United States Patent Application Publication US 2015/0232836 A1 - sequence listing, part 46

SEQ ID NO: 1838650 - DNA, 15 bp, Homo sapiens
cctgagcaacagagt

SEQ ID NO: 1838651 - DNA, 15 bp, Homo sapiens
ctgagcaacagagtg

SEQ ID NO: 1838652 - DNA, 15 bp, Homo sapiens
tgagcaacagagtga

SEQ ID NO: 1838653 - DNA, 15 bp, Homo sapiens
gagcaacagagtgag

SEQ ID NO: 1838654 - DNA, 15 bp, Homo sapiens
cagagtgagactcct

SEQ ID NO: 1838655 - DNA, 15 bp, Homo sapiens
agagtgagactcctt

SEQ ID NO: 1838656 - DNA, 15 bp, Homo sapiens
gagtgagactccttc

SEQ ID NO: 1838657 - DNA, 15 bp, Homo sapiens
agtgagactccttca

SEQ ID NO: 1838658 - DNA, 15 bp, Homo sapiens
gtgagactccttcaa

SEQ ID NO: 1838659 - DNA, 15 bp, Homo sapiens
tgagactccttcaaa

SEQ ID NO: 1838660 - DNA, 15 bp, Homo sapiens
gagactccttcaaaa

SEQ ID NO: 1838661 - DNA, 15 bp, Homo sapiens
agactccttcaaaaa

SEQ ID NO: 1838662 - DNA, 15 bp, Homo sapiens
gactccttcaaaaaa

SEQ ID NO: 1838663 - DNA, 15 bp, Homo sapiens
actccttcaaaaaaa

SEQ ID NO: 1838664 - DNA, 15 bp, Homo sapiens
ctccttcaaaaaaaa

SEQ ID NO: 1838665 - DNA, 15 bp, Homo sapiens
tccttcaaaaaaaaa

SEQ ID NO: 1838666 - DNA, 15 bp, Homo sapiens
ccttcaaaaaaaaaa

SEQ ID NO: 1838667 - DNA, 15 bp, Homo sapiens
aaaaaaaagaagaaa

SEQ ID NO: 1838668 - DNA, 15 bp, Homo sapiens
aaaaaaagaagaaag

SEQ ID NO: 1838669 - DNA, 15 bp, Homo sapiens
aaaaaagaagaaaga

SEQ ID NO: 1838670 - DNA, 15 bp, Homo sapiens
aaaagaagaaagaaa

SEQ ID NO: 1838671 - DNA, 15 bp, Homo sapiens
aaagaagaaagaaaa

SEQ ID NO: 1838672 - DNA, 15 bp, Homo sapiens
aagaagaaagaaaaa

SEQ ID NO: 1838673 - DNA, 15 bp, Homo sapiens
agaagaaagaaaaat

SEQ ID NO: 1838674 - DNA, 15 bp, Homo sapiens
gaagaaagaaaaatt

SEQ ID NO: 1838675 - DNA, 15 bp, Homo sapiens
aagaaagaaaaatta

SEQ ID NO: 1838676 - DNA, 15 bp, Homo sapiens
agaaagaaaaattaa

SEQ ID NO: 1838677 - DNA, 15 bp, Homo sapiens
gaaagaaaaattaaa

SEQ ID NO: 1838678 - DNA, 15 bp, Homo sapiens
aaagaaaaattaaaa

SEQ ID NO: 1838679 - DNA, 15 bp, Homo sapiens
aagaaaaattaaaaa

SEQ ID NO: 1838680 - DNA, 15 bp, Homo sapiens
agaaaaattaaaaaa

SEQ ID NO: 1838681 - DNA, 15 bp, Homo sapiens
gaaaaattaaaaaaa

SEQ ID NO: 1838682 - DNA, 15 bp, Homo sapiens
aaaaattaaaaaaaa

SEQ ID NO: 1838683 - DNA, 15 bp, Homo sapiens
aaaattaaaaaaaat

SEQ ID NO: 1838684 - DNA, 15 bp, Homo sapiens
aaattaaaaaaaata

SEQ ID NO: 1838685 - DNA, 15 bp, Homo sapiens
aattaaaaaaaataa

SEQ ID NO: 1838686 - DNA, 15 bp, Homo sapiens
attaaaaaaaataaa

SEQ ID NO: 1838687 - DNA, 15 bp, Homo sapiens
ttaaaaaaaataaag

SEQ ID NO: 1838688 - DNA, 15 bp, Homo sapiens
taaaaaaaataaagt

SEQ ID NO: 1838689 - DNA, 15 bp, Homo sapiens
aaaaaaaataaagtg

SEQ ID NO: 1838690 - DNA, 15 bp, Homo sapiens
aaaaaaataaagtga

SEQ ID NO: 1838691 - DNA, 15 bp, Homo sapiens
aaaaaataaagtgaa

SEQ ID NO: 1838692 - DNA, 15 bp, Homo sapiens
aaaaataaagtgaat

SEQ ID NO: 1838693 - DNA, 15 bp, Homo sapiens
aaaataaagtgaatc

SEQ ID NO: 1838694 - DNA, 15 bp, Homo sapiens
aaataaagtgaatcc

SEQ ID NO: 1838695 - DNA, 15 bp, Homo sapiens
aataaagtgaatcca

SEQ ID NO: 1838696 - DNA, 15 bp, Homo sapiens
ataaagtgaatccaa

SEQ ID NO: 1838697 - DNA, 15 bp, Homo sapiens
taaagtgaatccaat

SEQ ID NO: 1838698 - DNA, 15 bp, Homo sapiens
aaagtgaatccaatg

SEQ ID NO: 1838699 - DNA, 15 bp, Homo sapiens
aagtgaatccaatga

SEQ ID NO: 1838700 - DNA, 15 bp, Homo sapiens
agtgaatccaatgat

SEQ ID NO: 1838701 - DNA, 15 bp, Homo sapiens
gtgaatccaatgata

SEQ ID NO: 1838702 - DNA, 15 bp, Homo sapiens
tgaatccaatgatat

SEQ ID NO: 1838703 - DNA, 15 bp, Homo sapiens
gaatccaatgatatt

SEQ ID NO: 1838704 - DNA, 15 bp, Homo sapiens
aatccaatgatatta

SEQ ID NO: 1838705 - DNA, 15 bp, Homo sapiens
atccaatgatattaa

SEQ ID NO: 1838706 - DNA, 15 bp, Homo sapiens
tccaatgatattaaa

SEQ ID NO: 1838707 - DNA, 15 bp, Homo sapiens
ccaatgatattaaat

SEQ ID NO: 1838708 - DNA, 15 bp, Homo sapiens
caatgatattaaatt

SEQ ID NO: 1838709 - DNA, 15 bp, Homo sapiens
aatgatattaaatta

SEQ ID NO: 1838710 - DNA, 15 bp, Homo sapiens
atgatattaaattaa

SEQ ID NO: 1838711 - DNA, 15 bp, Homo sapiens
tgatattaaattaaa

SEQ ID NO: 1838712 - DNA, 15 bp, Homo sapiens
gatattaaattaaaa

SEQ ID NO: 1838713 - DNA, 15 bp, Homo sapiens
atattaaattaaaat

SEQ ID NO: 1838714 - DNA, 15 bp, Homo sapiens
tattaaattaaaatg

SEQ ID NO: 1838715 - DNA, 15 bp, Homo sapiens
attaaattaaaatgt

SEQ ID NO: 1838716 - DNA, 15 bp, Homo sapiens
ttaaattaaaatgtt

SEQ ID NO: 1838717 - DNA, 15 bp, Homo sapiens
taaattaaaatgttt

SEQ ID NO: 1838718 - DNA, 15 bp, Homo sapiens
aaattaaaatgtttt

SEQ ID NO: 1838719 - DNA, 15 bp, Homo sapiens
aattaaaatgtttta

SEQ ID NO: 1838720 - DNA, 15 bp, Homo sapiens
attaaaatgttttaa

SEQ ID NO: 1838721 - DNA, 15 bp, Homo sapiens
ttaaaatgttttaaa

SEQ ID NO: 1838722 - DNA, 15 bp, Homo sapiens
aaaatgttttaaata

SEQ ID NO: 1838723 - DNA, 15 bp, Homo sapiens
aaatgttttaaataa

SEQ ID NO: 1838724 - DNA, 15 bp, Homo sapiens
aatgttttaaataaa

SEQ ID NO: 1838725 - DNA, 15 bp, Homo sapiens
atgttttaaataaaa

SEQ ID NO: 1838726 - DNA, 15 bp, Homo sapiens
tgttttaaataaaat

SEQ ID NO: 1838727 - DNA, 15 bp, Homo sapiens
gttttaaataaaata

SEQ ID NO: 1838728 - DNA, 15 bp, Homo sapiens
ttttaaataaaataa

SEQ ID NO: 1838729 - DNA, 15 bp, Homo sapiens
tttaaataaaataaa

SEQ ID NO: 1838730 - DNA, 15 bp, Homo sapiens
ttaaataaaataaaa

SEQ ID NO: 1838731 - DNA, 15 bp, Homo sapiens
taaataaaataaaaa

SEQ ID NO: 1838732 - DNA, 15 bp, Homo sapiens
aataaaataaaaatg

SEQ ID NO: 1838733 - DNA, 15 bp, Homo sapiens
ataaaataaaaatga

SEQ ID NO: 1838734 - DNA, 15 bp, Homo sapiens
taaaataaaaatgaa

SEQ ID NO: 1838735 - DNA, 15 bp, Homo sapiens
aaaataaaaatgaat

SEQ ID NO: 1838736 - DNA, 15 bp, Homo sapiens
aataaaaatgaataa

SEQ ID NO: 1838737 - DNA, 15 bp, Homo sapiens
ataaaaatgaataat

SEQ ID NO: 1838738 - DNA, 15 bp, Homo sapiens
taaaaatgaataatg

SEQ ID NO: 1838739 - DNA, 15 bp, Homo sapiens
aaaaatgaataatga

SEQ ID NO: 1838740 - DNA, 15 bp, Homo sapiens
aaaatgaataatgaa

SEQ ID NO: 1838741 - DNA, 15 bp, Homo sapiens
aaatgaataatgaaa

SEQ ID NO: 1838742 - DNA, 15 bp, Homo sapiens
aatgaataatgaaat

SEQ ID NO: 1838743 - DNA, 15 bp, Homo sapiens
atgaataatgaaatg

SEQ ID NO: 1838744 - DNA, 15 bp, Homo sapiens
tgaataatgaaatga

SEQ ID NO: 1838745 - DNA, 15 bp, Homo sapiens
gaataatgaaatgaa

SEQ ID NO: 1838746 - DNA, 15 bp, Homo sapiens
aataatgaaatgaat

SEQ ID NO: 1838747 - DNA, 15 bp, Homo sapiens
ataatgaaatgaatg

SEQ ID NO: 1838748 - DNA, 15 bp, Homo sapiens
taatgaaatgaatgg

SEQ ID NO: 1838749 - DNA, 15 bp, Homo sapiens
aatgaaatgaatggg

SEQ ID NO: 1838750 - DNA, 15 bp, Homo sapiens
atgaaatgaatgggt

SEQ ID NO: 1838751 - DNA, 15 bp, Homo sapiens
tgaaatgaatgggta

SEQ ID NO: 1838752 - DNA, 15 bp, Homo sapiens
gaaatgaatgggtac

SEQ ID NO: 1838753 - DNA, 15 bp, Homo sapiens
aaatgaatgggtaca

SEQ ID NO: 1838754 - DNA, 15 bp, Homo sapiens
aatgaatgggtacat

SEQ ID NO: 1838755 - DNA, 15 bp, Homo sapiens
atgaatgggtacatg

SEQ ID NO: 1838756 - DNA, 15 bp, Homo sapiens
tgaatgggtacatga

SEQ ID NO: 1838757 - DNA, 15 bp, Homo sapiens
gaatgggtacatgat

SEQ ID NO: 1838758 - DNA, 15 bp, Homo sapiens
aatgggtacatgata

SEQ ID NO: 1838759 - DNA, 15 bp, Homo sapiens
atgggtacatgataa

SEQ ID NO: 1838760 - DNA, 15 bp, Homo sapiens
tgggtacatgataat

SEQ ID NO: 1838761 - DNA, 15 bp, Homo sapiens
gggtacatgataatt

SEQ ID NO: 1838762 - DNA, 15 bp, Homo sapiens
ggtacatgataatta

SEQ ID NO: 1838763 - DNA, 15 bp, Homo sapiens
gtacatgataattaa

SEQ ID NO: 1838764 - DNA, 15 bp, Homo sapiens
tacatgataattaat

SEQ ID NO: 1838765 - DNA, 15 bp, Homo sapiens
acatgataattaata

SEQ ID NO: 1838766 - DNA, 15 bp, Homo sapiens
catgataattaataa

SEQ ID NO: 1838767 - DNA, 15 bp, Homo sapiens
atgataattaataaa

SEQ ID NO: 1838768 - DNA, 15 bp, Homo sapiens
tgataattaataaat

SEQ ID NO: 1838769 - DNA, 15 bp, Homo sapiens
gataattaataaata

SEQ ID NO: 1838770 - DNA, 15 bp, Homo sapiens
ataattaataaatag

SEQ ID NO: 1838771 - DNA, 15 bp, Homo sapiens
taattaataaatagt

SEQ ID NO: 1838772 - DNA, 15 bp, Homo sapiens
aattaataaatagtt

SEQ ID NO: 1838773 - DNA, 15 bp, Homo sapiens
attaataaatagttt

SEQ ID NO: 1838774 - DNA, 15 bp, Homo sapiens
ttaataaatagttta

SEQ ID NO: 1838775 - DNA, 15 bp, Homo sapiens
taataaatagtttaa

SEQ ID NO: 1838776 - DNA, 15 bp, Homo sapiens
aataaatagtttaaa

SEQ ID NO: 1838777 - DNA, 15 bp, Homo sapiens
ataaatagtttaaaa

SEQ ID NO: 1838778 - DNA, 15 bp, Homo sapiens
taaatagtttaaaaa

SEQ ID NO: 1838779 - DNA, 15 bp, Homo sapiens
aaatagtttaaaaac

SEQ ID NO: 1838780 - DNA, 15 bp, Homo sapiens
aatagtttaaaaaca

SEQ ID NO: 1838781 - DNA, 15 bp, Homo sapiens
atagtttaaaaacaa

SEQ ID NO: 1838782 - DNA, 15 bp, Homo sapiens
tagtttaaaaacaaa

SEQ ID NO: 1838783 - DNA, 15 bp, Homo sapiens
agtttaaaaacaaaa

SEQ ID NO: 1838784 - DNA, 15 bp, Homo sapiens
gtttaaaaacaaaat

SEQ ID NO: 1838785 - DNA, 15 bp, Homo sapiens
tttaaaaacaaaata

SEQ ID NO: 1838786 - DNA, 15 bp, Homo sapiens
ttaaaaacaaaataa

SEQ ID NO: 1838787 - DNA, 15 bp, Homo sapiens
taaaaacaaaataaa

SEQ ID NO: 1838788 - DNA, 15 bp, Homo sapiens
aaaacaaaataaaat

SEQ ID NO: 1838789 - DNA, 15 bp, Homo sapiens
aaacaaaataaaatg

SEQ ID NO: 1838790 - DNA, 15 bp, Homo sapiens
aacaaaataaaatgg

SEQ ID NO: 1838791 - DNA, 15 bp, Homo sapiens
acaaaataaaatggg

SEQ ID NO: 1838792 - DNA, 15 bp, Homo sapiens
caaaataaaatgggc

SEQ ID NO: 1838793 - DNA, 15 bp, Homo sapiens
aaaataaaatgggcg

SEQ ID NO: 1838794 - DNA, 15 bp, Homo sapiens
aaataaaatgggcgg

SEQ ID NO: 1838795 - DNA, 15 bp, Homo sapiens
aataaaatgggcgga

SEQ ID NO: 1838796 - DNA, 15 bp, Homo sapiens
ataaaatgggcggag

SEQ ID NO: 1838797 - DNA, 15 bp, Homo sapiens
taaaatgggcggagt

SEQ ID NO: 1838798 - DNA, 15 bp, Homo sapiens
aaaatgggcggagtg

SEQ ID NO: 1838799 - DNA, 15 bp, Homo sapiens
aaatgggcggagtgc

SEQ ID NO: 1838800 - DNA, 15 bp, Homo sapiens
aatgggcggagtgca

SEQ ID NO: 1838801 - DNA, 15 bp, Homo sapiens
atgggcggagtgcag

SEQ ID NO: 1838802 - DNA, 15 bp, Homo sapiens
tgggcggagtgcagt

SEQ ID NO: 1838803 - DNA, 15 bp, Homo sapiens
gggcggagtgcagtg

SEQ ID NO: 1838804 - DNA, 15 bp, Homo sapiens
ggcggagtgcagtgg

SEQ ID NO: 1838805 - DNA, 15 bp, Homo sapiens
gcggagtgcagtggc

SEQ ID NO: 1838806 - DNA, 15 bp, Homo sapiens
cggagtgcagtggct

SEQ ID NO: 1838807 - DNA, 15 bp, Homo sapiens
gagtgcagtggctca

SEQ ID NO: 1838808 - DNA, 15 bp, Homo sapiens
agtgcagtggctcac

SEQ ID NO: 1838809 - DNA, 15 bp, Homo sapiens
ggctgaggcgggcaa

SEQ ID NO: 1838810 - DNA, 15 bp, Homo sapiens
gctgaggcgggcaaa

SEQ ID NO: 1838811 - DNA, 15 bp, Homo sapiens
ctgaggcgggcaaat

SEQ ID NO: 1838812 - DNA, 15 bp, Homo sapiens
tgaggcgggcaaatc

SEQ ID NO: 1838813 - DNA, 15 bp, Homo sapiens
gaggcgggcaaatca

SEQ ID NO: 1838814 - DNA, 15 bp, Homo sapiens
aggcgggcaaatcac

SEQ ID NO: 1838815 - DNA, 15 bp, Homo sapiens
ggcgggcaaatcacc

SEQ ID NO: 1838816 - DNA, 15 bp, Homo sapiens
gcgggcaaatcacct

SEQ ID NO: 1838817 - DNA, 15 bp, Homo sapiens
cgggcaaatcacctg

SEQ ID NO: 1838818 - DNA, 15 bp, Homo sapiens
gggcaaatcacctga

SEQ ID NO: 1838819 - DNA, 15 bp, Homo sapiens
ggcaaatcacctgag

SEQ ID NO: 1838820 - DNA, 15 bp, Homo sapiens
gcaaatcacctgagg

SEQ ID NO: 1838821 - DNA, 15 bp, Homo sapiens
caaatcacctgaggt

SEQ ID NO: 1838822 - DNA, 15 bp, Homo sapiens
aaatcacctgaggtc

SEQ ID NO: 1838823 - DNA, 15 bp, Homo sapiens
aatcacctgaggtcg

SEQ ID NO: 1838824 - DNA, 15 bp, Homo sapiens
tcacctgaggtcgga

SEQ ID NO: 1838825 - DNA, 15 bp, Homo sapiens
cacctgaggtcggaa

SEQ ID NO: 1838826 - DNA, 15 bp, Homo sapiens
acctgaggtcggaag

SEQ ID NO: 1838827 - DNA, 15 bp, Homo sapiens
cctgaggtcggaagc

SEQ ID NO: 1838828 - DNA, 15 bp, Homo sapiens
ctgaggtcggaagct

SEQ ID NO: 1838829 - DNA, 15 bp, Homo sapiens
tgaggtcggaagctc

SEQ ID NO: 1838830 - DNA, 15 bp, Homo sapiens
gaggtcggaagctcg

SEQ ID NO: 1838831 - DNA, 15 bp, Homo sapiens
aggtcggaagctcga

SEQ ID NO: 1838832 - DNA, 15 bp, Homo sapiens
ggtcggaagctcgag

SEQ ID NO: 1838833 - DNA, 15 bp, Homo sapiens
gtcggaagctcgaga

SEQ ID NO: 1838834 - DNA, 15 bp, Homo sapiens
tcggaagctcgagac

SEQ ID NO: 1838835 - DNA, 15 bp, Homo sapiens
cggaagctcgagacc

SEQ ID NO: 1838836 - DNA, 15 bp, Homo sapiens
ggaagctcgagacca

SEQ ID NO: 1838837 - DNA, 15 bp, Homo sapiens
gaagctcgagaccag

SEQ ID NO: 1838838 - DNA, 15 bp, Homo sapiens
aagctcgagaccagc

SEQ ID NO: 1838839 - DNA, 15 bp, Homo sapiens
agctcgagaccagcc

SEQ ID NO: 1838840 - DNA, 15 bp, Homo sapiens
gctcgagaccagcct

SEQ ID NO: 1838841 - DNA, 15 bp, Homo sapiens
ctcgagaccagcctg

SEQ ID NO: 1838842 - DNA, 15 bp, Homo sapiens
agcctgaccaacata

SEQ ID NO: 1838843 - DNA, 15 bp, Homo sapiens
gcctgaccaacatag

SEQ ID NO: 1838844 - DNA, 15 bp, Homo sapiens
aaatacaaaatattt

SEQ ID NO: 1838845 - DNA, 15 bp, Homo sapiens
aatacaaaatattta

SEQ ID NO: 1838846 - DNA, 15 bp, Homo sapiens
atacaaaatatttag

SEQ ID NO: 1838847 - DNA, 15 bp, Homo sapiens
tacaaaatatttagc

SEQ ID NO: 1838848 - DNA, 15 bp, Homo sapiens
acaaaatatttagcc

SEQ ID NO: 1838849 - DNA, 15 bp, Homo sapiens
caaaatatttagcca

SEQ ID NO: 1838850 - DNA, 15 bp, Homo sapiens
aaaatatttagccag

SEQ ID NO: 1838851 - DNA, 15 bp, Homo sapiens
aaatatttagccagc

SEQ ID NO: 1838852 - DNA, 15 bp, Homo sapiens
aatatttagccagcc

SEQ ID NO: 1838853 - DNA, 15 bp, Homo sapiens
atatttagccagcca

SEQ ID NO: 1838854 - DNA, 15 bp, Homo sapiens
tatttagccagccat

SEQ ID NO: 1838855 - DNA, 15 bp, Homo sapiens
atttagccagccata

SEQ ID NO: 1838856 - DNA, 15 bp, Homo sapiens
tttagccagccatag

SEQ ID NO: 1838857 - DNA, 15 bp, Homo sapiens
ttagccagccatagt

SEQ ID NO: 1838858 - DNA, 15 bp, Homo sapiens
tagccagccatagtg

SEQ ID NO: 1838859 - DNA, 15 bp, Homo sapiens
agccagccatagtgg

SEQ ID NO: 1838860 - DNA, 15 bp, Homo sapiens
gccagccatagtggc

SEQ ID NO: 1838861 - DNA, 15 bp, Homo sapiens
ccagccatagtggca

SEQ ID NO: 1838862 - DNA, 15 bp, Homo sapiens
cagccatagtggcag

SEQ ID NO: 1838863 - DNA, 15 bp, Homo sapiens
agccatagtggcagg

SEQ ID NO: 1838864 - DNA, 15 bp, Homo sapiens
gccatagtggcaggc

SEQ ID NO: 1838865 - DNA, 15 bp, Homo sapiens
ccatagtggcaggcg

SEQ ID NO: 1838866 - DNA, 15 bp, Homo sapiens
catagtggcaggcgc

SEQ ID NO: 1838867 - DNA, 15 bp, Homo sapiens
atagtggcaggcgcc

SEQ ID NO: 1838868 - DNA, 15 bp, Homo sapiens
tagtggcaggcgcct

SEQ ID NO: 1838869 - DNA, 15 bp, Homo sapiens
agtggcaggcgcctg

SEQ ID NO: 1838870 - DNA, 15 bp, Homo sapiens
tgtagtcccagctat

SEQ ID NO: 1838871 - DNA, 15 bp, Homo sapiens
gtagtcccagctatt

SEQ ID NO: 1838872 - DNA, 15 bp, Homo sapiens
tagtcccagctattt

SEQ ID NO: 1838873 - DNA, 15 bp, Homo sapiens
agtcccagctatttg

SEQ ID NO: 1838874 - DNA, 15 bp, Homo sapiens
gtcccagctatttgg

SEQ ID NO: 1838875 - DNA, 15 bp, Homo sapiens
tcccagctatttgga

SEQ ID NO: 1838876 - DNA, 15 bp, Homo sapiens
cccagctatttggaa

SEQ ID NO: 1838877 - DNA, 15 bp, Homo sapiens
ccagctatttggaag

SEQ ID NO: 1838878 - DNA, 15 bp, Homo sapiens
cagctatttggaagg

SEQ ID NO: 1838879 - DNA, 15 bp, Homo sapiens
agctatttggaaggc

SEQ ID NO: 1838880 - DNA, 15 bp, Homo sapiens
gctatttggaaggct

SEQ ID NO: 1838881 - DNA, 15 bp, Homo sapiens
ctatttggaaggctg

SEQ ID NO: 1838882 - DNA, 15 bp, Homo sapiens
tatttggaaggctga

SEQ ID NO: 1838883 - DNA, 15 bp, Homo sapiens
atttggaaggctgag

SEQ ID NO: 1838884 - DNA, 15 bp, Homo sapiens
ttggaaggctgaggc

SEQ ID NO: 1838885 - DNA, 15 bp, Homo sapiens
tggaaggctgaggca

SEQ ID NO: 1838886 - DNA, 15 bp, Homo sapiens
ggaaggctgaggcag

SEQ ID NO: 1838887 - DNA, 15 bp, Homo sapiens
aattgcttgaactca

SEQ ID NO: 1838888 - DNA, 15 bp, Homo sapiens
attgcttgaactcag

SEQ ID NO: 1838889 - DNA, 15 bp, Homo sapiens
ttgcttgaactcagg

SEQ ID NO: 1838890 - DNA, 15 bp, Homo sapiens
tgcttgaactcagga

SEQ ID NO: 1838891 - DNA, 15 bp, Homo sapiens
ttgaactcaggaggc

SEQ ID NO: 1838892 - DNA, 15 bp, Homo sapiens
tgaactcaggaggca

SEQ ID NO: 1838893 - DNA, 15 bp, Homo sapiens
gaactcaggaggcag

SEQ ID NO: 1838894 - DNA, 15 bp, Homo sapiens
aactcaggaggcaga

SEQ ID NO: 1838895 - DNA, 15 bp, Homo sapiens
cagtgagcagagatc

SEQ ID NO: 1838896 - DNA, 15 bp, Homo sapiens
agtgagcagagatcg

SEQ ID NO: 1838897 - DNA, 15 bp, Homo sapiens
gtgagcagagatcgt

SEQ ID NO: 1838898 - DNA, 15 bp, Homo sapiens
tgagcagagatcgtg

SEQ ID NO: 1838899 - DNA, 15 bp, Homo sapiens
gagcagagatcgtgc

SEQ ID NO: 1838900 - DNA, 15 bp, Homo sapiens
agcagagatcgtgcc

SEQ ID NO: 1838901 - DNA, 15 bp, Homo sapiens
gcagagatcgtgcca

SEQ ID NO: 1838902 - DNA, 15 bp, Homo sapiens
cagagatcgtgccac

SEQ ID NO: 1838903 - DNA, 15 bp, Homo sapiens
agagatcgtgccact

SEQ ID NO: 1838904 - DNA, 15 bp, Homo sapiens
ctgcattccagcctc

SEQ ID NO: 1838905 - DNA, 15 bp, Homo sapiens
tgcattccagcctca

SEQ ID NO: 1838906 - DNA, 15 bp, Homo sapiens
gcattccagcctcag

SEQ ID NO: 1838907 - DNA, 15 bp, Homo sapiens
cattccagcctcagc

SEQ ID NO: 1838908 - DNA, 15 bp, Homo sapiens
attccagcctcagca

SEQ ID NO: 1838909 - DNA, 15 bp, Homo sapiens
ttccagcctcagcaa

SEQ ID NO: 1838910 - DNA, 15 bp, Homo sapiens
cctcagcaacagagt

SEQ ID NO: 1838911 - DNA, 15 bp, Homo sapiens
ctcagcaacagagtg

SEQ ID NO: 1838912 - DNA, 15 bp, Homo sapiens
tcagcaacagagtga

SEQ ID NO: 1838913 - DNA, 15 bp, Homo sapiens
cagcaacagagtgag

SEQ ID NO: 1838914 - DNA, 15 bp, Homo sapiens
tctcaaaaataaatg

SEQ ID NO: 1838915 - DNA, 15 bp, Homo sapiens
ctcaaaaataaatga

SEQ ID NO: 1838916 - DNA, 15 bp, Homo sapiens
tcaaaaataaatgaa

SEQ ID NO: 1838917 - DNA, 15 bp, Homo sapiens
caaaaataaatgaaa

SEQ ID NO: 1838918 - DNA, 15 bp, Homo sapiens
aaaaataaatgaaat

SEQ ID NO: 1838919 - DNA, 15 bp, Homo sapiens
aaaataaatgaaatc

SEQ ID NO: 1838920 - DNA, 15 bp, Homo sapiens
aaataaatgaaatca

SEQ ID NO: 1838921 - DNA, 15 bp, Homo sapiens
aataaatgaaatcaa

SEQ ID NO: 1838922 - DNA, 15 bp, Homo sapiens
ataaatgaaatcaaa

SEQ ID NO: 1838923 - DNA, 15 bp, Homo sapiens
taaatgaaatcaaat

SEQ ID NO: 1838924 - DNA, 15 bp, Homo sapiens
aaatgaaatcaaatc

SEQ ID NO: 1838925 - DNA, 15 bp, Homo sapiens
aatgaaatcaaatca

SEQ ID NO: 1838926 - DNA, 15 bp, Homo sapiens
atgaaatcaaatcaa

SEQ ID NO: 1838927 - DNA, 15 bp, Homo sapiens
tgaaatcaaatcaaa

SEQ ID NO: 1838928 - DNA, 15 bp, Homo sapiens
gaaatcaaatcaaat

SEQ ID NO: 1838929 - DNA, 15 bp, Homo sapiens
aaatcaaatcaaatc

SEQ ID NO: 1838930 - DNA, 15 bp, Homo sapiens
aatcaaatcaaatca

SEQ ID NO: 1838931 - DNA, 15 bp, Homo sapiens
atcaaatcaaatcaa

SEQ ID NO: 1838932 - DNA, 15 bp, Homo sapiens
tcaaatcaaatcaaa

SEQ ID NO: 1838933 - DNA, 15 bp, Homo sapiens
caaatcaaatcaaat

SEQ ID NO: 1838934 - DNA, 15 bp, Homo sapiens
aaatcaaatcaaatg

SEQ ID NO: 1838935 - DNA, 15 bp, Homo sapiens
aatcaaatcaaatga

SEQ ID NO: 1838936 - DNA, 15 bp, Homo sapiens
atcaaatcaaatgag

SEQ ID NO: 1838937 - DNA, 15 bp, Homo sapiens
tcaaatcaaatgagc

SEQ ID NO: 1838938 - DNA, 15 bp, Homo sapiens
caaatcaaatgagcc

SEQ ID NO: 1838939 - DNA, 15 bp, Homo sapiens
aaatcaaatgagccc

SEQ ID NO: 1838940 - DNA, 15 bp, Homo sapiens
aatcaaatgagccca

SEQ ID NO: 1838941 - DNA, 15 bp, Homo sapiens
atcaaatgagcccaa

SEQ ID NO: 1838942 - DNA, 15 bp, Homo sapiens
tcaaatgagcccaaa

SEQ ID NO: 1838943 - DNA, 15 bp, Homo sapiens
caaatgagcccaaac

SEQ ID NO: 1838944 - DNA, 15 bp, Homo sapiens
aaatgagcccaaaca

SEQ ID NO: 1838945 - DNA, 15 bp, Homo sapiens
aatgagcccaaacaa

SEQ ID NO: 1838946 - DNA, 15 bp, Homo sapiens
atgagcccaaacaac

SEQ ID NO: 1838947 - DNA, 15 bp, Homo sapiens
tgagcccaaacaact

SEQ ID NO: 1838948 - DNA, 15 bp, Homo sapiens
gagcccaaacaactg

SEQ ID NO: 1838949 - DNA, 15 bp, Homo sapiens
agcccaaacaactga

SEQ ID NO: 1838950 - DNA, 15 bp, Homo sapiens
gcccaaacaactgaa

SEQ ID NO: 1838951 - DNA, 15 bp, Homo sapiens
cccaaacaactgaag

SEQ ID NO: 1838952 - DNA, 15 bp, Homo sapiens
ccaaacaactgaagg

SEQ ID NO: 1838953 - DNA, 15 bp, Homo sapiens
caaacaactgaagga

SEQ ID NO: 1838954 - DNA, 15 bp, Homo sapiens
aaacaactgaaggaa

SEQ ID NO: 1838955 - DNA, 15 bp, Homo sapiens
aacaactgaaggaag

SEQ ID NO: 1838956 - DNA, 15 bp, Homo sapiens
acaactgaaggaagc

SEQ ID NO: 1838957 - DNA, 15 bp, Homo sapiens
caactgaaggaagcc

SEQ ID NO: 1838958 - DNA, 15 bp, Homo sapiens
aactgaaggaagcca

SEQ ID NO: 1838959 - DNA, 15 bp, Homo sapiens
actgaaggaagccac

SEQ ID NO: 1838960 - DNA, 15 bp, Homo sapiens
ctgaaggaagccaca

SEQ ID NO: 1838961 - DNA, 15 bp, Homo sapiens
tgaaggaagccacag

SEQ ID NO: 1838962 - DNA, 15 bp, Homo sapiens
gaaggaagccacaga

SEQ ID NO: 1838963 - DNA, 15 bp, Homo sapiens
aaggaagccacagag

SEQ ID NO: 1838964 - DNA, 15 bp, Homo sapiens
aggaagccacagagg

SEQ ID NO: 1838965 - DNA, 15 bp, Homo sapiens
ggaagccacagaggg

SEQ ID NO: 1838966 - DNA, 15 bp, Homo sapiens
gaagccacagagggg

SEQ ID NO: 1838967 - DNA, 15 bp, Homo sapiens
aagccacagaggggg

SEQ ID NO: 1838968 - DNA, 15 bp, Homo sapiens
agccacagagggggc

SEQ ID NO: 1838969 - DNA, 15 bp, Homo sapiens
gccacagagggggca

SEQ ID NO: 1838970 - DNA, 15 bp, Homo sapiens
ccacagagggggcat

SEQ ID NO: 1838971 - DNA, 15 bp, Homo sapiens
cacagagggggcatg

SEQ ID NO: 1838972 - DNA, 15 bp, Homo sapiens
acagagggggcatga

SEQ ID NO: 1838973 - DNA, 15 bp, Homo sapiens
cagagggggcatgac

SEQ ID NO: 1838974 - DNA, 15 bp, Homo sapiens
agagggggcatgaca

SEQ ID NO: 1838975 - DNA, 15 bp, Homo sapiens
gagggggcatgacat

SEQ ID NO: 1838976 - DNA, 15 bp, Homo sapiens
agggggcatgacatc

SEQ ID NO: 1838977 - DNA, 15 bp, Homo sapiens
gggggcatgacatcc

SEQ ID NO: 1838978 - DNA, 15 bp, Homo sapiens
ggggcatgacatccc

SEQ ID NO: 1838979 - DNA, 15 bp, Homo sapiens
gggcatgacatcccc

SEQ ID NO: 1838980 - DNA, 15 bp, Homo sapiens
ggcatgacatcccca

SEQ ID NO: 1838981 - DNA, 15 bp, Homo sapiens
gcatgacatccccag

SEQ ID NO: 1838982 - DNA, 15 bp, Homo sapiens
catgacatccccaga

SEQ ID NO: 1838983 - DNA, 15 bp, Homo sapiens
atgacatccccagag

SEQ ID NO: 1838984 - DNA, 15 bp, Homo sapiens
tgacatccccagagt

SEQ ID NO: 1838985 - DNA, 15 bp, Homo sapiens
gacatccccagagtc

SEQ ID NO: 1838986 - DNA, 15 bp, Homo sapiens
acatccccagagtca

SEQ ID NO: 1838987 - DNA, 15 bp, Homo sapiens
catccccagagtcac

SEQ ID NO: 1838988 - DNA, 15 bp, Homo sapiens
atccccagagtcacc

SEQ ID NO: 1838989 - DNA, 15 bp, Homo sapiens
tccccagagtcaccc

SEQ ID NO: 1838990 - DNA, 15 bp, Homo sapiens
ccccagagtcaccca

SEQ ID NO: 1838991 - DNA, 15 bp, Homo sapiens
cccagagtcacccag

SEQ ID NO: 1838992 - DNA, 15 bp, Homo sapiens
ccagagtcacccagg

SEQ ID NO: 1838993 - DNA, 15 bp, Homo sapiens
cagagtcacccagga

SEQ ID NO: 1838994 - DNA, 15 bp, Homo sapiens
agagtcacccaggac

SEQ ID NO: 1838995 - DNA, 15 bp, Homo sapiens
gagtcacccaggaca

SEQ ID NO: 1838996 - DNA, 15 bp, Homo sapiens
agtcacccaggacac

SEQ ID NO: 1838997 - DNA, 15 bp, Homo sapiens
gtcacccaggacacc

SEQ ID NO: 1838998 - DNA, 15 bp, Homo sapiens
tcacccaggacacca

SEQ ID NO: 1838999 - DNA, 15 bp, Homo sapiens
cacccaggacaccag

SEQ ID NO: 1839000 - DNA, 15 bp, Homo sapiens
acccaggacaccagg

SEQ ID NO: 1839001 - DNA, 15 bp, Homo sapiens
cccaggacaccaggg

SEQ ID NO: 1839002 - DNA, 15 bp, Homo sapiens
ccaggacaccaggga

SEQ ID NO: 1839003 - DNA, 15 bp, Homo sapiens
caggacaccagggac

SEQ ID NO: 1839004 - DNA, 15 bp, Homo sapiens
aggacaccagggaca

SEQ ID NO: 1839005 - DNA, 15 bp, Homo sapiens
ggacaccagggacag

SEQ ID NO: 1839006 - DNA, 15 bp, Homo sapiens
gacaccagggacaga

SEQ ID NO: 1839007 - DNA, 15 bp, Homo sapiens
acaccagggacagag

SEQ ID NO: 1839008 - DNA, 15 bp, Homo sapiens
caccagggacagagg

SEQ ID NO: 1839009 - DNA, 15 bp, Homo sapiens
accagggacagagga

SEQ ID NO: 1839010 - DNA, 15 bp, Homo sapiens
ccagggacagaggaa

SEQ ID NO: 1839011 - DNA, 15 bp, Homo sapiens
cagggacagaggaag

SEQ ID NO: 1839012 - DNA, 15 bp, Homo sapiens
agggacagaggaagg

SEQ ID NO: 1839013 - DNA, 15 bp, Homo sapiens
gggacagaggaagga

SEQ ID NO: 1839014 - DNA, 15 bp, Homo sapiens
ggacagaggaaggat

SEQ ID NO: 1839015 - DNA, 15 bp, Homo sapiens
gacagaggaaggatt

SEQ ID NO: 1839016 - DNA, 15 bp, Homo sapiens
acagaggaaggattt

SEQ ID NO: 1839017 - DNA, 15 bp, Homo sapiens
cagaggaaggatttg

SEQ ID NO: 1839018 - DNA, 15 bp, Homo sapiens
agaggaaggatttga

SEQ ID NO: 1839019 - DNA, 15 bp, Homo sapiens
gaggaaggatttgaa

SEQ ID NO: 1839020 - DNA, 15 bp, Homo sapiens
aggaaggatttgaac

SEQ ID NO: 1839021 - DNA, 15 bp, Homo sapiens
ggaaggatttgaact

SEQ ID NO: 1839022 - DNA, 15 bp, Homo sapiens
gaaggatttgaactc

SEQ ID NO: 1839023 - DNA, 15 bp, Homo sapiens
aaggatttgaactca

SEQ ID NO: 1839024 - DNA, 15 bp, Homo sapiens
ggatttgaactcaga

SEQ ID NO: 1839025 - DNA, 15 bp, Homo sapiens
gatttgaactcagag

SEQ ID NO: 1839026 - DNA, 15 bp, Homo sapiens
atttgaactcagagc

SEQ ID NO: 1839027 - DNA, 15 bp, Homo sapiens
tttgaactcagagcc

SEQ ID NO: 1839028 - DNA, 15 bp, Homo sapiens
ttgaactcagagcca

SEQ ID NO: 1839029 - DNA, 15 bp, Homo sapiens
tgaactcagagccac

SEQ ID NO: 1839030 - DNA, 15 bp, Homo sapiens
gaactcagagccacc

SEQ ID NO: 1839031 - DNA, 15 bp, Homo sapiens
aactcagagccacct

SEQ ID NO: 1839032 - DNA, 15 bp, Homo sapiens
actcagagccacctg

SEQ ID NO: 1839033 - DNA, 15 bp, Homo sapiens
ctcagagccacctga

SEQ ID NO: 1839034 - DNA, 15 bp, Homo sapiens
tcagagccacctgat

SEQ ID NO: 1839035 - DNA, 15 bp, Homo sapiens
cagagccacctgatt

SEQ ID NO: 1839036 - DNA, 15 bp, Homo sapiens
agagccacctgattc

SEQ ID NO: 1839037 - DNA, 15 bp, Homo sapiens
gagccacctgattct

SEQ ID NO: 1839038 - DNA, 15 bp, Homo sapiens
agccacctgattcta

SEQ ID NO: 1839039 - DNA, 15 bp, Homo sapiens
gccacctgattctat

SEQ ID NO: 1839040 - DNA, 15 bp, Homo sapiens
ccacctgattctatc

SEQ ID NO: 1839041 - DNA, 15 bp, Homo sapiens
cacctgattctatcc

SEQ ID NO: 1839042 - DNA, 15 bp, Homo sapiens
acctgattctatccc

SEQ ID NO: 1839043 - DNA, 15 bp, Homo sapiens
cctgattctatccca

SEQ ID NO: 1839044 - DNA, 15 bp, Homo sapiens
ctgattctatcccag

SEQ ID NO: 1839045 - DNA, 15 bp, Homo sapiens
tgattctatcccagg

SEQ ID NO: 1839046 - DNA, 15 bp, Homo sapiens
gattctatcccaggc

SEQ ID NO: 1839047 - DNA, 15 bp, Homo sapiens
attctatcccaggct

SEQ ID NO: 1839048 - DNA, 15 bp, Homo sapiens
ttctatcccaggctt

SEQ ID NO: 1839049 - DNA, 15 bp, Homo sapiens
tctatcccaggcttg

SEQ ID NO: 1839050 - DNA, 15 bp, Homo sapiens
ctatcccaggcttgg

SEQ ID NO: 1839051 - DNA, 15 bp, Homo sapiens
tatcccaggcttggc

SEQ ID NO: 1839052 - DNA, 15 bp, Homo sapiens
atcccaggcttggct

SEQ ID NO: 1839053 - DNA, 15 bp, Homo sapiens
tcccaggcttggctg

SEQ ID NO: 1839054 - DNA, 15 bp, Homo sapiens
cccaggcttggctgg

SEQ ID NO: 1839055 - DNA, 15 bp, Homo sapiens
ccaggcttggctggg

SEQ ID NO: 1839056 - DNA, 15 bp, Homo sapiens
caggcttggctgggc

SEQ ID NO: 1839057 - DNA, 15 bp, Homo sapiens
aggcttggctgggcg

SEQ ID NO: 1839058 - DNA, 15 bp, Homo sapiens
ggcttggctgggcgc

SEQ ID NO: 1839059 - DNA, 15 bp, Homo sapiens
gcttggctgggcgca

SEQ ID NO: 1839060 - DNA, 15 bp, Homo sapiens
cttggctgggcgcag

SEQ ID NO: 1839061 - DNA, 15 bp, Homo sapiens
ttggctgggcgcagt

SEQ ID NO: 1839062 - DNA, 15 bp, Homo sapiens
tggctgggcgcagtg

SEQ ID NO: 1839063 - DNA, 15 bp, Homo sapiens
cctgtaatcccatca

SEQ ID NO: 1839064 - DNA, 15 bp, Homo sapiens
ctgtaatcccatcac

SEQ ID NO: 1839065 - DNA, 15 bp, Homo sapiens
tgtaatcccatcact

SEQ ID NO: 1839066 - DNA, 15 bp, Homo sapiens
gtaatcccatcactc

SEQ ID NO: 1839067 - DNA, 15 bp, Homo sapiens
taatcccatcactct

SEQ ID NO: 1839068 - DNA, 15 bp, Homo sapiens
aatcccatcactctg

SEQ ID NO: 1839069 - DNA, 15 bp, Homo sapiens
atcccatcactctgg

SEQ ID NO: 1839070 - DNA, 15 bp, Homo sapiens
tcccatcactctggg

SEQ ID NO: 1839071 - DNA, 15 bp, Homo sapiens
cccatcactctgggt

SEQ ID NO: 1839072 - DNA, 15 bp, Homo sapiens
ccatcactctgggtg

SEQ ID NO: 1839073 - DNA, 15 bp, Homo sapiens
catcactctgggtgg

SEQ ID NO: 1839074 - DNA, 15 bp, Homo sapiens
atcactctgggtggg

SEQ ID NO: 1839075 - DNA, 15 bp, Homo sapiens
tcactctgggtggga

SEQ ID NO: 1839076 - DNA, 15 bp, Homo sapiens
cactctgggtgggag

SEQ ID NO: 1839077 - DNA, 15 bp, Homo sapiens
actctgggtgggagt

SEQ ID NO: 1839078 - DNA, 15 bp, Homo sapiens
ctctgggtgggagtt

SEQ ID NO: 1839079 - DNA, 15 bp, Homo sapiens
tctgggtgggagtta

SEQ ID NO: 1839080 - DNA, 15 bp, Homo sapiens
ctgggtgggagttag

SEQ ID NO: 1839081 - DNA, 15 bp, Homo sapiens
tgggtgggagttagg

SEQ ID NO: 1839082 - DNA, 15 bp, Homo sapiens
gggtgggagttagga

SEQ ID NO: 1839083 - DNA, 15 bp, Homo sapiens
ggtgggagttaggag

SEQ ID NO: 1839084 - DNA, 15 bp, Homo sapiens
gtgggagttaggagg

SEQ ID NO: 1839085 - DNA, 15 bp, Homo sapiens
tgggagttaggagga

SEQ ID NO: 1839086 - DNA, 15 bp, Homo sapiens
gggagttaggaggat

SEQ ID NO: 1839087 - DNA, 15 bp, Homo sapiens
ggagttaggaggatc

SEQ ID NO: 1839088 - DNA, 15 bp, Homo sapiens
gagttaggaggatcg

SEQ ID NO: 1839089 - DNA, 15 bp, Homo sapiens
agttaggaggatcgc

SEQ ID NO: 1839090 - DNA, 15 bp, Homo sapiens
gttaggaggatcgct

SEQ ID NO: 1839091 - DNA, 15 bp, Homo sapiens
ttaggaggatcgctt

SEQ ID NO: 1839092 - DNA, 15 bp, Homo sapiens
taagaccagcctggg

SEQ ID NO: 1839093 - DNA, 15 bp, Homo sapiens
ctgggcaacacagct

SEQ ID NO: 1839094 - DNA, 15 bp, Homo sapiens
tgggcaacacagcta

SEQ ID NO: 1839095 - DNA, 15 bp, Homo sapiens
gggcaacacagctac

SEQ ID NO: 1839096 - DNA, 15 bp, Homo sapiens
ggcaacacagctaca

SEQ ID NO: 1839097 - DNA, 15 bp, Homo sapiens
gcaacacagctacac

SEQ ID NO: 1839098 - DNA, 15 bp, Homo sapiens
caacacagctacacc

SEQ ID NO: 1839099 - DNA, 15 bp, Homo sapiens
aacacagctacaccc

SEQ ID NO: 1839100 - DNA, 15 bp, Homo sapiens
acacagctacacccc

SEQ ID NO: 1839101 - DNA, 15 bp, Homo sapiens
cacagctacacccca

SEQ ID NO: 1839102 - DNA, 15 bp, Homo sapiens
acagctacaccccat

SEQ ID NO: 1839103 - DNA, 15 bp, Homo sapiens
cagctacaccccatc

SEQ ID NO: 1839104 - DNA, 15 bp, Homo sapiens
agctacaccccatct

SEQ ID NO: 1839105 - DNA, 15 bp, Homo sapiens
gctacaccccatctg

SEQ ID NO: 1839106 - DNA, 15 bp, Homo sapiens
ctacaccccatctgt

SEQ ID NO: 1839107 - DNA, 15 bp, Homo sapiens
tacaccccatctgta

SEQ ID NO: 1839108 - DNA, 15 bp, Homo sapiens
acaccccatctgtac

SEQ ID NO: 1839109 - DNA, 15 bp, Homo sapiens
caccccatctgtaca

SEQ ID NO: 1839110 - DNA, 15 bp, Homo sapiens
accccatctgtacaa

SEQ ID NO: 1839111 - DNA, 15 bp, Homo sapiens
ccccatctgtacaaa

SEQ ID NO: 1839112 - DNA, 15 bp, Homo sapiens
cccatctgtacaaaa

SEQ ID NO: 1839113 - DNA, 15 bp, Homo sapiens
ccatctgtacaaaaa

SEQ ID NO: 1839114 - DNA, 15 bp, Homo sapiens
catctgtacaaaaaa

SEQ ID NO: 1839115 - DNA, 15 bp, Homo sapiens
atctgtacaaaaaat

SEQ ID NO: 1839116 - DNA, 15 bp, Homo sapiens
tctgtacaaaaaata

SEQ ID NO: 1839117 - DNA, 15 bp, Homo sapiens
ctgtacaaaaaataa

SEQ ID NO: 1839118 - DNA, 15 bp, Homo sapiens
tgtacaaaaaataaa

SEQ ID NO: 1839119 - DNA, 15 bp, Homo sapiens
gtacaaaaaataaaa

SEQ ID NO: 1839120 - DNA, 15 bp, Homo sapiens
tacaaaaaataaaaa

SEQ ID NO: 1839121 - DNA, 15 bp, Homo sapiens
acaaaaaataaaaat

SEQ ID NO: 1839122 - DNA, 15 bp, Homo sapiens
aaaaataaaaattag

SEQ ID NO: 1839123 - DNA, 15 bp, Homo sapiens
aaaataaaaattagc

SEQ ID NO: 1839124 - DNA, 15 bp, Homo sapiens
aaataaaaattagcc

SEQ ID NO: 1839125 - DNA, 15 bp, Homo sapiens
aataaaaattagccc

SEQ ID NO: 1839126 - DNA, 15 bp, Homo sapiens
ataaaaattagccca

SEQ ID NO: 1839127 - DNA, 15 bp, Homo sapiens
taaaaattagcccag

SEQ ID NO: 1839128 - DNA, 15 bp, Homo sapiens
aaaaattagcccagt

SEQ ID NO: 1839129 - DNA, 15 bp, Homo sapiens
aaaattagcccagtg

SEQ ID NO: 1839130 - DNA, 15 bp, Homo sapiens
aaattagcccagtgt

SEQ ID NO: 1839131 - DNA, 15 bp, Homo sapiens
aattagcccagtgtg

SEQ ID NO: 1839132 - DNA, 15 bp, Homo sapiens
attagcccagtgtgg

SEQ ID NO: 1839133 - DNA, 15 bp, Homo sapiens
agcccagtgtggtgg

SEQ ID NO: 1839134 - DNA, 15 bp, Homo sapiens
gcccagtgtggtggt

SEQ ID NO: 1839135 - DNA, 15 bp, Homo sapiens
cccagtgtggtggtg

SEQ ID NO: 1839136 - DNA, 15 bp, Homo sapiens
ccagtgtggtggtgc

SEQ ID NO: 1839137 - DNA, 15 bp, Homo sapiens
cagtgtggtggtgca

SEQ ID NO: 1839138 - DNA, 15 bp, Homo sapiens
agtgtggtggtgcac

SEQ ID NO: 1839139 - DNA, 15 bp, Homo sapiens
ggtggtgcacgccta

SEQ ID NO: 1839140 - DNA, 15 bp, Homo sapiens
gtggtgcacgcctat

SEQ ID NO: 1839141 - DNA, 15 bp, Homo sapiens
tggtgcacgcctata

SEQ ID NO: 1839142 - DNA, 15 bp, Homo sapiens
ggtgcacgcctatag

SEQ ID NO: 1839143 - DNA, 15 bp, Homo sapiens
gtgcacgcctatagt

SEQ ID NO: 1839144 - DNA, 15 bp, Homo sapiens
tgcacgcctatagtc

SEQ ID NO: 1839145 - DNA, 15 bp, Homo sapiens
gcacgcctatagtct

SEQ ID NO: 1839146 - DNA, 15 bp, Homo sapiens
cacgcctatagtctc

SEQ ID NO: 1839147 - DNA, 15 bp, Homo sapiens
acgcctatagtctct

SEQ ID NO: 1839148 - DNA, 15 bp, Homo sapiens
cgcctatagtctctg

SEQ ID NO: 1839149 - DNA, 15 bp, Homo sapiens
gcctatagtctctgc

SEQ ID NO: 1839150 - DNA, 15 bp, Homo sapiens
cctatagtctctgca

SEQ ID NO: 1839151 - DNA, 15 bp, Homo sapiens
ctatagtctctgcac

SEQ ID NO: 1839152 - DNA, 15 bp, Homo sapiens
tatagtctctgcact

SEQ ID NO: 1839153 - DNA, 15 bp, Homo sapiens
atagtctctgcactt

SEQ ID NO: 1839154 - DNA, 15 bp, Homo sapiens
tagtctctgcacttt

SEQ ID NO: 1839155 - DNA, 15 bp, Homo sapiens
agtctctgcactttg

SEQ ID NO: 1839156 - DNA, 15 bp, Homo sapiens
gtctctgcactttgg

SEQ ID NO: 1839157 - DNA, 15 bp, Homo sapiens
tctctgcactttggg

SEQ ID NO: 1839158 - DNA, 15 bp, Homo sapiens
ctctgcactttggga

SEQ ID NO: 1839159 - DNA, 15 bp, Homo sapiens
tctgcactttgggag

SEQ ID NO: 1839160 - DNA, 15 bp, Homo sapiens
aggcaggaggatcgt

SEQ ID NO: 1839161 - DNA, 15 bp, Homo sapiens
ggcaggaggatcgtt

SEQ ID NO: 1839162 - DNA, 15 bp, Homo sapiens
gcaggaggatcgttt

SEQ ID NO: 1839163 - DNA, 15 bp, Homo sapiens
caggaggatcgtttg

SEQ ID NO: 1839164 - DNA, 15 bp, Homo sapiens
aggaggatcgtttga

SEQ ID NO: 1839165 - DNA, 15 bp, Homo sapiens
ggaggatcgtttgag

SEQ ID NO: 1839166 - DNA, 15 bp, Homo sapiens
gaggatcgtttgagc

SEQ ID NO: 1839167 - DNA, 15 bp, Homo sapiens
aggatcgtttgagcc

SEQ ID NO: 1839168 - DNA, 15 bp, Homo sapiens
ggatcgtttgagccc

SEQ ID NO: 1839169 - DNA, 15 bp, Homo sapiens
gatcgtttgagccca

SEQ ID NO: 1839170 - DNA, 15 bp, Homo sapiens
atcgtttgagcccag

SEQ ID NO: 1839171 - DNA, 15 bp, Homo sapiens
tcgtttgagcccagg

SEQ ID NO: 1839172 - DNA, 15 bp, Homo sapiens
cgtttgagcccagga

SEQ ID NO: 1839173 - DNA, 15 bp, Homo sapiens
gtttgagcccaggag

SEQ ID NO: 1839174 - DNA, 15 bp, Homo sapiens
ggagttggaggctgt

SEQ ID NO: 1839175 - DNA, 15 bp, Homo sapiens
gagttggaggctgta

SEQ ID NO: 1839176 - DNA, 15 bp, Homo sapiens
agttggaggctgtag

SEQ ID NO: 1839177 - DNA, 15 bp, Homo sapiens
gttggaggctgtagt

SEQ ID NO: 1839178 - DNA, 15 bp, Homo sapiens
ttggaggctgtagtc

SEQ ID NO: 1839179 - DNA, 15 bp, Homo sapiens
tggaggctgtagtcg

SEQ ID NO: 1839180 - DNA, 15 bp, Homo sapiens
ggaggctgtagtcgg

SEQ ID NO: 1839181 - DNA, 15 bp, Homo sapiens
gaggctgtagtcggt

SEQ ID NO: 1839182 - DNA, 15 bp, Homo sapiens
aggctgtagtcggtt

SEQ ID NO: 1839183 - DNA, 15 bp, Homo sapiens
ggctgtagtcggttg

SEQ ID NO: 1839184 - DNA, 15 bp, Homo sapiens
gctgtagtcggttga

SEQ ID NO: 1839185 - DNA, 15 bp, Homo sapiens
ctgtagtcggttgag

SEQ ID NO: 1839186 - DNA, 15 bp, Homo sapiens
tgtagtcggttgaga

SEQ ID NO: 1839187 - DNA, 15 bp, Homo sapiens
gtagtcggttgagat

SEQ ID NO: 1839188 - DNA, 15 bp, Homo sapiens
tagtcggttgagata

SEQ ID NO: 1839189 - DNA, 15 bp, Homo sapiens
agtcggttgagatag

SEQ ID NO: 1839190 - DNA, 15 bp, Homo sapiens
gtcggttgagatagc

SEQ ID NO: 1839191 - DNA, 15 bp, Homo sapiens
tcggttgagatagca

SEQ ID NO: 1839192 - DNA, 15 bp, Homo sapiens
cggttgagatagcac

SEQ ID NO: 1839193 - DNA, 15 bp, Homo sapiens
ggttgagatagcacc

SEQ ID NO: 1839194 - DNA, 15 bp, Homo sapiens
gttgagatagcacca

SEQ ID NO: 1839195 - DNA, 15 bp, Homo sapiens
ttgagatagcaccac

SEQ ID NO: 1839196 - DNA, 15 bp, Homo sapiens
tgagatagcaccact

SEQ ID NO: 1839197 - DNA, 15 bp, Homo sapiens
gagatagcaccactg

SEQ ID NO: 1839198 - DNA, 15 bp, Homo sapiens
agatagcaccactgc

SEQ ID NO: 1839199 - DNA, 15 bp, Homo sapiens
gatagcaccactgca

SEQ ID NO: 1839200 - DNA, 15 bp, Homo sapiens
atagcaccactgcac

SEQ ID NO: 1839201 - DNA, 15 bp, Homo sapiens
tagcaccactgcact

SEQ ID NO: 1839202 - DNA, 15 bp, Homo sapiens
agcaccactgcactc

SEQ ID NO: 1839203 - DNA, 15 bp, Homo sapiens
cctgggtgacagaaa

SEQ ID NO: 1839204 - DNA, 15 bp, Homo sapiens
ctgggtgacagaaag

SEQ ID NO: 1839205 - DNA, 15 bp, Homo sapiens
tgggtgacagaaaga

SEQ ID NO: 1839206 - DNA, 15 bp, Homo sapiens
gggtgacagaaagag

SEQ ID NO: 1839207 - DNA, 15 bp, Homo sapiens
ggtgacagaaagaga

SEQ ID NO: 1839208 - DNA, 15 bp, Homo sapiens
gtgacagaaagagac

SEQ ID NO: 1839209 - DNA, 15 bp, Homo sapiens
tgacagaaagagact

SEQ ID NO: 1839210 - DNA, 15 bp, Homo sapiens
gacagaaagagactc

SEQ ID NO: 1839211 - DNA, 15 bp, Homo sapiens
acagaaagagactct

SEQ ID NO: 1839212 - DNA, 15 bp, Homo sapiens
cagaaagagactctg

SEQ ID NO: 1839213 - DNA, 15 bp, Homo sapiens
agaaagagactctgt

SEQ ID NO: 1839214 - DNA, 15 bp, Homo sapiens
gaaagagactctgtc

SEQ ID NO: 1839215 - DNA, 15 bp, Homo sapiens
aaagagactctgtct

SEQ ID NO: 1839216 - DNA, 15 bp, Homo sapiens
aagagactctgtctc

SEQ ID NO: 1839217 - DNA, 15 bp, Homo sapiens
aaaaaaaaaaaatgg

SEQ ID NO: 1839218 - DNA, 15 bp, Homo sapiens
aaaaaaaaaaatgga

SEQ ID NO: 1839219 - DNA, 15 bp, Homo sapiens
aaaaaaaaaatggac

SEQ ID NO: 1839220 - DNA, 15 bp, Homo sapiens
aaaaaaaaatggacc

SEQ ID NO: 1839221 - DNA, 15 bp, Homo sapiens
aaaaaaaatggacca

SEQ ID NO: 1839222 - DNA, 15 bp, Homo sapiens
aaaaaaatggaccaa

SEQ ID NO: 1839223 - DNA, 15 bp, Homo sapiens
aaaaaatggaccaag

SEQ ID NO: 1839224 - DNA, 15 bp, Homo sapiens
aaaaatggaccaagc

SEQ ID NO: 1839225 - DNA, 15 bp, Homo sapiens
aaaatggaccaagcg

SEQ ID NO: 1839226 - DNA, 15 bp, Homo sapiens
aaatggaccaagcgt

SEQ ID NO: 1839227 - DNA, 15 bp, Homo sapiens
aatggaccaagcgtg

SEQ ID NO: 1839228 - DNA, 15 bp, Homo sapiens
atggaccaagcgtgg

SEQ ID NO: 1839229 - DNA, 15 bp, Homo sapiens
tggaccaagcgtggt

SEQ ID NO: 1839230 - DNA, 15 bp, Homo sapiens
ggaccaagcgtggtg

SEQ ID NO: 1839231 - DNA, 15 bp, Homo sapiens
gaccaagcgtggtgg

SEQ ID NO: 1839232 - DNA, 15 bp, Homo sapiens
accaagcgtggtggc

SEQ ID NO: 1839233 - DNA, 15 bp, Homo sapiens
caaggcgggtggatg

SEQ ID NO: 1839234 - DNA, 15 bp, Homo sapiens
aaggcgggtggatga

SEQ ID NO: 1839235 - DNA, 15 bp, Homo sapiens
aggcgggtggatgac

SEQ ID NO: 1839236 - DNA, 15 bp, Homo sapiens
ggcgggtggatgacc

SEQ ID NO: 1839237 - DNA, 15 bp, Homo sapiens
gcgggtggatgacct

SEQ ID NO: 1839238 - DNA, 15 bp, Homo sapiens
cgggtggatgacctg

SEQ ID NO: 1839239 - DNA, 15 bp, Homo sapiens
gggtggatgacctga

SEQ ID NO: 1839240 - DNA, 15 bp, Homo sapiens
ggtggatgacctgag

SEQ ID NO: 1839241 - DNA, 15 bp, Homo sapiens
gtggatgacctgagg

SEQ ID NO: 1839242 - DNA, 15 bp, Homo sapiens
tggatgacctgaggt

SEQ ID NO: 1839243 - DNA, 15 bp, Homo sapiens
ggatgacctgaggtc

SEQ ID NO: 1839244 - DNA, 15 bp, Homo sapiens
gatgacctgaggtca

SEQ ID NO: 1839245 - DNA, 15 bp, Homo sapiens
aggagttcaagaccg

SEQ ID NO: 1839246 - DNA, 15 bp, Homo sapiens
ggagttcaagaccgg

SEQ ID NO: 1839247 - DNA, 15 bp, Homo sapiens
gagttcaagaccggc

SEQ ID NO: 1839248 - DNA, 15 bp, Homo sapiens
agttcaagaccggcc

SEQ ID NO: 1839249 - DNA, 15 bp, Homo sapiens
gttcaagaccggcct

SEQ ID NO: 1839250 - DNA, 15 bp, Homo sapiens
ttcaagaccggcctg

SEQ ID NO: 1839251 - DNA, 15 bp, Homo sapiens
tcaagaccggcctgg

SEQ ID NO: 1839252 - DNA, 15 bp, Homo sapiens
caagaccggcctggc

SEQ ID NO: 1839253 - DNA, 15 bp, Homo sapiens
aagaccggcctggcc

SEQ ID NO: 1839254 - DNA, 15 bp, Homo sapiens
agaccggcctggcca

SEQ ID NO: 1839255 - DNA, 15 bp, Homo sapiens
gaccggcctggccaa

SEQ ID NO: 1839256 - DNA, 15 bp, Homo sapiens
accggcctggccaac

SEQ ID NO: 1839257 - DNA, 15 bp, Homo sapiens
ccggcctggccaaca

SEQ ID NO: 1839258 - DNA, 15 bp, Homo sapiens
cggcctggccaacat

SEQ ID NO: 1839259 - DNA, 15 bp, Homo sapiens
ggcctggccaacatg

SEQ ID NO: 1839260 - DNA, 15 bp, Homo sapiens
ccaacatggtgaagt

SEQ ID NO: 1839261 - DNA, 15 bp, Homo sapiens
caacatggtgaagtc

SEQ ID NO: 1839262 - DNA, 15 bp, Homo sapiens
aacatggtgaagtcc

SEQ ID NO: 1839263 - DNA, 15 bp, Homo sapiens
acatggtgaagtcct

SEQ ID NO: 1839264 - DNA, 15 bp, Homo sapiens
catggtgaagtcctg

SEQ ID NO: 1839265 - DNA, 15 bp, Homo sapiens
atggtgaagtcctgc

SEQ ID NO: 1839266 - DNA, 15 bp, Homo sapiens
tggtgaagtcctgcc

SEQ ID NO: 1839267 - DNA, 15 bp, Homo sapiens
ggtgaagtcctgcct

SEQ ID NO: 1839268 - DNA, 15 bp, Homo sapiens
gtgaagtcctgcctc

SEQ ID NO: 1839269 - DNA, 15 bp, Homo sapiens
tgaagtcctgcctct

SEQ ID NO: 1839270 - DNA, 15 bp, Homo sapiens
gaagtcctgcctcta

SEQ ID NO: 1839271 - DNA, 15 bp, Homo sapiens
aagtcctgcctctac

SEQ ID NO: 1839272 - DNA, 15 bp, Homo sapiens
agtcctgcctctact

SEQ ID NO: 1839273 - DNA, 15 bp, Homo sapiens
gtcctgcctctacta

SEQ ID NO: 1839274 - DNA, 15 bp, Homo sapiens
tcctgcctctactaa

SEQ ID NO: 1839275 - DNA, 15 bp, Homo sapiens
cctgcctctactaaa

SEQ ID NO: 1839276 - DNA, 15 bp, Homo sapiens
ctgcctctactaaaa

SEQ ID NO: 1839277 - DNA, 15 bp, Homo sapiens
tgcctctactaaaaa

SEQ ID NO: 1839278 - DNA, 15 bp, Homo sapiens
gcctctactaaaaat

SEQ ID NO: 1839279 - DNA, 15 bp, Homo sapiens
gggcatggtggtgcg

SEQ ID NO: 1839280 - DNA, 15 bp, Homo sapiens
ggcatggtggtgcgt

SEQ ID NO: 1839281 - DNA, 15 bp, Homo sapiens
gcatggtggtgcgtg

SEQ ID NO: 1839282 - DNA, 15 bp, Homo sapiens
catggtggtgcgtgc

SEQ ID NO: 1839283 - DNA, 15 bp, Homo sapiens
atggtggtgcgtgcc

SEQ ID NO: 1839284 - DNA, 15 bp, Homo sapiens
tggtggtgcgtgcct

SEQ ID NO: 1839285 - DNA, 15 bp, Homo sapiens
ggtggtgcgtgcctg

SEQ ID NO: 1839286 - DNA, 15 bp, Homo sapiens
gtggtgcgtgcctgt

SEQ ID NO: 1839287 - DNA, 15 bp, Homo sapiens
tggtgcgtgcctgta

SEQ ID NO: 1839288 - DNA, 15 bp, Homo sapiens
ggtgcgtgcctgtaa

SEQ ID NO: 1839289 - DNA, 15 bp, Homo sapiens
gtgcgtgcctgtaat

SEQ ID NO: 1839290 - DNA, 15 bp, Homo sapiens
tgcgtgcctgtaatc

SEQ ID NO: 1839291 - DNA, 15 bp, Homo sapiens
tgaggcaagaaaatt

SEQ ID NO: 1839292 - DNA, 15 bp, Homo sapiens
gaggcaagaaaatta

SEQ ID NO: 1839293 - DNA, 15 bp, Homo sapiens
aggcaagaaaattac

SEQ ID NO: 1839294 - DNA, 15 bp, Homo sapiens
ggcaagaaaattact

SEQ ID NO: 1839295 - DNA, 15 bp, Homo sapiens
gcaagaaaattactt

SEQ ID NO: 1839296 - DNA, 15 bp, Homo sapiens
caagaaaattacttg

SEQ ID NO: 1839297 - DNA, 15 bp, Homo sapiens
aagaaaattacttga

SEQ ID NO: 1839298 - DNA, 15 bp, Homo sapiens
agaaaattacttgaa

SEQ ID NO: 1839299 - DNA, 15 bp, Homo sapiens
gaaaattacttgaac

SEQ ID NO: 1839300 - DNA, 15 bp, Homo sapiens
aaaattacttgaacc

SEQ ID NO: 1839301 - DNA, 15 bp, Homo sapiens
aaattacttgaaccc

SEQ ID NO: 1839302 - DNA, 15 bp, Homo sapiens
aattacttgaacccg

SEQ ID NO: 1839303 - DNA, 15 bp, Homo sapiens
attacttgaacccgg

SEQ ID NO: 1839304 - DNA, 15 bp, Homo sapiens
ttacttgaacccggg

SEQ ID NO: 1839305 - DNA, 15 bp, Homo sapiens
tacttgaacccggga

SEQ ID NO: 1839306 - DNA, 15 bp, Homo sapiens
gtgagccgagatcaa

SEQ ID NO: 1839307 - DNA, 15 bp, Homo sapiens
tgagccgagatcaag

SEQ ID NO: 1839308 - DNA, 15 bp, Homo sapiens
gagccgagatcaagc

SEQ ID NO: 1839309 - DNA, 15 bp, Homo sapiens
agccgagatcaagcc

SEQ ID NO: 1839310 - DNA, 15 bp, Homo sapiens
gccgagatcaagcca

SEQ ID NO: 1839311 - DNA, 15 bp, Homo sapiens
ccgagatcaagccac

SEQ ID NO: 1839312 - DNA, 15 bp, Homo sapiens
cgagatcaagccacg

SEQ ID NO: 1839313 - DNA, 15 bp, Homo sapiens
gagatcaagccacgg

SEQ ID NO: 1839314 - DNA, 15 bp, Homo sapiens
agatcaagccacggc

SEQ ID NO: 1839315 - DNA, 15 bp, Homo sapiens
gatcaagccacggca

SEQ ID NO: 1839316 - DNA, 15 bp, Homo sapiens
atcaagccacggcac

SEQ ID NO: 1839317 - DNA, 15 bp, Homo sapiens
tcaagccacggcact

SEQ ID NO: 1839318 - DNA, 15 bp, Homo sapiens
caagccacggcactc

SEQ ID NO: 1839319 - DNA, 15 bp, Homo sapiens
aagccacggcactcc

SEQ ID NO: 1839320 - DNA, 15 bp, Homo sapiens
agccacggcactcca

SEQ ID NO: 1839321 - DNA, 15 bp, Homo sapiens
gccacggcactccag

SEQ ID NO: 1839322 - DNA, 15 bp, Homo sapiens
ccacggcactccagc

SEQ ID NO: 1839323 - DNA, 15 bp, Homo sapiens
cacggcactccagcc

SEQ ID NO: 1839324 - DNA, 15 bp, Homo sapiens
acggcactccagcct

SEQ ID NO: 1839325 - DNA, 15 bp, Homo sapiens
cggcactccagcctg

SEQ ID NO: 1839326 - DNA, 15 bp, Homo sapiens
ggcactccagcctgg

SEQ ID NO: 1839327 - DNA, 15 bp, Homo sapiens
ggcgacaagagggaa

SEQ ID NO: 1839328 - DNA, 15 bp, Homo sapiens
gcgacaagagggaaa

SEQ ID NO: 1839329 - DNA, 15 bp, Homo sapiens
cgacaagagggaaac

SEQ ID NO: 1839330 - DNA, 15 bp, Homo sapiens
gacaagagggaaact

SEQ ID NO: 1839331 - DNA, 15 bp, Homo sapiens
acaagagggaaactc

SEQ ID NO: 1839332 - DNA, 15 bp, Homo sapiens
caagagggaaactcc

SEQ ID NO: 1839333 - DNA, 15 bp, Homo sapiens
aagagggaaactcca

SEQ ID NO: 1839334 - DNA, 15 bp, Homo sapiens
agagggaaactccat

SEQ ID NO: 1839335 - DNA, 15 bp, Homo sapiens
gagggaaactccatc

SEQ ID NO: 1839336 - DNA, 15 bp, Homo sapiens
agggaaactccatct

SEQ ID NO: 1839337 - DNA, 15 bp, Homo sapiens
gggaaactccatctc

SEQ ID NO: 1839338 - DNA, 15 bp, Homo sapiens
ggaaactccatctca

SEQ ID NO: 1839339 - DNA, 15 bp, Homo sapiens
ctccatctcaaaaat

SEQ ID NO: 1839340 - DNA, 15 bp, Homo sapiens
tccatctcaaaaata

SEQ ID NO: 1839341 - DNA, 15 bp, Homo sapiens
ccatctcaaaaataa

SEQ ID NO: 1839342 - DNA, 15 bp, Homo sapiens
catctcaaaaataaa

SEQ ID NO: 1839343 - DNA, 15 bp, Homo sapiens
atctcaaaaataaaa

SEQ ID NO: 1839344 - DNA, 15 bp, Homo sapiens
tctcaaaaataaaat

SEQ ID NO: 1839345 - DNA, 15 bp, Homo sapiens
ctcaaaaataaaata

SEQ ID NO: 1839346 - DNA, 15 bp, Homo sapiens
tcaaaaataaaataa

SEQ ID NO: 1839347 - DNA, 15 bp, Homo sapiens
caaaaataaaataaa

SEQ ID NO: 1839348 - DNA, 15 bp, Homo sapiens
ataaaataaaaaatg

SEQ ID NO: 1839349 - DNA, 15 bp, Homo sapiens
taaaataaaaaatga

SEQ ID NO: 1839350 - DNA, 15 bp, Homo sapiens
aaaataaaaaatgaa

SEQ ID NO: 1839351 - DNA, 15 bp, Homo sapiens
aaataaaaaatgaaa

SEQ ID NO: 1839352 - DNA, 15 bp, Homo sapiens
aataaaaaatgaaat

SEQ ID NO: 1839353 - DNA, 15 bp, Homo sapiens
ataaaaaatgaaatc

SEQ ID NO: 1839354 - DNA, 15 bp, Homo sapiens
taaaaaatgaaatcc

SEQ ID NO: 1839355 - DNA, 15 bp, Homo sapiens
aaaaaatgaaatcca

SEQ ID NO: 1839356 - DNA, 15 bp, Homo sapiens
aaaaatgaaatccag

SEQ ID NO: 1839357 - DNA, 15 bp, Homo sapiens
aaaatgaaatccagg

SEQ ID NO: 1839358 - DNA, 15 bp, Homo sapiens
aaatgaaatccaggc

SEQ ID NO: 1839359 - DNA, 15 bp, Homo sapiens
aatgaaatccaggct

SEQ ID NO: 1839360 - DNA, 15 bp, Homo sapiens
atgaaatccaggctt

SEQ ID NO: 1839361 - DNA, 15 bp, Homo sapiens
tgaaatccaggcttg

SEQ ID NO: 1839362 - DNA, 15 bp, Homo sapiens
gaaatccaggcttgt

SEQ ID NO: 1839363 - DNA, 15 bp, Homo sapiens
aaatccaggcttgtt

SEQ ID NO: 1839364 - DNA, 15 bp, Homo sapiens
aatccaggcttgttc

SEQ ID NO: 1839365 - DNA, 15 bp, Homo sapiens
atccaggcttgttcc

SEQ ID NO: 1839366 - DNA, 15 bp, Homo sapiens
tccaggcttgttcca

SEQ ID NO: 1839367 - DNA, 15 bp, Homo sapiens
ccaggcttgttccac

SEQ ID NO: 1839368 - DNA, 15 bp, Homo sapiens
caggcttgttccaca

SEQ ID NO: 1839369 - DNA, 15 bp, Homo sapiens
aggcttgttccacag

SEQ ID NO: 1839370 - DNA, 15 bp, Homo sapiens
ggcttgttccacagg

SEQ ID NO: 1839371 - DNA, 15 bp, Homo sapiens
gcttgttccacaggc

SEQ ID NO: 1839372 - DNA, 15 bp, Homo sapiens
cttgttccacaggcc

SEQ ID NO: 1839373 - DNA, 15 bp, Homo sapiens
ttgttccacaggcct

SEQ ID NO: 1839374 - DNA, 15 bp, Homo sapiens
tgttccacaggcctc

SEQ ID NO: 1839375 - DNA, 15 bp, Homo sapiens
gttccacaggcctct

SEQ ID NO: 1839376 - DNA, 15 bp, Homo sapiens
ttccacaggcctctc

SEQ ID NO: 1839377 - DNA, 15 bp, Homo sapiens
tccacaggcctctct

SEQ ID NO: 1839378 - DNA, 15 bp, Homo sapiens
ccacaggcctctctt

SEQ ID NO: 1839379 - DNA, 15 bp, Homo sapiens
cacaggcctctcttt

SEQ ID NO: 1839380 - DNA, 15 bp, Homo sapiens
acaggcctctctttt

SEQ ID NO: 1839381 - DNA, 15 bp, Homo sapiens
caggcctctcttttt

SEQ ID NO: 1839382 - DNA, 15 bp, Homo sapiens
aggcctctctttttg

SEQ ID NO: 1839383 - DNA, 15 bp, Homo sapiens
ggcctctctttttgg

SEQ ID NO: 1839384 - DNA, 15 bp, Homo sapiens
gcctctctttttggc

SEQ ID NO: 1839385 - DNA, 15 bp, Homo sapiens
cctctctttttggct

SEQ ID NO: 1839386 - DNA, 15 bp, Homo sapiens
ctctctttttggctt

SEQ ID NO: 1839387 - DNA, 15 bp, Homo sapiens
tctctttttggcttt

SEQ ID NO: 1839388 - DNA, 15 bp, Homo sapiens
ctctttttggctttt

SEQ ID NO: 1839389 - DNA, 15 bp, Homo sapiens
tctttttggcttttc

SEQ ID NO: 1839390 - DNA, 15 bp, Homo sapiens
ctttttggcttttca

SEQ ID NO: 1839391 - DNA, 15 bp, Homo sapiens
tttttggcttttcaa

SEQ ID NO: 1839392 - DNA, 15 bp, Homo sapiens
ttttggcttttcaaa

SEQ ID NO: 1839393 - DNA, 15 bp, Homo sapiens
tttggcttttcaaaa

SEQ ID NO: 1839394 - DNA, 15 bp, Homo sapiens
ttggcttttcaaaaa

SEQ ID NO: 1839395 - DNA, 15 bp, Homo sapiens
tggcttttcaaaaat

SEQ ID NO: 1839396 - DNA, 15 bp, Homo sapiens
ggcttttcaaaaatg

SEQ ID NO: 1839397 - DNA, 15 bp, Homo sapiens
gcttttcaaaaatgg

SEQ ID NO: 1839398 - DNA, 15 bp, Homo sapiens
cttttcaaaaatggc

SEQ ID NO: 1839399 - DNA, 15 bp, Homo sapiens
ttttcaaaaatggct

SEQ ID NO: 1839400 - DNA, 15 bp, Homo sapiens
tttcaaaaatggctt

SEQ ID NO: 1839401 - DNA, 15 bp, Homo sapiens
ttcaaaaatggcttt

SEQ ID NO: 1839402 - DNA, 15 bp, Homo sapiens
tcaaaaatggctttc

SEQ ID NO: 1839403 - DNA, 15 bp, Homo sapiens
caaaaatggctttca

SEQ ID NO: 1839404 - DNA, 15 bp, Homo sapiens
aaaaatggctttcaa

SEQ ID NO: 1839405 - DNA, 15 bp, Homo sapiens
aaaatggctttcaaa

SEQ ID NO: 1839406 - DNA, 15 bp, Homo sapiens
aaatggctttcaaag

SEQ ID NO: 1839407 - DNA, 15 bp, Homo sapiens
aatggctttcaaaga

SEQ ID NO: 1839408 - DNA, 15 bp, Homo sapiens
atggctttcaaagat

SEQ ID NO: 1839409 - DNA, 15 bp, Homo sapiens
tggctttcaaagatc

SEQ ID NO: 1839410 - DNA, 15 bp, Homo sapiens
ggctttcaaagatcc

SEQ ID NO: 1839411 - DNA, 15 bp, Homo sapiens
gctttcaaagatcct

SEQ ID NO: 1839412 - DNA, 15 bp, Homo sapiens
ctttcaaagatcctg

SEQ ID NO: 1839413 - DNA, 15 bp, Homo sapiens
tttcaaagatcctga

SEQ ID NO: 1839414 - DNA, 15 bp, Homo sapiens
ttcaaagatcctgag

SEQ ID NO: 1839415 - DNA, 15 bp, Homo sapiens
tcaaagatcctgagc

SEQ ID NO: 1839416 - DNA, 15 bp, Homo sapiens
caaagatcctgagct

SEQ ID NO: 1839417 - DNA, 15 bp, Homo sapiens
aaagatcctgagctc

SEQ ID NO: 1839418 - DNA, 15 bp, Homo sapiens
aagatcctgagctcc

SEQ ID NO: 1839419 - DNA, 15 bp, Homo sapiens
agatcctgagctccc

SEQ ID NO: 1839420 - DNA, 15 bp, Homo sapiens
gatcctgagctccca

SEQ ID NO: 1839421 - DNA, 15 bp, Homo sapiens
atcctgagctcccac

SEQ ID NO: 1839422 - DNA, 15 bp, Homo sapiens
tcctgagctcccact

SEQ ID NO: 1839423 - DNA, 15 bp, Homo sapiens
cctgagctcccactc

SEQ ID NO: 1839424 - DNA, 15 bp, Homo sapiens
ctgagctcccactca

SEQ ID NO: 1839425 - DNA, 15 bp, Homo sapiens
tgagctcccactcac

SEQ ID NO: 1839426 - DNA, 15 bp, Homo sapiens
gagctcccactcact

SEQ ID NO: 1839427 - DNA, 15 bp, Homo sapiens
agctcccactcactc

SEQ ID NO: 1839428 - DNA, 15 bp, Homo sapiens
gctcccactcactcg

SEQ ID NO: 1839429 - DNA, 15 bp, Homo sapiens
ctcccactcactcgc

SEQ ID NO: 1839430 - DNA, 15 bp, Homo sapiens
tcccactcactcgca

SEQ ID NO: 1839431 - DNA, 15 bp, Homo sapiens
cccactcactcgcac

SEQ ID NO: 1839432 - DNA, 15 bp, Homo sapiens
ccactcactcgcact

SEQ ID NO: 1839433 - DNA, 15 bp, Homo sapiens
cactcactcgcactc

SEQ ID NO: 1839434 - DNA, 15 bp, Homo sapiens
actcactcgcactct

SEQ ID NO: 1839435 - DNA, 15 bp, Homo sapiens
ctcactcgcactctc

SEQ ID NO: 1839436 - DNA, 15 bp, Homo sapiens
tcactcgcactctct

SEQ ID NO: 1839437 - DNA, 15 bp, Homo sapiens
cactcgcactctctg

SEQ ID NO: 1839438 - DNA, 15 bp, Homo sapiens
actcgcactctctgc

SEQ ID NO: 1839439 - DNA, 15 bp, Homo sapiens
ctcgcactctctgct

SEQ ID NO: 1839440 - DNA, 15 bp, Homo sapiens
tcgcactctctgctc

SEQ ID NO: 1839441 - DNA, 15 bp, Homo sapiens
cgcactctctgctcc

SEQ ID NO: 1839442 - DNA, 15 bp, Homo sapiens
gcactctctgctcct

SEQ ID NO: 1839443 - DNA, 15 bp, Homo sapiens
cactctctgctcctg

SEQ ID NO: 1839444 - DNA, 15 bp, Homo sapiens
actctctgctcctgc

SEQ ID NO: 1839445 - DNA, 15 bp, Homo sapiens
ctctctgctcctgcc

SEQ ID NO: 1839446 - DNA, 15 bp, Homo sapiens
tctctgctcctgcca

SEQ ID NO: 1839447 - DNA, 15 bp, Homo sapiens
ctctgctcctgccaa

SEQ ID NO: 1839448 - DNA, 15 bp, Homo sapiens
tctgctcctgccaag

SEQ ID NO: 1839449 - DNA, 15 bp, Homo sapiens
ctgctcctgccaaga

SEQ ID NO: 1839450 - DNA, 15 bp, Homo sapiens
tgctcctgccaagag

SEQ ID NO: 1839451 - DNA, 15 bp, Homo sapiens
gctcctgccaagaga

SEQ ID NO: 1839452 - DNA, 15 bp, Homo sapiens
ctcctgccaagagaa

SEQ ID NO: 1839453 - DNA, 15 bp, Homo sapiens
tcctgccaagagaat

SEQ ID NO: 1839454 - DNA, 15 bp, Homo sapiens
cctgccaagagaatc

SEQ ID NO: 1839455 - DNA, 15 bp, Homo sapiens
ctgccaagagaatct

SEQ ID NO: 1839456 - DNA, 15 bp, Homo sapiens
tgccaagagaatctg

SEQ ID NO: 1839457 - DNA, 15 bp, Homo sapiens
gccaagagaatctgc

SEQ ID NO: 1839458 - DNA, 15 bp, Homo sapiens
ccaagagaatctgcc

SEQ ID NO: 1839459 - DNA, 15 bp, Homo sapiens
caagagaatctgcct

SEQ ID NO: 1839460 - DNA, 15 bp, Homo sapiens
aagagaatctgcctg

SEQ ID NO: 1839461 - DNA, 15 bp, Homo sapiens
agagaatctgcctgt

SEQ ID NO: 1839462 - DNA, 15 bp, Homo sapiens
gagaatctgcctgtt

SEQ ID NO: 1839463 - DNA, 15 bp, Homo sapiens
agaatctgcctgtta

SEQ ID NO: 1839464 - DNA, 15 bp, Homo sapiens
gaatctgcctgttat

SEQ ID NO: 1839465 - DNA, 15 bp, Homo sapiens
aatctgcctgttatg

SEQ ID NO: 1839466 - DNA, 15 bp, Homo sapiens
atctgcctgttatgc

SEQ ID NO: 1839467 - DNA, 15 bp, Homo sapiens
tctgcctgttatgcc

SEQ ID NO: 1839468 - DNA, 15 bp, Homo sapiens
ctgcctgttatgcct

SEQ ID NO: 1839469 - DNA, 15 bp, Homo sapiens
tgcctgttatgcctg

SEQ ID NO: 1839470 - DNA, 15 bp, Homo sapiens
gcctgttatgcctgt

SEQ ID NO: 1839471 - DNA, 15 bp, Homo sapiens
cctgttatgcctgtg

SEQ ID NO: 1839472 - DNA, 15 bp, Homo sapiens
ctgttatgcctgtgc

SEQ ID NO: 1839473 - DNA, 15 bp, Homo sapiens
tgttatgcctgtgca

SEQ ID NO: 1839474 - DNA, 15 bp, Homo sapiens
gttatgcctgtgcat

SEQ ID NO: 1839475 - DNA, 15 bp, Homo sapiens
ttatgcctgtgcatc

SEQ ID NO: 1839476 - DNA, 15 bp, Homo sapiens
tatgcctgtgcatca

SEQ ID NO: 1839477 - DNA, 15 bp, Homo sapiens
atgcctgtgcatcaa

SEQ ID NO: 1839478 - DNA, 15 bp, Homo sapiens
tgcctgtgcatcaag

SEQ ID NO: 1839479 - DNA, 15 bp, Homo sapiens
gcctgtgcatcaagc

SEQ ID NO: 1839480 - DNA, 15 bp, Homo sapiens
cctgtgcatcaagca

SEQ ID NO: 1839481 - DNA, 15 bp, Homo sapiens
ctgtgcatcaagcag

SEQ ID NO: 1839482 - DNA, 15 bp, Homo sapiens
tgtgcatcaagcaga

SEQ ID NO: 1839483 - DNA, 15 bp, Homo sapiens
gtgcatcaagcagac

SEQ ID NO: 1839484 - DNA, 15 bp, Homo sapiens
tgcatcaagcagacc

SEQ ID NO: 1839485 - DNA, 15 bp, Homo sapiens
gcatcaagcagacct

SEQ ID NO: 1839486 - DNA, 15 bp, Homo sapiens
catcaagcagacctg

SEQ ID NO: 1839487 - DNA, 15 bp, Homo sapiens
atcaagcagacctgg

SEQ ID NO: 1839488 - DNA, 15 bp, Homo sapiens
tcaagcagacctggt

SEQ ID NO: 1839489 - DNA, 15 bp, Homo sapiens
caagcagacctggtc

SEQ ID NO: 1839490 - DNA, 15 bp, Homo sapiens
aagcagacctggtcc

SEQ ID NO: 1839491 - DNA, 15 bp, Homo sapiens
agcagacctggtcca

SEQ ID NO: 1839492 - DNA, 15 bp, Homo sapiens
gcagacctggtccag

SEQ ID NO: 1839493 - DNA, 15 bp, Homo sapiens
cagacctggtccagc

SEQ ID NO: 1839494 - DNA, 15 bp, Homo sapiens
agacctggtccagcc

SEQ ID NO: 1839495 - DNA, 15 bp, Homo sapiens
gacctggtccagcct

SEQ ID NO: 1839496 - DNA, 15 bp, Homo sapiens
acctggtccagcctc

SEQ ID NO: 1839497 - DNA, 15 bp, Homo sapiens
cctggtccagcctcc

SEQ ID NO: 1839498 - DNA, 15 bp, Homo sapiens
ctggtccagcctccg

SEQ ID NO: 1839499 - DNA, 15 bp, Homo sapiens
tggtccagcctccga

SEQ ID NO: 1839500 - DNA, 15 bp, Homo sapiens
ggtccagcctccgaa

SEQ ID NO: 1839501 - DNA, 15 bp, Homo sapiens
gtccagcctccgaat

SEQ ID NO: 1839502 - DNA, 15 bp, Homo sapiens
tccagcctccgaatc

SEQ ID NO: 1839503 - DNA, 15 bp, Homo sapiens
ccagcctccgaatct

SEQ ID NO: 1839504 - DNA, 15 bp, Homo sapiens
cagcctccgaatctt

SEQ ID NO: 1839505 - DNA, 15 bp, Homo sapiens
agcctccgaatcttt

SEQ ID NO: 1839506 - DNA, 15 bp, Homo sapiens
gcctccgaatcttta

SEQ ID NO: 1839507 - DNA, 15 bp, Homo sapiens
cctccgaatctttac

SEQ ID NO: 1839508 - DNA, 15 bp, Homo sapiens
ctccgaatctttacc

SEQ ID NO: 1839509 - DNA, 15 bp, Homo sapiens
tccgaatctttaccc

SEQ ID NO: 1839510 - DNA, 15 bp, Homo sapiens
ccgaatctttaccca

SEQ ID NO: 1839511 - DNA, 15 bp, Homo sapiens
cgaatctttacccac

SEQ ID NO: 1839512 - DNA, 15 bp, Homo sapiens
gaatctttacccaca

SEQ ID NO: 1839513 - DNA, 15 bp, Homo sapiens
aatctttacccacac

SEQ ID NO: 1839514 - DNA, 15 bp, Homo sapiens
atctttacccacaca

SEQ ID NO: 1839515 - DNA, 15 bp, Homo sapiens
tctttacccacacag

SEQ ID NO: 1839516 - DNA, 15 bp, Homo sapiens
ctttacccacacagg

SEQ ID NO: 1839517 - DNA, 15 bp, Homo sapiens
tttacccacacaggt

SEQ ID NO: 1839518 - DNA, 15 bp, Homo sapiens
ttacccacacaggtc

SEQ ID NO: 1839519 - DNA, 15 bp, Homo sapiens
tacccacacaggtcc

SEQ ID NO: 1839520 - DNA, 15 bp, Homo sapiens
acccacacaggtccg

SEQ ID NO: 1839521 - DNA, 15 bp, Homo sapiens
cccacacaggtccgt

SEQ ID NO: 1839522 - DNA, 15 bp, Homo sapiens
ccacacaggtccgtg

SEQ ID NO: 1839523 - DNA, 15 bp, Homo sapiens
cacacaggtccgtgc

SEQ ID NO: 1839524 - DNA, 15 bp, Homo sapiens
acacaggtccgtgcc

SEQ ID NO: 1839525 - DNA, 15 bp, Homo sapiens
cacaggtccgtgccc

SEQ ID NO: 1839526 - DNA, 15 bp, Homo sapiens
acaggtccgtgcccc

SEQ ID NO: 1839527 - DNA, 15 bp, Homo sapiens
caggtccgtgccccg

SEQ ID NO: 1839528 - DNA, 15 bp, Homo sapiens
aggtccgtgccccgc

SEQ ID NO: 1839529 - DNA, 15 bp, Homo sapiens
ggtccgtgccccgct

SEQ ID NO: 1839530 - DNA, 15 bp, Homo sapiens
gtccgtgccccgctc

SEQ ID NO: 1839531 - DNA, 15 bp, Homo sapiens
tccgtgccccgctcc

SEQ ID NO: 1839532 - DNA, 15 bp, Homo sapiens
ccgtgccccgctcct

SEQ ID NO: 1839533 - DNA, 15 bp, Homo sapiens
cgtgccccgctcctc

SEQ ID NO: 1839534 - DNA, 15 bp, Homo sapiens
gtgccccgctcctca

SEQ ID NO: 1839535 - DNA, 15 bp, Homo sapiens
tgccccgctcctcac

SEQ ID NO: 1839536 - DNA, 15 bp, Homo sapiens
gccccgctcctcacg

SEQ ID NO: 1839537 - DNA, 15 bp, Homo sapiens
ccccgctcctcacgt

SEQ ID NO: 1839538 - DNA, 15 bp, Homo sapiens
cccgctcctcacgtg

SEQ ID NO: 1839539 - DNA, 15 bp, Homo sapiens
ccgctcctcacgtgc

SEQ ID NO: 1839540 - DNA, 15 bp, Homo sapiens
cgctcctcacgtgcc

SEQ ID NO: 1839541 - DNA, 15 bp, Homo sapiens
gctcctcacgtgcct

SEQ ID NO: 1839542 - DNA, 15 bp, Homo sapiens
ctcctcacgtgcctg

SEQ ID NO: 1839543 - DNA, 15 bp, Homo sapiens
tcctcacgtgcctgc

SEQ ID NO: 1839544 - DNA, 15 bp, Homo sapiens
cctcacgtgcctgcc

SEQ ID NO: 1839545 - DNA, 15 bp, Homo sapiens
ctcacgtgcctgcct

SEQ ID NO: 1839546 - DNA, 15 bp, Homo sapiens
tcacgtgcctgcctt

SEQ ID NO: 1839547 - DNA, 15 bp, Homo sapiens
cacgtgcctgccttc

SEQ ID NO: 1839548 - DNA, 15 bp, Homo sapiens
acgtgcctgccttca

SEQ ID NO: 1839549 - DNA, 15 bp, Homo sapiens
cgtgcctgccttcac

SEQ ID NO: 1839550 - DNA, 15 bp, Homo sapiens
gtgcctgccttcact

SEQ ID NO: 1839551 - DNA, 15 bp, Homo sapiens
tgcctgccttcactt

SEQ ID NO: 1839552 - DNA, 15 bp, Homo sapiens
gcctgccttcacttc

SEQ ID NO: 1839553 - DNA, 15 bp, Homo sapiens
cctgccttcacttct

SEQ ID NO: 1839554 - DNA, 15 bp, Homo sapiens
ctgccttcacttctc

SEQ ID NO: 1839555 - DNA, 15 bp, Homo sapiens
tgccttcacttctct

SEQ ID NO: 1839556 - DNA, 15 bp, Homo sapiens
gccttcacttctcta

SEQ ID NO: 1839557 - DNA, 15 bp, Homo sapiens
ccttcacttctctaa

SEQ ID NO: 1839558 - DNA, 15 bp, Homo sapiens
cttcacttctctaaa

SEQ ID NO: 1839559 - DNA, 15 bp, Homo sapiens
ttcacttctctaaat

SEQ ID NO: 1839560 - DNA, 15 bp, Homo sapiens
tcacttctctaaatc

SEQ ID NO: 1839561 - DNA, 15 bp, Homo sapiens
cacttctctaaatcc

SEQ ID NO: 1839562 - DNA, 15 bp, Homo sapiens
acttctctaaatcct

SEQ ID NO: 1839563 - DNA, 15 bp, Homo sapiens
cttctctaaatcctc

SEQ ID NO: 1839564 - DNA, 15 bp, Homo sapiens
ttctctaaatcctcc

SEQ ID NO: 1839565 - DNA, 15 bp, Homo sapiens
tctctaaatcctccc

SEQ ID NO: 1839566 - DNA, 15 bp, Homo sapiens
ctctaaatcctccct

SEQ ID NO: 1839567 - DNA, 15 bp, Homo sapiens
tctaaatcctcccta

SEQ ID NO: 1839568 - DNA, 15 bp, Homo sapiens
ctaaatcctccctat

SEQ ID NO: 1839569 - DNA, 15 bp, Homo sapiens
taaatcctccctatt

SEQ ID NO: 1839570 - DNA, 15 bp, Homo sapiens
aaatcctccctattc

SEQ ID NO: 1839571 - DNA, 15 bp, Homo sapiens
aatcctccctattct

SEQ ID NO: 1839572 - DNA, 15 bp, Homo sapiens
atcctccctattctt

SEQ ID NO: 1839573 - DNA, 15 bp, Homo sapiens
tcctccctattcttc

SEQ ID NO: 1839574 - DNA, 15 bp, Homo sapiens
cctccctattcttcc

SEQ ID NO: 1839575 - DNA, 15 bp, Homo sapiens
ctccctattcttcca

SEQ ID NO: 1839576 - DNA, 15 bp, Homo sapiens
tccctattcttccag

SEQ ID NO: 1839577 - DNA, 15 bp, Homo sapiens
ccctattcttccagg

SEQ ID NO: 1839578 - DNA, 15 bp, Homo sapiens
cctattcttccaggc

SEQ ID NO: 1839579 - DNA, 15 bp, Homo sapiens
ctattcttccaggct

SEQ ID NO: 1839580 - DNA, 15 bp, Homo sapiens
tattcttccaggctc

SEQ ID NO: 1839581 - DNA, 15 bp, Homo sapiens
attcttccaggctct

SEQ ID NO: 1839582 - DNA, 15 bp, Homo sapiens
ttcttccaggctctg

SEQ ID NO: 1839583 - DNA, 15 bp, Homo sapiens
tcttccaggctctgc

SEQ ID NO: 1839584 - DNA, 15 bp, Homo sapiens
cttccaggctctgct

SEQ ID NO: 1839585 - DNA, 15 bp, Homo sapiens
ttccaggctctgctc

SEQ ID NO: 1839586 - DNA, 15 bp, Homo sapiens
tccaggctctgctcc

SEQ ID NO: 1839587 - DNA, 15 bp, Homo sapiens
ccaggctctgctccg

SEQ ID NO: 1839588 - DNA, 15 bp, Homo sapiens
caggctctgctccgg

SEQ ID NO: 1839589 - DNA, 15 bp, Homo sapiens
aggctctgctccggt

SEQ ID NO: 1839590 - DNA, 15 bp, Homo sapiens
ggctctgctccggtg

SEQ ID NO: 1839591 - DNA, 15 bp, Homo sapiens
gctctgctccggtgc

SEQ ID NO: 1839592 - DNA, 15 bp, Homo sapiens
ctctgctccggtgcc

SEQ ID NO: 1839593 - DNA, 15 bp, Homo sapiens
tctgctccggtgcca

SEQ ID NO: 1839594 - DNA, 15 bp, Homo sapiens
ctgctccggtgccac

SEQ ID NO: 1839595 - DNA, 15 bp, Homo sapiens
tgctccggtgccacc

SEQ ID NO: 1839596 - DNA, 15 bp, Homo sapiens
gctccggtgccacct

SEQ ID NO: 1839597 - DNA, 15 bp, Homo sapiens
ctccggtgccacctc

SEQ ID NO: 1839598 - DNA, 15 bp, Homo sapiens
tccggtgccacctcc

SEQ ID NO: 1839599 - DNA, 15 bp, Homo sapiens
ccggtgccacctcct

SEQ ID NO: 1839600 - DNA, 15 bp, Homo sapiens
cggtgccacctcctc

SEQ ID NO: 1839601 - DNA, 15 bp, Homo sapiens
ggtgccacctcctcc

SEQ ID NO: 1839602 - DNA, 15 bp, Homo sapiens
gtgccacctcctcca

SEQ ID NO: 1839603 - DNA, 15 bp, Homo sapiens
tgccacctcctccag

SEQ ID NO: 1839604 - DNA, 15 bp, Homo sapiens
ccacctcctccaggc

SEQ ID NO: 1839605 - DNA, 15 bp, Homo sapiens
cacctcctccaggca

SEQ ID NO: 1839606 - DNA, 15 bp, Homo sapiens
acctcctccaggcag

SEQ ID NO: 1839607 - DNA, 15 bp, Homo sapiens
cctcctccaggcaga

SEQ ID NO: 1839608 - DNA, 15 bp, Homo sapiens
ctcctccaggcagac

SEQ ID NO: 1839609 - DNA, 15 bp, Homo sapiens
tcctccaggcagact

SEQ ID NO: 1839610 - DNA, 15 bp, Homo sapiens
cctccaggcagactc

SEQ ID NO: 1839611 - DNA, 15 bp, Homo sapiens
ctccaggcagactcc

SEQ ID NO: 1839612 - DNA, 15 bp, Homo sapiens
tccaggcagactccc

SEQ ID NO: 1839613 - DNA, 15 bp, Homo sapiens
ccaggcagactccct

SEQ ID NO: 1839614 - DNA, 15 bp, Homo sapiens
caggcagactccctg

SEQ ID NO: 1839615 - DNA, 15 bp, Homo sapiens
aggcagactccctga

SEQ ID NO: 1839616 - DNA, 15 bp, Homo sapiens
ggcagactccctgat

SEQ ID NO: 1839617 - DNA, 15 bp, Homo sapiens
gcagactccctgatt

SEQ ID NO: 1839618 - DNA, 15 bp, Homo sapiens
cagactccctgattt

SEQ ID NO: 1839619 - DNA, 15 bp, Homo sapiens
agactccctgatttc

SEQ ID NO: 1839620 - DNA, 15 bp, Homo sapiens
gactccctgatttct

SEQ ID NO: 1839621 - DNA, 15 bp, Homo sapiens
actccctgatttctc

SEQ ID NO: 1839622 - DNA, 15 bp, Homo sapiens
ctccctgatttctcc

SEQ ID NO: 1839623 - DNA, 15 bp, Homo sapiens
tccctgatttctcca

SEQ ID NO: 1839624 - DNA, 15 bp, Homo sapiens
ccctgatttctccag

SEQ ID NO: 1839625 - DNA, 15 bp, Homo sapiens
cctgatttctccagg

SEQ ID NO: 1839626 - DNA, 15 bp, Homo sapiens
ctgatttctccaggc

SEQ ID NO: 1839627 - DNA, 15 bp, Homo sapiens
tgatttctccaggcc

SEQ ID NO: 1839628 - DNA, 15 bp, Homo sapiens
gatttctccaggcca

SEQ ID NO: 1839629 - DNA, 15 bp, Homo sapiens
atttctccaggccac

SEQ ID NO: 1839630 - DNA, 15 bp, Homo sapiens
tttctccaggccaca

SEQ ID NO: 1839631 - DNA, 15 bp, Homo sapiens
ttctccaggccacac

SEQ ID NO: 1839632 - DNA, 15 bp, Homo sapiens
tctccaggccacacc

SEQ ID NO: 1839633 - DNA, 15 bp, Homo sapiens
ctccaggccacacca

SEQ ID NO: 1839634 - DNA, 15 bp, Homo sapiens
tccaggccacaccag

SEQ ID NO: 1839635 - DNA, 15 bp, Homo sapiens
ccaggccacaccaga

SEQ ID NO: 1839636 - DNA, 15 bp, Homo sapiens
caggccacaccagat

SEQ ID NO: 1839637 - DNA, 15 bp, Homo sapiens
aggccacaccagatg

SEQ ID NO: 1839638 - DNA, 15 bp, Homo sapiens
ggccacaccagatgg

SEQ ID NO: 1839639 - DNA, 15 bp, Homo sapiens
gccacaccagatggg

SEQ ID NO: 1839640 - DNA, 15 bp, Homo sapiens
ccacaccagatgggg

SEQ ID NO: 1839641 - DNA, 15 bp, Homo sapiens
cacaccagatgggga

SEQ ID NO: 1839642 - DNA, 15 bp, Homo sapiens
acaccagatggggat

SEQ ID NO: 1839643 - DNA, 15 bp, Homo sapiens
caccagatggggatg

SEQ ID NO: 1839644 - DNA, 15 bp, Homo sapiens
accagatggggatgt

SEQ ID NO: 1839645 - DNA, 15 bp, Homo sapiens
ccagatggggatgtt

SEQ ID NO: 1839646 - DNA, 15 bp, Homo sapiens
cagatggggatgttg

SEQ ID NO: 1839647 - DNA, 15 bp, Homo sapiens
agatggggatgttgt

SEQ ID NO: 1839648 - DNA, 15 bp, Homo sapiens
gatggggatgttgta

SEQ ID NO: 1839649 - DNA, 15 bp, Homo sapiens
atggggatgttgtat

SEQ ID NO: 1839650 - DNA, 15 bp, Homo sapiens
tggggatgttgtatc

SEQ ID NO: 1839651 - DNA, 15 bp, Homo sapiens
ggggatgttgtatcc

SEQ ID NO: 1839652 - DNA, 15 bp, Homo sapiens
gggatgttgtatccc

SEQ ID NO: 1839653 - DNA, 15 bp, Homo sapiens
ggatgttgtatccca

SEQ ID NO: 1839654 - DNA, 15 bp, Homo sapiens
gatgttgtatcccat

SEQ ID NO: 1839655 - DNA, 15 bp, Homo sapiens
atgttgtatcccatg

SEQ ID NO: 1839656 - DNA, 15 bp, Homo sapiens
tgttgtatcccatga

SEQ ID NO: 1839657 - DNA, 15 bp, Homo sapiens
gttgtatcccatgat

SEQ ID NO: 1839658 - DNA, 15 bp, Homo sapiens
ttgtatcccatgata

SEQ ID NO: 1839659 - DNA, 15 bp, Homo sapiens
tgtatcccatgatac

SEQ ID NO: 1839660 - DNA, 15 bp, Homo sapiens
gtatcccatgatacg

SEQ ID NO: 1839661 - DNA, 15 bp, Homo sapiens
tatcccatgatacga

SEQ ID NO: 1839662 - DNA, 15 bp, Homo sapiens
atcccatgatacgaa

SEQ ID NO: 1839663 - DNA, 15 bp, Homo sapiens
tcccatgatacgaaa

SEQ ID NO: 1839664 - DNA, 15 bp, Homo sapiens
cccatgatacgaaaa

SEQ ID NO: 1839665 - DNA, 15 bp, Homo sapiens
ccatgatacgaaaac

SEQ ID NO: 1839666 - DNA, 15 bp, Homo sapiens
catgatacgaaaact

SEQ ID NO: 1839667 - DNA, 15 bp, Homo sapiens
atgatacgaaaacta

SEQ ID NO: 1839668 - DNA, 15 bp, Homo sapiens
tgatacgaaaactaa

SEQ ID NO: 1839669 - DNA, 15 bp, Homo sapiens
gatacgaaaactaaa

SEQ ID NO: 1839670 - DNA, 15 bp, Homo sapiens
atacgaaaactaaag

SEQ ID NO: 1839671 - DNA, 15 bp, Homo sapiens
tacgaaaactaaagg

SEQ ID NO: 1839672 - DNA, 15 bp, Homo sapiens
acgaaaactaaaggc

SEQ ID NO: 1839673 - DNA, 15 bp, Homo sapiens
cgaaaactaaaggct

SEQ ID NO: 1839674 - DNA, 15 bp, Homo sapiens
gaaaactaaaggctc

SEQ ID NO: 1839675 - DNA, 15 bp, Homo sapiens
aaaactaaaggctcc

SEQ ID NO: 1839676 - DNA, 15 bp, Homo sapiens
aaactaaaggctcca

SEQ ID NO: 1839677 - DNA, 15 bp, Homo sapiens
aactaaaggctccaa

SEQ ID NO: 1839678 - DNA, 15 bp, Homo sapiens
actaaaggctccaag

SEQ ID NO: 1839679 - DNA, 15 bp, Homo sapiens
ctaaaggctccaagt

SEQ ID NO: 1839680 - DNA, 15 bp, Homo sapiens
taaaggctccaagtc

SEQ ID NO: 1839681 - DNA, 15 bp, Homo sapiens
aaaggctccaagtca

SEQ ID NO: 1839682 - DNA, 15 bp, Homo sapiens
aaggctccaagtcaa

SEQ ID NO: 1839683 - DNA, 15 bp, Homo sapiens
aggctccaagtcaag

SEQ ID NO: 1839684 - DNA, 15 bp, Homo sapiens
ggctccaagtcaagc

SEQ ID NO: 1839685 - DNA, 15 bp, Homo sapiens
gctccaagtcaagct

SEQ ID NO: 1839686 - DNA, 15 bp, Homo sapiens
ctccaagtcaagctt

SEQ ID NO: 1839687 - DNA, 15 bp, Homo sapiens
tccaagtcaagcttg

SEQ ID NO: 1839688 - DNA, 15 bp, Homo sapiens
ccaagtcaagcttgc

SEQ ID NO: 1839689 - DNA, 15 bp, Homo sapiens
caagtcaagcttgcc

SEQ ID NO: 1839690 - DNA, 15 bp, Homo sapiens
aagtcaagcttgccc

SEQ ID NO: 1839691 - DNA, 15 bp, Homo sapiens
agtcaagcttgccca

SEQ ID NO: 1839692 - DNA, 15 bp, Homo sapiens
gtcaagcttgcccac

SEQ ID NO: 1839693 - DNA, 15 bp, Homo sapiens
tcaagcttgcccacc

SEQ ID NO: 1839694 - DNA, 15 bp, Homo sapiens
caagcttgcccaccc

SEQ ID NO: 1839695 - DNA, 15 bp, Homo sapiens
aagcttgcccaccca

SEQ ID NO: 1839696 - DNA, 15 bp, Homo sapiens
agcttgcccacccag

SEQ ID NO: 1839697 - DNA, 15 bp, Homo sapiens
gcttgcccacccagg

SEQ ID NO: 1839698 - DNA, 15 bp, Homo sapiens
cttgcccacccaggc

SEQ ID NO: 1839699 - DNA, 15 bp, Homo sapiens
ttgcccacccaggcc

SEQ ID NO: 1839700 - DNA, 15 bp, Homo sapiens
tgcccacccaggcca

SEQ ID NO: 1839701 - DNA, 15 bp, Homo sapiens
gcccacccaggccag

SEQ ID NO: 1839702 - DNA, 15 bp, Homo sapiens
cccacccaggccagg

SEQ ID NO: 1839703 - DNA, 15 bp, Homo sapiens
ccacccaggccaggc

SEQ ID NO: 1839704 - DNA, 15 bp, Homo sapiens
cacccaggccaggca

SEQ ID NO: 1839705 - DNA, 15 bp, Homo sapiens
acccaggccaggcac

SEQ ID NO: 1839706 - DNA, 15 bp, Homo sapiens
cccaggccaggcaca

SEQ ID NO: 1839707 - DNA, 15 bp, Homo sapiens
ccaggccaggcacaa

SEQ ID NO: 1839708 - DNA, 15 bp, Homo sapiens
caggccaggcacaaa

SEQ ID NO: 1839709 - DNA, 15 bp, Homo sapiens
aggccaggcacaaag

SEQ ID NO: 1839710 - DNA, 15 bp, Homo sapiens
ggccaggcacaaaga

SEQ ID NO: 1839711 - DNA, 15 bp, Homo sapiens
gccaggcacaaagag

SEQ ID NO: 1839712 - DNA, 15 bp, Homo sapiens
ccaggcacaaagagg

SEQ ID NO: 1839713 - DNA, 15 bp, Homo sapiens
caggcacaaagaggt

SEQ ID NO: 1839714 - DNA, 15 bp, Homo sapiens
aggcacaaagaggtg

SEQ ID NO: 1839715 - DNA, 15 bp, Homo sapiens
ggcacaaagaggtgc

SEQ ID NO: 1839716 - DNA, 15 bp, Homo sapiens
gcacaaagaggtgct

SEQ ID NO: 1839717 - DNA, 15 bp, Homo sapiens
cacaaagaggtgctc

SEQ ID NO: 1839718 - DNA, 15 bp, Homo sapiens
acaaagaggtgctca

SEQ ID NO: 1839719 - DNA, 15 bp, Homo sapiens
caaagaggtgctcag

SEQ ID NO: 1839720 - DNA, 15 bp, Homo sapiens
aaagaggtgctcagg

SEQ ID NO: 1839721 - DNA, 15 bp, Homo sapiens
aagaggtgctcagga

SEQ ID NO: 1839722 - DNA, 15 bp, Homo sapiens
agaggtgctcaggaa

SEQ ID NO: 1839723 - DNA, 15 bp, Homo sapiens
gaggtgctcaggaag

SEQ ID NO: 1839724 - DNA, 15 bp, Homo sapiens
aggtgctcaggaagg

SEQ ID NO: 1839725 - DNA, 15 bp, Homo sapiens
ggtgctcaggaaggc

SEQ ID NO: 1839726 - DNA, 15 bp, Homo sapiens
gtgctcaggaaggct

SEQ ID NO: 1839727 - DNA, 15 bp, Homo sapiens
tgctcaggaaggctg

SEQ ID NO: 1839728 - DNA, 15 bp, Homo sapiens
gctcaggaaggctga

SEQ ID NO: 1839729 - DNA, 15 bp, Homo sapiens
ctcaggaaggctgat

SEQ ID NO: 1839730 - DNA, 15 bp, Homo sapiens
tcaggaaggctgatt

SEQ ID NO: 1839731 - DNA, 15 bp, Homo sapiens
caggaaggctgattg

SEQ ID NO: 1839732 - DNA, 15 bp, Homo sapiens
aggaaggctgattgc

SEQ ID NO: 1839733 - DNA, 15 bp, Homo sapiens
ggaaggctgattgcc

SEQ ID NO: 1839734 - DNA, 15 bp, Homo sapiens
gaaggctgattgcct

SEQ ID NO: 1839735 - DNA, 15 bp, Homo sapiens
aaggctgattgcctg

SEQ ID NO: 1839736 - DNA, 15 bp, Homo sapiens
aggctgattgcctgt

SEQ ID NO: 1839737 - DNA, 15 bp, Homo sapiens
ggctgattgcctgtc

SEQ ID NO: 1839738 - DNA, 15 bp, Homo sapiens
gctgattgcctgtcc

SEQ ID NO: 1839739 - DNA, 15 bp, Homo sapiens
ctgattgcctgtccc

SEQ ID NO: 1839740 - DNA, 15 bp, Homo sapiens
tgattgcctgtccct

SEQ ID NO: 1839741 - DNA, 15 bp, Homo sapiens
gattgcctgtccctg

SEQ ID NO: 1839742 - DNA, 15 bp, Homo sapiens
attgcctgtccctgg

SEQ ID NO: 1839743 - DNA, 15 bp, Homo sapiens
ttgcctgtccctgga

SEQ ID NO: 1839744 - DNA, 15 bp, Homo sapiens
tgcctgtccctggag

SEQ ID NO: 1839745 - DNA, 15 bp, Homo sapiens
gcctgtccctggagg

SEQ ID NO: 1839746 - DNA, 15 bp, Homo sapiens
cctgtccctggaggt

SEQ ID NO: 1839747 - DNA, 15 bp, Homo sapiens
ctgtccctggaggtg

SEQ ID NO: 1839748 - DNA, 15 bp, Homo sapiens
tgtccctggaggtga

SEQ ID NO: 1839749 - DNA, 15 bp, Homo sapiens
gtccctggaggtgag

SEQ ID NO: 1839750 - DNA, 15 bp, Homo sapiens
tccctggaggtgagc

SEQ ID NO: 1839751 - DNA, 15 bp, Homo sapiens
ccctggaggtgagcc

SEQ ID NO: 1839752 - DNA, 15 bp, Homo sapiens
cctggaggtgagccc

SEQ ID NO: 1839753 - DNA, 15 bp, Homo sapiens
ctggaggtgagccct

SEQ ID NO: 1839754 - DNA, 15 bp, Homo sapiens
tggaggtgagccctc

SEQ ID NO: 1839755 - DNA, 15 bp, Homo sapiens
ggaggtgagccctcc

SEQ ID NO: 1839756 - DNA, 15 bp, Homo sapiens
gaggtgagccctccc

SEQ ID NO: 1839757 - DNA, 15 bp, Homo sapiens
aggtgagccctccct

SEQ ID NO: 1839758 - DNA, 15 bp, Homo sapiens
ggtgagccctccctt

SEQ ID NO: 1839759 - DNA, 15 bp, Homo sapiens
gtgagccctcccttt

SEQ ID NO: 1839760 - DNA, 15 bp, Homo sapiens
tgagccctccctttc

SEQ ID NO: 1839761 - DNA, 15 bp, Homo sapiens
gagccctccctttca

SEQ ID NO: 1839762 - DNA, 15 bp, Homo sapiens
agccctccctttcat

SEQ ID NO: 1839763 - DNA, 15 bp, Homo sapiens
gccctccctttcatc

SEQ ID NO: 1839764 - DNA, 15 bp, Homo sapiens
ccctccctttcatcc

SEQ ID NO: 1839765 - DNA, 15 bp, Homo sapiens
cctccctttcatcct

SEQ ID NO: 1839766 - DNA, 15 bp, Homo sapiens
ctccctttcatcctc

SEQ ID NO: 1839767 - DNA, 15 bp, Homo sapiens
tccctttcatcctcc

SEQ ID NO: 1839768 - DNA, 15 bp, Homo sapiens
ccctttcatcctccc

SEQ ID NO: 1839769 - DNA, 15 bp, Homo sapiens
cctttcatcctcccc

SEQ ID NO: 1839770 - DNA, 15 bp, Homo sapiens
ctttcatcctcccca

SEQ ID NO: 1839771 - DNA, 15 bp, Homo sapiens
tttcatcctccccat

SEQ ID NO: 1839772 - DNA, 15 bp, Homo sapiens
ttcatcctccccatc

SEQ ID NO: 1839773 - DNA, 15 bp, Homo sapiens
tcatcctccccatct

SEQ ID NO: 1839774 - DNA, 15 bp, Homo sapiens
catcctccccatctg

SEQ ID NO: 1839775 - DNA, 15 bp, Homo sapiens
atcctccccatctgt

SEQ ID NO: 1839776 - DNA, 15 bp, Homo sapiens
tcctccccatctgtg

SEQ ID NO: 1839777 - DNA, 15 bp, Homo sapiens
cctccccatctgtgc

SEQ ID NO: 1839778 - DNA, 15 bp, Homo sapiens
ctccccatctgtgcc

SEQ ID NO: 1839779 - DNA, 15 bp, Homo sapiens
tccccatctgtgccc

SEQ ID NO: 1839780 - DNA, 15 bp, Homo sapiens
ccccatctgtgccct

SEQ ID NO: 1839781 - DNA, 15 bp, Homo sapiens
cccatctgtgccctg

SEQ ID NO: 1839782 - DNA, 15 bp, Homo sapiens
ccatctgtgccctga

SEQ ID NO: 1839783 - DNA, 15 bp, Homo sapiens
catctgtgccctgaa

SEQ ID NO: 1839784 - DNA, 15 bp, Homo sapiens
atctgtgccctgaat

SEQ ID NO: 1839785 - DNA, 15 bp, Homo sapiens
tctgtgccctgaatt

SEQ ID NO: 1839786 - DNA, 15 bp, Homo sapiens
ctgtgccctgaattg

SEQ ID NO: 1839787 - DNA, 15 bp, Homo sapiens
tgtgccctgaattgg

SEQ ID NO: 1839788 - DNA, 15 bp, Homo sapiens
gtgccctgaattggc

SEQ ID NO: 1839789 - DNA, 15 bp, Homo sapiens
tgccctgaattggcc

SEQ ID NO: 1839790 - DNA, 15 bp, Homo sapiens
gccctgaattggccg

SEQ ID NO: 1839791 - DNA, 15 bp, Homo sapiens
ccctgaattggccgc

SEQ ID NO: 1839792 - DNA, 15 bp, Homo sapiens
cctgaattggccgcc

SEQ ID NO: 1839793 - DNA, 15 bp, Homo sapiens
ctgaattggccgcca

SEQ ID NO: 1839794 - DNA, 15 bp, Homo sapiens
tgaattggccgccac

SEQ ID NO: 1839795 - DNA, 15 bp, Homo sapiens
gaattggccgccaca

SEQ ID NO: 1839796 - DNA, 15 bp, Homo sapiens
aattggccgccacag

SEQ ID NO: 1839797 - DNA, 15 bp, Homo sapiens
attggccgccacagg

SEQ ID NO: 1839798 - DNA, 15 bp, Homo sapiens
ttggccgccacaggg

SEQ ID NO: 1839799 - DNA, 15 bp, Homo sapiens
tggccgccacaggga

SEQ ID NO: 1839800 - DNA, 15 bp, Homo sapiens
ggccgccacagggac

SEQ ID NO: 1839801 - DNA, 15 bp, Homo sapiens
gccgccacagggact

SEQ ID NO: 1839802 - DNA, 15 bp, Homo sapiens
ccgccacagggactt

SEQ ID NO: 1839803 - DNA, 15 bp, Homo sapiens
cgccacagggacttg

SEQ ID NO: 1839804 - DNA, 15 bp, Homo sapiens
gccacagggacttga

SEQ ID NO: 1839805 - DNA, 15 bp, Homo sapiens
ccacagggacttgag

SEQ ID NO: 1839806 - DNA, 15 bp, Homo sapiens
cacagggacttgagg

SEQ ID NO: 1839807 - DNA, 15 bp, Homo sapiens
acagggacttgaggg

SEQ ID NO: 1839808 - DNA, 15 bp, Homo sapiens
agggacttgaggggg

SEQ ID NO: 1839809 - DNA, 15 bp, Homo sapiens
gggacttgagggggc

SEQ ID NO: 1839810 - DNA, 15 bp, Homo sapiens
ggacttgagggggct

SEQ ID NO: 1839811 - DNA, 15 bp, Homo sapiens
gacttgagggggctg

SEQ ID NO: 1839812 - DNA, 15 bp, Homo sapiens
acttgagggggctga

SEQ ID NO: 1839813 - DNA, 15 bp, Homo sapiens
cttgagggggctgag

SEQ ID NO: 1839814 - DNA, 15 bp, Homo sapiens
ttgagggggctgaga

SEQ ID NO: 1839815 - DNA, 15 bp, Homo sapiens
tgagggggctgagaa

SEQ ID NO: 1839816 - DNA, 15 bp, Homo sapiens
gagggggctgagaag

SEQ ID NO: 1839817 - DNA, 15 bp, Homo sapiens
agggggctgagaaga

SEQ ID NO: 1839818 - DNA, 15 bp, Homo sapiens
gggggctgagaagaa

SEQ ID NO: 1839819 - DNA, 15 bp, Homo sapiens
ggggctgagaagaat

SEQ ID NO: 1839820 - DNA, 15 bp, Homo sapiens
gggctgagaagaatg

SEQ ID NO: 1839821 - DNA, 15 bp, Homo sapiens
ggctgagaagaatgg

SEQ ID NO: 1839822 - DNA, 15 bp, Homo sapiens
gctgagaagaatggg

SEQ ID NO: 1839823 - DNA, 15 bp, Homo sapiens
ctgagaagaatgggg

SEQ ID NO: 1839824 - DNA, 15 bp, Homo sapiens
tgagaagaatgggga

SEQ ID NO: 1839825 - DNA, 15 bp, Homo sapiens
gagaagaatggggac

SEQ ID NO: 1839826 - DNA, 15 bp, Homo sapiens
agaagaatggggaca

SEQ ID NO: 1839827 - DNA, 15 bp, Homo sapiens
gaagaatggggacaa

SEQ ID NO: 1839828 - DNA, 15 bp, Homo sapiens
aagaatggggacaat

SEQ ID NO: 1839829 - DNA, 15 bp, Homo sapiens
agaatggggacaatg

SEQ ID NO: 1839830 - DNA, 15 bp, Homo sapiens
gaatggggacaatgg

SEQ ID NO: 1839831 - DNA, 15 bp, Homo sapiens
aatggggacaatgga

SEQ ID NO: 1839832 - DNA, 15 bp, Homo sapiens
atggggacaatggag

SEQ ID NO: 1839833 - DNA, 15 bp, Homo sapiens
tggggacaatggagg

SEQ ID NO: 1839834 - DNA, 15 bp, Homo sapiens
ggggacaatggagga

SEQ ID NO: 1839835 - DNA, 15 bp, Homo sapiens
gggacaatggaggaa

SEQ ID NO: 1839836 - DNA, 15 bp, Homo sapiens
ggacaatggaggaag

SEQ ID NO: 1839837 - DNA, 15 bp, Homo sapiens
gacaatggaggaaga

SEQ ID NO: 1839838 - DNA, 15 bp, Homo sapiens
acaatggaggaagaa

SEQ ID NO: 1839839 - DNA, 15 bp, Homo sapiens
caatggaggaagaag

SEQ ID NO: 1839840 - DNA, 15 bp, Homo sapiens
aatggaggaagaagc

SEQ ID NO: 1839841 - DNA, 15 bp, Homo sapiens
atggaggaagaagca

SEQ ID NO: 1839842 - DNA, 15 bp, Homo sapiens
tggaggaagaagcat

SEQ ID NO: 1839843 - DNA, 15 bp, Homo sapiens
ggaggaagaagcatg

SEQ ID NO: 1839844 - DNA, 15 bp, Homo sapiens
gaggaagaagcatgt

SEQ ID NO: 1839845 - DNA, 15 bp, Homo sapiens
aggaagaagcatgtc

SEQ ID NO: 1839846 - DNA, 15 bp, Homo sapiens
ggaagaagcatgtct

SEQ ID NO: 1839847 - DNA, 15 bp, Homo sapiens
gaagaagcatgtctt

SEQ ID NO: 1839848 - DNA, 15 bp, Homo sapiens
aagaagcatgtcttt

SEQ ID NO: 1839849 - DNA, 15 bp, Homo sapiens
agaagcatgtctttc

SEQ ID NO: 1839850 - DNA, 15 bp, Homo sapiens
gaagcatgtctttct

SEQ ID NO: 1839851 - DNA, 15 bp, Homo sapiens
aagcatgtctttcta

SEQ ID NO: 1839852 - DNA, 15 bp, Homo sapiens
agcatgtctttctag

SEQ ID NO: 1839853 - DNA, 15 bp, Homo sapiens
gcatgtctttctagg

SEQ ID NO: 1839854 - DNA, 15 bp, Homo sapiens
catgtctttctagga

SEQ ID NO: 1839855 - DNA, 15 bp, Homo sapiens
atgtctttctaggag

SEQ ID NO: 1839856 - DNA, 15 bp, Homo sapiens
tgtctttctaggagt

SEQ ID NO: 1839857 - DNA, 15 bp, Homo sapiens
gtctttctaggagtt

SEQ ID NO: 1839858 - DNA, 15 bp, Homo sapiens
tctttctaggagttc

SEQ ID NO: 1839859 - DNA, 15 bp, Homo sapiens
ctttctaggagttca

SEQ ID NO: 1839860 - DNA, 15 bp, Homo sapiens
tttctaggagttcat

SEQ ID NO: 1839861 - DNA, 15 bp, Homo sapiens
ttctaggagttcata

SEQ ID NO: 1839862 - DNA, 15 bp, Homo sapiens
tctaggagttcatag

SEQ ID NO: 1839863 - DNA, 15 bp, Homo sapiens
ctaggagttcatagc

SEQ ID NO: 1839864 - DNA, 15 bp, Homo sapiens
taggagttcatagcc

SEQ ID NO: 1839865 - DNA, 15 bp, Homo sapiens
aggagttcatagcca

SEQ ID NO: 1839866 - DNA, 15 bp, Homo sapiens
ggagttcatagccaa

SEQ ID NO: 1839867 - DNA, 15 bp, Homo sapiens
gagttcatagccaaa

SEQ ID NO: 1839868 - DNA, 15 bp, Homo sapiens
agttcatagccaaag

SEQ ID NO: 1839869 - DNA, 15 bp, Homo sapiens
gttcatagccaaaga

SEQ ID NO: 1839870 - DNA, 15 bp, Homo sapiens
ttcatagccaaagac

SEQ ID NO: 1839871 - DNA, 15 bp, Homo sapiens
tcatagccaaagaca

SEQ ID NO: 1839872 - DNA, 15 bp, Homo sapiens
catagccaaagacac

SEQ ID NO: 1839873 - DNA, 15 bp, Homo sapiens
atagccaaagacacg

SEQ ID NO: 1839874 - DNA, 15 bp, Homo sapiens
tagccaaagacacgg

SEQ ID NO: 1839875 - DNA, 15 bp, Homo sapiens
agccaaagacacgga

SEQ ID NO: 1839876 - DNA, 15 bp, Homo sapiens
gccaaagacacggat

SEQ ID NO: 1839877 - DNA, 15 bp, Homo sapiens
ccaaagacacggatg

SEQ ID NO: 1839878 - DNA, 15 bp, Homo sapiens
caaagacacggatgc

SEQ ID NO: 1839879 - DNA, 15 bp, Homo sapiens
aaagacacggatgca

SEQ ID NO: 1839880 - DNA, 15 bp, Homo sapiens
aagacacggatgcaa

SEQ ID NO: 1839881 - DNA, 15 bp, Homo sapiens
agacacggatgcaag

SEQ ID NO: 1839882 - DNA, 15 bp, Homo sapiens
gacacggatgcaaga

SEQ ID NO: 1839883 - DNA, 15 bp, Homo sapiens
acacggatgcaagag

SEQ ID NO: 1839884 - DNA, 15 bp, Homo sapiens
cacggatgcaagaga

SEQ ID NO: 1839885 - DNA, 15 bp, Homo sapiens
acggatgcaagagaa

SEQ ID NO: 1839886 - DNA, 15 bp, Homo sapiens
cggatgcaagagaag

SEQ ID NO: 1839887 - DNA, 15 bp, Homo sapiens
ggatgcaagagaaga

SEQ ID NO: 1839888 - DNA, 15 bp, Homo sapiens
gatgcaagagaagac

SEQ ID NO: 1839889 - DNA, 15 bp, Homo sapiens
atgcaagagaagaca

SEQ ID NO: 1839890 - DNA, 15 bp, Homo sapiens
tgcaagagaagacag

SEQ ID NO: 1839891 - DNA, 15 bp, Homo sapiens
gcaagagaagacagc

SEQ ID NO: 1839892 - DNA, 15 bp, Homo sapiens
caagagaagacagct

SEQ ID NO: 1839893 - DNA, 15 bp, Homo sapiens
aagagaagacagctg

SEQ ID NO: 1839894 - DNA, 15 bp, Homo sapiens
agagaagacagctgg

SEQ ID NO: 1839895 - DNA, 15 bp, Homo sapiens
gagaagacagctgga

SEQ ID NO: 1839896 - DNA, 15 bp, Homo sapiens
agaagacagctggat

SEQ ID NO: 1839897 - DNA, 15 bp, Homo sapiens
gaagacagctggatc

SEQ ID NO: 1839898 - DNA, 15 bp, Homo sapiens
aagacagctggatct

SEQ ID NO: 1839899 - DNA, 15 bp, Homo sapiens
agacagctggatcta

SEQ ID NO: 1839900 - DNA, 15 bp, Homo sapiens
gacagctggatctac

SEQ ID NO: 1839901 - DNA, 15 bp, Homo sapiens
acagctggatctacc

SEQ ID NO: 1839902 - DNA, 15 bp, Homo sapiens
cagctggatctacct

SEQ ID NO: 1839903 - DNA, 15 bp, Homo sapiens
agctggatctacctc

SEQ ID NO: 1839904 - DNA, 15 bp, Homo sapiens
gctggatctacctca

SEQ ID NO: 1839905 - DNA, 15 bp, Homo sapiens
ctggatctacctcag

SEQ ID NO: 1839906 - DNA, 15 bp, Homo sapiens
tggatctacctcagg

SEQ ID NO: 1839907 - DNA, 15 bp, Homo sapiens
ggatctacctcaggg

SEQ ID NO: 1839908 - DNA, 15 bp, Homo sapiens
gatctacctcagggc

SEQ ID NO: 1839909 - DNA, 15 bp, Homo sapiens
atctacctcagggcc

SEQ ID NO: 1839910 - DNA, 15 bp, Homo sapiens
tctacctcagggcct

SEQ ID NO: 1839911 - DNA, 15 bp, Homo sapiens
ctacctcagggcctt

SEQ ID NO: 1839912 - DNA, 15 bp, Homo sapiens
tacctcagggccttt

SEQ ID NO: 1839913 - DNA, 15 bp, Homo sapiens
acctcagggcctttg

SEQ ID NO: 1839914 - DNA, 15 bp, Homo sapiens
cctcagggcctttgc

SEQ ID NO: 1839915 - DNA, 15 bp, Homo sapiens
ctcagggcctttgca

SEQ ID NO: 1839916 - DNA, 15 bp, Homo sapiens
tcagggcctttgcac

SEQ ID NO: 1839917 - DNA, 15 bp, Homo sapiens
cagggcctttgcact

SEQ ID NO: 1839918 - DNA, 15 bp, Homo sapiens
agggcctttgcactg

SEQ ID NO: 1839919 - DNA, 15 bp, Homo sapiens
gggcctttgcactgg

SEQ ID NO: 1839920 - DNA, 15 bp, Homo sapiens
ggcctttgcactggc

SEQ ID NO: 1839921 - DNA, 15 bp, Homo sapiens
gcctttgcactggct

SEQ ID NO: 1839922 - DNA, 15 bp, Homo sapiens
cctttgcactggctg

SEQ ID NO: 1839923 - DNA, 15 bp, Homo sapiens
ctttgcactggctgt

SEQ ID NO: 1839924 - DNA, 15 bp, Homo sapiens
tttgcactggctgtt

SEQ ID NO: 1839925 - DNA, 15 bp, Homo sapiens
ttgcactggctgttc

SEQ ID NO: 1839926 - DNA, 15 bp, Homo sapiens
tgcactggctgttcc

SEQ ID NO: 1839927 - DNA, 15 bp, Homo sapiens
gcactggctgttcca

SEQ ID NO: 1839928 - DNA, 15 bp, Homo sapiens
cactggctgttccag

SEQ ID NO: 1839929 - DNA, 15 bp, Homo sapiens
actggctgttccagc

SEQ ID NO: 1839930 - DNA, 15 bp, Homo sapiens
ctggctgttccagcc

SEQ ID NO: 1839931 - DNA, 15 bp, Homo sapiens
tggctgttccagcca

SEQ ID NO: 1839932 - DNA, 15 bp, Homo sapiens
ggctgttccagccac

SEQ ID NO: 1839933 - DNA, 15 bp, Homo sapiens
gctgttccagccact

SEQ ID NO: 1839934 - DNA, 15 bp, Homo sapiens
ctgttccagccactt

SEQ ID NO: 1839935 - DNA, 15 bp, Homo sapiens
tgttccagccacttg

SEQ ID NO: 1839936 - DNA, 15 bp, Homo sapiens
gttccagccacttgg

SEQ ID NO: 1839937 - DNA, 15 bp, Homo sapiens
ttccagccacttgga

SEQ ID NO: 1839938 - DNA, 15 bp, Homo sapiens
tccagccacttggaa

SEQ ID NO: 1839939 - DNA, 15 bp, Homo sapiens
ccagccacttggaat

SEQ ID NO: 1839940 - DNA, 15 bp, Homo sapiens
cagccacttggaatg

SEQ ID NO: 1839941 - DNA, 15 bp, Homo sapiens
agccacttggaatgc

SEQ ID NO: 1839942 - DNA, 15 bp, Homo sapiens
gccacttggaatgca

SEQ ID NO: 1839943 - DNA, 15 bp, Homo sapiens
ccacttggaatgcaa

SEQ ID NO: 1839944 - DNA, 15 bp, Homo sapiens
cacttggaatgcaat

SEQ ID NO: 1839945 - DNA, 15 bp, Homo sapiens
acttggaatgcaatt

SEQ ID NO: 1839946 - DNA, 15 bp, Homo sapiens
cttggaatgcaattc

SEQ ID NO: 1839947 - DNA, 15 bp, Homo sapiens
ttggaatgcaattcc

SEQ ID NO: 1839948 - DNA, 15 bp, Homo sapiens
tggaatgcaattcct

SEQ ID NO: 1839949 - DNA, 15 bp, Homo sapiens
ggaatgcaattcctg

SEQ ID NO: 1839950 - DNA, 15 bp, Homo sapiens
gaatgcaattcctgc

SEQ ID NO: 1839951 - DNA, 15 bp, Homo sapiens
aatgcaattcctgca

SEQ ID NO: 1839952 - DNA, 15 bp, Homo sapiens
atgcaattcctgcaa

SEQ ID NO: 1839953 - DNA, 15 bp, Homo sapiens
tgcaattcctgcaaa

SEQ ID NO: 1839954 - DNA, 15 bp, Homo sapiens
gcaattcctgcaaac

SEQ ID NO: 1839955 - DNA, 15 bp, Homo sapiens
caattcctgcaaact

SEQ ID NO: 1839956 - DNA, 15 bp, Homo sapiens
aattcctgcaaactc

SEQ ID NO: 1839957 - DNA, 15 bp, Homo sapiens
attcctgcaaactct

SEQ ID NO: 1839958 - DNA, 15 bp, Homo sapiens
ttcctgcaaactctc

SEQ ID NO: 1839959 - DNA, 15 bp, Homo sapiens
tcctgcaaactctct

SEQ ID NO: 1839960 - DNA, 15 bp, Homo sapiens
cctgcaaactctctc

SEQ ID NO: 1839961 - DNA, 15 bp, Homo sapiens
ctgcaaactctctcc

SEQ ID NO: 1839962 - DNA, 15 bp, Homo sapiens
tgcaaactctctccc

SEQ ID NO: 1839963 - DNA, 15 bp, Homo sapiens
gcaaactctctcccc

SEQ ID NO: 1839964 - DNA, 15 bp, Homo sapiens
caaactctctccccc

SEQ ID NO: 1839965 - DNA, 15 bp, Homo sapiens
aaactctctccccca

SEQ ID NO: 1839966 - DNA, 15 bp, Homo sapiens
aactctctcccccac

SEQ ID NO: 1839967 - DNA, 15 bp, Homo sapiens
actctctcccccact

SEQ ID NO: 1839968 - DNA, 15 bp, Homo sapiens
ctctctcccccactc

SEQ ID NO: 1839969 - DNA, 15 bp, Homo sapiens
tctctcccccactcc

SEQ ID NO: 1839970 - DNA, 15 bp, Homo sapiens
ctctcccccactccc

SEQ ID NO: 1839971 - DNA, 15 bp, Homo sapiens
tctcccccactcccc

SEQ ID NO: 1839972 - DNA, 15 bp, Homo sapiens
ctcccccactcccct

SEQ ID NO: 1839973 - DNA, 15 bp, Homo sapiens
tcccccactcccctt

SEQ ID NO: 1839974 - DNA, 15 bp, Homo sapiens
cccccactccccttc

SEQ ID NO: 1839975 - DNA, 15 bp, Homo sapiens
ccccactccccttcc

SEQ ID NO: 1839976 - DNA, 15 bp, Homo sapiens
cccactccccttccc

SEQ ID NO: 1839977 - DNA, 15 bp, Homo sapiens
ccactccccttccct

SEQ ID NO: 1839978 - DNA, 15 bp, Homo sapiens
cactccccttccctt

SEQ ID NO: 1839979 - DNA, 15 bp, Homo sapiens
actccccttcccttt

SEQ ID NO: 1839980 - DNA, 15 bp, Homo sapiens
ctccccttccctttt

SEQ ID NO: 1839981 - DNA, 15 bp, Homo sapiens
tccccttcccttttt

SEQ ID NO: 1839982 - DNA, 15 bp, Homo sapiens
ccccttccctttttc

SEQ ID NO: 1839983 - DNA, 15 bp, Homo sapiens
cccttccctttttct

SEQ ID NO: 1839984 - DNA, 15 bp, Homo sapiens
ccttccctttttctt

SEQ ID NO: 1839985 - DNA, 15 bp, Homo sapiens
cttccctttttcttt

SEQ ID NO: 1839986 - DNA, 15 bp, Homo sapiens
ttccctttttctttt

SEQ ID NO: 1839987 - DNA, 15 bp, Homo sapiens
tccctttttcttttt

SEQ ID NO: 1839988 - DNA, 15 bp, Homo sapiens
ccctttttctttttt

SEQ ID NO: 1839989 - DNA, 15 bp, Homo sapiens
cctttttcttttttt

SEQ ID NO: 1839990 - DNA, 15 bp, Homo sapiens
ttttttcttttttga

SEQ ID NO: 1839991 - DNA, 15 bp, Homo sapiens
tttcttttttgagat

SEQ ID NO: 1839992 - DNA, 15 bp, Homo sapiens
ttcttttttgagatg

SEQ ID NO: 1839993 - DNA, 15 bp, Homo sapiens
tcttttttgagatgg

SEQ ID NO: 1839994 - DNA, 15 bp, Homo sapiens
cttttttgagatgga

SEQ ID NO: 1839995 - DNA, 15 bp, Homo sapiens
gcagtgcaatggcac

SEQ ID NO: 1839996 - DNA, 15 bp, Homo sapiens
cagtgcaatggcaca

SEQ ID NO: 1839997 - DNA, 15 bp, Homo sapiens
aggtgcccgccaccg

SEQ ID NO: 1839998 - DNA, 15 bp, Homo sapiens
ggtgcccgccaccgt

SEQ ID NO: 1839999 - DNA, 15 bp, Homo sapiens
gtgcccgccaccgtg

SEQ ID NO: 1840000 - DNA, 15 bp, Homo sapiens
tgcccgccaccgtgc

SEQ ID NO: 1840001 - DNA, 15 bp, Homo sapiens
gcccgccaccgtgcc

SEQ ID NO: 1840002 - DNA, 15 bp, Homo sapiens
cccgccaccgtgccc

SEQ ID NO: 1840003 - DNA, 15 bp, Homo sapiens
ccgccaccgtgccca

SEQ ID NO: 1840004 - DNA, 15 bp, Homo sapiens
cgccaccgtgcccag

SEQ ID NO: 1840005 - DNA, 15 bp, Homo sapiens
gccaccgtgcccagc

SEQ ID NO: 1840006 - DNA, 15 bp, Homo sapiens
ccaccgtgcccagct

SEQ ID NO: 1840007 - DNA, 15 bp, Homo sapiens
caccgtgcccagcta

SEQ ID NO: 1840008 - DNA, 15 bp, Homo sapiens
tttagtagagacaac

SEQ ID NO: 1840009 - DNA, 15 bp, Homo sapiens
ttagtagagacaacg

SEQ ID NO: 1840010 - DNA, 15 bp, Homo sapiens
tagtagagacaacgt

SEQ ID NO: 1840011 - DNA, 15 bp, Homo sapiens
agtagagacaacgtt

SEQ ID NO: 1840012 - DNA, 15 bp, Homo sapiens
gtagagacaacgttt

SEQ ID NO: 1840013 - DNA, 15 bp, Homo sapiens
tagagacaacgtttc

SEQ ID NO: 1840014 - DNA, 15 bp, Homo sapiens
agagacaacgtttca

SEQ ID NO: 1840015 - DNA, 15 bp, Homo sapiens
gagacaacgtttcac

SEQ ID NO: 1840016 - DNA, 15 bp, Homo sapiens
agacaacgtttcacc

SEQ ID NO: 1840017 - DNA, 15 bp, Homo sapiens
gacaacgtttcacca

SEQ ID NO: 1840018 - DNA, 15 bp, Homo sapiens
acaacgtttcaccat

SEQ ID NO: 1840019 - DNA, 15 bp, Homo sapiens
caacgtttcaccatg

SEQ ID NO: 1840020 - DNA, 15 bp, Homo sapiens
aacgtttcaccatgt

SEQ ID NO: 1840021 - DNA, 15 bp, Homo sapiens
acgtttcaccatgtt

SEQ ID NO: 1840022 - DNA, 15 bp, Homo sapiens
ggccaggctcgtctt

SEQ ID NO: 1840023 - DNA, 15 bp, Homo sapiens
gccaggctcgtcttg

SEQ ID NO: 1840024 - DNA, 15 bp, Homo sapiens
ccaggctcgtcttga

SEQ ID NO: 1840025 - DNA, 15 bp, Homo sapiens
caggctcgtcttgaa

SEQ ID NO: 1840026 - DNA, 15 bp, Homo sapiens
aggctcgtcttgaac

SEQ ID NO: 1840027 - DNA, 15 bp, Homo sapiens
ggctcgtcttgaact

SEQ ID NO: 1840028 - DNA, 15 bp, Homo sapiens
gctcgtcttgaactc

SEQ ID NO: 1840029 - DNA, 15 bp, Homo sapiens
ctcgtcttgaactcc

SEQ ID NO: 1840030 - DNA, 15 bp, Homo sapiens
tcgtcttgaactcct

SEQ ID NO: 1840031 - DNA, 15 bp, Homo sapiens
cgtcttgaactcctg

SEQ ID NO: 1840032 - DNA, 15 bp, Homo sapiens
aactcctgacctcac

SEQ ID NO: 1840033 - DNA, 15 bp, Homo sapiens
actcctgacctcacg

SEQ ID NO: 1840034 - DNA, 15 bp, Homo sapiens
ctcctgacctcacgt

SEQ ID NO: 1840035 - DNA, 15 bp, Homo sapiens
tcctgacctcacgtg

SEQ ID NO: 1840036 - DNA, 15 bp, Homo sapiens
cctgacctcacgtga

SEQ ID NO: 1840037 - DNA, 15 bp, Homo sapiens
ctgacctcacgtgat

SEQ ID NO: 1840038 - DNA, 15 bp, Homo sapiens
tgacctcacgtgatc

SEQ ID NO: 1840039 - DNA, 15 bp, Homo sapiens
gacctcacgtgatct

SEQ ID NO: 1840040 - DNA, 15 bp, Homo sapiens
acctcacgtgatctg

SEQ ID NO: 1840041 - DNA, 15 bp, Homo sapiens
cctcacgtgatctgc

SEQ ID NO: 1840042 - DNA, 15 bp, Homo sapiens
ctcacgtgatctgcc

SEQ ID NO: 1840043 - DNA, 15 bp, Homo sapiens
tcacgtgatctgcct

SEQ ID NO: 1840044 - DNA, 15 bp, Homo sapiens
cacgtgatctgcctg

SEQ ID NO: 1840045 - DNA, 15 bp, Homo sapiens
acgtgatctgcctgc

SEQ ID NO: 1840046 - DNA, 15 bp, Homo sapiens
caccacgcccagccc

SEQ ID NO: 1840047 - DNA, 15 bp, Homo sapiens
accacgcccagccct

SEQ ID NO: 1840048 - DNA, 15 bp, Homo sapiens
ccacgcccagccctc

SEQ ID NO: 1840049 - DNA, 15 bp, Homo sapiens
cacgcccagccctcc

SEQ ID NO: 1840050 - DNA, 15 bp, Homo sapiens
acgcccagccctccc

SEQ ID NO: 1840051 - DNA, 15 bp, Homo sapiens
cgcccagccctcccc

SEQ ID NO: 1840052 - DNA, 15 bp, Homo sapiens
gcccagccctcccct

SEQ ID NO: 1840053 - DNA, 15 bp, Homo sapiens
cccagccctcccctt

SEQ ID NO: 1840054 - DNA, 15 bp, Homo sapiens
ccagccctccccttc

SEQ ID NO: 1840055 - DNA, 15 bp, Homo sapiens
cagccctccccttcc

SEQ ID NO: 1840056 - DNA, 15 bp, Homo sapiens
agccctccccttccc

SEQ ID NO: 1840057 - DNA, 15 bp, Homo sapiens
gccctccccttccct

SEQ ID NO: 1840058 - DNA, 15 bp, Homo sapiens
ccctccccttccctt

SEQ ID NO: 1840059 - DNA, 15 bp, Homo sapiens
cctccccttcccttt

SEQ ID NO: 1840060 - DNA, 15 bp, Homo sapiens
ctccccttccctttc

SEQ ID NO: 1840061 - DNA, 15 bp, Homo sapiens
tccccttccctttct

SEQ ID NO: 1840062 - DNA, 15 bp, Homo sapiens
ccccttccctttcta

SEQ ID NO: 1840063 - DNA, 15 bp, Homo sapiens
cccttccctttctaa

SEQ ID NO: 1840064 - DNA, 15 bp, Homo sapiens
ccttccctttctaat

SEQ ID NO: 1840065 - DNA, 15 bp, Homo sapiens
cttccctttctaatc

SEQ ID NO: 1840066 - DNA, 15 bp, Homo sapiens
ttccctttctaatct

SEQ ID NO: 1840067 - DNA, 15 bp, Homo sapiens
tccctttctaatctt

SEQ ID NO: 1840068 - DNA, 15 bp, Homo sapiens
ccctttctaatcttt

SEQ ID NO: 1840069 - DNA, 15 bp, Homo sapiens
cctttctaatctttg

SEQ ID NO: 1840070 - DNA, 15 bp, Homo sapiens
ctttctaatctttgc

SEQ ID NO: 1840071 - DNA, 15 bp, Homo sapiens
tttctaatctttgct

SEQ ID NO: 1840072 - DNA, 15 bp, Homo sapiens
ttctaatctttgctt

SEQ ID NO: 1840073 - DNA, 15 bp, Homo sapiens
tctaatctttgcttt

SEQ ID NO: 1840074 - DNA, 15 bp, Homo sapiens
ctaatctttgcttta

SEQ ID NO: 1840075 - DNA, 15 bp, Homo sapiens
taatctttgctttaa

SEQ ID NO: 1840076 - DNA, 15 bp, Homo sapiens
aatctttgctttaat

SEQ ID NO: 1840077 - DNA, 15 bp, Homo sapiens
atctttgctttaata

SEQ ID NO: 1840078 - DNA, 15 bp, Homo sapiens
tctttgctttaatac

SEQ ID NO: 1840079 - DNA, 15 bp, Homo sapiens
ctttgctttaatacc

SEQ ID NO: 1840080 - DNA, 15 bp, Homo sapiens
tttgctttaatacca

SEQ ID NO: 1840081 - DNA, 15 bp, Homo sapiens
ttgctttaataccac

SEQ ID NO: 1840082 - DNA, 15 bp, Homo sapiens
tgctttaataccacc

SEQ ID NO: 1840083 - DNA, 15 bp, Homo sapiens
gctttaataccacct

SEQ ID NO: 1840084 - DNA, 15 bp, Homo sapiens
ctttaataccacctc

SEQ ID NO: 1840085 - DNA, 15 bp, Homo sapiens
tttaataccacctcc

SEQ ID NO: 1840086 - DNA, 15 bp, Homo sapiens
ttaataccacctcct

SEQ ID NO: 1840087 - DNA, 15 bp, Homo sapiens
taataccacctcctc

SEQ ID NO: 1840088 - DNA, 15 bp, Homo sapiens
aataccacctcctct

SEQ ID NO: 1840089 - DNA, 15 bp, Homo sapiens
ataccacctcctctg

SEQ ID NO: 1840090 - DNA, 15 bp, Homo sapiens
taccacctcctctgg

SEQ ID NO: 1840091 - DNA, 15 bp, Homo sapiens
accacctcctctggg

SEQ ID NO: 1840092 - DNA, 15 bp, Homo sapiens
ccacctcctctggga

SEQ ID NO: 1840093 - DNA, 15 bp, Homo sapiens
cacctcctctgggaa

SEQ ID NO: 1840094 - DNA, 15 bp, Homo sapiens
acctcctctgggaag

SEQ ID NO: 1840095 - DNA, 15 bp, Homo sapiens
cctcctctgggaagc

SEQ ID NO: 1840096 - DNA, 15 bp, Homo sapiens
ctcctctgggaagcc

SEQ ID NO: 1840097 - DNA, 15 bp, Homo sapiens
tcctctgggaagcct

SEQ ID NO: 1840098 - DNA, 15 bp, Homo sapiens
cctctgggaagcctt

SEQ ID NO: 1840099 - DNA, 15 bp, Homo sapiens
ctctgggaagccttc

SEQ ID NO: 1840100 - DNA, 15 bp, Homo sapiens
tctgggaagccttcc

SEQ ID NO: 1840101 - DNA, 15 bp, Homo sapiens
ctgggaagccttccc

SEQ ID NO: 1840102 - DNA, 15 bp, Homo sapiens
tgggaagccttccct

SEQ ID NO: 1840103 - DNA, 15 bp, Homo sapiens
gggaagccttccctg

SEQ ID NO: 1840104 - DNA, 15 bp, Homo sapiens
ggaagccttccctgg

SEQ ID NO: 1840105 - DNA, 15 bp, Homo sapiens
gaagccttccctggc

SEQ ID NO: 1840106 - DNA, 15 bp, Homo sapiens
aagccttccctggcc

SEQ ID NO: 1840107 - DNA, 15 bp, Homo sapiens
agccttccctggcca

SEQ ID NO: 1840108 - DNA, 15 bp, Homo sapiens
gccttccctggccac

SEQ ID NO: 1840109 - DNA, 15 bp, Homo sapiens
ccttccctggccacc

SEQ ID NO: 1840110 - DNA, 15 bp, Homo sapiens
cttccctggccaccc

SEQ ID NO: 1840111 - DNA, 15 bp, Homo sapiens
ttccctggccaccct

SEQ ID NO: 1840112 - DNA, 15 bp, Homo sapiens
tccctggccaccctc

SEQ ID NO: 1840113 - DNA, 15 bp, Homo sapiens
ccctggccaccctct

SEQ ID NO: 1840114 - DNA, 15 bp, Homo sapiens
cctggccaccctctt

SEQ ID NO: 1840115 - DNA, 15 bp, Homo sapiens
ctggccaccctcttt

SEQ ID NO: 1840116 - DNA, 15 bp, Homo sapiens
tggccaccctcttta

SEQ ID NO: 1840117 - DNA, 15 bp, Homo sapiens
ggccaccctctttaa

SEQ ID NO: 1840118 - DNA, 15 bp, Homo sapiens
gccaccctctttaaa

SEQ ID NO: 1840119 - DNA, 15 bp, Homo sapiens
ccaccctctttaaaa

SEQ ID NO: 1840120 - DNA, 15 bp, Homo sapiens
caccctctttaaaac

SEQ ID NO: 1840121 - DNA, 15 bp, Homo sapiens
accctctttaaaact

SEQ ID NO: 1840122 - DNA, 15 bp, Homo sapiens
ccctctttaaaactg

SEQ ID NO: 1840123 - DNA, 15 bp, Homo sapiens
cctctttaaaactgc

SEQ ID NO: 1840124 - DNA, 15 bp, Homo sapiens
ctctttaaaactgca

SEQ ID NO: 1840125 - DNA, 15 bp, Homo sapiens
tctttaaaactgcag

SEQ ID NO: 1840126 - DNA, 15 bp, Homo sapiens
ctttaaaactgcagc

SEQ ID NO: 1840127 - DNA, 15 bp, Homo sapiens
tttaaaactgcagcc

SEQ ID NO: 1840128 - DNA, 15 bp, Homo sapiens
ttaaaactgcagcca

SEQ ID NO: 1840129 - DNA, 15 bp, Homo sapiens
taaaactgcagccac

SEQ ID NO: 1840130 - DNA, 15 bp, Homo sapiens
aaaactgcagccacc

SEQ ID NO: 1840131 - DNA, 15 bp, Homo sapiens
aaactgcagccacct

SEQ ID NO: 1840132 - DNA, 15 bp, Homo sapiens
aactgcagccacctc

SEQ ID NO: 1840133 - DNA, 15 bp, Homo sapiens
actgcagccacctcc

SEQ ID NO: 1840134 - DNA, 15 bp, Homo sapiens
ctgcagccacctccc

SEQ ID NO: 1840135 - DNA, 15 bp, Homo sapiens
tgcagccacctcccc

SEQ ID NO: 1840136 - DNA, 15 bp, Homo sapiens
gcagccacctcccct

SEQ ID NO: 1840137 - DNA, 15 bp, Homo sapiens
cagccacctcccctg

SEQ ID NO: 1840138 - DNA, 15 bp, Homo sapiens
agccacctcccctgc

SEQ ID NO: 1840139 - DNA, 15 bp, Homo sapiens
gccacctcccctgcc

SEQ ID NO: 1840140 - DNA, 15 bp, Homo sapiens
ccacctcccctgccc

SEQ ID NO: 1840141 - DNA, 15 bp, Homo sapiens
cacctcccctgccct

SEQ ID NO: 1840142 - DNA, 15 bp, Homo sapiens
acctcccctgccctg

SEQ ID NO: 1840143 - DNA, 15 bp, Homo sapiens
cctcccctgccctga

SEQ ID NO: 1840144 - DNA, 15 bp, Homo sapiens
ctcccctgccctgaa

SEQ ID NO: 1840145 - DNA, 15 bp, Homo sapiens
tcccctgccctgaat

SEQ ID NO: 1840146 - DNA, 15 bp, Homo sapiens
cccctgccctgaatg

SEQ ID NO: 1840147 - DNA, 15 bp, Homo sapiens
ccctgccctgaatgc

SEQ ID NO: 1840148 - DNA, 15 bp, Homo sapiens
cctgccctgaatgct

SEQ ID NO: 1840149 - DNA, 15 bp, Homo sapiens
ctgccctgaatgctt

SEQ ID NO: 1840150 - DNA, 15 bp, Homo sapiens
tgccctgaatgcttc

SEQ ID NO: 1840151 - DNA, 15 bp, Homo sapiens
gccctgaatgcttca

SEQ ID NO: 1840152 - DNA, 15 bp, Homo sapiens
ccctgaatgcttcaa

SEQ ID NO: 1840153 - DNA, 15 bp, Homo sapiens
cctgaatgcttcaat

SEQ ID NO: 1840154 - DNA, 15 bp, Homo sapiens
ctgaatgcttcaatt

SEQ ID NO: 1840155 - DNA, 15 bp, Homo sapiens
tgaatgcttcaattc

SEQ ID NO: 1840156 - DNA, 15 bp, Homo sapiens
gaatgcttcaattcc

SEQ ID NO: 1840157 - DNA, 15 bp, Homo sapiens
aatgcttcaattccc

SEQ ID NO: 1840158 - DNA, 15 bp, Homo sapiens
atgcttcaattccct

SEQ ID NO: 1840159 - DNA, 15 bp, Homo sapiens
tgcttcaattccctt

SEQ ID NO: 1840160 - DNA, 15 bp, Homo sapiens
gcttcaattcccttt

SEQ ID NO: 1840161 - DNA, 15 bp, Homo sapiens
cttcaattccctttt

SEQ ID NO: 1840162 - DNA, 15 bp, Homo sapiens
ttcaattcccttttc

SEQ ID NO: 1840163 - DNA, 15 bp, Homo sapiens
tcaattcccttttcc

SEQ ID NO: 1840164 - DNA, 15 bp, Homo sapiens
caattcccttttcct

SEQ ID NO: 1840165 - DNA, 15 bp, Homo sapiens
aattcccttttcctg

SEQ ID NO: 1840166 - DNA, 15 bp, Homo sapiens
attcccttttcctgc

SEQ ID NO: 1840167 - DNA, 15 bp, Homo sapiens
ttcccttttcctgct

SEQ ID NO: 1840168 - DNA, 15 bp, Homo sapiens
tcccttttcctgctt

SEQ ID NO: 1840169 - DNA, 15 bp, Homo sapiens
cccttttcctgcttt

SEQ ID NO: 1840170 - DNA, 15 bp, Homo sapiens
ccttttcctgctttg

SEQ ID NO: 1840171 - DNA, 15 bp, Homo sapiens
cttttcctgctttgt

SEQ ID NO: 1840172 - DNA, 15 bp, Homo sapiens
ttttcctgctttgtc

SEQ ID NO: 1840173 - DNA, 15 bp, Homo sapiens
tttcctgctttgtct

SEQ ID NO: 1840174 - DNA, 15 bp, Homo sapiens
ttcctgctttgtctg

SEQ ID NO: 1840175 - DNA, 15 bp, Homo sapiens
tcctgctttgtctgt

SEQ ID NO: 1840176 - DNA, 15 bp, Homo sapiens
cctgctttgtctgtc

SEQ ID NO: 1840177 - DNA, 15 bp, Homo sapiens
ctgctttgtctgtct

SEQ ID NO: 1840178 - DNA, 15 bp, Homo sapiens
tgctttgtctgtctt

SEQ ID NO: 1840179 - DNA, 15 bp, Homo sapiens
gctttgtctgtcttt

SEQ ID NO: 1840180 - DNA, 15 bp, Homo sapiens
ctttgtctgtctttg

SEQ ID NO: 1840181 - DNA, 15 bp, Homo sapiens
tttgtctgtctttgc

SEQ ID NO: 1840182 - DNA, 15 bp, Homo sapiens
ttgtctgtctttgcg

SEQ ID NO: 1840183 - DNA, 15 bp, Homo sapiens
tgtctgtctttgcga

SEQ ID NO: 1840184 - DNA, 15 bp, Homo sapiens
gtctgtctttgcgac

SEQ ID NO: 1840185 - DNA, 15 bp, Homo sapiens
tctgtctttgcgaca

SEQ ID NO: 1840186 - DNA, 15 bp, Homo sapiens
ctgtctttgcgacac

SEQ ID NO: 1840187 - DNA, 15 bp, Homo sapiens
tgtctttgcgacaca

SEQ ID NO: 1840188 - DNA, 15 bp, Homo sapiens
gtctttgcgacacaa

SEQ ID NO: 1840189 - DNA, 15 bp, Homo sapiens
tctttgcgacacaaa

SEQ ID NO: 1840190 - DNA, 15 bp, Homo sapiens
ctttgcgacacaaaa

SEQ ID NO: 1840191 - DNA, 15 bp, Homo sapiens
tttgcgacacaaaat

SEQ ID NO: 1840192 - DNA, 15 bp, Homo sapiens
ttgcgacacaaaata

SEQ ID NO: 1840193 - DNA, 15 bp, Homo sapiens
tgcgacacaaaatac

SEQ ID NO: 1840194 - DNA, 15 bp, Homo sapiens
gcgacacaaaataca

SEQ ID NO: 1840195 - DNA, 15 bp, Homo sapiens
cgacacaaaatacac

SEQ ID NO: 1840196 - DNA, 15 bp, Homo sapiens
gacacaaaatacaca

SEQ ID NO: 1840197 - DNA, 15 bp, Homo sapiens
acacaaaatacacat

SEQ ID NO: 1840198 - DNA, 15 bp, Homo sapiens
acaaaatacacattg

SEQ ID NO: 1840199 - DNA, 15 bp, Homo sapiens
caaaatacacattgt

SEQ ID NO: 1840200 - DNA, 15 bp, Homo sapiens
aaaatacacattgtc

SEQ ID NO: 1840201 - DNA, 15 bp, Homo sapiens
aaatacacattgtca

SEQ ID NO: 1840202 - DNA, 15 bp, Homo sapiens
aatacacattgtcac

SEQ ID NO: 1840203 - DNA, 15 bp, Homo sapiens
atacacattgtcact

SEQ ID NO: 1840204 - DNA, 15 bp, Homo sapiens
tacacattgtcactt

SEQ ID NO: 1840205 - DNA, 15 bp, Homo sapiens
acacattgtcactta

SEQ ID NO: 1840206 - DNA, 15 bp, Homo sapiens
cacattgtcacttat

SEQ ID NO: 1840207 - DNA, 15 bp, Homo sapiens
acattgtcacttatt

SEQ ID NO: 1840208 - DNA, 15 bp, Homo sapiens
cattgtcacttattt

SEQ ID NO: 1840209 - DNA, 15 bp, Homo sapiens
attgtcacttattta

SEQ ID NO: 1840210 - DNA, 15 bp, Homo sapiens
ttgtcacttatttat

SEQ ID NO: 1840211 - DNA, 15 bp, Homo sapiens
tgtcacttatttatc

SEQ ID NO: 1840212 - DNA, 15 bp, Homo sapiens
gtcacttatttatct

SEQ ID NO: 1840213 - DNA, 15 bp, Homo sapiens
tcacttatttatctt

SEQ ID NO: 1840214 - DNA, 15 bp, Homo sapiens
cacttatttatcttg

SEQ ID NO: 1840215 - DNA, 15 bp, Homo sapiens
acttatttatcttgt

SEQ ID NO: 1840216 - DNA, 15 bp, Homo sapiens
cttatttatcttgtt

SEQ ID NO: 1840217 - DNA, 15 bp, Homo sapiens
ttatttatcttgttt

SEQ ID NO: 1840218 - DNA, 15 bp, Homo sapiens
tatttatcttgtttc

SEQ ID NO: 1840219 - DNA, 15 bp, Homo sapiens
atttatcttgtttcg

SEQ ID NO: 1840220 - DNA, 15 bp, Homo sapiens
tttatcttgtttcgt

SEQ ID NO: 1840221 - DNA, 15 bp, Homo sapiens
ttatcttgtttcgtg

SEQ ID NO: 1840222 - DNA, 15 bp, Homo sapiens
tatcttgtttcgtgt

SEQ ID NO: 1840223 - DNA, 15 bp, Homo sapiens
atcttgtttcgtgtt

SEQ ID NO: 1840224 - DNA, 15 bp, Homo sapiens
tcttgtttcgtgttc

SEQ ID NO: 1840225 - DNA, 15 bp, Homo sapiens
cttgtttcgtgttca

SEQ ID NO: 1840226 - DNA, 15 bp, Homo sapiens
ttgtttcgtgttcat

SEQ ID NO: 1840227 - DNA, 15 bp, Homo sapiens
tgtttcgtgttcatc

SEQ ID NO: 1840228 - DNA, 15 bp, Homo sapiens
gtttcgtgttcatct

SEQ ID NO: 1840229 - DNA, 15 bp, Homo sapiens
tttcgtgttcatctc

SEQ ID NO: 1840230 - DNA, 15 bp, Homo sapiens
ttcgtgttcatctcc

SEQ ID NO: 1840231 - DNA, 15 bp, Homo sapiens
tcgtgttcatctccc

SEQ ID NO: 1840232 - DNA, 15 bp, Homo sapiens
cgtgttcatctcccg

SEQ ID NO: 1840233 - DNA, 15 bp, Homo sapiens
gtgttcatctcccgt

SEQ ID NO: 1840234 - DNA, 15 bp, Homo sapiens
tgttcatctcccgta

SEQ ID NO: 1840235 - DNA, 15 bp, Homo sapiens
gttcatctcccgtac

SEQ ID NO: 1840236 - DNA, 15 bp, Homo sapiens
ttcatctcccgtact

SEQ ID NO: 1840237 - DNA, 15 bp, Homo sapiens
tcatctcccgtactc

SEQ ID NO: 1840238 - DNA, 15 bp, Homo sapiens
catctcccgtactca

SEQ ID NO: 1840239 - DNA, 15 bp, Homo sapiens
atctcccgtactcag

SEQ ID NO: 1840240 - DNA, 15 bp, Homo sapiens
tctcccgtactcagc

SEQ ID NO: 1840241 - DNA, 15 bp, Homo sapiens
ctcccgtactcagcg

SEQ ID NO: 1840242 - DNA, 15 bp, Homo sapiens
tcccgtactcagcgg

SEQ ID NO: 1840243 - DNA, 15 bp, Homo sapiens
cccgtactcagcggt

SEQ ID NO: 1840244 - DNA, 15 bp, Homo sapiens
ccgtactcagcggtc

SEQ ID NO: 1840245 - DNA, 15 bp, Homo sapiens
cgtactcagcggtcg

SEQ ID NO: 1840246 - DNA, 15 bp, Homo sapiens
gtactcagcggtcgg

SEQ ID NO: 1840247 - DNA, 15 bp, Homo sapiens
tactcagcggtcggc

SEQ ID NO: 1840248 - DNA, 15 bp, Homo sapiens
actcagcggtcggct

SEQ ID NO: 1840249 - DNA, 15 bp, Homo sapiens
ctcagcggtcggctc

SEQ ID NO: 1840250 - DNA, 15 bp, Homo sapiens
tcagcggtcggctcc

SEQ ID NO: 1840251 - DNA, 15 bp, Homo sapiens
cagcggtcggctcca

SEQ ID NO: 1840252 - DNA, 15 bp, Homo sapiens
agcggtcggctccac

SEQ ID NO: 1840253 - DNA, 15 bp, Homo sapiens
gcggtcggctccacg

SEQ ID NO: 1840254 - DNA, 15 bp, Homo sapiens
cggtcggctccacga

SEQ ID NO: 1840255 - DNA, 15 bp, Homo sapiens
ggtcggctccacgag

SEQ ID NO: 1840256 - DNA, 15 bp, Homo sapiens
gtcggctccacgagg

SEQ ID NO: 1840257 - DNA, 15 bp, Homo sapiens
tcggctccacgaggg

SEQ ID NO: 1840258 - DNA, 15 bp, Homo sapiens
cggctccacgagggc

SEQ ID NO: 1840259 - DNA, 15 bp, Homo sapiens
ggctccacgagggca

SEQ ID NO: 1840260 - DNA, 15 bp, Homo sapiens
gctccacgagggcaa

SEQ ID NO: 1840261 - DNA, 15 bp, Homo sapiens
ctccacgagggcaag

SEQ ID NO: 1840262 - DNA, 15 bp, Homo sapiens
tccacgagggcaagg

SEQ ID NO: 1840263 - DNA, 15 bp, Homo sapiens
ccacgagggcaagga

SEQ ID NO: 1840264 - DNA, 15 bp, Homo sapiens
cacgagggcaaggat

SEQ ID NO: 1840265 - DNA, 15 bp, Homo sapiens
acgagggcaaggatt

SEQ ID NO: 1840266 - DNA, 15 bp, Homo sapiens
cgagggcaaggattt

SEQ ID NO: 1840267 - DNA, 15 bp, Homo sapiens
gagggcaaggatttt

SEQ ID NO: 1840268 - DNA, 15 bp, Homo sapiens
agggcaaggattttt

SEQ ID NO: 1840269 - DNA, 15 bp, Homo sapiens
gggcaaggatttttg

SEQ ID NO: 1840270 - DNA, 15 bp, Homo sapiens
ggcaaggatttttgc

SEQ ID NO: 1840271 - DNA, 15 bp, Homo sapiens
gcaaggatttttgcc

SEQ ID NO: 1840272 - DNA, 15 bp, Homo sapiens
caaggatttttgcct

SEQ ID NO: 1840273 - DNA, 15 bp, Homo sapiens
aaggatttttgcctg

SEQ ID NO: 1840274 - DNA, 15 bp, Homo sapiens
aggatttttgcctgc

SEQ ID NO: 1840275 - DNA, 15 bp, Homo sapiens
ggatttttgcctgcc

SEQ ID NO: 1840276 - DNA, 15 bp, Homo sapiens
gatttttgcctgccc

SEQ ID NO: 1840277 - DNA, 15 bp, Homo sapiens
atttttgcctgccct

SEQ ID NO: 1840278 - DNA, 15 bp, Homo sapiens
tttttgcctgcccta

SEQ ID NO: 1840279 - DNA, 15 bp, Homo sapiens
ttttgcctgccctat

SEQ ID NO: 1840280 - DNA, 15 bp, Homo sapiens
tttgcctgccctatt

SEQ ID NO: 1840281 - DNA, 15 bp, Homo sapiens
ttgcctgccctattc

SEQ ID NO: 1840282 - DNA, 15 bp, Homo sapiens
tgcctgccctattcc

SEQ ID NO: 1840283 - DNA, 15 bp, Homo sapiens
gcctgccctattccc

SEQ ID NO: 1840284 - DNA, 15 bp, Homo sapiens
cctgccctattccct

SEQ ID NO: 1840285 - DNA, 15 bp, Homo sapiens
ctgccctattccctg

SEQ ID NO: 1840286 - DNA, 15 bp, Homo sapiens
tgccctattccctgg

SEQ ID NO: 1840287 - DNA, 15 bp, Homo sapiens
gccctattccctggc

SEQ ID NO: 1840288 - DNA, 15 bp, Homo sapiens
ccctattccctggct

SEQ ID NO: 1840289 - DNA, 15 bp, Homo sapiens
cctattccctggctg

SEQ ID NO: 1840290 - DNA, 15 bp, Homo sapiens
ctattccctggctga

SEQ ID NO: 1840291 - DNA, 15 bp, Homo sapiens
tattccctggctgat

SEQ ID NO: 1840292 - DNA, 15 bp, Homo sapiens
attccctggctgatt

SEQ ID NO: 1840293 - DNA, 15 bp, Homo sapiens
ttccctggctgattc

SEQ ID NO: 1840294 - DNA, 15 bp, Homo sapiens
tccctggctgattcc

SEQ ID NO: 1840295 - DNA, 15 bp, Homo sapiens
ccctggctgattccc

SEQ ID NO: 1840296 - DNA, 15 bp, Homo sapiens
cctggctgattcccc

SEQ ID NO: 1840297 - DNA, 15 bp, Homo sapiens
ctggctgattcccct

SEQ ID NO: 1840298 - DNA, 15 bp, Homo sapiens
tggctgattcccctg

SEQ ID NO: 1840299 - DNA, 15 bp, Homo sapiens
ggctgattcccctgt

SEQ ID NO: 1840300 - DNA, 15 bp, Homo sapiens
gctgattcccctgtg

SEQ ID NO: 1840301 - DNA, 15 bp, Homo sapiens
ctgattcccctgtgc

SEQ ID NO: 1840302 - DNA, 15 bp, Homo sapiens
tgattcccctgtgcc

SEQ ID NO: 1840303 - DNA, 15 bp, Homo sapiens
gattcccctgtgcct

SEQ ID NO: 1840304 - DNA, 15 bp, Homo sapiens
attcccctgtgcctg

SEQ ID NO: 1840305 - DNA, 15 bp, Homo sapiens
ttcccctgtgcctgg

SEQ ID NO: 1840306 - DNA, 15 bp, Homo sapiens
tcccctgtgcctgga

SEQ ID NO: 1840307 - DNA, 15 bp, Homo sapiens
cccctgtgcctggaa

SEQ ID NO: 1840308 - DNA, 15 bp, Homo sapiens
ccctgtgcctggaac

SEQ ID NO: 1840309 - DNA, 15 bp, Homo sapiens
cctgtgcctggaaca

SEQ ID NO: 1840310 - DNA, 15 bp, Homo sapiens
ctgtgcctggaacag

SEQ ID NO: 1840311 - DNA, 15 bp, Homo sapiens
tgtgcctggaacagc

SEQ ID NO: 1840312 - DNA, 15 bp, Homo sapiens
gtgcctggaacagcg

SEQ ID NO: 1840313 - DNA, 15 bp, Homo sapiens
tgcctggaacagcgc

SEQ ID NO: 1840314 - DNA, 15 bp, Homo sapiens
gcctggaacagcgcc

SEQ ID NO: 1840315 - DNA, 15 bp, Homo sapiens
cctggaacagcgcct

SEQ ID NO: 1840316 - DNA, 15 bp, Homo sapiens
ctggaacagcgcctg

SEQ ID NO: 1840317 - DNA, 15 bp, Homo sapiens
tggaacagcgcctgc

SEQ ID NO: 1840318 - DNA, 15 bp, Homo sapiens
ggaacagcgcctgct

SEQ ID NO: 1840319 - DNA, 15 bp, Homo sapiens
gaacagcgcctgcta

SEQ ID NO: 1840320 - DNA, 15 bp, Homo sapiens
aacagcgcctgctat

SEQ ID NO: 1840321 - DNA, 15 bp, Homo sapiens
acagcgcctgctata

SEQ ID NO: 1840322 - DNA, 15 bp, Homo sapiens
cagcgcctgctatat

SEQ ID NO: 1840323 - DNA, 15 bp, Homo sapiens
agcgcctgctatata

SEQ ID NO: 1840324 - DNA, 15 bp, Homo sapiens
gcgcctgctatataa

SEQ ID NO: 1840325 - DNA, 15 bp, Homo sapiens
cgcctgctatataaa

SEQ ID NO: 1840326 - DNA, 15 bp, Homo sapiens
gcctgctatataaat

SEQ ID NO: 1840327 - DNA, 15 bp, Homo sapiens
cctgctatataaata

SEQ ID NO: 1840328 - DNA, 15 bp, Homo sapiens
ctgctatataaatat

SEQ ID NO: 1840329 - DNA, 15 bp, Homo sapiens
tgctatataaatatg

SEQ ID NO: 1840330 - DNA, 15 bp, Homo sapiens
gctatataaatatgt

SEQ ID NO: 1840331 - DNA, 15 bp, Homo sapiens
ctatataaatatgtg

SEQ ID NO: 1840332 - DNA, 15 bp, Homo sapiens
tatataaatatgtgc

SEQ ID NO: 1840333 - DNA, 15 bp, Homo sapiens
atataaatatgtgct

SEQ ID NO: 1840334 - DNA, 15 bp, Homo sapiens
tataaatatgtgctg

SEQ ID NO: 1840335 - DNA, 15 bp, Homo sapiens
ataaatatgtgctga

SEQ ID NO: 1840336 - DNA, 15 bp, Homo sapiens
taaatatgtgctgag

SEQ ID NO: 1840337 - DNA, 15 bp, Homo sapiens
aaatatgtgctgagt

SEQ ID NO: 1840338 - DNA, 15 bp, Homo sapiens
aatatgtgctgagta

SEQ ID NO: 1840339 - DNA, 15 bp, Homo sapiens
atatgtgctgagtac

SEQ ID NO: 1840340 - DNA, 15 bp, Homo sapiens
tatgtgctgagtaca

SEQ ID NO: 1840341 - DNA, 15 bp, Homo sapiens
atgtgctgagtacac

SEQ ID NO: 1840342 - DNA, 15 bp, Homo sapiens
tgtgctgagtacaca

SEQ ID NO: 1840343 - DNA, 15 bp, Homo sapiens
gtgctgagtacacac

SEQ ID NO: 1840344 - DNA, 15 bp, Homo sapiens
tgctgagtacacaca

SEQ ID NO: 1840345 - DNA, 15 bp, Homo sapiens
gctgagtacacacac

SEQ ID NO: 1840346 - DNA, 15 bp, Homo sapiens
ctgagtacacacaca

SEQ ID NO: 1840347 - DNA, 15 bp, Homo sapiens
tgagtacacacacac

SEQ ID NO: 1840348 - DNA, 15 bp, Homo sapiens
gagtacacacacacc

SEQ ID NO: 1840349 - DNA, 15 bp, Homo sapiens
agtacacacacacca

SEQ ID NO: 1840350 - DNA, 15 bp, Homo sapiens
gtacacacacaccaa

SEQ ID NO: 1840351 - DNA, 15 bp, Homo sapiens
tacacacacaccaaa

SEQ ID NO: 1840352 - DNA, 15 bp, Homo sapiens
acacacacaccaaag

SEQ ID NO: 1840353 - DNA, 15 bp, Homo sapiens
cacacacaccaaagc

SEQ ID NO: 1840354 - DNA, 15 bp, Homo sapiens
acacacaccaaagca

SEQ ID NO: 1840355 - DNA, 15 bp, Homo sapiens
cacacaccaaagcaa

SEQ ID NO: 1840356 - DNA, 15 bp, Homo sapiens
acacaccaaagcaaa

SEQ ID NO: 1840357 - DNA, 15 bp, Homo sapiens
cacaccaaagcaaaa

SEQ ID NO: 1840358 - DNA, 15 bp, Homo sapiens
acaccaaagcaaaag

SEQ ID NO: 1840359 - DNA, 15 bp, Homo sapiens
caccaaagcaaaaga

SEQ ID NO: 1840360 - DNA, 15 bp, Homo sapiens
accaaagcaaaagat

SEQ ID NO: 1840361 - DNA, 15 bp, Homo sapiens
ccaaagcaaaagatc

SEQ ID NO: 1840362 - DNA, 15 bp, Homo sapiens
caaagcaaaagatca

SEQ ID NO: 1840363 - DNA, 15 bp, Homo sapiens
aaagcaaaagatcag

SEQ ID NO: 1840364 - DNA, 15 bp, Homo sapiens
aagcaaaagatcagg

SEQ ID NO: 1840365 - DNA, 15 bp, Homo sapiens
agcaaaagatcagga

SEQ ID NO: 1840366 - DNA, 15 bp, Homo sapiens
gcaaaagatcaggat

SEQ ID NO: 1840367 - DNA, 15 bp, Homo sapiens
caaaagatcaggatc

SEQ ID NO: 1840368 - DNA, 15 bp, Homo sapiens
aaaagatcaggatcc

SEQ ID NO: 1840369 - DNA, 15 bp, Homo sapiens
aaagatcaggatcct

SEQ ID NO: 1840370 - DNA, 15 bp, Homo sapiens
aagatcaggatcctc

SEQ ID NO: 1840371 - DNA, 15 bp, Homo sapiens
agatcaggatcctcg

SEQ ID NO: 1840372 - DNA, 15 bp, Homo sapiens
gatcaggatcctcgg

SEQ ID NO: 1840373 - DNA, 15 bp, Homo sapiens
atcaggatcctcggg

SEQ ID NO: 1840374 - DNA, 15 bp, Homo sapiens
tcaggatcctcggga

SEQ ID NO: 1840375 - DNA, 15 bp, Homo sapiens
caggatcctcgggaa

SEQ ID NO: 1840376 - DNA, 15 bp, Homo sapiens
aggatcctcgggaaa

SEQ ID NO: 1840377 - DNA, 15 bp, Homo sapiens
ggatcctcgggaaag

SEQ ID NO: 1840378 - DNA, 15 bp, Homo sapiens
gatcctcgggaaagt

SEQ ID NO: 1840379 - DNA, 15 bp, Homo sapiens
atcctcgggaaagtg

SEQ ID NO: 1840380 - DNA, 15 bp, Homo sapiens
tcctcgggaaagtgg

SEQ ID NO: 1840381 - DNA, 15 bp, Homo sapiens
cctcgggaaagtggg

SEQ ID NO: 1840382 - DNA, 15 bp, Homo sapiens
ctcgggaaagtgggt

SEQ ID NO: 1840383 - DNA, 15 bp, Homo sapiens
tcgggaaagtgggtc

SEQ ID NO: 1840384 - DNA, 15 bp, Homo sapiens
cgggaaagtgggtcc

SEQ ID NO: 1840385 - DNA, 15 bp, Homo sapiens
gggaaagtgggtcct

SEQ ID NO: 1840386 - DNA, 15 bp, Homo sapiens
ggaaagtgggtcctt

SEQ ID NO: 1840387 - DNA, 15 bp, Homo sapiens
gaaagtgggtccttg

SEQ ID NO: 1840388 - DNA, 15 bp, Homo sapiens
aaagtgggtccttgg

SEQ ID NO: 1840389 - DNA, 15 bp, Homo sapiens
aagtgggtccttgga

SEQ ID NO: 1840390 - DNA, 15 bp, Homo sapiens
agtgggtccttggaa

SEQ ID NO: 1840391 - DNA, 15 bp, Homo sapiens
gtgggtccttggaaa

SEQ ID NO: 1840392 - DNA, 15 bp, Homo sapiens
tgggtccttggaaaa

SEQ ID NO: 1840393 - DNA, 15 bp, Homo sapiens
gggtccttggaaaag

SEQ ID NO: 1840394 - DNA, 15 bp, Homo sapiens
ggtccttggaaaagc

SEQ ID NO: 1840395 - DNA, 15 bp, Homo sapiens
gtccttggaaaagca

SEQ ID NO: 1840396 - DNA, 15 bp, Homo sapiens
tccttggaaaagcaa

SEQ ID NO: 1840397 - DNA, 15 bp, Homo sapiens
ccttggaaaagcaag

SEQ ID NO: 1840398 - DNA, 15 bp, Homo sapiens
cttggaaaagcaagg

SEQ ID NO: 1840399 - DNA, 15 bp, Homo sapiens
ttggaaaagcaaggg

SEQ ID NO: 1840400 - DNA, 15 bp, Homo sapiens
tggaaaagcaagggg

SEQ ID NO: 1840401 - DNA, 15 bp, Homo sapiens
ggaaaagcaaggggt

SEQ ID NO: 1840402 - DNA, 15 bp, Homo sapiens
gaaaagcaaggggtt

SEQ ID NO: 1840403 - DNA, 15 bp, Homo sapiens
aaaagcaaggggtta

SEQ ID NO: 1840404 - DNA, 15 bp, Homo sapiens
aaagcaaggggttac

SEQ ID NO: 1840405 - DNA, 15 bp, Homo sapiens
aagcaaggggttact

SEQ ID NO: 1840406 - DNA, 15 bp, Homo sapiens
agcaaggggttactg

SEQ ID NO: 1840407 - DNA, 15 bp, Homo sapiens
gcaaggggttactgt

SEQ ID NO: 1840408 - DNA, 15 bp, Homo sapiens
caaggggttactgtg

SEQ ID NO: 1840409 - DNA, 15 bp, Homo sapiens
aaggggttactgtgg

SEQ ID NO: 1840410 - DNA, 15 bp, Homo sapiens
aggggttactgtggc

SEQ ID NO: 1840411 - DNA, 15 bp, Homo sapiens
ggggttactgtggcc

SEQ ID NO: 1840412 - DNA, 15 bp, Homo sapiens
gggttactgtggccg

SEQ ID NO: 1840413 - DNA, 15 bp, Homo sapiens
ggttactgtggccgg

SEQ ID NO: 1840414 - DNA, 15 bp, Homo sapiens
gttactgtggccggg

SEQ ID NO: 1840415 - DNA, 15 bp, Homo sapiens
ttactgtggccgggg

SEQ ID NO: 1840416 - DNA, 15 bp, Homo sapiens
tactgtggccgggga

SEQ ID NO: 1840417 - DNA, 15 bp, Homo sapiens
actgtggccggggag

SEQ ID NO: 1840418 - DNA, 15 bp, Homo sapiens
ctgtggccggggaga

SEQ ID NO: 1840419 - DNA, 15 bp, Homo sapiens
tgtggccggggagag

SEQ ID NO: 1840420 - DNA, 15 bp, Homo sapiens
gtggccggggagagc

SEQ ID NO: 1840421 - DNA, 15 bp, Homo sapiens
tggccggggagagcg

SEQ ID NO: 1840422 - DNA, 15 bp, Homo sapiens
ggccggggagagcgg

SEQ ID NO: 1840423 - DNA, 15 bp, Homo sapiens
gccggggagagcgga

SEQ ID NO: 1840424 - DNA, 15 bp, Homo sapiens
ccggggagagcggag

SEQ ID NO: 1840425 - DNA, 15 bp, Homo sapiens
cggggagagcggaga

SEQ ID NO: 1840426 - DNA, 15 bp, Homo sapiens
ggggagagcggagat

SEQ ID NO: 1840427 - DNA, 15 bp, Homo sapiens
gggagagcggagatt

SEQ ID NO: 1840428 - DNA, 15 bp, Homo sapiens
ggagagcggagattg

SEQ ID NO: 1840429 - DNA, 15 bp, Homo sapiens
gagagcggagattgg

SEQ ID NO: 1840430 - DNA, 15 bp, Homo sapiens
agagcggagattgga

SEQ ID NO: 1840431 - DNA, 15 bp, Homo sapiens
gagcggagattggac

SEQ ID NO: 1840432 - DNA, 15 bp, Homo sapiens
agcggagattggacg

SEQ ID NO: 1840433 - DNA, 15 bp, Homo sapiens
gcggagattggacgg

SEQ ID NO: 1840434 - DNA, 15 bp, Homo sapiens
cggagattggacggg

SEQ ID NO: 1840435 - DNA, 15 bp, Homo sapiens
ggagattggacgggg

SEQ ID NO: 1840436 - DNA, 15 bp, Homo sapiens
gagattggacgggga

SEQ ID NO: 1840437 - DNA, 15 bp, Homo sapiens
agattggacggggag

SEQ ID NO: 1840438 - DNA, 15 bp, Homo sapiens
gattggacggggagg

SEQ ID NO: 1840439 - DNA, 15 bp, Homo sapiens
attggacggggaggt

SEQ ID NO: 1840440 - DNA, 15 bp, Homo sapiens
ttggacggggaggtg

SEQ ID NO: 1840441 - DNA, 15 bp, Homo sapiens
tggacggggaggtgg

SEQ ID NO: 1840442 - DNA, 15 bp, Homo sapiens
ggacggggaggtggt

SEQ ID NO: 1840443 - DNA, 15 bp, Homo sapiens
gacggggaggtggta

SEQ ID NO: 1840444 - DNA, 15 bp, Homo sapiens
acggggaggtggtac

SEQ ID NO: 1840445 - DNA, 15 bp, Homo sapiens
cggggaggtggtact

SEQ ID NO: 1840446 - DNA, 15 bp, Homo sapiens
ggggaggtggtactg

SEQ ID NO: 1840447 - DNA, 15 bp, Homo sapiens
gggaggtggtactgg

SEQ ID NO: 1840448 - DNA, 15 bp, Homo sapiens
ggaggtggtactggg

SEQ ID NO: 1840449 - DNA, 15 bp, Homo sapiens
gaggtggtactgggg

SEQ ID NO: 1840450 - DNA, 15 bp, Homo sapiens
aggtggtactggggc

SEQ ID NO: 1840451 - DNA, 15 bp, Homo sapiens
ggtggtactggggcc

SEQ ID NO: 1840452 - DNA, 15 bp, Homo sapiens
gtggtactggggcca

SEQ ID NO: 1840453 - DNA, 15 bp, Homo sapiens
tggtactggggccaa

SEQ ID NO: 1840454 - DNA, 15 bp, Homo sapiens
ggtactggggccaaa

SEQ ID NO: 1840455 - DNA, 15 bp, Homo sapiens
gtactggggccaaat

SEQ ID NO: 1840456 - DNA, 15 bp, Homo sapiens
tactggggccaaatt

SEQ ID NO: 1840457 - DNA, 15 bp, Homo sapiens
actggggccaaattg

SEQ ID NO: 1840458 - DNA, 15 bp, Homo sapiens
ctggggccaaattgt

SEQ ID NO: 1840459 - DNA, 15 bp, Homo sapiens
tggggccaaattgtg

SEQ ID NO: 1840460 - DNA, 15 bp, Homo sapiens
ggggccaaattgtga

SEQ ID NO: 1840461 - DNA, 15 bp, Homo sapiens
gggccaaattgtgag

SEQ ID NO: 1840462 - DNA, 15 bp, Homo sapiens
ggccaaattgtgagg

SEQ ID NO: 1840463 - DNA, 15 bp, Homo sapiens
gccaaattgtgagga

SEQ ID NO: 1840464 - DNA, 15 bp, Homo sapiens
ccaaattgtgaggaa

SEQ ID NO: 1840465 - DNA, 15 bp, Homo sapiens
caaattgtgaggaat

SEQ ID NO: 1840466 - DNA, 15 bp, Homo sapiens
aaattgtgaggaatt

SEQ ID NO: 1840467 - DNA, 15 bp, Homo sapiens
aattgtgaggaatta

SEQ ID NO: 1840468 - DNA, 15 bp, Homo sapiens
attgtgaggaattag

SEQ ID NO: 1840469 - DNA, 15 bp, Homo sapiens
ttgtgaggaattagg

SEQ ID NO: 1840470 - DNA, 15 bp, Homo sapiens
tgtgaggaattagga

SEQ ID NO: 1840471 - DNA, 15 bp, Homo sapiens
gtgaggaattaggag

SEQ ID NO: 1840472 - DNA, 15 bp, Homo sapiens
tgaggaattaggagg

SEQ ID NO: 1840473 - DNA, 15 bp, Homo sapiens
gaggaattaggaggg

SEQ ID NO: 1840474 - DNA, 15 bp, Homo sapiens
aggaattaggagggt

SEQ ID NO: 1840475 - DNA, 15 bp, Homo sapiens
ggaattaggagggtc

SEQ ID NO: 1840476 - DNA, 15 bp, Homo sapiens
gaattaggagggtct

SEQ ID NO: 1840477 - DNA, 15 bp, Homo sapiens
aattaggagggtctg

SEQ ID NO: 1840478 - DNA, 15 bp, Homo sapiens
attaggagggtctga

SEQ ID NO: 1840479 - DNA, 15 bp, Homo sapiens
ttaggagggtctgat

SEQ ID NO: 1840480 - DNA, 15 bp, Homo sapiens
taggagggtctgatt

SEQ ID NO: 1840481 - DNA, 15 bp, Homo sapiens
aggagggtctgattg

SEQ ID NO: 1840482 - DNA, 15 bp, Homo sapiens
ggagggtctgattgg

SEQ ID NO: 1840483 - DNA, 15 bp, Homo sapiens
gagggtctgattggt

SEQ ID NO: 1840484 - DNA, 15 bp, Homo sapiens
agggtctgattggtg

SEQ ID NO: 1840485 - DNA, 15 bp, Homo sapiens
gggtctgattggtgg

SEQ ID NO: 1840486 - DNA, 15 bp, Homo sapiens
ggtctgattggtggc

SEQ ID NO: 1840487 - DNA, 15 bp, Homo sapiens
gtctgattggtggca

SEQ ID NO: 1840488 - DNA, 15 bp, Homo sapiens
tctgattggtggcaa

SEQ ID NO: 1840489 - DNA, 15 bp, Homo sapiens
ctgattggtggcaat

SEQ ID NO: 1840490 - DNA, 15 bp, Homo sapiens
tgattggtggcaatg

SEQ ID NO: 1840491 - DNA, 15 bp, Homo sapiens
gattggtggcaatgc

SEQ ID NO: 1840492 - DNA, 15 bp, Homo sapiens
attggtggcaatgcg

SEQ ID NO: 1840493 - DNA, 15 bp, Homo sapiens
ttggtggcaatgcgg

SEQ ID NO: 1840494 - DNA, 15 bp, Homo sapiens
tggtggcaatgcggc

SEQ ID NO: 1840495 - DNA, 15 bp, Homo sapiens
ggtggcaatgcggcg

SEQ ID NO: 1840496 - DNA, 15 bp, Homo sapiens
gtggcaatgcggcga

SEQ ID NO: 1840497 - DNA, 15 bp, Homo sapiens
tggcaatgcggcgag

SEQ ID NO: 1840498 - DNA, 15 bp, Homo sapiens
ggcaatgcggcgaga

SEQ ID NO: 1840499 - DNA, 15 bp, Homo sapiens
gcaatgcggcgagaa

SEQ ID NO: 1840500 - DNA, 15 bp, Homo sapiens
caatgcggcgagaag

SEQ ID NO: 1840501 - DNA, 15 bp, Homo sapiens
aatgcggcgagaagg

SEQ ID NO: 1840502 - DNA, 15 bp, Homo sapiens
atgcggcgagaagga

SEQ ID NO: 1840503 - DNA, 15 bp, Homo sapiens
tgcggcgagaaggaa

SEQ ID NO: 1840504 - DNA, 15 bp, Homo sapiens
gcggcgagaaggaat

SEQ ID NO: 1840505 - DNA, 15 bp, Homo sapiens
cggcgagaaggaatt

SEQ ID NO: 1840506 - DNA, 15 bp, Homo sapiens
ggcgagaaggaattc

SEQ ID NO: 1840507 - DNA, 15 bp, Homo sapiens
gcgagaaggaattcc

SEQ ID NO: 1840508 - DNA, 15 bp, Homo sapiens
cgagaaggaattcca

SEQ ID NO: 1840509 - DNA, 15 bp, Homo sapiens
gagaaggaattccat

SEQ ID NO: 1840510 - DNA, 15 bp, Homo sapiens
agaaggaattccatg

SEQ ID NO: 1840511 - DNA, 15 bp, Homo sapiens
gaaggaattccatgg

SEQ ID NO: 1840512 - DNA, 15 bp, Homo sapiens
aaggaattccatgga

SEQ ID NO: 1840513 - DNA, 15 bp, Homo sapiens
aggaattccatggag

SEQ ID NO: 1840514 - DNA, 15 bp, Homo sapiens
ggaattccatggaga

SEQ ID NO: 1840515 - DNA, 15 bp, Homo sapiens
gaattccatggagag

SEQ ID NO: 1840516 - DNA, 15 bp, Homo sapiens
aattccatggagagc

SEQ ID NO: 1840517 - DNA, 15 bp, Homo sapiens
attccatggagagcg

SEQ ID NO: 1840518 - DNA, 15 bp, Homo sapiens
ttccatggagagcgg

SEQ ID NO: 1840519 - DNA, 15 bp, Homo sapiens
tccatggagagcgga

SEQ ID NO: 1840520 - DNA, 15 bp, Homo sapiens
ccatggagagcggac

SEQ ID NO: 1840521 - DNA, 15 bp, Homo sapiens
catggagagcggact

SEQ ID NO: 1840522 - DNA, 15 bp, Homo sapiens
atggagagcggacta

SEQ ID NO: 1840523 - DNA, 15 bp, Homo sapiens
tggagagcggactag

SEQ ID NO: 1840524 - DNA, 15 bp, Homo sapiens
ggagagcggactagg

SEQ ID NO: 1840525 - DNA, 15 bp, Homo sapiens
gagagcggactaggg

SEQ ID NO: 1840526 - DNA, 15 bp, Homo sapiens
agagcggactagggc

SEQ ID NO: 1840527 - DNA, 15 bp, Homo sapiens
gagcggactagggcc

SEQ ID NO: 1840528 - DNA, 15 bp, Homo sapiens
agcggactagggcct

SEQ ID NO: 1840529 - DNA, 15 bp, Homo sapiens
gcggactagggcctg

SEQ ID NO: 1840530 - DNA, 15 bp, Homo sapiens
cggactagggcctgg

SEQ ID NO: 1840531 - DNA, 15 bp, Homo sapiens
ggactagggcctggg

SEQ ID NO: 1840532 - DNA, 15 bp, Homo sapiens
gactagggcctgggt

SEQ ID NO: 1840533 - DNA, 15 bp, Homo sapiens
actagggcctgggta

SEQ ID NO: 1840534 - DNA, 15 bp, Homo sapiens
ctagggcctgggtaa

SEQ ID NO: 1840535 - DNA, 15 bp, Homo sapiens
tagggcctgggtaaa

SEQ ID NO: 1840536 - DNA, 15 bp, Homo sapiens
agggcctgggtaaag

SEQ ID NO: 1840537 - DNA, 15 bp, Homo sapiens
gggcctgggtaaagg

SEQ ID NO: 1840538 - DNA, 15 bp, Homo sapiens
ggcctgggtaaaggc

SEQ ID NO: 1840539 - DNA, 15 bp, Homo sapiens
gcctgggtaaaggcc

SEQ ID NO: 1840540 - DNA, 15 bp, Homo sapiens
cctgggtaaaggcct

SEQ ID NO: 1840541 - DNA, 15 bp, Homo sapiens
ctgggtaaaggcctg

SEQ ID NO: 1840542 - DNA, 15 bp, Homo sapiens
tgggtaaaggcctgg

SEQ ID NO: 1840543 - DNA, 15 bp, Homo sapiens
gggtaaaggcctggg

SEQ ID NO: 1840544 - DNA, 15 bp, Homo sapiens
ggtaaaggcctgggc

SEQ ID NO: 1840545 - DNA, 15 bp, Homo sapiens
gtaaaggcctgggct

SEQ ID NO: 1840546 - DNA, 15 bp, Homo sapiens
taaaggcctgggctg

SEQ ID NO: 1840547 - DNA, 15 bp, Homo sapiens
aaaggcctgggctgg

SEQ ID NO: 1840548 - DNA, 15 bp, Homo sapiens
aaggcctgggctgga

SEQ ID NO: 1840549 - DNA, 15 bp, Homo sapiens
aggcctgggctggaa

SEQ ID NO: 1840550 - DNA, 15 bp, Homo sapiens
ggcctgggctggaaa

SEQ ID NO: 1840551 - DNA, 15 bp, Homo sapiens
gcctgggctggaaag

SEQ ID NO: 1840552 - DNA, 15 bp, Homo sapiens
cctgggctggaaagc

SEQ ID NO: 1840553 - DNA, 15 bp, Homo sapiens
ctgggctggaaagct

SEQ ID NO: 1840554 - DNA, 15 bp, Homo sapiens
tgggctggaaagctt

SEQ ID NO: 1840555 - DNA, 15 bp, Homo sapiens
gggctggaaagcttg

SEQ ID NO: 1840556 - DNA, 15 bp, Homo sapiens
ggctggaaagcttgt

SEQ ID NO: 1840557 - DNA, 15 bp, Homo sapiens
gctggaaagcttgta

SEQ ID NO: 1840558 - DNA, 15 bp, Homo sapiens
ctggaaagcttgtac

SEQ ID NO: 1840559 - DNA, 15 bp, Homo sapiens
tggaaagcttgtacg

SEQ ID NO: 1840560 - DNA, 15 bp, Homo sapiens
ggaaagcttgtacgg

SEQ ID NO: 1840561 - DNA, 15 bp, Homo sapiens
gaaagcttgtacggg

SEQ ID NO: 1840562 - DNA, 15 bp, Homo sapiens
aaagcttgtacgggg

SEQ ID NO: 1840563 - DNA, 15 bp, Homo sapiens
aagcttgtacgggga

SEQ ID NO: 1840564 - DNA, 15 bp, Homo sapiens
agcttgtacggggag

SEQ ID NO: 1840565 - DNA, 15 bp, Homo sapiens
gcttgtacggggagc

SEQ ID NO: 1840566 - DNA, 15 bp, Homo sapiens
cttgtacggggagca

SEQ ID NO: 1840567 - DNA, 15 bp, Homo sapiens
ttgtacggggagcag

SEQ ID NO: 1840568 - DNA, 15 bp, Homo sapiens
tgtacggggagcagt

SEQ ID NO: 1840569 - DNA, 15 bp, Homo sapiens
gtacggggagcagtg

SEQ ID NO: 1840570 - DNA, 15 bp, Homo sapiens
tacggggagcagtgg

SEQ ID NO: 1840571 - DNA, 15 bp, Homo sapiens
acggggagcagtggg

SEQ ID NO: 1840572 - DNA, 15 bp, Homo sapiens
cggggagcagtgggg

SEQ ID NO: 1840573 - DNA, 15 bp, Homo sapiens
ggggagcagtgggga

SEQ ID NO: 1840574 - DNA, 15 bp, Homo sapiens
gggagcagtggggag

SEQ ID NO: 1840575 - DNA, 15 bp, Homo sapiens
ggagcagtggggagg

SEQ ID NO: 1840576 - DNA, 15 bp, Homo sapiens
gagcagtggggaggt

SEQ ID NO: 1840577 - DNA, 15 bp, Homo sapiens
agcagtggggaggtc

SEQ ID NO: 1840578 - DNA, 15 bp, Homo sapiens
gcagtggggaggtca

SEQ ID NO: 1840579 - DNA, 15 bp, Homo sapiens
cagtggggaggtcat

SEQ ID NO: 1840580 - DNA, 15 bp, Homo sapiens
agtggggaggtcatg

SEQ ID NO: 1840581 - DNA, 15 bp, Homo sapiens
gtggggaggtcatga

SEQ ID NO: 1840582 - DNA, 15 bp, Homo sapiens
tggggaggtcatgac

SEQ ID NO: 1840583 - DNA, 15 bp, Homo sapiens
ggggaggtcatgacg

SEQ ID NO: 1840584 - DNA, 15 bp, Homo sapiens
gggaggtcatgacgc

SEQ ID NO: 1840585 - DNA, 15 bp, Homo sapiens
ggaggtcatgacgct

SEQ ID NO: 1840586 - DNA, 15 bp, Homo sapiens
gaggtcatgacgcta

SEQ ID NO: 1840587 - DNA, 15 bp, Homo sapiens
aggtcatgacgctag

SEQ ID NO: 1840588 - DNA, 15 bp, Homo sapiens
ggtcatgacgctagg

SEQ ID NO: 1840589 - DNA, 15 bp, Homo sapiens
gtcatgacgctaggg

SEQ ID NO: 1840590 - DNA, 15 bp, Homo sapiens
tcatgacgctagggg

SEQ ID NO: 1840591 - DNA, 15 bp, Homo sapiens
catgacgctaggggg

SEQ ID NO: 1840592 - DNA, 15 bp, Homo sapiens
atgacgctagggggc

SEQ ID NO: 1840593 - DNA, 15 bp, Homo sapiens
tgacgctagggggca

SEQ ID NO: 1840594 - DNA, 15 bp, Homo sapiens
gacgctagggggcag

SEQ ID NO: 1840595 - DNA, 15 bp, Homo sapiens
acgctagggggcagc

SEQ ID NO: 1840596 - DNA, 15 bp, Homo sapiens
cgctagggggcagca

SEQ ID NO: 1840597 - DNA, 15 bp, Homo sapiens
gctagggggcagcag

SEQ ID NO: 1840598 - DNA, 15 bp, Homo sapiens
ctagggggcagcaga

SEQ ID NO: 1840599 - DNA, 15 bp, Homo sapiens
tagggggcagcagag

SEQ ID NO: 1840600 - DNA, 15 bp, Homo sapiens
agggggcagcagaga

SEQ ID NO: 1840601 - DNA, 15 bp, Homo sapiens
gggggcagcagagag

SEQ ID NO: 1840602 - DNA, 15 bp, Homo sapiens
ggggcagcagagagg

SEQ ID NO: 1840603 - DNA, 15 bp, Homo sapiens
gggcagcagagagga

SEQ ID NO: 1840604 - DNA, 15 bp, Homo sapiens
ggcagcagagaggaa

SEQ ID NO: 1840605 - DNA, 15 bp, Homo sapiens
gcagcagagaggaaa

SEQ ID NO: 1840606 - DNA, 15 bp, Homo sapiens
cagcagagaggaaag

SEQ ID NO: 1840607 - DNA, 15 bp, Homo sapiens
agcagagaggaaagg

SEQ ID NO: 1840608 - DNA, 15 bp, Homo sapiens
gcagagaggaaagga

SEQ ID NO: 1840609 - DNA, 15 bp, Homo sapiens
cagagaggaaaggag

SEQ ID NO: 1840610 - DNA, 15 bp, Homo sapiens
agagaggaaaggaga

SEQ ID NO: 1840611 - DNA, 15 bp, Homo sapiens
gagaggaaaggagaa

SEQ ID NO: 1840612 - DNA, 15 bp, Homo sapiens
agaggaaaggagaag

SEQ ID NO: 1840613 - DNA, 15 bp, Homo sapiens
gaggaaaggagaaga

SEQ ID NO: 1840614 - DNA, 15 bp, Homo sapiens
aggaaaggagaagag

SEQ ID NO: 1840615 - DNA, 15 bp, Homo sapiens
ggaaaggagaagagg

SEQ ID NO: 1840616 - DNA, 15 bp, Homo sapiens
gaaaggagaagaggt

SEQ ID NO: 1840617 - DNA, 15 bp, Homo sapiens
aaaggagaagaggtg

SEQ ID NO: 1840618 - DNA, 15 bp, Homo sapiens
aaggagaagaggtgg

SEQ ID NO: 1840619 - DNA, 15 bp, Homo sapiens
aggagaagaggtggg

SEQ ID NO: 1840620 - DNA, 15 bp, Homo sapiens
ggagaagaggtgggt

SEQ ID NO: 1840621 - DNA, 15 bp, Homo sapiens
gagaagaggtgggta

SEQ ID NO: 1840622 - DNA, 15 bp, Homo sapiens
agaagaggtgggtac

SEQ ID NO: 1840623 - DNA, 15 bp, Homo sapiens
gaagaggtgggtact

SEQ ID NO: 1840624 - DNA, 15 bp, Homo sapiens
aagaggtgggtactg

SEQ ID NO: 1840625 - DNA, 15 bp, Homo sapiens
agaggtgggtactgg

SEQ ID NO: 1840626 - DNA, 15 bp, Homo sapiens
gaggtgggtactgga

SEQ ID NO: 1840627 - DNA, 15 bp, Homo sapiens
aggtgggtactggaa

SEQ ID NO: 1840628 - DNA, 15 bp, Homo sapiens
ggtgggtactggaat

SEQ ID NO: 1840629 - DNA, 15 bp, Homo sapiens
gtgggtactggaatg

SEQ ID NO: 1840630 - DNA, 15 bp, Homo sapiens
tgggtactggaatga

SEQ ID NO: 1840631 - DNA, 15 bp, Homo sapiens
gggtactggaatgaa

SEQ ID NO: 1840632 - DNA, 15 bp, Homo sapiens
ggtactggaatgaaa

SEQ ID NO: 1840633 - DNA, 15 bp, Homo sapiens
gtactggaatgaaag

SEQ ID NO: 1840634 - DNA, 15 bp, Homo sapiens
tactggaatgaaagg

SEQ ID NO: 1840635 - DNA, 15 bp, Homo sapiens
actggaatgaaaggg

SEQ ID NO: 1840636 - DNA, 15 bp, Homo sapiens
ctggaatgaaagggt

SEQ ID NO: 1840637 - DNA, 15 bp, Homo sapiens
tggaatgaaagggtg

SEQ ID NO: 1840638 - DNA, 15 bp, Homo sapiens
ggaatgaaagggtgg

SEQ ID NO: 1840639 - DNA, 15 bp, Homo sapiens
gaatgaaagggtgga

SEQ ID NO: 1840640 - DNA, 15 bp, Homo sapiens
aatgaaagggtggat

SEQ ID NO: 1840641 - DNA, 15 bp, Homo sapiens
atgaaagggtggatc

SEQ ID NO: 1840642 - DNA, 15 bp, Homo sapiens
tgaaagggtggatct

SEQ ID NO: 1840643 - DNA, 15 bp, Homo sapiens
gaaagggtggatctt

SEQ ID NO: 1840644 - DNA, 15 bp, Homo sapiens
aaagggtggatcttc

SEQ ID NO: 1840645 - DNA, 15 bp, Homo sapiens
aagggtggatcttca

SEQ ID NO: 1840646 - DNA, 15 bp, Homo sapiens
agggtggatcttcag

SEQ ID NO: 1840647 - DNA, 15 bp, Homo sapiens
gggtggatcttcagc

SEQ ID NO: 1840648 - DNA, 15 bp, Homo sapiens
ggtggatcttcagcc

SEQ ID NO: 1840649 - DNA, 15 bp, Homo sapiens
gtggatcttcagcca

SEQ ID NO: 1840650 - DNA, 15 bp, Homo sapiens
tggatcttcagccaa

SEQ ID NO: 1840651 - DNA, 15 bp, Homo sapiens
ggatcttcagccaag

SEQ ID NO: 1840652 - DNA, 15 bp, Homo sapiens
gatcttcagccaagc

SEQ ID NO: 1840653 - DNA, 15 bp, Homo sapiens
atcttcagccaagcc

SEQ ID NO: 1840654 - DNA, 15 bp, Homo sapiens
tcttcagccaagccc

SEQ ID NO: 1840655 - DNA, 15 bp, Homo sapiens
cttcagccaagcccc

SEQ ID NO: 1840656 - DNA, 15 bp, Homo sapiens
ttcagccaagcccca

SEQ ID NO: 1840657 - DNA, 15 bp, Homo sapiens
tcagccaagccccag

SEQ ID NO: 1840658 - DNA, 15 bp, Homo sapiens
cagccaagccccagg

SEQ ID NO: 1840659 - DNA, 15 bp, Homo sapiens
agccaagccccagga

SEQ ID NO: 1840660 - DNA, 15 bp, Homo sapiens
gccaagccccaggag

SEQ ID NO: 1840661 - DNA, 15 bp, Homo sapiens
ccaagccccaggaga

SEQ ID NO: 1840662 - DNA, 15 bp, Homo sapiens
caagccccaggagac

SEQ ID NO: 1840663 - DNA, 15 bp, Homo sapiens
aagccccaggagaca

SEQ ID NO: 1840664 - DNA, 15 bp, Homo sapiens
agccccaggagacag

SEQ ID NO: 1840665 - DNA, 15 bp, Homo sapiens
gccccaggagacaga

SEQ ID NO: 1840666 - DNA, 15 bp, Homo sapiens
ccccaggagacagaa

SEQ ID NO: 1840667 - DNA, 15 bp, Homo sapiens
ccaggagacagaagg

SEQ ID NO: 1840668 - DNA, 15 bp, Homo sapiens
caggagacagaaggc

SEQ ID NO: 1840669 - DNA, 15 bp, Homo sapiens
aggagacagaaggct

SEQ ID NO: 1840670 - DNA, 15 bp, Homo sapiens
ggagacagaaggctg

SEQ ID NO: 1840671 - DNA, 15 bp, Homo sapiens
gagacagaaggctga

SEQ ID NO: 1840672 - DNA, 15 bp, Homo sapiens
agacagaaggctgaa

SEQ ID NO: 1840673 - DNA, 15 bp, Homo sapiens
gacagaaggctgaag

SEQ ID NO: 1840674 - DNA, 15 bp, Homo sapiens
acagaaggctgaagt

SEQ ID NO: 1840675 - DNA, 15 bp, Homo sapiens
cagaaggctgaagtt

SEQ ID NO: 1840676 - DNA, 15 bp, Homo sapiens
agaaggctgaagttg

SEQ ID NO: 1840677 - DNA, 15 bp, Homo sapiens
gaaggctgaagttgc

SEQ ID NO: 1840678 - DNA, 15 bp, Homo sapiens
aaggctgaagttgca

SEQ ID NO: 1840679 - DNA, 15 bp, Homo sapiens
aggctgaagttgcag

SEQ ID NO: 1840680 - DNA, 15 bp, Homo sapiens
ggctgaagttgcagg

SEQ ID NO: 1840681 - DNA, 15 bp, Homo sapiens
gctgaagttgcaggg

SEQ ID NO: 1840682 - DNA, 15 bp, Homo sapiens
ctgaagttgcagggg

SEQ ID NO: 1840683 - DNA, 15 bp, Homo sapiens
tgaagttgcaggggt

SEQ ID NO: 1840684 - DNA, 15 bp, Homo sapiens
gaagttgcaggggtg

SEQ ID NO: 1840685 - DNA, 15 bp, Homo sapiens
aagttgcaggggtgt

SEQ ID NO: 1840686 - DNA, 15 bp, Homo sapiens
agttgcaggggtgta

SEQ ID NO: 1840687 - DNA, 15 bp, Homo sapiens
gttgcaggggtgtat

SEQ ID NO: 1840688 - DNA, 15 bp, Homo sapiens
ttgcaggggtgtatc

SEQ ID NO: 1840689 - DNA, 15 bp, Homo sapiens
tgcaggggtgtatcg

SEQ ID NO: 1840690 - DNA, 15 bp, Homo sapiens
gcaggggtgtatcgg

SEQ ID NO: 1840691 - DNA, 15 bp, Homo sapiens
caggggtgtatcggg

SEQ ID NO: 1840692 - DNA, 15 bp, Homo sapiens
aggggtgtatcgggc

SEQ ID NO: 1840693 - DNA, 15 bp, Homo sapiens
ggggtgtatcgggca

SEQ ID NO: 1840694 - DNA, 15 bp, Homo sapiens
gggtgtatcgggcat

SEQ ID NO: 1840695 - DNA, 15 bp, Homo sapiens
ggtgtatcgggcatc

SEQ ID NO: 1840696 - DNA, 15 bp, Homo sapiens
gtgtatcgggcatct

SEQ ID NO: 1840697 - DNA, 15 bp, Homo sapiens
tgtatcgggcatcta

SEQ ID NO: 1840698 - DNA, 15 bp, Homo sapiens
gtatcgggcatctag

SEQ ID NO: 1840699 - DNA, 15 bp, Homo sapiens
tatcgggcatctagg

SEQ ID NO: 1840700 - DNA, 15 bp, Homo sapiens
atcgggcatctaggg

SEQ ID NO: 1840701 - DNA, 15 bp, Homo sapiens
tcgggcatctagggc

SEQ ID NO: 1840702 - DNA, 15 bp, Homo sapiens
cgggcatctagggcc

SEQ ID NO: 1840703 - DNA, 15 bp, Homo sapiens
gggcatctagggcct

SEQ ID NO: 1840704 - DNA, 15 bp, Homo sapiens
ggcatctagggcctc

SEQ ID NO: 1840705 - DNA, 15 bp, Homo sapiens
gcatctagggcctca

SEQ ID NO: 1840706 - DNA, 15 bp, Homo sapiens
catctagggcctcac

SEQ ID NO: 1840707 - DNA, 15 bp, Homo sapiens
atctagggcctcaca

SEQ ID NO: 1840708 - DNA, 15 bp, Homo sapiens
tctagggcctcacac

SEQ ID NO: 1840709 - DNA, 15 bp, Homo sapiens
ctagggcctcacact

SEQ ID NO: 1840710 - DNA, 15 bp, Homo sapiens
tagggcctcacactc

SEQ ID NO: 1840711 - DNA, 15 bp, Homo sapiens
agggcctcacactca

SEQ ID NO: 1840712 - DNA, 15 bp, Homo sapiens
gggcctcacactcac

SEQ ID NO: 1840713 - DNA, 15 bp, Homo sapiens
ggcctcacactcacc

SEQ ID NO: 1840714 - DNA, 15 bp, Homo sapiens
gcctcacactcacct

SEQ ID NO: 1840715 - DNA, 15 bp, Homo sapiens
cctcacactcacctc

SEQ ID NO: 1840716 - DNA, 15 bp, Homo sapiens
ctcacactcacctct

SEQ ID NO: 1840717 - DNA, 15 bp, Homo sapiens
tcacactcacctctg

SEQ ID NO: 1840718 - DNA, 15 bp, Homo sapiens
cacactcacctctgt

SEQ ID NO: 1840719 - DNA, 15 bp, Homo sapiens
acactcacctctgtc

SEQ ID NO: 1840720 - DNA, 15 bp, Homo sapiens
cactcacctctgtct

SEQ ID NO: 1840721 - DNA, 15 bp, Homo sapiens
actcacctctgtctt

SEQ ID NO: 1840722 - DNA, 15 bp, Homo sapiens
ctcacctctgtcttc

SEQ ID NO: 1840723 - DNA, 15 bp, Homo sapiens
tcacctctgtcttct

SEQ ID NO: 1840724 - DNA, 15 bp, Homo sapiens
cacctctgtcttctt

SEQ ID NO: 1840725 - DNA, 15 bp, Homo sapiens
acctctgtcttctta

SEQ ID NO: 1840726 - DNA, 15 bp, Homo sapiens
cctctgtcttcttaa

SEQ ID NO: 1840727 - DNA, 15 bp, Homo sapiens
ctctgtcttcttaaa

SEQ ID NO: 1840728 - DNA, 15 bp, Homo sapiens
tctgtcttcttaaat

SEQ ID NO: 1840729 - DNA, 15 bp, Homo sapiens
ctgtcttcttaaatc

SEQ ID NO: 1840730 - DNA, 15 bp, Homo sapiens
tgtcttcttaaatcg

SEQ ID NO: 1840731 - DNA, 15 bp, Homo sapiens
gtcttcttaaatcgc

SEQ ID NO: 1840732 - DNA, 15 bp, Homo sapiens
tcttcttaaatcgcg

SEQ ID NO: 1840733 - DNA, 15 bp, Homo sapiens
cttcttaaatcgcgc

SEQ ID NO: 1840734 - DNA, 15 bp, Homo sapiens
ttcttaaatcgcgcc

SEQ ID NO: 1840735 - DNA, 15 bp, Homo sapiens
tcttaaatcgcgccc

SEQ ID NO: 1840736 - DNA, 15 bp, Homo sapiens
cttaaatcgcgccct

SEQ ID NO: 1840737 - DNA, 15 bp, Homo sapiens
ttaaatcgcgccctg

SEQ ID NO: 1840738 - DNA, 15 bp, Homo sapiens
taaatcgcgccctga

SEQ ID NO: 1840739 - DNA, 15 bp, Homo sapiens
aaatcgcgccctgag

SEQ ID NO: 1840740 - DNA, 15 bp, Homo sapiens
aatcgcgccctgaga

SEQ ID NO: 1840741 - DNA, 15 bp, Homo sapiens
atcgcgccctgagag

SEQ ID NO: 1840742 - DNA, 15 bp, Homo sapiens
tcgcgccctgagagt

SEQ ID NO: 1840743 - DNA, 15 bp, Homo sapiens
cgcgccctgagagtc

SEQ ID NO: 1840744 - DNA, 15 bp, Homo sapiens
gcgccctgagagtct

SEQ ID NO: 1840745 - DNA, 15 bp, Homo sapiens
cgccctgagagtctt

SEQ ID NO: 1840746 - DNA, 15 bp, Homo sapiens
gccctgagagtcttc

SEQ ID NO: 1840747 - DNA, 15 bp, Homo sapiens
ccctgagagtcttca

SEQ ID NO: 1840748 - DNA, 15 bp, Homo sapiens
cctgagagtcttcat

SEQ ID NO: 1840749 - DNA, 15 bp, Homo sapiens
ctgagagtcttcata

SEQ ID NO: 1840750 - DNA, 15 bp, Homo sapiens
tgagagtcttcatag

SEQ ID NO: 1840751 - DNA, 15 bp, Homo sapiens
gagagtcttcatagt

SEQ ID NO: 1840752 - DNA, 15 bp, Homo sapiens
agagtcttcatagtt

SEQ ID NO: 1840753 - DNA, 15 bp, Homo sapiens
gagtcttcatagttg

SEQ ID NO: 1840754 - DNA, 15 bp, Homo sapiens
agtcttcatagttgg

SEQ ID NO: 1840755 - DNA, 15 bp, Homo sapiens
gtcttcatagttggt

SEQ ID NO: 1840756 - DNA, 15 bp, Homo sapiens
tcttcatagttggtg

SEQ ID NO: 1840757 - DNA, 15 bp, Homo sapiens
cttcatagttggtgc

SEQ ID NO: 1840758 - DNA, 15 bp, Homo sapiens
ttcatagttggtgcc

SEQ ID NO: 1840759 - DNA, 15 bp, Homo sapiens
tcatagttggtgccc

SEQ ID NO: 1840760 - DNA, 15 bp, Homo sapiens
catagttggtgccct

SEQ ID NO: 1840761 - DNA, 15 bp, Homo sapiens
atagttggtgccctg

SEQ ID NO: 1840762 - DNA, 15 bp, Homo sapiens
tagttggtgccctgt

SEQ ID NO: 1840763 - DNA, 15 bp, Homo sapiens
agttggtgccctgtg

SEQ ID NO: 1840764 - DNA, 15 bp, Homo sapiens
gttggtgccctgtgt

SEQ ID NO: 1840765 - DNA, 15 bp, Homo sapiens
ttggtgccctgtgtt

SEQ ID NO: 1840766 - DNA, 15 bp, Homo sapiens
tggtgccctgtgttt

SEQ ID NO: 1840767 - DNA, 15 bp, Homo sapiens
ggtgccctgtgtttc

SEQ ID NO: 1840768 - DNA, 15 bp, Homo sapiens
gtgccctgtgtttct

SEQ ID NO: 1840769 - DNA, 15 bp, Homo sapiens
tgccctgtgtttctc

SEQ ID NO: 1840770 - DNA, 15 bp, Homo sapiens
gccctgtgtttctcc

SEQ ID NO: 1840771 - DNA, 15 bp, Homo sapiens
ccctgtgtttctcct

SEQ ID NO: 1840772 - DNA, 15 bp, Homo sapiens
cctgtgtttctcctc

SEQ ID NO: 1840773 - DNA, 15 bp, Homo sapiens
ctgtgtttctcctct

SEQ ID NO: 1840774 - DNA, 15 bp, Homo sapiens
tgtgtttctcctctc

SEQ ID NO: 1840775 - DNA, 15 bp, Homo sapiens
gtgtttctcctctcc

SEQ ID NO: 1840776 - DNA, 15 bp, Homo sapiens
tgtttctcctctcca

SEQ ID NO: 1840777 - DNA, 15 bp, Homo sapiens
gtttctcctctccac

SEQ ID NO: 1840778 - DNA, 15 bp, Homo sapiens
tttctcctctccaca

SEQ ID NO: 1840779 - DNA, 15 bp, Homo sapiens
ttctcctctccacag

SEQ ID NO: 1840780 - DNA, 15 bp, Homo sapiens
tctcctctccacagg

SEQ ID NO: 1840781 - DNA, 15 bp, Homo sapiens
ctcctctccacaggc

SEQ ID NO: 1840782 - DNA, 15 bp, Homo sapiens
tcctctccacaggcc

SEQ ID NO: 1840783 - DNA, 15 bp, Homo sapiens
cctctccacaggcca

SEQ ID NO: 1840784 - DNA, 15 bp, Homo sapiens
ctctccacaggccac

SEQ ID NO: 1840785 - DNA, 15 bp, Homo sapiens
tctccacaggccacc

SEQ ID NO: 1840786 - DNA, 15 bp, Homo sapiens
ctccacaggccacct

SEQ ID NO: 1840787 - DNA, 15 bp, Homo sapiens
tccacaggccacctg

SEQ ID NO: 1840788 - DNA, 15 bp, Homo sapiens
ccacaggccacctga

SEQ ID NO: 1840789 - DNA, 15 bp, Homo sapiens
cacaggccacctgag

SEQ ID NO: 1840790 - DNA, 15 bp, Homo sapiens
acaggccacctgagg

SEQ ID NO: 1840791 - DNA, 15 bp, Homo sapiens
caggccacctgagga

SEQ ID NO: 1840792 - DNA, 15 bp, Homo sapiens
aggccacctgaggag

SEQ ID NO: 1840793 - DNA, 15 bp, Homo sapiens
ggccacctgaggagg

SEQ ID NO: 1840794 - DNA, 15 bp, Homo sapiens
gccacctgaggaggg

SEQ ID NO: 1840795 - DNA, 15 bp, Homo sapiens
ccacctgaggagggc

SEQ ID NO: 1840796 - DNA, 15 bp, Homo sapiens
cacctgaggagggca

SEQ ID NO: 1840797 - DNA, 15 bp, Homo sapiens
acctgaggagggcaa

SEQ ID NO: 1840798 - DNA, 15 bp, Homo sapiens
cctgaggagggcaag

SEQ ID NO: 1840799 - DNA, 15 bp, Homo sapiens
ctgaggagggcaagg

SEQ ID NO: 1840800 - DNA, 15 bp, Homo sapiens
tgaggagggcaaggg

SEQ ID NO: 1840801 - DNA, 15 bp, Homo sapiens
gaggagggcaagggt

SEQ ID NO: 1840802 - DNA, 15 bp, Homo sapiens
aggagggcaagggtg

SEQ ID NO: 1840803 - DNA, 15 bp, Homo sapiens
ggagggcaagggtgg

SEQ ID NO: 1840804 - DNA, 15 bp, Homo sapiens
gagggcaagggtggg

SEQ ID NO: 1840805 - DNA, 15 bp, Homo sapiens
agggcaagggtgggg

SEQ ID NO: 1840806 - DNA, 15 bp, Homo sapiens
gggcaagggtggggg

SEQ ID NO: 1840807 - DNA, 15 bp, Homo sapiens
ggcaagggtgggggt

SEQ ID NO: 1840808 - DNA, 15 bp, Homo sapiens
gcaagggtgggggta

SEQ ID NO: 1840809 - DNA, 15 bp, Homo sapiens
caagggtgggggtaa

SEQ ID NO: 1840810 - DNA, 15 bp, Homo sapiens
aagggtgggggtaag

SEQ ID NO: 1840811 - DNA, 15 bp, Homo sapiens
agggtgggggtaagg

SEQ ID NO: 1840812 - DNA, 15 bp, Homo sapiens
gggtgggggtaaggt

SEQ ID NO: 1840813 - DNA, 15 bp, Homo sapiens
ggtgggggtaaggtg

SEQ ID NO: 1840814 - DNA, 15 bp, Homo sapiens
gtgggggtaaggtga

SEQ ID NO: 1840815 - DNA, 15 bp, Homo sapiens
tgggggtaaggtgag

SEQ ID NO: 1840816 - DNA, 15 bp, Homo sapiens
gggggtaaggtgagg

SEQ ID NO: 1840817 - DNA, 15 bp, Homo sapiens
ggggtaaggtgaggg

SEQ ID NO: 1840818 - DNA, 15 bp, Homo sapiens
gggtaaggtgaggga

SEQ ID NO: 1840819 - DNA, 15 bp, Homo sapiens
ggtaaggtgagggac

SEQ ID NO: 1840820 - DNA, 15 bp, Homo sapiens
gtaaggtgagggaca

SEQ ID NO: 1840821 - DNA, 15 bp, Homo sapiens
taaggtgagggacac

SEQ ID NO: 1840822 - DNA, 15 bp, Homo sapiens
aaggtgagggacacc

SEQ ID NO: 1840823 - DNA, 15 bp, Homo sapiens
aggtgagggacacca

SEQ ID NO: 1840824 - DNA, 15 bp, Homo sapiens
ggtgagggacaccag

SEQ ID NO: 1840825 - DNA, 15 bp, Homo sapiens
gtgagggacaccagt

SEQ ID NO: 1840826 - DNA, 15 bp, Homo sapiens
tgagggacaccagtc

SEQ ID NO: 1840827 - DNA, 15 bp, Homo sapiens
gagggacaccagtcc

SEQ ID NO: 1840828 - DNA, 15 bp, Homo sapiens
agggacaccagtcct

SEQ ID NO: 1840829 - DNA, 15 bp, Homo sapiens
gggacaccagtcctg

SEQ ID NO: 1840830 - DNA, 15 bp, Homo sapiens
ggacaccagtcctgg

SEQ ID NO: 1840831 - DNA, 15 bp, Homo sapiens
gacaccagtcctggt

SEQ ID NO: 1840832 - DNA, 15 bp, Homo sapiens
acaccagtcctggtg

SEQ ID NO: 1840833 - DNA, 15 bp, Homo sapiens
caccagtcctggtgg

SEQ ID NO: 1840834 - DNA, 15 bp, Homo sapiens
accagtcctggtggg

SEQ ID NO: 1840835 - DNA, 15 bp, Homo sapiens
ccagtcctggtgggc

SEQ ID NO: 1840836 - DNA, 15 bp, Homo sapiens
cagtcctggtgggcg

SEQ ID NO: 1840837 - DNA, 15 bp, Homo sapiens
agtcctggtgggcgg

SEQ ID NO: 1840838 - DNA, 15 bp, Homo sapiens
gtcctggtgggcggc

SEQ ID NO: 1840839 - DNA, 15 bp, Homo sapiens
tcctggtgggcggca

SEQ ID NO: 1840840 - DNA, 15 bp, Homo sapiens
cctggtgggcggcag

SEQ ID NO: 1840841 - DNA, 15 bp, Homo sapiens
ctggtgggcggcagg

SEQ ID NO: 1840842 - DNA, 15 bp, Homo sapiens
tggtgggcggcaggg

SEQ ID NO: 1840843 - DNA, 15 bp, Homo sapiens
ggtgggcggcagggt

SEQ ID NO: 1840844 - DNA, 15 bp, Homo sapiens
gtgggcggcagggtc

SEQ ID NO: 1840845 - DNA, 15 bp, Homo sapiens
tgggcggcagggtcc

SEQ ID NO: 1840846 - DNA, 15 bp, Homo sapiens
gggcggcagggtccg

SEQ ID NO: 1840847 - DNA, 15 bp, Homo sapiens
ggcggcagggtccgt

SEQ ID NO: 1840848 - DNA, 15 bp, Homo sapiens
gcggcagggtccgtt

SEQ ID NO: 1840849 - DNA, 15 bp, Homo sapiens
cggcagggtccgttg

SEQ ID NO: 1840850 - DNA, 15 bp, Homo sapiens
ggcagggtccgttgc

SEQ ID NO: 1840851 - DNA, 15 bp, Homo sapiens
gcagggtccgttgcc

SEQ ID NO: 1840852 - DNA, 15 bp, Homo sapiens
cagggtccgttgcct

SEQ ID NO: 1840853 - DNA, 15 bp, Homo sapiens
agggtccgttgcctc

SEQ ID NO: 1840854 - DNA, 15 bp, Homo sapiens
gggtccgttgcctcg

SEQ ID NO: 1840855 - DNA, 15 bp, Homo sapiens
ggtccgttgcctcgc

SEQ ID NO: 1840856 - DNA, 15 bp, Homo sapiens
gtccgttgcctcgcc

SEQ ID NO: 1840857 - DNA, 15 bp, Homo sapiens
tccgttgcctcgccc

SEQ ID NO: 1840858 - DNA, 15 bp, Homo sapiens
ccgttgcctcgccct

SEQ ID NO: 1840859 - DNA, 15 bp, Homo sapiens
cgttgcctcgccctc

SEQ ID NO: 1840860 - DNA, 15 bp, Homo sapiens
gttgcctcgccctcc

SEQ ID NO: 1840861 - DNA, 15 bp, Homo sapiens
ttgcctcgccctcct

SEQ ID NO: 1840862 - DNA, 15 bp, Homo sapiens
tgcctcgccctcctc

SEQ ID NO: 1840863 - DNA, 15 bp, Homo sapiens
gcctcgccctcctca

SEQ ID NO: 1840864 - DNA, 15 bp, Homo sapiens
cctcgccctcctcaa

SEQ ID NO: 1840865 - DNA, 15 bp, Homo sapiens
ctcgccctcctcaaa

SEQ ID NO: 1840866 - DNA, 15 bp, Homo sapiens
tcgccctcctcaaaa

SEQ ID NO: 1840867 - DNA, 15 bp, Homo sapiens
cgccctcctcaaaag

SEQ ID NO: 1840868 - DNA, 15 bp, Homo sapiens
gccctcctcaaaagg

SEQ ID NO: 1840869 - DNA, 15 bp, Homo sapiens
ccctcctcaaaagga

SEQ ID NO: 1840870 - DNA, 15 bp, Homo sapiens
cctcctcaaaaggac

SEQ ID NO: 1840871 - DNA, 15 bp, Homo sapiens
ctcctcaaaaggacc

SEQ ID NO: 1840872 - DNA, 15 bp, Homo sapiens
tcctcaaaaggaccg

SEQ ID NO: 1840873 - DNA, 15 bp, Homo sapiens
cctcaaaaggaccgc

SEQ ID NO: 1840874 - DNA, 15 bp, Homo sapiens
ctcaaaaggaccgct

SEQ ID NO: 1840875 - DNA, 15 bp, Homo sapiens
tcaaaaggaccgctt

SEQ ID NO: 1840876 - DNA, 15 bp, Homo sapiens
caaaaggaccgcttc

SEQ ID NO: 1840877 - DNA, 15 bp, Homo sapiens
aaaaggaccgcttcc

SEQ ID NO: 1840878 - DNA, 15 bp, Homo sapiens
aaaggaccgcttcct

SEQ ID NO: 1840879 - DNA, 15 bp, Homo sapiens
aaggaccgcttcctc

SEQ ID NO: 1840880 - DNA, 15 bp, Homo sapiens
aggaccgcttcctcc

SEQ ID NO: 1840881 - DNA, 15 bp, Homo sapiens
ggaccgcttcctcct

SEQ ID NO: 1840882 - DNA, 15 bp, Homo sapiens
gaccgcttcctcctt

SEQ ID NO: 1840883 - DNA, 15 bp, Homo sapiens
accgcttcctccttc

SEQ ID NO: 1840884 - DNA, 15 bp, Homo sapiens
ccgcttcctccttcc

SEQ ID NO: 1840885 - DNA, 15 bp, Homo sapiens
cgcttcctccttcct

SEQ ID NO: 1840886 - DNA, 15 bp, Homo sapiens
gcttcctccttcctg

SEQ ID NO: 1840887 - DNA, 15 bp, Homo sapiens
cttcctccttcctga

SEQ ID NO: 1840888 - DNA, 15 bp, Homo sapiens
ttcctccttcctgac

SEQ ID NO: 1840889 - DNA, 15 bp, Homo sapiens
tcctccttcctgacc

SEQ ID NO: 1840890 - DNA, 15 bp, Homo sapiens
cctccttcctgacca

SEQ ID NO: 1840891 - DNA, 15 bp, Homo sapiens
ctccttcctgaccag

SEQ ID NO: 1840892 - DNA, 15 bp, Homo sapiens
tccttcctgaccagt

SEQ ID NO: 1840893 - DNA, 15 bp, Homo sapiens
ccttcctgaccagtc

SEQ ID NO: 1840894 - DNA, 15 bp, Homo sapiens
cttcctgaccagtcc

SEQ ID NO: 1840895 - DNA, 15 bp, Homo sapiens
ttcctgaccagtcct

SEQ ID NO: 1840896 - DNA, 15 bp, Homo sapiens
tcctgaccagtcctg

SEQ ID NO: 1840897 - DNA, 15 bp, Homo sapiens
cctgaccagtcctgg

SEQ ID NO: 1840898 - DNA, 15 bp, Homo sapiens
ctgaccagtcctggc

SEQ ID NO: 1840899 - DNA, 15 bp, Homo sapiens
tgaccagtcctggcc

SEQ ID NO: 1840900 - DNA, 15 bp, Homo sapiens
gaccagtcctggccc

SEQ ID NO: 1840901 - DNA, 15 bp, Homo sapiens
accagtcctggcccc

SEQ ID NO: 1840902 - DNA, 15 bp, Homo sapiens
ccagtcctggcccct

SEQ ID NO: 1840903 - DNA, 15 bp, Homo sapiens
cagtcctggccccta

SEQ ID NO: 1840904 - DNA, 15 bp, Homo sapiens
agtcctggcccctag

SEQ ID NO: 1840905 - DNA, 15 bp, Homo sapiens
gtcctggcccctaga

SEQ ID NO: 1840906 - DNA, 15 bp, Homo sapiens
tcctggcccctagag

SEQ ID NO: 1840907 - DNA, 15 bp, Homo sapiens
cctggcccctagagc

SEQ ID NO: 1840908 - DNA, 15 bp, Homo sapiens
ctggcccctagagca

SEQ ID NO: 1840909 - DNA, 15 bp, Homo sapiens
tggcccctagagcaa

SEQ ID NO: 1840910 - DNA, 15 bp, Homo sapiens
ggcccctagagcaag

SEQ ID NO: 1840911 - DNA, 15 bp, Homo sapiens
gcccctagagcaaga

SEQ ID NO: 1840912 - DNA, 15 bp, Homo sapiens
cccctagagcaagac

SEQ ID NO: 1840913 - DNA, 15 bp, Homo sapiens
ccctagagcaagaca

SEQ ID NO: 1840914 - DNA, 15 bp, Homo sapiens
cctagagcaagacac

SEQ ID NO: 1840915 - DNA, 15 bp, Homo sapiens
ctagagcaagacaca

SEQ ID NO: 1840916 - DNA, 15 bp, Homo sapiens
tagagcaagacacag

SEQ ID NO: 1840917 - DNA, 15 bp, Homo sapiens
agagcaagacacaga

SEQ ID NO: 1840918 - DNA, 15 bp, Homo sapiens
gagcaagacacagac

SEQ ID NO: 1840919 - DNA, 15 bp, Homo sapiens
agcaagacacagacc

SEQ ID NO: 1840920 - DNA, 15 bp, Homo sapiens
gcaagacacagacct

SEQ ID NO: 1840921 - DNA, 15 bp, Homo sapiens
caagacacagacctg

SEQ ID NO: 1840922 - DNA, 15 bp, Homo sapiens
aagacacagacctgc

SEQ ID NO: 1840923 - DNA, 15 bp, Homo sapiens
agacacagacctgct

SEQ ID NO: 1840924 - DNA, 15 bp, Homo sapiens
gacacagacctgctc

SEQ ID NO: 1840925 - DNA, 15 bp, Homo sapiens
acacagacctgctct

SEQ ID NO: 1840926 - DNA, 15 bp, Homo sapiens
cacagacctgctcta

SEQ ID NO: 1840927 - DNA, 15 bp, Homo sapiens
acagacctgctctat

SEQ ID NO: 1840928 - DNA, 15 bp, Homo sapiens
cagacctgctctatc

SEQ ID NO: 1840929 - DNA, 15 bp, Homo sapiens
agacctgctctatct

SEQ ID NO: 1840930 - DNA, 15 bp, Homo sapiens
gacctgctctatctc

SEQ ID NO: 1840931 - DNA, 15 bp, Homo sapiens
acctgctctatctcc

SEQ ID NO: 1840932 - DNA, 15 bp, Homo sapiens
cctgctctatctcct

SEQ ID NO: 1840933 - DNA, 15 bp, Homo sapiens
ctgctctatctccta

SEQ ID NO: 1840934 - DNA, 15 bp, Homo sapiens
tgctctatctcctac

SEQ ID NO: 1840935 - DNA, 15 bp, Homo sapiens
gctctatctcctacc

SEQ ID NO: 1840936 - DNA, 15 bp, Homo sapiens
ctctatctcctacct

SEQ ID NO: 1840937 - DNA, 15 bp, Homo sapiens
tctatctcctacctg

SEQ ID NO: 1840938 - DNA, 15 bp, Homo sapiens
ctatctcctacctgc

SEQ ID NO: 1840939 - DNA, 15 bp, Homo sapiens
tatctcctacctgct

SEQ ID NO: 1840940 - DNA, 15 bp, Homo sapiens
atctcctacctgctg

SEQ ID NO: 1840941 - DNA, 15 bp, Homo sapiens
tctcctacctgctgt

SEQ ID NO: 1840942 - DNA, 15 bp, Homo sapiens
ctcctacctgctgtg

SEQ ID NO: 1840943 - DNA, 15 bp, Homo sapiens
tcctacctgctgtgt

SEQ ID NO: 1840944 - DNA, 15 bp, Homo sapiens
cctacctgctgtgtg

SEQ ID NO: 1840945 - DNA, 15 bp, Homo sapiens
ctacctgctgtgtgt

SEQ ID NO: 1840946 - DNA, 15 bp, Homo sapiens
tacctgctgtgtgtc

SEQ ID NO: 1840947 - DNA, 15 bp, Homo sapiens
acctgctgtgtgtcc

SEQ ID NO: 1840948 - DNA, 15 bp, Homo sapiens
cctgctgtgtgtcct

SEQ ID NO: 1840949 - DNA, 15 bp, Homo sapiens
ctgctgtgtgtcctt

SEQ ID NO: 1840950 - DNA, 15 bp, Homo sapiens
tgctgtgtgtccttt

SEQ ID NO: 1840951 - DNA, 15 bp, Homo sapiens
gctgtgtgtcctttg

SEQ ID NO: 1840952 - DNA, 15 bp, Homo sapiens
ctgtgtgtcctttgg

SEQ ID NO: 1840953 - DNA, 15 bp, Homo sapiens
tgtgtgtcctttggc

SEQ ID NO: 1840954 - DNA, 15 bp, Homo sapiens
gtgtgtcctttggca

SEQ ID NO: 1840955 - DNA, 15 bp, Homo sapiens
tgtgtcctttggcag

SEQ ID NO: 1840956 - DNA, 15 bp, Homo sapiens
gtgtcctttggcagt

SEQ ID NO: 1840957 - DNA, 15 bp, Homo sapiens
tgtcctttggcagtt

SEQ ID NO: 1840958 - DNA, 15 bp, Homo sapiens
gtcctttggcagttt

SEQ ID NO: 1840959 - DNA, 15 bp, Homo sapiens
tcctttggcagttta

SEQ ID NO: 1840960 - DNA, 15 bp, Homo sapiens
cctttggcagtttac

SEQ ID NO: 1840961 - DNA, 15 bp, Homo sapiens
ctttggcagtttact

SEQ ID NO: 1840962 - DNA, 15 bp, Homo sapiens
tttggcagtttactt

SEQ ID NO: 1840963 - DNA, 15 bp, Homo sapiens
ttggcagtttacttg

SEQ ID NO: 1840964 - DNA, 15 bp, Homo sapiens
tggcagtttacttgc

SEQ ID NO: 1840965 - DNA, 15 bp, Homo sapiens
ggcagtttacttgcc

SEQ ID NO: 1840966 - DNA, 15 bp, Homo sapiens
gcagtttacttgccc

SEQ ID NO: 1840967 - DNA, 15 bp, Homo sapiens
cagtttacttgccct

SEQ ID NO: 1840968 - DNA, 15 bp, Homo sapiens
agtttacttgccctc

SEQ ID NO: 1840969 - DNA, 15 bp, Homo sapiens
gtttacttgccctct

SEQ ID NO: 1840970 - DNA, 15 bp, Homo sapiens
tttacttgccctctc

SEQ ID NO: 1840971 - DNA, 15 bp, Homo sapiens
ttacttgccctctct

SEQ ID NO: 1840972 - DNA, 15 bp, Homo sapiens
tacttgccctctctg

SEQ ID NO: 1840973 - DNA, 15 bp, Homo sapiens
acttgccctctctgt

SEQ ID NO: 1840974 - DNA, 15 bp, Homo sapiens
cttgccctctctgtt

SEQ ID NO: 1840975 - DNA, 15 bp, Homo sapiens
ttgccctctctgttt

SEQ ID NO: 1840976 - DNA, 15 bp, Homo sapiens
tgccctctctgtttt

SEQ ID NO: 1840977 - DNA, 15 bp, Homo sapiens
gccctctctgtttta

SEQ ID NO: 1840978 - DNA, 15 bp, Homo sapiens
ccctctctgttttac

SEQ ID NO: 1840979 - DNA, 15 bp, Homo sapiens
cctctctgttttact

SEQ ID NO: 1840980 - DNA, 15 bp, Homo sapiens
ctctctgttttactt

SEQ ID NO: 1840981 - DNA, 15 bp, Homo sapiens
tctctgttttacttc

SEQ ID NO: 1840982 - DNA, 15 bp, Homo sapiens
ctctgttttacttcc

SEQ ID NO: 1840983 - DNA, 15 bp, Homo sapiens
tctgttttacttccc

SEQ ID NO: 1840984 - DNA, 15 bp, Homo sapiens
ctgttttacttccct

SEQ ID NO: 1840985 - DNA, 15 bp, Homo sapiens
tgttttacttccctc

SEQ ID NO: 1840986 - DNA, 15 bp, Homo sapiens
gttttacttccctca

SEQ ID NO: 1840987 - DNA, 15 bp, Homo sapiens
ttttacttccctcat

SEQ ID NO: 1840988 - DNA, 15 bp, Homo sapiens
tttacttccctcatc

SEQ ID NO: 1840989 - DNA, 15 bp, Homo sapiens
ttacttccctcatct

SEQ ID NO: 1840990 - DNA, 15 bp, Homo sapiens
tacttccctcatcta

SEQ ID NO: 1840991 - DNA, 15 bp, Homo sapiens
acttccctcatctat

SEQ ID NO: 1840992 - DNA, 15 bp, Homo sapiens
cttccctcatctata

SEQ ID NO: 1840993 - DNA, 15 bp, Homo sapiens
ttccctcatctatac

SEQ ID NO: 1840994 - DNA, 15 bp, Homo sapiens
tccctcatctataca

SEQ ID NO: 1840995 - DNA, 15 bp, Homo sapiens
ccctcatctatacag

SEQ ID NO: 1840996 - DNA, 15 bp, Homo sapiens
cctcatctatacagt

SEQ ID NO: 1840997 - DNA, 15 bp, Homo sapiens
ctcatctatacagtg

SEQ ID NO: 1840998 - DNA, 15 bp, Homo sapiens
tcatctatacagtga

SEQ ID NO: 1840999 - DNA, 15 bp, Homo sapiens
catctatacagtgac

SEQ ID NO: 1841000 - DNA, 15 bp, Homo sapiens
atctatacagtgaca

SEQ ID NO: 1841001 - DNA, 15 bp, Homo sapiens
tctatacagtgacag

SEQ ID NO: 1841002 - DNA, 15 bp, Homo sapiens
ctatacagtgacaga

SEQ ID NO: 1841003 - DNA, 15 bp, Homo sapiens
tatacagtgacagaa

SEQ ID NO: 1841004 - DNA, 15 bp, Homo sapiens
atacagtgacagaaa

SEQ ID NO: 1841005 - DNA, 15 bp, Homo sapiens
tacagtgacagaaat

SEQ ID NO: 1841006 - DNA, 15 bp, Homo sapiens
acagtgacagaaatg

SEQ ID NO: 1841007 - DNA, 15 bp, Homo sapiens
cagtgacagaaatga

SEQ ID NO: 1841008 - DNA, 15 bp, Homo sapiens
agtgacagaaatgat

SEQ ID NO: 1841009 - DNA, 15 bp, Homo sapiens
gtgacagaaatgatc

SEQ ID NO: 1841010 - DNA, 15 bp, Homo sapiens
tgacagaaatgatcc

SEQ ID NO: 1841011 - DNA, 15 bp, Homo sapiens
gacagaaatgatcct

SEQ ID NO: 1841012 - DNA, 15 bp, Homo sapiens
acagaaatgatcctt

SEQ ID NO: 1841013 - DNA, 15 bp, Homo sapiens
cagaaatgatccttt

SEQ ID NO: 1841014 - DNA, 15 bp, Homo sapiens
agaaatgatcctttc

SEQ ID NO: 1841015 - DNA, 15 bp, Homo sapiens
gaaatgatcctttct

SEQ ID NO: 1841016 - DNA, 15 bp, Homo sapiens
aaatgatcctttctt

SEQ ID NO: 1841017 - DNA, 15 bp, Homo sapiens
aatgatcctttcttg

SEQ ID NO: 1841018 - DNA, 15 bp, Homo sapiens
atgatcctttcttga

SEQ ID NO: 1841019 - DNA, 15 bp, Homo sapiens
tgatcctttcttgac

SEQ ID NO: 1841020 - DNA, 15 bp, Homo sapiens
gatcctttcttgacc

SEQ ID NO: 1841021 - DNA, 15 bp, Homo sapiens
atcctttcttgacca

SEQ ID NO: 1841022 - DNA, 15 bp, Homo sapiens
tcctttcttgaccaa

SEQ ID NO: 1841023 - DNA, 15 bp, Homo sapiens
cctttcttgaccaac

SEQ ID NO: 1841024 - DNA, 15 bp, Homo sapiens
ctttcttgaccaact

SEQ ID NO: 1841025 - DNA, 15 bp, Homo sapiens
tttcttgaccaactc

SEQ ID NO: 1841026 - DNA, 15 bp, Homo sapiens
ttcttgaccaactca

SEQ ID NO: 1841027 - DNA, 15 bp, Homo sapiens
tcttgaccaactcat

SEQ ID NO: 1841028 - DNA, 15 bp, Homo sapiens
cttgaccaactcatg

SEQ ID NO: 1841029 - DNA, 15 bp, Homo sapiens
ttgaccaactcatgg

SEQ ID NO: 1841030 - DNA, 15 bp, Homo sapiens
tgaccaactcatggt

SEQ ID NO: 1841031 - DNA, 15 bp, Homo sapiens
gaccaactcatggtc

SEQ ID NO: 1841032 - DNA, 15 bp, Homo sapiens
accaactcatggtca

SEQ ID NO: 1841033 - DNA, 15 bp, Homo sapiens
ccaactcatggtcag

SEQ ID NO: 1841034 - DNA, 15 bp, Homo sapiens
caactcatggtcagt

SEQ ID NO: 1841035 - DNA, 15 bp, Homo sapiens
aactcatggtcagtt

SEQ ID NO: 1841036 - DNA, 15 bp, Homo sapiens
actcatggtcagttt

SEQ ID NO: 1841037 - DNA, 15 bp, Homo sapiens
ctcatggtcagtttt

SEQ ID NO: 1841038 - DNA, 15 bp, Homo sapiens
tcatggtcagttttc

SEQ ID NO: 1841039 - DNA, 15 bp, Homo sapiens
catggtcagttttca

SEQ ID NO: 1841040 - DNA, 15 bp, Homo sapiens
atggtcagttttcag

SEQ ID NO: 1841041 - DNA, 15 bp, Homo sapiens
tggtcagttttcagc

SEQ ID NO: 1841042 - DNA, 15 bp, Homo sapiens
ggtcagttttcagca

SEQ ID NO: 1841043 - DNA, 15 bp, Homo sapiens
gtcagttttcagcat

SEQ ID NO: 1841044 - DNA, 15 bp, Homo sapiens
tcagttttcagcatg

SEQ ID NO: 1841045 - DNA, 15 bp, Homo sapiens
cagttttcagcatgg

SEQ ID NO: 1841046 - DNA, 15 bp, Homo sapiens
agttttcagcatggt

SEQ ID NO: 1841047 - DNA, 15 bp, Homo sapiens
gttttcagcatggtc

SEQ ID NO: 1841048 - DNA, 15 bp, Homo sapiens
ttttcagcatggtcc

SEQ ID NO: 1841049 - DNA, 15 bp, Homo sapiens
tttcagcatggtccc

SEQ ID NO: 1841050 - DNA, 15 bp, Homo sapiens
ttcagcatggtccct

SEQ ID NO: 1841051 - DNA, 15 bp, Homo sapiens
tcagcatggtcccta

SEQ ID NO: 1841052 - DNA, 15 bp, Homo sapiens
cagcatggtccctac

SEQ ID NO: 1841053 - DNA, 15 bp, Homo sapiens
agcatggtccctaca

SEQ ID NO: 1841054 - DNA, 15 bp, Homo sapiens
gcatggtccctacac

SEQ ID NO: 1841055 - DNA, 15 bp, Homo sapiens
catggtccctacaca

SEQ ID NO: 1841056 - DNA, 15 bp, Homo sapiens
atggtccctacacag

SEQ ID NO: 1841057 - DNA, 15 bp, Homo sapiens
tggtccctacacaga

SEQ ID NO: 1841058 - DNA, 15 bp, Homo sapiens
ggtccctacacagag

SEQ ID NO: 1841059 - DNA, 15 bp, Homo sapiens
gtccctacacagagc

SEQ ID NO: 1841060 - DNA, 15 bp, Homo sapiens
tccctacacagagcc

SEQ ID NO: 1841061 - DNA, 15 bp, Homo sapiens
ccctacacagagcct

SEQ ID NO: 1841062 - DNA, 15 bp, Homo sapiens
cctacacagagcctg

SEQ ID NO: 1841063 - DNA, 15 bp, Homo sapiens
ctacacagagcctgg

SEQ ID NO: 1841064 - DNA, 15 bp, Homo sapiens
tacacagagcctggc

SEQ ID NO: 1841065 - DNA, 15 bp, Homo sapiens
acacagagcctggcc

SEQ ID NO: 1841066 - DNA, 15 bp, Homo sapiens
cacagagcctggcca

SEQ ID NO: 1841067 - DNA, 15 bp, Homo sapiens
acagagcctggccaa

SEQ ID NO: 1841068 - DNA, 15 bp, Homo sapiens
cagagcctggccaaa

SEQ ID NO: 1841069 - DNA, 15 bp, Homo sapiens
agagcctggccaaac

SEQ ID NO: 1841070 - DNA, 15 bp, Homo sapiens
gagcctggccaaaca

SEQ ID NO: 1841071 - DNA, 15 bp, Homo sapiens
agcctggccaaacat

SEQ ID NO: 1841072 - DNA, 15 bp, Homo sapiens
gcctggccaaacatg

SEQ ID NO: 1841073 - DNA, 15 bp, Homo sapiens
cctggccaaacatga

SEQ ID NO: 1841074 - DNA, 15 bp, Homo sapiens
ctggccaaacatgag

SEQ ID NO: 1841075 - DNA, 15 bp, Homo sapiens
tggccaaacatgagg

SEQ ID NO: 1841076 - DNA, 15 bp, Homo sapiens
ggccaaacatgaggg

SEQ ID NO: 1841077 - DNA, 15 bp, Homo sapiens
gccaaacatgagggg

SEQ ID NO: 1841078 - DNA, 15 bp, Homo sapiens
ccaaacatgaggggc

SEQ ID NO: 1841079 - DNA, 15 bp, Homo sapiens
caaacatgaggggct

SEQ ID NO: 1841080 - DNA, 15 bp, Homo sapiens
aaacatgaggggctt

SEQ ID NO: 1841081 - DNA, 15 bp, Homo sapiens
aacatgaggggcttc

SEQ ID NO: 1841082 - DNA, 15 bp, Homo sapiens
acatgaggggcttca

SEQ ID NO: 1841083 - DNA, 15 bp, Homo sapiens
catgaggggcttcat

SEQ ID NO: 1841084 - DNA, 15 bp, Homo sapiens
atgaggggcttcata

SEQ ID NO: 1841085 - DNA, 15 bp, Homo sapiens
tgaggggcttcataa

SEQ ID NO: 1841086 - DNA, 15 bp, Homo sapiens
gaggggcttcataaa

SEQ ID NO: 1841087 - DNA, 15 bp, Homo sapiens
aggggcttcataaat

SEQ ID NO: 1841088 - DNA, 15 bp, Homo sapiens
ggggcttcataaatg

SEQ ID NO: 1841089 - DNA, 15 bp, Homo sapiens
gggcttcataaatgc

SEQ ID NO: 1841090 - DNA, 15 bp, Homo sapiens
ggcttcataaatgca

SEQ ID NO: 1841091 - DNA, 15 bp, Homo sapiens
gcttcataaatgcat

SEQ ID NO: 1841092 - DNA, 15 bp, Homo sapiens
cttcataaatgcatc

SEQ ID NO: 1841093 - DNA, 15 bp, Homo sapiens
ttcataaatgcatct

SEQ ID NO: 1841094 - DNA, 15 bp, Homo sapiens
tcataaatgcatctc

SEQ ID NO: 1841095 - DNA, 15 bp, Homo sapiens
cataaatgcatctca

SEQ ID NO: 1841096 - DNA, 15 bp, Homo sapiens
ataaatgcatctcac

SEQ ID NO: 1841097 - DNA, 15 bp, Homo sapiens
taaatgcatctcact

SEQ ID NO: 1841098 - DNA, 15 bp, Homo sapiens
aaatgcatctcactg

SEQ ID NO: 1841099 - DNA, 15 bp, Homo sapiens
aatgcatctcactgg

SEQ ID NO: 1841100 - DNA, 15 bp, Homo sapiens
atgcatctcactggt

SEQ ID NO: 1841101 - DNA, 15 bp, Homo sapiens
tgcatctcactggta

SEQ ID NO: 1841102 - DNA, 15 bp, Homo sapiens
gcatctcactggtat

SEQ ID NO: 1841103 - DNA, 15 bp, Homo sapiens
catctcactggtatt

SEQ ID NO: 1841104 - DNA, 15 bp, Homo sapiens
atctcactggtattt

SEQ ID NO: 1841105 - DNA, 15 bp, Homo sapiens
tctcactggtatttc

SEQ ID NO: 1841106 - DNA, 15 bp, Homo sapiens
ctcactggtatttcc

SEQ ID NO: 1841107 - DNA, 15 bp, Homo sapiens
tcactggtatttcct

SEQ ID NO: 1841108 - DNA, 15 bp, Homo sapiens
cactggtatttcctg

SEQ ID NO: 1841109 - DNA, 15 bp, Homo sapiens
actggtatttcctgc

SEQ ID NO: 1841110 - DNA, 15 bp, Homo sapiens
ctggtatttcctgcg

SEQ ID NO: 1841111 - DNA, 15 bp, Homo sapiens
tggtatttcctgcgg

SEQ ID NO: 1841112 - DNA, 15 bp, Homo sapiens
ggtatttcctgcggt

SEQ ID NO: 1841113 - DNA, 15 bp, Homo sapiens
gtatttcctgcggtc

SEQ ID NO: 1841114 - DNA, 15 bp, Homo sapiens
tatttcctgcggtcc

SEQ ID NO: 1841115 - DNA, 15 bp, Homo sapiens
atttcctgcggtcca

SEQ ID NO: 1841116 - DNA, 15 bp, Homo sapiens
tttcctgcggtccaa

SEQ ID NO: 1841117 - DNA, 15 bp, Homo sapiens
ttcctgcggtccaaa

SEQ ID NO: 1841118 - DNA, 15 bp, Homo sapiens
tcctgcggtccaaac

SEQ ID NO: 1841119 - DNA, 15 bp, Homo sapiens
cctgcggtccaaaca

SEQ ID NO: 1841120 - DNA, 15 bp, Homo sapiens
ctgcggtccaaacag

SEQ ID NO: 1841121 - DNA, 15 bp, Homo sapiens
tgcggtccaaacaga

SEQ ID NO: 1841122 - DNA, 15 bp, Homo sapiens
gcggtccaaacagat

SEQ ID NO: 1841123 - DNA, 15 bp, Homo sapiens
cggtccaaacagatc

SEQ ID NO: 1841124 - DNA, 15 bp, Homo sapiens
ggtccaaacagatca

SEQ ID NO: 1841125 - DNA, 15 bp, Homo sapiens
gtccaaacagatcaa

SEQ ID NO: 1841126 - DNA, 15 bp, Homo sapiens
tccaaacagatcaag

SEQ ID NO: 1841127 - DNA, 15 bp, Homo sapiens
ccaaacagatcaagc

SEQ ID NO: 1841128 - DNA, 15 bp, Homo sapiens
caaacagatcaagcc

SEQ ID NO: 1841129 - DNA, 15 bp, Homo sapiens
aaacagatcaagcct

SEQ ID NO: 1841130 - DNA, 15 bp, Homo sapiens
aacagatcaagcctt

SEQ ID NO: 1841131 - DNA, 15 bp, Homo sapiens
acagatcaagccttt

SEQ ID NO: 1841132 - DNA, 15 bp, Homo sapiens
cagatcaagcctttt

SEQ ID NO: 1841133 - DNA, 15 bp, Homo sapiens
agatcaagccttttc

SEQ ID NO: 1841134 - DNA, 15 bp, Homo sapiens
gatcaagccttttct

SEQ ID NO: 1841135 - DNA, 15 bp, Homo sapiens
atcaagccttttctg

SEQ ID NO: 1841136 - DNA, 15 bp, Homo sapiens
tcaagccttttctgg

SEQ ID NO: 1841137 - DNA, 15 bp, Homo sapiens
caagccttttctggt

SEQ ID NO: 1841138 - DNA, 15 bp, Homo sapiens
aagccttttctggtc

SEQ ID NO: 1841139 - DNA, 15 bp, Homo sapiens
agccttttctggtct

SEQ ID NO: 1841140 - DNA, 15 bp, Homo sapiens
gccttttctggtctc

SEQ ID NO: 1841141 - DNA, 15 bp, Homo sapiens
ccttttctggtctcc

SEQ ID NO: 1841142 - DNA, 15 bp, Homo sapiens
cttttctggtctcct

SEQ ID NO: 1841143 - DNA, 15 bp, Homo sapiens
ttttctggtctccta

SEQ ID NO: 1841144 - DNA, 15 bp, Homo sapiens
tttctggtctcctaa

SEQ ID NO: 1841145 - DNA, 15 bp, Homo sapiens
ttctggtctcctaac

SEQ ID NO: 1841146 - DNA, 15 bp, Homo sapiens
tctggtctcctaact

SEQ ID NO: 1841147 - DNA, 15 bp, Homo sapiens
ctggtctcctaactt

SEQ ID NO: 1841148 - DNA, 15 bp, Homo sapiens
tggtctcctaacttt

SEQ ID NO: 1841149 - DNA, 15 bp, Homo sapiens
ggtctcctaactttt

SEQ ID NO: 1841150 - DNA, 15 bp, Homo sapiens
gtctcctaactttta

SEQ ID NO: 1841151 - DNA, 15 bp, Homo sapiens
tctcctaacttttac

SEQ ID NO: 1841152 - DNA, 15 bp, Homo sapiens
ctcctaacttttacc

SEQ ID NO: 1841153 - DNA, 15 bp, Homo sapiens
tcctaacttttacct

SEQ ID NO: 1841154 - DNA, 15 bp, Homo sapiens
cctaacttttacctg

SEQ ID NO: 1841155 - DNA, 15 bp, Homo sapiens
ctaacttttacctgt

SEQ ID NO: 1841156 - DNA, 15 bp, Homo sapiens
taacttttacctgtg

SEQ ID NO: 1841157 - DNA, 15 bp, Homo sapiens
aacttttacctgtgc

SEQ ID NO: 1841158 - DNA, 15 bp, Homo sapiens
acttttacctgtgca

SEQ ID NO: 1841159 - DNA, 15 bp, Homo sapiens
cttttacctgtgcag

SEQ ID NO: 1841160 - DNA, 15 bp, Homo sapiens
ttttacctgtgcagt

SEQ ID NO: 1841161 - DNA, 15 bp, Homo sapiens
tttacctgtgcagtt

SEQ ID NO: 1841162 - DNA, 15 bp, Homo sapiens
ttacctgtgcagtta

SEQ ID NO: 1841163 - DNA, 15 bp, Homo sapiens
tacctgtgcagttat

SEQ ID NO: 1841164 - DNA, 15 bp, Homo sapiens
acctgtgcagttatt

SEQ ID NO: 1841165 - DNA, 15 bp, Homo sapiens
cctgtgcagttattt

SEQ ID NO: 1841166 - DNA, 15 bp, Homo sapiens
ctgtgcagttatttc

SEQ ID NO: 1841167 - DNA, 15 bp, Homo sapiens
tgtgcagttatttct

SEQ ID NO: 1841168 - DNA, 15 bp, Homo sapiens
gtgcagttatttctg

SEQ ID NO: 1841169 - DNA, 15 bp, Homo sapiens
tgcagttatttctgc

SEQ ID NO: 1841170 - DNA, 15 bp, Homo sapiens
gcagttatttctgcc

SEQ ID NO: 1841171 - DNA, 15 bp, Homo sapiens
cagttatttctgcct

SEQ ID NO: 1841172 - DNA, 15 bp, Homo sapiens
agttatttctgccta

SEQ ID NO: 1841173 - DNA, 15 bp, Homo sapiens
gttatttctgcctag

SEQ ID NO: 1841174 - DNA, 15 bp, Homo sapiens
ttatttctgcctaga

SEQ ID NO: 1841175 - DNA, 15 bp, Homo sapiens
tatttctgcctagaa

SEQ ID NO: 1841176 - DNA, 15 bp, Homo sapiens
atttctgcctagaat

SEQ ID NO: 1841177 - DNA, 15 bp, Homo sapiens
tttctgcctagaatg

SEQ ID NO: 1841178 - DNA, 15 bp, Homo sapiens
ttctgcctagaatgg

SEQ ID NO: 1841179 - DNA, 15 bp, Homo sapiens
tctgcctagaatggt

SEQ ID NO: 1841180 - DNA, 15 bp, Homo sapiens
ctgcctagaatggtt

SEQ ID NO: 1841181 - DNA, 15 bp, Homo sapiens
tgcctagaatggttt

SEQ ID NO: 1841182 - DNA, 15 bp, Homo sapiens
gcctagaatggtttc

SEQ ID NO: 1841183 - DNA, 15 bp, Homo sapiens
cctagaatggtttct

SEQ ID NO: 1841184 - DNA, 15 bp, Homo sapiens
ctagaatggtttctt

SEQ ID NO: 1841185 - DNA, 15 bp, Homo sapiens
tagaatggtttcttt

SEQ ID NO: 1841186 - DNA, 15 bp, Homo sapiens
agaatggtttctttt

SEQ ID NO: 1841187 - DNA, 15 bp, Homo sapiens
gaatggtttcttttt

SEQ ID NO: 1841188 - DNA, 15 bp, Homo sapiens
aatggtttctttttt

SEQ ID NO: 1841189 - DNA, 15 bp, Homo sapiens
atggtttcttttttc

SEQ ID NO: 1841190 - DNA, 15 bp, Homo sapiens
tggtttcttttttct

SEQ ID NO: 1841191 - DNA, 15 bp, Homo sapiens
ggtttcttttttctt

SEQ ID NO: 1841192 - DNA, 15 bp, Homo sapiens
gtttcttttttcttc

SEQ ID NO: 1841193 - DNA, 15 bp, Homo sapiens
tttcttttttcttct

SEQ ID NO: 1841194 - DNA, 15 bp, Homo sapiens
ttcttttttcttctc

SEQ ID NO: 1841195 - DNA, 15 bp, Homo sapiens
tcttttttcttctct

SEQ ID NO: 1841196 - DNA, 15 bp, Homo sapiens
cttttttcttctctg

SEQ ID NO: 1841197 - DNA, 15 bp, Homo sapiens
ttttttcttctctga

SEQ ID NO: 1841198 - DNA, 15 bp, Homo sapiens
tttttcttctctgaa

SEQ ID NO: 1841199 - DNA, 15 bp, Homo sapiens
ttttcttctctgaac

SEQ ID NO: 1841200 - DNA, 15 bp, Homo sapiens
tttcttctctgaact

SEQ ID NO: 1841201 - DNA, 15 bp, Homo sapiens
ttcttctctgaactc

SEQ ID NO: 1841202 - DNA, 15 bp, Homo sapiens
tcttctctgaactcc

SEQ ID NO: 1841203 - DNA, 15 bp, Homo sapiens
cttctctgaactcct

SEQ ID NO: 1841204 - DNA, 15 bp, Homo sapiens
ttctctgaactccta

SEQ ID NO: 1841205 - DNA, 15 bp, Homo sapiens
tctctgaactcctac

SEQ ID NO: 1841206 - DNA, 15 bp, Homo sapiens
ctctgaactcctact

SEQ ID NO: 1841207 - DNA, 15 bp, Homo sapiens
tctgaactcctactc

SEQ ID NO: 1841208 - DNA, 15 bp, Homo sapiens
ctgaactcctactca

SEQ ID NO: 1841209 - DNA, 15 bp, Homo sapiens
tgaactcctactcat

SEQ ID NO: 1841210 - DNA, 15 bp, Homo sapiens
gaactcctactcatc

SEQ ID NO: 1841211 - DNA, 15 bp, Homo sapiens
aactcctactcatcc

SEQ ID NO: 1841212 - DNA, 15 bp, Homo sapiens
actcctactcatcct

SEQ ID NO: 1841213 - DNA, 15 bp, Homo sapiens
ctcctactcatcctt

SEQ ID NO: 1841214 - DNA, 15 bp, Homo sapiens
tcctactcatccttc

SEQ ID NO: 1841215 - DNA, 15 bp, Homo sapiens
cctactcatccttca

SEQ ID NO: 1841216 - DNA, 15 bp, Homo sapiens
ctactcatccttcaa

SEQ ID NO: 1841217 - DNA, 15 bp, Homo sapiens
tactcatccttcaaa

SEQ ID NO: 1841218 - DNA, 15 bp, Homo sapiens
actcatccttcaaag

SEQ ID NO: 1841219 - DNA, 15 bp, Homo sapiens
ctcatccttcaaagc

SEQ ID NO: 1841220 - DNA, 15 bp, Homo sapiens
tcatccttcaaagcc

SEQ ID NO: 1841221 - DNA, 15 bp, Homo sapiens
catccttcaaagccc

SEQ ID NO: 1841222 - DNA, 15 bp, Homo sapiens
atccttcaaagccca

SEQ ID NO: 1841223 - DNA, 15 bp, Homo sapiens
tccttcaaagcccag

SEQ ID NO: 1841224 - DNA, 15 bp, Homo sapiens
ccttcaaagcccagt

SEQ ID NO: 1841225 - DNA, 15 bp, Homo sapiens
cttcaaagcccagtt

SEQ ID NO: 1841226 - DNA, 15 bp, Homo sapiens
ttcaaagcccagttc

SEQ ID NO: 1841227 - DNA, 15 bp, Homo sapiens
tcaaagcccagttcc

SEQ ID NO: 1841228 - DNA, 15 bp, Homo sapiens
caaagcccagttcca

SEQ ID NO: 1841229 - DNA, 15 bp, Homo sapiens
aaagcccagttccaa

SEQ ID NO: 1841230 - DNA, 15 bp, Homo sapiens
aagcccagttccaaa

SEQ ID NO: 1841231 - DNA, 15 bp, Homo sapiens
agcccagttccaaaa

SEQ ID NO: 1841232 - DNA, 15 bp, Homo sapiens
gcccagttccaaaat

SEQ ID NO: 1841233 - DNA, 15 bp, Homo sapiens
cccagttccaaaatc

SEQ ID NO: 1841234 - DNA, 15 bp, Homo sapiens
ccagttccaaaatcc

SEQ ID NO: 1841235 - DNA, 15 bp, Homo sapiens
cagttccaaaatccc

SEQ ID NO: 1841236 - DNA, 15 bp, Homo sapiens
agttccaaaatccct

SEQ ID NO: 1841237 - DNA, 15 bp, Homo sapiens
tccaaaatcccttgc

SEQ ID NO: 1841238 - DNA, 15 bp, Homo sapiens
ccaaaatcccttgct

SEQ ID NO: 1841239 - DNA, 15 bp, Homo sapiens
caaaatcccttgctc

SEQ ID NO: 1841240 - DNA, 15 bp, Homo sapiens
aaaatcccttgctct

SEQ ID NO: 1841241 - DNA, 15 bp, Homo sapiens
aaatcccttgctctt

SEQ ID NO: 1841242 - DNA, 15 bp, Homo sapiens
aatcccttgctctta

SEQ ID NO: 1841243 - DNA, 15 bp, Homo sapiens
atcccttgctcttat

SEQ ID NO: 1841244 - DNA, 15 bp, Homo sapiens
tcccttgctcttatc

SEQ ID NO: 1841245 - DNA, 15 bp, Homo sapiens
cccttgctcttatca

SEQ ID NO: 1841246 - DNA, 15 bp, Homo sapiens
ccttgctcttatcag

SEQ ID NO: 1841247 - DNA, 15 bp, Homo sapiens
cttgctcttatcagc

SEQ ID NO: 1841248 - DNA, 15 bp, Homo sapiens
ttgctcttatcagct

SEQ ID NO: 1841249 - DNA, 15 bp, Homo sapiens
tgctcttatcagctt

SEQ ID NO: 1841250 - DNA, 15 bp, Homo sapiens
gctcttatcagcttt

SEQ ID NO: 1841251 - DNA, 15 bp, Homo sapiens
ctcttatcagctttg

SEQ ID NO: 1841252 - DNA, 15 bp, Homo sapiens
tcttatcagctttgc

SEQ ID NO: 1841253 - DNA, 15 bp, Homo sapiens
cttatcagctttgcc

SEQ ID NO: 1841254 - DNA, 15 bp, Homo sapiens
ttatcagctttgcct

SEQ ID NO: 1841255 - DNA, 15 bp, Homo sapiens
tatcagctttgcctc

SEQ ID NO: 1841256 - DNA, 15 bp, Homo sapiens
atcagctttgcctct

SEQ ID NO: 1841257 - DNA, 15 bp, Homo sapiens
tcagctttgcctctt

SEQ ID NO: 1841258 - DNA, 15 bp, Homo sapiens
cagctttgcctcttg

SEQ ID NO: 1841259 - DNA, 15 bp, Homo sapiens
agctttgcctcttgt

SEQ ID NO: 1841260 - DNA, 15 bp, Homo sapiens
gctttgcctcttgtt

SEQ ID NO: 1841261 - DNA, 15 bp, Homo sapiens
ctttgcctcttgttc

SEQ ID NO: 1841262 - DNA, 15 bp, Homo sapiens
tttgcctcttgttcc

SEQ ID NO: 1841263 - DNA, 15 bp, Homo sapiens
ttgcctcttgttccc

SEQ ID NO: 1841264 - DNA, 15 bp, Homo sapiens
tgcctcttgttccca

SEQ ID NO: 1841265 - DNA, 15 bp, Homo sapiens
gcctcttgttcccaa

SEQ ID NO: 1841266 - DNA, 15 bp, Homo sapiens
cctcttgttcccaag

SEQ ID NO: 1841267 - DNA, 15 bp, Homo sapiens
ctcttgttcccaagc

SEQ ID NO: 1841268 - DNA, 15 bp, Homo sapiens
tcttgttcccaagca

SEQ ID NO: 1841269 - DNA, 15 bp, Homo sapiens
cttgttcccaagcag

SEQ ID NO: 1841270 - DNA, 15 bp, Homo sapiens
ttgttcccaagcaga

SEQ ID NO: 1841271 - DNA, 15 bp, Homo sapiens
tgttcccaagcagag

SEQ ID NO: 1841272 - DNA, 15 bp, Homo sapiens
gttcccaagcagaga

SEQ ID NO: 1841273 - DNA, 15 bp, Homo sapiens
ttcccaagcagagat

SEQ ID NO: 1841274 - DNA, 15 bp, Homo sapiens
tcccaagcagagatc

SEQ ID NO: 1841275 - DNA, 15 bp, Homo sapiens
cccaagcagagatct

SEQ ID NO: 1841276 - DNA, 15 bp, Homo sapiens
ccaagcagagatcta

SEQ ID NO: 1841277 - DNA, 15 bp, Homo sapiens
caagcagagatctaa

SEQ ID NO: 1841278 - DNA, 15 bp, Homo sapiens
aagcagagatctaac

SEQ ID NO: 1841279 - DNA, 15 bp, Homo sapiens
agcagagatctaact

SEQ ID NO: 1841280 - DNA, 15 bp, Homo sapiens
gcagagatctaactc

SEQ ID NO: 1841281 - DNA, 15 bp, Homo sapiens
cagagatctaactcc

SEQ ID NO: 1841282 - DNA, 15 bp, Homo sapiens
agagatctaactccc

SEQ ID NO: 1841283 - DNA, 15 bp, Homo sapiens
gagatctaactcccc

SEQ ID NO: 1841284 - DNA, 15 bp, Homo sapiens
agatctaactcccca

SEQ ID NO: 1841285 - DNA, 15 bp, Homo sapiens
gatctaactccccaa

SEQ ID NO: 1841286 - DNA, 15 bp, Homo sapiens
atctaactccccaaa

SEQ ID NO: 1841287 - DNA, 15 bp, Homo sapiens
tctaactccccaaat

SEQ ID NO: 1841288 - DNA, 15 bp, Homo sapiens
ctaactccccaaatt

SEQ ID NO: 1841289 - DNA, 15 bp, Homo sapiens
taactccccaaattg

SEQ ID NO: 1841290 - DNA, 15 bp, Homo sapiens
aactccccaaattgg

SEQ ID NO: 1841291 - DNA, 15 bp, Homo sapiens
actccccaaattggg

SEQ ID NO: 1841292 - DNA, 15 bp, Homo sapiens
ctccccaaattgggt

SEQ ID NO: 1841293 - DNA, 15 bp, Homo sapiens
tccccaaattgggtt

SEQ ID NO: 1841294 - DNA, 15 bp, Homo sapiens
ccccaaattgggttc

SEQ ID NO: 1841295 - DNA, 15 bp, Homo sapiens
cccaaattgggttcc

SEQ ID NO: 1841296 - DNA, 15 bp, Homo sapiens
ccaaattgggttccc

SEQ ID NO: 1841297 - DNA, 15 bp, Homo sapiens
caaattgggttcccg

SEQ ID NO: 1841298 - DNA, 15 bp, Homo sapiens
aaattgggttcccgc

SEQ ID NO: 1841299 - DNA, 15 bp, Homo sapiens
aattgggttcccgcc

SEQ ID NO: 1841300 - DNA, 15 bp, Homo sapiens
attgggttcccgcct

SEQ ID NO: 1841301 - DNA, 15 bp, Homo sapiens
ttgggttcccgccta

SEQ ID NO: 1841302 - DNA, 15 bp, Homo sapiens
tgggttcccgcctac

SEQ ID NO: 1841303 - DNA, 15 bp, Homo sapiens
gggttcccgcctacc

SEQ ID NO: 1841304 - DNA, 15 bp, Homo sapiens
ggttcccgcctaccc

SEQ ID NO: 1841305 - DNA, 15 bp, Homo sapiens
gttcccgcctaccct

SEQ ID NO: 1841306 - DNA, 15 bp, Homo sapiens
ttcccgcctaccctg

SEQ ID NO: 1841307 - DNA, 15 bp, Homo sapiens
tcccgcctaccctgg

SEQ ID NO: 1841308 - DNA, 15 bp, Homo sapiens
cccgcctaccctggc

SEQ ID NO: 1841309 - DNA, 15 bp, Homo sapiens
ccgcctaccctggct

SEQ ID NO: 1841310 - DNA, 15 bp, Homo sapiens
cgcctaccctggctg

SEQ ID NO: 1841311 - DNA, 15 bp, Homo sapiens
gcctaccctggctgg

SEQ ID NO: 1841312 - DNA, 15 bp, Homo sapiens
cctaccctggctggg

SEQ ID NO: 1841313 - DNA, 15 bp, Homo sapiens
ctaccctggctgggt

SEQ ID NO: 1841314 - DNA, 15 bp, Homo sapiens
taccctggctgggtc

SEQ ID NO: 1841315 - DNA, 15 bp, Homo sapiens
accctggctgggtct

SEQ ID NO: 1841316 - DNA, 15 bp, Homo sapiens
ccctggctgggtctc

SEQ ID NO: 1841317 - DNA, 15 bp, Homo sapiens
cctggctgggtctct

SEQ ID NO: 1841318 - DNA, 15 bp, Homo sapiens
ctggctgggtctctg

SEQ ID NO: 1841319 - DNA, 15 bp, Homo sapiens
tggctgggtctctgc

SEQ ID NO: 1841320 - DNA, 15 bp, Homo sapiens
ggctgggtctctgcc

SEQ ID NO: 1841321 - DNA, 15 bp, Homo sapiens
gctgggtctctgcct

SEQ ID NO: 1841322 - DNA, 15 bp, Homo sapiens
ctgggtctctgcctc

SEQ ID NO: 1841323 - DNA, 15 bp, Homo sapiens
tgggtctctgcctct

SEQ ID NO: 1841324 - DNA, 15 bp, Homo sapiens
gggtctctgcctctg

SEQ ID NO: 1841325 - DNA, 15 bp, Homo sapiens
ggtctctgcctctgc

SEQ ID NO: 1841326 - DNA, 15 bp, Homo sapiens
gtctctgcctctgcc

SEQ ID NO: 1841327 - DNA, 15 bp, Homo sapiens
tctctgcctctgcct

SEQ ID NO: 1841328 - DNA, 15 bp, Homo sapiens
ctctgcctctgcctc

SEQ ID NO: 1841329 - DNA, 15 bp, Homo sapiens
tctgcctctgcctca

SEQ ID NO: 1841330 - DNA, 15 bp, Homo sapiens
ctgcctctgcctcac

SEQ ID NO: 1841331 - DNA, 15 bp, Homo sapiens
tgcctctgcctcacc

SEQ ID NO: 1841332 - DNA, 15 bp, Homo sapiens
gcctctgcctcaccc

SEQ ID NO: 1841333 - DNA, 15 bp, Homo sapiens
cctctgcctcacccc

SEQ ID NO: 1841334 - DNA, 15 bp, Homo sapiens
ctctgcctcacccct

SEQ ID NO: 1841335 - DNA, 15 bp, Homo sapiens
tctgcctcacccctg

SEQ ID NO: 1841336 - DNA, 15 bp, Homo sapiens
ctgcctcacccctgg

SEQ ID NO: 1841337 - DNA, 15 bp, Homo sapiens
tgcctcacccctggc

SEQ ID NO: 1841338 - DNA, 15 bp, Homo sapiens
gcctcacccctggct

SEQ ID NO: 1841339 - DNA, 15 bp, Homo sapiens
cctcacccctggctc

SEQ ID NO: 1841340 - DNA, 15 bp, Homo sapiens
ctcacccctggctcc

SEQ ID NO: 1841341 - DNA, 15 bp, Homo sapiens
tcacccctggctcca

SEQ ID NO: 1841342 - DNA, 15 bp, Homo sapiens
cacccctggctccat

SEQ ID NO: 1841343 - DNA, 15 bp, Homo sapiens
acccctggctccatg

SEQ ID NO: 1841344 - DNA, 15 bp, Homo sapiens
cccctggctccatgg

SEQ ID NO: 1841345 - DNA, 15 bp, Homo sapiens
ccctggctccatggg

SEQ ID NO: 1841346 - DNA, 15 bp, Homo sapiens
cctggctccatgggc

SEQ ID NO: 1841347 - DNA, 15 bp, Homo sapiens
ctggctccatgggct

SEQ ID NO: 1841348 - DNA, 15 bp, Homo sapiens
tggctccatgggctg

SEQ ID NO: 1841349 - DNA, 15 bp, Homo sapiens
ggctccatgggctgg

SEQ ID NO: 1841350 - DNA, 15 bp, Homo sapiens
gctccatgggctgga

SEQ ID NO: 1841351 - DNA, 15 bp, Homo sapiens
ctccatgggctggaa

SEQ ID NO: 1841352 - DNA, 15 bp, Homo sapiens
tccatgggctggaag

SEQ ID NO: 1841353 - DNA, 15 bp, Homo sapiens
ccatgggctggaagg

SEQ ID NO: 1841354 - DNA, 15 bp, Homo sapiens
catgggctggaaggg

SEQ ID NO: 1841355 - DNA, 15 bp, Homo sapiens
atgggctggaagggt

SEQ ID NO: 1841356 - DNA, 15 bp, Homo sapiens
tgggctggaagggtc

SEQ ID NO: 1841357 - DNA, 15 bp, Homo sapiens
gggctggaagggtct

SEQ ID NO: 1841358 - DNA, 15 bp, Homo sapiens
ggctggaagggtctg

SEQ ID NO: 1841359 - DNA, 15 bp, Homo sapiens
gctggaagggtctgg

SEQ ID NO: 1841360 - DNA, 15 bp, Homo sapiens
ctggaagggtctggg

SEQ ID NO: 1841361 - DNA, 15 bp, Homo sapiens
tggaagggtctgggc

SEQ ID NO: 1841362 - DNA, 15 bp, Homo sapiens
ggaagggtctgggct

SEQ ID NO: 1841363 - DNA, 15 bp, Homo sapiens
gaagggtctgggctg

SEQ ID NO: 1841364 - DNA, 15 bp, Homo sapiens
aagggtctgggctga

SEQ ID NO: 1841365 - DNA, 15 bp, Homo sapiens
agggtctgggctgat

SEQ ID NO: 1841366 - DNA, 15 bp, Homo sapiens
gggtctgggctgatt

SEQ ID NO: 1841367 - DNA, 15 bp, Homo sapiens
ggtctgggctgattc

SEQ ID NO: 1841368 - DNA, 15 bp, Homo sapiens
gtctgggctgattct

SEQ ID NO: 1841369 - DNA, 15 bp, Homo sapiens
tctgggctgattctg

SEQ ID NO: 1841370 - DNA, 15 bp, Homo sapiens
ctgggctgattctgt

SEQ ID NO: 1841371 - DNA, 15 bp, Homo sapiens
tgggctgattctgtc

SEQ ID NO: 1841372 - DNA, 15 bp, Homo sapiens
gggctgattctgtcc

SEQ ID NO: 1841373 - DNA, 15 bp, Homo sapiens
ggctgattctgtcct

SEQ ID NO: 1841374 - DNA, 15 bp, Homo sapiens
gctgattctgtcctt

SEQ ID NO: 1841375 - DNA, 15 bp, Homo sapiens
ctgattctgtccttt

SEQ ID NO: 1841376 - DNA, 15 bp, Homo sapiens
tgattctgtcctttt

SEQ ID NO: 1841377 - DNA, 15 bp, Homo sapiens
gattctgtccttttc

SEQ ID NO: 1841378 - DNA, 15 bp, Homo sapiens
attctgtccttttca

SEQ ID NO: 1841379 - DNA, 15 bp, Homo sapiens
ttctgtccttttcaa

SEQ ID NO: 1841380 - DNA, 15 bp, Homo sapiens
tctgtccttttcaac

SEQ ID NO: 1841381 - DNA, 15 bp, Homo sapiens
ctgtccttttcaaca

SEQ ID NO: 1841382 - DNA, 15 bp, Homo sapiens
tgtccttttcaacag

SEQ ID NO: 1841383 - DNA, 15 bp, Homo sapiens
gtccttttcaacagt

SEQ ID NO: 1841384 - DNA, 15 bp, Homo sapiens
tccttttcaacagtc

SEQ ID NO: 1841385 - DNA, 15 bp, Homo sapiens
ccttttcaacagtca

SEQ ID NO: 1841386 - DNA, 15 bp, Homo sapiens
cttttcaacagtcag

SEQ ID NO: 1841387 - DNA, 15 bp, Homo sapiens
ttttcaacagtcagg

SEQ ID NO: 1841388 - DNA, 15 bp, Homo sapiens
tttcaacagtcaggg

SEQ ID NO: 1841389 - DNA, 15 bp, Homo sapiens
ttcaacagtcagggg

SEQ ID NO: 1841390 - DNA, 15 bp, Homo sapiens
tcaacagtcaggggc

SEQ ID NO: 1841391 - DNA, 15 bp, Homo sapiens
caacagtcaggggct

SEQ ID NO: 1841392 - DNA, 15 bp, Homo sapiens
aacagtcaggggctc

SEQ ID NO: 1841393 - DNA, 15 bp, Homo sapiens
acagtcaggggctcc

SEQ ID NO: 1841394 - DNA, 15 bp, Homo sapiens
cagtcaggggctccc

SEQ ID NO: 1841395 - DNA, 15 bp, Homo sapiens
agtcaggggctccct

SEQ ID NO: 1841396 - DNA, 15 bp, Homo sapiens
gtcaggggctccctg

SEQ ID NO: 1841397 - DNA, 15 bp, Homo sapiens
tcaggggctccctgg

SEQ ID NO: 1841398 - DNA, 15 bp, Homo sapiens
caggggctccctggg

SEQ ID NO: 1841399 - DNA, 15 bp, Homo sapiens
aggggctccctgggg

SEQ ID NO: 1841400 - DNA, 15 bp, Homo sapiens
ggggctccctgggga

SEQ ID NO: 1841401 - DNA, 15 bp, Homo sapiens
gggctccctggggac

SEQ ID NO: 1841402 - DNA, 15 bp, Homo sapiens
ggctccctggggact

SEQ ID NO: 1841403 - DNA, 15 bp, Homo sapiens
gctccctggggactg

SEQ ID NO: 1841404 - DNA, 15 bp, Homo sapiens
ctccctggggactga

SEQ ID NO: 1841405 - DNA, 15 bp, Homo sapiens
tccctggggactgaa

SEQ ID NO: 1841406 - DNA, 15 bp, Homo sapiens
ccctggggactgaag

SEQ ID NO: 1841407 - DNA, 15 bp, Homo sapiens
cctggggactgaagc

SEQ ID NO: 1841408 - DNA, 15 bp, Homo sapiens
ctggggactgaagcc

SEQ ID NO: 1841409 - DNA, 15 bp, Homo sapiens
tggggactgaagcca

SEQ ID NO: 1841410 - DNA, 15 bp, Homo sapiens
ggggactgaagccag

SEQ ID NO: 1841411 - DNA, 15 bp, Homo sapiens
gggactgaagccagg

SEQ ID NO: 1841412 - DNA, 15 bp, Homo sapiens
ggactgaagccaggg

SEQ ID NO: 1841413 - DNA, 15 bp, Homo sapiens
gactgaagccagggc

SEQ ID NO: 1841414 - DNA, 15 bp, Homo sapiens
actgaagccagggct

SEQ ID NO: 1841415 - DNA, 15 bp, Homo sapiens
ctgaagccagggctg

SEQ ID NO: 1841416 - DNA, 15 bp, Homo sapiens
tgaagccagggctga

SEQ ID NO: 1841417 - DNA, 15 bp, Homo sapiens
gaagccagggctgac

SEQ ID NO: 1841418 - DNA, 15 bp, Homo sapiens
aagccagggctgacg

SEQ ID NO: 1841419 - DNA, 15 bp, Homo sapiens
agccagggctgacgg

SEQ ID NO: 1841420 - DNA, 15 bp, Homo sapiens
gccagggctgacggc

SEQ ID NO: 1841421 - DNA, 15 bp, Homo sapiens
ccagggctgacggct

SEQ ID NO: 1841422 - DNA, 15 bp, Homo sapiens
cagggctgacggctc

SEQ ID NO: 1841423 - DNA, 15 bp, Homo sapiens
agggctgacggctct

SEQ ID NO: 1841424 - DNA, 15 bp, Homo sapiens
gggctgacggctctc

SEQ ID NO: 1841425 - DNA, 15 bp, Homo sapiens
ggctgacggctctca

SEQ ID NO: 1841426 - DNA, 15 bp, Homo sapiens
gctgacggctctcag

SEQ ID NO: 1841427 - DNA, 15 bp, Homo sapiens
ctgacggctctcagc

SEQ ID NO: 1841428 - DNA, 15 bp, Homo sapiens
tgacggctctcagca

SEQ ID NO: 1841429 - DNA, 15 bp, Homo sapiens
gacggctctcagcac

SEQ ID NO: 1841430 - DNA, 15 bp, Homo sapiens
acggctctcagcaca

SEQ ID NO: 1841431 - DNA, 15 bp, Homo sapiens
cggctctcagcacag

SEQ ID NO: 1841432 - DNA, 15 bp, Homo sapiens
ggctctcagcacaga

SEQ ID NO: 1841433 - DNA, 15 bp, Homo sapiens
gctctcagcacagag

SEQ ID NO: 1841434 - DNA, 15 bp, Homo sapiens
ctctcagcacagagg

SEQ ID NO: 1841435 - DNA, 15 bp, Homo sapiens
tctcagcacagaggc

SEQ ID NO: 1841436 - DNA, 15 bp, Homo sapiens
ctcagcacagaggca

SEQ ID NO: 1841437 - DNA, 15 bp, Homo sapiens
tcagcacagaggcat

SEQ ID NO: 1841438 - DNA, 15 bp, Homo sapiens
cagcacagaggcatg

SEQ ID NO: 1841439 - DNA, 15 bp, Homo sapiens
agcacagaggcatgt

SEQ ID NO: 1841440 - DNA, 15 bp, Homo sapiens
gcacagaggcatgtt

SEQ ID NO: 1841441 - DNA, 15 bp, Homo sapiens
cacagaggcatgttt

SEQ ID NO: 1841442 - DNA, 15 bp, Homo sapiens
acagaggcatgtttg

SEQ ID NO: 1841443 - DNA, 15 bp, Homo sapiens
cagaggcatgtttgc

SEQ ID NO: 1841444 - DNA, 15 bp, Homo sapiens
agaggcatgtttgct

SEQ ID NO: 1841445 - DNA, 15 bp, Homo sapiens
gaggcatgtttgcta

SEQ ID NO: 1841446 - DNA, 15 bp, Homo sapiens
aggcatgtttgctac

SEQ ID NO: 1841447 - DNA, 15 bp, Homo sapiens
ggcatgtttgctaca

SEQ ID NO: 1841448 - DNA, 15 bp, Homo sapiens
gcatgtttgctacat

SEQ ID NO: 1841449 - DNA, 15 bp, Homo sapiens
catgtttgctacata

SEQ ID NO: 1841450 - DNA, 15 bp, Homo sapiens
atgtttgctacatag

SEQ ID NO: 1841451 - DNA, 15 bp, Homo sapiens
tgtttgctacatagt

SEQ ID NO: 1841452 - DNA, 15 bp, Homo sapiens
gtttgctacatagtc

SEQ ID NO: 1841453 - DNA, 15 bp, Homo sapiens
tttgctacatagtca

SEQ ID NO: 1841454 - DNA, 15 bp, Homo sapiens
ttgctacatagtcag

SEQ ID NO: 1841455 - DNA, 15 bp, Homo sapiens
tgctacatagtcaga

SEQ ID NO: 1841456 - DNA, 15 bp, Homo sapiens
gctacatagtcagag

SEQ ID NO: 1841457 - DNA, 15 bp, Homo sapiens
ctacatagtcagagg

SEQ ID NO: 1841458 - DNA, 15 bp, Homo sapiens
tacatagtcagaggg

SEQ ID NO: 1841459 - DNA, 15 bp, Homo sapiens
acatagtcagaggga

SEQ ID NO: 1841460 - DNA, 15 bp, Homo sapiens
catagtcagagggaa

SEQ ID NO: 1841461 - DNA, 15 bp, Homo sapiens
atagtcagagggaac

SEQ ID NO: 1841462 - DNA, 15 bp, Homo sapiens
tagtcagagggaacc

SEQ ID NO: 1841463 - DNA, 15 bp, Homo sapiens
agtcagagggaacct

SEQ ID NO: 1841464 - DNA, 15 bp, Homo sapiens
gtcagagggaacctc

SEQ ID NO: 1841465 - DNA, 15 bp, Homo sapiens
tcagagggaacctcc

SEQ ID NO: 1841466 - DNA, 15 bp, Homo sapiens
cagagggaacctcca

SEQ ID NO: 1841467 - DNA, 15 bp, Homo sapiens
agagggaacctccat

SEQ ID NO: 1841468 - DNA, 15 bp, Homo sapiens
gagggaacctccatg

SEQ ID NO: 1841469 - DNA, 15 bp, Homo sapiens
agggaacctccatgt

SEQ ID NO: 1841470 - DNA, 15 bp, Homo sapiens
gggaacctccatgtg

SEQ ID NO: 1841471 - DNA, 15 bp, Homo sapiens
ggaacctccatgtga

SEQ ID NO: 1841472 - DNA, 15 bp, Homo sapiens
gaacctccatgtgac

SEQ ID NO: 1841473 - DNA, 15 bp, Homo sapiens
aacctccatgtgaca

SEQ ID NO: 1841474 - DNA, 15 bp, Homo sapiens
acctccatgtgacag

SEQ ID NO: 1841475 - DNA, 15 bp, Homo sapiens
cctccatgtgacagc

SEQ ID NO: 1841476 - DNA, 15 bp, Homo sapiens
ctccatgtgacagca

SEQ ID NO: 1841477 - DNA, 15 bp, Homo sapiens
tccatgtgacagcaa

SEQ ID NO: 1841478 - DNA, 15 bp, Homo sapiens
ccatgtgacagcaat

SEQ ID NO: 1841479 - DNA, 15 bp, Homo sapiens
catgtgacagcaatt

SEQ ID NO: 1841480 - DNA, 15 bp, Homo sapiens
atgtgacagcaattc

SEQ ID NO: 1841481 - DNA, 15 bp, Homo sapiens
tgtgacagcaattca

SEQ ID NO: 1841482 - DNA, 15 bp, Homo sapiens
gtgacagcaattcac

SEQ ID NO: 1841483 - DNA, 15 bp, Homo sapiens
tgacagcaattcacc

SEQ ID NO: 1841484 - DNA, 15 bp, Homo sapiens
gacagcaattcaccc

SEQ ID NO: 1841485 - DNA, 15 bp, Homo sapiens
acagcaattcaccca

SEQ ID NO: 1841486 - DNA, 15 bp, Homo sapiens
cagcaattcacccat

SEQ ID NO: 1841487 - DNA, 15 bp, Homo sapiens
agcaattcacccata

SEQ ID NO: 1841488 - DNA, 15 bp, Homo sapiens
gcaattcacccatag

SEQ ID NO: 1841489 - DNA, 15 bp, Homo sapiens
caattcacccatagt

SEQ ID NO: 1841490 - DNA, 15 bp, Homo sapiens
aattcacccatagtg

SEQ ID NO: 1841491 - DNA, 15 bp, Homo sapiens
attcacccatagtgg

SEQ ID NO: 1841492 - DNA, 15 bp, Homo sapiens
ttcacccatagtggg

SEQ ID NO: 1841493 - DNA, 15 bp, Homo sapiens
tcacccatagtgggt

SEQ ID NO: 1841494 - DNA, 15 bp, Homo sapiens
cacccatagtgggtg

SEQ ID NO: 1841495 - DNA, 15 bp, Homo sapiens
acccatagtgggtgg

SEQ ID NO: 1841496 - DNA, 15 bp, Homo sapiens
cccatagtgggtgga

SEQ ID NO: 1841497 - DNA, 15 bp, Homo sapiens
ccatagtgggtggag

SEQ ID NO: 1841498 - DNA, 15 bp, Homo sapiens
catagtgggtggagg

SEQ ID NO: 1841499 - DNA, 15 bp, Homo sapiens
atagtgggtggaggt

SEQ ID NO: 1841500 - DNA, 15 bp, Homo sapiens
tagtgggtggaggtc

SEQ ID NO: 1841501 - DNA, 15 bp, Homo sapiens
agtgggtggaggtct

SEQ ID NO: 1841502 - DNA, 15 bp, Homo sapiens
gtgggtggaggtctg

SEQ ID NO: 1841503 - DNA, 15 bp, Homo sapiens
tgggtggaggtctgg

SEQ ID NO: 1841504 - DNA, 15 bp, Homo sapiens
gggtggaggtctggg

SEQ ID NO: 1841505 - DNA, 15 bp, Homo sapiens
ggtggaggtctgggg

SEQ ID NO: 1841506 - DNA, 15 bp, Homo sapiens
gtggaggtctggggc

SEQ ID NO: 1841507 - DNA, 15 bp, Homo sapiens
tggaggtctggggca

SEQ ID NO: 1841508 - DNA, 15 bp, Homo sapiens
ggaggtctggggcaa

SEQ ID NO: 1841509 - DNA, 15 bp, Homo sapiens
gaggtctggggcaat

SEQ ID NO: 1841510 - DNA, 15 bp, Homo sapiens
aggtctggggcaatg

SEQ ID NO: 1841511 - DNA, 15 bp, Homo sapiens
ggtctggggcaatgg

SEQ ID NO: 1841512 - DNA, 15 bp, Homo sapiens
gtctggggcaatggc

SEQ ID NO: 1841513 - DNA, 15 bp, Homo sapiens
tctggggcaatggct

SEQ ID NO: 1841514 - DNA, 15 bp, Homo sapiens
ctggggcaatggctg

SEQ ID NO: 1841515 - DNA, 15 bp, Homo sapiens
tggggcaatggctgc

SEQ ID NO: 1841516 - DNA, 15 bp, Homo sapiens
ggggcaatggctgca

SEQ ID NO: 1841517 - DNA, 15 bp, Homo sapiens
gggcaatggctgcat

SEQ ID NO: 1841518 - DNA, 15 bp, Homo sapiens
ggcaatggctgcatg

SEQ ID NO: 1841519 - DNA, 15 bp, Homo sapiens
gcaatggctgcatgc

SEQ ID NO: 1841520 - DNA, 15 bp, Homo sapiens
caatggctgcatgca

SEQ ID NO: 1841521 - DNA, 15 bp, Homo sapiens
aatggctgcatgcat

SEQ ID NO: 1841522 - DNA, 15 bp, Homo sapiens
atggctgcatgcatg

SEQ ID NO: 1841523 - DNA, 15 bp, Homo sapiens
tggctgcatgcatgt

SEQ ID NO: 1841524 - DNA, 15 bp, Homo sapiens
ggctgcatgcatgtg

SEQ ID NO: 1841525 - DNA, 15 bp, Homo sapiens
gctgcatgcatgtgt

SEQ ID NO: 1841526 - DNA, 15 bp, Homo sapiens
ctgcatgcatgtgtg

SEQ ID NO: 1841527 - DNA, 15 bp, Homo sapiens
atgcatgtgtgtgac

SEQ ID NO: 1841528 - DNA, 15 bp, Homo sapiens
tgcatgtgtgtgacg

SEQ ID NO: 1841529 - DNA, 15 bp, Homo sapiens
gcatgtgtgtgacgt

SEQ ID NO: 1841530 - DNA, 15 bp, Homo sapiens
catgtgtgtgacgtt

SEQ ID NO: 1841531 - DNA, 15 bp, Homo sapiens
atgtgtgtgacgttg

SEQ ID NO: 1841532 - DNA, 15 bp, Homo sapiens
tgtgtgtgacgttga

SEQ ID NO: 1841533 - DNA, 15 bp, Homo sapiens
gtgtgtgacgttgag

SEQ ID NO: 1841534 - DNA, 15 bp, Homo sapiens
tgtgtgacgttgagt

SEQ ID NO: 1841535 - DNA, 15 bp, Homo sapiens
gtgtgacgttgagtg

SEQ ID NO: 1841536 - DNA, 15 bp, Homo sapiens
tgtgacgttgagtgt

SEQ ID NO: 1841537 - DNA, 15 bp, Homo sapiens
gtgacgttgagtgtg

SEQ ID NO: 1841538 - DNA, 15 bp, Homo sapiens
tgacgttgagtgtgg

SEQ ID NO: 1841539 - DNA, 15 bp, Homo sapiens
gacgttgagtgtggg

SEQ ID NO: 1841540 - DNA, 15 bp, Homo sapiens
acgttgagtgtgggg

SEQ ID NO: 1841541 - DNA, 15 bp, Homo sapiens
cgttgagtgtggggc

SEQ ID NO: 1841542 - DNA, 15 bp, Homo sapiens
gttgagtgtggggcg

SEQ ID NO: 1841543 - DNA, 15 bp, Homo sapiens
ttgagtgtggggcgt

SEQ ID NO: 1841544 - DNA, 15 bp, Homo sapiens
tgagtgtggggcgtg

SEQ ID NO: 1841545 - DNA, 15 bp, Homo sapiens
gagtgtggggcgtgt

SEQ ID NO: 1841546 - DNA, 15 bp, Homo sapiens
agtgtggggcgtgtg

SEQ ID NO: 1841547 - DNA, 15 bp, Homo sapiens
gtgtggggcgtgtgc

SEQ ID NO: 1841548 - DNA, 15 bp, Homo sapiens
tgtggggcgtgtgca

SEQ ID NO: 1841549 - DNA, 15 bp, Homo sapiens
gtggggcgtgtgcac

SEQ ID NO: 1841550 - DNA, 15 bp, Homo sapiens
tggggcgtgtgcaca

SEQ ID NO: 1841551 - DNA, 15 bp, Homo sapiens
ggggcgtgtgcacac

SEQ ID NO: 1841552 - DNA, 15 bp, Homo sapiens
gggcgtgtgcacacg

SEQ ID NO: 1841553 - DNA, 15 bp, Homo sapiens
ggcgtgtgcacacgt

SEQ ID NO: 1841554 - DNA, 15 bp, Homo sapiens
gcgtgtgcacacgtg

SEQ ID NO: 1841555 - DNA, 15 bp, Homo sapiens
cgtgtgcacacgtgc

SEQ ID NO: 1841556 - DNA, 15 bp, Homo sapiens
gtgtgcacacgtgca

SEQ ID NO: 1841557 - DNA, 15 bp, Homo sapiens
tgtgcacacgtgcac

SEQ ID NO: 1841558 - DNA, 15 bp, Homo sapiens
gtgcacacgtgcact

SEQ ID NO: 1841559 - DNA, 15 bp, Homo sapiens
tgcacacgtgcactt

SEQ ID NO: 1841560 - DNA, 15 bp, Homo sapiens
gcacacgtgcacttc

SEQ ID NO: 1841561 - DNA, 15 bp, Homo sapiens
cacacgtgcacttct

SEQ ID NO: 1841562 - DNA, 15 bp, Homo sapiens
acacgtgcacttctg

SEQ ID NO: 1841563 - DNA, 15 bp, Homo sapiens
cacgtgcacttctgt

SEQ ID NO: 1841564 - DNA, 15 bp, Homo sapiens
acgtgcacttctgtc

SEQ ID NO: 1841565 - DNA, 15 bp, Homo sapiens
cgtgcacttctgtcc

SEQ ID NO: 1841566 - DNA, 15 bp, Homo sapiens
gtgcacttctgtcca

SEQ ID NO: 1841567 - DNA, 15 bp, Homo sapiens
tgcacttctgtccac

SEQ ID NO: 1841568 - DNA, 15 bp, Homo sapiens
gcacttctgtccacc

SEQ ID NO: 1841569 - DNA, 15 bp, Homo sapiens
cacttctgtccacct

SEQ ID NO: 1841570 - DNA, 15 bp, Homo sapiens
acttctgtccacctg

SEQ ID NO: 1841571 - DNA, 15 bp, Homo sapiens
cttctgtccacctgg

SEQ ID NO: 1841572 - DNA, 15 bp, Homo sapiens
ttctgtccacctggg

SEQ ID NO: 1841573 - DNA, 15 bp, Homo sapiens
tctgtccacctgggc

SEQ ID NO: 1841574 - DNA, 15 bp, Homo sapiens
ctgtccacctgggcc

SEQ ID NO: 1841575 - DNA, 15 bp, Homo sapiens
tgtccacctgggcct

SEQ ID NO: 1841576 - DNA, 15 bp, Homo sapiens
gtccacctgggcctg

SEQ ID NO: 1841577 - DNA, 15 bp, Homo sapiens
tccacctgggcctgt

SEQ ID NO: 1841578 - DNA, 15 bp, Homo sapiens
ccacctgggcctgtt

SEQ ID NO: 1841579 - DNA, 15 bp, Homo sapiens
cacctgggcctgttc

SEQ ID NO: 1841580 - DNA, 15 bp, Homo sapiens
acctgggcctgttct

SEQ ID NO: 1841581 - DNA, 15 bp, Homo sapiens
cctgggcctgttcta

SEQ ID NO: 1841582 - DNA, 15 bp, Homo sapiens
ctgggcctgttctac

SEQ ID NO: 1841583 - DNA, 15 bp, Homo sapiens
tgggcctgttctacg

SEQ ID NO: 1841584 - DNA, 15 bp, Homo sapiens
gggcctgttctacgt

SEQ ID NO: 1841585 - DNA, 15 bp, Homo sapiens
ggcctgttctacgtt

SEQ ID NO: 1841586 - DNA, 15 bp, Homo sapiens
gcctgttctacgttc

SEQ ID NO: 1841587 - DNA, 15 bp, Homo sapiens
cctgttctacgttcc

SEQ ID NO: 1841588 - DNA, 15 bp, Homo sapiens
ctgttctacgttccg

SEQ ID NO: 1841589 - DNA, 15 bp, Homo sapiens
tgttctacgttccgc

SEQ ID NO: 1841590 - DNA, 15 bp, Homo sapiens
gttctacgttccgca

SEQ ID NO: 1841591 - DNA, 15 bp, Homo sapiens
ttctacgttccgcat

SEQ ID NO: 1841592 - DNA, 15 bp, Homo sapiens
tctacgttccgcatg

SEQ ID NO: 1841593 - DNA, 15 bp, Homo sapiens
ctacgttccgcatgg

SEQ ID NO: 1841594 - DNA, 15 bp, Homo sapiens
tacgttccgcatggg

SEQ ID NO: 1841595 - DNA, 15 bp, Homo sapiens
acgttccgcatgggc

SEQ ID NO: 1841596 - DNA, 15 bp, Homo sapiens
cgttccgcatgggca

SEQ ID NO: 1841597 - DNA, 15 bp, Homo sapiens
gttccgcatgggcag

SEQ ID NO: 1841598 - DNA, 15 bp, Homo sapiens
ttccgcatgggcagg

SEQ ID NO: 1841599 - DNA, 15 bp, Homo sapiens
tccgcatgggcaggc

SEQ ID NO: 1841600 - DNA, 15 bp, Homo sapiens
ccgcatgggcaggca

SEQ ID NO: 1841601 - DNA, 15 bp, Homo sapiens
cgcatgggcaggcac

SEQ ID NO: 1841602 - DNA, 15 bp, Homo sapiens
gcatgggcaggcacg

SEQ ID NO: 1841603 - DNA, 15 bp, Homo sapiens
catgggcaggcacgg

SEQ ID NO: 1841604 - DNA, 15 bp, Homo sapiens
atgggcaggcacgga

SEQ ID NO: 1841605 - DNA, 15 bp, Homo sapiens
tgggcaggcacggag

SEQ ID NO: 1841606 - DNA, 15 bp, Homo sapiens
gggcaggcacggagg

SEQ ID NO: 1841607 - DNA, 15 bp, Homo sapiens
ggcaggcacggaggt

SEQ ID NO: 1841608 - DNA, 15 bp, Homo sapiens
gcaggcacggaggtc

SEQ ID NO: 1841609 - DNA, 15 bp, Homo sapiens
caggcacggaggtca

SEQ ID NO: 1841610 - DNA, 15 bp, Homo sapiens
aggcacggaggtcag

SEQ ID NO: 1841611 - DNA, 15 bp, Homo sapiens
ggcacggaggtcagg

SEQ ID NO: 1841612 - DNA, 15 bp, Homo sapiens
gcacggaggtcaggc

SEQ ID NO: 1841613 - DNA, 15 bp, Homo sapiens
cacggaggtcaggca

SEQ ID NO: 1841614 - DNA, 15 bp, Homo sapiens
acggaggtcaggcag

SEQ ID NO: 1841615 - DNA, 15 bp, Homo sapiens
cggaggtcaggcagg

SEQ ID NO: 1841616 - DNA, 15 bp, Homo sapiens
ggaggtcaggcaggc

SEQ ID NO: 1841617 - DNA, 15 bp, Homo sapiens
gaggtcaggcaggcc

SEQ ID NO: 1841618 - DNA, 15 bp, Homo sapiens
aggtcaggcaggcct

SEQ ID NO: 1841619 - DNA, 15 bp, Homo sapiens
ggtcaggcaggccta

SEQ ID NO: 1841620 - DNA, 15 bp, Homo sapiens
gtcaggcaggcctat

SEQ ID NO: 1841621 - DNA, 15 bp, Homo sapiens
tcaggcaggcctatc

SEQ ID NO: 1841622 - DNA, 15 bp, Homo sapiens
caggcaggcctatct

SEQ ID NO: 1841623 - DNA, 15 bp, Homo sapiens
aggcaggcctatctt

SEQ ID NO: 1841624 - DNA, 15 bp, Homo sapiens
ggcaggcctatcttg

SEQ ID NO: 1841625 - DNA, 15 bp, Homo sapiens
gcaggcctatcttga

SEQ ID NO: 1841626 - DNA, 15 bp, Homo sapiens
caggcctatcttgag

SEQ ID NO: 1841627 - DNA, 15 bp, Homo sapiens
aggcctatcttgagg

SEQ ID NO: 1841628 - DNA, 15 bp, Homo sapiens
ggcctatcttgaggg

SEQ ID NO: 1841629 - DNA, 15 bp, Homo sapiens
gcctatcttgagggg

SEQ ID NO: 1841630 - DNA, 15 bp, Homo sapiens
cctatcttgaggggg

SEQ ID NO: 1841631 - DNA, 15 bp, Homo sapiens
ctatcttgagggggt

SEQ ID NO: 1841632 - DNA, 15 bp, Homo sapiens
tatcttgagggggtg

SEQ ID NO: 1841633 - DNA, 15 bp, Homo sapiens
atcttgagggggtgt

SEQ ID NO: 1841634 - DNA, 15 bp, Homo sapiens
tcttgagggggtgtg

SEQ ID NO: 1841635 - DNA, 15 bp, Homo sapiens
cttgagggggtgtgt

SEQ ID NO: 1841636 - DNA, 15 bp, Homo sapiens
ttgagggggtgtgtt

SEQ ID NO: 1841637 - DNA, 15 bp, Homo sapiens
tgagggggtgtgttt

SEQ ID NO: 1841638 - DNA, 15 bp, Homo sapiens
gagggggtgtgtttt

SEQ ID NO: 1841639 - DNA, 15 bp, Homo sapiens
agggggtgtgttttt

SEQ ID NO: 1841640 - DNA, 15 bp, Homo sapiens
gggggtgtgtttttt

SEQ ID NO: 1841641 - DNA, 15 bp, Homo sapiens
ggggtgtgttttttg

SEQ ID NO: 1841642 - DNA, 15 bp, Homo sapiens
gggtgtgttttttga

SEQ ID NO: 1841643 - DNA, 15 bp, Homo sapiens
ggtgtgttttttgag

SEQ ID NO: 1841644 - DNA, 15 bp, Homo sapiens
gtgtgttttttgagg

SEQ ID NO: 1841645 - DNA, 15 bp, Homo sapiens
tgtgttttttgaggg

SEQ ID NO: 1841646 - DNA, 15 bp, Homo sapiens
gtgttttttgagggg

SEQ ID NO: 1841647 - DNA, 15 bp, Homo sapiens
tgttttttgaggggt

SEQ ID NO: 1841648 - DNA, 15 bp, Homo sapiens
gttttttgaggggtg

SEQ ID NO: 1841649 - DNA, 15 bp, Homo sapiens
ttttttgaggggtgt

SEQ ID NO: 1841650 - DNA, 15 bp, Homo sapiens
tttttgaggggtgtg

SEQ ID NO: 1841651 - DNA, 15 bp, Homo sapiens
ttttgaggggtgtga

SEQ ID NO: 1841652 - DNA, 15 bp, Homo sapiens
tttgaggggtgtgac

SEQ ID NO: 1841653 - DNA, 15 bp, Homo sapiens
ttgaggggtgtgact

SEQ ID NO: 1841654 - DNA, 15 bp, Homo sapiens
tgaggggtgtgactg

SEQ ID NO: 1841655 - DNA, 15 bp, Homo sapiens
gaggggtgtgactgt

SEQ ID NO: 1841656 - DNA, 15 bp, Homo sapiens
aggggtgtgactgtg

SEQ ID NO: 1841657 - DNA, 15 bp, Homo sapiens
ggggtgtgactgtga

SEQ ID NO: 1841658 - DNA, 15 bp, Homo sapiens
gggtgtgactgtgag

SEQ ID NO: 1841659 - DNA, 15 bp, Homo sapiens
ggtgtgactgtgagg

SEQ ID NO: 1841660 - DNA, 15 bp, Homo sapiens
gtgtgactgtgaggc

SEQ ID NO: 1841661 - DNA, 15 bp, Homo sapiens
tgtgactgtgaggcc

SEQ ID NO: 1841662 - DNA, 15 bp, Homo sapiens
gtgactgtgaggccc

SEQ ID NO: 1841663 - DNA, 15 bp, Homo sapiens
tgactgtgaggccct

SEQ ID NO: 1841664 - DNA, 15 bp, Homo sapiens
gactgtgaggcccta

SEQ ID NO: 1841665 - DNA, 15 bp, Homo sapiens
actgtgaggccctat

SEQ ID NO: 1841666 - DNA, 15 bp, Homo sapiens
ctgtgaggccctatg

SEQ ID NO: 1841667 - DNA, 15 bp, Homo sapiens
tgtgaggccctatgt

SEQ ID NO: 1841668 - DNA, 15 bp, Homo sapiens
gtgaggccctatgtg

SEQ ID NO: 1841669 - DNA, 15 bp, Homo sapiens
tgaggccctatgtgt

SEQ ID NO: 1841670 - DNA, 15 bp, Homo sapiens
gaggccctatgtgtg

SEQ ID NO: 1841671 - DNA, 15 bp, Homo sapiens
aggccctatgtgtga

SEQ ID NO: 1841672 - DNA, 15 bp, Homo sapiens
ggccctatgtgtgaa

SEQ ID NO: 1841673 - DNA, 15 bp, Homo sapiens
gccctatgtgtgaaa

SEQ ID NO: 1841674 - DNA, 15 bp, Homo sapiens
ccctatgtgtgaaag

SEQ ID NO: 1841675 - DNA, 15 bp, Homo sapiens
cctatgtgtgaaagg

SEQ ID NO: 1841676 - DNA, 15 bp, Homo sapiens
ctatgtgtgaaaggg

SEQ ID NO: 1841677 - DNA, 15 bp, Homo sapiens
tatgtgtgaaaggga

SEQ ID NO: 1841678 - DNA, 15 bp, Homo sapiens
atgtgtgaaagggat

SEQ ID NO: 1841679 - DNA, 15 bp, Homo sapiens
tgtgtgaaagggatt

SEQ ID NO: 1841680 - DNA, 15 bp, Homo sapiens
gtgtgaaagggattt

SEQ ID NO: 1841681 - DNA, 15 bp, Homo sapiens
tgtgaaagggatttc

SEQ ID NO: 1841682 - DNA, 15 bp, Homo sapiens
gtgaaagggatttct

SEQ ID NO: 1841683 - DNA, 15 bp, Homo sapiens
tgaaagggatttctg

SEQ ID NO: 1841684 - DNA, 15 bp, Homo sapiens
gaaagggatttctgt

SEQ ID NO: 1841685 - DNA, 15 bp, Homo sapiens
aaagggatttctgtg

SEQ ID NO: 1841686 - DNA, 15 bp, Homo sapiens
aagggatttctgtga

SEQ ID NO: 1841687 - DNA, 15 bp, Homo sapiens
agggatttctgtgat

SEQ ID NO: 1841688 - DNA, 15 bp, Homo sapiens
gggatttctgtgatg

SEQ ID NO: 1841689 - DNA, 15 bp, Homo sapiens
ggatttctgtgatgg

SEQ ID NO: 1841690 - DNA, 15 bp, Homo sapiens
gatttctgtgatgga

SEQ ID NO: 1841691 - DNA, 15 bp, Homo sapiens
atttctgtgatggag

SEQ ID NO: 1841692 - DNA, 15 bp, Homo sapiens
tttctgtgatggaga

SEQ ID NO: 1841693 - DNA, 15 bp, Homo sapiens
ttctgtgatggagaa

SEQ ID NO: 1841694 - DNA, 15 bp, Homo sapiens
tctgtgatggagaat

SEQ ID NO: 1841695 - DNA, 15 bp, Homo sapiens
ctgtgatggagaatc

SEQ ID NO: 1841696 - DNA, 15 bp, Homo sapiens
tgtgatggagaatct

SEQ ID NO: 1841697 - DNA, 15 bp, Homo sapiens
gtgatggagaatctg

SEQ ID NO: 1841698 - DNA, 15 bp, Homo sapiens
tgatggagaatctgt

SEQ ID NO: 1841699 - DNA, 15 bp, Homo sapiens
gatggagaatctgta

SEQ ID NO: 1841700 - DNA, 15 bp, Homo sapiens
atggagaatctgtat

SEQ ID NO: 1841701 - DNA, 15 bp, Homo sapiens
tggagaatctgtatt

SEQ ID NO: 1841702 - DNA, 15 bp, Homo sapiens
ggagaatctgtattt

SEQ ID NO: 1841703 - DNA, 15 bp, Homo sapiens
gagaatctgtatttg

SEQ ID NO: 1841704 - DNA, 15 bp, Homo sapiens
agaatctgtatttgc

SEQ ID NO: 1841705 - DNA, 15 bp, Homo sapiens
gaatctgtatttgcc

SEQ ID NO: 1841706 - DNA, 15 bp, Homo sapiens
aatctgtatttgcct

SEQ ID NO: 1841707 - DNA, 15 bp, Homo sapiens
atctgtatttgcctc

SEQ ID NO: 1841708 - DNA, 15 bp, Homo sapiens
tctgtatttgcctct

SEQ ID NO: 1841709 - DNA, 15 bp, Homo sapiens
ctgtatttgcctctt

SEQ ID NO: 1841710 - DNA, 15 bp, Homo sapiens
gtatttgcctcttac

SEQ ID NO: 1841711 - DNA, 15 bp, Homo sapiens
tatttgcctcttacc

SEQ ID NO: 1841712 - DNA, 15 bp, Homo sapiens
atttgcctcttacca

SEQ ID NO: 1841713 - DNA, 15 bp, Homo sapiens
tttgcctcttaccaa

SEQ ID NO: 1841714 - DNA, 15 bp, Homo sapiens
ttgcctcttaccaag

SEQ ID NO: 1841715 - DNA, 15 bp, Homo sapiens
tgcctcttaccaagg

SEQ ID NO: 1841716 - DNA, 15 bp, Homo sapiens
gcctcttaccaagga

SEQ ID NO: 1841717 - DNA, 15 bp, Homo sapiens
cctcttaccaaggag

SEQ ID NO: 1841718 - DNA, 15 bp, Homo sapiens
ctcttaccaaggagt

SEQ ID NO: 1841719 - DNA, 15 bp, Homo sapiens
tcttaccaaggagta

SEQ ID NO: 1841720 - DNA, 15 bp, Homo sapiens
cttaccaaggagtag

SEQ ID NO: 1841721 - DNA, 15 bp, Homo sapiens
ttaccaaggagtagg

SEQ ID NO: 1841722 - DNA, 15 bp, Homo sapiens
taccaaggagtaggg

SEQ ID NO: 1841723 - DNA, 15 bp, Homo sapiens
accaaggagtagggg

SEQ ID NO: 1841724 - DNA, 15 bp, Homo sapiens
ccaaggagtaggggt

SEQ ID NO: 1841725 - DNA, 15 bp, Homo sapiens
caaggagtaggggtt

SEQ ID NO: 1841726 - DNA, 15 bp, Homo sapiens
aaggagtaggggttg

SEQ ID NO: 1841727 - DNA, 15 bp, Homo sapiens
aggagtaggggttgg

SEQ ID NO: 1841728 - DNA, 15 bp, Homo sapiens
ggagtaggggttggc

SEQ ID NO: 1841729 - DNA, 15 bp, Homo sapiens
gagtaggggttggca

SEQ ID NO: 1841730 - DNA, 15 bp, Homo sapiens
agtaggggttggcat

SEQ ID NO: 1841731 - DNA, 15 bp, Homo sapiens
gtaggggttggcatg

SEQ ID NO: 1841732 - DNA, 15 bp, Homo sapiens
taggggttggcatgg

SEQ ID NO: 1841733 - DNA, 15 bp, Homo sapiens
aggggttggcatggc

SEQ ID NO: 1841734 - DNA, 15 bp, Homo sapiens
ggggttggcatggcc

SEQ ID NO: 1841735 - DNA, 15 bp, Homo sapiens
gggttggcatggcct

SEQ ID NO: 1841736 - DNA, 15 bp, Homo sapiens
ggttggcatggcctc

SEQ ID NO: 1841737 - DNA, 15 bp, Homo sapiens
gttggcatggcctct

SEQ ID NO: 1841738 - DNA, 15 bp, Homo sapiens
ttggcatggcctcta

SEQ ID NO: 1841739 - DNA, 15 bp, Homo sapiens
tggcatggcctctac

SEQ ID NO: 1841740 - DNA, 15 bp, Homo sapiens
ggcatggcctctacc

SEQ ID NO: 1841741 - DNA, 15 bp, Homo sapiens
gcatggcctctacct

SEQ ID NO: 1841742 - DNA, 15 bp, Homo sapiens
catggcctctacctg

SEQ ID NO: 1841743 - DNA, 15 bp, Homo sapiens
atggcctctacctgt

SEQ ID NO: 1841744 - DNA, 15 bp, Homo sapiens
tggcctctacctgtc

SEQ ID NO: 1841745 - DNA, 15 bp, Homo sapiens
ggcctctacctgtcc

SEQ ID NO: 1841746 - DNA, 15 bp, Homo sapiens
gcctctacctgtcca

SEQ ID NO: 1841747 - DNA, 15 bp, Homo sapiens
cctctacctgtccac

SEQ ID NO: 1841748 - DNA, 15 bp, Homo sapiens
ctctacctgtccacc

SEQ ID NO: 1841749 - DNA, 15 bp, Homo sapiens
tctacctgtccacct

SEQ ID NO: 1841750 - DNA, 15 bp, Homo sapiens
ctacctgtccaccta

SEQ ID NO: 1841751 - DNA, 15 bp, Homo sapiens
tacctgtccacctat

SEQ ID NO: 1841752 - DNA, 15 bp, Homo sapiens
acctgtccacctatc

SEQ ID NO: 1841753 - DNA, 15 bp, Homo sapiens
cctgtccacctatct

SEQ ID NO: 1841754 - DNA, 15 bp, Homo sapiens
ctgtccacctatcta

SEQ ID NO: 1841755 - DNA, 15 bp, Homo sapiens
tgtccacctatctac

SEQ ID NO: 1841756 - DNA, 15 bp, Homo sapiens
gtccacctatctact

SEQ ID NO: 1841757 - DNA, 15 bp, Homo sapiens
tccacctatctactc

SEQ ID NO: 1841758 - DNA, 15 bp, Homo sapiens
ccacctatctactcg

SEQ ID NO: 1841759 - DNA, 15 bp, Homo sapiens
cacctatctactcgt

SEQ ID NO: 1841760 - DNA, 15 bp, Homo sapiens
acctatctactcgtg

SEQ ID NO: 1841761 - DNA, 15 bp, Homo sapiens
cctatctactcgtga

SEQ ID NO: 1841762 - DNA, 15 bp, Homo sapiens
ctatctactcgtgaa

SEQ ID NO: 1841763 - DNA, 15 bp, Homo sapiens
tatctactcgtgaat

SEQ ID NO: 1841764 - DNA, 15 bp, Homo sapiens
atctactcgtgaatt

SEQ ID NO: 1841765 - DNA, 15 bp, Homo sapiens
tctactcgtgaattc

SEQ ID NO: 1841766 - DNA, 15 bp, Homo sapiens
ctactcgtgaattct

SEQ ID NO: 1841767 - DNA, 15 bp, Homo sapiens
tactcgtgaattctc

SEQ ID NO: 1841768 - DNA, 15 bp, Homo sapiens
actcgtgaattctcc

SEQ ID NO: 1841769 - DNA, 15 bp, Homo sapiens
ctcgtgaattctcca

SEQ ID NO: 1841770 - DNA, 15 bp, Homo sapiens
tcgtgaattctccaa

SEQ ID NO: 1841771 - DNA, 15 bp, Homo sapiens
cgtgaattctccaag

SEQ ID NO: 1841772 - DNA, 15 bp, Homo sapiens
gtgaattctccaagc

SEQ ID NO: 1841773 - DNA, 15 bp, Homo sapiens
tgaattctccaagcc

SEQ ID NO: 1841774 - DNA, 15 bp, Homo sapiens
gaattctccaagcca

SEQ ID NO: 1841775 - DNA, 15 bp, Homo sapiens
aattctccaagccac

SEQ ID NO: 1841776 - DNA, 15 bp, Homo sapiens
attctccaagccacc

SEQ ID NO: 1841777 - DNA, 15 bp, Homo sapiens
ttctccaagccaccc

SEQ ID NO: 1841778 - DNA, 15 bp, Homo sapiens
tctccaagccaccct

SEQ ID NO: 1841779 - DNA, 15 bp, Homo sapiens
ctccaagccaccctt

SEQ ID NO: 1841780 - DNA, 15 bp, Homo sapiens
tccaagccacccttc

SEQ ID NO: 1841781 - DNA, 15 bp, Homo sapiens
ccaagccacccttcc

SEQ ID NO: 1841782 - DNA, 15 bp, Homo sapiens
caagccacccttcca

SEQ ID NO: 1841783 - DNA, 15 bp, Homo sapiens
aagccacccttccac

SEQ ID NO: 1841784 - DNA, 15 bp, Homo sapiens
agccacccttccacg

SEQ ID NO: 1841785 - DNA, 15 bp, Homo sapiens
gccacccttccacgc

SEQ ID NO: 1841786 - DNA, 15 bp, Homo sapiens
ccacccttccacgca

SEQ ID NO: 1841787 - DNA, 15 bp, Homo sapiens
cacccttccacgcat

SEQ ID NO: 1841788 - DNA, 15 bp, Homo sapiens
acccttccacgcatt

SEQ ID NO: 1841789 - DNA, 15 bp, Homo sapiens
cccttccacgcattt

SEQ ID NO: 1841790 - DNA, 15 bp, Homo sapiens
ccttccacgcattta

SEQ ID NO: 1841791 - DNA, 15 bp, Homo sapiens
cttccacgcatttac

SEQ ID NO: 1841792 - DNA, 15 bp, Homo sapiens
ttccacgcatttacc

SEQ ID NO: 1841793 - DNA, 15 bp, Homo sapiens
tccacgcatttacca

SEQ ID NO: 1841794 - DNA, 15 bp, Homo sapiens
ccacgcatttaccac

SEQ ID NO: 1841795 - DNA, 15 bp, Homo sapiens
cacgcatttaccacc

SEQ ID NO: 1841796 - DNA, 15 bp, Homo sapiens
acgcatttaccacct

SEQ ID NO: 1841797 - DNA, 15 bp, Homo sapiens
cgcatttaccaccta

SEQ ID NO: 1841798 - DNA, 15 bp, Homo sapiens
gcatttaccacctat

SEQ ID NO: 1841799 - DNA, 15 bp, Homo sapiens
catttaccacctatg

SEQ ID NO: 1841800 - DNA, 15 bp, Homo sapiens
atttaccacctatgc

SEQ ID NO: 1841801 - DNA, 15 bp, Homo sapiens
tttaccacctatgca

SEQ ID NO: 1841802 - DNA, 15 bp, Homo sapiens
ttaccacctatgcac

SEQ ID NO: 1841803 - DNA, 15 bp, Homo sapiens
taccacctatgcact

SEQ ID NO: 1841804 - DNA, 15 bp, Homo sapiens
accacctatgcactc

SEQ ID NO: 1841805 - DNA, 15 bp, Homo sapiens
ccacctatgcactca

SEQ ID NO: 1841806 - DNA, 15 bp, Homo sapiens
cacctatgcactcac

SEQ ID NO: 1841807 - DNA, 15 bp, Homo sapiens
acctatgcactcacc

SEQ ID NO: 1841808 - DNA, 15 bp, Homo sapiens
cctatgcactcacct

SEQ ID NO: 1841809 - DNA, 15 bp, Homo sapiens
ctatgcactcacctg

SEQ ID NO: 1841810 - DNA, 15 bp, Homo sapiens
tatgcactcacctgg

SEQ ID NO: 1841811 - DNA, 15 bp, Homo sapiens
atgcactcacctgga

SEQ ID NO: 1841812 - DNA, 15 bp, Homo sapiens
tgcactcacctggac

SEQ ID NO: 1841813 - DNA, 15 bp, Homo sapiens
gcactcacctggaca

SEQ ID NO: 1841814 - DNA, 15 bp, Homo sapiens
cactcacctggacat

SEQ ID NO: 1841815 - DNA, 15 bp, Homo sapiens
actcacctggacatc

SEQ ID NO: 1841816 - DNA, 15 bp, Homo sapiens
ctcacctggacatcc

SEQ ID NO: 1841817 - DNA, 15 bp, Homo sapiens
tcacctggacatcca

SEQ ID NO: 1841818 - DNA, 15 bp, Homo sapiens
cacctggacatccat

SEQ ID NO: 1841819 - DNA, 15 bp, Homo sapiens
acctggacatccatc

SEQ ID NO: 1841820 - DNA, 15 bp, Homo sapiens
cctggacatccatcc

SEQ ID NO: 1841821 - DNA, 15 bp, Homo sapiens
ctggacatccatcct

SEQ ID NO: 1841822 - DNA, 15 bp, Homo sapiens
tggacatccatcctc

SEQ ID NO: 1841823 - DNA, 15 bp, Homo sapiens
ggacatccatcctcc

SEQ ID NO: 1841824 - DNA, 15 bp, Homo sapiens
gacatccatcctccc

SEQ ID NO: 1841825 - DNA, 15 bp, Homo sapiens
acatccatcctccca

SEQ ID NO: 1841826 - DNA, 15 bp, Homo sapiens
catccatcctcccac

SEQ ID NO: 1841827 - DNA, 15 bp, Homo sapiens
atccatcctcccacc

SEQ ID NO: 1841828 - DNA, 15 bp, Homo sapiens
tccatcctcccacct

SEQ ID NO: 1841829 - DNA, 15 bp, Homo sapiens
ccatcctcccaccta

SEQ ID NO: 1841830 - DNA, 15 bp, Homo sapiens
catcctcccacctaa

SEQ ID NO: 1841831 - DNA, 15 bp, Homo sapiens
atcctcccacctaag

SEQ ID NO: 1841832 - DNA, 15 bp, Homo sapiens
tcctcccacctaagc

SEQ ID NO: 1841833 - DNA, 15 bp, Homo sapiens
cctcccacctaagca

SEQ ID NO: 1841834 - DNA, 15 bp, Homo sapiens
ctcccacctaagcac

SEQ ID NO: 1841835 - DNA, 15 bp, Homo sapiens
tcccacctaagcact

SEQ ID NO: 1841836 - DNA, 15 bp, Homo sapiens
cccacctaagcactg

SEQ ID NO: 1841837 - DNA, 15 bp, Homo sapiens
ccacctaagcactgt

SEQ ID NO: 1841838 - DNA, 15 bp, Homo sapiens
cacctaagcactgta

SEQ ID NO: 1841839 - DNA, 15 bp, Homo sapiens
acctaagcactgtat

SEQ ID NO: 1841840 - DNA, 15 bp, Homo sapiens
cctaagcactgtata

SEQ ID NO: 1841841 - DNA, 15 bp, Homo sapiens
ctaagcactgtataa

SEQ ID NO: 1841842 - DNA, 15 bp, Homo sapiens
taagcactgtataac

SEQ ID NO: 1841843 - DNA, 15 bp, Homo sapiens
aagcactgtataacc

SEQ ID NO: 1841844 - DNA, 15 bp, Homo sapiens
agcactgtataacca

SEQ ID NO: 1841845 - DNA, 15 bp, Homo sapiens
gcactgtataaccac

SEQ ID NO: 1841846 - DNA, 15 bp, Homo sapiens
cactgtataaccacc

SEQ ID NO: 1841847 - DNA, 15 bp, Homo sapiens
actgtataaccaccc

SEQ ID NO: 1841848 - DNA, 15 bp, Homo sapiens
ctgtataaccaccca

SEQ ID NO: 1841849 - DNA, 15 bp, Homo sapiens
tgtataaccacccac

SEQ ID NO: 1841850 - DNA, 15 bp, Homo sapiens
gtataaccacccact

SEQ ID NO: 1841851 - DNA, 15 bp, Homo sapiens
tataaccacccactg

SEQ ID NO: 1841852 - DNA, 15 bp, Homo sapiens
ataaccacccactgg

SEQ ID NO: 1841853 - DNA, 15 bp, Homo sapiens
taaccacccactggc

SEQ ID NO: 1841854 - DNA, 15 bp, Homo sapiens
aaccacccactggcc

SEQ ID NO: 1841855 - DNA, 15 bp, Homo sapiens
accacccactggcca

SEQ ID NO: 1841856 - DNA, 15 bp, Homo sapiens
ccacccactggccac

SEQ ID NO: 1841857 - DNA, 15 bp, Homo sapiens
cacccactggccacc

SEQ ID NO: 1841858 - DNA, 15 bp, Homo sapiens
acccactggccacca

SEQ ID NO: 1841859 - DNA, 15 bp, Homo sapiens
cccactggccaccac

SEQ ID NO: 1841860 - DNA, 15 bp, Homo sapiens
ccactggccaccacc

SEQ ID NO: 1841861 - DNA, 15 bp, Homo sapiens
cactggccaccaccc

SEQ ID NO: 1841862 - DNA, 15 bp, Homo sapiens
actggccaccaccca

SEQ ID NO: 1841863 - DNA, 15 bp, Homo sapiens
ctggccaccacccac

SEQ ID NO: 1841864 - DNA, 15 bp, Homo sapiens
tggccaccacccaca

SEQ ID NO: 1841865 - DNA, 15 bp, Homo sapiens
ggccaccacccacaa

SEQ ID NO: 1841866 - DNA, 15 bp, Homo sapiens
gccaccacccacaaa

SEQ ID NO: 1841867 - DNA, 15 bp, Homo sapiens
ccaccacccacaaac

SEQ ID NO: 1841868 - DNA, 15 bp, Homo sapiens
caccacccacaaacc

SEQ ID NO: 1841869 - DNA, 15 bp, Homo sapiens
accacccacaaaccc

SEQ ID NO: 1841870 - DNA, 15 bp, Homo sapiens
ccacccacaaaccca

SEQ ID NO: 1841871 - DNA, 15 bp, Homo sapiens
cacccacaaacccac

SEQ ID NO: 1841872 - DNA, 15 bp, Homo sapiens
acccacaaacccacc

SEQ ID NO: 1841873 - DNA, 15 bp, Homo sapiens
cccacaaacccaccc

SEQ ID NO: 1841874 - DNA, 15 bp, Homo sapiens
ccacaaacccaccca

SEQ ID NO: 1841875 - DNA, 15 bp, Homo sapiens
cacaaacccacccac

SEQ ID NO: 1841876 - DNA, 15 bp, Homo sapiens
acaaacccacccacc

SEQ ID NO: 1841877 - DNA, 15 bp, Homo sapiens
caaacccacccaccc

SEQ ID NO: 1841878 - DNA, 15 bp, Homo sapiens
aacccacccacccaa

SEQ ID NO: 1841879 - DNA, 15 bp, Homo sapiens
acccacccacccaat

SEQ ID NO: 1841880 - DNA, 15 bp, Homo sapiens
cccacccacccaatt

SEQ ID NO: 1841881 - DNA, 15 bp, Homo sapiens
ccacccacccaattc

SEQ ID NO: 1841882 - DNA, 15 bp, Homo sapiens
cacccacccaattca

SEQ ID NO: 1841883 - DNA, 15 bp, Homo sapiens
acccacccaattcat

SEQ ID NO: 1841884 - DNA, 15 bp, Homo sapiens
cccacccaattcatg

SEQ ID NO: 1841885 - DNA, 15 bp, Homo sapiens
ccacccaattcatgt

SEQ ID NO: 1841886 - DNA, 15 bp, Homo sapiens
cacccaattcatgtt

SEQ ID NO: 1841887 - DNA, 15 bp, Homo sapiens
acccaattcatgttc

SEQ ID NO: 1841888 - DNA, 15 bp, Homo sapiens
cccaattcatgttct

SEQ ID NO: 1841889 - DNA, 15 bp, Homo sapiens
ccaattcatgttctc

SEQ ID NO: 1841890 - DNA, 15 bp, Homo sapiens
caattcatgttctca

SEQ ID NO: 1841891 - DNA, 15 bp, Homo sapiens
aattcatgttctcat

SEQ ID NO: 1841892 - DNA, 15 bp, Homo sapiens
attcatgttctcatg

SEQ ID NO: 1841893 - DNA, 15 bp, Homo sapiens
ttcatgttctcatgg

SEQ ID NO: 1841894 - DNA, 15 bp, Homo sapiens
tcatgttctcatggt

SEQ ID NO: 1841895 - DNA, 15 bp, Homo sapiens
catgttctcatggtt

SEQ ID NO: 1841896 - DNA, 15 bp, Homo sapiens
atgttctcatggttc

SEQ ID NO: 1841897 - DNA, 15 bp, Homo sapiens
tgttctcatggttct

SEQ ID NO: 1841898 - DNA, 15 bp, Homo sapiens
gttctcatggttctt

SEQ ID NO: 1841899 - DNA, 15 bp, Homo sapiens
ttctcatggttcttc

SEQ ID NO: 1841900 - DNA, 15 bp, Homo sapiens
tctcatggttcttca

SEQ ID NO: 1841901 - DNA, 15 bp, Homo sapiens
ctcatggttcttcat

SEQ ID NO: 1841902 - DNA, 15 bp, Homo sapiens
tcatggttcttcatc

SEQ ID NO: 1841903 - DNA, 15 bp, Homo sapiens
catggttcttcatca

SEQ ID NO: 1841904 - DNA, 15 bp, Homo sapiens
atggttcttcatcac

SEQ ID NO: 1841905 - DNA, 15 bp, Homo sapiens
tggttcttcatcacc

SEQ ID NO: 1841906 - DNA, 15 bp, Homo sapiens
ggttcttcatcaccc

SEQ ID NO: 1841907 - DNA, 15 bp, Homo sapiens
gttcttcatcaccct

SEQ ID NO: 1841908 - DNA, 15 bp, Homo sapiens
ttcttcatcaccctt

SEQ ID NO: 1841909 - DNA, 15 bp, Homo sapiens
tcttcatcacccttt

SEQ ID NO: 1841910 - DNA, 15 bp, Homo sapiens
cttcatcacccttta

SEQ ID NO: 1841911 - DNA, 15 bp, Homo sapiens
ttcatcaccctttaa

SEQ ID NO: 1841912 - DNA, 15 bp, Homo sapiens
tcatcaccctttaat

SEQ ID NO: 1841913 - DNA, 15 bp, Homo sapiens
catcaccctttaatc

SEQ ID NO: 1841914 - DNA, 15 bp, Homo sapiens
atcaccctttaatca

SEQ ID NO: 1841915 - DNA, 15 bp, Homo sapiens
tcaccctttaatcag

SEQ ID NO: 1841916 - DNA, 15 bp, Homo sapiens
caccctttaatcaga

SEQ ID NO: 1841917 - DNA, 15 bp, Homo sapiens
accctttaatcagat

SEQ ID NO: 1841918 - DNA, 15 bp, Homo sapiens
ccctttaatcagatt

SEQ ID NO: 1841919 - DNA, 15 bp, Homo sapiens
cctttaatcagattt

SEQ ID NO: 1841920 - DNA, 15 bp, Homo sapiens
ctttaatcagatttc

SEQ ID NO: 1841921 - DNA, 15 bp, Homo sapiens
tttaatcagatttca

SEQ ID NO: 1841922 - DNA, 15 bp, Homo sapiens
ttaatcagatttcac

SEQ ID NO: 1841923 - DNA, 15 bp, Homo sapiens
taatcagatttcacc

SEQ ID NO: 1841924 - DNA, 15 bp, Homo sapiens
aatcagatttcaccc

SEQ ID NO: 1841925 - DNA, 15 bp, Homo sapiens
atcagatttcaccca

SEQ ID NO: 1841926 - DNA, 15 bp, Homo sapiens
tcagatttcacccac

SEQ ID NO: 1841927 - DNA, 15 bp, Homo sapiens
cagatttcacccaca

SEQ ID NO: 1841928 - DNA, 15 bp, Homo sapiens
agatttcacccacac

SEQ ID NO: 1841929 - DNA, 15 bp, Homo sapiens
gatttcacccacaca

SEQ ID NO: 1841930 - DNA, 15 bp, Homo sapiens
atttcacccacacat

SEQ ID NO: 1841931 - DNA, 15 bp, Homo sapiens
tttcacccacacatc

SEQ ID NO: 1841932 - DNA, 15 bp, Homo sapiens
ttcacccacacatcc

SEQ ID NO: 1841933 - DNA, 15 bp, Homo sapiens
tcacccacacatcca

SEQ ID NO: 1841934 - DNA, 15 bp, Homo sapiens
cacccacacatccat

SEQ ID NO: 1841935 - DNA, 15 bp, Homo sapiens
acccacacatccatc

SEQ ID NO: 1841936 - DNA, 15 bp, Homo sapiens
cccacacatccatcc

SEQ ID NO: 1841937 - DNA, 15 bp, Homo sapiens
ccacacatccatcca

SEQ ID NO: 1841938 - DNA, 15 bp, Homo sapiens
cacacatccatccac

SEQ ID NO: 1841939 - DNA, 15 bp, Homo sapiens
acacatccatccacc

SEQ ID NO: 1841940 - DNA, 15 bp, Homo sapiens
cacatccatccaccc

SEQ ID NO: 1841941 - DNA, 15 bp, Homo sapiens
acatccatccaccca

SEQ ID NO: 1841942 - DNA, 15 bp, Homo sapiens
catccatccacccac

SEQ ID NO: 1841943 - DNA, 15 bp, Homo sapiens
atccatccacccacc

SEQ ID NO: 1841944 - DNA, 15 bp, Homo sapiens
tccatccacccaccc

SEQ ID NO: 1841945 - DNA, 15 bp, Homo sapiens
ccatccacccaccca

SEQ ID NO: 1841946 - DNA, 15 bp, Homo sapiens
catccacccacccaa

SEQ ID NO: 1841947 - DNA, 15 bp, Homo sapiens
atccacccacccaaa

SEQ ID NO: 1841948 - DNA, 15 bp, Homo sapiens
tccacccacccaaac

SEQ ID NO: 1841949 - DNA, 15 bp, Homo sapiens
ccacccacccaaaca

SEQ ID NO: 1841950 - DNA, 15 bp, Homo sapiens
cacccacccaaacac

SEQ ID NO: 1841951 - DNA, 15 bp, Homo sapiens
acccacccaaacacc

SEQ ID NO: 1841952 - DNA, 15 bp, Homo sapiens
cccacccaaacacct

SEQ ID NO: 1841953 - DNA, 15 bp, Homo sapiens
ccacccaaacaccta

SEQ ID NO: 1841954 - DNA, 15 bp, Homo sapiens
cacccaaacacctac

SEQ ID NO: 1841955 - DNA, 15 bp, Homo sapiens
acccaaacacctacc

SEQ ID NO: 1841956 - DNA, 15 bp, Homo sapiens
cccaaacacctacca

SEQ ID NO: 1841957 - DNA, 15 bp, Homo sapiens
ccaaacacctaccaa

SEQ ID NO: 1841958 - DNA, 15 bp, Homo sapiens
caaacacctaccaac

SEQ ID NO: 1841959 - DNA, 15 bp, Homo sapiens
aaacacctaccaact

SEQ ID NO: 1841960 - DNA, 15 bp, Homo sapiens
aacacctaccaactc

SEQ ID NO: 1841961 - DNA, 15 bp, Homo sapiens
acacctaccaactcc

SEQ ID NO: 1841962 - DNA, 15 bp, Homo sapiens
cacctaccaactccc

SEQ ID NO: 1841963 - DNA, 15 bp, Homo sapiens
acctaccaactccca

SEQ ID NO: 1841964 - DNA, 15 bp, Homo sapiens
cctaccaactcccac

SEQ ID NO: 1841965 - DNA, 15 bp, Homo sapiens
ctaccaactcccacc

SEQ ID NO: 1841966 - DNA, 15 bp, Homo sapiens
taccaactcccacca

SEQ ID NO: 1841967 - DNA, 15 bp, Homo sapiens
accaactcccaccat

SEQ ID NO: 1841968 - DNA, 15 bp, Homo sapiens
ccaactcccaccatt

SEQ ID NO: 1841969 - DNA, 15 bp, Homo sapiens
caactcccaccattc

SEQ ID NO: 1841970 - DNA, 15 bp, Homo sapiens
aactcccaccattca

SEQ ID NO: 1841971 - DNA, 15 bp, Homo sapiens
actcccaccattcat

SEQ ID NO: 1841972 - DNA, 15 bp, Homo sapiens
ctcccaccattcatc

SEQ ID NO: 1841973 - DNA, 15 bp, Homo sapiens
tcccaccattcatcc

SEQ ID NO: 1841974 - DNA, 15 bp, Homo sapiens
cccaccattcatcca

SEQ ID NO: 1841975 - DNA, 15 bp, Homo sapiens
ccaccattcatccat

SEQ ID NO: 1841976 - DNA, 15 bp, Homo sapiens
caccattcatccatc

SEQ ID NO: 1841977 - DNA, 15 bp, Homo sapiens
accattcatccatcc

SEQ ID NO: 1841978 - DNA, 15 bp, Homo sapiens
cattcatccatccac

SEQ ID NO: 1841979 - DNA, 15 bp, Homo sapiens
attcatccatccact

SEQ ID NO: 1841980 - DNA, 15 bp, Homo sapiens
ttcatccatccactc

SEQ ID NO: 1841981 - DNA, 15 bp, Homo sapiens
tcatccatccactca

SEQ ID NO: 1841982 - DNA, 15 bp, Homo sapiens
catccatccactcat

SEQ ID NO: 1841983 - DNA, 15 bp, Homo sapiens
atccatccactcatc

SEQ ID NO: 1841984 - DNA, 15 bp, Homo sapiens
tccatccactcatcc

SEQ ID NO: 1841985 - DNA, 15 bp, Homo sapiens
ccatccactcatcca

SEQ ID NO: 1841986 - DNA, 15 bp, Homo sapiens
catccactcatccac

SEQ ID NO: 1841987 - DNA, 15 bp, Homo sapiens
atccactcatccacc

SEQ ID NO: 1841988 - DNA, 15 bp, Homo sapiens
tccactcatccaccc

SEQ ID NO: 1841989 - DNA, 15 bp, Homo sapiens
ccactcatccaccca

SEQ ID NO: 1841990 - DNA, 15 bp, Homo sapiens
cactcatccacccat

SEQ ID NO: 1841991 - DNA, 15 bp, Homo sapiens
actcatccacccatc

SEQ ID NO: 1841992 - DNA, 15 bp, Homo sapiens
ctcatccacccatcc

SEQ ID NO: 1841993 - DNA, 15 bp, Homo sapiens
tcatccacccatcca

SEQ ID NO: 1841994 - DNA, 15 bp, Homo sapiens
catccacccatccat

SEQ ID NO: 1841995 - DNA, 15 bp, Homo sapiens
atccacccatccatc

SEQ ID NO: 1841996 - DNA, 15 bp, Homo sapiens
tccacccatccatcc

SEQ ID NO: 1841997 - DNA, 15 bp, Homo sapiens
ccacccatccatcca

SEQ ID NO: 1841998 - DNA, 15 bp, Homo sapiens
cacccatccatccac

SEQ ID NO: 1841999 - DNA, 15 bp, Homo sapiens
acccatccatccact

SEQ ID NO: 1842000 - DNA, 15 bp, Homo sapiens
cccatccatccactt

SEQ ID NO: 1842001 - DNA, 15 bp, Homo sapiens
ccatccatccactta

SEQ ID NO: 1842002 - DNA, 15 bp, Homo sapiens
catccatccacttat

SEQ ID NO: 1842003 - DNA, 15 bp, Homo sapiens
atccatccacttatc

SEQ ID NO: 1842004 - DNA, 15 bp, Homo sapiens
tccatccacttatcc

SEQ ID NO: 1842005 - DNA, 15 bp, Homo sapiens
ccatccacttatcca

SEQ ID NO: 1842006 - DNA, 15 bp, Homo sapiens
catccacttatccat

SEQ ID NO: 1842007 - DNA, 15 bp, Homo sapiens
atccacttatccatc

SEQ ID NO: 1842008 - DNA, 15 bp, Homo sapiens
tccacttatccatcc

SEQ ID NO: 1842009 - DNA, 15 bp, Homo sapiens
ccacttatccatccc

SEQ ID NO: 1842010 - DNA, 15 bp, Homo sapiens
cacttatccatccct

SEQ ID NO: 1842011 - DNA, 15 bp, Homo sapiens
acttatccatccctt

SEQ ID NO: 1842012 - DNA, 15 bp, Homo sapiens
cttatccatcccttc

SEQ ID NO: 1842013 - DNA, 15 bp, Homo sapiens
ttatccatcccttca

SEQ ID NO: 1842014 - DNA, 15 bp, Homo sapiens
tatccatcccttcat

SEQ ID NO: 1842015 - DNA, 15 bp, Homo sapiens
atccatcccttcatc

SEQ ID NO: 1842016 - DNA, 15 bp, Homo sapiens
tccatcccttcatcc

SEQ ID NO: 1842017 - DNA, 15 bp, Homo sapiens
ccatcccttcatcca

SEQ ID NO: 1842018 - DNA, 15 bp, Homo sapiens
catcccttcatccat

SEQ ID NO: 1842019 - DNA, 15 bp, Homo sapiens
atcccttcatccatc

SEQ ID NO: 1842020 - DNA, 15 bp, Homo sapiens
tcccttcatccatcc

SEQ ID NO: 1842021 - DNA, 15 bp, Homo sapiens
cccttcatccatcca

SEQ ID NO: 1842022 - DNA, 15 bp, Homo sapiens
ccttcatccatccac

SEQ ID NO: 1842023 - DNA, 15 bp, Homo sapiens
cttcatccatccacc

SEQ ID NO: 1842024 - DNA, 15 bp, Homo sapiens
ttcatccatccaccc

SEQ ID NO: 1842025 - DNA, 15 bp, Homo sapiens
tcatccatccaccca

SEQ ID NO: 1842026 - DNA, 15 bp, Homo sapiens
catccatccacccaa

SEQ ID NO: 1842027 - DNA, 15 bp, Homo sapiens
atccatccacccaac

SEQ ID NO: 1842028 - DNA, 15 bp, Homo sapiens
tccatccacccaacc

SEQ ID NO: 1842029 - DNA, 15 bp, Homo sapiens
ccatccacccaacca

SEQ ID NO: 1842030 - DNA, 15 bp, Homo sapiens
catccacccaaccac

SEQ ID NO: 1842031 - DNA, 15 bp, Homo sapiens
atccacccaaccacc

SEQ ID NO: 1842032 - DNA, 15 bp, Homo sapiens
tccacccaaccaccc

SEQ ID NO: 1842033 - DNA, 15 bp, Homo sapiens
ccacccaaccaccca

SEQ ID NO: 1842034 - DNA, 15 bp, Homo sapiens
cacccaaccacccat

SEQ ID NO: 1842035 - DNA, 15 bp, Homo sapiens
acccaaccacccatc

SEQ ID NO: 1842036 - DNA, 15 bp, Homo sapiens
cccaaccacccatcc

SEQ ID NO: 1842037 - DNA, 15 bp, Homo sapiens
ccaaccacccatcca

SEQ ID NO: 1842038 - DNA, 15 bp, Homo sapiens
caaccacccatccat

SEQ ID NO: 1842039 - DNA, 15 bp, Homo sapiens
aaccacccatccatc

SEQ ID NO: 1842040 - DNA, 15 bp, Homo sapiens
accacccatccatcc

SEQ ID NO: 1842041 - DNA, 15 bp, Homo sapiens
cacccatccatccat

SEQ ID NO: 1842042 - DNA, 15 bp, Homo sapiens
acccatccatccatc

SEQ ID NO: 1842043 - DNA, 15 bp, Homo sapiens
cccatccatccatct

SEQ ID NO: 1842044 - DNA, 15 bp, Homo sapiens
ccatccatccatctg

SEQ ID NO: 1842045 - DNA, 15 bp, Homo sapiens
catccatccatctgc

SEQ ID NO: 1842046 - DNA, 15 bp, Homo sapiens
atccatccatctgcc

SEQ ID NO: 1842047 - DNA, 15 bp, Homo sapiens
tccatccatctgccc

SEQ ID NO: 1842048 - DNA, 15 bp, Homo sapiens
ccatccatctgccca

SEQ ID NO: 1842049 - DNA, 15 bp, Homo sapiens
catccatctgcccaa

SEQ ID NO: 1842050 - DNA, 15 bp, Homo sapiens
atccatctgcccaag

SEQ ID NO: 1842051 - DNA, 15 bp, Homo sapiens
tccatctgcccaagc

SEQ ID NO: 1842052 - DNA, 15 bp, Homo sapiens
ccatctgcccaagca

SEQ ID NO: 1842053 - DNA, 15 bp, Homo sapiens
catctgcccaagcat

SEQ ID NO: 1842054 - DNA, 15 bp, Homo sapiens
atctgcccaagcatc

SEQ ID NO: 1842055 - DNA, 15 bp, Homo sapiens
tctgcccaagcatcc

SEQ ID NO: 1842056 - DNA, 15 bp, Homo sapiens
ctgcccaagcatcca

SEQ ID NO: 1842057 - DNA, 15 bp, Homo sapiens
tgcccaagcatccat

SEQ ID NO: 1842058 - DNA, 15 bp, Homo sapiens
gcccaagcatccatc

SEQ ID NO: 1842059 - DNA, 15 bp, Homo sapiens
cccaagcatccatcc

SEQ ID NO: 1842060 - DNA, 15 bp, Homo sapiens
ccaagcatccatcca

SEQ ID NO: 1842061 - DNA, 15 bp, Homo sapiens
caagcatccatccat

SEQ ID NO: 1842062 - DNA, 15 bp, Homo sapiens
aagcatccatccatc

SEQ ID NO: 1842063 - DNA, 15 bp, Homo sapiens
agcatccatccatcc

SEQ ID NO: 1842064 - DNA, 15 bp, Homo sapiens
gcatccatccatcca

SEQ ID NO: 1842065 - DNA, 15 bp, Homo sapiens
atccatccatccacc

SEQ ID NO: 1842066 - DNA, 15 bp, Homo sapiens
tccatccatccaccc

SEQ ID NO: 1842067 - DNA, 15 bp, Homo sapiens
ccatccatccaccca

SEQ ID NO: 1842068 - DNA, 15 bp, Homo sapiens
catccatccacccat

SEQ ID NO: 1842069 - DNA, 15 bp, Homo sapiens
atccatccacccatc

SEQ ID NO: 1842070 - DNA, 15 bp, Homo sapiens
tccatccacccatct

SEQ ID NO: 1842071 - DNA, 15 bp, Homo sapiens
ccatccacccatctg

SEQ ID NO: 1842072 - DNA, 15 bp, Homo sapiens
catccacccatctgc

SEQ ID NO: 1842073 - DNA, 15 bp, Homo sapiens
atccacccatctgcc

SEQ ID NO: 1842074 - DNA, 15 bp, Homo sapiens
tccacccatctgccc

SEQ ID NO: 1842075 - DNA, 15 bp, Homo sapiens
ccacccatctgccca

SEQ ID NO: 1842076 - DNA, 15 bp, Homo sapiens
cacccatctgcccac

SEQ ID NO: 1842077 - DNA, 15 bp, Homo sapiens
acccatctgcccacc

SEQ ID NO: 1842078 - DNA, 15 bp, Homo sapiens
cccatctgcccaccc

SEQ ID NO: 1842079 - DNA, 15 bp, Homo sapiens
ccatctgcccaccca

SEQ ID NO: 1842080 - DNA, 15 bp, Homo sapiens
catctgcccacccaa

SEQ ID NO: 1842081 - DNA, 15 bp, Homo sapiens
atctgcccacccaat

SEQ ID NO: 1842082 - DNA, 15 bp, Homo sapiens
tctgcccacccaatc

SEQ ID NO: 1842083 - DNA, 15 bp, Homo sapiens
ctgcccacccaatca

SEQ ID NO: 1842084 - DNA, 15 bp, Homo sapiens
tgcccacccaatcac

SEQ ID NO: 1842085 - DNA, 15 bp, Homo sapiens
gcccacccaatcaca

SEQ ID NO: 1842086 - DNA, 15 bp, Homo sapiens
cccacccaatcacac

SEQ ID NO: 1842087 - DNA, 15 bp, Homo sapiens
ccacccaatcacaca

SEQ ID NO: 1842088 - DNA, 15 bp, Homo sapiens
cacccaatcacacac

SEQ ID NO: 1842089 - DNA, 15 bp, Homo sapiens
acccaatcacacacc

SEQ ID NO: 1842090 - DNA, 15 bp, Homo sapiens
cccaatcacacaccc

SEQ ID NO: 1842091 - DNA, 15 bp, Homo sapiens
ccaatcacacaccca

SEQ ID NO: 1842092 - DNA, 15 bp, Homo sapiens
caatcacacacccat

SEQ ID NO: 1842093 - DNA, 15 bp, Homo sapiens
aatcacacacccatc

SEQ ID NO: 1842094 - DNA, 15 bp, Homo sapiens
atcacacacccatcc

SEQ ID NO: 1842095 - DNA, 15 bp, Homo sapiens
tcacacacccatcca

SEQ ID NO: 1842096 - DNA, 15 bp, Homo sapiens
cacacacccatccac

SEQ ID NO: 1842097 - DNA, 15 bp, Homo sapiens
acacacccatccacc

SEQ ID NO: 1842098 - DNA, 15 bp, Homo sapiens
cacacccatccaccc

SEQ ID NO: 1842099 - DNA, 15 bp, Homo sapiens
acacccatccaccca

SEQ ID NO: 1842100 - DNA, 15 bp, Homo sapiens
cacccatccacccat

SEQ ID NO: 1842101 - DNA, 15 bp, Homo sapiens
acccatccacccatc

SEQ ID NO: 1842102 - DNA, 15 bp, Homo sapiens
cccatccacccatcc

SEQ ID NO: 1842103 - DNA, 15 bp, Homo sapiens
ccatccacccatcca

SEQ ID NO: 1842104 - DNA, 15 bp, Homo sapiens
catccacccatccac

SEQ ID NO: 1842105 - DNA, 15 bp, Homo sapiens
atccacccatccacc

SEQ ID NO: 1842106 - DNA, 15 bp, Homo sapiens
tccacccatccaccc

SEQ ID NO: 1842107 - DNA, 15 bp, Homo sapiens
ccacccatccaccca

SEQ ID NO: 1842108 - DNA, 15 bp, Homo sapiens
cacccatccacccac

SEQ ID NO: 1842109 - DNA, 15 bp, Homo sapiens
acccatccacccacc

SEQ ID NO: 1842110 - DNA, 15 bp, Homo sapiens
cccatccacccaccc

SEQ ID NO: 1842111 - DNA, 15 bp, Homo sapiens
catccacccacccac

SEQ ID NO: 1842112 - DNA, 15 bp, Homo sapiens
atccacccacccacc

SEQ ID NO: 1842113 - DNA, 15 bp, Homo sapiens
tccacccacccaccc

SEQ ID NO: 1842114 - DNA, 15 bp, Homo sapiens
ccacccacccaccca

SEQ ID NO: 1842115 - DNA, 15 bp, Homo sapiens
cacccacccacccat

SEQ ID NO: 1842116 - DNA, 15 bp, Homo sapiens
acccacccacccatc

SEQ ID NO: 1842117 - DNA, 15 bp, Homo sapiens
cccacccacccatcc

SEQ ID NO: 1842118 - DNA, 15 bp, Homo sapiens
ccacccacccatcca

SEQ ID NO: 1842119 - DNA, 15 bp, Homo sapiens
cacccacccatccac

SEQ ID NO: 1842120 - DNA, 15 bp, Homo sapiens
acccacccatccact

SEQ ID NO: 1842121 - DNA, 15 bp, Homo sapiens
cccacccatccactc

SEQ ID NO: 1842122 - DNA, 15 bp, Homo sapiens
ccacccatccactca

SEQ ID NO: 1842123 - DNA, 15 bp, Homo sapiens
cacccatccactcat

SEQ ID NO: 1842124 - DNA, 15 bp, Homo sapiens
acccatccactcatc

SEQ ID NO: 1842125 - DNA, 15 bp, Homo sapiens
cccatccactcatcc

SEQ ID NO: 1842126 - DNA, 15 bp, Homo sapiens
catccactcatccat

SEQ ID NO: 1842127 - DNA, 15 bp, Homo sapiens
atccactcatccatc

SEQ ID NO: 1842128 - DNA, 15 bp, Homo sapiens
tccactcatccatcc

SEQ ID NO: 1842129 - DNA, 15 bp, Homo sapiens
ccactcatccatcca

SEQ ID NO: 1842130 - DNA, 15 bp, Homo sapiens
cactcatccatccac

SEQ ID NO: 1842131 - DNA, 15 bp, Homo sapiens
actcatccatccact

SEQ ID NO: 1842132 - DNA, 15 bp, Homo sapiens
ctcatccatccactt

SEQ ID NO: 1842133 - DNA, 15 bp, Homo sapiens
tcatccatccactta

SEQ ID NO: 1842134 - DNA, 15 bp, Homo sapiens
acttatccatccctc

SEQ ID NO: 1842135 - DNA, 15 bp, Homo sapiens
cttatccatccctcc

SEQ ID NO: 1842136 - DNA, 15 bp, Homo sapiens
ttatccatccctcca

SEQ ID NO: 1842137 - DNA, 15 bp, Homo sapiens
tatccatccctccat

SEQ ID NO: 1842138 - DNA, 15 bp, Homo sapiens
atccatccctccatc

SEQ ID NO: 1842139 - DNA, 15 bp, Homo sapiens
tccatccctccatcc

SEQ ID NO: 1842140 - DNA, 15 bp, Homo sapiens
ccatccctccatcca

SEQ ID NO: 1842141 - DNA, 15 bp, Homo sapiens
catccctccatccac

SEQ ID NO: 1842142 - DNA, 15 bp, Homo sapiens
atccctccatccacc

SEQ ID NO: 1842143 - DNA, 15 bp, Homo sapiens
ccctccatccaccca

SEQ ID NO: 1842144 - DNA, 15 bp, Homo sapiens
cctccatccacccac

SEQ ID NO: 1842145 - DNA, 15 bp, Homo sapiens
ctccatccacccacc

SEQ ID NO: 1842146 - DNA, 15 bp, Homo sapiens
atccacccacccaac

SEQ ID NO: 1842147 - DNA, 15 bp, Homo sapiens
tccacccacccaacc

SEQ ID NO: 1842148 - DNA, 15 bp, Homo sapiens
ccacccacccaacca

SEQ ID NO: 1842149 - DNA, 15 bp, Homo sapiens
cacccacccaaccac

SEQ ID NO: 1842150 - DNA, 15 bp, Homo sapiens
acccacccaaccacc

SEQ ID NO: 1842151 - DNA, 15 bp, Homo sapiens
cccacccaaccacca

SEQ ID NO: 1842152 - DNA, 15 bp, Homo sapiens
ccacccaaccaccaa

SEQ ID NO: 1842153 - DNA, 15 bp, Homo sapiens
cacccaaccaccaat

SEQ ID NO: 1842154 - DNA, 15 bp, Homo sapiens
acccaaccaccaatc

SEQ ID NO: 1842155 - DNA, 15 bp, Homo sapiens
cccaaccaccaatcc

SEQ ID NO: 1842156 - DNA, 15 bp, Homo sapiens
ccaaccaccaatcca

SEQ ID NO: 1842157 - DNA, 15 bp, Homo sapiens
caaccaccaatccat

SEQ ID NO: 1842158 - DNA, 15 bp, Homo sapiens
aaccaccaatccatc

SEQ ID NO: 1842159 - DNA, 15 bp, Homo sapiens
accaccaatccatcc

SEQ ID NO: 1842160 - DNA, 15 bp, Homo sapiens
ccaccaatccatcca

SEQ ID NO: 1842161 - DNA, 15 bp, Homo sapiens
caccaatccatccat

SEQ ID NO: 1842162 - DNA, 15 bp, Homo sapiens
accaatccatccatc

SEQ ID NO: 1842163 - DNA, 15 bp, Homo sapiens
ccaatccatccatcc

SEQ ID NO: 1842164 - DNA, 15 bp, Homo sapiens
caatccatccatcca

SEQ ID NO: 1842165 - DNA, 15 bp, Homo sapiens
aatccatccatccac

SEQ ID NO: 1842166 - DNA, 15 bp, Homo sapiens
cacccacccacccac

SEQ ID NO: 1842167 - DNA, 15 bp, Homo sapiens
acccacccacccacc

SEQ ID NO: 1842168 - DNA, 15 bp, Homo sapiens
cccacccacccacca

SEQ ID NO: 1842169 - DNA, 15 bp, Homo sapiens
ccacccacccaccag

SEQ ID NO: 1842170 - DNA, 15 bp, Homo sapiens
cacccacccaccagt

SEQ ID NO: 1842171 - DNA, 15 bp, Homo sapiens
acccacccaccagtg

SEQ ID NO: 1842172 - DNA, 15 bp, Homo sapiens
cccacccaccagtgc

SEQ ID NO: 1842173 - DNA, 15 bp, Homo sapiens
ccacccaccagtgca

SEQ ID NO: 1842174 - DNA, 15 bp, Homo sapiens
cacccaccagtgcat

SEQ ID NO: 1842175 - DNA, 15 bp, Homo sapiens
acccaccagtgcatc

SEQ ID NO: 1842176 - DNA, 15 bp, Homo sapiens
cccaccagtgcatcc

SEQ ID NO: 1842177 - DNA, 15 bp, Homo sapiens
ccaccagtgcatcca

SEQ ID NO: 1842178 - DNA, 15 bp, Homo sapiens
caccagtgcatccat

SEQ ID NO: 1842179 - DNA, 15 bp, Homo sapiens
accagtgcatccatc

SEQ ID NO: 1842180 - DNA, 15 bp, Homo sapiens
ccagtgcatccatcc

SEQ ID NO: 1842181 - DNA, 15 bp, Homo sapiens
cagtgcatccatcca

SEQ ID NO: 1842182 - DNA, 15 bp, Homo sapiens
agtgcatccatccac

SEQ ID NO: 1842183 - DNA, 15 bp, Homo sapiens
gtgcatccatccacc

SEQ ID NO: 1842184 - DNA, 15 bp, Homo sapiens
tgcatccatccaccc

SEQ ID NO: 1842185 - DNA, 15 bp, Homo sapiens
gcatccatccaccca

SEQ ID NO: 1842186 - DNA, 15 bp, Homo sapiens
tccacccacccacca

SEQ ID NO: 1842187 - DNA, 15 bp, Homo sapiens
acccacccaccagtc

SEQ ID NO: 1842188 - DNA, 15 bp, Homo sapiens
cccacccaccagtcc

SEQ ID NO: 1842189 - DNA, 15 bp, Homo sapiens
ccacccaccagtcca

SEQ ID NO: 1842190 - DNA, 15 bp, Homo sapiens
cacccaccagtccat

SEQ ID NO: 1842191 - DNA, 15 bp, Homo sapiens
acccaccagtccatc

SEQ ID NO: 1842192 - DNA, 15 bp, Homo sapiens
cccaccagtccatcc

SEQ ID NO: 1842193 - DNA, 15 bp, Homo sapiens
ccaccagtccatcca

SEQ ID NO: 1842194 - DNA, 15 bp, Homo sapiens
caccagtccatccat

SEQ ID NO: 1842195 - DNA, 15 bp, Homo sapiens
accagtccatccatg

SEQ ID NO: 1842196 - DNA, 15 bp, Homo sapiens
ccagtccatccatgg

SEQ ID NO: 1842197 - DNA, 15 bp, Homo sapiens
cagtccatccatgga

SEQ ID NO: 1842198 - DNA, 15 bp, Homo sapiens
agtccatccatggat

SEQ ID NO: 1842199 - DNA, 15 bp, Homo sapiens
gtccatccatggatc

SEQ ID NO: 1842200 - DNA, 15 bp, Homo sapiens
tccatccatggatcc

SEQ ID NO: 1842201 - DNA, 15 bp, Homo sapiens
ccatccatggatcct

SEQ ID NO: 1842202 - DNA, 15 bp, Homo sapiens
catccatggatcctt

SEQ ID NO: 1842203 - DNA, 15 bp, Homo sapiens
atccatggatccttc

SEQ ID NO: 1842204 - DNA, 15 bp, Homo sapiens
tccatggatccttcc

SEQ ID NO: 1842205 - DNA, 15 bp, Homo sapiens
ccatggatccttcca

SEQ ID NO: 1842206 - DNA, 15 bp, Homo sapiens
catggatccttccat

SEQ ID NO: 1842207 - DNA, 15 bp, Homo sapiens
atggatccttccatc

SEQ ID NO: 1842208 - DNA, 15 bp, Homo sapiens
tggatccttccatcc

SEQ ID NO: 1842209 - DNA, 15 bp, Homo sapiens
ggatccttccatcca

SEQ ID NO: 1842210 - DNA, 15 bp, Homo sapiens
gatccttccatccat

SEQ ID NO: 1842211 - DNA, 15 bp, Homo sapiens
atccttccatccatc

SEQ ID NO: 1842212 - DNA, 15 bp, Homo sapiens
tccttccatccatcc

SEQ ID NO: 1842213 - DNA, 15 bp, Homo sapiens
ccttccatccatcca

SEQ ID NO: 1842214 - DNA, 15 bp, Homo sapiens
cttccatccatccat

SEQ ID NO: 1842215 - DNA, 15 bp, Homo sapiens
ttccatccatccatc

SEQ ID NO: 1842216 - DNA, 15 bp, Homo sapiens
tccatccatccactt

SEQ ID NO: 1842217 - DNA, 15 bp, Homo sapiens
catccctccatccat

SEQ ID NO: 1842218 - DNA, 15 bp, Homo sapiens
atccctccatccatt

SEQ ID NO: 1842219 - DNA, 15 bp, Homo sapiens
tccctccatccattt

SEQ ID NO: 1842220 - DNA, 15 bp, Homo sapiens
ccctccatccatttg

SEQ ID NO: 1842221 - DNA, 15 bp, Homo sapiens
cctccatccatttgc

SEQ ID NO: 1842222 - DNA, 15 bp, Homo sapiens
ctccatccatttgcc

SEQ ID NO: 1842223 - DNA, 15 bp, Homo sapiens
tccatccatttgccc

SEQ ID NO: 1842224 - DNA, 15 bp, Homo sapiens
ccatccatttgccca

SEQ ID NO: 1842225 - DNA, 15 bp, Homo sapiens
catccatttgcccaa

SEQ ID NO: 1842226 - DNA, 15 bp, Homo sapiens
atccatttgcccaat

SEQ ID NO: 1842227 - DNA, 15 bp, Homo sapiens
tccatttgcccaatc

SEQ ID NO: 1842228 - DNA, 15 bp, Homo sapiens
ccatttgcccaatca

SEQ ID NO: 1842229 - DNA, 15 bp, Homo sapiens
catttgcccaatcac

SEQ ID NO: 1842230 - DNA, 15 bp, Homo sapiens
atttgcccaatcacc

SEQ ID NO: 1842231 - DNA, 15 bp, Homo sapiens
tttgcccaatcaccc

SEQ ID NO: 1842232 - DNA, 15 bp, Homo sapiens
ttgcccaatcaccca

SEQ ID NO: 1842233 - DNA, 15 bp, Homo sapiens
tgcccaatcacccac

SEQ ID NO: 1842234 - DNA, 15 bp, Homo sapiens
gcccaatcacccacc

SEQ ID NO: 1842235 - DNA, 15 bp, Homo sapiens
cccaatcacccaccc

SEQ ID NO: 1842236 - DNA, 15 bp, Homo sapiens
ccaatcacccaccca

SEQ ID NO: 1842237 - DNA, 15 bp, Homo sapiens
caatcacccacccat

SEQ ID NO: 1842238 - DNA, 15 bp, Homo sapiens
aatcacccacccatt

SEQ ID NO: 1842239 - DNA, 15 bp, Homo sapiens
atcacccacccattc

SEQ ID NO: 1842240 - DNA, 15 bp, Homo sapiens
tcacccacccattca

SEQ ID NO: 1842241 - DNA, 15 bp, Homo sapiens
cacccacccattcat

SEQ ID NO: 1842242 - DNA, 15 bp, Homo sapiens
acccacccattcatc

SEQ ID NO: 1842243 - DNA, 15 bp, Homo sapiens
cccacccattcatcc

SEQ ID NO: 1842244 - DNA, 15 bp, Homo sapiens
cacccattcatccat

SEQ ID NO: 1842245 - DNA, 15 bp, Homo sapiens
acccattcatccatc

SEQ ID NO: 1842246 - DNA, 15 bp, Homo sapiens
cccattcatccatcc

SEQ ID NO: 1842247 - DNA, 15 bp, Homo sapiens
attcatccatccacc

SEQ ID NO: 1842248 - DNA, 15 bp, Homo sapiens
tccatccacccatcc

SEQ ID NO: 1842249 - DNA, 15 bp, Homo sapiens
acccatccatccata

SEQ ID NO: 1842250 - DNA, 15 bp, Homo sapiens
cccatccatccatac

SEQ ID NO: 1842251 - DNA, 15 bp, Homo sapiens
ccatccatccataca

SEQ ID NO: 1842252 - DNA, 15 bp, Homo sapiens
catccatccatacat

SEQ ID NO: 1842253 - DNA, 15 bp, Homo sapiens
atccatccatacatc

SEQ ID NO: 1842254 - DNA, 15 bp, Homo sapiens
tccatccatacatct

SEQ ID NO: 1842255 - DNA, 15 bp, Homo sapiens
ccatccatacatcta

SEQ ID NO: 1842256 - DNA, 15 bp, Homo sapiens
catccatacatctac

SEQ ID NO: 1842257 - DNA, 15 bp, Homo sapiens
atccatacatctacc

SEQ ID NO: 1842258 - DNA, 15 bp, Homo sapiens
tccatacatctaccc

SEQ ID NO: 1842259 - DNA, 15 bp, Homo sapiens
ccatacatctaccca

SEQ ID NO: 1842260 - DNA, 15 bp, Homo sapiens
catacatctacccat

SEQ ID NO: 1842261 - DNA, 15 bp, Homo sapiens
atacatctacccatt

SEQ ID NO: 1842262 - DNA, 15 bp, Homo sapiens
tacatctacccattc

SEQ ID NO: 1842263 - DNA, 15 bp, Homo sapiens
acatctacccattca

SEQ ID NO: 1842264 - DNA, 15 bp, Homo sapiens
catctacccattcac

SEQ ID NO: 1842265 - DNA, 15 bp, Homo sapiens
atctacccattcacc

SEQ ID NO: 1842266 - DNA, 15 bp, Homo sapiens
tctacccattcaccc

SEQ ID NO: 1842267 - DNA, 15 bp, Homo sapiens
ctacccattcaccca

SEQ ID NO: 1842268 - DNA, 15 bp, Homo sapiens
tacccattcacccat

SEQ ID NO: 1842269 - DNA, 15 bp, Homo sapiens
acccattcacccatc

SEQ ID NO: 1842270 - DNA, 15 bp, Homo sapiens
cccattcacccatct

SEQ ID NO: 1842271 - DNA, 15 bp, Homo sapiens
ccattcacccatcta

SEQ ID NO: 1842272 - DNA, 15 bp, Homo sapiens
cattcacccatctac

SEQ ID NO: 1842273 - DNA, 15 bp, Homo sapiens
attcacccatctacc

SEQ ID NO: 1842274 - DNA, 15 bp, Homo sapiens
ttcacccatctacca

SEQ ID NO: 1842275 - DNA, 15 bp, Homo sapiens
tcacccatctaccaa

SEQ ID NO: 1842276 - DNA, 15 bp, Homo sapiens
cacccatctaccaaa

SEQ ID NO: 1842277 - DNA, 15 bp, Homo sapiens
acccatctaccaaac

SEQ ID NO: 1842278 - DNA, 15 bp, Homo sapiens
cccatctaccaaacc

SEQ ID NO: 1842279 - DNA, 15 bp, Homo sapiens
ccatctaccaaacca

SEQ ID NO: 1842280 - DNA, 15 bp, Homo sapiens
catctaccaaaccac

SEQ ID NO: 1842281 - DNA, 15 bp, Homo sapiens
atctaccaaaccacc

SEQ ID NO: 1842282 - DNA, 15 bp, Homo sapiens
tctaccaaaccacca

SEQ ID NO: 1842283 - DNA, 15 bp, Homo sapiens
ctaccaaaccaccaa

SEQ ID NO: 1842284 - DNA, 15 bp, Homo sapiens
taccaaaccaccaat

SEQ ID NO: 1842285 - DNA, 15 bp, Homo sapiens
accaaaccaccaatc

SEQ ID NO: 1842286 - DNA, 15 bp, Homo sapiens
ccaaaccaccaatcc

SEQ ID NO: 1842287 - DNA, 15 bp, Homo sapiens
caaaccaccaatcca

SEQ ID NO: 1842288 - DNA, 15 bp, Homo sapiens
aaaccaccaatccac

SEQ ID NO: 1842289 - DNA, 15 bp, Homo sapiens
aaccaccaatccacc

SEQ ID NO: 1842290 - DNA, 15 bp, Homo sapiens
accaccaatccacct

SEQ ID NO: 1842291 - DNA, 15 bp, Homo sapiens
ccaccaatccaccta

SEQ ID NO: 1842292 - DNA, 15 bp, Homo sapiens
caccaatccacctat

SEQ ID NO: 1842293 - DNA, 15 bp, Homo sapiens
accaatccacctatt

SEQ ID NO: 1842294 - DNA, 15 bp, Homo sapiens
ccaatccacctattc

SEQ ID NO: 1842295 - DNA, 15 bp, Homo sapiens
caatccacctattcg

SEQ ID NO: 1842296 - DNA, 15 bp, Homo sapiens
aatccacctattcgc

SEQ ID NO: 1842297 - DNA, 15 bp, Homo sapiens
atccacctattcgcc

SEQ ID NO: 1842298 - DNA, 15 bp, Homo sapiens
tccacctattcgccc

SEQ ID NO: 1842299 - DNA, 15 bp, Homo sapiens
ccacctattcgcccc

SEQ ID NO: 1842300 - DNA, 15 bp, Homo sapiens
cacctattcgccccc

SEQ ID NO: 1842301 - DNA, 15 bp, Homo sapiens
acctattcgcccccc

SEQ ID NO: 1842302 - DNA, 15 bp, Homo sapiens
cctattcgcccccca

SEQ ID NO: 1842303 - DNA, 15 bp, Homo sapiens
ctattcgccccccat

SEQ ID NO: 1842304 - DNA, 15 bp, Homo sapiens
tattcgccccccatc

SEQ ID NO: 1842305 - DNA, 15 bp, Homo sapiens
attcgccccccatcc

SEQ ID NO: 1842306 - DNA, 15 bp, Homo sapiens
ttcgccccccatcca

SEQ ID NO: 1842307 - DNA, 15 bp, Homo sapiens
tcgccccccatccat

SEQ ID NO: 1842308 - DNA, 15 bp, Homo sapiens
cgccccccatccatc

SEQ ID NO: 1842309 - DNA, 15 bp, Homo sapiens
gccccccatccatcc

SEQ ID NO: 1842310 - DNA, 15 bp, Homo sapiens
ccccccatccatcca

SEQ ID NO: 1842311 - DNA, 15 bp, Homo sapiens
cccccatccatccac

SEQ ID NO: 1842312 - DNA, 15 bp, Homo sapiens
ccccatccatccacc

SEQ ID NO: 1842313 - DNA, 15 bp, Homo sapiens
cccatccatccaccc

SEQ ID NO: 1842314 - DNA, 15 bp, Homo sapiens
catccacccacccat

SEQ ID NO: 1842315 - DNA, 15 bp, Homo sapiens
atccacccacccatc

SEQ ID NO: 1842316 - DNA, 15 bp, Homo sapiens
tccacccacccatcc

SEQ ID NO: 1842317 - DNA, 15 bp, Homo sapiens
cacccacccatccat

SEQ ID NO: 1842318 - DNA, 15 bp, Homo sapiens
acccacccatccatt

SEQ ID NO: 1842319 - DNA, 15 bp, Homo sapiens
cccacccatccattc

SEQ ID NO: 1842320 - DNA, 15 bp, Homo sapiens
ccacccatccattca

SEQ ID NO: 1842321 - DNA, 15 bp, Homo sapiens
cacccatccattcat

SEQ ID NO: 1842322 - DNA, 15 bp, Homo sapiens
acccatccattcatc

SEQ ID NO: 1842323 - DNA, 15 bp, Homo sapiens
cccatccattcatct

SEQ ID NO: 1842324 - DNA, 15 bp, Homo sapiens
ccatccattcatcta

SEQ ID NO: 1842325 - DNA, 15 bp, Homo sapiens
catccattcatctac

SEQ ID NO: 1842326 - DNA, 15 bp, Homo sapiens
atccattcatctacc

SEQ ID NO: 1842327 - DNA, 15 bp, Homo sapiens
tccattcatctaccc

SEQ ID NO: 1842328 - DNA, 15 bp, Homo sapiens
ccattcatctacccc

SEQ ID NO: 1842329 - DNA, 15 bp, Homo sapiens
cattcatctacccct

SEQ ID NO: 1842330 - DNA, 15 bp, Homo sapiens
attcatctacccctc

SEQ ID NO: 1842331 - DNA, 15 bp, Homo sapiens
ttcatctacccctcc

SEQ ID NO: 1842332 - DNA, 15 bp, Homo sapiens
tcatctacccctcca

SEQ ID NO: 1842333 - DNA, 15 bp, Homo sapiens
catctacccctccac

SEQ ID NO: 1842334 - DNA, 15 bp, Homo sapiens
atctacccctccacc

SEQ ID NO: 1842335 - DNA, 15 bp, Homo sapiens
tctacccctccaccg

SEQ ID NO: 1842336 - DNA, 15 bp, Homo sapiens
ctacccctccaccgg

SEQ ID NO: 1842337 - DNA, 15 bp, Homo sapiens
tacccctccaccggt

SEQ ID NO: 1842338 - DNA, 15 bp, Homo sapiens
acccctccaccggtg

SEQ ID NO: 1842339 - DNA, 15 bp, Homo sapiens
cccctccaccggtgc

SEQ ID NO: 1842340 - DNA, 15 bp, Homo sapiens
ccctccaccggtgcc

SEQ ID NO: 1842341 - DNA, 15 bp, Homo sapiens
cctccaccggtgccc

SEQ ID NO: 1842342 - DNA, 15 bp, Homo sapiens
ctccaccggtgccca

SEQ ID NO: 1842343 - DNA, 15 bp, Homo sapiens
tccaccggtgcccat

SEQ ID NO: 1842344 - DNA, 15 bp, Homo sapiens
ccaccggtgcccatt

SEQ ID NO: 1842345 - DNA, 15 bp, Homo sapiens
caccggtgcccattc

SEQ ID NO: 1842346 - DNA, 15 bp, Homo sapiens
accggtgcccattca

SEQ ID NO: 1842347 - DNA, 15 bp, Homo sapiens
ccggtgcccattcac

SEQ ID NO: 1842348 - DNA, 15 bp, Homo sapiens
cggtgcccattcact

SEQ ID NO: 1842349 - DNA, 15 bp, Homo sapiens
ggtgcccattcactc

SEQ ID NO: 1842350 - DNA, 15 bp, Homo sapiens
gtgcccattcactca

SEQ ID NO: 1842351 - DNA, 15 bp, Homo sapiens
tgcccattcactcac

SEQ ID NO: 1842352 - DNA, 15 bp, Homo sapiens
gcccattcactcact

SEQ ID NO: 1842353 - DNA, 15 bp, Homo sapiens
cccattcactcacta

SEQ ID NO: 1842354 - DNA, 15 bp, Homo sapiens
ccattcactcactac

SEQ ID NO: 1842355 - DNA, 15 bp, Homo sapiens
cattcactcactacc

SEQ ID NO: 1842356 - DNA, 15 bp, Homo sapiens
attcactcactacct

SEQ ID NO: 1842357 - DNA, 15 bp, Homo sapiens
ttcactcactaccta

SEQ ID NO: 1842358 - DNA, 15 bp, Homo sapiens
tcactcactacctac

SEQ ID NO: 1842359 - DNA, 15 bp, Homo sapiens
cactcactacctacc

SEQ ID NO: 1842360 - DNA, 15 bp, Homo sapiens
actcactacctaccc

SEQ ID NO: 1842361 - DNA, 15 bp, Homo sapiens
ctcactacctaccct

SEQ ID NO: 1842362 - DNA, 15 bp, Homo sapiens
tcactacctaccctt

SEQ ID NO: 1842363 - DNA, 15 bp, Homo sapiens
cactacctacccttt

SEQ ID NO: 1842364 - DNA, 15 bp, Homo sapiens
actacctaccctttt

SEQ ID NO: 1842365 - DNA, 15 bp, Homo sapiens
ctacctacccttttt

SEQ ID NO: 1842366 - DNA, 15 bp, Homo sapiens
tacctaccctttttt

SEQ ID NO: 1842367 - DNA, 15 bp, Homo sapiens
acctacccttttttc

SEQ ID NO: 1842368 - DNA, 15 bp, Homo sapiens
cctacccttttttct

SEQ ID NO: 1842369 - DNA, 15 bp, Homo sapiens
ctacccttttttctt

SEQ ID NO: 1842370 - DNA, 15 bp, Homo sapiens
tacccttttttcttc

SEQ ID NO: 1842371 - DNA, 15 bp, Homo sapiens
acccttttttcttct

SEQ ID NO: 1842372 - DNA, 15 bp, Homo sapiens
cccttttttcttcta

SEQ ID NO: 1842373 - DNA, 15 bp, Homo sapiens
ccttttttcttctac

SEQ ID NO: 1842374 - DNA, 15 bp, Homo sapiens
cttttttcttctacc

SEQ ID NO: 1842375 - DNA, 15 bp, Homo sapiens
tttttcttctacctc

SEQ ID NO: 1842376 - DNA, 15 bp, Homo sapiens
ttttcttctacctct

SEQ ID NO: 1842377 - DNA, 15 bp, Homo sapiens
tttcttctacctctg

SEQ ID NO: 1842378 - DNA, 15 bp, Homo sapiens
ttcttctacctctga

SEQ ID NO: 1842379 - DNA, 15 bp, Homo sapiens
tcttctacctctgac

SEQ ID NO: 1842380 - DNA, 15 bp, Homo sapiens
cttctacctctgact

SEQ ID NO: 1842381 - DNA, 15 bp, Homo sapiens
ttctacctctgactg

SEQ ID NO: 1842382 - DNA, 15 bp, Homo sapiens
tctacctctgactgg

SEQ ID NO: 1842383 - DNA, 15 bp, Homo sapiens
ctacctctgactgga

SEQ ID NO: 1842384 - DNA, 15 bp, Homo sapiens
tacctctgactggag

SEQ ID NO: 1842385 - DNA, 15 bp, Homo sapiens
acctctgactggagg

SEQ ID NO: 1842386 - DNA, 15 bp, Homo sapiens
cctctgactggagga

SEQ ID NO: 1842387 - DNA, 15 bp, Homo sapiens
ctctgactggaggat

SEQ ID NO: 1842388 - DNA, 15 bp, Homo sapiens
tctgactggaggatt

SEQ ID NO: 1842389 - DNA, 15 bp, Homo sapiens
ctgactggaggattc

SEQ ID NO: 1842390 - DNA, 15 bp, Homo sapiens
tgactggaggattca

SEQ ID NO: 1842391 - DNA, 15 bp, Homo sapiens
gactggaggattcaa

SEQ ID NO: 1842392 - DNA, 15 bp, Homo sapiens
actggaggattcaat

SEQ ID NO: 1842393 - DNA, 15 bp, Homo sapiens
ctggaggattcaatc

SEQ ID NO: 1842394 - DNA, 15 bp, Homo sapiens
tggaggattcaatca

SEQ ID NO: 1842395 - DNA, 15 bp, Homo sapiens
ggaggattcaatcac

SEQ ID NO: 1842396 - DNA, 15 bp, Homo sapiens
gaggattcaatcaca

SEQ ID NO: 1842397 - DNA, 15 bp, Homo sapiens
aggattcaatcacac

SEQ ID NO: 1842398 - DNA, 15 bp, Homo sapiens
ggattcaatcacacc

SEQ ID NO: 1842399 - DNA, 15 bp, Homo sapiens
gattcaatcacaccc

SEQ ID NO: 1842400 - DNA, 15 bp, Homo sapiens
attcaatcacaccca

SEQ ID NO: 1842401 - DNA, 15 bp, Homo sapiens
ttcaatcacacccaa

SEQ ID NO: 1842402 - DNA, 15 bp, Homo sapiens
tcaatcacacccaaa

SEQ ID NO: 1842403 - DNA, 15 bp, Homo sapiens
caatcacacccaaag

SEQ ID NO: 1842404 - DNA, 15 bp, Homo sapiens
aatcacacccaaagc

SEQ ID NO: 1842405 - DNA, 15 bp, Homo sapiens
atcacacccaaagca

SEQ ID NO: 1842406 - DNA, 15 bp, Homo sapiens
tcacacccaaagcag

SEQ ID NO: 1842407 - DNA, 15 bp, Homo sapiens
cacacccaaagcagg

SEQ ID NO: 1842408 - DNA, 15 bp, Homo sapiens
acacccaaagcaggg

SEQ ID NO: 1842409 - DNA, 15 bp, Homo sapiens
cacccaaagcagggg

SEQ ID NO: 1842410 - DNA, 15 bp, Homo sapiens
acccaaagcaggggg

SEQ ID NO: 1842411 - DNA, 15 bp, Homo sapiens
cccaaagcagggggt

SEQ ID NO: 1842412 - DNA, 15 bp, Homo sapiens
ccaaagcagggggta

SEQ ID NO: 1842413 - DNA, 15 bp, Homo sapiens
caaagcagggggtaa

SEQ ID NO: 1842414 - DNA, 15 bp, Homo sapiens
aaagcagggggtaat

SEQ ID NO: 1842415 - DNA, 15 bp, Homo sapiens
aagcagggggtaata

SEQ ID NO: 1842416 - DNA, 15 bp, Homo sapiens
agcagggggtaataa

SEQ ID NO: 1842417 - DNA, 15 bp, Homo sapiens
gcagggggtaataag

SEQ ID NO: 1842418 - DNA, 15 bp, Homo sapiens
cagggggtaataaga

SEQ ID NO: 1842419 - DNA, 15 bp, Homo sapiens
agggggtaataagac

SEQ ID NO: 1842420 - DNA, 15 bp, Homo sapiens
gggggtaataagaca

SEQ ID NO: 1842421 - DNA, 15 bp, Homo sapiens
ggggtaataagacac

SEQ ID NO: 1842422 - DNA, 15 bp, Homo sapiens
gggtaataagacacc

SEQ ID NO: 1842423 - DNA, 15 bp, Homo sapiens
ggtaataagacaccc

SEQ ID NO: 1842424 - DNA, 15 bp, Homo sapiens
gtaataagacaccca

SEQ ID NO: 1842425 - DNA, 15 bp, Homo sapiens
taataagacacccaa

SEQ ID NO: 1842426 - DNA, 15 bp, Homo sapiens
aataagacacccaac

SEQ ID NO: 1842427 - DNA, 15 bp, Homo sapiens
ataagacacccaaca

SEQ ID NO: 1842428 - DNA, 15 bp, Homo sapiens
taagacacccaacag

SEQ ID NO: 1842429 - DNA, 15 bp, Homo sapiens
aagacacccaacaga

SEQ ID NO: 1842430 - DNA, 15 bp, Homo sapiens
agacacccaacagag

SEQ ID NO: 1842431 - DNA, 15 bp, Homo sapiens
gacacccaacagagg

SEQ ID NO: 1842432 - DNA, 15 bp, Homo sapiens
acacccaacagagga

SEQ ID NO: 1842433 - DNA, 15 bp, Homo sapiens
cacccaacagaggag

SEQ ID NO: 1842434 - DNA, 15 bp, Homo sapiens
acccaacagaggagt

SEQ ID NO: 1842435 - DNA, 15 bp, Homo sapiens
cccaacagaggagtt

SEQ ID NO: 1842436 - DNA, 15 bp, Homo sapiens
ccaacagaggagttc

SEQ ID NO: 1842437 - DNA, 15 bp, Homo sapiens
caacagaggagttca

SEQ ID NO: 1842438 - DNA, 15 bp, Homo sapiens
aacagaggagttcac

SEQ ID NO: 1842439 - DNA, 15 bp, Homo sapiens
acagaggagttcaca

SEQ ID NO: 1842440 - DNA, 15 bp, Homo sapiens
cagaggagttcacag

SEQ ID NO: 1842441 - DNA, 15 bp, Homo sapiens
agaggagttcacagg

SEQ ID NO: 1842442 - DNA, 15 bp, Homo sapiens
gaggagttcacaggc

SEQ ID NO: 1842443 - DNA, 15 bp, Homo sapiens
aggagttcacaggct

SEQ ID NO: 1842444 - DNA, 15 bp, Homo sapiens
ggagttcacaggctg

SEQ ID NO: 1842445 - DNA, 15 bp, Homo sapiens
gagttcacaggctgc

SEQ ID NO: 1842446 - DNA, 15 bp, Homo sapiens
agttcacaggctgct

SEQ ID NO: 1842447 - DNA, 15 bp, Homo sapiens
gttcacaggctgctt

SEQ ID NO: 1842448 - DNA, 15 bp, Homo sapiens
ttcacaggctgcttg

SEQ ID NO: 1842449 - DNA, 15 bp, Homo sapiens
tcacaggctgcttgg

SEQ ID NO: 1842450 - DNA, 15 bp, Homo sapiens
cacaggctgcttggg

SEQ ID NO: 1842451 - DNA, 15 bp, Homo sapiens
acaggctgcttggga

SEQ ID NO: 1842452 - DNA, 15 bp, Homo sapiens
caggctgcttgggag

SEQ ID NO: 1842453 - DNA, 15 bp, Homo sapiens
aggctgcttgggaga

SEQ ID NO: 1842454 - DNA, 15 bp, Homo sapiens
ggctgcttgggagaa

SEQ ID NO: 1842455 - DNA, 15 bp, Homo sapiens
gctgcttgggagaag

SEQ ID NO: 1842456 - DNA, 15 bp, Homo sapiens
ctgcttgggagaaga

SEQ ID NO: 1842457 - DNA, 15 bp, Homo sapiens
tgcttgggagaagac

SEQ ID NO: 1842458 - DNA, 15 bp, Homo sapiens
gcttgggagaagaca

SEQ ID NO: 1842459 - DNA, 15 bp, Homo sapiens
cttgggagaagacaa

SEQ ID NO: 1842460 - DNA, 15 bp, Homo sapiens
ttgggagaagacaat

SEQ ID NO: 1842461 - DNA, 15 bp, Homo sapiens
tgggagaagacaatc

SEQ ID NO: 1842462 - DNA, 15 bp, Homo sapiens
gggagaagacaatcc

SEQ ID NO: 1842463 - DNA, 15 bp, Homo sapiens
ggagaagacaatccg

SEQ ID NO: 1842464 - DNA, 15 bp, Homo sapiens
gagaagacaatccgt

SEQ ID NO: 1842465 - DNA, 15 bp, Homo sapiens
agaagacaatccgtg

SEQ ID NO: 1842466 - DNA, 15 bp, Homo sapiens
gaagacaatccgtgg

SEQ ID NO: 1842467 - DNA, 15 bp, Homo sapiens
aagacaatccgtggg

SEQ ID NO: 1842468 - DNA, 15 bp, Homo sapiens
agacaatccgtgggc

SEQ ID NO: 1842469 - DNA, 15 bp, Homo sapiens
gacaatccgtgggct

SEQ ID NO: 1842470 - DNA, 15 bp, Homo sapiens
acaatccgtgggctt

SEQ ID NO: 1842471 - DNA, 15 bp, Homo sapiens
caatccgtgggcttg

SEQ ID NO: 1842472 - DNA, 15 bp, Homo sapiens
aatccgtgggcttgg

SEQ ID NO: 1842473 - DNA, 15 bp, Homo sapiens
atccgtgggcttggg

SEQ ID NO: 1842474 - DNA, 15 bp, Homo sapiens
tccgtgggcttgggg

SEQ ID NO: 1842475 - DNA, 15 bp, Homo sapiens
ccgtgggcttggggg

SEQ ID NO: 1842476 - DNA, 15 bp, Homo sapiens
cgtgggcttggggga

SEQ ID NO: 1842477 - DNA, 15 bp, Homo sapiens
gtgggcttgggggag

SEQ ID NO: 1842478 - DNA, 15 bp, Homo sapiens
tgggcttgggggagg

SEQ ID NO: 1842479 - DNA, 15 bp, Homo sapiens
gggcttgggggaggg

SEQ ID NO: 1842480 - DNA, 15 bp, Homo sapiens
ggcttgggggaggga

SEQ ID NO: 1842481 - DNA, 15 bp, Homo sapiens
gcttgggggagggag

SEQ ID NO: 1842482 - DNA, 15 bp, Homo sapiens
cttgggggagggaga

SEQ ID NO: 1842483 - DNA, 15 bp, Homo sapiens
ttgggggagggagaa

SEQ ID NO: 1842484 - DNA, 15 bp, Homo sapiens
tgggggagggagaaa

SEQ ID NO: 1842485 - DNA, 15 bp, Homo sapiens
gggggagggagaaac

SEQ ID NO: 1842486 - DNA, 15 bp, Homo sapiens
ggggagggagaaacg

SEQ ID NO: 1842487 - DNA, 15 bp, Homo sapiens
gggagggagaaacgc

SEQ ID NO: 1842488 - DNA, 15 bp, Homo sapiens
ggagggagaaacgcc

SEQ ID NO: 1842489 - DNA, 15 bp, Homo sapiens
gagggagaaacgcct

SEQ ID NO: 1842490 - DNA, 15 bp, Homo sapiens
agggagaaacgcctg

SEQ ID NO: 1842491 - DNA, 15 bp, Homo sapiens
gggagaaacgcctgc

SEQ ID NO: 1842492 - DNA, 15 bp, Homo sapiens
ggagaaacgcctgct

SEQ ID NO: 1842493 - DNA, 15 bp, Homo sapiens
gagaaacgcctgcta

SEQ ID NO: 1842494 - DNA, 15 bp, Homo sapiens
agaaacgcctgctaa

SEQ ID NO: 1842495 - DNA, 15 bp, Homo sapiens
gaaacgcctgctaaa

SEQ ID NO: 1842496 - DNA, 15 bp, Homo sapiens
aaacgcctgctaaat

SEQ ID NO: 1842497 - DNA, 15 bp, Homo sapiens
aacgcctgctaaatt

SEQ ID NO: 1842498 - DNA, 15 bp, Homo sapiens
acgcctgctaaattt

SEQ ID NO: 1842499 - DNA, 15 bp, Homo sapiens
cgcctgctaaattta

SEQ ID NO: 1842500 - DNA, 15 bp, Homo sapiens
gcctgctaaatttag

SEQ ID NO: 1842501 - DNA, 15 bp, Homo sapiens
cctgctaaatttagg

SEQ ID NO: 1842502 - DNA, 15 bp, Homo sapiens
ctgctaaatttagga

SEQ ID NO: 1842503 - DNA, 15 bp, Homo sapiens
tgctaaatttaggaa

SEQ ID NO: 1842504 - DNA, 15 bp, Homo sapiens
gctaaatttaggaag

SEQ ID NO: 1842505 - DNA, 15 bp, Homo sapiens
ctaaatttaggaagc

SEQ ID NO: 1842506 - DNA, 15 bp, Homo sapiens
taaatttaggaagct

SEQ ID NO: 1842507 - DNA, 15 bp, Homo sapiens
aaatttaggaagctg

SEQ ID NO: 1842508 - DNA, 15 bp, Homo sapiens
aatttaggaagctgc

SEQ ID NO: 1842509 - DNA, 15 bp, Homo sapiens
atttaggaagctgct

SEQ ID NO: 1842510 - DNA, 15 bp, Homo sapiens
tttaggaagctgctt

SEQ ID NO: 1842511 - DNA, 15 bp, Homo sapiens
ttaggaagctgcttg

SEQ ID NO: 1842512 - DNA, 15 bp, Homo sapiens
taggaagctgcttgc

SEQ ID NO: 1842513 - DNA, 15 bp, Homo sapiens
aggaagctgcttgct

SEQ ID NO: 1842514 - DNA, 15 bp, Homo sapiens
ggaagctgcttgctg

SEQ ID NO: 1842515 - DNA, 15 bp, Homo sapiens
gaagctgcttgctgg

SEQ ID NO: 1842516 - DNA, 15 bp, Homo sapiens
aagctgcttgctgga

SEQ ID NO: 1842517 - DNA, 15 bp, Homo sapiens
agctgcttgctggaa

SEQ ID NO: 1842518 - DNA, 15 bp, Homo sapiens
gctgcttgctggaag

SEQ ID NO: 1842519 - DNA, 15 bp, Homo sapiens
ctgcttgctggaaga

SEQ ID NO: 1842520 - DNA, 15 bp, Homo sapiens
tgcttgctggaagag

SEQ ID NO: 1842521 - DNA, 15 bp, Homo sapiens
gcttgctggaagagg

SEQ ID NO: 1842522 - DNA, 15 bp, Homo sapiens
cttgctggaagaggt

SEQ ID NO: 1842523 - DNA, 15 bp, Homo sapiens
ttgctggaagaggtg

SEQ ID NO: 1842524 - DNA, 15 bp, Homo sapiens
tgctggaagaggtga

SEQ ID NO: 1842525 - DNA, 15 bp, Homo sapiens
gctggaagaggtgat

SEQ ID NO: 1842526 - DNA, 15 bp, Homo sapiens
ctggaagaggtgatg

SEQ ID NO: 1842527 - DNA, 15 bp, Homo sapiens
tggaagaggtgatgg

SEQ ID NO: 1842528 - DNA, 15 bp, Homo sapiens
ggaagaggtgatggt

SEQ ID NO: 1842529 - DNA, 15 bp, Homo sapiens
gaagaggtgatggta

SEQ ID NO: 1842530 - DNA, 15 bp, Homo sapiens
aagaggtgatggtaa

SEQ ID NO: 1842531 - DNA, 15 bp, Homo sapiens
agaggtgatggtaaa

SEQ ID NO: 1842532 - DNA, 15 bp, Homo sapiens
gaggtgatggtaaat

SEQ ID NO: 1842533 - DNA, 15 bp, Homo sapiens
aggtgatggtaaata

SEQ ID NO: 1842534 - DNA, 15 bp, Homo sapiens
ggtgatggtaaataa

SEQ ID NO: 1842535 - DNA, 15 bp, Homo sapiens
gtgatggtaaataag

SEQ ID NO: 1842536 - DNA, 15 bp, Homo sapiens
tgatggtaaataaga

SEQ ID NO: 1842537 - DNA, 15 bp, Homo sapiens
gatggtaaataagaa

SEQ ID NO: 1842538 - DNA, 15 bp, Homo sapiens
atggtaaataagaag

SEQ ID NO: 1842539 - DNA, 15 bp, Homo sapiens
tggtaaataagaagg

SEQ ID NO: 1842540 - DNA, 15 bp, Homo sapiens
ggtaaataagaaggg

SEQ ID NO: 1842541 - DNA, 15 bp, Homo sapiens
gtaaataagaagggc

SEQ ID NO: 1842542 - DNA, 15 bp, Homo sapiens
taaataagaagggcc

SEQ ID NO: 1842543 - DNA, 15 bp, Homo sapiens
aaataagaagggcct

SEQ ID NO: 1842544 - DNA, 15 bp, Homo sapiens
aataagaagggcctg

SEQ ID NO: 1842545 - DNA, 15 bp, Homo sapiens
ataagaagggcctga

SEQ ID NO: 1842546 - DNA, 15 bp, Homo sapiens
taagaagggcctgat

SEQ ID NO: 1842547 - DNA, 15 bp, Homo sapiens
aagaagggcctgatg

SEQ ID NO: 1842548 - DNA, 15 bp, Homo sapiens
agaagggcctgatgg

SEQ ID NO: 1842549 - DNA, 15 bp, Homo sapiens
gaagggcctgatggc

SEQ ID NO: 1842550 - DNA, 15 bp, Homo sapiens
aagggcctgatggcc

SEQ ID NO: 1842551 - DNA, 15 bp, Homo sapiens
agggcctgatggccg

SEQ ID NO: 1842552 - DNA, 15 bp, Homo sapiens
gggcctgatggccgg

SEQ ID NO: 1842553 - DNA, 15 bp, Homo sapiens
ggcctgatggccggg

SEQ ID NO: 1842554 - DNA, 15 bp, Homo sapiens
gcctgatggccgggt

SEQ ID NO: 1842555 - DNA, 15 bp, Homo sapiens
cctgatggccgggtg

SEQ ID NO: 1842556 - DNA, 15 bp, Homo sapiens
ctgatggccgggtgg

SEQ ID NO: 1842557 - DNA, 15 bp, Homo sapiens
tgatggccgggtggg

SEQ ID NO: 1842558 - DNA, 15 bp, Homo sapiens
gatggccgggtggga

SEQ ID NO: 1842559 - DNA, 15 bp, Homo sapiens
atggccgggtgggat

SEQ ID NO: 1842560 - DNA, 15 bp, Homo sapiens
tggccgggtgggatg

SEQ ID NO: 1842561 - DNA, 15 bp, Homo sapiens
ggccgggtgggatgt

SEQ ID NO: 1842562 - DNA, 15 bp, Homo sapiens
gccgggtgggatgtt

SEQ ID NO: 1842563 - DNA, 15 bp, Homo sapiens
ccgggtgggatgttg

SEQ ID NO: 1842564 - DNA, 15 bp, Homo sapiens
cgggtgggatgttga

SEQ ID NO: 1842565 - DNA, 15 bp, Homo sapiens
gggtgggatgttgag

SEQ ID NO: 1842566 - DNA, 15 bp, Homo sapiens
ggtgggatgttgagc

SEQ ID NO: 1842567 - DNA, 15 bp, Homo sapiens
tgggatgttgagcac

SEQ ID NO: 1842568 - DNA, 15 bp, Homo sapiens
gggatgttgagcacc

SEQ ID NO: 1842569 - DNA, 15 bp, Homo sapiens
ggatgttgagcacct

SEQ ID NO: 1842570 - DNA, 15 bp, Homo sapiens
gatgttgagcacctg

SEQ ID NO: 1842571 - DNA, 15 bp, Homo sapiens
atgttgagcacctgc

SEQ ID NO: 1842572 - DNA, 15 bp, Homo sapiens
tgttgagcacctgcc

SEQ ID NO: 1842573 - DNA, 15 bp, Homo sapiens
gttgagcacctgcct

SEQ ID NO: 1842574 - DNA, 15 bp, Homo sapiens
ttgagcacctgcctt

SEQ ID NO: 1842575 - DNA, 15 bp, Homo sapiens
tgagcacctgccttg

SEQ ID NO: 1842576 - DNA, 15 bp, Homo sapiens
gagcacctgccttgg

SEQ ID NO: 1842577 - DNA, 15 bp, Homo sapiens
agcacctgccttgga

SEQ ID NO: 1842578 - DNA, 15 bp, Homo sapiens
gcacctgccttggag

SEQ ID NO: 1842579 - DNA, 15 bp, Homo sapiens
cacctgccttggagg

SEQ ID NO: 1842580 - DNA, 15 bp, Homo sapiens
acctgccttggagga

SEQ ID NO: 1842581 - DNA, 15 bp, Homo sapiens
cctgccttggaggaa

SEQ ID NO: 1842582 - DNA, 15 bp, Homo sapiens
ctgccttggaggaag

SEQ ID NO: 1842583 - DNA, 15 bp, Homo sapiens
tgccttggaggaagc

SEQ ID NO: 1842584 - DNA, 15 bp, Homo sapiens
gccttggaggaagct

SEQ ID NO: 1842585 - DNA, 15 bp, Homo sapiens
ccttggaggaagcta

SEQ ID NO: 1842586 - DNA, 15 bp, Homo sapiens
cttggaggaagctag

SEQ ID NO: 1842587 - DNA, 15 bp, Homo sapiens
ttggaggaagctagg

SEQ ID NO: 1842588 - DNA, 15 bp, Homo sapiens
tggaggaagctaggc

SEQ ID NO: 1842589 - DNA, 15 bp, Homo sapiens
ggaggaagctaggca

SEQ ID NO: 1842590 - DNA, 15 bp, Homo sapiens
gaggaagctaggcag

SEQ ID NO: 1842591 - DNA, 15 bp, Homo sapiens
aggaagctaggcagg

SEQ ID NO: 1842592 - DNA, 15 bp, Homo sapiens
ggaagctaggcaggg

SEQ ID NO: 1842593 - DNA, 15 bp, Homo sapiens
gaagctaggcagggc

SEQ ID NO: 1842594 - DNA, 15 bp, Homo sapiens
aagctaggcagggca

SEQ ID NO: 1842595 - DNA, 15 bp, Homo sapiens
agctaggcagggcac

SEQ ID NO: 1842596 - DNA, 15 bp, Homo sapiens
gctaggcagggcaca

SEQ ID NO: 1842597 - DNA, 15 bp, Homo sapiens
ctaggcagggcacag

SEQ ID NO: 1842598 - DNA, 15 bp, Homo sapiens
taggcagggcacagg

SEQ ID NO: 1842599 - DNA, 15 bp, Homo sapiens
aggcagggcacaggc

SEQ ID NO: 1842600 - DNA, 15 bp, Homo sapiens
ggcagggcacaggcc

SEQ ID NO: 1842601 - DNA, 15 bp, Homo sapiens
gcagggcacaggccg

SEQ ID NO: 1842602 - DNA, 15 bp, Homo sapiens
cagggcacaggccgg

SEQ ID NO: 1842603 - DNA, 15 bp, Homo sapiens
agggcacaggccggc

SEQ ID NO: 1842604 - DNA, 15 bp, Homo sapiens
gggcacaggccggca

SEQ ID NO: 1842605 - DNA, 15 bp, Homo sapiens
ggcacaggccggcaa

SEQ ID NO: 1842606 - DNA, 15 bp, Homo sapiens
gcacaggccggcaag

SEQ ID NO: 1842607 - DNA, 15 bp, Homo sapiens
cacaggccggcaagt

SEQ ID NO: 1842608 - DNA, 15 bp, Homo sapiens
acaggccggcaagtg

SEQ ID NO: 1842609 - DNA, 15 bp, Homo sapiens
caggccggcaagtgg

SEQ ID NO: 1842610 - DNA, 15 bp, Homo sapiens
aggccggcaagtggg

SEQ ID NO: 1842611 - DNA, 15 bp, Homo sapiens
ggccggcaagtggga

SEQ ID NO: 1842612 - DNA, 15 bp, Homo sapiens
gccggcaagtgggaa

SEQ ID NO: 1842613 - DNA, 15 bp, Homo sapiens
ccggcaagtgggaag

SEQ ID NO: 1842614 - DNA, 15 bp, Homo sapiens
cggcaagtgggaagt

SEQ ID NO: 1842615 - DNA, 15 bp, Homo sapiens
ggcaagtgggaagtg

SEQ ID NO: 1842616 - DNA, 15 bp, Homo sapiens
gcaagtgggaagtgc

SEQ ID NO: 1842617 - DNA, 15 bp, Homo sapiens
caagtgggaagtgcg

SEQ ID NO: 1842618 - DNA, 15 bp, Homo sapiens
aagtgggaagtgcgt

SEQ ID NO: 1842619 - DNA, 15 bp, Homo sapiens
agtgggaagtgcgtg

SEQ ID NO: 1842620 - DNA, 15 bp, Homo sapiens
gtgggaagtgcgtgg

SEQ ID NO: 1842621 - DNA, 15 bp, Homo sapiens
tgggaagtgcgtggg

SEQ ID NO: 1842622 - DNA, 15 bp, Homo sapiens
gggaagtgcgtgggt

SEQ ID NO: 1842623 - DNA, 15 bp, Homo sapiens
ggaagtgcgtgggtg

SEQ ID NO: 1842624 - DNA, 15 bp, Homo sapiens
gaagtgcgtgggtga

SEQ ID NO: 1842625 - DNA, 15 bp, Homo sapiens
aagtgcgtgggtgaa

SEQ ID NO: 1842626 - DNA, 15 bp, Homo sapiens
agtgcgtgggtgaac

SEQ ID NO: 1842627 - DNA, 15 bp, Homo sapiens
gtgcgtgggtgaacg

SEQ ID NO: 1842628 - DNA, 15 bp, Homo sapiens
tgcgtgggtgaacga

SEQ ID NO: 1842629 - DNA, 15 bp, Homo sapiens
gcgtgggtgaacgag

SEQ ID NO: 1842630 - DNA, 15 bp, Homo sapiens
cgtgggtgaacgagt

SEQ ID NO: 1842631 - DNA, 15 bp, Homo sapiens
gtgggtgaacgagtg

SEQ ID NO: 1842632 - DNA, 15 bp, Homo sapiens
tgggtgaacgagtgc

SEQ ID NO: 1842633 - DNA, 15 bp, Homo sapiens
gggtgaacgagtgca

SEQ ID NO: 1842634 - DNA, 15 bp, Homo sapiens
ggtgaacgagtgcat

SEQ ID NO: 1842635 - DNA, 15 bp, Homo sapiens
gtgaacgagtgcatg

SEQ ID NO: 1842636 - DNA, 15 bp, Homo sapiens
tgaacgagtgcatgt

SEQ ID NO: 1842637 - DNA, 15 bp, Homo sapiens
gaacgagtgcatgtg

SEQ ID NO: 1842638 - DNA, 15 bp, Homo sapiens
aacgagtgcatgtgt

SEQ ID NO: 1842639 - DNA, 15 bp, Homo sapiens
acgagtgcatgtgtg

SEQ ID NO: 1842640 - DNA, 15 bp, Homo sapiens
cgagtgcatgtgtgt

SEQ ID NO: 1842641 - DNA, 15 bp, Homo sapiens
gagtgcatgtgtgtg

SEQ ID NO: 1842642 - DNA, 15 bp, Homo sapiens
agtgcatgtgtgtgt

SEQ ID NO: 1842643 - DNA, 15 bp, Homo sapiens
gtgcatgtgtgtgtc

SEQ ID NO: 1842644 - DNA, 15 bp, Homo sapiens
tgcatgtgtgtgtca

SEQ ID NO: 1842645 - DNA, 15 bp, Homo sapiens
gcatgtgtgtgtcag

SEQ ID NO: 1842646 - DNA, 15 bp, Homo sapiens
catgtgtgtgtcagg

SEQ ID NO: 1842647 - DNA, 15 bp, Homo sapiens
atgtgtgtgtcaggg

SEQ ID NO: 1842648 - DNA, 15 bp, Homo sapiens
tgtgtgtgtcagggt

SEQ ID NO: 1842649 - DNA, 15 bp, Homo sapiens
gtgtgtgtcagggta

SEQ ID NO: 1842650 - DNA, 15 bp, Homo sapiens
tgtgtgtcagggtac

SEQ ID NO: 1842651 - DNA, 15 bp, Homo sapiens
gtgtgtcagggtacc

SEQ ID NO: 1842652 - DNA, 15 bp, Homo sapiens
tgtgtcagggtacct

SEQ ID NO: 1842653 - DNA, 15 bp, Homo sapiens
gtgtcagggtacctg

SEQ ID NO: 1842654 - DNA, 15 bp, Homo sapiens
tgtcagggtacctgg

SEQ ID NO: 1842655 - DNA, 15 bp, Homo sapiens
gtcagggtacctggg

SEQ ID NO: 1842656 - DNA, 15 bp, Homo sapiens
tcagggtacctgggt

SEQ ID NO: 1842657 - DNA, 15 bp, Homo sapiens
cagggtacctgggta

SEQ ID NO: 1842658 - DNA, 15 bp, Homo sapiens
agggtacctgggtag

SEQ ID NO: 1842659 - DNA, 15 bp, Homo sapiens
gggtacctgggtagc

SEQ ID NO: 1842660 - DNA, 15 bp, Homo sapiens
ggtacctgggtagct

SEQ ID NO: 1842661 - DNA, 15 bp, Homo sapiens
gtacctgggtagctc

SEQ ID NO: 1842662 - DNA, 15 bp, Homo sapiens
tacctgggtagctcc

SEQ ID NO: 1842663 - DNA, 15 bp, Homo sapiens
acctgggtagctccg

SEQ ID NO: 1842664 - DNA, 15 bp, Homo sapiens
cctgggtagctccgc

SEQ ID NO: 1842665 - DNA, 15 bp, Homo sapiens
ctgggtagctccgca

SEQ ID NO: 1842666 - DNA, 15 bp, Homo sapiens
tgggtagctccgcag

SEQ ID NO: 1842667 - DNA, 15 bp, Homo sapiens
gggtagctccgcagc

SEQ ID NO: 1842668 - DNA, 15 bp, Homo sapiens
ggtagctccgcagcc

SEQ ID NO: 1842669 - DNA, 15 bp, Homo sapiens
gtagctccgcagcct

SEQ ID NO: 1842670 - DNA, 15 bp, Homo sapiens
tagctccgcagcctg

SEQ ID NO: 1842671 - DNA, 15 bp, Homo sapiens
agctccgcagcctgg

SEQ ID NO: 1842672 - DNA, 15 bp, Homo sapiens
gctccgcagcctggc

SEQ ID NO: 1842673 - DNA, 15 bp, Homo sapiens
ctccgcagcctggct

SEQ ID NO: 1842674 - DNA, 15 bp, Homo sapiens
tccgcagcctggcta

SEQ ID NO: 1842675 - DNA, 15 bp, Homo sapiens
ccgcagcctggctag

SEQ ID NO: 1842676 - DNA, 15 bp, Homo sapiens
cgcagcctggctagg

SEQ ID NO: 1842677 - DNA, 15 bp, Homo sapiens
gcagcctggctagga

SEQ ID NO: 1842678 - DNA, 15 bp, Homo sapiens
cagcctggctaggac

SEQ ID NO: 1842679 - DNA, 15 bp, Homo sapiens
agcctggctaggact

SEQ ID NO: 1842680 - DNA, 15 bp, Homo sapiens
gcctggctaggactc

SEQ ID NO: 1842681 - DNA, 15 bp, Homo sapiens
cctggctaggactca

SEQ ID NO: 1842682 - DNA, 15 bp, Homo sapiens
ctggctaggactcag

SEQ ID NO: 1842683 - DNA, 15 bp, Homo sapiens
tggctaggactcagc

SEQ ID NO: 1842684 - DNA, 15 bp, Homo sapiens
ggctaggactcagca

SEQ ID NO: 1842685 - DNA, 15 bp, Homo sapiens
gctaggactcagcac

SEQ ID NO: 1842686 - DNA, 15 bp, Homo sapiens
ctaggactcagcacg

SEQ ID NO: 1842687 - DNA, 15 bp, Homo sapiens
taggactcagcacgg

SEQ ID NO: 1842688 - DNA, 15 bp, Homo sapiens
aggactcagcacggc

SEQ ID NO: 1842689 - DNA, 15 bp, Homo sapiens
ggactcagcacggct

SEQ ID NO: 1842690 - DNA, 15 bp, Homo sapiens
gactcagcacggctt

SEQ ID NO: 1842691 - DNA, 15 bp, Homo sapiens
actcagcacggcttc

SEQ ID NO: 1842692 - DNA, 15 bp, Homo sapiens
ctcagcacggcttct

SEQ ID NO: 1842693 - DNA, 15 bp, Homo sapiens
tcagcacggcttctt

SEQ ID NO: 1842694 - DNA, 15 bp, Homo sapiens
cagcacggcttcttt

SEQ ID NO: 1842695 - DNA, 15 bp, Homo sapiens
agcacggcttctttc

SEQ ID NO: 1842696 - DNA, 15 bp, Homo sapiens
tttgtggaagaatgt

SEQ ID NO: 1842697 - DNA, 15 bp, Homo sapiens
ttgtggaagaatgtg

SEQ ID NO: 1842698 - DNA, 15 bp, Homo sapiens
tgtggaagaatgtgc

SEQ ID NO: 1842699 - DNA, 15 bp, Homo sapiens
gtggaagaatgtgcc

SEQ ID NO: 1842700 - DNA, 15 bp, Homo sapiens
tggaagaatgtgcca

SEQ ID NO: 1842701 - DNA, 15 bp, Homo sapiens
ggaagaatgtgccaa

SEQ ID NO: 1842702 - DNA, 15 bp, Homo sapiens
gaagaatgtgccaag

SEQ ID NO: 1842703 - DNA, 15 bp, Homo sapiens
aagaatgtgccaagt

SEQ ID NO: 1842704 - DNA, 15 bp, Homo sapiens
agaatgtgccaagtg

SEQ ID NO: 1842705 - DNA, 15 bp, Homo sapiens
gaatgtgccaagtgt

SEQ ID NO: 1842706 - DNA, 15 bp, Homo sapiens
aatgtgccaagtgta

SEQ ID NO: 1842707 - DNA, 15 bp, Homo sapiens
atgtgccaagtgtaa

SEQ ID NO: 1842708 - DNA, 15 bp, Homo sapiens
tgtgccaagtgtaag

SEQ ID NO: 1842709 - DNA, 15 bp, Homo sapiens
gtgccaagtgtaaga

SEQ ID NO: 1842710 - DNA, 15 bp, Homo sapiens
tgccaagtgtaagac

SEQ ID NO: 1842711 - DNA, 15 bp, Homo sapiens
gccaagtgtaagacg

SEQ ID NO: 1842712 - DNA, 15 bp, Homo sapiens
ccaagtgtaagacgt

SEQ ID NO: 1842713 - DNA, 15 bp, Homo sapiens
caagtgtaagacgtg

SEQ ID NO: 1842714 - DNA, 15 bp, Homo sapiens
aagtgtaagacgtga

SEQ ID NO: 1842715 - DNA, 15 bp, Homo sapiens
agtgtaagacgtgag

SEQ ID NO: 1842716 - DNA, 15 bp, Homo sapiens
gtgtaagacgtgagt

SEQ ID NO: 1842717 - DNA, 15 bp, Homo sapiens
tgtaagacgtgagtg

SEQ ID NO: 1842718 - DNA, 15 bp, Homo sapiens
gtaagacgtgagtgc

SEQ ID NO: 1842719 - DNA, 15 bp, Homo sapiens
taagacgtgagtgcc

SEQ ID NO: 1842720 - DNA, 15 bp, Homo sapiens
aagacgtgagtgcca

SEQ ID NO: 1842721 - DNA, 15 bp, Homo sapiens
agacgtgagtgccac

SEQ ID NO: 1842722 - DNA, 15 bp, Homo sapiens
gacgtgagtgccacc

SEQ ID NO: 1842723 - DNA, 15 bp, Homo sapiens
acgtgagtgccacct

SEQ ID NO: 1842724 - DNA, 15 bp, Homo sapiens
cgtgagtgccacctg

SEQ ID NO: 1842725 - DNA, 15 bp, Homo sapiens
gtgagtgccacctgg

SEQ ID NO: 1842726 - DNA, 15 bp, Homo sapiens
tgagtgccacctggg

SEQ ID NO: 1842727 - DNA, 15 bp, Homo sapiens
gagtgccacctgggt

SEQ ID NO: 1842728 - DNA, 15 bp, Homo sapiens
agtgccacctgggtg

SEQ ID NO: 1842729 - DNA, 15 bp, Homo sapiens
gtgccacctgggtgc

SEQ ID NO: 1842730 - DNA, 15 bp, Homo sapiens
tgccacctgggtgca

SEQ ID NO: 1842731 - DNA, 15 bp, Homo sapiens
gccacctgggtgcag

SEQ ID NO: 1842732 - DNA, 15 bp, Homo sapiens
ccacctgggtgcagg

SEQ ID NO: 1842733 - DNA, 15 bp, Homo sapiens
cacctgggtgcaggg

SEQ ID NO: 1842734 - DNA, 15 bp, Homo sapiens
acctgggtgcagggg

SEQ ID NO: 1842735 - DNA, 15 bp, Homo sapiens
cctgggtgcaggggt

SEQ ID NO: 1842736 - DNA, 15 bp, Homo sapiens
ctgggtgcaggggtg

SEQ ID NO: 1842737 - DNA, 15 bp, Homo sapiens
tgggtgcaggggtgg

SEQ ID NO: 1842738 - DNA, 15 bp, Homo sapiens
gggtgcaggggtggg

SEQ ID NO: 1842739 - DNA, 15 bp, Homo sapiens
ggtgcaggggtgggg

SEQ ID NO: 1842740 - DNA, 15 bp, Homo sapiens
gtgcaggggtggggg

SEQ ID NO: 1842741 - DNA, 15 bp, Homo sapiens
tgcaggggtgggggc

SEQ ID NO: 1842742 - DNA, 15 bp, Homo sapiens
gcaggggtgggggct

SEQ ID NO: 1842743 - DNA, 15 bp, Homo sapiens
caggggtgggggctc

SEQ ID NO: 1842744 - DNA, 15 bp, Homo sapiens
aggggtgggggctct

SEQ ID NO: 1842745 - DNA, 15 bp, Homo sapiens
ggggtgggggctctg

SEQ ID NO: 1842746 - DNA, 15 bp, Homo sapiens
gggtgggggctctgc

SEQ ID NO: 1842747 - DNA, 15 bp, Homo sapiens
ggtgggggctctgcc

SEQ ID NO: 1842748 - DNA, 15 bp, Homo sapiens
gtgggggctctgcca

SEQ ID NO: 1842749 - DNA, 15 bp, Homo sapiens
tgggggctctgccag

SEQ ID NO: 1842750 - DNA, 15 bp, Homo sapiens
gggggctctgccaga

SEQ ID NO: 1842751 - DNA, 15 bp, Homo sapiens
ggggctctgccagag

SEQ ID NO: 1842752 - DNA, 15 bp, Homo sapiens
gggctctgccagagg

SEQ ID NO: 1842753 - DNA, 15 bp, Homo sapiens
ggctctgccagaggg

SEQ ID NO: 1842754 - DNA, 15 bp, Homo sapiens
gctctgccagagggg

SEQ ID NO: 1842755 - DNA, 15 bp, Homo sapiens
ctctgccagaggggg

SEQ ID NO: 1842756 - DNA, 15 bp, Homo sapiens
tctgccagagggggt

SEQ ID NO: 1842757 - DNA, 15 bp, Homo sapiens
ctgccagagggggtt

SEQ ID NO: 1842758 - DNA, 15 bp, Homo sapiens
tgccagagggggttg

SEQ ID NO: 1842759 - DNA, 15 bp, Homo sapiens
gccagagggggttgg

SEQ ID NO: 1842760 - DNA, 15 bp, Homo sapiens
ccagagggggttggg

SEQ ID NO: 1842761 - DNA, 15 bp, Homo sapiens
cagagggggttgggg

SEQ ID NO: 1842762 - DNA, 15 bp, Homo sapiens
agagggggttggggg

SEQ ID NO: 1842763 - DNA, 15 bp, Homo sapiens
gagggggttgggggt

SEQ ID NO: 1842764 - DNA, 15 bp, Homo sapiens
agggggttgggggtc

SEQ ID NO: 1842765 - DNA, 15 bp, Homo sapiens
gggggttgggggtcg

SEQ ID NO: 1842766 - DNA, 15 bp, Homo sapiens
ggggttgggggtcga

SEQ ID NO: 1842767 - DNA, 15 bp, Homo sapiens
gggttgggggtcgaa

SEQ ID NO: 1842768 - DNA, 15 bp, Homo sapiens
ggttgggggtcgaat

SEQ ID NO: 1842769 - DNA, 15 bp, Homo sapiens
gttgggggtcgaatc

SEQ ID NO: 1842770 - DNA, 15 bp, Homo sapiens
ttgggggtcgaatcc

SEQ ID NO: 1842771 - DNA, 15 bp, Homo sapiens
tgggggtcgaatccg

SEQ ID NO: 1842772 - DNA, 15 bp, Homo sapiens
gggggtcgaatccga

SEQ ID NO: 1842773 - DNA, 15 bp, Homo sapiens
ggggtcgaatccgat

SEQ ID NO: 1842774 - DNA, 15 bp, Homo sapiens
gggtcgaatccgatg

SEQ ID NO: 1842775 - DNA, 15 bp, Homo sapiens
ggtcgaatccgatgt

SEQ ID NO: 1842776 - DNA, 15 bp, Homo sapiens
gtcgaatccgatgtc

SEQ ID NO: 1842777 - DNA, 15 bp, Homo sapiens
tcgaatccgatgtcc

SEQ ID NO: 1842778 - DNA, 15 bp, Homo sapiens
cgaatccgatgtccc

SEQ ID NO: 1842779 - DNA, 15 bp, Homo sapiens
gaatccgatgtccca

SEQ ID NO: 1842780 - DNA, 15 bp, Homo sapiens
aatccgatgtcccag

SEQ ID NO: 1842781 - DNA, 15 bp, Homo sapiens
atccgatgtcccaga

SEQ ID NO: 1842782 - DNA, 15 bp, Homo sapiens
tccgatgtcccagag

SEQ ID NO: 1842783 - DNA, 15 bp, Homo sapiens
ccgatgtcccagaga

SEQ ID NO: 1842784 - DNA, 15 bp, Homo sapiens
cgatgtcccagagac

SEQ ID NO: 1842785 - DNA, 15 bp, Homo sapiens
gatgtcccagagacc

SEQ ID NO: 1842786 - DNA, 15 bp, Homo sapiens
atgtcccagagaccc

SEQ ID NO: 1842787 - DNA, 15 bp, Homo sapiens
tgtcccagagaccca

SEQ ID NO: 1842788 - DNA, 15 bp, Homo sapiens
gtcccagagacccag

SEQ ID NO: 1842789 - DNA, 15 bp, Homo sapiens
tcccagagacccaga

SEQ ID NO: 1842790 - DNA, 15 bp, Homo sapiens
cccagagacccagag

SEQ ID NO: 1842791 - DNA, 15 bp, Homo sapiens
ccagagacccagagg

SEQ ID NO: 1842792 - DNA, 15 bp, Homo sapiens
cagagacccagaggg

SEQ ID NO: 1842793 - DNA, 15 bp, Homo sapiens
agagacccagagggt

SEQ ID NO: 1842794 - DNA, 15 bp, Homo sapiens
gagacccagagggta

SEQ ID NO: 1842795 - DNA, 15 bp, Homo sapiens
agacccagagggtat

SEQ ID NO: 1842796 - DNA, 15 bp, Homo sapiens
gacccagagggtatg

SEQ ID NO: 1842797 - DNA, 15 bp, Homo sapiens
acccagagggtatgg

SEQ ID NO: 1842798 - DNA, 15 bp, Homo sapiens
cccagagggtatggg

SEQ ID NO: 1842799 - DNA, 15 bp, Homo sapiens
ccagagggtatgggg

SEQ ID NO: 1842800 - DNA, 15 bp, Homo sapiens
cagagggtatggggg

SEQ ID NO: 1842801 - DNA, 15 bp, Homo sapiens
agagggtatgggggg

SEQ ID NO: 1842802 - DNA, 15 bp, Homo sapiens
gagggtatgggggga

SEQ ID NO: 1842803 - DNA, 15 bp, Homo sapiens
agggtatggggggac

SEQ ID NO: 1842804 - DNA, 15 bp, Homo sapiens
gggtatggggggact

SEQ ID NO: 1842805 - DNA, 15 bp, Homo sapiens
ggtatggggggactg

SEQ ID NO: 1842806 - DNA, 15 bp, Homo sapiens
gtatggggggactgg

SEQ ID NO: 1842807 - DNA, 15 bp, Homo sapiens
tatggggggactggg

SEQ ID NO: 1842808 - DNA, 15 bp, Homo sapiens
atggggggactgggg

SEQ ID NO: 1842809 - DNA, 15 bp, Homo sapiens
tggggggactggggt

SEQ ID NO: 1842810 - DNA, 15 bp, Homo sapiens
ggggggactggggtg

SEQ ID NO: 1842811 - DNA, 15 bp, Homo sapiens
gggggactggggtgt

SEQ ID NO: 1842812 - DNA, 15 bp, Homo sapiens
ggggactggggtgtg

SEQ ID NO: 1842813 - DNA, 15 bp, Homo sapiens
gggactggggtgtgg

SEQ ID NO: 1842814 - DNA, 15 bp, Homo sapiens
ggactggggtgtggc

SEQ ID NO: 1842815 - DNA, 15 bp, Homo sapiens
gactggggtgtggcc

SEQ ID NO: 1842816 - DNA, 15 bp, Homo sapiens
actggggtgtggccc

SEQ ID NO: 1842817 - DNA, 15 bp, Homo sapiens
ctggggtgtggccct

SEQ ID NO: 1842818 - DNA, 15 bp, Homo sapiens
tggggtgtggccctc

SEQ ID NO: 1842819 - DNA, 15 bp, Homo sapiens
ggggtgtggccctcc

SEQ ID NO: 1842820 - DNA, 15 bp, Homo sapiens
gggtgtggccctcct

SEQ ID NO: 1842821 - DNA, 15 bp, Homo sapiens
ggtgtggccctcctg

SEQ ID NO: 1842822 - DNA, 15 bp, Homo sapiens
gtgtggccctcctgg

SEQ ID NO: 1842823 - DNA, 15 bp, Homo sapiens
tgtggccctcctggg

SEQ ID NO: 1842824 - DNA, 15 bp, Homo sapiens
gtggccctcctgggg

SEQ ID NO: 1842825 - DNA, 15 bp, Homo sapiens
tggccctcctggggg

SEQ ID NO: 1842826 - DNA, 15 bp, Homo sapiens
ggccctcctgggggg

SEQ ID NO: 1842827 - DNA, 15 bp, Homo sapiens
gccctcctgggggga

SEQ ID NO: 1842828 - DNA, 15 bp, Homo sapiens
ccctcctggggggat

SEQ ID NO: 1842829 - DNA, 15 bp, Homo sapiens
cctcctggggggatc

SEQ ID NO: 1842830 - DNA, 15 bp, Homo sapiens
ctcctggggggatct

SEQ ID NO: 1842831 - DNA, 15 bp, Homo sapiens
tcctggggggatctg

SEQ ID NO: 1842832 - DNA, 15 bp, Homo sapiens
cctggggggatctgg

SEQ ID NO: 1842833 - DNA, 15 bp, Homo sapiens
ctggggggatctggg

SEQ ID NO: 1842834 - DNA, 15 bp, Homo sapiens
tggggggatctgggg

SEQ ID NO: 1842835 - DNA, 15 bp, Homo sapiens
ggggggatctggggg

SEQ ID NO: 1842836 - DNA, 15 bp, Homo sapiens
gggggatctgggggc

SEQ ID NO: 1842837 - DNA, 15 bp, Homo sapiens
ggggatctgggggcg

SEQ ID NO: 1842838 - DNA, 15 bp, Homo sapiens
gggatctgggggcgt

SEQ ID NO: 1842839 - DNA, 15 bp, Homo sapiens
ggatctgggggcgtg

SEQ ID NO: 1842840 - DNA, 15 bp, Homo sapiens
gatctgggggcgtgt

SEQ ID NO: 1842841 - DNA, 15 bp, Homo sapiens
atctgggggcgtgtc

SEQ ID NO: 1842842 - DNA, 15 bp, Homo sapiens
tctgggggcgtgtct

SEQ ID NO: 1842843 - DNA, 15 bp, Homo sapiens
ctgggggcgtgtctc

SEQ ID NO: 1842844 - DNA, 15 bp, Homo sapiens
tgggggcgtgtctcc

SEQ ID NO: 1842845 - DNA, 15 bp, Homo sapiens
gggggcgtgtctccc

SEQ ID NO: 1842846 - DNA, 15 bp, Homo sapiens
ggggcgtgtctccct

SEQ ID NO: 1842847 - DNA, 15 bp, Homo sapiens
gggcgtgtctccctc

SEQ ID NO: 1842848 - DNA, 15 bp, Homo sapiens
ggcgtgtctccctct

SEQ ID NO: 1842849 - DNA, 15 bp, Homo sapiens
gcgtgtctccctctt

SEQ ID NO: 1842850 - DNA, 15 bp, Homo sapiens
cgtgtctccctcttg

SEQ ID NO: 1842851 - DNA, 15 bp, Homo sapiens
gtgtctccctcttgg

SEQ ID NO: 1842852 - DNA, 15 bp, Homo sapiens
tgtctccctcttggg

SEQ ID NO: 1842853 - DNA, 15 bp, Homo sapiens
gtctccctcttgggg

SEQ ID NO: 1842854 - DNA, 15 bp, Homo sapiens
tctccctcttggggg

SEQ ID NO: 1842855 - DNA, 15 bp, Homo sapiens
ctccctcttgggggg

SEQ ID NO: 1842856 - DNA, 15 bp, Homo sapiens
tccctcttgggggga

SEQ ID NO: 1842857 - DNA, 15 bp, Homo sapiens
ccctcttggggggat

SEQ ID NO: 1842858 - DNA, 15 bp, Homo sapiens
cctcttggggggata

SEQ ID NO: 1842859 - DNA, 15 bp, Homo sapiens
ctcttggggggatat

SEQ ID NO: 1842860 - DNA, 15 bp, Homo sapiens
tcttggggggatata

SEQ ID NO: 1842861 - DNA, 15 bp, Homo sapiens
cttggggggatataa

SEQ ID NO: 1842862 - DNA, 15 bp, Homo sapiens
ttggggggatataag

SEQ ID NO: 1842863 - DNA, 15 bp, Homo sapiens
tggggggatataagg

SEQ ID NO: 1842864 - DNA, 15 bp, Homo sapiens
ggggggatataagga

SEQ ID NO: 1842865 - DNA, 15 bp, Homo sapiens
gggggatataaggag

SEQ ID NO: 1842866 - DNA, 15 bp, Homo sapiens
ggggatataaggagt

SEQ ID NO: 1842867 - DNA, 15 bp, Homo sapiens
gggatataaggagta

SEQ ID NO: 1842868 - DNA, 15 bp, Homo sapiens
ggatataaggagtat

SEQ ID NO: 1842869 - DNA, 15 bp, Homo sapiens
gatataaggagtatg

SEQ ID NO: 1842870 - DNA, 15 bp, Homo sapiens
atataaggagtatgt

SEQ ID NO: 1842871 - DNA, 15 bp, Homo sapiens
tataaggagtatgtc

SEQ ID NO: 1842872 - DNA, 15 bp, Homo sapiens
ataaggagtatgtct

SEQ ID NO: 1842873 - DNA, 15 bp, Homo sapiens
taaggagtatgtctc

SEQ ID NO: 1842874 - DNA, 15 bp, Homo sapiens
aaggagtatgtctcc

SEQ ID NO: 1842875 - DNA, 15 bp, Homo sapiens
aggagtatgtctccc

SEQ ID NO: 1842876 - DNA, 15 bp, Homo sapiens
ggagtatgtctccct

SEQ ID NO: 1842877 - DNA, 15 bp, Homo sapiens
gagtatgtctccctc

SEQ ID NO: 1842878 - DNA, 15 bp, Homo sapiens
agtatgtctccctcc

SEQ ID NO: 1842879 - DNA, 15 bp, Homo sapiens
gtatgtctccctcct

SEQ ID NO: 1842880 - DNA, 15 bp, Homo sapiens
tatgtctccctcctg

SEQ ID NO: 1842881 - DNA, 15 bp, Homo sapiens
atgtctccctcctgg

SEQ ID NO: 1842882 - DNA, 15 bp, Homo sapiens
tgtctccctcctgga

SEQ ID NO: 1842883 - DNA, 15 bp, Homo sapiens
gtctccctcctggag

SEQ ID NO: 1842884 - DNA, 15 bp, Homo sapiens
tctccctcctggagg

SEQ ID NO: 1842885 - DNA, 15 bp, Homo sapiens
ctccctcctggaggg

SEQ ID NO: 1842886 - DNA, 15 bp, Homo sapiens
tccctcctggaggga

SEQ ID NO: 1842887 - DNA, 15 bp, Homo sapiens
ccctcctggagggat

SEQ ID NO: 1842888 - DNA, 15 bp, Homo sapiens
cctcctggagggatt

SEQ ID NO: 1842889 - DNA, 15 bp, Homo sapiens
ctcctggagggattt

SEQ ID NO: 1842890 - DNA, 15 bp, Homo sapiens
tcctggagggatttg

SEQ ID NO: 1842891 - DNA, 15 bp, Homo sapiens
cctggagggatttgg

SEQ ID NO: 1842892 - DNA, 15 bp, Homo sapiens
ctggagggatttggg

SEQ ID NO: 1842893 - DNA, 15 bp, Homo sapiens
tggagggatttgggg

SEQ ID NO: 1842894 - DNA, 15 bp, Homo sapiens
ggagggatttggggg

SEQ ID NO: 1842895 - DNA, 15 bp, Homo sapiens
gagggatttgggggg

SEQ ID NO: 1842896 - DNA, 15 bp, Homo sapiens
agggatttggggggc

SEQ ID NO: 1842897 - DNA, 15 bp, Homo sapiens
gggatttggggggca

SEQ ID NO: 1842898 - DNA, 15 bp, Homo sapiens
ggatttggggggcat

SEQ ID NO: 1842899 - DNA, 15 bp, Homo sapiens
gatttggggggcatg

SEQ ID NO: 1842900 - DNA, 15 bp, Homo sapiens
atttggggggcatgt

SEQ ID NO: 1842901 - DNA, 15 bp, Homo sapiens
tttggggggcatgtc

SEQ ID NO: 1842902 - DNA, 15 bp, Homo sapiens
ttggggggcatgtct

SEQ ID NO: 1842903 - DNA, 15 bp, Homo sapiens
tggggggcatgtctt

SEQ ID NO: 1842904 - DNA, 15 bp, Homo sapiens
ggggggcatgtcttc

SEQ ID NO: 1842905 - DNA, 15 bp, Homo sapiens
gggggcatgtcttcc

SEQ ID NO: 1842906 - DNA, 15 bp, Homo sapiens
ggggcatgtcttcct

SEQ ID NO: 1842907 - DNA, 15 bp, Homo sapiens
gggcatgtcttcctc

SEQ ID NO: 1842908 - DNA, 15 bp, Homo sapiens
ggcatgtcttcctcc

SEQ ID NO: 1842909 - DNA, 15 bp, Homo sapiens
gcatgtcttcctcct

SEQ ID NO: 1842910 - DNA, 15 bp, Homo sapiens
catgtcttcctcctg

SEQ ID NO: 1842911 - DNA, 15 bp, Homo sapiens
atgtcttcctcctgg

SEQ ID NO: 1842912 - DNA, 15 bp, Homo sapiens
tgtcttcctcctgga

SEQ ID NO: 1842913 - DNA, 15 bp, Homo sapiens
gtcttcctcctggag

SEQ ID NO: 1842914 - DNA, 15 bp, Homo sapiens
tcttcctcctggagg

SEQ ID NO: 1842915 - DNA, 15 bp, Homo sapiens
cttcctcctggaggg

SEQ ID NO: 1842916 - DNA, 15 bp, Homo sapiens
ttcctcctggaggga

SEQ ID NO: 1842917 - DNA, 15 bp, Homo sapiens
tcctcctggagggat

SEQ ID NO: 1842918 - DNA, 15 bp, Homo sapiens
agggatttggggggg

SEQ ID NO: 1842919 - DNA, 15 bp, Homo sapiens
gggatttgggggggc

SEQ ID NO: 1842920 - DNA, 15 bp, Homo sapiens
ggatttgggggggcc

SEQ ID NO: 1842921 - DNA, 15 bp, Homo sapiens
gatttgggggggccg

SEQ ID NO: 1842922 - DNA, 15 bp, Homo sapiens
atttgggggggccgt

SEQ ID NO: 1842923 - DNA, 15 bp, Homo sapiens
tttgggggggccgtg

SEQ ID NO: 1842924 - DNA, 15 bp, Homo sapiens
ttgggggggccgtgc

SEQ ID NO: 1842925 - DNA, 15 bp, Homo sapiens
tgggggggccgtgcc

SEQ ID NO: 1842926 - DNA, 15 bp, Homo sapiens
gggggggccgtgcct

SEQ ID NO: 1842927 - DNA, 15 bp, Homo sapiens
ggggggccgtgcctc

SEQ ID NO: 1842928 - DNA, 15 bp, Homo sapiens
gggggccgtgcctcc

SEQ ID NO: 1842929 - DNA, 15 bp, Homo sapiens
ggggccgtgcctccc

SEQ ID NO: 1842930 - DNA, 15 bp, Homo sapiens
gggccgtgcctccct

SEQ ID NO: 1842931 - DNA, 15 bp, Homo sapiens
ggccgtgcctccctc

SEQ ID NO: 1842932 - DNA, 15 bp, Homo sapiens
gccgtgcctccctcc

SEQ ID NO: 1842933 - DNA, 15 bp, Homo sapiens
ccgtgcctccctcct

SEQ ID NO: 1842934 - DNA, 15 bp, Homo sapiens
cgtgcctccctcctg

SEQ ID NO: 1842935 - DNA, 15 bp, Homo sapiens
gtgcctccctcctgt

SEQ ID NO: 1842936 - DNA, 15 bp, Homo sapiens
tgcctccctcctgtg

SEQ ID NO: 1842937 - DNA, 15 bp, Homo sapiens
gcctccctcctgtgg

SEQ ID NO: 1842938 - DNA, 15 bp, Homo sapiens
cctccctcctgtggg

SEQ ID NO: 1842939 - DNA, 15 bp, Homo sapiens
ctccctcctgtgggg

SEQ ID NO: 1842940 - DNA, 15 bp, Homo sapiens
tccctcctgtggggg

SEQ ID NO: 1842941 - DNA, 15 bp, Homo sapiens
ccctcctgtgggggg

SEQ ID NO: 1842942 - DNA, 15 bp, Homo sapiens
cctcctgtggggggt

SEQ ID NO: 1842943 - DNA, 15 bp, Homo sapiens
ctcctgtggggggta

SEQ ID NO: 1842944 - DNA, 15 bp, Homo sapiens
tcctgtggggggtac

SEQ ID NO: 1842945 - DNA, 15 bp, Homo sapiens
cctgtggggggtaca

SEQ ID NO: 1842946 - DNA, 15 bp, Homo sapiens
ctgtggggggtacat

SEQ ID NO: 1842947 - DNA, 15 bp, Homo sapiens
tgtggggggtacatc

SEQ ID NO: 1842948 - DNA, 15 bp, Homo sapiens
gtggggggtacatcc

SEQ ID NO: 1842949 - DNA, 15 bp, Homo sapiens
tggggggtacatccg

SEQ ID NO: 1842950 - DNA, 15 bp, Homo sapiens
ggggggtacatccgt

SEQ ID NO: 1842951 - DNA, 15 bp, Homo sapiens
gggggtacatccgtg

SEQ ID NO: 1842952 - DNA, 15 bp, Homo sapiens
ggggtacatccgtgt

SEQ ID NO: 1842953 - DNA, 15 bp, Homo sapiens
gggtacatccgtgtc

SEQ ID NO: 1842954 - DNA, 15 bp, Homo sapiens
ggtacatccgtgtcc

SEQ ID NO: 1842955 - DNA, 15 bp, Homo sapiens
gtacatccgtgtcct

SEQ ID NO: 1842956 - DNA, 15 bp, Homo sapiens
tacatccgtgtcctg

SEQ ID NO: 1842957 - DNA, 15 bp, Homo sapiens
acatccgtgtcctgg

SEQ ID NO: 1842958 - DNA, 15 bp, Homo sapiens
catccgtgtcctggc

SEQ ID NO: 1842959 - DNA, 15 bp, Homo sapiens
atccgtgtcctggca

SEQ ID NO: 1842960 - DNA, 15 bp, Homo sapiens
tccgtgtcctggcac

SEQ ID NO: 1842961 - DNA, 15 bp, Homo sapiens
ccgtgtcctggcact

SEQ ID NO: 1842962 - DNA, 15 bp, Homo sapiens
cgtgtcctggcactg

SEQ ID NO: 1842963 - DNA, 15 bp, Homo sapiens
gtgtcctggcactgc

SEQ ID NO: 1842964 - DNA, 15 bp, Homo sapiens
tgtcctggcactgct

SEQ ID NO: 1842965 - DNA, 15 bp, Homo sapiens
gtcctggcactgctg

SEQ ID NO: 1842966 - DNA, 15 bp, Homo sapiens
tcctggcactgctgt

SEQ ID NO: 1842967 - DNA, 15 bp, Homo sapiens
cctggcactgctgta

SEQ ID NO: 1842968 - DNA, 15 bp, Homo sapiens
ctggcactgctgtag

SEQ ID NO: 1842969 - DNA, 15 bp, Homo sapiens
tggcactgctgtagc

SEQ ID NO: 1842970 - DNA, 15 bp, Homo sapiens
ggcactgctgtagca

SEQ ID NO: 1842971 - DNA, 15 bp, Homo sapiens
gcactgctgtagcaa

SEQ ID NO: 1842972 - DNA, 15 bp, Homo sapiens
cactgctgtagcaac

SEQ ID NO: 1842973 - DNA, 15 bp, Homo sapiens
actgctgtagcaacc

SEQ ID NO: 1842974 - DNA, 15 bp, Homo sapiens
ctgctgtagcaacct

SEQ ID NO: 1842975 - DNA, 15 bp, Homo sapiens
tgctgtagcaacctg

SEQ ID NO: 1842976 - DNA, 15 bp, Homo sapiens
gctgtagcaacctgc

SEQ ID NO: 1842977 - DNA, 15 bp, Homo sapiens
ctgtagcaacctgcc

SEQ ID NO: 1842978 - DNA, 15 bp, Homo sapiens
tgtagcaacctgcca

SEQ ID NO: 1842979 - DNA, 15 bp, Homo sapiens
gtagcaacctgccac

SEQ ID NO: 1842980 - DNA, 15 bp, Homo sapiens
tagcaacctgccaca

SEQ ID NO: 1842981 - DNA, 15 bp, Homo sapiens
agcaacctgccacag

SEQ ID NO: 1842982 - DNA, 15 bp, Homo sapiens
gcaacctgccacaga

SEQ ID NO: 1842983 - DNA, 15 bp, Homo sapiens
caacctgccacagat

SEQ ID NO: 1842984 - DNA, 15 bp, Homo sapiens
aacctgccacagatg

SEQ ID NO: 1842985 - DNA, 15 bp, Homo sapiens
acctgccacagatga

SEQ ID NO: 1842986 - DNA, 15 bp, Homo sapiens
cctgccacagatgag

SEQ ID NO: 1842987 - DNA, 15 bp, Homo sapiens
ctgccacagatgagc

SEQ ID NO: 1842988 - DNA, 15 bp, Homo sapiens
tgccacagatgagca

SEQ ID NO: 1842989 - DNA, 15 bp, Homo sapiens
gccacagatgagcag

SEQ ID NO: 1842990 - DNA, 15 bp, Homo sapiens
ccacagatgagcagc

SEQ ID NO: 1842991 - DNA, 15 bp, Homo sapiens
cacagatgagcagcg

SEQ ID NO: 1842992 - DNA, 15 bp, Homo sapiens
acagatgagcagcgt

SEQ ID NO: 1842993 - DNA, 15 bp, Homo sapiens
cagatgagcagcgta

SEQ ID NO: 1842994 - DNA, 15 bp, Homo sapiens
agatgagcagcgtag

SEQ ID NO: 1842995 - DNA, 15 bp, Homo sapiens
gatgagcagcgtaga

SEQ ID NO: 1842996 - DNA, 15 bp, Homo sapiens
atgagcagcgtagaa

SEQ ID NO: 1842997 - DNA, 15 bp, Homo sapiens
tgagcagcgtagaac

SEQ ID NO: 1842998 - DNA, 15 bp, Homo sapiens
gagcagcgtagaaca

SEQ ID NO: 1842999 - DNA, 15 bp, Homo sapiens
agcagcgtagaacaa

SEQ ID NO: 1843000 - DNA, 15 bp, Homo sapiens
gcagcgtagaacaat

SEQ ID NO: 1843001 - DNA, 15 bp, Homo sapiens
cagcgtagaacaata

SEQ ID NO: 1843002 - DNA, 15 bp, Homo sapiens
agcgtagaacaatag

SEQ ID NO: 1843003 - DNA, 15 bp, Homo sapiens
gcgtagaacaataga

SEQ ID NO: 1843004 - DNA, 15 bp, Homo sapiens
cgtagaacaatagaa

SEQ ID NO: 1843005 - DNA, 15 bp, Homo sapiens
gtagaacaatagaaa

SEQ ID NO: 1843006 - DNA, 15 bp, Homo sapiens
tagaacaatagaaat

SEQ ID NO: 1843007 - DNA, 15 bp, Homo sapiens
agaacaatagaaatt

SEQ ID NO: 1843008 - DNA, 15 bp, Homo sapiens
gaacaatagaaattt

SEQ ID NO: 1843009 - DNA, 15 bp, Homo sapiens
aacaatagaaatttg

SEQ ID NO: 1843010 - DNA, 15 bp, Homo sapiens
acaatagaaatttgt

SEQ ID NO: 1843011 - DNA, 15 bp, Homo sapiens
caatagaaatttgtg

SEQ ID NO: 1843012 - DNA, 15 bp, Homo sapiens
aatagaaatttgtga

SEQ ID NO: 1843013 - DNA, 15 bp, Homo sapiens
atagaaatttgtgat

SEQ ID NO: 1843014 - DNA, 15 bp, Homo sapiens
tagaaatttgtgatc

SEQ ID NO: 1843015 - DNA, 15 bp, Homo sapiens
agaaatttgtgatct

SEQ ID NO: 1843016 - DNA, 15 bp, Homo sapiens
gaaatttgtgatctc

SEQ ID NO: 1843017 - DNA, 15 bp, Homo sapiens
aaatttgtgatctca

SEQ ID NO: 1843018 - DNA, 15 bp, Homo sapiens
aatttgtgatctcac

SEQ ID NO: 1843019 - DNA, 15 bp, Homo sapiens
atttgtgatctcaca

SEQ ID NO: 1843020 - DNA, 15 bp, Homo sapiens
tttgtgatctcacag

SEQ ID NO: 1843021 - DNA, 15 bp, Homo sapiens
ttgtgatctcacagt

SEQ ID NO: 1843022 - DNA, 15 bp, Homo sapiens
tgtgatctcacagtt

SEQ ID NO: 1843023 - DNA, 15 bp, Homo sapiens
gtgatctcacagttc

SEQ ID NO: 1843024 - DNA, 15 bp, Homo sapiens
tgatctcacagttct

SEQ ID NO: 1843025 - DNA, 15 bp, Homo sapiens
gatctcacagttctg

SEQ ID NO: 1843026 - DNA, 15 bp, Homo sapiens
atctcacagttctgg

SEQ ID NO: 1843027 - DNA, 15 bp, Homo sapiens
tctcacagttctggg

SEQ ID NO: 1843028 - DNA, 15 bp, Homo sapiens
ctcacagttctgggg

SEQ ID NO: 1843029 - DNA, 15 bp, Homo sapiens
tcacagttctgggga

SEQ ID NO: 1843030 - DNA, 15 bp, Homo sapiens
cacagttctggggac

SEQ ID NO: 1843031 - DNA, 15 bp, Homo sapiens
acagttctggggacc

SEQ ID NO: 1843032 - DNA, 15 bp, Homo sapiens
cagttctggggacca

SEQ ID NO: 1843033 - DNA, 15 bp, Homo sapiens
agttctggggaccag

SEQ ID NO: 1843034 - DNA, 15 bp, Homo sapiens
gttctggggaccaga

SEQ ID NO: 1843035 - DNA, 15 bp, Homo sapiens
ttctggggaccagaa

SEQ ID NO: 1843036 - DNA, 15 bp, Homo sapiens
tctggggaccagaag

SEQ ID NO: 1843037 - DNA, 15 bp, Homo sapiens
ctggggaccagaagt

SEQ ID NO: 1843038 - DNA, 15 bp, Homo sapiens
tggggaccagaagtc

SEQ ID NO: 1843039 - DNA, 15 bp, Homo sapiens
ggggaccagaagtcc

SEQ ID NO: 1843040 - DNA, 15 bp, Homo sapiens
gggaccagaagtcca

SEQ ID NO: 1843041 - DNA, 15 bp, Homo sapiens
ggaccagaagtccaa

SEQ ID NO: 1843042 - DNA, 15 bp, Homo sapiens
gaccagaagtccaaa

SEQ ID NO: 1843043 - DNA, 15 bp, Homo sapiens
accagaagtccaaaa

SEQ ID NO: 1843044 - DNA, 15 bp, Homo sapiens
ccagaagtccaaaat

SEQ ID NO: 1843045 - DNA, 15 bp, Homo sapiens
cagaagtccaaaatc

SEQ ID NO: 1843046 - DNA, 15 bp, Homo sapiens
agaagtccaaaatcc

SEQ ID NO: 1843047 - DNA, 15 bp, Homo sapiens
gaagtccaaaatcca

SEQ ID NO: 1843048 - DNA, 15 bp, Homo sapiens
aagtccaaaatccag

SEQ ID NO: 1843049 - DNA, 15 bp, Homo sapiens
agtccaaaatccagg

SEQ ID NO: 1843050 - DNA, 15 bp, Homo sapiens
gtccaaaatccaggt

SEQ ID NO: 1843051 - DNA, 15 bp, Homo sapiens
tccaaaatccaggtg

SEQ ID NO: 1843052 - DNA, 15 bp, Homo sapiens
ccaaaatccaggtgt

SEQ ID NO: 1843053 - DNA, 15 bp, Homo sapiens
caaaatccaggtgtc

SEQ ID NO: 1843054 - DNA, 15 bp, Homo sapiens
aaaatccaggtgtct

SEQ ID NO: 1843055 - DNA, 15 bp, Homo sapiens
aaatccaggtgtctg

SEQ ID NO: 1843056 - DNA, 15 bp, Homo sapiens
aatccaggtgtctgc

SEQ ID NO: 1843057 - DNA, 15 bp, Homo sapiens
atccaggtgtctgca

SEQ ID NO: 1843058 - DNA, 15 bp, Homo sapiens
tccaggtgtctgcag

SEQ ID NO: 1843059 - DNA, 15 bp, Homo sapiens
ccaggtgtctgcagg

SEQ ID NO: 1843060 - DNA, 15 bp, Homo sapiens
caggtgtctgcaggg

SEQ ID NO: 1843061 - DNA, 15 bp, Homo sapiens
aggtgtctgcagggc

SEQ ID NO: 1843062 - DNA, 15 bp, Homo sapiens
ggtgtctgcagggcc

SEQ ID NO: 1843063 - DNA, 15 bp, Homo sapiens
gtgtctgcagggcca

SEQ ID NO: 1843064 - DNA, 15 bp, Homo sapiens
tgtctgcagggccat

SEQ ID NO: 1843065 - DNA, 15 bp, Homo sapiens
gtctgcagggccatg

SEQ ID NO: 1843066 - DNA, 15 bp, Homo sapiens
tctgcagggccatgc

SEQ ID NO: 1843067 - DNA, 15 bp, Homo sapiens
ctgcagggccatgcc

SEQ ID NO: 1843068 - DNA, 15 bp, Homo sapiens
tgcagggccatgccc

SEQ ID NO: 1843069 - DNA, 15 bp, Homo sapiens
gcagggccatgcccc

SEQ ID NO: 1843070 - DNA, 15 bp, Homo sapiens
cagggccatgcccct

SEQ ID NO: 1843071 - DNA, 15 bp, Homo sapiens
agggccatgcccctc

SEQ ID NO: 1843072 - DNA, 15 bp, Homo sapiens
gggccatgcccctct

SEQ ID NO: 1843073 - DNA, 15 bp, Homo sapiens
ggccatgcccctctg

SEQ ID NO: 1843074 - DNA, 15 bp, Homo sapiens
gccatgcccctctgc

SEQ ID NO: 1843075 - DNA, 15 bp, Homo sapiens
ccatgcccctctgca

SEQ ID NO: 1843076 - DNA, 15 bp, Homo sapiens
catgcccctctgcaa

SEQ ID NO: 1843077 - DNA, 15 bp, Homo sapiens
atgcccctctgcaac

SEQ ID NO: 1843078 - DNA, 15 bp, Homo sapiens
tgcccctctgcaacc

SEQ ID NO: 1843079 - DNA, 15 bp, Homo sapiens
gcccctctgcaacct

SEQ ID NO: 1843080 - DNA, 15 bp, Homo sapiens
cccctctgcaacctg

SEQ ID NO: 1843081 - DNA, 15 bp, Homo sapiens
ccctctgcaacctgt

SEQ ID NO: 1843082 - DNA, 15 bp, Homo sapiens
cctctgcaacctgta

SEQ ID NO: 1843083 - DNA, 15 bp, Homo sapiens
ctctgcaacctgtag

SEQ ID NO: 1843084 - DNA, 15 bp, Homo sapiens
tctgcaacctgtagg

SEQ ID NO: 1843085 - DNA, 15 bp, Homo sapiens
ctgcaacctgtaggg

SEQ ID NO: 1843086 - DNA, 15 bp, Homo sapiens
tgcaacctgtagggg

SEQ ID NO: 1843087 - DNA, 15 bp, Homo sapiens
gcaacctgtagggga

SEQ ID NO: 1843088 - DNA, 15 bp, Homo sapiens
caacctgtaggggag

SEQ ID NO: 1843089 - DNA, 15 bp, Homo sapiens
aacctgtaggggagg

SEQ ID NO: 1843090 - DNA, 15 bp, Homo sapiens
acctgtaggggagga

SEQ ID NO: 1843091 - DNA, 15 bp, Homo sapiens
cctgtaggggaggat

SEQ ID NO: 1843092 - DNA, 15 bp, Homo sapiens
ctgtaggggaggatt

SEQ ID NO: 1843093 - DNA, 15 bp, Homo sapiens
tgtaggggaggattt

SEQ ID NO: 1843094 - DNA, 15 bp, Homo sapiens
gtaggggaggatttt

SEQ ID NO: 1843095 - DNA, 15 bp, Homo sapiens
taggggaggattttt

SEQ ID NO: 1843096 - DNA, 15 bp, Homo sapiens
aggggaggatttttc

SEQ ID NO: 1843097 - DNA, 15 bp, Homo sapiens
ggggaggatttttcc

SEQ ID NO: 1843098 - DNA, 15 bp, Homo sapiens
gggaggatttttcct

SEQ ID NO: 1843099 - DNA, 15 bp, Homo sapiens
ggaggatttttcctg

SEQ ID NO: 1843100 - DNA, 15 bp, Homo sapiens
gaggatttttcctgc

SEQ ID NO: 1843101 - DNA, 15 bp, Homo sapiens
aggatttttcctgcc

SEQ ID NO: 1843102 - DNA, 15 bp, Homo sapiens
ggatttttcctgcct

SEQ ID NO: 1843103 - DNA, 15 bp, Homo sapiens
gatttttcctgcctt

SEQ ID NO: 1843104 - DNA, 15 bp, Homo sapiens
atttttcctgccttt

SEQ ID NO: 1843105 - DNA, 15 bp, Homo sapiens
tttttcctgcctttt

SEQ ID NO: 1843106 - DNA, 15 bp, Homo sapiens
ttttcctgccttttc

SEQ ID NO: 1843107 - DNA, 15 bp, Homo sapiens
tttcctgccttttcc

SEQ ID NO: 1843108 - DNA, 15 bp, Homo sapiens
tcctgccttttcctg

SEQ ID NO: 1843109 - DNA, 15 bp, Homo sapiens
cctgccttttcctgg

SEQ ID NO: 1843110 - DNA, 15 bp, Homo sapiens
ctgccttttcctggc

SEQ ID NO: 1843111 - DNA, 15 bp, Homo sapiens
tgccttttcctggct

SEQ ID NO: 1843112 - DNA, 15 bp, Homo sapiens
gccttttcctggctg

SEQ ID NO: 1843113 - DNA, 15 bp, Homo sapiens
ccttttcctggctgc

SEQ ID NO: 1843114 - DNA, 15 bp, Homo sapiens
cttttcctggctgct

SEQ ID NO: 1843115 - DNA, 15 bp, Homo sapiens
ttttcctggctgctg

SEQ ID NO: 1843116 - DNA, 15 bp, Homo sapiens
tttcctggctgctgg

SEQ ID NO: 1843117 - DNA, 15 bp, Homo sapiens
ttcctggctgctggt

SEQ ID NO: 1843118 - DNA, 15 bp, Homo sapiens
tcctggctgctggtg

SEQ ID NO: 1843119 - DNA, 15 bp, Homo sapiens
cctggctgctggtgg

SEQ ID NO: 1843120 - DNA, 15 bp, Homo sapiens
ctggctgctggtggc

SEQ ID NO: 1843121 - DNA, 15 bp, Homo sapiens
tggctgctggtggca

SEQ ID NO: 1843122 - DNA, 15 bp, Homo sapiens
ggctgctggtggcag

SEQ ID NO: 1843123 - DNA, 15 bp, Homo sapiens
gctgctggtggcagc

SEQ ID NO: 1843124 - DNA, 15 bp, Homo sapiens
ctgctggtggcagcc

SEQ ID NO: 1843125 - DNA, 15 bp, Homo sapiens
tgctggtggcagcca

SEQ ID NO: 1843126 - DNA, 15 bp, Homo sapiens
gctggtggcagccag

SEQ ID NO: 1843127 - DNA, 15 bp, Homo sapiens
ctggtggcagccagc

SEQ ID NO: 1843128 - DNA, 15 bp, Homo sapiens
tggtggcagccagcc

SEQ ID NO: 1843129 - DNA, 15 bp, Homo sapiens
ggtggcagccagcca

SEQ ID NO: 1843130 - DNA, 15 bp, Homo sapiens
gtggcagccagccac

SEQ ID NO: 1843131 - DNA, 15 bp, Homo sapiens
tggcagccagccacc

SEQ ID NO: 1843132 - DNA, 15 bp, Homo sapiens
ggcagccagccaccc

SEQ ID NO: 1843133 - DNA, 15 bp, Homo sapiens
gcagccagccaccct

SEQ ID NO: 1843134 - DNA, 15 bp, Homo sapiens
cagccagccaccctt

SEQ ID NO: 1843135 - DNA, 15 bp, Homo sapiens
agccagccacccttg

SEQ ID NO: 1843136 - DNA, 15 bp, Homo sapiens
gccagccacccttgg

SEQ ID NO: 1843137 - DNA, 15 bp, Homo sapiens
ccagccacccttggt

SEQ ID NO: 1843138 - DNA, 15 bp, Homo sapiens
cagccacccttggtg

SEQ ID NO: 1843139 - DNA, 15 bp, Homo sapiens
agccacccttggtgg

SEQ ID NO: 1843140 - DNA, 15 bp, Homo sapiens
gccacccttggtggt

SEQ ID NO: 1843141 - DNA, 15 bp, Homo sapiens
ccacccttggtggtc

SEQ ID NO: 1843142 - DNA, 15 bp, Homo sapiens
cacccttggtggtcc

SEQ ID NO: 1843143 - DNA, 15 bp, Homo sapiens
acccttggtggtcct

SEQ ID NO: 1843144 - DNA, 15 bp, Homo sapiens
cccttggtggtcctg

SEQ ID NO: 1843145 - DNA, 15 bp, Homo sapiens
ccttggtggtcctgg

SEQ ID NO: 1843146 - DNA, 15 bp, Homo sapiens
cttggtggtcctgga

SEQ ID NO: 1843147 - DNA, 15 bp, Homo sapiens
ttggtggtcctggac

SEQ ID NO: 1843148 - DNA, 15 bp, Homo sapiens
tggtggtcctggacc

SEQ ID NO: 1843149 - DNA, 15 bp, Homo sapiens
ggtggtcctggacct

SEQ ID NO: 1843150 - DNA, 15 bp, Homo sapiens
gtggtcctggaccta

SEQ ID NO: 1843151 - DNA, 15 bp, Homo sapiens
tggtcctggacctac

SEQ ID NO: 1843152 - DNA, 15 bp, Homo sapiens
ggtcctggacctaca

SEQ ID NO: 1843153 - DNA, 15 bp, Homo sapiens
gtcctggacctacag

SEQ ID NO: 1843154 - DNA, 15 bp, Homo sapiens
tcctggacctacagc

SEQ ID NO: 1843155 - DNA, 15 bp, Homo sapiens
cctggacctacagcc

SEQ ID NO: 1843156 - DNA, 15 bp, Homo sapiens
ctggacctacagcca

SEQ ID NO: 1843157 - DNA, 15 bp, Homo sapiens
tggacctacagccac

SEQ ID NO: 1843158 - DNA, 15 bp, Homo sapiens
ggacctacagccaca

SEQ ID NO: 1843159 - DNA, 15 bp, Homo sapiens
gacctacagccacag

SEQ ID NO: 1843160 - DNA, 15 bp, Homo sapiens
acctacagccacagg

SEQ ID NO: 1843161 - DNA, 15 bp, Homo sapiens
cctacagccacaggg

SEQ ID NO: 1843162 - DNA, 15 bp, Homo sapiens
ctacagccacagggg

SEQ ID NO: 1843163 - DNA, 15 bp, Homo sapiens
tacagccacaggggc

SEQ ID NO: 1843164 - DNA, 15 bp, Homo sapiens
acagccacaggggcc

SEQ ID NO: 1843165 - DNA, 15 bp, Homo sapiens
cagccacaggggcct

SEQ ID NO: 1843166 - DNA, 15 bp, Homo sapiens
agccacaggggcctt

SEQ ID NO: 1843167 - DNA, 15 bp, Homo sapiens
gccacaggggccttc

SEQ ID NO: 1843168 - DNA, 15 bp, Homo sapiens
ccacaggggccttct

SEQ ID NO: 1843169 - DNA, 15 bp, Homo sapiens
cacaggggccttctt

SEQ ID NO: 1843170 - DNA, 15 bp, Homo sapiens
acaggggccttctta

SEQ ID NO: 1843171 - DNA, 15 bp, Homo sapiens
caggggccttcttat

SEQ ID NO: 1843172 - DNA, 15 bp, Homo sapiens
aggggccttcttatc

SEQ ID NO: 1843173 - DNA, 15 bp, Homo sapiens
ggggccttcttatct

SEQ ID NO: 1843174 - DNA, 15 bp, Homo sapiens
gggccttcttatctc

SEQ ID NO: 1843175 - DNA, 15 bp, Homo sapiens
ggccttcttatctct

SEQ ID NO: 1843176 - DNA, 15 bp, Homo sapiens
gccttcttatctctg

SEQ ID NO: 1843177 - DNA, 15 bp, Homo sapiens
ccttcttatctctgt

SEQ ID NO: 1843178 - DNA, 15 bp, Homo sapiens
cttcttatctctgtg

SEQ ID NO: 1843179 - DNA, 15 bp, Homo sapiens
ttcttatctctgtgt

SEQ ID NO: 1843180 - DNA, 15 bp, Homo sapiens
tcttatctctgtgtt

SEQ ID NO: 1843181 - DNA, 15 bp, Homo sapiens
cttatctctgtgttt

SEQ ID NO: 1843182 - DNA, 15 bp, Homo sapiens
ttatctctgtgtttc

SEQ ID NO: 1843183 - DNA, 15 bp, Homo sapiens
tatctctgtgtttct

SEQ ID NO: 1843184 - DNA, 15 bp, Homo sapiens
atctctgtgtttctc

SEQ ID NO: 1843185 - DNA, 15 bp, Homo sapiens
tctctgtgtttctcc

SEQ ID NO: 1843186 - DNA, 15 bp, Homo sapiens
ctctgtgtttctcct

SEQ ID NO: 1843187 - DNA, 15 bp, Homo sapiens
tctgtgtttctcctt

SEQ ID NO: 1843188 - DNA, 15 bp, Homo sapiens
ctgtgtttctccttt

SEQ ID NO: 1843189 - DNA, 15 bp, Homo sapiens
tgtgtttctcctttt

SEQ ID NO: 1843190 - DNA, 15 bp, Homo sapiens
gtgtttctccttttt

SEQ ID NO: 1843191 - DNA, 15 bp, Homo sapiens
tgtttctcctttttt

SEQ ID NO: 1843192 - DNA, 15 bp, Homo sapiens
gtttctccttttttt

SEQ ID NO: 1843193 - DNA, 15 bp, Homo sapiens
tttctcctttttttt

SEQ ID NO: 1843194 - DNA, 15 bp, Homo sapiens
ttctccttttttttg

SEQ ID NO: 1843195 - DNA, 15 bp, Homo sapiens
tctccttttttttga

SEQ ID NO: 1843196 - DNA, 15 bp, Homo sapiens
ctccttttttttgag

SEQ ID NO: 1843197 - DNA, 15 bp, Homo sapiens
tccttttttttgaga

SEQ ID NO: 1843198 - DNA, 15 bp, Homo sapiens
ccttttttttgagac

SEQ ID NO: 1843199 - DNA, 15 bp, Homo sapiens
tttttgagacagtcc

SEQ ID NO: 1843200 - DNA, 15 bp, Homo sapiens
ttttgagacagtccc

SEQ ID NO: 1843201 - DNA, 15 bp, Homo sapiens
tttgagacagtcccg

SEQ ID NO: 1843202 - DNA, 15 bp, Homo sapiens
ttgagacagtcccgc

SEQ ID NO: 1843203 - DNA, 15 bp, Homo sapiens
tgagacagtcccgct

SEQ ID NO: 1843204 - DNA, 15 bp, Homo sapiens
gagacagtcccgctc

SEQ ID NO: 1843205 - DNA, 15 bp, Homo sapiens
agacagtcccgctct

SEQ ID NO: 1843206 - DNA, 15 bp, Homo sapiens
gacagtcccgctctg

SEQ ID NO: 1843207 - DNA, 15 bp, Homo sapiens
acagtcccgctctgt

SEQ ID NO: 1843208 - DNA, 15 bp, Homo sapiens
cagtcccgctctgtc

SEQ ID NO: 1843209 - DNA, 15 bp, Homo sapiens
agtcccgctctgtca

SEQ ID NO: 1843210 - DNA, 15 bp, Homo sapiens
gtcccgctctgtcat

SEQ ID NO: 1843211 - DNA, 15 bp, Homo sapiens
tcccgctctgtcatc

SEQ ID NO: 1843212 - DNA, 15 bp, Homo sapiens
cccgctctgtcatcc

SEQ ID NO: 1843213 - DNA, 15 bp, Homo sapiens
ccgctctgtcatcca

SEQ ID NO: 1843214 - DNA, 15 bp, Homo sapiens
cgctctgtcatccag

SEQ ID NO: 1843215 - DNA, 15 bp, Homo sapiens
gctctgtcatccagg

SEQ ID NO: 1843216 - DNA, 15 bp, Homo sapiens
atccaggctggagta

SEQ ID NO: 1843217 - DNA, 15 bp, Homo sapiens
tccaggctggagtac

SEQ ID NO: 1843218 - DNA, 15 bp, Homo sapiens
ctggagtacagtggg

SEQ ID NO: 1843219 - DNA, 15 bp, Homo sapiens
tggagtacagtgggg

SEQ ID NO: 1843220 - DNA, 15 bp, Homo sapiens
ggagtacagtggggc

SEQ ID NO: 1843221 - DNA, 15 bp, Homo sapiens
gagtacagtggggca

SEQ ID NO: 1843222 - DNA, 15 bp, Homo sapiens
agtacagtggggcaa

SEQ ID NO: 1843223 - DNA, 15 bp, Homo sapiens
gtacagtggggcaat

SEQ ID NO: 1843224 - DNA, 15 bp, Homo sapiens
tacagtggggcaatc

SEQ ID NO: 1843225 - DNA, 15 bp, Homo sapiens
acagtggggcaatct

SEQ ID NO: 1843226 - DNA, 15 bp, Homo sapiens
cagtggggcaatctc

SEQ ID NO: 1843227 - DNA, 15 bp, Homo sapiens
agtggggcaatctcg

SEQ ID NO: 1843228 - DNA, 15 bp, Homo sapiens
gtggggcaatctcgg

SEQ ID NO: 1843229 - DNA, 15 bp, Homo sapiens
tggggcaatctcggc

SEQ ID NO: 1843230 - DNA, 15 bp, Homo sapiens
ggggcaatctcggct

SEQ ID NO: 1843231 - DNA, 15 bp, Homo sapiens
gggcaatctcggctc

SEQ ID NO: 1843232 - DNA, 15 bp, Homo sapiens
ggcaatctcggctca

SEQ ID NO: 1843233 - DNA, 15 bp, Homo sapiens
gcctcccgggttcag

SEQ ID NO: 1843234 - DNA, 15 bp, Homo sapiens
tcccgggttcaggca

SEQ ID NO: 1843235 - DNA, 15 bp, Homo sapiens
cccgggttcaggcaa

SEQ ID NO: 1843236 - DNA, 15 bp, Homo sapiens
ccgggttcaggcaat

SEQ ID NO: 1843237 - DNA, 15 bp, Homo sapiens
cgggttcaggcaatt

SEQ ID NO: 1843238 - DNA, 15 bp, Homo sapiens
gggttcaggcaatta

SEQ ID NO: 1843239 - DNA, 15 bp, Homo sapiens
ggttcaggcaattat

SEQ ID NO: 1843240 - DNA, 15 bp, Homo sapiens
gttcaggcaattatt

SEQ ID NO: 1843241 - DNA, 15 bp, Homo sapiens
ttcaggcaattattc

SEQ ID NO: 1843242 - DNA, 15 bp, Homo sapiens
tcaggcaattattct

SEQ ID NO: 1843243 - DNA, 15 bp, Homo sapiens
caggcaattattctg

SEQ ID NO: 1843244 - DNA, 15 bp, Homo sapiens
aggcaattattctgc

SEQ ID NO: 1843245 - DNA, 15 bp, Homo sapiens
ggcaattattctgcc

SEQ ID NO: 1843246 - DNA, 15 bp, Homo sapiens
gcaattattctgcct

SEQ ID NO: 1843247 - DNA, 15 bp, Homo sapiens
caattattctgcctc

SEQ ID NO: 1843248 - DNA, 15 bp, Homo sapiens
aattattctgcctca

SEQ ID NO: 1843249 - DNA, 15 bp, Homo sapiens
attattctgcctcag

SEQ ID NO: 1843250 - DNA, 15 bp, Homo sapiens
ttattctgcctcagc

SEQ ID NO: 1843251 - DNA, 15 bp, Homo sapiens
tattctgcctcagcc

SEQ ID NO: 1843252 - DNA, 15 bp, Homo sapiens
attctgcctcagcca

SEQ ID NO: 1843253 - DNA, 15 bp, Homo sapiens
ttctgcctcagccat

SEQ ID NO: 1843254 - DNA, 15 bp, Homo sapiens
tctgcctcagccatc

SEQ ID NO: 1843255 - DNA, 15 bp, Homo sapiens
ctgcctcagccatcc

SEQ ID NO: 1843256 - DNA, 15 bp, Homo sapiens
tgcctcagccatcca

SEQ ID NO: 1843257 - DNA, 15 bp, Homo sapiens
gcctcagccatccaa

SEQ ID NO: 1843258 - DNA, 15 bp, Homo sapiens
cctcagccatccaag

SEQ ID NO: 1843259 - DNA, 15 bp, Homo sapiens
ctcagccatccaagt

SEQ ID NO: 1843260 - DNA, 15 bp, Homo sapiens
tcagccatccaagta

SEQ ID NO: 1843261 - DNA, 15 bp, Homo sapiens
cagccatccaagtag

SEQ ID NO: 1843262 - DNA, 15 bp, Homo sapiens
agccatccaagtagc

SEQ ID NO: 1843263 - DNA, 15 bp, Homo sapiens
gccatccaagtagct

SEQ ID NO: 1843264 - DNA, 15 bp, Homo sapiens
ccatccaagtagctg

SEQ ID NO: 1843265 - DNA, 15 bp, Homo sapiens
catccaagtagctgc

SEQ ID NO: 1843266 - DNA, 15 bp, Homo sapiens
atccaagtagctgca

SEQ ID NO: 1843267 - DNA, 15 bp, Homo sapiens
tccaagtagctgcaa

SEQ ID NO: 1843268 - DNA, 15 bp, Homo sapiens
ccaagtagctgcaac

SEQ ID NO: 1843269 - DNA, 15 bp, Homo sapiens
caagtagctgcaact

SEQ ID NO: 1843270 - DNA, 15 bp, Homo sapiens
aagtagctgcaactg

SEQ ID NO: 1843271 - DNA, 15 bp, Homo sapiens
agtagctgcaactgc

SEQ ID NO: 1843272 - DNA, 15 bp, Homo sapiens
gtagctgcaactgca

SEQ ID NO: 1843273 - DNA, 15 bp, Homo sapiens
tagctgcaactgcag

SEQ ID NO: 1843274 - DNA, 15 bp, Homo sapiens
agctgcaactgcagg

SEQ ID NO: 1843275 - DNA, 15 bp, Homo sapiens
gctgcaactgcaggc

SEQ ID NO: 1843276 - DNA, 15 bp, Homo sapiens
ctgcaactgcaggcg

SEQ ID NO: 1843277 - DNA, 15 bp, Homo sapiens
tgcaactgcaggcgc

SEQ ID NO: 1843278 - DNA, 15 bp, Homo sapiens
gcaactgcaggcgcc

SEQ ID NO: 1843279 - DNA, 15 bp, Homo sapiens
caactgcaggcgccc

SEQ ID NO: 1843280 - DNA, 15 bp, Homo sapiens
aactgcaggcgcccg

SEQ ID NO: 1843281 - DNA, 15 bp, Homo sapiens
actgcaggcgcccgc

SEQ ID NO: 1843282 - DNA, 15 bp, Homo sapiens
ctgcaggcgcccgcc

SEQ ID NO: 1843283 - DNA, 15 bp, Homo sapiens
tgcaggcgcccgcca

SEQ ID NO: 1843284 - DNA, 15 bp, Homo sapiens
gcaggcgcccgccac

SEQ ID NO: 1843285 - DNA, 15 bp, Homo sapiens
gcgcccgccaccaca

SEQ ID NO: 1843286 - DNA, 15 bp, Homo sapiens
cgcccgccaccacac

SEQ ID NO: 1843287 - DNA, 15 bp, Homo sapiens
cacacctggctaata

SEQ ID NO: 1843288 - DNA, 15 bp, Homo sapiens
acacctggctaatat

SEQ ID NO: 1843289 - DNA, 15 bp, Homo sapiens
cacctggctaatatt

SEQ ID NO: 1843290 - DNA, 15 bp, Homo sapiens
acctggctaatattt

SEQ ID NO: 1843291 - DNA, 15 bp, Homo sapiens
ggctaatatttgtat

SEQ ID NO: 1843292 - DNA, 15 bp, Homo sapiens
atatttgtattttta

SEQ ID NO: 1843293 - DNA, 15 bp, Homo sapiens
tatttgtatttttag

SEQ ID NO: 1843294 - DNA, 15 bp, Homo sapiens
atttgtatttttagt

SEQ ID NO: 1843295 - DNA, 15 bp, Homo sapiens
ggccaggctggtgtc

SEQ ID NO: 1843296 - DNA, 15 bp, Homo sapiens
gccaggctggtgtcg

SEQ ID NO: 1843297 - DNA, 15 bp, Homo sapiens
ccaggctggtgtcga

SEQ ID NO: 1843298 - DNA, 15 bp, Homo sapiens
caggctggtgtcgaa

SEQ ID NO: 1843299 - DNA, 15 bp, Homo sapiens
aggctggtgtcgaac

SEQ ID NO: 1843300 - DNA, 15 bp, Homo sapiens
ggctggtgtcgaact

SEQ ID NO: 1843301 - DNA, 15 bp, Homo sapiens
gctggtgtcgaactc

SEQ ID NO: 1843302 - DNA, 15 bp, Homo sapiens
ctggtgtcgaactcc

SEQ ID NO: 1843303 - DNA, 15 bp, Homo sapiens
tggtgtcgaactcct

SEQ ID NO: 1843304 - DNA, 15 bp, Homo sapiens
ggtgtcgaactcctg

SEQ ID NO: 1843305 - DNA, 15 bp, Homo sapiens
gtgtcgaactcctga

SEQ ID NO: 1843306 - DNA, 15 bp, Homo sapiens
tgtcgaactcctgac

SEQ ID NO: 1843307 - DNA, 15 bp, Homo sapiens
gtcgaactcctgacc

SEQ ID NO: 1843308 - DNA, 15 bp, Homo sapiens
caaagtgctgggatg

SEQ ID NO: 1843309 - DNA, 15 bp, Homo sapiens
aaagtgctgggatga

SEQ ID NO: 1843310 - DNA, 15 bp, Homo sapiens
aagtgctgggatgac

SEQ ID NO: 1843311 - DNA, 15 bp, Homo sapiens
agtgctgggatgaca

SEQ ID NO: 1843312 - DNA, 15 bp, Homo sapiens
gtgctgggatgacag

SEQ ID NO: 1843313 - DNA, 15 bp, Homo sapiens
tgctgggatgacagg

SEQ ID NO: 1843314 - DNA, 15 bp, Homo sapiens
ctgggatgacaggcg

SEQ ID NO: 1843315 - DNA, 15 bp, Homo sapiens
tgggatgacaggcgt

SEQ ID NO: 1843316 - DNA, 15 bp, Homo sapiens
gggatgacaggcgtg

SEQ ID NO: 1843317 - DNA, 15 bp, Homo sapiens
ggatgacaggcgtga

SEQ ID NO: 1843318 - DNA, 15 bp, Homo sapiens
gatgacaggcgtgag

SEQ ID NO: 1843319 - DNA, 15 bp, Homo sapiens
atgacaggcgtgagc

SEQ ID NO: 1843320 - DNA, 15 bp, Homo sapiens
tgacaggcgtgagcc

SEQ ID NO: 1843321 - DNA, 15 bp, Homo sapiens
gacaggcgtgagcca

SEQ ID NO: 1843322 - DNA, 15 bp, Homo sapiens
gagccaccacgcccg

SEQ ID NO: 1843323 - DNA, 15 bp, Homo sapiens
agccaccacgcccgg

SEQ ID NO: 1843324 - DNA, 15 bp, Homo sapiens
ccaccacgcccggcc

SEQ ID NO: 1843325 - DNA, 15 bp, Homo sapiens
caccacgcccggccc

SEQ ID NO: 1843326 - DNA, 15 bp, Homo sapiens
accacgcccggccca

SEQ ID NO: 1843327 - DNA, 15 bp, Homo sapiens
ccacgcccggcccag

SEQ ID NO: 1843328 - DNA, 15 bp, Homo sapiens
cacgcccggcccagt

SEQ ID NO: 1843329 - DNA, 15 bp, Homo sapiens
acgcccggcccagta

SEQ ID NO: 1843330 - DNA, 15 bp, Homo sapiens
cgcccggcccagtat

SEQ ID NO: 1843331 - DNA, 15 bp, Homo sapiens
gcccggcccagtata

SEQ ID NO: 1843332 - DNA, 15 bp, Homo sapiens
cccggcccagtataa

SEQ ID NO: 1843333 - DNA, 15 bp, Homo sapiens
ccggcccagtataac

SEQ ID NO: 1843334 - DNA, 15 bp, Homo sapiens
cggcccagtataacg

SEQ ID NO: 1843335 - DNA, 15 bp, Homo sapiens
ggcccagtataacga

SEQ ID NO: 1843336 - DNA, 15 bp, Homo sapiens
gcccagtataacgat

SEQ ID NO: 1843337 - DNA, 15 bp, Homo sapiens
cccagtataacgatt

SEQ ID NO: 1843338 - DNA, 15 bp, Homo sapiens
ccagtataacgatta

SEQ ID NO: 1843339 - DNA, 15 bp, Homo sapiens
cagtataacgattaa

SEQ ID NO: 1843340 - DNA, 15 bp, Homo sapiens
agtataacgattaaa

SEQ ID NO: 1843341 - DNA, 15 bp, Homo sapiens
gtataacgattaaag

SEQ ID NO: 1843342 - DNA, 15 bp, Homo sapiens
tataacgattaaagt

SEQ ID NO: 1843343 - DNA, 15 bp, Homo sapiens
ataacgattaaagtc

SEQ ID NO: 1843344 - DNA, 15 bp, Homo sapiens
taacgattaaagtca

SEQ ID NO: 1843345 - DNA, 15 bp, Homo sapiens
aacgattaaagtcag

SEQ ID NO: 1843346 - DNA, 15 bp, Homo sapiens
acgattaaagtcagg

SEQ ID NO: 1843347 - DNA, 15 bp, Homo sapiens
cgattaaagtcagga

SEQ ID NO: 1843348 - DNA, 15 bp, Homo sapiens
gattaaagtcaggaa

SEQ ID NO: 1843349 - DNA, 15 bp, Homo sapiens
attaaagtcaggaaa

SEQ ID NO: 1843350 - DNA, 15 bp, Homo sapiens
ttaaagtcaggaaaa

SEQ ID NO: 1843351 - DNA, 15 bp, Homo sapiens
taaagtcaggaaaag

SEQ ID NO: 1843352 - DNA, 15 bp, Homo sapiens
aaagtcaggaaaagt

SEQ ID NO: 1843353 - DNA, 15 bp, Homo sapiens
aagtcaggaaaagta

SEQ ID NO: 1843354 - DNA, 15 bp, Homo sapiens
agtcaggaaaagtaa

SEQ ID NO: 1843355 - DNA, 15 bp, Homo sapiens
gtcaggaaaagtaaa

SEQ ID NO: 1843356 - DNA, 15 bp, Homo sapiens
tcaggaaaagtaaag

SEQ ID NO: 1843357 - DNA, 15 bp, Homo sapiens
gaaaagtaaagtgga

SEQ ID NO: 1843358 - DNA, 15 bp, Homo sapiens
aaaagtaaagtggac

SEQ ID NO: 1843359 - DNA, 15 bp, Homo sapiens
aaagtaaagtggaca

SEQ ID NO: 1843360 - DNA, 15 bp, Homo sapiens
aagtaaagtggacat

SEQ ID NO: 1843361 - DNA, 15 bp, Homo sapiens
agtaaagtggacatc

SEQ ID NO: 1843362 - DNA, 15 bp, Homo sapiens
gtaaagtggacatcg

SEQ ID NO: 1843363 - DNA, 15 bp, Homo sapiens
taaagtggacatcgc

SEQ ID NO: 1843364 - DNA, 15 bp, Homo sapiens
aaagtggacatcgcc

SEQ ID NO: 1843365 - DNA, 15 bp, Homo sapiens
aagtggacatcgcct

SEQ ID NO: 1843366 - DNA, 15 bp, Homo sapiens
agtggacatcgcctt

SEQ ID NO: 1843367 - DNA, 15 bp, Homo sapiens
gtggacatcgccttc

SEQ ID NO: 1843368 - DNA, 15 bp, Homo sapiens
tggacatcgccttct

SEQ ID NO: 1843369 - DNA, 15 bp, Homo sapiens
ggacatcgccttctc

SEQ ID NO: 1843370 - DNA, 15 bp, Homo sapiens
gacatcgccttctct

SEQ ID NO: 1843371 - DNA, 15 bp, Homo sapiens
acatcgccttctcta

SEQ ID NO: 1843372 - DNA, 15 bp, Homo sapiens
catcgccttctctaa

SEQ ID NO: 1843373 - DNA, 15 bp, Homo sapiens
atcgccttctctaat

SEQ ID NO: 1843374 - DNA, 15 bp, Homo sapiens
tcgccttctctaatc

SEQ ID NO: 1843375 - DNA, 15 bp, Homo sapiens
cgccttctctaatcc

SEQ ID NO: 1843376 - DNA, 15 bp, Homo sapiens
gccttctctaatccc

SEQ ID NO: 1843377 - DNA, 15 bp, Homo sapiens
ccttctctaatcccg

SEQ ID NO: 1843378 - DNA, 15 bp, Homo sapiens
cttctctaatcccga

SEQ ID NO: 1843379 - DNA, 15 bp, Homo sapiens
ttctctaatcccgaa

SEQ ID NO: 1843380 - DNA, 15 bp, Homo sapiens
tctctaatcccgaat

SEQ ID NO: 1843381 - DNA, 15 bp, Homo sapiens
ctctaatcccgaatc

SEQ ID NO: 1843382 - DNA, 15 bp, Homo sapiens
tctaatcccgaatcc

SEQ ID NO: 1843383 - DNA, 15 bp, Homo sapiens
ctaatcccgaatcca

SEQ ID NO: 1843384 - DNA, 15 bp, Homo sapiens
taatcccgaatccag

SEQ ID NO: 1843385 - DNA, 15 bp, Homo sapiens
aatcccgaatccaga

SEQ ID NO: 1843386 - DNA, 15 bp, Homo sapiens
atcccgaatccagac

SEQ ID NO: 1843387 - DNA, 15 bp, Homo sapiens
tcccgaatccagact

SEQ ID NO: 1843388 - DNA, 15 bp, Homo sapiens
cccgaatccagactc

SEQ ID NO: 1843389 - DNA, 15 bp, Homo sapiens
ccgaatccagactcg

SEQ ID NO: 1843390 - DNA, 15 bp, Homo sapiens
cgaatccagactcgg

SEQ ID NO: 1843391 - DNA, 15 bp, Homo sapiens
gaatccagactcggc

SEQ ID NO: 1843392 - DNA, 15 bp, Homo sapiens
aatccagactcggcc

SEQ ID NO: 1843393 - DNA, 15 bp, Homo sapiens
atccagactcggcct

SEQ ID NO: 1843394 - DNA, 15 bp, Homo sapiens
tccagactcggcctg

SEQ ID NO: 1843395 - DNA, 15 bp, Homo sapiens
ccagactcggcctgt

SEQ ID NO: 1843396 - DNA, 15 bp, Homo sapiens
cagactcggcctgtc

SEQ ID NO: 1843397 - DNA, 15 bp, Homo sapiens
agactcggcctgtcg

SEQ ID NO: 1843398 - DNA, 15 bp, Homo sapiens
gactcggcctgtcgc

SEQ ID NO: 1843399 - DNA, 15 bp, Homo sapiens
actcggcctgtcgcc

SEQ ID NO: 1843400 - DNA, 15 bp, Homo sapiens
ctcggcctgtcgccc

SEQ ID NO: 1843401 - DNA, 15 bp, Homo sapiens
tcggcctgtcgcccc

SEQ ID NO: 1843402 - DNA, 15 bp, Homo sapiens
cggcctgtcgccccc

SEQ ID NO: 1843403 - DNA, 15 bp, Homo sapiens
ggcctgtcgccccca

SEQ ID NO: 1843404 - DNA, 15 bp, Homo sapiens
gcctgtcgcccccat

SEQ ID NO: 1843405 - DNA, 15 bp, Homo sapiens
cctgtcgcccccatg

SEQ ID NO: 1843406 - DNA, 15 bp, Homo sapiens
ctgtcgcccccatgc

SEQ ID NO: 1843407 - DNA, 15 bp, Homo sapiens
tgtcgcccccatgct

SEQ ID NO: 1843408 - DNA, 15 bp, Homo sapiens
gtcgcccccatgctc

SEQ ID NO: 1843409 - DNA, 15 bp, Homo sapiens
tcgcccccatgctcc

SEQ ID NO: 1843410 - DNA, 15 bp, Homo sapiens
cgcccccatgctcca

SEQ ID NO: 1843411 - DNA, 15 bp, Homo sapiens
gcccccatgctccaa

SEQ ID NO: 1843412 - DNA, 15 bp, Homo sapiens
cccccatgctccaat

SEQ ID NO: 1843413 - DNA, 15 bp, Homo sapiens
ccccatgctccaatt

SEQ ID NO: 1843414 - DNA, 15 bp, Homo sapiens
cccatgctccaattg

SEQ ID NO: 1843415 - DNA, 15 bp, Homo sapiens
ccatgctccaattgt

SEQ ID NO: 1843416 - DNA, 15 bp, Homo sapiens
catgctccaattgtt

SEQ ID NO: 1843417 - DNA, 15 bp, Homo sapiens
atgctccaattgttc

SEQ ID NO: 1843418 - DNA, 15 bp, Homo sapiens
tgctccaattgttcc

SEQ ID NO: 1843419 - DNA, 15 bp, Homo sapiens
gctccaattgttcct

SEQ ID NO: 1843420 - DNA, 15 bp, Homo sapiens
ctccaattgttcctg

SEQ ID NO: 1843421 - DNA, 15 bp, Homo sapiens
tccaattgttcctgt

SEQ ID NO: 1843422 - DNA, 15 bp, Homo sapiens
ccaattgttcctgtt

SEQ ID NO: 1843423 - DNA, 15 bp, Homo sapiens
caattgttcctgttt

SEQ ID NO: 1843424 - DNA, 15 bp, Homo sapiens
aattgttcctgtttc

SEQ ID NO: 1843425 - DNA, 15 bp, Homo sapiens
attgttcctgtttct

SEQ ID NO: 1843426 - DNA, 15 bp, Homo sapiens
ttgttcctgtttctc

SEQ ID NO: 1843427 - DNA, 15 bp, Homo sapiens
tgttcctgtttctcc

SEQ ID NO: 1843428 - DNA, 15 bp, Homo sapiens
gttcctgtttctcct

SEQ ID NO: 1843429 - DNA, 15 bp, Homo sapiens
ttcctgtttctcctg

SEQ ID NO: 1843430 - DNA, 15 bp, Homo sapiens
tcctgtttctcctgg

SEQ ID NO: 1843431 - DNA, 15 bp, Homo sapiens
cctgtttctcctggt

SEQ ID NO: 1843432 - DNA, 15 bp, Homo sapiens
ctgtttctcctggtc

SEQ ID NO: 1843433 - DNA, 15 bp, Homo sapiens
tgtttctcctggtcc

SEQ ID NO: 1843434 - DNA, 15 bp, Homo sapiens
gtttctcctggtccg

SEQ ID NO: 1843435 - DNA, 15 bp, Homo sapiens
tttctcctggtccgg

SEQ ID NO: 1843436 - DNA, 15 bp, Homo sapiens
ttctcctggtccggg

SEQ ID NO: 1843437 - DNA, 15 bp, Homo sapiens
tctcctggtccggga

SEQ ID NO: 1843438 - DNA, 15 bp, Homo sapiens
ctcctggtccgggat

SEQ ID NO: 1843439 - DNA, 15 bp, Homo sapiens
tcctggtccgggatc

SEQ ID NO: 1843440 - DNA, 15 bp, Homo sapiens
cctggtccgggatcc

SEQ ID NO: 1843441 - DNA, 15 bp, Homo sapiens
ctggtccgggatccc

SEQ ID NO: 1843442 - DNA, 15 bp, Homo sapiens
tggtccgggatccca

SEQ ID NO: 1843443 - DNA, 15 bp, Homo sapiens
ggtccgggatcccat

SEQ ID NO: 1843444 - DNA, 15 bp, Homo sapiens
gtccgggatcccatg

SEQ ID NO: 1843445 - DNA, 15 bp, Homo sapiens
tccgggatcccatgc

SEQ ID NO: 1843446 - DNA, 15 bp, Homo sapiens
ccgggatcccatgct

SEQ ID NO: 1843447 - DNA, 15 bp, Homo sapiens
cgggatcccatgctg

SEQ ID NO: 1843448 - DNA, 15 bp, Homo sapiens
gggatcccatgctgg

SEQ ID NO: 1843449 - DNA, 15 bp, Homo sapiens
ggatcccatgctggg

SEQ ID NO: 1843450 - DNA, 15 bp, Homo sapiens
gatcccatgctgggt

SEQ ID NO: 1843451 - DNA, 15 bp, Homo sapiens
atcccatgctgggtc

SEQ ID NO: 1843452 - DNA, 15 bp, Homo sapiens
tcccatgctgggtct

SEQ ID NO: 1843453 - DNA, 15 bp, Homo sapiens
cccatgctgggtctt

SEQ ID NO: 1843454 - DNA, 15 bp, Homo sapiens
ccatgctgggtcttg

SEQ ID NO: 1843455 - DNA, 15 bp, Homo sapiens
catgctgggtcttgt

SEQ ID NO: 1843456 - DNA, 15 bp, Homo sapiens
atgctgggtcttgtc

SEQ ID NO: 1843457 - DNA, 15 bp, Homo sapiens
tgctgggtcttgtct

SEQ ID NO: 1843458 - DNA, 15 bp, Homo sapiens
gctgggtcttgtctc

SEQ ID NO: 1843459 - DNA, 15 bp, Homo sapiens
ctgggtcttgtctct

SEQ ID NO: 1843460 - DNA, 15 bp, Homo sapiens
tgggtcttgtctctc

SEQ ID NO: 1843461 - DNA, 15 bp, Homo sapiens
gggtcttgtctctcg

SEQ ID NO: 1843462 - DNA, 15 bp, Homo sapiens
ggtcttgtctctcga

SEQ ID NO: 1843463 - DNA, 15 bp, Homo sapiens
gtcttgtctctcgag

SEQ ID NO: 1843464 - DNA, 15 bp, Homo sapiens
tcttgtctctcgagc

SEQ ID NO: 1843465 - DNA, 15 bp, Homo sapiens
cttgtctctcgagcc

SEQ ID NO: 1843466 - DNA, 15 bp, Homo sapiens
ttgtctctcgagccc

SEQ ID NO: 1843467 - DNA, 15 bp, Homo sapiens
tgtctctcgagcccc

SEQ ID NO: 1843468 - DNA, 15 bp, Homo sapiens
gtctctcgagcccct

SEQ ID NO: 1843469 - DNA, 15 bp, Homo sapiens
tctctcgagcccctt

SEQ ID NO: 1843470 - DNA, 15 bp, Homo sapiens
ctctcgagccccttc

SEQ ID NO: 1843471 - DNA, 15 bp, Homo sapiens
tctcgagccccttcg

SEQ ID NO: 1843472 - DNA, 15 bp, Homo sapiens
ctcgagccccttcgt

SEQ ID NO: 1843473 - DNA, 15 bp, Homo sapiens
tcgagccccttcgtc

SEQ ID NO: 1843474 - DNA, 15 bp, Homo sapiens
cgagccccttcgtct

SEQ ID NO: 1843475 - DNA, 15 bp, Homo sapiens
gagccccttcgtctg

SEQ ID NO: 1843476 - DNA, 15 bp, Homo sapiens
agccccttcgtctgt

SEQ ID NO: 1843477 - DNA, 15 bp, Homo sapiens
gccccttcgtctgtc

SEQ ID NO: 1843478 - DNA, 15 bp, Homo sapiens
ccccttcgtctgtct

SEQ ID NO: 1843479 - DNA, 15 bp, Homo sapiens
cccttcgtctgtctg

SEQ ID NO: 1843480 - DNA, 15 bp, Homo sapiens
ccttcgtctgtctgg

SEQ ID NO: 1843481 - DNA, 15 bp, Homo sapiens
cttcgtctgtctggg

SEQ ID NO: 1843482 - DNA, 15 bp, Homo sapiens
ttcgtctgtctggga

SEQ ID NO: 1843483 - DNA, 15 bp, Homo sapiens
tcgtctgtctgggac

SEQ ID NO: 1843484 - DNA, 15 bp, Homo sapiens
cgtctgtctgggaca

SEQ ID NO: 1843485 - DNA, 15 bp, Homo sapiens
gtctgtctgggacag

SEQ ID NO: 1843486 - DNA, 15 bp, Homo sapiens
tctgtctgggacagt

SEQ ID NO: 1843487 - DNA, 15 bp, Homo sapiens
ctgtctgggacagtt

SEQ ID NO: 1843488 - DNA, 15 bp, Homo sapiens
tgtctgggacagttt

SEQ ID NO: 1843489 - DNA, 15 bp, Homo sapiens
gtctgggacagtttc

SEQ ID NO: 1843490 - DNA, 15 bp, Homo sapiens
tctgggacagtttcc

SEQ ID NO: 1843491 - DNA, 15 bp, Homo sapiens
ctgggacagtttcct

SEQ ID NO: 1843492 - DNA, 15 bp, Homo sapiens
tgggacagtttcctg

SEQ ID NO: 1843493 - DNA, 15 bp, Homo sapiens
gggacagtttcctgc

SEQ ID NO: 1843494 - DNA, 15 bp, Homo sapiens
ggacagtttcctgct

SEQ ID NO: 1843495 - DNA, 15 bp, Homo sapiens
gacagtttcctgctt

SEQ ID NO: 1843496 - DNA, 15 bp, Homo sapiens
acagtttcctgcttt

SEQ ID NO: 1843497 - DNA, 15 bp, Homo sapiens
cagtttcctgctttg

SEQ ID NO: 1843498 - DNA, 15 bp, Homo sapiens
agtttcctgctttgt

SEQ ID NO: 1843499 - DNA, 15 bp, Homo sapiens
gtttcctgctttgtt

SEQ ID NO: 1843500 - DNA, 15 bp, Homo sapiens
tttcctgctttgttt

SEQ ID NO: 1843501 - DNA, 15 bp, Homo sapiens
ttcctgctttgtttt

SEQ ID NO: 1843502 - DNA, 15 bp, Homo sapiens
tcctgctttgttttc

SEQ ID NO: 1843503 - DNA, 15 bp, Homo sapiens
cctgctttgttttct

SEQ ID NO: 1843504 - DNA, 15 bp, Homo sapiens
ctgctttgttttctg

SEQ ID NO: 1843505 - DNA, 15 bp, Homo sapiens
tgctttgttttctgt

SEQ ID NO: 1843506 - DNA, 15 bp, Homo sapiens
gctttgttttctgtg

SEQ ID NO: 1843507 - DNA, 15 bp, Homo sapiens
ctttgttttctgtgc

SEQ ID NO: 1843508 - DNA, 15 bp, Homo sapiens
tttgttttctgtgct

SEQ ID NO: 1843509 - DNA, 15 bp, Homo sapiens
ttgttttctgtgctc

SEQ ID NO: 1843510 - DNA, 15 bp, Homo sapiens
tgttttctgtgctcc

SEQ ID NO: 1843511 - DNA, 15 bp, Homo sapiens
gttttctgtgctccg

SEQ ID NO: 1843512 - DNA, 15 bp, Homo sapiens
ttttctgtgctccgg

SEQ ID NO: 1843513 - DNA, 15 bp, Homo sapiens
tttctgtgctccggg

SEQ ID NO: 1843514 - DNA, 15 bp, Homo sapiens
ttctgtgctccgggc

SEQ ID NO: 1843515 - DNA, 15 bp, Homo sapiens
tctgtgctccgggca

SEQ ID NO: 1843516 - DNA, 15 bp, Homo sapiens
ctgtgctccgggcac

SEQ ID NO: 1843517 - DNA, 15 bp, Homo sapiens
tgtgctccgggcacc

SEQ ID NO: 1843518 - DNA, 15 bp, Homo sapiens
gtgctccgggcaccg

SEQ ID NO: 1843519 - DNA, 15 bp, Homo sapiens
tgctccgggcaccga

SEQ ID NO: 1843520 - DNA, 15 bp, Homo sapiens
gctccgggcaccgag

SEQ ID NO: 1843521 - DNA, 15 bp, Homo sapiens
ctccgggcaccgagc

SEQ ID NO: 1843522 - DNA, 15 bp, Homo sapiens
tccgggcaccgagca

SEQ ID NO: 1843523 - DNA, 15 bp, Homo sapiens
ccgggcaccgagcag

SEQ ID NO: 1843524 - DNA, 15 bp, Homo sapiens
cgggcaccgagcagc

SEQ ID NO: 1843525 - DNA, 15 bp, Homo sapiens
gggcaccgagcagca

SEQ ID NO: 1843526 - DNA, 15 bp, Homo sapiens
ggcaccgagcagcat

SEQ ID NO: 1843527 - DNA, 15 bp, Homo sapiens
gcaccgagcagcatc

SEQ ID NO: 1843528 - DNA, 15 bp, Homo sapiens
caccgagcagcatcc

SEQ ID NO: 1843529 - DNA, 15 bp, Homo sapiens
accgagcagcatccc

SEQ ID NO: 1843530 - DNA, 15 bp, Homo sapiens
ccgagcagcatccca

SEQ ID NO: 1843531 - DNA, 15 bp, Homo sapiens
cgagcagcatcccag

SEQ ID NO: 1843532 - DNA, 15 bp, Homo sapiens
gagcagcatcccagc

SEQ ID NO: 1843533 - DNA, 15 bp, Homo sapiens
agcagcatcccagcc

SEQ ID NO: 1843534 - DNA, 15 bp, Homo sapiens
gcagcatcccagccc

SEQ ID NO: 1843535 - DNA, 15 bp, Homo sapiens
cagcatcccagcccg

SEQ ID NO: 1843536 - DNA, 15 bp, Homo sapiens
agcatcccagcccgt

SEQ ID NO: 1843537 - DNA, 15 bp, Homo sapiens
gcatcccagcccgtt

SEQ ID NO: 1843538 - DNA, 15 bp, Homo sapiens
catcccagcccgtta

SEQ ID NO: 1843539 - DNA, 15 bp, Homo sapiens
atcccagcccgttat

SEQ ID NO: 1843540 - DNA, 15 bp, Homo sapiens
tcccagcccgttatt

SEQ ID NO: 1843541 - DNA, 15 bp, Homo sapiens
cccagcccgttattc

SEQ ID NO: 1843542 - DNA, 15 bp, Homo sapiens
ccagcccgttattca

SEQ ID NO: 1843543 - DNA, 15 bp, Homo sapiens
cagcccgttattcat

SEQ ID NO: 1843544 - DNA, 15 bp, Homo sapiens
agcccgttattcatg

SEQ ID NO: 1843545 - DNA, 15 bp, Homo sapiens
gcccgttattcatgg

SEQ ID NO: 1843546 - DNA, 15 bp, Homo sapiens
cccgttattcatgga

SEQ ID NO: 1843547 - DNA, 15 bp, Homo sapiens
ccgttattcatggaa

SEQ ID NO: 1843548 - DNA, 15 bp, Homo sapiens
cgttattcatggaag

SEQ ID NO: 1843549 - DNA, 15 bp, Homo sapiens
gttattcatggaagg

SEQ ID NO: 1843550 - DNA, 15 bp, Homo sapiens
ttattcatggaaggc

SEQ ID NO: 1843551 - DNA, 15 bp, Homo sapiens
tattcatggaaggct

SEQ ID NO: 1843552 - DNA, 15 bp, Homo sapiens
attcatggaaggcta

SEQ ID NO: 1843553 - DNA, 15 bp, Homo sapiens
ttcatggaaggctac

SEQ ID NO: 1843554 - DNA, 15 bp, Homo sapiens
tcatggaaggctact

SEQ ID NO: 1843555 - DNA, 15 bp, Homo sapiens
catggaaggctactc

SEQ ID NO: 1843556 - DNA, 15 bp, Homo sapiens
atggaaggctactcg

SEQ ID NO: 1843557 - DNA, 15 bp, Homo sapiens
tggaaggctactcgt

SEQ ID NO: 1843558 - DNA, 15 bp, Homo sapiens
ggaaggctactcgtt

SEQ ID NO: 1843559 - DNA, 15 bp, Homo sapiens
gaaggctactcgttc

SEQ ID NO: 1843560 - DNA, 15 bp, Homo sapiens
aaggctactcgttcc

SEQ ID NO: 1843561 - DNA, 15 bp, Homo sapiens
aggctactcgttccg

SEQ ID NO: 1843562 - DNA, 15 bp, Homo sapiens
ggctactcgttccgt

SEQ ID NO: 1843563 - DNA, 15 bp, Homo sapiens
gctactcgttccgtg

SEQ ID NO: 1843564 - DNA, 15 bp, Homo sapiens
ctactcgttccgtgt

SEQ ID NO: 1843565 - DNA, 15 bp, Homo sapiens
tactcgttccgtgtc

SEQ ID NO: 1843566 - DNA, 15 bp, Homo sapiens
actcgttccgtgtcg

SEQ ID NO: 1843567 - DNA, 15 bp, Homo sapiens
ctcgttccgtgtcgc

SEQ ID NO: 1843568 - DNA, 15 bp, Homo sapiens
tcgttccgtgtcgct

SEQ ID NO: 1843569 - DNA, 15 bp, Homo sapiens
cgttccgtgtcgctg

SEQ ID NO: 1843570 - DNA, 15 bp, Homo sapiens
gttccgtgtcgctgg

SEQ ID NO: 1843571 - DNA, 15 bp, Homo sapiens
ttccgtgtcgctggg

SEQ ID NO: 1843572 - DNA, 15 bp, Homo sapiens
tccgtgtcgctgggt

SEQ ID NO: 1843573 - DNA, 15 bp, Homo sapiens
ccgtgtcgctgggtg

SEQ ID NO: 1843574 - DNA, 15 bp, Homo sapiens
cgtgtcgctgggtgc

SEQ ID NO: 1843575 - DNA, 15 bp, Homo sapiens
gtgtcgctgggtgct

SEQ ID NO: 1843576 - DNA, 15 bp, Homo sapiens
tgtcgctgggtgcta

SEQ ID NO: 1843577 - DNA, 15 bp, Homo sapiens
gtcgctgggtgctag

SEQ ID NO: 1843578 - DNA, 15 bp, Homo sapiens
tcgctgggtgctagt

SEQ ID NO: 1843579 - DNA, 15 bp, Homo sapiens
cgctgggtgctagtt

SEQ ID NO: 1843580 - DNA, 15 bp, Homo sapiens
gctgggtgctagttc

SEQ ID NO: 1843581 - DNA, 15 bp, Homo sapiens
ctgggtgctagttct

SEQ ID NO: 1843582 - DNA, 15 bp, Homo sapiens
tgggtgctagttctg

SEQ ID NO: 1843583 - DNA, 15 bp, Homo sapiens
gggtgctagttctgg

SEQ ID NO: 1843584 - DNA, 15 bp, Homo sapiens
ggtgctagttctggt

SEQ ID NO: 1843585 - DNA, 15 bp, Homo sapiens
gtgctagttctggtc

SEQ ID NO: 1843586 - DNA, 15 bp, Homo sapiens
tgctagttctggtca

SEQ ID NO: 1843587 - DNA, 15 bp, Homo sapiens
gctagttctggtcac

SEQ ID NO: 1843588 - DNA, 15 bp, Homo sapiens
ctagttctggtcacc

SEQ ID NO: 1843589 - DNA, 15 bp, Homo sapiens
tagttctggtcacct

SEQ ID NO: 1843590 - DNA, 15 bp, Homo sapiens
agttctggtcacctg

SEQ ID NO: 1843591 - DNA, 15 bp, Homo sapiens
gttctggtcacctgt

SEQ ID NO: 1843592 - DNA, 15 bp, Homo sapiens
ttctggtcacctgtc

SEQ ID NO: 1843593 - DNA, 15 bp, Homo sapiens
tctggtcacctgtcc

SEQ ID NO: 1843594 - DNA, 15 bp, Homo sapiens
ctggtcacctgtcca

SEQ ID NO: 1843595 - DNA, 15 bp, Homo sapiens
tggtcacctgtccac

SEQ ID NO: 1843596 - DNA, 15 bp, Homo sapiens
ggtcacctgtccacc

SEQ ID NO: 1843597 - DNA, 15 bp, Homo sapiens
gtcacctgtccaccc

SEQ ID NO: 1843598 - DNA, 15 bp, Homo sapiens
tcacctgtccacccc

SEQ ID NO: 1843599 - DNA, 15 bp, Homo sapiens
cacctgtccaccccc

SEQ ID NO: 1843600 - DNA, 15 bp, Homo sapiens
acctgtccacccccc

SEQ ID NO: 1843601 - DNA, 15 bp, Homo sapiens
cctgtccacccccca

SEQ ID NO: 1843602 - DNA, 15 bp, Homo sapiens
ctgtccaccccccac

SEQ ID NO: 1843603 - DNA, 15 bp, Homo sapiens
tgtccaccccccacc

SEQ ID NO: 1843604 - DNA, 15 bp, Homo sapiens
gtccaccccccacct

SEQ ID NO: 1843605 - DNA, 15 bp, Homo sapiens
tccaccccccacctc

SEQ ID NO: 1843606 - DNA, 15 bp, Homo sapiens
ccaccccccacctcc

SEQ ID NO: 1843607 - DNA, 15 bp, Homo sapiens
caccccccacctccc

SEQ ID NO: 1843608 - DNA, 15 bp, Homo sapiens
accccccacctccct

SEQ ID NO: 1843609 - DNA, 15 bp, Homo sapiens
ccccccacctccctg

SEQ ID NO: 1843610 - DNA, 15 bp, Homo sapiens
cccccacctccctgg

SEQ ID NO: 1843611 - DNA, 15 bp, Homo sapiens
ccccacctccctggg

SEQ ID NO: 1843612 - DNA, 15 bp, Homo sapiens
cccacctccctggga

SEQ ID NO: 1843613 - DNA, 15 bp, Homo sapiens
ccacctccctgggag

SEQ ID NO: 1843614 - DNA, 15 bp, Homo sapiens
cacctccctgggaga

SEQ ID NO: 1843615 - DNA, 15 bp, Homo sapiens
acctccctgggagaa

SEQ ID NO: 1843616 - DNA, 15 bp, Homo sapiens
cctccctgggagaac

SEQ ID NO: 1843617 - DNA, 15 bp, Homo sapiens
ctccctgggagaacg

SEQ ID NO: 1843618 - DNA, 15 bp, Homo sapiens
tccctgggagaacgt

SEQ ID NO: 1843619 - DNA, 15 bp, Homo sapiens
ccctgggagaacgtc

SEQ ID NO: 1843620 - DNA, 15 bp, Homo sapiens
cctgggagaacgtca

SEQ ID NO: 1843621 - DNA, 15 bp, Homo sapiens
ctgggagaacgtcac

SEQ ID NO: 1843622 - DNA, 15 bp, Homo sapiens
tgggagaacgtcacc

SEQ ID NO: 1843623 - DNA, 15 bp, Homo sapiens
gggagaacgtcaccc

SEQ ID NO: 1843624 - DNA, 15 bp, Homo sapiens
ggagaacgtcaccct

SEQ ID NO: 1843625 - DNA, 15 bp, Homo sapiens
gagaacgtcacccta

SEQ ID NO: 1843626 - DNA, 15 bp, Homo sapiens
agaacgtcaccctag

SEQ ID NO: 1843627 - DNA, 15 bp, Homo sapiens
gaacgtcaccctaga

SEQ ID NO: 1843628 - DNA, 15 bp, Homo sapiens
aacgtcaccctagaa

SEQ ID NO: 1843629 - DNA, 15 bp, Homo sapiens
acgtcaccctagaaa

SEQ ID NO: 1843630 - DNA, 15 bp, Homo sapiens
cgtcaccctagaaac

SEQ ID NO: 1843631 - DNA, 15 bp, Homo sapiens
gtcaccctagaaaca

SEQ ID NO: 1843632 - DNA, 15 bp, Homo sapiens
tcaccctagaaacag

SEQ ID NO: 1843633 - DNA, 15 bp, Homo sapiens
caccctagaaacagt

SEQ ID NO: 1843634 - DNA, 15 bp, Homo sapiens
accctagaaacagtg

SEQ ID NO: 1843635 - DNA, 15 bp, Homo sapiens
ccctagaaacagtgc

SEQ ID NO: 1843636 - DNA, 15 bp, Homo sapiens
cctagaaacagtgcg

SEQ ID NO: 1843637 - DNA, 15 bp, Homo sapiens
ctagaaacagtgcga

SEQ ID NO: 1843638 - DNA, 15 bp, Homo sapiens
tagaaacagtgcgag

SEQ ID NO: 1843639 - DNA, 15 bp, Homo sapiens
agaaacagtgcgaga

SEQ ID NO: 1843640 - DNA, 15 bp, Homo sapiens
gaaacagtgcgagag

SEQ ID NO: 1843641 - DNA, 15 bp, Homo sapiens
aaacagtgcgagagt

SEQ ID NO: 1843642 - DNA, 15 bp, Homo sapiens
aacagtgcgagagtc

SEQ ID NO: 1843643 - DNA, 15 bp, Homo sapiens
acagtgcgagagtca

SEQ ID NO: 1843644 - DNA, 15 bp, Homo sapiens
cagtgcgagagtcac

SEQ ID NO: 1843645 - DNA, 15 bp, Homo sapiens
agtgcgagagtcacc

SEQ ID NO: 1843646 - DNA, 15 bp, Homo sapiens
gtgcgagagtcaccc

SEQ ID NO: 1843647 - DNA, 15 bp, Homo sapiens
tgcgagagtcaccca

SEQ ID NO: 1843648 - DNA, 15 bp, Homo sapiens
gcgagagtcacccat

SEQ ID NO: 1843649 - DNA, 15 bp, Homo sapiens
cgagagtcacccatg

SEQ ID NO: 1843650 - DNA, 15 bp, Homo sapiens
gagagtcacccatgg

SEQ ID NO: 1843651 - DNA, 15 bp, Homo sapiens
agagtcacccatggg

SEQ ID NO: 1843652 - DNA, 15 bp, Homo sapiens
gagtcacccatggga

SEQ ID NO: 1843653 - DNA, 15 bp, Homo sapiens
agtcacccatgggag

SEQ ID NO: 1843654 - DNA, 15 bp, Homo sapiens
gtcacccatgggagc

SEQ ID NO: 1843655 - DNA, 15 bp, Homo sapiens
tcacccatgggagct

SEQ ID NO: 1843656 - DNA, 15 bp, Homo sapiens
cacccatgggagctc

SEQ ID NO: 1843657 - DNA, 15 bp, Homo sapiens
acccatgggagctca

SEQ ID NO: 1843658 - DNA, 15 bp, Homo sapiens
cccatgggagctcac

SEQ ID NO: 1843659 - DNA, 15 bp, Homo sapiens
ccatgggagctcacc

SEQ ID NO: 1843660 - DNA, 15 bp, Homo sapiens
catgggagctcacct

SEQ ID NO: 1843661 - DNA, 15 bp, Homo sapiens
atgggagctcacctg

SEQ ID NO: 1843662 - DNA, 15 bp, Homo sapiens
tgggagctcacctgg

SEQ ID NO: 1843663 - DNA, 15 bp, Homo sapiens
gggagctcacctggt

SEQ ID NO: 1843664 - DNA, 15 bp, Homo sapiens
ggagctcacctggtc

SEQ ID NO: 1843665 - DNA, 15 bp, Homo sapiens
gagctcacctggtcc

SEQ ID NO: 1843666 - DNA, 15 bp, Homo sapiens
agctcacctggtccc

SEQ ID NO: 1843667 - DNA, 15 bp, Homo sapiens
gctcacctggtccca

SEQ ID NO: 1843668 - DNA, 15 bp, Homo sapiens
ctcacctggtcccat

SEQ ID NO: 1843669 - DNA, 15 bp, Homo sapiens
tcacctggtcccatc

SEQ ID NO: 1843670 - DNA, 15 bp, Homo sapiens
cacctggtcccatcc

SEQ ID NO: 1843671 - DNA, 15 bp, Homo sapiens
acctggtcccatcct

SEQ ID NO: 1843672 - DNA, 15 bp, Homo sapiens
cctggtcccatcctc

SEQ ID NO: 1843673 - DNA, 15 bp, Homo sapiens
ctggtcccatcctcc

SEQ ID NO: 1843674 - DNA, 15 bp, Homo sapiens
tggtcccatcctccc

SEQ ID NO: 1843675 - DNA, 15 bp, Homo sapiens
ggtcccatcctcccc

SEQ ID NO: 1843676 - DNA, 15 bp, Homo sapiens
gtcccatcctccccc

SEQ ID NO: 1843677 - DNA, 15 bp, Homo sapiens
tcccatcctccccct

SEQ ID NO: 1843678 - DNA, 15 bp, Homo sapiens
cccatcctccccctt

SEQ ID NO: 1843679 - DNA, 15 bp, Homo sapiens
ccatcctcccccttc

SEQ ID NO: 1843680 - DNA, 15 bp, Homo sapiens
catcctcccccttcc

SEQ ID NO: 1843681 - DNA, 15 bp, Homo sapiens
atcctcccccttcct

SEQ ID NO: 1843682 - DNA, 15 bp, Homo sapiens
tcctcccccttcctc

SEQ ID NO: 1843683 - DNA, 15 bp, Homo sapiens
tcccccttcctccct

SEQ ID NO: 1843684 - DNA, 15 bp, Homo sapiens
cccccttcctccctg

SEQ ID NO: 1843685 - DNA, 15 bp, Homo sapiens
ccccttcctccctga

SEQ ID NO: 1843686 - DNA, 15 bp, Homo sapiens
cccttcctccctgac

SEQ ID NO: 1843687 - DNA, 15 bp, Homo sapiens
ccttcctccctgaca

SEQ ID NO: 1843688 - DNA, 15 bp, Homo sapiens
cttcctccctgacac

SEQ ID NO: 1843689 - DNA, 15 bp, Homo sapiens
ttcctccctgacaca

SEQ ID NO: 1843690 - DNA, 15 bp, Homo sapiens
tcctccctgacacag

SEQ ID NO: 1843691 - DNA, 15 bp, Homo sapiens
cctccctgacacagg

SEQ ID NO: 1843692 - DNA, 15 bp, Homo sapiens
ctccctgacacaggc

SEQ ID NO: 1843693 - DNA, 15 bp, Homo sapiens
tccctgacacaggca

SEQ ID NO: 1843694 - DNA, 15 bp, Homo sapiens
ccctgacacaggcag

SEQ ID NO: 1843695 - DNA, 15 bp, Homo sapiens
cctgacacaggcagt

SEQ ID NO: 1843696 - DNA, 15 bp, Homo sapiens
ctgacacaggcagta

SEQ ID NO: 1843697 - DNA, 15 bp, Homo sapiens
tgacacaggcagtac

SEQ ID NO: 1843698 - DNA, 15 bp, Homo sapiens
gacacaggcagtacg

SEQ ID NO: 1843699 - DNA, 15 bp, Homo sapiens
acacaggcagtacgt

SEQ ID NO: 1843700 - DNA, 15 bp, Homo sapiens
cacaggcagtacgtc

SEQ ID NO: 1843701 - DNA, 15 bp, Homo sapiens
acaggcagtacgtcc

SEQ ID NO: 1843702 - DNA, 15 bp, Homo sapiens
caggcagtacgtccg

SEQ ID NO: 1843703 - DNA, 15 bp, Homo sapiens
aggcagtacgtccga

SEQ ID NO: 1843704 - DNA, 15 bp, Homo sapiens
ggcagtacgtccgag

SEQ ID NO: 1843705 - DNA, 15 bp, Homo sapiens
gcagtacgtccgaga

SEQ ID NO: 1843706 - DNA, 15 bp, Homo sapiens
cagtacgtccgagac

SEQ ID NO: 1843707 - DNA, 15 bp, Homo sapiens
agtacgtccgagaca

SEQ ID NO: 1843708 - DNA, 15 bp, Homo sapiens
gtacgtccgagacac

SEQ ID NO: 1843709 - DNA, 15 bp, Homo sapiens
tacgtccgagacaca

SEQ ID NO: 1843710 - DNA, 15 bp, Homo sapiens
acgtccgagacacag

SEQ ID NO: 1843711 - DNA, 15 bp, Homo sapiens
cgtccgagacacagt

SEQ ID NO: 1843712 - DNA, 15 bp, Homo sapiens
gtccgagacacagtc

SEQ ID NO: 1843713 - DNA, 15 bp, Homo sapiens
tccgagacacagtcg

SEQ ID NO: 1843714 - DNA, 15 bp, Homo sapiens
ccgagacacagtcgt

SEQ ID NO: 1843715 - DNA, 15 bp, Homo sapiens
cgagacacagtcgtg

SEQ ID NO: 1843716 - DNA, 15 bp, Homo sapiens
gagacacagtcgtgg

SEQ ID NO: 1843717 - DNA, 15 bp, Homo sapiens
agacacagtcgtggg

SEQ ID NO: 1843718 - DNA, 15 bp, Homo sapiens
gacacagtcgtgggc

SEQ ID NO: 1843719 - DNA, 15 bp, Homo sapiens
acacagtcgtgggca

SEQ ID NO: 1843720 - DNA, 15 bp, Homo sapiens
cacagtcgtgggcac

SEQ ID NO: 1843721 - DNA, 15 bp, Homo sapiens
acagtcgtgggcacc

SEQ ID NO: 1843722 - DNA, 15 bp, Homo sapiens
cagtcgtgggcacca

SEQ ID NO: 1843723 - DNA, 15 bp, Homo sapiens
agtcgtgggcaccat

SEQ ID NO: 1843724 - DNA, 15 bp, Homo sapiens
gtcgtgggcaccatg

SEQ ID NO: 1843725 - DNA, 15 bp, Homo sapiens
tcgtgggcaccatgg

SEQ ID NO: 1843726 - DNA, 15 bp, Homo sapiens
cgtgggcaccatggg

SEQ ID NO: 1843727 - DNA, 15 bp, Homo sapiens
gtgggcaccatgggc

SEQ ID NO: 1843728 - DNA, 15 bp, Homo sapiens
tgggcaccatgggcc

SEQ ID NO: 1843729 - DNA, 15 bp, Homo sapiens
gggcaccatgggcct

SEQ ID NO: 1843730 - DNA, 15 bp, Homo sapiens
ggcaccatgggcctg

SEQ ID NO: 1843731 - DNA, 15 bp, Homo sapiens
gcaccatgggcctga

SEQ ID NO: 1843732 - DNA, 15 bp, Homo sapiens
caccatgggcctgaa

SEQ ID NO: 1843733 - DNA, 15 bp, Homo sapiens
accatgggcctgaag

SEQ ID NO: 1843734 - DNA, 15 bp, Homo sapiens
ccatgggcctgaagg

SEQ ID NO: 1843735 - DNA, 15 bp, Homo sapiens
catgggcctgaaggc

SEQ ID NO: 1843736 - DNA, 15 bp, Homo sapiens
atgggcctgaaggcc

SEQ ID NO: 1843737 - DNA, 15 bp, Homo sapiens
tgggcctgaaggcca

SEQ ID NO: 1843738 - DNA, 15 bp, Homo sapiens
gggcctgaaggccac

SEQ ID NO: 1843739 - DNA, 15 bp, Homo sapiens
ggcctgaaggccacg

SEQ ID NO: 1843740 - DNA, 15 bp, Homo sapiens
gcctgaaggccacgg

SEQ ID NO: 1843741 - DNA, 15 bp, Homo sapiens
cctgaaggccacggg

SEQ ID NO: 1843742 - DNA, 15 bp, Homo sapiens
ctgaaggccacgggc

SEQ ID NO: 1843743 - DNA, 15 bp, Homo sapiens
tgaaggccacgggcc

SEQ ID NO: 1843744 - DNA, 15 bp, Homo sapiens
gaaggccacgggccg

SEQ ID NO: 1843745 - DNA, 15 bp, Homo sapiens
aaggccacgggccgg

SEQ ID NO: 1843746 - DNA, 15 bp, Homo sapiens
aggccacgggccggc

SEQ ID NO: 1843747 - DNA, 15 bp, Homo sapiens
ggccacgggccggct

SEQ ID NO: 1843748 - DNA, 15 bp, Homo sapiens
gccacgggccggctc

SEQ ID NO: 1843749 - DNA, 15 bp, Homo sapiens
ccacgggccggctct

SEQ ID NO: 1843750 - DNA, 15 bp, Homo sapiens
cacgggccggctctg

SEQ ID NO: 1843751 - DNA, 15 bp, Homo sapiens
acgggccggctctgc

SEQ ID NO: 1843752 - DNA, 15 bp, Homo sapiens
cgggccggctctgca

SEQ ID NO: 1843753 - DNA, 15 bp, Homo sapiens
gggccggctctgcac

SEQ ID NO: 1843754 - DNA, 15 bp, Homo sapiens
ggccggctctgcacc

SEQ ID NO: 1843755 - DNA, 15 bp, Homo sapiens
gccggctctgcaccg

SEQ ID NO: 1843756 - DNA, 15 bp, Homo sapiens
ccggctctgcaccgt

SEQ ID NO: 1843757 - DNA, 15 bp, Homo sapiens
cggctctgcaccgtg

SEQ ID NO: 1843758 - DNA, 15 bp, Homo sapiens
ggctctgcaccgtgg

SEQ ID NO: 1843759 - DNA, 15 bp, Homo sapiens
gctctgcaccgtggc

SEQ ID NO: 1843760 - DNA, 15 bp, Homo sapiens
ctctgcaccgtggct

SEQ ID NO: 1843761 - DNA, 15 bp, Homo sapiens
tctgcaccgtggcta

SEQ ID NO: 1843762 - DNA, 15 bp, Homo sapiens
ctgcaccgtggctaa

SEQ ID NO: 1843763 - DNA, 15 bp, Homo sapiens
tgcaccgtggctaag

SEQ ID NO: 1843764 - DNA, 15 bp, Homo sapiens
gcaccgtggctaagg

SEQ ID NO: 1843765 - DNA, 15 bp, Homo sapiens
caccgtggctaaggc

SEQ ID NO: 1843766 - DNA, 15 bp, Homo sapiens
accgtggctaaggca

SEQ ID NO: 1843767 - DNA, 15 bp, Homo sapiens
ccgtggctaaggcaa

SEQ ID NO: 1843768 - DNA, 15 bp, Homo sapiens
cgtggctaaggcaag

SEQ ID NO: 1843769 - DNA, 15 bp, Homo sapiens
gtggctaaggcaagg

SEQ ID NO: 1843770 - DNA, 15 bp, Homo sapiens
tggctaaggcaaggg

SEQ ID NO: 1843771 - DNA, 15 bp, Homo sapiens
ggctaaggcaagggg

SEQ ID NO: 1843772 - DNA, 15 bp, Homo sapiens
gctaaggcaaggggg

SEQ ID NO: 1843773 - DNA, 15 bp, Homo sapiens
ctaaggcaagggggc

SEQ ID NO: 1843774 - DNA, 15 bp, Homo sapiens
taaggcaagggggct

SEQ ID NO: 1843775 - DNA, 15 bp, Homo sapiens
aaggcaagggggctg

SEQ ID NO: 1843776 - DNA, 15 bp, Homo sapiens
aggcaagggggctgc

SEQ ID NO: 1843777 - DNA, 15 bp, Homo sapiens
ggcaagggggctgcg

SEQ ID NO: 1843778 - DNA, 15 bp, Homo sapiens
gcaagggggctgcga

SEQ ID NO: 1843779 - DNA, 15 bp, Homo sapiens
caagggggctgcgag

SEQ ID NO: 1843780 - DNA, 15 bp, Homo sapiens
aagggggctgcgagc

SEQ ID NO: 1843781 - DNA, 15 bp, Homo sapiens
agggggctgcgagcc

SEQ ID NO: 1843782 - DNA, 15 bp, Homo sapiens
gggggctgcgagcct

SEQ ID NO: 1843783 - DNA, 15 bp, Homo sapiens
ggggctgcgagcctg

SEQ ID NO: 1843784 - DNA, 15 bp, Homo sapiens
gggctgcgagcctgc

SEQ ID NO: 1843785 - DNA, 15 bp, Homo sapiens
ggctgcgagcctgca

SEQ ID NO: 1843786 - DNA, 15 bp, Homo sapiens
gctgcgagcctgcag

SEQ ID NO: 1843787 - DNA, 15 bp, Homo sapiens
ctgcgagcctgcagg

SEQ ID NO: 1843788 - DNA, 15 bp, Homo sapiens
tgcgagcctgcaggt

SEQ ID NO: 1843789 - DNA, 15 bp, Homo sapiens
gcgagcctgcaggtg

SEQ ID NO: 1843790 - DNA, 15 bp, Homo sapiens
cgagcctgcaggtga

SEQ ID NO: 1843791 - DNA, 15 bp, Homo sapiens
gagcctgcaggtgag

SEQ ID NO: 1843792 - DNA, 15 bp, Homo sapiens
agcctgcaggtgagc

SEQ ID NO: 1843793 - DNA, 15 bp, Homo sapiens
gcctgcaggtgagcc

SEQ ID NO: 1843794 - DNA, 15 bp, Homo sapiens
cctgcaggtgagcca

SEQ ID NO: 1843795 - DNA, 15 bp, Homo sapiens
ctgcaggtgagccac

SEQ ID NO: 1843796 - DNA, 15 bp, Homo sapiens
tgcaggtgagccacc

SEQ ID NO: 1843797 - DNA, 15 bp, Homo sapiens
gcaggtgagccaccc

SEQ ID NO: 1843798 - DNA, 15 bp, Homo sapiens
caggtgagccacccc

SEQ ID NO: 1843799 - DNA, 15 bp, Homo sapiens
aggtgagccaccccc

SEQ ID NO: 1843800 - DNA, 15 bp, Homo sapiens
ggtgagccaccccca

SEQ ID NO: 1843801 - DNA, 15 bp, Homo sapiens
gtgagccacccccac

SEQ ID NO: 1843802 - DNA, 15 bp, Homo sapiens
tgagccacccccacc

SEQ ID NO: 1843803 - DNA, 15 bp, Homo sapiens
gagccacccccaccc

SEQ ID NO: 1843804 - DNA, 15 bp, Homo sapiens
agccacccccaccca

SEQ ID NO: 1843805 - DNA, 15 bp, Homo sapiens
gccacccccacccat

SEQ ID NO: 1843806 - DNA, 15 bp, Homo sapiens
ccacccccacccatg

SEQ ID NO: 1843807 - DNA, 15 bp, Homo sapiens
cacccccacccatgc

SEQ ID NO: 1843808 - DNA, 15 bp, Homo sapiens
acccccacccatgcc

SEQ ID NO: 1843809 - DNA, 15 bp, Homo sapiens
cccccacccatgccc

SEQ ID NO: 1843810 - DNA, 15 bp, Homo sapiens
ccccacccatgccct

SEQ ID NO: 1843811 - DNA, 15 bp, Homo sapiens
cccacccatgccctg

SEQ ID NO: 1843812 - DNA, 15 bp, Homo sapiens
ccacccatgccctgg

SEQ ID NO: 1843813 - DNA, 15 bp, Homo sapiens
cacccatgccctggg

SEQ ID NO: 1843814 - DNA, 15 bp, Homo sapiens
acccatgccctgggc

SEQ ID NO: 1843815 - DNA, 15 bp, Homo sapiens
cccatgccctgggct

SEQ ID NO: 1843816 - DNA, 15 bp, Homo sapiens
ccatgccctgggctc

SEQ ID NO: 1843817 - DNA, 15 bp, Homo sapiens
catgccctgggctcc

SEQ ID NO: 1843818 - DNA, 15 bp, Homo sapiens
atgccctgggctcca

SEQ ID NO: 1843819 - DNA, 15 bp, Homo sapiens
tgccctgggctccag

SEQ ID NO: 1843820 - DNA, 15 bp, Homo sapiens
gccctgggctccagg

SEQ ID NO: 1843821 - DNA, 15 bp, Homo sapiens
ccctgggctccaggg

SEQ ID NO: 1843822 - DNA, 15 bp, Homo sapiens
cctgggctccagggg

SEQ ID NO: 1843823 - DNA, 15 bp, Homo sapiens
ctgggctccagggga

SEQ ID NO: 1843824 - DNA, 15 bp, Homo sapiens
tgggctccaggggag

SEQ ID NO: 1843825 - DNA, 15 bp, Homo sapiens
gggctccaggggagg

SEQ ID NO: 1843826 - DNA, 15 bp, Homo sapiens
ggctccaggggaggc

SEQ ID NO: 1843827 - DNA, 15 bp, Homo sapiens
gctccaggggaggct

SEQ ID NO: 1843828 - DNA, 15 bp, Homo sapiens
ctccaggggaggctg

SEQ ID NO: 1843829 - DNA, 15 bp, Homo sapiens
tccaggggaggctgc

SEQ ID NO: 1843830 - DNA, 15 bp, Homo sapiens
ccaggggaggctgcg

SEQ ID NO: 1843831 - DNA, 15 bp, Homo sapiens
caggggaggctgcga

SEQ ID NO: 1843832 - DNA, 15 bp, Homo sapiens
aggggaggctgcgag

SEQ ID NO: 1843833 - DNA, 15 bp, Homo sapiens
ggggaggctgcgagg

SEQ ID NO: 1843834 - DNA, 15 bp, Homo sapiens
gggaggctgcgaggc

SEQ ID NO: 1843835 - DNA, 15 bp, Homo sapiens
ggaggctgcgaggcc

SEQ ID NO: 1843836 - DNA, 15 bp, Homo sapiens
gaggctgcgaggccc

SEQ ID NO: 1843837 - DNA, 15 bp, Homo sapiens
aggctgcgaggcccc

SEQ ID NO: 1843838 - DNA, 15 bp, Homo sapiens
gctgcgaggcccctg

SEQ ID NO: 1843839 - DNA, 15 bp, Homo sapiens
ctgcgaggcccctga

SEQ ID NO: 1843840 - DNA, 15 bp, Homo sapiens
tgcgaggcccctgag

SEQ ID NO: 1843841 - DNA, 15 bp, Homo sapiens
gcgaggcccctgagg

SEQ ID NO: 1843842 - DNA, 15 bp, Homo sapiens
cgaggcccctgagga

SEQ ID NO: 1843843 - DNA, 15 bp, Homo sapiens
gaggcccctgaggac

SEQ ID NO: 1843844 - DNA, 15 bp, Homo sapiens
aggcccctgaggact

SEQ ID NO: 1843845 - DNA, 15 bp, Homo sapiens
ggcccctgaggactc

SEQ ID NO: 1843846 - DNA, 15 bp, Homo sapiens
gcccctgaggactct

SEQ ID NO: 1843847 - DNA, 15 bp, Homo sapiens
cccctgaggactctc

SEQ ID NO: 1843848 - DNA, 15 bp, Homo sapiens
ccctgaggactctcc

SEQ ID NO: 1843849 - DNA, 15 bp, Homo sapiens
cctgaggactctcct

SEQ ID NO: 1843850 - DNA, 15 bp, Homo sapiens
ctgaggactctcctc

SEQ ID NO: 1843851 - DNA, 15 bp, Homo sapiens
tgaggactctcctca

SEQ ID NO: 1843852 - DNA, 15 bp, Homo sapiens
gaggactctcctcag

SEQ ID NO: 1843853 - DNA, 15 bp, Homo sapiens
aggactctcctcagc

SEQ ID NO: 1843854 - DNA, 15 bp, Homo sapiens
ggactctcctcagct

SEQ ID NO: 1843855 - DNA, 15 bp, Homo sapiens
gactctcctcagctt

SEQ ID NO: 1843856 - DNA, 15 bp, Homo sapiens
actctcctcagcttc

SEQ ID NO: 1843857 - DNA, 15 bp, Homo sapiens
ctctcctcagcttcc

SEQ ID NO: 1843858 - DNA, 15 bp, Homo sapiens
tctcctcagcttcct

SEQ ID NO: 1843859 - DNA, 15 bp, Homo sapiens
ctcctcagcttcctc

SEQ ID NO: 1843860 - DNA, 15 bp, Homo sapiens
tcctcagcttcctca

SEQ ID NO: 1843861 - DNA, 15 bp, Homo sapiens
cctcagcttcctcat

SEQ ID NO: 1843862 - DNA, 15 bp, Homo sapiens
ctcagcttcctcatt

SEQ ID NO: 1843863 - DNA, 15 bp, Homo sapiens
tcagcttcctcattg

SEQ ID NO: 1843864 - DNA, 15 bp, Homo sapiens
cagcttcctcattgc

SEQ ID NO: 1843865 - DNA, 15 bp, Homo sapiens
agcttcctcattgca

SEQ ID NO: 1843866 - DNA, 15 bp, Homo sapiens
gcttcctcattgcag

SEQ ID NO: 1843867 - DNA, 15 bp, Homo sapiens
cttcctcattgcagg

SEQ ID NO: 1843868 - DNA, 15 bp, Homo sapiens
ttcctcattgcaggg

SEQ ID NO: 1843869 - DNA, 15 bp, Homo sapiens
tcctcattgcagggg

SEQ ID NO: 1843870 - DNA, 15 bp, Homo sapiens
cctcattgcagggga

SEQ ID NO: 1843871 - DNA, 15 bp, Homo sapiens
ctcattgcaggggag

SEQ ID NO: 1843872 - DNA, 15 bp, Homo sapiens
tcattgcaggggaga

SEQ ID NO: 1843873 - DNA, 15 bp, Homo sapiens
cattgcaggggagag

SEQ ID NO: 1843874 - DNA, 15 bp, Homo sapiens
attgcaggggagagc

SEQ ID NO: 1843875 - DNA, 15 bp, Homo sapiens
ttgcaggggagagct

SEQ ID NO: 1843876 - DNA, 15 bp, Homo sapiens
tgcaggggagagctg

SEQ ID NO: 1843877 - DNA, 15 bp, Homo sapiens
gcaggggagagctga

SEQ ID NO: 1843878 - DNA, 15 bp, Homo sapiens
caggggagagctgag

SEQ ID NO: 1843879 - DNA, 15 bp, Homo sapiens
aggggagagctgagg

SEQ ID NO: 1843880 - DNA, 15 bp, Homo sapiens
ggggagagctgaggg

SEQ ID NO: 1843881 - DNA, 15 bp, Homo sapiens
gggagagctgaggga

SEQ ID NO: 1843882 - DNA, 15 bp, Homo sapiens
ggagagctgagggac

SEQ ID NO: 1843883 - DNA, 15 bp, Homo sapiens
gagagctgagggaca

SEQ ID NO: 1843884 - DNA, 15 bp, Homo sapiens
agagctgagggacac

SEQ ID NO: 1843885 - DNA, 15 bp, Homo sapiens
gagctgagggacacc

SEQ ID NO: 1843886 - DNA, 15 bp, Homo sapiens
agctgagggacacca

SEQ ID NO: 1843887 - DNA, 15 bp, Homo sapiens
gctgagggacaccat

SEQ ID NO: 1843888 - DNA, 15 bp, Homo sapiens
ctgagggacaccatc

SEQ ID NO: 1843889 - DNA, 15 bp, Homo sapiens
tgagggacaccatcc

SEQ ID NO: 1843890 - DNA, 15 bp, Homo sapiens
gagggacaccatcct

SEQ ID NO: 1843891 - DNA, 15 bp, Homo sapiens
agggacaccatccta

SEQ ID NO: 1843892 - DNA, 15 bp, Homo sapiens
gggacaccatcctag

SEQ ID NO: 1843893 - DNA, 15 bp, Homo sapiens
ggacaccatcctaga

SEQ ID NO: 1843894 - DNA, 15 bp, Homo sapiens
gacaccatcctagac

SEQ ID NO: 1843895 - DNA, 15 bp, Homo sapiens
acaccatcctagact

SEQ ID NO: 1843896 - DNA, 15 bp, Homo sapiens
caccatcctagactg

SEQ ID NO: 1843897 - DNA, 15 bp, Homo sapiens
accatcctagactgg

SEQ ID NO: 1843898 - DNA, 15 bp, Homo sapiens
ccatcctagactggg

SEQ ID NO: 1843899 - DNA, 15 bp, Homo sapiens
catcctagactggga

SEQ ID NO: 1843900 - DNA, 15 bp, Homo sapiens
atcctagactgggag

SEQ ID NO: 1843901 - DNA, 15 bp, Homo sapiens
tcctagactgggagg

SEQ ID NO: 1843902 - DNA, 15 bp, Homo sapiens
cctagactgggagga

SEQ ID NO: 1843903 - DNA, 15 bp, Homo sapiens
ctagactgggaggac

SEQ ID NO: 1843904 - DNA, 15 bp, Homo sapiens
tagactgggaggact

SEQ ID NO: 1843905 - DNA, 15 bp, Homo sapiens
agactgggaggactc

SEQ ID NO: 1843906 - DNA, 15 bp, Homo sapiens
gactgggaggactcc

SEQ ID NO: 1843907 - DNA, 15 bp, Homo sapiens
actgggaggactccc

SEQ ID NO: 1843908 - DNA, 15 bp, Homo sapiens
ctgggaggactccct

SEQ ID NO: 1843909 - DNA, 15 bp, Homo sapiens
tgggaggactccctg

SEQ ID NO: 1843910 - DNA, 15 bp, Homo sapiens
gggaggactccctgc

SEQ ID NO: 1843911 - DNA, 15 bp, Homo sapiens
ggaggactccctgcc

SEQ ID NO: 1843912 - DNA, 15 bp, Homo sapiens
gaggactccctgccc

SEQ ID NO: 1843913 - DNA, 15 bp, Homo sapiens
aggactccctgcccg

SEQ ID NO: 1843914 - DNA, 15 bp, Homo sapiens
ggactccctgcccga

SEQ ID NO: 1843915 - DNA, 15 bp, Homo sapiens
gactccctgcccgac

SEQ ID NO: 1843916 - DNA, 15 bp, Homo sapiens
actccctgcccgacc

SEQ ID NO: 1843917 - DNA, 15 bp, Homo sapiens
ctccctgcccgaccg

SEQ ID NO: 1843918 - DNA, 15 bp, Homo sapiens
tccctgcccgaccgg

SEQ ID NO: 1843919 - DNA, 15 bp, Homo sapiens
ccctgcccgaccggg

SEQ ID NO: 1843920 - DNA, 15 bp, Homo sapiens
cctgcccgaccggga

SEQ ID NO: 1843921 - DNA, 15 bp, Homo sapiens
ctgcccgaccgggac

SEQ ID NO: 1843922 - DNA, 15 bp, Homo sapiens
tgcccgaccgggacc

SEQ ID NO: 1843923 - DNA, 15 bp, Homo sapiens
gcccgaccgggacct

SEQ ID NO: 1843924 - DNA, 15 bp, Homo sapiens
cccgaccgggacctg

SEQ ID NO: 1843925 - DNA, 15 bp, Homo sapiens
ccgaccgggacctgg

SEQ ID NO: 1843926 - DNA, 15 bp, Homo sapiens
cgaccgggacctggc

SEQ ID NO: 1843927 - DNA, 15 bp, Homo sapiens
gaccgggacctggca

SEQ ID NO: 1843928 - DNA, 15 bp, Homo sapiens
accgggacctggcac

SEQ ID NO: 1843929 - DNA, 15 bp, Homo sapiens
ccgggacctggcact

SEQ ID NO: 1843930 - DNA, 15 bp, Homo sapiens
cgggacctggcactc

SEQ ID NO: 1843931 - DNA, 15 bp, Homo sapiens
gggacctggcactcg

SEQ ID NO: 1843932 - DNA, 15 bp, Homo sapiens
ggacctggcactcgc

SEQ ID NO: 1843933 - DNA, 15 bp, Homo sapiens
gacctggcactcgcc

SEQ ID NO: 1843934 - DNA, 15 bp, Homo sapiens
acctggcactcgccg

SEQ ID NO: 1843935 - DNA, 15 bp, Homo sapiens
cctggcactcgccga

SEQ ID NO: 1843936 - DNA, 15 bp, Homo sapiens
ctggcactcgccgat

SEQ ID NO: 1843937 - DNA, 15 bp, Homo sapiens
tggcactcgccgatg

SEQ ID NO: 1843938 - DNA, 15 bp, Homo sapiens
ggcactcgccgatga

SEQ ID NO: 1843939 - DNA, 15 bp, Homo sapiens
gcactcgccgatgag

SEQ ID NO: 1843940 - DNA, 15 bp, Homo sapiens
cactcgccgatgagg

SEQ ID NO: 1843941 - DNA, 15 bp, Homo sapiens
actcgccgatgaggc

SEQ ID NO: 1843942 - DNA, 15 bp, Homo sapiens
ctcgccgatgaggcc

SEQ ID NO: 1843943 - DNA, 15 bp, Homo sapiens
tcgccgatgaggcca

SEQ ID NO: 1843944 - DNA, 15 bp, Homo sapiens
cgccgatgaggccag

SEQ ID NO: 1843945 - DNA, 15 bp, Homo sapiens
gccgatgaggccagc

SEQ ID NO: 1843946 - DNA, 15 bp, Homo sapiens
ccgatgaggccagca

SEQ ID NO: 1843947 - DNA, 15 bp, Homo sapiens
cgatgaggccagcag

SEQ ID NO: 1843948 - DNA, 15 bp, Homo sapiens
gatgaggccagcagg

SEQ ID NO: 1843949 - DNA, 15 bp, Homo sapiens
atgaggccagcaggt

SEQ ID NO: 1843950 - DNA, 15 bp, Homo sapiens
tgaggccagcaggtc

SEQ ID NO: 1843951 - DNA, 15 bp, Homo sapiens
gaggccagcaggtct

SEQ ID NO: 1843952 - DNA, 15 bp, Homo sapiens
aggccagcaggtctg

SEQ ID NO: 1843953 - DNA, 15 bp, Homo sapiens
ggccagcaggtctga

SEQ ID NO: 1843954 - DNA, 15 bp, Homo sapiens
gccagcaggtctgac

SEQ ID NO: 1843955 - DNA, 15 bp, Homo sapiens
ccagcaggtctgacc

SEQ ID NO: 1843956 - DNA, 15 bp, Homo sapiens
cagcaggtctgaccc

SEQ ID NO: 1843957 - DNA, 15 bp, Homo sapiens
agcaggtctgacccc

SEQ ID NO: 1843958 - DNA, 15 bp, Homo sapiens
gcaggtctgaccccc

SEQ ID NO: 1843959 - DNA, 15 bp, Homo sapiens
caggtctgacccccc

SEQ ID NO: 1843960 - DNA, 15 bp, Homo sapiens
aggtctgacccccca

SEQ ID NO: 1843961 - DNA, 15 bp, Homo sapiens
ggtctgaccccccac

SEQ ID NO: 1843962 - DNA, 15 bp, Homo sapiens
gtctgaccccccacc

SEQ ID NO: 1843963 - DNA, 15 bp, Homo sapiens
tctgaccccccaccc

SEQ ID NO: 1843964 - DNA, 15 bp, Homo sapiens
ctgaccccccacccc

SEQ ID NO: 1843965 - DNA, 15 bp, Homo sapiens
tgaccccccaccccc

SEQ ID NO: 1843966 - DNA, 15 bp, Homo sapiens
gaccccccaccccca

SEQ ID NO: 1843967 - DNA, 15 bp, Homo sapiens
accccccacccccag

SEQ ID NO: 1843968 - DNA, 15 bp, Homo sapiens
ccccccacccccagg

SEQ ID NO: 1843969 - DNA, 15 bp, Homo sapiens
cccccacccccaggg

SEQ ID NO: 1843970 - DNA, 15 bp, Homo sapiens
ccccacccccaggga

SEQ ID NO: 1843971 - DNA, 15 bp, Homo sapiens
cccacccccagggag

SEQ ID NO: 1843972 - DNA, 15 bp, Homo sapiens
ccacccccagggagc

SEQ ID NO: 1843973 - DNA, 15 bp, Homo sapiens
cacccccagggagcc

SEQ ID NO: 1843974 - DNA, 15 bp, Homo sapiens
acccccagggagccc

SEQ ID NO: 1843975 - DNA, 15 bp, Homo sapiens
cccccagggagccca

SEQ ID NO: 1843976 - DNA, 15 bp, Homo sapiens
ccccagggagcccat

SEQ ID NO: 1843977 - DNA, 15 bp, Homo sapiens
cccagggagcccatg

SEQ ID NO: 1843978 - DNA, 15 bp, Homo sapiens
ccagggagcccatgg

SEQ ID NO: 1843979 - DNA, 15 bp, Homo sapiens
cagggagcccatggt

SEQ ID NO: 1843980 - DNA, 15 bp, Homo sapiens
agggagcccatggtg

SEQ ID NO: 1843981 - DNA, 15 bp, Homo sapiens
gggagcccatggtgg

SEQ ID NO: 1843982 - DNA, 15 bp, Homo sapiens
ggagcccatggtggg

SEQ ID NO: 1843983 - DNA, 15 bp, Homo sapiens
gagcccatggtgggg

SEQ ID NO: 1843984 - DNA, 15 bp, Homo sapiens
agcccatggtggggc

SEQ ID NO: 1843985 - DNA, 15 bp, Homo sapiens
gcccatggtggggcg

SEQ ID NO: 1843986 - DNA, 15 bp, Homo sapiens
cccatggtggggcgg

SEQ ID NO: 1843987 - DNA, 15 bp, Homo sapiens
ccatggtggggcggg

SEQ ID NO: 1843988 - DNA, 15 bp, Homo sapiens
catggtggggcgggg

SEQ ID NO: 1843989 - DNA, 15 bp, Homo sapiens
atggtggggcggggc

SEQ ID NO: 1843990 - DNA, 15 bp, Homo sapiens
tggtggggcggggcg

SEQ ID NO: 1843991 - DNA, 15 bp, Homo sapiens
ggtggggcggggcgg

SEQ ID NO: 1843992 - DNA, 15 bp, Homo sapiens
gtggggcggggcggg

SEQ ID NO: 1843993 - DNA, 15 bp, Homo sapiens
tggggcggggcggga

SEQ ID NO: 1843994 - DNA, 15 bp, Homo sapiens
ggggcggggcgggac

SEQ ID NO: 1843995 - DNA, 15 bp, Homo sapiens
gggcggggcgggacg

SEQ ID NO: 1843996 - DNA, 15 bp, Homo sapiens
ggcggggcgggacga

SEQ ID NO: 1843997 - DNA, 15 bp, Homo sapiens
gcggggcgggacgac

SEQ ID NO: 1843998 - DNA, 15 bp, Homo sapiens
cggggcgggacgaca

SEQ ID NO: 1843999 - DNA, 15 bp, Homo sapiens
ggggcgggacgacag

SEQ ID NO: 1844000 - DNA, 15 bp, Homo sapiens
gggcgggacgacagc

SEQ ID NO: 1844001 - DNA, 15 bp, Homo sapiens
ggcgggacgacagca

SEQ ID NO: 1844002 - DNA, 15 bp, Homo sapiens
gcgggacgacagcag

SEQ ID NO: 1844003 - DNA, 15 bp, Homo sapiens
cgggacgacagcaga

SEQ ID NO: 1844004 - DNA, 15 bp, Homo sapiens
gggacgacagcagaa

SEQ ID NO: 1844005 - DNA, 15 bp, Homo sapiens
ggacgacagcagaaa

SEQ ID NO: 1844006 - DNA, 15 bp, Homo sapiens
gacgacagcagaaac

SEQ ID NO: 1844007 - DNA, 15 bp, Homo sapiens
acgacagcagaaaca

SEQ ID NO: 1844008 - DNA, 15 bp, Homo sapiens
cgacagcagaaacac

SEQ ID NO: 1844009 - DNA, 15 bp, Homo sapiens
gacagcagaaacaca

SEQ ID NO: 1844010 - DNA, 15 bp, Homo sapiens
acagcagaaacacag

SEQ ID NO: 1844011 - DNA, 15 bp, Homo sapiens
cagcagaaacacagc

SEQ ID NO: 1844012 - DNA, 15 bp, Homo sapiens
agcagaaacacagcc

SEQ ID NO: 1844013 - DNA, 15 bp, Homo sapiens
gcagaaacacagcca

SEQ ID NO: 1844014 - DNA, 15 bp, Homo sapiens
cagaaacacagccag

SEQ ID NO: 1844015 - DNA, 15 bp, Homo sapiens
agaaacacagccagc

SEQ ID NO: 1844016 - DNA, 15 bp, Homo sapiens
gaaacacagccagct

SEQ ID NO: 1844017 - DNA, 15 bp, Homo sapiens
aaacacagccagctc

SEQ ID NO: 1844018 - DNA, 15 bp, Homo sapiens
aacacagccagctcc

SEQ ID NO: 1844019 - DNA, 15 bp, Homo sapiens
acacagccagctcca

SEQ ID NO: 1844020 - DNA, 15 bp, Homo sapiens
cacagccagctccag

SEQ ID NO: 1844021 - DNA, 15 bp, Homo sapiens
acagccagctccagc

SEQ ID NO: 1844022 - DNA, 15 bp, Homo sapiens
cagccagctccagca

SEQ ID NO: 1844023 - DNA, 15 bp, Homo sapiens
agccagctccagcat

SEQ ID NO: 1844024 - DNA, 15 bp, Homo sapiens
gccagctccagcatg

SEQ ID NO: 1844025 - DNA, 15 bp, Homo sapiens
ccagctccagcatgg

SEQ ID NO: 1844026 - DNA, 15 bp, Homo sapiens
cagctccagcatggg

SEQ ID NO: 1844027 - DNA, 15 bp, Homo sapiens
agctccagcatggga

SEQ ID NO: 1844028 - DNA, 15 bp, Homo sapiens
gctccagcatgggac

SEQ ID NO: 1844029 - DNA, 15 bp, Homo sapiens
ctccagcatgggaca

SEQ ID NO: 1844030 - DNA, 15 bp, Homo sapiens
tccagcatgggacag

SEQ ID NO: 1844031 - DNA, 15 bp, Homo sapiens
ccagcatgggacagt

SEQ ID NO: 1844032 - DNA, 15 bp, Homo sapiens
cagcatgggacagtg

SEQ ID NO: 1844033 - DNA, 15 bp, Homo sapiens
agcatgggacagtgg

SEQ ID NO: 1844034 - DNA, 15 bp, Homo sapiens
gcatgggacagtggc

SEQ ID NO: 1844035 - DNA, 15 bp, Homo sapiens
catgggacagtggct

SEQ ID NO: 1844036 - DNA, 15 bp, Homo sapiens
atgggacagtggctg

SEQ ID NO: 1844037 - DNA, 15 bp, Homo sapiens
tgggacagtggctga

SEQ ID NO: 1844038 - DNA, 15 bp, Homo sapiens
gggacagtggctgag

SEQ ID NO: 1844039 - DNA, 15 bp, Homo sapiens
ggacagtggctgagg

SEQ ID NO: 1844040 - DNA, 15 bp, Homo sapiens
gacagtggctgaggc

SEQ ID NO: 1844041 - DNA, 15 bp, Homo sapiens
acagtggctgaggct

SEQ ID NO: 1844042 - DNA, 15 bp, Homo sapiens
cagtggctgaggctc

SEQ ID NO: 1844043 - DNA, 15 bp, Homo sapiens
agtggctgaggctca

SEQ ID NO: 1844044 - DNA, 15 bp, Homo sapiens
gtggctgaggctcac

SEQ ID NO: 1844045 - DNA, 15 bp, Homo sapiens
tggctgaggctcaca

SEQ ID NO: 1844046 - DNA, 15 bp, Homo sapiens
ggctgaggctcacag

SEQ ID NO: 1844047 - DNA, 15 bp, Homo sapiens
gctgaggctcacagg

SEQ ID NO: 1844048 - DNA, 15 bp, Homo sapiens
ctgaggctcacaggc

SEQ ID NO: 1844049 - DNA, 15 bp, Homo sapiens
tgaggctcacaggca

SEQ ID NO: 1844050 - DNA, 15 bp, Homo sapiens
gaggctcacaggcag

SEQ ID NO: 1844051 - DNA, 15 bp, Homo sapiens
aggctcacaggcagt

SEQ ID NO: 1844052 - DNA, 15 bp, Homo sapiens
ggctcacaggcagtg

SEQ ID NO: 1844053 - DNA, 15 bp, Homo sapiens
gctcacaggcagtga

SEQ ID NO: 1844054 - DNA, 15 bp, Homo sapiens
ctcacaggcagtgag

SEQ ID NO: 1844055 - DNA, 15 bp, Homo sapiens
tcacaggcagtgagg

SEQ ID NO: 1844056 - DNA, 15 bp, Homo sapiens
cacaggcagtgaggg

SEQ ID NO: 1844057 - DNA, 15 bp, Homo sapiens
acaggcagtgagggg

SEQ ID NO: 1844058 - DNA, 15 bp, Homo sapiens
caggcagtgagggga

SEQ ID NO: 1844059 - DNA, 15 bp, Homo sapiens
aggcagtgaggggag

SEQ ID NO: 1844060 - DNA, 15 bp, Homo sapiens
ggcagtgaggggagg

SEQ ID NO: 1844061 - DNA, 15 bp, Homo sapiens
gcagtgaggggaggc

SEQ ID NO: 1844062 - DNA, 15 bp, Homo sapiens
cagtgaggggaggct

SEQ ID NO: 1844063 - DNA, 15 bp, Homo sapiens
agtgaggggaggctt

SEQ ID NO: 1844064 - DNA, 15 bp, Homo sapiens
gtgaggggaggcttc

SEQ ID NO: 1844065 - DNA, 15 bp, Homo sapiens
tgaggggaggcttcc

SEQ ID NO: 1844066 - DNA, 15 bp, Homo sapiens
gaggggaggcttcct

SEQ ID NO: 1844067 - DNA, 15 bp, Homo sapiens
aggggaggcttcctg

SEQ ID NO: 1844068 - DNA, 15 bp, Homo sapiens
ggggaggcttcctgg

SEQ ID NO: 1844069 - DNA, 15 bp, Homo sapiens
gggaggcttcctgga

SEQ ID NO: 1844070 - DNA, 15 bp, Homo sapiens
ggaggcttcctggag

SEQ ID NO: 1844071 - DNA, 15 bp, Homo sapiens
gaggcttcctggagc

SEQ ID NO: 1844072 - DNA, 15 bp, Homo sapiens
aggcttcctggagca

SEQ ID NO: 1844073 - DNA, 15 bp, Homo sapiens
ggcttcctggagcag

SEQ ID NO: 1844074 - DNA, 15 bp, Homo sapiens
gcttcctggagcagg

SEQ ID NO: 1844075 - DNA, 15 bp, Homo sapiens
cttcctggagcaggt

SEQ ID NO: 1844076 - DNA, 15 bp, Homo sapiens
ttcctggagcaggtg

SEQ ID NO: 1844077 - DNA, 15 bp, Homo sapiens
tcctggagcaggtgg

SEQ ID NO: 1844078 - DNA, 15 bp, Homo sapiens
cctggagcaggtggg

SEQ ID NO: 1844079 - DNA, 15 bp, Homo sapiens
ctggagcaggtgggc

SEQ ID NO: 1844080 - DNA, 15 bp, Homo sapiens
tggagcaggtgggcc

SEQ ID NO: 1844081 - DNA, 15 bp, Homo sapiens
ggagcaggtgggcca

SEQ ID NO: 1844082 - DNA, 15 bp, Homo sapiens
gagcaggtgggccag

SEQ ID NO: 1844083 - DNA, 15 bp, Homo sapiens
agcaggtgggccagg

SEQ ID NO: 1844084 - DNA, 15 bp, Homo sapiens
gcaggtgggccaggc

SEQ ID NO: 1844085 - DNA, 15 bp, Homo sapiens
caggtgggccaggcc

SEQ ID NO: 1844086 - DNA, 15 bp, Homo sapiens
aggtgggccaggcca

SEQ ID NO: 1844087 - DNA, 15 bp, Homo sapiens
ggtgggccaggccag

SEQ ID NO: 1844088 - DNA, 15 bp, Homo sapiens
gtgggccaggccagg

SEQ ID NO: 1844089 - DNA, 15 bp, Homo sapiens
tgggccaggccaggg

SEQ ID NO: 1844090 - DNA, 15 bp, Homo sapiens
gggccaggccagggg

SEQ ID NO: 1844091 - DNA, 15 bp, Homo sapiens
ggccaggccaggggc

SEQ ID NO: 1844092 - DNA, 15 bp, Homo sapiens
gccaggccaggggct

SEQ ID NO: 1844093 - DNA, 15 bp, Homo sapiens
ccaggccaggggctg

SEQ ID NO: 1844094 - DNA, 15 bp, Homo sapiens
caggccaggggctgc

SEQ ID NO: 1844095 - DNA, 15 bp, Homo sapiens
aggccaggggctgca

SEQ ID NO: 1844096 - DNA, 15 bp, Homo sapiens
ggccaggggctgcac

SEQ ID NO: 1844097 - DNA, 15 bp, Homo sapiens
gccaggggctgcaca

SEQ ID NO: 1844098 - DNA, 15 bp, Homo sapiens
ccaggggctgcacac

SEQ ID NO: 1844099 - DNA, 15 bp, Homo sapiens
ggggctgcacacacg

SEQ ID NO: 1844100 - DNA, 15 bp, Homo sapiens
gggctgcacacacgc

SEQ ID NO: 1844101 - DNA, 15 bp, Homo sapiens
ggctgcacacacgca

SEQ ID NO: 1844102 - DNA, 15 bp, Homo sapiens
gctgcacacacgcac

SEQ ID NO: 1844103 - DNA, 15 bp, Homo sapiens
ctgcacacacgcact

SEQ ID NO: 1844104 - DNA, 15 bp, Homo sapiens
tgcacacacgcactc

SEQ ID NO: 1844105 - DNA, 15 bp, Homo sapiens
gcacacacgcactca

SEQ ID NO: 1844106 - DNA, 15 bp, Homo sapiens
cacacacgcactcac

SEQ ID NO: 1844107 - DNA, 15 bp, Homo sapiens
acacacgcactcaca

SEQ ID NO: 1844108 - DNA, 15 bp, Homo sapiens
cacacgcactcacac

SEQ ID NO: 1844109 - DNA, 15 bp, Homo sapiens
acacgcactcacaca

SEQ ID NO: 1844110 - DNA, 15 bp, Homo sapiens
cacgcactcacacac

SEQ ID NO: 1844111 - DNA, 15 bp, Homo sapiens
acgcactcacacaca

SEQ ID NO: 1844112 - DNA, 15 bp, Homo sapiens
cgcactcacacacac

SEQ ID NO: 1844113 - DNA, 15 bp, Homo sapiens
gcactcacacacact

SEQ ID NO: 1844114 - DNA, 15 bp, Homo sapiens
actcacacacactcg

SEQ ID NO: 1844115 - DNA, 15 bp, Homo sapiens
ctcacacacactcgt

SEQ ID NO: 1844116 - DNA, 15 bp, Homo sapiens
tcacacacactcgtc

SEQ ID NO: 1844117 - DNA, 15 bp, Homo sapiens
cacacacactcgtca

SEQ ID NO: 1844118 - DNA, 15 bp, Homo sapiens
acacacactcgtcac

SEQ ID NO: 1844119 - DNA, 15 bp, Homo sapiens
cacacactcgtcacc

SEQ ID NO: 1844120 - DNA, 15 bp, Homo sapiens
acacactcgtcacct

SEQ ID NO: 1844121 - DNA, 15 bp, Homo sapiens
cacactcgtcacctc

SEQ ID NO: 1844122 - DNA, 15 bp, Homo sapiens
acactcgtcacctca

SEQ ID NO: 1844123 - DNA, 15 bp, Homo sapiens
cactcgtcacctcat

SEQ ID NO: 1844124 - DNA, 15 bp, Homo sapiens
actcgtcacctcatg

SEQ ID NO: 1844125 - DNA, 15 bp, Homo sapiens
ctcgtcacctcatgg

SEQ ID NO: 1844126 - DNA, 15 bp, Homo sapiens
tcgtcacctcatggc

SEQ ID NO: 1844127 - DNA, 15 bp, Homo sapiens
cgtcacctcatggct

SEQ ID NO: 1844128 - DNA, 15 bp, Homo sapiens
gtcacctcatggctc

SEQ ID NO: 1844129 - DNA, 15 bp, Homo sapiens
tcacctcatggctct

SEQ ID NO: 1844130 - DNA, 15 bp, Homo sapiens
cacctcatggctctg

SEQ ID NO: 1844131 - DNA, 15 bp, Homo sapiens
acctcatggctctgg

SEQ ID NO: 1844132 - DNA, 15 bp, Homo sapiens
cctcatggctctggg

SEQ ID NO: 1844133 - DNA, 15 bp, Homo sapiens
ctcatggctctgggt

SEQ ID NO: 1844134 - DNA, 15 bp, Homo sapiens
tcatggctctgggtg

SEQ ID NO: 1844135 - DNA, 15 bp, Homo sapiens
catggctctgggtgg

SEQ ID NO: 1844136 - DNA, 15 bp, Homo sapiens
atggctctgggtggg

SEQ ID NO: 1844137 - DNA, 15 bp, Homo sapiens
tggctctgggtgggt

SEQ ID NO: 1844138 - DNA, 15 bp, Homo sapiens
ggctctgggtgggtg

SEQ ID NO: 1844139 - DNA, 15 bp, Homo sapiens
gctctgggtgggtgc

SEQ ID NO: 1844140 - DNA, 15 bp, Homo sapiens
ctctgggtgggtgct

SEQ ID NO: 1844141 - DNA, 15 bp, Homo sapiens
tctgggtgggtgcta

SEQ ID NO: 1844142 - DNA, 15 bp, Homo sapiens
ctgggtgggtgctac

SEQ ID NO: 1844143 - DNA, 15 bp, Homo sapiens
tgggtgggtgctaca

SEQ ID NO: 1844144 - DNA, 15 bp, Homo sapiens
gggtgggtgctacac

SEQ ID NO: 1844145 - DNA, 15 bp, Homo sapiens
ggtgggtgctacaca

SEQ ID NO: 1844146 - DNA, 15 bp, Homo sapiens
gtgggtgctacacaa

SEQ ID NO: 1844147 - DNA, 15 bp, Homo sapiens
tgggtgctacacaag

SEQ ID NO: 1844148 - DNA, 15 bp, Homo sapiens
gggtgctacacaagg

SEQ ID NO: 1844149 - DNA, 15 bp, Homo sapiens
ggtgctacacaagga

SEQ ID NO: 1844150 - DNA, 15 bp, Homo sapiens
gtgctacacaaggaa

SEQ ID NO: 1844151 - DNA, 15 bp, Homo sapiens
tgctacacaaggaaa

SEQ ID NO: 1844152 - DNA, 15 bp, Homo sapiens
gctacacaaggaaac

SEQ ID NO: 1844153 - DNA, 15 bp, Homo sapiens
ctacacaaggaaacc

SEQ ID NO: 1844154 - DNA, 15 bp, Homo sapiens
tacacaaggaaacca

SEQ ID NO: 1844155 - DNA, 15 bp, Homo sapiens
acacaaggaaaccaa

SEQ ID NO: 1844156 - DNA, 15 bp, Homo sapiens
cacaaggaaaccaag

SEQ ID NO: 1844157 - DNA, 15 bp, Homo sapiens
acaaggaaaccaagg

SEQ ID NO: 1844158 - DNA, 15 bp, Homo sapiens
caaggaaaccaaggc

SEQ ID NO: 1844159 - DNA, 15 bp, Homo sapiens
aaggaaaccaaggct

SEQ ID NO: 1844160 - DNA, 15 bp, Homo sapiens
aggaaaccaaggctt

SEQ ID NO: 1844161 - DNA, 15 bp, Homo sapiens
ggaaaccaaggcttc

SEQ ID NO: 1844162 - DNA, 15 bp, Homo sapiens
gaaaccaaggcttcc

SEQ ID NO: 1844163 - DNA, 15 bp, Homo sapiens
aaaccaaggcttccg

SEQ ID NO: 1844164 - DNA, 15 bp, Homo sapiens
aaccaaggcttccgc

SEQ ID NO: 1844165 - DNA, 15 bp, Homo sapiens
accaaggcttccgcc

SEQ ID NO: 1844166 - DNA, 15 bp, Homo sapiens
ccaaggcttccgcca

SEQ ID NO: 1844167 - DNA, 15 bp, Homo sapiens
caaggcttccgccag

SEQ ID NO: 1844168 - DNA, 15 bp, Homo sapiens
aaggcttccgccagg

SEQ ID NO: 1844169 - DNA, 15 bp, Homo sapiens
aggcttccgccaggt

SEQ ID NO: 1844170 - DNA, 15 bp, Homo sapiens
ggcttccgccaggtg

SEQ ID NO: 1844171 - DNA, 15 bp, Homo sapiens
gcttccgccaggtgt

SEQ ID NO: 1844172 - DNA, 15 bp, Homo sapiens
cttccgccaggtgtc

SEQ ID NO: 1844173 - DNA, 15 bp, Homo sapiens
ttccgccaggtgtct

SEQ ID NO: 1844174 - DNA, 15 bp, Homo sapiens
tccgccaggtgtctc

SEQ ID NO: 1844175 - DNA, 15 bp, Homo sapiens
ccgccaggtgtctcc

SEQ ID NO: 1844176 - DNA, 15 bp, Homo sapiens
cgccaggtgtctcct

SEQ ID NO: 1844177 - DNA, 15 bp, Homo sapiens
gccaggtgtctcctc

SEQ ID NO: 1844178 - DNA, 15 bp, Homo sapiens
ccaggtgtctcctct

SEQ ID NO: 1844179 - DNA, 15 bp, Homo sapiens
caggtgtctcctcta

SEQ ID NO: 1844180 - DNA, 15 bp, Homo sapiens
aggtgtctcctctat

SEQ ID NO: 1844181 - DNA, 15 bp, Homo sapiens
ggtgtctcctctatc

SEQ ID NO: 1844182 - DNA, 15 bp, Homo sapiens
gtgtctcctctatcc

SEQ ID NO: 1844183 - DNA, 15 bp, Homo sapiens
tgtctcctctatcca

SEQ ID NO: 1844184 - DNA, 15 bp, Homo sapiens
gtctcctctatccag

SEQ ID NO: 1844185 - DNA, 15 bp, Homo sapiens
tctcctctatccagt

SEQ ID NO: 1844186 - DNA, 15 bp, Homo sapiens
ctcctctatccagtg

SEQ ID NO: 1844187 - DNA, 15 bp, Homo sapiens
tcctctatccagtgc

SEQ ID NO: 1844188 - DNA, 15 bp, Homo sapiens
cctctatccagtgct

SEQ ID NO: 1844189 - DNA, 15 bp, Homo sapiens
ctctatccagtgctg

SEQ ID NO: 1844190 - DNA, 15 bp, Homo sapiens
tctatccagtgctgc

SEQ ID NO: 1844191 - DNA, 15 bp, Homo sapiens
ctatccagtgctgcc

SEQ ID NO: 1844192 - DNA, 15 bp, Homo sapiens
tatccagtgctgccc

SEQ ID NO: 1844193 - DNA, 15 bp, Homo sapiens
atccagtgctgccca

SEQ ID NO: 1844194 - DNA, 15 bp, Homo sapiens
tccagtgctgcccag

SEQ ID NO: 1844195 - DNA, 15 bp, Homo sapiens
ccagtgctgcccagc

SEQ ID NO: 1844196 - DNA, 15 bp, Homo sapiens
cagtgctgcccagcc

SEQ ID NO: 1844197 - DNA, 15 bp, Homo sapiens
agtgctgcccagccg

SEQ ID NO: 1844198 - DNA, 15 bp, Homo sapiens
gtgctgcccagccgg

SEQ ID NO: 1844199 - DNA, 15 bp, Homo sapiens
tgctgcccagccggg

SEQ ID NO: 1844200 - DNA, 15 bp, Homo sapiens
gctgcccagccggga

SEQ ID NO: 1844201 - DNA, 15 bp, Homo sapiens
ctgcccagccgggag

SEQ ID NO: 1844202 - DNA, 15 bp, Homo sapiens
tgcccagccgggagg

SEQ ID NO: 1844203 - DNA, 15 bp, Homo sapiens
gcccagccgggaggt

SEQ ID NO: 1844204 - DNA, 15 bp, Homo sapiens
cccagccgggaggtg

SEQ ID NO: 1844205 - DNA, 15 bp, Homo sapiens
ccagccgggaggtga

SEQ ID NO: 1844206 - DNA, 15 bp, Homo sapiens
cagccgggaggtgac

SEQ ID NO: 1844207 - DNA, 15 bp, Homo sapiens
agccgggaggtgacc

SEQ ID NO: 1844208 - DNA, 15 bp, Homo sapiens
gccgggaggtgaccg

SEQ ID NO: 1844209 - DNA, 15 bp, Homo sapiens
ccgggaggtgaccga

SEQ ID NO: 1844210 - DNA, 15 bp, Homo sapiens
cgggaggtgaccgag

SEQ ID NO: 1844211 - DNA, 15 bp, Homo sapiens
gggaggtgaccgagc

SEQ ID NO: 1844212 - DNA, 15 bp, Homo sapiens
ggaggtgaccgagcc

SEQ ID NO: 1844213 - DNA, 15 bp, Homo sapiens
gaggtgaccgagcca

SEQ ID NO: 1844214 - DNA, 15 bp, Homo sapiens
aggtgaccgagccag

SEQ ID NO: 1844215 - DNA, 15 bp, Homo sapiens
ggtgaccgagccagg

SEQ ID NO: 1844216 - DNA, 15 bp, Homo sapiens
gtgaccgagccaggg

SEQ ID NO: 1844217 - DNA, 15 bp, Homo sapiens
tgaccgagccagggt

SEQ ID NO: 1844218 - DNA, 15 bp, Homo sapiens
gaccgagccagggtc

SEQ ID NO: 1844219 - DNA, 15 bp, Homo sapiens
accgagccagggtcc

SEQ ID NO: 1844220 - DNA, 15 bp, Homo sapiens
ccgagccagggtccc

SEQ ID NO: 1844221 - DNA, 15 bp, Homo sapiens
cgagccagggtccca

SEQ ID NO: 1844222 - DNA, 15 bp, Homo sapiens
gagccagggtcccac

SEQ ID NO: 1844223 - DNA, 15 bp, Homo sapiens
agccagggtcccacc

SEQ ID NO: 1844224 - DNA, 15 bp, Homo sapiens
gccagggtcccaccc

SEQ ID NO: 1844225 - DNA, 15 bp, Homo sapiens
ccagggtcccaccct

SEQ ID NO: 1844226 - DNA, 15 bp, Homo sapiens
cagggtcccacccta

SEQ ID NO: 1844227 - DNA, 15 bp, Homo sapiens
agggtcccaccctag

SEQ ID NO: 1844228 - DNA, 15 bp, Homo sapiens
gggtcccaccctagg

SEQ ID NO: 1844229 - DNA, 15 bp, Homo sapiens
ggtcccaccctaggt

SEQ ID NO: 1844230 - DNA, 15 bp, Homo sapiens
gtcccaccctaggtg

SEQ ID NO: 1844231 - DNA, 15 bp, Homo sapiens
tcccaccctaggtgt

SEQ ID NO: 1844232 - DNA, 15 bp, Homo sapiens
cccaccctaggtgtc

SEQ ID NO: 1844233 - DNA, 15 bp, Homo sapiens
ccaccctaggtgtcc

SEQ ID NO: 1844234 - DNA, 15 bp, Homo sapiens
caccctaggtgtcca

SEQ ID NO: 1844235 - DNA, 15 bp, Homo sapiens
accctaggtgtccaa

SEQ ID NO: 1844236 - DNA, 15 bp, Homo sapiens
ccctaggtgtccaag

SEQ ID NO: 1844237 - DNA, 15 bp, Homo sapiens
cctaggtgtccaagc

SEQ ID NO: 1844238 - DNA, 15 bp, Homo sapiens
ctaggtgtccaagct

SEQ ID NO: 1844239 - DNA, 15 bp, Homo sapiens
taggtgtccaagctc

SEQ ID NO: 1844240 - DNA, 15 bp, Homo sapiens
aggtgtccaagctct

SEQ ID NO: 1844241 - DNA, 15 bp, Homo sapiens
ggtgtccaagctctt

SEQ ID NO: 1844242 - DNA, 15 bp, Homo sapiens
gtgtccaagctctta

SEQ ID NO: 1844243 - DNA, 15 bp, Homo sapiens
tgtccaagctcttac

SEQ ID NO: 1844244 - DNA, 15 bp, Homo sapiens
gtccaagctcttacc

SEQ ID NO: 1844245 - DNA, 15 bp, Homo sapiens
tccaagctcttacca

SEQ ID NO: 1844246 - DNA, 15 bp, Homo sapiens
ccaagctcttaccac

SEQ ID NO: 1844247 - DNA, 15 bp, Homo sapiens
caagctcttaccaca

SEQ ID NO: 1844248 - DNA, 15 bp, Homo sapiens
aagctcttaccacac

SEQ ID NO: 1844249 - DNA, 15 bp, Homo sapiens
agctcttaccacact

SEQ ID NO: 1844250 - DNA, 15 bp, Homo sapiens
gctcttaccacactg

SEQ ID NO: 1844251 - DNA, 15 bp, Homo sapiens
ctcttaccacactgt

SEQ ID NO: 1844252 - DNA, 15 bp, Homo sapiens
tcttaccacactgtg

SEQ ID NO: 1844253 - DNA, 15 bp, Homo sapiens
cttaccacactgtga

SEQ ID NO: 1844254 - DNA, 15 bp, Homo sapiens
ttaccacactgtgat

SEQ ID NO: 1844255 - DNA, 15 bp, Homo sapiens
taccacactgtgata

SEQ ID NO: 1844256 - DNA, 15 bp, Homo sapiens
accacactgtgatac

SEQ ID NO: 1844257 - DNA, 15 bp, Homo sapiens
ccacactgtgatact

SEQ ID NO: 1844258 - DNA, 15 bp, Homo sapiens
cacactgtgatactc

SEQ ID NO: 1844259 - DNA, 15 bp, Homo sapiens
acactgtgatactcc

SEQ ID NO: 1844260 - DNA, 15 bp, Homo sapiens
cactgtgatactccc

SEQ ID NO: 1844261 - DNA, 15 bp, Homo sapiens
actgtgatactcccc

SEQ ID NO: 1844262 - DNA, 15 bp, Homo sapiens
ctgtgatactccccg

SEQ ID NO: 1844263 - DNA, 15 bp, Homo sapiens
tgtgatactccccgg

SEQ ID NO: 1844264 - DNA, 15 bp, Homo sapiens
gtgatactccccgga

SEQ ID NO: 1844265 - DNA, 15 bp, Homo sapiens
tgatactccccggaa

SEQ ID NO: 1844266 - DNA, 15 bp, Homo sapiens
gatactccccggaag

SEQ ID NO: 1844267 - DNA, 15 bp, Homo sapiens
atactccccggaagt

SEQ ID NO: 1844268 - DNA, 15 bp, Homo sapiens
tactccccggaagtg

SEQ ID NO: 1844269 - DNA, 15 bp, Homo sapiens
actccccggaagtgt

SEQ ID NO: 1844270 - DNA, 15 bp, Homo sapiens
ctccccggaagtgtc

SEQ ID NO: 1844271 - DNA, 15 bp, Homo sapiens
tccccggaagtgtct

SEQ ID NO: 1844272 - DNA, 15 bp, Homo sapiens
ccccggaagtgtcta

SEQ ID NO: 1844273 - DNA, 15 bp, Homo sapiens
cccggaagtgtctaa

SEQ ID NO: 1844274 - DNA, 15 bp, Homo sapiens
ccggaagtgtctaag

SEQ ID NO: 1844275 - DNA, 15 bp, Homo sapiens
cggaagtgtctaagg

SEQ ID NO: 1844276 - DNA, 15 bp, Homo sapiens
ggaagtgtctaaggg

SEQ ID NO: 1844277 - DNA, 15 bp, Homo sapiens
gaagtgtctaagggc

SEQ ID NO: 1844278 - DNA, 15 bp, Homo sapiens
aagtgtctaagggcc

SEQ ID NO: 1844279 - DNA, 15 bp, Homo sapiens
agtgtctaagggccc

SEQ ID NO: 1844280 - DNA, 15 bp, Homo sapiens
gtgtctaagggcccg

SEQ ID NO: 1844281 - DNA, 15 bp, Homo sapiens
tgtctaagggcccgc

SEQ ID NO: 1844282 - DNA, 15 bp, Homo sapiens
gtctaagggcccgcc

SEQ ID NO: 1844283 - DNA, 15 bp, Homo sapiens
tctaagggcccgccc

SEQ ID NO: 1844284 - DNA, 15 bp, Homo sapiens
ctaagggcccgccca

SEQ ID NO: 1844285 - DNA, 15 bp, Homo sapiens
taagggcccgcccag

SEQ ID NO: 1844286 - DNA, 15 bp, Homo sapiens
aagggcccgcccaga

SEQ ID NO: 1844287 - DNA, 15 bp, Homo sapiens
agggcccgcccagat

SEQ ID NO: 1844288 - DNA, 15 bp, Homo sapiens
gggcccgcccagatc

SEQ ID NO: 1844289 - DNA, 15 bp, Homo sapiens
ggcccgcccagatca

SEQ ID NO: 1844290 - DNA, 15 bp, Homo sapiens
gcccgcccagatcaa

SEQ ID NO: 1844291 - DNA, 15 bp, Homo sapiens
cccgcccagatcaat

SEQ ID NO: 1844292 - DNA, 15 bp, Homo sapiens
ccgcccagatcaatg

SEQ ID NO: 1844293 - DNA, 15 bp, Homo sapiens
cgcccagatcaatga

SEQ ID NO: 1844294 - DNA, 15 bp, Homo sapiens
gcccagatcaatgac

SEQ ID NO: 1844295 - DNA, 15 bp, Homo sapiens
cccagatcaatgacc

SEQ ID NO: 1844296 - DNA, 15 bp, Homo sapiens
ccagatcaatgaccc

SEQ ID NO: 1844297 - DNA, 15 bp, Homo sapiens
cagatcaatgacccc

SEQ ID NO: 1844298 - DNA, 15 bp, Homo sapiens
agatcaatgaccccg

SEQ ID NO: 1844299 - DNA, 15 bp, Homo sapiens
gatcaatgaccccgc

SEQ ID NO: 1844300 - DNA, 15 bp, Homo sapiens
atcaatgaccccgcc

SEQ ID NO: 1844301 - DNA, 15 bp, Homo sapiens
tcaatgaccccgcca

SEQ ID NO: 1844302 - DNA, 15 bp, Homo sapiens
caatgaccccgccaa

SEQ ID NO: 1844303 - DNA, 15 bp, Homo sapiens
aatgaccccgccaac

SEQ ID NO: 1844304 - DNA, 15 bp, Homo sapiens
atgaccccgccaacg

SEQ ID NO: 1844305 - DNA, 15 bp, Homo sapiens
tgaccccgccaacgg

SEQ ID NO: 1844306 - DNA, 15 bp, Homo sapiens
gaccccgccaacgga

SEQ ID NO: 1844307 - DNA, 15 bp, Homo sapiens
accccgccaacggac

SEQ ID NO: 1844308 - DNA, 15 bp, Homo sapiens
ccccgccaacggacc

SEQ ID NO: 1844309 - DNA, 15 bp, Homo sapiens
cccgccaacggaccg

SEQ ID NO: 1844310 - DNA, 15 bp, Homo sapiens
ccgccaacggaccgc

SEQ ID NO: 1844311 - DNA, 15 bp, Homo sapiens
cgccaacggaccgca

SEQ ID NO: 1844312 - DNA, 15 bp, Homo sapiens
gccaacggaccgcag

SEQ ID NO: 1844313 - DNA, 15 bp, Homo sapiens
ccaacggaccgcaga

SEQ ID NO: 1844314 - DNA, 15 bp, Homo sapiens
caacggaccgcagag

SEQ ID NO: 1844315 - DNA, 15 bp, Homo sapiens
aacggaccgcagagg

SEQ ID NO: 1844316 - DNA, 15 bp, Homo sapiens
acggaccgcagagga

SEQ ID NO: 1844317 - DNA, 15 bp, Homo sapiens
cggaccgcagaggag

SEQ ID NO: 1844318 - DNA, 15 bp, Homo sapiens
ggaccgcagaggagg

SEQ ID NO: 1844319 - DNA, 15 bp, Homo sapiens
gaccgcagaggaggg

SEQ ID NO: 1844320 - DNA, 15 bp, Homo sapiens
accgcagaggagggc

SEQ ID NO: 1844321 - DNA, 15 bp, Homo sapiens
ccgcagaggagggca

SEQ ID NO: 1844322 - DNA, 15 bp, Homo sapiens
cgcagaggagggcag

SEQ ID NO: 1844323 - DNA, 15 bp, Homo sapiens
gcagaggagggcagg

SEQ ID NO: 1844324 - DNA, 15 bp, Homo sapiens
cagaggagggcaggg

SEQ ID NO: 1844325 - DNA, 15 bp, Homo sapiens
agaggagggcagggc

SEQ ID NO: 1844326 - DNA, 15 bp, Homo sapiens
gaggagggcagggcg

SEQ ID NO: 1844327 - DNA, 15 bp, Homo sapiens
aggagggcagggcgg

SEQ ID NO: 1844328 - DNA, 15 bp, Homo sapiens
ggagggcagggcggg

SEQ ID NO: 1844329 - DNA, 15 bp, Homo sapiens
gagggcagggcggga

SEQ ID NO: 1844330 - DNA, 15 bp, Homo sapiens
agggcagggcgggat

SEQ ID NO: 1844331 - DNA, 15 bp, Homo sapiens
gggcagggcgggatc

SEQ ID NO: 1844332 - DNA, 15 bp, Homo sapiens
ggcagggcgggatcc

SEQ ID NO: 1844333 - DNA, 15 bp, Homo sapiens
gcagggcgggatccc

SEQ ID NO: 1844334 - DNA, 15 bp, Homo sapiens
cagggcgggatccca

SEQ ID NO: 1844335 - DNA, 15 bp, Homo sapiens
agggcgggatcccaa

SEQ ID NO: 1844336 - DNA, 15 bp, Homo sapiens
gggcgggatcccaaa

SEQ ID NO: 1844337 - DNA, 15 bp, Homo sapiens
ggcgggatcccaaag

SEQ ID NO: 1844338 - DNA, 15 bp, Homo sapiens
gcgggatcccaaagg

SEQ ID NO: 1844339 - DNA, 15 bp, Homo sapiens
cgggatcccaaaggc

SEQ ID NO: 1844340 - DNA, 15 bp, Homo sapiens
gggatcccaaaggct

SEQ ID NO: 1844341 - DNA, 15 bp, Homo sapiens
ggatcccaaaggctg

SEQ ID NO: 1844342 - DNA, 15 bp, Homo sapiens
gatcccaaaggctga

SEQ ID NO: 1844343 - DNA, 15 bp, Homo sapiens
atcccaaaggctgac

SEQ ID NO: 1844344 - DNA, 15 bp, Homo sapiens
tcccaaaggctgact

SEQ ID NO: 1844345 - DNA, 15 bp, Homo sapiens
cccaaaggctgactc

SEQ ID NO: 1844346 - DNA, 15 bp, Homo sapiens
ccaaaggctgactcg

SEQ ID NO: 1844347 - DNA, 15 bp, Homo sapiens
caaaggctgactcgg

SEQ ID NO: 1844348 - DNA, 15 bp, Homo sapiens
aaaggctgactcggg

SEQ ID NO: 1844349 - DNA, 15 bp, Homo sapiens
aaggctgactcggga

SEQ ID NO: 1844350 - DNA, 15 bp, Homo sapiens
aggctgactcgggag

SEQ ID NO: 1844351 - DNA, 15 bp, Homo sapiens
ggctgactcgggagt

SEQ ID NO: 1844352 - DNA, 15 bp, Homo sapiens
gctgactcgggagtg

SEQ ID NO: 1844353 - DNA, 15 bp, Homo sapiens
ctgactcgggagtgg

SEQ ID NO: 1844354 - DNA, 15 bp, Homo sapiens
tgactcgggagtggg

SEQ ID NO: 1844355 - DNA, 15 bp, Homo sapiens
gactcgggagtgggg

SEQ ID NO: 1844356 - DNA, 15 bp, Homo sapiens
actcgggagtggggc

SEQ ID NO: 1844357 - DNA, 15 bp, Homo sapiens
ctcgggagtggggct

SEQ ID NO: 1844358 - DNA, 15 bp, Homo sapiens
tcgggagtggggctg

SEQ ID NO: 1844359 - DNA, 15 bp, Homo sapiens
cgggagtggggctgg

SEQ ID NO: 1844360 - DNA, 15 bp, Homo sapiens
gggagtggggctggc

SEQ ID NO: 1844361 - DNA, 15 bp, Homo sapiens
ggagtggggctggcc

SEQ ID NO: 1844362 - DNA, 15 bp, Homo sapiens
gagtggggctggcct

SEQ ID NO: 1844363 - DNA, 15 bp, Homo sapiens
agtggggctggcctt

SEQ ID NO: 1844364 - DNA, 15 bp, Homo sapiens
gtggggctggccttg

SEQ ID NO: 1844365 - DNA, 15 bp, Homo sapiens
tggggctggccttga

SEQ ID NO: 1844366 - DNA, 15 bp, Homo sapiens
ggggctggccttgac

SEQ ID NO: 1844367 - DNA, 15 bp, Homo sapiens
gggctggccttgacc

SEQ ID NO: 1844368 - DNA, 15 bp, Homo sapiens
ggctggccttgaccg

SEQ ID NO: 1844369 - DNA, 15 bp, Homo sapiens
gctggccttgaccgc

SEQ ID NO: 1844370 - DNA, 15 bp, Homo sapiens
ctggccttgaccgcc

SEQ ID NO: 1844371 - DNA, 15 bp, Homo sapiens
tggccttgaccgccc

SEQ ID NO: 1844372 - DNA, 15 bp, Homo sapiens
ggccttgaccgcccc

SEQ ID NO: 1844373 - DNA, 15 bp, Homo sapiens
gccttgaccgccccg

SEQ ID NO: 1844374 - DNA, 15 bp, Homo sapiens
ccttgaccgccccgg

SEQ ID NO: 1844375 - DNA, 15 bp, Homo sapiens
cttgaccgccccggt

SEQ ID NO: 1844376 - DNA, 15 bp, Homo sapiens
ttgaccgccccggtg

SEQ ID NO: 1844377 - DNA, 15 bp, Homo sapiens
tgaccgccccggtga

SEQ ID NO: 1844378 - DNA, 15 bp, Homo sapiens
gaccgccccggtgag

SEQ ID NO: 1844379 - DNA, 15 bp, Homo sapiens
accgccccggtgagc

SEQ ID NO: 1844380 - DNA, 15 bp, Homo sapiens
ccgccccggtgagca

SEQ ID NO: 1844381 - DNA, 15 bp, Homo sapiens
cgccccggtgagcac

SEQ ID NO: 1844382 - DNA, 15 bp, Homo sapiens
gccccggtgagcaca

SEQ ID NO: 1844383 - DNA, 15 bp, Homo sapiens
ccccggtgagcacag

SEQ ID NO: 1844384 - DNA, 15 bp, Homo sapiens
cccggtgagcacaga

SEQ ID NO: 1844385 - DNA, 15 bp, Homo sapiens
ccggtgagcacagat

SEQ ID NO: 1844386 - DNA, 15 bp, Homo sapiens
cggtgagcacagatg

SEQ ID NO: 1844387 - DNA, 15 bp, Homo sapiens
ggtgagcacagatgg

SEQ ID NO: 1844388 - DNA, 15 bp, Homo sapiens
gtgagcacagatggc

SEQ ID NO: 1844389 - DNA, 15 bp, Homo sapiens
tgagcacagatggcc

SEQ ID NO: 1844390 - DNA, 15 bp, Homo sapiens
gagcacagatggcct

SEQ ID NO: 1844391 - DNA, 15 bp, Homo sapiens
agcacagatggccta

SEQ ID NO: 1844392 - DNA, 15 bp, Homo sapiens
gcacagatggcctag

SEQ ID NO: 1844393 - DNA, 15 bp, Homo sapiens
cacagatggcctagg

SEQ ID NO: 1844394 - DNA, 15 bp, Homo sapiens
acagatggcctaggt

SEQ ID NO: 1844395 - DNA, 15 bp, Homo sapiens
cagatggcctaggtg

SEQ ID NO: 1844396 - DNA, 15 bp, Homo sapiens
agatggcctaggtgt

SEQ ID NO: 1844397 - DNA, 15 bp, Homo sapiens
gatggcctaggtgtg

SEQ ID NO: 1844398 - DNA, 15 bp, Homo sapiens
atggcctaggtgtga

SEQ ID NO: 1844399 - DNA, 15 bp, Homo sapiens
tggcctaggtgtgaa

SEQ ID NO: 1844400 - DNA, 15 bp, Homo sapiens
ggcctaggtgtgaac

SEQ ID NO: 1844401 - DNA, 15 bp, Homo sapiens
gcctaggtgtgaacc

SEQ ID NO: 1844402 - DNA, 15 bp, Homo sapiens
cctaggtgtgaaccg

SEQ ID NO: 1844403 - DNA, 15 bp, Homo sapiens
ctaggtgtgaaccgg

SEQ ID NO: 1844404 - DNA, 15 bp, Homo sapiens
taggtgtgaaccggc

SEQ ID NO: 1844405 - DNA, 15 bp, Homo sapiens
aggtgtgaaccggcc

SEQ ID NO: 1844406 - DNA, 15 bp, Homo sapiens
ggtgtgaaccggccc

SEQ ID NO: 1844407 - DNA, 15 bp, Homo sapiens
gtgtgaaccggcccc

SEQ ID NO: 1844408 - DNA, 15 bp, Homo sapiens
tgtgaaccggccccc

SEQ ID NO: 1844409 - DNA, 15 bp, Homo sapiens
gtgaaccggccccca

SEQ ID NO: 1844410 - DNA, 15 bp, Homo sapiens
tgaaccggcccccag

SEQ ID NO: 1844411 - DNA, 15 bp, Homo sapiens
gaaccggcccccagg

SEQ ID NO: 1844412 - DNA, 15 bp, Homo sapiens
aaccggcccccaggg

SEQ ID NO: 1844413 - DNA, 15 bp, Homo sapiens
accggcccccagggc

SEQ ID NO: 1844414 - DNA, 15 bp, Homo sapiens
ccggcccccagggct

SEQ ID NO: 1844415 - DNA, 15 bp, Homo sapiens
cggcccccagggctg

SEQ ID NO: 1844416 - DNA, 15 bp, Homo sapiens
ggcccccagggctgg

SEQ ID NO: 1844417 - DNA, 15 bp, Homo sapiens
gcccccagggctggc

SEQ ID NO: 1844418 - DNA, 15 bp, Homo sapiens
cccccagggctggct

SEQ ID NO: 1844419 - DNA, 15 bp, Homo sapiens
ccccagggctggctc

SEQ ID NO: 1844420 - DNA, 15 bp, Homo sapiens
cccagggctggctcg

SEQ ID NO: 1844421 - DNA, 15 bp, Homo sapiens
ccagggctggctcgg

SEQ ID NO: 1844422 - DNA, 15 bp, Homo sapiens
cagggctggctcggg

SEQ ID NO: 1844423 - DNA, 15 bp, Homo sapiens
agggctggctcggga

SEQ ID NO: 1844424 - DNA, 15 bp, Homo sapiens
gggctggctcgggat

SEQ ID NO: 1844425 - DNA, 15 bp, Homo sapiens
ggctggctcgggatg

SEQ ID NO: 1844426 - DNA, 15 bp, Homo sapiens
gctggctcgggatgt

SEQ ID NO: 1844427 - DNA, 15 bp, Homo sapiens
ctggctcgggatgtt

SEQ ID NO: 1844428 - DNA, 15 bp, Homo sapiens
tggctcgggatgttg

SEQ ID NO: 1844429 - DNA, 15 bp, Homo sapiens
ggctcgggatgttgg

SEQ ID NO: 1844430 - DNA, 15 bp, Homo sapiens
gctcgggatgttggc

SEQ ID NO: 1844431 - DNA, 15 bp, Homo sapiens
ctcgggatgttggca

SEQ ID NO: 1844432 - DNA, 15 bp, Homo sapiens
tcgggatgttggcag

SEQ ID NO: 1844433 - DNA, 15 bp, Homo sapiens
cgggatgttggcagg

SEQ ID NO: 1844434 - DNA, 15 bp, Homo sapiens
gggatgttggcagga

SEQ ID NO: 1844435 - DNA, 15 bp, Homo sapiens
ggatgttggcaggag

SEQ ID NO: 1844436 - DNA, 15 bp, Homo sapiens
gatgttggcaggagc

SEQ ID NO: 1844437 - DNA, 15 bp, Homo sapiens
atgttggcaggagca

SEQ ID NO: 1844438 - DNA, 15 bp, Homo sapiens
tgttggcaggagcag

SEQ ID NO: 1844439 - DNA, 15 bp, Homo sapiens
gttggcaggagcagg

SEQ ID NO: 1844440 - DNA, 15 bp, Homo sapiens
ttggcaggagcaggg

SEQ ID NO: 1844441 - DNA, 15 bp, Homo sapiens
tggcaggagcagggc

SEQ ID NO: 1844442 - DNA, 15 bp, Homo sapiens
ggcaggagcagggca

SEQ ID NO: 1844443 - DNA, 15 bp, Homo sapiens
gcaggagcagggcat

SEQ ID NO: 1844444 - DNA, 15 bp, Homo sapiens
caggagcagggcatc

SEQ ID NO: 1844445 - DNA, 15 bp, Homo sapiens
aggagcagggcatca

SEQ ID NO: 1844446 - DNA, 15 bp, Homo sapiens
ggagcagggcatcag

SEQ ID NO: 1844447 - DNA, 15 bp, Homo sapiens
gagcagggcatcagg

SEQ ID NO: 1844448 - DNA, 15 bp, Homo sapiens
agcagggcatcaggc

SEQ ID NO: 1844449 - DNA, 15 bp, Homo sapiens
gcagggcatcaggct

SEQ ID NO: 1844450 - DNA, 15 bp, Homo sapiens
cagggcatcaggctc

SEQ ID NO: 1844451 - DNA, 15 bp, Homo sapiens
agggcatcaggctca

SEQ ID NO: 1844452 - DNA, 15 bp, Homo sapiens
gggcatcaggctcag

SEQ ID NO: 1844453 - DNA, 15 bp, Homo sapiens
ggcatcaggctcagc

SEQ ID NO: 1844454 - DNA, 15 bp, Homo sapiens
gcatcaggctcagcc

SEQ ID NO: 1844455 - DNA, 15 bp, Homo sapiens
catcaggctcagccc

SEQ ID NO: 1844456 - DNA, 15 bp, Homo sapiens
atcaggctcagccca

SEQ ID NO: 1844457 - DNA, 15 bp, Homo sapiens
tcaggctcagcccac

SEQ ID NO: 1844458 - DNA, 15 bp, Homo sapiens
caggctcagcccacg

SEQ ID NO: 1844459 - DNA, 15 bp, Homo sapiens
aggctcagcccacgc

SEQ ID NO: 1844460 - DNA, 15 bp, Homo sapiens
ggctcagcccacgct

SEQ ID NO: 1844461 - DNA, 15 bp, Homo sapiens
gctcagcccacgctc

SEQ ID NO: 1844462 - DNA, 15 bp, Homo sapiens
ctcagcccacgctcc

SEQ ID NO: 1844463 - DNA, 15 bp, Homo sapiens
tcagcccacgctccc

SEQ ID NO: 1844464 - DNA, 15 bp, Homo sapiens
cagcccacgctcccc

SEQ ID NO: 1844465 - DNA, 15 bp, Homo sapiens
agcccacgctccccg

SEQ ID NO: 1844466 - DNA, 15 bp, Homo sapiens
gcccacgctccccgg

SEQ ID NO: 1844467 - DNA, 15 bp, Homo sapiens
cccacgctccccggc

SEQ ID NO: 1844468 - DNA, 15 bp, Homo sapiens
ccacgctccccggcc

SEQ ID NO: 1844469 - DNA, 15 bp, Homo sapiens
cacgctccccggccc

SEQ ID NO: 1844470 - DNA, 15 bp, Homo sapiens
acgctccccggcccc

SEQ ID NO: 1844471 - DNA, 15 bp, Homo sapiens
cgctccccggcccca

SEQ ID NO: 1844472 - DNA, 15 bp, Homo sapiens
gctccccggccccag

SEQ ID NO: 1844473 - DNA, 15 bp, Homo sapiens
ctccccggccccagg

SEQ ID NO: 1844474 - DNA, 15 bp, Homo sapiens
tccccggccccagga

SEQ ID NO: 1844475 - DNA, 15 bp, Homo sapiens
ccccggccccaggaa

SEQ ID NO: 1844476 - DNA, 15 bp, Homo sapiens
cccggccccaggaac

SEQ ID NO: 1844477 - DNA, 15 bp, Homo sapiens
ccggccccaggaacg

SEQ ID NO: 1844478 - DNA, 15 bp, Homo sapiens
cggccccaggaacgc

SEQ ID NO: 1844479 - DNA, 15 bp, Homo sapiens
ggccccaggaacgcc

SEQ ID NO: 1844480 - DNA, 15 bp, Homo sapiens
gccccaggaacgccg

SEQ ID NO: 1844481 - DNA, 15 bp, Homo sapiens
ccccaggaacgccga

SEQ ID NO: 1844482 - DNA, 15 bp, Homo sapiens
cccaggaacgccgac

SEQ ID NO: 1844483 - DNA, 15 bp, Homo sapiens
ccaggaacgccgacc

SEQ ID NO: 1844484 - DNA, 15 bp, Homo sapiens
caggaacgccgacct

SEQ ID NO: 1844485 - DNA, 15 bp, Homo sapiens
aggaacgccgacctg

SEQ ID NO: 1844486 - DNA, 15 bp, Homo sapiens
ggaacgccgacctgt

SEQ ID NO: 1844487 - DNA, 15 bp, Homo sapiens
gaacgccgacctgtc

SEQ ID NO: 1844488 - DNA, 15 bp, Homo sapiens
aacgccgacctgtcc

SEQ ID NO: 1844489 - DNA, 15 bp, Homo sapiens
acgccgacctgtcca

SEQ ID NO: 1844490 - DNA, 15 bp, Homo sapiens
cgccgacctgtccat

SEQ ID NO: 1844491 - DNA, 15 bp, Homo sapiens
gccgacctgtccatc

SEQ ID NO: 1844492 - DNA, 15 bp, Homo sapiens
ccgacctgtccatca

SEQ ID NO: 1844493 - DNA, 15 bp, Homo sapiens
cgacctgtccatcac

SEQ ID NO: 1844494 - DNA, 15 bp, Homo sapiens
gacctgtccatcacg

SEQ ID NO: 1844495 - DNA, 15 bp, Homo sapiens
acctgtccatcacgc

SEQ ID NO: 1844496 - DNA, 15 bp, Homo sapiens
cctgtccatcacgct

SEQ ID NO: 1844497 - DNA, 15 bp, Homo sapiens
ctgtccatcacgctg

SEQ ID NO: 1844498 - DNA, 15 bp, Homo sapiens
tgtccatcacgctgg

SEQ ID NO: 1844499 - DNA, 15 bp, Homo sapiens
gtccatcacgctggg

SEQ ID NO: 1844500 - DNA, 15 bp, Homo sapiens
tccatcacgctgggt

SEQ ID NO: 1844501 - DNA, 15 bp, Homo sapiens
ccatcacgctgggta

SEQ ID NO: 1844502 - DNA, 15 bp, Homo sapiens
catcacgctgggtac

SEQ ID NO: 1844503 - DNA, 15 bp, Homo sapiens
atcacgctgggtaca

SEQ ID NO: 1844504 - DNA, 15 bp, Homo sapiens
tcacgctgggtacat

SEQ ID NO: 1844505 - DNA, 15 bp, Homo sapiens
cacgctgggtacatc

SEQ ID NO: 1844506 - DNA, 15 bp, Homo sapiens
acgctgggtacatcg

SEQ ID NO: 1844507 - DNA, 15 bp, Homo sapiens
cgctgggtacatcgc

SEQ ID NO: 1844508 - DNA, 15 bp, Homo sapiens
gctgggtacatcgct

SEQ ID NO: 1844509 - DNA, 15 bp, Homo sapiens
ctgggtacatcgctg

SEQ ID NO: 1844510 - DNA, 15 bp, Homo sapiens
tgggtacatcgctgc

SEQ ID NO: 1844511 - DNA, 15 bp, Homo sapiens
gggtacatcgctgca

SEQ ID NO: 1844512 - DNA, 15 bp, Homo sapiens
ggtacatcgctgcag

SEQ ID NO: 1844513 - DNA, 15 bp, Homo sapiens
gtacatcgctgcaga

SEQ ID NO: 1844514 - DNA, 15 bp, Homo sapiens
tacatcgctgcagat

SEQ ID NO: 1844515 - DNA, 15 bp, Homo sapiens
acatcgctgcagatc

SEQ ID NO: 1844516 - DNA, 15 bp, Homo sapiens
catcgctgcagatcc

SEQ ID NO: 1844517 - DNA, 15 bp, Homo sapiens
atcgctgcagatccg

SEQ ID NO: 1844518 - DNA, 15 bp, Homo sapiens
tcgctgcagatccgg

SEQ ID NO: 1844519 - DNA, 15 bp, Homo sapiens
cgctgcagatccggc

SEQ ID NO: 1844520 - DNA, 15 bp, Homo sapiens
gctgcagatccggcc

SEQ ID NO: 1844521 - DNA, 15 bp, Homo sapiens
ctgcagatccggccc

SEQ ID NO: 1844522 - DNA, 15 bp, Homo sapiens
tgcagatccggccca

SEQ ID NO: 1844523 - DNA, 15 bp, Homo sapiens
gcagatccggcccag

SEQ ID NO: 1844524 - DNA, 15 bp, Homo sapiens
cagatccggcccagc

SEQ ID NO: 1844525 - DNA, 15 bp, Homo sapiens
agatccggcccagcg

SEQ ID NO: 1844526 - DNA, 15 bp, Homo sapiens
gatccggcccagcgg

SEQ ID NO: 1844527 - DNA, 15 bp, Homo sapiens
atccggcccagcggg

SEQ ID NO: 1844528 - DNA, 15 bp, Homo sapiens
tccggcccagcggga

SEQ ID NO: 1844529 - DNA, 15 bp, Homo sapiens
ccggcccagcgggaa

SEQ ID NO: 1844530 - DNA, 15 bp, Homo sapiens
cggcccagcgggaac

SEQ ID NO: 1844531 - DNA, 15 bp, Homo sapiens
ggcccagcgggaacc

SEQ ID NO: 1844532 - DNA, 15 bp, Homo sapiens
gcccagcgggaacct

SEQ ID NO: 1844533 - DNA, 15 bp, Homo sapiens
cccagcgggaacctg

SEQ ID NO: 1844534 - DNA, 15 bp, Homo sapiens
ccagcgggaacctgc

SEQ ID NO: 1844535 - DNA, 15 bp, Homo sapiens
cagcgggaacctgcc

SEQ ID NO: 1844536 - DNA, 15 bp, Homo sapiens
agcgggaacctgccg

SEQ ID NO: 1844537 - DNA, 15 bp, Homo sapiens
gcgggaacctgccgc

SEQ ID NO: 1844538 - DNA, 15 bp, Homo sapiens
cgggaacctgccgct

SEQ ID NO: 1844539 - DNA, 15 bp, Homo sapiens
gggaacctgccgctg

SEQ ID NO: 1844540 - DNA, 15 bp, Homo sapiens
ggaacctgccgctgg

SEQ ID NO: 1844541 - DNA, 15 bp, Homo sapiens
gaacctgccgctggc

SEQ ID NO: 1844542 - DNA, 15 bp, Homo sapiens
aacctgccgctggct

SEQ ID NO: 1844543 - DNA, 15 bp, Homo sapiens
acctgccgctggcta

SEQ ID NO: 1844544 - DNA, 15 bp, Homo sapiens
cctgccgctggctac

SEQ ID NO: 1844545 - DNA, 15 bp, Homo sapiens
ctgccgctggctacc

SEQ ID NO: 1844546 - DNA, 15 bp, Homo sapiens
tgccgctggctacca

SEQ ID NO: 1844547 - DNA, 15 bp, Homo sapiens
gccgctggctaccaa

SEQ ID NO: 1844548 - DNA, 15 bp, Homo sapiens
ccgctggctaccaag

SEQ ID NO: 1844549 - DNA, 15 bp, Homo sapiens
cgctggctaccaagc

SEQ ID NO: 1844550 - DNA, 15 bp, Homo sapiens
gctggctaccaagcg

SEQ ID NO: 1844551 - DNA, 15 bp, Homo sapiens
ctggctaccaagcgc

SEQ ID NO: 1844552 - DNA, 15 bp, Homo sapiens
tggctaccaagcgcc

SEQ ID NO: 1844553 - DNA, 15 bp, Homo sapiens
ggctaccaagcgccg

SEQ ID NO: 1844554 - DNA, 15 bp, Homo sapiens
gctaccaagcgccgg

SEQ ID NO: 1844555 - DNA, 15 bp, Homo sapiens
ctaccaagcgccggg

SEQ ID NO: 1844556 - DNA, 15 bp, Homo sapiens
taccaagcgccgggg

SEQ ID NO: 1844557 - DNA, 15 bp, Homo sapiens
accaagcgccgggga

SEQ ID NO: 1844558 - DNA, 15 bp, Homo sapiens
ccaagcgccggggag

SEQ ID NO: 1844559 - DNA, 15 bp, Homo sapiens
caagcgccggggagg

SEQ ID NO: 1844560 - DNA, 15 bp, Homo sapiens
aagcgccggggaggc

SEQ ID NO: 1844561 - DNA, 15 bp, Homo sapiens
agcgccggggaggcc

SEQ ID NO: 1844562 - DNA, 15 bp, Homo sapiens
gcgccggggaggccg

SEQ ID NO: 1844563 - DNA, 15 bp, Homo sapiens
cgccggggaggccgc

SEQ ID NO: 1844564 - DNA, 15 bp, Homo sapiens
gccggggaggccgcc

SEQ ID NO: 1844565 - DNA, 15 bp, Homo sapiens
ccggggaggccgcct

SEQ ID NO: 1844566 - DNA, 15 bp, Homo sapiens
cggggaggccgcctg

SEQ ID NO: 1844567 - DNA, 15 bp, Homo sapiens
ggggaggccgcctgg

SEQ ID NO: 1844568 - DNA, 15 bp, Homo sapiens
gggaggccgcctggt

SEQ ID NO: 1844569 - DNA, 15 bp, Homo sapiens
ggaggccgcctggtc

SEQ ID NO: 1844570 - DNA, 15 bp, Homo sapiens
gaggccgcctggtca

SEQ ID NO: 1844571 - DNA, 15 bp, Homo sapiens
aggccgcctggtcat

SEQ ID NO: 1844572 - DNA, 15 bp, Homo sapiens
ggccgcctggtcatc

SEQ ID NO: 1844573 - DNA, 15 bp, Homo sapiens
gccgcctggtcatcg

SEQ ID NO: 1844574 - DNA, 15 bp, Homo sapiens
ccgcctggtcatcgt

SEQ ID NO: 1844575 - DNA, 15 bp, Homo sapiens
cgcctggtcatcgtc

SEQ ID NO: 1844576 - DNA, 15 bp, Homo sapiens
gcctggtcatcgtca

SEQ ID NO: 1844577 - DNA, 15 bp, Homo sapiens
cctggtcatcgtcaa

SEQ ID NO: 1844578 - DNA, 15 bp, Homo sapiens
ctggtcatcgtcaac

SEQ ID NO: 1844579 - DNA, 15 bp, Homo sapiens
tggtcatcgtcaacc

SEQ ID NO: 1844580 - DNA, 15 bp, Homo sapiens
ggtcatcgtcaacct

SEQ ID NO: 1844581 - DNA, 15 bp, Homo sapiens
gtcatcgtcaacctg

SEQ ID NO: 1844582 - DNA, 15 bp, Homo sapiens
tcatcgtcaacctgc

SEQ ID NO: 1844583 - DNA, 15 bp, Homo sapiens
catcgtcaacctgca

SEQ ID NO: 1844584 - DNA, 15 bp, Homo sapiens
atcgtcaacctgcag

SEQ ID NO: 1844585 - DNA, 15 bp, Homo sapiens
tcgtcaacctgcagc

SEQ ID NO: 1844586 - DNA, 15 bp, Homo sapiens
cgtcaacctgcagcc

SEQ ID NO: 1844587 - DNA, 15 bp, Homo sapiens
gtcaacctgcagccc

SEQ ID NO: 1844588 - DNA, 15 bp, Homo sapiens
tcaacctgcagccca

SEQ ID NO: 1844589 - DNA, 15 bp, Homo sapiens
caacctgcagcccac

SEQ ID NO: 1844590 - DNA, 15 bp, Homo sapiens
aacctgcagcccacc

SEQ ID NO: 1844591 - DNA, 15 bp, Homo sapiens
acctgcagcccacca

SEQ ID NO: 1844592 - DNA, 15 bp, Homo sapiens
cctgcagcccaccaa

SEQ ID NO: 1844593 - DNA, 15 bp, Homo sapiens
ctgcagcccaccaag

SEQ ID NO: 1844594 - DNA, 15 bp, Homo sapiens
tgcagcccaccaagc

SEQ ID NO: 1844595 - DNA, 15 bp, Homo sapiens
gcagcccaccaagca

SEQ ID NO: 1844596 - DNA, 15 bp, Homo sapiens
agcccaccaagcacg

SEQ ID NO: 1844597 - DNA, 15 bp, Homo sapiens
gcccaccaagcacgt

SEQ ID NO: 1844598 - DNA, 15 bp, Homo sapiens
cccaccaagcacgta

SEQ ID NO: 1844599 - DNA, 15 bp, Homo sapiens
ccaccaagcacgtag

SEQ ID NO: 1844600 - DNA, 15 bp, Homo sapiens
caccaagcacgtagg

SEQ ID NO: 1844601 - DNA, 15 bp, Homo sapiens
accaagcacgtaggt

SEQ ID NO: 1844602 - DNA, 15 bp, Homo sapiens
ccaagcacgtaggtg

SEQ ID NO: 1844603 - DNA, 15 bp, Homo sapiens
caagcacgtaggtgt

SEQ ID NO: 1844604 - DNA, 15 bp, Homo sapiens
aagcacgtaggtgtc

SEQ ID NO: 1844605 - DNA, 15 bp, Homo sapiens
agcacgtaggtgtct

SEQ ID NO: 1844606 - DNA, 15 bp, Homo sapiens
gcacgtaggtgtctg

SEQ ID NO: 1844607 - DNA, 15 bp, Homo sapiens
cacgtaggtgtctga

SEQ ID NO: 1844608 - DNA, 15 bp, Homo sapiens
acgtaggtgtctgag

SEQ ID NO: 1844609 - DNA, 15 bp, Homo sapiens
cgtaggtgtctgagc

SEQ ID NO: 1844610 - DNA, 15 bp, Homo sapiens
gtaggtgtctgagcc

SEQ ID NO: 1844611 - DNA, 15 bp, Homo sapiens
taggtgtctgagcct

SEQ ID NO: 1844612 - DNA, 15 bp, Homo sapiens
aggtgtctgagccta

SEQ ID NO: 1844613 - DNA, 15 bp, Homo sapiens
ggtgtctgagcctac

SEQ ID NO: 1844614 - DNA, 15 bp, Homo sapiens
gtgtctgagcctacc

SEQ ID NO: 1844615 - DNA, 15 bp, Homo sapiens
tgtctgagcctaccc

SEQ ID NO: 1844616 - DNA, 15 bp, Homo sapiens
gtctgagcctacccc

SEQ ID NO: 1844617 - DNA, 15 bp, Homo sapiens
tctgagcctacccct

SEQ ID NO: 1844618 - DNA, 15 bp, Homo sapiens
ctgagcctacccctg

SEQ ID NO: 1844619 - DNA, 15 bp, Homo sapiens
tgagcctacccctgc

SEQ ID NO: 1844620 - DNA, 15 bp, Homo sapiens
gagcctacccctgcc

SEQ ID NO: 1844621 - DNA, 15 bp, Homo sapiens
agcctacccctgccc

SEQ ID NO: 1844622 - DNA, 15 bp, Homo sapiens
gcctacccctgccca

SEQ ID NO: 1844623 - DNA, 15 bp, Homo sapiens
cctacccctgcccag

SEQ ID NO: 1844624 - DNA, 15 bp, Homo sapiens
ctacccctgcccagg

SEQ ID NO: 1844625 - DNA, 15 bp, Homo sapiens
tacccctgcccaggg

SEQ ID NO: 1844626 - DNA, 15 bp, Homo sapiens
acccctgcccagggc

SEQ ID NO: 1844627 - DNA, 15 bp, Homo sapiens
cccctgcccagggcc

SEQ ID NO: 1844628 - DNA, 15 bp, Homo sapiens
ccctgcccagggcca

SEQ ID NO: 1844629 - DNA, 15 bp, Homo sapiens
cctgcccagggccac

SEQ ID NO: 1844630 - DNA, 15 bp, Homo sapiens
ctgcccagggccacc

SEQ ID NO: 1844631 - DNA, 15 bp, Homo sapiens
tgcccagggccacca

SEQ ID NO: 1844632 - DNA, 15 bp, Homo sapiens
gcccagggccaccat

SEQ ID NO: 1844633 - DNA, 15 bp, Homo sapiens
cccagggccaccatg

SEQ ID NO: 1844634 - DNA, 15 bp, Homo sapiens
ccagggccaccatgc

SEQ ID NO: 1844635 - DNA, 15 bp, Homo sapiens
cagggccaccatgca

SEQ ID NO: 1844636 - DNA, 15 bp, Homo sapiens
agggccaccatgcac

SEQ ID NO: 1844637 - DNA, 15 bp, Homo sapiens
gggccaccatgcacc

SEQ ID NO: 1844638 - DNA, 15 bp, Homo sapiens
ggccaccatgcaccc

SEQ ID NO: 1844639 - DNA, 15 bp, Homo sapiens
gccaccatgcaccct

SEQ ID NO: 1844640 - DNA, 15 bp, Homo sapiens
ccaccatgcaccctc

SEQ ID NO: 1844641 - DNA, 15 bp, Homo sapiens
caccatgcaccctct

SEQ ID NO: 1844642 - DNA, 15 bp, Homo sapiens
accatgcaccctctg

SEQ ID NO: 1844643 - DNA, 15 bp, Homo sapiens
ccatgcaccctctgt

SEQ ID NO: 1844644 - DNA, 15 bp, Homo sapiens
catgcaccctctgtc

SEQ ID NO: 1844645 - DNA, 15 bp, Homo sapiens
atgcaccctctgtcc

SEQ ID NO: 1844646 - DNA, 15 bp, Homo sapiens
tgcaccctctgtccc

SEQ ID NO: 1844647 - DNA, 15 bp, Homo sapiens
gcaccctctgtcccc

SEQ ID NO: 1844648 - DNA, 15 bp, Homo sapiens
caccctctgtccccc

SEQ ID NO: 1844649 - DNA, 15 bp, Homo sapiens
accctctgtccccca

SEQ ID NO: 1844650 - DNA, 15 bp, Homo sapiens
ccctctgtcccccac

SEQ ID NO: 1844651 - DNA, 15 bp, Homo sapiens
cctctgtcccccacg

SEQ ID NO: 1844652 - DNA, 15 bp, Homo sapiens
ctctgtcccccacgc

SEQ ID NO: 1844653 - DNA, 15 bp, Homo sapiens
tctgtcccccacgcc

SEQ ID NO: 1844654 - DNA, 15 bp, Homo sapiens
ctgtcccccacgcct

SEQ ID NO: 1844655 - DNA, 15 bp, Homo sapiens
tgtcccccacgcctg

SEQ ID NO: 1844656 - DNA, 15 bp, Homo sapiens
gtcccccacgcctga

SEQ ID NO: 1844657 - DNA, 15 bp, Homo sapiens
tcccccacgcctgac

SEQ ID NO: 1844658 - DNA, 15 bp, Homo sapiens
cccccacgcctgacc

SEQ ID NO: 1844659 - DNA, 15 bp, Homo sapiens
ccccacgcctgaccc

SEQ ID NO: 1844660 - DNA, 15 bp, Homo sapiens
cccacgcctgacccg

SEQ ID NO: 1844661 - DNA, 15 bp, Homo sapiens
ccacgcctgacccgt

SEQ ID NO: 1844662 - DNA, 15 bp, Homo sapiens
cacgcctgacccgtc

SEQ ID NO: 1844663 - DNA, 15 bp, Homo sapiens
acgcctgacccgtcc

SEQ ID NO: 1844664 - DNA, 15 bp, Homo sapiens
cgcctgacccgtccc

SEQ ID NO: 1844665 - DNA, 15 bp, Homo sapiens
gcctgacccgtcccg

SEQ ID NO: 1844666 - DNA, 15 bp, Homo sapiens
cctgacccgtcccgc

SEQ ID NO: 1844667 - DNA, 15 bp, Homo sapiens
ctgacccgtcccgcc

SEQ ID NO: 1844668 - DNA, 15 bp, Homo sapiens
tgacccgtcccgccc

SEQ ID NO: 1844669 - DNA, 15 bp, Homo sapiens
gacccgtcccgcccc

SEQ ID NO: 1844670 - DNA, 15 bp, Homo sapiens
acccgtcccgcccct

SEQ ID NO: 1844671 - DNA, 15 bp, Homo sapiens
cccgtcccgcccctc

SEQ ID NO: 1844672 - DNA, 15 bp, Homo sapiens
ccgtcccgcccctcg

SEQ ID NO: 1844673 - DNA, 15 bp, Homo sapiens
cgtcccgcccctcgg

SEQ ID NO: 1844674 - DNA, 15 bp, Homo sapiens
gtcccgcccctcggc

SEQ ID NO: 1844675 - DNA, 15 bp, Homo sapiens
tcccgcccctcggca

SEQ ID NO: 1844676 - DNA, 15 bp, Homo sapiens
cccgcccctcggcag

SEQ ID NO: 1844677 - DNA, 15 bp, Homo sapiens
ccgcccctcggcagg

SEQ ID NO: 1844678 - DNA, 15 bp, Homo sapiens
cgcccctcggcagga

SEQ ID NO: 1844679 - DNA, 15 bp, Homo sapiens
gcccctcggcaggac

SEQ ID NO: 1844680 - DNA, 15 bp, Homo sapiens
cccctcggcaggacc

SEQ ID NO: 1844681 - DNA, 15 bp, Homo sapiens
ccctcggcaggaccg

SEQ ID NO: 1844682 - DNA, 15 bp, Homo sapiens
cctcggcaggaccgc

SEQ ID NO: 1844683 - DNA, 15 bp, Homo sapiens
ctcggcaggaccgcc

SEQ ID NO: 1844684 - DNA, 15 bp, Homo sapiens
tcggcaggaccgcca

SEQ ID NO: 1844685 - DNA, 15 bp, Homo sapiens
cggcaggaccgccat

SEQ ID NO: 1844686 - DNA, 15 bp, Homo sapiens
ggcaggaccgccatg

SEQ ID NO: 1844687 - DNA, 15 bp, Homo sapiens
gcaggaccgccatgc

SEQ ID NO: 1844688 - DNA, 15 bp, Homo sapiens
caggaccgccatgct

SEQ ID NO: 1844689 - DNA, 15 bp, Homo sapiens
aggaccgccatgctg

SEQ ID NO: 1844690 - DNA, 15 bp, Homo sapiens
ggaccgccatgctga

SEQ ID NO: 1844691 - DNA, 15 bp, Homo sapiens
gaccgccatgctgac

SEQ ID NO: 1844692 - DNA, 15 bp, Homo sapiens
accgccatgctgacc

SEQ ID NO: 1844693 - DNA, 15 bp, Homo sapiens
ccgccatgctgacct

SEQ ID NO: 1844694 - DNA, 15 bp, Homo sapiens
cgccatgctgacctc

SEQ ID NO: 1844695 - DNA, 15 bp, Homo sapiens
gccatgctgacctcc

SEQ ID NO: 1844696 - DNA, 15 bp, Homo sapiens
ccatgctgacctccg

SEQ ID NO: 1844697 - DNA, 15 bp, Homo sapiens
catgctgacctccgc

SEQ ID NO: 1844698 - DNA, 15 bp, Homo sapiens
atgctgacctccgca

SEQ ID NO: 1844699 - DNA, 15 bp, Homo sapiens
tgctgacctccgcat

SEQ ID NO: 1844700 - DNA, 15 bp, Homo sapiens
gctgacctccgcatc

SEQ ID NO: 1844701 - DNA, 15 bp, Homo sapiens
ctgacctccgcatcc

SEQ ID NO: 1844702 - DNA, 15 bp, Homo sapiens
tgacctccgcatcca

SEQ ID NO: 1844703 - DNA, 15 bp, Homo sapiens
gacctccgcatccat

SEQ ID NO: 1844704 - DNA, 15 bp, Homo sapiens
acctccgcatccatg

SEQ ID NO: 1844705 - DNA, 15 bp, Homo sapiens
cctccgcatccatgg

SEQ ID NO: 1844706 - DNA, 15 bp, Homo sapiens
ctccgcatccatggc

SEQ ID NO: 1844707 - DNA, 15 bp, Homo sapiens
tccgcatccatggct

SEQ ID NO: 1844708 - DNA, 15 bp, Homo sapiens
ccgcatccatggcta

SEQ ID NO: 1844709 - DNA, 15 bp, Homo sapiens
cgcatccatggctac

SEQ ID NO: 1844710 - DNA, 15 bp, Homo sapiens
gcatccatggctacg

SEQ ID NO: 1844711 - DNA, 15 bp, Homo sapiens
catccatggctacgt

SEQ ID NO: 1844712 - DNA, 15 bp, Homo sapiens
atccatggctacgtt

SEQ ID NO: 1844713 - DNA, 15 bp, Homo sapiens
tccatggctacgttg

SEQ ID NO: 1844714 - DNA, 15 bp, Homo sapiens
ccatggctacgttga

SEQ ID NO: 1844715 - DNA, 15 bp, Homo sapiens
catggctacgttgac

SEQ ID NO: 1844716 - DNA, 15 bp, Homo sapiens
atggctacgttgacg

SEQ ID NO: 1844717 - DNA, 15 bp, Homo sapiens
tggctacgttgacga

SEQ ID NO: 1844718 - DNA, 15 bp, Homo sapiens
ggctacgttgacgag

SEQ ID NO: 1844719 - DNA, 15 bp, Homo sapiens
gctacgttgacgagg

SEQ ID NO: 1844720 - DNA, 15 bp, Homo sapiens
ctacgttgacgaggt

SEQ ID NO: 1844721 - DNA, 15 bp, Homo sapiens
tacgttgacgaggtc

SEQ ID NO: 1844722 - DNA, 15 bp, Homo sapiens
acgttgacgaggtca

SEQ ID NO: 1844723 - DNA, 15 bp, Homo sapiens
cgttgacgaggtcat

SEQ ID NO: 1844724 - DNA, 15 bp, Homo sapiens
gttgacgaggtcatg

SEQ ID NO: 1844725 - DNA, 15 bp, Homo sapiens
ttgacgaggtcatga

SEQ ID NO: 1844726 - DNA, 15 bp, Homo sapiens
tgacgaggtcatgac

SEQ ID NO: 1844727 - DNA, 15 bp, Homo sapiens
gacgaggtcatgacc

SEQ ID NO: 1844728 - DNA, 15 bp, Homo sapiens
acgaggtcatgaccc

SEQ ID NO: 1844729 - DNA, 15 bp, Homo sapiens
cgaggtcatgacccg

SEQ ID NO: 1844730 - DNA, 15 bp, Homo sapiens
gaggtcatgacccgg

SEQ ID NO: 1844731 - DNA, 15 bp, Homo sapiens
aggtcatgacccggc

SEQ ID NO: 1844732 - DNA, 15 bp, Homo sapiens
ggtcatgacccggct

SEQ ID NO: 1844733 - DNA, 15 bp, Homo sapiens
gtcatgacccggctc

SEQ ID NO: 1844734 - DNA, 15 bp, Homo sapiens
tcatgacccggctca

SEQ ID NO: 1844735 - DNA, 15 bp, Homo sapiens
catgacccggctcat

SEQ ID NO: 1844736 - DNA, 15 bp, Homo sapiens
atgacccggctcatg

SEQ ID NO: 1844737 - DNA, 15 bp, Homo sapiens
tgacccggctcatga

SEQ ID NO: 1844738 - DNA, 15 bp, Homo sapiens
gacccggctcatgaa

SEQ ID NO: 1844739 - DNA, 15 bp, Homo sapiens
acccggctcatgaag

SEQ ID NO: 1844740 - DNA, 15 bp, Homo sapiens
cccggctcatgaagc

SEQ ID NO: 1844741 - DNA, 15 bp, Homo sapiens
ccggctcatgaagca

SEQ ID NO: 1844742 - DNA, 15 bp, Homo sapiens
cggctcatgaagcac

SEQ ID NO: 1844743 - DNA, 15 bp, Homo sapiens
ggctcatgaagcacc

SEQ ID NO: 1844744 - DNA, 15 bp, Homo sapiens
gctcatgaagcacct

SEQ ID NO: 1844745 - DNA, 15 bp, Homo sapiens
ctcatgaagcacctg

SEQ ID NO: 1844746 - DNA, 15 bp, Homo sapiens
tcatgaagcacctgg

SEQ ID NO: 1844747 - DNA, 15 bp, Homo sapiens
catgaagcacctggg

SEQ ID NO: 1844748 - DNA, 15 bp, Homo sapiens
atgaagcacctgggg

SEQ ID NO: 1844749 - DNA, 15 bp, Homo sapiens
tgaagcacctggggc

SEQ ID NO: 1844750 - DNA, 15 bp, Homo sapiens
gaagcacctggggct

SEQ ID NO: 1844751 - DNA, 15 bp, Homo sapiens
aagcacctggggctg

SEQ ID NO: 1844752 - DNA, 15 bp, Homo sapiens
agcacctggggctgg

SEQ ID NO: 1844753 - DNA, 15 bp, Homo sapiens
gcacctggggctgga

SEQ ID NO: 1844754 - DNA, 15 bp, Homo sapiens
cacctggggctggag

SEQ ID NO: 1844755 - DNA, 15 bp, Homo sapiens
acctggggctggaga

SEQ ID NO: 1844756 - DNA, 15 bp, Homo sapiens
cctggggctggagat

SEQ ID NO: 1844757 - DNA, 15 bp, Homo sapiens
ctggggctggagatc

SEQ ID NO: 1844758 - DNA, 15 bp, Homo sapiens
tggggctggagatcc

SEQ ID NO: 1844759 - DNA, 15 bp, Homo sapiens
ggggctggagatccc

SEQ ID NO: 1844760 - DNA, 15 bp, Homo sapiens
gggctggagatcccc

SEQ ID NO: 1844761 - DNA, 15 bp, Homo sapiens
ggctggagatccccg

SEQ ID NO: 1844762 - DNA, 15 bp, Homo sapiens
gctggagatccccgc

SEQ ID NO: 1844763 - DNA, 15 bp, Homo sapiens
ctggagatccccgcc

SEQ ID NO: 1844764 - DNA, 15 bp, Homo sapiens
tggagatccccgcct

SEQ ID NO: 1844765 - DNA, 15 bp, Homo sapiens
ggagatccccgcctg

SEQ ID NO: 1844766 - DNA, 15 bp, Homo sapiens
gagatccccgcctgg

SEQ ID NO: 1844767 - DNA, 15 bp, Homo sapiens
agatccccgcctggg

SEQ ID NO: 1844768 - DNA, 15 bp, Homo sapiens
gatccccgcctggga

SEQ ID NO: 1844769 - DNA, 15 bp, Homo sapiens
atccccgcctgggac

SEQ ID NO: 1844770 - DNA, 15 bp, Homo sapiens
tccccgcctgggacg

SEQ ID NO: 1844771 - DNA, 15 bp, Homo sapiens
ccccgcctgggacgg

SEQ ID NO: 1844772 - DNA, 15 bp, Homo sapiens
cccgcctgggacggc

SEQ ID NO: 1844773 - DNA, 15 bp, Homo sapiens
ccgcctgggacggcc

SEQ ID NO: 1844774 - DNA, 15 bp, Homo sapiens
cgcctgggacggccc

SEQ ID NO: 1844775 - DNA, 15 bp, Homo sapiens
gcctgggacggcccc

SEQ ID NO: 1844776 - DNA, 15 bp, Homo sapiens
cctgggacggccccc

SEQ ID NO: 1844777 - DNA, 15 bp, Homo sapiens
ctgggacggcccccg

SEQ ID NO: 1844778 - DNA, 15 bp, Homo sapiens
tgggacggcccccgt

SEQ ID NO: 1844779 - DNA, 15 bp, Homo sapiens
gggacggcccccgtg

SEQ ID NO: 1844780 - DNA, 15 bp, Homo sapiens
ggacggcccccgtgt

SEQ ID NO: 1844781 - DNA, 15 bp, Homo sapiens
gacggcccccgtgtg

SEQ ID NO: 1844782 - DNA, 15 bp, Homo sapiens
acggcccccgtgtgc

SEQ ID NO: 1844783 - DNA, 15 bp, Homo sapiens
cggcccccgtgtgct

SEQ ID NO: 1844784 - DNA, 15 bp, Homo sapiens
ggcccccgtgtgctg

SEQ ID NO: 1844785 - DNA, 15 bp, Homo sapiens
gcccccgtgtgctgg

SEQ ID NO: 1844786 - DNA, 15 bp, Homo sapiens
cccccgtgtgctgga

SEQ ID NO: 1844787 - DNA, 15 bp, Homo sapiens
ccccgtgtgctggag

SEQ ID NO: 1844788 - DNA, 15 bp, Homo sapiens
cccgtgtgctggaga

SEQ ID NO: 1844789 - DNA, 15 bp, Homo sapiens
ccgtgtgctggagag

SEQ ID NO: 1844790 - DNA, 15 bp, Homo sapiens
cgtgtgctggagagg

SEQ ID NO: 1844791 - DNA, 15 bp, Homo sapiens
gtgtgctggagaggg

SEQ ID NO: 1844792 - DNA, 15 bp, Homo sapiens
tgtgctggagagggc

SEQ ID NO: 1844793 - DNA, 15 bp, Homo sapiens
gtgctggagagggcg

SEQ ID NO: 1844794 - DNA, 15 bp, Homo sapiens
tgctggagagggcgc

SEQ ID NO: 1844795 - DNA, 15 bp, Homo sapiens
gctggagagggcgct

SEQ ID NO: 1844796 - DNA, 15 bp, Homo sapiens
ctggagagggcgctg

SEQ ID NO: 1844797 - DNA, 15 bp, Homo sapiens
tggagagggcgctgc

SEQ ID NO: 1844798 - DNA, 15 bp, Homo sapiens
ggagagggcgctgcc

SEQ ID NO: 1844799 - DNA, 15 bp, Homo sapiens
gagagggcgctgcca

SEQ ID NO: 1844800 - DNA, 15 bp, Homo sapiens
agagggcgctgccac

SEQ ID NO: 1844801 - DNA, 15 bp, Homo sapiens
gagggcgctgccacc

SEQ ID NO: 1844802 - DNA, 15 bp, Homo sapiens
agggcgctgccaccc

SEQ ID NO: 1844803 - DNA, 15 bp, Homo sapiens
gggcgctgccacccc

SEQ ID NO: 1844804 - DNA, 15 bp, Homo sapiens
ggcgctgccacccct

SEQ ID NO: 1844805 - DNA, 15 bp, Homo sapiens
gcgctgccacccctg

SEQ ID NO: 1844806 - DNA, 15 bp, Homo sapiens
cgctgccacccctgc

SEQ ID NO: 1844807 - DNA, 15 bp, Homo sapiens
gctgccacccctgcc

SEQ ID NO: 1844808 - DNA, 15 bp, Homo sapiens
ctgccacccctgccc

SEQ ID NO: 1844809 - DNA, 15 bp, Homo sapiens
tgccacccctgcccc

SEQ ID NO: 1844810 - DNA, 15 bp, Homo sapiens
gccacccctgccccg

SEQ ID NO: 1844811 - DNA, 15 bp, Homo sapiens
ccacccctgccccgc

SEQ ID NO: 1844812 - DNA, 15 bp, Homo sapiens
cacccctgccccgcc

SEQ ID NO: 1844813 - DNA, 15 bp, Homo sapiens
acccctgccccgccc

SEQ ID NO: 1844814 - DNA, 15 bp, Homo sapiens
cccctgccccgcccg

SEQ ID NO: 1844815 - DNA, 15 bp, Homo sapiens
ccctgccccgcccgc

SEQ ID NO: 1844816 - DNA, 15 bp, Homo sapiens
cctgccccgcccgcc

SEQ ID NO: 1844817 - DNA, 15 bp, Homo sapiens
ctgccccgcccgccc

SEQ ID NO: 1844818 - DNA, 15 bp, Homo sapiens
tgccccgcccgccca

SEQ ID NO: 1844819 - DNA, 15 bp, Homo sapiens
gccccgcccgcccac

SEQ ID NO: 1844820 - DNA, 15 bp, Homo sapiens
ccccgcccgcccacc

SEQ ID NO: 1844821 - DNA, 15 bp, Homo sapiens
cccgcccgcccaccc

SEQ ID NO: 1844822 - DNA, 15 bp, Homo sapiens
ccgcccgcccacccc

SEQ ID NO: 1844823 - DNA, 15 bp, Homo sapiens
cgcccgcccaccccc

SEQ ID NO: 1844824 - DNA, 15 bp, Homo sapiens
gcccgcccaccccca

SEQ ID NO: 1844825 - DNA, 15 bp, Homo sapiens
cccgcccacccccaa

SEQ ID NO: 1844826 - DNA, 15 bp, Homo sapiens
ccgcccacccccaag

SEQ ID NO: 1844827 - DNA, 15 bp, Homo sapiens
cgcccacccccaagc

SEQ ID NO: 1844828 - DNA, 15 bp, Homo sapiens
gcccacccccaagct

SEQ ID NO: 1844829 - DNA, 15 bp, Homo sapiens
cccacccccaagctg

SEQ ID NO: 1844830 - DNA, 15 bp, Homo sapiens
ccacccccaagctgg

SEQ ID NO: 1844831 - DNA, 15 bp, Homo sapiens
cacccccaagctgga

SEQ ID NO: 1844832 - DNA, 15 bp, Homo sapiens
acccccaagctggag

SEQ ID NO: 1844833 - DNA, 15 bp, Homo sapiens
cccccaagctggagc

SEQ ID NO: 1844834 - DNA, 15 bp, Homo sapiens
ccccaagctggagcc

SEQ ID NO: 1844835 - DNA, 15 bp, Homo sapiens
cccaagctggagccc

SEQ ID NO: 1844836 - DNA, 15 bp, Homo sapiens
ccaagctggagccca

SEQ ID NO: 1844837 - DNA, 15 bp, Homo sapiens
caagctggagcccaa

SEQ ID NO: 1844838 - DNA, 15 bp, Homo sapiens
aagctggagcccaag

SEQ ID NO: 1844839 - DNA, 15 bp, Homo sapiens
agctggagcccaagg

SEQ ID NO: 1844840 - DNA, 15 bp, Homo sapiens
gctggagcccaagga

SEQ ID NO: 1844841 - DNA, 15 bp, Homo sapiens
ctggagcccaaggag

SEQ ID NO: 1844842 - DNA, 15 bp, Homo sapiens
tggagcccaaggagg

SEQ ID NO: 1844843 - DNA, 15 bp, Homo sapiens
ggagcccaaggagga

SEQ ID NO: 1844844 - DNA, 15 bp, Homo sapiens
gagcccaaggaggaa

SEQ ID NO: 1844845 - DNA, 15 bp, Homo sapiens
agcccaaggaggaat

SEQ ID NO: 1844846 - DNA, 15 bp, Homo sapiens
gcccaaggaggaatc

SEQ ID NO: 1844847 - DNA, 15 bp, Homo sapiens
cccaaggaggaatct

SEQ ID NO: 1844848 - DNA, 15 bp, Homo sapiens
ccaaggaggaatctc

SEQ ID NO: 1844849 - DNA, 15 bp, Homo sapiens
caaggaggaatctcc

SEQ ID NO: 1844850 - DNA, 15 bp, Homo sapiens
aaggaggaatctccc

SEQ ID NO: 1844851 - DNA, 15 bp, Homo sapiens
aggaggaatctccca

SEQ ID NO: 1844852 - DNA, 15 bp, Homo sapiens
ggaggaatctcccac

SEQ ID NO: 1844853 - DNA, 15 bp, Homo sapiens
gaggaatctcccacc

SEQ ID NO: 1844854 - DNA, 15 bp, Homo sapiens
aggaatctcccaccc

SEQ ID NO: 1844855 - DNA, 15 bp, Homo sapiens
ggaatctcccacccg

SEQ ID NO: 1844856 - DNA, 15 bp, Homo sapiens
gaatctcccacccgg

SEQ ID NO: 1844857 - DNA, 15 bp, Homo sapiens
aatctcccacccgga

SEQ ID NO: 1844858 - DNA, 15 bp, Homo sapiens
atctcccacccggat

SEQ ID NO: 1844859 - DNA, 15 bp, Homo sapiens
tctcccacccggatc

SEQ ID NO: 1844860 - DNA, 15 bp, Homo sapiens
ctcccacccggatca

SEQ ID NO: 1844861 - DNA, 15 bp, Homo sapiens
tcccacccggatcaa

SEQ ID NO: 1844862 - DNA, 15 bp, Homo sapiens
cccacccggatcaac

SEQ ID NO: 1844863 - DNA, 15 bp, Homo sapiens
ccacccggatcaacg

SEQ ID NO: 1844864 - DNA, 15 bp, Homo sapiens
cacccggatcaacgg

SEQ ID NO: 1844865 - DNA, 15 bp, Homo sapiens
acccggatcaacggc

SEQ ID NO: 1844866 - DNA, 15 bp, Homo sapiens
cccggatcaacggct

SEQ ID NO: 1844867 - DNA, 15 bp, Homo sapiens
ccggatcaacggctc

SEQ ID NO: 1844868 - DNA, 15 bp, Homo sapiens
cggatcaacggctct

SEQ ID NO: 1844869 - DNA, 15 bp, Homo sapiens
ggatcaacggctcta

SEQ ID NO: 1844870 - DNA, 15 bp, Homo sapiens
gatcaacggctctat

SEQ ID NO: 1844871 - DNA, 15 bp, Homo sapiens
atcaacggctctatc

SEQ ID NO: 1844872 - DNA, 15 bp, Homo sapiens
tcaacggctctatcc

SEQ ID NO: 1844873 - DNA, 15 bp, Homo sapiens
caacggctctatccc

SEQ ID NO: 1844874 - DNA, 15 bp, Homo sapiens
aacggctctatcccc

SEQ ID NO: 1844875 - DNA, 15 bp, Homo sapiens
acggctctatccccg

SEQ ID NO: 1844876 - DNA, 15 bp, Homo sapiens
cggctctatccccgc

SEQ ID NO: 1844877 - DNA, 15 bp, Homo sapiens
ggctctatccccgcc

SEQ ID NO: 1844878 - DNA, 15 bp, Homo sapiens
gctctatccccgccg

SEQ ID NO: 1844879 - DNA, 15 bp, Homo sapiens
ctctatccccgccgg

SEQ ID NO: 1844880 - DNA, 15 bp, Homo sapiens
tctatccccgccggc

SEQ ID NO: 1844881 - DNA, 15 bp, Homo sapiens
ctatccccgccggcc

SEQ ID NO: 1844882 - DNA, 15 bp, Homo sapiens
tatccccgccggccc

SEQ ID NO: 1844883 - DNA, 15 bp, Homo sapiens
atccccgccggcccc

SEQ ID NO: 1844884 - DNA, 15 bp, Homo sapiens
tccccgccggcccca

SEQ ID NO: 1844885 - DNA, 15 bp, Homo sapiens
ccccgccggccccaa

SEQ ID NO: 1844886 - DNA, 15 bp, Homo sapiens
cccgccggccccaag

SEQ ID NO: 1844887 - DNA, 15 bp, Homo sapiens
ccgccggccccaagc

SEQ ID NO: 1844888 - DNA, 15 bp, Homo sapiens
cgccggccccaagca

SEQ ID NO: 1844889 - DNA, 15 bp, Homo sapiens
gccggccccaagcag

SEQ ID NO: 1844890 - DNA, 15 bp, Homo sapiens
ccggccccaagcagg

SEQ ID NO: 1844891 - DNA, 15 bp, Homo sapiens
cggccccaagcagga

SEQ ID NO: 1844892 - DNA, 15 bp, Homo sapiens
ggccccaagcaggag

SEQ ID NO: 1844893 - DNA, 15 bp, Homo sapiens
gccccaagcaggagc

SEQ ID NO: 1844894 - DNA, 15 bp, Homo sapiens
ccccaagcaggagcc

SEQ ID NO: 1844895 - DNA, 15 bp, Homo sapiens
cccaagcaggagccc

SEQ ID NO: 1844896 - DNA, 15 bp, Homo sapiens
ccaagcaggagccct

SEQ ID NO: 1844897 - DNA, 15 bp, Homo sapiens
caagcaggagccctg

SEQ ID NO: 1844898 - DNA, 15 bp, Homo sapiens
aagcaggagccctgc

SEQ ID NO: 1844899 - DNA, 15 bp, Homo sapiens
agcaggagccctgcg

SEQ ID NO: 1844900 - DNA, 15 bp, Homo sapiens
gcaggagccctgcgc

SEQ ID NO: 1844901 - DNA, 15 bp, Homo sapiens
caggagccctgcgcc

SEQ ID NO: 1844902 - DNA, 15 bp, Homo sapiens
aggagccctgcgccc

SEQ ID NO: 1844903 - DNA, 15 bp, Homo sapiens
ggagccctgcgccca

SEQ ID NO: 1844904 - DNA, 15 bp, Homo sapiens
gagccctgcgcccag

SEQ ID NO: 1844905 - DNA, 15 bp, Homo sapiens
agccctgcgcccagc

SEQ ID NO: 1844906 - DNA, 15 bp, Homo sapiens
gccctgcgcccagca

SEQ ID NO: 1844907 - DNA, 15 bp, Homo sapiens
ccctgcgcccagcac

SEQ ID NO: 1844908 - DNA, 15 bp, Homo sapiens
cctgcgcccagcaca

SEQ ID NO: 1844909 - DNA, 15 bp, Homo sapiens
ctgcgcccagcacaa

SEQ ID NO: 1844910 - DNA, 15 bp, Homo sapiens
tgcgcccagcacaac

SEQ ID NO: 1844911 - DNA, 15 bp, Homo sapiens
gcgcccagcacaacg

SEQ ID NO: 1844912 - DNA, 15 bp, Homo sapiens
cgcccagcacaacgg

SEQ ID NO: 1844913 - DNA, 15 bp, Homo sapiens
gcccagcacaacggc

SEQ ID NO: 1844914 - DNA, 15 bp, Homo sapiens
cccagcacaacggct

SEQ ID NO: 1844915 - DNA, 15 bp, Homo sapiens
ccagcacaacggctc

SEQ ID NO: 1844916 - DNA, 15 bp, Homo sapiens
cagcacaacggctca

SEQ ID NO: 1844917 - DNA, 15 bp, Homo sapiens
agcacaacggctcag

SEQ ID NO: 1844918 - DNA, 15 bp, Homo sapiens
gcacaacggctcaga

SEQ ID NO: 1844919 - DNA, 15 bp, Homo sapiens
cacaacggctcagag

SEQ ID NO: 1844920 - DNA, 15 bp, Homo sapiens
acaacggctcagagc

SEQ ID NO: 1844921 - DNA, 15 bp, Homo sapiens
caacggctcagagcc

SEQ ID NO: 1844922 - DNA, 15 bp, Homo sapiens
aacggctcagagccc

SEQ ID NO: 1844923 - DNA, 15 bp, Homo sapiens
acggctcagagcccg

SEQ ID NO: 1844924 - DNA, 15 bp, Homo sapiens
cggctcagagcccgc

SEQ ID NO: 1844925 - DNA, 15 bp, Homo sapiens
ggctcagagcccgcc

SEQ ID NO: 1844926 - DNA, 15 bp, Homo sapiens
gctcagagcccgcca

SEQ ID NO: 1844927 - DNA, 15 bp, Homo sapiens
ctcagagcccgccag

SEQ ID NO: 1844928 - DNA, 15 bp, Homo sapiens
tcagagcccgccagc

SEQ ID NO: 1844929 - DNA, 15 bp, Homo sapiens
cagagcccgccagcc

SEQ ID NO: 1844930 - DNA, 15 bp, Homo sapiens
agagcccgccagccc

SEQ ID NO: 1844931 - DNA, 15 bp, Homo sapiens
gagcccgccagcccc

SEQ ID NO: 1844932 - DNA, 15 bp, Homo sapiens
agcccgccagcccca

SEQ ID NO: 1844933 - DNA, 15 bp, Homo sapiens
gcccgccagccccaa

SEQ ID NO: 1844934 - DNA, 15 bp, Homo sapiens
cccgccagccccaaa

SEQ ID NO: 1844935 - DNA, 15 bp, Homo sapiens
ccgccagccccaaac

SEQ ID NO: 1844936 - DNA, 15 bp, Homo sapiens
cgccagccccaaacg

SEQ ID NO: 1844937 - DNA, 15 bp, Homo sapiens
gccagccccaaacgg

SEQ ID NO: 1844938 - DNA, 15 bp, Homo sapiens
ccagccccaaacggg

SEQ ID NO: 1844939 - DNA, 15 bp, Homo sapiens
cagccccaaacggga

SEQ ID NO: 1844940 - DNA, 15 bp, Homo sapiens
agccccaaacgggag

SEQ ID NO: 1844941 - DNA, 15 bp, Homo sapiens
gccccaaacgggagc

SEQ ID NO: 1844942 - DNA, 15 bp, Homo sapiens
ccccaaacgggagcg

SEQ ID NO: 1844943 - DNA, 15 bp, Homo sapiens
cccaaacgggagcgg

SEQ ID NO: 1844944 - DNA, 15 bp, Homo sapiens
ccaaacgggagcggc

SEQ ID NO: 1844945 - DNA, 15 bp, Homo sapiens
caaacgggagcggcc

SEQ ID NO: 1844946 - DNA, 15 bp, Homo sapiens
aaacgggagcggccc

SEQ ID NO: 1844947 - DNA, 15 bp, Homo sapiens
aacgggagcggccca

SEQ ID NO: 1844948 - DNA, 15 bp, Homo sapiens
acgggagcggcccac

SEQ ID NO: 1844949 - DNA, 15 bp, Homo sapiens
cgggagcggcccacc

SEQ ID NO: 1844950 - DNA, 15 bp, Homo sapiens
gggagcggcccacca

SEQ ID NO: 1844951 - DNA, 15 bp, Homo sapiens
ggagcggcccaccag

SEQ ID NO: 1844952 - DNA, 15 bp, Homo sapiens
gagcggcccaccagc

SEQ ID NO: 1844953 - DNA, 15 bp, Homo sapiens
agcggcccaccagcc

SEQ ID NO: 1844954 - DNA, 15 bp, Homo sapiens
gcggcccaccagccc

SEQ ID NO: 1844955 - DNA, 15 bp, Homo sapiens
cggcccaccagccct

SEQ ID NO: 1844956 - DNA, 15 bp, Homo sapiens
ggcccaccagccctg

SEQ ID NO: 1844957 - DNA, 15 bp, Homo sapiens
gcccaccagccctgc

SEQ ID NO: 1844958 - DNA, 15 bp, Homo sapiens
cccaccagccctgcc

SEQ ID NO: 1844959 - DNA, 15 bp, Homo sapiens
ccaccagccctgccc

SEQ ID NO: 1844960 - DNA, 15 bp, Homo sapiens
caccagccctgcccc

SEQ ID NO: 1844961 - DNA, 15 bp, Homo sapiens
accagccctgccccc

SEQ ID NO: 1844962 - DNA, 15 bp, Homo sapiens
ccagccctgcccccc

SEQ ID NO: 1844963 - DNA, 15 bp, Homo sapiens
cagccctgcccccca

SEQ ID NO: 1844964 - DNA, 15 bp, Homo sapiens
agccctgccccccac

SEQ ID NO: 1844965 - DNA, 15 bp, Homo sapiens
gccctgccccccaca

SEQ ID NO: 1844966 - DNA, 15 bp, Homo sapiens
ccctgccccccacag

SEQ ID NO: 1844967 - DNA, 15 bp, Homo sapiens
cctgccccccacaga

SEQ ID NO: 1844968 - DNA, 15 bp, Homo sapiens
ctgccccccacagac

SEQ ID NO: 1844969 - DNA, 15 bp, Homo sapiens
tgccccccacagacc

SEQ ID NO: 1844970 - DNA, 15 bp, Homo sapiens
gccccccacagaccc

SEQ ID NO: 1844971 - DNA, 15 bp, Homo sapiens
ccccccacagacccc

SEQ ID NO: 1844972 - DNA, 15 bp, Homo sapiens
cccccacagaccccc

SEQ ID NO: 1844973 - DNA, 15 bp, Homo sapiens
ccccacagacccccc

SEQ ID NO: 1844974 - DNA, 15 bp, Homo sapiens
cccacagacccccca

SEQ ID NO: 1844975 - DNA, 15 bp, Homo sapiens
ccacagaccccccaa

SEQ ID NO: 1844976 - DNA, 15 bp, Homo sapiens
cacagaccccccaaa

SEQ ID NO: 1844977 - DNA, 15 bp, Homo sapiens
acagaccccccaaaa

SEQ ID NO: 1844978 - DNA, 15 bp, Homo sapiens
cagaccccccaaaag

SEQ ID NO: 1844979 - DNA, 15 bp, Homo sapiens
agaccccccaaaagg

SEQ ID NO: 1844980 - DNA, 15 bp, Homo sapiens
gaccccccaaaaggg

SEQ ID NO: 1844981 - DNA, 15 bp, Homo sapiens
accccccaaaagggt

SEQ ID NO: 1844982 - DNA, 15 bp, Homo sapiens
ccccccaaaagggtg

SEQ ID NO: 1844983 - DNA, 15 bp, Homo sapiens
cccccaaaagggtga

SEQ ID NO: 1844984 - DNA, 15 bp, Homo sapiens
ccccaaaagggtgaa

SEQ ID NO: 1844985 - DNA, 15 bp, Homo sapiens
cccaaaagggtgaag

SEQ ID NO: 1844986 - DNA, 15 bp, Homo sapiens
ccaaaagggtgaagg

SEQ ID NO: 1844987 - DNA, 15 bp, Homo sapiens
caaaagggtgaaggc

SEQ ID NO: 1844988 - DNA, 15 bp, Homo sapiens
aaaagggtgaaggcc

SEQ ID NO: 1844989 - DNA, 15 bp, Homo sapiens
aaagggtgaaggcca

SEQ ID NO: 1844990 - DNA, 15 bp, Homo sapiens
aagggtgaaggccaa

SEQ ID NO: 1844991 - DNA, 15 bp, Homo sapiens
agggtgaaggccaag

SEQ ID NO: 1844992 - DNA, 15 bp, Homo sapiens
gggtgaaggccaagg

SEQ ID NO: 1844993 - DNA, 15 bp, Homo sapiens
ggtgaaggccaaggc

SEQ ID NO: 1844994 - DNA, 15 bp, Homo sapiens
gtgaaggccaaggcg

SEQ ID NO: 1844995 - DNA, 15 bp, Homo sapiens
tgaaggccaaggcgg

SEQ ID NO: 1844996 - DNA, 15 bp, Homo sapiens
gaaggccaaggcggt

SEQ ID NO: 1844997 - DNA, 15 bp, Homo sapiens
aaggccaaggcggtc

SEQ ID NO: 1844998 - DNA, 15 bp, Homo sapiens
aggccaaggcggtcc

SEQ ID NO: 1844999 - DNA, 15 bp, Homo sapiens
ggccaaggcggtccc

SEQ ID NO: 1845000 - DNA, 15 bp, Homo sapiens
gccaaggcggtcccc

SEQ ID NO: 1845001 - DNA, 15 bp, Homo sapiens
ccaaggcggtcccca

SEQ ID NO: 1845002 - DNA, 15 bp, Homo sapiens
caaggcggtccccag

SEQ ID NO: 1845003 - DNA, 15 bp, Homo sapiens
aaggcggtccccagc

SEQ ID NO: 1845004 - DNA, 15 bp, Homo sapiens
aggcggtccccagct

SEQ ID NO: 1845005 - DNA, 15 bp, Homo sapiens
ggcggtccccagctg

SEQ ID NO: 1845006 - DNA, 15 bp, Homo sapiens
gcggtccccagctga

SEQ ID NO: 1845007 - DNA, 15 bp, Homo sapiens
cggtccccagctgac

SEQ ID NO: 1845008 - DNA, 15 bp, Homo sapiens
ggtccccagctgacc

SEQ ID NO: 1845009 - DNA, 15 bp, Homo sapiens
gtccccagctgacca

SEQ ID NO: 1845010 - DNA, 15 bp, Homo sapiens
tccccagctgaccag

SEQ ID NO: 1845011 - DNA, 15 bp, Homo sapiens
ccccagctgaccagg

SEQ ID NO: 1845012 - DNA, 15 bp, Homo sapiens
cccagctgaccaggg

SEQ ID NO: 1845013 - DNA, 15 bp, Homo sapiens
ccagctgaccagggt

SEQ ID NO: 1845014 - DNA, 15 bp, Homo sapiens
cagctgaccagggtg

SEQ ID NO: 1845015 - DNA, 15 bp, Homo sapiens
agctgaccagggtgc

SEQ ID NO: 1845016 - DNA, 15 bp, Homo sapiens
gctgaccagggtgct

SEQ ID NO: 1845017 - DNA, 15 bp, Homo sapiens
ctgaccagggtgctt

SEQ ID NO: 1845018 - DNA, 15 bp, Homo sapiens
tgaccagggtgcttg

SEQ ID NO: 1845019 - DNA, 15 bp, Homo sapiens
gaccagggtgcttgg

SEQ ID NO: 1845020 - DNA, 15 bp, Homo sapiens
accagggtgcttggg

SEQ ID NO: 1845021 - DNA, 15 bp, Homo sapiens
ccagggtgcttgggg

SEQ ID NO: 1845022 - DNA, 15 bp, Homo sapiens
cagggtgcttgggga

SEQ ID NO: 1845023 - DNA, 15 bp, Homo sapiens
agggtgcttggggag

SEQ ID NO: 1845024 - DNA, 15 bp, Homo sapiens
gggtgcttggggagg

SEQ ID NO: 1845025 - DNA, 15 bp, Homo sapiens
ggtgcttggggaggg

SEQ ID NO: 1845026 - DNA, 15 bp, Homo sapiens
gtgcttggggagggt

SEQ ID NO: 1845027 - DNA, 15 bp, Homo sapiens
tgcttggggagggtg

SEQ ID NO: 1845028 - DNA, 15 bp, Homo sapiens
gcttggggagggtgg

SEQ ID NO: 1845029 - DNA, 15 bp, Homo sapiens
cttggggagggtggg

SEQ ID NO: 1845030 - DNA, 15 bp, Homo sapiens
ttggggagggtgggg

SEQ ID NO: 1845031 - DNA, 15 bp, Homo sapiens
tggggagggtggggc

SEQ ID NO: 1845032 - DNA, 15 bp, Homo sapiens
ggggagggtggggct

SEQ ID NO: 1845033 - DNA, 15 bp, Homo sapiens
gggagggtggggctt

SEQ ID NO: 1845034 - DNA, 15 bp, Homo sapiens
ggagggtggggcttt

SEQ ID NO: 1845035 - DNA, 15 bp, Homo sapiens
gagggtggggctttt

SEQ ID NO: 1845036 - DNA, 15 bp, Homo sapiens
agggtggggcttttt

SEQ ID NO: 1845037 - DNA, 15 bp, Homo sapiens
gggtggggctttttg

SEQ ID NO: 1845038 - DNA, 15 bp, Homo sapiens
ggtggggctttttgt

SEQ ID NO: 1845039 - DNA, 15 bp, Homo sapiens
gtggggctttttgta

SEQ ID NO: 1845040 - DNA, 15 bp, Homo sapiens
tggggctttttgtag

SEQ ID NO: 1845041 - DNA, 15 bp, Homo sapiens
ggggctttttgtaga

SEQ ID NO: 1845042 - DNA, 15 bp, Homo sapiens
gggctttttgtagaa

SEQ ID NO: 1845043 - DNA, 15 bp, Homo sapiens
ggctttttgtagaaa

SEQ ID NO: 1845044 - DNA, 15 bp, Homo sapiens
gctttttgtagaaac

SEQ ID NO: 1845045 - DNA, 15 bp, Homo sapiens
ctttttgtagaaact

SEQ ID NO: 1845046 - DNA, 15 bp, Homo sapiens
tttttgtagaaactg

SEQ ID NO: 1845047 - DNA, 15 bp, Homo sapiens
ttttgtagaaactgt

SEQ ID NO: 1845048 - DNA, 15 bp, Homo sapiens
tttgtagaaactgtg

SEQ ID NO: 1845049 - DNA, 15 bp, Homo sapiens
ttgtagaaactgtgg

SEQ ID NO: 1845050 - DNA, 15 bp, Homo sapiens
tgtagaaactgtgga

SEQ ID NO: 1845051 - DNA, 15 bp, Homo sapiens
gtagaaactgtggat

SEQ ID NO: 1845052 - DNA, 15 bp, Homo sapiens
tagaaactgtggatt

SEQ ID NO: 1845053 - DNA, 15 bp, Homo sapiens
agaaactgtggattc

SEQ ID NO: 1845054 - DNA, 15 bp, Homo sapiens
gaaactgtggattct

SEQ ID NO: 1845055 - DNA, 15 bp, Homo sapiens
aaactgtggattctt

SEQ ID NO: 1845056 - DNA, 15 bp, Homo sapiens
aactgtggattcttt

SEQ ID NO: 1845057 - DNA, 15 bp, Homo sapiens
actgtggattctttt

SEQ ID NO: 1845058 - DNA, 15 bp, Homo sapiens
ctgtggattcttttt

SEQ ID NO: 1845059 - DNA, 15 bp, Homo sapiens
tgtggattctttttc

SEQ ID NO: 1845060 - DNA, 15 bp, Homo sapiens
gtggattctttttct

SEQ ID NO: 1845061 - DNA, 15 bp, Homo sapiens
tggattctttttctc

SEQ ID NO: 1845062 - DNA, 15 bp, Homo sapiens
ggattctttttctct

SEQ ID NO: 1845063 - DNA, 15 bp, Homo sapiens
gattctttttctctc

SEQ ID NO: 1845064 - DNA, 15 bp, Homo sapiens
attctttttctctcg

SEQ ID NO: 1845065 - DNA, 15 bp, Homo sapiens
ttctttttctctcgt

SEQ ID NO: 1845066 - DNA, 15 bp, Homo sapiens
tctttttctctcgtg

SEQ ID NO: 1845067 - DNA, 15 bp, Homo sapiens
ctttttctctcgtgg

SEQ ID NO: 1845068 - DNA, 15 bp, Homo sapiens
tttttctctcgtggt

SEQ ID NO: 1845069 - DNA, 15 bp, Homo sapiens
ttttctctcgtggtc

SEQ ID NO: 1845070 - DNA, 15 bp, Homo sapiens
tttctctcgtggtct

SEQ ID NO: 1845071 - DNA, 15 bp, Homo sapiens
ttctctcgtggtctc

SEQ ID NO: 1845072 - DNA, 15 bp, Homo sapiens
tctctcgtggtctca

SEQ ID NO: 1845073 - DNA, 15 bp, Homo sapiens
ctctcgtggtctcac

SEQ ID NO: 1845074 - DNA, 15 bp, Homo sapiens
tctcgtggtctcact

SEQ ID NO: 1845075 - DNA, 15 bp, Homo sapiens
ctcgtggtctcactt

SEQ ID NO: 1845076 - DNA, 15 bp, Homo sapiens
tcgtggtctcacttt

SEQ ID NO: 1845077 - DNA, 15 bp, Homo sapiens
cgtggtctcactttg

SEQ ID NO: 1845078 - DNA, 15 bp, Homo sapiens
gtggtctcactttgt

SEQ ID NO: 1845079 - DNA, 15 bp, Homo sapiens
tggtctcactttgtt

SEQ ID NO: 1845080 - DNA, 15 bp, Homo sapiens
ggtctcactttgtta

SEQ ID NO: 1845081 - DNA, 15 bp, Homo sapiens
gtctcactttgttac

SEQ ID NO: 1845082 - DNA, 15 bp, Homo sapiens
tctcactttgttact

SEQ ID NO: 1845083 - DNA, 15 bp, Homo sapiens
ctcactttgttactt

SEQ ID NO: 1845084 - DNA, 15 bp, Homo sapiens
tcactttgttacttg

SEQ ID NO: 1845085 - DNA, 15 bp, Homo sapiens
cactttgttacttgt

SEQ ID NO: 1845086 - DNA, 15 bp, Homo sapiens
actttgttacttgtt

SEQ ID NO: 1845087 - DNA, 15 bp, Homo sapiens
ctttgttacttgttt

SEQ ID NO: 1845088 - DNA, 15 bp, Homo sapiens
tttgttacttgtttc

SEQ ID NO: 1845089 - DNA, 15 bp, Homo sapiens
ttgttacttgtttct

SEQ ID NO: 1845090 - DNA, 15 bp, Homo sapiens
tgttacttgtttctg

SEQ ID NO: 1845091 - DNA, 15 bp, Homo sapiens
gttacttgtttctgt

SEQ ID NO: 1845092 - DNA, 15 bp, Homo sapiens
ttacttgtttctgtc

SEQ ID NO: 1845093 - DNA, 15 bp, Homo sapiens
tacttgtttctgtcc

SEQ ID NO: 1845094 - DNA, 15 bp, Homo sapiens
acttgtttctgtccc

SEQ ID NO: 1845095 - DNA, 15 bp, Homo sapiens
cttgtttctgtcccc

SEQ ID NO: 1845096 - DNA, 15 bp, Homo sapiens
ttgtttctgtccccg

SEQ ID NO: 1845097 - DNA, 15 bp, Homo sapiens
tgtttctgtccccgg

SEQ ID NO: 1845098 - DNA, 15 bp, Homo sapiens
gtttctgtccccggg

SEQ ID NO: 1845099 - DNA, 15 bp, Homo sapiens
tttctgtccccggga

SEQ ID NO: 1845100 - DNA, 15 bp, Homo sapiens
ttctgtccccgggag

SEQ ID NO: 1845101 - DNA, 15 bp, Homo sapiens
tctgtccccgggagc

SEQ ID NO: 1845102 - DNA, 15 bp, Homo sapiens
ctgtccccgggagcc

SEQ ID NO: 1845103 - DNA, 15 bp, Homo sapiens
tgtccccgggagcct

SEQ ID NO: 1845104 - DNA, 15 bp, Homo sapiens
gtccccgggagcctc

SEQ ID NO: 1845105 - DNA, 15 bp, Homo sapiens
tccccgggagcctca

SEQ ID NO: 1845106 - DNA, 15 bp, Homo sapiens
ccccgggagcctcag

SEQ ID NO: 1845107 - DNA, 15 bp, Homo sapiens
cccgggagcctcagg

SEQ ID NO: 1845108 - DNA, 15 bp, Homo sapiens
ccgggagcctcaggg

SEQ ID NO: 1845109 - DNA, 15 bp, Homo sapiens
cgggagcctcagggc

SEQ ID NO: 1845110 - DNA, 15 bp, Homo sapiens
gggagcctcagggct

SEQ ID NO: 1845111 - DNA, 15 bp, Homo sapiens
ggagcctcagggctc

SEQ ID NO: 1845112 - DNA, 15 bp, Homo sapiens
gagcctcagggctct

SEQ ID NO: 1845113 - DNA, 15 bp, Homo sapiens
agcctcagggctctg

SEQ ID NO: 1845114 - DNA, 15 bp, Homo sapiens
gcctcagggctctga

SEQ ID NO: 1845115 - DNA, 15 bp, Homo sapiens
cctcagggctctgag

SEQ ID NO: 1845116 - DNA, 15 bp, Homo sapiens
ctcagggctctgaga

SEQ ID NO: 1845117 - DNA, 15 bp, Homo sapiens
tcagggctctgagag

SEQ ID NO: 1845118 - DNA, 15 bp, Homo sapiens
cagggctctgagagc

SEQ ID NO: 1845119 - DNA, 15 bp, Homo sapiens
agggctctgagagct

SEQ ID NO: 1845120 - DNA, 15 bp, Homo sapiens
gggctctgagagctg

SEQ ID NO: 1845121 - DNA, 15 bp, Homo sapiens
ggctctgagagctgt

SEQ ID NO: 1845122 - DNA, 15 bp, Homo sapiens
gctctgagagctgtg

SEQ ID NO: 1845123 - DNA, 15 bp, Homo sapiens
ctctgagagctgtgc

SEQ ID NO: 1845124 - DNA, 15 bp, Homo sapiens
tctgagagctgtgct

SEQ ID NO: 1845125 - DNA, 15 bp, Homo sapiens
ctgagagctgtgctc

SEQ ID NO: 1845126 - DNA, 15 bp, Homo sapiens
tgagagctgtgctcc

SEQ ID NO: 1845127 - DNA, 15 bp, Homo sapiens
gagagctgtgctcca

SEQ ID NO: 1845128 - DNA, 15 bp, Homo sapiens
agagctgtgctccag

SEQ ID NO: 1845129 - DNA, 15 bp, Homo sapiens
gagctgtgctccagg

SEQ ID NO: 1845130 - DNA, 15 bp, Homo sapiens
agctgtgctccaggc

SEQ ID NO: 1845131 - DNA, 15 bp, Homo sapiens
gctgtgctccaggcc

SEQ ID NO: 1845132 - DNA, 15 bp, Homo sapiens
ctgtgctccaggcca

SEQ ID NO: 1845133 - DNA, 15 bp, Homo sapiens
tgtgctccaggccag

SEQ ID NO: 1845134 - DNA, 15 bp, Homo sapiens
gtgctccaggccagg

SEQ ID NO: 1845135 - DNA, 15 bp, Homo sapiens
tgctccaggccaggg

SEQ ID NO: 1845136 - DNA, 15 bp, Homo sapiens
gctccaggccagggg

SEQ ID NO: 1845137 - DNA, 15 bp, Homo sapiens
ctccaggccaggggt

SEQ ID NO: 1845138 - DNA, 15 bp, Homo sapiens
tccaggccaggggtt

SEQ ID NO: 1845139 - DNA, 15 bp, Homo sapiens
ccaggccaggggtta

SEQ ID NO: 1845140 - DNA, 15 bp, Homo sapiens
caggccaggggttac

SEQ ID NO: 1845141 - DNA, 15 bp, Homo sapiens
aggccaggggttaca

SEQ ID NO: 1845142 - DNA, 15 bp, Homo sapiens
ggccaggggttacac

SEQ ID NO: 1845143 - DNA, 15 bp, Homo sapiens
gccaggggttacacc

SEQ ID NO: 1845144 - DNA, 15 bp, Homo sapiens
ccaggggttacacct

SEQ ID NO: 1845145 - DNA, 15 bp, Homo sapiens
caggggttacacctg

SEQ ID NO: 1845146 - DNA, 15 bp, Homo sapiens
aggggttacacctgc

SEQ ID NO: 1845147 - DNA, 15 bp, Homo sapiens
ggggttacacctgcc

SEQ ID NO: 1845148 - DNA, 15 bp, Homo sapiens
gggttacacctgccc

SEQ ID NO: 1845149 - DNA, 15 bp, Homo sapiens
ggttacacctgccct

SEQ ID NO: 1845150 - DNA, 15 bp, Homo sapiens
gttacacctgccctc

SEQ ID NO: 1845151 - DNA, 15 bp, Homo sapiens
ttacacctgccctcc

SEQ ID NO: 1845152 - DNA, 15 bp, Homo sapiens
tacacctgccctccg

SEQ ID NO: 1845153 - DNA, 15 bp, Homo sapiens
acacctgccctccgt

SEQ ID NO: 1845154 - DNA, 15 bp, Homo sapiens
cacctgccctccgtg

SEQ ID NO: 1845155 - DNA, 15 bp, Homo sapiens
acctgccctccgtgg

SEQ ID NO: 1845156 - DNA, 15 bp, Homo sapiens
cctgccctccgtggt

SEQ ID NO: 1845157 - DNA, 15 bp, Homo sapiens
ctgccctccgtggtc

SEQ ID NO: 1845158 - DNA, 15 bp, Homo sapiens
tgccctccgtggtcc

SEQ ID NO: 1845159 - DNA, 15 bp, Homo sapiens
gccctccgtggtccc

SEQ ID NO: 1845160 - DNA, 15 bp, Homo sapiens
ccctccgtggtccct

SEQ ID NO: 1845161 - DNA, 15 bp, Homo sapiens
cctccgtggtccctc

SEQ ID NO: 1845162 - DNA, 15 bp, Homo sapiens
ctccgtggtccctcc

SEQ ID NO: 1845163 - DNA, 15 bp, Homo sapiens
tccgtggtccctccc

SEQ ID NO: 1845164 - DNA, 15 bp, Homo sapiens
ccgtggtccctccct

SEQ ID NO: 1845165 - DNA, 15 bp, Homo sapiens
cgtggtccctccctg

SEQ ID NO: 1845166 - DNA, 15 bp, Homo sapiens
gtggtccctccctgg

SEQ ID NO: 1845167 - DNA, 15 bp, Homo sapiens
tggtccctccctggg

SEQ ID NO: 1845168 - DNA, 15 bp, Homo sapiens
ggtccctccctgggc

SEQ ID NO: 1845169 - DNA, 15 bp, Homo sapiens
gtccctccctgggct

SEQ ID NO: 1845170 - DNA, 15 bp, Homo sapiens
tccctccctgggctc

SEQ ID NO: 1845171 - DNA, 15 bp, Homo sapiens
ccctccctgggctcc

SEQ ID NO: 1845172 - DNA, 15 bp, Homo sapiens
cctccctgggctcca

SEQ ID NO: 1845173 - DNA, 15 bp, Homo sapiens
ctccctgggctccag

SEQ ID NO: 1845174 - DNA, 15 bp, Homo sapiens
tccctgggctccagg

SEQ ID NO: 1845175 - DNA, 15 bp, Homo sapiens
ctgggctccaggggc

SEQ ID NO: 1845176 - DNA, 15 bp, Homo sapiens
tgggctccaggggcc

SEQ ID NO: 1845177 - DNA, 15 bp, Homo sapiens
gggctccaggggcct

SEQ ID NO: 1845178 - DNA, 15 bp, Homo sapiens
ggctccaggggcctc

SEQ ID NO: 1845179 - DNA, 15 bp, Homo sapiens
gctccaggggcctct

SEQ ID NO: 1845180 - DNA, 15 bp, Homo sapiens
ctccaggggcctctg

SEQ ID NO: 1845181 - DNA, 15 bp, Homo sapiens
tccaggggcctctgg

SEQ ID NO: 1845182 - DNA, 15 bp, Homo sapiens
ccaggggcctctggt

SEQ ID NO: 1845183 - DNA, 15 bp, Homo sapiens
caggggcctctggtg

SEQ ID NO: 1845184 - DNA, 15 bp, Homo sapiens
aggggcctctggtgc

SEQ ID NO: 1845185 - DNA, 15 bp, Homo sapiens
ggggcctctggtgcg

SEQ ID NO: 1845186 - DNA, 15 bp, Homo sapiens
gggcctctggtgcgg

SEQ ID NO: 1845187 - DNA, 15 bp, Homo sapiens
ggcctctggtgcggt

SEQ ID NO: 1845188 - DNA, 15 bp, Homo sapiens
gcctctggtgcggtt

SEQ ID NO: 1845189 - DNA, 15 bp, Homo sapiens
cctctggtgcggttc

SEQ ID NO: 1845190 - DNA, 15 bp, Homo sapiens
ctctggtgcggttcc

SEQ ID NO: 1845191 - DNA, 15 bp, Homo sapiens
tctggtgcggttccg

SEQ ID NO: 1845192 - DNA, 15 bp, Homo sapiens
ctggtgcggttccgg

SEQ ID NO: 1845193 - DNA, 15 bp, Homo sapiens
tggtgcggttccggg

SEQ ID NO: 1845194 - DNA, 15 bp, Homo sapiens
ggtgcggttccggga

SEQ ID NO: 1845195 - DNA, 15 bp, Homo sapiens
gtgcggttccgggaa

SEQ ID NO: 1845196 - DNA, 15 bp, Homo sapiens
tgcggttccgggaag

SEQ ID NO: 1845197 - DNA, 15 bp, Homo sapiens
gcggttccgggaaga

SEQ ID NO: 1845198 - DNA, 15 bp, Homo sapiens
cggttccgggaagaa

SEQ ID NO: 1845199 - DNA, 15 bp, Homo sapiens
ggttccgggaagaag

SEQ ID NO: 1845200 - DNA, 15 bp, Homo sapiens
gttccgggaagaagc

SEQ ID NO: 1845201 - DNA, 15 bp, Homo sapiens
ttccgggaagaagcc

SEQ ID NO: 1845202 - DNA, 15 bp, Homo sapiens
tccgggaagaagcca

SEQ ID NO: 1845203 - DNA, 15 bp, Homo sapiens
ccgggaagaagccac

SEQ ID NO: 1845204 - DNA, 15 bp, Homo sapiens
cgggaagaagccaca

SEQ ID NO: 1845205 - DNA, 15 bp, Homo sapiens
gggaagaagccacac

SEQ ID NO: 1845206 - DNA, 15 bp, Homo sapiens
ggaagaagccacacc

SEQ ID NO: 1845207 - DNA, 15 bp, Homo sapiens
gaagaagccacaccc

SEQ ID NO: 1845208 - DNA, 15 bp, Homo sapiens
aagaagccacacccc

SEQ ID NO: 1845209 - DNA, 15 bp, Homo sapiens
agaagccacacccca

SEQ ID NO: 1845210 - DNA, 15 bp, Homo sapiens
gaagccacaccccag

SEQ ID NO: 1845211 - DNA, 15 bp, Homo sapiens
aagccacaccccaga

SEQ ID NO: 1845212 - DNA, 15 bp, Homo sapiens
agccacaccccagag

SEQ ID NO: 1845213 - DNA, 15 bp, Homo sapiens
gccacaccccagagg

SEQ ID NO: 1845214 - DNA, 15 bp, Homo sapiens
ccacaccccagaggt

SEQ ID NO: 1845215 - DNA, 15 bp, Homo sapiens
cacaccccagaggtg

SEQ ID NO: 1845216 - DNA, 15 bp, Homo sapiens
acaccccagaggtga

SEQ ID NO: 1845217 - DNA, 15 bp, Homo sapiens
caccccagaggtgac

SEQ ID NO: 1845218 - DNA, 15 bp, Homo sapiens
accccagaggtgaca

SEQ ID NO: 1845219 - DNA, 15 bp, Homo sapiens
ccccagaggtgacag

SEQ ID NO: 1845220 - DNA, 15 bp, Homo sapiens
cccagaggtgacagg

SEQ ID NO: 1845221 - DNA, 15 bp, Homo sapiens
ccagaggtgacaggt

SEQ ID NO: 1845222 - DNA, 15 bp, Homo sapiens
cagaggtgacaggtg

SEQ ID NO: 1845223 - DNA, 15 bp, Homo sapiens
agaggtgacaggtga

SEQ ID NO: 1845224 - DNA, 15 bp, Homo sapiens
gaggtgacaggtgag

SEQ ID NO: 1845225 - DNA, 15 bp, Homo sapiens
aggtgacaggtgagc

SEQ ID NO: 1845226 - DNA, 15 bp, Homo sapiens
ggtgacaggtgagcc

SEQ ID NO: 1845227 - DNA, 15 bp, Homo sapiens
gtgacaggtgagccc

SEQ ID NO: 1845228 - DNA, 15 bp, Homo sapiens
tgacaggtgagcccc

SEQ ID NO: 1845229 - DNA, 15 bp, Homo sapiens
gacaggtgagcccct

SEQ ID NO: 1845230 - DNA, 15 bp, Homo sapiens
acaggtgagcccctg

SEQ ID NO: 1845231 - DNA, 15 bp, Homo sapiens
caggtgagcccctgc

SEQ ID NO: 1845232 - DNA, 15 bp, Homo sapiens
aggtgagcccctgcc

SEQ ID NO: 1845233 - DNA, 15 bp, Homo sapiens
ggtgagcccctgcca

SEQ ID NO: 1845234 - DNA, 15 bp, Homo sapiens
gtgagcccctgccac

SEQ ID NO: 1845235 - DNA, 15 bp, Homo sapiens
tgagcccctgccaca

SEQ ID NO: 1845236 - DNA, 15 bp, Homo sapiens
gagcccctgccacac

SEQ ID NO: 1845237 - DNA, 15 bp, Homo sapiens
agcccctgccacacc

SEQ ID NO: 1845238 - DNA, 15 bp, Homo sapiens
gcccctgccacaccc

SEQ ID NO: 1845239 - DNA, 15 bp, Homo sapiens
cccctgccacacccc

SEQ ID NO: 1845240 - DNA, 15 bp, Homo sapiens
ccctgccacacccca

SEQ ID NO: 1845241 - DNA, 15 bp, Homo sapiens
cctgccacaccccag

SEQ ID NO: 1845242 - DNA, 15 bp, Homo sapiens
ctgccacaccccagc

SEQ ID NO: 1845243 - DNA, 15 bp, Homo sapiens
tgccacaccccagcc

SEQ ID NO: 1845244 - DNA, 15 bp, Homo sapiens
gccacaccccagcct

SEQ ID NO: 1845245 - DNA, 15 bp, Homo sapiens
ccacaccccagcctc

SEQ ID NO: 1845246 - DNA, 15 bp, Homo sapiens
cacaccccagcctct

SEQ ID NO: 1845247 - DNA, 15 bp, Homo sapiens
acaccccagcctctg

SEQ ID NO: 1845248 - DNA, 15 bp, Homo sapiens
caccccagcctctga

SEQ ID NO: 1845249 - DNA, 15 bp, Homo sapiens
accccagcctctgac

SEQ ID NO: 1845250 - DNA, 15 bp, Homo sapiens
ccccagcctctgact

SEQ ID NO: 1845251 - DNA, 15 bp, Homo sapiens
cccagcctctgactt

SEQ ID NO: 1845252 - DNA, 15 bp, Homo sapiens
ccagcctctgacttg

SEQ ID NO: 1845253 - DNA, 15 bp, Homo sapiens
cagcctctgacttgc

SEQ ID NO: 1845254 - DNA, 15 bp, Homo sapiens
agcctctgacttgct

SEQ ID NO: 1845255 - DNA, 15 bp, Homo sapiens
gcctctgacttgctg

SEQ ID NO: 1845256 - DNA, 15 bp, Homo sapiens
cctctgacttgctgt

SEQ ID NO: 1845257 - DNA, 15 bp, Homo sapiens
ctctgacttgctgtg

SEQ ID NO: 1845258 - DNA, 15 bp, Homo sapiens
tctgacttgctgtgt

SEQ ID NO: 1845259 - DNA, 15 bp, Homo sapiens
ctgacttgctgtgtt

SEQ ID NO: 1845260 - DNA, 15 bp, Homo sapiens
tgacttgctgtgttg

SEQ ID NO: 1845261 - DNA, 15 bp, Homo sapiens
gacttgctgtgttgt

SEQ ID NO: 1845262 - DNA, 15 bp, Homo sapiens
acttgctgtgttgtc

SEQ ID NO: 1845263 - DNA, 15 bp, Homo sapiens
cttgctgtgttgtcc

SEQ ID NO: 1845264 - DNA, 15 bp, Homo sapiens
ttgctgtgttgtcca

SEQ ID NO: 1845265 - DNA, 15 bp, Homo sapiens
tgctgtgttgtccag

SEQ ID NO: 1845266 - DNA, 15 bp, Homo sapiens
gctgtgttgtccaga

SEQ ID NO: 1845267 - DNA, 15 bp, Homo sapiens
ctgtgttgtccagag

SEQ ID NO: 1845268 - DNA, 15 bp, Homo sapiens
tgtgttgtccagagg

SEQ ID NO: 1845269 - DNA, 15 bp, Homo sapiens
gtgttgtccagaggt

SEQ ID NO: 1845270 - DNA, 15 bp, Homo sapiens
tgttgtccagaggtg

SEQ ID NO: 1845271 - DNA, 15 bp, Homo sapiens
gttgtccagaggtga

SEQ ID NO: 1845272 - DNA, 15 bp, Homo sapiens
ttgtccagaggtgag

SEQ ID NO: 1845273 - DNA, 15 bp, Homo sapiens
tgtccagaggtgagg

SEQ ID NO: 1845274 - DNA, 15 bp, Homo sapiens
gtccagaggtgaggc

SEQ ID NO: 1845275 - DNA, 15 bp, Homo sapiens
tccagaggtgaggct

SEQ ID NO: 1845276 - DNA, 15 bp, Homo sapiens
ccagaggtgaggctg

SEQ ID NO: 1845277 - DNA, 15 bp, Homo sapiens
cagaggtgaggctgg

SEQ ID NO: 1845278 - DNA, 15 bp, Homo sapiens
agaggtgaggctggg

SEQ ID NO: 1845279 - DNA, 15 bp, Homo sapiens
gaggtgaggctgggc

SEQ ID NO: 1845280 - DNA, 15 bp, Homo sapiens
aggtgaggctgggcc

SEQ ID NO: 1845281 - DNA, 15 bp, Homo sapiens
ggtgaggctgggccc

SEQ ID NO: 1845282 - DNA, 15 bp, Homo sapiens
gtgaggctgggccct

SEQ ID NO: 1845283 - DNA, 15 bp, Homo sapiens
tgaggctgggccctc

SEQ ID NO: 1845284 - DNA, 15 bp, Homo sapiens
gaggctgggccctcc

SEQ ID NO: 1845285 - DNA, 15 bp, Homo sapiens
aggctgggccctccc

SEQ ID NO: 1845286 - DNA, 15 bp, Homo sapiens
ggctgggccctccct

SEQ ID NO: 1845287 - DNA, 15 bp, Homo sapiens
gctgggccctccctg

SEQ ID NO: 1845288 - DNA, 15 bp, Homo sapiens
ctgggccctccctgg

SEQ ID NO: 1845289 - DNA, 15 bp, Homo sapiens
tgggccctccctggt

SEQ ID NO: 1845290 - DNA, 15 bp, Homo sapiens
gggccctccctggtc

SEQ ID NO: 1845291 - DNA, 15 bp, Homo sapiens
ggccctccctggtct

SEQ ID NO: 1845292 - DNA, 15 bp, Homo sapiens
gccctccctggtctc

SEQ ID NO: 1845293 - DNA, 15 bp, Homo sapiens
ccctccctggtctcc

SEQ ID NO: 1845294 - DNA, 15 bp, Homo sapiens
cctccctggtctcca

SEQ ID NO: 1845295 - DNA, 15 bp, Homo sapiens
ctccctggtctccag

SEQ ID NO: 1845296 - DNA, 15 bp, Homo sapiens
tccctggtctccagc

SEQ ID NO: 1845297 - DNA, 15 bp, Homo sapiens
ccctggtctccagct

SEQ ID NO: 1845298 - DNA, 15 bp, Homo sapiens
cctggtctccagctt

SEQ ID NO: 1845299 - DNA, 15 bp, Homo sapiens
ctggtctccagctta

SEQ ID NO: 1845300 - DNA, 15 bp, Homo sapiens
tggtctccagcttaa

SEQ ID NO: 1845301 - DNA, 15 bp, Homo sapiens
ggtctccagcttaaa

SEQ ID NO: 1845302 - DNA, 15 bp, Homo sapiens
gtctccagcttaaac

SEQ ID NO: 1845303 - DNA, 15 bp, Homo sapiens
tctccagcttaaaca

SEQ ID NO: 1845304 - DNA, 15 bp, Homo sapiens
ctccagcttaaacag

SEQ ID NO: 1845305 - DNA, 15 bp, Homo sapiens
tccagcttaaacagg

SEQ ID NO: 1845306 - DNA, 15 bp, Homo sapiens
ccagcttaaacagga

SEQ ID NO: 1845307 - DNA, 15 bp, Homo sapiens
cagcttaaacaggag

SEQ ID NO: 1845308 - DNA, 15 bp, Homo sapiens
agcttaaacaggagt

SEQ ID NO: 1845309 - DNA, 15 bp, Homo sapiens
gcttaaacaggagtg

SEQ ID NO: 1845310 - DNA, 15 bp, Homo sapiens
cttaaacaggagtga

SEQ ID NO: 1845311 - DNA, 15 bp, Homo sapiens
ttaaacaggagtgaa

SEQ ID NO: 1845312 - DNA, 15 bp, Homo sapiens
taaacaggagtgaac

SEQ ID NO: 1845313 - DNA, 15 bp, Homo sapiens
aaacaggagtgaact

SEQ ID NO: 1845314 - DNA, 15 bp, Homo sapiens
aacaggagtgaactc

SEQ ID NO: 1845315 - DNA, 15 bp, Homo sapiens
acaggagtgaactcc

SEQ ID NO: 1845316 - DNA, 15 bp, Homo sapiens
caggagtgaactccc

SEQ ID NO: 1845317 - DNA, 15 bp, Homo sapiens
aggagtgaactccct

SEQ ID NO: 1845318 - DNA, 15 bp, Homo sapiens
ggagtgaactccctc

SEQ ID NO: 1845319 - DNA, 15 bp, Homo sapiens
gagtgaactccctct

SEQ ID NO: 1845320 - DNA, 15 bp, Homo sapiens
agtgaactccctctg

SEQ ID NO: 1845321 - DNA, 15 bp, Homo sapiens
gtgaactccctctgt

SEQ ID NO: 1845322 - DNA, 15 bp, Homo sapiens
tgaactccctctgtc

SEQ ID NO: 1845323 - DNA, 15 bp, Homo sapiens
gaactccctctgtcc

SEQ ID NO: 1845324 - DNA, 15 bp, Homo sapiens
aactccctctgtccc

SEQ ID NO: 1845325 - DNA, 15 bp, Homo sapiens
actccctctgtcccc

SEQ ID NO: 1845326 - DNA, 15 bp, Homo sapiens
ctccctctgtcccca

SEQ ID NO: 1845327 - DNA, 15 bp, Homo sapiens
tccctctgtccccag

SEQ ID NO: 1845328 - DNA, 15 bp, Homo sapiens
ccctctgtccccagg

SEQ ID NO: 1845329 - DNA, 15 bp, Homo sapiens
cctctgtccccaggg

SEQ ID NO: 1845330 - DNA, 15 bp, Homo sapiens
ctctgtccccagggc

SEQ ID NO: 1845331 - DNA, 15 bp, Homo sapiens
tctgtccccagggcc

SEQ ID NO: 1845332 - DNA, 15 bp, Homo sapiens
ctgtccccagggcct

SEQ ID NO: 1845333 - DNA, 15 bp, Homo sapiens
tgtccccagggcctc

SEQ ID NO: 1845334 - DNA, 15 bp, Homo sapiens
gtccccagggcctcc

SEQ ID NO: 1845335 - DNA, 15 bp, Homo sapiens
tccccagggcctccc

SEQ ID NO: 1845336 - DNA, 15 bp, Homo sapiens
ccccagggcctccct

SEQ ID NO: 1845337 - DNA, 15 bp, Homo sapiens
cccagggcctccctt

SEQ ID NO: 1845338 - DNA, 15 bp, Homo sapiens
ccagggcctcccttc

SEQ ID NO: 1845339 - DNA, 15 bp, Homo sapiens
cagggcctcccttct

SEQ ID NO: 1845340 - DNA, 15 bp, Homo sapiens
agggcctcccttctg

SEQ ID NO: 1845341 - DNA, 15 bp, Homo sapiens
gggcctcccttctgg

SEQ ID NO: 1845342 - DNA, 15 bp, Homo sapiens
ggcctcccttctggg

SEQ ID NO: 1845343 - DNA, 15 bp, Homo sapiens
gcctcccttctgggc

SEQ ID NO: 1845344 - DNA, 15 bp, Homo sapiens
cctcccttctgggcc

SEQ ID NO: 1845345 - DNA, 15 bp, Homo sapiens
ctcccttctgggccc

SEQ ID NO: 1845346 - DNA, 15 bp, Homo sapiens
tcccttctgggcccc

SEQ ID NO: 1845347 - DNA, 15 bp, Homo sapiens
cccttctgggccccc

SEQ ID NO: 1845348 - DNA, 15 bp, Homo sapiens
ccttctgggccccct

SEQ ID NO: 1845349 - DNA, 15 bp, Homo sapiens
cttctgggcccccta

SEQ ID NO: 1845350 - DNA, 15 bp, Homo sapiens
ttctgggccccctac

SEQ ID NO: 1845351 - DNA, 15 bp, Homo sapiens
tctgggccccctaca

SEQ ID NO: 1845352 - DNA, 15 bp, Homo sapiens
ctgggccccctacag

SEQ ID NO: 1845353 - DNA, 15 bp, Homo sapiens
tgggccccctacagc

SEQ ID NO: 1845354 - DNA, 15 bp, Homo sapiens
gggccccctacagcc

SEQ ID NO: 1845355 - DNA, 15 bp, Homo sapiens
ggccccctacagccc

SEQ ID NO: 1845356 - DNA, 15 bp, Homo sapiens
gccccctacagccca

SEQ ID NO: 1845357 - DNA, 15 bp, Homo sapiens
ccccctacagcccac

SEQ ID NO: 1845358 - DNA, 15 bp, Homo sapiens
cccctacagcccacc

SEQ ID NO: 1845359 - DNA, 15 bp, Homo sapiens
ccctacagcccaccc

SEQ ID NO: 1845360 - DNA, 15 bp, Homo sapiens
cctacagcccaccct

SEQ ID NO: 1845361 - DNA, 15 bp, Homo sapiens
ctacagcccacccta

SEQ ID NO: 1845362 - DNA, 15 bp, Homo sapiens
tacagcccaccctac

SEQ ID NO: 1845363 - DNA, 15 bp, Homo sapiens
acagcccaccctacc

SEQ ID NO: 1845364 - DNA, 15 bp, Homo sapiens
cagcccaccctaccc

SEQ ID NO: 1845365 - DNA, 15 bp, Homo sapiens
agcccaccctacccc

SEQ ID NO: 1845366 - DNA, 15 bp, Homo sapiens
gcccaccctacccct

SEQ ID NO: 1845367 - DNA, 15 bp, Homo sapiens
cccaccctacccctc

SEQ ID NO: 1845368 - DNA, 15 bp, Homo sapiens
ccaccctacccctcc

SEQ ID NO: 1845369 - DNA, 15 bp, Homo sapiens
caccctacccctcct

SEQ ID NO: 1845370 - DNA, 15 bp, Homo sapiens
accctacccctcctc

SEQ ID NO: 1845371 - DNA, 15 bp, Homo sapiens
ccctacccctcctcc

SEQ ID NO: 1845372 - DNA, 15 bp, Homo sapiens
cctacccctcctcca

SEQ ID NO: 1845373 - DNA, 15 bp, Homo sapiens
ctacccctcctccat

SEQ ID NO: 1845374 - DNA, 15 bp, Homo sapiens
tacccctcctccatg

SEQ ID NO: 1845375 - DNA, 15 bp, Homo sapiens
acccctcctccatgg

SEQ ID NO: 1845376 - DNA, 15 bp, Homo sapiens
cccctcctccatggg

SEQ ID NO: 1845377 - DNA, 15 bp, Homo sapiens
ccctcctccatgggc

SEQ ID NO: 1845378 - DNA, 15 bp, Homo sapiens
cctcctccatgggcc

SEQ ID NO: 1845379 - DNA, 15 bp, Homo sapiens
ctcctccatgggccc

SEQ ID NO: 1845380 - DNA, 15 bp, Homo sapiens
tcctccatgggccct

SEQ ID NO: 1845381 - DNA, 15 bp, Homo sapiens
cctccatgggccctg

SEQ ID NO: 1845382 - DNA, 15 bp, Homo sapiens
ctccatgggccctgc

SEQ ID NO: 1845383 - DNA, 15 bp, Homo sapiens
tccatgggccctgca

SEQ ID NO: 1845384 - DNA, 15 bp, Homo sapiens
ccatgggccctgcag

SEQ ID NO: 1845385 - DNA, 15 bp, Homo sapiens
catgggccctgcagg

SEQ ID NO: 1845386 - DNA, 15 bp, Homo sapiens
atgggccctgcagga

SEQ ID NO: 1845387 - DNA, 15 bp, Homo sapiens
tgggccctgcaggag

SEQ ID NO: 1845388 - DNA, 15 bp, Homo sapiens
gggccctgcaggagg

SEQ ID NO: 1845389 - DNA, 15 bp, Homo sapiens
ggccctgcaggaggg

SEQ ID NO: 1845390 - DNA, 15 bp, Homo sapiens
gccctgcaggagggg

SEQ ID NO: 1845391 - DNA, 15 bp, Homo sapiens
ccctgcaggagggga

SEQ ID NO: 1845392 - DNA, 15 bp, Homo sapiens
cctgcaggaggggag

SEQ ID NO: 1845393 - DNA, 15 bp, Homo sapiens
ctgcaggaggggaga

SEQ ID NO: 1845394 - DNA, 15 bp, Homo sapiens
tgcaggaggggagac

SEQ ID NO: 1845395 - DNA, 15 bp, Homo sapiens
gcaggaggggagacc

SEQ ID NO: 1845396 - DNA, 15 bp, Homo sapiens
caggaggggagaccc

SEQ ID NO: 1845397 - DNA, 15 bp, Homo sapiens
aggaggggagaccca

SEQ ID NO: 1845398 - DNA, 15 bp, Homo sapiens
ggaggggagacccac

SEQ ID NO: 1845399 - DNA, 15 bp, Homo sapiens
gaggggagacccacc

SEQ ID NO: 1845400 - DNA, 15 bp, Homo sapiens
aggggagacccacct

SEQ ID NO: 1845401 - DNA, 15 bp, Homo sapiens
ggggagacccacctt

SEQ ID NO: 1845402 - DNA, 15 bp, Homo sapiens
gggagacccaccttg

SEQ ID NO: 1845403 - DNA, 15 bp, Homo sapiens
ggagacccaccttga

SEQ ID NO: 1845404 - DNA, 15 bp, Homo sapiens
gagacccaccttgaa

SEQ ID NO: 1845405 - DNA, 15 bp, Homo sapiens
agacccaccttgaag

SEQ ID NO: 1845406 - DNA, 15 bp, Homo sapiens
gacccaccttgaagt

SEQ ID NO: 1845407 - DNA, 15 bp, Homo sapiens
acccaccttgaagtg

SEQ ID NO: 1845408 - DNA, 15 bp, Homo sapiens
cccaccttgaagtgg

SEQ ID NO: 1845409 - DNA, 15 bp, Homo sapiens
ccaccttgaagtggg

SEQ ID NO: 1845410 - DNA, 15 bp, Homo sapiens
caccttgaagtgggg

SEQ ID NO: 1845411 - DNA, 15 bp, Homo sapiens
accttgaagtggggg

SEQ ID NO: 1845412 - DNA, 15 bp, Homo sapiens
ccttgaagtggggga

SEQ ID NO: 1845413 - DNA, 15 bp, Homo sapiens
cttgaagtgggggat

SEQ ID NO: 1845414 - DNA, 15 bp, Homo sapiens
ttgaagtgggggatc

SEQ ID NO: 1845415 - DNA, 15 bp, Homo sapiens
tgaagtgggggatca

SEQ ID NO: 1845416 - DNA, 15 bp, Homo sapiens
gaagtgggggatcag

SEQ ID NO: 1845417 - DNA, 15 bp, Homo sapiens
aagtgggggatcagt

SEQ ID NO: 1845418 - DNA, 15 bp, Homo sapiens
agtgggggatcagta

SEQ ID NO: 1845419 - DNA, 15 bp, Homo sapiens
gtgggggatcagtag

SEQ ID NO: 1845420 - DNA, 15 bp, Homo sapiens
tgggggatcagtaga

SEQ ID NO: 1845421 - DNA, 15 bp, Homo sapiens
gggggatcagtagag

SEQ ID NO: 1845422 - DNA, 15 bp, Homo sapiens
ggggatcagtagagg

SEQ ID NO: 1845423 - DNA, 15 bp, Homo sapiens
gggatcagtagaggc

SEQ ID NO: 1845424 - DNA, 15 bp, Homo sapiens
ggatcagtagaggct

SEQ ID NO: 1845425 - DNA, 15 bp, Homo sapiens
gatcagtagaggctt

SEQ ID NO: 1845426 - DNA, 15 bp, Homo sapiens
atcagtagaggcttg

SEQ ID NO: 1845427 - DNA, 15 bp, Homo sapiens
tcagtagaggcttgc

SEQ ID NO: 1845428 - DNA, 15 bp, Homo sapiens
cagtagaggcttgca

SEQ ID NO: 1845429 - DNA, 15 bp, Homo sapiens
agtagaggcttgcac

SEQ ID NO: 1845430 - DNA, 15 bp, Homo sapiens
gtagaggcttgcact

SEQ ID NO: 1845431 - DNA, 15 bp, Homo sapiens
tagaggcttgcactg

SEQ ID NO: 1845432 - DNA, 15 bp, Homo sapiens
agaggcttgcactgc

SEQ ID NO: 1845433 - DNA, 15 bp, Homo sapiens
gaggcttgcactgcc

SEQ ID NO: 1845434 - DNA, 15 bp, Homo sapiens
aggcttgcactgcct

SEQ ID NO: 1845435 - DNA, 15 bp, Homo sapiens
ggcttgcactgcctt

SEQ ID NO: 1845436 - DNA, 15 bp, Homo sapiens
gcttgcactgccttt

SEQ ID NO: 1845437 - DNA, 15 bp, Homo sapiens
cttgcactgcctttg

SEQ ID NO: 1845438 - DNA, 15 bp, Homo sapiens
ttgcactgcctttgg

SEQ ID NO: 1845439 - DNA, 15 bp, Homo sapiens
tgcactgcctttggg

SEQ ID NO: 1845440 - DNA, 15 bp, Homo sapiens
gcactgcctttgggg

SEQ ID NO: 1845441 - DNA, 15 bp, Homo sapiens
cactgcctttggggc

SEQ ID NO: 1845442 - DNA, 15 bp, Homo sapiens
actgcctttggggct

SEQ ID NO: 1845443 - DNA, 15 bp, Homo sapiens
ctgcctttggggctg

SEQ ID NO: 1845444 - DNA, 15 bp, Homo sapiens
tgcctttggggctgg

SEQ ID NO: 1845445 - DNA, 15 bp, Homo sapiens
gcctttggggctgga

SEQ ID NO: 1845446 - DNA, 15 bp, Homo sapiens
cctttggggctggag

SEQ ID NO: 1845447 - DNA, 15 bp, Homo sapiens
ctttggggctggagg

SEQ ID NO: 1845448 - DNA, 15 bp, Homo sapiens
tttggggctggaggg

SEQ ID NO: 1845449 - DNA, 15 bp, Homo sapiens
ttggggctggaggga

SEQ ID NO: 1845450 - DNA, 15 bp, Homo sapiens
tggggctggagggag

SEQ ID NO: 1845451 - DNA, 15 bp, Homo sapiens
ggggctggagggaga

SEQ ID NO: 1845452 - DNA, 15 bp, Homo sapiens
gggctggagggagac

SEQ ID NO: 1845453 - DNA, 15 bp, Homo sapiens
ggctggagggagacg

SEQ ID NO: 1845454 - DNA, 15 bp, Homo sapiens
gctggagggagacgt

SEQ ID NO: 1845455 - DNA, 15 bp, Homo sapiens
ctggagggagacgtg

SEQ ID NO: 1845456 - DNA, 15 bp, Homo sapiens
tggagggagacgtgg

SEQ ID NO: 1845457 - DNA, 15 bp, Homo sapiens
ggagggagacgtggg

SEQ ID NO: 1845458 - DNA, 15 bp, Homo sapiens
gagggagacgtgggt

SEQ ID NO: 1845459 - DNA, 15 bp, Homo sapiens
agggagacgtgggtc

SEQ ID NO: 1845460 - DNA, 15 bp, Homo sapiens
gggagacgtgggtcc

SEQ ID NO: 1845461 - DNA, 15 bp, Homo sapiens
ggagacgtgggtcca

SEQ ID NO: 1845462 - DNA, 15 bp, Homo sapiens
gagacgtgggtccac

SEQ ID NO: 1845463 - DNA, 15 bp, Homo sapiens
agacgtgggtccacc

SEQ ID NO: 1845464 - DNA, 15 bp, Homo sapiens
gacgtgggtccacca

SEQ ID NO: 1845465 - DNA, 15 bp, Homo sapiens
acgtgggtccaccag

SEQ ID NO: 1845466 - DNA, 15 bp, Homo sapiens
cgtgggtccaccagg

SEQ ID NO: 1845467 - DNA, 15 bp, Homo sapiens
gtgggtccaccaggc

SEQ ID NO: 1845468 - DNA, 15 bp, Homo sapiens
tgggtccaccaggct

SEQ ID NO: 1845469 - DNA, 15 bp, Homo sapiens
gggtccaccaggctt

SEQ ID NO: 1845470 - DNA, 15 bp, Homo sapiens
ggtccaccaggcttc

SEQ ID NO: 1845471 - DNA, 15 bp, Homo sapiens
gtccaccaggcttct

SEQ ID NO: 1845472 - DNA, 15 bp, Homo sapiens
tccaccaggcttctg

SEQ ID NO: 1845473 - DNA, 15 bp, Homo sapiens
ccaccaggcttctgg

SEQ ID NO: 1845474 - DNA, 15 bp, Homo sapiens
caccaggcttctgga

SEQ ID NO: 1845475 - DNA, 15 bp, Homo sapiens
accaggcttctggaa

SEQ ID NO: 1845476 - DNA, 15 bp, Homo sapiens
ccaggcttctggaaa

SEQ ID NO: 1845477 - DNA, 15 bp, Homo sapiens
caggcttctggaaaa

SEQ ID NO: 1845478 - DNA, 15 bp, Homo sapiens
aggcttctggaaaag

SEQ ID NO: 1845479 - DNA, 15 bp, Homo sapiens
ggcttctggaaaagt

SEQ ID NO: 1845480 - DNA, 15 bp, Homo sapiens
gcttctggaaaagtc

SEQ ID NO: 1845481 - DNA, 15 bp, Homo sapiens
cttctggaaaagtcc

SEQ ID NO: 1845482 - DNA, 15 bp, Homo sapiens
ttctggaaaagtcct

SEQ ID NO: 1845483 - DNA, 15 bp, Homo sapiens
tctggaaaagtcctc

SEQ ID NO: 1845484 - DNA, 15 bp, Homo sapiens
ctggaaaagtcctca

SEQ ID NO: 1845485 - DNA, 15 bp, Homo sapiens
tggaaaagtcctcaa

SEQ ID NO: 1845486 - DNA, 15 bp, Homo sapiens
ggaaaagtcctcaat

SEQ ID NO: 1845487 - DNA, 15 bp, Homo sapiens
gaaaagtcctcaatg

SEQ ID NO: 1845488 - DNA, 15 bp, Homo sapiens
aaaagtcctcaatgc

SEQ ID NO: 1845489 - DNA, 15 bp, Homo sapiens
aaagtcctcaatgca

SEQ ID NO: 1845490 - DNA, 15 bp, Homo sapiens
aagtcctcaatgcaa

SEQ ID NO: 1845491 - DNA, 15 bp, Homo sapiens
agtcctcaatgcaat

SEQ ID NO: 1845492 - DNA, 15 bp, Homo sapiens
gtcctcaatgcaata

SEQ ID NO: 1845493 - DNA, 15 bp, Homo sapiens
tcctcaatgcaataa

SEQ ID NO: 1845494 - DNA, 15 bp, Homo sapiens
cctcaatgcaataaa

SEQ ID NO: 1845495 - DNA, 15 bp, Homo sapiens
ctcaatgcaataaaa

SEQ ID NO: 1845496 - DNA, 15 bp, Homo sapiens
tcaatgcaataaaaa

SEQ ID NO: 1845497 - DNA, 15 bp, Homo sapiens
caatgcaataaaaac

SEQ ID NO: 1845498 - DNA, 15 bp, Homo sapiens
aatgcaataaaaaca

SEQ ID NO: 1845499 - DNA, 15 bp, Homo sapiens
atgcaataaaaacaa

SEQ ID NO: 1845500 - DNA, 15 bp, Homo sapiens
tgcaataaaaacaat

SEQ ID NO: 1845501 - DNA, 15 bp, Homo sapiens
gcaataaaaacaatt

SEQ ID NO: 1845502 - DNA, 15 bp, Homo sapiens
caataaaaacaattt

SEQ ID NO: 1845503 - DNA, 15 bp, Homo sapiens
aataaaaacaatttc

SEQ ID NO: 1845504 - DNA, 15 bp, Homo sapiens
taaaaacaatttctt

SEQ ID NO: 1845505 - DNA, 15 bp, Homo sapiens
aaaaacaatttcttt

SEQ ID NO: 1845506 - DNA, 15 bp, Homo sapiens
aaaacaatttctttc

SEQ ID NO: 1845507 - DNA, 15 bp, Homo sapiens
aaacaatttctttct

SEQ ID NO: 1845508 - DNA, 15 bp, Homo sapiens
aacaatttctttctt

SEQ ID NO: 1845509 - DNA, 15 bp, Homo sapiens
acaatttctttcttg

SEQ ID NO: 1845510 - DNA, 15 bp, Homo sapiens
caatttctttcttgc

SEQ ID NO: 1845511 - DNA, 15 bp, Homo sapiens
aatttctttcttgca

SEQ ID NO: 1845512 - DNA, 15 bp, Homo sapiens
atttctttcttgcat

SEQ ID NO: 1845513 - DNA, 15 bp, Homo sapiens
tttctttcttgcatc

SEQ ID NO: 1845514 - DNA, 15 bp, Homo sapiens
ttctttcttgcatct

SEQ ID NO: 1845515 - DNA, 15 bp, Homo sapiens
tctttcttgcatctc

SEQ ID NO: 1845516 - DNA, 15 bp, Homo sapiens
ctttcttgcatctca

SEQ ID NO: 1845517 - DNA, 15 bp, Homo sapiens
tttcttgcatctcag

SEQ ID NO: 1845518 - DNA, 15 bp, Homo sapiens
ttcttgcatctcagt

SEQ ID NO: 1845519 - DNA, 15 bp, Homo sapiens
tcttgcatctcagtg

SEQ ID NO: 1845520 - DNA, 15 bp, Homo sapiens
cttgcatctcagtgt

SEQ ID NO: 1845521 - DNA, 15 bp, Homo sapiens
ttgcatctcagtgtg

SEQ ID NO: 1845522 - DNA, 15 bp, Homo sapiens
tgcatctcagtgtgt

SEQ ID NO: 1845523 - DNA, 15 bp, Homo sapiens
gcatctcagtgtgtt

SEQ ID NO: 1845524 - DNA, 15 bp, Homo sapiens
catctcagtgtgttt

SEQ ID NO: 1845525 - DNA, 15 bp, Homo sapiens
atctcagtgtgttta

SEQ ID NO: 1845526 - DNA, 15 bp, Homo sapiens
tctcagtgtgtttac

SEQ ID NO: 1845527 - DNA, 15 bp, Homo sapiens
ctcagtgtgtttact

SEQ ID NO: 1845528 - DNA, 15 bp, Homo sapiens
tcagtgtgtttactt

SEQ ID NO: 1845529 - DNA, 15 bp, Homo sapiens
cagtgtgtttacttt

SEQ ID NO: 1845530 - DNA, 15 bp, Homo sapiens
agtgtgtttacttta

SEQ ID NO: 1845531 - DNA, 15 bp, Homo sapiens
gtgtgtttactttat

SEQ ID NO: 1845532 - DNA, 15 bp, Homo sapiens
tgtgtttactttatt

SEQ ID NO: 1845533 - DNA, 15 bp, Homo sapiens
gtgtttactttattt

SEQ ID NO: 1845534 - DNA, 15 bp, Homo sapiens
tgtttactttatttt

SEQ ID NO: 1845535 - DNA, 15 bp, Homo sapiens
gtttactttatttta

SEQ ID NO: 1845536 - DNA, 15 bp, Homo sapiens
tttactttattttat

SEQ ID NO: 1845537 - DNA, 15 bp, Homo sapiens
ttactttattttatt

SEQ ID NO: 1845538 - DNA, 15 bp, Homo sapiens
tactttattttattg

SEQ ID NO: 1845539 - DNA, 15 bp, Homo sapiens
actttattttattga

SEQ ID NO: 1845540 - DNA, 15 bp, Homo sapiens
ctttattttattgag

SEQ ID NO: 1845541 - DNA, 15 bp, Homo sapiens
tttattttattgagc

SEQ ID NO: 1845542 - DNA, 15 bp, Homo sapiens
ttattttattgagcc

SEQ ID NO: 1845543 - DNA, 15 bp, Homo sapiens
tattttattgagcca

SEQ ID NO: 1845544 - DNA, 15 bp, Homo sapiens
attttattgagccag

SEQ ID NO: 1845545 - DNA, 15 bp, Homo sapiens
ttttattgagccaga

SEQ ID NO: 1845546 - DNA, 15 bp, Homo sapiens
tttattgagccagag

SEQ ID NO: 1845547 - DNA, 15 bp, Homo sapiens
ttattgagccagagt

SEQ ID NO: 1845548 - DNA, 15 bp, Homo sapiens
tattgagccagagtc

SEQ ID NO: 1845549 - DNA, 15 bp, Homo sapiens
attgagccagagtct

SEQ ID NO: 1845550 - DNA, 15 bp, Homo sapiens
ttgagccagagtctc

SEQ ID NO: 1845551 - DNA, 15 bp, Homo sapiens
tgagccagagtctca

SEQ ID NO: 1845552 - DNA, 15 bp, Homo sapiens
gagccagagtctcac

SEQ ID NO: 1845553 - DNA, 15 bp, Homo sapiens
agccagagtctcact

SEQ ID NO: 1845554 - DNA, 15 bp, Homo sapiens
gccagagtctcactc

SEQ ID NO: 1845555 - DNA, 15 bp, Homo sapiens
ccagagtctcactct

SEQ ID NO: 1845556 - DNA, 15 bp, Homo sapiens
ctcactctgtcacca

SEQ ID NO: 1845557 - DNA, 15 bp, Homo sapiens
tcactctgtcaccaa

SEQ ID NO: 1845558 - DNA, 15 bp, Homo sapiens
cactctgtcaccaag

SEQ ID NO: 1845559 - DNA, 15 bp, Homo sapiens
actctgtcaccaagg

SEQ ID NO: 1845560 - DNA, 15 bp, Homo sapiens
ctctgtcaccaaggc

SEQ ID NO: 1845561 - DNA, 15 bp, Homo sapiens
tctgtcaccaaggct

SEQ ID NO: 1845562 - DNA, 15 bp, Homo sapiens
ctgtcaccaaggctg

SEQ ID NO: 1845563 - DNA, 15 bp, Homo sapiens
tgtcaccaaggctgg

SEQ ID NO: 1845564 - DNA, 15 bp, Homo sapiens
gtcaccaaggctgga

SEQ ID NO: 1845565 - DNA, 15 bp, Homo sapiens
tcaccaaggctggaa

SEQ ID NO: 1845566 - DNA, 15 bp, Homo sapiens
caccaaggctggaat

SEQ ID NO: 1845567 - DNA, 15 bp, Homo sapiens
accaaggctggaatg

SEQ ID NO: 1845568 - DNA, 15 bp, Homo sapiens
agtggcgtgatctca

SEQ ID NO: 1845569 - DNA, 15 bp, Homo sapiens
gtggcgtgatctcag

SEQ ID NO: 1845570 - DNA, 15 bp, Homo sapiens
tggcgtgatctcagc

SEQ ID NO: 1845571 - DNA, 15 bp, Homo sapiens
ggcgtgatctcagct

SEQ ID NO: 1845572 - DNA, 15 bp, Homo sapiens
gcgtgatctcagctc

SEQ ID NO: 1845573 - DNA, 15 bp, Homo sapiens
cgtgatctcagctca

SEQ ID NO: 1845574 - DNA, 15 bp, Homo sapiens
ctcagctcactgcag

SEQ ID NO: 1845575 - DNA, 15 bp, Homo sapiens
tcagctcactgcagc

SEQ ID NO: 1845576 - DNA, 15 bp, Homo sapiens
tcactgcagcctctg

SEQ ID NO: 1845577 - DNA, 15 bp, Homo sapiens
cactgcagcctctgc

SEQ ID NO: 1845578 - DNA, 15 bp, Homo sapiens
actgcagcctctgcc

SEQ ID NO: 1845579 - DNA, 15 bp, Homo sapiens
ctgcagcctctgcct

SEQ ID NO: 1845580 - DNA, 15 bp, Homo sapiens
agcctctgcctccta

SEQ ID NO: 1845581 - DNA, 15 bp, Homo sapiens
gcctctgcctcctag

SEQ ID NO: 1845582 - DNA, 15 bp, Homo sapiens
ggattataggtgtgt

SEQ ID NO: 1845583 - DNA, 15 bp, Homo sapiens
gattataggtgtgtg

SEQ ID NO: 1845584 - DNA, 15 bp, Homo sapiens
attataggtgtgtgc

SEQ ID NO: 1845585 - DNA, 15 bp, Homo sapiens
ttataggtgtgtgcc

SEQ ID NO: 1845586 - DNA, 15 bp, Homo sapiens
aggtgtgtgccacca

SEQ ID NO: 1845587 - DNA, 15 bp, Homo sapiens
ggtgtgtgccaccac

SEQ ID NO: 1845588 - DNA, 15 bp, Homo sapiens
gtgtgtgccaccaca

SEQ ID NO: 1845589 - DNA, 15 bp, Homo sapiens
tgtgtgccaccacac

SEQ ID NO: 1845590 - DNA, 15 bp, Homo sapiens
acacccagctaattg

SEQ ID NO: 1845591 - DNA, 15 bp, Homo sapiens
cacccagctaattgt

SEQ ID NO: 1845592 - DNA, 15 bp, Homo sapiens
acccagctaattgtt

SEQ ID NO: 1845593 - DNA, 15 bp, Homo sapiens
cccagctaattgttt

SEQ ID NO: 1845594 - DNA, 15 bp, Homo sapiens
ccagctaattgtttg

SEQ ID NO: 1845595 - DNA, 15 bp, Homo sapiens
cagctaattgtttgc

SEQ ID NO: 1845596 - DNA, 15 bp, Homo sapiens
agctaattgtttgca

SEQ ID NO: 1845597 - DNA, 15 bp, Homo sapiens
gctaattgtttgcat

SEQ ID NO: 1845598 - DNA, 15 bp, Homo sapiens
ctaattgtttgcatt

SEQ ID NO: 1845599 - DNA, 15 bp, Homo sapiens
taattgtttgcattt

SEQ ID NO: 1845600 - DNA, 15 bp, Homo sapiens
aattgtttgcatttt

SEQ ID NO: 1845601 - DNA, 15 bp, Homo sapiens
attgtttgcattttt

SEQ ID NO: 1845602 - DNA, 15 bp, Homo sapiens
ttgtttgcatttttt

SEQ ID NO: 1845603 - DNA, 15 bp, Homo sapiens
tgtttgcattttttg

SEQ ID NO: 1845604 - DNA, 15 bp, Homo sapiens
gtttgcattttttgt

SEQ ID NO: 1845605 - DNA, 15 bp, Homo sapiens
tttgcattttttgta

SEQ ID NO: 1845606 - DNA, 15 bp, Homo sapiens
ttgcattttttgtag

SEQ ID NO: 1845607 - DNA, 15 bp, Homo sapiens
tgcattttttgtaga

SEQ ID NO: 1845608 - DNA, 15 bp, Homo sapiens
gcattttttgtagag

SEQ ID NO: 1845609 - DNA, 15 bp, Homo sapiens
ttgtagagatggggg

SEQ ID NO: 1845610 - DNA, 15 bp, Homo sapiens
tgtagagatgggggt

SEQ ID NO: 1845611 - DNA, 15 bp, Homo sapiens
gtagagatgggggtc

SEQ ID NO: 1845612 - DNA, 15 bp, Homo sapiens
tagagatgggggtct

SEQ ID NO: 1845613 - DNA, 15 bp, Homo sapiens
agagatgggggtctc

SEQ ID NO: 1845614 - DNA, 15 bp, Homo sapiens
gagatgggggtctca

SEQ ID NO: 1845615 - DNA, 15 bp, Homo sapiens
agatgggggtctcac

SEQ ID NO: 1845616 - DNA, 15 bp, Homo sapiens
gatgggggtctcact

SEQ ID NO: 1845617 - DNA, 15 bp, Homo sapiens
atgggggtctcacta

SEQ ID NO: 1845618 - DNA, 15 bp, Homo sapiens
tgggggtctcactat

SEQ ID NO: 1845619 - DNA, 15 bp, Homo sapiens
gggggtctcactatg

SEQ ID NO: 1845620 - DNA, 15 bp, Homo sapiens
gggtctcactatgtg

SEQ ID NO: 1845621 - DNA, 15 bp, Homo sapiens
ggtctcactatgtga

SEQ ID NO: 1845622 - DNA, 15 bp, Homo sapiens
gtctcactatgtgac

SEQ ID NO: 1845623 - DNA, 15 bp, Homo sapiens
tctcactatgtgact

SEQ ID NO: 1845624 - DNA, 15 bp, Homo sapiens
ctcactatgtgactc

SEQ ID NO: 1845625 - DNA, 15 bp, Homo sapiens
tcactatgtgactca

SEQ ID NO: 1845626 - DNA, 15 bp, Homo sapiens
cactatgtgactcag

SEQ ID NO: 1845627 - DNA, 15 bp, Homo sapiens
actatgtgactcagg

SEQ ID NO: 1845628 - DNA, 15 bp, Homo sapiens
ctatgtgactcaggc

SEQ ID NO: 1845629 - DNA, 15 bp, Homo sapiens
tatgtgactcaggct

SEQ ID NO: 1845630 - DNA, 15 bp, Homo sapiens
atgtgactcaggctg

SEQ ID NO: 1845631 - DNA, 15 bp, Homo sapiens
tgtgactcaggctgg

SEQ ID NO: 1845632 - DNA, 15 bp, Homo sapiens
gtgactcaggctggt

SEQ ID NO: 1845633 - DNA, 15 bp, Homo sapiens
tgactcaggctggtc

SEQ ID NO: 1845634 - DNA, 15 bp, Homo sapiens
gactcaggctggtct

SEQ ID NO: 1845635 - DNA, 15 bp, Homo sapiens
actcaggctggtctc

SEQ ID NO: 1845636 - DNA, 15 bp, Homo sapiens
ctcaggctggtctca

SEQ ID NO: 1845637 - DNA, 15 bp, Homo sapiens
cctgggctcaagcag

SEQ ID NO: 1845638 - DNA, 15 bp, Homo sapiens
ctgggctcaagcagt

SEQ ID NO: 1845639 - DNA, 15 bp, Homo sapiens
tgggctcaagcagtc

SEQ ID NO: 1845640 - DNA, 15 bp, Homo sapiens
gggctcaagcagtca

SEQ ID NO: 1845641 - DNA, 15 bp, Homo sapiens
ggctcaagcagtcag

SEQ ID NO: 1845642 - DNA, 15 bp, Homo sapiens
gctcaagcagtcagg

SEQ ID NO: 1845643 - DNA, 15 bp, Homo sapiens
ctcaagcagtcaggc

SEQ ID NO: 1845644 - DNA, 15 bp, Homo sapiens
tcaagcagtcaggcc

SEQ ID NO: 1845645 - DNA, 15 bp, Homo sapiens
caagcagtcaggcca

SEQ ID NO: 1845646 - DNA, 15 bp, Homo sapiens
aagcagtcaggccac

SEQ ID NO: 1845647 - DNA, 15 bp, Homo sapiens
agcagtcaggccacc

SEQ ID NO: 1845648 - DNA, 15 bp, Homo sapiens
gcagtcaggccacct

SEQ ID NO: 1845649 - DNA, 15 bp, Homo sapiens
cagtcaggccacctt

SEQ ID NO: 1845650 - DNA, 15 bp, Homo sapiens
agtcaggccaccttg

SEQ ID NO: 1845651 - DNA, 15 bp, Homo sapiens
gtcaggccaccttgg

SEQ ID NO: 1845652 - DNA, 15 bp, Homo sapiens
tcaggccaccttggc

SEQ ID NO: 1845653 - DNA, 15 bp, Homo sapiens
caggccaccttggcc

SEQ ID NO: 1845654 - DNA, 15 bp, Homo sapiens
aggccaccttggcct

SEQ ID NO: 1845655 - DNA, 15 bp, Homo sapiens
ggccaccttggcctc

SEQ ID NO: 1845656 - DNA, 15 bp, Homo sapiens
gccaccttggcctcc

SEQ ID NO: 1845657 - DNA, 15 bp, Homo sapiens
cccaaagtgctggac

SEQ ID NO: 1845658 - DNA, 15 bp, Homo sapiens
ccaaagtgctggact

SEQ ID NO: 1845659 - DNA, 15 bp, Homo sapiens
caaagtgctggactt

SEQ ID NO: 1845660 - DNA, 15 bp, Homo sapiens
aaagtgctggactta

SEQ ID NO: 1845661 - DNA, 15 bp, Homo sapiens
aagtgctggacttaa

SEQ ID NO: 1845662 - DNA, 15 bp, Homo sapiens
agtgctggacttaac

SEQ ID NO: 1845663 - DNA, 15 bp, Homo sapiens
gtgctggacttaacg

SEQ ID NO: 1845664 - DNA, 15 bp, Homo sapiens
tgctggacttaacgg

SEQ ID NO: 1845665 - DNA, 15 bp, Homo sapiens
gctggacttaacggg

SEQ ID NO: 1845666 - DNA, 15 bp, Homo sapiens
ctggacttaacgggc

SEQ ID NO: 1845667 - DNA, 15 bp, Homo sapiens
tggacttaacgggcg

SEQ ID NO: 1845668 - DNA, 15 bp, Homo sapiens
ggacttaacgggcgt

SEQ ID NO: 1845669 - DNA, 15 bp, Homo sapiens
gacttaacgggcgtg

SEQ ID NO: 1845670 - DNA, 15 bp, Homo sapiens
acttaacgggcgtga

SEQ ID NO: 1845671 - DNA, 15 bp, Homo sapiens
cttaacgggcgtgag

SEQ ID NO: 1845672 - DNA, 15 bp, Homo sapiens
ttaacgggcgtgagc

SEQ ID NO: 1845673 - DNA, 15 bp, Homo sapiens
taacgggcgtgagcc

SEQ ID NO: 1845674 - DNA, 15 bp, Homo sapiens
aacgggcgtgagcca

SEQ ID NO: 1845675 - DNA, 15 bp, Homo sapiens
acgggcgtgagccac

SEQ ID NO: 1845676 - DNA, 15 bp, Homo sapiens
cgggcgtgagccact

SEQ ID NO: 1845677 - DNA, 15 bp, Homo sapiens
gggcgtgagccactg

SEQ ID NO: 1845678 - DNA, 15 bp, Homo sapiens
gcgtgagccactgtg

SEQ ID NO: 1845679 - DNA, 15 bp, Homo sapiens
cgtgagccactgtgc

SEQ ID NO: 1845680 - DNA, 15 bp, Homo sapiens
gccactgtgcccagt

SEQ ID NO: 1845681 - DNA, 15 bp, Homo sapiens
ccactgtgcccagtg

SEQ ID NO: 1845682 - DNA, 15 bp, Homo sapiens
cactgtgcccagtga

SEQ ID NO: 1845683 - DNA, 15 bp, Homo sapiens
actgtgcccagtgag

SEQ ID NO: 1845684 - DNA, 15 bp, Homo sapiens
ctgtgcccagtgagt

SEQ ID NO: 1845685 - DNA, 15 bp, Homo sapiens
tgtgcccagtgagtg

SEQ ID NO: 1845686 - DNA, 15 bp, Homo sapiens
gtgcccagtgagtgt

SEQ ID NO: 1845687 - DNA, 15 bp, Homo sapiens
tgcccagtgagtgtt

SEQ ID NO: 1845688 - DNA, 15 bp, Homo sapiens
gcccagtgagtgttt

SEQ ID NO: 1845689 - DNA, 15 bp, Homo sapiens
cccagtgagtgttta

SEQ ID NO: 1845690 - DNA, 15 bp, Homo sapiens
ccagtgagtgtttaa

SEQ ID NO: 1845691 - DNA, 15 bp, Homo sapiens
cagtgagtgtttaaa

SEQ ID NO: 1845692 - DNA, 15 bp, Homo sapiens
agtgagtgtttaaat

SEQ ID NO: 1845693 - DNA, 15 bp, Homo sapiens
gtgagtgtttaaatt

SEQ ID NO: 1845694 - DNA, 15 bp, Homo sapiens
tgagtgtttaaattc

SEQ ID NO: 1845695 - DNA, 15 bp, Homo sapiens
gagtgtttaaattcc

SEQ ID NO: 1845696 - DNA, 15 bp, Homo sapiens
agtgtttaaattccc

SEQ ID NO: 1845697 - DNA, 15 bp, Homo sapiens
gtgtttaaattccct

SEQ ID NO: 1845698 - DNA, 15 bp, Homo sapiens
tgtttaaattcccta

SEQ ID NO: 1845699 - DNA, 15 bp, Homo sapiens
gtttaaattccctat

SEQ ID NO: 1845700 - DNA, 15 bp, Homo sapiens
tttaaattccctatt

SEQ ID NO: 1845701 - DNA, 15 bp, Homo sapiens
ttaaattccctattt

SEQ ID NO: 1845702 - DNA, 15 bp, Homo sapiens
taaattccctatttg

SEQ ID NO: 1845703 - DNA, 15 bp, Homo sapiens
aaattccctatttgt

SEQ ID NO: 1845704 - DNA, 15 bp, Homo sapiens
aattccctatttgtg

SEQ ID NO: 1845705 - DNA, 15 bp, Homo sapiens
attccctatttgtgg

SEQ ID NO: 1845706 - DNA, 15 bp, Homo sapiens
ttccctatttgtggc

SEQ ID NO: 1845707 - DNA, 15 bp, Homo sapiens
tccctatttgtggca

SEQ ID NO: 1845708 - DNA, 15 bp, Homo sapiens
ccctatttgtggcag

SEQ ID NO: 1845709 - DNA, 15 bp, Homo sapiens
cctatttgtggcagg

SEQ ID NO: 1845710 - DNA, 15 bp, Homo sapiens
ctatttgtggcaggt

SEQ ID NO: 1845711 - DNA, 15 bp, Homo sapiens
tatttgtggcaggtc

SEQ ID NO: 1845712 - DNA, 15 bp, Homo sapiens
atttgtggcaggtcc

SEQ ID NO: 1845713 - DNA, 15 bp, Homo sapiens
tttgtggcaggtcct

SEQ ID NO: 1845714 - DNA, 15 bp, Homo sapiens
ttgtggcaggtcctc

SEQ ID NO: 1845715 - DNA, 15 bp, Homo sapiens
tgtggcaggtcctcg

SEQ ID NO: 1845716 - DNA, 15 bp, Homo sapiens
gtggcaggtcctcgc

SEQ ID NO: 1845717 - DNA, 15 bp, Homo sapiens
tggcaggtcctcgcc

SEQ ID NO: 1845718 - DNA, 15 bp, Homo sapiens
ggcaggtcctcgccc

SEQ ID NO: 1845719 - DNA, 15 bp, Homo sapiens
gcaggtcctcgcccc

SEQ ID NO: 1845720 - DNA, 15 bp, Homo sapiens
caggtcctcgccccc

SEQ ID NO: 1845721 - DNA, 15 bp, Homo sapiens
aggtcctcgcccccc

SEQ ID NO: 1845722 - DNA, 15 bp, Homo sapiens
ggtcctcgcccccct

SEQ ID NO: 1845723 - DNA, 15 bp, Homo sapiens
gtcctcgcccccctg

SEQ ID NO: 1845724 - DNA, 15 bp, Homo sapiens
tcctcgcccccctgg

SEQ ID NO: 1845725 - DNA, 15 bp, Homo sapiens
cctcgcccccctggg

SEQ ID NO: 1845726 - DNA, 15 bp, Homo sapiens
ctcgcccccctgggt

SEQ ID NO: 1845727 - DNA, 15 bp, Homo sapiens
tcgcccccctgggtc

SEQ ID NO: 1845728 - DNA, 15 bp, Homo sapiens
cgcccccctgggtca

SEQ ID NO: 1845729 - DNA, 15 bp, Homo sapiens
gcccccctgggtcag

SEQ ID NO: 1845730 - DNA, 15 bp, Homo sapiens
cccccctgggtcagg

SEQ ID NO: 1845731 - DNA, 15 bp, Homo sapiens
ccccctgggtcagga

SEQ ID NO: 1845732 - DNA, 15 bp, Homo sapiens
cccctgggtcaggag

SEQ ID NO: 1845733 - DNA, 15 bp, Homo sapiens
ccctgggtcaggagt

SEQ ID NO: 1845734 - DNA, 15 bp, Homo sapiens
cctgggtcaggagtt

SEQ ID NO: 1845735 - DNA, 15 bp, Homo sapiens
ctgggtcaggagttc

SEQ ID NO: 1845736 - DNA, 15 bp, Homo sapiens
tgggtcaggagttcg

SEQ ID NO: 1845737 - DNA, 15 bp, Homo sapiens
gggtcaggagttcgt

SEQ ID NO: 1845738 - DNA, 15 bp, Homo sapiens
ggtcaggagttcgtg

SEQ ID NO: 1845739 - DNA, 15 bp, Homo sapiens
gtcaggagttcgtgg

SEQ ID NO: 1845740 - DNA, 15 bp, Homo sapiens
tcaggagttcgtggt

SEQ ID NO: 1845741 - DNA, 15 bp, Homo sapiens
caggagttcgtggtc

SEQ ID NO: 1845742 - DNA, 15 bp, Homo sapiens
aggagttcgtggtcc

SEQ ID NO: 1845743 - DNA, 15 bp, Homo sapiens
ggagttcgtggtccc

SEQ ID NO: 1845744 - DNA, 15 bp, Homo sapiens
gagttcgtggtcccc

SEQ ID NO: 1845745 - DNA, 15 bp, Homo sapiens
agttcgtggtcccct

SEQ ID NO: 1845746 - DNA, 15 bp, Homo sapiens
gttcgtggtcccctc

SEQ ID NO: 1845747 - DNA, 15 bp, Homo sapiens
ttcgtggtcccctcc

SEQ ID NO: 1845748 - DNA, 15 bp, Homo sapiens
tcgtggtcccctcct

SEQ ID NO: 1845749 - DNA, 15 bp, Homo sapiens
cgtggtcccctcctc

SEQ ID NO: 1845750 - DNA, 15 bp, Homo sapiens
gtggtcccctcctcc

SEQ ID NO: 1845751 - DNA, 15 bp, Homo sapiens
tggtcccctcctccc

SEQ ID NO: 1845752 - DNA, 15 bp, Homo sapiens
ggtcccctcctccct

SEQ ID NO: 1845753 - DNA, 15 bp, Homo sapiens
gtcccctcctccctg

SEQ ID NO: 1845754 - DNA, 15 bp, Homo sapiens
tcccctcctccctgg

SEQ ID NO: 1845755 - DNA, 15 bp, Homo sapiens
cccctcctccctgga

SEQ ID NO: 1845756 - DNA, 15 bp, Homo sapiens
ccctcctccctggac

SEQ ID NO: 1845757 - DNA, 15 bp, Homo sapiens
cctcctccctggacc

SEQ ID NO: 1845758 - DNA, 15 bp, Homo sapiens
ctcctccctggacca

SEQ ID NO: 1845759 - DNA, 15 bp, Homo sapiens
tcctccctggaccag

SEQ ID NO: 1845760 - DNA, 15 bp, Homo sapiens
cctccctggaccagc

SEQ ID NO: 1845761 - DNA, 15 bp, Homo sapiens
ctccctggaccagct

SEQ ID NO: 1845762 - DNA, 15 bp, Homo sapiens
tccctggaccagctg

SEQ ID NO: 1845763 - DNA, 15 bp, Homo sapiens
ccctggaccagctgc

SEQ ID NO: 1845764 - DNA, 15 bp, Homo sapiens
cctggaccagctgct

SEQ ID NO: 1845765 - DNA, 15 bp, Homo sapiens
ctggaccagctgctt

SEQ ID NO: 1845766 - DNA, 15 bp, Homo sapiens
tggaccagctgcttg

SEQ ID NO: 1845767 - DNA, 15 bp, Homo sapiens
ggaccagctgcttgg

SEQ ID NO: 1845768 - DNA, 15 bp, Homo sapiens
gaccagctgcttggg

SEQ ID NO: 1845769 - DNA, 15 bp, Homo sapiens
accagctgcttgggc

SEQ ID NO: 1845770 - DNA, 15 bp, Homo sapiens
ccagctgcttgggct

SEQ ID NO: 1845771 - DNA, 15 bp, Homo sapiens
cagctgcttgggctc

SEQ ID NO: 1845772 - DNA, 15 bp, Homo sapiens
agctgcttgggctcc

SEQ ID NO: 1845773 - DNA, 15 bp, Homo sapiens
gctgcttgggctccg

SEQ ID NO: 1845774 - DNA, 15 bp, Homo sapiens
ctgcttgggctccgt

SEQ ID NO: 1845775 - DNA, 15 bp, Homo sapiens
tgcttgggctccgtt

SEQ ID NO: 1845776 - DNA, 15 bp, Homo sapiens
gcttgggctccgttg

SEQ ID NO: 1845777 - DNA, 15 bp, Homo sapiens
cttgggctccgttgc

SEQ ID NO: 1845778 - DNA, 15 bp, Homo sapiens
ttgggctccgttgca

SEQ ID NO: 1845779 - DNA, 15 bp, Homo sapiens
tgggctccgttgcaa

SEQ ID NO: 1845780 - DNA, 15 bp, Homo sapiens
gggctccgttgcaat

SEQ ID NO: 1845781 - DNA, 15 bp, Homo sapiens
ggctccgttgcaatc

SEQ ID NO: 1845782 - DNA, 15 bp, Homo sapiens
gctccgttgcaatcc

SEQ ID NO: 1845783 - DNA, 15 bp, Homo sapiens
ctccgttgcaatccc

SEQ ID NO: 1845784 - DNA, 15 bp, Homo sapiens
tccgttgcaatccct

SEQ ID NO: 1845785 - DNA, 15 bp, Homo sapiens
ccgttgcaatccctg

SEQ ID NO: 1845786 - DNA, 15 bp, Homo sapiens
cgttgcaatccctgc

SEQ ID NO: 1845787 - DNA, 15 bp, Homo sapiens
gttgcaatccctgcc

SEQ ID NO: 1845788 - DNA, 15 bp, Homo sapiens
ttgcaatccctgccc

SEQ ID NO: 1845789 - DNA, 15 bp, Homo sapiens
tgcaatccctgcccc

SEQ ID NO: 1845790 - DNA, 15 bp, Homo sapiens
gcaatccctgcccct

SEQ ID NO: 1845791 - DNA, 15 bp, Homo sapiens
caatccctgcccctc

SEQ ID NO: 1845792 - DNA, 15 bp, Homo sapiens
aatccctgcccctca

SEQ ID NO: 1845793 - DNA, 15 bp, Homo sapiens
atccctgcccctcaa

SEQ ID NO: 1845794 - DNA, 15 bp, Homo sapiens
tccctgcccctcaag

SEQ ID NO: 1845795 - DNA, 15 bp, Homo sapiens
ccctgcccctcaagc

SEQ ID NO: 1845796 - DNA, 15 bp, Homo sapiens
cctgcccctcaagcc

SEQ ID NO: 1845797 - DNA, 15 bp, Homo sapiens
ctgcccctcaagcct

SEQ ID NO: 1845798 - DNA, 15 bp, Homo sapiens
tgcccctcaagcctg

SEQ ID NO: 1845799 - DNA, 15 bp, Homo sapiens
gcccctcaagcctgg

SEQ ID NO: 1845800 - DNA, 15 bp, Homo sapiens
cccctcaagcctggg

SEQ ID NO: 1845801 - DNA, 15 bp, Homo sapiens
ccctcaagcctgggg

SEQ ID NO: 1845802 - DNA, 15 bp, Homo sapiens
cctcaagcctggggg

SEQ ID NO: 1845803 - DNA, 15 bp, Homo sapiens
ctcaagcctgggggc

SEQ ID NO: 1845804 - DNA, 15 bp, Homo sapiens
tcaagcctgggggcc

SEQ ID NO: 1845805 - DNA, 15 bp, Homo sapiens
caagcctgggggccg

SEQ ID NO: 1845806 - DNA, 15 bp, Homo sapiens
aagcctgggggccga

SEQ ID NO: 1845807 - DNA, 15 bp, Homo sapiens
agcctgggggccgag

SEQ ID NO: 1845808 - DNA, 15 bp, Homo sapiens
gcctgggggccgagg

SEQ ID NO: 1845809 - DNA, 15 bp, Homo sapiens
cctgggggccgagga

SEQ ID NO: 1845810 - DNA, 15 bp, Homo sapiens
ctgggggccgaggaa

SEQ ID NO: 1845811 - DNA, 15 bp, Homo sapiens
tgggggccgaggaac

SEQ ID NO: 1845812 - DNA, 15 bp, Homo sapiens
gggggccgaggaaca

SEQ ID NO: 1845813 - DNA, 15 bp, Homo sapiens
ggggccgaggaacaa

SEQ ID NO: 1845814 - DNA, 15 bp, Homo sapiens
gggccgaggaacaag

SEQ ID NO: 1845815 - DNA, 15 bp, Homo sapiens
ggccgaggaacaagg

SEQ ID NO: 1845816 - DNA, 15 bp, Homo sapiens
gccgaggaacaaggg

SEQ ID NO: 1845817 - DNA, 15 bp, Homo sapiens
ccgaggaacaagggc

SEQ ID NO: 1845818 - DNA, 15 bp, Homo sapiens
cgaggaacaagggct

SEQ ID NO: 1845819 - DNA, 15 bp, Homo sapiens
gaggaacaagggctc

SEQ ID NO: 1845820 - DNA, 15 bp, Homo sapiens
aggaacaagggctca

SEQ ID NO: 1845821 - DNA, 15 bp, Homo sapiens
ggaacaagggctcac

SEQ ID NO: 1845822 - DNA, 15 bp, Homo sapiens
gaacaagggctcacc

SEQ ID NO: 1845823 - DNA, 15 bp, Homo sapiens
aacaagggctcacct

SEQ ID NO: 1845824 - DNA, 15 bp, Homo sapiens
acaagggctcacctc

SEQ ID NO: 1845825 - DNA, 15 bp, Homo sapiens
caagggctcacctct

SEQ ID NO: 1845826 - DNA, 15 bp, Homo sapiens
aagggctcacctctc

SEQ ID NO: 1845827 - DNA, 15 bp, Homo sapiens
agggctcacctctcc

SEQ ID NO: 1845828 - DNA, 15 bp, Homo sapiens
gggctcacctctccc

SEQ ID NO: 1845829 - DNA, 15 bp, Homo sapiens
ggctcacctctcccc

SEQ ID NO: 1845830 - DNA, 15 bp, Homo sapiens
gctcacctctccccc

SEQ ID NO: 1845831 - DNA, 15 bp, Homo sapiens
ctcacctctcccccc

SEQ ID NO: 1845832 - DNA, 15 bp, Homo sapiens
tcacctctcccccca

SEQ ID NO: 1845833 - DNA, 15 bp, Homo sapiens
cacctctccccccac

SEQ ID NO: 1845834 - DNA, 15 bp, Homo sapiens
acctctccccccacc

SEQ ID NO: 1845835 - DNA, 15 bp, Homo sapiens
cctctccccccaccc

SEQ ID NO: 1845836 - DNA, 15 bp, Homo sapiens
ctctccccccacccc

SEQ ID NO: 1845837 - DNA, 15 bp, Homo sapiens
tctccccccaccccg

SEQ ID NO: 1845838 - DNA, 15 bp, Homo sapiens
ctccccccaccccgc

SEQ ID NO: 1845839 - DNA, 15 bp, Homo sapiens
tccccccaccccgcc

SEQ ID NO: 1845840 - DNA, 15 bp, Homo sapiens
ccccccaccccgcct

SEQ ID NO: 1845841 - DNA, 15 bp, Homo sapiens
cccccaccccgcctc

SEQ ID NO: 1845842 - DNA, 15 bp, Homo sapiens
ccccaccccgcctct

SEQ ID NO: 1845843 - DNA, 15 bp, Homo sapiens
cccaccccgcctctg

SEQ ID NO: 1845844 - DNA, 15 bp, Homo sapiens
ccaccccgcctctgg

SEQ ID NO: 1845845 - DNA, 15 bp, Homo sapiens
caccccgcctctgga

SEQ ID NO: 1845846 - DNA, 15 bp, Homo sapiens
accccgcctctggag

SEQ ID NO: 1845847 - DNA, 15 bp, Homo sapiens
ccccgcctctggagg

SEQ ID NO: 1845848 - DNA, 15 bp, Homo sapiens
cccgcctctggaggg

SEQ ID NO: 1845849 - DNA, 15 bp, Homo sapiens
ccgcctctggaggga

SEQ ID NO: 1845850 - DNA, 15 bp, Homo sapiens
cgcctctggagggat

SEQ ID NO: 1845851 - DNA, 15 bp, Homo sapiens
gcctctggagggatc

SEQ ID NO: 1845852 - DNA, 15 bp, Homo sapiens
cctctggagggatca

SEQ ID NO: 1845853 - DNA, 15 bp, Homo sapiens
ctctggagggatcag

SEQ ID NO: 1845854 - DNA, 15 bp, Homo sapiens
tctggagggatcagg

SEQ ID NO: 1845855 - DNA, 15 bp, Homo sapiens
ctggagggatcaggc

SEQ ID NO: 1845856 - DNA, 15 bp, Homo sapiens
tggagggatcaggcc

SEQ ID NO: 1845857 - DNA, 15 bp, Homo sapiens
ggagggatcaggcca

SEQ ID NO: 1845858 - DNA, 15 bp, Homo sapiens
gagggatcaggccag

SEQ ID NO: 1845859 - DNA, 15 bp, Homo sapiens
agggatcaggccagt

SEQ ID NO: 1845860 - DNA, 15 bp, Homo sapiens
gggatcaggccagtt

SEQ ID NO: 1845861 - DNA, 15 bp, Homo sapiens
ggatcaggccagttt

SEQ ID NO: 1845862 - DNA, 15 bp, Homo sapiens
gatcaggccagtttt

SEQ ID NO: 1845863 - DNA, 15 bp, Homo sapiens
atcaggccagttttc

SEQ ID NO: 1845864 - DNA, 15 bp, Homo sapiens
tcaggccagttttct

SEQ ID NO: 1845865 - DNA, 15 bp, Homo sapiens
caggccagttttctg

SEQ ID NO: 1845866 - DNA, 15 bp, Homo sapiens
aggccagttttctga

SEQ ID NO: 1845867 - DNA, 15 bp, Homo sapiens
ggccagttttctgat

SEQ ID NO: 1845868 - DNA, 15 bp, Homo sapiens
gccagttttctgatg

SEQ ID NO: 1845869 - DNA, 15 bp, Homo sapiens
ccagttttctgatga

SEQ ID NO: 1845870 - DNA, 15 bp, Homo sapiens
cagttttctgatgat

SEQ ID NO: 1845871 - DNA, 15 bp, Homo sapiens
agttttctgatgatg

SEQ ID NO: 1845872 - DNA, 15 bp, Homo sapiens
gttttctgatgatga

SEQ ID NO: 1845873 - DNA, 15 bp, Homo sapiens
ttttctgatgatgaa

SEQ ID NO: 1845874 - DNA, 15 bp, Homo sapiens
tttctgatgatgaag

SEQ ID NO: 1845875 - DNA, 15 bp, Homo sapiens
ttctgatgatgaagc

SEQ ID NO: 1845876 - DNA, 15 bp, Homo sapiens
tctgatgatgaagcc

SEQ ID NO: 1845877 - DNA, 15 bp, Homo sapiens
ctgatgatgaagcca

SEQ ID NO: 1845878 - DNA, 15 bp, Homo sapiens
tgatgatgaagccaa

SEQ ID NO: 1845879 - DNA, 15 bp, Homo sapiens
gatgatgaagccaat

SEQ ID NO: 1845880 - DNA, 15 bp, Homo sapiens
atgatgaagccaata

SEQ ID NO: 1845881 - DNA, 15 bp, Homo sapiens
tgatgaagccaataa

SEQ ID NO: 1845882 - DNA, 15 bp, Homo sapiens
gatgaagccaataag

SEQ ID NO: 1845883 - DNA, 15 bp, Homo sapiens
atgaagccaataagg

SEQ ID NO: 1845884 - DNA, 15 bp, Homo sapiens
tgaagccaataaggc

SEQ ID NO: 1845885 - DNA, 15 bp, Homo sapiens
gaagccaataaggca

SEQ ID NO: 1845886 - DNA, 15 bp, Homo sapiens
aagccaataaggcag

SEQ ID NO: 1845887 - DNA, 15 bp, Homo sapiens
agccaataaggcagc

SEQ ID NO: 1845888 - DNA, 15 bp, Homo sapiens
gccaataaggcagct

SEQ ID NO: 1845889 - DNA, 15 bp, Homo sapiens
ccaataaggcagctg

SEQ ID NO: 1845890 - DNA, 15 bp, Homo sapiens
caataaggcagctgg

SEQ ID NO: 1845891 - DNA, 15 bp, Homo sapiens
aataaggcagctggc

SEQ ID NO: 1845892 - DNA, 15 bp, Homo sapiens
ataaggcagctggca

SEQ ID NO: 1845893 - DNA, 15 bp, Homo sapiens
taaggcagctggcat

SEQ ID NO: 1845894 - DNA, 15 bp, Homo sapiens
aaggcagctggcatt

SEQ ID NO: 1845895 - DNA, 15 bp, Homo sapiens
aggcagctggcattt

SEQ ID NO: 1845896 - DNA, 15 bp, Homo sapiens
ggcagctggcatttt

SEQ ID NO: 1845897 - DNA, 15 bp, Homo sapiens
gcagctggcattttc

SEQ ID NO: 1845898 - DNA, 15 bp, Homo sapiens
cagctggcattttct

SEQ ID NO: 1845899 - DNA, 15 bp, Homo sapiens
agctggcattttctg

SEQ ID NO: 1845900 - DNA, 15 bp, Homo sapiens
gctggcattttctga

SEQ ID NO: 1845901 - DNA, 15 bp, Homo sapiens
ctggcattttctgag

SEQ ID NO: 1845902 - DNA, 15 bp, Homo sapiens
tggcattttctgagc

SEQ ID NO: 1845903 - DNA, 15 bp, Homo sapiens
ggcattttctgagca

SEQ ID NO: 1845904 - DNA, 15 bp, Homo sapiens
gcattttctgagcac

SEQ ID NO: 1845905 - DNA, 15 bp, Homo sapiens
cattttctgagcact

SEQ ID NO: 1845906 - DNA, 15 bp, Homo sapiens
attttctgagcactc

SEQ ID NO: 1845907 - DNA, 15 bp, Homo sapiens
ttttctgagcactca

SEQ ID NO: 1845908 - DNA, 15 bp, Homo sapiens
tttctgagcactcag

SEQ ID NO: 1845909 - DNA, 15 bp, Homo sapiens
ttctgagcactcagt

SEQ ID NO: 1845910 - DNA, 15 bp, Homo sapiens
tctgagcactcagtt

SEQ ID NO: 1845911 - DNA, 15 bp, Homo sapiens
ctgagcactcagttt

SEQ ID NO: 1845912 - DNA, 15 bp, Homo sapiens
tgagcactcagtttg

SEQ ID NO: 1845913 - DNA, 15 bp, Homo sapiens
gagcactcagtttgt

SEQ ID NO: 1845914 - DNA, 15 bp, Homo sapiens
agcactcagtttgta

SEQ ID NO: 1845915 - DNA, 15 bp, Homo sapiens
gcactcagtttgtag

SEQ ID NO: 1845916 - DNA, 15 bp, Homo sapiens
cactcagtttgtagt

SEQ ID NO: 1845917 - DNA, 15 bp, Homo sapiens
actcagtttgtagtt

SEQ ID NO: 1845918 - DNA, 15 bp, Homo sapiens
ctcagtttgtagtta

SEQ ID NO: 1845919 - DNA, 15 bp, Homo sapiens
tcagtttgtagttat

SEQ ID NO: 1845920 - DNA, 15 bp, Homo sapiens
cagtttgtagttata

SEQ ID NO: 1845921 - DNA, 15 bp, Homo sapiens
agtttgtagttatac

SEQ ID NO: 1845922 - DNA, 15 bp, Homo sapiens
gtttgtagttataca

SEQ ID NO: 1845923 - DNA, 15 bp, Homo sapiens
tttgtagttatacac

SEQ ID NO: 1845924 - DNA, 15 bp, Homo sapiens
ttgtagttatacact

SEQ ID NO: 1845925 - DNA, 15 bp, Homo sapiens
tgtagttatacactt

SEQ ID NO: 1845926 - DNA, 15 bp, Homo sapiens
gtagttatacactta

SEQ ID NO: 1845927 - DNA, 15 bp, Homo sapiens
tagttatacacttat

SEQ ID NO: 1845928 - DNA, 15 bp, Homo sapiens
agttatacacttatg

SEQ ID NO: 1845929 - DNA, 15 bp, Homo sapiens
gttatacacttatgc

SEQ ID NO: 1845930 - DNA, 15 bp, Homo sapiens
ttatacacttatgca

SEQ ID NO: 1845931 - DNA, 15 bp, Homo sapiens
tatacacttatgcac

SEQ ID NO: 1845932 - DNA, 15 bp, Homo sapiens
atacacttatgcaca

SEQ ID NO: 1845933 - DNA, 15 bp, Homo sapiens
tacacttatgcacat

SEQ ID NO: 1845934 - DNA, 15 bp, Homo sapiens
acacttatgcacatg

SEQ ID NO: 1845935 - DNA, 15 bp, Homo sapiens
cacttatgcacatgc

SEQ ID NO: 1845936 - DNA, 15 bp, Homo sapiens
acttatgcacatgct

SEQ ID NO: 1845937 - DNA, 15 bp, Homo sapiens
cttatgcacatgctt

SEQ ID NO: 1845938 - DNA, 15 bp, Homo sapiens
ttatgcacatgcttt

SEQ ID NO: 1845939 - DNA, 15 bp, Homo sapiens
tatgcacatgctttt

SEQ ID NO: 1845940 - DNA, 15 bp, Homo sapiens
atgcacatgcttttt

SEQ ID NO: 1845941 - DNA, 15 bp, Homo sapiens
tgcacatgctttttg

SEQ ID NO: 1845942 - DNA, 15 bp, Homo sapiens
gcacatgctttttgt

SEQ ID NO: 1845943 - DNA, 15 bp, Homo sapiens
cacatgctttttgtt

SEQ ID NO: 1845944 - DNA, 15 bp, Homo sapiens
acatgctttttgttg

SEQ ID NO: 1845945 - DNA, 15 bp, Homo sapiens
catgctttttgttgt

SEQ ID NO: 1845946 - DNA, 15 bp, Homo sapiens
atgctttttgttgtt

SEQ ID NO: 1845947 - DNA, 15 bp, Homo sapiens
tgctttttgttgttg

SEQ ID NO: 1845948 - DNA, 15 bp, Homo sapiens
gctttttgttgttgt

SEQ ID NO: 1845949 - DNA, 15 bp, Homo sapiens
ctttttgttgttgtt

SEQ ID NO: 1845950 - DNA, 15 bp, Homo sapiens
tttttgttgttgttt

SEQ ID NO: 1845951 - DNA, 15 bp, Homo sapiens
ttttgttgttgttta

SEQ ID NO: 1845952 - DNA, 15 bp, Homo sapiens
tttgttgttgtttaa

SEQ ID NO: 1845953 - DNA, 15 bp, Homo sapiens
ttgttgttgtttaac

SEQ ID NO: 1845954 - DNA, 15 bp, Homo sapiens
tgttgttgtttaaca

SEQ ID NO: 1845955 - DNA, 15 bp, Homo sapiens
gttgttgtttaacat

SEQ ID NO: 1845956 - DNA, 15 bp, Homo sapiens
ttgttgtttaacatt

SEQ ID NO: 1845957 - DNA, 15 bp, Homo sapiens
tgttgtttaacattt

SEQ ID NO: 1845958 - DNA, 15 bp, Homo sapiens
gttgtttaacattta

SEQ ID NO: 1845959 - DNA, 15 bp, Homo sapiens
ttgtttaacatttac

SEQ ID NO: 1845960 - DNA, 15 bp, Homo sapiens
tgtttaacatttacc

SEQ ID NO: 1845961 - DNA, 15 bp, Homo sapiens
gtttaacatttaccc

SEQ ID NO: 1845962 - DNA, 15 bp, Homo sapiens
tttaacatttacccc

SEQ ID NO: 1845963 - DNA, 15 bp, Homo sapiens
ttaacatttaccccc

SEQ ID NO: 1845964 - DNA, 15 bp, Homo sapiens
taacatttaccccca

SEQ ID NO: 1845965 - DNA, 15 bp, Homo sapiens
aacatttacccccag

SEQ ID NO: 1845966 - DNA, 15 bp, Homo sapiens
acatttacccccagg

SEQ ID NO: 1845967 - DNA, 15 bp, Homo sapiens
catttacccccaggc

SEQ ID NO: 1845968 - DNA, 15 bp, Homo sapiens
atttacccccaggct

SEQ ID NO: 1845969 - DNA, 15 bp, Homo sapiens
tttacccccaggcta

SEQ ID NO: 1845970 - DNA, 15 bp, Homo sapiens
ttacccccaggctat

SEQ ID NO: 1845971 - DNA, 15 bp, Homo sapiens
tacccccaggctatg

SEQ ID NO: 1845972 - DNA, 15 bp, Homo sapiens
acccccaggctatga

SEQ ID NO: 1845973 - DNA, 15 bp, Homo sapiens
cccccaggctatgag

SEQ ID NO: 1845974 - DNA, 15 bp, Homo sapiens
ccccaggctatgagt

SEQ ID NO: 1845975 - DNA, 15 bp, Homo sapiens
cccaggctatgagtc

SEQ ID NO: 1845976 - DNA, 15 bp, Homo sapiens
ccaggctatgagtcc

SEQ ID NO: 1845977 - DNA, 15 bp, Homo sapiens
caggctatgagtccc

SEQ ID NO: 1845978 - DNA, 15 bp, Homo sapiens
aggctatgagtcccc

SEQ ID NO: 1845979 - DNA, 15 bp, Homo sapiens
ggctatgagtcccca

SEQ ID NO: 1845980 - DNA, 15 bp, Homo sapiens
gctatgagtccccac

SEQ ID NO: 1845981 - DNA, 15 bp, Homo sapiens
ctatgagtccccacc

SEQ ID NO: 1845982 - DNA, 15 bp, Homo sapiens
tatgagtccccacct

SEQ ID NO: 1845983 - DNA, 15 bp, Homo sapiens
atgagtccccacctg

SEQ ID NO: 1845984 - DNA, 15 bp, Homo sapiens
tgagtccccacctgt

SEQ ID NO: 1845985 - DNA, 15 bp, Homo sapiens
gagtccccacctgtg

SEQ ID NO: 1845986 - DNA, 15 bp, Homo sapiens
agtccccacctgtgc

SEQ ID NO: 1845987 - DNA, 15 bp, Homo sapiens
gtccccacctgtgct

SEQ ID NO: 1845988 - DNA, 15 bp, Homo sapiens
tccccacctgtgctt

SEQ ID NO: 1845989 - DNA, 15 bp, Homo sapiens
ccccacctgtgcttt

SEQ ID NO: 1845990 - DNA, 15 bp, Homo sapiens
cccacctgtgctttg

SEQ ID NO: 1845991 - DNA, 15 bp, Homo sapiens
ccacctgtgctttgg

SEQ ID NO: 1845992 - DNA, 15 bp, Homo sapiens
cacctgtgctttggg

SEQ ID NO: 1845993 - DNA, 15 bp, Homo sapiens
acctgtgctttgggc

SEQ ID NO: 1845994 - DNA, 15 bp, Homo sapiens
cctgtgctttgggcg

SEQ ID NO: 1845995 - DNA, 15 bp, Homo sapiens
ctgtgctttgggcgc

SEQ ID NO: 1845996 - DNA, 15 bp, Homo sapiens
tgtgctttgggcgcg

SEQ ID NO: 1845997 - DNA, 15 bp, Homo sapiens
gtgctttgggcgcga

SEQ ID NO: 1845998 - DNA, 15 bp, Homo sapiens
tgctttgggcgcgat

SEQ ID NO: 1845999 - DNA, 15 bp, Homo sapiens
gctttgggcgcgatt

SEQ ID NO: 1846000 - DNA, 15 bp, Homo sapiens
ctttgggcgcgattt

SEQ ID NO: 1846001 - DNA, 15 bp, Homo sapiens
tttgggcgcgatttt

SEQ ID NO: 1846002 - DNA, 15 bp, Homo sapiens
ttgggcgcgattttg

SEQ ID NO: 1846003 - DNA, 15 bp, Homo sapiens
tgggcgcgattttgc

SEQ ID NO: 1846004 - DNA, 15 bp, Homo sapiens
gggcgcgattttgcg

SEQ ID NO: 1846005 - DNA, 15 bp, Homo sapiens
ggcgcgattttgcga

SEQ ID NO: 1846006 - DNA, 15 bp, Homo sapiens
gcgcgattttgcgat

SEQ ID NO: 1846007 - DNA, 15 bp, Homo sapiens
cgcgattttgcgatg

SEQ ID NO: 1846008 - DNA, 15 bp, Homo sapiens
gcgattttgcgatgg

SEQ ID NO: 1846009 - DNA, 15 bp, Homo sapiens
cgattttgcgatggc

SEQ ID NO: 1846010 - DNA, 15 bp, Homo sapiens
gattttgcgatggcg

SEQ ID NO: 1846011 - DNA, 15 bp, Homo sapiens
attttgcgatggcgc

SEQ ID NO: 1846012 - DNA, 15 bp, Homo sapiens
ttttgcgatggcgcc

SEQ ID NO: 1846013 - DNA, 15 bp, Homo sapiens
tttgcgatggcgccc

SEQ ID NO: 1846014 - DNA, 15 bp, Homo sapiens
ttgcgatggcgcccg

SEQ ID NO: 1846015 - DNA, 15 bp, Homo sapiens
tgcgatggcgcccgg

SEQ ID NO: 1846016 - DNA, 15 bp, Homo sapiens
gcgatggcgcccggg

SEQ ID NO: 1846017 - DNA, 15 bp, Homo sapiens
cgatggcgcccgggc

SEQ ID NO: 1846018 - DNA, 15 bp, Homo sapiens
gatggcgcccgggca

SEQ ID NO: 1846019 - DNA, 15 bp, Homo sapiens
atggcgcccgggcag

SEQ ID NO: 1846020 - DNA, 15 bp, Homo sapiens
tggcgcccgggcagg

SEQ ID NO: 1846021 - DNA, 15 bp, Homo sapiens
ggcgcccgggcaggc

SEQ ID NO: 1846022 - DNA, 15 bp, Homo sapiens
gcgcccgggcaggcg

SEQ ID NO: 1846023 - DNA, 15 bp, Homo sapiens
cgcccgggcaggcgc

SEQ ID NO: 1846024 - DNA, 15 bp, Homo sapiens
gcccgggcaggcgcg

SEQ ID NO: 1846025 - DNA, 15 bp, Homo sapiens
cccgggcaggcgcgc

SEQ ID NO: 1846026 - DNA, 15 bp, Homo sapiens
ccgggcaggcgcgca

SEQ ID NO: 1846027 - DNA, 15 bp, Homo sapiens
cgggcaggcgcgcac

SEQ ID NO: 1846028 - DNA, 15 bp, Homo sapiens
gggcaggcgcgcaca

SEQ ID NO: 1846029 - DNA, 15 bp, Homo sapiens
ggcaggcgcgcacag

SEQ ID NO: 1846030 - DNA, 15 bp, Homo sapiens
gcaggcgcgcacagc

SEQ ID NO: 1846031 - DNA, 15 bp, Homo sapiens
caggcgcgcacagcc

SEQ ID NO: 1846032 - DNA, 15 bp, Homo sapiens
aggcgcgcacagccc

SEQ ID NO: 1846033 - DNA, 15 bp, Homo sapiens
ggcgcgcacagcccg

SEQ ID NO: 1846034 - DNA, 15 bp, Homo sapiens
gcgcgcacagcccgc

SEQ ID NO: 1846035 - DNA, 15 bp, Homo sapiens
gcgcacagcccgcag

SEQ ID NO: 1846036 - DNA, 15 bp, Homo sapiens
cgcacagcccgcagt

SEQ ID NO: 1846037 - DNA, 15 bp, Homo sapiens
gcacagcccgcagtg

SEQ ID NO: 1846038 - DNA, 15 bp, Homo sapiens
cacagcccgcagtgg

SEQ ID NO: 1846039 - DNA, 15 bp, Homo sapiens
acagcccgcagtggg

SEQ ID NO: 1846040 - DNA, 15 bp, Homo sapiens
cagcccgcagtgggg

SEQ ID NO: 1846041 - DNA, 15 bp, Homo sapiens
agcccgcagtggggg

SEQ ID NO: 1846042 - DNA, 15 bp, Homo sapiens
gcccgcagtgggggc

SEQ ID NO: 1846043 - DNA, 15 bp, Homo sapiens
cccgcagtgggggcg

SEQ ID NO: 1846044 - DNA, 15 bp, Homo sapiens
ccgcagtgggggcga

SEQ ID NO: 1846045 - DNA, 15 bp, Homo sapiens
cgcagtgggggcgac

SEQ ID NO: 1846046 - DNA, 15 bp, Homo sapiens
gcagtgggggcgacc

SEQ ID NO: 1846047 - DNA, 15 bp, Homo sapiens
cagtgggggcgaccc

SEQ ID NO: 1846048 - DNA, 15 bp, Homo sapiens
agtgggggcgacccc

SEQ ID NO: 1846049 - DNA, 15 bp, Homo sapiens
gtgggggcgacccca

SEQ ID NO: 1846050 - DNA, 15 bp, Homo sapiens
tgggggcgaccccac

SEQ ID NO: 1846051 - DNA, 15 bp, Homo sapiens
gggggcgaccccaca

SEQ ID NO: 1846052 - DNA, 15 bp, Homo sapiens
ggggcgaccccacag

SEQ ID NO: 1846053 - DNA, 15 bp, Homo sapiens
gggcgaccccacaga

SEQ ID NO: 1846054 - DNA, 15 bp, Homo sapiens
ggcgaccccacagac

SEQ ID NO: 1846055 - DNA, 15 bp, Homo sapiens
gcgaccccacagacg

SEQ ID NO: 1846056 - DNA, 15 bp, Homo sapiens
cgaccccacagacga

SEQ ID NO: 1846057 - DNA, 15 bp, Homo sapiens
gaccccacagacgag

SEQ ID NO: 1846058 - DNA, 15 bp, Homo sapiens
accccacagacgagc

SEQ ID NO: 1846059 - DNA, 15 bp, Homo sapiens
ccccacagacgagcg

SEQ ID NO: 1846060 - DNA, 15 bp, Homo sapiens
cccacagacgagcgc

SEQ ID NO: 1846061 - DNA, 15 bp, Homo sapiens
ccacagacgagcgca

SEQ ID NO: 1846062 - DNA, 15 bp, Homo sapiens
cacagacgagcgcag

SEQ ID NO: 1846063 - DNA, 15 bp, Homo sapiens
acagacgagcgcagg

SEQ ID NO: 1846064 - DNA, 15 bp, Homo sapiens
cagacgagcgcagga

SEQ ID NO: 1846065 - DNA, 15 bp, Homo sapiens
agacgagcgcaggag

SEQ ID NO: 1846066 - DNA, 15 bp, Homo sapiens
gacgagcgcaggagc

SEQ ID NO: 1846067 - DNA, 15 bp, Homo sapiens
acgagcgcaggagca

SEQ ID NO: 1846068 - DNA, 15 bp, Homo sapiens
cgagcgcaggagcag

SEQ ID NO: 1846069 - DNA, 15 bp, Homo sapiens
gagcgcaggagcagc

SEQ ID NO: 1846070 - DNA, 15 bp, Homo sapiens
agcgcaggagcagcc

SEQ ID NO: 1846071 - DNA, 15 bp, Homo sapiens
gcgcaggagcagccg

SEQ ID NO: 1846072 - DNA, 15 bp, Homo sapiens
cgcaggagcagccgg

SEQ ID NO: 1846073 - DNA, 15 bp, Homo sapiens
gcaggagcagccggg

SEQ ID NO: 1846074 - DNA, 15 bp, Homo sapiens
caggagcagccgggt

SEQ ID NO: 1846075 - DNA, 15 bp, Homo sapiens
aggagcagccgggtt

SEQ ID NO: 1846076 - DNA, 15 bp, Homo sapiens
ggagcagccgggttc

SEQ ID NO: 1846077 - DNA, 15 bp, Homo sapiens
gagcagccgggttcc

SEQ ID NO: 1846078 - DNA, 15 bp, Homo sapiens
agcagccgggttcca

SEQ ID NO: 1846079 - DNA, 15 bp, Homo sapiens
gcagccgggttccac

SEQ ID NO: 1846080 - DNA, 15 bp, Homo sapiens
cagccgggttccact

SEQ ID NO: 1846081 - DNA, 15 bp, Homo sapiens
agccgggttccactc

SEQ ID NO: 1846082 - DNA, 15 bp, Homo sapiens
gccgggttccactct

SEQ ID NO: 1846083 - DNA, 15 bp, Homo sapiens
ccgggttccactctc

SEQ ID NO: 1846084 - DNA, 15 bp, Homo sapiens
cgggttccactctcc

SEQ ID NO: 1846085 - DNA, 15 bp, Homo sapiens
gggttccactctccc

SEQ ID NO: 1846086 - DNA, 15 bp, Homo sapiens
ggttccactctcccc

SEQ ID NO: 1846087 - DNA, 15 bp, Homo sapiens
gttccactctcccca

SEQ ID NO: 1846088 - DNA, 15 bp, Homo sapiens
ttccactctccccag

SEQ ID NO: 1846089 - DNA, 15 bp, Homo sapiens
tccactctccccagc

SEQ ID NO: 1846090 - DNA, 15 bp, Homo sapiens
ccactctccccagct

SEQ ID NO: 1846091 - DNA, 15 bp, Homo sapiens
cactctccccagctg

SEQ ID NO: 1846092 - DNA, 15 bp, Homo sapiens
actctccccagctgt

SEQ ID NO: 1846093 - DNA, 15 bp, Homo sapiens
ctctccccagctgtg

SEQ ID NO: 1846094 - DNA, 15 bp, Homo sapiens
tctccccagctgtga

SEQ ID NO: 1846095 - DNA, 15 bp, Homo sapiens
ctccccagctgtgac

SEQ ID NO: 1846096 - DNA, 15 bp, Homo sapiens
tccccagctgtgacc

SEQ ID NO: 1846097 - DNA, 15 bp, Homo sapiens
ccccagctgtgacct

SEQ ID NO: 1846098 - DNA, 15 bp, Homo sapiens
cccagctgtgacctt

SEQ ID NO: 1846099 - DNA, 15 bp, Homo sapiens
ccagctgtgacctta

SEQ ID NO: 1846100 - DNA, 15 bp, Homo sapiens
cagctgtgaccttag

SEQ ID NO: 1846101 - DNA, 15 bp, Homo sapiens
agctgtgaccttagg

SEQ ID NO: 1846102 - DNA, 15 bp, Homo sapiens
gctgtgaccttaggc

SEQ ID NO: 1846103 - DNA, 15 bp, Homo sapiens
ctgtgaccttaggca

SEQ ID NO: 1846104 - DNA, 15 bp, Homo sapiens
tgtgaccttaggcag

SEQ ID NO: 1846105 - DNA, 15 bp, Homo sapiens
gtgaccttaggcagt

SEQ ID NO: 1846106 - DNA, 15 bp, Homo sapiens
tgaccttaggcagtc

SEQ ID NO: 1846107 - DNA, 15 bp, Homo sapiens
gaccttaggcagtcc

SEQ ID NO: 1846108 - DNA, 15 bp, Homo sapiens
accttaggcagtccc

SEQ ID NO: 1846109 - DNA, 15 bp, Homo sapiens
ccttaggcagtccct

SEQ ID NO: 1846110 - DNA, 15 bp, Homo sapiens
cttaggcagtccctc

SEQ ID NO: 1846111 - DNA, 15 bp, Homo sapiens
ttaggcagtccctcc

SEQ ID NO: 1846112 - DNA, 15 bp, Homo sapiens
taggcagtccctcca

SEQ ID NO: 1846113 - DNA, 15 bp, Homo sapiens
aggcagtccctccac

SEQ ID NO: 1846114 - DNA, 15 bp, Homo sapiens
ggcagtccctccact

SEQ ID NO: 1846115 - DNA, 15 bp, Homo sapiens
gcagtccctccactt

SEQ ID NO: 1846116 - DNA, 15 bp, Homo sapiens
cagtccctccacttc

SEQ ID NO: 1846117 - DNA, 15 bp, Homo sapiens
agtccctccacttcc

SEQ ID NO: 1846118 - DNA, 15 bp, Homo sapiens
gtccctccacttccg

SEQ ID NO: 1846119 - DNA, 15 bp, Homo sapiens
tccctccacttccga

SEQ ID NO: 1846120 - DNA, 15 bp, Homo sapiens
ccctccacttccgac

SEQ ID NO: 1846121 - DNA, 15 bp, Homo sapiens
cctccacttccgacg

SEQ ID NO: 1846122 - DNA, 15 bp, Homo sapiens
ctccacttccgacgc

SEQ ID NO: 1846123 - DNA, 15 bp, Homo sapiens
tccacttccgacgcc

SEQ ID NO: 1846124 - DNA, 15 bp, Homo sapiens
ccacttccgacgcct

SEQ ID NO: 1846125 - DNA, 15 bp, Homo sapiens
cacttccgacgcctc

SEQ ID NO: 1846126 - DNA, 15 bp, Homo sapiens
acttccgacgcctcg

SEQ ID NO: 1846127 - DNA, 15 bp, Homo sapiens
cttccgacgcctcgg

SEQ ID NO: 1846128 - DNA, 15 bp, Homo sapiens
ttccgacgcctcggt

SEQ ID NO: 1846129 - DNA, 15 bp, Homo sapiens
tccgacgcctcggtg

SEQ ID NO: 1846130 - DNA, 15 bp, Homo sapiens
ccgacgcctcggtgt

SEQ ID NO: 1846131 - DNA, 15 bp, Homo sapiens
cgacgcctcggtgtc

SEQ ID NO: 1846132 - DNA, 15 bp, Homo sapiens
gacgcctcggtgtcc

SEQ ID NO: 1846133 - DNA, 15 bp, Homo sapiens
acgcctcggtgtcct

SEQ ID NO: 1846134 - DNA, 15 bp, Homo sapiens
cgcctcggtgtcctc

SEQ ID NO: 1846135 - DNA, 15 bp, Homo sapiens
gcctcggtgtcctcg

SEQ ID NO: 1846136 - DNA, 15 bp, Homo sapiens
cctcggtgtcctcgc

SEQ ID NO: 1846137 - DNA, 15 bp, Homo sapiens
ctcggtgtcctcgcc

SEQ ID NO: 1846138 - DNA, 15 bp, Homo sapiens
tcggtgtcctcgccc

SEQ ID NO: 1846139 - DNA, 15 bp, Homo sapiens
cggtgtcctcgcccg

SEQ ID NO: 1846140 - DNA, 15 bp, Homo sapiens
ggtgtcctcgcccgc

SEQ ID NO: 1846141 - DNA, 15 bp, Homo sapiens
gtgtcctcgcccgca

SEQ ID NO: 1846142 - DNA, 15 bp, Homo sapiens
tgtcctcgcccgcaa

SEQ ID NO: 1846143 - DNA, 15 bp, Homo sapiens
gtcctcgcccgcaaa

SEQ ID NO: 1846144 - DNA, 15 bp, Homo sapiens
tcctcgcccgcaaaa

SEQ ID NO: 1846145 - DNA, 15 bp, Homo sapiens
cctcgcccgcaaaat

SEQ ID NO: 1846146 - DNA, 15 bp, Homo sapiens
ctcgcccgcaaaatg

SEQ ID NO: 1846147 - DNA, 15 bp, Homo sapiens
tcgcccgcaaaatga

SEQ ID NO: 1846148 - DNA, 15 bp, Homo sapiens
cgcccgcaaaatgag

SEQ ID NO: 1846149 - DNA, 15 bp, Homo sapiens
gcccgcaaaatgagc

SEQ ID NO: 1846150 - DNA, 15 bp, Homo sapiens
cccgcaaaatgagca

SEQ ID NO: 1846151 - DNA, 15 bp, Homo sapiens
ccgcaaaatgagcag

SEQ ID NO: 1846152 - DNA, 15 bp, Homo sapiens
cgcaaaatgagcagg

SEQ ID NO: 1846153 - DNA, 15 bp, Homo sapiens
gcaaaatgagcaggg

SEQ ID NO: 1846154 - DNA, 15 bp, Homo sapiens
caaaatgagcagggt

SEQ ID NO: 1846155 - DNA, 15 bp, Homo sapiens
aaaatgagcagggtg

SEQ ID NO: 1846156 - DNA, 15 bp, Homo sapiens
aaatgagcagggtgg

SEQ ID NO: 1846157 - DNA, 15 bp, Homo sapiens
aatgagcagggtggg

SEQ ID NO: 1846158 - DNA, 15 bp, Homo sapiens
atgagcagggtgggc

SEQ ID NO: 1846159 - DNA, 15 bp, Homo sapiens
tgagcagggtgggcc

SEQ ID NO: 1846160 - DNA, 15 bp, Homo sapiens
gagcagggtgggccg

SEQ ID NO: 1846161 - DNA, 15 bp, Homo sapiens
agcagggtgggccgc

SEQ ID NO: 1846162 - DNA, 15 bp, Homo sapiens
gcagggtgggccgcc

SEQ ID NO: 1846163 - DNA, 15 bp, Homo sapiens
cagggtgggccgccc

SEQ ID NO: 1846164 - DNA, 15 bp, Homo sapiens
agggtgggccgccca

SEQ ID NO: 1846165 - DNA, 15 bp, Homo sapiens
gggtgggccgcccag

SEQ ID NO: 1846166 - DNA, 15 bp, Homo sapiens
ggtgggccgcccaga

SEQ ID NO: 1846167 - DNA, 15 bp, Homo sapiens
gtgggccgcccagat

SEQ ID NO: 1846168 - DNA, 15 bp, Homo sapiens
tgggccgcccagatc

SEQ ID NO: 1846169 - DNA, 15 bp, Homo sapiens
gggccgcccagatcc

SEQ ID NO: 1846170 - DNA, 15 bp, Homo sapiens
ggccgcccagatccc

SEQ ID NO: 1846171 - DNA, 15 bp, Homo sapiens
gccgcccagatcccc

SEQ ID NO: 1846172 - DNA, 15 bp, Homo sapiens
ccgcccagatccccg

SEQ ID NO: 1846173 - DNA, 15 bp, Homo sapiens
cgcccagatccccgg

SEQ ID NO: 1846174 - DNA, 15 bp, Homo sapiens
gcccagatccccggg

SEQ ID NO: 1846175 - DNA, 15 bp, Homo sapiens
cccagatccccggga

SEQ ID NO: 1846176 - DNA, 15 bp, Homo sapiens
ccagatccccgggaa

SEQ ID NO: 1846177 - DNA, 15 bp, Homo sapiens
cagatccccgggaag

SEQ ID NO: 1846178 - DNA, 15 bp, Homo sapiens
agatccccgggaagg

SEQ ID NO: 1846179 - DNA, 15 bp, Homo sapiens
gatccccgggaaggc

SEQ ID NO: 1846180 - DNA, 15 bp, Homo sapiens
atccccgggaaggca

SEQ ID NO: 1846181 - DNA, 15 bp, Homo sapiens
tccccgggaaggcag

SEQ ID NO: 1846182 - DNA, 15 bp, Homo sapiens
ccccgggaaggcagc

SEQ ID NO: 1846183 - DNA, 15 bp, Homo sapiens
cccgggaaggcagct

SEQ ID NO: 1846184 - DNA, 15 bp, Homo sapiens
ccgggaaggcagctg

SEQ ID NO: 1846185 - DNA, 15 bp, Homo sapiens
cgggaaggcagctgc

SEQ ID NO: 1846186 - DNA, 15 bp, Homo sapiens
gcagctgccttcccc

SEQ ID NO: 1846187 - DNA, 15 bp, Homo sapiens
cagctgccttccccg

SEQ ID NO: 1846188 - DNA, 15 bp, Homo sapiens
agctgccttccccgc

SEQ ID NO: 1846189 - DNA, 15 bp, Homo sapiens
gctgccttccccgca

SEQ ID NO: 1846190 - DNA, 15 bp, Homo sapiens
ctgccttccccgcaa

SEQ ID NO: 1846191 - DNA, 15 bp, Homo sapiens
tgccttccccgcaac

SEQ ID NO: 1846192 - DNA, 15 bp, Homo sapiens
gccttccccgcaact

SEQ ID NO: 1846193 - DNA, 15 bp, Homo sapiens
ccttccccgcaactc

SEQ ID NO: 1846194 - DNA, 15 bp, Homo sapiens
cttccccgcaactcc

SEQ ID NO: 1846195 - DNA, 15 bp, Homo sapiens
ttccccgcaactccg

SEQ ID NO: 1846196 - DNA, 15 bp, Homo sapiens
tccccgcaactccgg

SEQ ID NO: 1846197 - DNA, 15 bp, Homo sapiens
ccccgcaactccgga

SEQ ID NO: 1846198 - DNA, 15 bp, Homo sapiens
cccgcaactccggag

SEQ ID NO: 1846199 - DNA, 15 bp, Homo sapiens
ccgcaactccggagg

SEQ ID NO: 1846200 - DNA, 15 bp, Homo sapiens
cgcaactccggaggg

SEQ ID NO: 1846201 - DNA, 15 bp, Homo sapiens
gcaactccggagggg

SEQ ID NO: 1846202 - DNA, 15 bp, Homo sapiens
caactccggagggga

SEQ ID NO: 1846203 - DNA, 15 bp, Homo sapiens
aactccggaggggac

SEQ ID NO: 1846204 - DNA, 15 bp, Homo sapiens
actccggaggggaca

SEQ ID NO: 1846205 - DNA, 15 bp, Homo sapiens
ctccggaggggacac

SEQ ID NO: 1846206 - DNA, 15 bp, Homo sapiens
tccggaggggacacc

SEQ ID NO: 1846207 - DNA, 15 bp, Homo sapiens
ccggaggggacacct

SEQ ID NO: 1846208 - DNA, 15 bp, Homo sapiens
cggaggggacacctt

SEQ ID NO: 1846209 - DNA, 15 bp, Homo sapiens
ggaggggacaccttg

SEQ ID NO: 1846210 - DNA, 15 bp, Homo sapiens
gaggggacaccttgg

SEQ ID NO: 1846211 - DNA, 15 bp, Homo sapiens
aggggacaccttgga

SEQ ID NO: 1846212 - DNA, 15 bp, Homo sapiens
ggggacaccttggaa

SEQ ID NO: 1846213 - DNA, 15 bp, Homo sapiens
gggacaccttggaag

SEQ ID NO: 1846214 - DNA, 15 bp, Homo sapiens
ggacaccttggaagc

SEQ ID NO: 1846215 - DNA, 15 bp, Homo sapiens
gacaccttggaagcg

SEQ ID NO: 1846216 - DNA, 15 bp, Homo sapiens
acaccttggaagcgc

SEQ ID NO: 1846217 - DNA, 15 bp, Homo sapiens
caccttggaagcgcc

SEQ ID NO: 1846218 - DNA, 15 bp, Homo sapiens
accttggaagcgcca

SEQ ID NO: 1846219 - DNA, 15 bp, Homo sapiens
ccttggaagcgccac

SEQ ID NO: 1846220 - DNA, 15 bp, Homo sapiens
cttggaagcgccacg

SEQ ID NO: 1846221 - DNA, 15 bp, Homo sapiens
ttggaagcgccacgc

SEQ ID NO: 1846222 - DNA, 15 bp, Homo sapiens
tggaagcgccacgcc

SEQ ID NO: 1846223 - DNA, 15 bp, Homo sapiens
ggaagcgccacgcct

SEQ ID NO: 1846224 - DNA, 15 bp, Homo sapiens
gaagcgccacgcctg

SEQ ID NO: 1846225 - DNA, 15 bp, Homo sapiens
aagcgccacgcctgc

SEQ ID NO: 1846226 - DNA, 15 bp, Homo sapiens
gcgccacgcctgcct

SEQ ID NO: 1846227 - DNA, 15 bp, Homo sapiens
cgccacgcctgcctc

SEQ ID NO: 1846228 - DNA, 15 bp, Homo sapiens
gccacgcctgcctcc

SEQ ID NO: 1846229 - DNA, 15 bp, Homo sapiens
ccacgcctgcctccc

SEQ ID NO: 1846230 - DNA, 15 bp, Homo sapiens
cacgcctgcctcccc

SEQ ID NO: 1846231 - DNA, 15 bp, Homo sapiens
acgcctgcctccccg

SEQ ID NO: 1846232 - DNA, 15 bp, Homo sapiens
cgcctgcctccccgc

SEQ ID NO: 1846233 - DNA, 15 bp, Homo sapiens
gcctgcctccccgca

SEQ ID NO: 1846234 - DNA, 15 bp, Homo sapiens
cctgcctccccgcac

SEQ ID NO: 1846235 - DNA, 15 bp, Homo sapiens
ctgcctccccgcact

SEQ ID NO: 1846236 - DNA, 15 bp, Homo sapiens
tgcctccccgcactc

SEQ ID NO: 1846237 - DNA, 15 bp, Homo sapiens
gcctccccgcactcc

SEQ ID NO: 1846238 - DNA, 15 bp, Homo sapiens
cctccccgcactccg

SEQ ID NO: 1846239 - DNA, 15 bp, Homo sapiens
ctccccgcactccgc

SEQ ID NO: 1846240 - DNA, 15 bp, Homo sapiens
tccccgcactccgcc

SEQ ID NO: 1846241 - DNA, 15 bp, Homo sapiens
ccccgcactccgccc

SEQ ID NO: 1846242 - DNA, 15 bp, Homo sapiens
cccgcactccgcccg

SEQ ID NO: 1846243 - DNA, 15 bp, Homo sapiens
ccgcactccgcccgc

SEQ ID NO: 1846244 - DNA, 15 bp, Homo sapiens
cgcactccgcccgcc

SEQ ID NO: 1846245 - DNA, 15 bp, Homo sapiens
gcactccgcccgccg

SEQ ID NO: 1846246 - DNA, 15 bp, Homo sapiens
cactccgcccgccgc

SEQ ID NO: 1846247 - DNA, 15 bp, Homo sapiens
actccgcccgccgcc

SEQ ID NO: 1846248 - DNA, 15 bp, Homo sapiens
ctccgcccgccgccg

SEQ ID NO: 1846249 - DNA, 15 bp, Homo sapiens
tccgcccgccgccgc

SEQ ID NO: 1846250 - DNA, 15 bp, Homo sapiens
ccgcccgccgccgct

SEQ ID NO: 1846251 - DNA, 15 bp, Homo sapiens
cgcccgccgccgctc

SEQ ID NO: 1846252 - DNA, 15 bp, Homo sapiens
gcccgccgccgctct

SEQ ID NO: 1846253 - DNA, 15 bp, Homo sapiens
cccgccgccgctctc

SEQ ID NO: 1846254 - DNA, 15 bp, Homo sapiens
ccgccgccgctctcc

SEQ ID NO: 1846255 - DNA, 15 bp, Homo sapiens
cgccgccgctctcca

SEQ ID NO: 1846256 - DNA, 15 bp, Homo sapiens
gccgccgctctccaa

SEQ ID NO: 1846257 - DNA, 15 bp, Homo sapiens
ccgccgctctccaag

SEQ ID NO: 1846258 - DNA, 15 bp, Homo sapiens
cgccgctctccaagg

SEQ ID NO: 1846259 - DNA, 15 bp, Homo sapiens
gccgctctccaaggt

SEQ ID NO: 1846260 - DNA, 15 bp, Homo sapiens
ccgctctccaaggtg

SEQ ID NO: 1846261 - DNA, 15 bp, Homo sapiens
cgctctccaaggtgc

SEQ ID NO: 1846262 - DNA, 15 bp, Homo sapiens
gctctccaaggtgct

SEQ ID NO: 1846263 - DNA, 15 bp, Homo sapiens
ctctccaaggtgctg

SEQ ID NO: 1846264 - DNA, 15 bp, Homo sapiens
tctccaaggtgctga

SEQ ID NO: 1846265 - DNA, 15 bp, Homo sapiens
ctccaaggtgctgaa

SEQ ID NO: 1846266 - DNA, 15 bp, Homo sapiens
tccaaggtgctgaag

SEQ ID NO: 1846267 - DNA, 15 bp, Homo sapiens
ccaaggtgctgaagt

SEQ ID NO: 1846268 - DNA, 15 bp, Homo sapiens
caaggtgctgaagtc

SEQ ID NO: 1846269 - DNA, 15 bp, Homo sapiens
aaggtgctgaagtcg

SEQ ID NO: 1846270 - DNA, 15 bp, Homo sapiens
aggtgctgaagtcgt

SEQ ID NO: 1846271 - DNA, 15 bp, Homo sapiens
ggtgctgaagtcgtg

SEQ ID NO: 1846272 - DNA, 15 bp, Homo sapiens
gtgctgaagtcgtgc

SEQ ID NO: 1846273 - DNA, 15 bp, Homo sapiens
tgctgaagtcgtgcc

SEQ ID NO: 1846274 - DNA, 15 bp, Homo sapiens
gctgaagtcgtgccc

SEQ ID NO: 1846275 - DNA, 15 bp, Homo sapiens
ctgaagtcgtgcccg

SEQ ID NO: 1846276 - DNA, 15 bp, Homo sapiens
tgaagtcgtgcccgg

SEQ ID NO: 1846277 - DNA, 15 bp, Homo sapiens
gaagtcgtgcccggc

SEQ ID NO: 1846278 - DNA, 15 bp, Homo sapiens
aagtcgtgcccggcg

SEQ ID NO: 1846279 - DNA, 15 bp, Homo sapiens
agtcgtgcccggcgc

SEQ ID NO: 1846280 - DNA, 15 bp, Homo sapiens
gtcgtgcccggcgcc

SEQ ID NO: 1846281 - DNA, 15 bp, Homo sapiens
tcgtgcccggcgcct

SEQ ID NO: 1846282 - DNA, 15 bp, Homo sapiens
cgtgcccggcgcctc

SEQ ID NO: 1846283 - DNA, 15 bp, Homo sapiens
gtgcccggcgcctct

SEQ ID NO: 1846284 - DNA, 15 bp, Homo sapiens
tgcccggcgcctctc

SEQ ID NO: 1846285 - DNA, 15 bp, Homo sapiens
gcccggcgcctctcc

SEQ ID NO: 1846286 - DNA, 15 bp, Homo sapiens
cccggcgcctctccc

SEQ ID NO: 1846287 - DNA, 15 bp, Homo sapiens
ccggcgcctctccct

SEQ ID NO: 1846288 - DNA, 15 bp, Homo sapiens
cggcgcctctccctc

SEQ ID NO: 1846289 - DNA, 15 bp, Homo sapiens
ggcgcctctccctcc

SEQ ID NO: 1846290 - DNA, 15 bp, Homo sapiens
gcgcctctccctccg

SEQ ID NO: 1846291 - DNA, 15 bp, Homo sapiens
cgcctctccctccgc

SEQ ID NO: 1846292 - DNA, 15 bp, Homo sapiens
gcctctccctccgct

SEQ ID NO: 1846293 - DNA, 15 bp, Homo sapiens
cctctccctccgctg

SEQ ID NO: 1846294 - DNA, 15 bp, Homo sapiens
ctctccctccgctgc

SEQ ID NO: 1846295 - DNA, 15 bp, Homo sapiens
tctccctccgctgct

SEQ ID NO: 1846296 - DNA, 15 bp, Homo sapiens
ctccctccgctgctc

SEQ ID NO: 1846297 - DNA, 15 bp, Homo sapiens
tccctccgctgctcc

SEQ ID NO: 1846298 - DNA, 15 bp, Homo sapiens
ccctccgctgctcca

SEQ ID NO: 1846299 - DNA, 15 bp, Homo sapiens
cctccgctgctccag

SEQ ID NO: 1846300 - DNA, 15 bp, Homo sapiens
ctccgctgctccagc

SEQ ID NO: 1846301 - DNA, 15 bp, Homo sapiens
tccgctgctccagcg

SEQ ID NO: 1846302 - DNA, 15 bp, Homo sapiens
ccgctgctccagcgc

SEQ ID NO: 1846303 - DNA, 15 bp, Homo sapiens
cgctgctccagcgcg

SEQ ID NO: 1846304 - DNA, 15 bp, Homo sapiens
gctgctccagcgcgg

SEQ ID NO: 1846305 - DNA, 15 bp, Homo sapiens
ctgctccagcgcggg

SEQ ID NO: 1846306 - DNA, 15 bp, Homo sapiens
tgctccagcgcgggc

SEQ ID NO: 1846307 - DNA, 15 bp, Homo sapiens
gctccagcgcgggca

SEQ ID NO: 1846308 - DNA, 15 bp, Homo sapiens
ctccagcgcgggcat

SEQ ID NO: 1846309 - DNA, 15 bp, Homo sapiens
tccagcgcgggcatc

SEQ ID NO: 1846310 - DNA, 15 bp, Homo sapiens
ccagcgcgggcatct

SEQ ID NO: 1846311 - DNA, 15 bp, Homo sapiens
cagcgcgggcatctg

SEQ ID NO: 1846312 - DNA, 15 bp, Homo sapiens
agcgcgggcatctgg

SEQ ID NO: 1846313 - DNA, 15 bp, Homo sapiens
gcgcgggcatctggc

SEQ ID NO: 1846314 - DNA, 15 bp, Homo sapiens
cgcgggcatctggcg

SEQ ID NO: 1846315 - DNA, 15 bp, Homo sapiens
gcgggcatctggcgg

SEQ ID NO: 1846316 - DNA, 15 bp, Homo sapiens
cgggcatctggcggg

SEQ ID NO: 1846317 - DNA, 15 bp, Homo sapiens
gggcatctggcgggg

SEQ ID NO: 1846318 - DNA, 15 bp, Homo sapiens
ggcatctggcggggg

SEQ ID NO: 1846319 - DNA, 15 bp, Homo sapiens
gcatctggcgggggt

SEQ ID NO: 1846320 - DNA, 15 bp, Homo sapiens
catctggcgggggtg

SEQ ID NO: 1846321 - DNA, 15 bp, Homo sapiens
atctggcgggggtgt

SEQ ID NO: 1846322 - DNA, 15 bp, Homo sapiens
tctggcgggggtgtg

SEQ ID NO: 1846323 - DNA, 15 bp, Homo sapiens
ctggcgggggtgtgg

SEQ ID NO: 1846324 - DNA, 15 bp, Homo sapiens
tggcgggggtgtgga

SEQ ID NO: 1846325 - DNA, 15 bp, Homo sapiens
ggcgggggtgtggag

SEQ ID NO: 1846326 - DNA, 15 bp, Homo sapiens
gcgggggtgtggagc

SEQ ID NO: 1846327 - DNA, 15 bp, Homo sapiens
cgggggtgtggagcc

SEQ ID NO: 1846328 - DNA, 15 bp, Homo sapiens
gggggtgtggagccc

SEQ ID NO: 1846329 - DNA, 15 bp, Homo sapiens
ggggtgtggagccca

SEQ ID NO: 1846330 - DNA, 15 bp, Homo sapiens
gggtgtggagcccac

SEQ ID NO: 1846331 - DNA, 15 bp, Homo sapiens
ggtgtggagcccaca

SEQ ID NO: 1846332 - DNA, 15 bp, Homo sapiens
gtgtggagcccacac

SEQ ID NO: 1846333 - DNA, 15 bp, Homo sapiens
tgtggagcccacacc

SEQ ID NO: 1846334 - DNA, 15 bp, Homo sapiens
gtggagcccacacct

SEQ ID NO: 1846335 - DNA, 15 bp, Homo sapiens
tggagcccacacctc

SEQ ID NO: 1846336 - DNA, 15 bp, Homo sapiens
ggagcccacacctca

SEQ ID NO: 1846337 - DNA, 15 bp, Homo sapiens
gagcccacacctcac

SEQ ID NO: 1846338 - DNA, 15 bp, Homo sapiens
agcccacacctcact

SEQ ID NO: 1846339 - DNA, 15 bp, Homo sapiens
gcccacacctcactc

SEQ ID NO: 1846340 - DNA, 15 bp, Homo sapiens
cccacacctcactca

SEQ ID NO: 1846341 - DNA, 15 bp, Homo sapiens
ccacacctcactcac

SEQ ID NO: 1846342 - DNA, 15 bp, Homo sapiens
cacacctcactcacc

SEQ ID NO: 1846343 - DNA, 15 bp, Homo sapiens
acacctcactcaccc

SEQ ID NO: 1846344 - DNA, 15 bp, Homo sapiens
cacctcactcaccca

SEQ ID NO: 1846345 - DNA, 15 bp, Homo sapiens
acctcactcacccat

SEQ ID NO: 1846346 - DNA, 15 bp, Homo sapiens
cctcactcacccatc

SEQ ID NO: 1846347 - DNA, 15 bp, Homo sapiens
ctcactcacccatcc

SEQ ID NO: 1846348 - DNA, 15 bp, Homo sapiens
tcactcacccatccc

SEQ ID NO: 1846349 - DNA, 15 bp, Homo sapiens
cactcacccatccca

SEQ ID NO: 1846350 - DNA, 15 bp, Homo sapiens
actcacccatcccag

SEQ ID NO: 1846351 - DNA, 15 bp, Homo sapiens
ctcacccatcccagg

SEQ ID NO: 1846352 - DNA, 15 bp, Homo sapiens
tcacccatcccaggc

SEQ ID NO: 1846353 - DNA, 15 bp, Homo sapiens
cacccatcccaggct

SEQ ID NO: 1846354 - DNA, 15 bp, Homo sapiens
acccatcccaggctg

SEQ ID NO: 1846355 - DNA, 15 bp, Homo sapiens
cccatcccaggctgg

SEQ ID NO: 1846356 - DNA, 15 bp, Homo sapiens
ccatcccaggctggc

SEQ ID NO: 1846357 - DNA, 15 bp, Homo sapiens
catcccaggctggcc

SEQ ID NO: 1846358 - DNA, 15 bp, Homo sapiens
atcccaggctggccc

SEQ ID NO: 1846359 - DNA, 15 bp, Homo sapiens
tcccaggctggccca

SEQ ID NO: 1846360 - DNA, 15 bp, Homo sapiens
cccaggctggcccag

SEQ ID NO: 1846361 - DNA, 15 bp, Homo sapiens
ccaggctggcccagc

SEQ ID NO: 1846362 - DNA, 15 bp, Homo sapiens
caggctggcccagcc

SEQ ID NO: 1846363 - DNA, 15 bp, Homo sapiens
aggctggcccagccc

SEQ ID NO: 1846364 - DNA, 15 bp, Homo sapiens
ggctggcccagcccc

SEQ ID NO: 1846365 - DNA, 15 bp, Homo sapiens
gctggcccagcccct

SEQ ID NO: 1846366 - DNA, 15 bp, Homo sapiens
ctggcccagcccctc

SEQ ID NO: 1846367 - DNA, 15 bp, Homo sapiens
tggcccagcccctcc

SEQ ID NO: 1846368 - DNA, 15 bp, Homo sapiens
ggcccagcccctcct

SEQ ID NO: 1846369 - DNA, 15 bp, Homo sapiens
gcccagcccctcctt

SEQ ID NO: 1846370 - DNA, 15 bp, Homo sapiens
cccagcccctccttc

SEQ ID NO: 1846371 - DNA, 15 bp, Homo sapiens
ccagcccctccttct

SEQ ID NO: 1846372 - DNA, 15 bp, Homo sapiens
cagcccctccttctg

SEQ ID NO: 1846373 - DNA, 15 bp, Homo sapiens
agcccctccttctgg

SEQ ID NO: 1846374 - DNA, 15 bp, Homo sapiens
gcccctccttctggg

SEQ ID NO: 1846375 - DNA, 15 bp, Homo sapiens
cccctccttctgggg

SEQ ID NO: 1846376 - DNA, 15 bp, Homo sapiens
ccctccttctgggga

SEQ ID NO: 1846377 - DNA, 15 bp, Homo sapiens
cctccttctggggag

SEQ ID NO: 1846378 - DNA, 15 bp, Homo sapiens
ctccttctggggagt

SEQ ID NO: 1846379 - DNA, 15 bp, Homo sapiens
tccttctggggagtc

SEQ ID NO: 1846380 - DNA, 15 bp, Homo sapiens
ccttctggggagtcg

SEQ ID NO: 1846381 - DNA, 15 bp, Homo sapiens
cttctggggagtcga

SEQ ID NO: 1846382 - DNA, 15 bp, Homo sapiens
ttctggggagtcgag

SEQ ID NO: 1846383 - DNA, 15 bp, Homo sapiens
tctggggagtcgagg

SEQ ID NO: 1846384 - DNA, 15 bp, Homo sapiens
ctggggagtcgagga

SEQ ID NO: 1846385 - DNA, 15 bp, Homo sapiens
tggggagtcgaggag

SEQ ID NO: 1846386 - DNA, 15 bp, Homo sapiens
ggggagtcgaggagc

SEQ ID NO: 1846387 - DNA, 15 bp, Homo sapiens
gggagtcgaggagcc

SEQ ID NO: 1846388 - DNA, 15 bp, Homo sapiens
ggagtcgaggagccc

SEQ ID NO: 1846389 - DNA, 15 bp, Homo sapiens
gagtcgaggagcccc

SEQ ID NO: 1846390 - DNA, 15 bp, Homo sapiens
agtcgaggagcccca

SEQ ID NO: 1846391 - DNA, 15 bp, Homo sapiens
gtcgaggagccccag

SEQ ID NO: 1846392 - DNA, 15 bp, Homo sapiens
tcgaggagccccaga

SEQ ID NO: 1846393 - DNA, 15 bp, Homo sapiens
cgaggagccccagac

SEQ ID NO: 1846394 - DNA, 15 bp, Homo sapiens
gaggagccccagact

SEQ ID NO: 1846395 - DNA, 15 bp, Homo sapiens
aggagccccagactc

SEQ ID NO: 1846396 - DNA, 15 bp, Homo sapiens
ggagccccagactcc

SEQ ID NO: 1846397 - DNA, 15 bp, Homo sapiens
gagccccagactccg

SEQ ID NO: 1846398 - DNA, 15 bp, Homo sapiens
agccccagactccgc

SEQ ID NO: 1846399 - DNA, 15 bp, Homo sapiens
gccccagactccgcc

SEQ ID NO: 1846400 - DNA, 15 bp, Homo sapiens
ccccagactccgcct

SEQ ID NO: 1846401 - DNA, 15 bp, Homo sapiens
cccagactccgcctc

SEQ ID NO: 1846402 - DNA, 15 bp, Homo sapiens
ccagactccgcctcc

SEQ ID NO: 1846403 - DNA, 15 bp, Homo sapiens
cagactccgcctcca

SEQ ID NO: 1846404 - DNA, 15 bp, Homo sapiens
agactccgcctccac

SEQ ID NO: 1846405 - DNA, 15 bp, Homo sapiens
gactccgcctccaca

SEQ ID NO: 1846406 - DNA, 15 bp, Homo sapiens
actccgcctccacac

SEQ ID NO: 1846407 - DNA, 15 bp, Homo sapiens
ctccgcctccacacc

SEQ ID NO: 1846408 - DNA, 15 bp, Homo sapiens
tccgcctccacacca

SEQ ID NO: 1846409 - DNA, 15 bp, Homo sapiens
ccgcctccacaccaa

SEQ ID NO: 1846410 - DNA, 15 bp, Homo sapiens
cgcctccacaccaaa

SEQ ID NO: 1846411 - DNA, 15 bp, Homo sapiens
gcctccacaccaaaa

SEQ ID NO: 1846412 - DNA, 15 bp, Homo sapiens
cctccacaccaaaac

SEQ ID NO: 1846413 - DNA, 15 bp, Homo sapiens
ctccacaccaaaaca

SEQ ID NO: 1846414 - DNA, 15 bp, Homo sapiens
tccacaccaaaacaa

SEQ ID NO: 1846415 - DNA, 15 bp, Homo sapiens
ccacaccaaaacaag

SEQ ID NO: 1846416 - DNA, 15 bp, Homo sapiens
cacaccaaaacaagg

SEQ ID NO: 1846417 - DNA, 15 bp, Homo sapiens
acaccaaaacaaggt

SEQ ID NO: 1846418 - DNA, 15 bp, Homo sapiens
caccaaaacaaggtt

SEQ ID NO: 1846419 - DNA, 15 bp, Homo sapiens
accaaaacaaggttc

SEQ ID NO: 1846420 - DNA, 15 bp, Homo sapiens
ccaaaacaaggttct

SEQ ID NO: 1846421 - DNA, 15 bp, Homo sapiens
caaaacaaggttctg

SEQ ID NO: 1846422 - DNA, 15 bp, Homo sapiens
aaaacaaggttctgt

SEQ ID NO: 1846423 - DNA, 15 bp, Homo sapiens
aaacaaggttctgtc

SEQ ID NO: 1846424 - DNA, 15 bp, Homo sapiens
aacaaggttctgtca

SEQ ID NO: 1846425 - DNA, 15 bp, Homo sapiens
acaaggttctgtcaa

SEQ ID NO: 1846426 - DNA, 15 bp, Homo sapiens
caaggttctgtcaaa

SEQ ID NO: 1846427 - DNA, 15 bp, Homo sapiens
tgagattacaggcgt

SEQ ID NO: 1846428 - DNA, 15 bp, Homo sapiens
gagattacaggcgtg

SEQ ID NO: 1846429 - DNA, 15 bp, Homo sapiens
agattacaggcgtga

SEQ ID NO: 1846430 - DNA, 15 bp, Homo sapiens
gtgagccactgcacg

SEQ ID NO: 1846431 - DNA, 15 bp, Homo sapiens
tgagccactgcacgc

SEQ ID NO: 1846432 - DNA, 15 bp, Homo sapiens
gagccactgcacgcg

SEQ ID NO: 1846433 - DNA, 15 bp, Homo sapiens
agccactgcacgcgg

SEQ ID NO: 1846434 - DNA, 15 bp, Homo sapiens
gccactgcacgcggc

SEQ ID NO: 1846435 - DNA, 15 bp, Homo sapiens
ccactgcacgcggcc

SEQ ID NO: 1846436 - DNA, 15 bp, Homo sapiens
cactgcacgcggccc

SEQ ID NO: 1846437 - DNA, 15 bp, Homo sapiens
actgcacgcggccca

SEQ ID NO: 1846438 - DNA, 15 bp, Homo sapiens
ctgcacgcggcccat

SEQ ID NO: 1846439 - DNA, 15 bp, Homo sapiens
tgcacgcggcccata

SEQ ID NO: 1846440 - DNA, 15 bp, Homo sapiens
gcacgcggcccatag

SEQ ID NO: 1846441 - DNA, 15 bp, Homo sapiens
cacgcggcccatagg

SEQ ID NO: 1846442 - DNA, 15 bp, Homo sapiens
acgcggcccataggt

SEQ ID NO: 1846443 - DNA, 15 bp, Homo sapiens
cgcggcccataggta

SEQ ID NO: 1846444 - DNA, 15 bp, Homo sapiens
gcggcccataggtaa

SEQ ID NO: 1846445 - DNA, 15 bp, Homo sapiens
cggcccataggtaaa

SEQ ID NO: 1846446 - DNA, 15 bp, Homo sapiens
ggcccataggtaaaa

SEQ ID NO: 1846447 - DNA, 15 bp, Homo sapiens
gcccataggtaaaac

SEQ ID NO: 1846448 - DNA, 15 bp, Homo sapiens
cccataggtaaaact

SEQ ID NO: 1846449 - DNA, 15 bp, Homo sapiens
ccataggtaaaactc

SEQ ID NO: 1846450 - DNA, 15 bp, Homo sapiens
cataggtaaaactct

SEQ ID NO: 1846451 - DNA, 15 bp, Homo sapiens
ataggtaaaactctt

SEQ ID NO: 1846452 - DNA, 15 bp, Homo sapiens
taggtaaaactctta

SEQ ID NO: 1846453 - DNA, 15 bp, Homo sapiens
aggtaaaactcttat

SEQ ID NO: 1846454 - DNA, 15 bp, Homo sapiens
ggtaaaactcttatt

SEQ ID NO: 1846455 - DNA, 15 bp, Homo sapiens
gtaaaactcttattc

SEQ ID NO: 1846456 - DNA, 15 bp, Homo sapiens
taaaactcttattcc

SEQ ID NO: 1846457 - DNA, 15 bp, Homo sapiens
aaaactcttattccc

SEQ ID NO: 1846458 - DNA, 15 bp, Homo sapiens
aaactcttattccct

SEQ ID NO: 1846459 - DNA, 15 bp, Homo sapiens
aactcttattcccta

SEQ ID NO: 1846460 - DNA, 15 bp, Homo sapiens
actcttattccctat

SEQ ID NO: 1846461 - DNA, 15 bp, Homo sapiens
ctcttattccctatg

SEQ ID NO: 1846462 - DNA, 15 bp, Homo sapiens
tcttattccctatgt

SEQ ID NO: 1846463 - DNA, 15 bp, Homo sapiens
cttattccctatgtc

SEQ ID NO: 1846464 - DNA, 15 bp, Homo sapiens
ttattccctatgtca

SEQ ID NO: 1846465 - DNA, 15 bp, Homo sapiens
tattccctatgtcat

SEQ ID NO: 1846466 - DNA, 15 bp, Homo sapiens
attccctatgtcatt

SEQ ID NO: 1846467 - DNA, 15 bp, Homo sapiens
ttccctatgtcattc

SEQ ID NO: 1846468 - DNA, 15 bp, Homo sapiens
tccctatgtcattct

SEQ ID NO: 1846469 - DNA, 15 bp, Homo sapiens
ccctatgtcattctg

SEQ ID NO: 1846470 - DNA, 15 bp, Homo sapiens
cctatgtcattctgc

SEQ ID NO: 1846471 - DNA, 15 bp, Homo sapiens
ctatgtcattctgcc

SEQ ID NO: 1846472 - DNA, 15 bp, Homo sapiens
tatgtcattctgcca

SEQ ID NO: 1846473 - DNA, 15 bp, Homo sapiens
atgtcattctgccat

SEQ ID NO: 1846474 - DNA, 15 bp, Homo sapiens
tgtcattctgccatc

SEQ ID NO: 1846475 - DNA, 15 bp, Homo sapiens
gtcattctgccatca

SEQ ID NO: 1846476 - DNA, 15 bp, Homo sapiens
tcattctgccatcac

SEQ ID NO: 1846477 - DNA, 15 bp, Homo sapiens
cattctgccatcaca

SEQ ID NO: 1846478 - DNA, 15 bp, Homo sapiens
attctgccatcacat

SEQ ID NO: 1846479 - DNA, 15 bp, Homo sapiens
ttctgccatcacatg

SEQ ID NO: 1846480 - DNA, 15 bp, Homo sapiens
tctgccatcacatgg

SEQ ID NO: 1846481 - DNA, 15 bp, Homo sapiens
ctgccatcacatggg

SEQ ID NO: 1846482 - DNA, 15 bp, Homo sapiens
tgccatcacatgggc

SEQ ID NO: 1846483 - DNA, 15 bp, Homo sapiens
gccatcacatgggct

SEQ ID NO: 1846484 - DNA, 15 bp, Homo sapiens
ccatcacatgggctc

SEQ ID NO: 1846485 - DNA, 15 bp, Homo sapiens
catcacatgggctct

SEQ ID NO: 1846486 - DNA, 15 bp, Homo sapiens
atcacatgggctctc

SEQ ID NO: 1846487 - DNA, 15 bp, Homo sapiens
tcacatgggctctct

SEQ ID NO: 1846488 - DNA, 15 bp, Homo sapiens
cacatgggctctctg

SEQ ID NO: 1846489 - DNA, 15 bp, Homo sapiens
acatgggctctctgc

SEQ ID NO: 1846490 - DNA, 15 bp, Homo sapiens
catgggctctctgct

SEQ ID NO: 1846491 - DNA, 15 bp, Homo sapiens
atgggctctctgctc

SEQ ID NO: 1846492 - DNA, 15 bp, Homo sapiens
tgggctctctgctct

SEQ ID NO: 1846493 - DNA, 15 bp, Homo sapiens
gggctctctgctctt

SEQ ID NO: 1846494 - DNA, 15 bp, Homo sapiens
ggctctctgctcttc

SEQ ID NO: 1846495 - DNA, 15 bp, Homo sapiens
gctctctgctcttcc

SEQ ID NO: 1846496 - DNA, 15 bp, Homo sapiens
ctctctgctcttcct

SEQ ID NO: 1846497 - DNA, 15 bp, Homo sapiens
tctctgctcttcctg

SEQ ID NO: 1846498 - DNA, 15 bp, Homo sapiens
ctctgctcttcctgc

SEQ ID NO: 1846499 - DNA, 15 bp, Homo sapiens
tctgctcttcctgca

SEQ ID NO: 1846500 - DNA, 15 bp, Homo sapiens
ctgctcttcctgcaa

SEQ ID NO: 1846501 - DNA, 15 bp, Homo sapiens
tgctcttcctgcaaa

SEQ ID NO: 1846502 - DNA, 15 bp, Homo sapiens
gctcttcctgcaaag

SEQ ID NO: 1846503 - DNA, 15 bp, Homo sapiens
ctcttcctgcaaagg

SEQ ID NO: 1846504 - DNA, 15 bp, Homo sapiens
tcttcctgcaaaggg

SEQ ID NO: 1846505 - DNA, 15 bp, Homo sapiens
cttcctgcaaaggga

SEQ ID NO: 1846506 - DNA, 15 bp, Homo sapiens
ttcctgcaaagggac

SEQ ID NO: 1846507 - DNA, 15 bp, Homo sapiens
tcctgcaaagggact

SEQ ID NO: 1846508 - DNA, 15 bp, Homo sapiens
cctgcaaagggactc

SEQ ID NO: 1846509 - DNA, 15 bp, Homo sapiens
ctgcaaagggactct

SEQ ID NO: 1846510 - DNA, 15 bp, Homo sapiens
tgcaaagggactctg

SEQ ID NO: 1846511 - DNA, 15 bp, Homo sapiens
gcaaagggactctgg

SEQ ID NO: 1846512 - DNA, 15 bp, Homo sapiens
caaagggactctggg

SEQ ID NO: 1846513 - DNA, 15 bp, Homo sapiens
aaagggactctgggg

SEQ ID NO: 1846514 - DNA, 15 bp, Homo sapiens
aagggactctggggc

SEQ ID NO: 1846515 - DNA, 15 bp, Homo sapiens
agggactctggggct

SEQ ID NO: 1846516 - DNA, 15 bp, Homo sapiens
gggactctggggctg

SEQ ID NO: 1846517 - DNA, 15 bp, Homo sapiens
ggactctggggctgc

SEQ ID NO: 1846518 - DNA, 15 bp, Homo sapiens
gactctggggctgct

SEQ ID NO: 1846519 - DNA, 15 bp, Homo sapiens
actctggggctgctt

SEQ ID NO: 1846520 - DNA, 15 bp, Homo sapiens
ctctggggctgcttc

SEQ ID NO: 1846521 - DNA, 15 bp, Homo sapiens
tctggggctgcttcc

SEQ ID NO: 1846522 - DNA, 15 bp, Homo sapiens
ctggggctgcttccc

SEQ ID NO: 1846523 - DNA, 15 bp, Homo sapiens
tggggctgcttcccc

SEQ ID NO: 1846524 - DNA, 15 bp, Homo sapiens
ggggctgcttcccct

SEQ ID NO: 1846525 - DNA, 15 bp, Homo sapiens
gggctgcttcccctg

SEQ ID NO: 1846526 - DNA, 15 bp, Homo sapiens
ggctgcttcccctgt

SEQ ID NO: 1846527 - DNA, 15 bp, Homo sapiens
gctgcttcccctgtc

SEQ ID NO: 1846528 - DNA, 15 bp, Homo sapiens
ctgcttcccctgtcc

SEQ ID NO: 1846529 - DNA, 15 bp, Homo sapiens
tgcttcccctgtcct

SEQ ID NO: 1846530 - DNA, 15 bp, Homo sapiens
gcttcccctgtcctc

SEQ ID NO: 1846531 - DNA, 15 bp, Homo sapiens
cttcccctgtcctct

SEQ ID NO: 1846532 - DNA, 15 bp, Homo sapiens
ttcccctgtcctctg

SEQ ID NO: 1846533 - DNA, 15 bp, Homo sapiens
tcccctgtcctctgc

SEQ ID NO: 1846534 - DNA, 15 bp, Homo sapiens
cccctgtcctctgcc

SEQ ID NO: 1846535 - DNA, 15 bp, Homo sapiens
ccctgtcctctgccc

SEQ ID NO: 1846536 - DNA, 15 bp, Homo sapiens
cctgtcctctgcccc

SEQ ID NO: 1846537 - DNA, 15 bp, Homo sapiens
ctgtcctctgcccca

SEQ ID NO: 1846538 - DNA, 15 bp, Homo sapiens
tgtcctctgccccag

SEQ ID NO: 1846539 - DNA, 15 bp, Homo sapiens
gtcctctgccccagc

SEQ ID NO: 1846540 - DNA, 15 bp, Homo sapiens
tcctctgccccagct

SEQ ID NO: 1846541 - DNA, 15 bp, Homo sapiens
cctctgccccagctg

SEQ ID NO: 1846542 - DNA, 15 bp, Homo sapiens
ctctgccccagctgg

SEQ ID NO: 1846543 - DNA, 15 bp, Homo sapiens
tctgccccagctgga

SEQ ID NO: 1846544 - DNA, 15 bp, Homo sapiens
ctgccccagctggac

SEQ ID NO: 1846545 - DNA, 15 bp, Homo sapiens
tgccccagctggacc

SEQ ID NO: 1846546 - DNA, 15 bp, Homo sapiens
gccccagctggaccc

SEQ ID NO: 1846547 - DNA, 15 bp, Homo sapiens
ccccagctggaccca

SEQ ID NO: 1846548 - DNA, 15 bp, Homo sapiens
cccagctggacccag

SEQ ID NO: 1846549 - DNA, 15 bp, Homo sapiens
ccagctggacccaga

SEQ ID NO: 1846550 - DNA, 15 bp, Homo sapiens
cagctggacccagac

SEQ ID NO: 1846551 - DNA, 15 bp, Homo sapiens
agctggacccagact

SEQ ID NO: 1846552 - DNA, 15 bp, Homo sapiens
gctggacccagactc

SEQ ID NO: 1846553 - DNA, 15 bp, Homo sapiens
ctggacccagactca

SEQ ID NO: 1846554 - DNA, 15 bp, Homo sapiens
tggacccagactcac

SEQ ID NO: 1846555 - DNA, 15 bp, Homo sapiens
ggacccagactcaca

SEQ ID NO: 1846556 - DNA, 15 bp, Homo sapiens
gacccagactcacag

SEQ ID NO: 1846557 - DNA, 15 bp, Homo sapiens
acccagactcacagg

SEQ ID NO: 1846558 - DNA, 15 bp, Homo sapiens
cccagactcacaggt

SEQ ID NO: 1846559 - DNA, 15 bp, Homo sapiens
ccagactcacaggtt

SEQ ID NO: 1846560 - DNA, 15 bp, Homo sapiens
cagactcacaggttt

SEQ ID NO: 1846561 - DNA, 15 bp, Homo sapiens
agactcacaggtttt

SEQ ID NO: 1846562 - DNA, 15 bp, Homo sapiens
gactcacaggttttg

SEQ ID NO: 1846563 - DNA, 15 bp, Homo sapiens
actcacaggttttgc

SEQ ID NO: 1846564 - DNA, 15 bp, Homo sapiens
ctcacaggttttgct

SEQ ID NO: 1846565 - DNA, 15 bp, Homo sapiens
tcacaggttttgctt

SEQ ID NO: 1846566 - DNA, 15 bp, Homo sapiens
cacaggttttgcttc

SEQ ID NO: 1846567 - DNA, 15 bp, Homo sapiens
acaggttttgcttct

SEQ ID NO: 1846568 - DNA, 15 bp, Homo sapiens
caggttttgcttctc

SEQ ID NO: 1846569 - DNA, 15 bp, Homo sapiens
aggttttgcttctcg

SEQ ID NO: 1846570 - DNA, 15 bp, Homo sapiens
ggttttgcttctcga

SEQ ID NO: 1846571 - DNA, 15 bp, Homo sapiens
gttttgcttctcgag

SEQ ID NO: 1846572 - DNA, 15 bp, Homo sapiens
ttttgcttctcgaga

SEQ ID NO: 1846573 - DNA, 15 bp, Homo sapiens
tttgcttctcgagat

SEQ ID NO: 1846574 - DNA, 15 bp, Homo sapiens
ttgcttctcgagatg

SEQ ID NO: 1846575 - DNA, 15 bp, Homo sapiens
tgcttctcgagatgc

SEQ ID NO: 1846576 - DNA, 15 bp, Homo sapiens
gcttctcgagatgca

SEQ ID NO: 1846577 - DNA, 15 bp, Homo sapiens
aaaagcgaaactccg

SEQ ID NO: 1846578 - DNA, 15 bp, Homo sapiens
aaagcgaaactccgt

SEQ ID NO: 1846579 - DNA, 15 bp, Homo sapiens
aagcgaaactccgtc

SEQ ID NO: 1846580 - DNA, 15 bp, Homo sapiens
gaaactccgtctcag

SEQ ID NO: 1846581 - DNA, 15 bp, Homo sapiens
aaactccgtctcagg

SEQ ID NO: 1846582 - DNA, 15 bp, Homo sapiens
aactccgtctcagga

SEQ ID NO: 1846583 - DNA, 15 bp, Homo sapiens
actccgtctcaggaa

SEQ ID NO: 1846584 - DNA, 15 bp, Homo sapiens
ctccgtctcaggaaa

SEQ ID NO: 1846585 - DNA, 15 bp, Homo sapiens
tccgtctcaggaaaa

SEQ ID NO: 1846586 - DNA, 15 bp, Homo sapiens
ccgtctcaggaaaaa

SEQ ID NO: 1846587 - DNA, 15 bp, Homo sapiens
cgtctcaggaaaaaa

SEQ ID NO: 1846588 - DNA, 15 bp, Homo sapiens
gtctcaggaaaaaaa

SEQ ID NO: 1846589 - DNA, 15 bp, Homo sapiens
aaaaaattagctagg

SEQ ID NO: 1846590 - DNA, 15 bp, Homo sapiens
aattagctaggcata

SEQ ID NO: 1846591 - DNA, 15 bp, Homo sapiens
attagctaggcataa

SEQ ID NO: 1846592 - DNA, 15 bp, Homo sapiens
ttagctaggcataat

SEQ ID NO: 1846593 - DNA, 15 bp, Homo sapiens
tagctaggcataatg

SEQ ID NO: 1846594 - DNA, 15 bp, Homo sapiens
agctaggcataatgg

SEQ ID NO: 1846595 - DNA, 15 bp, Homo sapiens
gctaggcataatggc

SEQ ID NO: 1846596 - DNA, 15 bp, Homo sapiens
ctaggcataatggca

SEQ ID NO: 1846597 - DNA, 15 bp, Homo sapiens
taggcataatggcat

SEQ ID NO: 1846598 - DNA, 15 bp, Homo sapiens
aggcataatggcata

SEQ ID NO: 1846599 - DNA, 15 bp, Homo sapiens
ggcataatggcatac

SEQ ID NO: 1846600 - DNA, 15 bp, Homo sapiens
gcataatggcataca

SEQ ID NO: 1846601 - DNA, 15 bp, Homo sapiens
cataatggcatacac

SEQ ID NO: 1846602 - DNA, 15 bp, Homo sapiens
ataatggcatacacc

SEQ ID NO: 1846603 - DNA, 15 bp, Homo sapiens
taatggcatacacct

SEQ ID NO: 1846604 - DNA, 15 bp, Homo sapiens
aatggcatacacctg

SEQ ID NO: 1846605 - DNA, 15 bp, Homo sapiens
atggcatacacctgt

SEQ ID NO: 1846606 - DNA, 15 bp, Homo sapiens
ggcatacacctgtag

SEQ ID NO: 1846607 - DNA, 15 bp, Homo sapiens
gcatacacctgtagt

SEQ ID NO: 1846608 - DNA, 15 bp, Homo sapiens
catacacctgtagtc

SEQ ID NO: 1846609 - DNA, 15 bp, Homo sapiens
atacacctgtagtcc

SEQ ID NO: 1846610 - DNA, 15 bp, Homo sapiens
tacacctgtagtccc

SEQ ID NO: 1846611 - DNA, 15 bp, Homo sapiens
tagtcccagctgcta

SEQ ID NO: 1846612 - DNA, 15 bp, Homo sapiens
agtcccagctgctag

SEQ ID NO: 1846613 - DNA, 15 bp, Homo sapiens
gtcccagctgctagg

SEQ ID NO: 1846614 - DNA, 15 bp, Homo sapiens
ccagctgctagggag

SEQ ID NO: 1846615 - DNA, 15 bp, Homo sapiens
cagctgctagggagg

SEQ ID NO: 1846616 - DNA, 15 bp, Homo sapiens
agctgctagggaggc

SEQ ID NO: 1846617 - DNA, 15 bp, Homo sapiens
gctgctagggaggct

SEQ ID NO: 1846618 - DNA, 15 bp, Homo sapiens
ctgctagggaggctg

SEQ ID NO: 1846619 - DNA, 15 bp, Homo sapiens
tgctagggaggctga

SEQ ID NO: 1846620 - DNA, 15 bp, Homo sapiens
gctagggaggctgat

SEQ ID NO: 1846621 - DNA, 15 bp, Homo sapiens
ctagggaggctgatg

SEQ ID NO: 1846622 - DNA, 15 bp, Homo sapiens
tagggaggctgatgt

SEQ ID NO: 1846623 - DNA, 15 bp, Homo sapiens
agggaggctgatgtg

SEQ ID NO: 1846624 - DNA, 15 bp, Homo sapiens
gggaggctgatgtgg

SEQ ID NO: 1846625 - DNA, 15 bp, Homo sapiens
ggaggctgatgtggg

SEQ ID NO: 1846626 - DNA, 15 bp, Homo sapiens
gaggctgatgtggga

SEQ ID NO: 1846627 - DNA, 15 bp, Homo sapiens
aggctgatgtgggag

SEQ ID NO: 1846628 - DNA, 15 bp, Homo sapiens
ggctgatgtgggaga

SEQ ID NO: 1846629 - DNA, 15 bp, Homo sapiens
gctgatgtgggagaa

SEQ ID NO: 1846630 - DNA, 15 bp, Homo sapiens
ctgatgtgggagaat

SEQ ID NO: 1846631 - DNA, 15 bp, Homo sapiens
tgatgtgggagaatc

SEQ ID NO: 1846632 - DNA, 15 bp, Homo sapiens
gatgtgggagaatca

SEQ ID NO: 1846633 - DNA, 15 bp, Homo sapiens
atgtgggagaatcac

SEQ ID NO: 1846634 - DNA, 15 bp, Homo sapiens
tgtgggagaatcact

SEQ ID NO: 1846635 - DNA, 15 bp, Homo sapiens
gggagaatcacttgt

SEQ ID NO: 1846636 - DNA, 15 bp, Homo sapiens
ggagaatcacttgta

SEQ ID NO: 1846637 - DNA, 15 bp, Homo sapiens
gagaatcacttgtac

SEQ ID NO: 1846638 - DNA, 15 bp, Homo sapiens
agaatcacttgtact

SEQ ID NO: 1846639 - DNA, 15 bp, Homo sapiens
gaatcacttgtactc

SEQ ID NO: 1846640 - DNA, 15 bp, Homo sapiens
aatcacttgtactcc

SEQ ID NO: 1846641 - DNA, 15 bp, Homo sapiens
atcacttgtactcca

SEQ ID NO: 1846642 - DNA, 15 bp, Homo sapiens
tcacttgtactccag

SEQ ID NO: 1846643 - DNA, 15 bp, Homo sapiens
cacttgtactccaga

SEQ ID NO: 1846644 - DNA, 15 bp, Homo sapiens
acttgtactccagag

SEQ ID NO: 1846645 - DNA, 15 bp, Homo sapiens
cttgtactccagagg

SEQ ID NO: 1846646 - DNA, 15 bp, Homo sapiens
ttgtactccagaggg

SEQ ID NO: 1846647 - DNA, 15 bp, Homo sapiens
tgtactccagagggg

SEQ ID NO: 1846648 - DNA, 15 bp, Homo sapiens
gtactccagaggggg

SEQ ID NO: 1846649 - DNA, 15 bp, Homo sapiens
tactccagaggggga

SEQ ID NO: 1846650 - DNA, 15 bp, Homo sapiens
actccagagggggaa

SEQ ID NO: 1846651 - DNA, 15 bp, Homo sapiens
ctccagagggggaag

SEQ ID NO: 1846652 - DNA, 15 bp, Homo sapiens
tccagagggggaagt

SEQ ID NO: 1846653 - DNA, 15 bp, Homo sapiens
ccagagggggaagtt

SEQ ID NO: 1846654 - DNA, 15 bp, Homo sapiens
cagagggggaagttg

SEQ ID NO: 1846655 - DNA, 15 bp, Homo sapiens
agagggggaagttgg

SEQ ID NO: 1846656 - DNA, 15 bp, Homo sapiens
gagggggaagttgga

SEQ ID NO: 1846657 - DNA, 15 bp, Homo sapiens
agggggaagttggag

SEQ ID NO: 1846658 - DNA, 15 bp, Homo sapiens
gggggaagttggagt

SEQ ID NO: 1846659 - DNA, 15 bp, Homo sapiens
ggggaagttggagtg

SEQ ID NO: 1846660 - DNA, 15 bp, Homo sapiens
gggaagttggagtga

SEQ ID NO: 1846661 - DNA, 15 bp, Homo sapiens
ggaagttggagtgag

SEQ ID NO: 1846662 - DNA, 15 bp, Homo sapiens
gaagttggagtgagc

SEQ ID NO: 1846663 - DNA, 15 bp, Homo sapiens
aagttggagtgagcc

SEQ ID NO: 1846664 - DNA, 15 bp, Homo sapiens
agttggagtgagcca

SEQ ID NO: 1846665 - DNA, 15 bp, Homo sapiens
gttggagtgagccaa

SEQ ID NO: 1846666 - DNA, 15 bp, Homo sapiens
ttggagtgagccaag

SEQ ID NO: 1846667 - DNA, 15 bp, Homo sapiens
tggagtgagccaaga

SEQ ID NO: 1846668 - DNA, 15 bp, Homo sapiens
ggagtgagccaagat

SEQ ID NO: 1846669 - DNA, 15 bp, Homo sapiens
gagtgagccaagatc

SEQ ID NO: 1846670 - DNA, 15 bp, Homo sapiens
tgagccaagatcacc

SEQ ID NO: 1846671 - DNA, 15 bp, Homo sapiens
gagccaagatcacct

SEQ ID NO: 1846672 - DNA, 15 bp, Homo sapiens
agccaagatcacctc

SEQ ID NO: 1846673 - DNA, 15 bp, Homo sapiens
gccaagatcacctca

SEQ ID NO: 1846674 - DNA, 15 bp, Homo sapiens
ccaagatcacctcac

SEQ ID NO: 1846675 - DNA, 15 bp, Homo sapiens
caagatcacctcact

SEQ ID NO: 1846676 - DNA, 15 bp, Homo sapiens
aagatcacctcactc

SEQ ID NO: 1846677 - DNA, 15 bp, Homo sapiens
agatcacctcactcc

SEQ ID NO: 1846678 - DNA, 15 bp, Homo sapiens
gatcacctcactcca

SEQ ID NO: 1846679 - DNA, 15 bp, Homo sapiens
atcacctcactccac

SEQ ID NO: 1846680 - DNA, 15 bp, Homo sapiens
tcacctcactccact

SEQ ID NO: 1846681 - DNA, 15 bp, Homo sapiens
cacctcactccactc

SEQ ID NO: 1846682 - DNA, 15 bp, Homo sapiens
acctcactccactcc

SEQ ID NO: 1846683 - DNA, 15 bp, Homo sapiens
cctcactccactcca

SEQ ID NO: 1846684 - DNA, 15 bp, Homo sapiens
ctcactccactccag

SEQ ID NO: 1846685 - DNA, 15 bp, Homo sapiens
tcactccactccagc

SEQ ID NO: 1846686 - DNA, 15 bp, Homo sapiens
cactccactccagcc

SEQ ID NO: 1846687 - DNA, 15 bp, Homo sapiens
actccactccagcct

SEQ ID NO: 1846688 - DNA, 15 bp, Homo sapiens
ctccactccagcctg

SEQ ID NO: 1846689 - DNA, 15 bp, Homo sapiens
tccactccagcctgg

SEQ ID NO: 1846690 - DNA, 15 bp, Homo sapiens
ccactccagcctggg

SEQ ID NO: 1846691 - DNA, 15 bp, Homo sapiens
ctgggcaacagagtc

SEQ ID NO: 1846692 - DNA, 15 bp, Homo sapiens
tgggcaacagagtca

SEQ ID NO: 1846693 - DNA, 15 bp, Homo sapiens
gggcaacagagtcag

SEQ ID NO: 1846694 - DNA, 15 bp, Homo sapiens
ggcaacagagtcaga

SEQ ID NO: 1846695 - DNA, 15 bp, Homo sapiens
gcaacagagtcagaa

SEQ ID NO: 1846696 - DNA, 15 bp, Homo sapiens
caacagagtcagaac

SEQ ID NO: 1846697 - DNA, 15 bp, Homo sapiens
aacagagtcagaacc

SEQ ID NO: 1846698 - DNA, 15 bp, Homo sapiens
acagagtcagaacct

SEQ ID NO: 1846699 - DNA, 15 bp, Homo sapiens
cagagtcagaacctg

SEQ ID NO: 1846700 - DNA, 15 bp, Homo sapiens
agagtcagaacctgt

SEQ ID NO: 1846701 - DNA, 15 bp, Homo sapiens
gagtcagaacctgtc

SEQ ID NO: 1846702 - DNA, 15 bp, Homo sapiens
agtcagaacctgtct

SEQ ID NO: 1846703 - DNA, 15 bp, Homo sapiens
gtcagaacctgtctc

SEQ ID NO: 1846704 - DNA, 15 bp, Homo sapiens
tcagaacctgtctca

SEQ ID NO: 1846705 - DNA, 15 bp, Homo sapiens
cagaacctgtctcaa

SEQ ID NO: 1846706 - DNA, 15 bp, Homo sapiens
agaacctgtctcaat

SEQ ID NO: 1846707 - DNA, 15 bp, Homo sapiens
gaacctgtctcaata

SEQ ID NO: 1846708 - DNA, 15 bp, Homo sapiens
aacctgtctcaatag

SEQ ID NO: 1846709 - DNA, 15 bp, Homo sapiens
acctgtctcaataga

SEQ ID NO: 1846710 - DNA, 15 bp, Homo sapiens
cctgtctcaatagaa

SEQ ID NO: 1846711 - DNA, 15 bp, Homo sapiens
ctgtctcaatagaaa

SEQ ID NO: 1846712 - DNA, 15 bp, Homo sapiens
tgtctcaatagaaaa

SEQ ID NO: 1846713 - DNA, 15 bp, Homo sapiens
gtctcaatagaaaaa

SEQ ID NO: 1846714 - DNA, 15 bp, Homo sapiens
tctcaatagaaaaaa

SEQ ID NO: 1846715 - DNA, 15 bp, Homo sapiens
ctcaatagaaaaaaa

SEQ ID NO: 1846716 - DNA, 15 bp, Homo sapiens
tcaatagaaaaaaaa

SEQ ID NO: 1846717 - DNA, 15 bp, Homo sapiens
caatagaaaaaaaaa

SEQ ID NO: 1846718 - DNA, 15 bp, Homo sapiens
aatagaaaaaaaaaa

SEQ ID NO: 1846719 - DNA, 15 bp, Homo sapiens
atagaaaaaaaaaaa

SEQ ID NO: 1846720 - DNA, 15 bp, Homo sapiens
aaaaaaaaaaaacag

SEQ ID NO: 1846721 - DNA, 15 bp, Homo sapiens
aaaaaaaaaaacaga

SEQ ID NO: 1846722 - DNA, 15 bp, Homo sapiens
aaaaaaaaaacagat

SEQ ID NO: 1846723 - DNA, 15 bp, Homo sapiens
aaaaaaaaacagatg

SEQ ID NO: 1846724 - DNA, 15 bp, Homo sapiens
aaaaaaaacagatga

SEQ ID NO: 1846725 - DNA, 15 bp, Homo sapiens
aaaaaaacagatgag

SEQ ID NO: 1846726 - DNA, 15 bp, Homo sapiens
aaaaaacagatgaga

SEQ ID NO: 1846727 - DNA, 15 bp, Homo sapiens
aaaaacagatgagaa

SEQ ID NO: 1846728 - DNA, 15 bp, Homo sapiens
aaaacagatgagaat

SEQ ID NO: 1846729 - DNA, 15 bp, Homo sapiens
aaacagatgagaata

SEQ ID NO: 1846730 - DNA, 15 bp, Homo sapiens
aacagatgagaatat

SEQ ID NO: 1846731 - DNA, 15 bp, Homo sapiens
acagatgagaatatc

SEQ ID NO: 1846732 - DNA, 15 bp, Homo sapiens
cagatgagaatatca

SEQ ID NO: 1846733 - DNA, 15 bp, Homo sapiens
agatgagaatatcaa

SEQ ID NO: 1846734 - DNA, 15 bp, Homo sapiens
gatgagaatatcaaa

SEQ ID NO: 1846735 - DNA, 15 bp, Homo sapiens
atgagaatatcaaac

SEQ ID NO: 1846736 - DNA, 15 bp, Homo sapiens
tgagaatatcaaact

SEQ ID NO: 1846737 - DNA, 15 bp, Homo sapiens
gagaatatcaaactc

SEQ ID NO: 1846738 - DNA, 15 bp, Homo sapiens
agaatatcaaactca

SEQ ID NO: 1846739 - DNA, 15 bp, Homo sapiens
gaatatcaaactcag

SEQ ID NO: 1846740 - DNA, 15 bp, Homo sapiens
aatatcaaactcagg

SEQ ID NO: 1846741 - DNA, 15 bp, Homo sapiens
atatcaaactcaggc

SEQ ID NO: 1846742 - DNA, 15 bp, Homo sapiens
tatcaaactcaggca

SEQ ID NO: 1846743 - DNA, 15 bp, Homo sapiens
atcaaactcaggcat

SEQ ID NO: 1846744 - DNA, 15 bp, Homo sapiens
tcaaactcaggcatt

SEQ ID NO: 1846745 - DNA, 15 bp, Homo sapiens
caaactcaggcattg

SEQ ID NO: 1846746 - DNA, 15 bp, Homo sapiens
aaactcaggcattga

SEQ ID NO: 1846747 - DNA, 15 bp, Homo sapiens
aactcaggcattgat

SEQ ID NO: 1846748 - DNA, 15 bp, Homo sapiens
actcaggcattgata

SEQ ID NO: 1846749 - DNA, 15 bp, Homo sapiens
ctcaggcattgatac

SEQ ID NO: 1846750 - DNA, 15 bp, Homo sapiens
tcaggcattgatact

SEQ ID NO: 1846751 - DNA, 15 bp, Homo sapiens
caggcattgatactg

SEQ ID NO: 1846752 - DNA, 15 bp, Homo sapiens
aggcattgatactga

SEQ ID NO: 1846753 - DNA, 15 bp, Homo sapiens
ggcattgatactgag

SEQ ID NO: 1846754 - DNA, 15 bp, Homo sapiens
gcattgatactgagt

SEQ ID NO: 1846755 - DNA, 15 bp, Homo sapiens
cattgatactgagtg

SEQ ID NO: 1846756 - DNA, 15 bp, Homo sapiens
attgatactgagtgc

SEQ ID NO: 1846757 - DNA, 15 bp, Homo sapiens
ttgatactgagtgca

SEQ ID NO: 1846758 - DNA, 15 bp, Homo sapiens
tgatactgagtgcag

SEQ ID NO: 1846759 - DNA, 15 bp, Homo sapiens
gatactgagtgcagc

SEQ ID NO: 1846760 - DNA, 15 bp, Homo sapiens
atactgagtgcagca

SEQ ID NO: 1846761 - DNA, 15 bp, Homo sapiens
tactgagtgcagcag

SEQ ID NO: 1846762 - DNA, 15 bp, Homo sapiens
actgagtgcagcagg

SEQ ID NO: 1846763 - DNA, 15 bp, Homo sapiens
ctgagtgcagcaggc

SEQ ID NO: 1846764 - DNA, 15 bp, Homo sapiens
tgagtgcagcaggct

SEQ ID NO: 1846765 - DNA, 15 bp, Homo sapiens
gagtgcagcaggctg

SEQ ID NO: 1846766 - DNA, 15 bp, Homo sapiens
agtgcagcaggctgg

SEQ ID NO: 1846767 - DNA, 15 bp, Homo sapiens
gtgcagcaggctggg

SEQ ID NO: 1846768 - DNA, 15 bp, Homo sapiens
tgcagcaggctgggt

SEQ ID NO: 1846769 - DNA, 15 bp, Homo sapiens
gcagcaggctgggtg

SEQ ID NO: 1846770 - DNA, 15 bp, Homo sapiens
cagcaggctgggtgg

SEQ ID NO: 1846771 - DNA, 15 bp, Homo sapiens
agcaggctgggtggg

SEQ ID NO: 1846772 - DNA, 15 bp, Homo sapiens
gcaggctgggtgggg

SEQ ID NO: 1846773 - DNA, 15 bp, Homo sapiens
caggctgggtgggga

SEQ ID NO: 1846774 - DNA, 15 bp, Homo sapiens
aggctgggtggggac

SEQ ID NO: 1846775 - DNA, 15 bp, Homo sapiens
ggctgggtggggact

SEQ ID NO: 1846776 - DNA, 15 bp, Homo sapiens
gctgggtggggactg

SEQ ID NO: 1846777 - DNA, 15 bp, Homo sapiens
ctgggtggggactgt

SEQ ID NO: 1846778 - DNA, 15 bp, Homo sapiens
tgggtggggactgtg

SEQ ID NO: 1846779 - DNA, 15 bp, Homo sapiens
gggtggggactgtgg

SEQ ID NO: 1846780 - DNA, 15 bp, Homo sapiens
ggtggggactgtggt

SEQ ID NO: 1846781 - DNA, 15 bp, Homo sapiens
gtggggactgtggtt

SEQ ID NO: 1846782 - DNA, 15 bp, Homo sapiens
tggggactgtggtta

SEQ ID NO: 1846783 - DNA, 15 bp, Homo sapiens
ggggactgtggttag

SEQ ID NO: 1846784 - DNA, 15 bp, Homo sapiens
gggactgtggttagc

SEQ ID NO: 1846785 - DNA, 15 bp, Homo sapiens
ggactgtggttagct

SEQ ID NO: 1846786 - DNA, 15 bp, Homo sapiens
gactgtggttagcta

SEQ ID NO: 1846787 - DNA, 15 bp, Homo sapiens
actgtggttagctag

SEQ ID NO: 1846788 - DNA, 15 bp, Homo sapiens
ctgtggttagctaga

SEQ ID NO: 1846789 - DNA, 15 bp, Homo sapiens
tgtggttagctagag

SEQ ID NO: 1846790 - DNA, 15 bp, Homo sapiens
gtggttagctagaga

SEQ ID NO: 1846791 - DNA, 15 bp, Homo sapiens
tggttagctagagaa

SEQ ID NO: 1846792 - DNA, 15 bp, Homo sapiens
ggttagctagagaac

SEQ ID NO: 1846793 - DNA, 15 bp, Homo sapiens
gttagctagagaacc

SEQ ID NO: 1846794 - DNA, 15 bp, Homo sapiens
ttagctagagaaccc

SEQ ID NO: 1846795 - DNA, 15 bp, Homo sapiens
tagctagagaaccca

SEQ ID NO: 1846796 - DNA, 15 bp, Homo sapiens
agctagagaacccaa

SEQ ID NO: 1846797 - DNA, 15 bp, Homo sapiens
gctagagaacccaaa

SEQ ID NO: 1846798 - DNA, 15 bp, Homo sapiens
ctagagaacccaaac

SEQ ID NO: 1846799 - DNA, 15 bp, Homo sapiens
tagagaacccaaaca

SEQ ID NO: 1846800 - DNA, 15 bp, Homo sapiens
agagaacccaaacag

SEQ ID NO: 1846801 - DNA, 15 bp, Homo sapiens
gagaacccaaacagc

SEQ ID NO: 1846802 - DNA, 15 bp, Homo sapiens
agaacccaaacagct

SEQ ID NO: 1846803 - DNA, 15 bp, Homo sapiens
gaacccaaacagcta

SEQ ID NO: 1846804 - DNA, 15 bp, Homo sapiens
aacccaaacagctac

SEQ ID NO: 1846805 - DNA, 15 bp, Homo sapiens
acccaaacagctacc

SEQ ID NO: 1846806 - DNA, 15 bp, Homo sapiens
cccaaacagctaccc

SEQ ID NO: 1846807 - DNA, 15 bp, Homo sapiens
ccaaacagctaccca

SEQ ID NO: 1846808 - DNA, 15 bp, Homo sapiens
caaacagctacccag

SEQ ID NO: 1846809 - DNA, 15 bp, Homo sapiens
aaacagctacccagc

SEQ ID NO: 1846810 - DNA, 15 bp, Homo sapiens
aacagctacccagcc

SEQ ID NO: 1846811 - DNA, 15 bp, Homo sapiens
acagctacccagcca

SEQ ID NO: 1846812 - DNA, 15 bp, Homo sapiens
cagctacccagccat

SEQ ID NO: 1846813 - DNA, 15 bp, Homo sapiens
agctacccagccatt

SEQ ID NO: 1846814 - DNA, 15 bp, Homo sapiens
gctacccagccattg

SEQ ID NO: 1846815 - DNA, 15 bp, Homo sapiens
ctacccagccattga

SEQ ID NO: 1846816 - DNA, 15 bp, Homo sapiens
tacccagccattgac

SEQ ID NO: 1846817 - DNA, 15 bp, Homo sapiens
acccagccattgact

SEQ ID NO: 1846818 - DNA, 15 bp, Homo sapiens
cccagccattgactg

SEQ ID NO: 1846819 - DNA, 15 bp, Homo sapiens
ccagccattgactgg

SEQ ID NO: 1846820 - DNA, 15 bp, Homo sapiens
cagccattgactggt

SEQ ID NO: 1846821 - DNA, 15 bp, Homo sapiens
agccattgactggtg

SEQ ID NO: 1846822 - DNA, 15 bp, Homo sapiens
gccattgactggtgc

SEQ ID NO: 1846823 - DNA, 15 bp, Homo sapiens
ccattgactggtgca

SEQ ID NO: 1846824 - DNA, 15 bp, Homo sapiens
cattgactggtgcat

SEQ ID NO: 1846825 - DNA, 15 bp, Homo sapiens
attgactggtgcata

SEQ ID NO: 1846826 - DNA, 15 bp, Homo sapiens
ttgactggtgcatat

SEQ ID NO: 1846827 - DNA, 15 bp, Homo sapiens
tgactggtgcatatg

SEQ ID NO: 1846828 - DNA, 15 bp, Homo sapiens
gactggtgcatatgg

SEQ ID NO: 1846829 - DNA, 15 bp, Homo sapiens
actggtgcatatgga

SEQ ID NO: 1846830 - DNA, 15 bp, Homo sapiens
ctggtgcatatggag

SEQ ID NO: 1846831 - DNA, 15 bp, Homo sapiens
tggtgcatatggagg

SEQ ID NO: 1846832 - DNA, 15 bp, Homo sapiens
ggtgcatatggaggt

SEQ ID NO: 1846833 - DNA, 15 bp, Homo sapiens
gtgcatatggaggtt

SEQ ID NO: 1846834 - DNA, 15 bp, Homo sapiens
tgcatatggaggttt

SEQ ID NO: 1846835 - DNA, 15 bp, Homo sapiens
gcatatggaggtttg

SEQ ID NO: 1846836 - DNA, 15 bp, Homo sapiens
catatggaggtttga

SEQ ID NO: 1846837 - DNA, 15 bp, Homo sapiens
atatggaggtttgag

SEQ ID NO: 1846838 - DNA, 15 bp, Homo sapiens
tatggaggtttgaga

SEQ ID NO: 1846839 - DNA, 15 bp, Homo sapiens
atggaggtttgagaa

SEQ ID NO: 1846840 - DNA, 15 bp, Homo sapiens
tggaggtttgagaat

SEQ ID NO: 1846841 - DNA, 15 bp, Homo sapiens
ggaggtttgagaata

SEQ ID NO: 1846842 - DNA, 15 bp, Homo sapiens
gaggtttgagaatat

SEQ ID NO: 1846843 - DNA, 15 bp, Homo sapiens
aggtttgagaatatg

SEQ ID NO: 1846844 - DNA, 15 bp, Homo sapiens
ggtttgagaatatga

SEQ ID NO: 1846845 - DNA, 15 bp, Homo sapiens
gtttgagaatatgaa

SEQ ID NO: 1846846 - DNA, 15 bp, Homo sapiens
tttgagaatatgaaa

SEQ ID NO: 1846847 - DNA, 15 bp, Homo sapiens
ttgagaatatgaaac

SEQ ID NO: 1846848 - DNA, 15 bp, Homo sapiens
tgagaatatgaaaca

SEQ ID NO: 1846849 - DNA, 15 bp, Homo sapiens
gagaatatgaaacag

SEQ ID NO: 1846850 - DNA, 15 bp, Homo sapiens
agaatatgaaacaga

SEQ ID NO: 1846851 - DNA, 15 bp, Homo sapiens
gaatatgaaacagag

SEQ ID NO: 1846852 - DNA, 15 bp, Homo sapiens
aatatgaaacagagg

SEQ ID NO: 1846853 - DNA, 15 bp, Homo sapiens
atatgaaacagagga

SEQ ID NO: 1846854 - DNA, 15 bp, Homo sapiens
tatgaaacagaggac

SEQ ID NO: 1846855 - DNA, 15 bp, Homo sapiens
atgaaacagaggaca

SEQ ID NO: 1846856 - DNA, 15 bp, Homo sapiens
tgaaacagaggacat

SEQ ID NO: 1846857 - DNA, 15 bp, Homo sapiens
gaaacagaggacatt

SEQ ID NO: 1846858 - DNA, 15 bp, Homo sapiens
aaacagaggacattc

SEQ ID NO: 1846859 - DNA, 15 bp, Homo sapiens
aacagaggacattca

SEQ ID NO: 1846860 - DNA, 15 bp, Homo sapiens
acagaggacattcaa

SEQ ID NO: 1846861 - DNA, 15 bp, Homo sapiens
cagaggacattcaag

SEQ ID NO: 1846862 - DNA, 15 bp, Homo sapiens
agaggacattcaagt

SEQ ID NO: 1846863 - DNA, 15 bp, Homo sapiens
gaggacattcaagta

SEQ ID NO: 1846864 - DNA, 15 bp, Homo sapiens
aggacattcaagtaa

SEQ ID NO: 1846865 - DNA, 15 bp, Homo sapiens
ggacattcaagtaat

SEQ ID NO: 1846866 - DNA, 15 bp, Homo sapiens
gacattcaagtaatt

SEQ ID NO: 1846867 - DNA, 15 bp, Homo sapiens
acattcaagtaattg

SEQ ID NO: 1846868 - DNA, 15 bp, Homo sapiens
cattcaagtaattga

SEQ ID NO: 1846869 - DNA, 15 bp, Homo sapiens
attcaagtaattgag

SEQ ID NO: 1846870 - DNA, 15 bp, Homo sapiens
ttcaagtaattgagt

SEQ ID NO: 1846871 - DNA, 15 bp, Homo sapiens
tcaagtaattgagtt

SEQ ID NO: 1846872 - DNA, 15 bp, Homo sapiens
caagtaattgagttg

SEQ ID NO: 1846873 - DNA, 15 bp, Homo sapiens
aagtaattgagttgg

SEQ ID NO: 1846874 - DNA, 15 bp, Homo sapiens
agtaattgagttggt

SEQ ID NO: 1846875 - DNA, 15 bp, Homo sapiens
gtaattgagttggtt

SEQ ID NO: 1846876 - DNA, 15 bp, Homo sapiens
taattgagttggttt

SEQ ID NO: 1846877 - DNA, 15 bp, Homo sapiens
aattgagttggtttt

SEQ ID NO: 1846878 - DNA, 15 bp, Homo sapiens
attgagttggttttt

SEQ ID NO: 1846879 - DNA, 15 bp, Homo sapiens
ttgagttggtttttt

SEQ ID NO: 1846880 - DNA, 15 bp, Homo sapiens
tgagttggttttttg

SEQ ID NO: 1846881 - DNA, 15 bp, Homo sapiens
gagttggttttttgg

SEQ ID NO: 1846882 - DNA, 15 bp, Homo sapiens
agttggttttttgga

SEQ ID NO: 1846883 - DNA, 15 bp, Homo sapiens
gttggttttttggat

SEQ ID NO: 1846884 - DNA, 15 bp, Homo sapiens
ttggttttttggatt

SEQ ID NO: 1846885 - DNA, 15 bp, Homo sapiens
tggttttttggattt

SEQ ID NO: 1846886 - DNA, 15 bp, Homo sapiens
ggttttttggatttt

SEQ ID NO: 1846887 - DNA, 15 bp, Homo sapiens
gttttttggattttg

SEQ ID NO: 1846888 - DNA, 15 bp, Homo sapiens
ttttttggattttgt

SEQ ID NO: 1846889 - DNA, 15 bp, Homo sapiens
tttttggattttgtt

SEQ ID NO: 1846890 - DNA, 15 bp, Homo sapiens
ttttggattttgttt

SEQ ID NO: 1846891 - DNA, 15 bp, Homo sapiens
tttggattttgtttt

SEQ ID NO: 1846892 - DNA, 15 bp, Homo sapiens
ttggattttgttttg

SEQ ID NO: 1846893 - DNA, 15 bp, Homo sapiens
tggattttgttttgt

SEQ ID NO: 1846894 - DNA, 15 bp, Homo sapiens
ggattttgttttgtt

SEQ ID NO: 1846895 - DNA, 15 bp, Homo sapiens
gattttgttttgttt

SEQ ID NO: 1846896 - DNA, 15 bp, Homo sapiens
attttgttttgttta

SEQ ID NO: 1846897 - DNA, 15 bp, Homo sapiens
ttttgttttgtttat

SEQ ID NO: 1846898 - DNA, 15 bp, Homo sapiens
tttgttttgtttatg

SEQ ID NO: 1846899 - DNA, 15 bp, Homo sapiens
ttgttttgtttatgt

SEQ ID NO: 1846900 - DNA, 15 bp, Homo sapiens
tgttttgtttatgtt

SEQ ID NO: 1846901 - DNA, 15 bp, Homo sapiens
gttttgtttatgttt

SEQ ID NO: 1846902 - DNA, 15 bp, Homo sapiens
ttttgtttatgtttt

SEQ ID NO: 1846903 - DNA, 15 bp, Homo sapiens
tttgtttatgttttt

SEQ ID NO: 1846904 - DNA, 15 bp, Homo sapiens
ttgtttatgttttta

SEQ ID NO: 1846905 - DNA, 15 bp, Homo sapiens
tgtttatgtttttag

SEQ ID NO: 1846906 - DNA, 15 bp, Homo sapiens
gtttatgtttttagt

SEQ ID NO: 1846907 - DNA, 15 bp, Homo sapiens
tttatgtttttagtt

SEQ ID NO: 1846908 - DNA, 15 bp, Homo sapiens
ttatgtttttagttt

SEQ ID NO: 1846909 - DNA, 15 bp, Homo sapiens
tatgtttttagtttt

SEQ ID NO: 1846910 - DNA, 15 bp, Homo sapiens
atgtttttagttttt

SEQ ID NO: 1846911 - DNA, 15 bp, Homo sapiens
tgtttttagtttttt

SEQ ID NO: 1846912 - DNA, 15 bp, Homo sapiens
gtttttagttttttt

SEQ ID NO: 1846913 - DNA, 15 bp, Homo sapiens
tttttagtttttttg

SEQ ID NO: 1846914 - DNA, 15 bp, Homo sapiens
ttttagtttttttgt

SEQ ID NO: 1846915 - DNA, 15 bp, Homo sapiens
tttagtttttttgtt

SEQ ID NO: 1846916 - DNA, 15 bp, Homo sapiens
ttagtttttttgttt

SEQ ID NO: 1846917 - DNA, 15 bp, Homo sapiens
tagtttttttgtttt

SEQ ID NO: 1846918 - DNA, 15 bp, Homo sapiens
agtttttttgttttt

SEQ ID NO: 1846919 - DNA, 15 bp, Homo sapiens
gtttttttgtttttg

SEQ ID NO: 1846920 - DNA, 15 bp, Homo sapiens
ttgtttttgttttga

SEQ ID NO: 1846921 - DNA, 15 bp, Homo sapiens
tgtttttgttttgac

SEQ ID NO: 1846922 - DNA, 15 bp, Homo sapiens
gtttttgttttgaca

SEQ ID NO: 1846923 - DNA, 15 bp, Homo sapiens
tttttgttttgacag

SEQ ID NO: 1846924 - DNA, 15 bp, Homo sapiens
ttttgttttgacaga

SEQ ID NO: 1846925 - DNA, 15 bp, Homo sapiens
tttgttttgacagag

SEQ ID NO: 1846926 - DNA, 15 bp, Homo sapiens
ttgttttgacagagt

SEQ ID NO: 1846927 - DNA, 15 bp, Homo sapiens
tgttttgacagagtt

SEQ ID NO: 1846928 - DNA, 15 bp, Homo sapiens
gttttgacagagttt

SEQ ID NO: 1846929 - DNA, 15 bp, Homo sapiens
ttttgacagagtttc

SEQ ID NO: 1846930 - DNA, 15 bp, Homo sapiens
tttgacagagtttcg

SEQ ID NO: 1846931 - DNA, 15 bp, Homo sapiens
ttgacagagtttcgc

SEQ ID NO: 1846932 - DNA, 15 bp, Homo sapiens
tgacagagtttcgct

SEQ ID NO: 1846933 - DNA, 15 bp, Homo sapiens
gagtgcagtggtacc

SEQ ID NO: 1846934 - DNA, 15 bp, Homo sapiens
agtgcagtggtacca

SEQ ID NO: 1846935 - DNA, 15 bp, Homo sapiens
gtgcagtggtaccat

SEQ ID NO: 1846936 - DNA, 15 bp, Homo sapiens
tgcagtggtaccatc

SEQ ID NO: 1846937 - DNA, 15 bp, Homo sapiens
gcagtggtaccatct

SEQ ID NO: 1846938 - DNA, 15 bp, Homo sapiens
cagtggtaccatctc

SEQ ID NO: 1846939 - DNA, 15 bp, Homo sapiens
agtggtaccatctcg

SEQ ID NO: 1846940 - DNA, 15 bp, Homo sapiens
gtggtaccatctcgg

SEQ ID NO: 1846941 - DNA, 15 bp, Homo sapiens
tggtaccatctcggc

SEQ ID NO: 1846942 - DNA, 15 bp, Homo sapiens
ggtaccatctcggct

SEQ ID NO: 1846943 - DNA, 15 bp, Homo sapiens
gtaccatctcggctc

SEQ ID NO: 1846944 - DNA, 15 bp, Homo sapiens
taccatctcggctca

SEQ ID NO: 1846945 - DNA, 15 bp, Homo sapiens
ctcccgggttcaagg

SEQ ID NO: 1846946 - DNA, 15 bp, Homo sapiens
tcccgggttcaaggg

SEQ ID NO: 1846947 - DNA, 15 bp, Homo sapiens
cccgggttcaaggga

SEQ ID NO: 1846948 - DNA, 15 bp, Homo sapiens
ccgggttcaagggag

SEQ ID NO: 1846949 - DNA, 15 bp, Homo sapiens
cgggttcaagggaga

SEQ ID NO: 1846950 - DNA, 15 bp, Homo sapiens
gggttcaagggagat

SEQ ID NO: 1846951 - DNA, 15 bp, Homo sapiens
ggttcaagggagatc

SEQ ID NO: 1846952 - DNA, 15 bp, Homo sapiens
gttcaagggagatcc

SEQ ID NO: 1846953 - DNA, 15 bp, Homo sapiens
ttcaagggagatcct

SEQ ID NO: 1846954 - DNA, 15 bp, Homo sapiens
tcaagggagatcctc

SEQ ID NO: 1846955 - DNA, 15 bp, Homo sapiens
caagggagatcctcc

SEQ ID NO: 1846956 - DNA, 15 bp, Homo sapiens
aagggagatcctcct

SEQ ID NO: 1846957 - DNA, 15 bp, Homo sapiens
agggagatcctcctg

SEQ ID NO: 1846958 - DNA, 15 bp, Homo sapiens
gggagatcctcctgc

SEQ ID NO: 1846959 - DNA, 15 bp, Homo sapiens
ggagatcctcctgcc

SEQ ID NO: 1846960 - DNA, 15 bp, Homo sapiens
gagatcctcctgcct

SEQ ID NO: 1846961 - DNA, 15 bp, Homo sapiens
agatcctcctgcctc

SEQ ID NO: 1846962 - DNA, 15 bp, Homo sapiens
ctcagcctcctgaga

SEQ ID NO: 1846963 - DNA, 15 bp, Homo sapiens
tcagcctcctgagaa

SEQ ID NO: 1846964 - DNA, 15 bp, Homo sapiens
cagcctcctgagaag

SEQ ID NO: 1846965 - DNA, 15 bp, Homo sapiens
agcctcctgagaagc

SEQ ID NO: 1846966 - DNA, 15 bp, Homo sapiens
gcctcctgagaagct

SEQ ID NO: 1846967 - DNA, 15 bp, Homo sapiens
cctcctgagaagctg

SEQ ID NO: 1846968 - DNA, 15 bp, Homo sapiens
ctcctgagaagctgg

SEQ ID NO: 1846969 - DNA, 15 bp, Homo sapiens
tcctgagaagctggg

SEQ ID NO: 1846970 - DNA, 15 bp, Homo sapiens
cctgagaagctggga

SEQ ID NO: 1846971 - DNA, 15 bp, Homo sapiens
ctgagaagctgggag

SEQ ID NO: 1846972 - DNA, 15 bp, Homo sapiens
tgagaagctgggagg

SEQ ID NO: 1846973 - DNA, 15 bp, Homo sapiens
gagaagctgggaggc

SEQ ID NO: 1846974 - DNA, 15 bp, Homo sapiens
agaagctgggaggct

SEQ ID NO: 1846975 - DNA, 15 bp, Homo sapiens
gaagctgggaggctg

SEQ ID NO: 1846976 - DNA, 15 bp, Homo sapiens
aagctgggaggctga

SEQ ID NO: 1846977 - DNA, 15 bp, Homo sapiens
agctgggaggctgag

SEQ ID NO: 1846978 - DNA, 15 bp, Homo sapiens
gctgggaggctgaga

SEQ ID NO: 1846979 - DNA, 15 bp, Homo sapiens
ctgggaggctgagaa

SEQ ID NO: 1846980 - DNA, 15 bp, Homo sapiens
tgggaggctgagaag

SEQ ID NO: 1846981 - DNA, 15 bp, Homo sapiens
gggaggctgagaagc

SEQ ID NO: 1846982 - DNA, 15 bp, Homo sapiens
ggaggctgagaagca

SEQ ID NO: 1846983 - DNA, 15 bp, Homo sapiens
gaggctgagaagcac

SEQ ID NO: 1846984 - DNA, 15 bp, Homo sapiens
aggctgagaagcacc

SEQ ID NO: 1846985 - DNA, 15 bp, Homo sapiens
ggctgagaagcacct

SEQ ID NO: 1846986 - DNA, 15 bp, Homo sapiens
gctgagaagcacctt

SEQ ID NO: 1846987 - DNA, 15 bp, Homo sapiens
ctgagaagcacctta

SEQ ID NO: 1846988 - DNA, 15 bp, Homo sapiens
tgagaagcaccttac

SEQ ID NO: 1846989 - DNA, 15 bp, Homo sapiens
gagaagcaccttaca

SEQ ID NO: 1846990 - DNA, 15 bp, Homo sapiens
agaagcaccttacag

SEQ ID NO: 1846991 - DNA, 15 bp, Homo sapiens
gaagcaccttacagt

SEQ ID NO: 1846992 - DNA, 15 bp, Homo sapiens
aagcaccttacagtt

SEQ ID NO: 1846993 - DNA, 15 bp, Homo sapiens
agcaccttacagttg

SEQ ID NO: 1846994 - DNA, 15 bp, Homo sapiens
gcaccttacagttgc

SEQ ID NO: 1846995 - DNA, 15 bp, Homo sapiens
caccttacagttgcc

SEQ ID NO: 1846996 - DNA, 15 bp, Homo sapiens
accttacagttgccc

SEQ ID NO: 1846997 - DNA, 15 bp, Homo sapiens
ccttacagttgccca

SEQ ID NO: 1846998 - DNA, 15 bp, Homo sapiens
cttacagttgcccac

SEQ ID NO: 1846999 - DNA, 15 bp, Homo sapiens
ttacagttgcccacc

SEQ ID NO: 1847000 - DNA, 15 bp, Homo sapiens
tacagttgcccacca

SEQ ID NO: 1847001 - DNA, 15 bp, Homo sapiens
acagttgcccaccac

SEQ ID NO: 1847002 - DNA, 15 bp, Homo sapiens
cagttgcccaccacc

SEQ ID NO: 1847003 - DNA, 15 bp, Homo sapiens
agttgcccaccacca

SEQ ID NO: 1847004 - DNA, 15 bp, Homo sapiens
gttgcccaccaccag

SEQ ID NO: 1847005 - DNA, 15 bp, Homo sapiens
ttgcccaccaccagg

SEQ ID NO: 1847006 - DNA, 15 bp, Homo sapiens
tgcccaccaccaggc

SEQ ID NO: 1847007 - DNA, 15 bp, Homo sapiens
gcccaccaccaggca

SEQ ID NO: 1847008 - DNA, 15 bp, Homo sapiens
cccaccaccaggcac

SEQ ID NO: 1847009 - DNA, 15 bp, Homo sapiens
ccaccaccaggcaca

SEQ ID NO: 1847010 - DNA, 15 bp, Homo sapiens
caccaccaggcacag

SEQ ID NO: 1847011 - DNA, 15 bp, Homo sapiens
accaccaggcacagc

SEQ ID NO: 1847012 - DNA, 15 bp, Homo sapiens
ccaccaggcacagct

SEQ ID NO: 1847013 - DNA, 15 bp, Homo sapiens
caccaggcacagcta

SEQ ID NO: 1847014 - DNA, 15 bp, Homo sapiens
accaggcacagctaa

SEQ ID NO: 1847015 - DNA, 15 bp, Homo sapiens
ccaggcacagctaat

SEQ ID NO: 1847016 - DNA, 15 bp, Homo sapiens
caggcacagctaatt

SEQ ID NO: 1847017 - DNA, 15 bp, Homo sapiens
aggcacagctaattt

SEQ ID NO: 1847018 - DNA, 15 bp, Homo sapiens
ggcacagctaatttt

SEQ ID NO: 1847019 - DNA, 15 bp, Homo sapiens
gcacagctaattttt

SEQ ID NO: 1847020 - DNA, 15 bp, Homo sapiens
cacagctaatttttg

SEQ ID NO: 1847021 - DNA, 15 bp, Homo sapiens
acagctaatttttgt

SEQ ID NO: 1847022 - DNA, 15 bp, Homo sapiens
agctaatttttgtaa

SEQ ID NO: 1847023 - DNA, 15 bp, Homo sapiens
gctaatttttgtaat

SEQ ID NO: 1847024 - DNA, 15 bp, Homo sapiens
ctaatttttgtaatt

SEQ ID NO: 1847025 - DNA, 15 bp, Homo sapiens
taatttttgtaattt

SEQ ID NO: 1847026 - DNA, 15 bp, Homo sapiens
aatttttgtaatttt

SEQ ID NO: 1847027 - DNA, 15 bp, Homo sapiens
atttttgtaatttta

SEQ ID NO: 1847028 - DNA, 15 bp, Homo sapiens
aattttagtagagac

SEQ ID NO: 1847029 - DNA, 15 bp, Homo sapiens
ctcaagtgatcctct

SEQ ID NO: 1847030 - DNA, 15 bp, Homo sapiens
tcaagtgatcctctg

SEQ ID NO: 1847031 - DNA, 15 bp, Homo sapiens
caagtgatcctctgc

SEQ ID NO: 1847032 - DNA, 15 bp, Homo sapiens
aagtgatcctctgcc

SEQ ID NO: 1847033 - DNA, 15 bp, Homo sapiens
agtgatcctctgcct

SEQ ID NO: 1847034 - DNA, 15 bp, Homo sapiens
gtgatcctctgcctc

SEQ ID NO: 1847035 - DNA, 15 bp, Homo sapiens
tgatcctctgcctca

SEQ ID NO: 1847036 - DNA, 15 bp, Homo sapiens
gatcctctgcctcag

SEQ ID NO: 1847037 - DNA, 15 bp, Homo sapiens
atcctctgcctcagc

SEQ ID NO: 1847038 - DNA, 15 bp, Homo sapiens
tcctctgcctcagcc

SEQ ID NO: 1847039 - DNA, 15 bp, Homo sapiens
cctctgcctcagcct

SEQ ID NO: 1847040 - DNA, 15 bp, Homo sapiens
ctctgcctcagcctc

SEQ ID NO: 1847041 - DNA, 15 bp, Homo sapiens
gtgagccaccgtgcc

SEQ ID NO: 1847042 - DNA, 15 bp, Homo sapiens
tgagccaccgtgccc

SEQ ID NO: 1847043 - DNA, 15 bp, Homo sapiens
gagccaccgtgccca

SEQ ID NO: 1847044 - DNA, 15 bp, Homo sapiens
agccaccgtgcccag

SEQ ID NO: 1847045 - DNA, 15 bp, Homo sapiens
ccaccgtgcccagcc

SEQ ID NO: 1847046 - DNA, 15 bp, Homo sapiens
caccgtgcccagcct

SEQ ID NO: 1847047 - DNA, 15 bp, Homo sapiens
accgtgcccagcctc

SEQ ID NO: 1847048 - DNA, 15 bp, Homo sapiens
ccgtgcccagcctca

SEQ ID NO: 1847049 - DNA, 15 bp, Homo sapiens
cgtgcccagcctcaa

SEQ ID NO: 1847050 - DNA, 15 bp, Homo sapiens
gtgcccagcctcaag

SEQ ID NO: 1847051 - DNA, 15 bp, Homo sapiens
tgcccagcctcaagt

SEQ ID NO: 1847052 - DNA, 15 bp, Homo sapiens
gcccagcctcaagtc

SEQ ID NO: 1847053 - DNA, 15 bp, Homo sapiens
cccagcctcaagtca

SEQ ID NO: 1847054 - DNA, 15 bp, Homo sapiens
ccagcctcaagtcac

SEQ ID NO: 1847055 - DNA, 15 bp, Homo sapiens
cagcctcaagtcact

SEQ ID NO: 1847056 - DNA, 15 bp, Homo sapiens
agcctcaagtcactg

SEQ ID NO: 1847057 - DNA, 15 bp, Homo sapiens
gcctcaagtcactga

SEQ ID NO: 1847058 - DNA, 15 bp, Homo sapiens
cctcaagtcactgag

SEQ ID NO: 1847059 - DNA, 15 bp, Homo sapiens
ctcaagtcactgagt

SEQ ID NO: 1847060 - DNA, 15 bp, Homo sapiens
tcaagtcactgagtt

SEQ ID NO: 1847061 - DNA, 15 bp, Homo sapiens
caagtcactgagttc

SEQ ID NO: 1847062 - DNA, 15 bp, Homo sapiens
aagtcactgagttct

SEQ ID NO: 1847063 - DNA, 15 bp, Homo sapiens
agtcactgagttctc

SEQ ID NO: 1847064 - DNA, 15 bp, Homo sapiens
gtcactgagttctct

SEQ ID NO: 1847065 - DNA, 15 bp, Homo sapiens
tcactgagttctctt

SEQ ID NO: 1847066 - DNA, 15 bp, Homo sapiens
cactgagttctcttg

SEQ ID NO: 1847067 - DNA, 15 bp, Homo sapiens
actgagttctcttgt

SEQ ID NO: 1847068 - DNA, 15 bp, Homo sapiens
ctgagttctcttgta

SEQ ID NO: 1847069 - DNA, 15 bp, Homo sapiens
tgagttctcttgtaa

SEQ ID NO: 1847070 - DNA, 15 bp, Homo sapiens
gagttctcttgtaaa

SEQ ID NO: 1847071 - DNA, 15 bp, Homo sapiens
agttctcttgtaaaa

SEQ ID NO: 1847072 - DNA, 15 bp, Homo sapiens
gttctcttgtaaaat

SEQ ID NO: 1847073 - DNA, 15 bp, Homo sapiens
ttctcttgtaaaatc

SEQ ID NO: 1847074 - DNA, 15 bp, Homo sapiens
tctcttgtaaaatct

SEQ ID NO: 1847075 - DNA, 15 bp, Homo sapiens
ctcttgtaaaatcta

SEQ ID NO: 1847076 - DNA, 15 bp, Homo sapiens
tcttgtaaaatctac

SEQ ID NO: 1847077 - DNA, 15 bp, Homo sapiens
cttgtaaaatctacc

SEQ ID NO: 1847078 - DNA, 15 bp, Homo sapiens
ttgtaaaatctaccg

SEQ ID NO: 1847079 - DNA, 15 bp, Homo sapiens
tgtaaaatctaccgg

SEQ ID NO: 1847080 - DNA, 15 bp, Homo sapiens
gtaaaatctaccggt

SEQ ID NO: 1847081 - DNA, 15 bp, Homo sapiens
taaaatctaccggtc

SEQ ID NO: 1847082 - DNA, 15 bp, Homo sapiens
aaaatctaccggtca

SEQ ID NO: 1847083 - DNA, 15 bp, Homo sapiens
aaatctaccggtcag

SEQ ID NO: 1847084 - DNA, 15 bp, Homo sapiens
aatctaccggtcaga

SEQ ID NO: 1847085 - DNA, 15 bp, Homo sapiens
atctaccggtcagaa

SEQ ID NO: 1847086 - DNA, 15 bp, Homo sapiens
tctaccggtcagaaa

SEQ ID NO: 1847087 - DNA, 15 bp, Homo sapiens
ctaccggtcagaaaa

SEQ ID NO: 1847088 - DNA, 15 bp, Homo sapiens
taccggtcagaaaaa

SEQ ID NO: 1847089 - DNA, 15 bp, Homo sapiens
accggtcagaaaaac

SEQ ID NO: 1847090 - DNA, 15 bp, Homo sapiens
ccggtcagaaaaaca

SEQ ID NO: 1847091 - DNA, 15 bp, Homo sapiens
cggtcagaaaaacat

SEQ ID NO: 1847092 - DNA, 15 bp, Homo sapiens
ggtcagaaaaacatt

SEQ ID NO: 1847093 - DNA, 15 bp, Homo sapiens
tcagaaaaacattat

SEQ ID NO: 1847094 - DNA, 15 bp, Homo sapiens
cagaaaaacattatc

SEQ ID NO: 1847095 - DNA, 15 bp, Homo sapiens
agaaaaacattatca

SEQ ID NO: 1847096 - DNA, 15 bp, Homo sapiens
gaaaaacattatcaa

SEQ ID NO: 1847097 - DNA, 15 bp, Homo sapiens
aaaaacattatcaag

SEQ ID NO: 1847098 - DNA, 15 bp, Homo sapiens
aaaacattatcaagc

SEQ ID NO: 1847099 - DNA, 15 bp, Homo sapiens
aaacattatcaagca

SEQ ID NO: 1847100 - DNA, 15 bp, Homo sapiens
aacattatcaagcaa

SEQ ID NO: 1847101 - DNA, 15 bp, Homo sapiens
acattatcaagcaat

SEQ ID NO: 1847102 - DNA, 15 bp, Homo sapiens
cattatcaagcaatt

SEQ ID NO: 1847103 - DNA, 15 bp, Homo sapiens
attatcaagcaattc

SEQ ID NO: 1847104 - DNA, 15 bp, Homo sapiens
ttatcaagcaattca

SEQ ID NO: 1847105 - DNA, 15 bp, Homo sapiens
tatcaagcaattcaa

SEQ ID NO: 1847106 - DNA, 15 bp, Homo sapiens
atcaagcaattcaaa

SEQ ID NO: 1847107 - DNA, 15 bp, Homo sapiens
tcaagcaattcaaaa

SEQ ID NO: 1847108 - DNA, 15 bp, Homo sapiens
caagcaattcaaaaa

SEQ ID NO: 1847109 - DNA, 15 bp, Homo sapiens
aagcaattcaaaaat

SEQ ID NO: 1847110 - DNA, 15 bp, Homo sapiens
agcaattcaaaaatg

SEQ ID NO: 1847111 - DNA, 15 bp, Homo sapiens
gcaattcaaaaatgt

SEQ ID NO: 1847112 - DNA, 15 bp, Homo sapiens
caattcaaaaatgta

SEQ ID NO: 1847113 - DNA, 15 bp, Homo sapiens
aattcaaaaatgtat

SEQ ID NO: 1847114 - DNA, 15 bp, Homo sapiens
attcaaaaatgtata

SEQ ID NO: 1847115 - DNA, 15 bp, Homo sapiens
ttcaaaaatgtataa

SEQ ID NO: 1847116 - DNA, 15 bp, Homo sapiens
tcaaaaatgtataaa

SEQ ID NO: 1847117 - DNA, 15 bp, Homo sapiens
caaaaatgtataaaa

SEQ ID NO: 1847118 - DNA, 15 bp, Homo sapiens
aaaaatgtataaaat

SEQ ID NO: 1847119 - DNA, 15 bp, Homo sapiens
aaaatgtataaaatg

SEQ ID NO: 1847120 - DNA, 15 bp, Homo sapiens
aaatgtataaaatgc

SEQ ID NO: 1847121 - DNA, 15 bp, Homo sapiens
aatgtataaaatgca

SEQ ID NO: 1847122 - DNA, 15 bp, Homo sapiens
atgtataaaatgcag

SEQ ID NO: 1847123 - DNA, 15 bp, Homo sapiens
tgtataaaatgcagt

SEQ ID NO: 1847124 - DNA, 15 bp, Homo sapiens
gtataaaatgcagta

SEQ ID NO: 1847125 - DNA, 15 bp, Homo sapiens
tataaaatgcagtac

SEQ ID NO: 1847126 - DNA, 15 bp, Homo sapiens
ataaaatgcagtaca

SEQ ID NO: 1847127 - DNA, 15 bp, Homo sapiens
taaaatgcagtacag

SEQ ID NO: 1847128 - DNA, 15 bp, Homo sapiens
aaaatgcagtacagt

SEQ ID NO: 1847129 - DNA, 15 bp, Homo sapiens
aaatgcagtacagtc

SEQ ID NO: 1847130 - DNA, 15 bp, Homo sapiens
aatgcagtacagtcc

SEQ ID NO: 1847131 - DNA, 15 bp, Homo sapiens
atgcagtacagtcca

SEQ ID NO: 1847132 - DNA, 15 bp, Homo sapiens
tgcagtacagtccaa

SEQ ID NO: 1847133 - DNA, 15 bp, Homo sapiens
gcagtacagtccaat

SEQ ID NO: 1847134 - DNA, 15 bp, Homo sapiens
cagtacagtccaatc

SEQ ID NO: 1847135 - DNA, 15 bp, Homo sapiens
agtacagtccaatca

SEQ ID NO: 1847136 - DNA, 15 bp, Homo sapiens
gtacagtccaatcaa

SEQ ID NO: 1847137 - DNA, 15 bp, Homo sapiens
tacagtccaatcaaa

SEQ ID NO: 1847138 - DNA, 15 bp, Homo sapiens
acagtccaatcaaaa

SEQ ID NO: 1847139 - DNA, 15 bp, Homo sapiens
cagtccaatcaaaac

SEQ ID NO: 1847140 - DNA, 15 bp, Homo sapiens
agtccaatcaaaaca

SEQ ID NO: 1847141 - DNA, 15 bp, Homo sapiens
gtccaatcaaaacat

SEQ ID NO: 1847142 - DNA, 15 bp, Homo sapiens
tccaatcaaaacatg

SEQ ID NO: 1847143 - DNA, 15 bp, Homo sapiens
ccaatcaaaacatgt

SEQ ID NO: 1847144 - DNA, 15 bp, Homo sapiens
caatcaaaacatgtc

SEQ ID NO: 1847145 - DNA, 15 bp, Homo sapiens
aatcaaaacatgtct

SEQ ID NO: 1847146 - DNA, 15 bp, Homo sapiens
atcaaaacatgtctg

SEQ ID NO: 1847147 - DNA, 15 bp, Homo sapiens
tcaaaacatgtctgc

SEQ ID NO: 1847148 - DNA, 15 bp, Homo sapiens
caaaacatgtctgca

SEQ ID NO: 1847149 - DNA, 15 bp, Homo sapiens
aaaacatgtctgcag

SEQ ID NO: 1847150 - DNA, 15 bp, Homo sapiens
aaacatgtctgcagg

SEQ ID NO: 1847151 - DNA, 15 bp, Homo sapiens
aacatgtctgcaggg

SEQ ID NO: 1847152 - DNA, 15 bp, Homo sapiens
acatgtctgcagggc

SEQ ID NO: 1847153 - DNA, 15 bp, Homo sapiens
catgtctgcagggcc

SEQ ID NO: 1847154 - DNA, 15 bp, Homo sapiens
atgtctgcagggcca

SEQ ID NO: 1847155 - DNA, 15 bp, Homo sapiens
tgtctgcagggccag

SEQ ID NO: 1847156 - DNA, 15 bp, Homo sapiens
gtctgcagggccagg

SEQ ID NO: 1847157 - DNA, 15 bp, Homo sapiens
tctgcagggccaggc

SEQ ID NO: 1847158 - DNA, 15 bp, Homo sapiens
ctgcagggccaggca

SEQ ID NO: 1847159 - DNA, 15 bp, Homo sapiens
tgcagggccaggcat

SEQ ID NO: 1847160 - DNA, 15 bp, Homo sapiens
gcagggccaggcatg

SEQ ID NO: 1847161 - DNA, 15 bp, Homo sapiens
cagggccaggcatga

SEQ ID NO: 1847162 - DNA, 15 bp, Homo sapiens
agggccaggcatgat

SEQ ID NO: 1847163 - DNA, 15 bp, Homo sapiens
gggccaggcatgatg

SEQ ID NO: 1847164 - DNA, 15 bp, Homo sapiens
ggccaggcatgatgg

SEQ ID NO: 1847165 - DNA, 15 bp, Homo sapiens
ccaggcatgatggct

SEQ ID NO: 1847166 - DNA, 15 bp, Homo sapiens
caggcatgatggctc

SEQ ID NO: 1847167 - DNA, 15 bp, Homo sapiens
aggcatgatggctca

SEQ ID NO: 1847168 - DNA, 15 bp, Homo sapiens
ggcatgatggctcat

SEQ ID NO: 1847169 - DNA, 15 bp, Homo sapiens
gcatgatggctcatg

SEQ ID NO: 1847170 - DNA, 15 bp, Homo sapiens
catgatggctcatgc

SEQ ID NO: 1847171 - DNA, 15 bp, Homo sapiens
atgatggctcatgcc

SEQ ID NO: 1847172 - DNA, 15 bp, Homo sapiens
tgatggctcatgcct

SEQ ID NO: 1847173 - DNA, 15 bp, Homo sapiens
gatggctcatgcctg

SEQ ID NO: 1847174 - DNA, 15 bp, Homo sapiens
atggctcatgcctgt

SEQ ID NO: 1847175 - DNA, 15 bp, Homo sapiens
ggccaaggtgggaga

SEQ ID NO: 1847176 - DNA, 15 bp, Homo sapiens
gccaaggtgggagaa

SEQ ID NO: 1847177 - DNA, 15 bp, Homo sapiens
ccaaggtgggagaat

SEQ ID NO: 1847178 - DNA, 15 bp, Homo sapiens
caaggtgggagaatc

SEQ ID NO: 1847179 - DNA, 15 bp, Homo sapiens
aaggtgggagaatca

SEQ ID NO: 1847180 - DNA, 15 bp, Homo sapiens
cttgaacccaggagt

SEQ ID NO: 1847181 - DNA, 15 bp, Homo sapiens
ttgaacccaggagtc

SEQ ID NO: 1847182 - DNA, 15 bp, Homo sapiens
tgaacccaggagtcc

SEQ ID NO: 1847183 - DNA, 15 bp, Homo sapiens
gaacccaggagtccc

SEQ ID NO: 1847184 - DNA, 15 bp, Homo sapiens
aacccaggagtccca

SEQ ID NO: 1847185 - DNA, 15 bp, Homo sapiens
acccaggagtcccag

SEQ ID NO: 1847186 - DNA, 15 bp, Homo sapiens
cccaggagtcccagc

SEQ ID NO: 1847187 - DNA, 15 bp, Homo sapiens
ccaggagtcccagcc

SEQ ID NO: 1847188 - DNA, 15 bp, Homo sapiens
caggagtcccagccc

SEQ ID NO: 1847189 - DNA, 15 bp, Homo sapiens
aggagtcccagccca

SEQ ID NO: 1847190 - DNA, 15 bp, Homo sapiens
ggagtcccagcccag

SEQ ID NO: 1847191 - DNA, 15 bp, Homo sapiens
gagtcccagcccagc

SEQ ID NO: 1847192 - DNA, 15 bp, Homo sapiens
agtcccagcccagcc

SEQ ID NO: 1847193 - DNA, 15 bp, Homo sapiens
gtcccagcccagcct

SEQ ID NO: 1847194 - DNA, 15 bp, Homo sapiens
tcccagcccagcctg

SEQ ID NO: 1847195 - DNA, 15 bp, Homo sapiens
cccagcccagcctgg

SEQ ID NO: 1847196 - DNA, 15 bp, Homo sapiens
ccagcccagcctggg

SEQ ID NO: 1847197 - DNA, 15 bp, Homo sapiens
cagcccagcctgggc

SEQ ID NO: 1847198 - DNA, 15 bp, Homo sapiens
agcccagcctgggca

SEQ ID NO: 1847199 - DNA, 15 bp, Homo sapiens
gcccagcctgggcaa

SEQ ID NO: 1847200 - DNA, 15 bp, Homo sapiens
acataacaagacccc

SEQ ID NO: 1847201 - DNA, 15 bp, Homo sapiens
cataacaagacccca

SEQ ID NO: 1847202 - DNA, 15 bp, Homo sapiens
ataacaagaccccat

SEQ ID NO: 1847203 - DNA, 15 bp, Homo sapiens
taacaagaccccatt

SEQ ID NO: 1847204 - DNA, 15 bp, Homo sapiens
aacaagaccccattt

SEQ ID NO: 1847205 - DNA, 15 bp, Homo sapiens
acaagaccccatttc

SEQ ID NO: 1847206 - DNA, 15 bp, Homo sapiens
caagaccccatttct

SEQ ID NO: 1847207 - DNA, 15 bp, Homo sapiens
aagaccccatttcta

SEQ ID NO: 1847208 - DNA, 15 bp, Homo sapiens
agaccccatttctac

SEQ ID NO: 1847209 - DNA, 15 bp, Homo sapiens
gaccccatttctaca

SEQ ID NO: 1847210 - DNA, 15 bp, Homo sapiens
accccatttctacaa

SEQ ID NO: 1847211 - DNA, 15 bp, Homo sapiens
ccccatttctacaaa

SEQ ID NO: 1847212 - DNA, 15 bp, Homo sapiens
cccatttctacaaaa

SEQ ID NO: 1847213 - DNA, 15 bp, Homo sapiens
ccatttctacaaaaa

SEQ ID NO: 1847214 - DNA, 15 bp, Homo sapiens
catttctacaaaaaa

SEQ ID NO: 1847215 - DNA, 15 bp, Homo sapiens
atttctacaaaaaaa

SEQ ID NO: 1847216 - DNA, 15 bp, Homo sapiens
tctacaaaaaaaaaa

SEQ ID NO: 1847217 - DNA, 15 bp, Homo sapiens
ctacaaaaaaaaaaa

SEQ ID NO: 1847218 - DNA, 15 bp, Homo sapiens
aaaaaattaaattag

SEQ ID NO: 1847219 - DNA, 15 bp, Homo sapiens
aaaaattaaattagc

SEQ ID NO: 1847220 - DNA, 15 bp, Homo sapiens
aaaattaaattagcc

SEQ ID NO: 1847221 - DNA, 15 bp, Homo sapiens
aaattaaattagcca

SEQ ID NO: 1847222 - DNA, 15 bp, Homo sapiens
aattaaattagccaa

SEQ ID NO: 1847223 - DNA, 15 bp, Homo sapiens
attaaattagccaag

SEQ ID NO: 1847224 - DNA, 15 bp, Homo sapiens
ttaaattagccaagt

SEQ ID NO: 1847225 - DNA, 15 bp, Homo sapiens
taaattagccaagtg

SEQ ID NO: 1847226 - DNA, 15 bp, Homo sapiens
aaattagccaagtgt

SEQ ID NO: 1847227 - DNA, 15 bp, Homo sapiens
aattagccaagtgta

SEQ ID NO: 1847228 - DNA, 15 bp, Homo sapiens
attagccaagtgtag

SEQ ID NO: 1847229 - DNA, 15 bp, Homo sapiens
ttagccaagtgtagt

SEQ ID NO: 1847230 - DNA, 15 bp, Homo sapiens
tagccaagtgtagtg

SEQ ID NO: 1847231 - DNA, 15 bp, Homo sapiens
agccaagtgtagtgg

SEQ ID NO: 1847232 - DNA, 15 bp, Homo sapiens
gccaagtgtagtggc

SEQ ID NO: 1847233 - DNA, 15 bp, Homo sapiens
ccaagtgtagtggcg

SEQ ID NO: 1847234 - DNA, 15 bp, Homo sapiens
caagtgtagtggcgt

SEQ ID NO: 1847235 - DNA, 15 bp, Homo sapiens
aagtgtagtggcgtg

SEQ ID NO: 1847236 - DNA, 15 bp, Homo sapiens
agtgtagtggcgtgc

SEQ ID NO: 1847237 - DNA, 15 bp, Homo sapiens
gtgtagtggcgtgca

SEQ ID NO: 1847238 - DNA, 15 bp, Homo sapiens
tgtagtggcgtgcac

SEQ ID NO: 1847239 - DNA, 15 bp, Homo sapiens
gtagtggcgtgcacc

SEQ ID NO: 1847240 - DNA, 15 bp, Homo sapiens
tagtggcgtgcacct

SEQ ID NO: 1847241 - DNA, 15 bp, Homo sapiens
agtggcgtgcacctg

SEQ ID NO: 1847242 - DNA, 15 bp, Homo sapiens
tggcgtgcacctgtc

SEQ ID NO: 1847243 - DNA, 15 bp, Homo sapiens
ggcgtgcacctgtca

SEQ ID NO: 1847244 - DNA, 15 bp, Homo sapiens
gcgtgcacctgtcat

SEQ ID NO: 1847245 - DNA, 15 bp, Homo sapiens
cgtgcacctgtcatc

SEQ ID NO: 1847246 - DNA, 15 bp, Homo sapiens
gtgcacctgtcatcc

SEQ ID NO: 1847247 - DNA, 15 bp, Homo sapiens
tgcacctgtcatcct

SEQ ID NO: 1847248 - DNA, 15 bp, Homo sapiens
gcacctgtcatccta

SEQ ID NO: 1847249 - DNA, 15 bp, Homo sapiens
cacctgtcatcctag

SEQ ID NO: 1847250 - DNA, 15 bp, Homo sapiens
acctgtcatcctagc

SEQ ID NO: 1847251 - DNA, 15 bp, Homo sapiens
cctgtcatcctagct

SEQ ID NO: 1847252 - DNA, 15 bp, Homo sapiens
ctgtcatcctagcta

SEQ ID NO: 1847253 - DNA, 15 bp, Homo sapiens
tgtcatcctagctac

SEQ ID NO: 1847254 - DNA, 15 bp, Homo sapiens
gtcatcctagctact

SEQ ID NO: 1847255 - DNA, 15 bp, Homo sapiens
tcatcctagctactt

SEQ ID NO: 1847256 - DNA, 15 bp, Homo sapiens
catcctagctacttg

SEQ ID NO: 1847257 - DNA, 15 bp, Homo sapiens
atcctagctacttga

SEQ ID NO: 1847258 - DNA, 15 bp, Homo sapiens
tcctagctacttgag

SEQ ID NO: 1847259 - DNA, 15 bp, Homo sapiens
cctagctacttgaga

SEQ ID NO: 1847260 - DNA, 15 bp, Homo sapiens
ctagctacttgagag

SEQ ID NO: 1847261 - DNA, 15 bp, Homo sapiens
tagctacttgagagg

SEQ ID NO: 1847262 - DNA, 15 bp, Homo sapiens
agctacttgagaggc

SEQ ID NO: 1847263 - DNA, 15 bp, Homo sapiens
gctacttgagaggct

SEQ ID NO: 1847264 - DNA, 15 bp, Homo sapiens
ctacttgagaggctg

SEQ ID NO: 1847265 - DNA, 15 bp, Homo sapiens
tacttgagaggctga

SEQ ID NO: 1847266 - DNA, 15 bp, Homo sapiens
acttgagaggctgag

SEQ ID NO: 1847267 - DNA, 15 bp, Homo sapiens
cttgagaggctgagg

SEQ ID NO: 1847268 - DNA, 15 bp, Homo sapiens
tgagaggctgaggcg

SEQ ID NO: 1847269 - DNA, 15 bp, Homo sapiens
gagaggctgaggcgg

SEQ ID NO: 1847270 - DNA, 15 bp, Homo sapiens
agaggctgaggcggg

SEQ ID NO: 1847271 - DNA, 15 bp, Homo sapiens
gaggctgaggcggga

SEQ ID NO: 1847272 - DNA, 15 bp, Homo sapiens
aggctgaggcgggag

SEQ ID NO: 1847273 - DNA, 15 bp, Homo sapiens
ggctgaggcgggagg

SEQ ID NO: 1847274 - DNA, 15 bp, Homo sapiens
gctgaggcgggagga

SEQ ID NO: 1847275 - DNA, 15 bp, Homo sapiens
ctgaggcgggaggat

SEQ ID NO: 1847276 - DNA, 15 bp, Homo sapiens
gaggcgggaggatct

SEQ ID NO: 1847277 - DNA, 15 bp, Homo sapiens
aggcgggaggatctc

SEQ ID NO: 1847278 - DNA, 15 bp, Homo sapiens
ggcgggaggatctct

SEQ ID NO: 1847279 - DNA, 15 bp, Homo sapiens
cttgagcccaggagg

SEQ ID NO: 1847280 - DNA, 15 bp, Homo sapiens
ggaggtcaaggctga

SEQ ID NO: 1847281 - DNA, 15 bp, Homo sapiens
gaggtcaaggctgaa

SEQ ID NO: 1847282 - DNA, 15 bp, Homo sapiens
aggtcaaggctgaag

SEQ ID NO: 1847283 - DNA, 15 bp, Homo sapiens
ggtcaaggctgaagt

SEQ ID NO: 1847284 - DNA, 15 bp, Homo sapiens
gtcaaggctgaagtg

SEQ ID NO: 1847285 - DNA, 15 bp, Homo sapiens
tcaaggctgaagtga

SEQ ID NO: 1847286 - DNA, 15 bp, Homo sapiens
caaggctgaagtgag

SEQ ID NO: 1847287 - DNA, 15 bp, Homo sapiens
aaggctgaagtgagc

SEQ ID NO: 1847288 - DNA, 15 bp, Homo sapiens
aggctgaagtgagct

SEQ ID NO: 1847289 - DNA, 15 bp, Homo sapiens
ggctgaagtgagcta

SEQ ID NO: 1847290 - DNA, 15 bp, Homo sapiens
gctgaagtgagctat

SEQ ID NO: 1847291 - DNA, 15 bp, Homo sapiens
ctgaagtgagctatg

SEQ ID NO: 1847292 - DNA, 15 bp, Homo sapiens
tgaagtgagctatga

SEQ ID NO: 1847293 - DNA, 15 bp, Homo sapiens
gaagtgagctatgat

SEQ ID NO: 1847294 - DNA, 15 bp, Homo sapiens
aagtgagctatgatg

SEQ ID NO: 1847295 - DNA, 15 bp, Homo sapiens
agtgagctatgatgg

SEQ ID NO: 1847296 - DNA, 15 bp, Homo sapiens
gtgagctatgatggc

SEQ ID NO: 1847297 - DNA, 15 bp, Homo sapiens
tgagctatgatggca

SEQ ID NO: 1847298 - DNA, 15 bp, Homo sapiens
gagctatgatggcac

SEQ ID NO: 1847299 - DNA, 15 bp, Homo sapiens
agctatgatggcacc

SEQ ID NO: 1847300 - DNA, 15 bp, Homo sapiens
gctatgatggcacca

SEQ ID NO: 1847301 - DNA, 15 bp, Homo sapiens
ctatgatggcaccac

SEQ ID NO: 1847302 - DNA, 15 bp, Homo sapiens
tatgatggcaccact

SEQ ID NO: 1847303 - DNA, 15 bp, Homo sapiens
atgatggcaccactg

SEQ ID NO: 1847304 - DNA, 15 bp, Homo sapiens
tgatggcaccactgc

SEQ ID NO: 1847305 - DNA, 15 bp, Homo sapiens
cactgcactccagcg

SEQ ID NO: 1847306 - DNA, 15 bp, Homo sapiens
actgcactccagcgg

SEQ ID NO: 1847307 - DNA, 15 bp, Homo sapiens
ctgcactccagcggg

SEQ ID NO: 1847308 - DNA, 15 bp, Homo sapiens
tgcactccagcggga

SEQ ID NO: 1847309 - DNA, 15 bp, Homo sapiens
gcactccagcgggac

SEQ ID NO: 1847310 - DNA, 15 bp, Homo sapiens
cactccagcgggaca

SEQ ID NO: 1847311 - DNA, 15 bp, Homo sapiens
actccagcgggacac

SEQ ID NO: 1847312 - DNA, 15 bp, Homo sapiens
ctccagcgggacaca

SEQ ID NO: 1847313 - DNA, 15 bp, Homo sapiens
tccagcgggacacag

SEQ ID NO: 1847314 - DNA, 15 bp, Homo sapiens
ccagcgggacacagc

SEQ ID NO: 1847315 - DNA, 15 bp, Homo sapiens
cagcgggacacagca

SEQ ID NO: 1847316 - DNA, 15 bp, Homo sapiens
agcgggacacagcaa

SEQ ID NO: 1847317 - DNA, 15 bp, Homo sapiens
gcgggacacagcaag

SEQ ID NO: 1847318 - DNA, 15 bp, Homo sapiens
cgggacacagcaaga

SEQ ID NO: 1847319 - DNA, 15 bp, Homo sapiens
gggacacagcaagac

SEQ ID NO: 1847320 - DNA, 15 bp, Homo sapiens
ggacacagcaagacc

SEQ ID NO: 1847321 - DNA, 15 bp, Homo sapiens
gacacagcaagaccc

SEQ ID NO: 1847322 - DNA, 15 bp, Homo sapiens
acacagcaagaccct

SEQ ID NO: 1847323 - DNA, 15 bp, Homo sapiens
cacagcaagacccta

SEQ ID NO: 1847324 - DNA, 15 bp, Homo sapiens
acagcaagaccctat

SEQ ID NO: 1847325 - DNA, 15 bp, Homo sapiens
cagcaagaccctatc

SEQ ID NO: 1847326 - DNA, 15 bp, Homo sapiens
agcaagaccctatct

SEQ ID NO: 1847327 - DNA, 15 bp, Homo sapiens
gcaagaccctatctc

SEQ ID NO: 1847328 - DNA, 15 bp, Homo sapiens
caagaccctatctcc

SEQ ID NO: 1847329 - DNA, 15 bp, Homo sapiens
aagaccctatctcca

SEQ ID NO: 1847330 - DNA, 15 bp, Homo sapiens
agaccctatctccaa

SEQ ID NO: 1847331 - DNA, 15 bp, Homo sapiens
gaccctatctccaaa

SEQ ID NO: 1847332 - DNA, 15 bp, Homo sapiens
accctatctccaaaa

SEQ ID NO: 1847333 - DNA, 15 bp, Homo sapiens
ccctatctccaaaaa

SEQ ID NO: 1847334 - DNA, 15 bp, Homo sapiens
cctatctccaaaaaa

SEQ ID NO: 1847335 - DNA, 15 bp, Homo sapiens
ctatctccaaaaaaa

SEQ ID NO: 1847336 - DNA, 15 bp, Homo sapiens
tatctccaaaaaaaa

SEQ ID NO: 1847337 - DNA, 15 bp, Homo sapiens
atctccaaaaaaaaa

SEQ ID NO: 1847338 - DNA, 15 bp, Homo sapiens
tctccaaaaaaaaaa

SEQ ID NO: 1847339 - DNA, 15 bp, Homo sapiens
ctccaaaaaaaaaaa

SEQ ID NO: 1847340 - DNA, 15 bp, Homo sapiens
tccaaaaaaaaaaaa

SEQ ID NO: 1847341 - DNA, 15 bp, Homo sapiens
aaaaaaaaagtttgc

SEQ ID NO: 1847342 - DNA, 15 bp, Homo sapiens
aaaaaaagtttgctg

SEQ ID NO: 1847343 - DNA, 15 bp, Homo sapiens
aaaaaagtttgctgc

SEQ ID NO: 1847344 - DNA, 15 bp, Homo sapiens
aaaaagtttgctgca

SEQ ID NO: 1847345 - DNA, 15 bp, Homo sapiens
aaaagtttgctgcac

SEQ ID NO: 1847346 - DNA, 15 bp, Homo sapiens
aaagtttgctgcacc

SEQ ID NO: 1847347 - DNA, 15 bp, Homo sapiens
aagtttgctgcaccc

SEQ ID NO: 1847348 - DNA, 15 bp, Homo sapiens
agtttgctgcaccca

SEQ ID NO: 1847349 - DNA, 15 bp, Homo sapiens
gtttgctgcacccaa

SEQ ID NO: 1847350 - DNA, 15 bp, Homo sapiens
tttgctgcacccaaa

SEQ ID NO: 1847351 - DNA, 15 bp, Homo sapiens
ttgctgcacccaaat

SEQ ID NO: 1847352 - DNA, 15 bp, Homo sapiens
tgctgcacccaaatt

SEQ ID NO: 1847353 - DNA, 15 bp, Homo sapiens
gctgcacccaaattg

SEQ ID NO: 1847354 - DNA, 15 bp, Homo sapiens
ctgcacccaaattgc

SEQ ID NO: 1847355 - DNA, 15 bp, Homo sapiens
tgcacccaaattgct

SEQ ID NO: 1847356 - DNA, 15 bp, Homo sapiens
gcacccaaattgctg

SEQ ID NO: 1847357 - DNA, 15 bp, Homo sapiens
cacccaaattgctgc

SEQ ID NO: 1847358 - DNA, 15 bp, Homo sapiens
acccaaattgctgcc

SEQ ID NO: 1847359 - DNA, 15 bp, Homo sapiens
cccaaattgctgcca

SEQ ID NO: 1847360 - DNA, 15 bp, Homo sapiens
ccaaattgctgccac

SEQ ID NO: 1847361 - DNA, 15 bp, Homo sapiens
caaattgctgccacc

SEQ ID NO: 1847362 - DNA, 15 bp, Homo sapiens
aaattgctgccacct

SEQ ID NO: 1847363 - DNA, 15 bp, Homo sapiens
aattgctgccacctg

SEQ ID NO: 1847364 - DNA, 15 bp, Homo sapiens
attgctgccacctgg

SEQ ID NO: 1847365 - DNA, 15 bp, Homo sapiens
ttgctgccacctgga

SEQ ID NO: 1847366 - DNA, 15 bp, Homo sapiens
tgctgccacctggag

SEQ ID NO: 1847367 - DNA, 15 bp, Homo sapiens
gctgccacctggagt

SEQ ID NO: 1847368 - DNA, 15 bp, Homo sapiens
ctgccacctggagtc

SEQ ID NO: 1847369 - DNA, 15 bp, Homo sapiens
tgccacctggagtcc

SEQ ID NO: 1847370 - DNA, 15 bp, Homo sapiens
gccacctggagtccg

SEQ ID NO: 1847371 - DNA, 15 bp, Homo sapiens
ccacctggagtccgc

SEQ ID NO: 1847372 - DNA, 15 bp, Homo sapiens
cacctggagtccgcc

SEQ ID NO: 1847373 - DNA, 15 bp, Homo sapiens
acctggagtccgcca

SEQ ID NO: 1847374 - DNA, 15 bp, Homo sapiens
cctggagtccgccat

SEQ ID NO: 1847375 - DNA, 15 bp, Homo sapiens
ctggagtccgccatt

SEQ ID NO: 1847376 - DNA, 15 bp, Homo sapiens
tggagtccgccattc

SEQ ID NO: 1847377 - DNA, 15 bp, Homo sapiens
ggagtccgccattca

SEQ ID NO: 1847378 - DNA, 15 bp, Homo sapiens
gagtccgccattcat

SEQ ID NO: 1847379 - DNA, 15 bp, Homo sapiens
agtccgccattcatt

SEQ ID NO: 1847380 - DNA, 15 bp, Homo sapiens
gtccgccattcattc

SEQ ID NO: 1847381 - DNA, 15 bp, Homo sapiens
tccgccattcattcc

SEQ ID NO: 1847382 - DNA, 15 bp, Homo sapiens
ccgccattcattcct

SEQ ID NO: 1847383 - DNA, 15 bp, Homo sapiens
cgccattcattcctg

SEQ ID NO: 1847384 - DNA, 15 bp, Homo sapiens
gccattcattcctgg

SEQ ID NO: 1847385 - DNA, 15 bp, Homo sapiens
ccattcattcctgga

SEQ ID NO: 1847386 - DNA, 15 bp, Homo sapiens
cattcattcctggat

SEQ ID NO: 1847387 - DNA, 15 bp, Homo sapiens
attcattcctggatg

SEQ ID NO: 1847388 - DNA, 15 bp, Homo sapiens
ttcattcctggatgt

SEQ ID NO: 1847389 - DNA, 15 bp, Homo sapiens
tcattcctggatgtt

SEQ ID NO: 1847390 - DNA, 15 bp, Homo sapiens
cattcctggatgttg

SEQ ID NO: 1847391 - DNA, 15 bp, Homo sapiens
attcctggatgttga

SEQ ID NO: 1847392 - DNA, 15 bp, Homo sapiens
ttcctggatgttgat

SEQ ID NO: 1847393 - DNA, 15 bp, Homo sapiens
tcctggatgttgata

SEQ ID NO: 1847394 - DNA, 15 bp, Homo sapiens
cctggatgttgataa

SEQ ID NO: 1847395 - DNA, 15 bp, Homo sapiens
ctggatgttgataat

SEQ ID NO: 1847396 - DNA, 15 bp, Homo sapiens
tggatgttgataatt

SEQ ID NO: 1847397 - DNA, 15 bp, Homo sapiens
ggatgttgataatta

SEQ ID NO: 1847398 - DNA, 15 bp, Homo sapiens
gatgttgataattac

SEQ ID NO: 1847399 - DNA, 15 bp, Homo sapiens
atgttgataattacc

SEQ ID NO: 1847400 - DNA, 15 bp, Homo sapiens
tgttgataattaccc

SEQ ID NO: 1847401 - DNA, 15 bp, Homo sapiens
gttgataattaccct

SEQ ID NO: 1847402 - DNA, 15 bp, Homo sapiens
ttgataattaccctc

SEQ ID NO: 1847403 - DNA, 15 bp, Homo sapiens
tgataattaccctct

SEQ ID NO: 1847404 - DNA, 15 bp, Homo sapiens
gataattaccctctg

SEQ ID NO: 1847405 - DNA, 15 bp, Homo sapiens
ataattaccctctga

SEQ ID NO: 1847406 - DNA, 15 bp, Homo sapiens
taattaccctctgag

SEQ ID NO: 1847407 - DNA, 15 bp, Homo sapiens
aattaccctctgagt

SEQ ID NO: 1847408 - DNA, 15 bp, Homo sapiens
attaccctctgagtt

SEQ ID NO: 1847409 - DNA, 15 bp, Homo sapiens
ttaccctctgagttg

SEQ ID NO: 1847410 - DNA, 15 bp, Homo sapiens
taccctctgagttga

SEQ ID NO: 1847411 - DNA, 15 bp, Homo sapiens
accctctgagttgaa

SEQ ID NO: 1847412 - DNA, 15 bp, Homo sapiens
ccctctgagttgaat

SEQ ID NO: 1847413 - DNA, 15 bp, Homo sapiens
cctctgagttgaatt

SEQ ID NO: 1847414 - DNA, 15 bp, Homo sapiens
ctctgagttgaattt

SEQ ID NO: 1847415 - DNA, 15 bp, Homo sapiens
tctgagttgaattta

SEQ ID NO: 1847416 - DNA, 15 bp, Homo sapiens
ctgagttgaatttac

SEQ ID NO: 1847417 - DNA, 15 bp, Homo sapiens
tgagttgaatttaca

SEQ ID NO: 1847418 - DNA, 15 bp, Homo sapiens
gagttgaatttacaa

SEQ ID NO: 1847419 - DNA, 15 bp, Homo sapiens
agttgaatttacaat

SEQ ID NO: 1847420 - DNA, 15 bp, Homo sapiens
gttgaatttacaatg

SEQ ID NO: 1847421 - DNA, 15 bp, Homo sapiens
ttgaatttacaatgg

SEQ ID NO: 1847422 - DNA, 15 bp, Homo sapiens
tgaatttacaatggg

SEQ ID NO: 1847423 - DNA, 15 bp, Homo sapiens
gaatttacaatgggg

SEQ ID NO: 1847424 - DNA, 15 bp, Homo sapiens
aatttacaatggggc

SEQ ID NO: 1847425 - DNA, 15 bp, Homo sapiens
atttacaatggggct

SEQ ID NO: 1847426 - DNA, 15 bp, Homo sapiens
tttacaatggggctt

SEQ ID NO: 1847427 - DNA, 15 bp, Homo sapiens
ttacaatggggcttc

SEQ ID NO: 1847428 - DNA, 15 bp, Homo sapiens
tacaatggggcttct

SEQ ID NO: 1847429 - DNA, 15 bp, Homo sapiens
acaatggggcttctg

SEQ ID NO: 1847430 - DNA, 15 bp, Homo sapiens
caatggggcttctga

SEQ ID NO: 1847431 - DNA, 15 bp, Homo sapiens
aatggggcttctgac

SEQ ID NO: 1847432 - DNA, 15 bp, Homo sapiens
atggggcttctgact

SEQ ID NO: 1847433 - DNA, 15 bp, Homo sapiens
tggggcttctgactg

SEQ ID NO: 1847434 - DNA, 15 bp, Homo sapiens
ggggcttctgactga

SEQ ID NO: 1847435 - DNA, 15 bp, Homo sapiens
gggcttctgactgat

SEQ ID NO: 1847436 - DNA, 15 bp, Homo sapiens
ggcttctgactgatt

SEQ ID NO: 1847437 - DNA, 15 bp, Homo sapiens
gcttctgactgattg

SEQ ID NO: 1847438 - DNA, 15 bp, Homo sapiens
cttctgactgattgt

SEQ ID NO: 1847439 - DNA, 15 bp, Homo sapiens
ttctgactgattgtt

SEQ ID NO: 1847440 - DNA, 15 bp, Homo sapiens
tctgactgattgttt

SEQ ID NO: 1847441 - DNA, 15 bp, Homo sapiens
ctgactgattgtttt

SEQ ID NO: 1847442 - DNA, 15 bp, Homo sapiens
tgactgattgttttg

SEQ ID NO: 1847443 - DNA, 15 bp, Homo sapiens
gactgattgttttgg

SEQ ID NO: 1847444 - DNA, 15 bp, Homo sapiens
actgattgttttggc

SEQ ID NO: 1847445 - DNA, 15 bp, Homo sapiens
ctgattgttttggct

SEQ ID NO: 1847446 - DNA, 15 bp, Homo sapiens
tgattgttttggctc

SEQ ID NO: 1847447 - DNA, 15 bp, Homo sapiens
gattgttttggctct

SEQ ID NO: 1847448 - DNA, 15 bp, Homo sapiens
attgttttggctctg

SEQ ID NO: 1847449 - DNA, 15 bp, Homo sapiens
ttgttttggctctgg

SEQ ID NO: 1847450 - DNA, 15 bp, Homo sapiens
tgttttggctctggt

SEQ ID NO: 1847451 - DNA, 15 bp, Homo sapiens
gttttggctctggtg

SEQ ID NO: 1847452 - DNA, 15 bp, Homo sapiens
ttttggctctggtga

SEQ ID NO: 1847453 - DNA, 15 bp, Homo sapiens
tttggctctggtgac

SEQ ID NO: 1847454 - DNA, 15 bp, Homo sapiens
ttggctctggtgaca

SEQ ID NO: 1847455 - DNA, 15 bp, Homo sapiens
tggctctggtgacag

SEQ ID NO: 1847456 - DNA, 15 bp, Homo sapiens
ggctctggtgacaga

SEQ ID NO: 1847457 - DNA, 15 bp, Homo sapiens
gctctggtgacagac

SEQ ID NO: 1847458 - DNA, 15 bp, Homo sapiens
ctctggtgacagaca

SEQ ID NO: 1847459 - DNA, 15 bp, Homo sapiens
tctggtgacagacac

SEQ ID NO: 1847460 - DNA, 15 bp, Homo sapiens
ctggtgacagacaca

SEQ ID NO: 1847461 - DNA, 15 bp, Homo sapiens
tggtgacagacacag

SEQ ID NO: 1847462 - DNA, 15 bp, Homo sapiens
ggtgacagacacagc

SEQ ID NO: 1847463 - DNA, 15 bp, Homo sapiens
gtgacagacacagca

SEQ ID NO: 1847464 - DNA, 15 bp, Homo sapiens
tgacagacacagcat

SEQ ID NO: 1847465 - DNA, 15 bp, Homo sapiens
gacagacacagcata

SEQ ID NO: 1847466 - DNA, 15 bp, Homo sapiens
acagacacagcatag

SEQ ID NO: 1847467 - DNA, 15 bp, Homo sapiens
cagacacagcatagc

SEQ ID NO: 1847468 - DNA, 15 bp, Homo sapiens
agacacagcatagca

SEQ ID NO: 1847469 - DNA, 15 bp, Homo sapiens
gacacagcatagcat

SEQ ID NO: 1847470 - DNA, 15 bp, Homo sapiens
acacagcatagcatt

SEQ ID NO: 1847471 - DNA, 15 bp, Homo sapiens
cacagcatagcattc

SEQ ID NO: 1847472 - DNA, 15 bp, Homo sapiens
acagcatagcattct

SEQ ID NO: 1847473 - DNA, 15 bp, Homo sapiens
cagcatagcattcta

SEQ ID NO: 1847474 - DNA, 15 bp, Homo sapiens
agcatagcattctag

SEQ ID NO: 1847475 - DNA, 15 bp, Homo sapiens
gcatagcattctagt

SEQ ID NO: 1847476 - DNA, 15 bp, Homo sapiens
catagcattctagta

SEQ ID NO: 1847477 - DNA, 15 bp, Homo sapiens
atagcattctagtac

SEQ ID NO: 1847478 - DNA, 15 bp, Homo sapiens
tagcattctagtacg

SEQ ID NO: 1847479 - DNA, 15 bp, Homo sapiens
agcattctagtacgg

SEQ ID NO: 1847480 - DNA, 15 bp, Homo sapiens
gcattctagtacggg

SEQ ID NO: 1847481 - DNA, 15 bp, Homo sapiens
cattctagtacgggt

SEQ ID NO: 1847482 - DNA, 15 bp, Homo sapiens
attctagtacgggtg

SEQ ID NO: 1847483 - DNA, 15 bp, Homo sapiens
ttctagtacgggtgt

SEQ ID NO: 1847484 - DNA, 15 bp, Homo sapiens
tctagtacgggtgtt

SEQ ID NO: 1847485 - DNA, 15 bp, Homo sapiens
ctagtacgggtgttc

SEQ ID NO: 1847486 - DNA, 15 bp, Homo sapiens
tagtacgggtgttct

SEQ ID NO: 1847487 - DNA, 15 bp, Homo sapiens
agtacgggtgttcta

SEQ ID NO: 1847488 - DNA, 15 bp, Homo sapiens
gtacgggtgttctaa

SEQ ID NO: 1847489 - DNA, 15 bp, Homo sapiens
tacgggtgttctaaa

SEQ ID NO: 1847490 - DNA, 15 bp, Homo sapiens
acgggtgttctaaag

SEQ ID NO: 1847491 - DNA, 15 bp, Homo sapiens
cgggtgttctaaagg

SEQ ID NO: 1847492 - DNA, 15 bp, Homo sapiens
gggtgttctaaaggt

SEQ ID NO: 1847493 - DNA, 15 bp, Homo sapiens
ggtgttctaaaggtg

SEQ ID NO: 1847494 - DNA, 15 bp, Homo sapiens
gtgttctaaaggtga

SEQ ID NO: 1847495 - DNA, 15 bp, Homo sapiens
tgttctaaaggtgag

SEQ ID NO: 1847496 - DNA, 15 bp, Homo sapiens
gttctaaaggtgaga

SEQ ID NO: 1847497 - DNA, 15 bp, Homo sapiens
ttctaaaggtgagac

SEQ ID NO: 1847498 - DNA, 15 bp, Homo sapiens
tctaaaggtgagaca

SEQ ID NO: 1847499 - DNA, 15 bp, Homo sapiens
ctaaaggtgagacac

SEQ ID NO: 1847500 - DNA, 15 bp, Homo sapiens
taaaggtgagacaca

SEQ ID NO: 1847501 - DNA, 15 bp, Homo sapiens
aaaggtgagacacat

SEQ ID NO: 1847502 - DNA, 15 bp, Homo sapiens
aaggtgagacacata

SEQ ID NO: 1847503 - DNA, 15 bp, Homo sapiens
aggtgagacacatag

SEQ ID NO: 1847504 - DNA, 15 bp, Homo sapiens
ggtgagacacatagc

SEQ ID NO: 1847505 - DNA, 15 bp, Homo sapiens
gtgagacacatagcc

SEQ ID NO: 1847506 - DNA, 15 bp, Homo sapiens
tgagacacatagcca

SEQ ID NO: 1847507 - DNA, 15 bp, Homo sapiens
gagacacatagccag

SEQ ID NO: 1847508 - DNA, 15 bp, Homo sapiens
agacacatagccagt

SEQ ID NO: 1847509 - DNA, 15 bp, Homo sapiens
gacacatagccagtg

SEQ ID NO: 1847510 - DNA, 15 bp, Homo sapiens
acacatagccagtgc

SEQ ID NO: 1847511 - DNA, 15 bp, Homo sapiens
cacatagccagtgcg

SEQ ID NO: 1847512 - DNA, 15 bp, Homo sapiens
acatagccagtgcgg

SEQ ID NO: 1847513 - DNA, 15 bp, Homo sapiens
catagccagtgcggt

SEQ ID NO: 1847514 - DNA, 15 bp, Homo sapiens
atagccagtgcggtg

SEQ ID NO: 1847515 - DNA, 15 bp, Homo sapiens
tagccagtgcggtgg

SEQ ID NO: 1847516 - DNA, 15 bp, Homo sapiens
agccagtgcggtggc

SEQ ID NO: 1847517 - DNA, 15 bp, Homo sapiens
gccagtgcggtggct

SEQ ID NO: 1847518 - DNA, 15 bp, Homo sapiens
ccagtgcggtggctc

SEQ ID NO: 1847519 - DNA, 15 bp, Homo sapiens
cagtgcggtggctca

SEQ ID NO: 1847520 - DNA, 15 bp, Homo sapiens
gtggctcacgcctgg

SEQ ID NO: 1847521 - DNA, 15 bp, Homo sapiens
tggctcacgcctgga

SEQ ID NO: 1847522 - DNA, 15 bp, Homo sapiens
ggctcacgcctggaa

SEQ ID NO: 1847523 - DNA, 15 bp, Homo sapiens
gctcacgcctggaat

SEQ ID NO: 1847524 - DNA, 15 bp, Homo sapiens
ctcacgcctggaatc

SEQ ID NO: 1847525 - DNA, 15 bp, Homo sapiens
tcacgcctggaatcc

SEQ ID NO: 1847526 - DNA, 15 bp, Homo sapiens
cacgcctggaatccc

SEQ ID NO: 1847527 - DNA, 15 bp, Homo sapiens
acgcctggaatccca

SEQ ID NO: 1847528 - DNA, 15 bp, Homo sapiens
cgcctggaatcccag

SEQ ID NO: 1847529 - DNA, 15 bp, Homo sapiens
gagaccgaggcagga

SEQ ID NO: 1847530 - DNA, 15 bp, Homo sapiens
agaccgaggcaggag

SEQ ID NO: 1847531 - DNA, 15 bp, Homo sapiens
gaccgaggcaggagg

SEQ ID NO: 1847532 - DNA, 15 bp, Homo sapiens
accgaggcaggagga

SEQ ID NO: 1847533 - DNA, 15 bp, Homo sapiens
ccgaggcaggaggat

SEQ ID NO: 1847534 - DNA, 15 bp, Homo sapiens
cgaggcaggaggatc

SEQ ID NO: 1847535 - DNA, 15 bp, Homo sapiens
gaggcaggaggatca

SEQ ID NO: 1847536 - DNA, 15 bp, Homo sapiens
ggcaggaggatcaca

SEQ ID NO: 1847537 - DNA, 15 bp, Homo sapiens
gcaggaggatcacat

SEQ ID NO: 1847538 - DNA, 15 bp, Homo sapiens
caggaggatcacatg

SEQ ID NO: 1847539 - DNA, 15 bp, Homo sapiens
aggaggatcacatga

SEQ ID NO: 1847540 - DNA, 15 bp, Homo sapiens
ggaggatcacatgag

SEQ ID NO: 1847541 - DNA, 15 bp, Homo sapiens
gaggatcacatgagg

SEQ ID NO: 1847542 - DNA, 15 bp, Homo sapiens
aggatcacatgaggt

SEQ ID NO: 1847543 - DNA, 15 bp, Homo sapiens
ggatcacatgaggtc

SEQ ID NO: 1847544 - DNA, 15 bp, Homo sapiens
gatcacatgaggtca

SEQ ID NO: 1847545 - DNA, 15 bp, Homo sapiens
atcacatgaggtcag

SEQ ID NO: 1847546 - DNA, 15 bp, Homo sapiens
tcacatgaggtcagg

SEQ ID NO: 1847547 - DNA, 15 bp, Homo sapiens
cacatgaggtcagga

SEQ ID NO: 1847548 - DNA, 15 bp, Homo sapiens
acatgaggtcaggag

SEQ ID NO: 1847549 - DNA, 15 bp, Homo sapiens
catgaggtcaggagc

SEQ ID NO: 1847550 - DNA, 15 bp, Homo sapiens
atgaggtcaggagct

SEQ ID NO: 1847551 - DNA, 15 bp, Homo sapiens
tgaggtcaggagctc

SEQ ID NO: 1847552 - DNA, 15 bp, Homo sapiens
gaggtcaggagctcg

SEQ ID NO: 1847553 - DNA, 15 bp, Homo sapiens
aggtcaggagctcga

SEQ ID NO: 1847554 - DNA, 15 bp, Homo sapiens
ggtcaggagctcgag

SEQ ID NO: 1847555 - DNA, 15 bp, Homo sapiens
gtcaggagctcgaga

SEQ ID NO: 1847556 - DNA, 15 bp, Homo sapiens
tcaggagctcgagac

SEQ ID NO: 1847557 - DNA, 15 bp, Homo sapiens
caggagctcgagacc

SEQ ID NO: 1847558 - DNA, 15 bp, Homo sapiens
aggagctcgagacca

SEQ ID NO: 1847559 - DNA, 15 bp, Homo sapiens
ggagctcgagaccag

SEQ ID NO: 1847560 - DNA, 15 bp, Homo sapiens
gagctcgagaccagc

SEQ ID NO: 1847561 - DNA, 15 bp, Homo sapiens
ctgtctctactaaag

SEQ ID NO: 1847562 - DNA, 15 bp, Homo sapiens
tgtctctactaaaga

SEQ ID NO: 1847563 - DNA, 15 bp, Homo sapiens
cgtggtggcgcatgg

SEQ ID NO: 1847564 - DNA, 15 bp, Homo sapiens
gtggtggcgcatggc

SEQ ID NO: 1847565 - DNA, 15 bp, Homo sapiens
tggtggcgcatggct

SEQ ID NO: 1847566 - DNA, 15 bp, Homo sapiens
ggtggcgcatggctg

SEQ ID NO: 1847567 - DNA, 15 bp, Homo sapiens
gtggcgcatggctgt

SEQ ID NO: 1847568 - DNA, 15 bp, Homo sapiens
tggcgcatggctgta

SEQ ID NO: 1847569 - DNA, 15 bp, Homo sapiens
ggcgcatggctgtaa

SEQ ID NO: 1847570 - DNA, 15 bp, Homo sapiens
gcgcatggctgtaat

SEQ ID NO: 1847571 - DNA, 15 bp, Homo sapiens
cgcatggctgtaatc

SEQ ID NO: 1847572 - DNA, 15 bp, Homo sapiens
gcatggctgtaatcc

SEQ ID NO: 1847573 - DNA, 15 bp, Homo sapiens
aggcgggagaatcgc

SEQ ID NO: 1847574 - DNA, 15 bp, Homo sapiens
ggcgggagaatcgct

SEQ ID NO: 1847575 - DNA, 15 bp, Homo sapiens
gcgggagaatcgctg

SEQ ID NO: 1847576 - DNA, 15 bp, Homo sapiens
cgggagaatcgctgg

SEQ ID NO: 1847577 - DNA, 15 bp, Homo sapiens
gggagaatcgctgga

SEQ ID NO: 1847578 - DNA, 15 bp, Homo sapiens
ggagaatcgctggaa

SEQ ID NO: 1847579 - DNA, 15 bp, Homo sapiens
gagaatcgctggaat

SEQ ID NO: 1847580 - DNA, 15 bp, Homo sapiens
agaatcgctggaatc

SEQ ID NO: 1847581 - DNA, 15 bp, Homo sapiens
gaatcgctggaatct

SEQ ID NO: 1847582 - DNA, 15 bp, Homo sapiens
aatcgctggaatctg

SEQ ID NO: 1847583 - DNA, 15 bp, Homo sapiens
atcgctggaatctga

SEQ ID NO: 1847584 - DNA, 15 bp, Homo sapiens
tcgctggaatctgag

SEQ ID NO: 1847585 - DNA, 15 bp, Homo sapiens
cgctggaatctgaga

SEQ ID NO: 1847586 - DNA, 15 bp, Homo sapiens
gctggaatctgagag

SEQ ID NO: 1847587 - DNA, 15 bp, Homo sapiens
ctggaatctgagagg

SEQ ID NO: 1847588 - DNA, 15 bp, Homo sapiens
tggaatctgagaggc

SEQ ID NO: 1847589 - DNA, 15 bp, Homo sapiens
ggaatctgagaggca

SEQ ID NO: 1847590 - DNA, 15 bp, Homo sapiens
gaatctgagaggcag

SEQ ID NO: 1847591 - DNA, 15 bp, Homo sapiens
aatctgagaggcaga

SEQ ID NO: 1847592 - DNA, 15 bp, Homo sapiens
atctgagaggcagag

SEQ ID NO: 1847593 - DNA, 15 bp, Homo sapiens
tctgagaggcagagg

SEQ ID NO: 1847594 - DNA, 15 bp, Homo sapiens
ctgagaggcagaggt

SEQ ID NO: 1847595 - DNA, 15 bp, Homo sapiens
tgagaggcagaggtt

SEQ ID NO: 1847596 - DNA, 15 bp, Homo sapiens
gagaggcagaggttg

SEQ ID NO: 1847597 - DNA, 15 bp, Homo sapiens
agaggcagaggttgc

SEQ ID NO: 1847598 - DNA, 15 bp, Homo sapiens
ggcagaggttgcagc

SEQ ID NO: 1847599 - DNA, 15 bp, Homo sapiens
gcagaggttgcagca

SEQ ID NO: 1847600 - DNA, 15 bp, Homo sapiens
cagaggttgcagcaa

SEQ ID NO: 1847601 - DNA, 15 bp, Homo sapiens
agaggttgcagcaag

SEQ ID NO: 1847602 - DNA, 15 bp, Homo sapiens
aggttgcagcaagct

SEQ ID NO: 1847603 - DNA, 15 bp, Homo sapiens
ggttgcagcaagctg

SEQ ID NO: 1847604 - DNA, 15 bp, Homo sapiens
gttgcagcaagctga

SEQ ID NO: 1847605 - DNA, 15 bp, Homo sapiens
ttgcagcaagctgag

SEQ ID NO: 1847606 - DNA, 15 bp, Homo sapiens
tgcagcaagctgaga

SEQ ID NO: 1847607 - DNA, 15 bp, Homo sapiens
gcagcaagctgagat

SEQ ID NO: 1847608 - DNA, 15 bp, Homo sapiens
cagcaagctgagatc

SEQ ID NO: 1847609 - DNA, 15 bp, Homo sapiens
agcaagctgagatcg

SEQ ID NO: 1847610 - DNA, 15 bp, Homo sapiens
gcaagctgagatcgt

SEQ ID NO: 1847611 - DNA, 15 bp, Homo sapiens
caagctgagatcgtg

SEQ ID NO: 1847612 - DNA, 15 bp, Homo sapiens
aagctgagatcgtgc

SEQ ID NO: 1847613 - DNA, 15 bp, Homo sapiens
tcgtgccactgcatc

SEQ ID NO: 1847614 - DNA, 15 bp, Homo sapiens
cgtgccactgcatcc

SEQ ID NO: 1847615 - DNA, 15 bp, Homo sapiens
gtgccactgcatccc

SEQ ID NO: 1847616 - DNA, 15 bp, Homo sapiens
tgccactgcatccca

SEQ ID NO: 1847617 - DNA, 15 bp, Homo sapiens
gccactgcatcccag

SEQ ID NO: 1847618 - DNA, 15 bp, Homo sapiens
ccactgcatcccagc

SEQ ID NO: 1847619 - DNA, 15 bp, Homo sapiens
cactgcatcccagcc

SEQ ID NO: 1847620 - DNA, 15 bp, Homo sapiens
actgcatcccagcct

SEQ ID NO: 1847621 - DNA, 15 bp, Homo sapiens
ctgcatcccagcctc

SEQ ID NO: 1847622 - DNA, 15 bp, Homo sapiens
tgcatcccagcctca

SEQ ID NO: 1847623 - DNA, 15 bp, Homo sapiens
gcatcccagcctcag

SEQ ID NO: 1847624 - DNA, 15 bp, Homo sapiens
catcccagcctcagt

SEQ ID NO: 1847625 - DNA, 15 bp, Homo sapiens
atcccagcctcagtg

SEQ ID NO: 1847626 - DNA, 15 bp, Homo sapiens
tcccagcctcagtga

SEQ ID NO: 1847627 - DNA, 15 bp, Homo sapiens
cccagcctcagtgac

SEQ ID NO: 1847628 - DNA, 15 bp, Homo sapiens
ccagcctcagtgaca

SEQ ID NO: 1847629 - DNA, 15 bp, Homo sapiens
cagcctcagtgacag

SEQ ID NO: 1847630 - DNA, 15 bp, Homo sapiens
agcctcagtgacaga

SEQ ID NO: 1847631 - DNA, 15 bp, Homo sapiens
gcctcagtgacagag

SEQ ID NO: 1847632 - DNA, 15 bp, Homo sapiens
cctcagtgacagaga

SEQ ID NO: 1847633 - DNA, 15 bp, Homo sapiens
ctcagtgacagagaa

SEQ ID NO: 1847634 - DNA, 15 bp, Homo sapiens
tcagtgacagagaaa

SEQ ID NO: 1847635 - DNA, 15 bp, Homo sapiens
cagtgacagagaaag

SEQ ID NO: 1847636 - DNA, 15 bp, Homo sapiens
agtgacagagaaaga

SEQ ID NO: 1847637 - DNA, 15 bp, Homo sapiens
gtgacagagaaagac

SEQ ID NO: 1847638 - DNA, 15 bp, Homo sapiens
tgacagagaaagact

SEQ ID NO: 1847639 - DNA, 15 bp, Homo sapiens
gacagagaaagactc

SEQ ID NO: 1847640 - DNA, 15 bp, Homo sapiens
acagagaaagactct

SEQ ID NO: 1847641 - DNA, 15 bp, Homo sapiens
cagagaaagactcta

SEQ ID NO: 1847642 - DNA, 15 bp, Homo sapiens
agagaaagactctac

SEQ ID NO: 1847643 - DNA, 15 bp, Homo sapiens
gagaaagactctact

SEQ ID NO: 1847644 - DNA, 15 bp, Homo sapiens
agaaagactctactc

SEQ ID NO: 1847645 - DNA, 15 bp, Homo sapiens
gaaagactctactct

SEQ ID NO: 1847646 - DNA, 15 bp, Homo sapiens
aaagactctactcta

SEQ ID NO: 1847647 - DNA, 15 bp, Homo sapiens
aagactctactctaa

SEQ ID NO: 1847648 - DNA, 15 bp, Homo sapiens
agactctactctaaa

SEQ ID NO: 1847649 - DNA, 15 bp, Homo sapiens
gactctactctaaat

SEQ ID NO: 1847650 - DNA, 15 bp, Homo sapiens
actctactctaaata

SEQ ID NO: 1847651 - DNA, 15 bp, Homo sapiens
ctctactctaaataa

SEQ ID NO: 1847652 - DNA, 15 bp, Homo sapiens
tctactctaaataaa

SEQ ID NO: 1847653 - DNA, 15 bp, Homo sapiens
ctactctaaataaat

SEQ ID NO: 1847654 - DNA, 15 bp, Homo sapiens
tactctaaataaata

SEQ ID NO: 1847655 - DNA, 15 bp, Homo sapiens
actctaaataaataa

SEQ ID NO: 1847656 - DNA, 15 bp, Homo sapiens
ctctaaataaataaa

SEQ ID NO: 1847657 - DNA, 15 bp, Homo sapiens
tctaaataaataaat

SEQ ID NO: 1847658 - DNA, 15 bp, Homo sapiens
ctaaataaataaata

SEQ ID NO: 1847659 - DNA, 15 bp, Homo sapiens
ataaataaataaagg

SEQ ID NO: 1847660 - DNA, 15 bp, Homo sapiens
taaataaataaaggt

SEQ ID NO: 1847661 - DNA, 15 bp, Homo sapiens
aaataaataaaggtg

SEQ ID NO: 1847662 - DNA, 15 bp, Homo sapiens
aataaataaaggtgg

SEQ ID NO: 1847663 - DNA, 15 bp, Homo sapiens
ataaataaaggtggg

SEQ ID NO: 1847664 - DNA, 15 bp, Homo sapiens
taaataaaggtggga

SEQ ID NO: 1847665 - DNA, 15 bp, Homo sapiens
aaataaaggtgggac

SEQ ID NO: 1847666 - DNA, 15 bp, Homo sapiens
aataaaggtgggaca

SEQ ID NO: 1847667 - DNA, 15 bp, Homo sapiens
ataaaggtgggacac

SEQ ID NO: 1847668 - DNA, 15 bp, Homo sapiens
taaaggtgggacaca

SEQ ID NO: 1847669 - DNA, 15 bp, Homo sapiens
aaaggtgggacacac

SEQ ID NO: 1847670 - DNA, 15 bp, Homo sapiens
aaggtgggacacaca

SEQ ID NO: 1847671 - DNA, 15 bp, Homo sapiens
aggtgggacacacat

SEQ ID NO: 1847672 - DNA, 15 bp, Homo sapiens
ggtgggacacacatg

SEQ ID NO: 1847673 - DNA, 15 bp, Homo sapiens
gtgggacacacatgc

SEQ ID NO: 1847674 - DNA, 15 bp, Homo sapiens
tgggacacacatgca

SEQ ID NO: 1847675 - DNA, 15 bp, Homo sapiens
gggacacacatgcag

SEQ ID NO: 1847676 - DNA, 15 bp, Homo sapiens
ggacacacatgcagg

SEQ ID NO: 1847677 - DNA, 15 bp, Homo sapiens
gacacacatgcaggt

SEQ ID NO: 1847678 - DNA, 15 bp, Homo sapiens
acacacatgcaggta

SEQ ID NO: 1847679 - DNA, 15 bp, Homo sapiens
cacacatgcaggtaa

SEQ ID NO: 1847680 - DNA, 15 bp, Homo sapiens
acacatgcaggtaag

SEQ ID NO: 1847681 - DNA, 15 bp, Homo sapiens
cacatgcaggtaagt

SEQ ID NO: 1847682 - DNA, 15 bp, Homo sapiens
acatgcaggtaagtg

SEQ ID NO: 1847683 - DNA, 15 bp, Homo sapiens
catgcaggtaagtgc

SEQ ID NO: 1847684 - DNA, 15 bp, Homo sapiens
atgcaggtaagtgca

SEQ ID NO: 1847685 - DNA, 15 bp, Homo sapiens
tgcaggtaagtgcac

SEQ ID NO: 1847686 - DNA, 15 bp, Homo sapiens
gcaggtaagtgcacg

SEQ ID NO: 1847687 - DNA, 15 bp, Homo sapiens
caggtaagtgcacga

SEQ ID NO: 1847688 - DNA, 15 bp, Homo sapiens
aggtaagtgcacgaa

SEQ ID NO: 1847689 - DNA, 15 bp, Homo sapiens
ggtaagtgcacgaag

SEQ ID NO: 1847690 - DNA, 15 bp, Homo sapiens
gtaagtgcacgaagg

SEQ ID NO: 1847691 - DNA, 15 bp, Homo sapiens
taagtgcacgaaggg

SEQ ID NO: 1847692 - DNA, 15 bp, Homo sapiens
aagtgcacgaagggg

SEQ ID NO: 1847693 - DNA, 15 bp, Homo sapiens
agtgcacgaagggga

SEQ ID NO: 1847694 - DNA, 15 bp, Homo sapiens
gtgcacgaaggggag

SEQ ID NO: 1847695 - DNA, 15 bp, Homo sapiens
tgcacgaaggggaga

SEQ ID NO: 1847696 - DNA, 15 bp, Homo sapiens
gcacgaaggggagat

SEQ ID NO: 1847697 - DNA, 15 bp, Homo sapiens
cacgaaggggagatg

SEQ ID NO: 1847698 - DNA, 15 bp, Homo sapiens
acgaaggggagatgg

SEQ ID NO: 1847699 - DNA, 15 bp, Homo sapiens
cgaaggggagatgga

SEQ ID NO: 1847700 - DNA, 15 bp, Homo sapiens
gaaggggagatggat

SEQ ID NO: 1847701 - DNA, 15 bp, Homo sapiens
aaggggagatggatc

SEQ ID NO: 1847702 - DNA, 15 bp, Homo sapiens
aggggagatggatcc

SEQ ID NO: 1847703 - DNA, 15 bp, Homo sapiens
ggggagatggatcca

SEQ ID NO: 1847704 - DNA, 15 bp, Homo sapiens
gggagatggatccag

SEQ ID NO: 1847705 - DNA, 15 bp, Homo sapiens
ggagatggatccagg

SEQ ID NO: 1847706 - DNA, 15 bp, Homo sapiens
gagatggatccaggg

SEQ ID NO: 1847707 - DNA, 15 bp, Homo sapiens
agatggatccagggc

SEQ ID NO: 1847708 - DNA, 15 bp, Homo sapiens
gatggatccagggct

SEQ ID NO: 1847709 - DNA, 15 bp, Homo sapiens
atggatccagggctg

SEQ ID NO: 1847710 - DNA, 15 bp, Homo sapiens
tggatccagggctgg

SEQ ID NO: 1847711 - DNA, 15 bp, Homo sapiens
ggatccagggctgga

SEQ ID NO: 1847712 - DNA, 15 bp, Homo sapiens
gatccagggctggaa

SEQ ID NO: 1847713 - DNA, 15 bp, Homo sapiens
atccagggctggaag

SEQ ID NO: 1847714 - DNA, 15 bp, Homo sapiens
tccagggctggaagt

SEQ ID NO: 1847715 - DNA, 15 bp, Homo sapiens
ccagggctggaagtc

SEQ ID NO: 1847716 - DNA, 15 bp, Homo sapiens
cagggctggaagtcc

SEQ ID NO: 1847717 - DNA, 15 bp, Homo sapiens
agggctggaagtccc

SEQ ID NO: 1847718 - DNA, 15 bp, Homo sapiens
gggctggaagtcccc

SEQ ID NO: 1847719 - DNA, 15 bp, Homo sapiens
ggctggaagtccccc

SEQ ID NO: 1847720 - DNA, 15 bp, Homo sapiens
gctggaagtcccccc

SEQ ID NO: 1847721 - DNA, 15 bp, Homo sapiens
ctggaagtcccccca

SEQ ID NO: 1847722 - DNA, 15 bp, Homo sapiens
tggaagtccccccag

SEQ ID NO: 1847723 - DNA, 15 bp, Homo sapiens
ggaagtccccccaga

SEQ ID NO: 1847724 - DNA, 15 bp, Homo sapiens
gaagtccccccagac

SEQ ID NO: 1847725 - DNA, 15 bp, Homo sapiens
aagtccccccagact

SEQ ID NO: 1847726 - DNA, 15 bp, Homo sapiens
agtccccccagactc

SEQ ID NO: 1847727 - DNA, 15 bp, Homo sapiens
gtccccccagactca

SEQ ID NO: 1847728 - DNA, 15 bp, Homo sapiens
tccccccagactcac

SEQ ID NO: 1847729 - DNA, 15 bp, Homo sapiens
ccccccagactcacc

SEQ ID NO: 1847730 - DNA, 15 bp, Homo sapiens
cccccagactcacct

SEQ ID NO: 1847731 - DNA, 15 bp, Homo sapiens
ccccagactcacctt

SEQ ID NO: 1847732 - DNA, 15 bp, Homo sapiens
cccagactcacctta

SEQ ID NO: 1847733 - DNA, 15 bp, Homo sapiens
ccagactcaccttag

SEQ ID NO: 1847734 - DNA, 15 bp, Homo sapiens
cagactcaccttagt

SEQ ID NO: 1847735 - DNA, 15 bp, Homo sapiens
agactcaccttagtg

SEQ ID NO: 1847736 - DNA, 15 bp, Homo sapiens
gactcaccttagtga

SEQ ID NO: 1847737 - DNA, 15 bp, Homo sapiens
actcaccttagtgag

SEQ ID NO: 1847738 - DNA, 15 bp, Homo sapiens
ctcaccttagtgagg

SEQ ID NO: 1847739 - DNA, 15 bp, Homo sapiens
tcaccttagtgaggg

SEQ ID NO: 1847740 - DNA, 15 bp, Homo sapiens
caccttagtgagggg

SEQ ID NO: 1847741 - DNA, 15 bp, Homo sapiens
accttagtgaggggc

SEQ ID NO: 1847742 - DNA, 15 bp, Homo sapiens
ccttagtgaggggca

SEQ ID NO: 1847743 - DNA, 15 bp, Homo sapiens
cttagtgaggggcag

SEQ ID NO: 1847744 - DNA, 15 bp, Homo sapiens
ttagtgaggggcagc

SEQ ID NO: 1847745 - DNA, 15 bp, Homo sapiens
tagtgaggggcagct

SEQ ID NO: 1847746 - DNA, 15 bp, Homo sapiens
agtgaggggcagctg

SEQ ID NO: 1847747 - DNA, 15 bp, Homo sapiens
gtgaggggcagctga

SEQ ID NO: 1847748 - DNA, 15 bp, Homo sapiens
tgaggggcagctgag

SEQ ID NO: 1847749 - DNA, 15 bp, Homo sapiens
gaggggcagctgagt

SEQ ID NO: 1847750 - DNA, 15 bp, Homo sapiens
aggggcagctgagtg

SEQ ID NO: 1847751 - DNA, 15 bp, Homo sapiens
ggggcagctgagtgg

SEQ ID NO: 1847752 - DNA, 15 bp, Homo sapiens
gggcagctgagtggg

SEQ ID NO: 1847753 - DNA, 15 bp, Homo sapiens
ggcagctgagtgggc

SEQ ID NO: 1847754 - DNA, 15 bp, Homo sapiens
gcagctgagtgggca

SEQ ID NO: 1847755 - DNA, 15 bp, Homo sapiens
cagctgagtgggcag

SEQ ID NO: 1847756 - DNA, 15 bp, Homo sapiens
agctgagtgggcagg

SEQ ID NO: 1847757 - DNA, 15 bp, Homo sapiens
gctgagtgggcaggg

SEQ ID NO: 1847758 - DNA, 15 bp, Homo sapiens
ctgagtgggcagggt

SEQ ID NO: 1847759 - DNA, 15 bp, Homo sapiens
tgagtgggcagggtg

SEQ ID NO: 1847760 - DNA, 15 bp, Homo sapiens
gagtgggcagggtga

SEQ ID NO: 1847761 - DNA, 15 bp, Homo sapiens
agtgggcagggtgat

SEQ ID NO: 1847762 - DNA, 15 bp, Homo sapiens
gtgggcagggtgatg

SEQ ID NO: 1847763 - DNA, 15 bp, Homo sapiens
tgggcagggtgatgc

SEQ ID NO: 1847764 - DNA, 15 bp, Homo sapiens
gggcagggtgatgcc

SEQ ID NO: 1847765 - DNA, 15 bp, Homo sapiens
ggcagggtgatgcct

SEQ ID NO: 1847766 - DNA, 15 bp, Homo sapiens
gcagggtgatgcctt

SEQ ID NO: 1847767 - DNA, 15 bp, Homo sapiens
cagggtgatgccttc

SEQ ID NO: 1847768 - DNA, 15 bp, Homo sapiens
agggtgatgccttct

SEQ ID NO: 1847769 - DNA, 15 bp, Homo sapiens
gggtgatgccttctt

SEQ ID NO: 1847770 - DNA, 15 bp, Homo sapiens
ggtgatgccttcttt

SEQ ID NO: 1847771 - DNA, 15 bp, Homo sapiens
gtgatgccttcttta

SEQ ID NO: 1847772 - DNA, 15 bp, Homo sapiens
tgatgccttctttag

SEQ ID NO: 1847773 - DNA, 15 bp, Homo sapiens
gatgccttctttagc

SEQ ID NO: 1847774 - DNA, 15 bp, Homo sapiens
atgccttctttagcc

SEQ ID NO: 1847775 - DNA, 15 bp, Homo sapiens
tgccttctttagcca

SEQ ID NO: 1847776 - DNA, 15 bp, Homo sapiens
gccttctttagccag

SEQ ID NO: 1847777 - DNA, 15 bp, Homo sapiens
ccttctttagccagc

SEQ ID NO: 1847778 - DNA, 15 bp, Homo sapiens
cttctttagccagca

SEQ ID NO: 1847779 - DNA, 15 bp, Homo sapiens
ttctttagccagcag

SEQ ID NO: 1847780 - DNA, 15 bp, Homo sapiens
tctttagccagcagc

SEQ ID NO: 1847781 - DNA, 15 bp, Homo sapiens
ctttagccagcagct

SEQ ID NO: 1847782 - DNA, 15 bp, Homo sapiens
tttagccagcagctt

SEQ ID NO: 1847783 - DNA, 15 bp, Homo sapiens
ttagccagcagcttc

SEQ ID NO: 1847784 - DNA, 15 bp, Homo sapiens
tagccagcagcttct

SEQ ID NO: 1847785 - DNA, 15 bp, Homo sapiens
agccagcagcttctt

SEQ ID NO: 1847786 - DNA, 15 bp, Homo sapiens
gccagcagcttcttc

SEQ ID NO: 1847787 - DNA, 15 bp, Homo sapiens
ccagcagcttcttct

SEQ ID NO: 1847788 - DNA, 15 bp, Homo sapiens
cagcagcttcttctc

SEQ ID NO: 1847789 - DNA, 15 bp, Homo sapiens
agcagcttcttctca

SEQ ID NO: 1847790 - DNA, 15 bp, Homo sapiens
gcagcttcttctcat

SEQ ID NO: 1847791 - DNA, 15 bp, Homo sapiens
cagcttcttctcatc

SEQ ID NO: 1847792 - DNA, 15 bp, Homo sapiens
agcttcttctcatcc

SEQ ID NO: 1847793 - DNA, 15 bp, Homo sapiens
gcttcttctcatcct

SEQ ID NO: 1847794 - DNA, 15 bp, Homo sapiens
cttcttctcatcctc

SEQ ID NO: 1847795 - DNA, 15 bp, Homo sapiens
ttcttctcatcctcg

SEQ ID NO: 1847796 - DNA, 15 bp, Homo sapiens
tcttctcatcctcgg

SEQ ID NO: 1847797 - DNA, 15 bp, Homo sapiens
cttctcatcctcggt

SEQ ID NO: 1847798 - DNA, 15 bp, Homo sapiens
ttctcatcctcggtg

SEQ ID NO: 1847799 - DNA, 15 bp, Homo sapiens
tctcatcctcggtga

SEQ ID NO: 1847800 - DNA, 15 bp, Homo sapiens
ctcatcctcggtgag

SEQ ID NO: 1847801 - DNA, 15 bp, Homo sapiens
tcatcctcggtgagc

SEQ ID NO: 1847802 - DNA, 15 bp, Homo sapiens
catcctcggtgagca

SEQ ID NO: 1847803 - DNA, 15 bp, Homo sapiens
atcctcggtgagcac

SEQ ID NO: 1847804 - DNA, 15 bp, Homo sapiens
tcctcggtgagcacc

SEQ ID NO: 1847805 - DNA, 15 bp, Homo sapiens
cctcggtgagcacca

SEQ ID NO: 1847806 - DNA, 15 bp, Homo sapiens
ctcggtgagcaccag

SEQ ID NO: 1847807 - DNA, 15 bp, Homo sapiens
tcggtgagcaccagc

SEQ ID NO: 1847808 - DNA, 15 bp, Homo sapiens
cggtgagcaccagct

SEQ ID NO: 1847809 - DNA, 15 bp, Homo sapiens
ggtgagcaccagctc

SEQ ID NO: 1847810 - DNA, 15 bp, Homo sapiens
gtgagcaccagctcc

SEQ ID NO: 1847811 - DNA, 15 bp, Homo sapiens
tgagcaccagctcct

SEQ ID NO: 1847812 - DNA, 15 bp, Homo sapiens
gagcaccagctcctg

SEQ ID NO: 1847813 - DNA, 15 bp, Homo sapiens
agcaccagctcctga

SEQ ID NO: 1847814 - DNA, 15 bp, Homo sapiens
gcaccagctcctgac

SEQ ID NO: 1847815 - DNA, 15 bp, Homo sapiens
caccagctcctgaca

SEQ ID NO: 1847816 - DNA, 15 bp, Homo sapiens
accagctcctgacag

SEQ ID NO: 1847817 - DNA, 15 bp, Homo sapiens
ccagctcctgacagt

SEQ ID NO: 1847818 - DNA, 15 bp, Homo sapiens
cagctcctgacagtg

SEQ ID NO: 1847819 - DNA, 15 bp, Homo sapiens
agctcctgacagtgc

SEQ ID NO: 1847820 - DNA, 15 bp, Homo sapiens
gctcctgacagtgcc

SEQ ID NO: 1847821 - DNA, 15 bp, Homo sapiens
ctcctgacagtgccc

SEQ ID NO: 1847822 - DNA, 15 bp, Homo sapiens
tcctgacagtgccca

SEQ ID NO: 1847823 - DNA, 15 bp, Homo sapiens
cctgacagtgcccag

SEQ ID NO: 1847824 - DNA, 15 bp, Homo sapiens
ctgacagtgcccagc

SEQ ID NO: 1847825 - DNA, 15 bp, Homo sapiens
tgacagtgcccagcc

SEQ ID NO: 1847826 - DNA, 15 bp, Homo sapiens
gacagtgcccagccc

SEQ ID NO: 1847827 - DNA, 15 bp, Homo sapiens
acagtgcccagcccc

SEQ ID NO: 1847828 - DNA, 15 bp, Homo sapiens
cagtgcccagcccca

SEQ ID NO: 1847829 - DNA, 15 bp, Homo sapiens
agtgcccagccccag

SEQ ID NO: 1847830 - DNA, 15 bp, Homo sapiens
gtgcccagccccagg

SEQ ID NO: 1847831 - DNA, 15 bp, Homo sapiens
tgcccagccccaggt

SEQ ID NO: 1847832 - DNA, 15 bp, Homo sapiens
gcccagccccaggtc

SEQ ID NO: 1847833 - DNA, 15 bp, Homo sapiens
cccagccccaggtcg

SEQ ID NO: 1847834 - DNA, 15 bp, Homo sapiens
ccagccccaggtcgc

SEQ ID NO: 1847835 - DNA, 15 bp, Homo sapiens
cagccccaggtcgca

SEQ ID NO: 1847836 - DNA, 15 bp, Homo sapiens
agccccaggtcgcag

SEQ ID NO: 1847837 - DNA, 15 bp, Homo sapiens
gccccaggtcgcagg

SEQ ID NO: 1847838 - DNA, 15 bp, Homo sapiens
ccccaggtcgcagga

SEQ ID NO: 1847839 - DNA, 15 bp, Homo sapiens
cccaggtcgcaggag

SEQ ID NO: 1847840 - DNA, 15 bp, Homo sapiens
ccaggtcgcaggagg

SEQ ID NO: 1847841 - DNA, 15 bp, Homo sapiens
caggtcgcaggaggt

SEQ ID NO: 1847842 - DNA, 15 bp, Homo sapiens
aggtcgcaggaggta

SEQ ID NO: 1847843 - DNA, 15 bp, Homo sapiens
ggtcgcaggaggtag

SEQ ID NO: 1847844 - DNA, 15 bp, Homo sapiens
gtcgcaggaggtagg

SEQ ID NO: 1847845 - DNA, 15 bp, Homo sapiens
tcgcaggaggtagga

SEQ ID NO: 1847846 - DNA, 15 bp, Homo sapiens
cgcaggaggtaggag

SEQ ID NO: 1847847 - DNA, 15 bp, Homo sapiens
gcaggaggtaggagg

SEQ ID NO: 1847848 - DNA, 15 bp, Homo sapiens
caggaggtaggaggc

SEQ ID NO: 1847849 - DNA, 15 bp, Homo sapiens
aggaggtaggaggcc

SEQ ID NO: 1847850 - DNA, 15 bp, Homo sapiens
ggaggtaggaggccc

SEQ ID NO: 1847851 - DNA, 15 bp, Homo sapiens
gaggtaggaggcccc

SEQ ID NO: 1847852 - DNA, 15 bp, Homo sapiens
aggtaggaggccccc

SEQ ID NO: 1847853 - DNA, 15 bp, Homo sapiens
ggtaggaggccccca

SEQ ID NO: 1847854 - DNA, 15 bp, Homo sapiens
gtaggaggcccccag

SEQ ID NO: 1847855 - DNA, 15 bp, Homo sapiens
taggaggcccccagg

SEQ ID NO: 1847856 - DNA, 15 bp, Homo sapiens
aggaggcccccaggt

SEQ ID NO: 1847857 - DNA, 15 bp, Homo sapiens
ggaggcccccaggtg

SEQ ID NO: 1847858 - DNA, 15 bp, Homo sapiens
gaggcccccaggtga

SEQ ID NO: 1847859 - DNA, 15 bp, Homo sapiens
aggcccccaggtgat

SEQ ID NO: 1847860 - DNA, 15 bp, Homo sapiens
ggcccccaggtgatg

SEQ ID NO: 1847861 - DNA, 15 bp, Homo sapiens
gcccccaggtgatgc

SEQ ID NO: 1847862 - DNA, 15 bp, Homo sapiens
cccccaggtgatgct

SEQ ID NO: 1847863 - DNA, 15 bp, Homo sapiens
ccccaggtgatgctg

SEQ ID NO: 1847864 - DNA, 15 bp, Homo sapiens
cccaggtgatgctgt

SEQ ID NO: 1847865 - DNA, 15 bp, Homo sapiens
ccaggtgatgctgtt

SEQ ID NO: 1847866 - DNA, 15 bp, Homo sapiens
caggtgatgctgttg

SEQ ID NO: 1847867 - DNA, 15 bp, Homo sapiens
aggtgatgctgttgc

SEQ ID NO: 1847868 - DNA, 15 bp, Homo sapiens
ggtgatgctgttgct

SEQ ID NO: 1847869 - DNA, 15 bp, Homo sapiens
gtgatgctgttgcta

SEQ ID NO: 1847870 - DNA, 15 bp, Homo sapiens
tgatgctgttgctac

SEQ ID NO: 1847871 - DNA, 15 bp, Homo sapiens
gatgctgttgctacg

SEQ ID NO: 1847872 - DNA, 15 bp, Homo sapiens
atgctgttgctacgg

SEQ ID NO: 1847873 - DNA, 15 bp, Homo sapiens
tgctgttgctacgga

SEQ ID NO: 1847874 - DNA, 15 bp, Homo sapiens
gctgttgctacggaa

SEQ ID NO: 1847875 - DNA, 15 bp, Homo sapiens
ctgttgctacggaaa

SEQ ID NO: 1847876 - DNA, 15 bp, Homo sapiens
tgttgctacggaaaa

SEQ ID NO: 1847877 - DNA, 15 bp, Homo sapiens
gttgctacggaaaaa

SEQ ID NO: 1847878 - DNA, 15 bp, Homo sapiens
ttgctacggaaaaaa

SEQ ID NO: 1847879 - DNA, 15 bp, Homo sapiens
tgctacggaaaaaat

SEQ ID NO: 1847880 - DNA, 15 bp, Homo sapiens
gctacggaaaaaatc

SEQ ID NO: 1847881 - DNA, 15 bp, Homo sapiens
ctacggaaaaaatca

SEQ ID NO: 1847882 - DNA, 15 bp, Homo sapiens
tacggaaaaaatcag

SEQ ID NO: 1847883 - DNA, 15 bp, Homo sapiens
acggaaaaaatcaga

SEQ ID NO: 1847884 - DNA, 15 bp, Homo sapiens
cggaaaaaatcagag

SEQ ID NO: 1847885 - DNA, 15 bp, Homo sapiens
ggaaaaaatcagagg

SEQ ID NO: 1847886 - DNA, 15 bp, Homo sapiens
gaaaaaatcagagga

SEQ ID NO: 1847887 - DNA, 15 bp, Homo sapiens
aaaaaatcagaggaa

SEQ ID NO: 1847888 - DNA, 15 bp, Homo sapiens
aaaaatcagaggaat

SEQ ID NO: 1847889 - DNA, 15 bp, Homo sapiens
aaaatcagaggaatg

SEQ ID NO: 1847890 - DNA, 15 bp, Homo sapiens
aaatcagaggaatga

SEQ ID NO: 1847891 - DNA, 15 bp, Homo sapiens
aatcagaggaatgac

SEQ ID NO: 1847892 - DNA, 15 bp, Homo sapiens
atcagaggaatgacg

SEQ ID NO: 1847893 - DNA, 15 bp, Homo sapiens
tcagaggaatgacgg

SEQ ID NO: 1847894 - DNA, 15 bp, Homo sapiens
cagaggaatgacggc

SEQ ID NO: 1847895 - DNA, 15 bp, Homo sapiens
agaggaatgacggcg

SEQ ID NO: 1847896 - DNA, 15 bp, Homo sapiens
gaggaatgacggcgg

SEQ ID NO: 1847897 - DNA, 15 bp, Homo sapiens
aggaatgacggcggg

SEQ ID NO: 1847898 - DNA, 15 bp, Homo sapiens
ggaatgacggcgggt

SEQ ID NO: 1847899 - DNA, 15 bp, Homo sapiens
gaatgacggcgggtg

SEQ ID NO: 1847900 - DNA, 15 bp, Homo sapiens
aatgacggcgggtgc

SEQ ID NO: 1847901 - DNA, 15 bp, Homo sapiens
atgacggcgggtgca

SEQ ID NO: 1847902 - DNA, 15 bp, Homo sapiens
tgacggcgggtgcag

SEQ ID NO: 1847903 - DNA, 15 bp, Homo sapiens
gacggcgggtgcagg

SEQ ID NO: 1847904 - DNA, 15 bp, Homo sapiens
acggcgggtgcaggg

SEQ ID NO: 1847905 - DNA, 15 bp, Homo sapiens
cggcgggtgcaggga

SEQ ID NO: 1847906 - DNA, 15 bp, Homo sapiens
ggcgggtgcagggac

SEQ ID NO: 1847907 - DNA, 15 bp, Homo sapiens
gcgggtgcagggacg

SEQ ID NO: 1847908 - DNA, 15 bp, Homo sapiens
cgggtgcagggacgc

SEQ ID NO: 1847909 - DNA, 15 bp, Homo sapiens
gggtgcagggacgcc

SEQ ID NO: 1847910 - DNA, 15 bp, Homo sapiens
ggtgcagggacgcca

SEQ ID NO: 1847911 - DNA, 15 bp, Homo sapiens
gtgcagggacgccaa

SEQ ID NO: 1847912 - DNA, 15 bp, Homo sapiens
tgcagggacgccaac

SEQ ID NO: 1847913 - DNA, 15 bp, Homo sapiens
gcagggacgccaact

SEQ ID NO: 1847914 - DNA, 15 bp, Homo sapiens
cagggacgccaactg

SEQ ID NO: 1847915 - DNA, 15 bp, Homo sapiens
agggacgccaactgc

SEQ ID NO: 1847916 - DNA, 15 bp, Homo sapiens
gggacgccaactgcc

SEQ ID NO: 1847917 - DNA, 15 bp, Homo sapiens
ggacgccaactgcct

SEQ ID NO: 1847918 - DNA, 15 bp, Homo sapiens
gacgccaactgcctt

SEQ ID NO: 1847919 - DNA, 15 bp, Homo sapiens
acgccaactgccttc

SEQ ID NO: 1847920 - DNA, 15 bp, Homo sapiens
cgccaactgccttca

SEQ ID NO: 1847921 - DNA, 15 bp, Homo sapiens
gccaactgccttcag

SEQ ID NO: 1847922 - DNA, 15 bp, Homo sapiens
ccaactgccttcagg

SEQ ID NO: 1847923 - DNA, 15 bp, Homo sapiens
caactgccttcagga

SEQ ID NO: 1847924 - DNA, 15 bp, Homo sapiens
aactgccttcaggaa

SEQ ID NO: 1847925 - DNA, 15 bp, Homo sapiens
actgccttcaggaaa

SEQ ID NO: 1847926 - DNA, 15 bp, Homo sapiens
ctgccttcaggaaat

SEQ ID NO: 1847927 - DNA, 15 bp, Homo sapiens
tgccttcaggaaatg

SEQ ID NO: 1847928 - DNA, 15 bp, Homo sapiens
gccttcaggaaatga

SEQ ID NO: 1847929 - DNA, 15 bp, Homo sapiens
ccttcaggaaatgaa

SEQ ID NO: 1847930 - DNA, 15 bp, Homo sapiens
cttcaggaaatgaaa

SEQ ID NO: 1847931 - DNA, 15 bp, Homo sapiens
ttcaggaaatgaaag

SEQ ID NO: 1847932 - DNA, 15 bp, Homo sapiens
tcaggaaatgaaaga

SEQ ID NO: 1847933 - DNA, 15 bp, Homo sapiens
caggaaatgaaagag

SEQ ID NO: 1847934 - DNA, 15 bp, Homo sapiens
aggaaatgaaagagg

SEQ ID NO: 1847935 - DNA, 15 bp, Homo sapiens
ggaaatgaaagaggt

SEQ ID NO: 1847936 - DNA, 15 bp, Homo sapiens
gaaatgaaagaggta

SEQ ID NO: 1847937 - DNA, 15 bp, Homo sapiens
aaatgaaagaggtat

SEQ ID NO: 1847938 - DNA, 15 bp, Homo sapiens
aatgaaagaggtatc

SEQ ID NO: 1847939 - DNA, 15 bp, Homo sapiens
atgaaagaggtatca

SEQ ID NO: 1847940 - DNA, 15 bp, Homo sapiens
tgaaagaggtatcag

SEQ ID NO: 1847941 - DNA, 15 bp, Homo sapiens
gaaagaggtatcaga

SEQ ID NO: 1847942 - DNA, 15 bp, Homo sapiens
aaagaggtatcagat

SEQ ID NO: 1847943 - DNA, 15 bp, Homo sapiens
aagaggtatcagatc

SEQ ID NO: 1847944 - DNA, 15 bp, Homo sapiens
agaggtatcagatcg

SEQ ID NO: 1847945 - DNA, 15 bp, Homo sapiens
gaggtatcagatcga

SEQ ID NO: 1847946 - DNA, 15 bp, Homo sapiens
aggtatcagatcgaa

SEQ ID NO: 1847947 - DNA, 15 bp, Homo sapiens
ggtatcagatcgaaa

SEQ ID NO: 1847948 - DNA, 15 bp, Homo sapiens
gtatcagatcgaaaa

SEQ ID NO: 1847949 - DNA, 15 bp, Homo sapiens
tatcagatcgaaaac

SEQ ID NO: 1847950 - DNA, 15 bp, Homo sapiens
atcagatcgaaaaca

SEQ ID NO: 1847951 - DNA, 15 bp, Homo sapiens
tcagatcgaaaacac

SEQ ID NO: 1847952 - DNA, 15 bp, Homo sapiens
cagatcgaaaacact

SEQ ID NO: 1847953 - DNA, 15 bp, Homo sapiens
agatcgaaaacacta

SEQ ID NO: 1847954 - DNA, 15 bp, Homo sapiens
gatcgaaaacactat

SEQ ID NO: 1847955 - DNA, 15 bp, Homo sapiens
atcgaaaacactatc

SEQ ID NO: 1847956 - DNA, 15 bp, Homo sapiens
tcgaaaacactatca

SEQ ID NO: 1847957 - DNA, 15 bp, Homo sapiens
cgaaaacactatcac

SEQ ID NO: 1847958 - DNA, 15 bp, Homo sapiens
gaaaacactatcacc

SEQ ID NO: 1847959 - DNA, 15 bp, Homo sapiens
aaaacactatcaccc

SEQ ID NO: 1847960 - DNA, 15 bp, Homo sapiens
aaacactatcacccc

SEQ ID NO: 1847961 - DNA, 15 bp, Homo sapiens
aacactatcacccca

SEQ ID NO: 1847962 - DNA, 15 bp, Homo sapiens
acactatcaccccag

SEQ ID NO: 1847963 - DNA, 15 bp, Homo sapiens
cactatcaccccagg

SEQ ID NO: 1847964 - DNA, 15 bp, Homo sapiens
actatcaccccaggc

SEQ ID NO: 1847965 - DNA, 15 bp, Homo sapiens
ctatcaccccaggct

SEQ ID NO: 1847966 - DNA, 15 bp, Homo sapiens
tatcaccccaggctg

SEQ ID NO: 1847967 - DNA, 15 bp, Homo sapiens
atcaccccaggctgg

SEQ ID NO: 1847968 - DNA, 15 bp, Homo sapiens
tcaccccaggctggg

SEQ ID NO: 1847969 - DNA, 15 bp, Homo sapiens
caccccaggctgggt

SEQ ID NO: 1847970 - DNA, 15 bp, Homo sapiens
accccaggctgggtg

SEQ ID NO: 1847971 - DNA, 15 bp, Homo sapiens
ccccaggctgggtgt

SEQ ID NO: 1847972 - DNA, 15 bp, Homo sapiens
cccaggctgggtgtg

SEQ ID NO: 1847973 - DNA, 15 bp, Homo sapiens
ccaggctgggtgtgg

SEQ ID NO: 1847974 - DNA, 15 bp, Homo sapiens
tcatcccagcactta

SEQ ID NO: 1847975 - DNA, 15 bp, Homo sapiens
catcccagcacttag

SEQ ID NO: 1847976 - DNA, 15 bp, Homo sapiens
atcccagcacttaga

SEQ ID NO: 1847977 - DNA, 15 bp, Homo sapiens
tcccagcacttagag

SEQ ID NO: 1847978 - DNA, 15 bp, Homo sapiens
cccagcacttagaga

SEQ ID NO: 1847979 - DNA, 15 bp, Homo sapiens
ccagcacttagagag

SEQ ID NO: 1847980 - DNA, 15 bp, Homo sapiens
cagcacttagagagg

SEQ ID NO: 1847981 - DNA, 15 bp, Homo sapiens
agcacttagagaggc

SEQ ID NO: 1847982 - DNA, 15 bp, Homo sapiens
gcacttagagaggct

SEQ ID NO: 1847983 - DNA, 15 bp, Homo sapiens
cacttagagaggctg

SEQ ID NO: 1847984 - DNA, 15 bp, Homo sapiens
acttagagaggctga

SEQ ID NO: 1847985 - DNA, 15 bp, Homo sapiens
cttagagaggctgag

SEQ ID NO: 1847986 - DNA, 15 bp, Homo sapiens
ttagagaggctgagg

SEQ ID NO: 1847987 - DNA, 15 bp, Homo sapiens
tagagaggctgaggc

SEQ ID NO: 1847988 - DNA, 15 bp, Homo sapiens
agagaggctgaggca

SEQ ID NO: 1847989 - DNA, 15 bp, Homo sapiens
gagaggctgaggcat

SEQ ID NO: 1847990 - DNA, 15 bp, Homo sapiens
agaggctgaggcatg

SEQ ID NO: 1847991 - DNA, 15 bp, Homo sapiens
gaggctgaggcatgt

SEQ ID NO: 1847992 - DNA, 15 bp, Homo sapiens
aggctgaggcatgtg

SEQ ID NO: 1847993 - DNA, 15 bp, Homo sapiens
ggctgaggcatgtgg

SEQ ID NO: 1847994 - DNA, 15 bp, Homo sapiens
gctgaggcatgtgga

SEQ ID NO: 1847995 - DNA, 15 bp, Homo sapiens
ctgaggcatgtggat

SEQ ID NO: 1847996 - DNA, 15 bp, Homo sapiens
tgaggcatgtggatc

SEQ ID NO: 1847997 - DNA, 15 bp, Homo sapiens
gaggcatgtggatca

SEQ ID NO: 1847998 - DNA, 15 bp, Homo sapiens
aggcatgtggatcac

SEQ ID NO: 1847999 - DNA, 15 bp, Homo sapiens
ggcatgtggatcact

SEQ ID NO: 1848000 - DNA, 15 bp, Homo sapiens
gcatgtggatcactt

SEQ ID NO: 1848001 - DNA, 15 bp, Homo sapiens
catgtggatcacttg

SEQ ID NO: 1848002 - DNA, 15 bp, Homo sapiens
atgtggatcacttga

SEQ ID NO: 1848003 - DNA, 15 bp, Homo sapiens
tgtggatcacttgag

SEQ ID NO: 1848004 - DNA, 15 bp, Homo sapiens
tggatcacttgagct

SEQ ID NO: 1848005 - DNA, 15 bp, Homo sapiens
atcacttgagctcag

SEQ ID NO: 1848006 - DNA, 15 bp, Homo sapiens
tcacttgagctcagg

SEQ ID NO: 1848007 - DNA, 15 bp, Homo sapiens
cacttgagctcagga

SEQ ID NO: 1848008 - DNA, 15 bp, Homo sapiens
acttgagctcaggag

SEQ ID NO: 1848009 - DNA, 15 bp, Homo sapiens
cttgagctcaggaga

SEQ ID NO: 1848010 - DNA, 15 bp, Homo sapiens
ttgagctcaggagat

SEQ ID NO: 1848011 - DNA, 15 bp, Homo sapiens
tgagctcaggagatc

SEQ ID NO: 1848012 - DNA, 15 bp, Homo sapiens
gagctcaggagatcg

SEQ ID NO: 1848013 - DNA, 15 bp, Homo sapiens
ggagatcgagaccag

SEQ ID NO: 1848014 - DNA, 15 bp, Homo sapiens
gagatcgagaccagc

SEQ ID NO: 1848015 - DNA, 15 bp, Homo sapiens
agatcgagaccagcc

SEQ ID NO: 1848016 - DNA, 15 bp, Homo sapiens
gatcgagaccagcct

SEQ ID NO: 1848017 - DNA, 15 bp, Homo sapiens
atcgagaccagcctg

SEQ ID NO: 1848018 - DNA, 15 bp, Homo sapiens
agcctgggtaacatg

SEQ ID NO: 1848019 - DNA, 15 bp, Homo sapiens
gcctgggtaacatga

SEQ ID NO: 1848020 - DNA, 15 bp, Homo sapiens
cctgggtaacatgat

SEQ ID NO: 1848021 - DNA, 15 bp, Homo sapiens
ctgggtaacatgatg

SEQ ID NO: 1848022 - DNA, 15 bp, Homo sapiens
tgggtaacatgatga

SEQ ID NO: 1848023 - DNA, 15 bp, Homo sapiens
gggtaacatgatgaa

SEQ ID NO: 1848024 - DNA, 15 bp, Homo sapiens
ggtaacatgatgaaa

SEQ ID NO: 1848025 - DNA, 15 bp, Homo sapiens
gtaacatgatgaaac

SEQ ID NO: 1848026 - DNA, 15 bp, Homo sapiens
taacatgatgaaacc

SEQ ID NO: 1848027 - DNA, 15 bp, Homo sapiens
aacatgatgaaacct

SEQ ID NO: 1848028 - DNA, 15 bp, Homo sapiens
acatgatgaaacctc

SEQ ID NO: 1848029 - DNA, 15 bp, Homo sapiens
catgatgaaacctcg

SEQ ID NO: 1848030 - DNA, 15 bp, Homo sapiens
atgatgaaacctcgt

SEQ ID NO: 1848031 - DNA, 15 bp, Homo sapiens
tgatgaaacctcgtc

SEQ ID NO: 1848032 - DNA, 15 bp, Homo sapiens
gatgaaacctcgtct

SEQ ID NO: 1848033 - DNA, 15 bp, Homo sapiens
atgaaacctcgtctc

SEQ ID NO: 1848034 - DNA, 15 bp, Homo sapiens
tgaaacctcgtctct

SEQ ID NO: 1848035 - DNA, 15 bp, Homo sapiens
aaaatacaaaaattg

SEQ ID NO: 1848036 - DNA, 15 bp, Homo sapiens
aaatacaaaaattgc

SEQ ID NO: 1848037 - DNA, 15 bp, Homo sapiens
aatacaaaaattgcc

SEQ ID NO: 1848038 - DNA, 15 bp, Homo sapiens
atacaaaaattgccc

SEQ ID NO: 1848039 - DNA, 15 bp, Homo sapiens
tacaaaaattgccca

SEQ ID NO: 1848040 - DNA, 15 bp, Homo sapiens
acaaaaattgcccag

SEQ ID NO: 1848041 - DNA, 15 bp, Homo sapiens
caaaaattgcccagg

SEQ ID NO: 1848042 - DNA, 15 bp, Homo sapiens
aaaaattgcccaggt

SEQ ID NO: 1848043 - DNA, 15 bp, Homo sapiens
aaaattgcccaggtg

SEQ ID NO: 1848044 - DNA, 15 bp, Homo sapiens
aaattgcccaggtgc

SEQ ID NO: 1848045 - DNA, 15 bp, Homo sapiens
aattgcccaggtgcg

SEQ ID NO: 1848046 - DNA, 15 bp, Homo sapiens
attgcccaggtgcgg

SEQ ID NO: 1848047 - DNA, 15 bp, Homo sapiens
ttgcccaggtgcggt

SEQ ID NO: 1848048 - DNA, 15 bp, Homo sapiens
tgcccaggtgcggtg

SEQ ID NO: 1848049 - DNA, 15 bp, Homo sapiens
gcccaggtgcggtgg

SEQ ID NO: 1848050 - DNA, 15 bp, Homo sapiens
cccaggtgcggtggc

SEQ ID NO: 1848051 - DNA, 15 bp, Homo sapiens
ggccgaggtgggcaa

SEQ ID NO: 1848052 - DNA, 15 bp, Homo sapiens
gccgaggtgggcaaa

SEQ ID NO: 1848053 - DNA, 15 bp, Homo sapiens
ccgaggtgggcaaat

SEQ ID NO: 1848054 - DNA, 15 bp, Homo sapiens
cgaggtgggcaaatc

SEQ ID NO: 1848055 - DNA, 15 bp, Homo sapiens
gaggtgggcaaatca

SEQ ID NO: 1848056 - DNA, 15 bp, Homo sapiens
aggtgggcaaatcac

SEQ ID NO: 1848057 - DNA, 15 bp, Homo sapiens
ggtgggcaaatcact

SEQ ID NO: 1848058 - DNA, 15 bp, Homo sapiens
gtgggcaaatcacta

SEQ ID NO: 1848059 - DNA, 15 bp, Homo sapiens
tgggcaaatcactag

SEQ ID NO: 1848060 - DNA, 15 bp, Homo sapiens
gggcaaatcactagg

SEQ ID NO: 1848061 - DNA, 15 bp, Homo sapiens
ggcaaatcactaggt

SEQ ID NO: 1848062 - DNA, 15 bp, Homo sapiens
gcaaatcactaggtc

SEQ ID NO: 1848063 - DNA, 15 bp, Homo sapiens
caaatcactaggtca

SEQ ID NO: 1848064 - DNA, 15 bp, Homo sapiens
aaatcactaggtcag

SEQ ID NO: 1848065 - DNA, 15 bp, Homo sapiens
aatcactaggtcagg

SEQ ID NO: 1848066 - DNA, 15 bp, Homo sapiens
ggagtttgagaccat

SEQ ID NO: 1848067 - DNA, 15 bp, Homo sapiens
gagtttgagaccatc

SEQ ID NO: 1848068 - DNA, 15 bp, Homo sapiens
agtttgagaccatcc

SEQ ID NO: 1848069 - DNA, 15 bp, Homo sapiens
gtttgagaccatcct

SEQ ID NO: 1848070 - DNA, 15 bp, Homo sapiens
tttgagaccatcctg

SEQ ID NO: 1848071 - DNA, 15 bp, Homo sapiens
tgagaccatcctggt

SEQ ID NO: 1848072 - DNA, 15 bp, Homo sapiens
gagaccatcctggtc

SEQ ID NO: 1848073 - DNA, 15 bp, Homo sapiens
agaccatcctggtca

SEQ ID NO: 1848074 - DNA, 15 bp, Homo sapiens
gaccatcctggtcaa

SEQ ID NO: 1848075 - DNA, 15 bp, Homo sapiens
accatcctggtcaac

SEQ ID NO: 1848076 - DNA, 15 bp, Homo sapiens
ccatcctggtcaaca

SEQ ID NO: 1848077 - DNA, 15 bp, Homo sapiens
catcctggtcaacat

SEQ ID NO: 1848078 - DNA, 15 bp, Homo sapiens
atcctggtcaacatg

SEQ ID NO: 1848079 - DNA, 15 bp, Homo sapiens
tcctggtcaacatgg

SEQ ID NO: 1848080 - DNA, 15 bp, Homo sapiens
cctggtcaacatggt

SEQ ID NO: 1848081 - DNA, 15 bp, Homo sapiens
ctggtcaacatggtg

SEQ ID NO: 1848082 - DNA, 15 bp, Homo sapiens
tggtcaacatggtga

SEQ ID NO: 1848083 - DNA, 15 bp, Homo sapiens
ggtcaacatggtgaa

SEQ ID NO: 1848084 - DNA, 15 bp, Homo sapiens
gtcaacatggtgaaa

SEQ ID NO: 1848085 - DNA, 15 bp, Homo sapiens
aaaatacaaaaagtt

SEQ ID NO: 1848086 - DNA, 15 bp, Homo sapiens
aaatacaaaaagtta

SEQ ID NO: 1848087 - DNA, 15 bp, Homo sapiens
aatacaaaaagttag

SEQ ID NO: 1848088 - DNA, 15 bp, Homo sapiens
atacaaaaagttagc

SEQ ID NO: 1848089 - DNA, 15 bp, Homo sapiens
tacaaaaagttagct

SEQ ID NO: 1848090 - DNA, 15 bp, Homo sapiens
acaaaaagttagctg

SEQ ID NO: 1848091 - DNA, 15 bp, Homo sapiens
caaaaagttagctgg

SEQ ID NO: 1848092 - DNA, 15 bp, Homo sapiens
aaaaagttagctggg

SEQ ID NO: 1848093 - DNA, 15 bp, Homo sapiens
aaaagttagctgggc

SEQ ID NO: 1848094 - DNA, 15 bp, Homo sapiens
aaagttagctgggcg

SEQ ID NO: 1848095 - DNA, 15 bp, Homo sapiens
aagttagctgggcgt

SEQ ID NO: 1848096 - DNA, 15 bp, Homo sapiens
agttagctgggcgta

SEQ ID NO: 1848097 - DNA, 15 bp, Homo sapiens
gttagctgggcgtag

SEQ ID NO: 1848098 - DNA, 15 bp, Homo sapiens
ttagctgggcgtagt

SEQ ID NO: 1848099 - DNA, 15 bp, Homo sapiens
tagctgggcgtagtg

SEQ ID NO: 1848100 - DNA, 15 bp, Homo sapiens
agctgggcgtagtgg

SEQ ID NO: 1848101 - DNA, 15 bp, Homo sapiens
gctgggcgtagtggc

SEQ ID NO: 1848102 - DNA, 15 bp, Homo sapiens
ctgggcgtagtggcg

SEQ ID NO: 1848103 - DNA, 15 bp, Homo sapiens
tgggcgtagtggcgg

SEQ ID NO: 1848104 - DNA, 15 bp, Homo sapiens
ggcgtagtggcgggt

SEQ ID NO: 1848105 - DNA, 15 bp, Homo sapiens
gcgtagtggcgggtg

SEQ ID NO: 1848106 - DNA, 15 bp, Homo sapiens
cgtagtggcgggtgc

SEQ ID NO: 1848107 - DNA, 15 bp, Homo sapiens
gtagtggcgggtgcc

SEQ ID NO: 1848108 - DNA, 15 bp, Homo sapiens
tagtggcgggtgcct

SEQ ID NO: 1848109 - DNA, 15 bp, Homo sapiens
agtggcgggtgcctg

SEQ ID NO: 1848110 - DNA, 15 bp, Homo sapiens
cgggtgcctgtaata

SEQ ID NO: 1848111 - DNA, 15 bp, Homo sapiens
gggtgcctgtaatac

SEQ ID NO: 1848112 - DNA, 15 bp, Homo sapiens
ggtgcctgtaatacc

SEQ ID NO: 1848113 - DNA, 15 bp, Homo sapiens
taataccagctactt

SEQ ID NO: 1848114 - DNA, 15 bp, Homo sapiens
aataccagctacttg

SEQ ID NO: 1848115 - DNA, 15 bp, Homo sapiens
ataccagctacttgc

SEQ ID NO: 1848116 - DNA, 15 bp, Homo sapiens
taccagctacttgcg

SEQ ID NO: 1848117 - DNA, 15 bp, Homo sapiens
accagctacttgcga

SEQ ID NO: 1848118 - DNA, 15 bp, Homo sapiens
tacttgcgaggctga

SEQ ID NO: 1848119 - DNA, 15 bp, Homo sapiens
acttgcgaggctgag

SEQ ID NO: 1848120 - DNA, 15 bp, Homo sapiens
cttgcgaggctgagg

SEQ ID NO: 1848121 - DNA, 15 bp, Homo sapiens
ttgcgaggctgaggc

SEQ ID NO: 1848122 - DNA, 15 bp, Homo sapiens
tgcgaggctgaggca

SEQ ID NO: 1848123 - DNA, 15 bp, Homo sapiens
gcgaggctgaggcag

SEQ ID NO: 1848124 - DNA, 15 bp, Homo sapiens
cgaggctgaggcagg

SEQ ID NO: 1848125 - DNA, 15 bp, Homo sapiens
cttgaacccagaagt

SEQ ID NO: 1848126 - DNA, 15 bp, Homo sapiens
ttgaacccagaagtc

SEQ ID NO: 1848127 - DNA, 15 bp, Homo sapiens
tgaacccagaagtca

SEQ ID NO: 1848128 - DNA, 15 bp, Homo sapiens
gaacccagaagtcag

SEQ ID NO: 1848129 - DNA, 15 bp, Homo sapiens
aacccagaagtcaga

SEQ ID NO: 1848130 - DNA, 15 bp, Homo sapiens
acccagaagtcagag

SEQ ID NO: 1848131 - DNA, 15 bp, Homo sapiens
cccagaagtcagagg

SEQ ID NO: 1848132 - DNA, 15 bp, Homo sapiens
ccagaagtcagaggt

SEQ ID NO: 1848133 - DNA, 15 bp, Homo sapiens
cagaagtcagaggtt

SEQ ID NO: 1848134 - DNA, 15 bp, Homo sapiens
agaagtcagaggttg

SEQ ID NO: 1848135 - DNA, 15 bp, Homo sapiens
gaagtcagaggttgc

SEQ ID NO: 1848136 - DNA, 15 bp, Homo sapiens
aagtcagaggttgca

SEQ ID NO: 1848137 - DNA, 15 bp, Homo sapiens
agtcagaggttgcag

SEQ ID NO: 1848138 - DNA, 15 bp, Homo sapiens
gtcagaggttgcagt

SEQ ID NO: 1848139 - DNA, 15 bp, Homo sapiens
tcagaggttgcagtg

SEQ ID NO: 1848140 - DNA, 15 bp, Homo sapiens
actgcactccagccc

SEQ ID NO: 1848141 - DNA, 15 bp, Homo sapiens
ctgcactccagccct

SEQ ID NO: 1848142 - DNA, 15 bp, Homo sapiens
tgcactccagcccta

SEQ ID NO: 1848143 - DNA, 15 bp, Homo sapiens
gcactccagccctag

SEQ ID NO: 1848144 - DNA, 15 bp, Homo sapiens
cactccagccctagt

SEQ ID NO: 1848145 - DNA, 15 bp, Homo sapiens
actccagccctagtg

SEQ ID NO: 1848146 - DNA, 15 bp, Homo sapiens
ctccagccctagtga

SEQ ID NO: 1848147 - DNA, 15 bp, Homo sapiens
tccagccctagtgac

SEQ ID NO: 1848148 - DNA, 15 bp, Homo sapiens
ccagccctagtgaca

SEQ ID NO: 1848149 - DNA, 15 bp, Homo sapiens
cagccctagtgacag

SEQ ID NO: 1848150 - DNA, 15 bp, Homo sapiens
agccctagtgacagt

SEQ ID NO: 1848151 - DNA, 15 bp, Homo sapiens
gccctagtgacagta

SEQ ID NO: 1848152 - DNA, 15 bp, Homo sapiens
ccctagtgacagtat

SEQ ID NO: 1848153 - DNA, 15 bp, Homo sapiens
cctagtgacagtatg

SEQ ID NO: 1848154 - DNA, 15 bp, Homo sapiens
ctagtgacagtatga

SEQ ID NO: 1848155 - DNA, 15 bp, Homo sapiens
tagtgacagtatgag

SEQ ID NO: 1848156 - DNA, 15 bp, Homo sapiens
agtgacagtatgaga

SEQ ID NO: 1848157 - DNA, 15 bp, Homo sapiens
gtgacagtatgagac

SEQ ID NO: 1848158 - DNA, 15 bp, Homo sapiens
tgacagtatgagact

SEQ ID NO: 1848159 - DNA, 15 bp, Homo sapiens
gacagtatgagactc

SEQ ID NO: 1848160 - DNA, 15 bp, Homo sapiens
acagtatgagactcc

SEQ ID NO: 1848161 - DNA, 15 bp, Homo sapiens
cagtatgagactccg

SEQ ID NO: 1848162 - DNA, 15 bp, Homo sapiens
agtatgagactccgt

SEQ ID NO: 1848163 - DNA, 15 bp, Homo sapiens
gtatgagactccgtc

SEQ ID NO: 1848164 - DNA, 15 bp, Homo sapiens
tatgagactccgtct

SEQ ID NO: 1848165 - DNA, 15 bp, Homo sapiens
atgagactccgtctc

SEQ ID NO: 1848166 - DNA, 15 bp, Homo sapiens
aaaaaaaaaattacc

SEQ ID NO: 1848167 - DNA, 15 bp, Homo sapiens
aaaaaaaattacccg

SEQ ID NO: 1848168 - DNA, 15 bp, Homo sapiens
aaaaaaattacccga

SEQ ID NO: 1848169 - DNA, 15 bp, Homo sapiens
aaaaaattacccgac

SEQ ID NO: 1848170 - DNA, 15 bp, Homo sapiens
aaaaattacccgacc

SEQ ID NO: 1848171 - DNA, 15 bp, Homo sapiens
aaaattacccgacca

SEQ ID NO: 1848172 - DNA, 15 bp, Homo sapiens
aaattacccgaccat

SEQ ID NO: 1848173 - DNA, 15 bp, Homo sapiens
aattacccgaccatg

SEQ ID NO: 1848174 - DNA, 15 bp, Homo sapiens
attacccgaccatgg

SEQ ID NO: 1848175 - DNA, 15 bp, Homo sapiens
ttacccgaccatggt

SEQ ID NO: 1848176 - DNA, 15 bp, Homo sapiens
tacccgaccatggtg

SEQ ID NO: 1848177 - DNA, 15 bp, Homo sapiens
acccgaccatggtgg

SEQ ID NO: 1848178 - DNA, 15 bp, Homo sapiens
cccgaccatggtggc

SEQ ID NO: 1848179 - DNA, 15 bp, Homo sapiens
ccgaccatggtggcg

SEQ ID NO: 1848180 - DNA, 15 bp, Homo sapiens
cgaccatggtggcgg

SEQ ID NO: 1848181 - DNA, 15 bp, Homo sapiens
gaccatggtggcggc

SEQ ID NO: 1848182 - DNA, 15 bp, Homo sapiens
accatggtggcggcg

SEQ ID NO: 1848183 - DNA, 15 bp, Homo sapiens
ccatggtggcggcgc

SEQ ID NO: 1848184 - DNA, 15 bp, Homo sapiens
catggtggcggcgcc

SEQ ID NO: 1848185 - DNA, 15 bp, Homo sapiens
atggtggcggcgcct

SEQ ID NO: 1848186 - DNA, 15 bp, Homo sapiens
tggtggcggcgcctg

SEQ ID NO: 1848187 - DNA, 15 bp, Homo sapiens
ggtggcggcgcctgt

SEQ ID NO: 1848188 - DNA, 15 bp, Homo sapiens
gtggcggcgcctgta

SEQ ID NO: 1848189 - DNA, 15 bp, Homo sapiens
tggcggcgcctgtaa

SEQ ID NO: 1848190 - DNA, 15 bp, Homo sapiens
ggcggcgcctgtaat

SEQ ID NO: 1848191 - DNA, 15 bp, Homo sapiens
cggcgcctgtaatcc

SEQ ID NO: 1848192 - DNA, 15 bp, Homo sapiens
ctgaggcaggagaac

SEQ ID NO: 1848193 - DNA, 15 bp, Homo sapiens
tgaggcaggagaact

SEQ ID NO: 1848194 - DNA, 15 bp, Homo sapiens
gaggcaggagaactg

SEQ ID NO: 1848195 - DNA, 15 bp, Homo sapiens
aggcaggagaactgc

SEQ ID NO: 1848196 - DNA, 15 bp, Homo sapiens
ggcaggagaactgct

SEQ ID NO: 1848197 - DNA, 15 bp, Homo sapiens
gcaggagaactgctt

SEQ ID NO: 1848198 - DNA, 15 bp, Homo sapiens
caggagaactgcttg

SEQ ID NO: 1848199 - DNA, 15 bp, Homo sapiens
agaactgcttgaacc

SEQ ID NO: 1848200 - DNA, 15 bp, Homo sapiens
gaactgcttgaaccc

SEQ ID NO: 1848201 - DNA, 15 bp, Homo sapiens
aactgcttgaacccg

SEQ ID NO: 1848202 - DNA, 15 bp, Homo sapiens
actgcttgaacccgg

SEQ ID NO: 1848203 - DNA, 15 bp, Homo sapiens
ctgcttgaacccggg

SEQ ID NO: 1848204 - DNA, 15 bp, Homo sapiens
tgcttgaacccggga

SEQ ID NO: 1848205 - DNA, 15 bp, Homo sapiens
tgaacccgggaagca

SEQ ID NO: 1848206 - DNA, 15 bp, Homo sapiens
gaacccgggaagcag

SEQ ID NO: 1848207 - DNA, 15 bp, Homo sapiens
aacccgggaagcaga

SEQ ID NO: 1848208 - DNA, 15 bp, Homo sapiens
acccgggaagcagag

SEQ ID NO: 1848209 - DNA, 15 bp, Homo sapiens
cccgggaagcagagg

SEQ ID NO: 1848210 - DNA, 15 bp, Homo sapiens
ccgggaagcagaggt

SEQ ID NO: 1848211 - DNA, 15 bp, Homo sapiens
cgggaagcagaggtt

SEQ ID NO: 1848212 - DNA, 15 bp, Homo sapiens
gggaagcagaggttc

SEQ ID NO: 1848213 - DNA, 15 bp, Homo sapiens
ggaagcagaggttcc

SEQ ID NO: 1848214 - DNA, 15 bp, Homo sapiens
gaagcagaggttcca

SEQ ID NO: 1848215 - DNA, 15 bp, Homo sapiens
aagcagaggttccag

SEQ ID NO: 1848216 - DNA, 15 bp, Homo sapiens
agcagaggttccagt

SEQ ID NO: 1848217 - DNA, 15 bp, Homo sapiens
gcagaggttccagtg

SEQ ID NO: 1848218 - DNA, 15 bp, Homo sapiens
cagaggttccagtga

SEQ ID NO: 1848219 - DNA, 15 bp, Homo sapiens
agaggttccagtgag

SEQ ID NO: 1848220 - DNA, 15 bp, Homo sapiens
gaggttccagtgagc

SEQ ID NO: 1848221 - DNA, 15 bp, Homo sapiens
aggttccagtgagcc

SEQ ID NO: 1848222 - DNA, 15 bp, Homo sapiens
ggttccagtgagccc

SEQ ID NO: 1848223 - DNA, 15 bp, Homo sapiens
gttccagtgagccca

SEQ ID NO: 1848224 - DNA, 15 bp, Homo sapiens
ttccagtgagcccag

SEQ ID NO: 1848225 - DNA, 15 bp, Homo sapiens
tccagtgagcccaga

SEQ ID NO: 1848226 - DNA, 15 bp, Homo sapiens
ccagtgagcccagat

SEQ ID NO: 1848227 - DNA, 15 bp, Homo sapiens
agtgagcccagatca

SEQ ID NO: 1848228 - DNA, 15 bp, Homo sapiens
gtgagcccagatcac

SEQ ID NO: 1848229 - DNA, 15 bp, Homo sapiens
tgagcccagatcaca

SEQ ID NO: 1848230 - DNA, 15 bp, Homo sapiens
gagcccagatcacac

SEQ ID NO: 1848231 - DNA, 15 bp, Homo sapiens
agcccagatcacacc

SEQ ID NO: 1848232 - DNA, 15 bp, Homo sapiens
gcccagatcacacca

SEQ ID NO: 1848233 - DNA, 15 bp, Homo sapiens
cccagatcacaccac

SEQ ID NO: 1848234 - DNA, 15 bp, Homo sapiens
ccagatcacaccact

SEQ ID NO: 1848235 - DNA, 15 bp, Homo sapiens
cagatcacaccactg

SEQ ID NO: 1848236 - DNA, 15 bp, Homo sapiens
cactccagcctgaga

SEQ ID NO: 1848237 - DNA, 15 bp, Homo sapiens
actccagcctgagag

SEQ ID NO: 1848238 - DNA, 15 bp, Homo sapiens
ctccagcctgagaga

SEQ ID NO: 1848239 - DNA, 15 bp, Homo sapiens
tccagcctgagagac

SEQ ID NO: 1848240 - DNA, 15 bp, Homo sapiens
ccagcctgagagaca

SEQ ID NO: 1848241 - DNA, 15 bp, Homo sapiens
cagcctgagagacag

SEQ ID NO: 1848242 - DNA, 15 bp, Homo sapiens
agcctgagagacaga

SEQ ID NO: 1848243 - DNA, 15 bp, Homo sapiens
gcctgagagacagag

SEQ ID NO: 1848244 - DNA, 15 bp, Homo sapiens
cctgagagacagagt

SEQ ID NO: 1848245 - DNA, 15 bp, Homo sapiens
ctgagagacagagta

SEQ ID NO: 1848246 - DNA, 15 bp, Homo sapiens
tgagagacagagtaa

SEQ ID NO: 1848247 - DNA, 15 bp, Homo sapiens
gagagacagagtaag

SEQ ID NO: 1848248 - DNA, 15 bp, Homo sapiens
agagacagagtaaga

SEQ ID NO: 1848249 - DNA, 15 bp, Homo sapiens
gagacagagtaagac

SEQ ID NO: 1848250 - DNA, 15 bp, Homo sapiens
agacagagtaagact

SEQ ID NO: 1848251 - DNA, 15 bp, Homo sapiens
gacagagtaagactc

SEQ ID NO: 1848252 - DNA, 15 bp, Homo sapiens
acagagtaagactct

SEQ ID NO: 1848253 - DNA, 15 bp, Homo sapiens
cagagtaagactctg

SEQ ID NO: 1848254 - DNA, 15 bp, Homo sapiens
agagtaagactctgt

SEQ ID NO: 1848255 - DNA, 15 bp, Homo sapiens
gagtaagactctgtc

SEQ ID NO: 1848256 - DNA, 15 bp, Homo sapiens
aaaaaaagaaaaggt

SEQ ID NO: 1848257 - DNA, 15 bp, Homo sapiens
aaaaaagaaaaggtg

SEQ ID NO: 1848258 - DNA, 15 bp, Homo sapiens
aaaaagaaaaggtgg

SEQ ID NO: 1848259 - DNA, 15 bp, Homo sapiens
aaaagaaaaggtggc

SEQ ID NO: 1848260 - DNA, 15 bp, Homo sapiens
aaagaaaaggtggct

SEQ ID NO: 1848261 - DNA, 15 bp, Homo sapiens
aagaaaaggtggctc

SEQ ID NO: 1848262 - DNA, 15 bp, Homo sapiens
agaaaaggtggctca

SEQ ID NO: 1848263 - DNA, 15 bp, Homo sapiens
gaaaaggtggctcac

SEQ ID NO: 1848264 - DNA, 15 bp, Homo sapiens
aaaaggtggctcacg

SEQ ID NO: 1848265 - DNA, 15 bp, Homo sapiens
aaaggtggctcacgt

SEQ ID NO: 1848266 - DNA, 15 bp, Homo sapiens
aaggtggctcacgtc

SEQ ID NO: 1848267 - DNA, 15 bp, Homo sapiens
aggtggctcacgtct

SEQ ID NO: 1848268 - DNA, 15 bp, Homo sapiens
ggctcacgtctgtag

SEQ ID NO: 1848269 - DNA, 15 bp, Homo sapiens
gctcacgtctgtagt

SEQ ID NO: 1848270 - DNA, 15 bp, Homo sapiens
ctcacgtctgtagtc

SEQ ID NO: 1848271 - DNA, 15 bp, Homo sapiens
tcacgtctgtagtcc

SEQ ID NO: 1848272 - DNA, 15 bp, Homo sapiens
cacgtctgtagtccc

SEQ ID NO: 1848273 - DNA, 15 bp, Homo sapiens
acgtctgtagtccca

SEQ ID NO: 1848274 - DNA, 15 bp, Homo sapiens
cgtctgtagtcccag

SEQ ID NO: 1848275 - DNA, 15 bp, Homo sapiens
cgagactagcctggc

SEQ ID NO: 1848276 - DNA, 15 bp, Homo sapiens
gagactagcctggcc

SEQ ID NO: 1848277 - DNA, 15 bp, Homo sapiens
tgaaaccctgtctcc

SEQ ID NO: 1848278 - DNA, 15 bp, Homo sapiens
gaaaccctgtctcca

SEQ ID NO: 1848279 - DNA, 15 bp, Homo sapiens
aaaccctgtctccat

SEQ ID NO: 1848280 - DNA, 15 bp, Homo sapiens
aaccctgtctccatt

SEQ ID NO: 1848281 - DNA, 15 bp, Homo sapiens
accctgtctccatta

SEQ ID NO: 1848282 - DNA, 15 bp, Homo sapiens
ccctgtctccattaa

SEQ ID NO: 1848283 - DNA, 15 bp, Homo sapiens
cctgtctccattaaa

SEQ ID NO: 1848284 - DNA, 15 bp, Homo sapiens
ctgtctccattaaaa

SEQ ID NO: 1848285 - DNA, 15 bp, Homo sapiens
tgtctccattaaaaa

SEQ ID NO: 1848286 - DNA, 15 bp, Homo sapiens
gtctccattaaaaat

SEQ ID NO: 1848287 - DNA, 15 bp, Homo sapiens
tctccattaaaaata

SEQ ID NO: 1848288 - DNA, 15 bp, Homo sapiens
ctccattaaaaatac

SEQ ID NO: 1848289 - DNA, 15 bp, Homo sapiens
tccattaaaaataca

SEQ ID NO: 1848290 - DNA, 15 bp, Homo sapiens
ccattaaaaatacaa

SEQ ID NO: 1848291 - DNA, 15 bp, Homo sapiens
cattaaaaatacaaa

SEQ ID NO: 1848292 - DNA, 15 bp, Homo sapiens
aaaaatacaaaaatc

SEQ ID NO: 1848293 - DNA, 15 bp, Homo sapiens
aaaatacaaaaatca

SEQ ID NO: 1848294 - DNA, 15 bp, Homo sapiens
aaatacaaaaatcag

SEQ ID NO: 1848295 - DNA, 15 bp, Homo sapiens
aatacaaaaatcagc

SEQ ID NO: 1848296 - DNA, 15 bp, Homo sapiens
atacaaaaatcagcc

SEQ ID NO: 1848297 - DNA, 15 bp, Homo sapiens
tacaaaaatcagcct

SEQ ID NO: 1848298 - DNA, 15 bp, Homo sapiens
acaaaaatcagcctg

SEQ ID NO: 1848299 - DNA, 15 bp, Homo sapiens
caaaaatcagcctgg

SEQ ID NO: 1848300 - DNA, 15 bp, Homo sapiens
aaaaatcagcctggt

SEQ ID NO: 1848301 - DNA, 15 bp, Homo sapiens
aaaatcagcctggtg

SEQ ID NO: 1848302 - DNA, 15 bp, Homo sapiens
aaatcagcctggtgt

SEQ ID NO: 1848303 - DNA, 15 bp, Homo sapiens
aatcagcctggtgtg

SEQ ID NO: 1848304 - DNA, 15 bp, Homo sapiens
atcagcctggtgtgg

SEQ ID NO: 1848305 - DNA, 15 bp, Homo sapiens
tcagcctggtgtggt

SEQ ID NO: 1848306 - DNA, 15 bp, Homo sapiens
cagcctggtgtggtg

SEQ ID NO: 1848307 - DNA, 15 bp, Homo sapiens
agcctggtgtggtgg

SEQ ID NO: 1848308 - DNA, 15 bp, Homo sapiens
cctggtgtggtggca

SEQ ID NO: 1848309 - DNA, 15 bp, Homo sapiens
ctggtgtggtggcac

SEQ ID NO: 1848310 - DNA, 15 bp, Homo sapiens
tggtgtggtggcacg

SEQ ID NO: 1848311 - DNA, 15 bp, Homo sapiens
ggtgtggtggcacgt

SEQ ID NO: 1848312 - DNA, 15 bp, Homo sapiens
gtgtggtggcacgtg

SEQ ID NO: 1848313 - DNA, 15 bp, Homo sapiens
tgtggtggcacgtgc

SEQ ID NO: 1848314 - DNA, 15 bp, Homo sapiens
gtggtggcacgtgcc

SEQ ID NO: 1848315 - DNA, 15 bp, Homo sapiens
tggtggcacgtgcct

SEQ ID NO: 1848316 - DNA, 15 bp, Homo sapiens
gtggcacgtgcctgc

SEQ ID NO: 1848317 - DNA, 15 bp, Homo sapiens
tggcacgtgcctgca

SEQ ID NO: 1848318 - DNA, 15 bp, Homo sapiens
ggcacgtgcctgcaa

SEQ ID NO: 1848319 - DNA, 15 bp, Homo sapiens
gcacgtgcctgcaat

SEQ ID NO: 1848320 - DNA, 15 bp, Homo sapiens
cacgtgcctgcaatc

SEQ ID NO: 1848321 - DNA, 15 bp, Homo sapiens
acgtgcctgcaatcc

SEQ ID NO: 1848322 - DNA, 15 bp, Homo sapiens
cgtgcctgcaatccc

SEQ ID NO: 1848323 - DNA, 15 bp, Homo sapiens
gtgcctgcaatccca

SEQ ID NO: 1848324 - DNA, 15 bp, Homo sapiens
cctgcaatcccagct

SEQ ID NO: 1848325 - DNA, 15 bp, Homo sapiens
ctgcaatcccagcta

SEQ ID NO: 1848326 - DNA, 15 bp, Homo sapiens
tgcaatcccagctac

SEQ ID NO: 1848327 - DNA, 15 bp, Homo sapiens
gcaatcccagctact

SEQ ID NO: 1848328 - DNA, 15 bp, Homo sapiens
caatcccagctactc

SEQ ID NO: 1848329 - DNA, 15 bp, Homo sapiens
ctgaggcagaagaac

SEQ ID NO: 1848330 - DNA, 15 bp, Homo sapiens
tgaggcagaagaacc

SEQ ID NO: 1848331 - DNA, 15 bp, Homo sapiens
gaggcagaagaaccg

SEQ ID NO: 1848332 - DNA, 15 bp, Homo sapiens
aggcagaagaaccgc

SEQ ID NO: 1848333 - DNA, 15 bp, Homo sapiens
ggcagaagaaccgct

SEQ ID NO: 1848334 - DNA, 15 bp, Homo sapiens
gcagaagaaccgctt

SEQ ID NO: 1848335 - DNA, 15 bp, Homo sapiens
cagaagaaccgcttg

SEQ ID NO: 1848336 - DNA, 15 bp, Homo sapiens
agaagaaccgcttga

SEQ ID NO: 1848337 - DNA, 15 bp, Homo sapiens
gaagaaccgcttgaa

SEQ ID NO: 1848338 - DNA, 15 bp, Homo sapiens
aagaaccgcttgaac

SEQ ID NO: 1848339 - DNA, 15 bp, Homo sapiens
agaaccgcttgaacc

SEQ ID NO: 1848340 - DNA, 15 bp, Homo sapiens
gaaccgcttgaaccc

SEQ ID NO: 1848341 - DNA, 15 bp, Homo sapiens
aaccgcttgaacccg

SEQ ID NO: 1848342 - DNA, 15 bp, Homo sapiens
accgcttgaacccgg

SEQ ID NO: 1848343 - DNA, 15 bp, Homo sapiens
ccgcttgaacccggg

SEQ ID NO: 1848344 - DNA, 15 bp, Homo sapiens
aacccgggaggcagg

SEQ ID NO: 1848345 - DNA, 15 bp, Homo sapiens
acccgggaggcaggg

SEQ ID NO: 1848346 - DNA, 15 bp, Homo sapiens
cccgggaggcagggg

SEQ ID NO: 1848347 - DNA, 15 bp, Homo sapiens
ccgggaggcaggggt

SEQ ID NO: 1848348 - DNA, 15 bp, Homo sapiens
cgggaggcaggggtt

SEQ ID NO: 1848349 - DNA, 15 bp, Homo sapiens
gggaggcaggggttg

SEQ ID NO: 1848350 - DNA, 15 bp, Homo sapiens
ggaggcaggggttgc

SEQ ID NO: 1848351 - DNA, 15 bp, Homo sapiens
gaggcaggggttgca

SEQ ID NO: 1848352 - DNA, 15 bp, Homo sapiens
aggcaggggttgcag

SEQ ID NO: 1848353 - DNA, 15 bp, Homo sapiens
ggcaggggttgcagt

SEQ ID NO: 1848354 - DNA, 15 bp, Homo sapiens
gcaggggttgcagtg

SEQ ID NO: 1848355 - DNA, 15 bp, Homo sapiens
caggggttgcagtga

SEQ ID NO: 1848356 - DNA, 15 bp, Homo sapiens
aggggttgcagtgat

SEQ ID NO: 1848357 - DNA, 15 bp, Homo sapiens
ggggttgcagtgatc

SEQ ID NO: 1848358 - DNA, 15 bp, Homo sapiens
gggttgcagtgatct

SEQ ID NO: 1848359 - DNA, 15 bp, Homo sapiens
ggttgcagtgatctg

SEQ ID NO: 1848360 - DNA, 15 bp, Homo sapiens
gttgcagtgatctga

SEQ ID NO: 1848361 - DNA, 15 bp, Homo sapiens
ttgcagtgatctgag

SEQ ID NO: 1848362 - DNA, 15 bp, Homo sapiens
tgcagtgatctgaga

SEQ ID NO: 1848363 - DNA, 15 bp, Homo sapiens
gcagtgatctgagat

SEQ ID NO: 1848364 - DNA, 15 bp, Homo sapiens
cagtgatctgagatc

SEQ ID NO: 1848365 - DNA, 15 bp, Homo sapiens
agtgatctgagatcc

SEQ ID NO: 1848366 - DNA, 15 bp, Homo sapiens
gtgatctgagatcca

SEQ ID NO: 1848367 - DNA, 15 bp, Homo sapiens
tgatctgagatccag

SEQ ID NO: 1848368 - DNA, 15 bp, Homo sapiens
gatctgagatccagc

SEQ ID NO: 1848369 - DNA, 15 bp, Homo sapiens
atctgagatccagcc

SEQ ID NO: 1848370 - DNA, 15 bp, Homo sapiens
tctgagatccagcct

SEQ ID NO: 1848371 - DNA, 15 bp, Homo sapiens
ctgagatccagcctg

SEQ ID NO: 1848372 - DNA, 15 bp, Homo sapiens
tgagatccagcctgg

SEQ ID NO: 1848373 - DNA, 15 bp, Homo sapiens
gagatccagcctggg

SEQ ID NO: 1848374 - DNA, 15 bp, Homo sapiens
agatccagcctgggc

SEQ ID NO: 1848375 - DNA, 15 bp, Homo sapiens
gatccagcctgggcg

SEQ ID NO: 1848376 - DNA, 15 bp, Homo sapiens
atccagcctgggcga

SEQ ID NO: 1848377 - DNA, 15 bp, Homo sapiens
gcctgggcgacagaa

SEQ ID NO: 1848378 - DNA, 15 bp, Homo sapiens
cctgggcgacagaaa

SEQ ID NO: 1848379 - DNA, 15 bp, Homo sapiens
ctgggcgacagaaat

SEQ ID NO: 1848380 - DNA, 15 bp, Homo sapiens
tgggcgacagaaatt

SEQ ID NO: 1848381 - DNA, 15 bp, Homo sapiens
gggcgacagaaattc

SEQ ID NO: 1848382 - DNA, 15 bp, Homo sapiens
ggcgacagaaattct

SEQ ID NO: 1848383 - DNA, 15 bp, Homo sapiens
gcgacagaaattctg

SEQ ID NO: 1848384 - DNA, 15 bp, Homo sapiens
cgacagaaattctgt

SEQ ID NO: 1848385 - DNA, 15 bp, Homo sapiens
gacagaaattctgtc

SEQ ID NO: 1848386 - DNA, 15 bp, Homo sapiens
acagaaattctgtct

SEQ ID NO: 1848387 - DNA, 15 bp, Homo sapiens
cagaaattctgtctc

SEQ ID NO: 1848388 - DNA, 15 bp, Homo sapiens
agaaattctgtctca

SEQ ID NO: 1848389 - DNA, 15 bp, Homo sapiens
gaaattctgtctcaa

SEQ ID NO: 1848390 - DNA, 15 bp, Homo sapiens
aaattctgtctcaaa

SEQ ID NO: 1848391 - DNA, 15 bp, Homo sapiens
aattctgtctcaaaa

SEQ ID NO: 1848392 - DNA, 15 bp, Homo sapiens
attctgtctcaaaac

SEQ ID NO: 1848393 - DNA, 15 bp, Homo sapiens
ttctgtctcaaaaca

SEQ ID NO: 1848394 - DNA, 15 bp, Homo sapiens
tctgtctcaaaacag

SEQ ID NO: 1848395 - DNA, 15 bp, Homo sapiens
ctgtctcaaaacagc

SEQ ID NO: 1848396 - DNA, 15 bp, Homo sapiens
tgtctcaaaacagca

SEQ ID NO: 1848397 - DNA, 15 bp, Homo sapiens
gtctcaaaacagcaa

SEQ ID NO: 1848398 - DNA, 15 bp, Homo sapiens
tctcaaaacagcaac

SEQ ID NO: 1848399 - DNA, 15 bp, Homo sapiens
ctcaaaacagcaaca

SEQ ID NO: 1848400 - DNA, 15 bp, Homo sapiens
tcaaaacagcaacaa

SEQ ID NO: 1848401 - DNA, 15 bp, Homo sapiens
caaaacagcaacaac

SEQ ID NO: 1848402 - DNA, 15 bp, Homo sapiens
aaaacagcaacaaca

SEQ ID NO: 1848403 - DNA, 15 bp, Homo sapiens
aaacagcaacaacaa

SEQ ID NO: 1848404 - DNA, 15 bp, Homo sapiens
aacagcaacaacaaa

SEQ ID NO: 1848405 - DNA, 15 bp, Homo sapiens
acagcaacaacaaaa

SEQ ID NO: 1848406 - DNA, 15 bp, Homo sapiens
cagcaacaacaaaaa

SEQ ID NO: 1848407 - DNA, 15 bp, Homo sapiens
agcaacaacaaaaac

SEQ ID NO: 1848408 - DNA, 15 bp, Homo sapiens
gcaacaacaaaaact

SEQ ID NO: 1848409 - DNA, 15 bp, Homo sapiens
caacaacaaaaacta

SEQ ID NO: 1848410 - DNA, 15 bp, Homo sapiens
aacaacaaaaactat

SEQ ID NO: 1848411 - DNA, 15 bp, Homo sapiens
acaacaaaaactatc

SEQ ID NO: 1848412 - DNA, 15 bp, Homo sapiens
caacaaaaactatca

SEQ ID NO: 1848413 - DNA, 15 bp, Homo sapiens
aacaaaaactatcac

SEQ ID NO: 1848414 - DNA, 15 bp, Homo sapiens
acaaaaactatcact

SEQ ID NO: 1848415 - DNA, 15 bp, Homo sapiens
caaaaactatcactc

SEQ ID NO: 1848416 - DNA, 15 bp, Homo sapiens
aaaaactatcactcc

SEQ ID NO: 1848417 - DNA, 15 bp, Homo sapiens
aaaactatcactcct

SEQ ID NO: 1848418 - DNA, 15 bp, Homo sapiens
aaactatcactcctg

SEQ ID NO: 1848419 - DNA, 15 bp, Homo sapiens
aactatcactcctgc

SEQ ID NO: 1848420 - DNA, 15 bp, Homo sapiens
actatcactcctgcc

SEQ ID NO: 1848421 - DNA, 15 bp, Homo sapiens
ctatcactcctgcca

SEQ ID NO: 1848422 - DNA, 15 bp, Homo sapiens
tatcactcctgccac

SEQ ID NO: 1848423 - DNA, 15 bp, Homo sapiens
atcactcctgccacc

SEQ ID NO: 1848424 - DNA, 15 bp, Homo sapiens
tcactcctgccacca

SEQ ID NO: 1848425 - DNA, 15 bp, Homo sapiens
cactcctgccaccac

SEQ ID NO: 1848426 - DNA, 15 bp, Homo sapiens
actcctgccaccaca

SEQ ID NO: 1848427 - DNA, 15 bp, Homo sapiens
ctcctgccaccacag

SEQ ID NO: 1848428 - DNA, 15 bp, Homo sapiens
tcctgccaccacaga

SEQ ID NO: 1848429 - DNA, 15 bp, Homo sapiens
cctgccaccacagaa

SEQ ID NO: 1848430 - DNA, 15 bp, Homo sapiens
ctgccaccacagaat

SEQ ID NO: 1848431 - DNA, 15 bp, Homo sapiens
tgccaccacagaatc

SEQ ID NO: 1848432 - DNA, 15 bp, Homo sapiens
gccaccacagaatct

SEQ ID NO: 1848433 - DNA, 15 bp, Homo sapiens
ccaccacagaatctc

SEQ ID NO: 1848434 - DNA, 15 bp, Homo sapiens
caccacagaatctcc

SEQ ID NO: 1848435 - DNA, 15 bp, Homo sapiens
accacagaatctccc

SEQ ID NO: 1848436 - DNA, 15 bp, Homo sapiens
ccacagaatctccct

SEQ ID NO: 1848437 - DNA, 15 bp, Homo sapiens
cacagaatctccctt

SEQ ID NO: 1848438 - DNA, 15 bp, Homo sapiens
acagaatctcccttg

SEQ ID NO: 1848439 - DNA, 15 bp, Homo sapiens
cagaatctcccttgg

SEQ ID NO: 1848440 - DNA, 15 bp, Homo sapiens
agaatctcccttggc

SEQ ID NO: 1848441 - DNA, 15 bp, Homo sapiens
gaatctcccttggca

SEQ ID NO: 1848442 - DNA, 15 bp, Homo sapiens
aatctcccttggcag

SEQ ID NO: 1848443 - DNA, 15 bp, Homo sapiens
atctcccttggcagc

SEQ ID NO: 1848444 - DNA, 15 bp, Homo sapiens
tctcccttggcagca

SEQ ID NO: 1848445 - DNA, 15 bp, Homo sapiens
ctcccttggcagcag

SEQ ID NO: 1848446 - DNA, 15 bp, Homo sapiens
tcccttggcagcagg

SEQ ID NO: 1848447 - DNA, 15 bp, Homo sapiens
cccttggcagcaggg

SEQ ID NO: 1848448 - DNA, 15 bp, Homo sapiens
ccttggcagcagggc

SEQ ID NO: 1848449 - DNA, 15 bp, Homo sapiens
cttggcagcagggct

SEQ ID NO: 1848450 - DNA, 15 bp, Homo sapiens
ttggcagcagggctc

SEQ ID NO: 1848451 - DNA, 15 bp, Homo sapiens
tggcagcagggctcg

SEQ ID NO: 1848452 - DNA, 15 bp, Homo sapiens
ggcagcagggctcga

SEQ ID NO: 1848453 - DNA, 15 bp, Homo sapiens
gcagcagggctcgaa

SEQ ID NO: 1848454 - DNA, 15 bp, Homo sapiens
cagcagggctcgaaa

SEQ ID NO: 1848455 - DNA, 15 bp, Homo sapiens
agcagggctcgaaat

SEQ ID NO: 1848456 - DNA, 15 bp, Homo sapiens
gcagggctcgaaata

SEQ ID NO: 1848457 - DNA, 15 bp, Homo sapiens
cagggctcgaaataa

SEQ ID NO: 1848458 - DNA, 15 bp, Homo sapiens
agggctcgaaataac

SEQ ID NO: 1848459 - DNA, 15 bp, Homo sapiens
gggctcgaaataacc

SEQ ID NO: 1848460 - DNA, 15 bp, Homo sapiens
ggctcgaaataacca

SEQ ID NO: 1848461 - DNA, 15 bp, Homo sapiens
gctcgaaataaccaa

SEQ ID NO: 1848462 - DNA, 15 bp, Homo sapiens
ctcgaaataaccaac

SEQ ID NO: 1848463 - DNA, 15 bp, Homo sapiens
tcgaaataaccaaca

SEQ ID NO: 1848464 - DNA, 15 bp, Homo sapiens
cgaaataaccaacac

SEQ ID NO: 1848465 - DNA, 15 bp, Homo sapiens
gaaataaccaacaca

SEQ ID NO: 1848466 - DNA, 15 bp, Homo sapiens
aaataaccaacacac

SEQ ID NO: 1848467 - DNA, 15 bp, Homo sapiens
aataaccaacacacg

SEQ ID NO: 1848468 - DNA, 15 bp, Homo sapiens
ataaccaacacacgg

SEQ ID NO: 1848469 - DNA, 15 bp, Homo sapiens
taaccaacacacggt

SEQ ID NO: 1848470 - DNA, 15 bp, Homo sapiens
aaccaacacacggtc

SEQ ID NO: 1848471 - DNA, 15 bp, Homo sapiens
accaacacacggtcc

SEQ ID NO: 1848472 - DNA, 15 bp, Homo sapiens
ccaacacacggtcct

SEQ ID NO: 1848473 - DNA, 15 bp, Homo sapiens
caacacacggtcctt

SEQ ID NO: 1848474 - DNA, 15 bp, Homo sapiens
aacacacggtccttt

SEQ ID NO: 1848475 - DNA, 15 bp, Homo sapiens
acacacggtcctttg

SEQ ID NO: 1848476 - DNA, 15 bp, Homo sapiens
cacacggtcctttga

SEQ ID NO: 1848477 - DNA, 15 bp, Homo sapiens
acacggtcctttgac

SEQ ID NO: 1848478 - DNA, 15 bp, Homo sapiens
cacggtcctttgacc

SEQ ID NO: 1848479 - DNA, 15 bp, Homo sapiens
acggtcctttgaccg

SEQ ID NO: 1848480 - DNA, 15 bp, Homo sapiens
cggtcctttgaccgg

SEQ ID NO: 1848481 - DNA, 15 bp, Homo sapiens
ggtcctttgaccggg

SEQ ID NO: 1848482 - DNA, 15 bp, Homo sapiens
gtcctttgaccgggt

SEQ ID NO: 1848483 - DNA, 15 bp, Homo sapiens
tcctttgaccgggtc

SEQ ID NO: 1848484 - DNA, 15 bp, Homo sapiens
cctttgaccgggtca

SEQ ID NO: 1848485 - DNA, 15 bp, Homo sapiens
ctttgaccgggtcat

SEQ ID NO: 1848486 - DNA, 15 bp, Homo sapiens
tttgaccgggtcatt

SEQ ID NO: 1848487 - DNA, 15 bp, Homo sapiens
ttgaccgggtcattc

SEQ ID NO: 1848488 - DNA, 15 bp, Homo sapiens
tgaccgggtcattct

SEQ ID NO: 1848489 - DNA, 15 bp, Homo sapiens
gaccgggtcattcta

SEQ ID NO: 1848490 - DNA, 15 bp, Homo sapiens
accgggtcattctac

SEQ ID NO: 1848491 - DNA, 15 bp, Homo sapiens
ccgggtcattctacc

SEQ ID NO: 1848492 - DNA, 15 bp, Homo sapiens
cgggtcattctacct

SEQ ID NO: 1848493 - DNA, 15 bp, Homo sapiens
gggtcattctacctt

SEQ ID NO: 1848494 - DNA, 15 bp, Homo sapiens
ggtcattctaccttc

SEQ ID NO: 1848495 - DNA, 15 bp, Homo sapiens
gtcattctaccttca

SEQ ID NO: 1848496 - DNA, 15 bp, Homo sapiens
tcattctaccttcag

SEQ ID NO: 1848497 - DNA, 15 bp, Homo sapiens
cattctaccttcaga

SEQ ID NO: 1848498 - DNA, 15 bp, Homo sapiens
attctaccttcagaa

SEQ ID NO: 1848499 - DNA, 15 bp, Homo sapiens
ttctaccttcagaaa

SEQ ID NO: 1848500 - DNA, 15 bp, Homo sapiens
tctaccttcagaaat

SEQ ID NO: 1848501 - DNA, 15 bp, Homo sapiens
ctaccttcagaaatc

SEQ ID NO: 1848502 - DNA, 15 bp, Homo sapiens
taccttcagaaatca

SEQ ID NO: 1848503 - DNA, 15 bp, Homo sapiens
accttcagaaatcag

SEQ ID NO: 1848504 - DNA, 15 bp, Homo sapiens
ccttcagaaatcagt

SEQ ID NO: 1848505 - DNA, 15 bp, Homo sapiens
cttcagaaatcagtc

SEQ ID NO: 1848506 - DNA, 15 bp, Homo sapiens
ttcagaaatcagtcc

SEQ ID NO: 1848507 - DNA, 15 bp, Homo sapiens
tcagaaatcagtcct

SEQ ID NO: 1848508 - DNA, 15 bp, Homo sapiens
cagaaatcagtccta

SEQ ID NO: 1848509 - DNA, 15 bp, Homo sapiens
agaaatcagtcctac

SEQ ID NO: 1848510 - DNA, 15 bp, Homo sapiens
gaaatcagtcctaca

SEQ ID NO: 1848511 - DNA, 15 bp, Homo sapiens
aaatcagtcctacag

SEQ ID NO: 1848512 - DNA, 15 bp, Homo sapiens
aatcagtcctacaga

SEQ ID NO: 1848513 - DNA, 15 bp, Homo sapiens
atcagtcctacagat

SEQ ID NO: 1848514 - DNA, 15 bp, Homo sapiens
tcagtcctacagata

SEQ ID NO: 1848515 - DNA, 15 bp, Homo sapiens
cagtcctacagatat

SEQ ID NO: 1848516 - DNA, 15 bp, Homo sapiens
agtcctacagatatc

SEQ ID NO: 1848517 - DNA, 15 bp, Homo sapiens
gtcctacagatatcc

SEQ ID NO: 1848518 - DNA, 15 bp, Homo sapiens
tcctacagatatcct

SEQ ID NO: 1848519 - DNA, 15 bp, Homo sapiens
cctacagatatcctc

SEQ ID NO: 1848520 - DNA, 15 bp, Homo sapiens
ctacagatatcctca

SEQ ID NO: 1848521 - DNA, 15 bp, Homo sapiens
tacagatatcctcac

SEQ ID NO: 1848522 - DNA, 15 bp, Homo sapiens
acagatatcctcaca

SEQ ID NO: 1848523 - DNA, 15 bp, Homo sapiens
cagatatcctcacac

SEQ ID NO: 1848524 - DNA, 15 bp, Homo sapiens
agatatcctcacaca

SEQ ID NO: 1848525 - DNA, 15 bp, Homo sapiens
gatatcctcacacac

SEQ ID NO: 1848526 - DNA, 15 bp, Homo sapiens
atatcctcacacacg

SEQ ID NO: 1848527 - DNA, 15 bp, Homo sapiens
tatcctcacacacgc

SEQ ID NO: 1848528 - DNA, 15 bp, Homo sapiens
atcctcacacacgcg

SEQ ID NO: 1848529 - DNA, 15 bp, Homo sapiens
tcctcacacacgcgc

SEQ ID NO: 1848530 - DNA, 15 bp, Homo sapiens
cctcacacacgcgca

SEQ ID NO: 1848531 - DNA, 15 bp, Homo sapiens
ctcacacacgcgcaa

SEQ ID NO: 1848532 - DNA, 15 bp, Homo sapiens
tcacacacgcgcaaa

SEQ ID NO: 1848533 - DNA, 15 bp, Homo sapiens
cacacacgcgcaaaa

SEQ ID NO: 1848534 - DNA, 15 bp, Homo sapiens
acacacgcgcaaaat

SEQ ID NO: 1848535 - DNA, 15 bp, Homo sapiens
cacacgcgcaaaatg

SEQ ID NO: 1848536 - DNA, 15 bp, Homo sapiens
acacgcgcaaaatgg

SEQ ID NO: 1848537 - DNA, 15 bp, Homo sapiens
cacgcgcaaaatggc

SEQ ID NO: 1848538 - DNA, 15 bp, Homo sapiens
acgcgcaaaatggca

SEQ ID NO: 1848539 - DNA, 15 bp, Homo sapiens
cgcgcaaaatggcat

SEQ ID NO: 1848540 - DNA, 15 bp, Homo sapiens
gcgcaaaatggcata

SEQ ID NO: 1848541 - DNA, 15 bp, Homo sapiens
cgcaaaatggcatat

SEQ ID NO: 1848542 - DNA, 15 bp, Homo sapiens
gcaaaatggcatatg

SEQ ID NO: 1848543 - DNA, 15 bp, Homo sapiens
caaaatggcatatgg

SEQ ID NO: 1848544 - DNA, 15 bp, Homo sapiens
aaaatggcatatgga

SEQ ID NO: 1848545 - DNA, 15 bp, Homo sapiens
aaatggcatatggac

SEQ ID NO: 1848546 - DNA, 15 bp, Homo sapiens
aatggcatatggaca

SEQ ID NO: 1848547 - DNA, 15 bp, Homo sapiens
atggcatatggacag

SEQ ID NO: 1848548 - DNA, 15 bp, Homo sapiens
tggcatatggacagg

SEQ ID NO: 1848549 - DNA, 15 bp, Homo sapiens
ggcatatggacaggg

SEQ ID NO: 1848550 - DNA, 15 bp, Homo sapiens
gcatatggacagggt

SEQ ID NO: 1848551 - DNA, 15 bp, Homo sapiens
catatggacagggtt

SEQ ID NO: 1848552 - DNA, 15 bp, Homo sapiens
atatggacagggttc

SEQ ID NO: 1848553 - DNA, 15 bp, Homo sapiens
tatggacagggttct

SEQ ID NO: 1848554 - DNA, 15 bp, Homo sapiens
atggacagggttctt

SEQ ID NO: 1848555 - DNA, 15 bp, Homo sapiens
tggacagggttcttt

SEQ ID NO: 1848556 - DNA, 15 bp, Homo sapiens
ggacagggttctttc

SEQ ID NO: 1848557 - DNA, 15 bp, Homo sapiens
gacagggttctttct

SEQ ID NO: 1848558 - DNA, 15 bp, Homo sapiens
acagggttctttctt

SEQ ID NO: 1848559 - DNA, 15 bp, Homo sapiens
cagggttctttcttt

SEQ ID NO: 1848560 - DNA, 15 bp, Homo sapiens
agggttctttctttc

SEQ ID NO: 1848561 - DNA, 15 bp, Homo sapiens
gggttctttctttct

SEQ ID NO: 1848562 - DNA, 15 bp, Homo sapiens
ggttctttctttctt

SEQ ID NO: 1848563 - DNA, 15 bp, Homo sapiens
tctttctttctttcc

SEQ ID NO: 1848564 - DNA, 15 bp, Homo sapiens
ttctttctttccttc

SEQ ID NO: 1848565 - DNA, 15 bp, Homo sapiens
tctttctttccttcc

SEQ ID NO: 1848566 - DNA, 15 bp, Homo sapiens
ctttctttccttcct

SEQ ID NO: 1848567 - DNA, 15 bp, Homo sapiens
tccttccttctttct

SEQ ID NO: 1848568 - DNA, 15 bp, Homo sapiens
ccttccttctttctt

SEQ ID NO: 1848569 - DNA, 15 bp, Homo sapiens
cttccttctttcttt

SEQ ID NO: 1848570 - DNA, 15 bp, Homo sapiens
ttccttctttctttc

SEQ ID NO: 1848571 - DNA, 15 bp, Homo sapiens
tccttctttctttct

SEQ ID NO: 1848572 - DNA, 15 bp, Homo sapiens
ccttctttctttctt

SEQ ID NO: 1848573 - DNA, 15 bp, Homo sapiens
cttctttctttcttt

SEQ ID NO: 1848574 - DNA, 15 bp, Homo sapiens
ttcttttctttcttc

SEQ ID NO: 1848575 - DNA, 15 bp, Homo sapiens
tcttttctttcttct

SEQ ID NO: 1848576 - DNA, 15 bp, Homo sapiens
cttttctttcttctt

SEQ ID NO: 1848577 - DNA, 15 bp, Homo sapiens
tttctttcttctttc

SEQ ID NO: 1848578 - DNA, 15 bp, Homo sapiens
ttctttcttctttct

SEQ ID NO: 1848579 - DNA, 15 bp, Homo sapiens
tctttcttctttctt

SEQ ID NO: 1848580 - DNA, 15 bp, Homo sapiens
ctttcttctttcttt

SEQ ID NO: 1848581 - DNA, 15 bp, Homo sapiens
tttcttctttctttc

SEQ ID NO: 1848582 - DNA, 15 bp, Homo sapiens
tcttctttctttctt

SEQ ID NO: 1848583 - DNA, 15 bp, Homo sapiens
ttctttctttcttag

SEQ ID NO: 1848584 - DNA, 15 bp, Homo sapiens
tctttctttcttaga

SEQ ID NO: 1848585 - DNA, 15 bp, Homo sapiens
ctttctttcttagac

SEQ ID NO: 1848586 - DNA, 15 bp, Homo sapiens
tttctttcttagacg

SEQ ID NO: 1848587 - DNA, 15 bp, Homo sapiens
ttctttcttagacga

SEQ ID NO: 1848588 - DNA, 15 bp, Homo sapiens
tctttcttagacgag

SEQ ID NO: 1848589 - DNA, 15 bp, Homo sapiens
ctttcttagacgagt

SEQ ID NO: 1848590 - DNA, 15 bp, Homo sapiens
tttcttagacgagtc

SEQ ID NO: 1848591 - DNA, 15 bp, Homo sapiens
ttcttagacgagtct

SEQ ID NO: 1848592 - DNA, 15 bp, Homo sapiens
tcttagacgagtctc

SEQ ID NO: 1848593 - DNA, 15 bp, Homo sapiens
cttagacgagtctcg

SEQ ID NO: 1848594 - DNA, 15 bp, Homo sapiens
ttagacgagtctcgc

SEQ ID NO: 1848595 - DNA, 15 bp, Homo sapiens
tagacgagtctcgct

SEQ ID NO: 1848596 - DNA, 15 bp, Homo sapiens
agacgagtctcgctc

SEQ ID NO: 1848597 - DNA, 15 bp, Homo sapiens
gacgagtctcgctct

SEQ ID NO: 1848598 - DNA, 15 bp, Homo sapiens
acgagtctcgctctg

SEQ ID NO: 1848599 - DNA, 15 bp, Homo sapiens
cgagtctcgctctgt

SEQ ID NO: 1848600 - DNA, 15 bp, Homo sapiens
actgcaagctctgct

SEQ ID NO: 1848601 - DNA, 15 bp, Homo sapiens
ctgcaagctctgctt

SEQ ID NO: 1848602 - DNA, 15 bp, Homo sapiens
tgcaagctctgcttc

SEQ ID NO: 1848603 - DNA, 15 bp, Homo sapiens
gcaagctctgcttcc

SEQ ID NO: 1848604 - DNA, 15 bp, Homo sapiens
caagctctgcttccc

SEQ ID NO: 1848605 - DNA, 15 bp, Homo sapiens
aagctctgcttcccg

SEQ ID NO: 1848606 - DNA, 15 bp, Homo sapiens
agctctgcttcccgg

SEQ ID NO: 1848607 - DNA, 15 bp, Homo sapiens
gctctgcttcccggg

SEQ ID NO: 1848608 - DNA, 15 bp, Homo sapiens
ctctgcttcccgggt

SEQ ID NO: 1848609 - DNA, 15 bp, Homo sapiens
tctgcttcccgggtt

SEQ ID NO: 1848610 - DNA, 15 bp, Homo sapiens
ctgcttcccgggttc

SEQ ID NO: 1848611 - DNA, 15 bp, Homo sapiens
tgcttcccgggttca

SEQ ID NO: 1848612 - DNA, 15 bp, Homo sapiens
cttcccgggttcacg

SEQ ID NO: 1848613 - DNA, 15 bp, Homo sapiens
ttcccgggttcacgc

SEQ ID NO: 1848614 - DNA, 15 bp, Homo sapiens
ggctaattttttgtt

SEQ ID NO: 1848615 - DNA, 15 bp, Homo sapiens
gctaattttttgtta

SEQ ID NO: 1848616 - DNA, 15 bp, Homo sapiens
ctaattttttgttat

SEQ ID NO: 1848617 - DNA, 15 bp, Homo sapiens
taattttttgttatt

SEQ ID NO: 1848618 - DNA, 15 bp, Homo sapiens
aattttttgttattt

SEQ ID NO: 1848619 - DNA, 15 bp, Homo sapiens
attttttgttatttt

SEQ ID NO: 1848620 - DNA, 15 bp, Homo sapiens
ttttttgttattttt

SEQ ID NO: 1848621 - DNA, 15 bp, Homo sapiens
tttttgttattttta

SEQ ID NO: 1848622 - DNA, 15 bp, Homo sapiens
ttttgttatttttag

SEQ ID NO: 1848623 - DNA, 15 bp, Homo sapiens
tttgttatttttagt

SEQ ID NO: 1848624 - DNA, 15 bp, Homo sapiens
ttgttatttttagta

SEQ ID NO: 1848625 - DNA, 15 bp, Homo sapiens
tgttatttttagtag

SEQ ID NO: 1848626 - DNA, 15 bp, Homo sapiens
gttatttttagtaga

SEQ ID NO: 1848627 - DNA, 15 bp, Homo sapiens
cgtgttagccaggaa

SEQ ID NO: 1848628 - DNA, 15 bp, Homo sapiens
gtgttagccaggaag

SEQ ID NO: 1848629 - DNA, 15 bp, Homo sapiens
tgttagccaggaagg

SEQ ID NO: 1848630 - DNA, 15 bp, Homo sapiens
gttagccaggaaggt

SEQ ID NO: 1848631 - DNA, 15 bp, Homo sapiens
ttagccaggaaggtc

SEQ ID NO: 1848632 - DNA, 15 bp, Homo sapiens
tagccaggaaggtct

SEQ ID NO: 1848633 - DNA, 15 bp, Homo sapiens
agccaggaaggtctc

SEQ ID NO: 1848634 - DNA, 15 bp, Homo sapiens
gccaggaaggtctcg

SEQ ID NO: 1848635 - DNA, 15 bp, Homo sapiens
ccaggaaggtctcga

SEQ ID NO: 1848636 - DNA, 15 bp, Homo sapiens
caggaaggtctcgat

SEQ ID NO: 1848637 - DNA, 15 bp, Homo sapiens
aggaaggtctcgatc

SEQ ID NO: 1848638 - DNA, 15 bp, Homo sapiens
ggaaggtctcgatct

SEQ ID NO: 1848639 - DNA, 15 bp, Homo sapiens
gaaggtctcgatctc

SEQ ID NO: 1848640 - DNA, 15 bp, Homo sapiens
aaggtctcgatctcc

SEQ ID NO: 1848641 - DNA, 15 bp, Homo sapiens
aggtctcgatctcct

SEQ ID NO: 1848642 - DNA, 15 bp, Homo sapiens
gtgtggaccagtccc

SEQ ID NO: 1848643 - DNA, 15 bp, Homo sapiens
tgtggaccagtcccg

SEQ ID NO: 1848644 - DNA, 15 bp, Homo sapiens
gtggaccagtcccgg

SEQ ID NO: 1848645 - DNA, 15 bp, Homo sapiens
tggaccagtcccgga

SEQ ID NO: 1848646 - DNA, 15 bp, Homo sapiens
ggaccagtcccggac

SEQ ID NO: 1848647 - DNA, 15 bp, Homo sapiens
gaccagtcccggaca

SEQ ID NO: 1848648 - DNA, 15 bp, Homo sapiens
accagtcccggacag

SEQ ID NO: 1848649 - DNA, 15 bp, Homo sapiens
ccagtcccggacaga

SEQ ID NO: 1848650 - DNA, 15 bp, Homo sapiens
cagtcccggacagat

SEQ ID NO: 1848651 - DNA, 15 bp, Homo sapiens
agtcccggacagatg

SEQ ID NO: 1848652 - DNA, 15 bp, Homo sapiens
gtcccggacagatgc

SEQ ID NO: 1848653 - DNA, 15 bp, Homo sapiens
tcccggacagatgct

SEQ ID NO: 1848654 - DNA, 15 bp, Homo sapiens
cccggacagatgctg

SEQ ID NO: 1848655 - DNA, 15 bp, Homo sapiens
ccggacagatgctgg

SEQ ID NO: 1848656 - DNA, 15 bp, Homo sapiens
cggacagatgctggg

SEQ ID NO: 1848657 - DNA, 15 bp, Homo sapiens
ggacagatgctgggt

SEQ ID NO: 1848658 - DNA, 15 bp, Homo sapiens
gacagatgctgggtg

SEQ ID NO: 1848659 - DNA, 15 bp, Homo sapiens
acagatgctgggtgg

SEQ ID NO: 1848660 - DNA, 15 bp, Homo sapiens
cagatgctgggtggt

SEQ ID NO: 1848661 - DNA, 15 bp, Homo sapiens
agatgctgggtggtt

SEQ ID NO: 1848662 - DNA, 15 bp, Homo sapiens
gatgctgggtggttg

SEQ ID NO: 1848663 - DNA, 15 bp, Homo sapiens
atgctgggtggttgt

SEQ ID NO: 1848664 - DNA, 15 bp, Homo sapiens
tgctgggtggttgtg

SEQ ID NO: 1848665 - DNA, 15 bp, Homo sapiens
gctgggtggttgtgg

SEQ ID NO: 1848666 - DNA, 15 bp, Homo sapiens
ctgggtggttgtggt

SEQ ID NO: 1848667 - DNA, 15 bp, Homo sapiens
tgggtggttgtggtg

SEQ ID NO: 1848668 - DNA, 15 bp, Homo sapiens
gggtggttgtggtgg

SEQ ID NO: 1848669 - DNA, 15 bp, Homo sapiens
ggtggttgtggtggg

SEQ ID NO: 1848670 - DNA, 15 bp, Homo sapiens
gtggttgtggtgggt

SEQ ID NO: 1848671 - DNA, 15 bp, Homo sapiens
tggttgtggtgggtg

SEQ ID NO: 1848672 - DNA, 15 bp, Homo sapiens
ggttgtggtgggtga

SEQ ID NO: 1848673 - DNA, 15 bp, Homo sapiens
gttgtggtgggtgag

SEQ ID NO: 1848674 - DNA, 15 bp, Homo sapiens
ttgtggtgggtgaga

SEQ ID NO: 1848675 - DNA, 15 bp, Homo sapiens
tgtggtgggtgagac

SEQ ID NO: 1848676 - DNA, 15 bp, Homo sapiens
gtggtgggtgagact

SEQ ID NO: 1848677 - DNA, 15 bp, Homo sapiens
tggtgggtgagactg

SEQ ID NO: 1848678 - DNA, 15 bp, Homo sapiens
ggtgggtgagactgg

SEQ ID NO: 1848679 - DNA, 15 bp, Homo sapiens
gtgggtgagactgga

SEQ ID NO: 1848680 - DNA, 15 bp, Homo sapiens
tgggtgagactggag

SEQ ID NO: 1848681 - DNA, 15 bp, Homo sapiens
gggtgagactggaga

SEQ ID NO: 1848682 - DNA, 15 bp, Homo sapiens
ggtgagactggagaa

SEQ ID NO: 1848683 - DNA, 15 bp, Homo sapiens
gtgagactggagaaa

SEQ ID NO: 1848684 - DNA, 15 bp, Homo sapiens
tgagactggagaaaa

SEQ ID NO: 1848685 - DNA, 15 bp, Homo sapiens
gagactggagaaaag

SEQ ID NO: 1848686 - DNA, 15 bp, Homo sapiens
agactggagaaaagc

SEQ ID NO: 1848687 - DNA, 15 bp, Homo sapiens
gactggagaaaagca

SEQ ID NO: 1848688 - DNA, 15 bp, Homo sapiens
actggagaaaagcag

SEQ ID NO: 1848689 - DNA, 15 bp, Homo sapiens
ctggagaaaagcaga

SEQ ID NO: 1848690 - DNA, 15 bp, Homo sapiens
tggagaaaagcagat

SEQ ID NO: 1848691 - DNA, 15 bp, Homo sapiens
ggagaaaagcagata

SEQ ID NO: 1848692 - DNA, 15 bp, Homo sapiens
gagaaaagcagataa

SEQ ID NO: 1848693 - DNA, 15 bp, Homo sapiens
agaaaagcagataag

SEQ ID NO: 1848694 - DNA, 15 bp, Homo sapiens
gaaaagcagataagt

SEQ ID NO: 1848695 - DNA, 15 bp, Homo sapiens
aaaagcagataagtg

SEQ ID NO: 1848696 - DNA, 15 bp, Homo sapiens
aaagcagataagtgg

SEQ ID NO: 1848697 - DNA, 15 bp, Homo sapiens
aagcagataagtgga

SEQ ID NO: 1848698 - DNA, 15 bp, Homo sapiens
agcagataagtggag

SEQ ID NO: 1848699 - DNA, 15 bp, Homo sapiens
gcagataagtggaga

SEQ ID NO: 1848700 - DNA, 15 bp, Homo sapiens
cagataagtggagag

SEQ ID NO: 1848701 - DNA, 15 bp, Homo sapiens
agataagtggagagg

SEQ ID NO: 1848702 - DNA, 15 bp, Homo sapiens
gataagtggagaggc

SEQ ID NO: 1848703 - DNA, 15 bp, Homo sapiens
ataagtggagaggca

SEQ ID NO: 1848704 - DNA, 15 bp, Homo sapiens
taagtggagaggcat

SEQ ID NO: 1848705 - DNA, 15 bp, Homo sapiens
aagtggagaggcatt

SEQ ID NO: 1848706 - DNA, 15 bp, Homo sapiens
agtggagaggcattt

SEQ ID NO: 1848707 - DNA, 15 bp, Homo sapiens
gtggagaggcatttt

SEQ ID NO: 1848708 - DNA, 15 bp, Homo sapiens
tggagaggcattttg

SEQ ID NO: 1848709 - DNA, 15 bp, Homo sapiens
ggagaggcattttgg

SEQ ID NO: 1848710 - DNA, 15 bp, Homo sapiens
gagaggcattttgga

SEQ ID NO: 1848711 - DNA, 15 bp, Homo sapiens
agaggcattttggag

SEQ ID NO: 1848712 - DNA, 15 bp, Homo sapiens
gaggcattttggaga

SEQ ID NO: 1848713 - DNA, 15 bp, Homo sapiens
aggcattttggagat

SEQ ID NO: 1848714 - DNA, 15 bp, Homo sapiens
ggcattttggagata

SEQ ID NO: 1848715 - DNA, 15 bp, Homo sapiens
gcattttggagataa

SEQ ID NO: 1848716 - DNA, 15 bp, Homo sapiens
cattttggagataaa

SEQ ID NO: 1848717 - DNA, 15 bp, Homo sapiens
attttggagataaaa

SEQ ID NO: 1848718 - DNA, 15 bp, Homo sapiens
ttttggagataaaat

SEQ ID NO: 1848719 - DNA, 15 bp, Homo sapiens
tttggagataaaatg

SEQ ID NO: 1848720 - DNA, 15 bp, Homo sapiens
ttggagataaaatgg

SEQ ID NO: 1848721 - DNA, 15 bp, Homo sapiens
tggagataaaatgga

SEQ ID NO: 1848722 - DNA, 15 bp, Homo sapiens
ggagataaaatggat

SEQ ID NO: 1848723 - DNA, 15 bp, Homo sapiens
gagataaaatggata

SEQ ID NO: 1848724 - DNA, 15 bp, Homo sapiens
agataaaatggatag

SEQ ID NO: 1848725 - DNA, 15 bp, Homo sapiens
gataaaatggatagg

SEQ ID NO: 1848726 - DNA, 15 bp, Homo sapiens
ataaaatggataggc

SEQ ID NO: 1848727 - DNA, 15 bp, Homo sapiens
taaaatggataggct

SEQ ID NO: 1848728 - DNA, 15 bp, Homo sapiens
aaaatggataggctt

SEQ ID NO: 1848729 - DNA, 15 bp, Homo sapiens
aaatggataggcttt

SEQ ID NO: 1848730 - DNA, 15 bp, Homo sapiens
aatggataggctttg

SEQ ID NO: 1848731 - DNA, 15 bp, Homo sapiens
atggataggctttgg

SEQ ID NO: 1848732 - DNA, 15 bp, Homo sapiens
tggataggctttggg

SEQ ID NO: 1848733 - DNA, 15 bp, Homo sapiens
ggataggctttgggg

SEQ ID NO: 1848734 - DNA, 15 bp, Homo sapiens
gataggctttggggc

SEQ ID NO: 1848735 - DNA, 15 bp, Homo sapiens
ataggctttggggct

SEQ ID NO: 1848736 - DNA, 15 bp, Homo sapiens
taggctttggggctg

SEQ ID NO: 1848737 - DNA, 15 bp, Homo sapiens
aggctttggggctgg

SEQ ID NO: 1848738 - DNA, 15 bp, Homo sapiens
ggctttggggctggt

SEQ ID NO: 1848739 - DNA, 15 bp, Homo sapiens
gctttggggctggta

SEQ ID NO: 1848740 - DNA, 15 bp, Homo sapiens
ctttggggctggtag

SEQ ID NO: 1848741 - DNA, 15 bp, Homo sapiens
tttggggctggtagg

SEQ ID NO: 1848742 - DNA, 15 bp, Homo sapiens
ttggggctggtagga

SEQ ID NO: 1848743 - DNA, 15 bp, Homo sapiens
tggggctggtaggat

SEQ ID NO: 1848744 - DNA, 15 bp, Homo sapiens
ggggctggtaggata

SEQ ID NO: 1848745 - DNA, 15 bp, Homo sapiens
gggctggtaggataa

SEQ ID NO: 1848746 - DNA, 15 bp, Homo sapiens
ggctggtaggataag

SEQ ID NO: 1848747 - DNA, 15 bp, Homo sapiens
gctggtaggataagg

SEQ ID NO: 1848748 - DNA, 15 bp, Homo sapiens
ctggtaggataaggg

SEQ ID NO: 1848749 - DNA, 15 bp, Homo sapiens
tggtaggataagggg

SEQ ID NO: 1848750 - DNA, 15 bp, Homo sapiens
ggtaggataaggggt

SEQ ID NO: 1848751 - DNA, 15 bp, Homo sapiens
gtaggataaggggta

SEQ ID NO: 1848752 - DNA, 15 bp, Homo sapiens
taggataaggggtaa

SEQ ID NO: 1848753 - DNA, 15 bp, Homo sapiens
aggataaggggtaag

SEQ ID NO: 1848754 - DNA, 15 bp, Homo sapiens
ggataaggggtaagg

SEQ ID NO: 1848755 - DNA, 15 bp, Homo sapiens
gataaggggtaaggg

SEQ ID NO: 1848756 - DNA, 15 bp, Homo sapiens
ataaggggtaaggga

SEQ ID NO: 1848757 - DNA, 15 bp, Homo sapiens
taaggggtaagggag

SEQ ID NO: 1848758 - DNA, 15 bp, Homo sapiens
aaggggtaagggaga

SEQ ID NO: 1848759 - DNA, 15 bp, Homo sapiens
aggggtaagggagag

SEQ ID NO: 1848760 - DNA, 15 bp, Homo sapiens
ggggtaagggagagg

SEQ ID NO: 1848761 - DNA, 15 bp, Homo sapiens
gggtaagggagaggt

SEQ ID NO: 1848762 - DNA, 15 bp, Homo sapiens
ggtaagggagaggtt

SEQ ID NO: 1848763 - DNA, 15 bp, Homo sapiens
gtaagggagaggttt

SEQ ID NO: 1848764 - DNA, 15 bp, Homo sapiens
taagggagaggtttg

SEQ ID NO: 1848765 - DNA, 15 bp, Homo sapiens
aagggagaggtttgt

SEQ ID NO: 1848766 - DNA, 15 bp, Homo sapiens
agggagaggtttgtt

SEQ ID NO: 1848767 - DNA, 15 bp, Homo sapiens
gggagaggtttgttg

SEQ ID NO: 1848768 - DNA, 15 bp, Homo sapiens
ggagaggtttgttgt

SEQ ID NO: 1848769 - DNA, 15 bp, Homo sapiens
gagaggtttgttgtc

SEQ ID NO: 1848770 - DNA, 15 bp, Homo sapiens
agaggtttgttgtcc

SEQ ID NO: 1848771 - DNA, 15 bp, Homo sapiens
gaggtttgttgtcct

SEQ ID NO: 1848772 - DNA, 15 bp, Homo sapiens
aggtttgttgtcctt

SEQ ID NO: 1848773 - DNA, 15 bp, Homo sapiens
ggtttgttgtccttg

SEQ ID NO: 1848774 - DNA, 15 bp, Homo sapiens
gtttgttgtccttgg

SEQ ID NO: 1848775 - DNA, 15 bp, Homo sapiens
tttgttgtccttggt

SEQ ID NO: 1848776 - DNA, 15 bp, Homo sapiens
ttgttgtccttggtt

SEQ ID NO: 1848777 - DNA, 15 bp, Homo sapiens
tgttgtccttggttt

SEQ ID NO: 1848778 - DNA, 15 bp, Homo sapiens
gttgtccttggtttc

SEQ ID NO: 1848779 - DNA, 15 bp, Homo sapiens
ttgtccttggtttct

SEQ ID NO: 1848780 - DNA, 15 bp, Homo sapiens
tgtccttggtttctg

SEQ ID NO: 1848781 - DNA, 15 bp, Homo sapiens
gtccttggtttctgg

SEQ ID NO: 1848782 - DNA, 15 bp, Homo sapiens
tccttggtttctggt

SEQ ID NO: 1848783 - DNA, 15 bp, Homo sapiens
ccttggtttctggtt

SEQ ID NO: 1848784 - DNA, 15 bp, Homo sapiens
cttggtttctggttg

SEQ ID NO: 1848785 - DNA, 15 bp, Homo sapiens
ttggtttctggttgt

SEQ ID NO: 1848786 - DNA, 15 bp, Homo sapiens
tggtttctggttgtg

SEQ ID NO: 1848787 - DNA, 15 bp, Homo sapiens
ggtttctggttgtga

SEQ ID NO: 1848788 - DNA, 15 bp, Homo sapiens
gtttctggttgtgat

SEQ ID NO: 1848789 - DNA, 15 bp, Homo sapiens
tttctggttgtgatc

SEQ ID NO: 1848790 - DNA, 15 bp, Homo sapiens
ttctggttgtgatca

SEQ ID NO: 1848791 - DNA, 15 bp, Homo sapiens
tctggttgtgatcac

SEQ ID NO: 1848792 - DNA, 15 bp, Homo sapiens
ctggttgtgatcact

SEQ ID NO: 1848793 - DNA, 15 bp, Homo sapiens
tggttgtgatcactg

SEQ ID NO: 1848794 - DNA, 15 bp, Homo sapiens
ggttgtgatcactgg

SEQ ID NO: 1848795 - DNA, 15 bp, Homo sapiens
gttgtgatcactgga

SEQ ID NO: 1848796 - DNA, 15 bp, Homo sapiens
ttgtgatcactggat

SEQ ID NO: 1848797 - DNA, 15 bp, Homo sapiens
tgtgatcactggatg

SEQ ID NO: 1848798 - DNA, 15 bp, Homo sapiens
gtgatcactggatgg

SEQ ID NO: 1848799 - DNA, 15 bp, Homo sapiens
tgatcactggatggt

SEQ ID NO: 1848800 - DNA, 15 bp, Homo sapiens
gatcactggatggtg

SEQ ID NO: 1848801 - DNA, 15 bp, Homo sapiens
atcactggatggtga

SEQ ID NO: 1848802 - DNA, 15 bp, Homo sapiens
tcactggatggtgag

SEQ ID NO: 1848803 - DNA, 15 bp, Homo sapiens
cactggatggtgagg

SEQ ID NO: 1848804 - DNA, 15 bp, Homo sapiens
actggatggtgagga

SEQ ID NO: 1848805 - DNA, 15 bp, Homo sapiens
ctggatggtgaggag

SEQ ID NO: 1848806 - DNA, 15 bp, Homo sapiens
tggatggtgaggagt

SEQ ID NO: 1848807 - DNA, 15 bp, Homo sapiens
ggatggtgaggagtg

SEQ ID NO: 1848808 - DNA, 15 bp, Homo sapiens
gatggtgaggagtga

SEQ ID NO: 1848809 - DNA, 15 bp, Homo sapiens
atggtgaggagtgag

SEQ ID NO: 1848810 - DNA, 15 bp, Homo sapiens
tggtgaggagtgagc

SEQ ID NO: 1848811 - DNA, 15 bp, Homo sapiens
ggtgaggagtgagct

SEQ ID NO: 1848812 - DNA, 15 bp, Homo sapiens
gtgaggagtgagctt

SEQ ID NO: 1848813 - DNA, 15 bp, Homo sapiens
tgaggagtgagcttt

SEQ ID NO: 1848814 - DNA, 15 bp, Homo sapiens
gaggagtgagctttc

SEQ ID NO: 1848815 - DNA, 15 bp, Homo sapiens
aggagtgagctttct

SEQ ID NO: 1848816 - DNA, 15 bp, Homo sapiens
ggagtgagctttctg

SEQ ID NO: 1848817 - DNA, 15 bp, Homo sapiens
gagtgagctttctga

SEQ ID NO: 1848818 - DNA, 15 bp, Homo sapiens
agtgagctttctgag

SEQ ID NO: 1848819 - DNA, 15 bp, Homo sapiens
gtgagctttctgagc

SEQ ID NO: 1848820 - DNA, 15 bp, Homo sapiens
tgagctttctgagcg

SEQ ID NO: 1848821 - DNA, 15 bp, Homo sapiens
gagctttctgagcgt

SEQ ID NO: 1848822 - DNA, 15 bp, Homo sapiens
agctttctgagcgtg

SEQ ID NO: 1848823 - DNA, 15 bp, Homo sapiens
gctttctgagcgtgg

SEQ ID NO: 1848824 - DNA, 15 bp, Homo sapiens
ctttctgagcgtgga

SEQ ID NO: 1848825 - DNA, 15 bp, Homo sapiens
tttctgagcgtggag

SEQ ID NO: 1848826 - DNA, 15 bp, Homo sapiens
ttctgagcgtggagc

SEQ ID NO: 1848827 - DNA, 15 bp, Homo sapiens
tctgagcgtggagct

SEQ ID NO: 1848828 - DNA, 15 bp, Homo sapiens
ctgagcgtggagctc

SEQ ID NO: 1848829 - DNA, 15 bp, Homo sapiens
tgagcgtggagctct

SEQ ID NO: 1848830 - DNA, 15 bp, Homo sapiens
gagcgtggagctctg

SEQ ID NO: 1848831 - DNA, 15 bp, Homo sapiens
agcgtggagctctgg

SEQ ID NO: 1848832 - DNA, 15 bp, Homo sapiens
gcgtggagctctgga

SEQ ID NO: 1848833 - DNA, 15 bp, Homo sapiens
cgtggagctctggag

SEQ ID NO: 1848834 - DNA, 15 bp, Homo sapiens
gtggagctctggagg

SEQ ID NO: 1848835 - DNA, 15 bp, Homo sapiens
tggagctctggagga

SEQ ID NO: 1848836 - DNA, 15 bp, Homo sapiens
ggagctctggaggaa

SEQ ID NO: 1848837 - DNA, 15 bp, Homo sapiens
gagctctggaggaaa

SEQ ID NO: 1848838 - DNA, 15 bp, Homo sapiens
agctctggaggaaaa

SEQ ID NO: 1848839 - DNA, 15 bp, Homo sapiens
gctctggaggaaaag

SEQ ID NO: 1848840 - DNA, 15 bp, Homo sapiens
ctctggaggaaaagc

SEQ ID NO: 1848841 - DNA, 15 bp, Homo sapiens
tctggaggaaaagcc

SEQ ID NO: 1848842 - DNA, 15 bp, Homo sapiens
ctggaggaaaagcct

SEQ ID NO: 1848843 - DNA, 15 bp, Homo sapiens
tggaggaaaagcctg

SEQ ID NO: 1848844 - DNA, 15 bp, Homo sapiens
ggaggaaaagcctgt

SEQ ID NO: 1848845 - DNA, 15 bp, Homo sapiens
gaggaaaagcctgtt

SEQ ID NO: 1848846 - DNA, 15 bp, Homo sapiens
aggaaaagcctgttt

SEQ ID NO: 1848847 - DNA, 15 bp, Homo sapiens
ggaaaagcctgtttg

SEQ ID NO: 1848848 - DNA, 15 bp, Homo sapiens
gaaaagcctgtttgg

SEQ ID NO: 1848849 - DNA, 15 bp, Homo sapiens
aaaagcctgtttggg

SEQ ID NO: 1848850 - DNA, 15 bp, Homo sapiens
aaagcctgtttggga

SEQ ID NO: 1848851 - DNA, 15 bp, Homo sapiens
aagcctgtttgggag

SEQ ID NO: 1848852 - DNA, 15 bp, Homo sapiens
agcctgtttgggagt

SEQ ID NO: 1848853 - DNA, 15 bp, Homo sapiens
gcctgtttgggagtg

SEQ ID NO: 1848854 - DNA, 15 bp, Homo sapiens
cctgtttgggagtgt

SEQ ID NO: 1848855 - DNA, 15 bp, Homo sapiens
ctgtttgggagtgtt

SEQ ID NO: 1848856 - DNA, 15 bp, Homo sapiens
tgtttgggagtgtta

SEQ ID NO: 1848857 - DNA, 15 bp, Homo sapiens
gtttgggagtgttag

SEQ ID NO: 1848858 - DNA, 15 bp, Homo sapiens
tttgggagtgttaga

SEQ ID NO: 1848859 - DNA, 15 bp, Homo sapiens
ttgggagtgttagag

SEQ ID NO: 1848860 - DNA, 15 bp, Homo sapiens
tgggagtgttagagg

SEQ ID NO: 1848861 - DNA, 15 bp, Homo sapiens
gggagtgttagagga

SEQ ID NO: 1848862 - DNA, 15 bp, Homo sapiens
ggagtgttagaggag

SEQ ID NO: 1848863 - DNA, 15 bp, Homo sapiens
gagtgttagaggagt

SEQ ID NO: 1848864 - DNA, 15 bp, Homo sapiens
agtgttagaggagtt

SEQ ID NO: 1848865 - DNA, 15 bp, Homo sapiens
gtgttagaggagttt

SEQ ID NO: 1848866 - DNA, 15 bp, Homo sapiens
tgttagaggagtttg

SEQ ID NO: 1848867 - DNA, 15 bp, Homo sapiens
gttagaggagtttga

SEQ ID NO: 1848868 - DNA, 15 bp, Homo sapiens
ttagaggagtttgaa

SEQ ID NO: 1848869 - DNA, 15 bp, Homo sapiens
tagaggagtttgaac

SEQ ID NO: 1848870 - DNA, 15 bp, Homo sapiens
gaggagtttgaacca

SEQ ID NO: 1848871 - DNA, 15 bp, Homo sapiens
aggagtttgaaccag

SEQ ID NO: 1848872 - DNA, 15 bp, Homo sapiens
ggagtttgaaccaga

SEQ ID NO: 1848873 - DNA, 15 bp, Homo sapiens
gagtttgaaccagag

SEQ ID NO: 1848874 - DNA, 15 bp, Homo sapiens
agtttgaaccagagc

SEQ ID NO: 1848875 - DNA, 15 bp, Homo sapiens
gtttgaaccagagca

SEQ ID NO: 1848876 - DNA, 15 bp, Homo sapiens
tttgaaccagagcaa

SEQ ID NO: 1848877 - DNA, 15 bp, Homo sapiens
ttgaaccagagcaac

SEQ ID NO: 1848878 - DNA, 15 bp, Homo sapiens
tgaaccagagcaact

SEQ ID NO: 1848879 - DNA, 15 bp, Homo sapiens
gaaccagagcaactc

SEQ ID NO: 1848880 - DNA, 15 bp, Homo sapiens
aaccagagcaactcc

SEQ ID NO: 1848881 - DNA, 15 bp, Homo sapiens
accagagcaactcca

SEQ ID NO: 1848882 - DNA, 15 bp, Homo sapiens
ccagagcaactccat

SEQ ID NO: 1848883 - DNA, 15 bp, Homo sapiens
cagagcaactccatc

SEQ ID NO: 1848884 - DNA, 15 bp, Homo sapiens
agagcaactccatct

SEQ ID NO: 1848885 - DNA, 15 bp, Homo sapiens
gagcaactccatctt

SEQ ID NO: 1848886 - DNA, 15 bp, Homo sapiens
agcaactccatcttg

SEQ ID NO: 1848887 - DNA, 15 bp, Homo sapiens
gcaactccatcttga

SEQ ID NO: 1848888 - DNA, 15 bp, Homo sapiens
caactccatcttgaa

SEQ ID NO: 1848889 - DNA, 15 bp, Homo sapiens
aactccatcttgaat

SEQ ID NO: 1848890 - DNA, 15 bp, Homo sapiens
actccatcttgaata

SEQ ID NO: 1848891 - DNA, 15 bp, Homo sapiens
ctccatcttgaatag

SEQ ID NO: 1848892 - DNA, 15 bp, Homo sapiens
tccatcttgaatagg

SEQ ID NO: 1848893 - DNA, 15 bp, Homo sapiens
ccatcttgaataggg

SEQ ID NO: 1848894 - DNA, 15 bp, Homo sapiens
catcttgaatagggg

SEQ ID NO: 1848895 - DNA, 15 bp, Homo sapiens
atcttgaataggggc

SEQ ID NO: 1848896 - DNA, 15 bp, Homo sapiens
tcttgaataggggct

SEQ ID NO: 1848897 - DNA, 15 bp, Homo sapiens
cttgaataggggctg

SEQ ID NO: 1848898 - DNA, 15 bp, Homo sapiens
ttgaataggggctgg

SEQ ID NO: 1848899 - DNA, 15 bp, Homo sapiens
tgaataggggctggg

SEQ ID NO: 1848900 - DNA, 15 bp, Homo sapiens
gaataggggctgggt

SEQ ID NO: 1848901 - DNA, 15 bp, Homo sapiens
aataggggctgggta

SEQ ID NO: 1848902 - DNA, 15 bp, Homo sapiens
ataggggctgggtaa

SEQ ID NO: 1848903 - DNA, 15 bp, Homo sapiens
taggggctgggtaaa

SEQ ID NO: 1848904 - DNA, 15 bp, Homo sapiens
aggggctgggtaaaa

SEQ ID NO: 1848905 - DNA, 15 bp, Homo sapiens
ggggctgggtaaaat

SEQ ID NO: 1848906 - DNA, 15 bp, Homo sapiens
gggctgggtaaaatg

SEQ ID NO: 1848907 - DNA, 15 bp, Homo sapiens
ggctgggtaaaatga

SEQ ID NO: 1848908 - DNA, 15 bp, Homo sapiens
gctgggtaaaatgag

SEQ ID NO: 1848909 - DNA, 15 bp, Homo sapiens
ctgggtaaaatgagg

SEQ ID NO: 1848910 - DNA, 15 bp, Homo sapiens
tgggtaaaatgaggc

SEQ ID NO: 1848911 - DNA, 15 bp, Homo sapiens
gggtaaaatgaggct

SEQ ID NO: 1848912 - DNA, 15 bp, Homo sapiens
ggtaaaatgaggctg

SEQ ID NO: 1848913 - DNA, 15 bp, Homo sapiens
gtaaaatgaggctga

SEQ ID NO: 1848914 - DNA, 15 bp, Homo sapiens
taaaatgaggctgag

SEQ ID NO: 1848915 - DNA, 15 bp, Homo sapiens
aaaatgaggctgaga

SEQ ID NO: 1848916 - DNA, 15 bp, Homo sapiens
aaatgaggctgagac

SEQ ID NO: 1848917 - DNA, 15 bp, Homo sapiens
aatgaggctgagacc

SEQ ID NO: 1848918 - DNA, 15 bp, Homo sapiens
atgaggctgagacct

SEQ ID NO: 1848919 - DNA, 15 bp, Homo sapiens
tgaggctgagaccta

SEQ ID NO: 1848920 - DNA, 15 bp, Homo sapiens
gaggctgagacctac

SEQ ID NO: 1848921 - DNA, 15 bp, Homo sapiens
aggctgagacctact

SEQ ID NO: 1848922 - DNA, 15 bp, Homo sapiens
ggctgagacctactg

SEQ ID NO: 1848923 - DNA, 15 bp, Homo sapiens
gctgagacctactgg

SEQ ID NO: 1848924 - DNA, 15 bp, Homo sapiens
ctgagacctactggc

SEQ ID NO: 1848925 - DNA, 15 bp, Homo sapiens
tgagacctactggct

SEQ ID NO: 1848926 - DNA, 15 bp, Homo sapiens
gagacctactggctg

SEQ ID NO: 1848927 - DNA, 15 bp, Homo sapiens
agacctactggctgc

SEQ ID NO: 1848928 - DNA, 15 bp, Homo sapiens
gacctactggctgca

SEQ ID NO: 1848929 - DNA, 15 bp, Homo sapiens
acctactggctgcat

SEQ ID NO: 1848930 - DNA, 15 bp, Homo sapiens
cctactggctgcatt

SEQ ID NO: 1848931 - DNA, 15 bp, Homo sapiens
ctactggctgcattc

SEQ ID NO: 1848932 - DNA, 15 bp, Homo sapiens
tactggctgcattcc

SEQ ID NO: 1848933 - DNA, 15 bp, Homo sapiens
actggctgcattccc

SEQ ID NO: 1848934 - DNA, 15 bp, Homo sapiens
ctggctgcattccca

SEQ ID NO: 1848935 - DNA, 15 bp, Homo sapiens
tggctgcattcccag

SEQ ID NO: 1848936 - DNA, 15 bp, Homo sapiens
ggctgcattcccaga

SEQ ID NO: 1848937 - DNA, 15 bp, Homo sapiens
gctgcattcccagag

SEQ ID NO: 1848938 - DNA, 15 bp, Homo sapiens
ctgcattcccagagg

SEQ ID NO: 1848939 - DNA, 15 bp, Homo sapiens
tgcattcccagaggg

SEQ ID NO: 1848940 - DNA, 15 bp, Homo sapiens
gcattcccagagggt

SEQ ID NO: 1848941 - DNA, 15 bp, Homo sapiens
cattcccagagggtt

SEQ ID NO: 1848942 - DNA, 15 bp, Homo sapiens
attcccagagggtta

SEQ ID NO: 1848943 - DNA, 15 bp, Homo sapiens
ttcccagagggttaa

SEQ ID NO: 1848944 - DNA, 15 bp, Homo sapiens
tcccagagggttaag

SEQ ID NO: 1848945 - DNA, 15 bp, Homo sapiens
cccagagggttaagg

SEQ ID NO: 1848946 - DNA, 15 bp, Homo sapiens
ccagagggttaaggc

SEQ ID NO: 1848947 - DNA, 15 bp, Homo sapiens
cagagggttaaggca

SEQ ID NO: 1848948 - DNA, 15 bp, Homo sapiens
agagggttaaggcat

SEQ ID NO: 1848949 - DNA, 15 bp, Homo sapiens
gagggttaaggcatt

SEQ ID NO: 1848950 - DNA, 15 bp, Homo sapiens
agggttaaggcattc

SEQ ID NO: 1848951 - DNA, 15 bp, Homo sapiens
gggttaaggcattct

SEQ ID NO: 1848952 - DNA, 15 bp, Homo sapiens
ggttaaggcattcta

SEQ ID NO: 1848953 - DNA, 15 bp, Homo sapiens
gttaaggcattctaa

SEQ ID NO: 1848954 - DNA, 15 bp, Homo sapiens
ttaaggcattctaag

SEQ ID NO: 1848955 - DNA, 15 bp, Homo sapiens
taaggcattctaagt

SEQ ID NO: 1848956 - DNA, 15 bp, Homo sapiens
aaggcattctaagtc

SEQ ID NO: 1848957 - DNA, 15 bp, Homo sapiens
aggcattctaagtca

SEQ ID NO: 1848958 - DNA, 15 bp, Homo sapiens
ggcattctaagtcac

SEQ ID NO: 1848959 - DNA, 15 bp, Homo sapiens
gcattctaagtcaca

SEQ ID NO: 1848960 - DNA, 15 bp, Homo sapiens
cattctaagtcacag

SEQ ID NO: 1848961 - DNA, 15 bp, Homo sapiens
attctaagtcacagg

SEQ ID NO: 1848962 - DNA, 15 bp, Homo sapiens
ttctaagtcacagga

SEQ ID NO: 1848963 - DNA, 15 bp, Homo sapiens
tctaagtcacaggat

SEQ ID NO: 1848964 - DNA, 15 bp, Homo sapiens
ctaagtcacaggatg

SEQ ID NO: 1848965 - DNA, 15 bp, Homo sapiens
taagtcacaggatga

SEQ ID NO: 1848966 - DNA, 15 bp, Homo sapiens
aagtcacaggatgag

SEQ ID NO: 1848967 - DNA, 15 bp, Homo sapiens
agtcacaggatgaga

SEQ ID NO: 1848968 - DNA, 15 bp, Homo sapiens
gtcacaggatgagat

SEQ ID NO: 1848969 - DNA, 15 bp, Homo sapiens
tcacaggatgagata

SEQ ID NO: 1848970 - DNA, 15 bp, Homo sapiens
cacaggatgagatag

SEQ ID NO: 1848971 - DNA, 15 bp, Homo sapiens
acaggatgagatagg

SEQ ID NO: 1848972 - DNA, 15 bp, Homo sapiens
caggatgagatagga

SEQ ID NO: 1848973 - DNA, 15 bp, Homo sapiens
aggatgagataggag

SEQ ID NO: 1848974 - DNA, 15 bp, Homo sapiens
ggatgagataggagg

SEQ ID NO: 1848975 - DNA, 15 bp, Homo sapiens
gatgagataggaggt

SEQ ID NO: 1848976 - DNA, 15 bp, Homo sapiens
atgagataggaggtc

SEQ ID NO: 1848977 - DNA, 15 bp, Homo sapiens
tgagataggaggtcg

SEQ ID NO: 1848978 - DNA, 15 bp, Homo sapiens
gagataggaggtcgg

SEQ ID NO: 1848979 - DNA, 15 bp, Homo sapiens
agataggaggtcggc

SEQ ID NO: 1848980 - DNA, 15 bp, Homo sapiens
gataggaggtcggca

SEQ ID NO: 1848981 - DNA, 15 bp, Homo sapiens
ataggaggtcggcac

SEQ ID NO: 1848982 - DNA, 15 bp, Homo sapiens
taggaggtcggcaca

SEQ ID NO: 1848983 - DNA, 15 bp, Homo sapiens
aggaggtcggcacaa

SEQ ID NO: 1848984 - DNA, 15 bp, Homo sapiens
ggaggtcggcacaag

SEQ ID NO: 1848985 - DNA, 15 bp, Homo sapiens
gaggtcggcacaaga

SEQ ID NO: 1848986 - DNA, 15 bp, Homo sapiens
aggtcggcacaagat

SEQ ID NO: 1848987 - DNA, 15 bp, Homo sapiens
ggtcggcacaagata

SEQ ID NO: 1848988 - DNA, 15 bp, Homo sapiens
gtcggcacaagatac

SEQ ID NO: 1848989 - DNA, 15 bp, Homo sapiens
tcggcacaagataca

SEQ ID NO: 1848990 - DNA, 15 bp, Homo sapiens
cggcacaagatacag

SEQ ID NO: 1848991 - DNA, 15 bp, Homo sapiens
ggcacaagatacagg

SEQ ID NO: 1848992 - DNA, 15 bp, Homo sapiens
gcacaagatacaggt

SEQ ID NO: 1848993 - DNA, 15 bp, Homo sapiens
cacaagatacaggtc

SEQ ID NO: 1848994 - DNA, 15 bp, Homo sapiens
acaagatacaggtca

SEQ ID NO: 1848995 - DNA, 15 bp, Homo sapiens
caagatacaggtcaa

SEQ ID NO: 1848996 - DNA, 15 bp, Homo sapiens
aagatacaggtcaaa

SEQ ID NO: 1848997 - DNA, 15 bp, Homo sapiens
agatacaggtcaaaa

SEQ ID NO: 1848998 - DNA, 15 bp, Homo sapiens
gatacaggtcaaaaa

SEQ ID NO: 1848999 - DNA, 15 bp, Homo sapiens
atacaggtcaaaaat

SEQ ID NO: 1849000 - DNA, 15 bp, Homo sapiens
tacaggtcaaaaata

SEQ ID NO: 1849001 - DNA, 15 bp, Homo sapiens
acaggtcaaaaatac

SEQ ID NO: 1849002 - DNA, 15 bp, Homo sapiens
caggtcaaaaatacc

SEQ ID NO: 1849003 - DNA, 15 bp, Homo sapiens
aggtcaaaaatacct

SEQ ID NO: 1849004 - DNA, 15 bp, Homo sapiens
ggtcaaaaatacctt

SEQ ID NO: 1849005 - DNA, 15 bp, Homo sapiens
gtcaaaaataccttg

SEQ ID NO: 1849006 - DNA, 15 bp, Homo sapiens
tcaaaaataccttgc

SEQ ID NO: 1849007 - DNA, 15 bp, Homo sapiens
caaaaataccttgct

SEQ ID NO: 1849008 - DNA, 15 bp, Homo sapiens
aaaaataccttgctg

SEQ ID NO: 1849009 - DNA, 15 bp, Homo sapiens
aaaataccttgctga

SEQ ID NO: 1849010 - DNA, 15 bp, Homo sapiens
aaataccttgctgat

SEQ ID NO: 1849011 - DNA, 15 bp, Homo sapiens
aataccttgctgata

SEQ ID NO: 1849012 - DNA, 15 bp, Homo sapiens
ataccttgctgataa

SEQ ID NO: 1849013 - DNA, 15 bp, Homo sapiens
taccttgctgataaa

SEQ ID NO: 1849014 - DNA, 15 bp, Homo sapiens
accttgctgataaaa

SEQ ID NO: 1849015 - DNA, 15 bp, Homo sapiens
ccttgctgataaaac

SEQ ID NO: 1849016 - DNA, 15 bp, Homo sapiens
cttgctgataaaaca

SEQ ID NO: 1849017 - DNA, 15 bp, Homo sapiens
ttgctgataaaacag

SEQ ID NO: 1849018 - DNA, 15 bp, Homo sapiens
tgctgataaaacagg

SEQ ID NO: 1849019 - DNA, 15 bp, Homo sapiens
gctgataaaacaggt

SEQ ID NO: 1849020 - DNA, 15 bp, Homo sapiens
ctgataaaacaggtt

SEQ ID NO: 1849021 - DNA, 15 bp, Homo sapiens
tgataaaacaggttg

SEQ ID NO: 1849022 - DNA, 15 bp, Homo sapiens
gataaaacaggttgc

SEQ ID NO: 1849023 - DNA, 15 bp, Homo sapiens
ataaaacaggttgca

SEQ ID NO: 1849024 - DNA, 15 bp, Homo sapiens
taaaacaggttgcag

SEQ ID NO: 1849025 - DNA, 15 bp, Homo sapiens
aaaacaggttgcagt

SEQ ID NO: 1849026 - DNA, 15 bp, Homo sapiens
aaacaggttgcagta

SEQ ID NO: 1849027 - DNA, 15 bp, Homo sapiens
aacaggttgcagtag

SEQ ID NO: 1849028 - DNA, 15 bp, Homo sapiens
acaggttgcagtaga

SEQ ID NO: 1849029 - DNA, 15 bp, Homo sapiens
caggttgcagtagag

SEQ ID NO: 1849030 - DNA, 15 bp, Homo sapiens
aggttgcagtagaga

SEQ ID NO: 1849031 - DNA, 15 bp, Homo sapiens
ggttgcagtagagaa

SEQ ID NO: 1849032 - DNA, 15 bp, Homo sapiens
gttgcagtagagaag

SEQ ID NO: 1849033 - DNA, 15 bp, Homo sapiens
ttgcagtagagaagc

SEQ ID NO: 1849034 - DNA, 15 bp, Homo sapiens
tgcagtagagaagct

SEQ ID NO: 1849035 - DNA, 15 bp, Homo sapiens
gcagtagagaagctg

SEQ ID NO: 1849036 - DNA, 15 bp, Homo sapiens
cagtagagaagctgg

SEQ ID NO: 1849037 - DNA, 15 bp, Homo sapiens
agtagagaagctggc

SEQ ID NO: 1849038 - DNA, 15 bp, Homo sapiens
gtagagaagctggcc

SEQ ID NO: 1849039 - DNA, 15 bp, Homo sapiens
tagagaagctggcca

SEQ ID NO: 1849040 - DNA, 15 bp, Homo sapiens
agagaagctggccaa

SEQ ID NO: 1849041 - DNA, 15 bp, Homo sapiens
gagaagctggccaaa

SEQ ID NO: 1849042 - DNA, 15 bp, Homo sapiens
agaagctggccaaaa

SEQ ID NO: 1849043 - DNA, 15 bp, Homo sapiens
gaagctggccaaaat

SEQ ID NO: 1849044 - DNA, 15 bp, Homo sapiens
aagctggccaaaatc

SEQ ID NO: 1849045 - DNA, 15 bp, Homo sapiens
agctggccaaaatcc

SEQ ID NO: 1849046 - DNA, 15 bp, Homo sapiens
gctggccaaaatcca

SEQ ID NO: 1849047 - DNA, 15 bp, Homo sapiens
ctggccaaaatccac

SEQ ID NO: 1849048 - DNA, 15 bp, Homo sapiens
tggccaaaatccacc

SEQ ID NO: 1849049 - DNA, 15 bp, Homo sapiens
ggccaaaatccacca

SEQ ID NO: 1849050 - DNA, 15 bp, Homo sapiens
gccaaaatccaccaa

SEQ ID NO: 1849051 - DNA, 15 bp, Homo sapiens
ccaaaatccaccaag

SEQ ID NO: 1849052 - DNA, 15 bp, Homo sapiens
caaaatccaccaaga

SEQ ID NO: 1849053 - DNA, 15 bp, Homo sapiens
aaaatccaccaagat

SEQ ID NO: 1849054 - DNA, 15 bp, Homo sapiens
aaatccaccaagatg

SEQ ID NO: 1849055 - DNA, 15 bp, Homo sapiens
aatccaccaagatgg

SEQ ID NO: 1849056 - DNA, 15 bp, Homo sapiens
atccaccaagatggc

SEQ ID NO: 1849057 - DNA, 15 bp, Homo sapiens
tccaccaagatggcg

SEQ ID NO: 1849058 - DNA, 15 bp, Homo sapiens
ccaccaagatggcga

SEQ ID NO: 1849059 - DNA, 15 bp, Homo sapiens
caccaagatggcgac

SEQ ID NO: 1849060 - DNA, 15 bp, Homo sapiens
accaagatggcgaca

SEQ ID NO: 1849061 - DNA, 15 bp, Homo sapiens
ccaagatggcgacaa

SEQ ID NO: 1849062 - DNA, 15 bp, Homo sapiens
caagatggcgacaag

SEQ ID NO: 1849063 - DNA, 15 bp, Homo sapiens
aagatggcgacaaga

SEQ ID NO: 1849064 - DNA, 15 bp, Homo sapiens
agatggcgacaagag

SEQ ID NO: 1849065 - DNA, 15 bp, Homo sapiens
gatggcgacaagagt

SEQ ID NO: 1849066 - DNA, 15 bp, Homo sapiens
atggcgacaagagtg

SEQ ID NO: 1849067 - DNA, 15 bp, Homo sapiens
tggcgacaagagtga

SEQ ID NO: 1849068 - DNA, 15 bp, Homo sapiens
ggcgacaagagtgac

SEQ ID NO: 1849069 - DNA, 15 bp, Homo sapiens
gcgacaagagtgacc

SEQ ID NO: 1849070 - DNA, 15 bp, Homo sapiens
cgacaagagtgacct

SEQ ID NO: 1849071 - DNA, 15 bp, Homo sapiens
gacaagagtgacctc

SEQ ID NO: 1849072 - DNA, 15 bp, Homo sapiens
acaagagtgacctct

SEQ ID NO: 1849073 - DNA, 15 bp, Homo sapiens
caagagtgacctctg

SEQ ID NO: 1849074 - DNA, 15 bp, Homo sapiens
aagagtgacctctgg

SEQ ID NO: 1849075 - DNA, 15 bp, Homo sapiens
agagtgacctctggt

SEQ ID NO: 1849076 - DNA, 15 bp, Homo sapiens
gagtgacctctggtc

SEQ ID NO: 1849077 - DNA, 15 bp, Homo sapiens
agtgacctctggtca

SEQ ID NO: 1849078 - DNA, 15 bp, Homo sapiens
gtgacctctggtcat

SEQ ID NO: 1849079 - DNA, 15 bp, Homo sapiens
tgacctctggtcatc

SEQ ID NO: 1849080 - DNA, 15 bp, Homo sapiens
gacctctggtcatcc

SEQ ID NO: 1849081 - DNA, 15 bp, Homo sapiens
acctctggtcatcct

SEQ ID NO: 1849082 - DNA, 15 bp, Homo sapiens
cctctggtcatcctc

SEQ ID NO: 1849083 - DNA, 15 bp, Homo sapiens
ctctggtcatcctca

SEQ ID NO: 1849084 - DNA, 15 bp, Homo sapiens
tctggtcatcctcac

SEQ ID NO: 1849085 - DNA, 15 bp, Homo sapiens
ctggtcatcctcact

SEQ ID NO: 1849086 - DNA, 15 bp, Homo sapiens
tggtcatcctcactg

SEQ ID NO: 1849087 - DNA, 15 bp, Homo sapiens
ggtcatcctcactgt

SEQ ID NO: 1849088 - DNA, 15 bp, Homo sapiens
gtcatcctcactgtt

SEQ ID NO: 1849089 - DNA, 15 bp, Homo sapiens
tcatcctcactgtta

SEQ ID NO: 1849090 - DNA, 15 bp, Homo sapiens
catcctcactgttac

SEQ ID NO: 1849091 - DNA, 15 bp, Homo sapiens
atcctcactgttaca

SEQ ID NO: 1849092 - DNA, 15 bp, Homo sapiens
tcctcactgttacac

SEQ ID NO: 1849093 - DNA, 15 bp, Homo sapiens
cctcactgttacact

SEQ ID NO: 1849094 - DNA, 15 bp, Homo sapiens
ctcactgttacactc

SEQ ID NO: 1849095 - DNA, 15 bp, Homo sapiens
tcactgttacactcc

SEQ ID NO: 1849096 - DNA, 15 bp, Homo sapiens
cactgttacactccc

SEQ ID NO: 1849097 - DNA, 15 bp, Homo sapiens
actgttacactccca

SEQ ID NO: 1849098 - DNA, 15 bp, Homo sapiens
ctgttacactcccac

SEQ ID NO: 1849099 - DNA, 15 bp, Homo sapiens
tgttacactcccacc

SEQ ID NO: 1849100 - DNA, 15 bp, Homo sapiens
gttacactcccacca

SEQ ID NO: 1849101 - DNA, 15 bp, Homo sapiens
ttacactcccaccag

SEQ ID NO: 1849102 - DNA, 15 bp, Homo sapiens
tacactcccaccagc

SEQ ID NO: 1849103 - DNA, 15 bp, Homo sapiens
acactcccaccagcg

SEQ ID NO: 1849104 - DNA, 15 bp, Homo sapiens
cactcccaccagcgc

SEQ ID NO: 1849105 - DNA, 15 bp, Homo sapiens
actcccaccagcgcc

SEQ ID NO: 1849106 - DNA, 15 bp, Homo sapiens
ctcccaccagcgcca

SEQ ID NO: 1849107 - DNA, 15 bp, Homo sapiens
tcccaccagcgccat

SEQ ID NO: 1849108 - DNA, 15 bp, Homo sapiens
cccaccagcgccatg

SEQ ID NO: 1849109 - DNA, 15 bp, Homo sapiens
ccaccagcgccatga

SEQ ID NO: 1849110 - DNA, 15 bp, Homo sapiens
caccagcgccatgac

SEQ ID NO: 1849111 - DNA, 15 bp, Homo sapiens
accagcgccatgaca

SEQ ID NO: 1849112 - DNA, 15 bp, Homo sapiens
ccagcgccatgacag

SEQ ID NO: 1849113 - DNA, 15 bp, Homo sapiens
cagcgccatgacagt

SEQ ID NO: 1849114 - DNA, 15 bp, Homo sapiens
agcgccatgacagtt

SEQ ID NO: 1849115 - DNA, 15 bp, Homo sapiens
gcgccatgacagttt

SEQ ID NO: 1849116 - DNA, 15 bp, Homo sapiens
cgccatgacagtttg

SEQ ID NO: 1849117 - DNA, 15 bp, Homo sapiens
gccatgacagtttgc

SEQ ID NO: 1849118 - DNA, 15 bp, Homo sapiens
ccatgacagtttgca

SEQ ID NO: 1849119 - DNA, 15 bp, Homo sapiens
catgacagtttgcag

SEQ ID NO: 1849120 - DNA, 15 bp, Homo sapiens
atgacagtttgcaga

SEQ ID NO: 1849121 - DNA, 15 bp, Homo sapiens
tgacagtttgcagat

SEQ ID NO: 1849122 - DNA, 15 bp, Homo sapiens
gacagtttgcagatt

SEQ ID NO: 1849123 - DNA, 15 bp, Homo sapiens
acagtttgcagattc

SEQ ID NO: 1849124 - DNA, 15 bp, Homo sapiens
cagtttgcagattcc

SEQ ID NO: 1849125 - DNA, 15 bp, Homo sapiens
agtttgcagattcca

SEQ ID NO: 1849126 - DNA, 15 bp, Homo sapiens
gtttgcagattccag

SEQ ID NO: 1849127 - DNA, 15 bp, Homo sapiens
tttgcagattccagg

SEQ ID NO: 1849128 - DNA, 15 bp, Homo sapiens
ttgcagattccaggt

SEQ ID NO: 1849129 - DNA, 15 bp, Homo sapiens
tgcagattccaggta

SEQ ID NO: 1849130 - DNA, 15 bp, Homo sapiens
gcagattccaggtaa

SEQ ID NO: 1849131 - DNA, 15 bp, Homo sapiens
cagattccaggtaat

SEQ ID NO: 1849132 - DNA, 15 bp, Homo sapiens
agattccaggtaatg

SEQ ID NO: 1849133 - DNA, 15 bp, Homo sapiens
gattccaggtaatgt

SEQ ID NO: 1849134 - DNA, 15 bp, Homo sapiens
attccaggtaatgtc

SEQ ID NO: 1849135 - DNA, 15 bp, Homo sapiens
ttccaggtaatgtca

SEQ ID NO: 1849136 - DNA, 15 bp, Homo sapiens
tccaggtaatgtcag

SEQ ID NO: 1849137 - DNA, 15 bp, Homo sapiens
ccaggtaatgtcagg

SEQ ID NO: 1849138 - DNA, 15 bp, Homo sapiens
caggtaatgtcagga

SEQ ID NO: 1849139 - DNA, 15 bp, Homo sapiens
aggtaatgtcaggaa

SEQ ID NO: 1849140 - DNA, 15 bp, Homo sapiens
ggtaatgtcaggaaa

SEQ ID NO: 1849141 - DNA, 15 bp, Homo sapiens
gtaatgtcaggaaat

SEQ ID NO: 1849142 - DNA, 15 bp, Homo sapiens
taatgtcaggaaatt

SEQ ID NO: 1849143 - DNA, 15 bp, Homo sapiens
aatgtcaggaaatta

SEQ ID NO: 1849144 - DNA, 15 bp, Homo sapiens
atgtcaggaaattac

SEQ ID NO: 1849145 - DNA, 15 bp, Homo sapiens
tgtcaggaaattacc

SEQ ID NO: 1849146 - DNA, 15 bp, Homo sapiens
gtcaggaaattaccc

SEQ ID NO: 1849147 - DNA, 15 bp, Homo sapiens
tcaggaaattaccct

SEQ ID NO: 1849148 - DNA, 15 bp, Homo sapiens
caggaaattacccta

SEQ ID NO: 1849149 - DNA, 15 bp, Homo sapiens
aggaaattaccctat

SEQ ID NO: 1849150 - DNA, 15 bp, Homo sapiens
ggaaattaccctata

SEQ ID NO: 1849151 - DNA, 15 bp, Homo sapiens
gaaattaccctatat

SEQ ID NO: 1849152 - DNA, 15 bp, Homo sapiens
aaattaccctatatg

SEQ ID NO: 1849153 - DNA, 15 bp, Homo sapiens
aattaccctatatgg

SEQ ID NO: 1849154 - DNA, 15 bp, Homo sapiens
attaccctatatggt

SEQ ID NO: 1849155 - DNA, 15 bp, Homo sapiens
ttaccctatatggtc

SEQ ID NO: 1849156 - DNA, 15 bp, Homo sapiens
taccctatatggtct

SEQ ID NO: 1849157 - DNA, 15 bp, Homo sapiens
accctatatggtcta

SEQ ID NO: 1849158 - DNA, 15 bp, Homo sapiens
ccctatatggtctaa

SEQ ID NO: 1849159 - DNA, 15 bp, Homo sapiens
cctatatggtctaaa

SEQ ID NO: 1849160 - DNA, 15 bp, Homo sapiens
ctatatggtctaaaa

SEQ ID NO: 1849161 - DNA, 15 bp, Homo sapiens
tatatggtctaaaaa

SEQ ID NO: 1849162 - DNA, 15 bp, Homo sapiens
atatggtctaaaaaa

SEQ ID NO: 1849163 - DNA, 15 bp, Homo sapiens
tatggtctaaaaaaa

SEQ ID NO: 1849164 - DNA, 15 bp, Homo sapiens
atggtctaaaaaaag

SEQ ID NO: 1849165 - DNA, 15 bp, Homo sapiens
tggtctaaaaaaagg

SEQ ID NO: 1849166 - DNA, 15 bp, Homo sapiens
ggtctaaaaaaaggg

SEQ ID NO: 1849167 - DNA, 15 bp, Homo sapiens
gtctaaaaaaagggg

SEQ ID NO: 1849168 - DNA, 15 bp, Homo sapiens
tctaaaaaaagggga

SEQ ID NO: 1849169 - DNA, 15 bp, Homo sapiens
ctaaaaaaaggggac

SEQ ID NO: 1849170 - DNA, 15 bp, Homo sapiens
taaaaaaaggggaca

SEQ ID NO: 1849171 - DNA, 15 bp, Homo sapiens
aaaaaaaggggacac

SEQ ID NO: 1849172 - DNA, 15 bp, Homo sapiens
aaaaaaggggacaca

SEQ ID NO: 1849173 - DNA, 15 bp, Homo sapiens
aaaaaggggacacat

SEQ ID NO: 1849174 - DNA, 15 bp, Homo sapiens
aaaaggggacacatg

SEQ ID NO: 1849175 - DNA, 15 bp, Homo sapiens
aaaggggacacatga

SEQ ID NO: 1849176 - DNA, 15 bp, Homo sapiens
aaggggacacatgaa

SEQ ID NO: 1849177 - DNA, 15 bp, Homo sapiens
aggggacacatgaat

SEQ ID NO: 1849178 - DNA, 15 bp, Homo sapiens
ggggacacatgaata

SEQ ID NO: 1849179 - DNA, 15 bp, Homo sapiens
gggacacatgaataa

SEQ ID NO: 1849180 - DNA, 15 bp, Homo sapiens
ggacacatgaataat

SEQ ID NO: 1849181 - DNA, 15 bp, Homo sapiens
gacacatgaataatc

SEQ ID NO: 1849182 - DNA, 15 bp, Homo sapiens
acacatgaataatcc

SEQ ID NO: 1849183 - DNA, 15 bp, Homo sapiens
cacatgaataatcca

SEQ ID NO: 1849184 - DNA, 15 bp, Homo sapiens
acatgaataatccac

SEQ ID NO: 1849185 - DNA, 15 bp, Homo sapiens
catgaataatccacg

SEQ ID NO: 1849186 - DNA, 15 bp, Homo sapiens
atgaataatccacgc

SEQ ID NO: 1849187 - DNA, 15 bp, Homo sapiens
tgaataatccacgcc

SEQ ID NO: 1849188 - DNA, 15 bp, Homo sapiens
gaataatccacgcct

SEQ ID NO: 1849189 - DNA, 15 bp, Homo sapiens
aataatccacgcctt

SEQ ID NO: 1849190 - DNA, 15 bp, Homo sapiens
ataatccacgccttg

SEQ ID NO: 1849191 - DNA, 15 bp, Homo sapiens
taatccacgccttgt

SEQ ID NO: 1849192 - DNA, 15 bp, Homo sapiens
aatccacgccttgtt

SEQ ID NO: 1849193 - DNA, 15 bp, Homo sapiens
atccacgccttgttt

SEQ ID NO: 1849194 - DNA, 15 bp, Homo sapiens
tccacgccttgttta

SEQ ID NO: 1849195 - DNA, 15 bp, Homo sapiens
ccacgccttgtttag

SEQ ID NO: 1849196 - DNA, 15 bp, Homo sapiens
cacgccttgtttagc

SEQ ID NO: 1849197 - DNA, 15 bp, Homo sapiens
acgccttgtttagca

SEQ ID NO: 1849198 - DNA, 15 bp, Homo sapiens
cgccttgtttagcat

SEQ ID NO: 1849199 - DNA, 15 bp, Homo sapiens
gccttgtttagcatg

SEQ ID NO: 1849200 - DNA, 15 bp, Homo sapiens
ccttgtttagcatgt

SEQ ID NO: 1849201 - DNA, 15 bp, Homo sapiens
cttgtttagcatgtc

SEQ ID NO: 1849202 - DNA, 15 bp, Homo sapiens
ttgtttagcatgtca

SEQ ID NO: 1849203 - DNA, 15 bp, Homo sapiens
tgtttagcatgtcat

SEQ ID NO: 1849204 - DNA, 15 bp, Homo sapiens
gtttagcatgtcatt

SEQ ID NO: 1849205 - DNA, 15 bp, Homo sapiens
tttagcatgtcatta

SEQ ID NO: 1849206 - DNA, 15 bp, Homo sapiens
ttagcatgtcattaa

SEQ ID NO: 1849207 - DNA, 15 bp, Homo sapiens
tagcatgtcattaag

SEQ ID NO: 1849208 - DNA, 15 bp, Homo sapiens
agcatgtcattaaga

SEQ ID NO: 1849209 - DNA, 15 bp, Homo sapiens
gcatgtcattaagaa

SEQ ID NO: 1849210 - DNA, 15 bp, Homo sapiens
catgtcattaagaaa

SEQ ID NO: 1849211 - DNA, 15 bp, Homo sapiens
atgtcattaagaaat

SEQ ID NO: 1849212 - DNA, 15 bp, Homo sapiens
tgtcattaagaaata

SEQ ID NO: 1849213 - DNA, 15 bp, Homo sapiens
gtcattaagaaataa

SEQ ID NO: 1849214 - DNA, 15 bp, Homo sapiens
tcattaagaaataac

SEQ ID NO: 1849215 - DNA, 15 bp, Homo sapiens
cattaagaaataacc

SEQ ID NO: 1849216 - DNA, 15 bp, Homo sapiens
attaagaaataacca

SEQ ID NO: 1849217 - DNA, 15 bp, Homo sapiens
ttaagaaataaccat

SEQ ID NO: 1849218 - DNA, 15 bp, Homo sapiens
taagaaataaccata

SEQ ID NO: 1849219 - DNA, 15 bp, Homo sapiens
aagaaataaccataa

SEQ ID NO: 1849220 - DNA, 15 bp, Homo sapiens
agaaataaccataaa

SEQ ID NO: 1849221 - DNA, 15 bp, Homo sapiens
gaaataaccataaaa

SEQ ID NO: 1849222 - DNA, 15 bp, Homo sapiens
aaataaccataaaaa

SEQ ID NO: 1849223 - DNA, 15 bp, Homo sapiens
aataaccataaaaat

SEQ ID NO: 1849224 - DNA, 15 bp, Homo sapiens
ataaccataaaaatg

SEQ ID NO: 1849225 - DNA, 15 bp, Homo sapiens
taaccataaaaatgg

SEQ ID NO: 1849226 - DNA, 15 bp, Homo sapiens
aaccataaaaatggg

SEQ ID NO: 1849227 - DNA, 15 bp, Homo sapiens
accataaaaatgggc

SEQ ID NO: 1849228 - DNA, 15 bp, Homo sapiens
ccataaaaatgggca

SEQ ID NO: 1849229 - DNA, 15 bp, Homo sapiens
cataaaaatgggcaa

SEQ ID NO: 1849230 - DNA, 15 bp, Homo sapiens
ataaaaatgggcaac

SEQ ID NO: 1849231 - DNA, 15 bp, Homo sapiens
taaaaatgggcaacc

SEQ ID NO: 1849232 - DNA, 15 bp, Homo sapiens
aaaaatgggcaacca

SEQ ID NO: 1849233 - DNA, 15 bp, Homo sapiens
aaaatgggcaaccag

SEQ ID NO: 1849234 - DNA, 15 bp, Homo sapiens
aaatgggcaaccagc

SEQ ID NO: 1849235 - DNA, 15 bp, Homo sapiens
aatgggcaaccagca

SEQ ID NO: 1849236 - DNA, 15 bp, Homo sapiens
atgggcaaccagcag

SEQ ID NO: 1849237 - DNA, 15 bp, Homo sapiens
tgggcaaccagcagc

SEQ ID NO: 1849238 - DNA, 15 bp, Homo sapiens
gggcaaccagcagcc

SEQ ID NO: 1849239 - DNA, 15 bp, Homo sapiens
ggcaaccagcagccc

SEQ ID NO: 1849240 - DNA, 15 bp, Homo sapiens
gcaaccagcagccct

SEQ ID NO: 1849241 - DNA, 15 bp, Homo sapiens
caaccagcagccctt

SEQ ID NO: 1849242 - DNA, 15 bp, Homo sapiens
aaccagcagcccttg

SEQ ID NO: 1849243 - DNA, 15 bp, Homo sapiens
accagcagcccttgg

SEQ ID NO: 1849244 - DNA, 15 bp, Homo sapiens
ccagcagcccttggg

SEQ ID NO: 1849245 - DNA, 15 bp, Homo sapiens
cagcagcccttgggg

SEQ ID NO: 1849246 - DNA, 15 bp, Homo sapiens
agcagcccttggggc

SEQ ID NO: 1849247 - DNA, 15 bp, Homo sapiens
gcagcccttggggct

SEQ ID NO: 1849248 - DNA, 15 bp, Homo sapiens
cagcccttggggctg

SEQ ID NO: 1849249 - DNA, 15 bp, Homo sapiens
agcccttggggctgc

SEQ ID NO: 1849250 - DNA, 15 bp, Homo sapiens
gcccttggggctgct

SEQ ID NO: 1849251 - DNA, 15 bp, Homo sapiens
cccttggggctgctc

SEQ ID NO: 1849252 - DNA, 15 bp, Homo sapiens
ccttggggctgctct

SEQ ID NO: 1849253 - DNA, 15 bp, Homo sapiens
cttggggctgctctg

SEQ ID NO: 1849254 - DNA, 15 bp, Homo sapiens
ttggggctgctctgt

SEQ ID NO: 1849255 - DNA, 15 bp, Homo sapiens
tggggctgctctgtc

SEQ ID NO: 1849256 - DNA, 15 bp, Homo sapiens
ggggctgctctgtct

SEQ ID NO: 1849257 - DNA, 15 bp, Homo sapiens
gggctgctctgtcta

SEQ ID NO: 1849258 - DNA, 15 bp, Homo sapiens
ggctgctctgtctat

SEQ ID NO: 1849259 - DNA, 15 bp, Homo sapiens
gctgctctgtctatg

SEQ ID NO: 1849260 - DNA, 15 bp, Homo sapiens
ctgctctgtctatgg

SEQ ID NO: 1849261 - DNA, 15 bp, Homo sapiens
tgctctgtctatgga

SEQ ID NO: 1849262 - DNA, 15 bp, Homo sapiens
gctctgtctatggag

SEQ ID NO: 1849263 - DNA, 15 bp, Homo sapiens
ctctgtctatggagt

SEQ ID NO: 1849264 - DNA, 15 bp, Homo sapiens
tctgtctatggagta

SEQ ID NO: 1849265 - DNA, 15 bp, Homo sapiens
ctgtctatggagtag

SEQ ID NO: 1849266 - DNA, 15 bp, Homo sapiens
tgtctatggagtagc

SEQ ID NO: 1849267 - DNA, 15 bp, Homo sapiens
gtctatggagtagct

SEQ ID NO: 1849268 - DNA, 15 bp, Homo sapiens
tctatggagtagctg

SEQ ID NO: 1849269 - DNA, 15 bp, Homo sapiens
ctatggagtagctgt

SEQ ID NO: 1849270 - DNA, 15 bp, Homo sapiens
tatggagtagctgtt

SEQ ID NO: 1849271 - DNA, 15 bp, Homo sapiens
atggagtagctgttc

SEQ ID NO: 1849272 - DNA, 15 bp, Homo sapiens
tggagtagctgttct

SEQ ID NO: 1849273 - DNA, 15 bp, Homo sapiens
ggagtagctgttctt

SEQ ID NO: 1849274 - DNA, 15 bp, Homo sapiens
gagtagctgttcttt

SEQ ID NO: 1849275 - DNA, 15 bp, Homo sapiens
agtagctgttctttt

SEQ ID NO: 1849276 - DNA, 15 bp, Homo sapiens
gtagctgttctttta

SEQ ID NO: 1849277 - DNA, 15 bp, Homo sapiens
tagctgttcttttat

SEQ ID NO: 1849278 - DNA, 15 bp, Homo sapiens
agctgttcttttatt

SEQ ID NO: 1849279 - DNA, 15 bp, Homo sapiens
gctgttcttttattc

SEQ ID NO: 1849280 - DNA, 15 bp, Homo sapiens
ctgttcttttattcc

SEQ ID NO: 1849281 - DNA, 15 bp, Homo sapiens
tgttcttttattcct

SEQ ID NO: 1849282 - DNA, 15 bp, Homo sapiens
gttcttttattcctt

SEQ ID NO: 1849283 - DNA, 15 bp, Homo sapiens
ttcttttattccttt

SEQ ID NO: 1849284 - DNA, 15 bp, Homo sapiens
tcttttattccttta

SEQ ID NO: 1849285 - DNA, 15 bp, Homo sapiens
cttttattcctttac

SEQ ID NO: 1849286 - DNA, 15 bp, Homo sapiens
ttttattcctttact

SEQ ID NO: 1849287 - DNA, 15 bp, Homo sapiens
tttattcctttactt

SEQ ID NO: 1849288 - DNA, 15 bp, Homo sapiens
ttattcctttactta

SEQ ID NO: 1849289 - DNA, 15 bp, Homo sapiens
tattcctttacttac

SEQ ID NO: 1849290 - DNA, 15 bp, Homo sapiens
attcctttacttact

SEQ ID NO: 1849291 - DNA, 15 bp, Homo sapiens
ttcctttacttactt

SEQ ID NO: 1849292 - DNA, 15 bp, Homo sapiens
tcctttacttacttt

SEQ ID NO: 1849293 - DNA, 15 bp, Homo sapiens
cctttacttactttt

SEQ ID NO: 1849294 - DNA, 15 bp, Homo sapiens
ctttacttacttttt

SEQ ID NO: 1849295 - DNA, 15 bp, Homo sapiens
tttacttactttttt

SEQ ID NO: 1849296 - DNA, 15 bp, Homo sapiens
ttacttacttttttt

SEQ ID NO: 1849297 - DNA, 15 bp, Homo sapiens
acttacttttttttt

SEQ ID NO: 1849298 - DNA, 15 bp, Homo sapiens
cttactttttttttt

SEQ ID NO: 1849299 - DNA, 15 bp, Homo sapiens
caacctctgccaccc

SEQ ID NO: 1849300 - DNA, 15 bp, Homo sapiens
aacctctgccaccca

SEQ ID NO: 1849301 - DNA, 15 bp, Homo sapiens
acctctgccacccag

SEQ ID NO: 1849302 - DNA, 15 bp, Homo sapiens
cctctgccacccagg

SEQ ID NO: 1849303 - DNA, 15 bp, Homo sapiens
ctctgccacccaggt

SEQ ID NO: 1849304 - DNA, 15 bp, Homo sapiens
ctgccacccaggttc

SEQ ID NO: 1849305 - DNA, 15 bp, Homo sapiens
tgccacccaggttca

SEQ ID NO: 1849306 - DNA, 15 bp, Homo sapiens
gccacccaggttcaa

SEQ ID NO: 1849307 - DNA, 15 bp, Homo sapiens
ccacccaggttcaag

SEQ ID NO: 1849308 - DNA, 15 bp, Homo sapiens
acccaggttcaagcg

SEQ ID NO: 1849309 - DNA, 15 bp, Homo sapiens
tgggactgcaggcgt

SEQ ID NO: 1849310 - DNA, 15 bp, Homo sapiens
gggactgcaggcgtg

SEQ ID NO: 1849311 - DNA, 15 bp, Homo sapiens
ggactgcaggcgtgt

SEQ ID NO: 1849312 - DNA, 15 bp, Homo sapiens
gactgcaggcgtgtg

SEQ ID NO: 1849313 - DNA, 15 bp, Homo sapiens
actgcaggcgtgtgc

SEQ ID NO: 1849314 - DNA, 15 bp, Homo sapiens
ctgcaggcgtgtgcc

SEQ ID NO: 1849315 - DNA, 15 bp, Homo sapiens
tgcaggcgtgtgcca

SEQ ID NO: 1849316 - DNA, 15 bp, Homo sapiens
gcaggcgtgtgccac

SEQ ID NO: 1849317 - DNA, 15 bp, Homo sapiens
ggcgtgtgccaccat

SEQ ID NO: 1849318 - DNA, 15 bp, Homo sapiens
gcgtgtgccaccatg

SEQ ID NO: 1849319 - DNA, 15 bp, Homo sapiens
cgtgtgccaccatgc

SEQ ID NO: 1849320 - DNA, 15 bp, Homo sapiens
gtgccaccatgcccg

SEQ ID NO: 1849321 - DNA, 15 bp, Homo sapiens
tgccaccatgcccgc

SEQ ID NO: 1849322 - DNA, 15 bp, Homo sapiens
gccaccatgcccgcc

SEQ ID NO: 1849323 - DNA, 15 bp, Homo sapiens
ccaccatgcccgcct

SEQ ID NO: 1849324 - DNA, 15 bp, Homo sapiens
caccatgcccgccta

SEQ ID NO: 1849325 - DNA, 15 bp, Homo sapiens
accatgcccgcctag

SEQ ID NO: 1849326 - DNA, 15 bp, Homo sapiens
ccatgcccgcctagt

SEQ ID NO: 1849327 - DNA, 15 bp, Homo sapiens
catgcccgcctagtt

SEQ ID NO: 1849328 - DNA, 15 bp, Homo sapiens
atgcccgcctagttt

SEQ ID NO: 1849329 - DNA, 15 bp, Homo sapiens
tgcccgcctagtttt

SEQ ID NO: 1849330 - DNA, 15 bp, Homo sapiens
gcccgcctagttttt

SEQ ID NO: 1849331 - DNA, 15 bp, Homo sapiens
cccgcctagtttttc

SEQ ID NO: 1849332 - DNA, 15 bp, Homo sapiens
ccgcctagtttttca

SEQ ID NO: 1849333 - DNA, 15 bp, Homo sapiens
cgcctagtttttcat

SEQ ID NO: 1849334 - DNA, 15 bp, Homo sapiens
gcctagtttttcatt

SEQ ID NO: 1849335 - DNA, 15 bp, Homo sapiens
cctagtttttcattt

SEQ ID NO: 1849336 - DNA, 15 bp, Homo sapiens
ctagtttttcatttt

SEQ ID NO: 1849337 - DNA, 15 bp, Homo sapiens
tagtttttcattttc

SEQ ID NO: 1849338 - DNA, 15 bp, Homo sapiens
agtttttcattttct

SEQ ID NO: 1849339 - DNA, 15 bp, Homo sapiens
gtttttcattttctt

SEQ ID NO: 1849340 - DNA, 15 bp, Homo sapiens
tttttcattttcttt

SEQ ID NO: 1849341 - DNA, 15 bp, Homo sapiens
ttttcattttctttt

SEQ ID NO: 1849342 - DNA, 15 bp, Homo sapiens
tttcattttcttttt

SEQ ID NO: 1849343 - DNA, 15 bp, Homo sapiens
ttcattttcttttta

SEQ ID NO: 1849344 - DNA, 15 bp, Homo sapiens
tcattttctttttag

SEQ ID NO: 1849345 - DNA, 15 bp, Homo sapiens
cattttctttttagt

SEQ ID NO: 1849346 - DNA, 15 bp, Homo sapiens
attttctttttagta

SEQ ID NO: 1849347 - DNA, 15 bp, Homo sapiens
ttttctttttagtag

SEQ ID NO: 1849348 - DNA, 15 bp, Homo sapiens
tttctttttagtaga

SEQ ID NO: 1849349 - DNA, 15 bp, Homo sapiens
ttctttttagtagag

SEQ ID NO: 1849350 - DNA, 15 bp, Homo sapiens
tctttttagtagaga

SEQ ID NO: 1849351 - DNA, 15 bp, Homo sapiens
ctttttagtagagac

SEQ ID NO: 1849352 - DNA, 15 bp, Homo sapiens
agtagagacagggtg

SEQ ID NO: 1849353 - DNA, 15 bp, Homo sapiens
gtagagacagggtgt

SEQ ID NO: 1849354 - DNA, 15 bp, Homo sapiens
tagagacagggtgtc

SEQ ID NO: 1849355 - DNA, 15 bp, Homo sapiens
agagacagggtgtca

SEQ ID NO: 1849356 - DNA, 15 bp, Homo sapiens
gagacagggtgtcac

SEQ ID NO: 1849357 - DNA, 15 bp, Homo sapiens
agacagggtgtcacc

SEQ ID NO: 1849358 - DNA, 15 bp, Homo sapiens
gacagggtgtcaccg

SEQ ID NO: 1849359 - DNA, 15 bp, Homo sapiens
acagggtgtcaccgt

SEQ ID NO: 1849360 - DNA, 15 bp, Homo sapiens
cagggtgtcaccgtg

SEQ ID NO: 1849361 - DNA, 15 bp, Homo sapiens
agggtgtcaccgtgt

SEQ ID NO: 1849362 - DNA, 15 bp, Homo sapiens
gggtgtcaccgtgtt

SEQ ID NO: 1849363 - DNA, 15 bp, Homo sapiens
ggtgtcaccgtgtta

SEQ ID NO: 1849364 - DNA, 15 bp, Homo sapiens
gtgtcaccgtgttag

SEQ ID NO: 1849365 - DNA, 15 bp, Homo sapiens
tgtcaccgtgttagc

SEQ ID NO: 1849366 - DNA, 15 bp, Homo sapiens
gtcaccgtgttagct

SEQ ID NO: 1849367 - DNA, 15 bp, Homo sapiens
tcaccgtgttagcta

SEQ ID NO: 1849368 - DNA, 15 bp, Homo sapiens
caccgtgttagctag

SEQ ID NO: 1849369 - DNA, 15 bp, Homo sapiens
accgtgttagctagg

SEQ ID NO: 1849370 - DNA, 15 bp, Homo sapiens
ccgtgttagctagga

SEQ ID NO: 1849371 - DNA, 15 bp, Homo sapiens
cgtgttagctaggat

SEQ ID NO: 1849372 - DNA, 15 bp, Homo sapiens
gctaggatggtctcc

SEQ ID NO: 1849373 - DNA, 15 bp, Homo sapiens
ctaggatggtctcca

SEQ ID NO: 1849374 - DNA, 15 bp, Homo sapiens
taggatggtctccat

SEQ ID NO: 1849375 - DNA, 15 bp, Homo sapiens
aggatggtctccatc

SEQ ID NO: 1849376 - DNA, 15 bp, Homo sapiens
ggatggtctccatct

SEQ ID NO: 1849377 - DNA, 15 bp, Homo sapiens
gatggtctccatctc

SEQ ID NO: 1849378 - DNA, 15 bp, Homo sapiens
atggtctccatctcc

SEQ ID NO: 1849379 - DNA, 15 bp, Homo sapiens
tggtctccatctcct

SEQ ID NO: 1849380 - DNA, 15 bp, Homo sapiens
ggtctccatctcctg

SEQ ID NO: 1849381 - DNA, 15 bp, Homo sapiens
gtctccatctcctga

SEQ ID NO: 1849382 - DNA, 15 bp, Homo sapiens
tctccatctcctgac

SEQ ID NO: 1849383 - DNA, 15 bp, Homo sapiens
ctccatctcctgacc

SEQ ID NO: 1849384 - DNA, 15 bp, Homo sapiens
tccatctcctgacct

SEQ ID NO: 1849385 - DNA, 15 bp, Homo sapiens
ccatctcctgacctg

SEQ ID NO: 1849386 - DNA, 15 bp, Homo sapiens
catctcctgacctgg

SEQ ID NO: 1849387 - DNA, 15 bp, Homo sapiens
ctcctgacctggtga

SEQ ID NO: 1849388 - DNA, 15 bp, Homo sapiens
tcctgacctggtgat

SEQ ID NO: 1849389 - DNA, 15 bp, Homo sapiens
cctgacctggtgatc

SEQ ID NO: 1849390 - DNA, 15 bp, Homo sapiens
ctgacctggtgatcc

SEQ ID NO: 1849391 - DNA, 15 bp, Homo sapiens
tgacctggtgatccg

SEQ ID NO: 1849392 - DNA, 15 bp, Homo sapiens
gacctggtgatccgc

SEQ ID NO: 1849393 - DNA, 15 bp, Homo sapiens
acctggtgatccgcc

SEQ ID NO: 1849394 - DNA, 15 bp, Homo sapiens
cctggtgatccgccc

SEQ ID NO: 1849395 - DNA, 15 bp, Homo sapiens
ctggtgatccgcccg

SEQ ID NO: 1849396 - DNA, 15 bp, Homo sapiens
tggtgatccgcccgc

SEQ ID NO: 1849397 - DNA, 15 bp, Homo sapiens
ccgcctccgcctccc

SEQ ID NO: 1849398 - DNA, 15 bp, Homo sapiens
cgcctccgcctccca

SEQ ID NO: 1849399 - DNA, 15 bp, Homo sapiens
gcctccgcctcccaa

SEQ ID NO: 1849400 - DNA, 15 bp, Homo sapiens
caaagtgctgggata

SEQ ID NO: 1849401 - DNA, 15 bp, Homo sapiens
aaagtgctgggataa

SEQ ID NO: 1849402 - DNA, 15 bp, Homo sapiens
aagtgctgggataac

SEQ ID NO: 1849403 - DNA, 15 bp, Homo sapiens
agtgctgggataaca

SEQ ID NO: 1849404 - DNA, 15 bp, Homo sapiens
gtgctgggataacag

SEQ ID NO: 1849405 - DNA, 15 bp, Homo sapiens
tgctgggataacaga

SEQ ID NO: 1849406 - DNA, 15 bp, Homo sapiens
gctgggataacagac

SEQ ID NO: 1849407 - DNA, 15 bp, Homo sapiens
ctgggataacagacg

SEQ ID NO: 1849408 - DNA, 15 bp, Homo sapiens
tgggataacagacgt

SEQ ID NO: 1849409 - DNA, 15 bp, Homo sapiens
gggataacagacgtg

SEQ ID NO: 1849410 - DNA, 15 bp, Homo sapiens
ggataacagacgtga

SEQ ID NO: 1849411 - DNA, 15 bp, Homo sapiens
gataacagacgtgag

SEQ ID NO: 1849412 - DNA, 15 bp, Homo sapiens
ataacagacgtgagt

SEQ ID NO: 1849413 - DNA, 15 bp, Homo sapiens
taacagacgtgagtc

SEQ ID NO: 1849414 - DNA, 15 bp, Homo sapiens
aacagacgtgagtca

SEQ ID NO: 1849415 - DNA, 15 bp, Homo sapiens
acagacgtgagtcat

SEQ ID NO: 1849416 - DNA, 15 bp, Homo sapiens
cagacgtgagtcatc

SEQ ID NO: 1849417 - DNA, 15 bp, Homo sapiens
agacgtgagtcatcg

SEQ ID NO: 1849418 - DNA, 15 bp, Homo sapiens
gacgtgagtcatcgt

SEQ ID NO: 1849419 - DNA, 15 bp, Homo sapiens
acgtgagtcatcgtg

SEQ ID NO: 1849420 - DNA, 15 bp, Homo sapiens
cgtgagtcatcgtgc

SEQ ID NO: 1849421 - DNA, 15 bp, Homo sapiens
gtgagtcatcgtgcc

SEQ ID NO: 1849422 - DNA, 15 bp, Homo sapiens
tgagtcatcgtgccc

SEQ ID NO: 1849423 - DNA, 15 bp, Homo sapiens
gagtcatcgtgccct

SEQ ID NO: 1849424 - DNA, 15 bp, Homo sapiens
agtcatcgtgccctg

SEQ ID NO: 1849425 - DNA, 15 bp, Homo sapiens
gtcatcgtgccctgc

SEQ ID NO: 1849426 - DNA, 15 bp, Homo sapiens
tcatcgtgccctgcc

SEQ ID NO: 1849427 - DNA, 15 bp, Homo sapiens
catcgtgccctgcca

SEQ ID NO: 1849428 - DNA, 15 bp, Homo sapiens
atcgtgccctgccat

SEQ ID NO: 1849429 - DNA, 15 bp, Homo sapiens
tcgtgccctgccatt

SEQ ID NO: 1849430 - DNA, 15 bp, Homo sapiens
cgtgccctgccattt

SEQ ID NO: 1849431 - DNA, 15 bp, Homo sapiens
gtgccctgccatttc

SEQ ID NO: 1849432 - DNA, 15 bp, Homo sapiens
tgccctgccatttct

SEQ ID NO: 1849433 - DNA, 15 bp, Homo sapiens
gccctgccatttctt

SEQ ID NO: 1849434 - DNA, 15 bp, Homo sapiens
ccctgccatttcttt

SEQ ID NO: 1849435 - DNA, 15 bp, Homo sapiens
cctgccatttcttta

SEQ ID NO: 1849436 - DNA, 15 bp, Homo sapiens
ctgccatttctttac

SEQ ID NO: 1849437 - DNA, 15 bp, Homo sapiens
tgccatttctttact

SEQ ID NO: 1849438 - DNA, 15 bp, Homo sapiens
gccatttctttactt

SEQ ID NO: 1849439 - DNA, 15 bp, Homo sapiens
ccatttctttacttt

SEQ ID NO: 1849440 - DNA, 15 bp, Homo sapiens
catttctttactttc

SEQ ID NO: 1849441 - DNA, 15 bp, Homo sapiens
atttctttactttct

SEQ ID NO: 1849442 - DNA, 15 bp, Homo sapiens
tttctttactttctt

SEQ ID NO: 1849443 - DNA, 15 bp, Homo sapiens
ttctttactttctta

SEQ ID NO: 1849444 - DNA, 15 bp, Homo sapiens
tctttactttcttaa

SEQ ID NO: 1849445 - DNA, 15 bp, Homo sapiens
ctttactttcttaat

SEQ ID NO: 1849446 - DNA, 15 bp, Homo sapiens
tttactttcttaata

SEQ ID NO: 1849447 - DNA, 15 bp, Homo sapiens
ttactttcttaataa

SEQ ID NO: 1849448 - DNA, 15 bp, Homo sapiens
tactttcttaataaa

SEQ ID NO: 1849449 - DNA, 15 bp, Homo sapiens
actttcttaataaac

SEQ ID NO: 1849450 - DNA, 15 bp, Homo sapiens
ctttcttaataaact

SEQ ID NO: 1849451 - DNA, 15 bp, Homo sapiens
tttcttaataaactt

SEQ ID NO: 1849452 - DNA, 15 bp, Homo sapiens
ttcttaataaacttg

SEQ ID NO: 1849453 - DNA, 15 bp, Homo sapiens
tcttaataaacttgc

SEQ ID NO: 1849454 - DNA, 15 bp, Homo sapiens
cttaataaacttgct

SEQ ID NO: 1849455 - DNA, 15 bp, Homo sapiens
ttaataaacttgctt

SEQ ID NO: 1849456 - DNA, 15 bp, Homo sapiens
taataaacttgcttt

SEQ ID NO: 1849457 - DNA, 15 bp, Homo sapiens
aataaacttgctttc

SEQ ID NO: 1849458 - DNA, 15 bp, Homo sapiens
ataaacttgctttca

SEQ ID NO: 1849459 - DNA, 15 bp, Homo sapiens
taaacttgctttcac

SEQ ID NO: 1849460 - DNA, 15 bp, Homo sapiens
aaacttgctttcact

SEQ ID NO: 1849461 - DNA, 15 bp, Homo sapiens
aacttgctttcactt

SEQ ID NO: 1849462 - DNA, 15 bp, Homo sapiens
acttgctttcacttt

SEQ ID NO: 1849463 - DNA, 15 bp, Homo sapiens
cttgctttcactttg

SEQ ID NO: 1849464 - DNA, 15 bp, Homo sapiens
ttgctttcactttgc

SEQ ID NO: 1849465 - DNA, 15 bp, Homo sapiens
tgctttcactttgca

SEQ ID NO: 1849466 - DNA, 15 bp, Homo sapiens
gctttcactttgcac

SEQ ID NO: 1849467 - DNA, 15 bp, Homo sapiens
ctttcactttgcact

SEQ ID NO: 1849468 - DNA, 15 bp, Homo sapiens
tttcactttgcactg

SEQ ID NO: 1849469 - DNA, 15 bp, Homo sapiens
ttcactttgcactgt

SEQ ID NO: 1849470 - DNA, 15 bp, Homo sapiens
tcactttgcactgtg

SEQ ID NO: 1849471 - DNA, 15 bp, Homo sapiens
cactttgcactgtgg

SEQ ID NO: 1849472 - DNA, 15 bp, Homo sapiens
actttgcactgtgga

SEQ ID NO: 1849473 - DNA, 15 bp, Homo sapiens
ctttgcactgtggac

SEQ ID NO: 1849474 - DNA, 15 bp, Homo sapiens
tttgcactgtggact

SEQ ID NO: 1849475 - DNA, 15 bp, Homo sapiens
ttgcactgtggactt

SEQ ID NO: 1849476 - DNA, 15 bp, Homo sapiens
tgcactgtggacttg

SEQ ID NO: 1849477 - DNA, 15 bp, Homo sapiens
gcactgtggacttgc

SEQ ID NO: 1849478 - DNA, 15 bp, Homo sapiens
cactgtggacttgcc

SEQ ID NO: 1849479 - DNA, 15 bp, Homo sapiens
actgtggacttgccc

SEQ ID NO: 1849480 - DNA, 15 bp, Homo sapiens
ctgtggacttgccct

SEQ ID NO: 1849481 - DNA, 15 bp, Homo sapiens
tgtggacttgccctg

SEQ ID NO: 1849482 - DNA, 15 bp, Homo sapiens
gtggacttgccctga

SEQ ID NO: 1849483 - DNA, 15 bp, Homo sapiens
tggacttgccctgaa

SEQ ID NO: 1849484 - DNA, 15 bp, Homo sapiens
ggacttgccctgaat

SEQ ID NO: 1849485 - DNA, 15 bp, Homo sapiens
gacttgccctgaatt

SEQ ID NO: 1849486 - DNA, 15 bp, Homo sapiens
acttgccctgaattc

SEQ ID NO: 1849487 - DNA, 15 bp, Homo sapiens
cttgccctgaattct

SEQ ID NO: 1849488 - DNA, 15 bp, Homo sapiens
ttgccctgaattctt

SEQ ID NO: 1849489 - DNA, 15 bp, Homo sapiens
tgccctgaattcttt

SEQ ID NO: 1849490 - DNA, 15 bp, Homo sapiens
gccctgaattctttc

SEQ ID NO: 1849491 - DNA, 15 bp, Homo sapiens
ccctgaattctttct

SEQ ID NO: 1849492 - DNA, 15 bp, Homo sapiens
cctgaattctttctt

SEQ ID NO: 1849493 - DNA, 15 bp, Homo sapiens
ctgaattctttctta

SEQ ID NO: 1849494 - DNA, 15 bp, Homo sapiens
tgaattctttcttat

SEQ ID NO: 1849495 - DNA, 15 bp, Homo sapiens
gaattctttcttatg

SEQ ID NO: 1849496 - DNA, 15 bp, Homo sapiens
aattctttcttatgc

SEQ ID NO: 1849497 - DNA, 15 bp, Homo sapiens
attctttcttatgcg

SEQ ID NO: 1849498 - DNA, 15 bp, Homo sapiens
ttctttcttatgcga

SEQ ID NO: 1849499 - DNA, 15 bp, Homo sapiens
tctttcttatgcgag

SEQ ID NO: 1849500 - DNA, 15 bp, Homo sapiens
ctttcttatgcgaga

SEQ ID NO: 1849501 - DNA, 15 bp, Homo sapiens
tttcttatgcgagat

SEQ ID NO: 1849502 - DNA, 15 bp, Homo sapiens
ttcttatgcgagatc

SEQ ID NO: 1849503 - DNA, 15 bp, Homo sapiens
tcttatgcgagatcc

SEQ ID NO: 1849504 - DNA, 15 bp, Homo sapiens
cttatgcgagatcca

SEQ ID NO: 1849505 - DNA, 15 bp, Homo sapiens
ttatgcgagatccaa

SEQ ID NO: 1849506 - DNA, 15 bp, Homo sapiens
tatgcgagatccaaa

SEQ ID NO: 1849507 - DNA, 15 bp, Homo sapiens
atgcgagatccaaag

SEQ ID NO: 1849508 - DNA, 15 bp, Homo sapiens
tgcgagatccaaaga

SEQ ID NO: 1849509 - DNA, 15 bp, Homo sapiens
gcgagatccaaagaa

SEQ ID NO: 1849510 - DNA, 15 bp, Homo sapiens
cgagatccaaagaac

SEQ ID NO: 1849511 - DNA, 15 bp, Homo sapiens
gagatccaaagaact

SEQ ID NO: 1849512 - DNA, 15 bp, Homo sapiens
agatccaaagaactc

SEQ ID NO: 1849513 - DNA, 15 bp, Homo sapiens
gatccaaagaactct

SEQ ID NO: 1849514 - DNA, 15 bp, Homo sapiens
atccaaagaactctc

SEQ ID NO: 1849515 - DNA, 15 bp, Homo sapiens
tccaaagaactctct

SEQ ID NO: 1849516 - DNA, 15 bp, Homo sapiens
ccaaagaactctctc

SEQ ID NO: 1849517 - DNA, 15 bp, Homo sapiens
caaagaactctctct

SEQ ID NO: 1849518 - DNA, 15 bp, Homo sapiens
aaagaactctctctt

SEQ ID NO: 1849519 - DNA, 15 bp, Homo sapiens
aagaactctctcttg

SEQ ID NO: 1849520 - DNA, 15 bp, Homo sapiens
agaactctctcttgt

SEQ ID NO: 1849521 - DNA, 15 bp, Homo sapiens
gaactctctcttgtg

SEQ ID NO: 1849522 - DNA, 15 bp, Homo sapiens
aactctctcttgtgg

SEQ ID NO: 1849523 - DNA, 15 bp, Homo sapiens
actctctcttgtggt

SEQ ID NO: 1849524 - DNA, 15 bp, Homo sapiens
ctctctcttgtggtc

SEQ ID NO: 1849525 - DNA, 15 bp, Homo sapiens
tctctcttgtggtct

SEQ ID NO: 1849526 - DNA, 15 bp, Homo sapiens
ctctcttgtggtctg

SEQ ID NO: 1849527 - DNA, 15 bp, Homo sapiens
tctcttgtggtctgg

SEQ ID NO: 1849528 - DNA, 15 bp, Homo sapiens
ctcttgtggtctggc

SEQ ID NO: 1849529 - DNA, 15 bp, Homo sapiens
tcttgtggtctggct

SEQ ID NO: 1849530 - DNA, 15 bp, Homo sapiens
cttgtggtctggctc

SEQ ID NO: 1849531 - DNA, 15 bp, Homo sapiens
ttgtggtctggctcg

SEQ ID NO: 1849532 - DNA, 15 bp, Homo sapiens
tgtggtctggctcgg

SEQ ID NO: 1849533 - DNA, 15 bp, Homo sapiens
gtggtctggctcggg

SEQ ID NO: 1849534 - DNA, 15 bp, Homo sapiens
tggtctggctcggga

SEQ ID NO: 1849535 - DNA, 15 bp, Homo sapiens
ggtctggctcgggac

SEQ ID NO: 1849536 - DNA, 15 bp, Homo sapiens
gtctggctcgggacc

SEQ ID NO: 1849537 - DNA, 15 bp, Homo sapiens
tctggctcgggacca

SEQ ID NO: 1849538 - DNA, 15 bp, Homo sapiens
ctggctcgggaccac

SEQ ID NO: 1849539 - DNA, 15 bp, Homo sapiens
tggctcgggaccact

SEQ ID NO: 1849540 - DNA, 15 bp, Homo sapiens
ggctcgggaccactt

SEQ ID NO: 1849541 - DNA, 15 bp, Homo sapiens
gctcgggaccacttt

SEQ ID NO: 1849542 - DNA, 15 bp, Homo sapiens
ctcgggaccactttc

SEQ ID NO: 1849543 - DNA, 15 bp, Homo sapiens
tcgggaccactttct

SEQ ID NO: 1849544 - DNA, 15 bp, Homo sapiens
cgggaccactttctt

SEQ ID NO: 1849545 - DNA, 15 bp, Homo sapiens
gggaccactttcttg

SEQ ID NO: 1849546 - DNA, 15 bp, Homo sapiens
ggaccactttcttgt

SEQ ID NO: 1849547 - DNA, 15 bp, Homo sapiens
gaccactttcttgta

SEQ ID NO: 1849548 - DNA, 15 bp, Homo sapiens
accactttcttgtaa

SEQ ID NO: 1849549 - DNA, 15 bp, Homo sapiens
ccactttcttgtaac

SEQ ID NO: 1849550 - DNA, 15 bp, Homo sapiens
cactttcttgtaaca

SEQ ID NO: 1849551 - DNA, 15 bp, Homo sapiens
actttcttgtaacag

SEQ ID NO: 1849552 - DNA, 15 bp, Homo sapiens
ctttcttgtaacagg

SEQ ID NO: 1849553 - DNA, 15 bp, Homo sapiens
tttcttgtaacagga

SEQ ID NO: 1849554 - DNA, 15 bp, Homo sapiens
ttcttgtaacaggag

SEQ ID NO: 1849555 - DNA, 15 bp, Homo sapiens
tcttgtaacaggagg

SEQ ID NO: 1849556 - DNA, 15 bp, Homo sapiens
cttgtaacaggagga

SEQ ID NO: 1849557 - DNA, 15 bp, Homo sapiens
ttgtaacaggaggaa

SEQ ID NO: 1849558 - DNA, 15 bp, Homo sapiens
tgtaacaggaggaag

SEQ ID NO: 1849559 - DNA, 15 bp, Homo sapiens
gtaacaggaggaaga

SEQ ID NO: 1849560 - DNA, 15 bp, Homo sapiens
taacaggaggaagat

SEQ ID NO: 1849561 - DNA, 15 bp, Homo sapiens
aacaggaggaagatg

SEQ ID NO: 1849562 - DNA, 15 bp, Homo sapiens
acaggaggaagatgg

SEQ ID NO: 1849563 - DNA, 15 bp, Homo sapiens
caggaggaagatggc

SEQ ID NO: 1849564 - DNA, 15 bp, Homo sapiens
aggaggaagatggcc

SEQ ID NO: 1849565 - DNA, 15 bp, Homo sapiens
ggaggaagatggcct

SEQ ID NO: 1849566 - DNA, 15 bp, Homo sapiens
gaggaagatggccta

SEQ ID NO: 1849567 - DNA, 15 bp, Homo sapiens
aggaagatggcctat

SEQ ID NO: 1849568 - DNA, 15 bp, Homo sapiens
ggaagatggcctatc

SEQ ID NO: 1849569 - DNA, 15 bp, Homo sapiens
gaagatggcctatct

SEQ ID NO: 1849570 - DNA, 15 bp, Homo sapiens
aagatggcctatctg

SEQ ID NO: 1849571 - DNA, 15 bp, Homo sapiens
agatggcctatctgg

SEQ ID NO: 1849572 - DNA, 15 bp, Homo sapiens
gatggcctatctggg

SEQ ID NO: 1849573 - DNA, 15 bp, Homo sapiens
atggcctatctggga

SEQ ID NO: 1849574 - DNA, 15 bp, Homo sapiens
tggcctatctgggac

SEQ ID NO: 1849575 - DNA, 15 bp, Homo sapiens
ggcctatctgggacc

SEQ ID NO: 1849576 - DNA, 15 bp, Homo sapiens
gcctatctgggacct

SEQ ID NO: 1849577 - DNA, 15 bp, Homo sapiens
cctatctgggaccta

SEQ ID NO: 1849578 - DNA, 15 bp, Homo sapiens
ctatctgggacctaa

SEQ ID NO: 1849579 - DNA, 15 bp, Homo sapiens
tatctgggacctaat

SEQ ID NO: 1849580 - DNA, 15 bp, Homo sapiens
atctgggacctaatg

SEQ ID NO: 1849581 - DNA, 15 bp, Homo sapiens
tctgggacctaatga

SEQ ID NO: 1849582 - DNA, 15 bp, Homo sapiens
ctgggacctaatgag

SEQ ID NO: 1849583 - DNA, 15 bp, Homo sapiens
tgggacctaatgagc

SEQ ID NO: 1849584 - DNA, 15 bp, Homo sapiens
gggacctaatgagct

SEQ ID NO: 1849585 - DNA, 15 bp, Homo sapiens
ggacctaatgagctc

SEQ ID NO: 1849586 - DNA, 15 bp, Homo sapiens
gacctaatgagctca

SEQ ID NO: 1849587 - DNA, 15 bp, Homo sapiens
acctaatgagctcag

SEQ ID NO: 1849588 - DNA, 15 bp, Homo sapiens
cctaatgagctcagg

SEQ ID NO: 1849589 - DNA, 15 bp, Homo sapiens
ctaatgagctcaggg

SEQ ID NO: 1849590 - DNA, 15 bp, Homo sapiens
taatgagctcagggt

SEQ ID NO: 1849591 - DNA, 15 bp, Homo sapiens
aatgagctcagggtg

SEQ ID NO: 1849592 - DNA, 15 bp, Homo sapiens
atgagctcagggtgc

SEQ ID NO: 1849593 - DNA, 15 bp, Homo sapiens
tgagctcagggtgcc

SEQ ID NO: 1849594 - DNA, 15 bp, Homo sapiens
gagctcagggtgcct

SEQ ID NO: 1849595 - DNA, 15 bp, Homo sapiens
agctcagggtgcctt

SEQ ID NO: 1849596 - DNA, 15 bp, Homo sapiens
gctcagggtgccttt

SEQ ID NO: 1849597 - DNA, 15 bp, Homo sapiens
ctcagggtgcctttg

SEQ ID NO: 1849598 - DNA, 15 bp, Homo sapiens
tcagggtgcctttga

SEQ ID NO: 1849599 - DNA, 15 bp, Homo sapiens
cagggtgcctttgag

SEQ ID NO: 1849600 - DNA, 15 bp, Homo sapiens
agggtgcctttgaga

SEQ ID NO: 1849601 - DNA, 15 bp, Homo sapiens
gggtgcctttgagat

SEQ ID NO: 1849602 - DNA, 15 bp, Homo sapiens
ggtgcctttgagata

SEQ ID NO: 1849603 - DNA, 15 bp, Homo sapiens
gtgcctttgagatat

SEQ ID NO: 1849604 - DNA, 15 bp, Homo sapiens
tgcctttgagatatt

SEQ ID NO: 1849605 - DNA, 15 bp, Homo sapiens
gcctttgagatattg

SEQ ID NO: 1849606 - DNA, 15 bp, Homo sapiens
cctttgagatattga

SEQ ID NO: 1849607 - DNA, 15 bp, Homo sapiens
ctttgagatattgac

SEQ ID NO: 1849608 - DNA, 15 bp, Homo sapiens
tttgagatattgacc

SEQ ID NO: 1849609 - DNA, 15 bp, Homo sapiens
ttgagatattgacca

SEQ ID NO: 1849610 - DNA, 15 bp, Homo sapiens
tgagatattgaccag

SEQ ID NO: 1849611 - DNA, 15 bp, Homo sapiens
gagatattgaccagg

SEQ ID NO: 1849612 - DNA, 15 bp, Homo sapiens
agatattgaccaggc

SEQ ID NO: 1849613 - DNA, 15 bp, Homo sapiens
gatattgaccaggca

SEQ ID NO: 1849614 - DNA, 15 bp, Homo sapiens
atattgaccaggcaa

SEQ ID NO: 1849615 - DNA, 15 bp, Homo sapiens
tattgaccaggcaag

SEQ ID NO: 1849616 - DNA, 15 bp, Homo sapiens
attgaccaggcaagt

SEQ ID NO: 1849617 - DNA, 15 bp, Homo sapiens
ttgaccaggcaagtg

SEQ ID NO: 1849618 - DNA, 15 bp, Homo sapiens
tgaccaggcaagtgg

SEQ ID NO: 1849619 - DNA, 15 bp, Homo sapiens
gaccaggcaagtggg

SEQ ID NO: 1849620 - DNA, 15 bp, Homo sapiens
accaggcaagtggga

SEQ ID NO: 1849621 - DNA, 15 bp, Homo sapiens
ccaggcaagtgggac

SEQ ID NO: 1849622 - DNA, 15 bp, Homo sapiens
caggcaagtgggact

SEQ ID NO: 1849623 - DNA, 15 bp, Homo sapiens
aggcaagtgggactg

SEQ ID NO: 1849624 - DNA, 15 bp, Homo sapiens
ggcaagtgggactgg

SEQ ID NO: 1849625 - DNA, 15 bp, Homo sapiens
gcaagtgggactgga

SEQ ID NO: 1849626 - DNA, 15 bp, Homo sapiens
caagtgggactggag

SEQ ID NO: 1849627 - DNA, 15 bp, Homo sapiens
aagtgggactggaga

SEQ ID NO: 1849628 - DNA, 15 bp, Homo sapiens
agtgggactggagag

SEQ ID NO: 1849629 - DNA, 15 bp, Homo sapiens
gtgggactggagagc

SEQ ID NO: 1849630 - DNA, 15 bp, Homo sapiens
tgggactggagagca

SEQ ID NO: 1849631 - DNA, 15 bp, Homo sapiens
gggactggagagcaa

SEQ ID NO: 1849632 - DNA, 15 bp, Homo sapiens
ggactggagagcaaa

SEQ ID NO: 1849633 - DNA, 15 bp, Homo sapiens
gactggagagcaaag

SEQ ID NO: 1849634 - DNA, 15 bp, Homo sapiens
actggagagcaaagc

SEQ ID NO: 1849635 - DNA, 15 bp, Homo sapiens
ctggagagcaaagca

SEQ ID NO: 1849636 - DNA, 15 bp, Homo sapiens
tggagagcaaagcag

SEQ ID NO: 1849637 - DNA, 15 bp, Homo sapiens
ggagagcaaagcaga

SEQ ID NO: 1849638 - DNA, 15 bp, Homo sapiens
gagagcaaagcagag

SEQ ID NO: 1849639 - DNA, 15 bp, Homo sapiens
agagcaaagcagaga

SEQ ID NO: 1849640 - DNA, 15 bp, Homo sapiens
gagcaaagcagagac

SEQ ID NO: 1849641 - DNA, 15 bp, Homo sapiens
agcaaagcagagacc

SEQ ID NO: 1849642 - DNA, 15 bp, Homo sapiens
gcaaagcagagacct

SEQ ID NO: 1849643 - DNA, 15 bp, Homo sapiens
caaagcagagaccta

SEQ ID NO: 1849644 - DNA, 15 bp, Homo sapiens
aaagcagagacctaa

SEQ ID NO: 1849645 - DNA, 15 bp, Homo sapiens
aagcagagacctaat

SEQ ID NO: 1849646 - DNA, 15 bp, Homo sapiens
agcagagacctaatt

SEQ ID NO: 1849647 - DNA, 15 bp, Homo sapiens
gcagagacctaattt

SEQ ID NO: 1849648 - DNA, 15 bp, Homo sapiens
cagagacctaatttt

SEQ ID NO: 1849649 - DNA, 15 bp, Homo sapiens
agagacctaattttt

SEQ ID NO: 1849650 - DNA, 15 bp, Homo sapiens
gagacctaatttttt

SEQ ID NO: 1849651 - DNA, 15 bp, Homo sapiens
agacctaattttttt

SEQ ID NO: 1849652 - DNA, 15 bp, Homo sapiens
gacctaatttttttt

SEQ ID NO: 1849653 - DNA, 15 bp, Homo sapiens
acctaattttttttt

SEQ ID NO: 1849654 - DNA, 15 bp, Homo sapiens
cctaatttttttttt

SEQ ID NO: 1849655 - DNA, 15 bp, Homo sapiens
agtggcgcgatctcg

SEQ ID NO: 1849656 - DNA, 15 bp, Homo sapiens
gtggcgcgatctcgg

SEQ ID NO: 1849657 - DNA, 15 bp, Homo sapiens
gactacaggcacgtg

SEQ ID NO: 1849658 - DNA, 15 bp, Homo sapiens
actacaggcacgtgc

SEQ ID NO: 1849659 - DNA, 15 bp, Homo sapiens
ctacaggcacgtgct

SEQ ID NO: 1849660 - DNA, 15 bp, Homo sapiens
tacaggcacgtgcta

SEQ ID NO: 1849661 - DNA, 15 bp, Homo sapiens
acaggcacgtgctac

SEQ ID NO: 1849662 - DNA, 15 bp, Homo sapiens
caggcacgtgctacc

SEQ ID NO: 1849663 - DNA, 15 bp, Homo sapiens
aggcacgtgctacca

SEQ ID NO: 1849664 - DNA, 15 bp, Homo sapiens
ggcacgtgctaccac

SEQ ID NO: 1849665 - DNA, 15 bp, Homo sapiens
gcacgtgctaccaca

SEQ ID NO: 1849666 - DNA, 15 bp, Homo sapiens
cacgtgctaccacac

SEQ ID NO: 1849667 - DNA, 15 bp, Homo sapiens
acgtgctaccacacc

SEQ ID NO: 1849668 - DNA, 15 bp, Homo sapiens
cgtgctaccacaccc

SEQ ID NO: 1849669 - DNA, 15 bp, Homo sapiens
gtgctaccacaccca

SEQ ID NO: 1849670 - DNA, 15 bp, Homo sapiens
tgctaccacacccag

SEQ ID NO: 1849671 - DNA, 15 bp, Homo sapiens
gctaccacacccagc

SEQ ID NO: 1849672 - DNA, 15 bp, Homo sapiens
ctaccacacccagct

SEQ ID NO: 1849673 - DNA, 15 bp, Homo sapiens
taccacacccagcta

SEQ ID NO: 1849674 - DNA, 15 bp, Homo sapiens
cacccagctaatttg

SEQ ID NO: 1849675 - DNA, 15 bp, Homo sapiens
acccagctaatttgt

SEQ ID NO: 1849676 - DNA, 15 bp, Homo sapiens
cccagctaatttgtt

SEQ ID NO: 1849677 - DNA, 15 bp, Homo sapiens
ccagctaatttgttg

SEQ ID NO: 1849678 - DNA, 15 bp, Homo sapiens
cagctaatttgttgt

SEQ ID NO: 1849679 - DNA, 15 bp, Homo sapiens
agctaatttgttgta

SEQ ID NO: 1849680 - DNA, 15 bp, Homo sapiens
gctaatttgttgtat

SEQ ID NO: 1849681 - DNA, 15 bp, Homo sapiens
ctaatttgttgtatt

SEQ ID NO: 1849682 - DNA, 15 bp, Homo sapiens
taatttgttgtattt

SEQ ID NO: 1849683 - DNA, 15 bp, Homo sapiens
aatttgttgtatttt

SEQ ID NO: 1849684 - DNA, 15 bp, Homo sapiens
atttgttgtattttt

SEQ ID NO: 1849685 - DNA, 15 bp, Homo sapiens
tttgttgtattttta

SEQ ID NO: 1849686 - DNA, 15 bp, Homo sapiens
ttgttgtatttttag

SEQ ID NO: 1849687 - DNA, 15 bp, Homo sapiens
tgttgtatttttagt

SEQ ID NO: 1849688 - DNA, 15 bp, Homo sapiens
gttgtatttttagta

SEQ ID NO: 1849689 - DNA, 15 bp, Homo sapiens
tttagtagagatggc

SEQ ID NO: 1849690 - DNA, 15 bp, Homo sapiens
ttagtagagatggcg

SEQ ID NO: 1849691 - DNA, 15 bp, Homo sapiens
tagtagagatggcgt

SEQ ID NO: 1849692 - DNA, 15 bp, Homo sapiens
agtagagatggcgtt

SEQ ID NO: 1849693 - DNA, 15 bp, Homo sapiens
tagagatggcgtttc

SEQ ID NO: 1849694 - DNA, 15 bp, Homo sapiens
agagatggcgtttca

SEQ ID NO: 1849695 - DNA, 15 bp, Homo sapiens
gagatggcgtttcac

SEQ ID NO: 1849696 - DNA, 15 bp, Homo sapiens
agatggcgtttcacc

SEQ ID NO: 1849697 - DNA, 15 bp, Homo sapiens
gatggcgtttcacca

SEQ ID NO: 1849698 - DNA, 15 bp, Homo sapiens
atggcgtttcaccat

SEQ ID NO: 1849699 - DNA, 15 bp, Homo sapiens
tggcgtttcaccatg

SEQ ID NO: 1849700 - DNA, 15 bp, Homo sapiens
ggcgtttcaccatgt

SEQ ID NO: 1849701 - DNA, 15 bp, Homo sapiens
catgttggccaggat

SEQ ID NO: 1849702 - DNA, 15 bp, Homo sapiens
atgttggccaggatg

SEQ ID NO: 1849703 - DNA, 15 bp, Homo sapiens
tgttggccaggatgg

SEQ ID NO: 1849704 - DNA, 15 bp, Homo sapiens
tcgatctcctgaccc

SEQ ID NO: 1849705 - DNA, 15 bp, Homo sapiens
cgatctcctgaccct

SEQ ID NO: 1849706 - DNA, 15 bp, Homo sapiens
gatctcctgaccctg

SEQ ID NO: 1849707 - DNA, 15 bp, Homo sapiens
atctcctgaccctgt

SEQ ID NO: 1849708 - DNA, 15 bp, Homo sapiens
tctcctgaccctgtg

SEQ ID NO: 1849709 - DNA, 15 bp, Homo sapiens
ctcctgaccctgtga

SEQ ID NO: 1849710 - DNA, 15 bp, Homo sapiens
tcctgaccctgtgat

SEQ ID NO: 1849711 - DNA, 15 bp, Homo sapiens
cctgaccctgtgatg

SEQ ID NO: 1849712 - DNA, 15 bp, Homo sapiens
ctgaccctgtgatgc

SEQ ID NO: 1849713 - DNA, 15 bp, Homo sapiens
tgaccctgtgatgct

SEQ ID NO: 1849714 - DNA, 15 bp, Homo sapiens
gaccctgtgatgctc

SEQ ID NO: 1849715 - DNA, 15 bp, Homo sapiens
accctgtgatgctcc

SEQ ID NO: 1849716 - DNA, 15 bp, Homo sapiens
ccctgtgatgctcct

SEQ ID NO: 1849717 - DNA, 15 bp, Homo sapiens
cctgtgatgctcctg

SEQ ID NO: 1849718 - DNA, 15 bp, Homo sapiens
ctgtgatgctcctgc

SEQ ID NO: 1849719 - DNA, 15 bp, Homo sapiens
tgtgatgctcctgcc

SEQ ID NO: 1849720 - DNA, 15 bp, Homo sapiens
gtgatgctcctgcct

SEQ ID NO: 1849721 - DNA, 15 bp, Homo sapiens
gatgctcctgcctcg

SEQ ID NO: 1849722 - DNA, 15 bp, Homo sapiens
atgctcctgcctcgg

SEQ ID NO: 1849723 - DNA, 15 bp, Homo sapiens
tgctcctgcctcggc

SEQ ID NO: 1849724 - DNA, 15 bp, Homo sapiens
gctcctgcctcggcc

SEQ ID NO: 1849725 - DNA, 15 bp, Homo sapiens
gcgtgagccatcgcg

SEQ ID NO: 1849726 - DNA, 15 bp, Homo sapiens
cgtgagccatcgcgc

SEQ ID NO: 1849727 - DNA, 15 bp, Homo sapiens
gtgagccatcgcgcc

SEQ ID NO: 1849728 - DNA, 15 bp, Homo sapiens
tgagccatcgcgccg

SEQ ID NO: 1849729 - DNA, 15 bp, Homo sapiens
gagccatcgcgccga

SEQ ID NO: 1849730 - DNA, 15 bp, Homo sapiens
agccatcgcgccgag

SEQ ID NO: 1849731 - DNA, 15 bp, Homo sapiens
gccatcgcgccgagc

SEQ ID NO: 1849732 - DNA, 15 bp, Homo sapiens
ccatcgcgccgagcc

SEQ ID NO: 1849733 - DNA, 15 bp, Homo sapiens
catcgcgccgagccg

SEQ ID NO: 1849734 - DNA, 15 bp, Homo sapiens
atcgcgccgagccga

SEQ ID NO: 1849735 - DNA, 15 bp, Homo sapiens
tcgcgccgagccgag

SEQ ID NO: 1849736 - DNA, 15 bp, Homo sapiens
cgcgccgagccgagg

SEQ ID NO: 1849737 - DNA, 15 bp, Homo sapiens
gcgccgagccgaggc

SEQ ID NO: 1849738 - DNA, 15 bp, Homo sapiens
cgccgagccgaggcc

SEQ ID NO: 1849739 - DNA, 15 bp, Homo sapiens
gccgagccgaggcct

SEQ ID NO: 1849740 - DNA, 15 bp, Homo sapiens
ccgagccgaggcctg

SEQ ID NO: 1849741 - DNA, 15 bp, Homo sapiens
cgagccgaggcctgt

SEQ ID NO: 1849742 - DNA, 15 bp, Homo sapiens
gagccgaggcctgtt

SEQ ID NO: 1849743 - DNA, 15 bp, Homo sapiens
agccgaggcctgttc

SEQ ID NO: 1849744 - DNA, 15 bp, Homo sapiens
gccgaggcctgttca

SEQ ID NO: 1849745 - DNA, 15 bp, Homo sapiens
ccgaggcctgttcat

SEQ ID NO: 1849746 - DNA, 15 bp, Homo sapiens
cgaggcctgttcatg

SEQ ID NO: 1849747 - DNA, 15 bp, Homo sapiens
gaggcctgttcatgt

SEQ ID NO: 1849748 - DNA, 15 bp, Homo sapiens
aggcctgttcatgtt

SEQ ID NO: 1849749 - DNA, 15 bp, Homo sapiens
ggcctgttcatgttc

SEQ ID NO: 1849750 - DNA, 15 bp, Homo sapiens
gcctgttcatgttct

SEQ ID NO: 1849751 - DNA, 15 bp, Homo sapiens
cctgttcatgttctg

SEQ ID NO: 1849752 - DNA, 15 bp, Homo sapiens
ctgttcatgttctgc

SEQ ID NO: 1849753 - DNA, 15 bp, Homo sapiens
tgttcatgttctgcc

SEQ ID NO: 1849754 - DNA, 15 bp, Homo sapiens
gttcatgttctgcct

SEQ ID NO: 1849755 - DNA, 15 bp, Homo sapiens
ttcatgttctgcctc

SEQ ID NO: 1849756 - DNA, 15 bp, Homo sapiens
tcatgttctgcctct

SEQ ID NO: 1849757 - DNA, 15 bp, Homo sapiens
catgttctgcctctt

SEQ ID NO: 1849758 - DNA, 15 bp, Homo sapiens
atgttctgcctcttt

SEQ ID NO: 1849759 - DNA, 15 bp, Homo sapiens
tgttctgcctctttg

SEQ ID NO: 1849760 - DNA, 15 bp, Homo sapiens
gttctgcctctttgg

SEQ ID NO: 1849761 - DNA, 15 bp, Homo sapiens
ttctgcctctttggc

SEQ ID NO: 1849762 - DNA, 15 bp, Homo sapiens
tctgcctctttggct

SEQ ID NO: 1849763 - DNA, 15 bp, Homo sapiens
ctgcctctttggctg

SEQ ID NO: 1849764 - DNA, 15 bp, Homo sapiens
tgcctctttggctgt

SEQ ID NO: 1849765 - DNA, 15 bp, Homo sapiens
gcctctttggctgta

SEQ ID NO: 1849766 - DNA, 15 bp, Homo sapiens
cctctttggctgtaa

SEQ ID NO: 1849767 - DNA, 15 bp, Homo sapiens
ctctttggctgtaat

SEQ ID NO: 1849768 - DNA, 15 bp, Homo sapiens
tctttggctgtaatg

SEQ ID NO: 1849769 - DNA, 15 bp, Homo sapiens
ctttggctgtaatgg

SEQ ID NO: 1849770 - DNA, 15 bp, Homo sapiens
tttggctgtaatggt

SEQ ID NO: 1849771 - DNA, 15 bp, Homo sapiens
ttggctgtaatggtg

SEQ ID NO: 1849772 - DNA, 15 bp, Homo sapiens
tggctgtaatggtgg

SEQ ID NO: 1849773 - DNA, 15 bp, Homo sapiens
ggctgtaatggtggc

SEQ ID NO: 1849774 - DNA, 15 bp, Homo sapiens
gctgtaatggtggct

SEQ ID NO: 1849775 - DNA, 15 bp, Homo sapiens
ctgtaatggtggctg

SEQ ID NO: 1849776 - DNA, 15 bp, Homo sapiens
tgtaatggtggctgc

SEQ ID NO: 1849777 - DNA, 15 bp, Homo sapiens
gtaatggtggctgcc

SEQ ID NO: 1849778 - DNA, 15 bp, Homo sapiens
taatggtggctgcct

SEQ ID NO: 1849779 - DNA, 15 bp, Homo sapiens
aatggtggctgccta

SEQ ID NO: 1849780 - DNA, 15 bp, Homo sapiens
atggtggctgcctat

SEQ ID NO: 1849781 - DNA, 15 bp, Homo sapiens
tggtggctgcctatg

SEQ ID NO: 1849782 - DNA, 15 bp, Homo sapiens
ggtggctgcctatga

SEQ ID NO: 1849783 - DNA, 15 bp, Homo sapiens
gtggctgcctatgag

SEQ ID NO: 1849784 - DNA, 15 bp, Homo sapiens
tggctgcctatgaga

SEQ ID NO: 1849785 - DNA, 15 bp, Homo sapiens
ggctgcctatgagag

SEQ ID NO: 1849786 - DNA, 15 bp, Homo sapiens
gctgcctatgagagg

SEQ ID NO: 1849787 - DNA, 15 bp, Homo sapiens
ctgcctatgagaggc

SEQ ID NO: 1849788 - DNA, 15 bp, Homo sapiens
tgcctatgagaggca

SEQ ID NO: 1849789 - DNA, 15 bp, Homo sapiens
gcctatgagaggcat

SEQ ID NO: 1849790 - DNA, 15 bp, Homo sapiens
cctatgagaggcatg

SEQ ID NO: 1849791 - DNA, 15 bp, Homo sapiens
ctatgagaggcatgg

SEQ ID NO: 1849792 - DNA, 15 bp, Homo sapiens
tatgagaggcatggg

SEQ ID NO: 1849793 - DNA, 15 bp, Homo sapiens
atgagaggcatgggt

SEQ ID NO: 1849794 - DNA, 15 bp, Homo sapiens
tgagaggcatgggtg

SEQ ID NO: 1849795 - DNA, 15 bp, Homo sapiens
gagaggcatgggtgg

SEQ ID NO: 1849796 - DNA, 15 bp, Homo sapiens
agaggcatgggtggc

SEQ ID NO: 1849797 - DNA, 15 bp, Homo sapiens
gaggcatgggtggct

SEQ ID NO: 1849798 - DNA, 15 bp, Homo sapiens
aggcatgggtggctg

SEQ ID NO: 1849799 - DNA, 15 bp, Homo sapiens
ggcatgggtggctgg

SEQ ID NO: 1849800 - DNA, 15 bp, Homo sapiens
gcatgggtggctggc

SEQ ID NO: 1849801 - DNA, 15 bp, Homo sapiens
catgggtggctggca

SEQ ID NO: 1849802 - DNA, 15 bp, Homo sapiens
atgggtggctggcag

SEQ ID NO: 1849803 - DNA, 15 bp, Homo sapiens
tgggtggctggcagc

SEQ ID NO: 1849804 - DNA, 15 bp, Homo sapiens
gggtggctggcagcc

SEQ ID NO: 1849805 - DNA, 15 bp, Homo sapiens
ggtggctggcagccc

SEQ ID NO: 1849806 - DNA, 15 bp, Homo sapiens
gtggctggcagccca

SEQ ID NO: 1849807 - DNA, 15 bp, Homo sapiens
tggctggcagcccag

SEQ ID NO: 1849808 - DNA, 15 bp, Homo sapiens
ggctggcagcccagg

SEQ ID NO: 1849809 - DNA, 15 bp, Homo sapiens
gctggcagcccaggt

SEQ ID NO: 1849810 - DNA, 15 bp, Homo sapiens
ctggcagcccaggta

SEQ ID NO: 1849811 - DNA, 15 bp, Homo sapiens
tggcagcccaggtag

SEQ ID NO: 1849812 - DNA, 15 bp, Homo sapiens
ggcagcccaggtaga

SEQ ID NO: 1849813 - DNA, 15 bp, Homo sapiens
gcagcccaggtagaa

SEQ ID NO: 1849814 - DNA, 15 bp, Homo sapiens
cagcccaggtagaag

SEQ ID NO: 1849815 - DNA, 15 bp, Homo sapiens
agcccaggtagaagg

SEQ ID NO: 1849816 - DNA, 15 bp, Homo sapiens
gcccaggtagaagga

SEQ ID NO: 1849817 - DNA, 15 bp, Homo sapiens
cccaggtagaaggaa

SEQ ID NO: 1849818 - DNA, 15 bp, Homo sapiens
ccaggtagaaggaag

SEQ ID NO: 1849819 - DNA, 15 bp, Homo sapiens
caggtagaaggaagc

SEQ ID NO: 1849820 - DNA, 15 bp, Homo sapiens
aggtagaaggaagcc

SEQ ID NO: 1849821 - DNA, 15 bp, Homo sapiens
ggtagaaggaagcct

SEQ ID NO: 1849822 - DNA, 15 bp, Homo sapiens
gtagaaggaagcctt

SEQ ID NO: 1849823 - DNA, 15 bp, Homo sapiens
tagaaggaagcctta

SEQ ID NO: 1849824 - DNA, 15 bp, Homo sapiens
agaaggaagccttat

SEQ ID NO: 1849825 - DNA, 15 bp, Homo sapiens
gaaggaagccttatc

SEQ ID NO: 1849826 - DNA, 15 bp, Homo sapiens
aaggaagccttatct

SEQ ID NO: 1849827 - DNA, 15 bp, Homo sapiens
aggaagccttatctt

SEQ ID NO: 1849828 - DNA, 15 bp, Homo sapiens
ggaagccttatcttt

SEQ ID NO: 1849829 - DNA, 15 bp, Homo sapiens
gaagccttatctttt

SEQ ID NO: 1849830 - DNA, 15 bp, Homo sapiens
aagccttatcttttt

SEQ ID NO: 1849831 - DNA, 15 bp, Homo sapiens
agccttatctttttc

SEQ ID NO: 1849832 - DNA, 15 bp, Homo sapiens
gccttatctttttct

SEQ ID NO: 1849833 - DNA, 15 bp, Homo sapiens
ccttatctttttctt

SEQ ID NO: 1849834 - DNA, 15 bp, Homo sapiens
cttatctttttcttc

SEQ ID NO: 1849835 - DNA, 15 bp, Homo sapiens
ttatctttttcttcc

SEQ ID NO: 1849836 - DNA, 15 bp, Homo sapiens
tatctttttcttcct

SEQ ID NO: 1849837 - DNA, 15 bp, Homo sapiens
atctttttcttcctc

SEQ ID NO: 1849838 - DNA, 15 bp, Homo sapiens
tctttttcttcctcc

SEQ ID NO: 1849839 - DNA, 15 bp, Homo sapiens
ctttttcttcctccc

SEQ ID NO: 1849840 - DNA, 15 bp, Homo sapiens
tttttcttcctcccc

SEQ ID NO: 1849841 - DNA, 15 bp, Homo sapiens
ttttcttcctcccct

SEQ ID NO: 1849842 - DNA, 15 bp, Homo sapiens
tttcttcctcccctt

SEQ ID NO: 1849843 - DNA, 15 bp, Homo sapiens
ttcttcctccccttt

SEQ ID NO: 1849844 - DNA, 15 bp, Homo sapiens
tcttcctcccctttt

SEQ ID NO: 1849845 - DNA, 15 bp, Homo sapiens
cttcctccccttttg

SEQ ID NO: 1849846 - DNA, 15 bp, Homo sapiens
ttcctccccttttgt

SEQ ID NO: 1849847 - DNA, 15 bp, Homo sapiens
tcctccccttttgta

SEQ ID NO: 1849848 - DNA, 15 bp, Homo sapiens
cctccccttttgtat

SEQ ID NO: 1849849 - DNA, 15 bp, Homo sapiens
ctccccttttgtatt

SEQ ID NO: 1849850 - DNA, 15 bp, Homo sapiens
tccccttttgtattc

SEQ ID NO: 1849851 - DNA, 15 bp, Homo sapiens
ccccttttgtattct

SEQ ID NO: 1849852 - DNA, 15 bp, Homo sapiens
cccttttgtattctt

SEQ ID NO: 1849853 - DNA, 15 bp, Homo sapiens
ccttttgtattcttg

SEQ ID NO: 1849854 - DNA, 15 bp, Homo sapiens
cttttgtattcttgg

SEQ ID NO: 1849855 - DNA, 15 bp, Homo sapiens
ttttgtattcttgga

SEQ ID NO: 1849856 - DNA, 15 bp, Homo sapiens
tttgtattcttggaa

SEQ ID NO: 1849857 - DNA, 15 bp, Homo sapiens
ttgtattcttggaat

SEQ ID NO: 1849858 - DNA, 15 bp, Homo sapiens
tgtattcttggaatt

SEQ ID NO: 1849859 - DNA, 15 bp, Homo sapiens
gtattcttggaattg

SEQ ID NO: 1849860 - DNA, 15 bp, Homo sapiens
tattcttggaattgt

SEQ ID NO: 1849861 - DNA, 15 bp, Homo sapiens
attcttggaattgtg

SEQ ID NO: 1849862 - DNA, 15 bp, Homo sapiens
ttcttggaattgtgt

SEQ ID NO: 1849863 - DNA, 15 bp, Homo sapiens
tcttggaattgtgta

SEQ ID NO: 1849864 - DNA, 15 bp, Homo sapiens
cttggaattgtgtac

SEQ ID NO: 1849865 - DNA, 15 bp, Homo sapiens
ttggaattgtgtacc

SEQ ID NO: 1849866 - DNA, 15 bp, Homo sapiens
tggaattgtgtacca

SEQ ID NO: 1849867 - DNA, 15 bp, Homo sapiens
ggaattgtgtaccat

SEQ ID NO: 1849868 - DNA, 15 bp, Homo sapiens
gaattgtgtaccatt

SEQ ID NO: 1849869 - DNA, 15 bp, Homo sapiens
aattgtgtaccattg

SEQ ID NO: 1849870 - DNA, 15 bp, Homo sapiens
attgtgtaccattgt

SEQ ID NO: 1849871 - DNA, 15 bp, Homo sapiens
ttgtgtaccattgtg

SEQ ID NO: 1849872 - DNA, 15 bp, Homo sapiens
tgtgtaccattgtgc

SEQ ID NO: 1849873 - DNA, 15 bp, Homo sapiens
gtgtaccattgtgca

SEQ ID NO: 1849874 - DNA, 15 bp, Homo sapiens
tgtaccattgtgcat

SEQ ID NO: 1849875 - DNA, 15 bp, Homo sapiens
gtaccattgtgcatg

SEQ ID NO: 1849876 - DNA, 15 bp, Homo sapiens
taccattgtgcatgc

SEQ ID NO: 1849877 - DNA, 15 bp, Homo sapiens
accattgtgcatgca

SEQ ID NO: 1849878 - DNA, 15 bp, Homo sapiens
ccattgtgcatgcat

SEQ ID NO: 1849879 - DNA, 15 bp, Homo sapiens
cattgtgcatgcatt

SEQ ID NO: 1849880 - DNA, 15 bp, Homo sapiens
attgtgcatgcattg

SEQ ID NO: 1849881 - DNA, 15 bp, Homo sapiens
ttgtgcatgcattgc

SEQ ID NO: 1849882 - DNA, 15 bp, Homo sapiens
tgtgcatgcattgcc

SEQ ID NO: 1849883 - DNA, 15 bp, Homo sapiens
gtgcatgcattgcct

SEQ ID NO: 1849884 - DNA, 15 bp, Homo sapiens
tgcatgcattgccta

SEQ ID NO: 1849885 - DNA, 15 bp, Homo sapiens
gcatgcattgcctat

SEQ ID NO: 1849886 - DNA, 15 bp, Homo sapiens
catgcattgcctatt

SEQ ID NO: 1849887 - DNA, 15 bp, Homo sapiens
atgcattgcctattc

SEQ ID NO: 1849888 - DNA, 15 bp, Homo sapiens
tgcattgcctattca

SEQ ID NO: 1849889 - DNA, 15 bp, Homo sapiens
gcattgcctattcaa

SEQ ID NO: 1849890 - DNA, 15 bp, Homo sapiens
cattgcctattcaaa

SEQ ID NO: 1849891 - DNA, 15 bp, Homo sapiens
attgcctattcaaaa

SEQ ID NO: 1849892 - DNA, 15 bp, Homo sapiens
ttgcctattcaaaaa

SEQ ID NO: 1849893 - DNA, 15 bp, Homo sapiens
tgcctattcaaaaat

SEQ ID NO: 1849894 - DNA, 15 bp, Homo sapiens
gcctattcaaaaatc

SEQ ID NO: 1849895 - DNA, 15 bp, Homo sapiens
cctattcaaaaatca

SEQ ID NO: 1849896 - DNA, 15 bp, Homo sapiens
ctattcaaaaatcaa

SEQ ID NO: 1849897 - DNA, 15 bp, Homo sapiens
tattcaaaaatcaat

SEQ ID NO: 1849898 - DNA, 15 bp, Homo sapiens
attcaaaaatcaata

SEQ ID NO: 1849899 - DNA, 15 bp, Homo sapiens
ttcaaaaatcaataa

SEQ ID NO: 1849900 - DNA, 15 bp, Homo sapiens
tcaaaaatcaataaa

SEQ ID NO: 1849901 - DNA, 15 bp, Homo sapiens
caaaaatcaataaaa

SEQ ID NO: 1849902 - DNA, 15 bp, Homo sapiens
aaaaatcaataaaat

SEQ ID NO: 1849903 - DNA, 15 bp, Homo sapiens
aaaatcaataaaata

SEQ ID NO: 1849904 - DNA, 15 bp, Homo sapiens
aaatcaataaaatag

SEQ ID NO: 1849905 - DNA, 15 bp, Homo sapiens
aatcaataaaataga

SEQ ID NO: 1849906 - DNA, 15 bp, Homo sapiens
atcaataaaatagaa

SEQ ID NO: 1849907 - DNA, 15 bp, Homo sapiens
tcaataaaatagaaa

SEQ ID NO: 1849908 - DNA, 15 bp, Homo sapiens
caataaaatagaaaa

SEQ ID NO: 1849909 - DNA, 15 bp, Homo sapiens
aataaaatagaaaaa

SEQ ID NO: 1849910 - DNA, 15 bp, Homo sapiens
ataaaatagaaaaag

SEQ ID NO: 1849911 - DNA, 15 bp, Homo sapiens
taaaatagaaaaagc

SEQ ID NO: 1849912 - DNA, 15 bp, Homo sapiens
aaaatagaaaaagca

SEQ ID NO: 1849913 - DNA, 15 bp, Homo sapiens
aaatagaaaaagcaa

SEQ ID NO: 1849914 - DNA, 15 bp, Homo sapiens
aatagaaaaagcaaa

SEQ ID NO: 1849915 - DNA, 15 bp, Homo sapiens
tagaaaaagcaaaga

SEQ ID NO: 1849916 - DNA, 15 bp, Homo sapiens
agaaaaagcaaagaa

SEQ ID NO: 1849917 - DNA, 15 bp, Homo sapiens
gaaaaagcaaagaaa

SEQ ID NO: 1849918 - DNA, 15 bp, Homo sapiens
aaaaagcaaagaaaa

SEQ ID NO: 1849919 - DNA, 15 bp, Homo sapiens
aaaagcaaagaaaaa

SEQ ID NO: 1849920 - DNA, 15 bp, Homo sapiens
aaagcaaagaaaaag

SEQ ID NO: 1849921 - DNA, 15 bp, Homo sapiens
aagcaaagaaaaagt

SEQ ID NO: 1849922 - DNA, 15 bp, Homo sapiens
agcaaagaaaaagta

SEQ ID NO: 1849923 - DNA, 15 bp, Homo sapiens
gcaaagaaaaagtac

SEQ ID NO: 1849924 - DNA, 15 bp, Homo sapiens
caaagaaaaagtacc

SEQ ID NO: 1849925 - DNA, 15 bp, Homo sapiens
aaagaaaaagtacca

SEQ ID NO: 1849926 - DNA, 15 bp, Homo sapiens
aagaaaaagtaccaa

SEQ ID NO: 1849927 - DNA, 15 bp, Homo sapiens
agaaaaagtaccaaa

SEQ ID NO: 1849928 - DNA, 15 bp, Homo sapiens
gaaaaagtaccaaat

SEQ ID NO: 1849929 - DNA, 15 bp, Homo sapiens
aaaaagtaccaaata

SEQ ID NO: 1849930 - DNA, 15 bp, Homo sapiens
aaaagtaccaaataa

SEQ ID NO: 1849931 - DNA, 15 bp, Homo sapiens
aaagtaccaaataag

SEQ ID NO: 1849932 - DNA, 15 bp, Homo sapiens
aagtaccaaataaga

SEQ ID NO: 1849933 - DNA, 15 bp, Homo sapiens
agtaccaaataagat

SEQ ID NO: 1849934 - DNA, 15 bp, Homo sapiens
gtaccaaataagatg

SEQ ID NO: 1849935 - DNA, 15 bp, Homo sapiens
taccaaataagatgg

SEQ ID NO: 1849936 - DNA, 15 bp, Homo sapiens
accaaataagatgga

SEQ ID NO: 1849937 - DNA, 15 bp, Homo sapiens
ccaaataagatggac

SEQ ID NO: 1849938 - DNA, 15 bp, Homo sapiens
caaataagatggact

SEQ ID NO: 1849939 - DNA, 15 bp, Homo sapiens
aaataagatggactg

SEQ ID NO: 1849940 - DNA, 15 bp, Homo sapiens
aataagatggactga

SEQ ID NO: 1849941 - DNA, 15 bp, Homo sapiens
ataagatggactgaa

SEQ ID NO: 1849942 - DNA, 15 bp, Homo sapiens
taagatggactgaag

SEQ ID NO: 1849943 - DNA, 15 bp, Homo sapiens
aagatggactgaaga

SEQ ID NO: 1849944 - DNA, 15 bp, Homo sapiens
agatggactgaagat

SEQ ID NO: 1849945 - DNA, 15 bp, Homo sapiens
gatggactgaagatg

SEQ ID NO: 1849946 - DNA, 15 bp, Homo sapiens
atggactgaagatgg

SEQ ID NO: 1849947 - DNA, 15 bp, Homo sapiens
tggactgaagatgga

SEQ ID NO: 1849948 - DNA, 15 bp, Homo sapiens
ggactgaagatggag

SEQ ID NO: 1849949 - DNA, 15 bp, Homo sapiens
gactgaagatggaga

SEQ ID NO: 1849950 - DNA, 15 bp, Homo sapiens
actgaagatggagac

SEQ ID NO: 1849951 - DNA, 15 bp, Homo sapiens
ctgaagatggagact

SEQ ID NO: 1849952 - DNA, 15 bp, Homo sapiens
tgaagatggagactc

SEQ ID NO: 1849953 - DNA, 15 bp, Homo sapiens
gaagatggagactct

SEQ ID NO: 1849954 - DNA, 15 bp, Homo sapiens
aagatggagactctc

SEQ ID NO: 1849955 - DNA, 15 bp, Homo sapiens
agatggagactctct

SEQ ID NO: 1849956 - DNA, 15 bp, Homo sapiens
gatggagactctctg

SEQ ID NO: 1849957 - DNA, 15 bp, Homo sapiens
atggagactctctgg

SEQ ID NO: 1849958 - DNA, 15 bp, Homo sapiens
tggagactctctggg

SEQ ID NO: 1849959 - DNA, 15 bp, Homo sapiens
ggagactctctgggc

SEQ ID NO: 1849960 - DNA, 15 bp, Homo sapiens
gagactctctgggct

SEQ ID NO: 1849961 - DNA, 15 bp, Homo sapiens
agactctctgggcta

SEQ ID NO: 1849962 - DNA, 15 bp, Homo sapiens
gactctctgggctat

SEQ ID NO: 1849963 - DNA, 15 bp, Homo sapiens
actctctgggctatg

SEQ ID NO: 1849964 - DNA, 15 bp, Homo sapiens
ctctctgggctatgt

SEQ ID NO: 1849965 - DNA, 15 bp, Homo sapiens
tctctgggctatgta

SEQ ID NO: 1849966 - DNA, 15 bp, Homo sapiens
ctctgggctatgtaa

SEQ ID NO: 1849967 - DNA, 15 bp, Homo sapiens
tctgggctatgtaac

SEQ ID NO: 1849968 - DNA, 15 bp, Homo sapiens
ctgggctatgtaacg

SEQ ID NO: 1849969 - DNA, 15 bp, Homo sapiens
tgggctatgtaacgt

SEQ ID NO: 1849970 - DNA, 15 bp, Homo sapiens
gggctatgtaacgtt

SEQ ID NO: 1849971 - DNA, 15 bp, Homo sapiens
ggctatgtaacgttt

SEQ ID NO: 1849972 - DNA, 15 bp, Homo sapiens
gctatgtaacgttta

SEQ ID NO: 1849973 - DNA, 15 bp, Homo sapiens
ctatgtaacgtttat

SEQ ID NO: 1849974 - DNA, 15 bp, Homo sapiens
tatgtaacgtttata

SEQ ID NO: 1849975 - DNA, 15 bp, Homo sapiens
atgtaacgtttataa

SEQ ID NO: 1849976 - DNA, 15 bp, Homo sapiens
tgtaacgtttataat

SEQ ID NO: 1849977 - DNA, 15 bp, Homo sapiens
gtaacgtttataatc

SEQ ID NO: 1849978 - DNA, 15 bp, Homo sapiens
taacgtttataatcc

SEQ ID NO: 1849979 - DNA, 15 bp, Homo sapiens
aacgtttataatccc

SEQ ID NO: 1849980 - DNA, 15 bp, Homo sapiens
acgtttataatccct

SEQ ID NO: 1849981 - DNA, 15 bp, Homo sapiens
cgtttataatccctt

SEQ ID NO: 1849982 - DNA, 15 bp, Homo sapiens
gtttataatcccttc

SEQ ID NO: 1849983 - DNA, 15 bp, Homo sapiens
tttataatcccttct

SEQ ID NO: 1849984 - DNA, 15 bp, Homo sapiens
ttataatcccttctg

SEQ ID NO: 1849985 - DNA, 15 bp, Homo sapiens
tataatcccttctgg

SEQ ID NO: 1849986 - DNA, 15 bp, Homo sapiens
ataatcccttctggc

SEQ ID NO: 1849987 - DNA, 15 bp, Homo sapiens
taatcccttctggct

SEQ ID NO: 1849988 - DNA, 15 bp, Homo sapiens
aatcccttctggctt

SEQ ID NO: 1849989 - DNA, 15 bp, Homo sapiens
atcccttctggcttg

SEQ ID NO: 1849990 - DNA, 15 bp, Homo sapiens
tcccttctggcttga

SEQ ID NO: 1849991 - DNA, 15 bp, Homo sapiens
cccttctggcttgaa

SEQ ID NO: 1849992 - DNA, 15 bp, Homo sapiens
ccttctggcttgaac

SEQ ID NO: 1849993 - DNA, 15 bp, Homo sapiens
cttctggcttgaacc

SEQ ID NO: 1849994 - DNA, 15 bp, Homo sapiens
ttctggcttgaacct

SEQ ID NO: 1849995 - DNA, 15 bp, Homo sapiens
tctggcttgaacctc

SEQ ID NO: 1849996 - DNA, 15 bp, Homo sapiens
ctggcttgaacctca

SEQ ID NO: 1849997 - DNA, 15 bp, Homo sapiens
tggcttgaacctcat

SEQ ID NO: 1849998 - DNA, 15 bp, Homo sapiens
ggcttgaacctcatt

SEQ ID NO: 1849999 - DNA, 15 bp, Homo sapiens
gcttgaacctcattt

SEQ ID NO: 1850000 - DNA, 15 bp, Homo sapiens
cttgaacctcatttt

SEQ ID NO: 1850001 - DNA, 15 bp, Homo sapiens
ttgaacctcatttta

SEQ ID NO: 1850002 - DNA, 15 bp, Homo sapiens
tgaacctcattttac

SEQ ID NO: 1850003 - DNA, 15 bp, Homo sapiens
gaacctcattttact

SEQ ID NO: 1850004 - DNA, 15 bp, Homo sapiens
aacctcattttactg

SEQ ID NO: 1850005 - DNA, 15 bp, Homo sapiens
acctcattttactgc

SEQ ID NO: 1850006 - DNA, 15 bp, Homo sapiens
cctcattttactgca

SEQ ID NO: 1850007 - DNA, 15 bp, Homo sapiens
ctcattttactgcat

SEQ ID NO: 1850008 - DNA, 15 bp, Homo sapiens
tcattttactgcatt

SEQ ID NO: 1850009 - DNA, 15 bp, Homo sapiens
cattttactgcattt

SEQ ID NO: 1850010 - DNA, 15 bp, Homo sapiens
attttactgcatttc

SEQ ID NO: 1850011 - DNA, 15 bp, Homo sapiens
ttttactgcatttct

SEQ ID NO: 1850012 - DNA, 15 bp, Homo sapiens
tttactgcatttctc

SEQ ID NO: 1850013 - DNA, 15 bp, Homo sapiens
ttactgcatttctcc

SEQ ID NO: 1850014 - DNA, 15 bp, Homo sapiens
tactgcatttctcca

SEQ ID NO: 1850015 - DNA, 15 bp, Homo sapiens
actgcatttctccag

SEQ ID NO: 1850016 - DNA, 15 bp, Homo sapiens
ctgcatttctccaga

SEQ ID NO: 1850017 - DNA, 15 bp, Homo sapiens
tgcatttctccagat

SEQ ID NO: 1850018 - DNA, 15 bp, Homo sapiens
gcatttctccagatt

SEQ ID NO: 1850019 - DNA, 15 bp, Homo sapiens
catttctccagattt

SEQ ID NO: 1850020 - DNA, 15 bp, Homo sapiens
atttctccagatttt

SEQ ID NO: 1850021 - DNA, 15 bp, Homo sapiens
tttctccagattttt

SEQ ID NO: 1850022 - DNA, 15 bp, Homo sapiens
ttctccagatttttc

SEQ ID NO: 1850023 - DNA, 15 bp, Homo sapiens
tctccagatttttcc

SEQ ID NO: 1850024 - DNA, 15 bp, Homo sapiens
ctccagatttttcct

SEQ ID NO: 1850025 - DNA, 15 bp, Homo sapiens
tccagatttttcctt

SEQ ID NO: 1850026 - DNA, 15 bp, Homo sapiens
ccagatttttccttt

SEQ ID NO: 1850027 - DNA, 15 bp, Homo sapiens
cagatttttccttta

SEQ ID NO: 1850028 - DNA, 15 bp, Homo sapiens
agatttttcctttat

SEQ ID NO: 1850029 - DNA, 15 bp, Homo sapiens
gatttttcctttatg

SEQ ID NO: 1850030 - DNA, 15 bp, Homo sapiens
atttttcctttatgg

SEQ ID NO: 1850031 - DNA, 15 bp, Homo sapiens
tttttcctttatggt

SEQ ID NO: 1850032 - DNA, 15 bp, Homo sapiens
ttttcctttatggtc

SEQ ID NO: 1850033 - DNA, 15 bp, Homo sapiens
tttcctttatggtct

SEQ ID NO: 1850034 - DNA, 15 bp, Homo sapiens
ttcctttatggtcta

SEQ ID NO: 1850035 - DNA, 15 bp, Homo sapiens
tcctttatggtctac

SEQ ID NO: 1850036 - DNA, 15 bp, Homo sapiens
cctttatggtctacc

SEQ ID NO: 1850037 - DNA, 15 bp, Homo sapiens
ctttatggtctacca

SEQ ID NO: 1850038 - DNA, 15 bp, Homo sapiens
tttatggtctaccag

SEQ ID NO: 1850039 - DNA, 15 bp, Homo sapiens
ttatggtctaccaga

SEQ ID NO: 1850040 - DNA, 15 bp, Homo sapiens
tatggtctaccagac

SEQ ID NO: 1850041 - DNA, 15 bp, Homo sapiens
atggtctaccagact

SEQ ID NO: 1850042 - DNA, 15 bp, Homo sapiens
tggtctaccagactc

SEQ ID NO: 1850043 - DNA, 15 bp, Homo sapiens
ggtctaccagactct

SEQ ID NO: 1850044 - DNA, 15 bp, Homo sapiens
gtctaccagactcta

SEQ ID NO: 1850045 - DNA, 15 bp, Homo sapiens
tctaccagactctaa

SEQ ID NO: 1850046 - DNA, 15 bp, Homo sapiens
ctaccagactctaac

SEQ ID NO: 1850047 - DNA, 15 bp, Homo sapiens
taccagactctaaca

SEQ ID NO: 1850048 - DNA, 15 bp, Homo sapiens
accagactctaacaa

SEQ ID NO: 1850049 - DNA, 15 bp, Homo sapiens
ccagactctaacaat

SEQ ID NO: 1850050 - DNA, 15 bp, Homo sapiens
cagactctaacaatg

SEQ ID NO: 1850051 - DNA, 15 bp, Homo sapiens
agactctaacaatgc

SEQ ID NO: 1850052 - DNA, 15 bp, Homo sapiens
gactctaacaatgct

SEQ ID NO: 1850053 - DNA, 15 bp, Homo sapiens
actctaacaatgcta

SEQ ID NO: 1850054 - DNA, 15 bp, Homo sapiens
ctctaacaatgctaa

SEQ ID NO: 1850055 - DNA, 15 bp, Homo sapiens
tctaacaatgctaaa

SEQ ID NO: 1850056 - DNA, 15 bp, Homo sapiens
ctaacaatgctaaat

SEQ ID NO: 1850057 - DNA, 15 bp, Homo sapiens
taacaatgctaaata

SEQ ID NO: 1850058 - DNA, 15 bp, Homo sapiens
aacaatgctaaataa

SEQ ID NO: 1850059 - DNA, 15 bp, Homo sapiens
acaatgctaaataac

SEQ ID NO: 1850060 - DNA, 15 bp, Homo sapiens
caatgctaaataaca

SEQ ID NO: 1850061 - DNA, 15 bp, Homo sapiens
aatgctaaataacat

SEQ ID NO: 1850062 - DNA, 15 bp, Homo sapiens
atgctaaataacatc

SEQ ID NO: 1850063 - DNA, 15 bp, Homo sapiens
tgctaaataacatca

SEQ ID NO: 1850064 - DNA, 15 bp, Homo sapiens
gctaaataacatcat

SEQ ID NO: 1850065 - DNA, 15 bp, Homo sapiens
ctaaataacatcatc

SEQ ID NO: 1850066 - DNA, 15 bp, Homo sapiens
taaataacatcatct

SEQ ID NO: 1850067 - DNA, 15 bp, Homo sapiens
aaataacatcatctt

SEQ ID NO: 1850068 - DNA, 15 bp, Homo sapiens
aataacatcatcttc

SEQ ID NO: 1850069 - DNA, 15 bp, Homo sapiens
ataacatcatcttcc

SEQ ID NO: 1850070 - DNA, 15 bp, Homo sapiens
taacatcatcttccc

SEQ ID NO: 1850071 - DNA, 15 bp, Homo sapiens
aacatcatcttcccc

SEQ ID NO: 1850072 - DNA, 15 bp, Homo sapiens
acatcatcttccccc

SEQ ID NO: 1850073 - DNA, 15 bp, Homo sapiens
catcatcttccccca

SEQ ID NO: 1850074 - DNA, 15 bp, Homo sapiens
atcatcttcccccaa

SEQ ID NO: 1850075 - DNA, 15 bp, Homo sapiens
tcatcttcccccaac

SEQ ID NO: 1850076 - DNA, 15 bp, Homo sapiens
catcttcccccaact

SEQ ID NO: 1850077 - DNA, 15 bp, Homo sapiens
atcttcccccaactt

SEQ ID NO: 1850078 - DNA, 15 bp, Homo sapiens
tcttcccccaacttt

SEQ ID NO: 1850079 - DNA, 15 bp, Homo sapiens
cttcccccaactttg

SEQ ID NO: 1850080 - DNA, 15 bp, Homo sapiens
ttcccccaactttga

SEQ ID NO: 1850081 - DNA, 15 bp, Homo sapiens
tcccccaactttgaa

SEQ ID NO: 1850082 - DNA, 15 bp, Homo sapiens
cccccaactttgaaa

SEQ ID NO: 1850083 - DNA, 15 bp, Homo sapiens
ccccaactttgaaag

SEQ ID NO: 1850084 - DNA, 15 bp, Homo sapiens
cccaactttgaaagc

SEQ ID NO: 1850085 - DNA, 15 bp, Homo sapiens
ccaactttgaaagcc

SEQ ID NO: 1850086 - DNA, 15 bp, Homo sapiens
caactttgaaagcct

SEQ ID NO: 1850087 - DNA, 15 bp, Homo sapiens
aactttgaaagcctt

SEQ ID NO: 1850088 - DNA, 15 bp, Homo sapiens
actttgaaagccttc

SEQ ID NO: 1850089 - DNA, 15 bp, Homo sapiens
ctttgaaagccttca

SEQ ID NO: 1850090 - DNA, 15 bp, Homo sapiens
tttgaaagccttcaa

SEQ ID NO: 1850091 - DNA, 15 bp, Homo sapiens
ttgaaagccttcaaa

SEQ ID NO: 1850092 - DNA, 15 bp, Homo sapiens
tgaaagccttcaaaa

SEQ ID NO: 1850093 - DNA, 15 bp, Homo sapiens
gaaagccttcaaaag

SEQ ID NO: 1850094 - DNA, 15 bp, Homo sapiens
aaagccttcaaaaga

SEQ ID NO: 1850095 - DNA, 15 bp, Homo sapiens
aagccttcaaaagaa

SEQ ID NO: 1850096 - DNA, 15 bp, Homo sapiens
agccttcaaaagaaa

SEQ ID NO: 1850097 - DNA, 15 bp, Homo sapiens
gccttcaaaagaaat

SEQ ID NO: 1850098 - DNA, 15 bp, Homo sapiens
ccttcaaaagaaatg

SEQ ID NO: 1850099 - DNA, 15 bp, Homo sapiens
cttcaaaagaaatgt

SEQ ID NO: 1850100 - DNA, 15 bp, Homo sapiens
ttcaaaagaaatgtt

SEQ ID NO: 1850101 - DNA, 15 bp, Homo sapiens
tcaaaagaaatgttt

SEQ ID NO: 1850102 - DNA, 15 bp, Homo sapiens
caaaagaaatgttta

SEQ ID NO: 1850103 - DNA, 15 bp, Homo sapiens
aaaagaaatgtttat

SEQ ID NO: 1850104 - DNA, 15 bp, Homo sapiens
aaagaaatgtttatg

SEQ ID NO: 1850105 - DNA, 15 bp, Homo sapiens
aagaaatgtttatgg

SEQ ID NO: 1850106 - DNA, 15 bp, Homo sapiens
agaaatgtttatggg

SEQ ID NO: 1850107 - DNA, 15 bp, Homo sapiens
gaaatgtttatggga

SEQ ID NO: 1850108 - DNA, 15 bp, Homo sapiens
aaatgtttatgggat

SEQ ID NO: 1850109 - DNA, 15 bp, Homo sapiens
aatgtttatgggata

SEQ ID NO: 1850110 - DNA, 15 bp, Homo sapiens
atgtttatgggatag

SEQ ID NO: 1850111 - DNA, 15 bp, Homo sapiens
tgtttatgggataga

SEQ ID NO: 1850112 - DNA, 15 bp, Homo sapiens
gtttatgggatagag

SEQ ID NO: 1850113 - DNA, 15 bp, Homo sapiens
tttatgggatagagg

SEQ ID NO: 1850114 - DNA, 15 bp, Homo sapiens
ttatgggatagaggg

SEQ ID NO: 1850115 - DNA, 15 bp, Homo sapiens
tatgggatagagggg

SEQ ID NO: 1850116 - DNA, 15 bp, Homo sapiens
atgggatagaggggg

SEQ ID NO: 1850117 - DNA, 15 bp, Homo sapiens
tgggatagaggggga

SEQ ID NO: 1850118 - DNA, 15 bp, Homo sapiens
gggatagagggggat

SEQ ID NO: 1850119 - DNA, 15 bp, Homo sapiens
ggatagagggggatc

SEQ ID NO: 1850120 - DNA, 15 bp, Homo sapiens
gatagagggggatca

SEQ ID NO: 1850121 - DNA, 15 bp, Homo sapiens
atagagggggatcaa

SEQ ID NO: 1850122 - DNA, 15 bp, Homo sapiens
tagagggggatcaaa

SEQ ID NO: 1850123 - DNA, 15 bp, Homo sapiens
agagggggatcaaaa

SEQ ID NO: 1850124 - DNA, 15 bp, Homo sapiens
gagggggatcaaaac

SEQ ID NO: 1850125 - DNA, 15 bp, Homo sapiens
agggggatcaaaact

SEQ ID NO: 1850126 - DNA, 15 bp, Homo sapiens
gggggatcaaaacta

SEQ ID NO: 1850127 - DNA, 15 bp, Homo sapiens
ggggatcaaaactaa

SEQ ID NO: 1850128 - DNA, 15 bp, Homo sapiens
gggatcaaaactaaa

SEQ ID NO: 1850129 - DNA, 15 bp, Homo sapiens
ggatcaaaactaaat

SEQ ID NO: 1850130 - DNA, 15 bp, Homo sapiens
gatcaaaactaaatt

SEQ ID NO: 1850131 - DNA, 15 bp, Homo sapiens
atcaaaactaaattg

SEQ ID NO: 1850132 - DNA, 15 bp, Homo sapiens
tcaaaactaaattgg

SEQ ID NO: 1850133 - DNA, 15 bp, Homo sapiens
caaaactaaattggg

SEQ ID NO: 1850134 - DNA, 15 bp, Homo sapiens
aaaactaaattgggc

SEQ ID NO: 1850135 - DNA, 15 bp, Homo sapiens
aaactaaattgggca

SEQ ID NO: 1850136 - DNA, 15 bp, Homo sapiens
aactaaattgggcac

SEQ ID NO: 1850137 - DNA, 15 bp, Homo sapiens
actaaattgggcaca

SEQ ID NO: 1850138 - DNA, 15 bp, Homo sapiens
ctaaattgggcacag

SEQ ID NO: 1850139 - DNA, 15 bp, Homo sapiens
taaattgggcacagc

SEQ ID NO: 1850140 - DNA, 15 bp, Homo sapiens
aaattgggcacagca

SEQ ID NO: 1850141 - DNA, 15 bp, Homo sapiens
aattgggcacagcag

SEQ ID NO: 1850142 - DNA, 15 bp, Homo sapiens
attgggcacagcaga

SEQ ID NO: 1850143 - DNA, 15 bp, Homo sapiens
ttgggcacagcagaa

SEQ ID NO: 1850144 - DNA, 15 bp, Homo sapiens
tgggcacagcagaat

SEQ ID NO: 1850145 - DNA, 15 bp, Homo sapiens
gggcacagcagaatc

SEQ ID NO: 1850146 - DNA, 15 bp, Homo sapiens
ggcacagcagaatcc

SEQ ID NO: 1850147 - DNA, 15 bp, Homo sapiens
gcacagcagaatcct

SEQ ID NO: 1850148 - DNA, 15 bp, Homo sapiens
cacagcagaatcctg

SEQ ID NO: 1850149 - DNA, 15 bp, Homo sapiens
acagcagaatcctgc

SEQ ID NO: 1850150 - DNA, 15 bp, Homo sapiens
cagcagaatcctgcc

SEQ ID NO: 1850151 - DNA, 15 bp, Homo sapiens
agcagaatcctgccc

SEQ ID NO: 1850152 - DNA, 15 bp, Homo sapiens
gcagaatcctgccca

SEQ ID NO: 1850153 - DNA, 15 bp, Homo sapiens
cagaatcctgcccac

SEQ ID NO: 1850154 - DNA, 15 bp, Homo sapiens
agaatcctgcccact

SEQ ID NO: 1850155 - DNA, 15 bp, Homo sapiens
gaatcctgcccactg

SEQ ID NO: 1850156 - DNA, 15 bp, Homo sapiens
aatcctgcccactgg

SEQ ID NO: 1850157 - DNA, 15 bp, Homo sapiens
atcctgcccactggg

SEQ ID NO: 1850158 - DNA, 15 bp, Homo sapiens
tcctgcccactgggt

SEQ ID NO: 1850159 - DNA, 15 bp, Homo sapiens
cctgcccactgggta

SEQ ID NO: 1850160 - DNA, 15 bp, Homo sapiens
ctgcccactgggtaa

SEQ ID NO: 1850161 - DNA, 15 bp, Homo sapiens
tgcccactgggtaac

SEQ ID NO: 1850162 - DNA, 15 bp, Homo sapiens
gcccactgggtaact

SEQ ID NO: 1850163 - DNA, 15 bp, Homo sapiens
cccactgggtaactc

SEQ ID NO: 1850164 - DNA, 15 bp, Homo sapiens
ccactgggtaactcc

SEQ ID NO: 1850165 - DNA, 15 bp, Homo sapiens
cactgggtaactcct

SEQ ID NO: 1850166 - DNA, 15 bp, Homo sapiens
actgggtaactcctc

SEQ ID NO: 1850167 - DNA, 15 bp, Homo sapiens
ctgggtaactcctct

SEQ ID NO: 1850168 - DNA, 15 bp, Homo sapiens
tgggtaactcctctc

SEQ ID NO: 1850169 - DNA, 15 bp, Homo sapiens
gggtaactcctctcc

SEQ ID NO: 1850170 - DNA, 15 bp, Homo sapiens
ggtaactcctctcca

SEQ ID NO: 1850171 - DNA, 15 bp, Homo sapiens
gtaactcctctccat

SEQ ID NO: 1850172 - DNA, 15 bp, Homo sapiens
taactcctctccatg

SEQ ID NO: 1850173 - DNA, 15 bp, Homo sapiens
aactcctctccatga

SEQ ID NO: 1850174 - DNA, 15 bp, Homo sapiens
actcctctccatgaa

SEQ ID NO: 1850175 - DNA, 15 bp, Homo sapiens
ctcctctccatgaaa

SEQ ID NO: 1850176 - DNA, 15 bp, Homo sapiens
tcctctccatgaaaa

SEQ ID NO: 1850177 - DNA, 15 bp, Homo sapiens
cctctccatgaaaat

SEQ ID NO: 1850178 - DNA, 15 bp, Homo sapiens
ctctccatgaaaatg

SEQ ID NO: 1850179 - DNA, 15 bp, Homo sapiens
tctccatgaaaatga

SEQ ID NO: 1850180 - DNA, 15 bp, Homo sapiens
ctccatgaaaatgaa

SEQ ID NO: 1850181 - DNA, 15 bp, Homo sapiens
tccatgaaaatgaat

SEQ ID NO: 1850182 - DNA, 15 bp, Homo sapiens
ccatgaaaatgaatc

SEQ ID NO: 1850183 - DNA, 15 bp, Homo sapiens
catgaaaatgaatcc

SEQ ID NO: 1850184 - DNA, 15 bp, Homo sapiens
atgaaaatgaatccc

SEQ ID NO: 1850185 - DNA, 15 bp, Homo sapiens
tgaaaatgaatccct

SEQ ID NO: 1850186 - DNA, 15 bp, Homo sapiens
gaaaatgaatccctc

SEQ ID NO: 1850187 - DNA, 15 bp, Homo sapiens
aaaatgaatccctct

SEQ ID NO: 1850188 - DNA, 15 bp, Homo sapiens
aaatgaatccctctt

SEQ ID NO: 1850189 - DNA, 15 bp, Homo sapiens
aatgaatccctcttc

SEQ ID NO: 1850190 - DNA, 15 bp, Homo sapiens
atgaatccctcttca

SEQ ID NO: 1850191 - DNA, 15 bp, Homo sapiens
tgaatccctcttcac

SEQ ID NO: 1850192 - DNA, 15 bp, Homo sapiens
gaatccctcttcact

SEQ ID NO: 1850193 - DNA, 15 bp, Homo sapiens
aatccctcttcactt

SEQ ID NO: 1850194 - DNA, 15 bp, Homo sapiens
atccctcttcacttc

SEQ ID NO: 1850195 - DNA, 15 bp, Homo sapiens
tccctcttcacttcc

SEQ ID NO: 1850196 - DNA, 15 bp, Homo sapiens
ccctcttcacttcct

SEQ ID NO: 1850197 - DNA, 15 bp, Homo sapiens
cctcttcacttcctc

SEQ ID NO: 1850198 - DNA, 15 bp, Homo sapiens
ctcttcacttcctcc

SEQ ID NO: 1850199 - DNA, 15 bp, Homo sapiens
tcttcacttcctcct

SEQ ID NO: 1850200 - DNA, 15 bp, Homo sapiens
cttcacttcctcctt

SEQ ID NO: 1850201 - DNA, 15 bp, Homo sapiens
ttcacttcctccttg

SEQ ID NO: 1850202 - DNA, 15 bp, Homo sapiens
tcacttcctccttgt

SEQ ID NO: 1850203 - DNA, 15 bp, Homo sapiens
cacttcctccttgta

SEQ ID NO: 1850204 - DNA, 15 bp, Homo sapiens
acttcctccttgtat

SEQ ID NO: 1850205 - DNA, 15 bp, Homo sapiens
cttcctccttgtatc

SEQ ID NO: 1850206 - DNA, 15 bp, Homo sapiens
ttcctccttgtatct

SEQ ID NO: 1850207 - DNA, 15 bp, Homo sapiens
tcctccttgtatctc

SEQ ID NO: 1850208 - DNA, 15 bp, Homo sapiens
cctccttgtatctca

SEQ ID NO: 1850209 - DNA, 15 bp, Homo sapiens
ctccttgtatctcat

SEQ ID NO: 1850210 - DNA, 15 bp, Homo sapiens
tccttgtatctcata

SEQ ID NO: 1850211 - DNA, 15 bp, Homo sapiens
ccttgtatctcataa

SEQ ID NO: 1850212 - DNA, 15 bp, Homo sapiens
cttgtatctcataat

SEQ ID NO: 1850213 - DNA, 15 bp, Homo sapiens
ttgtatctcataatt

SEQ ID NO: 1850214 - DNA, 15 bp, Homo sapiens
tgtatctcataatta

SEQ ID NO: 1850215 - DNA, 15 bp, Homo sapiens
gtatctcataattac

SEQ ID NO: 1850216 - DNA, 15 bp, Homo sapiens
tatctcataattacc

SEQ ID NO: 1850217 - DNA, 15 bp, Homo sapiens
atctcataattacca

SEQ ID NO: 1850218 - DNA, 15 bp, Homo sapiens
tctcataattaccag

SEQ ID NO: 1850219 - DNA, 15 bp, Homo sapiens
ctcataattaccagg

SEQ ID NO: 1850220 - DNA, 15 bp, Homo sapiens
tcataattaccaggg

SEQ ID NO: 1850221 - DNA, 15 bp, Homo sapiens
cataattaccagggg

SEQ ID NO: 1850222 - DNA, 15 bp, Homo sapiens
ataattaccagggga

SEQ ID NO: 1850223 - DNA, 15 bp, Homo sapiens
taattaccaggggag

SEQ ID NO: 1850224 - DNA, 15 bp, Homo sapiens
aattaccaggggaga

SEQ ID NO: 1850225 - DNA, 15 bp, Homo sapiens
attaccaggggagat

SEQ ID NO: 1850226 - DNA, 15 bp, Homo sapiens
ttaccaggggagata

SEQ ID NO: 1850227 - DNA, 15 bp, Homo sapiens
taccaggggagatat

SEQ ID NO: 1850228 - DNA, 15 bp, Homo sapiens
accaggggagatatc

SEQ ID NO: 1850229 - DNA, 15 bp, Homo sapiens
ccaggggagatatct

SEQ ID NO: 1850230 - DNA, 15 bp, Homo sapiens
caggggagatatctc

SEQ ID NO: 1850231 - DNA, 15 bp, Homo sapiens
aggggagatatctcc

SEQ ID NO: 1850232 - DNA, 15 bp, Homo sapiens
ggggagatatctcca

SEQ ID NO: 1850233 - DNA, 15 bp, Homo sapiens
gggagatatctccag

SEQ ID NO: 1850234 - DNA, 15 bp, Homo sapiens
ggagatatctccagg

SEQ ID NO: 1850235 - DNA, 15 bp, Homo sapiens
gagatatctccagga

SEQ ID NO: 1850236 - DNA, 15 bp, Homo sapiens
agatatctccaggac

SEQ ID NO: 1850237 - DNA, 15 bp, Homo sapiens
gatatctccaggaca

SEQ ID NO: 1850238 - DNA, 15 bp, Homo sapiens
atatctccaggacac

SEQ ID NO: 1850239 - DNA, 15 bp, Homo sapiens
tatctccaggacaca

SEQ ID NO: 1850240 - DNA, 15 bp, Homo sapiens
atctccaggacacag

SEQ ID NO: 1850241 - DNA, 15 bp, Homo sapiens
tctccaggacacagg

SEQ ID NO: 1850242 - DNA, 15 bp, Homo sapiens
ctccaggacacagga

SEQ ID NO: 1850243 - DNA, 15 bp, Homo sapiens
tccaggacacaggaa

SEQ ID NO: 1850244 - DNA, 15 bp, Homo sapiens
ccaggacacaggaaa

SEQ ID NO: 1850245 - DNA, 15 bp, Homo sapiens
caggacacaggaaaa

SEQ ID NO: 1850246 - DNA, 15 bp, Homo sapiens
aggacacaggaaaat

SEQ ID NO: 1850247 - DNA, 15 bp, Homo sapiens
ggacacaggaaaata

SEQ ID NO: 1850248 - DNA, 15 bp, Homo sapiens
gacacaggaaaatat

SEQ ID NO: 1850249 - DNA, 15 bp, Homo sapiens
acacaggaaaatatg

SEQ ID NO: 1850250 - DNA, 15 bp, Homo sapiens
cacaggaaaatatgt

SEQ ID NO: 1850251 - DNA, 15 bp, Homo sapiens
acaggaaaatatgta

SEQ ID NO: 1850252 - DNA, 15 bp, Homo sapiens
caggaaaatatgtat

SEQ ID NO: 1850253 - DNA, 15 bp, Homo sapiens
aggaaaatatgtatg

SEQ ID NO: 1850254 - DNA, 15 bp, Homo sapiens
ggaaaatatgtatga

SEQ ID NO: 1850255 - DNA, 15 bp, Homo sapiens
gaaaatatgtatgac

SEQ ID NO: 1850256 - DNA, 15 bp, Homo sapiens
aaaatatgtatgact

SEQ ID NO: 1850257 - DNA, 15 bp, Homo sapiens
aaatatgtatgactc

SEQ ID NO: 1850258 - DNA, 15 bp, Homo sapiens
aatatgtatgactca

SEQ ID NO: 1850259 - DNA, 15 bp, Homo sapiens
atatgtatgactcat

SEQ ID NO: 1850260 - DNA, 15 bp, Homo sapiens
tatgtatgactcata

SEQ ID NO: 1850261 - DNA, 15 bp, Homo sapiens
atgtatgactcatag

SEQ ID NO: 1850262 - DNA, 15 bp, Homo sapiens
tgtatgactcatagt

SEQ ID NO: 1850263 - DNA, 15 bp, Homo sapiens
gtatgactcatagta

SEQ ID NO: 1850264 - DNA, 15 bp, Homo sapiens
tatgactcatagtag

SEQ ID NO: 1850265 - DNA, 15 bp, Homo sapiens
atgactcatagtagt

SEQ ID NO: 1850266 - DNA, 15 bp, Homo sapiens
tgactcatagtagta

SEQ ID NO: 1850267 - DNA, 15 bp, Homo sapiens
gactcatagtagtac

SEQ ID NO: 1850268 - DNA, 15 bp, Homo sapiens
actcatagtagtact

SEQ ID NO: 1850269 - DNA, 15 bp, Homo sapiens
ctcatagtagtacta

SEQ ID NO: 1850270 - DNA, 15 bp, Homo sapiens
tcatagtagtactag

SEQ ID NO: 1850271 - DNA, 15 bp, Homo sapiens
catagtagtactaga

SEQ ID NO: 1850272 - DNA, 15 bp, Homo sapiens
atagtagtactagaa

SEQ ID NO: 1850273 - DNA, 15 bp, Homo sapiens
tagtagtactagaaa

SEQ ID NO: 1850274 - DNA, 15 bp, Homo sapiens
agtagtactagaaaa

SEQ ID NO: 1850275 - DNA, 15 bp, Homo sapiens
gtagtactagaaaag

SEQ ID NO: 1850276 - DNA, 15 bp, Homo sapiens
tagtactagaaaaga

SEQ ID NO: 1850277 - DNA, 15 bp, Homo sapiens
agtactagaaaagaa

SEQ ID NO: 1850278 - DNA, 15 bp, Homo sapiens
gtactagaaaagaac

SEQ ID NO: 1850279 - DNA, 15 bp, Homo sapiens
tactagaaaagaact

SEQ ID NO: 1850280 - DNA, 15 bp, Homo sapiens
actagaaaagaacta

SEQ ID NO: 1850281 - DNA, 15 bp, Homo sapiens
ctagaaaagaactaa

SEQ ID NO: 1850282 - DNA, 15 bp, Homo sapiens
tagaaaagaactaaa

SEQ ID NO: 1850283 - DNA, 15 bp, Homo sapiens
agaaaagaactaaaa

SEQ ID NO: 1850284 - DNA, 15 bp, Homo sapiens
gaaaagaactaaaaa

SEQ ID NO: 1850285 - DNA, 15 bp, Homo sapiens
aaaagaactaaaaac

SEQ ID NO: 1850286 - DNA, 15 bp, Homo sapiens
aaagaactaaaaaca

SEQ ID NO: 1850287 - DNA, 15 bp, Homo sapiens
aagaactaaaaacac

SEQ ID NO: 1850288 - DNA, 15 bp, Homo sapiens
agaactaaaaacact

SEQ ID NO: 1850289 - DNA, 15 bp, Homo sapiens
gaactaaaaacactt

SEQ ID NO: 1850290 - DNA, 15 bp, Homo sapiens
aactaaaaacactta

SEQ ID NO: 1850291 - DNA, 15 bp, Homo sapiens
actaaaaacacttac

SEQ ID NO: 1850292 - DNA, 15 bp, Homo sapiens
ctaaaaacacttaca

SEQ ID NO: 1850293 - DNA, 15 bp, Homo sapiens
taaaaacacttacat

SEQ ID NO: 1850294 - DNA, 15 bp, Homo sapiens
aaaaacacttacatt

SEQ ID NO: 1850295 - DNA, 15 bp, Homo sapiens
aaaacacttacattg

SEQ ID NO: 1850296 - DNA, 15 bp, Homo sapiens
aaacacttacattgt

SEQ ID NO: 1850297 - DNA, 15 bp, Homo sapiens
aacacttacattgtt

SEQ ID NO: 1850298 - DNA, 15 bp, Homo sapiens
acacttacattgttt

SEQ ID NO: 1850299 - DNA, 15 bp, Homo sapiens
cacttacattgtttc

SEQ ID NO: 1850300 - DNA, 15 bp, Homo sapiens
acttacattgtttcc

SEQ ID NO: 1850301 - DNA, 15 bp, Homo sapiens
cttacattgtttcct

SEQ ID NO: 1850302 - DNA, 15 bp, Homo sapiens
ttacattgtttcctc

SEQ ID NO: 1850303 - DNA, 15 bp, Homo sapiens
tacattgtttcctca

SEQ ID NO: 1850304 - DNA, 15 bp, Homo sapiens
acattgtttcctcac

SEQ ID NO: 1850305 - DNA, 15 bp, Homo sapiens
cattgtttcctcact

SEQ ID NO: 1850306 - DNA, 15 bp, Homo sapiens
attgtttcctcactt

SEQ ID NO: 1850307 - DNA, 15 bp, Homo sapiens
ttgtttcctcactta

SEQ ID NO: 1850308 - DNA, 15 bp, Homo sapiens
tgtttcctcacttat

SEQ ID NO: 1850309 - DNA, 15 bp, Homo sapiens
gtttcctcacttatc

SEQ ID NO: 1850310 - DNA, 15 bp, Homo sapiens
tttcctcacttatcc

SEQ ID NO: 1850311 - DNA, 15 bp, Homo sapiens
ttcctcacttatccc

SEQ ID NO: 1850312 - DNA, 15 bp, Homo sapiens
tcctcacttatccct

SEQ ID NO: 1850313 - DNA, 15 bp, Homo sapiens
cctcacttatccctc

SEQ ID NO: 1850314 - DNA, 15 bp, Homo sapiens
ctcacttatccctct

SEQ ID NO: 1850315 - DNA, 15 bp, Homo sapiens
tcacttatccctctc

SEQ ID NO: 1850316 - DNA, 15 bp, Homo sapiens
cacttatccctctct

SEQ ID NO: 1850317 - DNA, 15 bp, Homo sapiens
acttatccctctctt

SEQ ID NO: 1850318 - DNA, 15 bp, Homo sapiens
cttatccctctctta

SEQ ID NO: 1850319 - DNA, 15 bp, Homo sapiens
ttatccctctcttat

SEQ ID NO: 1850320 - DNA, 15 bp, Homo sapiens
tatccctctcttatt

SEQ ID NO: 1850321 - DNA, 15 bp, Homo sapiens
atccctctcttattc

SEQ ID NO: 1850322 - DNA, 15 bp, Homo sapiens
tccctctcttattcc

SEQ ID NO: 1850323 - DNA, 15 bp, Homo sapiens
ccctctcttattcca

SEQ ID NO: 1850324 - DNA, 15 bp, Homo sapiens
cctctcttattccaa

SEQ ID NO: 1850325 - DNA, 15 bp, Homo sapiens
ctctcttattccaac

SEQ ID NO: 1850326 - DNA, 15 bp, Homo sapiens
tctcttattccaaca

SEQ ID NO: 1850327 - DNA, 15 bp, Homo sapiens
ctcttattccaacag

SEQ ID NO: 1850328 - DNA, 15 bp, Homo sapiens
tcttattccaacagg

SEQ ID NO: 1850329 - DNA, 15 bp, Homo sapiens
cttattccaacaggg

SEQ ID NO: 1850330 - DNA, 15 bp, Homo sapiens
ttattccaacaggga

SEQ ID NO: 1850331 - DNA, 15 bp, Homo sapiens
tattccaacagggaa

SEQ ID NO: 1850332 - DNA, 15 bp, Homo sapiens
attccaacagggaaa

SEQ ID NO: 1850333 - DNA, 15 bp, Homo sapiens
ttccaacagggaaaa

SEQ ID NO: 1850334 - DNA, 15 bp, Homo sapiens
tccaacagggaaaag

SEQ ID NO: 1850335 - DNA, 15 bp, Homo sapiens
ccaacagggaaaaga

SEQ ID NO: 1850336 - DNA, 15 bp, Homo sapiens
caacagggaaaagat

SEQ ID NO: 1850337 - DNA, 15 bp, Homo sapiens
aacagggaaaagatt

SEQ ID NO: 1850338 - DNA, 15 bp, Homo sapiens
acagggaaaagattt

SEQ ID NO: 1850339 - DNA, 15 bp, Homo sapiens
cagggaaaagatttc

SEQ ID NO: 1850340 - DNA, 15 bp, Homo sapiens
agggaaaagatttcc

SEQ ID NO: 1850341 - DNA, 15 bp, Homo sapiens
gggaaaagatttccc

SEQ ID NO: 1850342 - DNA, 15 bp, Homo sapiens
ggaaaagatttccct

SEQ ID NO: 1850343 - DNA, 15 bp, Homo sapiens
gaaaagatttcccta

SEQ ID NO: 1850344 - DNA, 15 bp, Homo sapiens
aaaagatttccctag

SEQ ID NO: 1850345 - DNA, 15 bp, Homo sapiens
aaagatttccctagg

SEQ ID NO: 1850346 - DNA, 15 bp, Homo sapiens
aagatttccctaggt

SEQ ID NO: 1850347 - DNA, 15 bp, Homo sapiens
agatttccctaggtt

SEQ ID NO: 1850348 - DNA, 15 bp, Homo sapiens
gatttccctaggttt

SEQ ID NO: 1850349 - DNA, 15 bp, Homo sapiens
atttccctaggttta

SEQ ID NO: 1850350 - DNA, 15 bp, Homo sapiens
tttccctaggtttat

SEQ ID NO: 1850351 - DNA, 15 bp, Homo sapiens
ttccctaggtttatt

SEQ ID NO: 1850352 - DNA, 15 bp, Homo sapiens
tccctaggtttattt

SEQ ID NO: 1850353 - DNA, 15 bp, Homo sapiens
ccctaggtttatttg

SEQ ID NO: 1850354 - DNA, 15 bp, Homo sapiens
cctaggtttatttgt

SEQ ID NO: 1850355 - DNA, 15 bp, Homo sapiens
ctaggtttatttgtt

SEQ ID NO: 1850356 - DNA, 15 bp, Homo sapiens
taggtttatttgttt

SEQ ID NO: 1850357 - DNA, 15 bp, Homo sapiens
aggtttatttgtttg

SEQ ID NO: 1850358 - DNA, 15 bp, Homo sapiens
ggtttatttgtttgt

SEQ ID NO: 1850359 - DNA, 15 bp, Homo sapiens
gtttatttgtttgtt

SEQ ID NO: 1850360 - DNA, 15 bp, Homo sapiens
tttatttgtttgttt

SEQ ID NO: 1850361 - DNA, 15 bp, Homo sapiens
ttatttgtttgtttt

SEQ ID NO: 1850362 - DNA, 15 bp, Homo sapiens
tatttgtttgttttt

SEQ ID NO: 1850363 - DNA, 15 bp, Homo sapiens
atttgtttgttttta

SEQ ID NO: 1850364 - DNA, 15 bp, Homo sapiens
tttgtttgtttttaa

SEQ ID NO: 1850365 - DNA, 15 bp, Homo sapiens
ttgtttgtttttaaa

SEQ ID NO: 1850366 - DNA, 15 bp, Homo sapiens
tgtttgtttttaaac

SEQ ID NO: 1850367 - DNA, 15 bp, Homo sapiens
gtttgtttttaaact

SEQ ID NO: 1850368 - DNA, 15 bp, Homo sapiens
tttgtttttaaactc

SEQ ID NO: 1850369 - DNA, 15 bp, Homo sapiens
ttgtttttaaactca

SEQ ID NO: 1850370 - DNA, 15 bp, Homo sapiens
tgtttttaaactcag

SEQ ID NO: 1850371 - DNA, 15 bp, Homo sapiens
gtttttaaactcaga

SEQ ID NO: 1850372 - DNA, 15 bp, Homo sapiens
tttttaaactcagac

SEQ ID NO: 1850373 - DNA, 15 bp, Homo sapiens
ttttaaactcagacg

SEQ ID NO: 1850374 - DNA, 15 bp, Homo sapiens
tttaaactcagacgc

SEQ ID NO: 1850375 - DNA, 15 bp, Homo sapiens
ttaaactcagacgct

SEQ ID NO: 1850376 - DNA, 15 bp, Homo sapiens
taaactcagacgcta

SEQ ID NO: 1850377 - DNA, 15 bp, Homo sapiens
aaactcagacgctag

SEQ ID NO: 1850378 - DNA, 15 bp, Homo sapiens
aactcagacgctagc

SEQ ID NO: 1850379 - DNA, 15 bp, Homo sapiens
actcagacgctagcc

SEQ ID NO: 1850380 - DNA, 15 bp, Homo sapiens
ctcagacgctagcct

SEQ ID NO: 1850381 - DNA, 15 bp, Homo sapiens
tcagacgctagcctt

SEQ ID NO: 1850382 - DNA, 15 bp, Homo sapiens
cagacgctagcctta

SEQ ID NO: 1850383 - DNA, 15 bp, Homo sapiens
agacgctagccttac

SEQ ID NO: 1850384 - DNA, 15 bp, Homo sapiens
gacgctagccttacc

SEQ ID NO: 1850385 - DNA, 15 bp, Homo sapiens
acgctagccttacct

SEQ ID NO: 1850386 - DNA, 15 bp, Homo sapiens
cgctagccttacctc

SEQ ID NO: 1850387 - DNA, 15 bp, Homo sapiens
gctagccttacctct

SEQ ID NO: 1850388 - DNA, 15 bp, Homo sapiens
ctagccttacctctt

SEQ ID NO: 1850389 - DNA, 15 bp, Homo sapiens
tagccttacctcttt

SEQ ID NO: 1850390 - DNA, 15 bp, Homo sapiens
agccttacctctttg

SEQ ID NO: 1850391 - DNA, 15 bp, Homo sapiens
gccttacctctttga

SEQ ID NO: 1850392 - DNA, 15 bp, Homo sapiens
ccttacctctttgac

SEQ ID NO: 1850393 - DNA, 15 bp, Homo sapiens
cttacctctttgaca

SEQ ID NO: 1850394 - DNA, 15 bp, Homo sapiens
ttacctctttgacag

SEQ ID NO: 1850395 - DNA, 15 bp, Homo sapiens
tacctctttgacaga

SEQ ID NO: 1850396 - DNA, 15 bp, Homo sapiens
acctctttgacagag

SEQ ID NO: 1850397 - DNA, 15 bp, Homo sapiens
cctctttgacagagt

SEQ ID NO: 1850398 - DNA, 15 bp, Homo sapiens
ctctttgacagagtt

SEQ ID NO: 1850399 - DNA, 15 bp, Homo sapiens
tctttgacagagttc

SEQ ID NO: 1850400 - DNA, 15 bp, Homo sapiens
ctttgacagagttct

SEQ ID NO: 1850401 - DNA, 15 bp, Homo sapiens
tttgacagagttcta

SEQ ID NO: 1850402 - DNA, 15 bp, Homo sapiens
ttgacagagttctaa

SEQ ID NO: 1850403 - DNA, 15 bp, Homo sapiens
tgacagagttctaac

SEQ ID NO: 1850404 - DNA, 15 bp, Homo sapiens
gacagagttctaact

SEQ ID NO: 1850405 - DNA, 15 bp, Homo sapiens
acagagttctaactg

SEQ ID NO: 1850406 - DNA, 15 bp, Homo sapiens
cagagttctaactgg

SEQ ID NO: 1850407 - DNA, 15 bp, Homo sapiens
agagttctaactggt

SEQ ID NO: 1850408 - DNA, 15 bp, Homo sapiens
gagttctaactggtc

SEQ ID NO: 1850409 - DNA, 15 bp, Homo sapiens
agttctaactggtcc

SEQ ID NO: 1850410 - DNA, 15 bp, Homo sapiens
gttctaactggtcct

SEQ ID NO: 1850411 - DNA, 15 bp, Homo sapiens
ttctaactggtcctt

SEQ ID NO: 1850412 - DNA, 15 bp, Homo sapiens
tctaactggtcctta

SEQ ID NO: 1850413 - DNA, 15 bp, Homo sapiens
ctaactggtccttat

SEQ ID NO: 1850414 - DNA, 15 bp, Homo sapiens
taactggtccttata

SEQ ID NO: 1850415 - DNA, 15 bp, Homo sapiens
aactggtccttataa

SEQ ID NO: 1850416 - DNA, 15 bp, Homo sapiens
actggtccttataaa

SEQ ID NO: 1850417 - DNA, 15 bp, Homo sapiens
ctggtccttataaaa

SEQ ID NO: 1850418 - DNA, 15 bp, Homo sapiens
tggtccttataaaac

SEQ ID NO: 1850419 - DNA, 15 bp, Homo sapiens
ggtccttataaaacc

SEQ ID NO: 1850420 - DNA, 15 bp, Homo sapiens
gtccttataaaaccc

SEQ ID NO: 1850421 - DNA, 15 bp, Homo sapiens
tccttataaaaccca

SEQ ID NO: 1850422 - DNA, 15 bp, Homo sapiens
ccttataaaacccac

SEQ ID NO: 1850423 - DNA, 15 bp, Homo sapiens
cttataaaacccaca

SEQ ID NO: 1850424 - DNA, 15 bp, Homo sapiens
ttataaaacccacac

SEQ ID NO: 1850425 - DNA, 15 bp, Homo sapiens
tataaaacccacaca

SEQ ID NO: 1850426 - DNA, 15 bp, Homo sapiens
ataaaacccacacaa

SEQ ID NO: 1850427 - DNA, 15 bp, Homo sapiens
taaaacccacacaag

SEQ ID NO: 1850428 - DNA, 15 bp, Homo sapiens
aaaacccacacaagg

SEQ ID NO: 1850429 - DNA, 15 bp, Homo sapiens
aaacccacacaaggg

SEQ ID NO: 1850430 - DNA, 15 bp, Homo sapiens
aacccacacaagggg

SEQ ID NO: 1850431 - DNA, 15 bp, Homo sapiens
acccacacaaggggc

SEQ ID NO: 1850432 - DNA, 15 bp, Homo sapiens
cccacacaaggggcc

SEQ ID NO: 1850433 - DNA, 15 bp, Homo sapiens
ccacacaaggggccg

SEQ ID NO: 1850434 - DNA, 15 bp, Homo sapiens
cacacaaggggccgg

SEQ ID NO: 1850435 - DNA, 15 bp, Homo sapiens
acacaaggggccggg

SEQ ID NO: 1850436 - DNA, 15 bp, Homo sapiens
cacaaggggccgggc

SEQ ID NO: 1850437 - DNA, 15 bp, Homo sapiens
acaaggggccgggca

SEQ ID NO: 1850438 - DNA, 15 bp, Homo sapiens
caaggggccgggcat

SEQ ID NO: 1850439 - DNA, 15 bp, Homo sapiens
aaggggccgggcatg

SEQ ID NO: 1850440 - DNA, 15 bp, Homo sapiens
aggggccgggcatgg

SEQ ID NO: 1850441 - DNA, 15 bp, Homo sapiens
ggggccgggcatggt

SEQ ID NO: 1850442 - DNA, 15 bp, Homo sapiens
gggccgggcatggtg

SEQ ID NO: 1850443 - DNA, 15 bp, Homo sapiens
catggtggctcatgg

SEQ ID NO: 1850444 - DNA, 15 bp, Homo sapiens
atggtggctcatggc

SEQ ID NO: 1850445 - DNA, 15 bp, Homo sapiens
tggtggctcatggct

SEQ ID NO: 1850446 - DNA, 15 bp, Homo sapiens
tggctgtaatcccat

SEQ ID NO: 1850447 - DNA, 15 bp, Homo sapiens
ggctgtaatcccatc

SEQ ID NO: 1850448 - DNA, 15 bp, Homo sapiens
gctgtaatcccatca

SEQ ID NO: 1850449 - DNA, 15 bp, Homo sapiens
ctgtaatcccatcac

SEQ ID NO: 1850450 - DNA, 15 bp, Homo sapiens
tgtaatcccatcact

SEQ ID NO: 1850451 - DNA, 15 bp, Homo sapiens
gtaatcccatcactt

SEQ ID NO: 1850452 - DNA, 15 bp, Homo sapiens
taatcccatcacttt

SEQ ID NO: 1850453 - DNA, 15 bp, Homo sapiens
aatcccatcactttg

SEQ ID NO: 1850454 - DNA, 15 bp, Homo sapiens
atcccatcactttgg

SEQ ID NO: 1850455 - DNA, 15 bp, Homo sapiens
tcccatcactttggg

SEQ ID NO: 1850456 - DNA, 15 bp, Homo sapiens
cccatcactttggga

SEQ ID NO: 1850457 - DNA, 15 bp, Homo sapiens
ccatcactttgggag

SEQ ID NO: 1850458 - DNA, 15 bp, Homo sapiens
catcactttgggaga

SEQ ID NO: 1850459 - DNA, 15 bp, Homo sapiens
atcactttgggagac

SEQ ID NO: 1850460 - DNA, 15 bp, Homo sapiens
tcactttgggagacc

SEQ ID NO: 1850461 - DNA, 15 bp, Homo sapiens
tgggagaccgaggcg

SEQ ID NO: 1850462 - DNA, 15 bp, Homo sapiens
gggagaccgaggcgg

SEQ ID NO: 1850463 - DNA, 15 bp, Homo sapiens
ggagaccgaggcggg

SEQ ID NO: 1850464 - DNA, 15 bp, Homo sapiens
gagaccgaggcgggc

SEQ ID NO: 1850465 - DNA, 15 bp, Homo sapiens
agaccgaggcgggcg

SEQ ID NO: 1850466 - DNA, 15 bp, Homo sapiens
gaccgaggcgggcgg

SEQ ID NO: 1850467 - DNA, 15 bp, Homo sapiens
accgaggcgggcgga

SEQ ID NO: 1850468 - DNA, 15 bp, Homo sapiens
atcacttgaggtcac

SEQ ID NO: 1850469 - DNA, 15 bp, Homo sapiens
tcacttgaggtcact

SEQ ID NO: 1850470 - DNA, 15 bp, Homo sapiens
cacttgaggtcactt

SEQ ID NO: 1850471 - DNA, 15 bp, Homo sapiens
acttgaggtcacttg

SEQ ID NO: 1850472 - DNA, 15 bp, Homo sapiens
cttgaggtcacttga

SEQ ID NO: 1850473 - DNA, 15 bp, Homo sapiens
ttgaggtcacttgag

SEQ ID NO: 1850474 - DNA, 15 bp, Homo sapiens
tgaggtcacttgagg

SEQ ID NO: 1850475 - DNA, 15 bp, Homo sapiens
gaggtcacttgaggt

SEQ ID NO: 1850476 - DNA, 15 bp, Homo sapiens
aggtcacttgaggtt

SEQ ID NO: 1850477 - DNA, 15 bp, Homo sapiens
ggtcacttgaggttc

SEQ ID NO: 1850478 - DNA, 15 bp, Homo sapiens
gtcacttgaggttcg

SEQ ID NO: 1850479 - DNA, 15 bp, Homo sapiens
tcacttgaggttcga

SEQ ID NO: 1850480 - DNA, 15 bp, Homo sapiens
cacttgaggttcgag

SEQ ID NO: 1850481 - DNA, 15 bp, Homo sapiens
acttgaggttcgaga

SEQ ID NO: 1850482 - DNA, 15 bp, Homo sapiens
cttgaggttcgagac

SEQ ID NO: 1850483 - DNA, 15 bp, Homo sapiens
ttgaggttcgagacc

SEQ ID NO: 1850484 - DNA, 15 bp, Homo sapiens
tgaggttcgagacca

SEQ ID NO: 1850485 - DNA, 15 bp, Homo sapiens
gaggttcgagaccaa

SEQ ID NO: 1850486 - DNA, 15 bp, Homo sapiens
aggttcgagaccaac

SEQ ID NO: 1850487 - DNA, 15 bp, Homo sapiens
ggttcgagaccaact

SEQ ID NO: 1850488 - DNA, 15 bp, Homo sapiens
gttcgagaccaactt

SEQ ID NO: 1850489 - DNA, 15 bp, Homo sapiens
ttcgagaccaacttg

SEQ ID NO: 1850490 - DNA, 15 bp, Homo sapiens
tcgagaccaacttga

SEQ ID NO: 1850491 - DNA, 15 bp, Homo sapiens
cgagaccaacttgac

SEQ ID NO: 1850492 - DNA, 15 bp, Homo sapiens
gagaccaacttgacc

SEQ ID NO: 1850493 - DNA, 15 bp, Homo sapiens
agaccaacttgacca

SEQ ID NO: 1850494 - DNA, 15 bp, Homo sapiens
gaccaacttgaccag

SEQ ID NO: 1850495 - DNA, 15 bp, Homo sapiens
accaacttgaccagc

SEQ ID NO: 1850496 - DNA, 15 bp, Homo sapiens
ccaacttgaccagca

SEQ ID NO: 1850497 - DNA, 15 bp, Homo sapiens
caacttgaccagcat

SEQ ID NO: 1850498 - DNA, 15 bp, Homo sapiens
aacttgaccagcatg

SEQ ID NO: 1850499 - DNA, 15 bp, Homo sapiens
acttgaccagcatgg

SEQ ID NO: 1850500 - DNA, 15 bp, Homo sapiens
cttgaccagcatggt

SEQ ID NO: 1850501 - DNA, 15 bp, Homo sapiens
ttgaccagcatggtg

SEQ ID NO: 1850502 - DNA, 15 bp, Homo sapiens
tgaccagcatggtga

SEQ ID NO: 1850503 - DNA, 15 bp, Homo sapiens
gaccagcatggtgaa

SEQ ID NO: 1850504 - DNA, 15 bp, Homo sapiens
accagcatggtgaaa

SEQ ID NO: 1850505 - DNA, 15 bp, Homo sapiens
cccgtttctactaaa

SEQ ID NO: 1850506 - DNA, 15 bp, Homo sapiens
ccgtttctactaaaa

SEQ ID NO: 1850507 - DNA, 15 bp, Homo sapiens
cgtttctactaaaaa

SEQ ID NO: 1850508 - DNA, 15 bp, Homo sapiens
acaaaaattagccaa

SEQ ID NO: 1850509 - DNA, 15 bp, Homo sapiens
caaaaattagccaag

SEQ ID NO: 1850510 - DNA, 15 bp, Homo sapiens
aaaaattagccaagt

SEQ ID NO: 1850511 - DNA, 15 bp, Homo sapiens
aaaattagccaagtg

SEQ ID NO: 1850512 - DNA, 15 bp, Homo sapiens
aaattagccaagtgt

SEQ ID NO: 1850513 - DNA, 15 bp, Homo sapiens
aattagccaagtgtg

SEQ ID NO: 1850514 - DNA, 15 bp, Homo sapiens
attagccaagtgtgg

SEQ ID NO: 1850515 - DNA, 15 bp, Homo sapiens
ttagccaagtgtggt

SEQ ID NO: 1850516 - DNA, 15 bp, Homo sapiens
tagccaagtgtggtg

SEQ ID NO: 1850517 - DNA, 15 bp, Homo sapiens
agccaagtgtggtgg

SEQ ID NO: 1850518 - DNA, 15 bp, Homo sapiens
gccaagtgtggtggt

SEQ ID NO: 1850519 - DNA, 15 bp, Homo sapiens
ccaagtgtggtggtg

SEQ ID NO: 1850520 - DNA, 15 bp, Homo sapiens
caagtgtggtggtgc

SEQ ID NO: 1850521 - DNA, 15 bp, Homo sapiens
aagtgtggtggtgca

SEQ ID NO: 1850522 - DNA, 15 bp, Homo sapiens
agtgtggtggtgcac

SEQ ID NO: 1850523 - DNA, 15 bp, Homo sapiens
gtggtggtgcacact

SEQ ID NO: 1850524 - DNA, 15 bp, Homo sapiens
tggtggtgcacactg

SEQ ID NO: 1850525 - DNA, 15 bp, Homo sapiens
ggtggtgcacactgt

SEQ ID NO: 1850526 - DNA, 15 bp, Homo sapiens
gtggtgcacactgta

SEQ ID NO: 1850527 - DNA, 15 bp, Homo sapiens
tggtgcacactgtaa

SEQ ID NO: 1850528 - DNA, 15 bp, Homo sapiens
ggtgcacactgtaat

SEQ ID NO: 1850529 - DNA, 15 bp, Homo sapiens
gtgcacactgtaatc

SEQ ID NO: 1850530 - DNA, 15 bp, Homo sapiens
tgcacactgtaatcc

SEQ ID NO: 1850531 - DNA, 15 bp, Homo sapiens
gcacactgtaatccc

SEQ ID NO: 1850532 - DNA, 15 bp, Homo sapiens
cacactgtaatccca

SEQ ID NO: 1850533 - DNA, 15 bp, Homo sapiens
acactgtaatcccag

SEQ ID NO: 1850534 - DNA, 15 bp, Homo sapiens
cactgtaatcccagc

SEQ ID NO: 1850535 - DNA, 15 bp, Homo sapiens
actgtaatcccagcc

SEQ ID NO: 1850536 - DNA, 15 bp, Homo sapiens
ctgtaatcccagcca

SEQ ID NO: 1850537 - DNA, 15 bp, Homo sapiens
tgtaatcccagccac

SEQ ID NO: 1850538 - DNA, 15 bp, Homo sapiens
gtaatcccagccact

SEQ ID NO: 1850539 - DNA, 15 bp, Homo sapiens
taatcccagccactc

SEQ ID NO: 1850540 - DNA, 15 bp, Homo sapiens
aatcccagccactca

SEQ ID NO: 1850541 - DNA, 15 bp, Homo sapiens
atcccagccactcag

SEQ ID NO: 1850542 - DNA, 15 bp, Homo sapiens
gagaatcgcttgaat

SEQ ID NO: 1850543 - DNA, 15 bp, Homo sapiens
agaatcgcttgaatc

SEQ ID NO: 1850544 - DNA, 15 bp, Homo sapiens
gaatcgcttgaatct

SEQ ID NO: 1850545 - DNA, 15 bp, Homo sapiens
aatcgcttgaatctg

SEQ ID NO: 1850546 - DNA, 15 bp, Homo sapiens
atcgcttgaatctgg

SEQ ID NO: 1850547 - DNA, 15 bp, Homo sapiens
tcgcttgaatctggg

SEQ ID NO: 1850548 - DNA, 15 bp, Homo sapiens
cgcttgaatctggga

SEQ ID NO: 1850549 - DNA, 15 bp, Homo sapiens
cttgaatctgggagg

SEQ ID NO: 1850550 - DNA, 15 bp, Homo sapiens
ttgaatctgggaggc

SEQ ID NO: 1850551 - DNA, 15 bp, Homo sapiens
tgaatctgggaggcg

SEQ ID NO: 1850552 - DNA, 15 bp, Homo sapiens
gaatctgggaggcgg

SEQ ID NO: 1850553 - DNA, 15 bp, Homo sapiens
aatctgggaggcgga

SEQ ID NO: 1850554 - DNA, 15 bp, Homo sapiens
atctgggaggcggag

SEQ ID NO: 1850555 - DNA, 15 bp, Homo sapiens
tctgggaggcggagg

SEQ ID NO: 1850556 - DNA, 15 bp, Homo sapiens
gaggttgcggtgagt

SEQ ID NO: 1850557 - DNA, 15 bp, Homo sapiens
aggttgcggtgagtc

SEQ ID NO: 1850558 - DNA, 15 bp, Homo sapiens
ggttgcggtgagtca

SEQ ID NO: 1850559 - DNA, 15 bp, Homo sapiens
gttgcggtgagtcac

SEQ ID NO: 1850560 - DNA, 15 bp, Homo sapiens
ttgcggtgagtcacg

SEQ ID NO: 1850561 - DNA, 15 bp, Homo sapiens
tgcggtgagtcacga

SEQ ID NO: 1850562 - DNA, 15 bp, Homo sapiens
gcggtgagtcacgat

SEQ ID NO: 1850563 - DNA, 15 bp, Homo sapiens
cggtgagtcacgatc

SEQ ID NO: 1850564 - DNA, 15 bp, Homo sapiens
ggtgagtcacgatcc

SEQ ID NO: 1850565 - DNA, 15 bp, Homo sapiens
gtgagtcacgatcct

SEQ ID NO: 1850566 - DNA, 15 bp, Homo sapiens
tgagtcacgatcctg

SEQ ID NO: 1850567 - DNA, 15 bp, Homo sapiens
gagtcacgatcctgc

SEQ ID NO: 1850568 - DNA, 15 bp, Homo sapiens
agtcacgatcctgcc

SEQ ID NO: 1850569 - DNA, 15 bp, Homo sapiens
gtcacgatcctgcca

SEQ ID NO: 1850570 - DNA, 15 bp, Homo sapiens
tcacgatcctgccac

SEQ ID NO: 1850571 - DNA, 15 bp, Homo sapiens
cacgatcctgccaca

SEQ ID NO: 1850572 - DNA, 15 bp, Homo sapiens
acgatcctgccacag

SEQ ID NO: 1850573 - DNA, 15 bp, Homo sapiens
cgatcctgccacagc

SEQ ID NO: 1850574 - DNA, 15 bp, Homo sapiens
gatcctgccacagca

SEQ ID NO: 1850575 - DNA, 15 bp, Homo sapiens
atcctgccacagcac

SEQ ID NO: 1850576 - DNA, 15 bp, Homo sapiens
tcctgccacagcact

SEQ ID NO: 1850577 - DNA, 15 bp, Homo sapiens
cctgccacagcactc

SEQ ID NO: 1850578 - DNA, 15 bp, Homo sapiens
ctgccacagcactcc

SEQ ID NO: 1850579 - DNA, 15 bp, Homo sapiens
agcactccagcctgc

SEQ ID NO: 1850580 - DNA, 15 bp, Homo sapiens
gcactccagcctgcg

SEQ ID NO: 1850581 - DNA, 15 bp, Homo sapiens
cactccagcctgcgt

SEQ ID NO: 1850582 - DNA, 15 bp, Homo sapiens
actccagcctgcgtg

SEQ ID NO: 1850583 - DNA, 15 bp, Homo sapiens
ctccagcctgcgtga

SEQ ID NO: 1850584 - DNA, 15 bp, Homo sapiens
tccagcctgcgtgac

SEQ ID NO: 1850585 - DNA, 15 bp, Homo sapiens
ccagcctgcgtgaca

SEQ ID NO: 1850586 - DNA, 15 bp, Homo sapiens
cagcctgcgtgacag

SEQ ID NO: 1850587 - DNA, 15 bp, Homo sapiens
agcctgcgtgacaga

SEQ ID NO: 1850588 - DNA, 15 bp, Homo sapiens
gcctgcgtgacagag

SEQ ID NO: 1850589 - DNA, 15 bp, Homo sapiens
cctgcgtgacagagc

SEQ ID NO: 1850590 - DNA, 15 bp, Homo sapiens
ctgcgtgacagagcg

SEQ ID NO: 1850591 - DNA, 15 bp, Homo sapiens
tgcgtgacagagcga

SEQ ID NO: 1850592 - DNA, 15 bp, Homo sapiens
gcgtgacagagcgag

SEQ ID NO: 1850593 - DNA, 15 bp, Homo sapiens
cgtgacagagcgaga

SEQ ID NO: 1850594 - DNA, 15 bp, Homo sapiens
tctgtctcaaaaaac

SEQ ID NO: 1850595 - DNA, 15 bp, Homo sapiens
ctgtctcaaaaaact

SEQ ID NO: 1850596 - DNA, 15 bp, Homo sapiens
tgtctcaaaaaactg

SEQ ID NO: 1850597 - DNA, 15 bp, Homo sapiens
gtctcaaaaaactga

SEQ ID NO: 1850598 - DNA, 15 bp, Homo sapiens
tctcaaaaaactgaa

SEQ ID NO: 1850599 - DNA, 15 bp, Homo sapiens
ctcaaaaaactgaaa

SEQ ID NO: 1850600 - DNA, 15 bp, Homo sapiens
tcaaaaaactgaaaa

SEQ ID NO: 1850601 - DNA, 15 bp, Homo sapiens
caaaaaactgaaaac

SEQ ID NO: 1850602 - DNA, 15 bp, Homo sapiens
aaaaaactgaaaaca

SEQ ID NO: 1850603 - DNA, 15 bp, Homo sapiens
aaaaactgaaaacaa

SEQ ID NO: 1850604 - DNA, 15 bp, Homo sapiens
aaaactgaaaacaaa

SEQ ID NO: 1850605 - DNA, 15 bp, Homo sapiens
aaactgaaaacaaaa

SEQ ID NO: 1850606 - DNA, 15 bp, Homo sapiens
aactgaaaacaaaaa

SEQ ID NO: 1850607 - DNA, 15 bp, Homo sapiens
actgaaaacaaaaaa

SEQ ID NO: 1850608 - DNA, 15 bp, Homo sapiens
ctgaaaacaaaaaac

SEQ ID NO: 1850609 - DNA, 15 bp, Homo sapiens
tgaaaacaaaaaacc

SEQ ID NO: 1850610 - DNA, 15 bp, Homo sapiens
gaaaacaaaaaaccc

SEQ ID NO: 1850611 - DNA, 15 bp, Homo sapiens
aaaacaaaaaacccc

SEQ ID NO: 1850612 - DNA, 15 bp, Homo sapiens
aaacaaaaaaccccc

SEQ ID NO: 1850613 - DNA, 15 bp, Homo sapiens
aacaaaaaaccccca

SEQ ID NO: 1850614 - DNA, 15 bp, Homo sapiens
acaaaaaacccccac

SEQ ID NO: 1850615 - DNA, 15 bp, Homo sapiens
caaaaaacccccaca

SEQ ID NO: 1850616 - DNA, 15 bp, Homo sapiens
aaaaaacccccacac

SEQ ID NO: 1850617 - DNA, 15 bp, Homo sapiens
aaaaacccccacaca

SEQ ID NO: 1850618 - DNA, 15 bp, Homo sapiens
aaaacccccacacaa

SEQ ID NO: 1850619 - DNA, 15 bp, Homo sapiens
aaacccccacacaaa

SEQ ID NO: 1850620 - DNA, 15 bp, Homo sapiens
aacccccacacaaac

SEQ ID NO: 1850621 - DNA, 15 bp, Homo sapiens
acccccacacaaaca

SEQ ID NO: 1850622 - DNA, 15 bp, Homo sapiens
cccccacacaaacaa

SEQ ID NO: 1850623 - DNA, 15 bp, Homo sapiens
ccccacacaaacaaa

SEQ ID NO: 1850624 - DNA, 15 bp, Homo sapiens
cccacacaaacaaaa

SEQ ID NO: 1850625 - DNA, 15 bp, Homo sapiens
ccacacaaacaaaat

SEQ ID NO: 1850626 - DNA, 15 bp, Homo sapiens
cacacaaacaaaatc

SEQ ID NO: 1850627 - DNA, 15 bp, Homo sapiens
acacaaacaaaatcc

SEQ ID NO: 1850628 - DNA, 15 bp, Homo sapiens
cacaaacaaaatccc

SEQ ID NO: 1850629 - DNA, 15 bp, Homo sapiens
acaaacaaaatccca

SEQ ID NO: 1850630 - DNA, 15 bp, Homo sapiens
caaacaaaatcccag

SEQ ID NO: 1850631 - DNA, 15 bp, Homo sapiens
aaacaaaatcccagc

SEQ ID NO: 1850632 - DNA, 15 bp, Homo sapiens
aacaaaatcccagcc

SEQ ID NO: 1850633 - DNA, 15 bp, Homo sapiens
acaaaatcccagcca

SEQ ID NO: 1850634 - DNA, 15 bp, Homo sapiens
caaaatcccagccac

SEQ ID NO: 1850635 - DNA, 15 bp, Homo sapiens
aaaatcccagccact

SEQ ID NO: 1850636 - DNA, 15 bp, Homo sapiens
aaatcccagccacta

SEQ ID NO: 1850637 - DNA, 15 bp, Homo sapiens
aatcccagccactag

SEQ ID NO: 1850638 - DNA, 15 bp, Homo sapiens
atcccagccactaga

SEQ ID NO: 1850639 - DNA, 15 bp, Homo sapiens
tcccagccactagaa

SEQ ID NO: 1850640 - DNA, 15 bp, Homo sapiens
cccagccactagaaa

SEQ ID NO: 1850641 - DNA, 15 bp, Homo sapiens
ccagccactagaaaa

SEQ ID NO: 1850642 - DNA, 15 bp, Homo sapiens
cagccactagaaaaa

SEQ ID NO: 1850643 - DNA, 15 bp, Homo sapiens
agccactagaaaaag

SEQ ID NO: 1850644 - DNA, 15 bp, Homo sapiens
gccactagaaaaagt

SEQ ID NO: 1850645 - DNA, 15 bp, Homo sapiens
ccactagaaaaagta

SEQ ID NO: 1850646 - DNA, 15 bp, Homo sapiens
cactagaaaaagtag

SEQ ID NO: 1850647 - DNA, 15 bp, Homo sapiens
actagaaaaagtagc

SEQ ID NO: 1850648 - DNA, 15 bp, Homo sapiens
ctagaaaaagtagct

SEQ ID NO: 1850649 - DNA, 15 bp, Homo sapiens
tagaaaaagtagctt

SEQ ID NO: 1850650 - DNA, 15 bp, Homo sapiens
agaaaaagtagcttc

SEQ ID NO: 1850651 - DNA, 15 bp, Homo sapiens
gaaaaagtagcttcc

SEQ ID NO: 1850652 - DNA, 15 bp, Homo sapiens
aaaaagtagcttcct

SEQ ID NO: 1850653 - DNA, 15 bp, Homo sapiens
aaaagtagcttcctt

SEQ ID NO: 1850654 - DNA, 15 bp, Homo sapiens
aaagtagcttccttc

SEQ ID NO: 1850655 - DNA, 15 bp, Homo sapiens
aagtagcttccttct

SEQ ID NO: 1850656 - DNA, 15 bp, Homo sapiens
agtagcttccttctt

SEQ ID NO: 1850657 - DNA, 15 bp, Homo sapiens
gtagcttccttcttc

SEQ ID NO: 1850658 - DNA, 15 bp, Homo sapiens
tagcttccttcttca

SEQ ID NO: 1850659 - DNA, 15 bp, Homo sapiens
agcttccttcttcat

SEQ ID NO: 1850660 - DNA, 15 bp, Homo sapiens
gcttccttcttcatt

SEQ ID NO: 1850661 - DNA, 15 bp, Homo sapiens
cttccttcttcatta

SEQ ID NO: 1850662 - DNA, 15 bp, Homo sapiens
ttccttcttcattac

SEQ ID NO: 1850663 - DNA, 15 bp, Homo sapiens
tccttcttcattacc

SEQ ID NO: 1850664 - DNA, 15 bp, Homo sapiens
ccttcttcattaccc

SEQ ID NO: 1850665 - DNA, 15 bp, Homo sapiens
cttcttcattaccct

SEQ ID NO: 1850666 - DNA, 15 bp, Homo sapiens
ttcttcattacccta

SEQ ID NO: 1850667 - DNA, 15 bp, Homo sapiens
tcttcattaccctat

SEQ ID NO: 1850668 - DNA, 15 bp, Homo sapiens
cttcattaccctatc

SEQ ID NO: 1850669 - DNA, 15 bp, Homo sapiens
ttcattaccctatca

SEQ ID NO: 1850670 - DNA, 15 bp, Homo sapiens
tcattaccctatcac

SEQ ID NO: 1850671 - DNA, 15 bp, Homo sapiens
cattaccctatcact

SEQ ID NO: 1850672 - DNA, 15 bp, Homo sapiens
attaccctatcactt

SEQ ID NO: 1850673 - DNA, 15 bp, Homo sapiens
ttaccctatcacttg

SEQ ID NO: 1850674 - DNA, 15 bp, Homo sapiens
taccctatcacttgg

SEQ ID NO: 1850675 - DNA, 15 bp, Homo sapiens
accctatcacttgga

SEQ ID NO: 1850676 - DNA, 15 bp, Homo sapiens
ccctatcacttggac

SEQ ID NO: 1850677 - DNA, 15 bp, Homo sapiens
cctatcacttggaca

SEQ ID NO: 1850678 - DNA, 15 bp, Homo sapiens
ctatcacttggacaa

SEQ ID NO: 1850679 - DNA, 15 bp, Homo sapiens
tatcacttggacaat

SEQ ID NO: 1850680 - DNA, 15 bp, Homo sapiens
atcacttggacaatt

SEQ ID NO: 1850681 - DNA, 15 bp, Homo sapiens
tcacttggacaatta

SEQ ID NO: 1850682 - DNA, 15 bp, Homo sapiens
cacttggacaattat

SEQ ID NO: 1850683 - DNA, 15 bp, Homo sapiens
acttggacaattatc

SEQ ID NO: 1850684 - DNA, 15 bp, Homo sapiens
cttggacaattatct

SEQ ID NO: 1850685 - DNA, 15 bp, Homo sapiens
ttggacaattatctc

SEQ ID NO: 1850686 - DNA, 15 bp, Homo sapiens
tggacaattatctcc

SEQ ID NO: 1850687 - DNA, 15 bp, Homo sapiens
ggacaattatctcct

SEQ ID NO: 1850688 - DNA, 15 bp, Homo sapiens
gacaattatctcctc

SEQ ID NO: 1850689 - DNA, 15 bp, Homo sapiens
acaattatctcctct

SEQ ID NO: 1850690 - DNA, 15 bp, Homo sapiens
caattatctcctcta

SEQ ID NO: 1850691 - DNA, 15 bp, Homo sapiens
aattatctcctctaa

SEQ ID NO: 1850692 - DNA, 15 bp, Homo sapiens
attatctcctctaaa

SEQ ID NO: 1850693 - DNA, 15 bp, Homo sapiens
ttatctcctctaaaa

SEQ ID NO: 1850694 - DNA, 15 bp, Homo sapiens
tatctcctctaaaaa

SEQ ID NO: 1850695 - DNA, 15 bp, Homo sapiens
atctcctctaaaaat

SEQ ID NO: 1850696 - DNA, 15 bp, Homo sapiens
tctcctctaaaaatt

SEQ ID NO: 1850697 - DNA, 15 bp, Homo sapiens
ctcctctaaaaattc

SEQ ID NO: 1850698 - DNA, 15 bp, Homo sapiens
tcctctaaaaattca

SEQ ID NO: 1850699 - DNA, 15 bp, Homo sapiens
cctctaaaaattcat

SEQ ID NO: 1850700 - DNA, 15 bp, Homo sapiens
ctctaaaaattcatt

SEQ ID NO: 1850701 - DNA, 15 bp, Homo sapiens
tctaaaaattcattt

SEQ ID NO: 1850702 - DNA, 15 bp, Homo sapiens
ctaaaaattcatttc

SEQ ID NO: 1850703 - DNA, 15 bp, Homo sapiens
aaaattcatttccta

SEQ ID NO: 1850704 - DNA, 15 bp, Homo sapiens
aaattcatttcctag

SEQ ID NO: 1850705 - DNA, 15 bp, Homo sapiens
aattcatttcctagg

SEQ ID NO: 1850706 - DNA, 15 bp, Homo sapiens
attcatttcctaggc

SEQ ID NO: 1850707 - DNA, 15 bp, Homo sapiens
ttcatttcctaggca

SEQ ID NO: 1850708 - DNA, 15 bp, Homo sapiens
tcatttcctaggcac

SEQ ID NO: 1850709 - DNA, 15 bp, Homo sapiens
catttcctaggcacg

SEQ ID NO: 1850710 - DNA, 15 bp, Homo sapiens
atttcctaggcacgg

SEQ ID NO: 1850711 - DNA, 15 bp, Homo sapiens
tttcctaggcacgga

SEQ ID NO: 1850712 - DNA, 15 bp, Homo sapiens
ttcctaggcacggaa

SEQ ID NO: 1850713 - DNA, 15 bp, Homo sapiens
tcctaggcacggaag

SEQ ID NO: 1850714 - DNA, 15 bp, Homo sapiens
cctaggcacggaaga

SEQ ID NO: 1850715 - DNA, 15 bp, Homo sapiens
ctaggcacggaagat

SEQ ID NO: 1850716 - DNA, 15 bp, Homo sapiens
taggcacggaagatt

SEQ ID NO: 1850717 - DNA, 15 bp, Homo sapiens
aggcacggaagatta

SEQ ID NO: 1850718 - DNA, 15 bp, Homo sapiens
ggcacggaagattag

SEQ ID NO: 1850719 - DNA, 15 bp, Homo sapiens
gcacggaagattagg

SEQ ID NO: 1850720 - DNA, 15 bp, Homo sapiens
cacggaagattaggc

SEQ ID NO: 1850721 - DNA, 15 bp, Homo sapiens
acggaagattaggca

SEQ ID NO: 1850722 - DNA, 15 bp, Homo sapiens
cggaagattaggcaa

SEQ ID NO: 1850723 - DNA, 15 bp, Homo sapiens
ggaagattaggcaaa

SEQ ID NO: 1850724 - DNA, 15 bp, Homo sapiens
gaagattaggcaaaa

SEQ ID NO: 1850725 - DNA, 15 bp, Homo sapiens
aagattaggcaaaat

SEQ ID NO: 1850726 - DNA, 15 bp, Homo sapiens
agattaggcaaaatg

SEQ ID NO: 1850727 - DNA, 15 bp, Homo sapiens
gattaggcaaaatgt

SEQ ID NO: 1850728 - DNA, 15 bp, Homo sapiens
attaggcaaaatgtg

SEQ ID NO: 1850729 - DNA, 15 bp, Homo sapiens
ttaggcaaaatgtgc

SEQ ID NO: 1850730 - DNA, 15 bp, Homo sapiens
taggcaaaatgtgct

SEQ ID NO: 1850731 - DNA, 15 bp, Homo sapiens
aggcaaaatgtgctt

SEQ ID NO: 1850732 - DNA, 15 bp, Homo sapiens
ggcaaaatgtgctta

SEQ ID NO: 1850733 - DNA, 15 bp, Homo sapiens
gcaaaatgtgcttat

SEQ ID NO: 1850734 - DNA, 15 bp, Homo sapiens
caaaatgtgcttatt

SEQ ID NO: 1850735 - DNA, 15 bp, Homo sapiens
aaaatgtgcttattg

SEQ ID NO: 1850736 - DNA, 15 bp, Homo sapiens
aaatgtgcttattgg

SEQ ID NO: 1850737 - DNA, 15 bp, Homo sapiens
aatgtgcttattggg

SEQ ID NO: 1850738 - DNA, 15 bp, Homo sapiens
atgtgcttattgggc

SEQ ID NO: 1850739 - DNA, 15 bp, Homo sapiens
tgtgcttattgggca

SEQ ID NO: 1850740 - DNA, 15 bp, Homo sapiens
gtgcttattgggcag

SEQ ID NO: 1850741 - DNA, 15 bp, Homo sapiens
tgcttattgggcagc

SEQ ID NO: 1850742 - DNA, 15 bp, Homo sapiens
gcttattgggcagct

SEQ ID NO: 1850743 - DNA, 15 bp, Homo sapiens
cttattgggcagcta

SEQ ID NO: 1850744 - DNA, 15 bp, Homo sapiens
gaagagtgagactct

SEQ ID NO: 1850745 - DNA, 15 bp, Homo sapiens
aagagtgagactcta

SEQ ID NO: 1850746 - DNA, 15 bp, Homo sapiens
agagtgagactctaa

SEQ ID NO: 1850747 - DNA, 15 bp, Homo sapiens
gagtgagactctaaa

SEQ ID NO: 1850748 - DNA, 15 bp, Homo sapiens
agtgagactctaaaa

SEQ ID NO: 1850749 - DNA, 15 bp, Homo sapiens
gtgagactctaaaaa

SEQ ID NO: 1850750 - DNA, 15 bp, Homo sapiens
tgagactctaaaaaa

SEQ ID NO: 1850751 - DNA, 15 bp, Homo sapiens
gagactctaaaaaaa

SEQ ID NO: 1850752 - DNA, 15 bp, Homo sapiens
agactctaaaaaaaa

SEQ ID NO: 1850753 - DNA, 15 bp, Homo sapiens
gactctaaaaaaaaa

SEQ ID NO: 1850754 - DNA, 15 bp, Homo sapiens
actctaaaaaaaaaa

SEQ ID NO: 1850755 - DNA, 15 bp, Homo sapiens
ctctaaaaaaaaaaa

SEQ ID NO: 1850756 - DNA, 15 bp, Homo sapiens
gaaagaaagaaaaaa

SEQ ID NO: 1850757 - DNA, 15 bp, Homo sapiens
aagaaagaaaaaaag

SEQ ID NO: 1850758 - DNA, 15 bp, Homo sapiens
agaaagaaaaaaaga

SEQ ID NO: 1850759 - DNA, 15 bp, Homo sapiens
gaaagaaaaaaagat

SEQ ID NO: 1850760 - DNA, 15 bp, Homo sapiens
aaagaaaaaaagatt

SEQ ID NO: 1850761 - DNA, 15 bp, Homo sapiens
aagaaaaaaagattc

SEQ ID NO: 1850762 - DNA, 15 bp, Homo sapiens
agaaaaaaagattct

SEQ ID NO: 1850763 - DNA, 15 bp, Homo sapiens
gaaaaaaagattctt

SEQ ID NO: 1850764 - DNA, 15 bp, Homo sapiens
aaaaaaagattcttt

SEQ ID NO: 1850765 - DNA, 15 bp, Homo sapiens
aaaaaagattcttta

SEQ ID NO: 1850766 - DNA, 15 bp, Homo sapiens
aaaaagattctttaa

SEQ ID NO: 1850767 - DNA, 15 bp, Homo sapiens
aaaagattctttaaa

SEQ ID NO: 1850768 - DNA, 15 bp, Homo sapiens
aaagattctttaaag

SEQ ID NO: 1850769 - DNA, 15 bp, Homo sapiens
aagattctttaaagc

SEQ ID NO: 1850770 - DNA, 15 bp, Homo sapiens
agattctttaaagcc

SEQ ID NO: 1850771 - DNA, 15 bp, Homo sapiens
gattctttaaagccc

SEQ ID NO: 1850772 - DNA, 15 bp, Homo sapiens
attctttaaagcccc

SEQ ID NO: 1850773 - DNA, 15 bp, Homo sapiens
ttctttaaagccccc

SEQ ID NO: 1850774 - DNA, 15 bp, Homo sapiens
tctttaaagccccca

SEQ ID NO: 1850775 - DNA, 15 bp, Homo sapiens
ctttaaagcccccaa

SEQ ID NO: 1850776 - DNA, 15 bp, Homo sapiens
tttaaagcccccaac

SEQ ID NO: 1850777 - DNA, 15 bp, Homo sapiens
ttaaagcccccaacg

SEQ ID NO: 1850778 - DNA, 15 bp, Homo sapiens
taaagcccccaacga

SEQ ID NO: 1850779 - DNA, 15 bp, Homo sapiens
aaagcccccaacgag

SEQ ID NO: 1850780 - DNA, 15 bp, Homo sapiens
aagcccccaacgagt

SEQ ID NO: 1850781 - DNA, 15 bp, Homo sapiens
agcccccaacgagtt

SEQ ID NO: 1850782 - DNA, 15 bp, Homo sapiens
gcccccaacgagttt

SEQ ID NO: 1850783 - DNA, 15 bp, Homo sapiens
cccccaacgagtttc

SEQ ID NO: 1850784 - DNA, 15 bp, Homo sapiens
ccccaacgagtttca

SEQ ID NO: 1850785 - DNA, 15 bp, Homo sapiens
cccaacgagtttcac

SEQ ID NO: 1850786 - DNA, 15 bp, Homo sapiens
ccaacgagtttcact

SEQ ID NO: 1850787 - DNA, 15 bp, Homo sapiens
caacgagtttcactg

SEQ ID NO: 1850788 - DNA, 15 bp, Homo sapiens
aacgagtttcactgc

SEQ ID NO: 1850789 - DNA, 15 bp, Homo sapiens
acgagtttcactgct

SEQ ID NO: 1850790 - DNA, 15 bp, Homo sapiens
cgagtttcactgctg

SEQ ID NO: 1850791 - DNA, 15 bp, Homo sapiens
gagtttcactgctgg

SEQ ID NO: 1850792 - DNA, 15 bp, Homo sapiens
agtttcactgctggc

SEQ ID NO: 1850793 - DNA, 15 bp, Homo sapiens
gtttcactgctggcc

SEQ ID NO: 1850794 - DNA, 15 bp, Homo sapiens
tttcactgctggcct

SEQ ID NO: 1850795 - DNA, 15 bp, Homo sapiens
ttcactgctggcctg

SEQ ID NO: 1850796 - DNA, 15 bp, Homo sapiens
tcactgctggcctga

SEQ ID NO: 1850797 - DNA, 15 bp, Homo sapiens
cactgctggcctgat

SEQ ID NO: 1850798 - DNA, 15 bp, Homo sapiens
actgctggcctgatc

SEQ ID NO: 1850799 - DNA, 15 bp, Homo sapiens
ctgctggcctgatct

SEQ ID NO: 1850800 - DNA, 15 bp, Homo sapiens
tgctggcctgatctc

SEQ ID NO: 1850801 - DNA, 15 bp, Homo sapiens
gctggcctgatctca

SEQ ID NO: 1850802 - DNA, 15 bp, Homo sapiens
ctggcctgatctcac

SEQ ID NO: 1850803 - DNA, 15 bp, Homo sapiens
tggcctgatctcaca

SEQ ID NO: 1850804 - DNA, 15 bp, Homo sapiens
ggcctgatctcacaa

SEQ ID NO: 1850805 - DNA, 15 bp, Homo sapiens
gcctgatctcacaat

SEQ ID NO: 1850806 - DNA, 15 bp, Homo sapiens
cctgatctcacaatt

SEQ ID NO: 1850807 - DNA, 15 bp, Homo sapiens
ctgatctcacaattc

SEQ ID NO: 1850808 - DNA, 15 bp, Homo sapiens
tgatctcacaattct

SEQ ID NO: 1850809 - DNA, 15 bp, Homo sapiens
gatctcacaattctc

SEQ ID NO: 1850810 - DNA, 15 bp, Homo sapiens
atctcacaattctca

SEQ ID NO: 1850811 - DNA, 15 bp, Homo sapiens
tctcacaattctcaa

SEQ ID NO: 1850812 - DNA, 15 bp, Homo sapiens
ctcacaattctcaat

SEQ ID NO: 1850813 - DNA, 15 bp, Homo sapiens
tcacaattctcaatg

SEQ ID NO: 1850814 - DNA, 15 bp, Homo sapiens
cacaattctcaatgg

SEQ ID NO: 1850815 - DNA, 15 bp, Homo sapiens
acaattctcaatggc

SEQ ID NO: 1850816 - DNA, 15 bp, Homo sapiens
caattctcaatggct

SEQ ID NO: 1850817 - DNA, 15 bp, Homo sapiens
aattctcaatggctt

SEQ ID NO: 1850818 - DNA, 15 bp, Homo sapiens
attctcaatggcttt

SEQ ID NO: 1850819 - DNA, 15 bp, Homo sapiens
ttctcaatggctttt

SEQ ID NO: 1850820 - DNA, 15 bp, Homo sapiens
tctcaatggcttttt

SEQ ID NO: 1850821 - DNA, 15 bp, Homo sapiens
ctcaatggcttttta

SEQ ID NO: 1850822 - DNA, 15 bp, Homo sapiens
tcaatggctttttaa

SEQ ID NO: 1850823 - DNA, 15 bp, Homo sapiens
caatggctttttaaa

SEQ ID NO: 1850824 - DNA, 15 bp, Homo sapiens
aatggctttttaaaa

SEQ ID NO: 1850825 - DNA, 15 bp, Homo sapiens
atggctttttaaaaa

SEQ ID NO: 1850826 - DNA, 15 bp, Homo sapiens
tggctttttaaaaaa

SEQ ID NO: 1850827 - DNA, 15 bp, Homo sapiens
ggctttttaaaaaaa

SEQ ID NO: 1850828 - DNA, 15 bp, Homo sapiens
gctttttaaaaaaat

SEQ ID NO: 1850829 - DNA, 15 bp, Homo sapiens
ctttttaaaaaaatc

SEQ ID NO: 1850830 - DNA, 15 bp, Homo sapiens
tttttaaaaaaatcg

SEQ ID NO: 1850831 - DNA, 15 bp, Homo sapiens
ttttaaaaaaatcgt

SEQ ID NO: 1850832 - DNA, 15 bp, Homo sapiens
tttaaaaaaatcgta

SEQ ID NO: 1850833 - DNA, 15 bp, Homo sapiens
ttaaaaaaatcgtat

SEQ ID NO: 1850834 - DNA, 15 bp, Homo sapiens
taaaaaaatcgtatt

SEQ ID NO: 1850835 - DNA, 15 bp, Homo sapiens
aaaaaaatcgtattt

SEQ ID NO: 1850836 - DNA, 15 bp, Homo sapiens
aaaaaatcgtatttc

SEQ ID NO: 1850837 - DNA, 15 bp, Homo sapiens
aaaaatcgtatttca

SEQ ID NO: 1850838 - DNA, 15 bp, Homo sapiens
aaaatcgtatttcac

SEQ ID NO: 1850839 - DNA, 15 bp, Homo sapiens
aaatcgtatttcact

SEQ ID NO: 1850840 - DNA, 15 bp, Homo sapiens
aatcgtatttcactg

SEQ ID NO: 1850841 - DNA, 15 bp, Homo sapiens
atcgtatttcactga

SEQ ID NO: 1850842 - DNA, 15 bp, Homo sapiens
tcgtatttcactgaa

SEQ ID NO: 1850843 - DNA, 15 bp, Homo sapiens
cgtatttcactgaat

SEQ ID NO: 1850844 - DNA, 15 bp, Homo sapiens
gtatttcactgaata

SEQ ID NO: 1850845 - DNA, 15 bp, Homo sapiens
tatttcactgaatat

SEQ ID NO: 1850846 - DNA, 15 bp, Homo sapiens
atttcactgaatatg

SEQ ID NO: 1850847 - DNA, 15 bp, Homo sapiens
tttcactgaatatga

SEQ ID NO: 1850848 - DNA, 15 bp, Homo sapiens
ttcactgaatatgaa

SEQ ID NO: 1850849 - DNA, 15 bp, Homo sapiens
tcactgaatatgaag

SEQ ID NO: 1850850 - DNA, 15 bp, Homo sapiens
cactgaatatgaagt

SEQ ID NO: 1850851 - DNA, 15 bp, Homo sapiens
actgaatatgaagtg

SEQ ID NO: 1850852 - DNA, 15 bp, Homo sapiens
ctgaatatgaagtga

SEQ ID NO: 1850853 - DNA, 15 bp, Homo sapiens
tgaatatgaagtgag

SEQ ID NO: 1850854 - DNA, 15 bp, Homo sapiens
gaatatgaagtgagg

SEQ ID NO: 1850855 - DNA, 15 bp, Homo sapiens
aatatgaagtgaggt

SEQ ID NO: 1850856 - DNA, 15 bp, Homo sapiens
atatgaagtgaggtt

SEQ ID NO: 1850857 - DNA, 15 bp, Homo sapiens
tatgaagtgaggtta

SEQ ID NO: 1850858 - DNA, 15 bp, Homo sapiens
atgaagtgaggttag

SEQ ID NO: 1850859 - DNA, 15 bp, Homo sapiens
tgaagtgaggttaga

SEQ ID NO: 1850860 - DNA, 15 bp, Homo sapiens
gaagtgaggttagat

SEQ ID NO: 1850861 - DNA, 15 bp, Homo sapiens
aagtgaggttagatc

SEQ ID NO: 1850862 - DNA, 15 bp, Homo sapiens
agtgaggttagatca

SEQ ID NO: 1850863 - DNA, 15 bp, Homo sapiens
gtgaggttagatcac

SEQ ID NO: 1850864 - DNA, 15 bp, Homo sapiens
tgaggttagatcacc

SEQ ID NO: 1850865 - DNA, 15 bp, Homo sapiens
gaggttagatcacca

SEQ ID NO: 1850866 - DNA, 15 bp, Homo sapiens
aggttagatcaccat

SEQ ID NO: 1850867 - DNA, 15 bp, Homo sapiens
ggttagatcaccatg

SEQ ID NO: 1850868 - DNA, 15 bp, Homo sapiens
gttagatcaccatgc

SEQ ID NO: 1850869 - DNA, 15 bp, Homo sapiens
ttagatcaccatgcc

SEQ ID NO: 1850870 - DNA, 15 bp, Homo sapiens
tagatcaccatgcca

SEQ ID NO: 1850871 - DNA, 15 bp, Homo sapiens
agatcaccatgccaa

SEQ ID NO: 1850872 - DNA, 15 bp, Homo sapiens
gatcaccatgccaac

SEQ ID NO: 1850873 - DNA, 15 bp, Homo sapiens
atcaccatgccaact

SEQ ID NO: 1850874 - DNA, 15 bp, Homo sapiens
tcaccatgccaacta

SEQ ID NO: 1850875 - DNA, 15 bp, Homo sapiens
caccatgccaactag

SEQ ID NO: 1850876 - DNA, 15 bp, Homo sapiens
accatgccaactagt

SEQ ID NO: 1850877 - DNA, 15 bp, Homo sapiens
ccatgccaactagtg

SEQ ID NO: 1850878 - DNA, 15 bp, Homo sapiens
catgccaactagtgg

SEQ ID NO: 1850879 - DNA, 15 bp, Homo sapiens
atgccaactagtggc

SEQ ID NO: 1850880 - DNA, 15 bp, Homo sapiens
tgccaactagtggcc

SEQ ID NO: 1850881 - DNA, 15 bp, Homo sapiens
gccaactagtggcct

SEQ ID NO: 1850882 - DNA, 15 bp, Homo sapiens
ccaactagtggcctc

SEQ ID NO: 1850883 - DNA, 15 bp, Homo sapiens
caactagtggcctca

SEQ ID NO: 1850884 - DNA, 15 bp, Homo sapiens
aactagtggcctcat

SEQ ID NO: 1850885 - DNA, 15 bp, Homo sapiens
actagtggcctcatc

SEQ ID NO: 1850886 - DNA, 15 bp, Homo sapiens
ctagtggcctcatca

SEQ ID NO: 1850887 - DNA, 15 bp, Homo sapiens
tagtggcctcatcaa

SEQ ID NO: 1850888 - DNA, 15 bp, Homo sapiens
agtggcctcatcaat

SEQ ID NO: 1850889 - DNA, 15 bp, Homo sapiens
gtggcctcatcaata

SEQ ID NO: 1850890 - DNA, 15 bp, Homo sapiens
tggcctcatcaatac

SEQ ID NO: 1850891 - DNA, 15 bp, Homo sapiens
ggcctcatcaatact

SEQ ID NO: 1850892 - DNA, 15 bp, Homo sapiens
gcctcatcaatactg

SEQ ID NO: 1850893 - DNA, 15 bp, Homo sapiens
cctcatcaatactga

SEQ ID NO: 1850894 - DNA, 15 bp, Homo sapiens
ctcatcaatactgat

SEQ ID NO: 1850895 - DNA, 15 bp, Homo sapiens
tcatcaatactgatg

SEQ ID NO: 1850896 - DNA, 15 bp, Homo sapiens
catcaatactgatgt

SEQ ID NO: 1850897 - DNA, 15 bp, Homo sapiens
atcaatactgatgtg

SEQ ID NO: 1850898 - DNA, 15 bp, Homo sapiens
tcaatactgatgtgt

SEQ ID NO: 1850899 - DNA, 15 bp, Homo sapiens
caatactgatgtgtg

SEQ ID NO: 1850900 - DNA, 15 bp, Homo sapiens
aatactgatgtgtgt

SEQ ID NO: 1850901 - DNA, 15 bp, Homo sapiens
atactgatgtgtgtg

SEQ ID NO: 1850902 - DNA, 15 bp, Homo sapiens
tactgatgtgtgtgt

SEQ ID NO: 1850903 - DNA, 15 bp, Homo sapiens
actgatgtgtgtgta

SEQ ID NO: 1850904 - DNA, 15 bp, Homo sapiens
ctgatgtgtgtgtat

SEQ ID NO: 1850905 - DNA, 15 bp, Homo sapiens
tgatgtgtgtgtatt

SEQ ID NO: 1850906 - DNA, 15 bp, Homo sapiens
gatgtgtgtgtattt

SEQ ID NO: 1850907 - DNA, 15 bp, Homo sapiens
atgtgtgtgtattta

SEQ ID NO: 1850908 - DNA, 15 bp, Homo sapiens
tgtgtgtgtatttaa

SEQ ID NO: 1850909 - DNA, 15 bp, Homo sapiens
gtgtgtgtatttaaa

SEQ ID NO: 1850910 - DNA, 15 bp, Homo sapiens
tgtgtgtatttaaat

SEQ ID NO: 1850911 - DNA, 15 bp, Homo sapiens
gtgtgtatttaaatc

SEQ ID NO: 1850912 - DNA, 15 bp, Homo sapiens
tgtgtatttaaatca

SEQ ID NO: 1850913 - DNA, 15 bp, Homo sapiens
gtgtatttaaatcat

SEQ ID NO: 1850914 - DNA, 15 bp, Homo sapiens
tgtatttaaatcatt

SEQ ID NO: 1850915 - DNA, 15 bp, Homo sapiens
gtatttaaatcatta

SEQ ID NO: 1850916 - DNA, 15 bp, Homo sapiens
tatttaaatcattac

SEQ ID NO: 1850917 - DNA, 15 bp, Homo sapiens
atttaaatcattacg

SEQ ID NO: 1850918 - DNA, 15 bp, Homo sapiens
tttaaatcattacgt

SEQ ID NO: 1850919 - DNA, 15 bp, Homo sapiens
ttaaatcattacgtt

SEQ ID NO: 1850920 - DNA, 15 bp, Homo sapiens
taaatcattacgttt

SEQ ID NO: 1850921 - DNA, 15 bp, Homo sapiens
aaatcattacgtttc

SEQ ID NO: 1850922 - DNA, 15 bp, Homo sapiens
aatcattacgtttct

SEQ ID NO: 1850923 - DNA, 15 bp, Homo sapiens
atcattacgtttctc

SEQ ID NO: 1850924 - DNA, 15 bp, Homo sapiens
tcattacgtttctcg

SEQ ID NO: 1850925 - DNA, 15 bp, Homo sapiens
cattacgtttctcgg

SEQ ID NO: 1850926 - DNA, 15 bp, Homo sapiens
attacgtttctcgga

SEQ ID NO: 1850927 - DNA, 15 bp, Homo sapiens
ttacgtttctcggag

SEQ ID NO: 1850928 - DNA, 15 bp, Homo sapiens
tacgtttctcggagc

SEQ ID NO: 1850929 - DNA, 15 bp, Homo sapiens
acgtttctcggagcc

SEQ ID NO: 1850930 - DNA, 15 bp, Homo sapiens
cgtttctcggagcca

SEQ ID NO: 1850931 - DNA, 15 bp, Homo sapiens
gtttctcggagccat

SEQ ID NO: 1850932 - DNA, 15 bp, Homo sapiens
tttctcggagccatc

SEQ ID NO: 1850933 - DNA, 15 bp, Homo sapiens
ttctcggagccatca

SEQ ID NO: 1850934 - DNA, 15 bp, Homo sapiens
tctcggagccatcag

SEQ ID NO: 1850935 - DNA, 15 bp, Homo sapiens
ctcggagccatcagc

SEQ ID NO: 1850936 - DNA, 15 bp, Homo sapiens
tcggagccatcagct

SEQ ID NO: 1850937 - DNA, 15 bp, Homo sapiens
cggagccatcagctt

SEQ ID NO: 1850938 - DNA, 15 bp, Homo sapiens
ggagccatcagcttt

SEQ ID NO: 1850939 - DNA, 15 bp, Homo sapiens
gagccatcagctttc

SEQ ID NO: 1850940 - DNA, 15 bp, Homo sapiens
agccatcagctttca

SEQ ID NO: 1850941 - DNA, 15 bp, Homo sapiens
gccatcagctttcac

SEQ ID NO: 1850942 - DNA, 15 bp, Homo sapiens
ccatcagctttcacg

SEQ ID NO: 1850943 - DNA, 15 bp, Homo sapiens
catcagctttcacgc

SEQ ID NO: 1850944 - DNA, 15 bp, Homo sapiens
atcagctttcacgct

SEQ ID NO: 1850945 - DNA, 15 bp, Homo sapiens
tcagctttcacgctg

SEQ ID NO: 1850946 - DNA, 15 bp, Homo sapiens
cagctttcacgctgt

SEQ ID NO: 1850947 - DNA, 15 bp, Homo sapiens
agctttcacgctgta

SEQ ID NO: 1850948 - DNA, 15 bp, Homo sapiens
gctttcacgctgtaa

SEQ ID NO: 1850949 - DNA, 15 bp, Homo sapiens
ctttcacgctgtaaa

SEQ ID NO: 1850950 - DNA, 15 bp, Homo sapiens
tttcacgctgtaaat

SEQ ID NO: 1850951 - DNA, 15 bp, Homo sapiens
ttcacgctgtaaatg

SEQ ID NO: 1850952 - DNA, 15 bp, Homo sapiens
tcacgctgtaaatgc

SEQ ID NO: 1850953 - DNA, 15 bp, Homo sapiens
cacgctgtaaatgcg

SEQ ID NO: 1850954 - DNA, 15 bp, Homo sapiens
acgctgtaaatgcgt

SEQ ID NO: 1850955 - DNA, 15 bp, Homo sapiens
cgctgtaaatgcgtt

SEQ ID NO: 1850956 - DNA, 15 bp, Homo sapiens
gctgtaaatgcgttt

SEQ ID NO: 1850957 - DNA, 15 bp, Homo sapiens
ctgtaaatgcgttta

SEQ ID NO: 1850958 - DNA, 15 bp, Homo sapiens
tgtaaatgcgtttat

SEQ ID NO: 1850959 - DNA, 15 bp, Homo sapiens
gtaaatgcgtttatg

SEQ ID NO: 1850960 - DNA, 15 bp, Homo sapiens
taaatgcgtttatgc

SEQ ID NO: 1850961 - DNA, 15 bp, Homo sapiens
aaatgcgtttatgcc

SEQ ID NO: 1850962 - DNA, 15 bp, Homo sapiens
aatgcgtttatgccc

SEQ ID NO: 1850963 - DNA, 15 bp, Homo sapiens
atgcgtttatgccct

SEQ ID NO: 1850964 - DNA, 15 bp, Homo sapiens
tgcgtttatgcccta

SEQ ID NO: 1850965 - DNA, 15 bp, Homo sapiens
gcgtttatgccctag

SEQ ID NO: 1850966 - DNA, 15 bp, Homo sapiens
cgtttatgccctagc

SEQ ID NO: 1850967 - DNA, 15 bp, Homo sapiens
gtttatgccctagca

SEQ ID NO: 1850968 - DNA, 15 bp, Homo sapiens
tttatgccctagcaa

SEQ ID NO: 1850969 - DNA, 15 bp, Homo sapiens
ttatgccctagcaat

SEQ ID NO: 1850970 - DNA, 15 bp, Homo sapiens
tatgccctagcaatg

SEQ ID NO: 1850971 - DNA, 15 bp, Homo sapiens
atgccctagcaatgc

SEQ ID NO: 1850972 - DNA, 15 bp, Homo sapiens
tgccctagcaatgcc

SEQ ID NO: 1850973 - DNA, 15 bp, Homo sapiens
gccctagcaatgcca

SEQ ID NO: 1850974 - DNA, 15 bp, Homo sapiens
ccctagcaatgccat

SEQ ID NO: 1850975 - DNA, 15 bp, Homo sapiens
cctagcaatgccatg

SEQ ID NO: 1850976 - DNA, 15 bp, Homo sapiens
ctagcaatgccatgc

SEQ ID NO: 1850977 - DNA, 15 bp, Homo sapiens
tagcaatgccatgcc

SEQ ID NO: 1850978 - DNA, 15 bp, Homo sapiens
agcaatgccatgccc

SEQ ID NO: 1850979 - DNA, 15 bp, Homo sapiens
gcaatgccatgcccg

SEQ ID NO: 1850980 - DNA, 15 bp, Homo sapiens
caatgccatgcccgt

SEQ ID NO: 1850981 - DNA, 15 bp, Homo sapiens
aatgccatgcccgtt

SEQ ID NO: 1850982 - DNA, 15 bp, Homo sapiens
atgccatgcccgttt

SEQ ID NO: 1850983 - DNA, 15 bp, Homo sapiens
tgccatgcccgtttc

SEQ ID NO: 1850984 - DNA, 15 bp, Homo sapiens
gccatgcccgtttct

SEQ ID NO: 1850985 - DNA, 15 bp, Homo sapiens
ccatgcccgtttcta

SEQ ID NO: 1850986 - DNA, 15 bp, Homo sapiens
catgcccgtttctat

SEQ ID NO: 1850987 - DNA, 15 bp, Homo sapiens
atgcccgtttctatg

SEQ ID NO: 1850988 - DNA, 15 bp, Homo sapiens
tgcccgtttctatgc

SEQ ID NO: 1850989 - DNA, 15 bp, Homo sapiens
gcccgtttctatgca

SEQ ID NO: 1850990 - DNA, 15 bp, Homo sapiens
cccgtttctatgcag

SEQ ID NO: 1850991 - DNA, 15 bp, Homo sapiens
ccgtttctatgcagt

SEQ ID NO: 1850992 - DNA, 15 bp, Homo sapiens
cgtttctatgcagta

SEQ ID NO: 1850993 - DNA, 15 bp, Homo sapiens
gtttctatgcagtaa

SEQ ID NO: 1850994 - DNA, 15 bp, Homo sapiens
tttctatgcagtaac

SEQ ID NO: 1850995 - DNA, 15 bp, Homo sapiens
ttctatgcagtaacc

SEQ ID NO: 1850996 - DNA, 15 bp, Homo sapiens
tctatgcagtaaccc

SEQ ID NO: 1850997 - DNA, 15 bp, Homo sapiens
ctatgcagtaacccg

SEQ ID NO: 1850998 - DNA, 15 bp, Homo sapiens
tatgcagtaacccgc

SEQ ID NO: 1850999 - DNA, 15 bp, Homo sapiens
atgcagtaacccgcc

SEQ ID NO: 1851000 - DNA, 15 bp, Homo sapiens
tgcagtaacccgcca

SEQ ID NO: 1851001 - DNA, 15 bp, Homo sapiens
gcagtaacccgccag

SEQ ID NO: 1851002 - DNA, 15 bp, Homo sapiens
cagtaacccgccagc

SEQ ID NO: 1851003 - DNA, 15 bp, Homo sapiens
agtaacccgccagct

SEQ ID NO: 1851004 - DNA, 15 bp, Homo sapiens
gtaacccgccagctt

SEQ ID NO: 1851005 - DNA, 15 bp, Homo sapiens
taacccgccagcttg

SEQ ID NO: 1851006 - DNA, 15 bp, Homo sapiens
aacccgccagcttgg

SEQ ID NO: 1851007 - DNA, 15 bp, Homo sapiens
acccgccagcttggg

SEQ ID NO: 1851008 - DNA, 15 bp, Homo sapiens
cccgccagcttgggt

SEQ ID NO: 1851009 - DNA, 15 bp, Homo sapiens
ccgccagcttgggta

SEQ ID NO: 1851010 - DNA, 15 bp, Homo sapiens
cgccagcttgggtat

SEQ ID NO: 1851011 - DNA, 15 bp, Homo sapiens
gccagcttgggtata

SEQ ID NO: 1851012 - DNA, 15 bp, Homo sapiens
ccagcttgggtatat

SEQ ID NO: 1851013 - DNA, 15 bp, Homo sapiens
cagcttgggtatatg

SEQ ID NO: 1851014 - DNA, 15 bp, Homo sapiens
agcttgggtatatgt

SEQ ID NO: 1851015 - DNA, 15 bp, Homo sapiens
gcttgggtatatgtt

SEQ ID NO: 1851016 - DNA, 15 bp, Homo sapiens
cttgggtatatgttt

SEQ ID NO: 1851017 - DNA, 15 bp, Homo sapiens
ttgggtatatgtttc

SEQ ID NO: 1851018 - DNA, 15 bp, Homo sapiens
tgggtatatgtttct

SEQ ID NO: 1851019 - DNA, 15 bp, Homo sapiens
gggtatatgtttctt

SEQ ID NO: 1851020 - DNA, 15 bp, Homo sapiens
ggtatatgtttcttc

SEQ ID NO: 1851021 - DNA, 15 bp, Homo sapiens
gtatatgtttcttcg

SEQ ID NO: 1851022 - DNA, 15 bp, Homo sapiens
tatatgtttcttcgg

SEQ ID NO: 1851023 - DNA, 15 bp, Homo sapiens
atatgtttcttcggg

SEQ ID NO: 1851024 - DNA, 15 bp, Homo sapiens
tatgtttcttcggga

SEQ ID NO: 1851025 - DNA, 15 bp, Homo sapiens
atgtttcttcgggac

SEQ ID NO: 1851026 - DNA, 15 bp, Homo sapiens
tgtttcttcgggacc

SEQ ID NO: 1851027 - DNA, 15 bp, Homo sapiens
gtttcttcgggacct

SEQ ID NO: 1851028 - DNA, 15 bp, Homo sapiens
tttcttcgggacctg

SEQ ID NO: 1851029 - DNA, 15 bp, Homo sapiens
ttcttcgggacctgg

SEQ ID NO: 1851030 - DNA, 15 bp, Homo sapiens
tcttcgggacctggg

SEQ ID NO: 1851031 - DNA, 15 bp, Homo sapiens
cttcgggacctgggg

SEQ ID NO: 1851032 - DNA, 15 bp, Homo sapiens
ttcgggacctggggt

SEQ ID NO: 1851033 - DNA, 15 bp, Homo sapiens
tcgggacctggggtc

SEQ ID NO: 1851034 - DNA, 15 bp, Homo sapiens
cgggacctggggtca

SEQ ID NO: 1851035 - DNA, 15 bp, Homo sapiens
gggacctggggtcaa

SEQ ID NO: 1851036 - DNA, 15 bp, Homo sapiens
ggacctggggtcaag

SEQ ID NO: 1851037 - DNA, 15 bp, Homo sapiens
gacctggggtcaagg

SEQ ID NO: 1851038 - DNA, 15 bp, Homo sapiens
acctggggtcaagga

SEQ ID NO: 1851039 - DNA, 15 bp, Homo sapiens
cctggggtcaaggaa

SEQ ID NO: 1851040 - DNA, 15 bp, Homo sapiens
ctggggtcaaggaat

SEQ ID NO: 1851041 - DNA, 15 bp, Homo sapiens
tggggtcaaggaata

SEQ ID NO: 1851042 - DNA, 15 bp, Homo sapiens
ggggtcaaggaataa

SEQ ID NO: 1851043 - DNA, 15 bp, Homo sapiens
gggtcaaggaataaa

SEQ ID NO: 1851044 - DNA, 15 bp, Homo sapiens
ggtcaaggaataaac

SEQ ID NO: 1851045 - DNA, 15 bp, Homo sapiens
gtcaaggaataaact

SEQ ID NO: 1851046 - DNA, 15 bp, Homo sapiens
tcaaggaataaactc

SEQ ID NO: 1851047 - DNA, 15 bp, Homo sapiens
caaggaataaactct

SEQ ID NO: 1851048 - DNA, 15 bp, Homo sapiens
aaggaataaactctc

SEQ ID NO: 1851049 - DNA, 15 bp, Homo sapiens
aggaataaactctct

SEQ ID NO: 1851050 - DNA, 15 bp, Homo sapiens
ggaataaactctctg

SEQ ID NO: 1851051 - DNA, 15 bp, Homo sapiens
gaataaactctctga

SEQ ID NO: 1851052 - DNA, 15 bp, Homo sapiens
aataaactctctgac

SEQ ID NO: 1851053 - DNA, 15 bp, Homo sapiens
ataaactctctgact

SEQ ID NO: 1851054 - DNA, 15 bp, Homo sapiens
taaactctctgactc

SEQ ID NO: 1851055 - DNA, 15 bp, Homo sapiens
aaactctctgactct

SEQ ID NO: 1851056 - DNA, 15 bp, Homo sapiens
aactctctgactcta

SEQ ID NO: 1851057 - DNA, 15 bp, Homo sapiens
actctctgactctaa

SEQ ID NO: 1851058 - DNA, 15 bp, Homo sapiens
ctctctgactctaag

SEQ ID NO: 1851059 - DNA, 15 bp, Homo sapiens
tctctgactctaagc

SEQ ID NO: 1851060 - DNA, 15 bp, Homo sapiens
ctctgactctaagca

SEQ ID NO: 1851061 - DNA, 15 bp, Homo sapiens
tctgactctaagcac

SEQ ID NO: 1851062 - DNA, 15 bp, Homo sapiens
ctgactctaagcacc

SEQ ID NO: 1851063 - DNA, 15 bp, Homo sapiens
tgactctaagcacct

SEQ ID NO: 1851064 - DNA, 15 bp, Homo sapiens
gactctaagcacctt

SEQ ID NO: 1851065 - DNA, 15 bp, Homo sapiens
actctaagcaccttg

SEQ ID NO: 1851066 - DNA, 15 bp, Homo sapiens
ctctaagcaccttga

SEQ ID NO: 1851067 - DNA, 15 bp, Homo sapiens
tctaagcaccttgaa

SEQ ID NO: 1851068 - DNA, 15 bp, Homo sapiens
ctaagcaccttgaaa

SEQ ID NO: 1851069 - DNA, 15 bp, Homo sapiens
taagcaccttgaaag

SEQ ID NO: 1851070 - DNA, 15 bp, Homo sapiens
aagcaccttgaaagc

SEQ ID NO: 1851071 - DNA, 15 bp, Homo sapiens
agcaccttgaaagct

SEQ ID NO: 1851072 - DNA, 15 bp, Homo sapiens
gcaccttgaaagcta

SEQ ID NO: 1851073 - DNA, 15 bp, Homo sapiens
caccttgaaagctac

SEQ ID NO: 1851074 - DNA, 15 bp, Homo sapiens
accttgaaagctacg

SEQ ID NO: 1851075 - DNA, 15 bp, Homo sapiens
ccttgaaagctacga

SEQ ID NO: 1851076 - DNA, 15 bp, Homo sapiens
cttgaaagctacgag

SEQ ID NO: 1851077 - DNA, 15 bp, Homo sapiens
ttgaaagctacgagg

SEQ ID NO: 1851078 - DNA, 15 bp, Homo sapiens
tgaaagctacgaggc

SEQ ID NO: 1851079 - DNA, 15 bp, Homo sapiens
gaaagctacgaggcc

SEQ ID NO: 1851080 - DNA, 15 bp, Homo sapiens
aaagctacgaggccc

SEQ ID NO: 1851081 - DNA, 15 bp, Homo sapiens
aagctacgaggccca

SEQ ID NO: 1851082 - DNA, 15 bp, Homo sapiens
agctacgaggcccag

SEQ ID NO: 1851083 - DNA, 15 bp, Homo sapiens
gctacgaggcccaga

SEQ ID NO: 1851084 - DNA, 15 bp, Homo sapiens
ctacgaggcccagaa

SEQ ID NO: 1851085 - DNA, 15 bp, Homo sapiens
tacgaggcccagaaa

SEQ ID NO: 1851086 - DNA, 15 bp, Homo sapiens
acgaggcccagaaac

SEQ ID NO: 1851087 - DNA, 15 bp, Homo sapiens
cgaggcccagaaaca

SEQ ID NO: 1851088 - DNA, 15 bp, Homo sapiens
gaggcccagaaacag

SEQ ID NO: 1851089 - DNA, 15 bp, Homo sapiens
aggcccagaaacagg

SEQ ID NO: 1851090 - DNA, 15 bp, Homo sapiens
ggcccagaaacaggg

SEQ ID NO: 1851091 - DNA, 15 bp, Homo sapiens
gcccagaaacagggc

SEQ ID NO: 1851092 - DNA, 15 bp, Homo sapiens
cccagaaacagggcc

SEQ ID NO: 1851093 - DNA, 15 bp, Homo sapiens
ccagaaacagggcct

SEQ ID NO: 1851094 - DNA, 15 bp, Homo sapiens
cagaaacagggcctg

SEQ ID NO: 1851095 - DNA, 15 bp, Homo sapiens
agaaacagggcctgc

SEQ ID NO: 1851096 - DNA, 15 bp, Homo sapiens
gaaacagggcctgca

SEQ ID NO: 1851097 - DNA, 15 bp, Homo sapiens
aaacagggcctgcat

SEQ ID NO: 1851098 - DNA, 15 bp, Homo sapiens
aacagggcctgcatg

SEQ ID NO: 1851099 - DNA, 15 bp, Homo sapiens
acagggcctgcatgc

SEQ ID NO: 1851100 - DNA, 15 bp, Homo sapiens
cagggcctgcatgca

SEQ ID NO: 1851101 - DNA, 15 bp, Homo sapiens
agggcctgcatgcaa

SEQ ID NO: 1851102 - DNA, 15 bp, Homo sapiens
gggcctgcatgcaaa

SEQ ID NO: 1851103 - DNA, 15 bp, Homo sapiens
ggcctgcatgcaaat

SEQ ID NO: 1851104 - DNA, 15 bp, Homo sapiens
gcctgcatgcaaatg

SEQ ID NO: 1851105 - DNA, 15 bp, Homo sapiens
cctgcatgcaaatga

SEQ ID NO: 1851106 - DNA, 15 bp, Homo sapiens
ctgcatgcaaatgaa

SEQ ID NO: 1851107 - DNA, 15 bp, Homo sapiens
tgcatgcaaatgaat

SEQ ID NO: 1851108 - DNA, 15 bp, Homo sapiens
gcatgcaaatgaatg

SEQ ID NO: 1851109 - DNA, 15 bp, Homo sapiens
catgcaaatgaatgc

SEQ ID NO: 1851110 - DNA, 15 bp, Homo sapiens
atgcaaatgaatgcc

SEQ ID NO: 1851111 - DNA, 15 bp, Homo sapiens
tgcaaatgaatgccc

SEQ ID NO: 1851112 - DNA, 15 bp, Homo sapiens
gcaaatgaatgccct

SEQ ID NO: 1851113 - DNA, 15 bp, Homo sapiens
caaatgaatgcccta

SEQ ID NO: 1851114 - DNA, 15 bp, Homo sapiens
aaatgaatgccctag

SEQ ID NO: 1851115 - DNA, 15 bp, Homo sapiens
aatgaatgccctagg

SEQ ID NO: 1851116 - DNA, 15 bp, Homo sapiens
atgaatgccctaggc

SEQ ID NO: 1851117 - DNA, 15 bp, Homo sapiens
tgaatgccctaggca

SEQ ID NO: 1851118 - DNA, 15 bp, Homo sapiens
gaatgccctaggcag

SEQ ID NO: 1851119 - DNA, 15 bp, Homo sapiens
aatgccctaggcagg

SEQ ID NO: 1851120 - DNA, 15 bp, Homo sapiens
atgccctaggcaggt

SEQ ID NO: 1851121 - DNA, 15 bp, Homo sapiens
tgccctaggcaggtc

SEQ ID NO: 1851122 - DNA, 15 bp, Homo sapiens
gccctaggcaggtct

SEQ ID NO: 1851123 - DNA, 15 bp, Homo sapiens
ccctaggcaggtctg

SEQ ID NO: 1851124 - DNA, 15 bp, Homo sapiens
cctaggcaggtctgc

SEQ ID NO: 1851125 - DNA, 15 bp, Homo sapiens
ctaggcaggtctgct

SEQ ID NO: 1851126 - DNA, 15 bp, Homo sapiens
taggcaggtctgctc

SEQ ID NO: 1851127 - DNA, 15 bp, Homo sapiens
aggcaggtctgctcg

SEQ ID NO: 1851128 - DNA, 15 bp, Homo sapiens
ggcaggtctgctcgc

SEQ ID NO: 1851129 - DNA, 15 bp, Homo sapiens
gcaggtctgctcgct

SEQ ID NO: 1851130 - DNA, 15 bp, Homo sapiens
caggtctgctcgctg

SEQ ID NO: 1851131 - DNA, 15 bp, Homo sapiens
aggtctgctcgctgg

SEQ ID NO: 1851132 - DNA, 15 bp, Homo sapiens
ggtctgctcgctggg

SEQ ID NO: 1851133 - DNA, 15 bp, Homo sapiens
gtctgctcgctgggt

SEQ ID NO: 1851134 - DNA, 15 bp, Homo sapiens
tctgctcgctgggta

SEQ ID NO: 1851135 - DNA, 15 bp, Homo sapiens
ctgctcgctgggtaa

SEQ ID NO: 1851136 - DNA, 15 bp, Homo sapiens
tgctcgctgggtaac

SEQ ID NO: 1851137 - DNA, 15 bp, Homo sapiens
gctcgctgggtaacc

SEQ ID NO: 1851138 - DNA, 15 bp, Homo sapiens
ctcgctgggtaacct

SEQ ID NO: 1851139 - DNA, 15 bp, Homo sapiens
tcgctgggtaacctt

SEQ ID NO: 1851140 - DNA, 15 bp, Homo sapiens
cgctgggtaaccttc

SEQ ID NO: 1851141 - DNA, 15 bp, Homo sapiens
gctgggtaaccttcc

SEQ ID NO: 1851142 - DNA, 15 bp, Homo sapiens
ctgggtaaccttccc

SEQ ID NO: 1851143 - DNA, 15 bp, Homo sapiens
tgggtaaccttcccg

SEQ ID NO: 1851144 - DNA, 15 bp, Homo sapiens
gggtaaccttcccgc

SEQ ID NO: 1851145 - DNA, 15 bp, Homo sapiens
ggtaaccttcccgcg

SEQ ID NO: 1851146 - DNA, 15 bp, Homo sapiens
gtaaccttcccgcgc

SEQ ID NO: 1851147 - DNA, 15 bp, Homo sapiens
taaccttcccgcgcc

SEQ ID NO: 1851148 - DNA, 15 bp, Homo sapiens
aaccttcccgcgccg

SEQ ID NO: 1851149 - DNA, 15 bp, Homo sapiens
accttcccgcgccgg

SEQ ID NO: 1851150 - DNA, 15 bp, Homo sapiens
ccttcccgcgccggg

SEQ ID NO: 1851151 - DNA, 15 bp, Homo sapiens
cttcccgcgccggga

SEQ ID NO: 1851152 - DNA, 15 bp, Homo sapiens
ttcccgcgccgggag

SEQ ID NO: 1851153 - DNA, 15 bp, Homo sapiens
tcccgcgccgggagg

SEQ ID NO: 1851154 - DNA, 15 bp, Homo sapiens
cccgcgccgggaggc

SEQ ID NO: 1851155 - DNA, 15 bp, Homo sapiens
ccgcgccgggaggca

SEQ ID NO: 1851156 - DNA, 15 bp, Homo sapiens
cgcgccgggaggcag

SEQ ID NO: 1851157 - DNA, 15 bp, Homo sapiens
gcgccgggaggcagg

SEQ ID NO: 1851158 - DNA, 15 bp, Homo sapiens
cgccgggaggcaggg

SEQ ID NO: 1851159 - DNA, 15 bp, Homo sapiens
gccgggaggcagggt

SEQ ID NO: 1851160 - DNA, 15 bp, Homo sapiens
ccgggaggcagggtg

SEQ ID NO: 1851161 - DNA, 15 bp, Homo sapiens
cgggaggcagggtgg

SEQ ID NO: 1851162 - DNA, 15 bp, Homo sapiens
gggaggcagggtggc

SEQ ID NO: 1851163 - DNA, 15 bp, Homo sapiens
ggaggcagggtggcg

SEQ ID NO: 1851164 - DNA, 15 bp, Homo sapiens
gaggcagggtggcgg

SEQ ID NO: 1851165 - DNA, 15 bp, Homo sapiens
aggcagggtggcggg

SEQ ID NO: 1851166 - DNA, 15 bp, Homo sapiens
ggcagggtggcgggt

SEQ ID NO: 1851167 - DNA, 15 bp, Homo sapiens
gcagggtggcgggtg

SEQ ID NO: 1851168 - DNA, 15 bp, Homo sapiens
cagggtggcgggtgg

SEQ ID NO: 1851169 - DNA, 15 bp, Homo sapiens
agggtggcgggtggc

SEQ ID NO: 1851170 - DNA, 15 bp, Homo sapiens
gggtggcgggtggcg

SEQ ID NO: 1851171 - DNA, 15 bp, Homo sapiens
ggtggcgggtggcgg

SEQ ID NO: 1851172 - DNA, 15 bp, Homo sapiens
gtggcgggtggcgga

SEQ ID NO: 1851173 - DNA, 15 bp, Homo sapiens
tggcgggtggcggag

SEQ ID NO: 1851174 - DNA, 15 bp, Homo sapiens
ggcgggtggcggagg

SEQ ID NO: 1851175 - DNA, 15 bp, Homo sapiens
gcgggtggcggaggt

SEQ ID NO: 1851176 - DNA, 15 bp, Homo sapiens
cgggtggcggaggtc

SEQ ID NO: 1851177 - DNA, 15 bp, Homo sapiens
gggtggcggaggtct

SEQ ID NO: 1851178 - DNA, 15 bp, Homo sapiens
ggtggcggaggtctt

SEQ ID NO: 1851179 - DNA, 15 bp, Homo sapiens
gtggcggaggtcttc

SEQ ID NO: 1851180 - DNA, 15 bp, Homo sapiens
tggcggaggtcttcc

SEQ ID NO: 1851181 - DNA, 15 bp, Homo sapiens
ggcggaggtcttccg

SEQ ID NO: 1851182 - DNA, 15 bp, Homo sapiens
gcggaggtcttccgg

SEQ ID NO: 1851183 - DNA, 15 bp, Homo sapiens
cggaggtcttccggg

SEQ ID NO: 1851184 - DNA, 15 bp, Homo sapiens
ggaggtcttccgggc

SEQ ID NO: 1851185 - DNA, 15 bp, Homo sapiens
gaggtcttccgggcc

SEQ ID NO: 1851186 - DNA, 15 bp, Homo sapiens
aggtcttccgggccc

SEQ ID NO: 1851187 - DNA, 15 bp, Homo sapiens
ggtcttccgggcccg

SEQ ID NO: 1851188 - DNA, 15 bp, Homo sapiens
gtcttccgggcccgg

SEQ ID NO: 1851189 - DNA, 15 bp, Homo sapiens
tcttccgggcccggg

SEQ ID NO: 1851190 - DNA, 15 bp, Homo sapiens
cttccgggcccggga

SEQ ID NO: 1851191 - DNA, 15 bp, Homo sapiens
ttccgggcccgggag

SEQ ID NO: 1851192 - DNA, 15 bp, Homo sapiens
tccgggcccgggagg

SEQ ID NO: 1851193 - DNA, 15 bp, Homo sapiens
ccgggcccgggagga

SEQ ID NO: 1851194 - DNA, 15 bp, Homo sapiens
cgggcccgggaggaa

SEQ ID NO: 1851195 - DNA, 15 bp, Homo sapiens
gggcccgggaggaaa

SEQ ID NO: 1851196 - DNA, 15 bp, Homo sapiens
ggcccgggaggaaac

SEQ ID NO: 1851197 - DNA, 15 bp, Homo sapiens
gcccgggaggaaacc

SEQ ID NO: 1851198 - DNA, 15 bp, Homo sapiens
cccgggaggaaacct

SEQ ID NO: 1851199 - DNA, 15 bp, Homo sapiens
ccgggaggaaacctg

SEQ ID NO: 1851200 - DNA, 15 bp, Homo sapiens
cgggaggaaacctgc

SEQ ID NO: 1851201 - DNA, 15 bp, Homo sapiens
gggaggaaacctgcc

SEQ ID NO: 1851202 - DNA, 15 bp, Homo sapiens
ggaggaaacctgccc

SEQ ID NO: 1851203 - DNA, 15 bp, Homo sapiens
gaggaaacctgcccg

SEQ ID NO: 1851204 - DNA, 15 bp, Homo sapiens
aggaaacctgcccgc

SEQ ID NO: 1851205 - DNA, 15 bp, Homo sapiens
ggaaacctgcccgcg

SEQ ID NO: 1851206 - DNA, 15 bp, Homo sapiens
gaaacctgcccgcgg

SEQ ID NO: 1851207 - DNA, 15 bp, Homo sapiens
aaacctgcccgcggc

SEQ ID NO: 1851208 - DNA, 15 bp, Homo sapiens
aacctgcccgcggcg

SEQ ID NO: 1851209 - DNA, 15 bp, Homo sapiens
acctgcccgcggcgc

SEQ ID NO: 1851210 - DNA, 15 bp, Homo sapiens
cctgcccgcggcgcg

SEQ ID NO: 1851211 - DNA, 15 bp, Homo sapiens
ctgcccgcggcgcgc

SEQ ID NO: 1851212 - DNA, 15 bp, Homo sapiens
tgcccgcggcgcgca

SEQ ID NO: 1851213 - DNA, 15 bp, Homo sapiens
gcccgcggcgcgcag

SEQ ID NO: 1851214 - DNA, 15 bp, Homo sapiens
cccgcggcgcgcagg

SEQ ID NO: 1851215 - DNA, 15 bp, Homo sapiens
ccgcggcgcgcaggc

SEQ ID NO: 1851216 - DNA, 15 bp, Homo sapiens
cgcggcgcgcaggcg

SEQ ID NO: 1851217 - DNA, 15 bp, Homo sapiens
gcggcgcgcaggcga

SEQ ID NO: 1851218 - DNA, 15 bp, Homo sapiens
cggcgcgcaggcgag

SEQ ID NO: 1851219 - DNA, 15 bp, Homo sapiens
ggcgcgcaggcgagc

SEQ ID NO: 1851220 - DNA, 15 bp, Homo sapiens
gcgcgcaggcgagcc

SEQ ID NO: 1851221 - DNA, 15 bp, Homo sapiens
cgcgcaggcgagccc

SEQ ID NO: 1851222 - DNA, 15 bp, Homo sapiens
gcgcaggcgagcccc

SEQ ID NO: 1851223 - DNA, 15 bp, Homo sapiens
cgcaggcgagccccc

SEQ ID NO: 1851224 - DNA, 15 bp, Homo sapiens
gcaggcgagccccca

SEQ ID NO: 1851225 - DNA, 15 bp, Homo sapiens
caggcgagcccccac

SEQ ID NO: 1851226 - DNA, 15 bp, Homo sapiens
aggcgagcccccacc

SEQ ID NO: 1851227 - DNA, 15 bp, Homo sapiens
ggcgagcccccaccc

SEQ ID NO: 1851228 - DNA, 15 bp, Homo sapiens
gcgagcccccacccc

SEQ ID NO: 1851229 - DNA, 15 bp, Homo sapiens
cgagcccccaccccc

SEQ ID NO: 1851230 - DNA, 15 bp, Homo sapiens
gagcccccacccccg

SEQ ID NO: 1851231 - DNA, 15 bp, Homo sapiens
agcccccacccccgc

SEQ ID NO: 1851232 - DNA, 15 bp, Homo sapiens
gcccccacccccgct

SEQ ID NO: 1851233 - DNA, 15 bp, Homo sapiens
cccccacccccgctc

SEQ ID NO: 1851234 - DNA, 15 bp, Homo sapiens
ccccacccccgctcc

SEQ ID NO: 1851235 - DNA, 15 bp, Homo sapiens
cccacccccgctccc

SEQ ID NO: 1851236 - DNA, 15 bp, Homo sapiens
ccacccccgctcccc

SEQ ID NO: 1851237 - DNA, 15 bp, Homo sapiens
cacccccgctcccct

SEQ ID NO: 1851238 - DNA, 15 bp, Homo sapiens
acccccgctcccctt

SEQ ID NO: 1851239 - DNA, 15 bp, Homo sapiens
cccccgctccccttc

SEQ ID NO: 1851240 - DNA, 15 bp, Homo sapiens
ccccgctccccttct

SEQ ID NO: 1851241 - DNA, 15 bp, Homo sapiens
cccgctccccttctc

SEQ ID NO: 1851242 - DNA, 15 bp, Homo sapiens
ccgctccccttctcc

SEQ ID NO: 1851243 - DNA, 15 bp, Homo sapiens
cgctccccttctccc

SEQ ID NO: 1851244 - DNA, 15 bp, Homo sapiens
gctccccttctcccg

SEQ ID NO: 1851245 - DNA, 15 bp, Homo sapiens
ctccccttctcccgc

SEQ ID NO: 1851246 - DNA, 15 bp, Homo sapiens
tccccttctcccgcc

SEQ ID NO: 1851247 - DNA, 15 bp, Homo sapiens
ccccttctcccgccg

SEQ ID NO: 1851248 - DNA, 15 bp, Homo sapiens
cccttctcccgccgg

SEQ ID NO: 1851249 - DNA, 15 bp, Homo sapiens
ccttctcccgccggg

SEQ ID NO: 1851250 - DNA, 15 bp, Homo sapiens
cttctcccgccggga

SEQ ID NO: 1851251 - DNA, 15 bp, Homo sapiens
ttctcccgccgggat

SEQ ID NO: 1851252 - DNA, 15 bp, Homo sapiens
tctcccgccgggatg

SEQ ID NO: 1851253 - DNA, 15 bp, Homo sapiens
ctcccgccgggatgc

SEQ ID NO: 1851254 - DNA, 15 bp, Homo sapiens
tcccgccgggatgct

SEQ ID NO: 1851255 - DNA, 15 bp, Homo sapiens
cccgccgggatgctg

SEQ ID NO: 1851256 - DNA, 15 bp, Homo sapiens
ccgccgggatgctgc

SEQ ID NO: 1851257 - DNA, 15 bp, Homo sapiens
cgccgggatgctgcc

SEQ ID NO: 1851258 - DNA, 15 bp, Homo sapiens
gccgggatgctgccc

SEQ ID NO: 1851259 - DNA, 15 bp, Homo sapiens
ccgggatgctgcccc

SEQ ID NO: 1851260 - DNA, 15 bp, Homo sapiens
cgggatgctgcccct

SEQ ID NO: 1851261 - DNA, 15 bp, Homo sapiens
gggatgctgcccctc

SEQ ID NO: 1851262 - DNA, 15 bp, Homo sapiens
ggatgctgcccctca

SEQ ID NO: 1851263 - DNA, 15 bp, Homo sapiens
gatgctgcccctcac

SEQ ID NO: 1851264 - DNA, 15 bp, Homo sapiens
atgctgcccctcaca

SEQ ID NO: 1851265 - DNA, 15 bp, Homo sapiens
tgctgcccctcacag

SEQ ID NO: 1851266 - DNA, 15 bp, Homo sapiens
gctgcccctcacagc

SEQ ID NO: 1851267 - DNA, 15 bp, Homo sapiens
ctgcccctcacagct

SEQ ID NO: 1851268 - DNA, 15 bp, Homo sapiens
tgcccctcacagctc

SEQ ID NO: 1851269 - DNA, 15 bp, Homo sapiens
gcccctcacagctcg

SEQ ID NO: 1851270 - DNA, 15 bp, Homo sapiens
cccctcacagctcgt

SEQ ID NO: 1851271 - DNA, 15 bp, Homo sapiens
ccctcacagctcgtc

SEQ ID NO: 1851272 - DNA, 15 bp, Homo sapiens
cctcacagctcgtca

SEQ ID NO: 1851273 - DNA, 15 bp, Homo sapiens
ctcacagctcgtcag

SEQ ID NO: 1851274 - DNA, 15 bp, Homo sapiens
tcacagctcgtcagc

SEQ ID NO: 1851275 - DNA, 15 bp, Homo sapiens
cacagctcgtcagcc

SEQ ID NO: 1851276 - DNA, 15 bp, Homo sapiens
acagctcgtcagccg

SEQ ID NO: 1851277 - DNA, 15 bp, Homo sapiens
cagctcgtcagccgg

SEQ ID NO: 1851278 - DNA, 15 bp, Homo sapiens
agctcgtcagccggc

SEQ ID NO: 1851279 - DNA, 15 bp, Homo sapiens
gctcgtcagccggcc

SEQ ID NO: 1851280 - DNA, 15 bp, Homo sapiens
ctcgtcagccggcca

SEQ ID NO: 1851281 - DNA, 15 bp, Homo sapiens
tcgtcagccggccaa

SEQ ID NO: 1851282 - DNA, 15 bp, Homo sapiens
cgtcagccggccaaa

SEQ ID NO: 1851283 - DNA, 15 bp, Homo sapiens
gtcagccggccaaat

SEQ ID NO: 1851284 - DNA, 15 bp, Homo sapiens
tcagccggccaaatg

SEQ ID NO: 1851285 - DNA, 15 bp, Homo sapiens
cagccggccaaatgc

SEQ ID NO: 1851286 - DNA, 15 bp, Homo sapiens
agccggccaaatgca

SEQ ID NO: 1851287 - DNA, 15 bp, Homo sapiens
gccggccaaatgcat

SEQ ID NO: 1851288 - DNA, 15 bp, Homo sapiens
ccggccaaatgcatt

SEQ ID NO: 1851289 - DNA, 15 bp, Homo sapiens
cggccaaatgcattc

SEQ ID NO: 1851290 - DNA, 15 bp, Homo sapiens
ggccaaatgcattcc

SEQ ID NO: 1851291 - DNA, 15 bp, Homo sapiens
gccaaatgcattcca

SEQ ID NO: 1851292 - DNA, 15 bp, Homo sapiens
ccaaatgcattccag

SEQ ID NO: 1851293 - DNA, 15 bp, Homo sapiens
caaatgcattccaga

SEQ ID NO: 1851294 - DNA, 15 bp, Homo sapiens
aaatgcattccagag

SEQ ID NO: 1851295 - DNA, 15 bp, Homo sapiens
aatgcattccagagc

SEQ ID NO: 1851296 - DNA, 15 bp, Homo sapiens
atgcattccagagct

SEQ ID NO: 1851297 - DNA, 15 bp, Homo sapiens
tgcattccagagctg

SEQ ID NO: 1851298 - DNA, 15 bp, Homo sapiens
gcattccagagctgt

SEQ ID NO: 1851299 - DNA, 15 bp, Homo sapiens
cattccagagctgtg

SEQ ID NO: 1851300 - DNA, 15 bp, Homo sapiens
attccagagctgtgc

SEQ ID NO: 1851301 - DNA, 15 bp, Homo sapiens
ttccagagctgtgca

SEQ ID NO: 1851302 - DNA, 15 bp, Homo sapiens
tccagagctgtgcac

SEQ ID NO: 1851303 - DNA, 15 bp, Homo sapiens
ccagagctgtgcaca

SEQ ID NO: 1851304 - DNA, 15 bp, Homo sapiens
cagagctgtgcacaa

SEQ ID NO: 1851305 - DNA, 15 bp, Homo sapiens
agagctgtgcacaag

SEQ ID NO: 1851306 - DNA, 15 bp, Homo sapiens
gagctgtgcacaaga

SEQ ID NO: 1851307 - DNA, 15 bp, Homo sapiens
agctgtgcacaagac

SEQ ID NO: 1851308 - DNA, 15 bp, Homo sapiens
gctgtgcacaagaca

SEQ ID NO: 1851309 - DNA, 15 bp, Homo sapiens
ctgtgcacaagacac

SEQ ID NO: 1851310 - DNA, 15 bp, Homo sapiens
tgtgcacaagacaca

SEQ ID NO: 1851311 - DNA, 15 bp, Homo sapiens
gtgcacaagacacac

SEQ ID NO: 1851312 - DNA, 15 bp, Homo sapiens
tgcacaagacacact

SEQ ID NO: 1851313 - DNA, 15 bp, Homo sapiens
gcacaagacacactt

SEQ ID NO: 1851314 - DNA, 15 bp, Homo sapiens
cacaagacacacttc

SEQ ID NO: 1851315 - DNA, 15 bp, Homo sapiens
acaagacacacttct

SEQ ID NO: 1851316 - DNA, 15 bp, Homo sapiens
caagacacacttctc

SEQ ID NO: 1851317 - DNA, 15 bp, Homo sapiens
aagacacacttctcc

SEQ ID NO: 1851318 - DNA, 15 bp, Homo sapiens
agacacacttctcca

SEQ ID NO: 1851319 - DNA, 15 bp, Homo sapiens
gacacacttctccag

SEQ ID NO: 1851320 - DNA, 15 bp, Homo sapiens
acacacttctccagg

SEQ ID NO: 1851321 - DNA, 15 bp, Homo sapiens
cacacttctccaggc

SEQ ID NO: 1851322 - DNA, 15 bp, Homo sapiens
acacttctccaggca

SEQ ID NO: 1851323 - DNA, 15 bp, Homo sapiens
cacttctccaggcag

SEQ ID NO: 1851324 - DNA, 15 bp, Homo sapiens
acttctccaggcagt

SEQ ID NO: 1851325 - DNA, 15 bp, Homo sapiens
cttctccaggcagtc

SEQ ID NO: 1851326 - DNA, 15 bp, Homo sapiens
ttctccaggcagtcc

SEQ ID NO: 1851327 - DNA, 15 bp, Homo sapiens
tctccaggcagtcct

SEQ ID NO: 1851328 - DNA, 15 bp, Homo sapiens
ctccaggcagtccta

SEQ ID NO: 1851329 - DNA, 15 bp, Homo sapiens
tccaggcagtcctag

SEQ ID NO: 1851330 - DNA, 15 bp, Homo sapiens
ccaggcagtcctaga

SEQ ID NO: 1851331 - DNA, 15 bp, Homo sapiens
caggcagtcctagaa

SEQ ID NO: 1851332 - DNA, 15 bp, Homo sapiens
aggcagtcctagaaa

SEQ ID NO: 1851333 - DNA, 15 bp, Homo sapiens
ggcagtcctagaaac

SEQ ID NO: 1851334 - DNA, 15 bp, Homo sapiens
gcagtcctagaaacc

SEQ ID NO: 1851335 - DNA, 15 bp, Homo sapiens
cagtcctagaaaccg

SEQ ID NO: 1851336 - DNA, 15 bp, Homo sapiens
agtcctagaaaccgg

SEQ ID NO: 1851337 - DNA, 15 bp, Homo sapiens
gtcctagaaaccgga

SEQ ID NO: 1851338 - DNA, 15 bp, Homo sapiens
tcctagaaaccggag

SEQ ID NO: 1851339 - DNA, 15 bp, Homo sapiens
cctagaaaccggagc

SEQ ID NO: 1851340 - DNA, 15 bp, Homo sapiens
ctagaaaccggagcc

SEQ ID NO: 1851341 - DNA, 15 bp, Homo sapiens
tagaaaccggagccc

SEQ ID NO: 1851342 - DNA, 15 bp, Homo sapiens
agaaaccggagcccg

SEQ ID NO: 1851343 - DNA, 15 bp, Homo sapiens
gaaaccggagcccgg

SEQ ID NO: 1851344 - DNA, 15 bp, Homo sapiens
aaaccggagcccgga

SEQ ID NO: 1851345 - DNA, 15 bp, Homo sapiens
aaccggagcccggag

SEQ ID NO: 1851346 - DNA, 15 bp, Homo sapiens
accggagcccggagc

SEQ ID NO: 1851347 - DNA, 15 bp, Homo sapiens
ccggagcccggagct

SEQ ID NO: 1851348 - DNA, 15 bp, Homo sapiens
cggagcccggagctg

SEQ ID NO: 1851349 - DNA, 15 bp, Homo sapiens
ggagcccggagctga

SEQ ID NO: 1851350 - DNA, 15 bp, Homo sapiens
gagcccggagctgag

SEQ ID NO: 1851351 - DNA, 15 bp, Homo sapiens
agcccggagctgaga

SEQ ID NO: 1851352 - DNA, 15 bp, Homo sapiens
gcccggagctgagag

SEQ ID NO: 1851353 - DNA, 15 bp, Homo sapiens
cccggagctgagagg

SEQ ID NO: 1851354 - DNA, 15 bp, Homo sapiens
ccggagctgagaggg

SEQ ID NO: 1851355 - DNA, 15 bp, Homo sapiens
cggagctgagagggc

SEQ ID NO: 1851356 - DNA, 15 bp, Homo sapiens
ggagctgagagggcg

SEQ ID NO: 1851357 - DNA, 15 bp, Homo sapiens
gagctgagagggcgg

SEQ ID NO: 1851358 - DNA, 15 bp, Homo sapiens
agctgagagggcggg

SEQ ID NO: 1851359 - DNA, 15 bp, Homo sapiens
gctgagagggcggga

SEQ ID NO: 1851360 - DNA, 15 bp, Homo sapiens
ctgagagggcgggag

SEQ ID NO: 1851361 - DNA, 15 bp, Homo sapiens
tgagagggcgggagg

SEQ ID NO: 1851362 - DNA, 15 bp, Homo sapiens
gagagggcgggaggg

SEQ ID NO: 1851363 - DNA, 15 bp, Homo sapiens
agagggcgggaggga

SEQ ID NO: 1851364 - DNA, 15 bp, Homo sapiens
gagggcgggagggag

SEQ ID NO: 1851365 - DNA, 15 bp, Homo sapiens
agggcgggagggagc

SEQ ID NO: 1851366 - DNA, 15 bp, Homo sapiens
gggcgggagggagcg

SEQ ID NO: 1851367 - DNA, 15 bp, Homo sapiens
ggcgggagggagcgc

SEQ ID NO: 1851368 - DNA, 15 bp, Homo sapiens
gcgggagggagcgcg

SEQ ID NO: 1851369 - DNA, 15 bp, Homo sapiens
cgggagggagcgcgc

SEQ ID NO: 1851370 - DNA, 15 bp, Homo sapiens
gggagggagcgcgcg

SEQ ID NO: 1851371 - DNA, 15 bp, Homo sapiens
ggagggagcgcgcgg

SEQ ID NO: 1851372 - DNA, 15 bp, Homo sapiens
gagggagcgcgcggc

SEQ ID NO: 1851373 - DNA, 15 bp, Homo sapiens
agggagcgcgcggcc

SEQ ID NO: 1851374 - DNA, 15 bp, Homo sapiens
gggagcgcgcggccg

SEQ ID NO: 1851375 - DNA, 15 bp, Homo sapiens
ggagcgcgcggccgc

SEQ ID NO: 1851376 - DNA, 15 bp, Homo sapiens
gagcgcgcggccgcc

SEQ ID NO: 1851377 - DNA, 15 bp, Homo sapiens
agcgcgcggccgccg

SEQ ID NO: 1851378 - DNA, 15 bp, Homo sapiens
gcgcgcggccgccgc

SEQ ID NO: 1851379 - DNA, 15 bp, Homo sapiens
cgcgcggccgccgct

SEQ ID NO: 1851380 - DNA, 15 bp, Homo sapiens
gcgcggccgccgctg

SEQ ID NO: 1851381 - DNA, 15 bp, Homo sapiens
cgcggccgccgctga

SEQ ID NO: 1851382 - DNA, 15 bp, Homo sapiens
gcggccgccgctgag

SEQ ID NO: 1851383 - DNA, 15 bp, Homo sapiens
cggccgccgctgagg

SEQ ID NO: 1851384 - DNA, 15 bp, Homo sapiens
ggccgccgctgaggt

SEQ ID NO: 1851385 - DNA, 15 bp, Homo sapiens
gccgccgctgaggtc

SEQ ID NO: 1851386 - DNA, 15 bp, Homo sapiens
ccgccgctgaggtca

SEQ ID NO: 1851387 - DNA, 15 bp, Homo sapiens
cgccgctgaggtcat

SEQ ID NO: 1851388 - DNA, 15 bp, Homo sapiens
gccgctgaggtcata

SEQ ID NO: 1851389 - DNA, 15 bp, Homo sapiens
ccgctgaggtcatat

SEQ ID NO: 1851390 - DNA, 15 bp, Homo sapiens
cgctgaggtcatatt

SEQ ID NO: 1851391 - DNA, 15 bp, Homo sapiens
gctgaggtcatattc

SEQ ID NO: 1851392 - DNA, 15 bp, Homo sapiens
ctgaggtcatattca

SEQ ID NO: 1851393 - DNA, 15 bp, Homo sapiens
tgaggtcatattcac

SEQ ID NO: 1851394 - DNA, 15 bp, Homo sapiens
gaggtcatattcacg

SEQ ID NO: 1851395 - DNA, 15 bp, Homo sapiens
aggtcatattcacgc

SEQ ID NO: 1851396 - DNA, 15 bp, Homo sapiens
ggtcatattcacgcc

SEQ ID NO: 1851397 - DNA, 15 bp, Homo sapiens
gtcatattcacgccg

SEQ ID NO: 1851398 - DNA, 15 bp, Homo sapiens
tcatattcacgccgc

SEQ ID NO: 1851399 - DNA, 15 bp, Homo sapiens
catattcacgccgcc

SEQ ID NO: 1851400 - DNA, 15 bp, Homo sapiens
atattcacgccgcct

SEQ ID NO: 1851401 - DNA, 15 bp, Homo sapiens
tattcacgccgcctc

SEQ ID NO: 1851402 - DNA, 15 bp, Homo sapiens
attcacgccgcctcc

SEQ ID NO: 1851403 - DNA, 15 bp, Homo sapiens
ttcacgccgcctccc

SEQ ID NO: 1851404 - DNA, 15 bp, Homo sapiens
tcacgccgcctcccc

SEQ ID NO: 1851405 - DNA, 15 bp, Homo sapiens
cacgccgcctccccg

SEQ ID NO: 1851406 - DNA, 15 bp, Homo sapiens
acgccgcctccccgc

SEQ ID NO: 1851407 - DNA, 15 bp, Homo sapiens
cgccgcctccccgcc

SEQ ID NO: 1851408 - DNA, 15 bp, Homo sapiens
gccgcctccccgccc

SEQ ID NO: 1851409 - DNA, 15 bp, Homo sapiens
ccgcctccccgccct

SEQ ID NO: 1851410 - DNA, 15 bp, Homo sapiens
cgcctccccgccctc

SEQ ID NO: 1851411 - DNA, 15 bp, Homo sapiens
gcctccccgccctcg

SEQ ID NO: 1851412 - DNA, 15 bp, Homo sapiens
cctccccgccctcgg

SEQ ID NO: 1851413 - DNA, 15 bp, Homo sapiens
ctccccgccctcggc

SEQ ID NO: 1851414 - DNA, 15 bp, Homo sapiens
tccccgccctcggcg

SEQ ID NO: 1851415 - DNA, 15 bp, Homo sapiens
ccccgccctcggcgg

SEQ ID NO: 1851416 - DNA, 15 bp, Homo sapiens
cccgccctcggcggc

SEQ ID NO: 1851417 - DNA, 15 bp, Homo sapiens
ccgccctcggcggct

SEQ ID NO: 1851418 - DNA, 15 bp, Homo sapiens
cgccctcggcggctg

SEQ ID NO: 1851419 - DNA, 15 bp, Homo sapiens
gccctcggcggctgt

SEQ ID NO: 1851420 - DNA, 15 bp, Homo sapiens
ccctcggcggctgtt

SEQ ID NO: 1851421 - DNA, 15 bp, Homo sapiens
cctcggcggctgttc

SEQ ID NO: 1851422 - DNA, 15 bp, Homo sapiens
ctcggcggctgttcc

SEQ ID NO: 1851423 - DNA, 15 bp, Homo sapiens
tcggcggctgttccc

SEQ ID NO: 1851424 - DNA, 15 bp, Homo sapiens
cggcggctgttcccc

SEQ ID NO: 1851425 - DNA, 15 bp, Homo sapiens
ggcggctgttcccct

SEQ ID NO: 1851426 - DNA, 15 bp, Homo sapiens
gcggctgttcccctc

SEQ ID NO: 1851427 - DNA, 15 bp, Homo sapiens
cggctgttcccctca

SEQ ID NO: 1851428 - DNA, 15 bp, Homo sapiens
ggctgttcccctcag

SEQ ID NO: 1851429 - DNA, 15 bp, Homo sapiens
gctgttcccctcagc

SEQ ID NO: 1851430 - DNA, 15 bp, Homo sapiens
ctgttcccctcagcg

SEQ ID NO: 1851431 - DNA, 15 bp, Homo sapiens
tgttcccctcagcgc

SEQ ID NO: 1851432 - DNA, 15 bp, Homo sapiens
gttcccctcagcgca

SEQ ID NO: 1851433 - DNA, 15 bp, Homo sapiens
ttcccctcagcgcac

SEQ ID NO: 1851434 - DNA, 15 bp, Homo sapiens
tcccctcagcgcaca

SEQ ID NO: 1851435 - DNA, 15 bp, Homo sapiens
cccctcagcgcacac

SEQ ID NO: 1851436 - DNA, 15 bp, Homo sapiens
ccctcagcgcacact

SEQ ID NO: 1851437 - DNA, 15 bp, Homo sapiens
cctcagcgcacactt

SEQ ID NO: 1851438 - DNA, 15 bp, Homo sapiens
ctcagcgcacacttc

SEQ ID NO: 1851439 - DNA, 15 bp, Homo sapiens
tcagcgcacacttcc

SEQ ID NO: 1851440 - DNA, 15 bp, Homo sapiens
cagcgcacacttccc

SEQ ID NO: 1851441 - DNA, 15 bp, Homo sapiens
agcgcacacttccca

SEQ ID NO: 1851442 - DNA, 15 bp, Homo sapiens
gcgcacacttcccag

SEQ ID NO: 1851443 - DNA, 15 bp, Homo sapiens
cgcacacttcccagg

SEQ ID NO: 1851444 - DNA, 15 bp, Homo sapiens
gcacacttcccaggg

SEQ ID NO: 1851445 - DNA, 15 bp, Homo sapiens
cacacttcccagggc

SEQ ID NO: 1851446 - DNA, 15 bp, Homo sapiens
acacttcccagggcc

SEQ ID NO: 1851447 - DNA, 15 bp, Homo sapiens
cacttcccagggcct

SEQ ID NO: 1851448 - DNA, 15 bp, Homo sapiens
acttcccagggcctc

SEQ ID NO: 1851449 - DNA, 15 bp, Homo sapiens
cttcccagggcctcg

SEQ ID NO: 1851450 - DNA, 15 bp, Homo sapiens
ttcccagggcctcgg

SEQ ID NO: 1851451 - DNA, 15 bp, Homo sapiens
tcccagggcctcggt

SEQ ID NO: 1851452 - DNA, 15 bp, Homo sapiens
cccagggcctcggtc

SEQ ID NO: 1851453 - DNA, 15 bp, Homo sapiens
ccagggcctcggtcc

SEQ ID NO: 1851454 - DNA, 15 bp, Homo sapiens
cagggcctcggtcca

SEQ ID NO: 1851455 - DNA, 15 bp, Homo sapiens
agggcctcggtccag

SEQ ID NO: 1851456 - DNA, 15 bp, Homo sapiens
gggcctcggtccagt

SEQ ID NO: 1851457 - DNA, 15 bp, Homo sapiens
ggcctcggtccagtc

SEQ ID NO: 1851458 - DNA, 15 bp, Homo sapiens
gcctcggtccagtcc

SEQ ID NO: 1851459 - DNA, 15 bp, Homo sapiens
cctcggtccagtccg

SEQ ID NO: 1851460 - DNA, 15 bp, Homo sapiens
ctcggtccagtccgg

SEQ ID NO: 1851461 - DNA, 15 bp, Homo sapiens
tcggtccagtccggt

SEQ ID NO: 1851462 - DNA, 15 bp, Homo sapiens
cggtccagtccggta

SEQ ID NO: 1851463 - DNA, 15 bp, Homo sapiens
ggtccagtccggtat

SEQ ID NO: 1851464 - DNA, 15 bp, Homo sapiens
gtccagtccggtata

SEQ ID NO: 1851465 - DNA, 15 bp, Homo sapiens
tccagtccggtataa

SEQ ID NO: 1851466 - DNA, 15 bp, Homo sapiens
ccagtccggtataaa

SEQ ID NO: 1851467 - DNA, 15 bp, Homo sapiens
cagtccggtataaat

SEQ ID NO: 1851468 - DNA, 15 bp, Homo sapiens
agtccggtataaatg

SEQ ID NO: 1851469 - DNA, 15 bp, Homo sapiens
gtccggtataaatgt

SEQ ID NO: 1851470 - DNA, 15 bp, Homo sapiens
tccggtataaatgtc

SEQ ID NO: 1851471 - DNA, 15 bp, Homo sapiens
ccggtataaatgtct

SEQ ID NO: 1851472 - DNA, 15 bp, Homo sapiens
cggtataaatgtctt

SEQ ID NO: 1851473 - DNA, 15 bp, Homo sapiens
ggtataaatgtcttt

SEQ ID NO: 1851474 - DNA, 15 bp, Homo sapiens
gtataaatgtctttt

SEQ ID NO: 1851475 - DNA, 15 bp, Homo sapiens
tataaatgtctttta

SEQ ID NO: 1851476 - DNA, 15 bp, Homo sapiens
ataaatgtcttttaa

SEQ ID NO: 1851477 - DNA, 15 bp, Homo sapiens
taaatgtcttttaaa

SEQ ID NO: 1851478 - DNA, 15 bp, Homo sapiens
aaatgtcttttaaac

SEQ ID NO: 1851479 - DNA, 15 bp, Homo sapiens
aatgtcttttaaacc

SEQ ID NO: 1851480 - DNA, 15 bp, Homo sapiens
atgtcttttaaaccg

SEQ ID NO: 1851481 - DNA, 15 bp, Homo sapiens
tgtcttttaaaccga

SEQ ID NO: 1851482 - DNA, 15 bp, Homo sapiens
gtcttttaaaccgag

SEQ ID NO: 1851483 - DNA, 15 bp, Homo sapiens
tcttttaaaccgaga

SEQ ID NO: 1851484 - DNA, 15 bp, Homo sapiens
cttttaaaccgagac

SEQ ID NO: 1851485 - DNA, 15 bp, Homo sapiens
ttttaaaccgagaca

SEQ ID NO: 1851486 - DNA, 15 bp, Homo sapiens
tttaaaccgagacag

SEQ ID NO: 1851487 - DNA, 15 bp, Homo sapiens
ttaaaccgagacagc

SEQ ID NO: 1851488 - DNA, 15 bp, Homo sapiens
taaaccgagacagcg

SEQ ID NO: 1851489 - DNA, 15 bp, Homo sapiens
aaaccgagacagcgc

SEQ ID NO: 1851490 - DNA, 15 bp, Homo sapiens
aaccgagacagcgct

SEQ ID NO: 1851491 - DNA, 15 bp, Homo sapiens
accgagacagcgctc

SEQ ID NO: 1851492 - DNA, 15 bp, Homo sapiens
ccgagacagcgctct

SEQ ID NO: 1851493 - DNA, 15 bp, Homo sapiens
cgagacagcgctctc

SEQ ID NO: 1851494 - DNA, 15 bp, Homo sapiens
gagacagcgctctcc

SEQ ID NO: 1851495 - DNA, 15 bp, Homo sapiens
agacagcgctctcct

SEQ ID NO: 1851496 - DNA, 15 bp, Homo sapiens
gacagcgctctcctc

SEQ ID NO: 1851497 - DNA, 15 bp, Homo sapiens
acagcgctctcctcc

SEQ ID NO: 1851498 - DNA, 15 bp, Homo sapiens
cagcgctctcctccc

SEQ ID NO: 1851499 - DNA, 15 bp, Homo sapiens
agcgctctcctcccc

SEQ ID NO: 1851500 - DNA, 15 bp, Homo sapiens
gcgctctcctcccct

SEQ ID NO: 1851501 - DNA, 15 bp, Homo sapiens
cgctctcctcccctt

SEQ ID NO: 1851502 - DNA, 15 bp, Homo sapiens
gctctcctccccttg

SEQ ID NO: 1851503 - DNA, 15 bp, Homo sapiens
ctctcctccccttgc

SEQ ID NO: 1851504 - DNA, 15 bp, Homo sapiens
tctcctccccttgcc

SEQ ID NO: 1851505 - DNA, 15 bp, Homo sapiens
ctcctccccttgccc

SEQ ID NO: 1851506 - DNA, 15 bp, Homo sapiens
tcctccccttgccct

SEQ ID NO: 1851507 - DNA, 15 bp, Homo sapiens
cctccccttgccctc

SEQ ID NO: 1851508 - DNA, 15 bp, Homo sapiens
ctccccttgccctcg

SEQ ID NO: 1851509 - DNA, 15 bp, Homo sapiens
tccccttgccctcgg

SEQ ID NO: 1851510 - DNA, 15 bp, Homo sapiens
ccccttgccctcggg

SEQ ID NO: 1851511 - DNA, 15 bp, Homo sapiens
cccttgccctcgggc

SEQ ID NO: 1851512 - DNA, 15 bp, Homo sapiens
ccttgccctcgggcg

SEQ ID NO: 1851513 - DNA, 15 bp, Homo sapiens
cttgccctcgggcgc

SEQ ID NO: 1851514 - DNA, 15 bp, Homo sapiens
ttgccctcgggcgcg

SEQ ID NO: 1851515 - DNA, 15 bp, Homo sapiens
tgccctcgggcgcgg

SEQ ID NO: 1851516 - DNA, 15 bp, Homo sapiens
gccctcgggcgcggc

SEQ ID NO: 1851517 - DNA, 15 bp, Homo sapiens
ccctcgggcgcggcc

SEQ ID NO: 1851518 - DNA, 15 bp, Homo sapiens
cctcgggcgcggcca

SEQ ID NO: 1851519 - DNA, 15 bp, Homo sapiens
ctcgggcgcggccaa

SEQ ID NO: 1851520 - DNA, 15 bp, Homo sapiens
tcgggcgcggccaag

SEQ ID NO: 1851521 - DNA, 15 bp, Homo sapiens
cgggcgcggccaagg

SEQ ID NO: 1851522 - DNA, 15 bp, Homo sapiens
gggcgcggccaaggg

SEQ ID NO: 1851523 - DNA, 15 bp, Homo sapiens
ggcgcggccaaggga

SEQ ID NO: 1851524 - DNA, 15 bp, Homo sapiens
gcgcggccaagggat

SEQ ID NO: 1851525 - DNA, 15 bp, Homo sapiens
cgcggccaagggatc

SEQ ID NO: 1851526 - DNA, 15 bp, Homo sapiens
gcggccaagggatcc

SEQ ID NO: 1851527 - DNA, 15 bp, Homo sapiens
cggccaagggatcca

SEQ ID NO: 1851528 - DNA, 15 bp, Homo sapiens
ggccaagggatccac

SEQ ID NO: 1851529 - DNA, 15 bp, Homo sapiens
gccaagggatccacc

SEQ ID NO: 1851530 - DNA, 15 bp, Homo sapiens
ccaagggatccaccg

SEQ ID NO: 1851531 - DNA, 15 bp, Homo sapiens
caagggatccaccgc

SEQ ID NO: 1851532 - DNA, 15 bp, Homo sapiens
aagggatccaccgcc

SEQ ID NO: 1851533 - DNA, 15 bp, Homo sapiens
agggatccaccgcca

SEQ ID NO: 1851534 - DNA, 15 bp, Homo sapiens
gggatccaccgccag

SEQ ID NO: 1851535 - DNA, 15 bp, Homo sapiens
ggatccaccgccagg

SEQ ID NO: 1851536 - DNA, 15 bp, Homo sapiens
gatccaccgccaggg

SEQ ID NO: 1851537 - DNA, 15 bp, Homo sapiens
atccaccgccagggc

SEQ ID NO: 1851538 - DNA, 15 bp, Homo sapiens
tccaccgccagggcc

SEQ ID NO: 1851539 - DNA, 15 bp, Homo sapiens
ccaccgccagggcct

SEQ ID NO: 1851540 - DNA, 15 bp, Homo sapiens
caccgccagggcctt

SEQ ID NO: 1851541 - DNA, 15 bp, Homo sapiens
accgccagggccttt

SEQ ID NO: 1851542 - DNA, 15 bp, Homo sapiens
ccgccagggccttta

SEQ ID NO: 1851543 - DNA, 15 bp, Homo sapiens
cgccagggcctttaa

SEQ ID NO: 1851544 - DNA, 15 bp, Homo sapiens
gccagggcctttaaa

SEQ ID NO: 1851545 - DNA, 15 bp, Homo sapiens
ccagggcctttaaaa

SEQ ID NO: 1851546 - DNA, 15 bp, Homo sapiens
cagggcctttaaaac

SEQ ID NO: 1851547 - DNA, 15 bp, Homo sapiens
agggcctttaaaaca

SEQ ID NO: 1851548 - DNA, 15 bp, Homo sapiens
gggcctttaaaacaa

SEQ ID NO: 1851549 - DNA, 15 bp, Homo sapiens
ggcctttaaaacaaa

SEQ ID NO: 1851550 - DNA, 15 bp, Homo sapiens
gcctttaaaacaaaa

SEQ ID NO: 1851551 - DNA, 15 bp, Homo sapiens
cctttaaaacaaaac

SEQ ID NO: 1851552 - DNA, 15 bp, Homo sapiens
ctttaaaacaaaacc

SEQ ID NO: 1851553 - DNA, 15 bp, Homo sapiens
tttaaaacaaaacca

SEQ ID NO: 1851554 - DNA, 15 bp, Homo sapiens
ttaaaacaaaaccaa

SEQ ID NO: 1851555 - DNA, 15 bp, Homo sapiens
taaaacaaaaccaat

SEQ ID NO: 1851556 - DNA, 15 bp, Homo sapiens
aaaacaaaaccaatg

SEQ ID NO: 1851557 - DNA, 15 bp, Homo sapiens
aaacaaaaccaatga

SEQ ID NO: 1851558 - DNA, 15 bp, Homo sapiens
aacaaaaccaatgaa

SEQ ID NO: 1851559 - DNA, 15 bp, Homo sapiens
acaaaaccaatgaat

SEQ ID NO: 1851560 - DNA, 15 bp, Homo sapiens
caaaaccaatgaatg

SEQ ID NO: 1851561 - DNA, 15 bp, Homo sapiens
aaaaccaatgaatga

SEQ ID NO: 1851562 - DNA, 15 bp, Homo sapiens
aaaccaatgaatgaa

SEQ ID NO: 1851563 - DNA, 15 bp, Homo sapiens
aaccaatgaatgaag

SEQ ID NO: 1851564 - DNA, 15 bp, Homo sapiens
accaatgaatgaagc

SEQ ID NO: 1851565 - DNA, 15 bp, Homo sapiens
ccaatgaatgaagcg

SEQ ID NO: 1851566 - DNA, 15 bp, Homo sapiens
caatgaatgaagcgc

SEQ ID NO: 1851567 - DNA, 15 bp, Homo sapiens
aatgaatgaagcgct

SEQ ID NO: 1851568 - DNA, 15 bp, Homo sapiens
atgaatgaagcgcta

SEQ ID NO: 1851569 - DNA, 15 bp, Homo sapiens
tgaatgaagcgctag

SEQ ID NO: 1851570 - DNA, 15 bp, Homo sapiens
gaatgaagcgctagg

SEQ ID NO: 1851571 - DNA, 15 bp, Homo sapiens
aatgaagcgctaggg

SEQ ID NO: 1851572 - DNA, 15 bp, Homo sapiens
atgaagcgctagggc

SEQ ID NO: 1851573 - DNA, 15 bp, Homo sapiens
tgaagcgctagggcg

SEQ ID NO: 1851574 - DNA, 15 bp, Homo sapiens
gaagcgctagggcga

SEQ ID NO: 1851575 - DNA, 15 bp, Homo sapiens
aagcgctagggcgag

SEQ ID NO: 1851576 - DNA, 15 bp, Homo sapiens
agcgctagggcgagc

SEQ ID NO: 1851577 - DNA, 15 bp, Homo sapiens
gcgctagggcgagcg

SEQ ID NO: 1851578 - DNA, 15 bp, Homo sapiens
cgctagggcgagcgc

SEQ ID NO: 1851579 - DNA, 15 bp, Homo sapiens
gctagggcgagcgcg

SEQ ID NO: 1851580 - DNA, 15 bp, Homo sapiens
ctagggcgagcgcgc

SEQ ID NO: 1851581 - DNA, 15 bp, Homo sapiens
tagggcgagcgcgcg

SEQ ID NO: 1851582 - DNA, 15 bp, Homo sapiens
agggcgagcgcgcgc

SEQ ID NO: 1851583 - DNA, 15 bp, Homo sapiens
gggcgagcgcgcgcg

SEQ ID NO: 1851584 - DNA, 15 bp, Homo sapiens
ggcgagcgcgcgcga

SEQ ID NO: 1851585 - DNA, 15 bp, Homo sapiens
gcgagcgcgcgcgag

SEQ ID NO: 1851586 - DNA, 15 bp, Homo sapiens
cgagcgcgcgcgaga

SEQ ID NO: 1851587 - DNA, 15 bp, Homo sapiens
gagcgcgcgcgagat

SEQ ID NO: 1851588 - DNA, 15 bp, Homo sapiens
agcgcgcgcgagatg

SEQ ID NO: 1851589 - DNA, 15 bp, Homo sapiens
gcgcgcgcgagatgg

SEQ ID NO: 1851590 - DNA, 15 bp, Homo sapiens
cgcgcgcgagatggc

SEQ ID NO: 1851591 - DNA, 15 bp, Homo sapiens
gcgcgcgagatggcc

SEQ ID NO: 1851592 - DNA, 15 bp, Homo sapiens
cgcgcgagatggcca

SEQ ID NO: 1851593 - DNA, 15 bp, Homo sapiens
gcgcgagatggccac

SEQ ID NO: 1851594 - DNA, 15 bp, Homo sapiens
cgcgagatggccacc

SEQ ID NO: 1851595 - DNA, 15 bp, Homo sapiens
gcgagatggccaccg

SEQ ID NO: 1851596 - DNA, 15 bp, Homo sapiens
cgagatggccaccgc

SEQ ID NO: 1851597 - DNA, 15 bp, Homo sapiens
gagatggccaccgcg

SEQ ID NO: 1851598 - DNA, 15 bp, Homo sapiens
agatggccaccgcga

SEQ ID NO: 1851599 - DNA, 15 bp, Homo sapiens
gatggccaccgcgaa

SEQ ID NO: 1851600 - DNA, 15 bp, Homo sapiens
atggccaccgcgaaa

SEQ ID NO: 1851601 - DNA, 15 bp, Homo sapiens
tggccaccgcgaaac

SEQ ID NO: 1851602 - DNA, 15 bp, Homo sapiens
ggccaccgcgaaacc

SEQ ID NO: 1851603 - DNA, 15 bp, Homo sapiens
gccaccgcgaaaccc

SEQ ID NO: 1851604 - DNA, 15 bp, Homo sapiens
ccaccgcgaaaccca

SEQ ID NO: 1851605 - DNA, 15 bp, Homo sapiens
caccgcgaaacccag

SEQ ID NO: 1851606 - DNA, 15 bp, Homo sapiens
accgcgaaacccagc

SEQ ID NO: 1851607 - DNA, 15 bp, Homo sapiens
ccgcgaaacccagcc

SEQ ID NO: 1851608 - DNA, 15 bp, Homo sapiens
cgcgaaacccagccg

SEQ ID NO: 1851609 - DNA, 15 bp, Homo sapiens
gcgaaacccagccgg

SEQ ID NO: 1851610 - DNA, 15 bp, Homo sapiens
cgaaacccagccggg

SEQ ID NO: 1851611 - DNA, 15 bp, Homo sapiens
gaaacccagccgggt

SEQ ID NO: 1851612 - DNA, 15 bp, Homo sapiens
aaacccagccgggtc

SEQ ID NO: 1851613 - DNA, 15 bp, Homo sapiens
aacccagccgggtcg

SEQ ID NO: 1851614 - DNA, 15 bp, Homo sapiens
acccagccgggtcga

SEQ ID NO: 1851615 - DNA, 15 bp, Homo sapiens
cccagccgggtcgaa

SEQ ID NO: 1851616 - DNA, 15 bp, Homo sapiens
ccagccgggtcgaaa

SEQ ID NO: 1851617 - DNA, 15 bp, Homo sapiens
cagccgggtcgaaat

SEQ ID NO: 1851618 - DNA, 15 bp, Homo sapiens
agccgggtcgaaatc

SEQ ID NO: 1851619 - DNA, 15 bp, Homo sapiens
gccgggtcgaaatcg

SEQ ID NO: 1851620 - DNA, 15 bp, Homo sapiens
ccgggtcgaaatcgg

SEQ ID NO: 1851621 - DNA, 15 bp, Homo sapiens
cgggtcgaaatcggg

SEQ ID NO: 1851622 - DNA, 15 bp, Homo sapiens
gggtcgaaatcgggc

SEQ ID NO: 1851623 - DNA, 15 bp, Homo sapiens
ggtcgaaatcgggcc

SEQ ID NO: 1851624 - DNA, 15 bp, Homo sapiens
gtcgaaatcgggcca

SEQ ID NO: 1851625 - DNA, 15 bp, Homo sapiens
tcgaaatcgggccac

SEQ ID NO: 1851626 - DNA, 15 bp, Homo sapiens
cgaaatcgggccacc

SEQ ID NO: 1851627 - DNA, 15 bp, Homo sapiens
gaaatcgggccaccg

SEQ ID NO: 1851628 - DNA, 15 bp, Homo sapiens
aaatcgggccaccga

SEQ ID NO: 1851629 - DNA, 15 bp, Homo sapiens
aatcgggccaccgac

SEQ ID NO: 1851630 - DNA, 15 bp, Homo sapiens
atcgggccaccgacc

SEQ ID NO: 1851631 - DNA, 15 bp, Homo sapiens
tcgggccaccgaccc

SEQ ID NO: 1851632 - DNA, 15 bp, Homo sapiens
cgggccaccgacccg

SEQ ID NO: 1851633 - DNA, 15 bp, Homo sapiens
gggccaccgacccgc

SEQ ID NO: 1851634 - DNA, 15 bp, Homo sapiens
ggccaccgacccgct

SEQ ID NO: 1851635 - DNA, 15 bp, Homo sapiens
gccaccgacccgctc

SEQ ID NO: 1851636 - DNA, 15 bp, Homo sapiens
ccaccgacccgctcg

SEQ ID NO: 1851637 - DNA, 15 bp, Homo sapiens
caccgacccgctcgc

SEQ ID NO: 1851638 - DNA, 15 bp, Homo sapiens
accgacccgctcgct

SEQ ID NO: 1851639 - DNA, 15 bp, Homo sapiens
ccgacccgctcgctc

SEQ ID NO: 1851640 - DNA, 15 bp, Homo sapiens
cgacccgctcgctca

SEQ ID NO: 1851641 - DNA, 15 bp, Homo sapiens
gacccgctcgctcag

SEQ ID NO: 1851642 - DNA, 15 bp, Homo sapiens
acccgctcgctcagc

SEQ ID NO: 1851643 - DNA, 15 bp, Homo sapiens
cccgctcgctcagct

SEQ ID NO: 1851644 - DNA, 15 bp, Homo sapiens
ccgctcgctcagctc

SEQ ID NO: 1851645 - DNA, 15 bp, Homo sapiens
cgctcgctcagctcc

SEQ ID NO: 1851646 - DNA, 15 bp, Homo sapiens
gctcgctcagctcca

SEQ ID NO: 1851647 - DNA, 15 bp, Homo sapiens
ctcgctcagctccaa

SEQ ID NO: 1851648 - DNA, 15 bp, Homo sapiens
tcgctcagctccaaa

SEQ ID NO: 1851649 - DNA, 15 bp, Homo sapiens
cgctcagctccaaaa

SEQ ID NO: 1851650 - DNA, 15 bp, Homo sapiens
gctcagctccaaaac

SEQ ID NO: 1851651 - DNA, 15 bp, Homo sapiens
ctcagctccaaaact

SEQ ID NO: 1851652 - DNA, 15 bp, Homo sapiens
cagctccaaaactcg

SEQ ID NO: 1851653 - DNA, 15 bp, Homo sapiens
agctccaaaactcgc

SEQ ID NO: 1851654 - DNA, 15 bp, Homo sapiens
gctccaaaactcgcg

SEQ ID NO: 1851655 - DNA, 15 bp, Homo sapiens
ctccaaaactcgcgg

SEQ ID NO: 1851656 - DNA, 15 bp, Homo sapiens
tccaaaactcgcggc

SEQ ID NO: 1851657 - DNA, 15 bp, Homo sapiens
ccaaaactcgcggcg

SEQ ID NO: 1851658 - DNA, 15 bp, Homo sapiens
caaaactcgcggcga

SEQ ID NO: 1851659 - DNA, 15 bp, Homo sapiens
aaaactcgcggcgaa

SEQ ID NO: 1851660 - DNA, 15 bp, Homo sapiens
aaactcgcggcgaag

SEQ ID NO: 1851661 - DNA, 15 bp, Homo sapiens
aactcgcggcgaagc

SEQ ID NO: 1851662 - DNA, 15 bp, Homo sapiens
actcgcggcgaagcc

SEQ ID NO: 1851663 - DNA, 15 bp, Homo sapiens
ctcgcggcgaagccc

SEQ ID NO: 1851664 - DNA, 15 bp, Homo sapiens
tcgcggcgaagcccg

SEQ ID NO: 1851665 - DNA, 15 bp, Homo sapiens
cgcggcgaagcccgc

SEQ ID NO: 1851666 - DNA, 15 bp, Homo sapiens
gcggcgaagcccgct

SEQ ID NO: 1851667 - DNA, 15 bp, Homo sapiens
cggcgaagcccgctc

SEQ ID NO: 1851668 - DNA, 15 bp, Homo sapiens
ggcgaagcccgctcg

SEQ ID NO: 1851669 - DNA, 15 bp, Homo sapiens
gcgaagcccgctcgg

SEQ ID NO: 1851670 - DNA, 15 bp, Homo sapiens
cgaagcccgctcggt

SEQ ID NO: 1851671 - DNA, 15 bp, Homo sapiens
gaagcccgctcggtg

SEQ ID NO: 1851672 - DNA, 15 bp, Homo sapiens
aagcccgctcggtgc

SEQ ID NO: 1851673 - DNA, 15 bp, Homo sapiens
agcccgctcggtgct

SEQ ID NO: 1851674 - DNA, 15 bp, Homo sapiens
gcccgctcggtgctc

SEQ ID NO: 1851675 - DNA, 15 bp, Homo sapiens
cccgctcggtgctcc

SEQ ID NO: 1851676 - DNA, 15 bp, Homo sapiens
ccgctcggtgctccc

SEQ ID NO: 1851677 - DNA, 15 bp, Homo sapiens
cgctcggtgctccct

SEQ ID NO: 1851678 - DNA, 15 bp, Homo sapiens
gctcggtgctccctg

SEQ ID NO: 1851679 - DNA, 15 bp, Homo sapiens
tcggtgctccctgct

SEQ ID NO: 1851680 - DNA, 15 bp, Homo sapiens
cggtgctccctgctt

SEQ ID NO: 1851681 - DNA, 15 bp, Homo sapiens
ggtgctccctgcttt

SEQ ID NO: 1851682 - DNA, 15 bp, Homo sapiens
gtgctccctgctttt

SEQ ID NO: 1851683 - DNA, 15 bp, Homo sapiens
tgctccctgcttttc

SEQ ID NO: 1851684 - DNA, 15 bp, Homo sapiens
gctccctgcttttcc

SEQ ID NO: 1851685 - DNA, 15 bp, Homo sapiens
ctccctgcttttcca

SEQ ID NO: 1851686 - DNA, 15 bp, Homo sapiens
tccctgcttttccaa

SEQ ID NO: 1851687 - DNA, 15 bp, Homo sapiens
cctgcttttccaatt

SEQ ID NO: 1851688 - DNA, 15 bp, Homo sapiens
ctgcttttccaattt

SEQ ID NO: 1851689 - DNA, 15 bp, Homo sapiens
tgcttttccaatttc

SEQ ID NO: 1851690 - DNA, 15 bp, Homo sapiens
gcttttccaatttct

SEQ ID NO: 1851691 - DNA, 15 bp, Homo sapiens
cttttccaatttctc

SEQ ID NO: 1851692 - DNA, 15 bp, Homo sapiens
ttttccaatttctcc

SEQ ID NO: 1851693 - DNA, 15 bp, Homo sapiens
tttccaatttctcca

SEQ ID NO: 1851694 - DNA, 15 bp, Homo sapiens
ttccaatttctccat

SEQ ID NO: 1851695 - DNA, 15 bp, Homo sapiens
tccaatttctccatg

SEQ ID NO: 1851696 - DNA, 15 bp, Homo sapiens
ccaatttctccatgg

SEQ ID NO: 1851697 - DNA, 15 bp, Homo sapiens
caatttctccatggc

SEQ ID NO: 1851698 - DNA, 15 bp, Homo sapiens
aatttctccatggct

SEQ ID NO: 1851699 - DNA, 15 bp, Homo sapiens
atttctccatggctc

SEQ ID NO: 1851700 - DNA, 15 bp, Homo sapiens
tttctccatggctcc

SEQ ID NO: 1851701 - DNA, 15 bp, Homo sapiens
ttctccatggctccg

SEQ ID NO: 1851702 - DNA, 15 bp, Homo sapiens
tctccatggctccgg

SEQ ID NO: 1851703 - DNA, 15 bp, Homo sapiens
ctccatggctccggc

SEQ ID NO: 1851704 - DNA, 15 bp, Homo sapiens
tccatggctccggcc

SEQ ID NO: 1851705 - DNA, 15 bp, Homo sapiens
ccatggctccggccg

SEQ ID NO: 1851706 - DNA, 15 bp, Homo sapiens
catggctccggccgg

SEQ ID NO: 1851707 - DNA, 15 bp, Homo sapiens
atggctccggccggg

SEQ ID NO: 1851708 - DNA, 15 bp, Homo sapiens
tggctccggccgggg

SEQ ID NO: 1851709 - DNA, 15 bp, Homo sapiens
ggctccggccggggc

SEQ ID NO: 1851710 - DNA, 15 bp, Homo sapiens
gctccggccggggct

SEQ ID NO: 1851711 - DNA, 15 bp, Homo sapiens
ctccggccggggctc

SEQ ID NO: 1851712 - DNA, 15 bp, Homo sapiens
tccggccggggctca

SEQ ID NO: 1851713 - DNA, 15 bp, Homo sapiens
ccggccggggctcaa

SEQ ID NO: 1851714 - DNA, 15 bp, Homo sapiens
cggccggggctcaat

SEQ ID NO: 1851715 - DNA, 15 bp, Homo sapiens
ggccggggctcaatc

SEQ ID NO: 1851716 - DNA, 15 bp, Homo sapiens
gccggggctcaatcc

SEQ ID NO: 1851717 - DNA, 15 bp, Homo sapiens
ccggggctcaatcca

SEQ ID NO: 1851718 - DNA, 15 bp, Homo sapiens
cggggctcaatccat

SEQ ID NO: 1851719 - DNA, 15 bp, Homo sapiens
ggggctcaatccatt

SEQ ID NO: 1851720 - DNA, 15 bp, Homo sapiens
gggctcaatccattc

SEQ ID NO: 1851721 - DNA, 15 bp, Homo sapiens
ggctcaatccattct

SEQ ID NO: 1851722 - DNA, 15 bp, Homo sapiens
gctcaatccattctg

SEQ ID NO: 1851723 - DNA, 15 bp, Homo sapiens
ctcaatccattctgg

SEQ ID NO: 1851724 - DNA, 15 bp, Homo sapiens
tcaatccattctggg

SEQ ID NO: 1851725 - DNA, 15 bp, Homo sapiens
caatccattctggga

SEQ ID NO: 1851726 - DNA, 15 bp, Homo sapiens
aatccattctgggag

SEQ ID NO: 1851727 - DNA, 15 bp, Homo sapiens
atccattctgggagc

SEQ ID NO: 1851728 - DNA, 15 bp, Homo sapiens
tccattctgggagct

SEQ ID NO: 1851729 - DNA, 15 bp, Homo sapiens
ccattctgggagctt

SEQ ID NO: 1851730 - DNA, 15 bp, Homo sapiens
cattctgggagcttc

SEQ ID NO: 1851731 - DNA, 15 bp, Homo sapiens
attctgggagcttct

SEQ ID NO: 1851732 - DNA, 15 bp, Homo sapiens
ttctgggagcttctc

SEQ ID NO: 1851733 - DNA, 15 bp, Homo sapiens
tctgggagcttctct

SEQ ID NO: 1851734 - DNA, 15 bp, Homo sapiens
ctgggagcttctctg

SEQ ID NO: 1851735 - DNA, 15 bp, Homo sapiens
tgggagcttctctgc

SEQ ID NO: 1851736 - DNA, 15 bp, Homo sapiens
gggagcttctctgcc

SEQ ID NO: 1851737 - DNA, 15 bp, Homo sapiens
ggagcttctctgccc

SEQ ID NO: 1851738 - DNA, 15 bp, Homo sapiens
gagcttctctgcccc

SEQ ID NO: 1851739 - DNA, 15 bp, Homo sapiens
agcttctctgccccc

SEQ ID NO: 1851740 - DNA, 15 bp, Homo sapiens
gcttctctgcccccc

SEQ ID NO: 1851741 - DNA, 15 bp, Homo sapiens
cttctctgcccccca

SEQ ID NO: 1851742 - DNA, 15 bp, Homo sapiens
ttctctgccccccac

SEQ ID NO: 1851743 - DNA, 15 bp, Homo sapiens
tctctgccccccacc

SEQ ID NO: 1851744 - DNA, 15 bp, Homo sapiens
ctctgccccccacct

SEQ ID NO: 1851745 - DNA, 15 bp, Homo sapiens
tctgccccccaccta

SEQ ID NO: 1851746 - DNA, 15 bp, Homo sapiens
ctgccccccacctat

SEQ ID NO: 1851747 - DNA, 15 bp, Homo sapiens
tgccccccacctatc

SEQ ID NO: 1851748 - DNA, 15 bp, Homo sapiens
gccccccacctatct

SEQ ID NO: 1851749 - DNA, 15 bp, Homo sapiens
ccccccacctatctc

SEQ ID NO: 1851750 - DNA, 15 bp, Homo sapiens
cccccacctatctct

SEQ ID NO: 1851751 - DNA, 15 bp, Homo sapiens
ccccacctatctctc

SEQ ID NO: 1851752 - DNA, 15 bp, Homo sapiens
cccacctatctctct

SEQ ID NO: 1851753 - DNA, 15 bp, Homo sapiens
ccacctatctctctc

SEQ ID NO: 1851754 - DNA, 15 bp, Homo sapiens
cacctatctctctcc

SEQ ID NO: 1851755 - DNA, 15 bp, Homo sapiens
acctatctctctccc

SEQ ID NO: 1851756 - DNA, 15 bp, Homo sapiens
cctatctctctcccc

SEQ ID NO: 1851757 - DNA, 15 bp, Homo sapiens
ctatctctctcccct

SEQ ID NO: 1851758 - DNA, 15 bp, Homo sapiens
tatctctctcccctc

SEQ ID NO: 1851759 - DNA, 15 bp, Homo sapiens
atctctctcccctcc

SEQ ID NO: 1851760 - DNA, 15 bp, Homo sapiens
tctctctcccctcca

SEQ ID NO: 1851761 - DNA, 15 bp, Homo sapiens
ctctctcccctccat

SEQ ID NO: 1851762 - DNA, 15 bp, Homo sapiens
tctctcccctccatc

SEQ ID NO: 1851763 - DNA, 15 bp, Homo sapiens
ctctcccctccatcg

SEQ ID NO: 1851764 - DNA, 15 bp, Homo sapiens
tctcccctccatcgg

SEQ ID NO: 1851765 - DNA, 15 bp, Homo sapiens
ctcccctccatcggt

SEQ ID NO: 1851766 - DNA, 15 bp, Homo sapiens
tcccctccatcggta

SEQ ID NO: 1851767 - DNA, 15 bp, Homo sapiens
cccctccatcggtac

SEQ ID NO: 1851768 - DNA, 15 bp, Homo sapiens
ccctccatcggtacc

SEQ ID NO: 1851769 - DNA, 15 bp, Homo sapiens
cctccatcggtaccc

SEQ ID NO: 1851770 - DNA, 15 bp, Homo sapiens
ctccatcggtacccc

SEQ ID NO: 1851771 - DNA, 15 bp, Homo sapiens
tccatcggtaccccc

SEQ ID NO: 1851772 - DNA, 15 bp, Homo sapiens
ccatcggtaccccct

SEQ ID NO: 1851773 - DNA, 15 bp, Homo sapiens
catcggtaccccctc

SEQ ID NO: 1851774 - DNA, 15 bp, Homo sapiens
atcggtaccccctct

SEQ ID NO: 1851775 - DNA, 15 bp, Homo sapiens
tcggtaccccctcta

SEQ ID NO: 1851776 - DNA, 15 bp, Homo sapiens
cggtaccccctctac

SEQ ID NO: 1851777 - DNA, 15 bp, Homo sapiens
ggtaccccctctaca

SEQ ID NO: 1851778 - DNA, 15 bp, Homo sapiens
gtaccccctctacag

SEQ ID NO: 1851779 - DNA, 15 bp, Homo sapiens
taccccctctacaga

SEQ ID NO: 1851780 - DNA, 15 bp, Homo sapiens
accccctctacagac

SEQ ID NO: 1851781 - DNA, 15 bp, Homo sapiens
ccccctctacagacc

SEQ ID NO: 1851782 - DNA, 15 bp, Homo sapiens
cccctctacagaccc

SEQ ID NO: 1851783 - DNA, 15 bp, Homo sapiens
ccctctacagacccg

SEQ ID NO: 1851784 - DNA, 15 bp, Homo sapiens
cctctacagacccgg

SEQ ID NO: 1851785 - DNA, 15 bp, Homo sapiens
ctctacagacccggg

SEQ ID NO: 1851786 - DNA, 15 bp, Homo sapiens
tctacagacccggga

SEQ ID NO: 1851787 - DNA, 15 bp, Homo sapiens
ctacagacccgggag

SEQ ID NO: 1851788 - DNA, 15 bp, Homo sapiens
tacagacccgggagg

SEQ ID NO: 1851789 - DNA, 15 bp, Homo sapiens
acagacccgggaggg

SEQ ID NO: 1851790 - DNA, 15 bp, Homo sapiens
cagacccgggagggg

SEQ ID NO: 1851791 - DNA, 15 bp, Homo sapiens
agacccgggaggggg

SEQ ID NO: 1851792 - DNA, 15 bp, Homo sapiens
gacccgggagggggt

SEQ ID NO: 1851793 - DNA, 15 bp, Homo sapiens
acccgggagggggtg

SEQ ID NO: 1851794 - DNA, 15 bp, Homo sapiens
cccgggagggggtgg

SEQ ID NO: 1851795 - DNA, 15 bp, Homo sapiens
ccgggagggggtggc

SEQ ID NO: 1851796 - DNA, 15 bp, Homo sapiens
cgggagggggtggcg

SEQ ID NO: 1851797 - DNA, 15 bp, Homo sapiens
gggagggggtggcgg

SEQ ID NO: 1851798 - DNA, 15 bp, Homo sapiens
ggagggggtggcggt

SEQ ID NO: 1851799 - DNA, 15 bp, Homo sapiens
gagggggtggcggtg

SEQ ID NO: 1851800 - DNA, 15 bp, Homo sapiens
agggggtggcggtgg

SEQ ID NO: 1851801 - DNA, 15 bp, Homo sapiens
gggggtggcggtggc

SEQ ID NO: 1851802 - DNA, 15 bp, Homo sapiens
ggggtggcggtggcg

SEQ ID NO: 1851803 - DNA, 15 bp, Homo sapiens
gggtggcggtggcgg

SEQ ID NO: 1851804 - DNA, 15 bp, Homo sapiens
ggtggcggtggcggg

SEQ ID NO: 1851805 - DNA, 15 bp, Homo sapiens
gtggcggtggcgggg

SEQ ID NO: 1851806 - DNA, 15 bp, Homo sapiens
tggcggtggcggggg

SEQ ID NO: 1851807 - DNA, 15 bp, Homo sapiens
ggcggtggcgggggg

SEQ ID NO: 1851808 - DNA, 15 bp, Homo sapiens
gcggtggcggggggt

SEQ ID NO: 1851809 - DNA, 15 bp, Homo sapiens
cggtggcggggggtt

SEQ ID NO: 1851810 - DNA, 15 bp, Homo sapiens
ggtggcggggggttg

SEQ ID NO: 1851811 - DNA, 15 bp, Homo sapiens
gtggcggggggttgg

SEQ ID NO: 1851812 - DNA, 15 bp, Homo sapiens
tggcggggggttggg

SEQ ID NO: 1851813 - DNA, 15 bp, Homo sapiens
ggcggggggttgggg

SEQ ID NO: 1851814 - DNA, 15 bp, Homo sapiens
gcggggggttggggg

SEQ ID NO: 1851815 - DNA, 15 bp, Homo sapiens
cggggggttgggggg

SEQ ID NO: 1851816 - DNA, 15 bp, Homo sapiens
ggggggttgggggga

SEQ ID NO: 1851817 - DNA, 15 bp, Homo sapiens
gggggttggggggag

SEQ ID NO: 1851818 - DNA, 15 bp, Homo sapiens
ggggttggggggaga

SEQ ID NO: 1851819 - DNA, 15 bp, Homo sapiens
gggttggggggagaa

SEQ ID NO: 1851820 - DNA, 15 bp, Homo sapiens
ggttggggggagaaa

SEQ ID NO: 1851821 - DNA, 15 bp, Homo sapiens
gttggggggagaaat

SEQ ID NO: 1851822 - DNA, 15 bp, Homo sapiens
ttggggggagaaata

SEQ ID NO: 1851823 - DNA, 15 bp, Homo sapiens
tggggggagaaatag

SEQ ID NO: 1851824 - DNA, 15 bp, Homo sapiens
ggggggagaaatagc

SEQ ID NO: 1851825 - DNA, 15 bp, Homo sapiens
gggggagaaatagct

SEQ ID NO: 1851826 - DNA, 15 bp, Homo sapiens
ggggagaaatagctt

SEQ ID NO: 1851827 - DNA, 15 bp, Homo sapiens
gggagaaatagcttt

SEQ ID NO: 1851828 - DNA, 15 bp, Homo sapiens
ggagaaatagctttt

SEQ ID NO: 1851829 - DNA, 15 bp, Homo sapiens
gagaaatagctttta

SEQ ID NO: 1851830 - DNA, 15 bp, Homo sapiens
agaaatagcttttag

SEQ ID NO: 1851831 - DNA, 15 bp, Homo sapiens
aaatagcttttagaa

SEQ ID NO: 1851832 - DNA, 15 bp, Homo sapiens
aatagcttttagaaa

SEQ ID NO: 1851833 - DNA, 15 bp, Homo sapiens
atagcttttagaaac

SEQ ID NO: 1851834 - DNA, 15 bp, Homo sapiens
tagcttttagaaacc

SEQ ID NO: 1851835 - DNA, 15 bp, Homo sapiens
agcttttagaaaccc

SEQ ID NO: 1851836 - DNA, 15 bp, Homo sapiens
gcttttagaaacccg

SEQ ID NO: 1851837 - DNA, 15 bp, Homo sapiens
cttttagaaacccga

SEQ ID NO: 1851838 - DNA, 15 bp, Homo sapiens
ttttagaaacccgat

SEQ ID NO: 1851839 - DNA, 15 bp, Homo sapiens
tttagaaacccgatc

SEQ ID NO: 1851840 - DNA, 15 bp, Homo sapiens
ttagaaacccgatct

SEQ ID NO: 1851841 - DNA, 15 bp, Homo sapiens
tagaaacccgatctg

SEQ ID NO: 1851842 - DNA, 15 bp, Homo sapiens
agaaacccgatctgt

SEQ ID NO: 1851843 - DNA, 15 bp, Homo sapiens
gaaacccgatctgtt

SEQ ID NO: 1851844 - DNA, 15 bp, Homo sapiens
aaacccgatctgttg

SEQ ID NO: 1851845 - DNA, 15 bp, Homo sapiens
aacccgatctgttgt

SEQ ID NO: 1851846 - DNA, 15 bp, Homo sapiens
acccgatctgttgtt

SEQ ID NO: 1851847 - DNA, 15 bp, Homo sapiens
cccgatctgttgttt

SEQ ID NO: 1851848 - DNA, 15 bp, Homo sapiens
ccgatctgttgtttg

SEQ ID NO: 1851849 - DNA, 15 bp, Homo sapiens
cgatctgttgtttgc

SEQ ID NO: 1851850 - DNA, 15 bp, Homo sapiens
gatctgttgtttgcg

SEQ ID NO: 1851851 - DNA, 15 bp, Homo sapiens
atctgttgtttgcga

SEQ ID NO: 1851852 - DNA, 15 bp, Homo sapiens
tctgttgtttgcgaa

SEQ ID NO: 1851853 - DNA, 15 bp, Homo sapiens
ctgttgtttgcgaaa

SEQ ID NO: 1851854 - DNA, 15 bp, Homo sapiens
tgttgtttgcgaaac

SEQ ID NO: 1851855 - DNA, 15 bp, Homo sapiens
gttgtttgcgaaaca

SEQ ID NO: 1851856 - DNA, 15 bp, Homo sapiens
ttgtttgcgaaacac

SEQ ID NO: 1851857 - DNA, 15 bp, Homo sapiens
tgtttgcgaaacaca

SEQ ID NO: 1851858 - DNA, 15 bp, Homo sapiens
gtttgcgaaacacaa

SEQ ID NO: 1851859 - DNA, 15 bp, Homo sapiens
tttgcgaaacacaat

SEQ ID NO: 1851860 - DNA, 15 bp, Homo sapiens
ttgcgaaacacaatc

SEQ ID NO: 1851861 - DNA, 15 bp, Homo sapiens
tgcgaaacacaatcg

SEQ ID NO: 1851862 - DNA, 15 bp, Homo sapiens
gcgaaacacaatcgc

SEQ ID NO: 1851863 - DNA, 15 bp, Homo sapiens
cgaaacacaatcgct

SEQ ID NO: 1851864 - DNA, 15 bp, Homo sapiens
gaaacacaatcgctt

SEQ ID NO: 1851865 - DNA, 15 bp, Homo sapiens
aaacacaatcgcttt

SEQ ID NO: 1851866 - DNA, 15 bp, Homo sapiens
aacacaatcgctttt

SEQ ID NO: 1851867 - DNA, 15 bp, Homo sapiens
acacaatcgcttttt

SEQ ID NO: 1851868 - DNA, 15 bp, Homo sapiens
cacaatcgctttttt

SEQ ID NO: 1851869 - DNA, 15 bp, Homo sapiens
acaatcgcttttttt

SEQ ID NO: 1851870 - DNA, 15 bp, Homo sapiens
caatcgctttttttt

SEQ ID NO: 1851871 - DNA, 15 bp, Homo sapiens
aatcgcttttttttt

SEQ ID NO: 1851872 - DNA, 15 bp, Homo sapiens
atcgctttttttttt

SEQ ID NO: 1851873 - DNA, 15 bp, Homo sapiens
ttttttttttaaagc

SEQ ID NO: 1851874 - DNA, 15 bp, Homo sapiens
tttttttttaaagcg

SEQ ID NO: 1851875 - DNA, 15 bp, Homo sapiens
ttttttttaaagcga

SEQ ID NO: 1851876 - DNA, 15 bp, Homo sapiens
tttttttaaagcgac

SEQ ID NO: 1851877 - DNA, 15 bp, Homo sapiens
ttttttaaagcgaca

SEQ ID NO: 1851878 - DNA, 15 bp, Homo sapiens
tttttaaagcgacag

SEQ ID NO: 1851879 - DNA, 15 bp, Homo sapiens
ttttaaagcgacagg

SEQ ID NO: 1851880 - DNA, 15 bp, Homo sapiens
tttaaagcgacaggg

SEQ ID NO: 1851881 - DNA, 15 bp, Homo sapiens
ttaaagcgacagggt

SEQ ID NO: 1851882 - DNA, 15 bp, Homo sapiens
taaagcgacagggtg

SEQ ID NO: 1851883 - DNA, 15 bp, Homo sapiens
aaagcgacagggtgt

SEQ ID NO: 1851884 - DNA, 15 bp, Homo sapiens
aagcgacagggtgtc

SEQ ID NO: 1851885 - DNA, 15 bp, Homo sapiens
agcgacagggtgtct

SEQ ID NO: 1851886 - DNA, 15 bp, Homo sapiens
gcgacagggtgtcta

SEQ ID NO: 1851887 - DNA, 15 bp, Homo sapiens
cgacagggtgtctag

SEQ ID NO: 1851888 - DNA, 15 bp, Homo sapiens
gacagggtgtctaga

SEQ ID NO: 1851889 - DNA, 15 bp, Homo sapiens
acagggtgtctagac

SEQ ID NO: 1851890 - DNA, 15 bp, Homo sapiens
cagggtgtctagacg

SEQ ID NO: 1851891 - DNA, 15 bp, Homo sapiens
agggtgtctagacgg

SEQ ID NO: 1851892 - DNA, 15 bp, Homo sapiens
gggtgtctagacggc

SEQ ID NO: 1851893 - DNA, 15 bp, Homo sapiens
ggtgtctagacggcc

SEQ ID NO: 1851894 - DNA, 15 bp, Homo sapiens
gtgtctagacggcca

SEQ ID NO: 1851895 - DNA, 15 bp, Homo sapiens
tgtctagacggccac

SEQ ID NO: 1851896 - DNA, 15 bp, Homo sapiens
gtctagacggccacg

SEQ ID NO: 1851897 - DNA, 15 bp, Homo sapiens
tctagacggccacgt

SEQ ID NO: 1851898 - DNA, 15 bp, Homo sapiens
ctagacggccacgtg

SEQ ID NO: 1851899 - DNA, 15 bp, Homo sapiens
tagacggccacgtga

SEQ ID NO: 1851900 - DNA, 15 bp, Homo sapiens
agacggccacgtgac

SEQ ID NO: 1851901 - DNA, 15 bp, Homo sapiens
gacggccacgtgacg

SEQ ID NO: 1851902 - DNA, 15 bp, Homo sapiens
acggccacgtgacga

SEQ ID NO: 1851903 - DNA, 15 bp, Homo sapiens
cggccacgtgacgag

SEQ ID NO: 1851904 - DNA, 15 bp, Homo sapiens
ggccacgtgacgagg

SEQ ID NO: 1851905 - DNA, 15 bp, Homo sapiens
gccacgtgacgaggc

SEQ ID NO: 1851906 - DNA, 15 bp, Homo sapiens
ccacgtgacgaggcc

SEQ ID NO: 1851907 - DNA, 15 bp, Homo sapiens
cacgtgacgaggccg

SEQ ID NO: 1851908 - DNA, 15 bp, Homo sapiens
acgtgacgaggccgg

SEQ ID NO: 1851909 - DNA, 15 bp, Homo sapiens
cgtgacgaggccgga

SEQ ID NO: 1851910 - DNA, 15 bp, Homo sapiens
gtgacgaggccggag

SEQ ID NO: 1851911 - DNA, 15 bp, Homo sapiens
tgacgaggccggagc

SEQ ID NO: 1851912 - DNA, 15 bp, Homo sapiens
gacgaggccggagcc

SEQ ID NO: 1851913 - DNA, 15 bp, Homo sapiens
acgaggccggagccg

SEQ ID NO: 1851914 - DNA, 15 bp, Homo sapiens
cgaggccggagccgg

SEQ ID NO: 1851915 - DNA, 15 bp, Homo sapiens
gaggccggagccggg

SEQ ID NO: 1851916 - DNA, 15 bp, Homo sapiens
aggccggagccgggc

SEQ ID NO: 1851917 - DNA, 15 bp, Homo sapiens
ggccggagccgggcg

SEQ ID NO: 1851918 - DNA, 15 bp, Homo sapiens
gccggagccgggcgc

SEQ ID NO: 1851919 - DNA, 15 bp, Homo sapiens
ccggagccgggcgcg

SEQ ID NO: 1851920 - DNA, 15 bp, Homo sapiens
cggagccgggcgcgc

SEQ ID NO: 1851921 - DNA, 15 bp, Homo sapiens
ggagccgggcgcgcc

SEQ ID NO: 1851922 - DNA, 15 bp, Homo sapiens
gagccgggcgcgcca

SEQ ID NO: 1851923 - DNA, 15 bp, Homo sapiens
agccgggcgcgccac

SEQ ID NO: 1851924 - DNA, 15 bp, Homo sapiens
gccgggcgcgccact

SEQ ID NO: 1851925 - DNA, 15 bp, Homo sapiens
ccgggcgcgccactg

SEQ ID NO: 1851926 - DNA, 15 bp, Homo sapiens
cgggcgcgccactgc

SEQ ID NO: 1851927 - DNA, 15 bp, Homo sapiens
gggcgcgccactgcg

SEQ ID NO: 1851928 - DNA, 15 bp, Homo sapiens
ggcgcgccactgcgc

SEQ ID NO: 1851929 - DNA, 15 bp, Homo sapiens
gcgcgccactgcgca

SEQ ID NO: 1851930 - DNA, 15 bp, Homo sapiens
cgcgccactgcgcag

SEQ ID NO: 1851931 - DNA, 15 bp, Homo sapiens
gcgccactgcgcagt

SEQ ID NO: 1851932 - DNA, 15 bp, Homo sapiens
cgccactgcgcagtg

SEQ ID NO: 1851933 - DNA, 15 bp, Homo sapiens
gccactgcgcagtgg

SEQ ID NO: 1851934 - DNA, 15 bp, Homo sapiens
ccactgcgcagtgga

SEQ ID NO: 1851935 - DNA, 15 bp, Homo sapiens
cactgcgcagtggaa

SEQ ID NO: 1851936 - DNA, 15 bp, Homo sapiens
actgcgcagtggaac

SEQ ID NO: 1851937 - DNA, 15 bp, Homo sapiens
ctgcgcagtggaacc

SEQ ID NO: 1851938 - DNA, 15 bp, Homo sapiens
tgcgcagtggaacca

SEQ ID NO: 1851939 - DNA, 15 bp, Homo sapiens
gcgcagtggaaccag

SEQ ID NO: 1851940 - DNA, 15 bp, Homo sapiens
cgcagtggaaccagc

SEQ ID NO: 1851941 - DNA, 15 bp, Homo sapiens
gcagtggaaccagcc

SEQ ID NO: 1851942 - DNA, 15 bp, Homo sapiens
cagtggaaccagccg

SEQ ID NO: 1851943 - DNA, 15 bp, Homo sapiens
agtggaaccagccga

SEQ ID NO: 1851944 - DNA, 15 bp, Homo sapiens
gtggaaccagccgag

SEQ ID NO: 1851945 - DNA, 15 bp, Homo sapiens
tggaaccagccgagc

SEQ ID NO: 1851946 - DNA, 15 bp, Homo sapiens
ggaaccagccgagca

SEQ ID NO: 1851947 - DNA, 15 bp, Homo sapiens
gaaccagccgagcag

SEQ ID NO: 1851948 - DNA, 15 bp, Homo sapiens
aaccagccgagcaga

SEQ ID NO: 1851949 - DNA, 15 bp, Homo sapiens
accagccgagcagag

SEQ ID NO: 1851950 - DNA, 15 bp, Homo sapiens
ccagccgagcagagg

SEQ ID NO: 1851951 - DNA, 15 bp, Homo sapiens
cagccgagcagaggg

SEQ ID NO: 1851952 - DNA, 15 bp, Homo sapiens
agccgagcagagggc

SEQ ID NO: 1851953 - DNA, 15 bp, Homo sapiens
gccgagcagagggcc

SEQ ID NO: 1851954 - DNA, 15 bp, Homo sapiens
ccgagcagagggccg

SEQ ID NO: 1851955 - DNA, 15 bp, Homo sapiens
cgagcagagggccgg

SEQ ID NO: 1851956 - DNA, 15 bp, Homo sapiens
gagcagagggccgga

SEQ ID NO: 1851957 - DNA, 15 bp, Homo sapiens
agcagagggccggag

SEQ ID NO: 1851958 - DNA, 15 bp, Homo sapiens
gcagagggccggagg

SEQ ID NO: 1851959 - DNA, 15 bp, Homo sapiens
cagagggccggaggg

SEQ ID NO: 1851960 - DNA, 15 bp, Homo sapiens
agagggccggagggg

SEQ ID NO: 1851961 - DNA, 15 bp, Homo sapiens
gagggccggaggggg

SEQ ID NO: 1851962 - DNA, 15 bp, Homo sapiens
agggccggagggggg

SEQ ID NO: 1851963 - DNA, 15 bp, Homo sapiens
gggccggaggggggg

SEQ ID NO: 1851964 - DNA, 15 bp, Homo sapiens
ggccggagggggggt

SEQ ID NO: 1851965 - DNA, 15 bp, Homo sapiens
gccggagggggggtg

SEQ ID NO: 1851966 - DNA, 15 bp, Homo sapiens
ccggagggggggtgc

SEQ ID NO: 1851967 - DNA, 15 bp, Homo sapiens
cggagggggggtgcg

SEQ ID NO: 1851968 - DNA, 15 bp, Homo sapiens
ggagggggggtgcgg

SEQ ID NO: 1851969 - DNA, 15 bp, Homo sapiens
gagggggggtgcggg

SEQ ID NO: 1851970 - DNA, 15 bp, Homo sapiens
agggggggtgcgggg

SEQ ID NO: 1851971 - DNA, 15 bp, Homo sapiens
gggggggtgcggggg

SEQ ID NO: 1851972 - DNA, 15 bp, Homo sapiens
ggggggtgcgggggg

SEQ ID NO: 1851973 - DNA, 15 bp, Homo sapiens
gggggtgcggggggg

SEQ ID NO: 1851974 - DNA, 15 bp, Homo sapiens
ggggtgcgggggggc

SEQ ID NO: 1851975 - DNA, 15 bp, Homo sapiens
gggtgcgggggggcg

SEQ ID NO: 1851976 - DNA, 15 bp, Homo sapiens
ggtgcgggggggcgg

SEQ ID NO: 1851977 - DNA, 15 bp, Homo sapiens
gtgcgggggggcggg

SEQ ID NO: 1851978 - DNA, 15 bp, Homo sapiens
tgcgggggggcgggg

SEQ ID NO: 1851979 - DNA, 15 bp, Homo sapiens
gcgggggggcgggga

SEQ ID NO: 1851980 - DNA, 15 bp, Homo sapiens
cgggggggcggggag

SEQ ID NO: 1851981 - DNA, 15 bp, Homo sapiens
gggggggcggggagg

SEQ ID NO: 1851982 - DNA, 15 bp, Homo sapiens
ggggggcggggagga

SEQ ID NO: 1851983 - DNA, 15 bp, Homo sapiens
gggggcggggaggag

SEQ ID NO: 1851984 - DNA, 15 bp, Homo sapiens
ggggcggggaggagg

SEQ ID NO: 1851985 - DNA, 15 bp, Homo sapiens
gcggggaggaggcgg

SEQ ID NO: 1851986 - DNA, 15 bp, Homo sapiens
cggggaggaggcggc

SEQ ID NO: 1851987 - DNA, 15 bp, Homo sapiens
ggggaggaggcggcg

SEQ ID NO: 1851988 - DNA, 15 bp, Homo sapiens
gggaggaggcggcgc

SEQ ID NO: 1851989 - DNA, 15 bp, Homo sapiens
ggaggaggcggcgcg

SEQ ID NO: 1851990 - DNA, 15 bp, Homo sapiens
gaggaggcggcgcgg

SEQ ID NO: 1851991 - DNA, 15 bp, Homo sapiens
aggaggcggcgcggc

SEQ ID NO: 1851992 - DNA, 15 bp, Homo sapiens
ggaggcggcgcggct

SEQ ID NO: 1851993 - DNA, 15 bp, Homo sapiens
gaggcggcgcggctg

SEQ ID NO: 1851994 - DNA, 15 bp, Homo sapiens
aggcggcgcggctgc

SEQ ID NO: 1851995 - DNA, 15 bp, Homo sapiens
ggcggcgcggctgcg

SEQ ID NO: 1851996 - DNA, 15 bp, Homo sapiens
gcggcgcggctgcgg

SEQ ID NO: 1851997 - DNA, 15 bp, Homo sapiens
cggcgcggctgcggc

SEQ ID NO: 1851998 - DNA, 15 bp, Homo sapiens
ggcgcggctgcggcg

SEQ ID NO: 1851999 - DNA, 15 bp, Homo sapiens
gcgcggctgcggcgg

SEQ ID NO: 1852000 - DNA, 15 bp, Homo sapiens
cgcggctgcggcggc

SEQ ID NO: 1852001 - DNA, 15 bp, Homo sapiens
gcggctgcggcggct

SEQ ID NO: 1852002 - DNA, 15 bp, Homo sapiens
cggctgcggcggctg

SEQ ID NO: 1852003 - DNA, 15 bp, Homo sapiens
ggctgcggcggctgg

SEQ ID NO: 1852004 - DNA, 15 bp, Homo sapiens
gctgcggcggctggg

SEQ ID NO: 1852005 - DNA, 15 bp, Homo sapiens
ctgcggcggctgggg

SEQ ID NO: 1852006 - DNA, 15 bp, Homo sapiens
tgcggcggctggggg

SEQ ID NO: 1852007 - DNA, 15 bp, Homo sapiens
gcggcggctgggggc

SEQ ID NO: 1852008 - DNA, 15 bp, Homo sapiens
cggcggctgggggcg

SEQ ID NO: 1852009 - DNA, 15 bp, Homo sapiens
ggcggctgggggcgg

SEQ ID NO: 1852010 - DNA, 15 bp, Homo sapiens
gcggctgggggcggg

SEQ ID NO: 1852011 - DNA, 15 bp, Homo sapiens
cggctgggggcgggg

SEQ ID NO: 1852012 - DNA, 15 bp, Homo sapiens
ggctgggggcggggg

SEQ ID NO: 1852013 - DNA, 15 bp, Homo sapiens
gctgggggcggggga

SEQ ID NO: 1852014 - DNA, 15 bp, Homo sapiens
ctgggggcgggggag

SEQ ID NO: 1852015 - DNA, 15 bp, Homo sapiens
tgggggcgggggagg

SEQ ID NO: 1852016 - DNA, 15 bp, Homo sapiens
gggggcgggggaggg

SEQ ID NO: 1852017 - DNA, 15 bp, Homo sapiens
ggggcgggggaggga

SEQ ID NO: 1852018 - DNA, 15 bp, Homo sapiens
gggcgggggagggaa

SEQ ID NO: 1852019 - DNA, 15 bp, Homo sapiens
ggcgggggagggaag

SEQ ID NO: 1852020 - DNA, 15 bp, Homo sapiens
gcgggggagggaagg

SEQ ID NO: 1852021 - DNA, 15 bp, Homo sapiens
cgggggagggaaggg

SEQ ID NO: 1852022 - DNA, 15 bp, Homo sapiens
gggggagggaagggg

SEQ ID NO: 1852023 - DNA, 15 bp, Homo sapiens
ggggagggaaggggg

SEQ ID NO: 1852024 - DNA, 15 bp, Homo sapiens
gggagggaaggggga

SEQ ID NO: 1852025 - DNA, 15 bp, Homo sapiens
ggagggaagggggag

SEQ ID NO: 1852026 - DNA, 15 bp, Homo sapiens
gagggaagggggagg

SEQ ID NO: 1852027 - DNA, 15 bp, Homo sapiens
agggaagggggagga

SEQ ID NO: 1852028 - DNA, 15 bp, Homo sapiens
gggaagggggaggaa

SEQ ID NO: 1852029 - DNA, 15 bp, Homo sapiens
ggaagggggaggaag

SEQ ID NO: 1852030 - DNA, 15 bp, Homo sapiens
gaagggggaggaagg

SEQ ID NO: 1852031 - DNA, 15 bp, Homo sapiens
aagggggaggaaggg

SEQ ID NO: 1852032 - DNA, 15 bp, Homo sapiens
agggggaggaagggg

SEQ ID NO: 1852033 - DNA, 15 bp, Homo sapiens
gggggaggaaggggg

SEQ ID NO: 1852034 - DNA, 15 bp, Homo sapiens
ggggaggaaggggga

SEQ ID NO: 1852035 - DNA, 15 bp, Homo sapiens
gaggaagggggaggg

SEQ ID NO: 1852036 - DNA, 15 bp, Homo sapiens
aggaagggggaggga

SEQ ID NO: 1852037 - DNA, 15 bp, Homo sapiens
ggaagggggagggaa

SEQ ID NO: 1852038 - DNA, 15 bp, Homo sapiens
gaagggggagggaag

SEQ ID NO: 1852039 - DNA, 15 bp, Homo sapiens
aagggggagggaagg

SEQ ID NO: 1852040 - DNA, 15 bp, Homo sapiens
agggggagggaaggg

SEQ ID NO: 1852041 - DNA, 15 bp, Homo sapiens
gggagggaagggggc

SEQ ID NO: 1852042 - DNA, 15 bp, Homo sapiens
ggagggaagggggcg

SEQ ID NO: 1852043 - DNA, 15 bp, Homo sapiens
gagggaagggggcgg

SEQ ID NO: 1852044 - DNA, 15 bp, Homo sapiens
agggaagggggcggg

SEQ ID NO: 1852045 - DNA, 15 bp, Homo sapiens
gggaagggggcgggg

SEQ ID NO: 1852046 - DNA, 15 bp, Homo sapiens
ggaagggggcggggg

SEQ ID NO: 1852047 - DNA, 15 bp, Homo sapiens
gaagggggcgggggc

SEQ ID NO: 1852048 - DNA, 15 bp, Homo sapiens
aagggggcgggggcg

SEQ ID NO: 1852049 - DNA, 15 bp, Homo sapiens
agggggcgggggcgg

SEQ ID NO: 1852050 - DNA, 15 bp, Homo sapiens
gggggcgggggcggg

SEQ ID NO: 1852051 - DNA, 15 bp, Homo sapiens
ggggcgggggcggga

SEQ ID NO: 1852052 - DNA, 15 bp, Homo sapiens
gggcgggggcgggag

SEQ ID NO: 1852053 - DNA, 15 bp, Homo sapiens
ggcgggggcgggagg

SEQ ID NO: 1852054 - DNA, 15 bp, Homo sapiens
gcgggggcgggaggc

SEQ ID NO: 1852055 - DNA, 15 bp, Homo sapiens
cgggggcgggaggcc

SEQ ID NO: 1852056 - DNA, 15 bp, Homo sapiens
gggggcgggaggcct

SEQ ID NO: 1852057 - DNA, 15 bp, Homo sapiens
ggggcgggaggcctt

SEQ ID NO: 1852058 - DNA, 15 bp, Homo sapiens
gggcgggaggccttg

SEQ ID NO: 1852059 - DNA, 15 bp, Homo sapiens
ggcgggaggccttgc

SEQ ID NO: 1852060 - DNA, 15 bp, Homo sapiens
gcgggaggccttgcg

SEQ ID NO: 1852061 - DNA, 15 bp, Homo sapiens
cgggaggccttgcgg

SEQ ID NO: 1852062 - DNA, 15 bp, Homo sapiens
gggaggccttgcggg

SEQ ID NO: 1852063 - DNA, 15 bp, Homo sapiens
ggaggccttgcggga

SEQ ID NO: 1852064 - DNA, 15 bp, Homo sapiens
gaggccttgcgggag

SEQ ID NO: 1852065 - DNA, 15 bp, Homo sapiens
aggccttgcgggagg

SEQ ID NO: 1852066 - DNA, 15 bp, Homo sapiens
ggccttgcgggaggc

SEQ ID NO: 1852067 - DNA, 15 bp, Homo sapiens
gccttgcgggaggcg

SEQ ID NO: 1852068 - DNA, 15 bp, Homo sapiens
ccttgcgggaggcgg

SEQ ID NO: 1852069 - DNA, 15 bp, Homo sapiens
cttgcgggaggcggt

SEQ ID NO: 1852070 - DNA, 15 bp, Homo sapiens
ttgcgggaggcggtg

SEQ ID NO: 1852071 - DNA, 15 bp, Homo sapiens
tgcgggaggcggtga

SEQ ID NO: 1852072 - DNA, 15 bp, Homo sapiens
gcgggaggcggtgag

SEQ ID NO: 1852073 - DNA, 15 bp, Homo sapiens
cgggaggcggtgagc

SEQ ID NO: 1852074 - DNA, 15 bp, Homo sapiens
gggaggcggtgagcc

SEQ ID NO: 1852075 - DNA, 15 bp, Homo sapiens
ggaggcggtgagccc

SEQ ID NO: 1852076 - DNA, 15 bp, Homo sapiens
gaggcggtgagcccc

SEQ ID NO: 1852077 - DNA, 15 bp, Homo sapiens
aggcggtgagccccg

SEQ ID NO: 1852078 - DNA, 15 bp, Homo sapiens
ggcggtgagccccgg

SEQ ID NO: 1852079 - DNA, 15 bp, Homo sapiens
gcggtgagccccggg

SEQ ID NO: 1852080 - DNA, 15 bp, Homo sapiens
cggtgagccccgggc

SEQ ID NO: 1852081 - DNA, 15 bp, Homo sapiens
ggtgagccccgggca

SEQ ID NO: 1852082 - DNA, 15 bp, Homo sapiens
gtgagccccgggcac

SEQ ID NO: 1852083 - DNA, 15 bp, Homo sapiens
tgagccccgggcaca

SEQ ID NO: 1852084 - DNA, 15 bp, Homo sapiens
gagccccgggcacac

SEQ ID NO: 1852085 - DNA, 15 bp, Homo sapiens
agccccgggcacact

SEQ ID NO: 1852086 - DNA, 15 bp, Homo sapiens
gccccgggcacactc

SEQ ID NO: 1852087 - DNA, 15 bp, Homo sapiens
ccccgggcacactcg

SEQ ID NO: 1852088 - DNA, 15 bp, Homo sapiens
cccgggcacactcgc

SEQ ID NO: 1852089 - DNA, 15 bp, Homo sapiens
ccgggcacactcgct

SEQ ID NO: 1852090 - DNA, 15 bp, Homo sapiens
cgggcacactcgctt

SEQ ID NO: 1852091 - DNA, 15 bp, Homo sapiens
gggcacactcgcttg

SEQ ID NO: 1852092 - DNA, 15 bp, Homo sapiens
ggcacactcgcttgc

SEQ ID NO: 1852093 - DNA, 15 bp, Homo sapiens
gcacactcgcttgct

SEQ ID NO: 1852094 - DNA, 15 bp, Homo sapiens
cacactcgcttgctg

SEQ ID NO: 1852095 - DNA, 15 bp, Homo sapiens
acactcgcttgctgc

SEQ ID NO: 1852096 - DNA, 15 bp, Homo sapiens
cactcgcttgctgct

SEQ ID NO: 1852097 - DNA, 15 bp, Homo sapiens
actcgcttgctgctc

SEQ ID NO: 1852098 - DNA, 15 bp, Homo sapiens
ctcgcttgctgctcg

SEQ ID NO: 1852099 - DNA, 15 bp, Homo sapiens
tcgcttgctgctcgg

SEQ ID NO: 1852100 - DNA, 15 bp, Homo sapiens
cgcttgctgctcggc

SEQ ID NO: 1852101 - DNA, 15 bp, Homo sapiens
gcttgctgctcggcg

SEQ ID NO: 1852102 - DNA, 15 bp, Homo sapiens
cttgctgctcggcgc

SEQ ID NO: 1852103 - DNA, 15 bp, Homo sapiens
ttgctgctcggcgca

SEQ ID NO: 1852104 - DNA, 15 bp, Homo sapiens
tgctgctcggcgcac

SEQ ID NO: 1852105 - DNA, 15 bp, Homo sapiens
gctgctcggcgcacg

SEQ ID NO: 1852106 - DNA, 15 bp, Homo sapiens
agggggaaagaccag

SEQ ID NO: 1852107 - DNA, 15 bp, Homo sapiens
gggggaaagaccaga

SEQ ID NO: 1852108 - DNA, 15 bp, Homo sapiens
ggggaaagaccagag

SEQ ID NO: 1852109 - DNA, 15 bp, Homo sapiens
gggaaagaccagaga

SEQ ID NO: 1852110 - DNA, 15 bp, Homo sapiens
ggaaagaccagagac

SEQ ID NO: 1852111 - DNA, 15 bp, Homo sapiens
aaagaccagagactc

SEQ ID NO: 1852112 - DNA, 15 bp, Homo sapiens
aagaccagagactcc

SEQ ID NO: 1852113 - DNA, 15 bp, Homo sapiens
agaccagagactccc

SEQ ID NO: 1852114 - DNA, 15 bp, Homo sapiens
gaccagagactcccc

SEQ ID NO: 1852115 - DNA, 15 bp, Homo sapiens
accagagactcccct

SEQ ID NO: 1852116 - DNA, 15 bp, Homo sapiens
ccagagactccccta

SEQ ID NO: 1852117 - DNA, 15 bp, Homo sapiens
cagagactcccctaa

SEQ ID NO: 1852118 - DNA, 15 bp, Homo sapiens
agagactcccctaaa

SEQ ID NO: 1852119 - DNA, 15 bp, Homo sapiens
gagactcccctaaac

SEQ ID NO: 1852120 - DNA, 15 bp, Homo sapiens
agactcccctaaacc

SEQ ID NO: 1852121 - DNA, 15 bp, Homo sapiens
gactcccctaaacca

SEQ ID NO: 1852122 - DNA, 15 bp, Homo sapiens
actcccctaaaccac

SEQ ID NO: 1852123 - DNA, 15 bp, Homo sapiens
ctcccctaaaccacc

SEQ ID NO: 1852124 - DNA, 15 bp, Homo sapiens
tcccctaaaccaccc

SEQ ID NO: 1852125 - DNA, 15 bp, Homo sapiens
cccctaaaccaccca

SEQ ID NO: 1852126 - DNA, 15 bp, Homo sapiens
ccctaaaccacccag

SEQ ID NO: 1852127 - DNA, 15 bp, Homo sapiens
cctaaaccacccaga

SEQ ID NO: 1852128 - DNA, 15 bp, Homo sapiens
ctaaaccacccagat

SEQ ID NO: 1852129 - DNA, 15 bp, Homo sapiens
taaaccacccagatg

SEQ ID NO: 1852130 - DNA, 15 bp, Homo sapiens
aaaccacccagatgc

SEQ ID NO: 1852131 - DNA, 15 bp, Homo sapiens
aaccacccagatgcg

SEQ ID NO: 1852132 - DNA, 15 bp, Homo sapiens
accacccagatgcgc

SEQ ID NO: 1852133 - DNA, 15 bp, Homo sapiens
ccacccagatgcgca

SEQ ID NO: 1852134 - DNA, 15 bp, Homo sapiens
cacccagatgcgcag

SEQ ID NO: 1852135 - DNA, 15 bp, Homo sapiens
acccagatgcgcagg

SEQ ID NO: 1852136 - DNA, 15 bp, Homo sapiens
cccagatgcgcagga

SEQ ID NO: 1852137 - DNA, 15 bp, Homo sapiens
ccagatgcgcaggat

SEQ ID NO: 1852138 - DNA, 15 bp, Homo sapiens
cagatgcgcaggatt

SEQ ID NO: 1852139 - DNA, 15 bp, Homo sapiens
agatgcgcaggattg

SEQ ID NO: 1852140 - DNA, 15 bp, Homo sapiens
gatgcgcaggattga

SEQ ID NO: 1852141 - DNA, 15 bp, Homo sapiens
atgcgcaggattgaa

SEQ ID NO: 1852142 - DNA, 15 bp, Homo sapiens
tgcgcaggattgaag

SEQ ID NO: 1852143 - DNA, 15 bp, Homo sapiens
gcgcaggattgaagc

SEQ ID NO: 1852144 - DNA, 15 bp, Homo sapiens
cgcaggattgaagcg

SEQ ID NO: 1852145 - DNA, 15 bp, Homo sapiens
gcaggattgaagcgg

SEQ ID NO: 1852146 - DNA, 15 bp, Homo sapiens
caggattgaagcggt

SEQ ID NO: 1852147 - DNA, 15 bp, Homo sapiens
aggattgaagcggtc

SEQ ID NO: 1852148 - DNA, 15 bp, Homo sapiens
ggattgaagcggtct

SEQ ID NO: 1852149 - DNA, 15 bp, Homo sapiens
gattgaagcggtcta

SEQ ID NO: 1852150 - DNA, 15 bp, Homo sapiens
attgaagcggtctag

SEQ ID NO: 1852151 - DNA, 15 bp, Homo sapiens
ttgaagcggtctagc

SEQ ID NO: 1852152 - DNA, 15 bp, Homo sapiens
tgaagcggtctagcc

SEQ ID NO: 1852153 - DNA, 15 bp, Homo sapiens
gaagcggtctagcca

SEQ ID NO: 1852154 - DNA, 15 bp, Homo sapiens
aagcggtctagccaa

SEQ ID NO: 1852155 - DNA, 15 bp, Homo sapiens
agcggtctagccaaa

SEQ ID NO: 1852156 - DNA, 15 bp, Homo sapiens
gcggtctagccaaag

SEQ ID NO: 1852157 - DNA, 15 bp, Homo sapiens
cggtctagccaaagc

SEQ ID NO: 1852158 - DNA, 15 bp, Homo sapiens
ggtctagccaaagct

SEQ ID NO: 1852159 - DNA, 15 bp, Homo sapiens
gtctagccaaagctt

SEQ ID NO: 1852160 - DNA, 15 bp, Homo sapiens
tctagccaaagcttt

SEQ ID NO: 1852161 - DNA, 15 bp, Homo sapiens
ctagccaaagctttc

SEQ ID NO: 1852162 - DNA, 15 bp, Homo sapiens
tagccaaagctttct

SEQ ID NO: 1852163 - DNA, 15 bp, Homo sapiens
agccaaagctttctg

SEQ ID NO: 1852164 - DNA, 15 bp, Homo sapiens
gccaaagctttctgt

SEQ ID NO: 1852165 - DNA, 15 bp, Homo sapiens
ccaaagctttctgtg

SEQ ID NO: 1852166 - DNA, 15 bp, Homo sapiens
caaagctttctgtgg

SEQ ID NO: 1852167 - DNA, 15 bp, Homo sapiens
aaagctttctgtgga

SEQ ID NO: 1852168 - DNA, 15 bp, Homo sapiens
aagctttctgtggat

SEQ ID NO: 1852169 - DNA, 15 bp, Homo sapiens
agctttctgtggatt

SEQ ID NO: 1852170 - DNA, 15 bp, Homo sapiens
gctttctgtggatta

SEQ ID NO: 1852171 - DNA, 15 bp, Homo sapiens
ctttctgtggattaa

SEQ ID NO: 1852172 - DNA, 15 bp, Homo sapiens
tttctgtggattaaa

SEQ ID NO: 1852173 - DNA, 15 bp, Homo sapiens
ttctgtggattaaaa

SEQ ID NO: 1852174 - DNA, 15 bp, Homo sapiens
tctgtggattaaaaa

SEQ ID NO: 1852175 - DNA, 15 bp, Homo sapiens
ctgtggattaaaaaa

SEQ ID NO: 1852176 - DNA, 15 bp, Homo sapiens
tgtggattaaaaaaa

SEQ ID NO: 1852177 - DNA, 15 bp, Homo sapiens
gtggattaaaaaaat

SEQ ID NO: 1852178 - DNA, 15 bp, Homo sapiens
tggattaaaaaaata

SEQ ID NO: 1852179 - DNA, 15 bp, Homo sapiens
ggattaaaaaaatac

SEQ ID NO: 1852180 - DNA, 15 bp, Homo sapiens
gattaaaaaaataca

SEQ ID NO: 1852181 - DNA, 15 bp, Homo sapiens
attaaaaaaatacac

SEQ ID NO: 1852182 - DNA, 15 bp, Homo sapiens
ttaaaaaaatacacg

SEQ ID NO: 1852183 - DNA, 15 bp, Homo sapiens
taaaaaaatacacga

SEQ ID NO: 1852184 - DNA, 15 bp, Homo sapiens
aaaaaaatacacgat

SEQ ID NO: 1852185 - DNA, 15 bp, Homo sapiens
aaaaaatacacgatt

SEQ ID NO: 1852186 - DNA, 15 bp, Homo sapiens
aaaaatacacgattt

SEQ ID NO: 1852187 - DNA, 15 bp, Homo sapiens
aaaatacacgatttt

SEQ ID NO: 1852188 - DNA, 15 bp, Homo sapiens
aaatacacgattttt

SEQ ID NO: 1852189 - DNA, 15 bp, Homo sapiens
aatacacgatttttt

SEQ ID NO: 1852190 - DNA, 15 bp, Homo sapiens
atacacgattttttt

SEQ ID NO: 1852191 - DNA, 15 bp, Homo sapiens
tacacgatttttttt

SEQ ID NO: 1852192 - DNA, 15 bp, Homo sapiens
acacgattttttttt

SEQ ID NO: 1852193 - DNA, 15 bp, Homo sapiens
cacgatttttttttt

SEQ ID NO: 1852194 - DNA, 15 bp, Homo sapiens
acgattttttttttt

SEQ ID NO: 1852195 - DNA, 15 bp, Homo sapiens
cgatttttttttttt

SEQ ID NO: 1852196 - DNA, 15 bp, Homo sapiens
ttttttttttttggc

SEQ ID NO: 1852197 - DNA, 15 bp, Homo sapiens
tttttttttggcaga

SEQ ID NO: 1852198 - DNA, 15 bp, Homo sapiens
ttttttttggcagaa

SEQ ID NO: 1852199 - DNA, 15 bp, Homo sapiens
tttttttggcagaag

SEQ ID NO: 1852200 - DNA, 15 bp, Homo sapiens
ttttttggcagaaga

SEQ ID NO: 1852201 - DNA, 15 bp, Homo sapiens
tttttggcagaagaa

SEQ ID NO: 1852202 - DNA, 15 bp, Homo sapiens
ttttggcagaagaaa

SEQ ID NO: 1852203 - DNA, 15 bp, Homo sapiens
tttggcagaagaaaa

SEQ ID NO: 1852204 - DNA, 15 bp, Homo sapiens
ttggcagaagaaaag

SEQ ID NO: 1852205 - DNA, 15 bp, Homo sapiens
tggcagaagaaaagg

SEQ ID NO: 1852206 - DNA, 15 bp, Homo sapiens
ggcagaagaaaagga

SEQ ID NO: 1852207 - DNA, 15 bp, Homo sapiens
gcagaagaaaaggag

SEQ ID NO: 1852208 - DNA, 15 bp, Homo sapiens
cagaagaaaaggaga

SEQ ID NO: 1852209 - DNA, 15 bp, Homo sapiens
agaagaaaaggagag

SEQ ID NO: 1852210 - DNA, 15 bp, Homo sapiens
gaagaaaaggagagg

SEQ ID NO: 1852211 - DNA, 15 bp, Homo sapiens
aagaaaaggagagga

SEQ ID NO: 1852212 - DNA, 15 bp, Homo sapiens
agaaaaggagaggaa

SEQ ID NO: 1852213 - DNA, 15 bp, Homo sapiens
gaaaaggagaggaag

SEQ ID NO: 1852214 - DNA, 15 bp, Homo sapiens
aaaaggagaggaaga

SEQ ID NO: 1852215 - DNA, 15 bp, Homo sapiens
aaaggagaggaagac

SEQ ID NO: 1852216 - DNA, 15 bp, Homo sapiens
aaggagaggaagacc

SEQ ID NO: 1852217 - DNA, 15 bp, Homo sapiens
aggagaggaagacca

SEQ ID NO: 1852218 - DNA, 15 bp, Homo sapiens
ggagaggaagaccag

SEQ ID NO: 1852219 - DNA, 15 bp, Homo sapiens
gagaggaagaccagc

SEQ ID NO: 1852220 - DNA, 15 bp, Homo sapiens
agaggaagaccagcg

SEQ ID NO: 1852221 - DNA, 15 bp, Homo sapiens
gaggaagaccagcgg

SEQ ID NO: 1852222 - DNA, 15 bp, Homo sapiens
aggaagaccagcggg

SEQ ID NO: 1852223 - DNA, 15 bp, Homo sapiens
ggaagaccagcgggg

SEQ ID NO: 1852224 - DNA, 15 bp, Homo sapiens
gaagaccagcggggc

SEQ ID NO: 1852225 - DNA, 15 bp, Homo sapiens
aagaccagcggggct

SEQ ID NO: 1852226 - DNA, 15 bp, Homo sapiens
agaccagcggggctt

SEQ ID NO: 1852227 - DNA, 15 bp, Homo sapiens
gaccagcggggcttt

SEQ ID NO: 1852228 - DNA, 15 bp, Homo sapiens
accagcggggctttg

SEQ ID NO: 1852229 - DNA, 15 bp, Homo sapiens
ccagcggggctttgc

SEQ ID NO: 1852230 - DNA, 15 bp, Homo sapiens
cagcggggctttgca

SEQ ID NO: 1852231 - DNA, 15 bp, Homo sapiens
agcggggctttgcaa

SEQ ID NO: 1852232 - DNA, 15 bp, Homo sapiens
gcggggctttgcaag

SEQ ID NO: 1852233 - DNA, 15 bp, Homo sapiens
cggggctttgcaagg

SEQ ID NO: 1852234 - DNA, 15 bp, Homo sapiens
ggggctttgcaagga

SEQ ID NO: 1852235 - DNA, 15 bp, Homo sapiens
gggctttgcaaggaa

SEQ ID NO: 1852236 - DNA, 15 bp, Homo sapiens
ggctttgcaaggaaa

SEQ ID NO: 1852237 - DNA, 15 bp, Homo sapiens
gctttgcaaggaaac

SEQ ID NO: 1852238 - DNA, 15 bp, Homo sapiens
ctttgcaaggaaacg

SEQ ID NO: 1852239 - DNA, 15 bp, Homo sapiens
tttgcaaggaaacgg

SEQ ID NO: 1852240 - DNA, 15 bp, Homo sapiens
ttgcaaggaaacggg

SEQ ID NO: 1852241 - DNA, 15 bp, Homo sapiens
tgcaaggaaacgggg

SEQ ID NO: 1852242 - DNA, 15 bp, Homo sapiens
gcaaggaaacggggg

SEQ ID NO: 1852243 - DNA, 15 bp, Homo sapiens
caaggaaacgggggg

SEQ ID NO: 1852244 - DNA, 15 bp, Homo sapiens
aaggaaacgggggga

SEQ ID NO: 1852245 - DNA, 15 bp, Homo sapiens
aggaaacggggggat

SEQ ID NO: 1852246 - DNA, 15 bp, Homo sapiens
ggaaacggggggatg

SEQ ID NO: 1852247 - DNA, 15 bp, Homo sapiens
gaaacggggggatgt

SEQ ID NO: 1852248 - DNA, 15 bp, Homo sapiens
aaacggggggatgta

SEQ ID NO: 1852249 - DNA, 15 bp, Homo sapiens
aacggggggatgtaa

SEQ ID NO: 1852250 - DNA, 15 bp, Homo sapiens
acggggggatgtaac

SEQ ID NO: 1852251 - DNA, 15 bp, Homo sapiens
cggggggatgtaact

SEQ ID NO: 1852252 - DNA, 15 bp, Homo sapiens
ggggggatgtaactc

SEQ ID NO: 1852253 - DNA, 15 bp, Homo sapiens
gggggatgtaactcg

SEQ ID NO: 1852254 - DNA, 15 bp, Homo sapiens
ggggatgtaactcgt

SEQ ID NO: 1852255 - DNA, 15 bp, Homo sapiens
gggatgtaactcgtg

SEQ ID NO: 1852256 - DNA, 15 bp, Homo sapiens
ggatgtaactcgtgg

SEQ ID NO: 1852257 - DNA, 15 bp, Homo sapiens
gatgtaactcgtgga

SEQ ID NO: 1852258 - DNA, 15 bp, Homo sapiens
atgtaactcgtggat

SEQ ID NO: 1852259 - DNA, 15 bp, Homo sapiens
tgtaactcgtggata

SEQ ID NO: 1852260 - DNA, 15 bp, Homo sapiens
gtaactcgtggatac

SEQ ID NO: 1852261 - DNA, 15 bp, Homo sapiens
taactcgtggataca

SEQ ID NO: 1852262 - DNA, 15 bp, Homo sapiens
aactcgtggatacat

SEQ ID NO: 1852263 - DNA, 15 bp, Homo sapiens
actcgtggatacatt

SEQ ID NO: 1852264 - DNA, 15 bp, Homo sapiens
ctcgtggatacattt

SEQ ID NO: 1852265 - DNA, 15 bp, Homo sapiens
tcgtggatacatttt

SEQ ID NO: 1852266 - DNA, 15 bp, Homo sapiens
cgtggatacattttt

SEQ ID NO: 1852267 - DNA, 15 bp, Homo sapiens
gtggatacatttttc

SEQ ID NO: 1852268 - DNA, 15 bp, Homo sapiens
tggatacatttttcc

SEQ ID NO: 1852269 - DNA, 15 bp, Homo sapiens
ggatacatttttcca

SEQ ID NO: 1852270 - DNA, 15 bp, Homo sapiens
gatacatttttccac

SEQ ID NO: 1852271 - DNA, 15 bp, Homo sapiens
atacatttttccacc

SEQ ID NO: 1852272 - DNA, 15 bp, Homo sapiens
tacatttttccaccc

SEQ ID NO: 1852273 - DNA, 15 bp, Homo sapiens
acatttttccaccca

SEQ ID NO: 1852274 - DNA, 15 bp, Homo sapiens
catttttccacccat

SEQ ID NO: 1852275 - DNA, 15 bp, Homo sapiens
atttttccacccatc

SEQ ID NO: 1852276 - DNA, 15 bp, Homo sapiens
tttttccacccatca

SEQ ID NO: 1852277 - DNA, 15 bp, Homo sapiens
ttttccacccatcaa

SEQ ID NO: 1852278 - DNA, 15 bp, Homo sapiens
tttccacccatcaaa

SEQ ID NO: 1852279 - DNA, 15 bp, Homo sapiens
ttccacccatcaaac

SEQ ID NO: 1852280 - DNA, 15 bp, Homo sapiens
tccacccatcaaaca

SEQ ID NO: 1852281 - DNA, 15 bp, Homo sapiens
ccacccatcaaacat

SEQ ID NO: 1852282 - DNA, 15 bp, Homo sapiens
cacccatcaaacatc

SEQ ID NO: 1852283 - DNA, 15 bp, Homo sapiens
acccatcaaacatct

SEQ ID NO: 1852284 - DNA, 15 bp, Homo sapiens
cccatcaaacatctt

SEQ ID NO: 1852285 - DNA, 15 bp, Homo sapiens
ccatcaaacatcttg

SEQ ID NO: 1852286 - DNA, 15 bp, Homo sapiens
catcaaacatcttgt

SEQ ID NO: 1852287 - DNA, 15 bp, Homo sapiens
atcaaacatcttgtt

SEQ ID NO: 1852288 - DNA, 15 bp, Homo sapiens
tcaaacatcttgtta

SEQ ID NO: 1852289 - DNA, 15 bp, Homo sapiens
caaacatcttgttat

SEQ ID NO: 1852290 - DNA, 15 bp, Homo sapiens
aaacatcttgttata

SEQ ID NO: 1852291 - DNA, 15 bp, Homo sapiens
aacatcttgttatac

SEQ ID NO: 1852292 - DNA, 15 bp, Homo sapiens
acatcttgttatact

SEQ ID NO: 1852293 - DNA, 15 bp, Homo sapiens
catcttgttatactt

SEQ ID NO: 1852294 - DNA, 15 bp, Homo sapiens
atcttgttatacttt

SEQ ID NO: 1852295 - DNA, 15 bp, Homo sapiens
tcttgttatactttg

SEQ ID NO: 1852296 - DNA, 15 bp, Homo sapiens
cttgttatactttgt

SEQ ID NO: 1852297 - DNA, 15 bp, Homo sapiens
ttgttatactttgta

SEQ ID NO: 1852298 - DNA, 15 bp, Homo sapiens
tgttatactttgtaa

SEQ ID NO: 1852299 - DNA, 15 bp, Homo sapiens
gttatactttgtaaa

SEQ ID NO: 1852300 - DNA, 15 bp, Homo sapiens
ttatactttgtaaac

SEQ ID NO: 1852301 - DNA, 15 bp, Homo sapiens
tatactttgtaaaca

SEQ ID NO: 1852302 - DNA, 15 bp, Homo sapiens
atactttgtaaacat

SEQ ID NO: 1852303 - DNA, 15 bp, Homo sapiens
tactttgtaaacatt

SEQ ID NO: 1852304 - DNA, 15 bp, Homo sapiens
actttgtaaacattt

SEQ ID NO: 1852305 - DNA, 15 bp, Homo sapiens
ctttgtaaacatttt

SEQ ID NO: 1852306 - DNA, 15 bp, Homo sapiens
tttgtaaacattttc

SEQ ID NO: 1852307 - DNA, 15 bp, Homo sapiens
ttgtaaacattttct

SEQ ID NO: 1852308 - DNA, 15 bp, Homo sapiens
tgtaaacattttctt

SEQ ID NO: 1852309 - DNA, 15 bp, Homo sapiens
gtaaacattttcttt

SEQ ID NO: 1852310 - DNA, 15 bp, Homo sapiens
taaacattttctttt

SEQ ID NO: 1852311 - DNA, 15 bp, Homo sapiens
aaacattttcttttt

SEQ ID NO: 1852312 - DNA, 15 bp, Homo sapiens
aacattttctttttt

SEQ ID NO: 1852313 - DNA, 15 bp, Homo sapiens
acattttcttttttt

SEQ ID NO: 1852314 - DNA, 15 bp, Homo sapiens
cattttcttttttta

SEQ ID NO: 1852315 - DNA, 15 bp, Homo sapiens
attttctttttttaa

SEQ ID NO: 1852316 - DNA, 15 bp, Homo sapiens
tttctttttttaaac

SEQ ID NO: 1852317 - DNA, 15 bp, Homo sapiens
ttctttttttaaacc

SEQ ID NO: 1852318 - DNA, 15 bp, Homo sapiens
tctttttttaaaccc

SEQ ID NO: 1852319 - DNA, 15 bp, Homo sapiens
ctttttttaaacccc

SEQ ID NO: 1852320 - DNA, 15 bp, Homo sapiens
tttttttaaacccca

SEQ ID NO: 1852321 - DNA, 15 bp, Homo sapiens
ttttttaaaccccag

SEQ ID NO: 1852322 - DNA, 15 bp, Homo sapiens
tttttaaaccccagt

SEQ ID NO: 1852323 - DNA, 15 bp, Homo sapiens
ttttaaaccccagtt

SEQ ID NO: 1852324 - DNA, 15 bp, Homo sapiens
tttaaaccccagttc

SEQ ID NO: 1852325 - DNA, 15 bp, Homo sapiens
ttaaaccccagttcc

SEQ ID NO: 1852326 - DNA, 15 bp, Homo sapiens
taaaccccagttcca

SEQ ID NO: 1852327 - DNA, 15 bp, Homo sapiens
aaaccccagttccag

SEQ ID NO: 1852328 - DNA, 15 bp, Homo sapiens
aaccccagttccagc

SEQ ID NO: 1852329 - DNA, 15 bp, Homo sapiens
accccagttccagcc

SEQ ID NO: 1852330 - DNA, 15 bp, Homo sapiens
ccccagttccagccg

SEQ ID NO: 1852331 - DNA, 15 bp, Homo sapiens
cccagttccagccgg

SEQ ID NO: 1852332 - DNA, 15 bp, Homo sapiens
ccagttccagccgga

SEQ ID NO: 1852333 - DNA, 15 bp, Homo sapiens
cagttccagccggac

SEQ ID NO: 1852334 - DNA, 15 bp, Homo sapiens
agttccagccggacg

SEQ ID NO: 1852335 - DNA, 15 bp, Homo sapiens
gttccagccggacgc

SEQ ID NO: 1852336 - DNA, 15 bp, Homo sapiens
ttccagccggacgcc

SEQ ID NO: 1852337 - DNA, 15 bp, Homo sapiens
ttttgcgagagcctt

SEQ ID NO: 1852338 - DNA, 15 bp, Homo sapiens
tttgcgagagccttc

SEQ ID NO: 1852339 - DNA, 15 bp, Homo sapiens
ttgcgagagccttct

SEQ ID NO: 1852340 - DNA, 15 bp, Homo sapiens
tgcgagagccttctt

SEQ ID NO: 1852341 - DNA, 15 bp, Homo sapiens
gcgagagccttctta

SEQ ID NO: 1852342 - DNA, 15 bp, Homo sapiens
cgagagccttcttat

SEQ ID NO: 1852343 - DNA, 15 bp, Homo sapiens
gagagccttcttatt

SEQ ID NO: 1852344 - DNA, 15 bp, Homo sapiens
agagccttcttattt

SEQ ID NO: 1852345 - DNA, 15 bp, Homo sapiens
gagccttcttatttt

SEQ ID NO: 1852346 - DNA, 15 bp, Homo sapiens
agccttcttattttg

SEQ ID NO: 1852347 - DNA, 15 bp, Homo sapiens
gccttcttattttgc

SEQ ID NO: 1852348 - DNA, 15 bp, Homo sapiens
ccttcttattttgcc

SEQ ID NO: 1852349 - DNA, 15 bp, Homo sapiens
cttcttattttgcca

SEQ ID NO: 1852350 - DNA, 15 bp, Homo sapiens
ttcttattttgccag

SEQ ID NO: 1852351 - DNA, 15 bp, Homo sapiens
tcttattttgccaga

SEQ ID NO: 1852352 - DNA, 15 bp, Homo sapiens
cttattttgccagac

SEQ ID NO: 1852353 - DNA, 15 bp, Homo sapiens
ttattttgccagacg

SEQ ID NO: 1852354 - DNA, 15 bp, Homo sapiens
tattttgccagacgt

SEQ ID NO: 1852355 - DNA, 15 bp, Homo sapiens
attttgccagacgtc

SEQ ID NO: 1852356 - DNA, 15 bp, Homo sapiens
ttttgccagacgtct

SEQ ID NO: 1852357 - DNA, 15 bp, Homo sapiens
tttgccagacgtctc

SEQ ID NO: 1852358 - DNA, 15 bp, Homo sapiens
ttgccagacgtctca

SEQ ID NO: 1852359 - DNA, 15 bp, Homo sapiens
tgccagacgtctcat

SEQ ID NO: 1852360 - DNA, 15 bp, Homo sapiens
gccagacgtctcatg

SEQ ID NO: 1852361 - DNA, 15 bp, Homo sapiens
ccagacgtctcatgc

SEQ ID NO: 1852362 - DNA, 15 bp, Homo sapiens
cagacgtctcatgcg

SEQ ID NO: 1852363 - DNA, 15 bp, Homo sapiens
agacgtctcatgcgg

SEQ ID NO: 1852364 - DNA, 15 bp, Homo sapiens
gacgtctcatgcggg

SEQ ID NO: 1852365 - DNA, 15 bp, Homo sapiens
acgtctcatgcgggg

SEQ ID NO: 1852366 - DNA, 15 bp, Homo sapiens
cgtctcatgcggggt

SEQ ID NO: 1852367 - DNA, 15 bp, Homo sapiens
gtctcatgcggggtg

SEQ ID NO: 1852368 - DNA, 15 bp, Homo sapiens
tctcatgcggggtga

SEQ ID NO: 1852369 - DNA, 15 bp, Homo sapiens
ctcatgcggggtgaa

SEQ ID NO: 1852370 - DNA, 15 bp, Homo sapiens
tcatgcggggtgaag

SEQ ID NO: 1852371 - DNA, 15 bp, Homo sapiens
catgcggggtgaagt

SEQ ID NO: 1852372 - DNA, 15 bp, Homo sapiens
atgcggggtgaagtc

SEQ ID NO: 1852373 - DNA, 15 bp, Homo sapiens
tgcggggtgaagtcc

SEQ ID NO: 1852374 - DNA, 15 bp, Homo sapiens
gcggggtgaagtcca

SEQ ID NO: 1852375 - DNA, 15 bp, Homo sapiens
cggggtgaagtccac

SEQ ID NO: 1852376 - DNA, 15 bp, Homo sapiens
ggggtgaagtccact

SEQ ID NO: 1852377 - DNA, 15 bp, Homo sapiens
gggtgaagtccactc

SEQ ID NO: 1852378 - DNA, 15 bp, Homo sapiens
ggtgaagtccactcg

SEQ ID NO: 1852379 - DNA, 15 bp, Homo sapiens
gtgaagtccactcgg

SEQ ID NO: 1852380 - DNA, 15 bp, Homo sapiens
tgaagtccactcggc

SEQ ID NO: 1852381 - DNA, 15 bp, Homo sapiens
gaagtccactcggcc

SEQ ID NO: 1852382 - DNA, 15 bp, Homo sapiens
aagtccactcggccc

SEQ ID NO: 1852383 - DNA, 15 bp, Homo sapiens
agtccactcggcccc

SEQ ID NO: 1852384 - DNA, 15 bp, Homo sapiens
gtccactcggccccc

SEQ ID NO: 1852385 - DNA, 15 bp, Homo sapiens
tccactcggccccct

SEQ ID NO: 1852386 - DNA, 15 bp, Homo sapiens
ccactcggccccctc

SEQ ID NO: 1852387 - DNA, 15 bp, Homo sapiens
cactcggccccctcc

SEQ ID NO: 1852388 - DNA, 15 bp, Homo sapiens
actcggccccctccc

SEQ ID NO: 1852389 - DNA, 15 bp, Homo sapiens
ctcggccccctcccc

SEQ ID NO: 1852390 - DNA, 15 bp, Homo sapiens
tcggccccctcccct

SEQ ID NO: 1852391 - DNA, 15 bp, Homo sapiens
cggccccctcccctg

SEQ ID NO: 1852392 - DNA, 15 bp, Homo sapiens
ggccccctcccctga

SEQ ID NO: 1852393 - DNA, 15 bp, Homo sapiens
gccccctcccctgag

SEQ ID NO: 1852394 - DNA, 15 bp, Homo sapiens
ccccctcccctgagt

SEQ ID NO: 1852395 - DNA, 15 bp, Homo sapiens
cccctcccctgagtc

SEQ ID NO: 1852396 - DNA, 15 bp, Homo sapiens
ccctcccctgagtct

SEQ ID NO: 1852397 - DNA, 15 bp, Homo sapiens
cctcccctgagtctt

SEQ ID NO: 1852398 - DNA, 15 bp, Homo sapiens
ctcccctgagtcttc

SEQ ID NO: 1852399 - DNA, 15 bp, Homo sapiens
tcccctgagtcttcg

SEQ ID NO: 1852400 - DNA, 15 bp, Homo sapiens
cccctgagtcttcgt

SEQ ID NO: 1852401 - DNA, 15 bp, Homo sapiens
ccctgagtcttcgtg

SEQ ID NO: 1852402 - DNA, 15 bp, Homo sapiens
cctgagtcttcgtgt

SEQ ID NO: 1852403 - DNA, 15 bp, Homo sapiens
ctgagtcttcgtgtg

SEQ ID NO: 1852404 - DNA, 15 bp, Homo sapiens
tgagtcttcgtgtgc

SEQ ID NO: 1852405 - DNA, 15 bp, Homo sapiens
gagtcttcgtgtgcg

SEQ ID NO: 1852406 - DNA, 15 bp, Homo sapiens
agtcttcgtgtgcgc

SEQ ID NO: 1852407 - DNA, 15 bp, Homo sapiens
gtcttcgtgtgcgcg

SEQ ID NO: 1852408 - DNA, 15 bp, Homo sapiens
tcttcgtgtgcgcgg

SEQ ID NO: 1852409 - DNA, 15 bp, Homo sapiens
cttcgtgtgcgcgga

SEQ ID NO: 1852410 - DNA, 15 bp, Homo sapiens
ttcgtgtgcgcggaa

SEQ ID NO: 1852411 - DNA, 15 bp, Homo sapiens
tcgtgtgcgcggaat

SEQ ID NO: 1852412 - DNA, 15 bp, Homo sapiens
cgtgtgcgcggaatt

SEQ ID NO: 1852413 - DNA, 15 bp, Homo sapiens
gtgtgcgcggaattc

SEQ ID NO: 1852414 - DNA, 15 bp, Homo sapiens
tgtgcgcggaattcg

SEQ ID NO: 1852415 - DNA, 15 bp, Homo sapiens
gtgcgcggaattcga

SEQ ID NO: 1852416 - DNA, 15 bp, Homo sapiens
tgcgcggaattcgag

SEQ ID NO: 1852417 - DNA, 15 bp, Homo sapiens
gcgcggaattcgagg

SEQ ID NO: 1852418 - DNA, 15 bp, Homo sapiens
cgcggaattcgagga

SEQ ID NO: 1852419 - DNA, 15 bp, Homo sapiens
gcggaattcgaggag

SEQ ID NO: 1852420 - DNA, 15 bp, Homo sapiens
cggaattcgaggaga

SEQ ID NO: 1852421 - DNA, 15 bp, Homo sapiens
ggaattcgaggagat

SEQ ID NO: 1852422 - DNA, 15 bp, Homo sapiens
gaattcgaggagatc

SEQ ID NO: 1852423 - DNA, 15 bp, Homo sapiens
aattcgaggagatcc

SEQ ID NO: 1852424 - DNA, 15 bp, Homo sapiens
attcgaggagatccg

SEQ ID NO: 1852425 - DNA, 15 bp, Homo sapiens
ttcgaggagatccgg

SEQ ID NO: 1852426 - DNA, 15 bp, Homo sapiens
tcgaggagatccggt

SEQ ID NO: 1852427 - DNA, 15 bp, Homo sapiens
cgaggagatccggtt

SEQ ID NO: 1852428 - DNA, 15 bp, Homo sapiens
gaggagatccggtta

SEQ ID NO: 1852429 - DNA, 15 bp, Homo sapiens
aggagatccggttac

SEQ ID NO: 1852430 - DNA, 15 bp, Homo sapiens
ggagatccggttact

SEQ ID NO: 1852431 - DNA, 15 bp, Homo sapiens
gagatccggttacta

SEQ ID NO: 1852432 - DNA, 15 bp, Homo sapiens
agatccggttactaa

SEQ ID NO: 1852433 - DNA, 15 bp, Homo sapiens
gatccggttactaag

SEQ ID NO: 1852434 - DNA, 15 bp, Homo sapiens
atccggttactaagg

SEQ ID NO: 1852435 - DNA, 15 bp, Homo sapiens
tccggttactaagga

SEQ ID NO: 1852436 - DNA, 15 bp, Homo sapiens
ccggttactaaggat

SEQ ID NO: 1852437 - DNA, 15 bp, Homo sapiens
cggttactaaggata

SEQ ID NO: 1852438 - DNA, 15 bp, Homo sapiens
ggttactaaggatat

SEQ ID NO: 1852439 - DNA, 15 bp, Homo sapiens
gttactaaggatata

SEQ ID NO: 1852440 - DNA, 15 bp, Homo sapiens
ttactaaggatatag

SEQ ID NO: 1852441 - DNA, 15 bp, Homo sapiens
tactaaggatataga

SEQ ID NO: 1852442 - DNA, 15 bp, Homo sapiens
actaaggatatagag

SEQ ID NO: 1852443 - DNA, 15 bp, Homo sapiens
ctaaggatatagagg

SEQ ID NO: 1852444 - DNA, 15 bp, Homo sapiens
taaggatatagagga

SEQ ID NO: 1852445 - DNA, 15 bp, Homo sapiens
aaggatatagaggaa

SEQ ID NO: 1852446 - DNA, 15 bp, Homo sapiens
aggatatagaggaaa

SEQ ID NO: 1852447 - DNA, 15 bp, Homo sapiens
ggatatagaggaaaa

SEQ ID NO: 1852448 - DNA, 15 bp, Homo sapiens
gatatagaggaaaaa

SEQ ID NO: 1852449 - DNA, 15 bp, Homo sapiens
atatagaggaaaaaa

SEQ ID NO: 1852450 - DNA, 15 bp, Homo sapiens
tatagaggaaaaaaa

SEQ ID NO: 1852451 - DNA, 15 bp, Homo sapiens
atagaggaaaaaaat

SEQ ID NO: 1852452 - DNA, 15 bp, Homo sapiens
tagaggaaaaaaata

SEQ ID NO: 1852453 - DNA, 15 bp, Homo sapiens
agaggaaaaaaataa

SEQ ID NO: 1852454 - DNA, 15 bp, Homo sapiens
gaggaaaaaaataaa

SEQ ID NO: 1852455 - DNA, 15 bp, Homo sapiens
aggaaaaaaataaat

SEQ ID NO: 1852456 - DNA, 15 bp, Homo sapiens
ggaaaaaaataaatc

SEQ ID NO: 1852457 - DNA, 15 bp, Homo sapiens
gaaaaaaataaatcg

SEQ ID NO: 1852458 - DNA, 15 bp, Homo sapiens
aaaaaaataaatcgc

SEQ ID NO: 1852459 - DNA, 15 bp, Homo sapiens
aaaaaataaatcgct

SEQ ID NO: 1852460 - DNA, 15 bp, Homo sapiens
aaaaataaatcgctt

SEQ ID NO: 1852461 - DNA, 15 bp, Homo sapiens
aaaataaatcgcttg

SEQ ID NO: 1852462 - DNA, 15 bp, Homo sapiens
aaataaatcgcttgc

SEQ ID NO: 1852463 - DNA, 15 bp, Homo sapiens
aataaatcgcttgct

SEQ ID NO: 1852464 - DNA, 15 bp, Homo sapiens
ataaatcgcttgctt

SEQ ID NO: 1852465 - DNA, 15 bp, Homo sapiens
taaatcgcttgcttt

SEQ ID NO: 1852466 - DNA, 15 bp, Homo sapiens
aaatcgcttgctttt

SEQ ID NO: 1852467 - DNA, 15 bp, Homo sapiens
aatcgcttgcttttt

SEQ ID NO: 1852468 - DNA, 15 bp, Homo sapiens
atcgcttgctttttt

SEQ ID NO: 1852469 - DNA, 15 bp, Homo sapiens
tcgcttgcttttttt

SEQ ID NO: 1852470 - DNA, 15 bp, Homo sapiens
cgcttgctttttttt

SEQ ID NO: 1852471 - DNA, 15 bp, Homo sapiens
gcttgcttttttttt

SEQ ID NO: 1852472 - DNA, 15 bp, Homo sapiens
gctttttttttttta

SEQ ID NO: 1852473 - DNA, 15 bp, Homo sapiens
ttttttttaattgcc

SEQ ID NO: 1852474 - DNA, 15 bp, Homo sapiens
tttttttaattgcct

SEQ ID NO: 1852475 - DNA, 15 bp, Homo sapiens
ttttttaattgcctg

SEQ ID NO: 1852476 - DNA, 15 bp, Homo sapiens
tttttaattgcctgc

SEQ ID NO: 1852477 - DNA, 15 bp, Homo sapiens
ttttaattgcctgct

SEQ ID NO: 1852478 - DNA, 15 bp, Homo sapiens
tttaattgcctgctt

SEQ ID NO: 1852479 - DNA, 15 bp, Homo sapiens
ttaattgcctgcttc

SEQ ID NO: 1852480 - DNA, 15 bp, Homo sapiens
taattgcctgcttct

SEQ ID NO: 1852481 - DNA, 15 bp, Homo sapiens
aattgcctgcttctc

SEQ ID NO: 1852482 - DNA, 15 bp, Homo sapiens
attgcctgcttctcc

SEQ ID NO: 1852483 - DNA, 15 bp, Homo sapiens
ttgcctgcttctccc

SEQ ID NO: 1852484 - DNA, 15 bp, Homo sapiens
tgcctgcttctcccc

SEQ ID NO: 1852485 - DNA, 15 bp, Homo sapiens
gcctgcttctcccca

SEQ ID NO: 1852486 - DNA, 15 bp, Homo sapiens
cctgcttctccccac

SEQ ID NO: 1852487 - DNA, 15 bp, Homo sapiens
ctgcttctccccacc

SEQ ID NO: 1852488 - DNA, 15 bp, Homo sapiens
tgcttctccccaccc

SEQ ID NO: 1852489 - DNA, 15 bp, Homo sapiens
cttctccccaccccc

SEQ ID NO: 1852490 - DNA, 15 bp, Homo sapiens
ttctccccaccccca

SEQ ID NO: 1852491 - DNA, 15 bp, Homo sapiens
ctccccacccccaaa

SEQ ID NO: 1852492 - DNA, 15 bp, Homo sapiens
tccccacccccaaat

SEQ ID NO: 1852493 - DNA, 15 bp, Homo sapiens
cccacccccaaatta

SEQ ID NO: 1852494 - DNA, 15 bp, Homo sapiens
ccacccccaaattaa

SEQ ID NO: 1852495 - DNA, 15 bp, Homo sapiens
cacccccaaattaag

SEQ ID NO: 1852496 - DNA, 15 bp, Homo sapiens
acccccaaattaagt

SEQ ID NO: 1852497 - DNA, 15 bp, Homo sapiens
cccccaaattaagtt

SEQ ID NO: 1852498 - DNA, 15 bp, Homo sapiens
ccccaaattaagttg

SEQ ID NO: 1852499 - DNA, 15 bp, Homo sapiens
cccaaattaagttgc

SEQ ID NO: 1852500 - DNA, 15 bp, Homo sapiens
ccaaattaagttgct

SEQ ID NO: 1852501 - DNA, 15 bp, Homo sapiens
caaattaagttgctt

SEQ ID NO: 1852502 - DNA, 15 bp, Homo sapiens
aaattaagttgctta

SEQ ID NO: 1852503 - DNA, 15 bp, Homo sapiens
aattaagttgcttag

SEQ ID NO: 1852504 - DNA, 15 bp, Homo sapiens
attaagttgcttagc

SEQ ID NO: 1852505 - DNA, 15 bp, Homo sapiens
ttaagttgcttagca

SEQ ID NO: 1852506 - DNA, 15 bp, Homo sapiens
taagttgcttagcaa

SEQ ID NO: 1852507 - DNA, 15 bp, Homo sapiens
aagttgcttagcaag

SEQ ID NO: 1852508 - DNA, 15 bp, Homo sapiens
agttgcttagcaagg

SEQ ID NO: 1852509 - DNA, 15 bp, Homo sapiens
gttgcttagcaaggg

SEQ ID NO: 1852510 - DNA, 15 bp, Homo sapiens
ttgcttagcaagggg

SEQ ID NO: 1852511 - DNA, 15 bp, Homo sapiens
tgcttagcaaggggg

SEQ ID NO: 1852512 - DNA, 15 bp, Homo sapiens
gcttagcaaggggga

SEQ ID NO: 1852513 - DNA, 15 bp, Homo sapiens
cttagcaagggggaa

SEQ ID NO: 1852514 - DNA, 15 bp, Homo sapiens
ttagcaagggggaaa

SEQ ID NO: 1852515 - DNA, 15 bp, Homo sapiens
tagcaagggggaaag

SEQ ID NO: 1852516 - DNA, 15 bp, Homo sapiens
agcaagggggaaaga

SEQ ID NO: 1852517 - DNA, 15 bp, Homo sapiens
gcaagggggaaagag

SEQ ID NO: 1852518 - DNA, 15 bp, Homo sapiens
caagggggaaagagg

SEQ ID NO: 1852519 - DNA, 15 bp, Homo sapiens
aagggggaaagaggc

SEQ ID NO: 1852520 - DNA, 15 bp, Homo sapiens
agggggaaagaggct

SEQ ID NO: 1852521 - DNA, 15 bp, Homo sapiens
gggggaaagaggctt

SEQ ID NO: 1852522 - DNA, 15 bp, Homo sapiens
ggggaaagaggcttt

SEQ ID NO: 1852523 - DNA, 15 bp, Homo sapiens
gggaaagaggctttt

SEQ ID NO: 1852524 - DNA, 15 bp, Homo sapiens
ggaaagaggcttttt

SEQ ID NO: 1852525 - DNA, 15 bp, Homo sapiens
gaaagaggctttttc

SEQ ID NO: 1852526 - DNA, 15 bp, Homo sapiens
aaagaggctttttcc

SEQ ID NO: 1852527 - DNA, 15 bp, Homo sapiens
aagaggctttttcct

SEQ ID NO: 1852528 - DNA, 15 bp, Homo sapiens
agaggctttttcctt

SEQ ID NO: 1852529 - DNA, 15 bp, Homo sapiens
gaggctttttccttc

SEQ ID NO: 1852530 - DNA, 15 bp, Homo sapiens
aggctttttccttct

SEQ ID NO: 1852531 - DNA, 15 bp, Homo sapiens
ggctttttccttctt

SEQ ID NO: 1852532 - DNA, 15 bp, Homo sapiens
gctttttccttcttc

SEQ ID NO: 1852533 - DNA, 15 bp, Homo sapiens
ctttttccttcttcc

SEQ ID NO: 1852534 - DNA, 15 bp, Homo sapiens
tttttccttcttcca

SEQ ID NO: 1852535 - DNA, 15 bp, Homo sapiens
ttttccttcttccaa

SEQ ID NO: 1852536 - DNA, 15 bp, Homo sapiens
tttccttcttccaac

SEQ ID NO: 1852537 - DNA, 15 bp, Homo sapiens
ttccttcttccaaca

SEQ ID NO: 1852538 - DNA, 15 bp, Homo sapiens
tccttcttccaacag

SEQ ID NO: 1852539 - DNA, 15 bp, Homo sapiens
ccttcttccaacagc

SEQ ID NO: 1852540 - DNA, 15 bp, Homo sapiens
cttcttccaacagcc

SEQ ID NO: 1852541 - DNA, 15 bp, Homo sapiens
ttcttccaacagccc

SEQ ID NO: 1852542 - DNA, 15 bp, Homo sapiens
tcttccaacagccca

SEQ ID NO: 1852543 - DNA, 15 bp, Homo sapiens
cttccaacagcccag

SEQ ID NO: 1852544 - DNA, 15 bp, Homo sapiens
ttccaacagcccagc

SEQ ID NO: 1852545 - DNA, 15 bp, Homo sapiens
tccaacagcccagcc

SEQ ID NO: 1852546 - DNA, 15 bp, Homo sapiens
ccaacagcccagccg

SEQ ID NO: 1852547 - DNA, 15 bp, Homo sapiens
caacagcccagccga

SEQ ID NO: 1852548 - DNA, 15 bp, Homo sapiens
aacagcccagccgaa

SEQ ID NO: 1852549 - DNA, 15 bp, Homo sapiens
acagcccagccgaac

SEQ ID NO: 1852550 - DNA, 15 bp, Homo sapiens
cagcccagccgaacg

SEQ ID NO: 1852551 - DNA, 15 bp, Homo sapiens
agcccagccgaacgc

SEQ ID NO: 1852552 - DNA, 15 bp, Homo sapiens
gcccagccgaacgcc

SEQ ID NO: 1852553 - DNA, 15 bp, Homo sapiens
cccagccgaacgcct

SEQ ID NO: 1852554 - DNA, 15 bp, Homo sapiens
ccagccgaacgcctt

SEQ ID NO: 1852555 - DNA, 15 bp, Homo sapiens
cagccgaacgccttt

SEQ ID NO: 1852556 - DNA, 15 bp, Homo sapiens
agccgaacgcctttc

SEQ ID NO: 1852557 - DNA, 15 bp, Homo sapiens
gccgaacgcctttcg

SEQ ID NO: 1852558 - DNA, 15 bp, Homo sapiens
ccgaacgcctttcgt

SEQ ID NO: 1852559 - DNA, 15 bp, Homo sapiens
cgaacgcctttcgtt

SEQ ID NO: 1852560 - DNA, 15 bp, Homo sapiens
gaacgcctttcgttt

SEQ ID NO: 1852561 - DNA, 15 bp, Homo sapiens
aacgcctttcgtttt

SEQ ID NO: 1852562 - DNA, 15 bp, Homo sapiens
acgcctttcgttttt

SEQ ID NO: 1852563 - DNA, 15 bp, Homo sapiens
cgcctttcgtttttt

SEQ ID NO: 1852564 - DNA, 15 bp, Homo sapiens
gcctttcgttttttg

SEQ ID NO: 1852565 - DNA, 15 bp, Homo sapiens
cctttcgttttttgc

SEQ ID NO: 1852566 - DNA, 15 bp, Homo sapiens
ctttcgttttttgcc

SEQ ID NO: 1852567 - DNA, 15 bp, Homo sapiens
tttcgttttttgccc

SEQ ID NO: 1852568 - DNA, 15 bp, Homo sapiens
ttcgttttttgcccc

SEQ ID NO: 1852569 - DNA, 15 bp, Homo sapiens
tcgttttttgccccc

SEQ ID NO: 1852570 - DNA, 15 bp, Homo sapiens
cgttttttgcccccg

SEQ ID NO: 1852571 - DNA, 15 bp, Homo sapiens
gttttttgcccccgc

SEQ ID NO: 1852572 - DNA, 15 bp, Homo sapiens
ttttttgcccccgcg

SEQ ID NO: 1852573 - DNA, 15 bp, Homo sapiens
tttttgcccccgcgg

SEQ ID NO: 1852574 - DNA, 15 bp, Homo sapiens
ttttgcccccgcgga

SEQ ID NO: 1852575 - DNA, 15 bp, Homo sapiens
tttgcccccgcggac

SEQ ID NO: 1852576 - DNA, 15 bp, Homo sapiens
ttgcccccgcggacc

SEQ ID NO: 1852577 - DNA, 15 bp, Homo sapiens
tgcccccgcggacct

SEQ ID NO: 1852578 - DNA, 15 bp, Homo sapiens
gcccccgcggacctt

SEQ ID NO: 1852579 - DNA, 15 bp, Homo sapiens
cccccgcggaccttc

SEQ ID NO: 1852580 - DNA, 15 bp, Homo sapiens
ccccgcggaccttcc

SEQ ID NO: 1852581 - DNA, 15 bp, Homo sapiens
cccgcggaccttcca

SEQ ID NO: 1852582 - DNA, 15 bp, Homo sapiens
ccgcggaccttccat

SEQ ID NO: 1852583 - DNA, 15 bp, Homo sapiens
cgcggaccttccatg

SEQ ID NO: 1852584 - DNA, 15 bp, Homo sapiens
gcggaccttccatgt

SEQ ID NO: 1852585 - DNA, 15 bp, Homo sapiens
cggaccttccatgta

SEQ ID NO: 1852586 - DNA, 15 bp, Homo sapiens
ggaccttccatgtag

SEQ ID NO: 1852587 - DNA, 15 bp, Homo sapiens
gaccttccatgtagg

SEQ ID NO: 1852588 - DNA, 15 bp, Homo sapiens
accttccatgtagga

SEQ ID NO: 1852589 - DNA, 15 bp, Homo sapiens
ccttccatgtaggaa

SEQ ID NO: 1852590 - DNA, 15 bp, Homo sapiens
cttccatgtaggaag

SEQ ID NO: 1852591 - DNA, 15 bp, Homo sapiens
ttccatgtaggaagc

SEQ ID NO: 1852592 - DNA, 15 bp, Homo sapiens
tccatgtaggaagcc

SEQ ID NO: 1852593 - DNA, 15 bp, Homo sapiens
ccatgtaggaagccg

SEQ ID NO: 1852594 - DNA, 15 bp, Homo sapiens
catgtaggaagccga

SEQ ID NO: 1852595 - DNA, 15 bp, Homo sapiens
atgtaggaagccgag

SEQ ID NO: 1852596 - DNA, 15 bp, Homo sapiens
tgtaggaagccgagg

SEQ ID NO: 1852597 - DNA, 15 bp, Homo sapiens
gtaggaagccgaggc

SEQ ID NO: 1852598 - DNA, 15 bp, Homo sapiens
taggaagccgaggct

SEQ ID NO: 1852599 - DNA, 15 bp, Homo sapiens
aggaagccgaggctg

SEQ ID NO: 1852600 - DNA, 15 bp, Homo sapiens
ggaagccgaggctgg

SEQ ID NO: 1852601 - DNA, 15 bp, Homo sapiens
gaagccgaggctggc

SEQ ID NO: 1852602 - DNA, 15 bp, Homo sapiens
aagccgaggctggcg

SEQ ID NO: 1852603 - DNA, 15 bp, Homo sapiens
agccgaggctggcga

SEQ ID NO: 1852604 - DNA, 15 bp, Homo sapiens
ccgaggctggcgagc

SEQ ID NO: 1852605 - DNA, 15 bp, Homo sapiens
cgaggctggcgagcc

SEQ ID NO: 1852606 - DNA, 15 bp, Homo sapiens
gaggctggcgagccc

SEQ ID NO: 1852607 - DNA, 15 bp, Homo sapiens
aggctggcgagcccg

SEQ ID NO: 1852608 - DNA, 15 bp, Homo sapiens
ggctggcgagcccga

SEQ ID NO: 1852609 - DNA, 15 bp, Homo sapiens
gctggcgagcccgac

SEQ ID NO: 1852610 - DNA, 15 bp, Homo sapiens
ctggcgagcccgaca

SEQ ID NO: 1852611 - DNA, 15 bp, Homo sapiens
tggcgagcccgacat

SEQ ID NO: 1852612 - DNA, 15 bp, Homo sapiens
ggcgagcccgacatt

SEQ ID NO: 1852613 - DNA, 15 bp, Homo sapiens
gcgagcccgacattc

SEQ ID NO: 1852614 - DNA, 15 bp, Homo sapiens
cgagcccgacattcg

SEQ ID NO: 1852615 - DNA, 15 bp, Homo sapiens
gagcccgacattcgg

SEQ ID NO: 1852616 - DNA, 15 bp, Homo sapiens
agcccgacattcggg

SEQ ID NO: 1852617 - DNA, 15 bp, Homo sapiens
gcccgacattcggga

SEQ ID NO: 1852618 - DNA, 15 bp, Homo sapiens
cccgacattcgggag

SEQ ID NO: 1852619 - DNA, 15 bp, Homo sapiens
ccgacattcgggagc

SEQ ID NO: 1852620 - DNA, 15 bp, Homo sapiens
cgacattcgggagcc

SEQ ID NO: 1852621 - DNA, 15 bp, Homo sapiens
gacattcgggagcca

SEQ ID NO: 1852622 - DNA, 15 bp, Homo sapiens
acattcgggagccac

SEQ ID NO: 1852623 - DNA, 15 bp, Homo sapiens
cattcgggagccact

SEQ ID NO: 1852624 - DNA, 15 bp, Homo sapiens
attcgggagccactg

SEQ ID NO: 1852625 - DNA, 15 bp, Homo sapiens
ttcgggagccactgc

SEQ ID NO: 1852626 - DNA, 15 bp, Homo sapiens
tcgggagccactgcg

SEQ ID NO: 1852627 - DNA, 15 bp, Homo sapiens
cgggagccactgcgg

SEQ ID NO: 1852628 - DNA, 15 bp, Homo sapiens
gggagccactgcggg

SEQ ID NO: 1852629 - DNA, 15 bp, Homo sapiens
ggagccactgcgggg

SEQ ID NO: 1852630 - DNA, 15 bp, Homo sapiens
gagccactgcggggg

SEQ ID NO: 1852631 - DNA, 15 bp, Homo sapiens
agccactgcgggggg

SEQ ID NO: 1852632 - DNA, 15 bp, Homo sapiens
gccactgcggggggg

SEQ ID NO: 1852633 - DNA, 15 bp, Homo sapiens
ccactgcgggggggc

SEQ ID NO: 1852634 - DNA, 15 bp, Homo sapiens
cactgcgggggggcc

SEQ ID NO: 1852635 - DNA, 15 bp, Homo sapiens
actgcgggggggcct

SEQ ID NO: 1852636 - DNA, 15 bp, Homo sapiens
ctgcgggggggcctc

SEQ ID NO: 1852637 - DNA, 15 bp, Homo sapiens
tgcgggggggcctct

SEQ ID NO: 1852638 - DNA, 15 bp, Homo sapiens
gcgggggggcctctt

SEQ ID NO: 1852639 - DNA, 15 bp, Homo sapiens
cgggggggcctcttt

SEQ ID NO: 1852640 - DNA, 15 bp, Homo sapiens
gggggggcctctttt

SEQ ID NO: 1852641 - DNA, 15 bp, Homo sapiens
ggggggcctcttttt

SEQ ID NO: 1852642 - DNA, 15 bp, Homo sapiens
gggggcctctttttg

SEQ ID NO: 1852643 - DNA, 15 bp, Homo sapiens
ggggcctctttttgg

SEQ ID NO: 1852644 - DNA, 15 bp, Homo sapiens
gggcctctttttggg

SEQ ID NO: 1852645 - DNA, 15 bp, Homo sapiens
ggcctctttttgggg

SEQ ID NO: 1852646 - DNA, 15 bp, Homo sapiens
gcctctttttgggga

SEQ ID NO: 1852647 - DNA, 15 bp, Homo sapiens
cctctttttggggag

SEQ ID NO: 1852648 - DNA, 15 bp, Homo sapiens
ctctttttggggagg

SEQ ID NO: 1852649 - DNA, 15 bp, Homo sapiens
tctttttggggaggc

SEQ ID NO: 1852650 - DNA, 15 bp, Homo sapiens
ctttttggggaggcg

SEQ ID NO: 1852651 - DNA, 15 bp, Homo sapiens
tttttggggaggcgc

SEQ ID NO: 1852652 - DNA, 15 bp, Homo sapiens
ttttggggaggcgcc

SEQ ID NO: 1852653 - DNA, 15 bp, Homo sapiens
tttggggaggcgccg

SEQ ID NO: 1852654 - DNA, 15 bp, Homo sapiens
ttggggaggcgccga

SEQ ID NO: 1852655 - DNA, 15 bp, Homo sapiens
tggggaggcgccgac

SEQ ID NO: 1852656 - DNA, 15 bp, Homo sapiens
ggggaggcgccgacg

SEQ ID NO: 1852657 - DNA, 15 bp, Homo sapiens
gggaggcgccgacgg

SEQ ID NO: 1852658 - DNA, 15 bp, Homo sapiens
ggaggcgccgacggg

SEQ ID NO: 1852659 - DNA, 15 bp, Homo sapiens
gaggcgccgacgggg

SEQ ID NO: 1852660 - DNA, 15 bp, Homo sapiens
aggcgccgacggggg

SEQ ID NO: 1852661 - DNA, 15 bp, Homo sapiens
ggcgccgacgggggc

SEQ ID NO: 1852662 - DNA, 15 bp, Homo sapiens
gcgccgacgggggca

SEQ ID NO: 1852663 - DNA, 15 bp, Homo sapiens
cgccgacgggggcag

SEQ ID NO: 1852664 - DNA, 15 bp, Homo sapiens
gccgacgggggcagg

SEQ ID NO: 1852665 - DNA, 15 bp, Homo sapiens
ccgacgggggcaggc

SEQ ID NO: 1852666 - DNA, 15 bp, Homo sapiens
cgacgggggcaggct

SEQ ID NO: 1852667 - DNA, 15 bp, Homo sapiens
gacgggggcaggctc

SEQ ID NO: 1852668 - DNA, 15 bp, Homo sapiens
acgggggcaggctcg

SEQ ID NO: 1852669 - DNA, 15 bp, Homo sapiens
cgggggcaggctcgg

SEQ ID NO: 1852670 - DNA, 15 bp, Homo sapiens
gggggcaggctcggc

SEQ ID NO: 1852671 - DNA, 15 bp, Homo sapiens
ggggcaggctcggcc

SEQ ID NO: 1852672 - DNA, 15 bp, Homo sapiens
gggcaggctcggccg

SEQ ID NO: 1852673 - DNA, 15 bp, Homo sapiens
ggcaggctcggccgt

SEQ ID NO: 1852674 - DNA, 15 bp, Homo sapiens
gcaggctcggccgtc

SEQ ID NO: 1852675 - DNA, 15 bp, Homo sapiens
caggctcggccgtcc

SEQ ID NO: 1852676 - DNA, 15 bp, Homo sapiens
aggctcggccgtccc

SEQ ID NO: 1852677 - DNA, 15 bp, Homo sapiens
ggctcggccgtcccc

SEQ ID NO: 1852678 - DNA, 15 bp, Homo sapiens
gctcggccgtcccca

SEQ ID NO: 1852679 - DNA, 15 bp, Homo sapiens
ctcggccgtccccag

SEQ ID NO: 1852680 - DNA, 15 bp, Homo sapiens
tcggccgtccccagg

SEQ ID NO: 1852681 - DNA, 15 bp, Homo sapiens
cggccgtccccaggg

SEQ ID NO: 1852682 - DNA, 15 bp, Homo sapiens
ggccgtccccaggga

SEQ ID NO: 1852683 - DNA, 15 bp, Homo sapiens
gccgtccccagggaa

SEQ ID NO: 1852684 - DNA, 15 bp, Homo sapiens
ccgtccccagggaag

SEQ ID NO: 1852685 - DNA, 15 bp, Homo sapiens
cgtccccagggaagc

SEQ ID NO: 1852686 - DNA, 15 bp, Homo sapiens
gtccccagggaagcg

SEQ ID NO: 1852687 - DNA, 15 bp, Homo sapiens
tccccagggaagcgg

SEQ ID NO: 1852688 - DNA, 15 bp, Homo sapiens
ccccagggaagcggc

SEQ ID NO: 1852689 - DNA, 15 bp, Homo sapiens
cccagggaagcggcg

SEQ ID NO: 1852690 - DNA, 15 bp, Homo sapiens
ccagggaagcggcgg

SEQ ID NO: 1852691 - DNA, 15 bp, Homo sapiens
cagggaagcggcggc

SEQ ID NO: 1852692 - DNA, 15 bp, Homo sapiens
agggaagcggcggcc

SEQ ID NO: 1852693 - DNA, 15 bp, Homo sapiens
gggaagcggcggccg

SEQ ID NO: 1852694 - DNA, 15 bp, Homo sapiens
ggaagcggcggccgg

SEQ ID NO: 1852695 - DNA, 15 bp, Homo sapiens
gaagcggcggccggg

SEQ ID NO: 1852696 - DNA, 15 bp, Homo sapiens
aagcggcggccgggt

SEQ ID NO: 1852697 - DNA, 15 bp, Homo sapiens
agcggcggccgggtt

SEQ ID NO: 1852698 - DNA, 15 bp, Homo sapiens
gcggcggccgggttc

SEQ ID NO: 1852699 - DNA, 15 bp, Homo sapiens
cggcggccgggttcc

SEQ ID NO: 1852700 - DNA, 15 bp, Homo sapiens
ggcggccgggttcct

SEQ ID NO: 1852701 - DNA, 15 bp, Homo sapiens
gcggccgggttcctc

SEQ ID NO: 1852702 - DNA, 15 bp, Homo sapiens
cggccgggttcctcc

SEQ ID NO: 1852703 - DNA, 15 bp, Homo sapiens
ggccgggttcctccg

SEQ ID NO: 1852704 - DNA, 15 bp, Homo sapiens
gccgggttcctccgg

SEQ ID NO: 1852705 - DNA, 15 bp, Homo sapiens
ccgggttcctccggg

SEQ ID NO: 1852706 - DNA, 15 bp, Homo sapiens
cgggttcctccgggg

SEQ ID NO: 1852707 - DNA, 15 bp, Homo sapiens
gggttcctccggggc

SEQ ID NO: 1852708 - DNA, 15 bp, Homo sapiens
ggttcctccggggcg

SEQ ID NO: 1852709 - DNA, 15 bp, Homo sapiens
gttcctccggggcgc

SEQ ID NO: 1852710 - DNA, 15 bp, Homo sapiens
ttcctccggggcgcg

SEQ ID NO: 1852711 - DNA, 15 bp, Homo sapiens
tcctccggggcgcgc

SEQ ID NO: 1852712 - DNA, 15 bp, Homo sapiens
cctccggggcgcgcc

SEQ ID NO: 1852713 - DNA, 15 bp, Homo sapiens
ctccggggcgcgccg

SEQ ID NO: 1852714 - DNA, 15 bp, Homo sapiens
tccggggcgcgccgg

SEQ ID NO: 1852715 - DNA, 15 bp, Homo sapiens
ccggggcgcgccggg

SEQ ID NO: 1852716 - DNA, 15 bp, Homo sapiens
cggggcgcgccgggg

SEQ ID NO: 1852717 - DNA, 15 bp, Homo sapiens
ggggcgcgccggggc

SEQ ID NO: 1852718 - DNA, 15 bp, Homo sapiens
gggcgcgccggggcc

SEQ ID NO: 1852719 - DNA, 15 bp, Homo sapiens
ggcgcgccggggccg

SEQ ID NO: 1852720 - DNA, 15 bp, Homo sapiens
gcgcgccggggccgg

SEQ ID NO: 1852721 - DNA, 15 bp, Homo sapiens
cgcgccggggccgga

SEQ ID NO: 1852722 - DNA, 15 bp, Homo sapiens
gcgccggggccggag

SEQ ID NO: 1852723 - DNA, 15 bp, Homo sapiens
cgccggggccggaga

SEQ ID NO: 1852724 - DNA, 15 bp, Homo sapiens
gccggggccggagag

SEQ ID NO: 1852725 - DNA, 15 bp, Homo sapiens
ccggggccggagagc

SEQ ID NO: 1852726 - DNA, 15 bp, Homo sapiens
cggggccggagagcc

SEQ ID NO: 1852727 - DNA, 15 bp, Homo sapiens
ggggccggagagccg

SEQ ID NO: 1852728 - DNA, 15 bp, Homo sapiens
gggccggagagccgc

SEQ ID NO: 1852729 - DNA, 15 bp, Homo sapiens
ggccggagagccgcg

SEQ ID NO: 1852730 - DNA, 15 bp, Homo sapiens
gccggagagccgcgc

SEQ ID NO: 1852731 - DNA, 15 bp, Homo sapiens
ccggagagccgcgca

SEQ ID NO: 1852732 - DNA, 15 bp, Homo sapiens
cggagagccgcgcag

SEQ ID NO: 1852733 - DNA, 15 bp, Homo sapiens
ggagagccgcgcagg

SEQ ID NO: 1852734 - DNA, 15 bp, Homo sapiens
gagagccgcgcaggg

SEQ ID NO: 1852735 - DNA, 15 bp, Homo sapiens
agagccgcgcagggc

SEQ ID NO: 1852736 - DNA, 15 bp, Homo sapiens
gagccgcgcagggcg

SEQ ID NO: 1852737 - DNA, 15 bp, Homo sapiens
agccgcgcagggcgc

SEQ ID NO: 1852738 - DNA, 15 bp, Homo sapiens
gccgcgcagggcgcg

SEQ ID NO: 1852739 - DNA, 15 bp, Homo sapiens
ccgcgcagggcgcgg

SEQ ID NO: 1852740 - DNA, 15 bp, Homo sapiens
cgcgcagggcgcggg

SEQ ID NO: 1852741 - DNA, 15 bp, Homo sapiens
gcgcagggcgcgggc

SEQ ID NO: 1852742 - DNA, 15 bp, Homo sapiens
cgcagggcgcgggcc

SEQ ID NO: 1852743 - DNA, 15 bp, Homo sapiens
gcagggcgcgggccg

SEQ ID NO: 1852744 - DNA, 15 bp, Homo sapiens
cagggcgcgggccgc

SEQ ID NO: 1852745 - DNA, 15 bp, Homo sapiens
agggcgcgggccgcg

SEQ ID NO: 1852746 - DNA, 15 bp, Homo sapiens
gggcgcgggccgcgc

SEQ ID NO: 1852747 - DNA, 15 bp, Homo sapiens
ggcgcgggccgcgcg

SEQ ID NO: 1852748 - DNA, 15 bp, Homo sapiens
gcgcgggccgcgcgg

SEQ ID NO: 1852749 - DNA, 15 bp, Homo sapiens
cgcgggccgcgcggg

SEQ ID NO: 1852750 - DNA, 15 bp, Homo sapiens
gcgggccgcgcgggg

SEQ ID NO: 1852751 - DNA, 15 bp, Homo sapiens
cgggccgcgcggggt

SEQ ID NO: 1852752 - DNA, 15 bp, Homo sapiens
gggccgcgcggggtg

SEQ ID NO: 1852753 - DNA, 15 bp, Homo sapiens
ggccgcgcggggtgg

SEQ ID NO: 1852754 - DNA, 15 bp, Homo sapiens
gccgcgcggggtggg

SEQ ID NO: 1852755 - DNA, 15 bp, Homo sapiens
ccgcgcggggtgggg

SEQ ID NO: 1852756 - DNA, 15 bp, Homo sapiens
cgcgcggggtggggc

SEQ ID NO: 1852757 - DNA, 15 bp, Homo sapiens
gcgcggggtggggca

SEQ ID NO: 1852758 - DNA, 15 bp, Homo sapiens
cgcggggtggggcag

SEQ ID NO: 1852759 - DNA, 15 bp, Homo sapiens
gcggggtggggcagc

SEQ ID NO: 1852760 - DNA, 15 bp, Homo sapiens
cggggtggggcagcc

SEQ ID NO: 1852761 - DNA, 15 bp, Homo sapiens
ggggtggggcagccg

SEQ ID NO: 1852762 - DNA, 15 bp, Homo sapiens
gggtggggcagccgg

SEQ ID NO: 1852763 - DNA, 15 bp, Homo sapiens
ggtggggcagccgga

SEQ ID NO: 1852764 - DNA, 15 bp, Homo sapiens
gtggggcagccggag

SEQ ID NO: 1852765 - DNA, 15 bp, Homo sapiens
tggggcagccggagc

SEQ ID NO: 1852766 - DNA, 15 bp, Homo sapiens
ggggcagccggagcg

SEQ ID NO: 1852767 - DNA, 15 bp, Homo sapiens
gggcagccggagcgc

SEQ ID NO: 1852768 - DNA, 15 bp, Homo sapiens
ggcagccggagcgca

SEQ ID NO: 1852769 - DNA, 15 bp, Homo sapiens
gcagccggagcgcag

SEQ ID NO: 1852770 - DNA, 15 bp, Homo sapiens
cagccggagcgcagg

SEQ ID NO: 1852771 - DNA, 15 bp, Homo sapiens
agccggagcgcaggc

SEQ ID NO: 1852772 - DNA, 15 bp, Homo sapiens
gccggagcgcaggcc

SEQ ID NO: 1852773 - DNA, 15 bp, Homo sapiens
ccggagcgcaggccc

SEQ ID NO: 1852774 - DNA, 15 bp, Homo sapiens
cggagcgcaggcccc

SEQ ID NO: 1852775 - DNA, 15 bp, Homo sapiens
ggagcgcaggccccc

SEQ ID NO: 1852776 - DNA, 15 bp, Homo sapiens
gagcgcaggcccccg

SEQ ID NO: 1852777 - DNA, 15 bp, Homo sapiens
agcgcaggcccccga

SEQ ID NO: 1852778 - DNA, 15 bp, Homo sapiens
gcgcaggcccccgat

SEQ ID NO: 1852779 - DNA, 15 bp, Homo sapiens
cgcaggcccccgatc

SEQ ID NO: 1852780 - DNA, 15 bp, Homo sapiens
gcaggcccccgatcc

SEQ ID NO: 1852781 - DNA, 15 bp, Homo sapiens
caggcccccgatccc

SEQ ID NO: 1852782 - DNA, 15 bp, Homo sapiens
aggcccccgatcccc

SEQ ID NO: 1852783 - DNA, 15 bp, Homo sapiens
ggcccccgatccccg

SEQ ID NO: 1852784 - DNA, 15 bp, Homo sapiens
gcccccgatccccgg

SEQ ID NO: 1852785 - DNA, 15 bp, Homo sapiens
cccccgatccccggc

SEQ ID NO: 1852786 - DNA, 15 bp, Homo sapiens
ccccgatccccggcg

SEQ ID NO: 1852787 - DNA, 15 bp, Homo sapiens
cccgatccccggcgg

SEQ ID NO: 1852788 - DNA, 15 bp, Homo sapiens
ccgatccccggcggg

SEQ ID NO: 1852789 - DNA, 15 bp, Homo sapiens
cgatccccggcgggc

SEQ ID NO: 1852790 - DNA, 15 bp, Homo sapiens
gatccccggcgggcg

SEQ ID NO: 1852791 - DNA, 15 bp, Homo sapiens
atccccggcgggcgc

SEQ ID NO: 1852792 - DNA, 15 bp, Homo sapiens
tccccggcgggcgcc

SEQ ID NO: 1852793 - DNA, 15 bp, Homo sapiens
ccccggcgggcgccc

SEQ ID NO: 1852794 - DNA, 15 bp, Homo sapiens
cccggcgggcgcccc

SEQ ID NO: 1852795 - DNA, 15 bp, Homo sapiens
ccggcgggcgccccc

SEQ ID NO: 1852796 - DNA, 15 bp, Homo sapiens
cggcgggcgcccccg

SEQ ID NO: 1852797 - DNA, 15 bp, Homo sapiens
ggcgggcgcccccgg

SEQ ID NO: 1852798 - DNA, 15 bp, Homo sapiens
gcgggcgcccccggg

SEQ ID NO: 1852799 - DNA, 15 bp, Homo sapiens
cgggcgcccccgggc

SEQ ID NO: 1852800 - DNA, 15 bp, Homo sapiens
gggcgcccccgggcc

SEQ ID NO: 1852801 - DNA, 15 bp, Homo sapiens
ggcgcccccgggccc

SEQ ID NO: 1852802 - DNA, 15 bp, Homo sapiens
gcgcccccgggcccc

SEQ ID NO: 1852803 - DNA, 15 bp, Homo sapiens
cgcccccgggccccc

SEQ ID NO: 1852804 - DNA, 15 bp, Homo sapiens
gcccccgggcccccg

SEQ ID NO: 1852805 - DNA, 15 bp, Homo sapiens
cccccgggcccccgc

SEQ ID NO: 1852806 - DNA, 15 bp, Homo sapiens
ccccgggcccccgcg

SEQ ID NO: 1852807 - DNA, 15 bp, Homo sapiens
cccgggcccccgcgc

SEQ ID NO: 1852808 - DNA, 15 bp, Homo sapiens
ccgggcccccgcgcg

SEQ ID NO: 1852809 - DNA, 15 bp, Homo sapiens
cgggcccccgcgcgc

SEQ ID NO: 1852810 - DNA, 15 bp, Homo sapiens
gggcccccgcgcgcg

SEQ ID NO: 1852811 - DNA, 15 bp, Homo sapiens
ggcccccgcgcgcgc

SEQ ID NO: 1852812 - DNA, 15 bp, Homo sapiens
gcccccgcgcgcgcc

SEQ ID NO: 1852813 - DNA, 15 bp, Homo sapiens
cccccgcgcgcgccc

SEQ ID NO: 1852814 - DNA, 15 bp, Homo sapiens
ccccgcgcgcgcccc

SEQ ID NO: 1852815 - DNA, 15 bp, Homo sapiens
cccgcgcgcgccccg

SEQ ID NO: 1852816 - DNA, 15 bp, Homo sapiens
ccgcgcgcgccccgg

SEQ ID NO: 1852817 - DNA, 15 bp, Homo sapiens
cgcgcgcgccccggc

SEQ ID NO: 1852818 - DNA, 15 bp, Homo sapiens
gcgcgcgccccggcc

SEQ ID NO: 1852819 - DNA, 15 bp, Homo sapiens
cgcgcgccccggcct

SEQ ID NO: 1852820 - DNA, 15 bp, Homo sapiens
gcgcgccccggcctc

SEQ ID NO: 1852821 - DNA, 15 bp, Homo sapiens
cgcgccccggcctcc

SEQ ID NO: 1852822 - DNA, 15 bp, Homo sapiens
gcgccccggcctccg

SEQ ID NO: 1852823 - DNA, 15 bp, Homo sapiens
cgccccggcctccgg

SEQ ID NO: 1852824 - DNA, 15 bp, Homo sapiens
gccccggcctccggg

SEQ ID NO: 1852825 - DNA, 15 bp, Homo sapiens
ccccggcctccggga

SEQ ID NO: 1852826 - DNA, 15 bp, Homo sapiens
cccggcctccgggag

SEQ ID NO: 1852827 - DNA, 15 bp, Homo sapiens
ccggcctccgggaga

SEQ ID NO: 1852828 - DNA, 15 bp, Homo sapiens
cggcctccgggagac

SEQ ID NO: 1852829 - DNA, 15 bp, Homo sapiens
ggcctccgggagact

SEQ ID NO: 1852830 - DNA, 15 bp, Homo sapiens
gcctccgggagactg

SEQ ID NO: 1852831 - DNA, 15 bp, Homo sapiens
cctccgggagactgg

SEQ ID NO: 1852832 - DNA, 15 bp, Homo sapiens
ctccgggagactggc

SEQ ID NO: 1852833 - DNA, 15 bp, Homo sapiens
tccgggagactggcg

SEQ ID NO: 1852834 - DNA, 15 bp, Homo sapiens
ccgggagactggcgc

SEQ ID NO: 1852835 - DNA, 15 bp, Homo sapiens
cgggagactggcgca

SEQ ID NO: 1852836 - DNA, 15 bp, Homo sapiens
gggagactggcgcat

SEQ ID NO: 1852837 - DNA, 15 bp, Homo sapiens
ggagactggcgcatg

SEQ ID NO: 1852838 - DNA, 15 bp, Homo sapiens
gagactggcgcatgc

SEQ ID NO: 1852839 - DNA, 15 bp, Homo sapiens
agactggcgcatgcc

SEQ ID NO: 1852840 - DNA, 15 bp, Homo sapiens
gactggcgcatgcca

SEQ ID NO: 1852841 - DNA, 15 bp, Homo sapiens
actggcgcatgccac

SEQ ID NO: 1852842 - DNA, 15 bp, Homo sapiens
ctggcgcatgccacg

SEQ ID NO: 1852843 - DNA, 15 bp, Homo sapiens
tggcgcatgccacgg

SEQ ID NO: 1852844 - DNA, 15 bp, Homo sapiens
ggcgcatgccacgga

SEQ ID NO: 1852845 - DNA, 15 bp, Homo sapiens
gcgcatgccacggag

SEQ ID NO: 1852846 - DNA, 15 bp, Homo sapiens
cgcatgccacggagc

SEQ ID NO: 1852847 - DNA, 15 bp, Homo sapiens
gcatgccacggagcg

SEQ ID NO: 1852848 - DNA, 15 bp, Homo sapiens
catgccacggagcgc

SEQ ID NO: 1852849 - DNA, 15 bp, Homo sapiens
atgccacggagcgcc

SEQ ID NO: 1852850 - DNA, 15 bp, Homo sapiens
tgccacggagcgccc

SEQ ID NO: 1852851 - DNA, 15 bp, Homo sapiens
gccacggagcgcccc

SEQ ID NO: 1852852 - DNA, 15 bp, Homo sapiens
ccacggagcgcccct

SEQ ID NO: 1852853 - DNA, 15 bp, Homo sapiens
cacggagcgcccctc

SEQ ID NO: 1852854 - DNA, 15 bp, Homo sapiens
acggagcgcccctcg

SEQ ID NO: 1852855 - DNA, 15 bp, Homo sapiens
cggagcgcccctcgg

SEQ ID NO: 1852856 - DNA, 15 bp, Homo sapiens
ggagcgcccctcggg

SEQ ID NO: 1852857 - DNA, 15 bp, Homo sapiens
gagcgcccctcgggc

SEQ ID NO: 1852858 - DNA, 15 bp, Homo sapiens
agcgcccctcgggcc

SEQ ID NO: 1852859 - DNA, 15 bp, Homo sapiens
gcgcccctcgggccg

SEQ ID NO: 1852860 - DNA, 15 bp, Homo sapiens
cgcccctcgggccgc

SEQ ID NO: 1852861 - DNA, 15 bp, Homo sapiens
gcccctcgggccgcc

SEQ ID NO: 1852862 - DNA, 15 bp, Homo sapiens
cccctcgggccgccg

SEQ ID NO: 1852863 - DNA, 15 bp, Homo sapiens
ccctcgggccgccgc

SEQ ID NO: 1852864 - DNA, 15 bp, Homo sapiens
cctcgggccgccgcc

SEQ ID NO: 1852865 - DNA, 15 bp, Homo sapiens
ctcgggccgccgccg

SEQ ID NO: 1852866 - DNA, 15 bp, Homo sapiens
tcgggccgccgccgc

SEQ ID NO: 1852867 - DNA, 15 bp, Homo sapiens
cgggccgccgccgct

SEQ ID NO: 1852868 - DNA, 15 bp, Homo sapiens
gggccgccgccgctc

SEQ ID NO: 1852869 - DNA, 15 bp, Homo sapiens
ggccgccgccgctcc

SEQ ID NO: 1852870 - DNA, 15 bp, Homo sapiens
gccgccgccgctcct

SEQ ID NO: 1852871 - DNA, 15 bp, Homo sapiens
ccgccgccgctcctg

SEQ ID NO: 1852872 - DNA, 15 bp, Homo sapiens
cgccgccgctcctgc

SEQ ID NO: 1852873 - DNA, 15 bp, Homo sapiens
gccgccgctcctgcc

SEQ ID NO: 1852874 - DNA, 15 bp, Homo sapiens
ccgccgctcctgccc

SEQ ID NO: 1852875 - DNA, 15 bp, Homo sapiens
cgccgctcctgcccg

SEQ ID NO: 1852876 - DNA, 15 bp, Homo sapiens
gccgctcctgcccgg

SEQ ID NO: 1852877 - DNA, 15 bp, Homo sapiens
ccgctcctgcccggg

SEQ ID NO: 1852878 - DNA, 15 bp, Homo sapiens
cgctcctgcccgggc

SEQ ID NO: 1852879 - DNA, 15 bp, Homo sapiens
gctcctgcccgggcc

SEQ ID NO: 1852880 - DNA, 15 bp, Homo sapiens
ctcctgcccgggccc

SEQ ID NO: 1852881 - DNA, 15 bp, Homo sapiens
tcctgcccgggcccc

SEQ ID NO: 1852882 - DNA, 15 bp, Homo sapiens
cctgcccgggcccct

SEQ ID NO: 1852883 - DNA, 15 bp, Homo sapiens
ctgcccgggcccctg

SEQ ID NO: 1852884 - DNA, 15 bp, Homo sapiens
tgcccgggcccctgc

SEQ ID NO: 1852885 - DNA, 15 bp, Homo sapiens
gcccgggcccctgct

SEQ ID NO: 1852886 - DNA, 15 bp, Homo sapiens
cccgggcccctgctg

SEQ ID NO: 1852887 - DNA, 15 bp, Homo sapiens
ccgggcccctgctgc

SEQ ID NO: 1852888 - DNA, 15 bp, Homo sapiens
cgggcccctgctgct

SEQ ID NO: 1852889 - DNA, 15 bp, Homo sapiens
gggcccctgctgctg

SEQ ID NO: 1852890 - DNA, 15 bp, Homo sapiens
ggcccctgctgctgc

SEQ ID NO: 1852891 - DNA, 15 bp, Homo sapiens
gcccctgctgctgct

SEQ ID NO: 1852892 - DNA, 15 bp, Homo sapiens
cccctgctgctgctg

SEQ ID NO: 1852893 - DNA, 15 bp, Homo sapiens
ccctgctgctgctgc

SEQ ID NO: 1852894 - DNA, 15 bp, Homo sapiens
cctgctgctgctgct

SEQ ID NO: 1852895 - DNA, 15 bp, Homo sapiens
tgctgctgctgctgt

SEQ ID NO: 1852896 - DNA, 15 bp, Homo sapiens
gctgctgctgctgtc

SEQ ID NO: 1852897 - DNA, 15 bp, Homo sapiens
ctgctgctgctgtcg

SEQ ID NO: 1852898 - DNA, 15 bp, Homo sapiens
tgctgctgctgtcgc

SEQ ID NO: 1852899 - DNA, 15 bp, Homo sapiens
gctgctgctgtcgcc

SEQ ID NO: 1852900 - DNA, 15 bp, Homo sapiens
ctgctgctgtcgcct

SEQ ID NO: 1852901 - DNA, 15 bp, Homo sapiens
tgctgctgtcgcctg

SEQ ID NO: 1852902 - DNA, 15 bp, Homo sapiens
gctgctgtcgcctgc

SEQ ID NO: 1852903 - DNA, 15 bp, Homo sapiens
ctgctgtcgcctgcg

SEQ ID NO: 1852904 - DNA, 15 bp, Homo sapiens
tgctgtcgcctgcgc

SEQ ID NO: 1852905 - DNA, 15 bp, Homo sapiens
gctgtcgcctgcgcc

SEQ ID NO: 1852906 - DNA, 15 bp, Homo sapiens
ctgtcgcctgcgcct

SEQ ID NO: 1852907 - DNA, 15 bp, Homo sapiens
tgtcgcctgcgcctg

SEQ ID NO: 1852908 - DNA, 15 bp, Homo sapiens
gtcgcctgcgcctgc

SEQ ID NO: 1852909 - DNA, 15 bp, Homo sapiens
tcgcctgcgcctgct

SEQ ID NO: 1852910 - DNA, 15 bp, Homo sapiens
cgcctgcgcctgctg

SEQ ID NO: 1852911 - DNA, 15 bp, Homo sapiens
gcctgcgcctgctgc

SEQ ID NO: 1852912 - DNA, 15 bp, Homo sapiens
cctgcgcctgctgcc

SEQ ID NO: 1852913 - DNA, 15 bp, Homo sapiens
ctgcgcctgctgccc

SEQ ID NO: 1852914 - DNA, 15 bp, Homo sapiens
tgcgcctgctgcccc

SEQ ID NO: 1852915 - DNA, 15 bp, Homo sapiens
gcgcctgctgcccca

SEQ ID NO: 1852916 - DNA, 15 bp, Homo sapiens
cgcctgctgccccaa

SEQ ID NO: 1852917 - DNA, 15 bp, Homo sapiens
gcctgctgccccaac

SEQ ID NO: 1852918 - DNA, 15 bp, Homo sapiens
cctgctgccccaact

SEQ ID NO: 1852919 - DNA, 15 bp, Homo sapiens
ctgctgccccaactc

SEQ ID NO: 1852920 - DNA, 15 bp, Homo sapiens
tgctgccccaactcg

SEQ ID NO: 1852921 - DNA, 15 bp, Homo sapiens
gctgccccaactcgg

SEQ ID NO: 1852922 - DNA, 15 bp, Homo sapiens
ctgccccaactcggc

SEQ ID NO: 1852923 - DNA, 15 bp, Homo sapiens
tgccccaactcggcg

SEQ ID NO: 1852924 - DNA, 15 bp, Homo sapiens
gccccaactcggcgc

SEQ ID NO: 1852925 - DNA, 15 bp, Homo sapiens
ccccaactcggcgcc

SEQ ID NO: 1852926 - DNA, 15 bp, Homo sapiens
cccaactcggcgccc

SEQ ID NO: 1852927 - DNA, 15 bp, Homo sapiens
ccaactcggcgcccg

SEQ ID NO: 1852928 - DNA, 15 bp, Homo sapiens
caactcggcgcccga

SEQ ID NO: 1852929 - DNA, 15 bp, Homo sapiens
aactcggcgcccgac

SEQ ID NO: 1852930 - DNA, 15 bp, Homo sapiens
actcggcgcccgact

SEQ ID NO: 1852931 - DNA, 15 bp, Homo sapiens
ctcggcgcccgactt

SEQ ID NO: 1852932 - DNA, 15 bp, Homo sapiens
tcggcgcccgacttc

SEQ ID NO: 1852933 - DNA, 15 bp, Homo sapiens
cggcgcccgacttct

SEQ ID NO: 1852934 - DNA, 15 bp, Homo sapiens
ggcgcccgacttctt

SEQ ID NO: 1852935 - DNA, 15 bp, Homo sapiens
gcgcccgacttcttc

SEQ ID NO: 1852936 - DNA, 15 bp, Homo sapiens
cgcccgacttcttca

SEQ ID NO: 1852937 - DNA, 15 bp, Homo sapiens
gcccgacttcttcat

SEQ ID NO: 1852938 - DNA, 15 bp, Homo sapiens
cccgacttcttcatg

SEQ ID NO: 1852939 - DNA, 15 bp, Homo sapiens
ccgacttcttcatgg

SEQ ID NO: 1852940 - DNA, 15 bp, Homo sapiens
cgacttcttcatggt

SEQ ID NO: 1852941 - DNA, 15 bp, Homo sapiens
gacttcttcatggtg

SEQ ID NO: 1852942 - DNA, 15 bp, Homo sapiens
acttcttcatggtgt

SEQ ID NO: 1852943 - DNA, 15 bp, Homo sapiens
cttcttcatggtgtg

SEQ ID NO: 1852944 - DNA, 15 bp, Homo sapiens
ttcttcatggtgtgc

SEQ ID NO: 1852945 - DNA, 15 bp, Homo sapiens
tcttcatggtgtgcg

SEQ ID NO: 1852946 - DNA, 15 bp, Homo sapiens
cttcatggtgtgcgg

SEQ ID NO: 1852947 - DNA, 15 bp, Homo sapiens
ttcatggtgtgcgga

SEQ ID NO: 1852948 - DNA, 15 bp, Homo sapiens
tcatggtgtgcggag

SEQ ID NO: 1852949 - DNA, 15 bp, Homo sapiens
catggtgtgcggagg

SEQ ID NO: 1852950 - DNA, 15 bp, Homo sapiens
atggtgtgcggaggt

SEQ ID NO: 1852951 - DNA, 15 bp, Homo sapiens
tggtgtgcggaggtc

SEQ ID NO: 1852952 - DNA, 15 bp, Homo sapiens
ggtgtgcggaggtca

SEQ ID NO: 1852953 - DNA, 15 bp, Homo sapiens
gtgtgcggaggtcat

SEQ ID NO: 1852954 - DNA, 15 bp, Homo sapiens
tgtgcggaggtcatg

SEQ ID NO: 1852955 - DNA, 15 bp, Homo sapiens
gtgcggaggtcatgt

SEQ ID NO: 1852956 - DNA, 15 bp, Homo sapiens
tgcggaggtcatgtt

SEQ ID NO: 1852957 - DNA, 15 bp, Homo sapiens
gcggaggtcatgttc

SEQ ID NO: 1852958 - DNA, 15 bp, Homo sapiens
cggaggtcatgttcg

SEQ ID NO: 1852959 - DNA, 15 bp, Homo sapiens
ggaggtcatgttcgc

SEQ ID NO: 1852960 - DNA, 15 bp, Homo sapiens
gaggtcatgttcgct

SEQ ID NO: 1852961 - DNA, 15 bp, Homo sapiens
aggtcatgttcgctc

SEQ ID NO: 1852962 - DNA, 15 bp, Homo sapiens
ggtcatgttcgctcc

SEQ ID NO: 1852963 - DNA, 15 bp, Homo sapiens
gtcatgttcgctcct

SEQ ID NO: 1852964 - DNA, 15 bp, Homo sapiens
tcatgttcgctcctt

SEQ ID NO: 1852965 - DNA, 15 bp, Homo sapiens
catgttcgctcctta

SEQ ID NO: 1852966 - DNA, 15 bp, Homo sapiens
atgttcgctccttag

SEQ ID NO: 1852967 - DNA, 15 bp, Homo sapiens
tgttcgctccttagc

SEQ ID NO: 1852968 - DNA, 15 bp, Homo sapiens
gttcgctccttagca

SEQ ID NO: 1852969 - DNA, 15 bp, Homo sapiens
ttcgctccttagcag

SEQ ID NO: 1852970 - DNA, 15 bp, Homo sapiens
tcgctccttagcagg

SEQ ID NO: 1852971 - DNA, 15 bp, Homo sapiens
cgctccttagcaggc

SEQ ID NO: 1852972 - DNA, 15 bp, Homo sapiens
gctccttagcaggca

SEQ ID NO: 1852973 - DNA, 15 bp, Homo sapiens
ctccttagcaggcaa

SEQ ID NO: 1852974 - DNA, 15 bp, Homo sapiens
tccttagcaggcaaa

SEQ ID NO: 1852975 - DNA, 15 bp, Homo sapiens
ccttagcaggcaaac

SEQ ID NO: 1852976 - DNA, 15 bp, Homo sapiens
cttagcaggcaaacg

SEQ ID NO: 1852977 - DNA, 15 bp, Homo sapiens
ttagcaggcaaacga

SEQ ID NO: 1852978 - DNA, 15 bp, Homo sapiens
tagcaggcaaacgac

SEQ ID NO: 1852979 - DNA, 15 bp, Homo sapiens
agcaggcaaacgact

SEQ ID NO: 1852980 - DNA, 15 bp, Homo sapiens
gcaggcaaacgactt

SEQ ID NO: 1852981 - DNA, 15 bp, Homo sapiens
caggcaaacgacttt

SEQ ID NO: 1852982 - DNA, 15 bp, Homo sapiens
aggcaaacgactttt

SEQ ID NO: 1852983 - DNA, 15 bp, Homo sapiens
ggcaaacgacttttc

SEQ ID NO: 1852984 - DNA, 15 bp, Homo sapiens
gcaaacgacttttct

SEQ ID NO: 1852985 - DNA, 15 bp, Homo sapiens
caaacgacttttctc

SEQ ID NO: 1852986 - DNA, 15 bp, Homo sapiens
aaacgacttttctcc

SEQ ID NO: 1852987 - DNA, 15 bp, Homo sapiens
aacgacttttctcct

SEQ ID NO: 1852988 - DNA, 15 bp, Homo sapiens
acgacttttctcctc

SEQ ID NO: 1852989 - DNA, 15 bp, Homo sapiens
cgacttttctcctcg

SEQ ID NO: 1852990 - DNA, 15 bp, Homo sapiens
gacttttctcctcgc

SEQ ID NO: 1852991 - DNA, 15 bp, Homo sapiens
acttttctcctcgcc

SEQ ID NO: 1852992 - DNA, 15 bp, Homo sapiens
cttttctcctcgcct

SEQ ID NO: 1852993 - DNA, 15 bp, Homo sapiens
ttttctcctcgcctc

SEQ ID NO: 1852994 - DNA, 15 bp, Homo sapiens
tttctcctcgcctcc

SEQ ID NO: 1852995 - DNA, 15 bp, Homo sapiens
ttctcctcgcctcct

SEQ ID NO: 1852996 - DNA, 15 bp, Homo sapiens
tctcctcgcctcctc

SEQ ID NO: 1852997 - DNA, 15 bp, Homo sapiens
ctcctcgcctcctcg

SEQ ID NO: 1852998 - DNA, 15 bp, Homo sapiens
tcctcgcctcctcgc

SEQ ID NO: 1852999 - DNA, 15 bp, Homo sapiens
cctcgcctcctcgcc

SEQ ID NO: 1853000 - DNA, 15 bp, Homo sapiens
ctcgcctcctcgccc

SEQ ID NO: 1853001 - DNA, 15 bp, Homo sapiens
tcgcctcctcgcccc

SEQ ID NO: 1853002 - DNA, 15 bp, Homo sapiens
cgcctcctcgccccg

SEQ ID NO: 1853003 - DNA, 15 bp, Homo sapiens
gcctcctcgccccgc

SEQ ID NO: 1853004 - DNA, 15 bp, Homo sapiens
cctcctcgccccgca

SEQ ID NO: 1853005 - DNA, 15 bp, Homo sapiens
ctcctcgccccgcat

SEQ ID NO: 1853006 - DNA, 15 bp, Homo sapiens
tcctcgccccgcatg

SEQ ID NO: 1853007 - DNA, 15 bp, Homo sapiens
cctcgccccgcatgt

SEQ ID NO: 1853008 - DNA, 15 bp, Homo sapiens
ctcgccccgcatgtt

SEQ ID NO: 1853009 - DNA, 15 bp, Homo sapiens
tcgccccgcatgttc

SEQ ID NO: 1853010 - DNA, 15 bp, Homo sapiens
cgccccgcatgttca

SEQ ID NO: 1853011 - DNA, 15 bp, Homo sapiens
gccccgcatgttcag

SEQ ID NO: 1853012 - DNA, 15 bp, Homo sapiens
ccccgcatgttcagg

SEQ ID NO: 1853013 - DNA, 15 bp, Homo sapiens
cccgcatgttcagga

SEQ ID NO: 1853014 - DNA, 15 bp, Homo sapiens
ccgcatgttcaggac

SEQ ID NO: 1853015 - DNA, 15 bp, Homo sapiens
cgcatgttcaggacc

SEQ ID NO: 1853016 - DNA, 15 bp, Homo sapiens
gcatgttcaggacca

SEQ ID NO: 1853017 - DNA, 15 bp, Homo sapiens
catgttcaggaccaa

SEQ ID NO: 1853018 - DNA, 15 bp, Homo sapiens
atgttcaggaccaaa

SEQ ID NO: 1853019 - DNA, 15 bp, Homo sapiens
tgttcaggaccaaac

SEQ ID NO: 1853020 - DNA, 15 bp, Homo sapiens
gttcaggaccaaacg

SEQ ID NO: 1853021 - DNA, 15 bp, Homo sapiens
ttcaggaccaaacga

SEQ ID NO: 1853022 - DNA, 15 bp, Homo sapiens
tcaggaccaaacgat

SEQ ID NO: 1853023 - DNA, 15 bp, Homo sapiens
caggaccaaacgatc

SEQ ID NO: 1853024 - DNA, 15 bp, Homo sapiens
aggaccaaacgatct

SEQ ID NO: 1853025 - DNA, 15 bp, Homo sapiens
ggaccaaacgatctg

SEQ ID NO: 1853026 - DNA, 15 bp, Homo sapiens
gaccaaacgatctgc

SEQ ID NO: 1853027 - DNA, 15 bp, Homo sapiens
accaaacgatctgcg

SEQ ID NO: 1853028 - DNA, 15 bp, Homo sapiens
ccaaacgatctgcgc

SEQ ID NO: 1853029 - DNA, 15 bp, Homo sapiens
caaacgatctgcgct

SEQ ID NO: 1853030 - DNA, 15 bp, Homo sapiens
aaacgatctgcgctc

SEQ ID NO: 1853031 - DNA, 15 bp, Homo sapiens
aacgatctgcgctcg

SEQ ID NO: 1853032 - DNA, 15 bp, Homo sapiens
acgatctgcgctcgt

SEQ ID NO: 1853033 - DNA, 15 bp, Homo sapiens
cgatctgcgctcgtc

SEQ ID NO: 1853034 - DNA, 15 bp, Homo sapiens
gatctgcgctcgtcc

SEQ ID NO: 1853035 - DNA, 15 bp, Homo sapiens
atctgcgctcgtccg

SEQ ID NO: 1853036 - DNA, 15 bp, Homo sapiens
tctgcgctcgtccgg

SEQ ID NO: 1853037 - DNA, 15 bp, Homo sapiens
ctgcgctcgtccggc

SEQ ID NO: 1853038 - DNA, 15 bp, Homo sapiens
tgcgctcgtccggcg

SEQ ID NO: 1853039 - DNA, 15 bp, Homo sapiens
gcgctcgtccggcgt

SEQ ID NO: 1853040 - DNA, 15 bp, Homo sapiens
cgctcgtccggcgtc

SEQ ID NO: 1853041 - DNA, 15 bp, Homo sapiens
gctcgtccggcgtct

SEQ ID NO: 1853042 - DNA, 15 bp, Homo sapiens
ctcgtccggcgtctc

SEQ ID NO: 1853043 - DNA, 15 bp, Homo sapiens
tcgtccggcgtctct

SEQ ID NO: 1853044 - DNA, 15 bp, Homo sapiens
cgtccggcgtctctg

SEQ ID NO: 1853045 - DNA, 15 bp, Homo sapiens
gtccggcgtctctgg

SEQ ID NO: 1853046 - DNA, 15 bp, Homo sapiens
tccggcgtctctgga

SEQ ID NO: 1853047 - DNA, 15 bp, Homo sapiens
ccggcgtctctggag

SEQ ID NO: 1853048 - DNA, 15 bp, Homo sapiens
cggcgtctctggagg

SEQ ID NO: 1853049 - DNA, 15 bp, Homo sapiens
ggcgtctctggagga

SEQ ID NO: 1853050 - DNA, 15 bp, Homo sapiens
gcgtctctggaggag

SEQ ID NO: 1853051 - DNA, 15 bp, Homo sapiens
cgtctctggaggagc

SEQ ID NO: 1853052 - DNA, 15 bp, Homo sapiens
gtctctggaggagcc

SEQ ID NO: 1853053 - DNA, 15 bp, Homo sapiens
tctctggaggagccg

SEQ ID NO: 1853054 - DNA, 15 bp, Homo sapiens
ctctggaggagccgt

SEQ ID NO: 1853055 - DNA, 15 bp, Homo sapiens
tctggaggagccgtg

SEQ ID NO: 1853056 - DNA, 15 bp, Homo sapiens
ctggaggagccgtgc

SEQ ID NO: 1853057 - DNA, 15 bp, Homo sapiens
tggaggagccgtgcg

SEQ ID NO: 1853058 - DNA, 15 bp, Homo sapiens
ggaggagccgtgcgc

SEQ ID NO: 1853059 - DNA, 15 bp, Homo sapiens
gaggagccgtgcgcc

SEQ ID NO: 1853060 - DNA, 15 bp, Homo sapiens
aggagccgtgcgccc

SEQ ID NO: 1853061 - DNA, 15 bp, Homo sapiens
ggagccgtgcgcccg

SEQ ID NO: 1853062 - DNA, 15 bp, Homo sapiens
gagccgtgcgcccgg

SEQ ID NO: 1853063 - DNA, 15 bp, Homo sapiens
agccgtgcgcccggc

SEQ ID NO: 1853064 - DNA, 15 bp, Homo sapiens
gccgtgcgcccggcg

SEQ ID NO: 1853065 - DNA, 15 bp, Homo sapiens
ccgtgcgcccggcgg

SEQ ID NO: 1853066 - DNA, 15 bp, Homo sapiens
cgtgcgcccggcggc

SEQ ID NO: 1853067 - DNA, 15 bp, Homo sapiens
gtgcgcccggcggcg

SEQ ID NO: 1853068 - DNA, 15 bp, Homo sapiens
tgcgcccggcggcga

SEQ ID NO: 1853069 - DNA, 15 bp, Homo sapiens
gcgcccggcggcgag

SEQ ID NO: 1853070 - DNA, 15 bp, Homo sapiens
cgcccggcggcgagg

SEQ ID NO: 1853071 - DNA, 15 bp, Homo sapiens
gcccggcggcgagga

SEQ ID NO: 1853072 - DNA, 15 bp, Homo sapiens
cccggcggcgaggac

SEQ ID NO: 1853073 - DNA, 15 bp, Homo sapiens
ccggcggcgaggacg

SEQ ID NO: 1853074 - DNA, 15 bp, Homo sapiens
cggcggcgaggacga

SEQ ID NO: 1853075 - DNA, 15 bp, Homo sapiens
ggcggcgaggacgag

SEQ ID NO: 1853076 - DNA, 15 bp, Homo sapiens
gcggcgaggacgagg

SEQ ID NO: 1853077 - DNA, 15 bp, Homo sapiens
cggcgaggacgagga

SEQ ID NO: 1853078 - DNA, 15 bp, Homo sapiens
ggcgaggacgaggag

SEQ ID NO: 1853079 - DNA, 15 bp, Homo sapiens
gcgaggacgaggagg

SEQ ID NO: 1853080 - DNA, 15 bp, Homo sapiens
cgaggacgaggagga

SEQ ID NO: 1853081 - DNA, 15 bp, Homo sapiens
gaggacgaggaggag

SEQ ID NO: 1853082 - DNA, 15 bp, Homo sapiens
aggacgaggaggagg

SEQ ID NO: 1853083 - DNA, 15 bp, Homo sapiens
ggacgaggaggaggg

SEQ ID NO: 1853084 - DNA, 15 bp, Homo sapiens
gacgaggaggagggc

SEQ ID NO: 1853085 - DNA, 15 bp, Homo sapiens
acgaggaggagggcg

SEQ ID NO: 1853086 - DNA, 15 bp, Homo sapiens
cgaggaggagggcgc

SEQ ID NO: 1853087 - DNA, 15 bp, Homo sapiens
gaggaggagggcgca

SEQ ID NO: 1853088 - DNA, 15 bp, Homo sapiens
aggaggagggcgcag

SEQ ID NO: 1853089 - DNA, 15 bp, Homo sapiens
ggaggagggcgcagg

SEQ ID NO: 1853090 - DNA, 15 bp, Homo sapiens
gaggagggcgcaggg

SEQ ID NO: 1853091 - DNA, 15 bp, Homo sapiens
aggagggcgcagggg

SEQ ID NO: 1853092 - DNA, 15 bp, Homo sapiens
ggagggcgcaggggg

SEQ ID NO: 1853093 - DNA, 15 bp, Homo sapiens
gagggcgcaggggga

SEQ ID NO: 1853094 - DNA, 15 bp, Homo sapiens
agggcgcagggggag

SEQ ID NO: 1853095 - DNA, 15 bp, Homo sapiens
gggcgcagggggagg

SEQ ID NO: 1853096 - DNA, 15 bp, Homo sapiens
ggcgcagggggaggt

SEQ ID NO: 1853097 - DNA, 15 bp, Homo sapiens
gcgcagggggaggtg

SEQ ID NO: 1853098 - DNA, 15 bp, Homo sapiens
cgcagggggaggtgg

SEQ ID NO: 1853099 - DNA, 15 bp, Homo sapiens
gcagggggaggtgga

SEQ ID NO: 1853100 - DNA, 15 bp, Homo sapiens
cagggggaggtggag

SEQ ID NO: 1853101 - DNA, 15 bp, Homo sapiens
agggggaggtggagg

SEQ ID NO: 1853102 - DNA, 15 bp, Homo sapiens
gggggaggtggagga

SEQ ID NO: 1853103 - DNA, 15 bp, Homo sapiens
ggggaggtggaggag

SEQ ID NO: 1853104 - DNA, 15 bp, Homo sapiens
gggaggtggaggagg

SEQ ID NO: 1853105 - DNA, 15 bp, Homo sapiens
ggaggtggaggagga

SEQ ID NO: 1853106 - DNA, 15 bp, Homo sapiens
gaggtggaggaggag

SEQ ID NO: 1853107 - DNA, 15 bp, Homo sapiens
aggtggaggaggagg

SEQ ID NO: 1853108 - DNA, 15 bp, Homo sapiens
ggtggaggaggaggc

SEQ ID NO: 1853109 - DNA, 15 bp, Homo sapiens
gtggaggaggaggcg

SEQ ID NO: 1853110 - DNA, 15 bp, Homo sapiens
tggaggaggaggcga

SEQ ID NO: 1853111 - DNA, 15 bp, Homo sapiens
ggaggaggaggcgag

SEQ ID NO: 1853112 - DNA, 15 bp, Homo sapiens
gaggaggaggcgagc

SEQ ID NO: 1853113 - DNA, 15 bp, Homo sapiens
aggaggaggcgagct

SEQ ID NO: 1853114 - DNA, 15 bp, Homo sapiens
ggaggaggcgagctg

SEQ ID NO: 1853115 - DNA, 15 bp, Homo sapiens
gaggaggcgagctgc

SEQ ID NO: 1853116 - DNA, 15 bp, Homo sapiens
aggaggcgagctgcg

SEQ ID NO: 1853117 - DNA, 15 bp, Homo sapiens
ggaggcgagctgcgg

SEQ ID NO: 1853118 - DNA, 15 bp, Homo sapiens
gaggcgagctgcggg

SEQ ID NO: 1853119 - DNA, 15 bp, Homo sapiens
aggcgagctgcgggg

SEQ ID NO: 1853120 - DNA, 15 bp, Homo sapiens
ggcgagctgcgggga

SEQ ID NO: 1853121 - DNA, 15 bp, Homo sapiens
gcgagctgcggggag

SEQ ID NO: 1853122 - DNA, 15 bp, Homo sapiens
cgagctgcggggaga

SEQ ID NO: 1853123 - DNA, 15 bp, Homo sapiens
gagctgcggggagaa

SEQ ID NO: 1853124 - DNA, 15 bp, Homo sapiens
agctgcggggagaag

SEQ ID NO: 1853125 - DNA, 15 bp, Homo sapiens
gctgcggggagaagg

SEQ ID NO: 1853126 - DNA, 15 bp, Homo sapiens
ctgcggggagaaggg

SEQ ID NO: 1853127 - DNA, 15 bp, Homo sapiens
tgcggggagaagggg

SEQ ID NO: 1853128 - DNA, 15 bp, Homo sapiens
gcggggagaaggggc

SEQ ID NO: 1853129 - DNA, 15 bp, Homo sapiens
cggggagaaggggcg

SEQ ID NO: 1853130 - DNA, 15 bp, Homo sapiens
ggggagaaggggcga

SEQ ID NO: 1853131 - DNA, 15 bp, Homo sapiens
gggagaaggggcgac

SEQ ID NO: 1853132 - DNA, 15 bp, Homo sapiens
ggagaaggggcgacg

SEQ ID NO: 1853133 - DNA, 15 bp, Homo sapiens
gagaaggggcgacgg

SEQ ID NO: 1853134 - DNA, 15 bp, Homo sapiens
agaaggggcgacgga

SEQ ID NO: 1853135 - DNA, 15 bp, Homo sapiens
gaaggggcgacggac

SEQ ID NO: 1853136 - DNA, 15 bp, Homo sapiens
aaggggcgacggaca

SEQ ID NO: 1853137 - DNA, 15 bp, Homo sapiens
aggggcgacggacag

SEQ ID NO: 1853138 - DNA, 15 bp, Homo sapiens
ggggcgacggacagc

SEQ ID NO: 1853139 - DNA, 15 bp, Homo sapiens
gggcgacggacagcc

SEQ ID NO: 1853140 - DNA, 15 bp, Homo sapiens
ggcgacggacagccg

SEQ ID NO: 1853141 - DNA, 15 bp, Homo sapiens
gcgacggacagccga

SEQ ID NO: 1853142 - DNA, 15 bp, Homo sapiens
cgacggacagccgag

SEQ ID NO: 1853143 - DNA, 15 bp, Homo sapiens
gacggacagccgagc

SEQ ID NO: 1853144 - DNA, 15 bp, Homo sapiens
acggacagccgagcg

SEQ ID NO: 1853145 - DNA, 15 bp, Homo sapiens
cggacagccgagcgc

SEQ ID NO: 1853146 - DNA, 15 bp, Homo sapiens
ggacagccgagcgca

SEQ ID NO: 1853147 - DNA, 15 bp, Homo sapiens
gacagccgagcgcat

SEQ ID NO: 1853148 - DNA, 15 bp, Homo sapiens
acagccgagcgcatg

SEQ ID NO: 1853149 - DNA, 15 bp, Homo sapiens
cagccgagcgcatgg

SEQ ID NO: 1853150 - DNA, 15 bp, Homo sapiens
agccgagcgcatggg

SEQ ID NO: 1853151 - DNA, 15 bp, Homo sapiens
gccgagcgcatgggg

SEQ ID NO: 1853152 - DNA, 15 bp, Homo sapiens
ccgagcgcatggggc

SEQ ID NO: 1853153 - DNA, 15 bp, Homo sapiens
cgagcgcatggggcc

SEQ ID NO: 1853154 - DNA, 15 bp, Homo sapiens
gagcgcatggggccg

SEQ ID NO: 1853155 - DNA, 15 bp, Homo sapiens
agcgcatggggccgg

SEQ ID NO: 1853156 - DNA, 15 bp, Homo sapiens
gcgcatggggccggt

SEQ ID NO: 1853157 - DNA, 15 bp, Homo sapiens
cgcatggggccggtg

SEQ ID NO: 1853158 - DNA, 15 bp, Homo sapiens
gcatggggccggtgg

SEQ ID NO: 1853159 - DNA, 15 bp, Homo sapiens
catggggccggtggc

SEQ ID NO: 1853160 - DNA, 15 bp, Homo sapiens
atggggccggtggcg

SEQ ID NO: 1853161 - DNA, 15 bp, Homo sapiens
tggggccggtggcgg

SEQ ID NO: 1853162 - DNA, 15 bp, Homo sapiens
ggggccggtggcggc

SEQ ID NO: 1853163 - DNA, 15 bp, Homo sapiens
gggccggtggcggcg

SEQ ID NO: 1853164 - DNA, 15 bp, Homo sapiens
ggccggtggcggcgg

SEQ ID NO: 1853165 - DNA, 15 bp, Homo sapiens
gccggtggcggcggc

SEQ ID NO: 1853166 - DNA, 15 bp, Homo sapiens
ccggtggcggcggcc

SEQ ID NO: 1853167 - DNA, 15 bp, Homo sapiens
cggtggcggcggccc

SEQ ID NO: 1853168 - DNA, 15 bp, Homo sapiens
ggtggcggcggcccg

SEQ ID NO: 1853169 - DNA, 15 bp, Homo sapiens
gtggcggcggcccgg

SEQ ID NO: 1853170 - DNA, 15 bp, Homo sapiens
tggcggcggcccggg

SEQ ID NO: 1853171 - DNA, 15 bp, Homo sapiens
ggcggcggcccgggc

SEQ ID NO: 1853172 - DNA, 15 bp, Homo sapiens
gcggcggcccgggca

SEQ ID NO: 1853173 - DNA, 15 bp, Homo sapiens
cggcggcccgggcag

SEQ ID NO: 1853174 - DNA, 15 bp, Homo sapiens
ggcggcccgggcagg

SEQ ID NO: 1853175 - DNA, 15 bp, Homo sapiens
gcggcccgggcaggg

SEQ ID NO: 1853176 - DNA, 15 bp, Homo sapiens
cggcccgggcagggc

SEQ ID NO: 1853177 - DNA, 15 bp, Homo sapiens
ggcccgggcagggct

SEQ ID NO: 1853178 - DNA, 15 bp, Homo sapiens
gcccgggcagggctg

SEQ ID NO: 1853179 - DNA, 15 bp, Homo sapiens
cccgggcagggctgg

SEQ ID NO: 1853180 - DNA, 15 bp, Homo sapiens
ccgggcagggctgga

SEQ ID NO: 1853181 - DNA, 15 bp, Homo sapiens
cgggcagggctggat

SEQ ID NO: 1853182 - DNA, 15 bp, Homo sapiens
gggcagggctggatg

SEQ ID NO: 1853183 - DNA, 15 bp, Homo sapiens
ggcagggctggatgc

SEQ ID NO: 1853184 - DNA, 15 bp, Homo sapiens
gcagggctggatgct

SEQ ID NO: 1853185 - DNA, 15 bp, Homo sapiens
cagggctggatgctg

SEQ ID NO: 1853186 - DNA, 15 bp, Homo sapiens
agggctggatgctgc

SEQ ID NO: 1853187 - DNA, 15 bp, Homo sapiens
gggctggatgctgcc

SEQ ID NO: 1853188 - DNA, 15 bp, Homo sapiens
ggctggatgctgcct

SEQ ID NO: 1853189 - DNA, 15 bp, Homo sapiens
gctggatgctgcctg

SEQ ID NO: 1853190 - DNA, 15 bp, Homo sapiens
ctggatgctgcctgg

SEQ ID NO: 1853191 - DNA, 15 bp, Homo sapiens
tggatgctgcctggg

SEQ ID NO: 1853192 - DNA, 15 bp, Homo sapiens
ggatgctgcctgggc

SEQ ID NO: 1853193 - DNA, 15 bp, Homo sapiens
gatgctgcctgggca

SEQ ID NO: 1853194 - DNA, 15 bp, Homo sapiens
atgctgcctgggcaa

SEQ ID NO: 1853195 - DNA, 15 bp, Homo sapiens
tgctgcctgggcaag

SEQ ID NO: 1853196 - DNA, 15 bp, Homo sapiens
gctgcctgggcaagg

SEQ ID NO: 1853197 - DNA, 15 bp, Homo sapiens
ctgcctgggcaaggc

SEQ ID NO: 1853198 - DNA, 15 bp, Homo sapiens
tgcctgggcaaggcg

SEQ ID NO: 1853199 - DNA, 15 bp, Homo sapiens
gcctgggcaaggcgg

SEQ ID NO: 1853200 - DNA, 15 bp, Homo sapiens
cctgggcaaggcggt

SEQ ID NO: 1853201 - DNA, 15 bp, Homo sapiens
ctgggcaaggcggtg

SEQ ID NO: 1853202 - DNA, 15 bp, Homo sapiens
tgggcaaggcggtgc

SEQ ID NO: 1853203 - DNA, 15 bp, Homo sapiens
gggcaaggcggtgcg

SEQ ID NO: 1853204 - DNA, 15 bp, Homo sapiens
ggcaaggcggtgcga

SEQ ID NO: 1853205 - DNA, 15 bp, Homo sapiens
gcaaggcggtgcgag

SEQ ID NO: 1853206 - DNA, 15 bp, Homo sapiens
caaggcggtgcgagg

SEQ ID NO: 1853207 - DNA, 15 bp, Homo sapiens
aaggcggtgcgaggt

SEQ ID NO: 1853208 - DNA, 15 bp, Homo sapiens
aggcggtgcgaggtg

SEQ ID NO: 1853209 - DNA, 15 bp, Homo sapiens
ggcggtgcgaggtgc

SEQ ID NO: 1853210 - DNA, 15 bp, Homo sapiens
gcggtgcgaggtgcc

SEQ ID NO: 1853211 - DNA, 15 bp, Homo sapiens
cggtgcgaggtgcca

SEQ ID NO: 1853212 - DNA, 15 bp, Homo sapiens
ggtgcgaggtgccaa

SEQ ID NO: 1853213 - DNA, 15 bp, Homo sapiens
gtgcgaggtgccaaa

SEQ ID NO: 1853214 - DNA, 15 bp, Homo sapiens
tgcgaggtgccaaag

SEQ ID NO: 1853215 - DNA, 15 bp, Homo sapiens
gcgaggtgccaaagg

SEQ ID NO: 1853216 - DNA, 15 bp, Homo sapiens
cgaggtgccaaaggt

SEQ ID NO: 1853217 - DNA, 15 bp, Homo sapiens
gaggtgccaaaggtc

SEQ ID NO: 1853218 - DNA, 15 bp, Homo sapiens
aggtgccaaaggtca

SEQ ID NO: 1853219 - DNA, 15 bp, Homo sapiens
ggtgccaaaggtcac

SEQ ID NO: 1853220 - DNA, 15 bp, Homo sapiens
gtgccaaaggtcacc

SEQ ID NO: 1853221 - DNA, 15 bp, Homo sapiens
tgccaaaggtcacca

SEQ ID NO: 1853222 - DNA, 15 bp, Homo sapiens
gccaaaggtcaccac

SEQ ID NO: 1853223 - DNA, 15 bp, Homo sapiens
ccaaaggtcaccacc

SEQ ID NO: 1853224 - DNA, 15 bp, Homo sapiens
caaaggtcaccacca

SEQ ID NO: 1853225 - DNA, 15 bp, Homo sapiens
aaaggtcaccaccat

SEQ ID NO: 1853226 - DNA, 15 bp, Homo sapiens
aaggtcaccaccatc

SEQ ID NO: 1853227 - DNA, 15 bp, Homo sapiens
aggtcaccaccatcc

SEQ ID NO: 1853228 - DNA, 15 bp, Homo sapiens
ggtcaccaccatccc

SEQ ID NO: 1853229 - DNA, 15 bp, Homo sapiens
gtcaccaccatcccc

SEQ ID NO: 1853230 - DNA, 15 bp, Homo sapiens
tcaccaccatcccca

SEQ ID NO: 1853231 - DNA, 15 bp, Homo sapiens
ctgttgtggctgggt

SEQ ID NO: 1853232 - DNA, 15 bp, Homo sapiens
tgttgtggctgggtt

SEQ ID NO: 1853233 - DNA, 15 bp, Homo sapiens
gttgtggctgggttt

SEQ ID NO: 1853234 - DNA, 15 bp, Homo sapiens
ttgtggctgggtttt

SEQ ID NO: 1853235 - DNA, 15 bp, Homo sapiens
tgtggctgggttttt

SEQ ID NO: 1853236 - DNA, 15 bp, Homo sapiens
gtggctgggtttttt

SEQ ID NO: 1853237 - DNA, 15 bp, Homo sapiens
tggctgggttttttg

SEQ ID NO: 1853238 - DNA, 15 bp, Homo sapiens
ggctgggttttttgc

SEQ ID NO: 1853239 - DNA, 15 bp, Homo sapiens
gctgggttttttgct

SEQ ID NO: 1853240 - DNA, 15 bp, Homo sapiens
ctgggttttttgctg

SEQ ID NO: 1853241 - DNA, 15 bp, Homo sapiens
tgggttttttgctgt

SEQ ID NO: 1853242 - DNA, 15 bp, Homo sapiens
gggttttttgctgtt

SEQ ID NO: 1853243 - DNA, 15 bp, Homo sapiens
ggttttttgctgttt

SEQ ID NO: 1853244 - DNA, 15 bp, Homo sapiens
gttttttgctgtttt

SEQ ID NO: 1853245 - DNA, 15 bp, Homo sapiens
ttttttgctgttttt

SEQ ID NO: 1853246 - DNA, 15 bp, Homo sapiens
tttttgctgtttttg

SEQ ID NO: 1853247 - DNA, 15 bp, Homo sapiens
ttttgctgtttttgc

SEQ ID NO: 1853248 - DNA, 15 bp, Homo sapiens
tttgctgtttttgca

SEQ ID NO: 1853249 - DNA, 15 bp, Homo sapiens
ttgctgtttttgcaa

SEQ ID NO: 1853250 - DNA, 15 bp, Homo sapiens
tgctgtttttgcaaa

SEQ ID NO: 1853251 - DNA, 15 bp, Homo sapiens
gctgtttttgcaaag

SEQ ID NO: 1853252 - DNA, 15 bp, Homo sapiens
ctgtttttgcaaaga

SEQ ID NO: 1853253 - DNA, 15 bp, Homo sapiens
tgtttttgcaaagac

SEQ ID NO: 1853254 - DNA, 15 bp, Homo sapiens
gtttttgcaaagacg

SEQ ID NO: 1853255 - DNA, 15 bp, Homo sapiens
tttttgcaaagacgt

SEQ ID NO: 1853256 - DNA, 15 bp, Homo sapiens
ttttgcaaagacgtt

SEQ ID NO: 1853257 - DNA, 15 bp, Homo sapiens
tttgcaaagacgttc

SEQ ID NO: 1853258 - DNA, 15 bp, Homo sapiens
ttgcaaagacgttcc

SEQ ID NO: 1853259 - DNA, 15 bp, Homo sapiens
tgcaaagacgttccc

SEQ ID NO: 1853260 - DNA, 15 bp, Homo sapiens
gcaaagacgttccct

SEQ ID NO: 1853261 - DNA, 15 bp, Homo sapiens
caaagacgttccctt

SEQ ID NO: 1853262 - DNA, 15 bp, Homo sapiens
aaagacgttcccttg

SEQ ID NO: 1853263 - DNA, 15 bp, Homo sapiens
aagacgttcccttga

SEQ ID NO: 1853264 - DNA, 15 bp, Homo sapiens
agacgttcccttgat

SEQ ID NO: 1853265 - DNA, 15 bp, Homo sapiens
gacgttcccttgata

SEQ ID NO: 1853266 - DNA, 15 bp, Homo sapiens
acgttcccttgatat

SEQ ID NO: 1853267 - DNA, 15 bp, Homo sapiens
cgttcccttgatatg

SEQ ID NO: 1853268 - DNA, 15 bp, Homo sapiens
gttcccttgatatgc

SEQ ID NO: 1853269 - DNA, 15 bp, Homo sapiens
ttcccttgatatgct

SEQ ID NO: 1853270 - DNA, 15 bp, Homo sapiens
tcccttgatatgctt

SEQ ID NO: 1853271 - DNA, 15 bp, Homo sapiens
cccttgatatgcttt

SEQ ID NO: 1853272 - DNA, 15 bp, Homo sapiens
ccttgatatgcttta

SEQ ID NO: 1853273 - DNA, 15 bp, Homo sapiens
cttgatatgctttac

SEQ ID NO: 1853274 - DNA, 15 bp, Homo sapiens
ttgatatgctttaca

SEQ ID NO: 1853275 - DNA, 15 bp, Homo sapiens
tgatatgctttacat

SEQ ID NO: 1853276 - DNA, 15 bp, Homo sapiens
gatatgctttacatt

SEQ ID NO: 1853277 - DNA, 15 bp, Homo sapiens
atatgctttacattt

SEQ ID NO: 1853278 - DNA, 15 bp, Homo sapiens
tatgctttacatttt

SEQ ID NO: 1853279 - DNA, 15 bp, Homo sapiens
atgctttacattttg

SEQ ID NO: 1853280 - DNA, 15 bp, Homo sapiens
tgctttacattttgt

SEQ ID NO: 1853281 - DNA, 15 bp, Homo sapiens
gctttacattttgtt

SEQ ID NO: 1853282 - DNA, 15 bp, Homo sapiens
ctttacattttgttc

SEQ ID NO: 1853283 - DNA, 15 bp, Homo sapiens
tttacattttgttcc

SEQ ID NO: 1853284 - DNA, 15 bp, Homo sapiens
ttacattttgttcct

SEQ ID NO: 1853285 - DNA, 15 bp, Homo sapiens
tacattttgttcctt

SEQ ID NO: 1853286 - DNA, 15 bp, Homo sapiens
acattttgttccttt

SEQ ID NO: 1853287 - DNA, 15 bp, Homo sapiens
cattttgttcctttt

SEQ ID NO: 1853288 - DNA, 15 bp, Homo sapiens
attttgttccttttt

SEQ ID NO: 1853289 - DNA, 15 bp, Homo sapiens
ttttgttcctttttc

SEQ ID NO: 1853290 - DNA, 15 bp, Homo sapiens
tgttcctttttcatg

SEQ ID NO: 1853291 - DNA, 15 bp, Homo sapiens
gttcctttttcatgt

SEQ ID NO: 1853292 - DNA, 15 bp, Homo sapiens
ttcctttttcatgta

SEQ ID NO: 1853293 - DNA, 15 bp, Homo sapiens
tcctttttcatgtat

SEQ ID NO: 1853294 - DNA, 15 bp, Homo sapiens
cctttttcatgtatt

SEQ ID NO: 1853295 - DNA, 15 bp, Homo sapiens
ctttttcatgtattt

SEQ ID NO: 1853296 - DNA, 15 bp, Homo sapiens
tttttcatgtatttg

SEQ ID NO: 1853297 - DNA, 15 bp, Homo sapiens
ttttcatgtatttgt

SEQ ID NO: 1853298 - DNA, 15 bp, Homo sapiens
tttcatgtatttgtg

SEQ ID NO: 1853299 - DNA, 15 bp, Homo sapiens
ttcatgtatttgtgc

SEQ ID NO: 1853300 - DNA, 15 bp, Homo sapiens
tcatgtatttgtgct

SEQ ID NO: 1853301 - DNA, 15 bp, Homo sapiens
catgtatttgtgctg

SEQ ID NO: 1853302 - DNA, 15 bp, Homo sapiens
atgtatttgtgctgt

SEQ ID NO: 1853303 - DNA, 15 bp, Homo sapiens
tgtatttgtgctgtg

SEQ ID NO: 1853304 - DNA, 15 bp, Homo sapiens
gtatttgtgctgtgt

SEQ ID NO: 1853305 - DNA, 15 bp, Homo sapiens
tatttgtgctgtgta

SEQ ID NO: 1853306 - DNA, 15 bp, Homo sapiens
atttgtgctgtgtag

SEQ ID NO: 1853307 - DNA, 15 bp, Homo sapiens
tttgtgctgtgtagc

SEQ ID NO: 1853308 - DNA, 15 bp, Homo sapiens
ttgtgctgtgtagcc

SEQ ID NO: 1853309 - DNA, 15 bp, Homo sapiens
tgtgctgtgtagccg

SEQ ID NO: 1853310 - DNA, 15 bp, Homo sapiens
gtgctgtgtagccgg

SEQ ID NO: 1853311 - DNA, 15 bp, Homo sapiens
tgctgtgtagccggt

SEQ ID NO: 1853312 - DNA, 15 bp, Homo sapiens
gctgtgtagccggtg

SEQ ID NO: 1853313 - DNA, 15 bp, Homo sapiens
ctgtgtagccggtgg

SEQ ID NO: 1853314 - DNA, 15 bp, Homo sapiens
tgtgtagccggtggg

SEQ ID NO: 1853315 - DNA, 15 bp, Homo sapiens
gtgtagccggtgggc

SEQ ID NO: 1853316 - DNA, 15 bp, Homo sapiens
tgtagccggtgggct

SEQ ID NO: 1853317 - DNA, 15 bp, Homo sapiens
gtagccggtgggctc

SEQ ID NO: 1853318 - DNA, 15 bp, Homo sapiens
tagccggtgggctca

SEQ ID NO: 1853319 - DNA, 15 bp, Homo sapiens
agccggtgggctcag

SEQ ID NO: 1853320 - DNA, 15 bp, Homo sapiens
gccggtgggctcagc

SEQ ID NO: 1853321 - DNA, 15 bp, Homo sapiens
ccggtgggctcagct

SEQ ID NO: 1853322 - DNA, 15 bp, Homo sapiens
cggtgggctcagctt

SEQ ID NO: 1853323 - DNA, 15 bp, Homo sapiens
ggtgggctcagcttt

SEQ ID NO: 1853324 - DNA, 15 bp, Homo sapiens
gtgggctcagcttta

SEQ ID NO: 1853325 - DNA, 15 bp, Homo sapiens
tgggctcagctttaa

SEQ ID NO: 1853326 - DNA, 15 bp, Homo sapiens
gggctcagctttaac

SEQ ID NO: 1853327 - DNA, 15 bp, Homo sapiens
ggctcagctttaaca

SEQ ID NO: 1853328 - DNA, 15 bp, Homo sapiens
gctcagctttaacac

SEQ ID NO: 1853329 - DNA, 15 bp, Homo sapiens
ctcagctttaacacg

SEQ ID NO: 1853330 - DNA, 15 bp, Homo sapiens
tcagctttaacacgt

SEQ ID NO: 1853331 - DNA, 15 bp, Homo sapiens
cagctttaacacgtg

SEQ ID NO: 1853332 - DNA, 15 bp, Homo sapiens
agctttaacacgtgg

SEQ ID NO: 1853333 - DNA, 15 bp, Homo sapiens
gctttaacacgtgga

SEQ ID NO: 1853334 - DNA, 15 bp, Homo sapiens
ctttaacacgtggaa

SEQ ID NO: 1853335 - DNA, 15 bp, Homo sapiens
tttaacacgtggaag

SEQ ID NO: 1853336 - DNA, 15 bp, Homo sapiens
ttaacacgtggaagc

SEQ ID NO: 1853337 - DNA, 15 bp, Homo sapiens
taacacgtggaagct

SEQ ID NO: 1853338 - DNA, 15 bp, Homo sapiens
aacacgtggaagctt

SEQ ID NO: 1853339 - DNA, 15 bp, Homo sapiens
acacgtggaagcttt

SEQ ID NO: 1853340 - DNA, 15 bp, Homo sapiens
cacgtggaagcttta

SEQ ID NO: 1853341 - DNA, 15 bp, Homo sapiens
acgtggaagctttag

SEQ ID NO: 1853342 - DNA, 15 bp, Homo sapiens
cgtggaagctttagt

SEQ ID NO: 1853343 - DNA, 15 bp, Homo sapiens
gtggaagctttagtc

SEQ ID NO: 1853344 - DNA, 15 bp, Homo sapiens
tggaagctttagtcc

SEQ ID NO: 1853345 - DNA, 15 bp, Homo sapiens
ggaagctttagtcca

SEQ ID NO: 1853346 - DNA, 15 bp, Homo sapiens
gaagctttagtccag

SEQ ID NO: 1853347 - DNA, 15 bp, Homo sapiens
aagctttagtccaga

SEQ ID NO: 1853348 - DNA, 15 bp, Homo sapiens
agctttagtccagag

SEQ ID NO: 1853349 - DNA, 15 bp, Homo sapiens
gctttagtccagaga

SEQ ID NO: 1853350 - DNA, 15 bp, Homo sapiens
ctttagtccagagag

SEQ ID NO: 1853351 - DNA, 15 bp, Homo sapiens
tttagtccagagaga

SEQ ID NO: 1853352 - DNA, 15 bp, Homo sapiens
ttagtccagagagaa

SEQ ID NO: 1853353 - DNA, 15 bp, Homo sapiens
tagtccagagagaag

SEQ ID NO: 1853354 - DNA, 15 bp, Homo sapiens
agtccagagagaagt

SEQ ID NO: 1853355 - DNA, 15 bp, Homo sapiens
gtccagagagaagtg

SEQ ID NO: 1853356 - DNA, 15 bp, Homo sapiens
tccagagagaagtgt

SEQ ID NO: 1853357 - DNA, 15 bp, Homo sapiens
ccagagagaagtgtc

SEQ ID NO: 1853358 - DNA, 15 bp, Homo sapiens
cagagagaagtgtct

SEQ ID NO: 1853359 - DNA, 15 bp, Homo sapiens
agagagaagtgtctt

SEQ ID NO: 1853360 - DNA, 15 bp, Homo sapiens
gagagaagtgtcttg

SEQ ID NO: 1853361 - DNA, 15 bp, Homo sapiens
agagaagtgtcttgg

SEQ ID NO: 1853362 - DNA, 15 bp, Homo sapiens
gagaagtgtcttggg

SEQ ID NO: 1853363 - DNA, 15 bp, Homo sapiens
agaagtgtcttggga

SEQ ID NO: 1853364 - DNA, 15 bp, Homo sapiens
gaagtgtcttgggaa

SEQ ID NO: 1853365 - DNA, 15 bp, Homo sapiens
aagtgtcttgggaac

SEQ ID NO: 1853366 - DNA, 15 bp, Homo sapiens
agtgtcttgggaacc

SEQ ID NO: 1853367 - DNA, 15 bp, Homo sapiens
gtgtcttgggaacca

SEQ ID NO: 1853368 - DNA, 15 bp, Homo sapiens
tgtcttgggaaccaa

SEQ ID NO: 1853369 - DNA, 15 bp, Homo sapiens
gtcttgggaaccaaa

SEQ ID NO: 1853370 - DNA, 15 bp, Homo sapiens
tcttgggaaccaaat

SEQ ID NO: 1853371 - DNA, 15 bp, Homo sapiens
cttgggaaccaaata

SEQ ID NO: 1853372 - DNA, 15 bp, Homo sapiens
ttgggaaccaaatag

SEQ ID NO: 1853373 - DNA, 15 bp, Homo sapiens
tgggaaccaaatagg

SEQ ID NO: 1853374 - DNA, 15 bp, Homo sapiens
gggaaccaaatagga

SEQ ID NO: 1853375 - DNA, 15 bp, Homo sapiens
ggaaccaaataggac

SEQ ID NO: 1853376 - DNA, 15 bp, Homo sapiens
gaaccaaataggact

SEQ ID NO: 1853377 - DNA, 15 bp, Homo sapiens
aaccaaataggactg

SEQ ID NO: 1853378 - DNA, 15 bp, Homo sapiens
accaaataggactgg

SEQ ID NO: 1853379 - DNA, 15 bp, Homo sapiens
ccaaataggactggt

SEQ ID NO: 1853380 - DNA, 15 bp, Homo sapiens
caaataggactggtt

SEQ ID NO: 1853381 - DNA, 15 bp, Homo sapiens
aaataggactggttg

SEQ ID NO: 1853382 - DNA, 15 bp, Homo sapiens
aataggactggttga

SEQ ID NO: 1853383 - DNA, 15 bp, Homo sapiens
ataggactggttgat

SEQ ID NO: 1853384 - DNA, 15 bp, Homo sapiens
taggactggttgatg

SEQ ID NO: 1853385 - DNA, 15 bp, Homo sapiens
aggactggttgatgg

SEQ ID NO: 1853386 - DNA, 15 bp, Homo sapiens
ggactggttgatggg

SEQ ID NO: 1853387 - DNA, 15 bp, Homo sapiens
gactggttgatgggg

SEQ ID NO: 1853388 - DNA, 15 bp, Homo sapiens
actggttgatgggga

SEQ ID NO: 1853389 - DNA, 15 bp, Homo sapiens
ctggttgatggggat

SEQ ID NO: 1853390 - DNA, 15 bp, Homo sapiens
tggttgatggggata

SEQ ID NO: 1853391 - DNA, 15 bp, Homo sapiens
ggttgatggggataa

SEQ ID NO: 1853392 - DNA, 15 bp, Homo sapiens
gttgatggggataac

SEQ ID NO: 1853393 - DNA, 15 bp, Homo sapiens
ttgatggggataact

SEQ ID NO: 1853394 - DNA, 15 bp, Homo sapiens
tgatggggataactc

SEQ ID NO: 1853395 - DNA, 15 bp, Homo sapiens
gatggggataactcg

SEQ ID NO: 1853396 - DNA, 15 bp, Homo sapiens
atggggataactcgg

SEQ ID NO: 1853397 - DNA, 15 bp, Homo sapiens
tggggataactcgga

SEQ ID NO: 1853398 - DNA, 15 bp, Homo sapiens
ggggataactcggag

SEQ ID NO: 1853399 - DNA, 15 bp, Homo sapiens
gggataactcggaga

SEQ ID NO: 1853400 - DNA, 15 bp, Homo sapiens
ggataactcggagac

SEQ ID NO: 1853401 - DNA, 15 bp, Homo sapiens
gataactcggagact

SEQ ID NO: 1853402 - DNA, 15 bp, Homo sapiens
ataactcggagactt

SEQ ID NO: 1853403 - DNA, 15 bp, Homo sapiens
taactcggagactta

SEQ ID NO: 1853404 - DNA, 15 bp, Homo sapiens
aactcggagacttag

SEQ ID NO: 1853405 - DNA, 15 bp, Homo sapiens
actcggagacttagt

SEQ ID NO: 1853406 - DNA, 15 bp, Homo sapiens
ctcggagacttagtg

SEQ ID NO: 1853407 - DNA, 15 bp, Homo sapiens
tcggagacttagtga

SEQ ID NO: 1853408 - DNA, 15 bp, Homo sapiens
cggagacttagtgag

SEQ ID NO: 1853409 - DNA, 15 bp, Homo sapiens
ggagacttagtgagt

SEQ ID NO: 1853410 - DNA, 15 bp, Homo sapiens
gagacttagtgagtg

SEQ ID NO: 1853411 - DNA, 15 bp, Homo sapiens
agacttagtgagtgc

SEQ ID NO: 1853412 - DNA, 15 bp, Homo sapiens
gacttagtgagtgcc

SEQ ID NO: 1853413 - DNA, 15 bp, Homo sapiens
acttagtgagtgcca

SEQ ID NO: 1853414 - DNA, 15 bp, Homo sapiens
cttagtgagtgccag

SEQ ID NO: 1853415 - DNA, 15 bp, Homo sapiens
ttagtgagtgccagg

SEQ ID NO: 1853416 - DNA, 15 bp, Homo sapiens
tagtgagtgccagga

SEQ ID NO: 1853417 - DNA, 15 bp, Homo sapiens
agtgagtgccaggag

SEQ ID NO: 1853418 - DNA, 15 bp, Homo sapiens
gtgagtgccaggagc

SEQ ID NO: 1853419 - DNA, 15 bp, Homo sapiens
tgagtgccaggagca

SEQ ID NO: 1853420 - DNA, 15 bp, Homo sapiens
gagtgccaggagcat

SEQ ID NO: 1853421 - DNA, 15 bp, Homo sapiens
agtgccaggagcatc

SEQ ID NO: 1853422 - DNA, 15 bp, Homo sapiens
gtgccaggagcatca

SEQ ID NO: 1853423 - DNA, 15 bp, Homo sapiens
tgccaggagcatcag

SEQ ID NO: 1853424 - DNA, 15 bp, Homo sapiens
gccaggagcatcagt

SEQ ID NO: 1853425 - DNA, 15 bp, Homo sapiens
ccaggagcatcagtg

SEQ ID NO: 1853426 - DNA, 15 bp, Homo sapiens
caggagcatcagtgg

SEQ ID NO: 1853427 - DNA, 15 bp, Homo sapiens
aggagcatcagtggg

SEQ ID NO: 1853428 - DNA, 15 bp, Homo sapiens
ggagcatcagtggga

SEQ ID NO: 1853429 - DNA, 15 bp, Homo sapiens
gagcatcagtgggaa

SEQ ID NO: 1853430 - DNA, 15 bp, Homo sapiens
agcatcagtgggaat

SEQ ID NO: 1853431 - DNA, 15 bp, Homo sapiens
gcatcagtgggaata

SEQ ID NO: 1853432 - DNA, 15 bp, Homo sapiens
catcagtgggaataa

SEQ ID NO: 1853433 - DNA, 15 bp, Homo sapiens
atcagtgggaataat

SEQ ID NO: 1853434 - DNA, 15 bp, Homo sapiens
tcagtgggaataatg

SEQ ID NO: 1853435 - DNA, 15 bp, Homo sapiens
cagtgggaataatgg

SEQ ID NO: 1853436 - DNA, 15 bp, Homo sapiens
agtgggaataatgga

SEQ ID NO: 1853437 - DNA, 15 bp, Homo sapiens
gtgggaataatggaa

SEQ ID NO: 1853438 - DNA, 15 bp, Homo sapiens
tgggaataatggaaa

SEQ ID NO: 1853439 - DNA, 15 bp, Homo sapiens
gggaataatggaaag

SEQ ID NO: 1853440 - DNA, 15 bp, Homo sapiens
ggaataatggaaagg

SEQ ID NO: 1853441 - DNA, 15 bp, Homo sapiens
gaataatggaaaggg

SEQ ID NO: 1853442 - DNA, 15 bp, Homo sapiens
aataatggaaagggt

SEQ ID NO: 1853443 - DNA, 15 bp, Homo sapiens
ataatggaaagggtg

SEQ ID NO: 1853444 - DNA, 15 bp, Homo sapiens
taatggaaagggtga

SEQ ID NO: 1853445 - DNA, 15 bp, Homo sapiens
aatggaaagggtgat

SEQ ID NO: 1853446 - DNA, 15 bp, Homo sapiens
atggaaagggtgatt

SEQ ID NO: 1853447 - DNA, 15 bp, Homo sapiens
tggaaagggtgattc

SEQ ID NO: 1853448 - DNA, 15 bp, Homo sapiens
ggaaagggtgattcg

SEQ ID NO: 1853449 - DNA, 15 bp, Homo sapiens
gaaagggtgattcga

SEQ ID NO: 1853450 - DNA, 15 bp, Homo sapiens
aaagggtgattcgat

SEQ ID NO: 1853451 - DNA, 15 bp, Homo sapiens
aagggtgattcgata

SEQ ID NO: 1853452 - DNA, 15 bp, Homo sapiens
agggtgattcgatag

SEQ ID NO: 1853453 - DNA, 15 bp, Homo sapiens
gggtgattcgataga

SEQ ID NO: 1853454 - DNA, 15 bp, Homo sapiens
ggtgattcgatagat

SEQ ID NO: 1853455 - DNA, 15 bp, Homo sapiens
gtgattcgatagatg

SEQ ID NO: 1853456 - DNA, 15 bp, Homo sapiens
tgattcgatagatgg

SEQ ID NO: 1853457 - DNA, 15 bp, Homo sapiens
gattcgatagatggg

SEQ ID NO: 1853458 - DNA, 15 bp, Homo sapiens
attcgatagatggga

SEQ ID NO: 1853459 - DNA, 15 bp, Homo sapiens
ttcgatagatgggaa

SEQ ID NO: 1853460 - DNA, 15 bp, Homo sapiens
tcgatagatgggaag

SEQ ID NO: 1853461 - DNA, 15 bp, Homo sapiens
cgatagatgggaaga

SEQ ID NO: 1853462 - DNA, 15 bp, Homo sapiens
gatagatgggaagac

SEQ ID NO: 1853463 - DNA, 15 bp, Homo sapiens
atagatgggaagacg

SEQ ID NO: 1853464 - DNA, 15 bp, Homo sapiens
tagatgggaagacgg

SEQ ID NO: 1853465 - DNA, 15 bp, Homo sapiens
agatgggaagacggt

SEQ ID NO: 1853466 - DNA, 15 bp, Homo sapiens
gatgggaagacggtt

SEQ ID NO: 1853467 - DNA, 15 bp, Homo sapiens
atgggaagacggttt

SEQ ID NO: 1853468 - DNA, 15 bp, Homo sapiens
tgggaagacggttta

SEQ ID NO: 1853469 - DNA, 15 bp, Homo sapiens
gggaagacggtttaa

SEQ ID NO: 1853470 - DNA, 15 bp, Homo sapiens
ggaagacggtttaaa

SEQ ID NO: 1853471 - DNA, 15 bp, Homo sapiens
gaagacggtttaaaa

SEQ ID NO: 1853472 - DNA, 15 bp, Homo sapiens
aagacggtttaaaaa

SEQ ID NO: 1853473 - DNA, 15 bp, Homo sapiens
agacggtttaaaaag

SEQ ID NO: 1853474 - DNA, 15 bp, Homo sapiens
gacggtttaaaaagg

SEQ ID NO: 1853475 - DNA, 15 bp, Homo sapiens
acggtttaaaaaggt

SEQ ID NO: 1853476 - DNA, 15 bp, Homo sapiens
cggtttaaaaaggtg

SEQ ID NO: 1853477 - DNA, 15 bp, Homo sapiens
ggtttaaaaaggtgc

SEQ ID NO: 1853478 - DNA, 15 bp, Homo sapiens
gtttaaaaaggtgca

SEQ ID NO: 1853479 - DNA, 15 bp, Homo sapiens
tttaaaaaggtgcaa

SEQ ID NO: 1853480 - DNA, 15 bp, Homo sapiens
ttaaaaaggtgcaaa

SEQ ID NO: 1853481 - DNA, 15 bp, Homo sapiens
taaaaaggtgcaaag

SEQ ID NO: 1853482 - DNA, 15 bp, Homo sapiens
aaaaaggtgcaaaga

SEQ ID NO: 1853483 - DNA, 15 bp, Homo sapiens
aaaaggtgcaaagaa

SEQ ID NO: 1853484 - DNA, 15 bp, Homo sapiens
aaaggtgcaaagaag

SEQ ID NO: 1853485 - DNA, 15 bp, Homo sapiens
aaggtgcaaagaaga

SEQ ID NO: 1853486 - DNA, 15 bp, Homo sapiens
aggtgcaaagaagac

SEQ ID NO: 1853487 - DNA, 15 bp, Homo sapiens
ggtgcaaagaagact

SEQ ID NO: 1853488 - DNA, 15 bp, Homo sapiens
gtgcaaagaagactt

SEQ ID NO: 1853489 - DNA, 15 bp, Homo sapiens
tgcaaagaagacttt

SEQ ID NO: 1853490 - DNA, 15 bp, Homo sapiens
gcaaagaagactttg

SEQ ID NO: 1853491 - DNA, 15 bp, Homo sapiens
caaagaagactttgg

SEQ ID NO: 1853492 - DNA, 15 bp, Homo sapiens
aaagaagactttggt

SEQ ID NO: 1853493 - DNA, 15 bp, Homo sapiens
aagaagactttggtc

SEQ ID NO: 1853494 - DNA, 15 bp, Homo sapiens
agaagactttggtct

SEQ ID NO: 1853495 - DNA, 15 bp, Homo sapiens
gaagactttggtctg

SEQ ID NO: 1853496 - DNA, 15 bp, Homo sapiens
aagactttggtctgg

SEQ ID NO: 1853497 - DNA, 15 bp, Homo sapiens
agactttggtctgga

SEQ ID NO: 1853498 - DNA, 15 bp, Homo sapiens
gactttggtctggag

SEQ ID NO: 1853499 - DNA, 15 bp, Homo sapiens
actttggtctggagt

SEQ ID NO: 1853500 - DNA, 15 bp, Homo sapiens
ctttggtctggagta

SEQ ID NO: 1853501 - DNA, 15 bp, Homo sapiens
tttggtctggagtag

SEQ ID NO: 1853502 - DNA, 15 bp, Homo sapiens
ttggtctggagtaga

SEQ ID NO: 1853503 - DNA, 15 bp, Homo sapiens
tggtctggagtagac

SEQ ID NO: 1853504 - DNA, 15 bp, Homo sapiens
ggtctggagtagaca

SEQ ID NO: 1853505 - DNA, 15 bp, Homo sapiens
gtctggagtagacac

SEQ ID NO: 1853506 - DNA, 15 bp, Homo sapiens
tctggagtagacact

SEQ ID NO: 1853507 - DNA, 15 bp, Homo sapiens
ctggagtagacacta

SEQ ID NO: 1853508 - DNA, 15 bp, Homo sapiens
tggagtagacactag

SEQ ID NO: 1853509 - DNA, 15 bp, Homo sapiens
ggagtagacactaga

SEQ ID NO: 1853510 - DNA, 15 bp, Homo sapiens
gagtagacactagaa

SEQ ID NO: 1853511 - DNA, 15 bp, Homo sapiens
agtagacactagaac

SEQ ID NO: 1853512 - DNA, 15 bp, Homo sapiens
gtagacactagaact

SEQ ID NO: 1853513 - DNA, 15 bp, Homo sapiens
tagacactagaactt

SEQ ID NO: 1853514 - DNA, 15 bp, Homo sapiens
agacactagaacttt

SEQ ID NO: 1853515 - DNA, 15 bp, Homo sapiens
gacactagaactttt

SEQ ID NO: 1853516 - DNA, 15 bp, Homo sapiens
acactagaacttttc

SEQ ID NO: 1853517 - DNA, 15 bp, Homo sapiens
cactagaacttttca

SEQ ID NO: 1853518 - DNA, 15 bp, Homo sapiens
actagaacttttcag

SEQ ID NO: 1853519 - DNA, 15 bp, Homo sapiens
ctagaacttttcaga

SEQ ID NO: 1853520 - DNA, 15 bp, Homo sapiens
tagaacttttcagaa

SEQ ID NO: 1853521 - DNA, 15 bp, Homo sapiens
agaacttttcagaag

SEQ ID NO: 1853522 - DNA, 15 bp, Homo sapiens
gaacttttcagaagt

SEQ ID NO: 1853523 - DNA, 15 bp, Homo sapiens
aacttttcagaagta

SEQ ID NO: 1853524 - DNA, 15 bp, Homo sapiens
acttttcagaagtat

SEQ ID NO: 1853525 - DNA, 15 bp, Homo sapiens
cttttcagaagtata

SEQ ID NO: 1853526 - DNA, 15 bp, Homo sapiens
ttttcagaagtatag

SEQ ID NO: 1853527 - DNA, 15 bp, Homo sapiens
tttcagaagtatagg

SEQ ID NO: 1853528 - DNA, 15 bp, Homo sapiens
ttcagaagtataggc

SEQ ID NO: 1853529 - DNA, 15 bp, Homo sapiens
tcagaagtataggca

SEQ ID NO: 1853530 - DNA, 15 bp, Homo sapiens
cagaagtataggcaa

SEQ ID NO: 1853531 - DNA, 15 bp, Homo sapiens
agaagtataggcaac

SEQ ID NO: 1853532 - DNA, 15 bp, Homo sapiens
gaagtataggcaaca

SEQ ID NO: 1853533 - DNA, 15 bp, Homo sapiens
aagtataggcaacag

SEQ ID NO: 1853534 - DNA, 15 bp, Homo sapiens
agtataggcaacagc

SEQ ID NO: 1853535 - DNA, 15 bp, Homo sapiens
gtataggcaacagcc

SEQ ID NO: 1853536 - DNA, 15 bp, Homo sapiens
tataggcaacagcca

SEQ ID NO: 1853537 - DNA, 15 bp, Homo sapiens
ataggcaacagccag

SEQ ID NO: 1853538 - DNA, 15 bp, Homo sapiens
taggcaacagccagt

SEQ ID NO: 1853539 - DNA, 15 bp, Homo sapiens
aggcaacagccagta

SEQ ID NO: 1853540 - DNA, 15 bp, Homo sapiens
ggcaacagccagtaa

SEQ ID NO: 1853541 - DNA, 15 bp, Homo sapiens
gcaacagccagtaaa

SEQ ID NO: 1853542 - DNA, 15 bp, Homo sapiens
aacagccagtaaaag

SEQ ID NO: 1853543 - DNA, 15 bp, Homo sapiens
acagccagtaaaagg

SEQ ID NO: 1853544 - DNA, 15 bp, Homo sapiens
cagccagtaaaaggg

SEQ ID NO: 1853545 - DNA, 15 bp, Homo sapiens
agccagtaaaagggg

SEQ ID NO: 1853546 - DNA, 15 bp, Homo sapiens
gccagtaaaaggggg

SEQ ID NO: 1853547 - DNA, 15 bp, Homo sapiens
ccagtaaaagggggg

SEQ ID NO: 1853548 - DNA, 15 bp, Homo sapiens
cagtaaaaggggggg

SEQ ID NO: 1853549 - DNA, 15 bp, Homo sapiens
agtaaaagggggggg

SEQ ID NO: 1853550 - DNA, 15 bp, Homo sapiens
gtaaaaggggggggg

SEQ ID NO: 1853551 - DNA, 15 bp, Homo sapiens
taaaagggggggggg

SEQ ID NO: 1853552 - DNA, 15 bp, Homo sapiens
aaaaggggggggggg

SEQ ID NO: 1853553 - DNA, 15 bp, Homo sapiens
aaagggggggggggg

SEQ ID NO: 1853554 - DNA, 15 bp, Homo sapiens
aaggggggggggggt

SEQ ID NO: 1853555 - DNA, 15 bp, Homo sapiens
aggggggggggggta

SEQ ID NO: 1853556 - DNA, 15 bp, Homo sapiens
ggggggggggggtag

SEQ ID NO: 1853557 - DNA, 15 bp, Homo sapiens
gggggggggggtagg

SEQ ID NO: 1853558 - DNA, 15 bp, Homo sapiens
ggggggggggtaggt

SEQ ID NO: 1853559 - DNA, 15 bp, Homo sapiens
gggggggggtaggtt

SEQ ID NO: 1853560 - DNA, 15 bp, Homo sapiens
ggggggggtaggttc

SEQ ID NO: 1853561 - DNA, 15 bp, Homo sapiens
gggggggtaggttcc

SEQ ID NO: 1853562 - DNA, 15 bp, Homo sapiens
ggggggtaggttcct

SEQ ID NO: 1853563 - DNA, 15 bp, Homo sapiens
gggggtaggttcctc

SEQ ID NO: 1853564 - DNA, 15 bp, Homo sapiens
ggggtaggttcctcc

SEQ ID NO: 1853565 - DNA, 15 bp, Homo sapiens
gggtaggttcctcct

SEQ ID NO: 1853566 - DNA, 15 bp, Homo sapiens
ggtaggttcctcctg

SEQ ID NO: 1853567 - DNA, 15 bp, Homo sapiens
gtaggttcctcctgc

SEQ ID NO: 1853568 - DNA, 15 bp, Homo sapiens
taggttcctcctgct

SEQ ID NO: 1853569 - DNA, 15 bp, Homo sapiens
aggttcctcctgctc

SEQ ID NO: 1853570 - DNA, 15 bp, Homo sapiens
ggttcctcctgctcc

SEQ ID NO: 1853571 - DNA, 15 bp, Homo sapiens
gttcctcctgctcca

SEQ ID NO: 1853572 - DNA, 15 bp, Homo sapiens
ttcctcctgctccag

SEQ ID NO: 1853573 - DNA, 15 bp, Homo sapiens
tcctcctgctccagt

SEQ ID NO: 1853574 - DNA, 15 bp, Homo sapiens
cctcctgctccagtc

SEQ ID NO: 1853575 - DNA, 15 bp, Homo sapiens
ctcctgctccagtca

SEQ ID NO: 1853576 - DNA, 15 bp, Homo sapiens
tcctgctccagtcac

SEQ ID NO: 1853577 - DNA, 15 bp, Homo sapiens
cctgctccagtcacc

SEQ ID NO: 1853578 - DNA, 15 bp, Homo sapiens
ctgctccagtcacct

SEQ ID NO: 1853579 - DNA, 15 bp, Homo sapiens
tgctccagtcacctg

SEQ ID NO: 1853580 - DNA, 15 bp, Homo sapiens
gctccagtcacctgc

SEQ ID NO: 1853581 - DNA, 15 bp, Homo sapiens
ctccagtcacctgca

SEQ ID NO: 1853582 - DNA, 15 bp, Homo sapiens
tccagtcacctgcaa

SEQ ID NO: 1853583 - DNA, 15 bp, Homo sapiens
ccagtcacctgcaag

SEQ ID NO: 1853584 - DNA, 15 bp, Homo sapiens
cagtcacctgcaagt

SEQ ID NO: 1853585 - DNA, 15 bp, Homo sapiens
agtcacctgcaagtc

SEQ ID NO: 1853586 - DNA, 15 bp, Homo sapiens
gtcacctgcaagtca

SEQ ID NO: 1853587 - DNA, 15 bp, Homo sapiens
tcacctgcaagtcag

SEQ ID NO: 1853588 - DNA, 15 bp, Homo sapiens
cacctgcaagtcagt

SEQ ID NO: 1853589 - DNA, 15 bp, Homo sapiens
acctgcaagtcagtc

SEQ ID NO: 1853590 - DNA, 15 bp, Homo sapiens
cctgcaagtcagtcc

SEQ ID NO: 1853591 - DNA, 15 bp, Homo sapiens
ctgcaagtcagtcct

SEQ ID NO: 1853592 - DNA, 15 bp, Homo sapiens
tgcaagtcagtcctc

SEQ ID NO: 1853593 - DNA, 15 bp, Homo sapiens
gcaagtcagtcctct

SEQ ID NO: 1853594 - DNA, 15 bp, Homo sapiens
caagtcagtcctctc

SEQ ID NO: 1853595 - DNA, 15 bp, Homo sapiens
aagtcagtcctctcc

SEQ ID NO: 1853596 - DNA, 15 bp, Homo sapiens
agtcagtcctctccc

SEQ ID NO: 1853597 - DNA, 15 bp, Homo sapiens
gtcagtcctctcccg

SEQ ID NO: 1853598 - DNA, 15 bp, Homo sapiens
tcagtcctctcccgg

SEQ ID NO: 1853599 - DNA, 15 bp, Homo sapiens
cagtcctctcccggg

SEQ ID NO: 1853600 - DNA, 15 bp, Homo sapiens
agtcctctcccgggg

SEQ ID NO: 1853601 - DNA, 15 bp, Homo sapiens
gtcctctcccggggt

SEQ ID NO: 1853602 - DNA, 15 bp, Homo sapiens
tcctctcccggggtt

SEQ ID NO: 1853603 - DNA, 15 bp, Homo sapiens
cctctcccggggttt

SEQ ID NO: 1853604 - DNA, 15 bp, Homo sapiens
ctctcccggggtttt

SEQ ID NO: 1853605 - DNA, 15 bp, Homo sapiens
tctcccggggttttc

SEQ ID NO: 1853606 - DNA, 15 bp, Homo sapiens
ctcccggggttttct

SEQ ID NO: 1853607 - DNA, 15 bp, Homo sapiens
tcccggggttttctc

SEQ ID NO: 1853608 - DNA, 15 bp, Homo sapiens
cccggggttttctca

SEQ ID NO: 1853609 - DNA, 15 bp, Homo sapiens
ccggggttttctcag

SEQ ID NO: 1853610 - DNA, 15 bp, Homo sapiens
cggggttttctcagt

SEQ ID NO: 1853611 - DNA, 15 bp, Homo sapiens
ggggttttctcagta

SEQ ID NO: 1853612 - DNA, 15 bp, Homo sapiens
gggttttctcagtat

SEQ ID NO: 1853613 - DNA, 15 bp, Homo sapiens
ggttttctcagtatt

SEQ ID NO: 1853614 - DNA, 15 bp, Homo sapiens
gttttctcagtattc

SEQ ID NO: 1853615 - DNA, 15 bp, Homo sapiens
ttttctcagtattcg

SEQ ID NO: 1853616 - DNA, 15 bp, Homo sapiens
tttctcagtattcgc

SEQ ID NO: 1853617 - DNA, 15 bp, Homo sapiens
ttctcagtattcgcc

SEQ ID NO: 1853618 - DNA, 15 bp, Homo sapiens
tctcagtattcgcca

SEQ ID NO: 1853619 - DNA, 15 bp, Homo sapiens
ctcagtattcgccat

SEQ ID NO: 1853620 - DNA, 15 bp, Homo sapiens
tcagtattcgccata

SEQ ID NO: 1853621 - DNA, 15 bp, Homo sapiens
cagtattcgccatag

SEQ ID NO: 1853622 - DNA, 15 bp, Homo sapiens
agtattcgccatagg

SEQ ID NO: 1853623 - DNA, 15 bp, Homo sapiens
gtattcgccataggg

SEQ ID NO: 1853624 - DNA, 15 bp, Homo sapiens
tattcgccataggga

SEQ ID NO: 1853625 - DNA, 15 bp, Homo sapiens
attcgccatagggac

SEQ ID NO: 1853626 - DNA, 15 bp, Homo sapiens
ttcgccatagggact

SEQ ID NO: 1853627 - DNA, 15 bp, Homo sapiens
tcgccatagggacta

SEQ ID NO: 1853628 - DNA, 15 bp, Homo sapiens
cgccatagggactat

SEQ ID NO: 1853629 - DNA, 15 bp, Homo sapiens
gccatagggactatc

SEQ ID NO: 1853630 - DNA, 15 bp, Homo sapiens
ccatagggactatca

SEQ ID NO: 1853631 - DNA, 15 bp, Homo sapiens
catagggactatcaa

SEQ ID NO: 1853632 - DNA, 15 bp, Homo sapiens
atagggactatcaaa

SEQ ID NO: 1853633 - DNA, 15 bp, Homo sapiens
tagggactatcaaag

SEQ ID NO: 1853634 - DNA, 15 bp, Homo sapiens
agggactatcaaagt

SEQ ID NO: 1853635 - DNA, 15 bp, Homo sapiens
gggactatcaaagtt

SEQ ID NO: 1853636 - DNA, 15 bp, Homo sapiens
ggactatcaaagttt

SEQ ID NO: 1853637 - DNA, 15 bp, Homo sapiens
gactatcaaagtttg

SEQ ID NO: 1853638 - DNA, 15 bp, Homo sapiens
actatcaaagtttga

SEQ ID NO: 1853639 - DNA, 15 bp, Homo sapiens
ctatcaaagtttgaa

SEQ ID NO: 1853640 - DNA, 15 bp, Homo sapiens
tatcaaagtttgaag

SEQ ID NO: 1853641 - DNA, 15 bp, Homo sapiens
atcaaagtttgaagc

SEQ ID NO: 1853642 - DNA, 15 bp, Homo sapiens
tcaaagtttgaagca

SEQ ID NO: 1853643 - DNA, 15 bp, Homo sapiens
caaagtttgaagcat

SEQ ID NO: 1853644 - DNA, 15 bp, Homo sapiens
aaagtttgaagcata

SEQ ID NO: 1853645 - DNA, 15 bp, Homo sapiens
aagtttgaagcatag

SEQ ID NO: 1853646 - DNA, 15 bp, Homo sapiens
agtttgaagcatagc

SEQ ID NO: 1853647 - DNA, 15 bp, Homo sapiens
gtttgaagcatagct

SEQ ID NO: 1853648 - DNA, 15 bp, Homo sapiens
tttgaagcatagctc

SEQ ID NO: 1853649 - DNA, 15 bp, Homo sapiens
ttgaagcatagctct

SEQ ID NO: 1853650 - DNA, 15 bp, Homo sapiens
tgaagcatagctctg

SEQ ID NO: 1853651 - DNA, 15 bp, Homo sapiens
gaagcatagctctgc

SEQ ID NO: 1853652 - DNA, 15 bp, Homo sapiens
aagcatagctctgcc

SEQ ID NO: 1853653 - DNA, 15 bp, Homo sapiens
agcatagctctgcct

SEQ ID NO: 1853654 - DNA, 15 bp, Homo sapiens
gcatagctctgcctg

SEQ ID NO: 1853655 - DNA, 15 bp, Homo sapiens
catagctctgcctgt

SEQ ID NO: 1853656 - DNA, 15 bp, Homo sapiens
atagctctgcctgtc

SEQ ID NO: 1853657 - DNA, 15 bp, Homo sapiens
tagctctgcctgtct

SEQ ID NO: 1853658 - DNA, 15 bp, Homo sapiens
agctctgcctgtctg

SEQ ID NO: 1853659 - DNA, 15 bp, Homo sapiens
gctctgcctgtctgc

SEQ ID NO: 1853660 - DNA, 15 bp, Homo sapiens
ctctgcctgtctgct

SEQ ID NO: 1853661 - DNA, 15 bp, Homo sapiens
tctgcctgtctgctg

SEQ ID NO: 1853662 - DNA, 15 bp, Homo sapiens
ctgcctgtctgctgc

SEQ ID NO: 1853663 - DNA, 15 bp, Homo sapiens
tgcctgtctgctgct

SEQ ID NO: 1853664 - DNA, 15 bp, Homo sapiens
gcctgtctgctgctt

SEQ ID NO: 1853665 - DNA, 15 bp, Homo sapiens
cctgtctgctgcttt

SEQ ID NO: 1853666 - DNA, 15 bp, Homo sapiens
ctgtctgctgctttg

SEQ ID NO: 1853667 - DNA, 15 bp, Homo sapiens
tgtctgctgctttgt

SEQ ID NO: 1853668 - DNA, 15 bp, Homo sapiens
gtctgctgctttgtc

SEQ ID NO: 1853669 - DNA, 15 bp, Homo sapiens
tctgctgctttgtca

SEQ ID NO: 1853670 - DNA, 15 bp, Homo sapiens
ctgctgctttgtcac

SEQ ID NO: 1853671 - DNA, 15 bp, Homo sapiens
tgctgctttgtcact

SEQ ID NO: 1853672 - DNA, 15 bp, Homo sapiens
gctgctttgtcactg

SEQ ID NO: 1853673 - DNA, 15 bp, Homo sapiens
ctgctttgtcactgg

SEQ ID NO: 1853674 - DNA, 15 bp, Homo sapiens
tgctttgtcactggc

SEQ ID NO: 1853675 - DNA, 15 bp, Homo sapiens
gctttgtcactggct

SEQ ID NO: 1853676 - DNA, 15 bp, Homo sapiens
ctttgtcactggctg

SEQ ID NO: 1853677 - DNA, 15 bp, Homo sapiens
tttgtcactggctgg

SEQ ID NO: 1853678 - DNA, 15 bp, Homo sapiens
ttgtcactggctggc

SEQ ID NO: 1853679 - DNA, 15 bp, Homo sapiens
tgtcactggctggca

SEQ ID NO: 1853680 - DNA, 15 bp, Homo sapiens
gtcactggctggcat

SEQ ID NO: 1853681 - DNA, 15 bp, Homo sapiens
tcactggctggcatg

SEQ ID NO: 1853682 - DNA, 15 bp, Homo sapiens
cactggctggcatga

SEQ ID NO: 1853683 - DNA, 15 bp, Homo sapiens
actggctggcatgaa

SEQ ID NO: 1853684 - DNA, 15 bp, Homo sapiens
ctggctggcatgaag

SEQ ID NO: 1853685 - DNA, 15 bp, Homo sapiens
tggctggcatgaagc

SEQ ID NO: 1853686 - DNA, 15 bp, Homo sapiens
ggctggcatgaagcc

SEQ ID NO: 1853687 - DNA, 15 bp, Homo sapiens
gctggcatgaagcca

SEQ ID NO: 1853688 - DNA, 15 bp, Homo sapiens
ctggcatgaagccat

SEQ ID NO: 1853689 - DNA, 15 bp, Homo sapiens
tggcatgaagccatg

SEQ ID NO: 1853690 - DNA, 15 bp, Homo sapiens
ggcatgaagccatgg

SEQ ID NO: 1853691 - DNA, 15 bp, Homo sapiens
gcatgaagccatggc

SEQ ID NO: 1853692 - DNA, 15 bp, Homo sapiens
catgaagccatggca

SEQ ID NO: 1853693 - DNA, 15 bp, Homo sapiens
atgaagccatggcag

SEQ ID NO: 1853694 - DNA, 15 bp, Homo sapiens
tgaagccatggcaga

SEQ ID NO: 1853695 - DNA, 15 bp, Homo sapiens
gaagccatggcagaa

SEQ ID NO: 1853696 - DNA, 15 bp, Homo sapiens
aagccatggcagaag

SEQ ID NO: 1853697 - DNA, 15 bp, Homo sapiens
agccatggcagaagc

SEQ ID NO: 1853698 - DNA, 15 bp, Homo sapiens
gccatggcagaagcc

SEQ ID NO: 1853699 - DNA, 15 bp, Homo sapiens
ccatggcagaagccc

SEQ ID NO: 1853700 - DNA, 15 bp, Homo sapiens
catggcagaagccca

SEQ ID NO: 1853701 - DNA, 15 bp, Homo sapiens
atggcagaagcccat

SEQ ID NO: 1853702 - DNA, 15 bp, Homo sapiens
tggcagaagcccatt

SEQ ID NO: 1853703 - DNA, 15 bp, Homo sapiens
ggcagaagcccattt

SEQ ID NO: 1853704 - DNA, 15 bp, Homo sapiens
gcagaagcccatttg

SEQ ID NO: 1853705 - DNA, 15 bp, Homo sapiens
cagaagcccatttga

SEQ ID NO: 1853706 - DNA, 15 bp, Homo sapiens
agaagcccatttgag

SEQ ID NO: 1853707 - DNA, 15 bp, Homo sapiens
gaagcccatttgaga

SEQ ID NO: 1853708 - DNA, 15 bp, Homo sapiens
aagcccatttgagac

SEQ ID NO: 1853709 - DNA, 15 bp, Homo sapiens
agcccatttgagact

SEQ ID NO: 1853710 - DNA, 15 bp, Homo sapiens
gcccatttgagactg

SEQ ID NO: 1853711 - DNA, 15 bp, Homo sapiens
cccatttgagactgg

SEQ ID NO: 1853712 - DNA, 15 bp, Homo sapiens
ccatttgagactggc

SEQ ID NO: 1853713 - DNA, 15 bp, Homo sapiens
catttgagactggca

SEQ ID NO: 1853714 - DNA, 15 bp, Homo sapiens
atttgagactggcac

SEQ ID NO: 1853715 - DNA, 15 bp, Homo sapiens
tttgagactggcacc

SEQ ID NO: 1853716 - DNA, 15 bp, Homo sapiens
ttgagactggcacca

SEQ ID NO: 1853717 - DNA, 15 bp, Homo sapiens
tgagactggcaccag

SEQ ID NO: 1853718 - DNA, 15 bp, Homo sapiens
gagactggcaccagc

SEQ ID NO: 1853719 - DNA, 15 bp, Homo sapiens
agactggcaccagcc

SEQ ID NO: 1853720 - DNA, 15 bp, Homo sapiens
gactggcaccagccc

SEQ ID NO: 1853721 - DNA, 15 bp, Homo sapiens
actggcaccagccct

SEQ ID NO: 1853722 - DNA, 15 bp, Homo sapiens
ctggcaccagccctg

SEQ ID NO: 1853723 - DNA, 15 bp, Homo sapiens
tggcaccagccctgt

SEQ ID NO: 1853724 - DNA, 15 bp, Homo sapiens
ggcaccagccctgtt

SEQ ID NO: 1853725 - DNA, 15 bp, Homo sapiens
gcaccagccctgttg

SEQ ID NO: 1853726 - DNA, 15 bp, Homo sapiens
caccagccctgttgt

SEQ ID NO: 1853727 - DNA, 15 bp, Homo sapiens
accagccctgttgtg

SEQ ID NO: 1853728 - DNA, 15 bp, Homo sapiens
ccagccctgttgtgg

SEQ ID NO: 1853729 - DNA, 15 bp, Homo sapiens
cagccctgttgtggt

SEQ ID NO: 1853730 - DNA, 15 bp, Homo sapiens
agccctgttgtggtt

SEQ ID NO: 1853731 - DNA, 15 bp, Homo sapiens
gccctgttgtggttg

SEQ ID NO: 1853732 - DNA, 15 bp, Homo sapiens
ccctgttgtggttgt

SEQ ID NO: 1853733 - DNA, 15 bp, Homo sapiens
cctgttgtggttgtc

SEQ ID NO: 1853734 - DNA, 15 bp, Homo sapiens
ctgttgtggttgtct

SEQ ID NO: 1853735 - DNA, 15 bp, Homo sapiens
tgttgtggttgtctg

SEQ ID NO: 1853736 - DNA, 15 bp, Homo sapiens
gttgtggttgtctgc

SEQ ID NO: 1853737 - DNA, 15 bp, Homo sapiens
ttgtggttgtctgca

SEQ ID NO: 1853738 - DNA, 15 bp, Homo sapiens
tgtggttgtctgcat

SEQ ID NO: 1853739 - DNA, 15 bp, Homo sapiens
gtggttgtctgcatt

SEQ ID NO: 1853740 - DNA, 15 bp, Homo sapiens
tggttgtctgcattc

SEQ ID NO: 1853741 - DNA, 15 bp, Homo sapiens
ggttgtctgcattca

SEQ ID NO: 1853742 - DNA, 15 bp, Homo sapiens
gttgtctgcattcaa

SEQ ID NO: 1853743 - DNA, 15 bp, Homo sapiens
ttgtctgcattcaac

SEQ ID NO: 1853744 - DNA, 15 bp, Homo sapiens
tgtctgcattcaact

SEQ ID NO: 1853745 - DNA, 15 bp, Homo sapiens
gtctgcattcaactt

SEQ ID NO: 1853746 - DNA, 15 bp, Homo sapiens
tctgcattcaacttc

SEQ ID NO: 1853747 - DNA, 15 bp, Homo sapiens
ctgcattcaacttct

SEQ ID NO: 1853748 - DNA, 15 bp, Homo sapiens
tgcattcaacttctg

SEQ ID NO: 1853749 - DNA, 15 bp, Homo sapiens
gcattcaacttctgg

SEQ ID NO: 1853750 - DNA, 15 bp, Homo sapiens
cattcaacttctggc

SEQ ID NO: 1853751 - DNA, 15 bp, Homo sapiens
attcaacttctggcc

SEQ ID NO: 1853752 - DNA, 15 bp, Homo sapiens
ttcaacttctggccg

SEQ ID NO: 1853753 - DNA, 15 bp, Homo sapiens
tcaacttctggccgg

SEQ ID NO: 1853754 - DNA, 15 bp, Homo sapiens
caacttctggccggc

SEQ ID NO: 1853755 - DNA, 15 bp, Homo sapiens
aacttctggccggca

SEQ ID NO: 1853756 - DNA, 15 bp, Homo sapiens
acttctggccggcag

SEQ ID NO: 1853757 - DNA, 15 bp, Homo sapiens
cttctggccggcagc

SEQ ID NO: 1853758 - DNA, 15 bp, Homo sapiens
ttctggccggcagca

SEQ ID NO: 1853759 - DNA, 15 bp, Homo sapiens
tctggccggcagcag

SEQ ID NO: 1853760 - DNA, 15 bp, Homo sapiens
ctggccggcagcagc

SEQ ID NO: 1853761 - DNA, 15 bp, Homo sapiens
tggccggcagcagca

SEQ ID NO: 1853762 - DNA, 15 bp, Homo sapiens
ggccggcagcagcac

SEQ ID NO: 1853763 - DNA, 15 bp, Homo sapiens
gccggcagcagcaca

SEQ ID NO: 1853764 - DNA, 15 bp, Homo sapiens
ccggcagcagcacag

SEQ ID NO: 1853765 - DNA, 15 bp, Homo sapiens
cggcagcagcacagg

SEQ ID NO: 1853766 - DNA, 15 bp, Homo sapiens
ggcagcagcacaggg

SEQ ID NO: 1853767 - DNA, 15 bp, Homo sapiens
gcagcagcacagggg

SEQ ID NO: 1853768 - DNA, 15 bp, Homo sapiens
cagcagcacaggggt

SEQ ID NO: 1853769 - DNA, 15 bp, Homo sapiens
agcagcacaggggtc

SEQ ID NO: 1853770 - DNA, 15 bp, Homo sapiens
gcagcacaggggtcc

SEQ ID NO: 1853771 - DNA, 15 bp, Homo sapiens
cagcacaggggtcca

SEQ ID NO: 1853772 - DNA, 15 bp, Homo sapiens
agcacaggggtccat

SEQ ID NO: 1853773 - DNA, 15 bp, Homo sapiens
gcacaggggtccatc

SEQ ID NO: 1853774 - DNA, 15 bp, Homo sapiens
cacaggggtccatcc

SEQ ID NO: 1853775 - DNA, 15 bp, Homo sapiens
acaggggtccatcct

SEQ ID NO: 1853776 - DNA, 15 bp, Homo sapiens
caggggtccatcctc

SEQ ID NO: 1853777 - DNA, 15 bp, Homo sapiens
aggggtccatcctct

SEQ ID NO: 1853778 - DNA, 15 bp, Homo sapiens
ggggtccatcctctg

SEQ ID NO: 1853779 - DNA, 15 bp, Homo sapiens
gggtccatcctctgg

SEQ ID NO: 1853780 - DNA, 15 bp, Homo sapiens
ggtccatcctctgga

SEQ ID NO: 1853781 - DNA, 15 bp, Homo sapiens
gtccatcctctggac

SEQ ID NO: 1853782 - DNA, 15 bp, Homo sapiens
tccatcctctggaca

SEQ ID NO: 1853783 - DNA, 15 bp, Homo sapiens
ccatcctctggacat

SEQ ID NO: 1853784 - DNA, 15 bp, Homo sapiens
catcctctggacatc

SEQ ID NO: 1853785 - DNA, 15 bp, Homo sapiens
atcctctggacatca

SEQ ID NO: 1853786 - DNA, 15 bp, Homo sapiens
tcctctggacatcac

SEQ ID NO: 1853787 - DNA, 15 bp, Homo sapiens
cctctggacatcaca

SEQ ID NO: 1853788 - DNA, 15 bp, Homo sapiens
ctctggacatcacag

SEQ ID NO: 1853789 - DNA, 15 bp, Homo sapiens
tctggacatcacagt

SEQ ID NO: 1853790 - DNA, 15 bp, Homo sapiens
ctggacatcacagtg

SEQ ID NO: 1853791 - DNA, 15 bp, Homo sapiens
tggacatcacagtgc

SEQ ID NO: 1853792 - DNA, 15 bp, Homo sapiens
ggacatcacagtgct

SEQ ID NO: 1853793 - DNA, 15 bp, Homo sapiens
gacatcacagtgctg

SEQ ID NO: 1853794 - DNA, 15 bp, Homo sapiens
acatcacagtgctgg

SEQ ID NO: 1853795 - DNA, 15 bp, Homo sapiens
catcacagtgctggg

SEQ ID NO: 1853796 - DNA, 15 bp, Homo sapiens
atcacagtgctgggg

SEQ ID NO: 1853797 - DNA, 15 bp, Homo sapiens
tcacagtgctgggga

SEQ ID NO: 1853798 - DNA, 15 bp, Homo sapiens
cacagtgctggggac

SEQ ID NO: 1853799 - DNA, 15 bp, Homo sapiens
acagtgctggggaca

SEQ ID NO: 1853800 - DNA, 15 bp, Homo sapiens
cagtgctggggacag

SEQ ID NO: 1853801 - DNA, 15 bp, Homo sapiens
agtgctggggacagg

SEQ ID NO: 1853802 - DNA, 15 bp, Homo sapiens
gtgctggggacaggg

SEQ ID NO: 1853803 - DNA, 15 bp, Homo sapiens
tgctggggacagggt

SEQ ID NO: 1853804 - DNA, 15 bp, Homo sapiens
gctggggacagggtc

SEQ ID NO: 1853805 - DNA, 15 bp, Homo sapiens
ctggggacagggtca

SEQ ID NO: 1853806 - DNA, 15 bp, Homo sapiens
tggggacagggtcag

SEQ ID NO: 1853807 - DNA, 15 bp, Homo sapiens
ggggacagggtcagc

SEQ ID NO: 1853808 - DNA, 15 bp, Homo sapiens
gggacagggtcagca

SEQ ID NO: 1853809 - DNA, 15 bp, Homo sapiens
ggacagggtcagcaa

SEQ ID NO: 1853810 - DNA, 15 bp, Homo sapiens
gacagggtcagcaaa

SEQ ID NO: 1853811 - DNA, 15 bp, Homo sapiens
acagggtcagcaaaa

SEQ ID NO: 1853812 - DNA, 15 bp, Homo sapiens
cagggtcagcaaaat

SEQ ID NO: 1853813 - DNA, 15 bp, Homo sapiens
agggtcagcaaaatg

SEQ ID NO: 1853814 - DNA, 15 bp, Homo sapiens
gggtcagcaaaatga

SEQ ID NO: 1853815 - DNA, 15 bp, Homo sapiens
ggtcagcaaaatgaa

SEQ ID NO: 1853816 - DNA, 15 bp, Homo sapiens
gtcagcaaaatgaac

SEQ ID NO: 1853817 - DNA, 15 bp, Homo sapiens
tcagcaaaatgaact

SEQ ID NO: 1853818 - DNA, 15 bp, Homo sapiens
cagcaaaatgaactt

SEQ ID NO: 1853819 - DNA, 15 bp, Homo sapiens
agcaaaatgaacttg

SEQ ID NO: 1853820 - DNA, 15 bp, Homo sapiens
gcaaaatgaacttgg

SEQ ID NO: 1853821 - DNA, 15 bp, Homo sapiens
caaaatgaacttggg

SEQ ID NO: 1853822 - DNA, 15 bp, Homo sapiens
aaaatgaacttgggg

SEQ ID NO: 1853823 - DNA, 15 bp, Homo sapiens
aaatgaacttggggg

SEQ ID NO: 1853824 - DNA, 15 bp, Homo sapiens
aatgaacttgggggt

SEQ ID NO: 1853825 - DNA, 15 bp, Homo sapiens
atgaacttgggggtg

SEQ ID NO: 1853826 - DNA, 15 bp, Homo sapiens
tgaacttgggggtga

SEQ ID NO: 1853827 - DNA, 15 bp, Homo sapiens
gaacttgggggtgac

SEQ ID NO: 1853828 - DNA, 15 bp, Homo sapiens
aacttgggggtgaca

SEQ ID NO: 1853829 - DNA, 15 bp, Homo sapiens
acttgggggtgacaa

SEQ ID NO: 1853830 - DNA, 15 bp, Homo sapiens
cttgggggtgacaac

SEQ ID NO: 1853831 - DNA, 15 bp, Homo sapiens
ttgggggtgacaaca

SEQ ID NO: 1853832 - DNA, 15 bp, Homo sapiens
tgggggtgacaacaa

SEQ ID NO: 1853833 - DNA, 15 bp, Homo sapiens
gggggtgacaacaag

SEQ ID NO: 1853834 - DNA, 15 bp, Homo sapiens
ggggtgacaacaagg

SEQ ID NO: 1853835 - DNA, 15 bp, Homo sapiens
gggtgacaacaagga

SEQ ID NO: 1853836 - DNA, 15 bp, Homo sapiens
ggtgacaacaaggac

SEQ ID NO: 1853837 - DNA, 15 bp, Homo sapiens
gtgacaacaaggaca

SEQ ID NO: 1853838 - DNA, 15 bp, Homo sapiens
tgacaacaaggacaa

SEQ ID NO: 1853839 - DNA, 15 bp, Homo sapiens
gacaacaaggacaaa

SEQ ID NO: 1853840 - DNA, 15 bp, Homo sapiens
acaacaaggacaaac

SEQ ID NO: 1853841 - DNA, 15 bp, Homo sapiens
caacaaggacaaacc

SEQ ID NO: 1853842 - DNA, 15 bp, Homo sapiens
aacaaggacaaaccc

SEQ ID NO: 1853843 - DNA, 15 bp, Homo sapiens
acaaggacaaaccca

SEQ ID NO: 1853844 - DNA, 15 bp, Homo sapiens
caaggacaaacccaa

SEQ ID NO: 1853845 - DNA, 15 bp, Homo sapiens
aaggacaaacccaaa

SEQ ID NO: 1853846 - DNA, 15 bp, Homo sapiens
aggacaaacccaaat

SEQ ID NO: 1853847 - DNA, 15 bp, Homo sapiens
ggacaaacccaaatt

SEQ ID NO: 1853848 - DNA, 15 bp, Homo sapiens
gacaaacccaaattc

SEQ ID NO: 1853849 - DNA, 15 bp, Homo sapiens
acaaacccaaattcc

SEQ ID NO: 1853850 - DNA, 15 bp, Homo sapiens
caaacccaaattcct

SEQ ID NO: 1853851 - DNA, 15 bp, Homo sapiens
aaacccaaattcctg

SEQ ID NO: 1853852 - DNA, 15 bp, Homo sapiens
aacccaaattcctgg

SEQ ID NO: 1853853 - DNA, 15 bp, Homo sapiens
acccaaattcctgga

SEQ ID NO: 1853854 - DNA, 15 bp, Homo sapiens
cccaaattcctggag

SEQ ID NO: 1853855 - DNA, 15 bp, Homo sapiens
ccaaattcctggagc

SEQ ID NO: 1853856 - DNA, 15 bp, Homo sapiens
caaattcctggagct

SEQ ID NO: 1853857 - DNA, 15 bp, Homo sapiens
aaattcctggagctc

SEQ ID NO: 1853858 - DNA, 15 bp, Homo sapiens
aattcctggagctcc

SEQ ID NO: 1853859 - DNA, 15 bp, Homo sapiens
attcctggagctccc

SEQ ID NO: 1853860 - DNA, 15 bp, Homo sapiens
ttcctggagctccct

SEQ ID NO: 1853861 - DNA, 15 bp, Homo sapiens
tcctggagctccctc

SEQ ID NO: 1853862 - DNA, 15 bp, Homo sapiens
cctggagctccctct

SEQ ID NO: 1853863 - DNA, 15 bp, Homo sapiens
ctggagctccctctt

SEQ ID NO: 1853864 - DNA, 15 bp, Homo sapiens
tggagctccctctta

SEQ ID NO: 1853865 - DNA, 15 bp, Homo sapiens
ggagctccctcttac

SEQ ID NO: 1853866 - DNA, 15 bp, Homo sapiens
gagctccctcttaca

SEQ ID NO: 1853867 - DNA, 15 bp, Homo sapiens
agctccctcttacag

SEQ ID NO: 1853868 - DNA, 15 bp, Homo sapiens
gctccctcttacagt

SEQ ID NO: 1853869 - DNA, 15 bp, Homo sapiens
ctccctcttacagta

SEQ ID NO: 1853870 - DNA, 15 bp, Homo sapiens
tccctcttacagtag

SEQ ID NO: 1853871 - DNA, 15 bp, Homo sapiens
ccctcttacagtagg

SEQ ID NO: 1853872 - DNA, 15 bp, Homo sapiens
cctcttacagtagga

SEQ ID NO: 1853873 - DNA, 15 bp, Homo sapiens
ctcttacagtaggag

SEQ ID NO: 1853874 - DNA, 15 bp, Homo sapiens
tcttacagtaggaga

SEQ ID NO: 1853875 - DNA, 15 bp, Homo sapiens
cttacagtaggagat

SEQ ID NO: 1853876 - DNA, 15 bp, Homo sapiens
ttacagtaggagata

SEQ ID NO: 1853877 - DNA, 15 bp, Homo sapiens
tacagtaggagatag

SEQ ID NO: 1853878 - DNA, 15 bp, Homo sapiens
acagtaggagataga

SEQ ID NO: 1853879 - DNA, 15 bp, Homo sapiens
cagtaggagatagat

SEQ ID NO: 1853880 - DNA, 15 bp, Homo sapiens
agtaggagatagatc

SEQ ID NO: 1853881 - DNA, 15 bp, Homo sapiens
gtaggagatagatct

SEQ ID NO: 1853882 - DNA, 15 bp, Homo sapiens
taggagatagatctg

SEQ ID NO: 1853883 - DNA, 15 bp, Homo sapiens
aggagatagatctgt

SEQ ID NO: 1853884 - DNA, 15 bp, Homo sapiens
ggagatagatctgtt

SEQ ID NO: 1853885 - DNA, 15 bp, Homo sapiens
gagatagatctgttt

SEQ ID NO: 1853886 - DNA, 15 bp, Homo sapiens
agatagatctgtttg

SEQ ID NO: 1853887 - DNA, 15 bp, Homo sapiens
gatagatctgtttgc

SEQ ID NO: 1853888 - DNA, 15 bp, Homo sapiens
atagatctgtttgct

SEQ ID NO: 1853889 - DNA, 15 bp, Homo sapiens
tagatctgtttgcta

SEQ ID NO: 1853890 - DNA, 15 bp, Homo sapiens
agatctgtttgctaa

SEQ ID NO: 1853891 - DNA, 15 bp, Homo sapiens
gatctgtttgctaaa

SEQ ID NO: 1853892 - DNA, 15 bp, Homo sapiens
atctgtttgctaaaa

SEQ ID NO: 1853893 - DNA, 15 bp, Homo sapiens
tctgtttgctaaaag

SEQ ID NO: 1853894 - DNA, 15 bp, Homo sapiens
ctgtttgctaaaagt

SEQ ID NO: 1853895 - DNA, 15 bp, Homo sapiens
tgtttgctaaaagta

SEQ ID NO: 1853896 - DNA, 15 bp, Homo sapiens
gtttgctaaaagtac

SEQ ID NO: 1853897 - DNA, 15 bp, Homo sapiens
tttgctaaaagtaca

SEQ ID NO: 1853898 - DNA, 15 bp, Homo sapiens
ttgctaaaagtacag

SEQ ID NO: 1853899 - DNA, 15 bp, Homo sapiens
tgctaaaagtacagg

SEQ ID NO: 1853900 - DNA, 15 bp, Homo sapiens
gctaaaagtacaggt

SEQ ID NO: 1853901 - DNA, 15 bp, Homo sapiens
ctaaaagtacaggtt

SEQ ID NO: 1853902 - DNA, 15 bp, Homo sapiens
taaaagtacaggttg

SEQ ID NO: 1853903 - DNA, 15 bp, Homo sapiens
aaaagtacaggttgt

SEQ ID NO: 1853904 - DNA, 15 bp, Homo sapiens
aaagtacaggttgta

SEQ ID NO: 1853905 - DNA, 15 bp, Homo sapiens
aagtacaggttgtat

SEQ ID NO: 1853906 - DNA, 15 bp, Homo sapiens
agtacaggttgtatg

SEQ ID NO: 1853907 - DNA, 15 bp, Homo sapiens
gtacaggttgtatgt

SEQ ID NO: 1853908 - DNA, 15 bp, Homo sapiens
tacaggttgtatgta

SEQ ID NO: 1853909 - DNA, 15 bp, Homo sapiens
acaggttgtatgtaa

SEQ ID NO: 1853910 - DNA, 15 bp, Homo sapiens
caggttgtatgtaac

SEQ ID NO: 1853911 - DNA, 15 bp, Homo sapiens
aggttgtatgtaacc

SEQ ID NO: 1853912 - DNA, 15 bp, Homo sapiens
ggttgtatgtaacct

SEQ ID NO: 1853913 - DNA, 15 bp, Homo sapiens
gttgtatgtaacctt

SEQ ID NO: 1853914 - DNA, 15 bp, Homo sapiens
ttgtatgtaaccttg

SEQ ID NO: 1853915 - DNA, 15 bp, Homo sapiens
tgtatgtaaccttgg

SEQ ID NO: 1853916 - DNA, 15 bp, Homo sapiens
gtatgtaaccttggt

SEQ ID NO: 1853917 - DNA, 15 bp, Homo sapiens
tatgtaaccttggtt

SEQ ID NO: 1853918 - DNA, 15 bp, Homo sapiens
atgtaaccttggttt

SEQ ID NO: 1853919 - DNA, 15 bp, Homo sapiens
tgtaaccttggtttt

SEQ ID NO: 1853920 - DNA, 15 bp, Homo sapiens
gtaaccttggttttt

SEQ ID NO: 1853921 - DNA, 15 bp, Homo sapiens
taaccttggtttttg

SEQ ID NO: 1853922 - DNA, 15 bp, Homo sapiens
aaccttggtttttgt

SEQ ID NO: 1853923 - DNA, 15 bp, Homo sapiens
accttggtttttgtg

SEQ ID NO: 1853924 - DNA, 15 bp, Homo sapiens
ccttggtttttgtgc

SEQ ID NO: 1853925 - DNA, 15 bp, Homo sapiens
cttggtttttgtgcc

SEQ ID NO: 1853926 - DNA, 15 bp, Homo sapiens
ttggtttttgtgcct

SEQ ID NO: 1853927 - DNA, 15 bp, Homo sapiens
tggtttttgtgcctg

SEQ ID NO: 1853928 - DNA, 15 bp, Homo sapiens
ggtttttgtgcctgt

SEQ ID NO: 1853929 - DNA, 15 bp, Homo sapiens
gtttttgtgcctgta

SEQ ID NO: 1853930 - DNA, 15 bp, Homo sapiens
tttttgtgcctgtat

SEQ ID NO: 1853931 - DNA, 15 bp, Homo sapiens
ttttgtgcctgtata

SEQ ID NO: 1853932 - DNA, 15 bp, Homo sapiens
tttgtgcctgtatac

SEQ ID NO: 1853933 - DNA, 15 bp, Homo sapiens
ttgtgcctgtatact

SEQ ID NO: 1853934 - DNA, 15 bp, Homo sapiens
tgtgcctgtatactg

SEQ ID NO: 1853935 - DNA, 15 bp, Homo sapiens
gtgcctgtatactgg

SEQ ID NO: 1853936 - DNA, 15 bp, Homo sapiens
tgcctgtatactggt

SEQ ID NO: 1853937 - DNA, 15 bp, Homo sapiens
gcctgtatactggtg

SEQ ID NO: 1853938 - DNA, 15 bp, Homo sapiens
cctgtatactggtgc

SEQ ID NO: 1853939 - DNA, 15 bp, Homo sapiens
ctgtatactggtgcc

SEQ ID NO: 1853940 - DNA, 15 bp, Homo sapiens
tgtatactggtgcct

SEQ ID NO: 1853941 - DNA, 15 bp, Homo sapiens
gtatactggtgcctg

SEQ ID NO: 1853942 - DNA, 15 bp, Homo sapiens
tatactggtgcctga

SEQ ID NO: 1853943 - DNA, 15 bp, Homo sapiens
atactggtgcctgaa

SEQ ID NO: 1853944 - DNA, 15 bp, Homo sapiens
tactggtgcctgaaa

SEQ ID NO: 1853945 - DNA, 15 bp, Homo sapiens
actggtgcctgaaaa

SEQ ID NO: 1853946 - DNA, 15 bp, Homo sapiens
ctggtgcctgaaaaa

SEQ ID NO: 1853947 - DNA, 15 bp, Homo sapiens
tggtgcctgaaaaaa

SEQ ID NO: 1853948 - DNA, 15 bp, Homo sapiens
ggtgcctgaaaaaaa

SEQ ID NO: 1853949 - DNA, 15 bp, Homo sapiens
gtgcctgaaaaaaac

SEQ ID NO: 1853950 - DNA, 15 bp, Homo sapiens
cctgaaaaaaacatt

SEQ ID NO: 1853951 - DNA, 15 bp, Homo sapiens
ctgaaaaaaacatta

SEQ ID NO: 1853952 - DNA, 15 bp, Homo sapiens
tgaaaaaaacattaa

SEQ ID NO: 1853953 - DNA, 15 bp, Homo sapiens
gaaaaaaacattaat

SEQ ID NO: 1853954 - DNA, 15 bp, Homo sapiens
aaaaaaacattaata

SEQ ID NO: 1853955 - DNA, 15 bp, Homo sapiens
aaaaaacattaatac

SEQ ID NO: 1853956 - DNA, 15 bp, Homo sapiens
aaaaacattaatact

SEQ ID NO: 1853957 - DNA, 15 bp, Homo sapiens
aaaacattaatactt

SEQ ID NO: 1853958 - DNA, 15 bp, Homo sapiens
aaacattaatacttg

SEQ ID NO: 1853959 - DNA, 15 bp, Homo sapiens
aacattaatacttgg

SEQ ID NO: 1853960 - DNA, 15 bp, Homo sapiens
acattaatacttggg

SEQ ID NO: 1853961 - DNA, 15 bp, Homo sapiens
cattaatacttggga

SEQ ID NO: 1853962 - DNA, 15 bp, Homo sapiens
attaatacttgggac

SEQ ID NO: 1853963 - DNA, 15 bp, Homo sapiens
ttaatacttgggaca

SEQ ID NO: 1853964 - DNA, 15 bp, Homo sapiens
taatacttgggacat

SEQ ID NO: 1853965 - DNA, 15 bp, Homo sapiens
aatacttgggacatt

SEQ ID NO: 1853966 - DNA, 15 bp, Homo sapiens
atacttgggacattt

SEQ ID NO: 1853967 - DNA, 15 bp, Homo sapiens
tacttgggacatttt

SEQ ID NO: 1853968 - DNA, 15 bp, Homo sapiens
acttgggacattttt

SEQ ID NO: 1853969 - DNA, 15 bp, Homo sapiens
cttgggacattttta

SEQ ID NO: 1853970 - DNA, 15 bp, Homo sapiens
ttgggacatttttat

SEQ ID NO: 1853971 - DNA, 15 bp, Homo sapiens
tgggacatttttatt

SEQ ID NO: 1853972 - DNA, 15 bp, Homo sapiens
gggacatttttattt

SEQ ID NO: 1853973 - DNA, 15 bp, Homo sapiens
ggacatttttatttt

SEQ ID NO: 1853974 - DNA, 15 bp, Homo sapiens
gacatttttattttg

SEQ ID NO: 1853975 - DNA, 15 bp, Homo sapiens
acatttttattttgc

SEQ ID NO: 1853976 - DNA, 15 bp, Homo sapiens
catttttattttgcc

SEQ ID NO: 1853977 - DNA, 15 bp, Homo sapiens
atttttattttgcca

SEQ ID NO: 1853978 - DNA, 15 bp, Homo sapiens
tttttattttgccaa

SEQ ID NO: 1853979 - DNA, 15 bp, Homo sapiens
ttttattttgccaag

SEQ ID NO: 1853980 - DNA, 15 bp, Homo sapiens
tttattttgccaagg

SEQ ID NO: 1853981 - DNA, 15 bp, Homo sapiens
ttattttgccaaggt

SEQ ID NO: 1853982 - DNA, 15 bp, Homo sapiens
tattttgccaaggtt

SEQ ID NO: 1853983 - DNA, 15 bp, Homo sapiens
attttgccaaggttc

SEQ ID NO: 1853984 - DNA, 15 bp, Homo sapiens
ttttgccaaggttct

SEQ ID NO: 1853985 - DNA, 15 bp, Homo sapiens
tttgccaaggttctg

SEQ ID NO: 1853986 - DNA, 15 bp, Homo sapiens
ttgccaaggttctgg

SEQ ID NO: 1853987 - DNA, 15 bp, Homo sapiens
tgccaaggttctggg

SEQ ID NO: 1853988 - DNA, 15 bp, Homo sapiens
gccaaggttctggga

SEQ ID NO: 1853989 - DNA, 15 bp, Homo sapiens
ccaaggttctgggag

SEQ ID NO: 1853990 - DNA, 15 bp, Homo sapiens
caaggttctgggaga

SEQ ID NO: 1853991 - DNA, 15 bp, Homo sapiens
aaggttctgggagaa

SEQ ID NO: 1853992 - DNA, 15 bp, Homo sapiens
aggttctgggagaag

SEQ ID NO: 1853993 - DNA, 15 bp, Homo sapiens
ggttctgggagaagg

SEQ ID NO: 1853994 - DNA, 15 bp, Homo sapiens
gttctgggagaagga

SEQ ID NO: 1853995 - DNA, 15 bp, Homo sapiens
ttctgggagaaggaa

SEQ ID NO: 1853996 - DNA, 15 bp, Homo sapiens
tctgggagaaggaaa

SEQ ID NO: 1853997 - DNA, 15 bp, Homo sapiens
tgggagaaggaaaag

SEQ ID NO: 1853998 - DNA, 15 bp, Homo sapiens
gggagaaggaaaagt

SEQ ID NO: 1853999 - DNA, 15 bp, Homo sapiens
ggagaaggaaaagtg

SEQ ID NO: 1854000 - DNA, 15 bp, Homo sapiens
gagaaggaaaagtga

SEQ ID NO: 1854001 - DNA, 15 bp, Homo sapiens
agaaggaaaagtgaa

SEQ ID NO: 1854002 - DNA, 15 bp, Homo sapiens
gaaggaaaagtgaag

SEQ ID NO: 1854003 - DNA, 15 bp, Homo sapiens
aaggaaaagtgaagg

SEQ ID NO: 1854004 - DNA, 15 bp, Homo sapiens
aggaaaagtgaaggg

SEQ ID NO: 1854005 - DNA, 15 bp, Homo sapiens
ggaaaagtgaagggt

SEQ ID NO: 1854006 - DNA, 15 bp, Homo sapiens
gaaaagtgaagggtt

SEQ ID NO: 1854007 - DNA, 15 bp, Homo sapiens
aaaagtgaagggttg

SEQ ID NO: 1854008 - DNA, 15 bp, Homo sapiens
aaagtgaagggttgg

SEQ ID NO: 1854009 - DNA, 15 bp, Homo sapiens
aagtgaagggttggg

SEQ ID NO: 1854010 - DNA, 15 bp, Homo sapiens
agtgaagggttgggc

SEQ ID NO: 1854011 - DNA, 15 bp, Homo sapiens
gtgaagggttgggca

SEQ ID NO: 1854012 - DNA, 15 bp, Homo sapiens
tgaagggttgggcac

SEQ ID NO: 1854013 - DNA, 15 bp, Homo sapiens
gaagggttgggcacc

SEQ ID NO: 1854014 - DNA, 15 bp, Homo sapiens
aagggttgggcacca

SEQ ID NO: 1854015 - DNA, 15 bp, Homo sapiens
agggttgggcaccat

SEQ ID NO: 1854016 - DNA, 15 bp, Homo sapiens
gggttgggcaccatt

SEQ ID NO: 1854017 - DNA, 15 bp, Homo sapiens
ggttgggcaccattt

SEQ ID NO: 1854018 - DNA, 15 bp, Homo sapiens
gttgggcaccattta

SEQ ID NO: 1854019 - DNA, 15 bp, Homo sapiens
ttgggcaccatttag

SEQ ID NO: 1854020 - DNA, 15 bp, Homo sapiens
tgggcaccatttagc

SEQ ID NO: 1854021 - DNA, 15 bp, Homo sapiens
gggcaccatttagct

SEQ ID NO: 1854022 - DNA, 15 bp, Homo sapiens
ggcaccatttagctc

SEQ ID NO: 1854023 - DNA, 15 bp, Homo sapiens
gcaccatttagctcc

SEQ ID NO: 1854024 - DNA, 15 bp, Homo sapiens
caccatttagctcct

SEQ ID NO: 1854025 - DNA, 15 bp, Homo sapiens
accatttagctcctg

SEQ ID NO: 1854026 - DNA, 15 bp, Homo sapiens
ccatttagctcctgg

SEQ ID NO: 1854027 - DNA, 15 bp, Homo sapiens
catttagctcctgga

SEQ ID NO: 1854028 - DNA, 15 bp, Homo sapiens
atttagctcctggaa

SEQ ID NO: 1854029 - DNA, 15 bp, Homo sapiens
tttagctcctggaat

SEQ ID NO: 1854030 - DNA, 15 bp, Homo sapiens
ttagctcctggaatt

SEQ ID NO: 1854031 - DNA, 15 bp, Homo sapiens
tagctcctggaattc

SEQ ID NO: 1854032 - DNA, 15 bp, Homo sapiens
agctcctggaattct

SEQ ID NO: 1854033 - DNA, 15 bp, Homo sapiens
gctcctggaattctg

SEQ ID NO: 1854034 - DNA, 15 bp, Homo sapiens
ctcctggaattctgc

SEQ ID NO: 1854035 - DNA, 15 bp, Homo sapiens
tcctggaattctgca

SEQ ID NO: 1854036 - DNA, 15 bp, Homo sapiens
cctggaattctgcaa

SEQ ID NO: 1854037 - DNA, 15 bp, Homo sapiens
ctggaattctgcaag

SEQ ID NO: 1854038 - DNA, 15 bp, Homo sapiens
tggaattctgcaagt

SEQ ID NO: 1854039 - DNA, 15 bp, Homo sapiens
ggaattctgcaagtc

SEQ ID NO: 1854040 - DNA, 15 bp, Homo sapiens
gaattctgcaagtcc

SEQ ID NO: 1854041 - DNA, 15 bp, Homo sapiens
aattctgcaagtcct

SEQ ID NO: 1854042 - DNA, 15 bp, Homo sapiens
attctgcaagtcctt

SEQ ID NO: 1854043 - DNA, 15 bp, Homo sapiens
ttctgcaagtccttc

SEQ ID NO: 1854044 - DNA, 15 bp, Homo sapiens
tctgcaagtccttcc

SEQ ID NO: 1854045 - DNA, 15 bp, Homo sapiens
ctgcaagtccttccg

SEQ ID NO: 1854046 - DNA, 15 bp, Homo sapiens
tgcaagtccttccgc

SEQ ID NO: 1854047 - DNA, 15 bp, Homo sapiens
gcaagtccttccgcc

SEQ ID NO: 1854048 - DNA, 15 bp, Homo sapiens
caagtccttccgcct

SEQ ID NO: 1854049 - DNA, 15 bp, Homo sapiens
aagtccttccgcctc

SEQ ID NO: 1854050 - DNA, 15 bp, Homo sapiens
agtccttccgcctcc

SEQ ID NO: 1854051 - DNA, 15 bp, Homo sapiens
gtccttccgcctcct

SEQ ID NO: 1854052 - DNA, 15 bp, Homo sapiens
tccttccgcctcctg

SEQ ID NO: 1854053 - DNA, 15 bp, Homo sapiens
ccttccgcctcctgc

SEQ ID NO: 1854054 - DNA, 15 bp, Homo sapiens
cttccgcctcctgcg

SEQ ID NO: 1854055 - DNA, 15 bp, Homo sapiens
ttccgcctcctgcgt

SEQ ID NO: 1854056 - DNA, 15 bp, Homo sapiens
tccgcctcctgcgtt

SEQ ID NO: 1854057 - DNA, 15 bp, Homo sapiens
ccgcctcctgcgttt

SEQ ID NO: 1854058 - DNA, 15 bp, Homo sapiens
cgcctcctgcgtttt

SEQ ID NO: 1854059 - DNA, 15 bp, Homo sapiens
gcctcctgcgttttg

SEQ ID NO: 1854060 - DNA, 15 bp, Homo sapiens
cctcctgcgttttgg

SEQ ID NO: 1854061 - DNA, 15 bp, Homo sapiens
ctcctgcgttttggc

SEQ ID NO: 1854062 - DNA, 15 bp, Homo sapiens
tcctgcgttttggct

SEQ ID NO: 1854063 - DNA, 15 bp, Homo sapiens
cctgcgttttggctg

SEQ ID NO: 1854064 - DNA, 15 bp, Homo sapiens
ctgcgttttggctgt

SEQ ID NO: 1854065 - DNA, 15 bp, Homo sapiens
tgcgttttggctgtt

SEQ ID NO: 1854066 - DNA, 15 bp, Homo sapiens
gcgttttggctgttg

SEQ ID NO: 1854067 - DNA, 15 bp, Homo sapiens
cgttttggctgttgg

SEQ ID NO: 1854068 - DNA, 15 bp, Homo sapiens
gttttggctgttggg

SEQ ID NO: 1854069 - DNA, 15 bp, Homo sapiens
ttttggctgttgggc

SEQ ID NO: 1854070 - DNA, 15 bp, Homo sapiens
tttggctgttgggcc

SEQ ID NO: 1854071 - DNA, 15 bp, Homo sapiens
ttggctgttgggcct

SEQ ID NO: 1854072 - DNA, 15 bp, Homo sapiens
tggctgttgggcctt

SEQ ID NO: 1854073 - DNA, 15 bp, Homo sapiens
ggctgttgggccttt

SEQ ID NO: 1854074 - DNA, 15 bp, Homo sapiens
gctgttgggcctttc

SEQ ID NO: 1854075 - DNA, 15 bp, Homo sapiens
ctgttgggcctttcc

SEQ ID NO: 1854076 - DNA, 15 bp, Homo sapiens
tgttgggcctttccc

SEQ ID NO: 1854077 - DNA, 15 bp, Homo sapiens
gttgggcctttcccc

SEQ ID NO: 1854078 - DNA, 15 bp, Homo sapiens
ttgggcctttccccc

SEQ ID NO: 1854079 - DNA, 15 bp, Homo sapiens
tgggcctttcccccc

SEQ ID NO: 1854080 - DNA, 15 bp, Homo sapiens
gggcctttcccccca

SEQ ID NO: 1854081 - DNA, 15 bp, Homo sapiens
ggcctttccccccac

SEQ ID NO: 1854082 - DNA, 15 bp, Homo sapiens
gcctttccccccact

SEQ ID NO: 1854083 - DNA, 15 bp, Homo sapiens
cctttccccccacta

SEQ ID NO: 1854084 - DNA, 15 bp, Homo sapiens
ctttccccccactaa

SEQ ID NO: 1854085 - DNA, 15 bp, Homo sapiens
tttccccccactaat

SEQ ID NO: 1854086 - DNA, 15 bp, Homo sapiens
ttccccccactaatt

SEQ ID NO: 1854087 - DNA, 15 bp, Homo sapiens
tccccccactaatta

SEQ ID NO: 1854088 - DNA, 15 bp, Homo sapiens
ccccccactaattaa

SEQ ID NO: 1854089 - DNA, 15 bp, Homo sapiens
cccccactaattaaa

SEQ ID NO: 1854090 - DNA, 15 bp, Homo sapiens
ccccactaattaaaa

SEQ ID NO: 1854091 - DNA, 15 bp, Homo sapiens
cccactaattaaaag

SEQ ID NO: 1854092 - DNA, 15 bp, Homo sapiens
ccactaattaaaagt

SEQ ID NO: 1854093 - DNA, 15 bp, Homo sapiens
cactaattaaaagtt

SEQ ID NO: 1854094 - DNA, 15 bp, Homo sapiens
actaattaaaagttt

SEQ ID NO: 1854095 - DNA, 15 bp, Homo sapiens
ctaattaaaagtttt

SEQ ID NO: 1854096 - DNA, 15 bp, Homo sapiens
taattaaaagttttg

SEQ ID NO: 1854097 - DNA, 15 bp, Homo sapiens
aattaaaagttttgc

SEQ ID NO: 1854098 - DNA, 15 bp, Homo sapiens
attaaaagttttgct

SEQ ID NO: 1854099 - DNA, 15 bp, Homo sapiens
ttaaaagttttgctg

SEQ ID NO: 1854100 - DNA, 15 bp, Homo sapiens
taaaagttttgctgg

SEQ ID NO: 1854101 - DNA, 15 bp, Homo sapiens
aaaagttttgctggg

SEQ ID NO: 1854102 - DNA, 15 bp, Homo sapiens
aaagttttgctgggg

SEQ ID NO: 1854103 - DNA, 15 bp, Homo sapiens
aagttttgctggggc

SEQ ID NO: 1854104 - DNA, 15 bp, Homo sapiens
agttttgctggggcg

SEQ ID NO: 1854105 - DNA, 15 bp, Homo sapiens
gttttgctggggcgt

SEQ ID NO: 1854106 - DNA, 15 bp, Homo sapiens
ttttgctggggcgtt

SEQ ID NO: 1854107 - DNA, 15 bp, Homo sapiens
tttgctggggcgttg

SEQ ID NO: 1854108 - DNA, 15 bp, Homo sapiens
ttgctggggcgttgt

SEQ ID NO: 1854109 - DNA, 15 bp, Homo sapiens
tgctggggcgttgtc

SEQ ID NO: 1854110 - DNA, 15 bp, Homo sapiens
gctggggcgttgtca

SEQ ID NO: 1854111 - DNA, 15 bp, Homo sapiens
ctggggcgttgtcat

SEQ ID NO: 1854112 - DNA, 15 bp, Homo sapiens
tggggcgttgtcata

SEQ ID NO: 1854113 - DNA, 15 bp, Homo sapiens
ggggcgttgtcataa

SEQ ID NO: 1854114 - DNA, 15 bp, Homo sapiens
gggcgttgtcataaa

SEQ ID NO: 1854115 - DNA, 15 bp, Homo sapiens
ggcgttgtcataaat

SEQ ID NO: 1854116 - DNA, 15 bp, Homo sapiens
gcgttgtcataaatt

SEQ ID NO: 1854117 - DNA, 15 bp, Homo sapiens
cgttgtcataaatta

SEQ ID NO: 1854118 - DNA, 15 bp, Homo sapiens
gttgtcataaattaa

SEQ ID NO: 1854119 - DNA, 15 bp, Homo sapiens
ttgtcataaattaaa

SEQ ID NO: 1854120 - DNA, 15 bp, Homo sapiens
tgtcataaattaaat

SEQ ID NO: 1854121 - DNA, 15 bp, Homo sapiens
gtcataaattaaata

SEQ ID NO: 1854122 - DNA, 15 bp, Homo sapiens
tcataaattaaatac

SEQ ID NO: 1854123 - DNA, 15 bp, Homo sapiens
taaattaaatacttt

SEQ ID NO: 1854124 - DNA, 15 bp, Homo sapiens
aaattaaatacttta

SEQ ID NO: 1854125 - DNA, 15 bp, Homo sapiens
aattaaatactttaa

SEQ ID NO: 1854126 - DNA, 15 bp, Homo sapiens
attaaatactttaat

SEQ ID NO: 1854127 - DNA, 15 bp, Homo sapiens
ttaaatactttaatg

SEQ ID NO: 1854128 - DNA, 15 bp, Homo sapiens
taaatactttaatga

SEQ ID NO: 1854129 - DNA, 15 bp, Homo sapiens
aaatactttaatgaa

SEQ ID NO: 1854130 - DNA, 15 bp, Homo sapiens
aatactttaatgaac

SEQ ID NO: 1854131 - DNA, 15 bp, Homo sapiens
atactttaatgaacg

SEQ ID NO: 1854132 - DNA, 15 bp, Homo sapiens
tactttaatgaacgt

SEQ ID NO: 1854133 - DNA, 15 bp, Homo sapiens
actttaatgaacgtg

SEQ ID NO: 1854134 - DNA, 15 bp, Homo sapiens
ctttaatgaacgtgt

SEQ ID NO: 1854135 - DNA, 15 bp, Homo sapiens
tttaatgaacgtgta

SEQ ID NO: 1854136 - DNA, 15 bp, Homo sapiens
ttaatgaacgtgtaa

SEQ ID NO: 1854137 - DNA, 15 bp, Homo sapiens
taatgaacgtgtaac

SEQ ID NO: 1854138 - DNA, 15 bp, Homo sapiens
aatgaacgtgtaacc

SEQ ID NO: 1854139 - DNA, 15 bp, Homo sapiens
atgaacgtgtaaccg

SEQ ID NO: 1854140 - DNA, 15 bp, Homo sapiens
tgaacgtgtaaccga

SEQ ID NO: 1854141 - DNA, 15 bp, Homo sapiens
gaacgtgtaaccgaa

SEQ ID NO: 1854142 - DNA, 15 bp, Homo sapiens
aacgtgtaaccgaag

SEQ ID NO: 1854143 - DNA, 15 bp, Homo sapiens
acgtgtaaccgaagc

SEQ ID NO: 1854144 - DNA, 15 bp, Homo sapiens
cgtgtaaccgaagcc

SEQ ID NO: 1854145 - DNA, 15 bp, Homo sapiens
gtgtaaccgaagccc

SEQ ID NO: 1854146 - DNA, 15 bp, Homo sapiens
tgtaaccgaagccca

SEQ ID NO: 1854147 - DNA, 15 bp, Homo sapiens
gtaaccgaagcccat

SEQ ID NO: 1854148 - DNA, 15 bp, Homo sapiens
taaccgaagcccata

SEQ ID NO: 1854149 - DNA, 15 bp, Homo sapiens
aaccgaagcccatac

SEQ ID NO: 1854150 - DNA, 15 bp, Homo sapiens
accgaagcccatact

SEQ ID NO: 1854151 - DNA, 15 bp, Homo sapiens
ccgaagcccatactc

SEQ ID NO: 1854152 - DNA, 15 bp, Homo sapiens
cgaagcccatactct

SEQ ID NO: 1854153 - DNA, 15 bp, Homo sapiens
gaagcccatactctg

SEQ ID NO: 1854154 - DNA, 15 bp, Homo sapiens
aagcccatactctgc

SEQ ID NO: 1854155 - DNA, 15 bp, Homo sapiens
agcccatactctgca

SEQ ID NO: 1854156 - DNA, 15 bp, Homo sapiens
gcccatactctgcag

SEQ ID NO: 1854157 - DNA, 15 bp, Homo sapiens
cccatactctgcagc

SEQ ID NO: 1854158 - DNA, 15 bp, Homo sapiens
ccatactctgcagcc

SEQ ID NO: 1854159 - DNA, 15 bp, Homo sapiens
catactctgcagcca

SEQ ID NO: 1854160 - DNA, 15 bp, Homo sapiens
atactctgcagccag

SEQ ID NO: 1854161 - DNA, 15 bp, Homo sapiens
tactctgcagccagt

SEQ ID NO: 1854162 - DNA, 15 bp, Homo sapiens
actctgcagccagtc

SEQ ID NO: 1854163 - DNA, 15 bp, Homo sapiens
ctctgcagccagtcc

SEQ ID NO: 1854164 - DNA, 15 bp, Homo sapiens
tctgcagccagtcct

SEQ ID NO: 1854165 - DNA, 15 bp, Homo sapiens
ctgcagccagtcctc

SEQ ID NO: 1854166 - DNA, 15 bp, Homo sapiens
tgcagccagtcctcc

SEQ ID NO: 1854167 - DNA, 15 bp, Homo sapiens
gcagccagtcctcct

SEQ ID NO: 1854168 - DNA, 15 bp, Homo sapiens
cagccagtcctcctg

SEQ ID NO: 1854169 - DNA, 15 bp, Homo sapiens
agccagtcctcctgg

SEQ ID NO: 1854170 - DNA, 15 bp, Homo sapiens
gccagtcctcctggg

SEQ ID NO: 1854171 - DNA, 15 bp, Homo sapiens
ccagtcctcctggga

SEQ ID NO: 1854172 - DNA, 15 bp, Homo sapiens
cagtcctcctgggac

SEQ ID NO: 1854173 - DNA, 15 bp, Homo sapiens
agtcctcctgggact

SEQ ID NO: 1854174 - DNA, 15 bp, Homo sapiens
gtcctcctgggactc

SEQ ID NO: 1854175 - DNA, 15 bp, Homo sapiens
tcctcctgggactct

SEQ ID NO: 1854176 - DNA, 15 bp, Homo sapiens
cctcctgggactcta

SEQ ID NO: 1854177 - DNA, 15 bp, Homo sapiens
ctcctgggactctac

SEQ ID NO: 1854178 - DNA, 15 bp, Homo sapiens
tcctgggactctacc

SEQ ID NO: 1854179 - DNA, 15 bp, Homo sapiens
cctgggactctacca

SEQ ID NO: 1854180 - DNA, 15 bp, Homo sapiens
ctgggactctaccag

SEQ ID NO: 1854181 - DNA, 15 bp, Homo sapiens
tgggactctaccagc

SEQ ID NO: 1854182 - DNA, 15 bp, Homo sapiens
gggactctaccagct

SEQ ID NO: 1854183 - DNA, 15 bp, Homo sapiens
ggactctaccagctc

SEQ ID NO: 1854184 - DNA, 15 bp, Homo sapiens
gactctaccagctcc

SEQ ID NO: 1854185 - DNA, 15 bp, Homo sapiens
actctaccagctccc

SEQ ID NO: 1854186 - DNA, 15 bp, Homo sapiens
ctctaccagctccct

SEQ ID NO: 1854187 - DNA, 15 bp, Homo sapiens
tctaccagctccctc

SEQ ID NO: 1854188 - DNA, 15 bp, Homo sapiens
ctaccagctccctca

SEQ ID NO: 1854189 - DNA, 15 bp, Homo sapiens
taccagctccctcaa

SEQ ID NO: 1854190 - DNA, 15 bp, Homo sapiens
accagctccctcaag

SEQ ID NO: 1854191 - DNA, 15 bp, Homo sapiens
ccagctccctcaagt

SEQ ID NO: 1854192 - DNA, 15 bp, Homo sapiens
cagctccctcaagtt

SEQ ID NO: 1854193 - DNA, 15 bp, Homo sapiens
agctccctcaagttg

SEQ ID NO: 1854194 - DNA, 15 bp, Homo sapiens
gctccctcaagttgg

SEQ ID NO: 1854195 - DNA, 15 bp, Homo sapiens
ctccctcaagttggg

SEQ ID NO: 1854196 - DNA, 15 bp, Homo sapiens
tccctcaagttggga

SEQ ID NO: 1854197 - DNA, 15 bp, Homo sapiens
ccctcaagttgggaa

SEQ ID NO: 1854198 - DNA, 15 bp, Homo sapiens
cctcaagttgggaag

SEQ ID NO: 1854199 - DNA, 15 bp, Homo sapiens
ctcaagttgggaagg

SEQ ID NO: 1854200 - DNA, 15 bp, Homo sapiens
tcaagttgggaaggc

SEQ ID NO: 1854201 - DNA, 15 bp, Homo sapiens
caagttgggaaggcg

SEQ ID NO: 1854202 - DNA, 15 bp, Homo sapiens
aagttgggaaggcgt

SEQ ID NO: 1854203 - DNA, 15 bp, Homo sapiens
agttgggaaggcgtt

SEQ ID NO: 1854204 - DNA, 15 bp, Homo sapiens
gttgggaaggcgttc

SEQ ID NO: 1854205 - DNA, 15 bp, Homo sapiens
ttgggaaggcgttcc

SEQ ID NO: 1854206 - DNA, 15 bp, Homo sapiens
tgggaaggcgttcct

SEQ ID NO: 1854207 - DNA, 15 bp, Homo sapiens
gggaaggcgttcctg

SEQ ID NO: 1854208 - DNA, 15 bp, Homo sapiens
ggaaggcgttcctgc

SEQ ID NO: 1854209 - DNA, 15 bp, Homo sapiens
gaaggcgttcctgct

SEQ ID NO: 1854210 - DNA, 15 bp, Homo sapiens
aaggcgttcctgctt

SEQ ID NO: 1854211 - DNA, 15 bp, Homo sapiens
aggcgttcctgcttg

SEQ ID NO: 1854212 - DNA, 15 bp, Homo sapiens
ggcgttcctgcttgc

SEQ ID NO: 1854213 - DNA, 15 bp, Homo sapiens
gcgttcctgcttgcc

SEQ ID NO: 1854214 - DNA, 15 bp, Homo sapiens
cgttcctgcttgcct

SEQ ID NO: 1854215 - DNA, 15 bp, Homo sapiens
gttcctgcttgcctg

SEQ ID NO: 1854216 - DNA, 15 bp, Homo sapiens
ttcctgcttgcctgg

SEQ ID NO: 1854217 - DNA, 15 bp, Homo sapiens
tcctgcttgcctggt

SEQ ID NO: 1854218 - DNA, 15 bp, Homo sapiens
cctgcttgcctggtg

SEQ ID NO: 1854219 - DNA, 15 bp, Homo sapiens
ctgcttgcctggtgc

SEQ ID NO: 1854220 - DNA, 15 bp, Homo sapiens
tgcttgcctggtgcc

SEQ ID NO: 1854221 - DNA, 15 bp, Homo sapiens
gcttgcctggtgccg

SEQ ID NO: 1854222 - DNA, 15 bp, Homo sapiens
cttgcctggtgccgg

SEQ ID NO: 1854223 - DNA, 15 bp, Homo sapiens
ttgcctggtgccggt

SEQ ID NO: 1854224 - DNA, 15 bp, Homo sapiens
tgcctggtgccggtc

SEQ ID NO: 1854225 - DNA, 15 bp, Homo sapiens
gcctggtgccggtct

SEQ ID NO: 1854226 - DNA, 15 bp, Homo sapiens
cctggtgccggtcta

SEQ ID NO: 1854227 - DNA, 15 bp, Homo sapiens
ctggtgccggtctaa

SEQ ID NO: 1854228 - DNA, 15 bp, Homo sapiens
tggtgccggtctaat

SEQ ID NO: 1854229 - DNA, 15 bp, Homo sapiens
ggtgccggtctaata

SEQ ID NO: 1854230 - DNA, 15 bp, Homo sapiens
gtgccggtctaataa

SEQ ID NO: 1854231 - DNA, 15 bp, Homo sapiens
tgccggtctaataag

SEQ ID NO: 1854232 - DNA, 15 bp, Homo sapiens
gccggtctaataagt

SEQ ID NO: 1854233 - DNA, 15 bp, Homo sapiens
ccggtctaataagtg

SEQ ID NO: 1854234 - DNA, 15 bp, Homo sapiens
cggtctaataagtgg

SEQ ID NO: 1854235 - DNA, 15 bp, Homo sapiens
ggtctaataagtggc

SEQ ID NO: 1854236 - DNA, 15 bp, Homo sapiens
gtctaataagtggcc

SEQ ID NO: 1854237 - DNA, 15 bp, Homo sapiens
tctaataagtggccc

SEQ ID NO: 1854238 - DNA, 15 bp, Homo sapiens
ctaataagtggcccg

SEQ ID NO: 1854239 - DNA, 15 bp, Homo sapiens
taataagtggcccgc

SEQ ID NO: 1854240 - DNA, 15 bp, Homo sapiens
aataagtggcccgca

SEQ ID NO: 1854241 - DNA, 15 bp, Homo sapiens
ataagtggcccgcaa

SEQ ID NO: 1854242 - DNA, 15 bp, Homo sapiens
taagtggcccgcaaa

SEQ ID NO: 1854243 - DNA, 15 bp, Homo sapiens
aagtggcccgcaaag

SEQ ID NO: 1854244 - DNA, 15 bp, Homo sapiens
agtggcccgcaaagc

SEQ ID NO: 1854245 - DNA, 15 bp, Homo sapiens
gtggcccgcaaagca

SEQ ID NO: 1854246 - DNA, 15 bp, Homo sapiens
tggcccgcaaagcat

SEQ ID NO: 1854247 - DNA, 15 bp, Homo sapiens
ggcccgcaaagcatg

SEQ ID NO: 1854248 - DNA, 15 bp, Homo sapiens
gcccgcaaagcatgt

SEQ ID NO: 1854249 - DNA, 15 bp, Homo sapiens
cccgcaaagcatgtg

SEQ ID NO: 1854250 - DNA, 15 bp, Homo sapiens
ccgcaaagcatgtga

SEQ ID NO: 1854251 - DNA, 15 bp, Homo sapiens
cgcaaagcatgtgat

SEQ ID NO: 1854252 - DNA, 15 bp, Homo sapiens
gcaaagcatgtgata

SEQ ID NO: 1854253 - DNA, 15 bp, Homo sapiens
caaagcatgtgatat

SEQ ID NO: 1854254 - DNA, 15 bp, Homo sapiens
aaagcatgtgatatt

SEQ ID NO: 1854255 - DNA, 15 bp, Homo sapiens
aagcatgtgatattt

SEQ ID NO: 1854256 - DNA, 15 bp, Homo sapiens
agcatgtgatatttt

SEQ ID NO: 1854257 - DNA, 15 bp, Homo sapiens
gcatgtgatattttg

SEQ ID NO: 1854258 - DNA, 15 bp, Homo sapiens
catgtgatattttgc

SEQ ID NO: 1854259 - DNA, 15 bp, Homo sapiens
atgtgatattttgct

SEQ ID NO: 1854260 - DNA, 15 bp, Homo sapiens
tgtgatattttgctt

SEQ ID NO: 1854261 - DNA, 15 bp, Homo sapiens
gtgatattttgcttt

SEQ ID NO: 1854262 - DNA, 15 bp, Homo sapiens
tgatattttgctttc

SEQ ID NO: 1854263 - DNA, 15 bp, Homo sapiens
gatattttgctttcg

SEQ ID NO: 1854264 - DNA, 15 bp, Homo sapiens
atattttgctttcga

SEQ ID NO: 1854265 - DNA, 15 bp, Homo sapiens
tattttgctttcgat

SEQ ID NO: 1854266 - DNA, 15 bp, Homo sapiens
attttgctttcgatt

SEQ ID NO: 1854267 - DNA, 15 bp, Homo sapiens
ttttgctttcgattt

SEQ ID NO: 1854268 - DNA, 15 bp, Homo sapiens
tttgctttcgattta

SEQ ID NO: 1854269 - DNA, 15 bp, Homo sapiens
ttgctttcgatttac

SEQ ID NO: 1854270 - DNA, 15 bp, Homo sapiens
tgctttcgatttaca

SEQ ID NO: 1854271 - DNA, 15 bp, Homo sapiens
gctttcgatttacaa

SEQ ID NO: 1854272 - DNA, 15 bp, Homo sapiens
ctttcgatttacaaa

SEQ ID NO: 1854273 - DNA, 15 bp, Homo sapiens
tttcgatttacaaaa

SEQ ID NO: 1854274 - DNA, 15 bp, Homo sapiens
ttcgatttacaaaac

SEQ ID NO: 1854275 - DNA, 15 bp, Homo sapiens
tcgatttacaaaaca

SEQ ID NO: 1854276 - DNA, 15 bp, Homo sapiens
cgatttacaaaacac

SEQ ID NO: 1854277 - DNA, 15 bp, Homo sapiens
gatttacaaaacacc

SEQ ID NO: 1854278 - DNA, 15 bp, Homo sapiens
atttacaaaacacca

SEQ ID NO: 1854279 - DNA, 15 bp, Homo sapiens
tttacaaaacaccag

SEQ ID NO: 1854280 - DNA, 15 bp, Homo sapiens
ttacaaaacaccaga

SEQ ID NO: 1854281 - DNA, 15 bp, Homo sapiens
tacaaaacaccagat

SEQ ID NO: 1854282 - DNA, 15 bp, Homo sapiens
acaaaacaccagata

SEQ ID NO: 1854283 - DNA, 15 bp, Homo sapiens
caaaacaccagataa

SEQ ID NO: 1854284 - DNA, 15 bp, Homo sapiens
aaaacaccagataaa

SEQ ID NO: 1854285 - DNA, 15 bp, Homo sapiens
aaacaccagataaat

SEQ ID NO: 1854286 - DNA, 15 bp, Homo sapiens
aacaccagataaatg

SEQ ID NO: 1854287 - DNA, 15 bp, Homo sapiens
acaccagataaatgg

SEQ ID NO: 1854288 - DNA, 15 bp, Homo sapiens
caccagataaatggt

SEQ ID NO: 1854289 - DNA, 15 bp, Homo sapiens
accagataaatggtt

SEQ ID NO: 1854290 - DNA, 15 bp, Homo sapiens
ccagataaatggtta

SEQ ID NO: 1854291 - DNA, 15 bp, Homo sapiens
cagataaatggttat

SEQ ID NO: 1854292 - DNA, 15 bp, Homo sapiens
agataaatggttatt

SEQ ID NO: 1854293 - DNA, 15 bp, Homo sapiens
gataaatggttatta

SEQ ID NO: 1854294 - DNA, 15 bp, Homo sapiens
ataaatggttattaa

SEQ ID NO: 1854295 - DNA, 15 bp, Homo sapiens
taaatggttattaat

SEQ ID NO: 1854296 - DNA, 15 bp, Homo sapiens
aaatggttattaata

SEQ ID NO: 1854297 - DNA, 15 bp, Homo sapiens
aatggttattaataa

SEQ ID NO: 1854298 - DNA, 15 bp, Homo sapiens
atggttattaataag

SEQ ID NO: 1854299 - DNA, 15 bp, Homo sapiens
tggttattaataagg

SEQ ID NO: 1854300 - DNA, 15 bp, Homo sapiens
ggttattaataagga

SEQ ID NO: 1854301 - DNA, 15 bp, Homo sapiens
gttattaataaggag

SEQ ID NO: 1854302 - DNA, 15 bp, Homo sapiens
ttattaataaggaga

SEQ ID NO: 1854303 - DNA, 15 bp, Homo sapiens
tattaataaggagat

SEQ ID NO: 1854304 - DNA, 15 bp, Homo sapiens
attaataaggagata

SEQ ID NO: 1854305 - DNA, 15 bp, Homo sapiens
ttaataaggagatac

SEQ ID NO: 1854306 - DNA, 15 bp, Homo sapiens
taataaggagatacc

SEQ ID NO: 1854307 - DNA, 15 bp, Homo sapiens
aataaggagataccc

SEQ ID NO: 1854308 - DNA, 15 bp, Homo sapiens
ataaggagataccca

SEQ ID NO: 1854309 - DNA, 15 bp, Homo sapiens
taaggagatacccag

SEQ ID NO: 1854310 - DNA, 15 bp, Homo sapiens
aaggagatacccagc

SEQ ID NO: 1854311 - DNA, 15 bp, Homo sapiens
aggagatacccagct

SEQ ID NO: 1854312 - DNA, 15 bp, Homo sapiens
ggagatacccagctc

SEQ ID NO: 1854313 - DNA, 15 bp, Homo sapiens
gagatacccagctct

SEQ ID NO: 1854314 - DNA, 15 bp, Homo sapiens
agatacccagctctc

SEQ ID NO: 1854315 - DNA, 15 bp, Homo sapiens
gatacccagctctct

SEQ ID NO: 1854316 - DNA, 15 bp, Homo sapiens
atacccagctctctg

SEQ ID NO: 1854317 - DNA, 15 bp, Homo sapiens
tacccagctctctgt

SEQ ID NO: 1854318 - DNA, 15 bp, Homo sapiens
acccagctctctgta

SEQ ID NO: 1854319 - DNA, 15 bp, Homo sapiens
cccagctctctgtat

SEQ ID NO: 1854320 - DNA, 15 bp, Homo sapiens
ccagctctctgtatt

SEQ ID NO: 1854321 - DNA, 15 bp, Homo sapiens
cagctctctgtattt

SEQ ID NO: 1854322 - DNA, 15 bp, Homo sapiens
agctctctgtatttg

SEQ ID NO: 1854323 - DNA, 15 bp, Homo sapiens
gctctctgtatttgt

SEQ ID NO: 1854324 - DNA, 15 bp, Homo sapiens
ctctctgtatttgta

SEQ ID NO: 1854325 - DNA, 15 bp, Homo sapiens
tctctgtatttgtaa

SEQ ID NO: 1854326 - DNA, 15 bp, Homo sapiens
ctctgtatttgtaac

SEQ ID NO: 1854327 - DNA, 15 bp, Homo sapiens
tctgtatttgtaaca

SEQ ID NO: 1854328 - DNA, 15 bp, Homo sapiens
ctgtatttgtaacaa

SEQ ID NO: 1854329 - DNA, 15 bp, Homo sapiens
tgtatttgtaacaaa

SEQ ID NO: 1854330 - DNA, 15 bp, Homo sapiens
gtatttgtaacaaac

SEQ ID NO: 1854331 - DNA, 15 bp, Homo sapiens
tatttgtaacaaacg

SEQ ID NO: 1854332 - DNA, 15 bp, Homo sapiens
atttgtaacaaacgt

SEQ ID NO: 1854333 - DNA, 15 bp, Homo sapiens
tttgtaacaaacgtt

SEQ ID NO: 1854334 - DNA, 15 bp, Homo sapiens
ttgtaacaaacgtta

SEQ ID NO: 1854335 - DNA, 15 bp, Homo sapiens
tgtaacaaacgttaa

SEQ ID NO: 1854336 - DNA, 15 bp, Homo sapiens
gtaacaaacgttaac

SEQ ID NO: 1854337 - DNA, 15 bp, Homo sapiens
taacaaacgttaact

SEQ ID NO: 1854338 - DNA, 15 bp, Homo sapiens
aacaaacgttaactg

SEQ ID NO: 1854339 - DNA, 15 bp, Homo sapiens
acaaacgttaactgg

SEQ ID NO: 1854340 - DNA, 15 bp, Homo sapiens
caaacgttaactgga

SEQ ID NO: 1854341 - DNA, 15 bp, Homo sapiens
aaacgttaactggaa

SEQ ID NO: 1854342 - DNA, 15 bp, Homo sapiens
aacgttaactggaat

SEQ ID NO: 1854343 - DNA, 15 bp, Homo sapiens
acgttaactggaatt

SEQ ID NO: 1854344 - DNA, 15 bp, Homo sapiens
cgttaactggaatta

SEQ ID NO: 1854345 - DNA, 15 bp, Homo sapiens
gttaactggaattac

SEQ ID NO: 1854346 - DNA, 15 bp, Homo sapiens
ttaactggaattacc

SEQ ID NO: 1854347 - DNA, 15 bp, Homo sapiens
taactggaattacca

SEQ ID NO: 1854348 - DNA, 15 bp, Homo sapiens
aactggaattaccaa

SEQ ID NO: 1854349 - DNA, 15 bp, Homo sapiens
actggaattaccaag

SEQ ID NO: 1854350 - DNA, 15 bp, Homo sapiens
ctggaattaccaagc

SEQ ID NO: 1854351 - DNA, 15 bp, Homo sapiens
tggaattaccaagct

SEQ ID NO: 1854352 - DNA, 15 bp, Homo sapiens
ggaattaccaagctc

SEQ ID NO: 1854353 - DNA, 15 bp, Homo sapiens
gaattaccaagctct

SEQ ID NO: 1854354 - DNA, 15 bp, Homo sapiens
aattaccaagctctg

SEQ ID NO: 1854355 - DNA, 15 bp, Homo sapiens
attaccaagctctgt

SEQ ID NO: 1854356 - DNA, 15 bp, Homo sapiens
ttaccaagctctgtt

SEQ ID NO: 1854357 - DNA, 15 bp, Homo sapiens
taccaagctctgttt

SEQ ID NO: 1854358 - DNA, 15 bp, Homo sapiens
accaagctctgtttt

SEQ ID NO: 1854359 - DNA, 15 bp, Homo sapiens
ccaagctctgttttc

SEQ ID NO: 1854360 - DNA, 15 bp, Homo sapiens
caagctctgttttcc

SEQ ID NO: 1854361 - DNA, 15 bp, Homo sapiens
aagctctgttttcct

SEQ ID NO: 1854362 - DNA, 15 bp, Homo sapiens
agctctgttttccta

SEQ ID NO: 1854363 - DNA, 15 bp, Homo sapiens
gctctgttttcctaa

SEQ ID NO: 1854364 - DNA, 15 bp, Homo sapiens
ctctgttttcctaaa

SEQ ID NO: 1854365 - DNA, 15 bp, Homo sapiens
tctgttttcctaaag

SEQ ID NO: 1854366 - DNA, 15 bp, Homo sapiens
ctgttttcctaaaga

SEQ ID NO: 1854367 - DNA, 15 bp, Homo sapiens
tgttttcctaaagac

SEQ ID NO: 1854368 - DNA, 15 bp, Homo sapiens
gttttcctaaagact

SEQ ID NO: 1854369 - DNA, 15 bp, Homo sapiens
ttttcctaaagactg

SEQ ID NO: 1854370 - DNA, 15 bp, Homo sapiens
tttcctaaagactgt

SEQ ID NO: 1854371 - DNA, 15 bp, Homo sapiens
ttcctaaagactgta

SEQ ID NO: 1854372 - DNA, 15 bp, Homo sapiens
tcctaaagactgtaa

SEQ ID NO: 1854373 - DNA, 15 bp, Homo sapiens
cctaaagactgtaac

SEQ ID NO: 1854374 - DNA, 15 bp, Homo sapiens
ctaaagactgtaact

SEQ ID NO: 1854375 - DNA, 15 bp, Homo sapiens
taaagactgtaactt

SEQ ID NO: 1854376 - DNA, 15 bp, Homo sapiens
aaagactgtaacttg

SEQ ID NO: 1854377 - DNA, 15 bp, Homo sapiens
aagactgtaacttga

SEQ ID NO: 1854378 - DNA, 15 bp, Homo sapiens
agactgtaacttgac

SEQ ID NO: 1854379 - DNA, 15 bp, Homo sapiens
gactgtaacttgact

SEQ ID NO: 1854380 - DNA, 15 bp, Homo sapiens
actgtaacttgactg

SEQ ID NO: 1854381 - DNA, 15 bp, Homo sapiens
ctgtaacttgactgg

SEQ ID NO: 1854382 - DNA, 15 bp, Homo sapiens
tgtaacttgactggg

SEQ ID NO: 1854383 - DNA, 15 bp, Homo sapiens
gtaacttgactgggt

SEQ ID NO: 1854384 - DNA, 15 bp, Homo sapiens
taacttgactgggtt

SEQ ID NO: 1854385 - DNA, 15 bp, Homo sapiens
aacttgactgggttt

SEQ ID NO: 1854386 - DNA, 15 bp, Homo sapiens
acttgactgggtttt

SEQ ID NO: 1854387 - DNA, 15 bp, Homo sapiens
cttgactgggttttg

SEQ ID NO: 1854388 - DNA, 15 bp, Homo sapiens
ttgactgggttttgg

SEQ ID NO: 1854389 - DNA, 15 bp, Homo sapiens
tgactgggttttggc

SEQ ID NO: 1854390 - DNA, 15 bp, Homo sapiens
gactgggttttggct

SEQ ID NO: 1854391 - DNA, 15 bp, Homo sapiens
actgggttttggctt

SEQ ID NO: 1854392 - DNA, 15 bp, Homo sapiens
ctgggttttggctta

SEQ ID NO: 1854393 - DNA, 15 bp, Homo sapiens
tgggttttggcttaa

SEQ ID NO: 1854394 - DNA, 15 bp, Homo sapiens
gggttttggcttaaa

SEQ ID NO: 1854395 - DNA, 15 bp, Homo sapiens
ggttttggcttaaag

SEQ ID NO: 1854396 - DNA, 15 bp, Homo sapiens
gttttggcttaaaga

SEQ ID NO: 1854397 - DNA, 15 bp, Homo sapiens
ttttggcttaaagaa

SEQ ID NO: 1854398 - DNA, 15 bp, Homo sapiens
tttggcttaaagaat

SEQ ID NO: 1854399 - DNA, 15 bp, Homo sapiens
ttggcttaaagaatc

SEQ ID NO: 1854400 - DNA, 15 bp, Homo sapiens
tggcttaaagaatca

SEQ ID NO: 1854401 - DNA, 15 bp, Homo sapiens
ggcttaaagaatcaa

SEQ ID NO: 1854402 - DNA, 15 bp, Homo sapiens
gcttaaagaatcaag

SEQ ID NO: 1854403 - DNA, 15 bp, Homo sapiens
cttaaagaatcaaga

SEQ ID NO: 1854404 - DNA, 15 bp, Homo sapiens
ttaaagaatcaagaa

SEQ ID NO: 1854405 - DNA, 15 bp, Homo sapiens
taaagaatcaagaat

SEQ ID NO: 1854406 - DNA, 15 bp, Homo sapiens
aaagaatcaagaatt

SEQ ID NO: 1854407 - DNA, 15 bp, Homo sapiens
aagaatcaagaattc

SEQ ID NO: 1854408 - DNA, 15 bp, Homo sapiens
agaatcaagaattct

SEQ ID NO: 1854409 - DNA, 15 bp, Homo sapiens
gaatcaagaattctt

SEQ ID NO: 1854410 - DNA, 15 bp, Homo sapiens
aatcaagaattcttt

SEQ ID NO: 1854411 - DNA, 15 bp, Homo sapiens
atcaagaattctttt

SEQ ID NO: 1854412 - DNA, 15 bp, Homo sapiens
tcaagaattctttta

SEQ ID NO: 1854413 - DNA, 15 bp, Homo sapiens
caagaattcttttat

SEQ ID NO: 1854414 - DNA, 15 bp, Homo sapiens
aagaattcttttatg

SEQ ID NO: 1854415 - DNA, 15 bp, Homo sapiens
agaattcttttatga

SEQ ID NO: 1854416 - DNA, 15 bp, Homo sapiens
gaattcttttatgaa

SEQ ID NO: 1854417 - DNA, 15 bp, Homo sapiens
aattcttttatgaag

SEQ ID NO: 1854418 - DNA, 15 bp, Homo sapiens
attcttttatgaagt

SEQ ID NO: 1854419 - DNA, 15 bp, Homo sapiens
ttcttttatgaagtt

SEQ ID NO: 1854420 - DNA, 15 bp, Homo sapiens
tcttttatgaagttc

SEQ ID NO: 1854421 - DNA, 15 bp, Homo sapiens
cttttatgaagttca

SEQ ID NO: 1854422 - DNA, 15 bp, Homo sapiens
ttttatgaagttcat

SEQ ID NO: 1854423 - DNA, 15 bp, Homo sapiens
tttatgaagttcatt

SEQ ID NO: 1854424 - DNA, 15 bp, Homo sapiens
ttatgaagttcattt

SEQ ID NO: 1854425 - DNA, 15 bp, Homo sapiens
tatgaagttcatttt

SEQ ID NO: 1854426 - DNA, 15 bp, Homo sapiens
atgaagttcattttc

SEQ ID NO: 1854427 - DNA, 15 bp, Homo sapiens
tgaagttcattttcc

SEQ ID NO: 1854428 - DNA, 15 bp, Homo sapiens
gaagttcattttcca

SEQ ID NO: 1854429 - DNA, 15 bp, Homo sapiens
aagttcattttccaa

SEQ ID NO: 1854430 - DNA, 15 bp, Homo sapiens
agttcattttccaag

SEQ ID NO: 1854431 - DNA, 15 bp, Homo sapiens
gttcattttccaagg

SEQ ID NO: 1854432 - DNA, 15 bp, Homo sapiens
ttcattttccaaggg

SEQ ID NO: 1854433 - DNA, 15 bp, Homo sapiens
tcattttccaagggg

SEQ ID NO: 1854434 - DNA, 15 bp, Homo sapiens
cattttccaaggggc

SEQ ID NO: 1854435 - DNA, 15 bp, Homo sapiens
attttccaaggggcc

SEQ ID NO: 1854436 - DNA, 15 bp, Homo sapiens
ttttccaaggggcca

SEQ ID NO: 1854437 - DNA, 15 bp, Homo sapiens
tttccaaggggccac

SEQ ID NO: 1854438 - DNA, 15 bp, Homo sapiens
ttccaaggggccacc

SEQ ID NO: 1854439 - DNA, 15 bp, Homo sapiens
tccaaggggccacct

SEQ ID NO: 1854440 - DNA, 15 bp, Homo sapiens
ccaaggggccacctc

SEQ ID NO: 1854441 - DNA, 15 bp, Homo sapiens
caaggggccacctct

SEQ ID NO: 1854442 - DNA, 15 bp, Homo sapiens
aaggggccacctctg

SEQ ID NO: 1854443 - DNA, 15 bp, Homo sapiens
aggggccacctctga

SEQ ID NO: 1854444 - DNA, 15 bp, Homo sapiens
ggggccacctctgac

SEQ ID NO: 1854445 - DNA, 15 bp, Homo sapiens
gggccacctctgacc

SEQ ID NO: 1854446 - DNA, 15 bp, Homo sapiens
ggccacctctgacct

SEQ ID NO: 1854447 - DNA, 15 bp, Homo sapiens
gccacctctgacctg

SEQ ID NO: 1854448 - DNA, 15 bp, Homo sapiens
ccacctctgacctgt

SEQ ID NO: 1854449 - DNA, 15 bp, Homo sapiens
cacctctgacctgtt

SEQ ID NO: 1854450 - DNA, 15 bp, Homo sapiens
acctctgacctgttt

SEQ ID NO: 1854451 - DNA, 15 bp, Homo sapiens
cctctgacctgtttt

SEQ ID NO: 1854452 - DNA, 15 bp, Homo sapiens
ctctgacctgttttt

SEQ ID NO: 1854453 - DNA, 15 bp, Homo sapiens
tctgacctgtttttt

SEQ ID NO: 1854454 - DNA, 15 bp, Homo sapiens
ctgacctgttttttt

SEQ ID NO: 1854455 - DNA, 15 bp, Homo sapiens
tgacctgtttttttt

SEQ ID NO: 1854456 - DNA, 15 bp, Homo sapiens
gacctgttttttttg

SEQ ID NO: 1854457 - DNA, 15 bp, Homo sapiens
acctgttttttttgt

SEQ ID NO: 1854458 - DNA, 15 bp, Homo sapiens
cctgttttttttgtc

SEQ ID NO: 1854459 - DNA, 15 bp, Homo sapiens
ctgttttttttgtcc

SEQ ID NO: 1854460 - DNA, 15 bp, Homo sapiens
gttttttttgtcctt

SEQ ID NO: 1854461 - DNA, 15 bp, Homo sapiens
ttttttttgtccttc

SEQ ID NO: 1854462 - DNA, 15 bp, Homo sapiens
tttttttgtccttcc

SEQ ID NO: 1854463 - DNA, 15 bp, Homo sapiens
ttttttgtccttcca

SEQ ID NO: 1854464 - DNA, 15 bp, Homo sapiens
tttttgtccttccat

SEQ ID NO: 1854465 - DNA, 15 bp, Homo sapiens
ttttgtccttccata

SEQ ID NO: 1854466 - DNA, 15 bp, Homo sapiens
tttgtccttccatat

SEQ ID NO: 1854467 - DNA, 15 bp, Homo sapiens
ttgtccttccatatt

SEQ ID NO: 1854468 - DNA, 15 bp, Homo sapiens
tgtccttccatattc

SEQ ID NO: 1854469 - DNA, 15 bp, Homo sapiens
gtccttccatattct

SEQ ID NO: 1854470 - DNA, 15 bp, Homo sapiens
tccttccatattctt

SEQ ID NO: 1854471 - DNA, 15 bp, Homo sapiens
ccttccatattcttc

SEQ ID NO: 1854472 - DNA, 15 bp, Homo sapiens
cttccatattcttca

SEQ ID NO: 1854473 - DNA, 15 bp, Homo sapiens
ttccatattcttcaa

SEQ ID NO: 1854474 - DNA, 15 bp, Homo sapiens
tccatattcttcaaa

SEQ ID NO: 1854475 - DNA, 15 bp, Homo sapiens
ccatattcttcaaat

SEQ ID NO: 1854476 - DNA, 15 bp, Homo sapiens
catattcttcaaatt

SEQ ID NO: 1854477 - DNA, 15 bp, Homo sapiens
atattcttcaaattt

SEQ ID NO: 1854478 - DNA, 15 bp, Homo sapiens
tattcttcaaatttg

SEQ ID NO: 1854479 - DNA, 15 bp, Homo sapiens
attcttcaaatttgg

SEQ ID NO: 1854480 - DNA, 15 bp, Homo sapiens
ttcttcaaatttgga

SEQ ID NO: 1854481 - DNA, 15 bp, Homo sapiens
tcttcaaatttggag

SEQ ID NO: 1854482 - DNA, 15 bp, Homo sapiens
cttcaaatttggagg

SEQ ID NO: 1854483 - DNA, 15 bp, Homo sapiens
ttcaaatttggaggt

SEQ ID NO: 1854484 - DNA, 15 bp, Homo sapiens
tcaaatttggaggtt

SEQ ID NO: 1854485 - DNA, 15 bp, Homo sapiens
caaatttggaggttt

SEQ ID NO: 1854486 - DNA, 15 bp, Homo sapiens
aaatttggaggtttt

SEQ ID NO: 1854487 - DNA, 15 bp, Homo sapiens
aatttggaggttttc

SEQ ID NO: 1854488 - DNA, 15 bp, Homo sapiens
atttggaggttttcc

SEQ ID NO: 1854489 - DNA, 15 bp, Homo sapiens
tttggaggttttcct

SEQ ID NO: 1854490 - DNA, 15 bp, Homo sapiens
ttggaggttttcctt

SEQ ID NO: 1854491 - DNA, 15 bp, Homo sapiens
tggaggttttcctta

SEQ ID NO: 1854492 - DNA, 15 bp, Homo sapiens
ggaggttttccttaa

SEQ ID NO: 1854493 - DNA, 15 bp, Homo sapiens
gaggttttccttaaa

SEQ ID NO: 1854494 - DNA, 15 bp, Homo sapiens
aggttttccttaaaa

SEQ ID NO: 1854495 - DNA, 15 bp, Homo sapiens
ggttttccttaaaag

SEQ ID NO: 1854496 - DNA, 15 bp, Homo sapiens
gttttccttaaaaga

SEQ ID NO: 1854497 - DNA, 15 bp, Homo sapiens
ttttccttaaaagag

SEQ ID NO: 1854498 - DNA, 15 bp, Homo sapiens
tttccttaaaagaga

SEQ ID NO: 1854499 - DNA, 15 bp, Homo sapiens
ttccttaaaagagag

SEQ ID NO: 1854500 - DNA, 15 bp, Homo sapiens
tccttaaaagagaga

SEQ ID NO: 1854501 - DNA, 15 bp, Homo sapiens
ccttaaaagagagag

SEQ ID NO: 1854502 - DNA, 15 bp, Homo sapiens
cttaaaagagagaga

SEQ ID NO: 1854503 - DNA, 15 bp, Homo sapiens
ttaaaagagagagaa

SEQ ID NO: 1854504 - DNA, 15 bp, Homo sapiens
taaaagagagagaac

SEQ ID NO: 1854505 - DNA, 15 bp, Homo sapiens
aaaagagagagaaca

SEQ ID NO: 1854506 - DNA, 15 bp, Homo sapiens
aaagagagagaacag

SEQ ID NO: 1854507 - DNA, 15 bp, Homo sapiens
aagagagagaacagt

SEQ ID NO: 1854508 - DNA, 15 bp, Homo sapiens
agagagagaacagtg

SEQ ID NO: 1854509 - DNA, 15 bp, Homo sapiens
gagagagaacagtga

SEQ ID NO: 1854510 - DNA, 15 bp, Homo sapiens
agagagaacagtgac

SEQ ID NO: 1854511 - DNA, 15 bp, Homo sapiens
gagagaacagtgacc

SEQ ID NO: 1854512 - DNA, 15 bp, Homo sapiens
agagaacagtgacct

SEQ ID NO: 1854513 - DNA, 15 bp, Homo sapiens
gagaacagtgacctt

SEQ ID NO: 1854514 - DNA, 15 bp, Homo sapiens
agaacagtgacctta

SEQ ID NO: 1854515 - DNA, 15 bp, Homo sapiens
gaacagtgaccttag

SEQ ID NO: 1854516 - DNA, 15 bp, Homo sapiens
aacagtgaccttagc

SEQ ID NO: 1854517 - DNA, 15 bp, Homo sapiens
acagtgaccttagcc

SEQ ID NO: 1854518 - DNA, 15 bp, Homo sapiens
cagtgaccttagccc

SEQ ID NO: 1854519 - DNA, 15 bp, Homo sapiens
agtgaccttagcccc

SEQ ID NO: 1854520 - DNA, 15 bp, Homo sapiens
gtgaccttagcccca

SEQ ID NO: 1854521 - DNA, 15 bp, Homo sapiens
tgaccttagccccag

SEQ ID NO: 1854522 - DNA, 15 bp, Homo sapiens
gaccttagccccagg

SEQ ID NO: 1854523 - DNA, 15 bp, Homo sapiens
accttagccccaggg

SEQ ID NO: 1854524 - DNA, 15 bp, Homo sapiens
ccttagccccaggga

SEQ ID NO: 1854525 - DNA, 15 bp, Homo sapiens
cttagccccagggat

SEQ ID NO: 1854526 - DNA, 15 bp, Homo sapiens
ttagccccagggata

SEQ ID NO: 1854527 - DNA, 15 bp, Homo sapiens
tagccccagggataa

SEQ ID NO: 1854528 - DNA, 15 bp, Homo sapiens
agccccagggataaa

SEQ ID NO: 1854529 - DNA, 15 bp, Homo sapiens
gccccagggataaag

SEQ ID NO: 1854530 - DNA, 15 bp, Homo sapiens
ccccagggataaaga

SEQ ID NO: 1854531 - DNA, 15 bp, Homo sapiens
cccagggataaagac

SEQ ID NO: 1854532 - DNA, 15 bp, Homo sapiens
ccagggataaagacc

SEQ ID NO: 1854533 - DNA, 15 bp, Homo sapiens
cagggataaagacca

SEQ ID NO: 1854534 - DNA, 15 bp, Homo sapiens
agggataaagaccag

SEQ ID NO: 1854535 - DNA, 15 bp, Homo sapiens
gggataaagaccagc

SEQ ID NO: 1854536 - DNA, 15 bp, Homo sapiens
ggataaagaccagca

SEQ ID NO: 1854537 - DNA, 15 bp, Homo sapiens
gataaagaccagcag

SEQ ID NO: 1854538 - DNA, 15 bp, Homo sapiens
ataaagaccagcagg

SEQ ID NO: 1854539 - DNA, 15 bp, Homo sapiens
taaagaccagcaggg

SEQ ID NO: 1854540 - DNA, 15 bp, Homo sapiens
aaagaccagcagggg

SEQ ID NO: 1854541 - DNA, 15 bp, Homo sapiens
aagaccagcaggggt

SEQ ID NO: 1854542 - DNA, 15 bp, Homo sapiens
agaccagcaggggta

SEQ ID NO: 1854543 - DNA, 15 bp, Homo sapiens
gaccagcaggggtaa

SEQ ID NO: 1854544 - DNA, 15 bp, Homo sapiens
accagcaggggtaaa

SEQ ID NO: 1854545 - DNA, 15 bp, Homo sapiens
ccagcaggggtaaat

SEQ ID NO: 1854546 - DNA, 15 bp, Homo sapiens
cagcaggggtaaatg

SEQ ID NO: 1854547 - DNA, 15 bp, Homo sapiens
agcaggggtaaatgt

SEQ ID NO: 1854548 - DNA, 15 bp, Homo sapiens
gcaggggtaaatgtt

SEQ ID NO: 1854549 - DNA, 15 bp, Homo sapiens
caggggtaaatgttc

SEQ ID NO: 1854550 - DNA, 15 bp, Homo sapiens
aggggtaaatgttcc

SEQ ID NO: 1854551 - DNA, 15 bp, Homo sapiens
ggggtaaatgttccc

SEQ ID NO: 1854552 - DNA, 15 bp, Homo sapiens
gggtaaatgttccca

SEQ ID NO: 1854553 - DNA, 15 bp, Homo sapiens
ggtaaatgttcccag

SEQ ID NO: 1854554 - DNA, 15 bp, Homo sapiens
gtaaatgttcccaga

SEQ ID NO: 1854555 - DNA, 15 bp, Homo sapiens
taaatgttcccagaa

SEQ ID NO: 1854556 - DNA, 15 bp, Homo sapiens
aaatgttcccagaaa

SEQ ID NO: 1854557 - DNA, 15 bp, Homo sapiens
aatgttcccagaaac

SEQ ID NO: 1854558 - DNA, 15 bp, Homo sapiens
atgttcccagaaacc

SEQ ID NO: 1854559 - DNA, 15 bp, Homo sapiens
tgttcccagaaacct

SEQ ID NO: 1854560 - DNA, 15 bp, Homo sapiens
gttcccagaaacctc

SEQ ID NO: 1854561 - DNA, 15 bp, Homo sapiens
ttcccagaaacctcc

SEQ ID NO: 1854562 - DNA, 15 bp, Homo sapiens
tcccagaaacctcca

SEQ ID NO: 1854563 - DNA, 15 bp, Homo sapiens
cccagaaacctccaa

SEQ ID NO: 1854564 - DNA, 15 bp, Homo sapiens
ccagaaacctccaaa

SEQ ID NO: 1854565 - DNA, 15 bp, Homo sapiens
cagaaacctccaaaa

SEQ ID NO: 1854566 - DNA, 15 bp, Homo sapiens
agaaacctccaaaaa

SEQ ID NO: 1854567 - DNA, 15 bp, Homo sapiens
gaaacctccaaaaac

SEQ ID NO: 1854568 - DNA, 15 bp, Homo sapiens
aaacctccaaaaacc

SEQ ID NO: 1854569 - DNA, 15 bp, Homo sapiens
aacctccaaaaacca

SEQ ID NO: 1854570 - DNA, 15 bp, Homo sapiens
acctccaaaaaccat

SEQ ID NO: 1854571 - DNA, 15 bp, Homo sapiens
cctccaaaaaccata

SEQ ID NO: 1854572 - DNA, 15 bp, Homo sapiens
ctccaaaaaccatag

SEQ ID NO: 1854573 - DNA, 15 bp, Homo sapiens
tccaaaaaccataga

SEQ ID NO: 1854574 - DNA, 15 bp, Homo sapiens
ccaaaaaccatagaa

SEQ ID NO: 1854575 - DNA, 15 bp, Homo sapiens
caaaaaccatagaaa

SEQ ID NO: 1854576 - DNA, 15 bp, Homo sapiens
aaaaaccatagaaaa

SEQ ID NO: 1854577 - DNA, 15 bp, Homo sapiens
aaaaccatagaaaag

SEQ ID NO: 1854578 - DNA, 15 bp, Homo sapiens
aaaccatagaaaaga

SEQ ID NO: 1854579 - DNA, 15 bp, Homo sapiens
aaccatagaaaagaa

SEQ ID NO: 1854580 - DNA, 15 bp, Homo sapiens
accatagaaaagaaa

SEQ ID NO: 1854581 - DNA, 15 bp, Homo sapiens
ccatagaaaagaaag

SEQ ID NO: 1854582 - DNA, 15 bp, Homo sapiens
catagaaaagaaagg

SEQ ID NO: 1854583 - DNA, 15 bp, Homo sapiens
atagaaaagaaaggc

SEQ ID NO: 1854584 - DNA, 15 bp, Homo sapiens
tagaaaagaaaggcc

SEQ ID NO: 1854585 - DNA, 15 bp, Homo sapiens
agaaaagaaaggcca

SEQ ID NO: 1854586 - DNA, 15 bp, Homo sapiens
gaaaagaaaggccat

SEQ ID NO: 1854587 - DNA, 15 bp, Homo sapiens
aaaagaaaggccatg

SEQ ID NO: 1854588 - DNA, 15 bp, Homo sapiens
aaagaaaggccatgt

SEQ ID NO: 1854589 - DNA, 15 bp, Homo sapiens
aagaaaggccatgtt

SEQ ID NO: 1854590 - DNA, 15 bp, Homo sapiens
agaaaggccatgttc

SEQ ID NO: 1854591 - DNA, 15 bp, Homo sapiens
gaaaggccatgttcc

SEQ ID NO: 1854592 - DNA, 15 bp, Homo sapiens
aaaggccatgttccc

SEQ ID NO: 1854593 - DNA, 15 bp, Homo sapiens
aaggccatgttccct

SEQ ID NO: 1854594 - DNA, 15 bp, Homo sapiens
aggccatgttccctt

SEQ ID NO: 1854595 - DNA, 15 bp, Homo sapiens
ggccatgttcccttg

SEQ ID NO: 1854596 - DNA, 15 bp, Homo sapiens
gccatgttcccttgg

SEQ ID NO: 1854597 - DNA, 15 bp, Homo sapiens
ccatgttcccttggg

SEQ ID NO: 1854598 - DNA, 15 bp, Homo sapiens
catgttcccttgggt

SEQ ID NO: 1854599 - DNA, 15 bp, Homo sapiens
atgttcccttgggtt

SEQ ID NO: 1854600 - DNA, 15 bp, Homo sapiens
tgttcccttgggttt

SEQ ID NO: 1854601 - DNA, 15 bp, Homo sapiens
gttcccttgggtttc

SEQ ID NO: 1854602 - DNA, 15 bp, Homo sapiens
ttcccttgggtttcc

SEQ ID NO: 1854603 - DNA, 15 bp, Homo sapiens
tcccttgggtttcct

SEQ ID NO: 1854604 - DNA, 15 bp, Homo sapiens
cccttgggtttcctg

SEQ ID NO: 1854605 - DNA, 15 bp, Homo sapiens
ccttgggtttcctgc

SEQ ID NO: 1854606 - DNA, 15 bp, Homo sapiens
cttgggtttcctgca

SEQ ID NO: 1854607 - DNA, 15 bp, Homo sapiens
ttgggtttcctgcag

SEQ ID NO: 1854608 - DNA, 15 bp, Homo sapiens
tgggtttcctgcaga

SEQ ID NO: 1854609 - DNA, 15 bp, Homo sapiens
gggtttcctgcagag

SEQ ID NO: 1854610 - DNA, 15 bp, Homo sapiens
ggtttcctgcagaga

SEQ ID NO: 1854611 - DNA, 15 bp, Homo sapiens
gtttcctgcagagac

SEQ ID NO: 1854612 - DNA, 15 bp, Homo sapiens
tttcctgcagagaca

SEQ ID NO: 1854613 - DNA, 15 bp, Homo sapiens
ttcctgcagagacac

SEQ ID NO: 1854614 - DNA, 15 bp, Homo sapiens
tcctgcagagacact

SEQ ID NO: 1854615 - DNA, 15 bp, Homo sapiens
cctgcagagacactg

SEQ ID NO: 1854616 - DNA, 15 bp, Homo sapiens
ctgcagagacactgg

SEQ ID NO: 1854617 - DNA, 15 bp, Homo sapiens
tgcagagacactggg

SEQ ID NO: 1854618 - DNA, 15 bp, Homo sapiens
gcagagacactggga

SEQ ID NO: 1854619 - DNA, 15 bp, Homo sapiens
cagagacactgggat

SEQ ID NO: 1854620 - DNA, 15 bp, Homo sapiens
agagacactgggata

SEQ ID NO: 1854621 - DNA, 15 bp, Homo sapiens
gagacactgggataa

SEQ ID NO: 1854622 - DNA, 15 bp, Homo sapiens
agacactgggataaa

SEQ ID NO: 1854623 - DNA, 15 bp, Homo sapiens
gacactgggataaat

SEQ ID NO: 1854624 - DNA, 15 bp, Homo sapiens
acactgggataaatc

SEQ ID NO: 1854625 - DNA, 15 bp, Homo sapiens
cactgggataaatct

SEQ ID NO: 1854626 - DNA, 15 bp, Homo sapiens
actgggataaatctg

SEQ ID NO: 1854627 - DNA, 15 bp, Homo sapiens
ctgggataaatctgt

SEQ ID NO: 1854628 - DNA, 15 bp, Homo sapiens
tgggataaatctgtt

SEQ ID NO: 1854629 - DNA, 15 bp, Homo sapiens
gggataaatctgttc

SEQ ID NO: 1854630 - DNA, 15 bp, Homo sapiens
ggataaatctgttct

SEQ ID NO: 1854631 - DNA, 15 bp, Homo sapiens
gataaatctgttctc

SEQ ID NO: 1854632 - DNA, 15 bp, Homo sapiens
ataaatctgttctca

SEQ ID NO: 1854633 - DNA, 15 bp, Homo sapiens
taaatctgttctcag

SEQ ID NO: 1854634 - DNA, 15 bp, Homo sapiens
aaatctgttctcagg

SEQ ID NO: 1854635 - DNA, 15 bp, Homo sapiens
aatctgttctcagga

SEQ ID NO: 1854636 - DNA, 15 bp, Homo sapiens
atctgttctcaggat

SEQ ID NO: 1854637 - DNA, 15 bp, Homo sapiens
tctgttctcaggatt

SEQ ID NO: 1854638 - DNA, 15 bp, Homo sapiens
ctgttctcaggattt

SEQ ID NO: 1854639 - DNA, 15 bp, Homo sapiens
tgttctcaggattta

SEQ ID NO: 1854640 - DNA, 15 bp, Homo sapiens
gttctcaggatttaa

SEQ ID NO: 1854641 - DNA, 15 bp, Homo sapiens
ttctcaggatttaag

SEQ ID NO: 1854642 - DNA, 15 bp, Homo sapiens
tctcaggatttaagc

SEQ ID NO: 1854643 - DNA, 15 bp, Homo sapiens
ctcaggatttaagca

SEQ ID NO: 1854644 - DNA, 15 bp, Homo sapiens
tcaggatttaagcag

SEQ ID NO: 1854645 - DNA, 15 bp, Homo sapiens
caggatttaagcagt

SEQ ID NO: 1854646 - DNA, 15 bp, Homo sapiens
aggatttaagcagtc

SEQ ID NO: 1854647 - DNA, 15 bp, Homo sapiens
ggatttaagcagtca

SEQ ID NO: 1854648 - DNA, 15 bp, Homo sapiens
gatttaagcagtcat

SEQ ID NO: 1854649 - DNA, 15 bp, Homo sapiens
atttaagcagtcatt

SEQ ID NO: 1854650 - DNA, 15 bp, Homo sapiens
tttaagcagtcattc

SEQ ID NO: 1854651 - DNA, 15 bp, Homo sapiens
ttaagcagtcattct

SEQ ID NO: 1854652 - DNA, 15 bp, Homo sapiens
taagcagtcattctg

SEQ ID NO: 1854653 - DNA, 15 bp, Homo sapiens
aagcagtcattctgc

SEQ ID NO: 1854654 - DNA, 15 bp, Homo sapiens
agcagtcattctgcc

SEQ ID NO: 1854655 - DNA, 15 bp, Homo sapiens
gcagtcattctgcca

SEQ ID NO: 1854656 - DNA, 15 bp, Homo sapiens
cagtcattctgccag

SEQ ID NO: 1854657 - DNA, 15 bp, Homo sapiens
agtcattctgccagg

SEQ ID NO: 1854658 - DNA, 15 bp, Homo sapiens
gtcattctgccaggc

SEQ ID NO: 1854659 - DNA, 15 bp, Homo sapiens
tcattctgccaggcc

SEQ ID NO: 1854660 - DNA, 15 bp, Homo sapiens
cattctgccaggcca

SEQ ID NO: 1854661 - DNA, 15 bp, Homo sapiens
attctgccaggccag

SEQ ID NO: 1854662 - DNA, 15 bp, Homo sapiens
ttctgccaggccagg

SEQ ID NO: 1854663 - DNA, 15 bp, Homo sapiens
tctgccaggccaggg

SEQ ID NO: 1854664 - DNA, 15 bp, Homo sapiens
ctgccaggccagggc

SEQ ID NO: 1854665 - DNA, 15 bp, Homo sapiens
tgccaggccagggcc

SEQ ID NO: 1854666 - DNA, 15 bp, Homo sapiens
gccaggccagggcct

SEQ ID NO: 1854667 - DNA, 15 bp, Homo sapiens
ccaggccagggcctc

SEQ ID NO: 1854668 - DNA, 15 bp, Homo sapiens
aggccagggcctcat

SEQ ID NO: 1854669 - DNA, 15 bp, Homo sapiens
ggccagggcctcatt

SEQ ID NO: 1854670 - DNA, 15 bp, Homo sapiens
gccagggcctcattt

SEQ ID NO: 1854671 - DNA, 15 bp, Homo sapiens
ccagggcctcatttt

SEQ ID NO: 1854672 - DNA, 15 bp, Homo sapiens
cagggcctcattttc

SEQ ID NO: 1854673 - DNA, 15 bp, Homo sapiens
agggcctcattttcg

SEQ ID NO: 1854674 - DNA, 15 bp, Homo sapiens
gggcctcattttcgg

SEQ ID NO: 1854675 - DNA, 15 bp, Homo sapiens
ggcctcattttcggt

SEQ ID NO: 1854676 - DNA, 15 bp, Homo sapiens
gcctcattttcggtg

SEQ ID NO: 1854677 - DNA, 15 bp, Homo sapiens
cctcattttcggtga

SEQ ID NO: 1854678 - DNA, 15 bp, Homo sapiens
ctcattttcggtgag

SEQ ID NO: 1854679 - DNA, 15 bp, Homo sapiens
tcattttcggtgagt

SEQ ID NO: 1854680 - DNA, 15 bp, Homo sapiens
cattttcggtgagtg

SEQ ID NO: 1854681 - DNA, 15 bp, Homo sapiens
attttcggtgagtgg

SEQ ID NO: 1854682 - DNA, 15 bp, Homo sapiens
ttttcggtgagtgga

SEQ ID NO: 1854683 - DNA, 15 bp, Homo sapiens
tttcggtgagtggag

SEQ ID NO: 1854684 - DNA, 15 bp, Homo sapiens
ttcggtgagtggagt

SEQ ID NO: 1854685 - DNA, 15 bp, Homo sapiens
tcggtgagtggagtg

SEQ ID NO: 1854686 - DNA, 15 bp, Homo sapiens
cggtgagtggagtga

SEQ ID NO: 1854687 - DNA, 15 bp, Homo sapiens
ggtgagtggagtgat

SEQ ID NO: 1854688 - DNA, 15 bp, Homo sapiens
gtgagtggagtgata

SEQ ID NO: 1854689 - DNA, 15 bp, Homo sapiens
tgagtggagtgatat

SEQ ID NO: 1854690 - DNA, 15 bp, Homo sapiens
gagtggagtgatata

SEQ ID NO: 1854691 - DNA, 15 bp, Homo sapiens
agtggagtgatatat

SEQ ID NO: 1854692 - DNA, 15 bp, Homo sapiens
gtggagtgatatatt

SEQ ID NO: 1854693 - DNA, 15 bp, Homo sapiens
tggagtgatatattt

SEQ ID NO: 1854694 - DNA, 15 bp, Homo sapiens
ggagtgatatattta

SEQ ID NO: 1854695 - DNA, 15 bp, Homo sapiens
gagtgatatatttat

SEQ ID NO: 1854696 - DNA, 15 bp, Homo sapiens
agtgatatatttatt

SEQ ID NO: 1854697 - DNA, 15 bp, Homo sapiens
gtgatatatttattc

SEQ ID NO: 1854698 - DNA, 15 bp, Homo sapiens
tgatatatttattca

SEQ ID NO: 1854699 - DNA, 15 bp, Homo sapiens
gatatatttattcat

SEQ ID NO: 1854700 - DNA, 15 bp, Homo sapiens
atatatttattcatt

SEQ ID NO: 1854701 - DNA, 15 bp, Homo sapiens
tatatttattcatta

SEQ ID NO: 1854702 - DNA, 15 bp, Homo sapiens
atatttattcattag

SEQ ID NO: 1854703 - DNA, 15 bp, Homo sapiens
tatttattcattagc

SEQ ID NO: 1854704 - DNA, 15 bp, Homo sapiens
atttattcattagca

SEQ ID NO: 1854705 - DNA, 15 bp, Homo sapiens
tttattcattagcaa

SEQ ID NO: 1854706 - DNA, 15 bp, Homo sapiens
ttattcattagcaag

SEQ ID NO: 1854707 - DNA, 15 bp, Homo sapiens
tattcattagcaagt

SEQ ID NO: 1854708 - DNA, 15 bp, Homo sapiens
attcattagcaagtg

SEQ ID NO: 1854709 - DNA, 15 bp, Homo sapiens
ttcattagcaagtgt

SEQ ID NO: 1854710 - DNA, 15 bp, Homo sapiens
tcattagcaagtgtt

SEQ ID NO: 1854711 - DNA, 15 bp, Homo sapiens
cattagcaagtgttg

SEQ ID NO: 1854712 - DNA, 15 bp, Homo sapiens
attagcaagtgttga

SEQ ID NO: 1854713 - DNA, 15 bp, Homo sapiens
ttagcaagtgttgac

SEQ ID NO: 1854714 - DNA, 15 bp, Homo sapiens
tagcaagtgttgaca

SEQ ID NO: 1854715 - DNA, 15 bp, Homo sapiens
agcaagtgttgacat

SEQ ID NO: 1854716 - DNA, 15 bp, Homo sapiens
gcaagtgttgacatt

SEQ ID NO: 1854717 - DNA, 15 bp, Homo sapiens
caagtgttgacatta

SEQ ID NO: 1854718 - DNA, 15 bp, Homo sapiens
aagtgttgacattag

SEQ ID NO: 1854719 - DNA, 15 bp, Homo sapiens
agtgttgacattagg

SEQ ID NO: 1854720 - DNA, 15 bp, Homo sapiens
gtgttgacattaggt

SEQ ID NO: 1854721 - DNA, 15 bp, Homo sapiens
tgttgacattaggta

SEQ ID NO: 1854722 - DNA, 15 bp, Homo sapiens
gttgacattaggtag

SEQ ID NO: 1854723 - DNA, 15 bp, Homo sapiens
ttgacattaggtagc

SEQ ID NO: 1854724 - DNA, 15 bp, Homo sapiens
tgacattaggtagca

SEQ ID NO: 1854725 - DNA, 15 bp, Homo sapiens
gacattaggtagcaa

SEQ ID NO: 1854726 - DNA, 15 bp, Homo sapiens
acattaggtagcaaa

SEQ ID NO: 1854727 - DNA, 15 bp, Homo sapiens
cattaggtagcaaaa

SEQ ID NO: 1854728 - DNA, 15 bp, Homo sapiens
attaggtagcaaaat

SEQ ID NO: 1854729 - DNA, 15 bp, Homo sapiens
ttaggtagcaaaatg

SEQ ID NO: 1854730 - DNA, 15 bp, Homo sapiens
taggtagcaaaatgt

SEQ ID NO: 1854731 - DNA, 15 bp, Homo sapiens
aggtagcaaaatgtg

SEQ ID NO: 1854732 - DNA, 15 bp, Homo sapiens
ggtagcaaaatgtgt

SEQ ID NO: 1854733 - DNA, 15 bp, Homo sapiens
gtagcaaaatgtgtg

SEQ ID NO: 1854734 - DNA, 15 bp, Homo sapiens
tagcaaaatgtgtgt

SEQ ID NO: 1854735 - DNA, 15 bp, Homo sapiens
agcaaaatgtgtgta

SEQ ID NO: 1854736 - DNA, 15 bp, Homo sapiens
gcaaaatgtgtgtaa

SEQ ID NO: 1854737 - DNA, 15 bp, Homo sapiens
caaaatgtgtgtaaa

SEQ ID NO: 1854738 - DNA, 15 bp, Homo sapiens
aaaatgtgtgtaaac

SEQ ID NO: 1854739 - DNA, 15 bp, Homo sapiens
aaatgtgtgtaaaca

SEQ ID NO: 1854740 - DNA, 15 bp, Homo sapiens
aatgtgtgtaaacag

SEQ ID NO: 1854741 - DNA, 15 bp, Homo sapiens
atgtgtgtaaacaga

SEQ ID NO: 1854742 - DNA, 15 bp, Homo sapiens
tgtgtgtaaacagag

SEQ ID NO: 1854743 - DNA, 15 bp, Homo sapiens
gtgtgtaaacagaga

SEQ ID NO: 1854744 - DNA, 15 bp, Homo sapiens
tgtgtaaacagagaa

SEQ ID NO: 1854745 - DNA, 15 bp, Homo sapiens
gtgtaaacagagaag

SEQ ID NO: 1854746 - DNA, 15 bp, Homo sapiens
tgtaaacagagaagc

SEQ ID NO: 1854747 - DNA, 15 bp, Homo sapiens
gtaaacagagaagcc

SEQ ID NO: 1854748 - DNA, 15 bp, Homo sapiens
taaacagagaagcca

SEQ ID NO: 1854749 - DNA, 15 bp, Homo sapiens
aaacagagaagccac

SEQ ID NO: 1854750 - DNA, 15 bp, Homo sapiens
aacagagaagccaca

SEQ ID NO: 1854751 - DNA, 15 bp, Homo sapiens
acagagaagccacaa

SEQ ID NO: 1854752 - DNA, 15 bp, Homo sapiens
cagagaagccacaaa

SEQ ID NO: 1854753 - DNA, 15 bp, Homo sapiens
agagaagccacaaag

SEQ ID NO: 1854754 - DNA, 15 bp, Homo sapiens
gagaagccacaaaga

SEQ ID NO: 1854755 - DNA, 15 bp, Homo sapiens
agaagccacaaagac

SEQ ID NO: 1854756 - DNA, 15 bp, Homo sapiens
gaagccacaaagaca

SEQ ID NO: 1854757 - DNA, 15 bp, Homo sapiens
aagccacaaagacag

SEQ ID NO: 1854758 - DNA, 15 bp, Homo sapiens
agccacaaagacagg

SEQ ID NO: 1854759 - DNA, 15 bp, Homo sapiens
gccacaaagacagga

SEQ ID NO: 1854760 - DNA, 15 bp, Homo sapiens
ccacaaagacaggaa

SEQ ID NO: 1854761 - DNA, 15 bp, Homo sapiens
cacaaagacaggaat

SEQ ID NO: 1854762 - DNA, 15 bp, Homo sapiens
acaaagacaggaatg

SEQ ID NO: 1854763 - DNA, 15 bp, Homo sapiens
caaagacaggaatgt

SEQ ID NO: 1854764 - DNA, 15 bp, Homo sapiens
aaagacaggaatgtg

SEQ ID NO: 1854765 - DNA, 15 bp, Homo sapiens
aagacaggaatgtgc

SEQ ID NO: 1854766 - DNA, 15 bp, Homo sapiens
agacaggaatgtgcc

SEQ ID NO: 1854767 - DNA, 15 bp, Homo sapiens
gacaggaatgtgcca

SEQ ID NO: 1854768 - DNA, 15 bp, Homo sapiens
acaggaatgtgccat

SEQ ID NO: 1854769 - DNA, 15 bp, Homo sapiens
caggaatgtgccatt

SEQ ID NO: 1854770 - DNA, 15 bp, Homo sapiens
aggaatgtgccattt

SEQ ID NO: 1854771 - DNA, 15 bp, Homo sapiens
ggaatgtgccatttc

SEQ ID NO: 1854772 - DNA, 15 bp, Homo sapiens
gaatgtgccatttcc

SEQ ID NO: 1854773 - DNA, 15 bp, Homo sapiens
aatgtgccatttcca

SEQ ID NO: 1854774 - DNA, 15 bp, Homo sapiens
atgtgccatttccaa

SEQ ID NO: 1854775 - DNA, 15 bp, Homo sapiens
tgtgccatttccaag

SEQ ID NO: 1854776 - DNA, 15 bp, Homo sapiens
gtgccatttccaagg

SEQ ID NO: 1854777 - DNA, 15 bp, Homo sapiens
tgccatttccaaggg

SEQ ID NO: 1854778 - DNA, 15 bp, Homo sapiens
gccatttccaagggg

SEQ ID NO: 1854779 - DNA, 15 bp, Homo sapiens
ccatttccaaggggg

SEQ ID NO: 1854780 - DNA, 15 bp, Homo sapiens
catttccaaggggga

SEQ ID NO: 1854781 - DNA, 15 bp, Homo sapiens
atttccaagggggag

SEQ ID NO: 1854782 - DNA, 15 bp, Homo sapiens
tttccaagggggaga

SEQ ID NO: 1854783 - DNA, 15 bp, Homo sapiens
ttccaagggggagaa

SEQ ID NO: 1854784 - DNA, 15 bp, Homo sapiens
tccaagggggagaaa

SEQ ID NO: 1854785 - DNA, 15 bp, Homo sapiens
ccaagggggagaaaa

SEQ ID NO: 1854786 - DNA, 15 bp, Homo sapiens
caagggggagaaaag

SEQ ID NO: 1854787 - DNA, 15 bp, Homo sapiens
aagggggagaaaagt

SEQ ID NO: 1854788 - DNA, 15 bp, Homo sapiens
agggggagaaaagtt

SEQ ID NO: 1854789 - DNA, 15 bp, Homo sapiens
gggggagaaaagttc

SEQ ID NO: 1854790 - DNA, 15 bp, Homo sapiens
ggggagaaaagttct

SEQ ID NO: 1854791 - DNA, 15 bp, Homo sapiens
gggagaaaagttctc

SEQ ID NO: 1854792 - DNA, 15 bp, Homo sapiens
ggagaaaagttctcc

SEQ ID NO: 1854793 - DNA, 15 bp, Homo sapiens
gagaaaagttctcca

SEQ ID NO: 1854794 - DNA, 15 bp, Homo sapiens
agaaaagttctccag

SEQ ID NO: 1854795 - DNA, 15 bp, Homo sapiens
gaaaagttctccaga

SEQ ID NO: 1854796 - DNA, 15 bp, Homo sapiens
aaaagttctccagat

SEQ ID NO: 1854797 - DNA, 15 bp, Homo sapiens
aaagttctccagatc

SEQ ID NO: 1854798 - DNA, 15 bp, Homo sapiens
aagttctccagatca

SEQ ID NO: 1854799 - DNA, 15 bp, Homo sapiens
agttctccagatcag

SEQ ID NO: 1854800 - DNA, 15 bp, Homo sapiens
gttctccagatcagc

SEQ ID NO: 1854801 - DNA, 15 bp, Homo sapiens
ttctccagatcagcc

SEQ ID NO: 1854802 - DNA, 15 bp, Homo sapiens
tctccagatcagcca

SEQ ID NO: 1854803 - DNA, 15 bp, Homo sapiens
ctccagatcagccaa

SEQ ID NO: 1854804 - DNA, 15 bp, Homo sapiens
tccagatcagccaat

SEQ ID NO: 1854805 - DNA, 15 bp, Homo sapiens
ccagatcagccaata

SEQ ID NO: 1854806 - DNA, 15 bp, Homo sapiens
cagatcagccaatag

SEQ ID NO: 1854807 - DNA, 15 bp, Homo sapiens
agatcagccaatagg

SEQ ID NO: 1854808 - DNA, 15 bp, Homo sapiens
gatcagccaatagga

SEQ ID NO: 1854809 - DNA, 15 bp, Homo sapiens
atcagccaataggaa

SEQ ID NO: 1854810 - DNA, 15 bp, Homo sapiens
tcagccaataggaag

SEQ ID NO: 1854811 - DNA, 15 bp, Homo sapiens
cagccaataggaagt

SEQ ID NO: 1854812 - DNA, 15 bp, Homo sapiens
agccaataggaagtg

SEQ ID NO: 1854813 - DNA, 15 bp, Homo sapiens
gccaataggaagtga

SEQ ID NO: 1854814 - DNA, 15 bp, Homo sapiens
ccaataggaagtgat

SEQ ID NO: 1854815 - DNA, 15 bp, Homo sapiens
caataggaagtgatt

SEQ ID NO: 1854816 - DNA, 15 bp, Homo sapiens
aataggaagtgatta

SEQ ID NO: 1854817 - DNA, 15 bp, Homo sapiens
ataggaagtgattaa

SEQ ID NO: 1854818 - DNA, 15 bp, Homo sapiens
taggaagtgattaac

SEQ ID NO: 1854819 - DNA, 15 bp, Homo sapiens
aggaagtgattaacc

SEQ ID NO: 1854820 - DNA, 15 bp, Homo sapiens
ggaagtgattaacct

SEQ ID NO: 1854821 - DNA, 15 bp, Homo sapiens
gaagtgattaacctg

SEQ ID NO: 1854822 - DNA, 15 bp, Homo sapiens
aagtgattaacctgc

SEQ ID NO: 1854823 - DNA, 15 bp, Homo sapiens
agtgattaacctgcc

SEQ ID NO: 1854824 - DNA, 15 bp, Homo sapiens
gtgattaacctgcca

SEQ ID NO: 1854825 - DNA, 15 bp, Homo sapiens
tgattaacctgccaa

SEQ ID NO: 1854826 - DNA, 15 bp, Homo sapiens
gattaacctgccaat

SEQ ID NO: 1854827 - DNA, 15 bp, Homo sapiens
attaacctgccaatc

SEQ ID NO: 1854828 - DNA, 15 bp, Homo sapiens
ttaacctgccaatcg

SEQ ID NO: 1854829 - DNA, 15 bp, Homo sapiens
taacctgccaatcgg

SEQ ID NO: 1854830 - DNA, 15 bp, Homo sapiens
aacctgccaatcgga

SEQ ID NO: 1854831 - DNA, 15 bp, Homo sapiens
acctgccaatcggaa

SEQ ID NO: 1854832 - DNA, 15 bp, Homo sapiens
cctgccaatcggaaa

SEQ ID NO: 1854833 - DNA, 15 bp, Homo sapiens
ctgccaatcggaaac

SEQ ID NO: 1854834 - DNA, 15 bp, Homo sapiens
tgccaatcggaaact

SEQ ID NO: 1854835 - DNA, 15 bp, Homo sapiens
gccaatcggaaacta

SEQ ID NO: 1854836 - DNA, 15 bp, Homo sapiens
ccaatcggaaactaa

SEQ ID NO: 1854837 - DNA, 15 bp, Homo sapiens
caatcggaaactaag

SEQ ID NO: 1854838 - DNA, 15 bp, Homo sapiens
aatcggaaactaaga

SEQ ID NO: 1854839 - DNA, 15 bp, Homo sapiens
atcggaaactaagac

SEQ ID NO: 1854840 - DNA, 15 bp, Homo sapiens
tcggaaactaagaca

SEQ ID NO: 1854841 - DNA, 15 bp, Homo sapiens
cggaaactaagacag

SEQ ID NO: 1854842 - DNA, 15 bp, Homo sapiens
ggaaactaagacagc

SEQ ID NO: 1854843 - DNA, 15 bp, Homo sapiens
gaaactaagacagct

SEQ ID NO: 1854844 - DNA, 15 bp, Homo sapiens
aaactaagacagctg

SEQ ID NO: 1854845 - DNA, 15 bp, Homo sapiens
aactaagacagctgg

SEQ ID NO: 1854846 - DNA, 15 bp, Homo sapiens
actaagacagctggt

SEQ ID NO: 1854847 - DNA, 15 bp, Homo sapiens
ctaagacagctggtt

SEQ ID NO: 1854848 - DNA, 15 bp, Homo sapiens
taagacagctggtta

SEQ ID NO: 1854849 - DNA, 15 bp, Homo sapiens
aagacagctggttac

SEQ ID NO: 1854850 - DNA, 15 bp, Homo sapiens
agacagctggttact

SEQ ID NO: 1854851 - DNA, 15 bp, Homo sapiens
gacagctggttactc

SEQ ID NO: 1854852 - DNA, 15 bp, Homo sapiens
acagctggttactca

SEQ ID NO: 1854853 - DNA, 15 bp, Homo sapiens
cagctggttactcac

SEQ ID NO: 1854854 - DNA, 15 bp, Homo sapiens
agctggttactcacc

SEQ ID NO: 1854855 - DNA, 15 bp, Homo sapiens
gctggttactcaccc

SEQ ID NO: 1854856 - DNA, 15 bp, Homo sapiens
ctggttactcaccca

SEQ ID NO: 1854857 - DNA, 15 bp, Homo sapiens
tggttactcacccaa

SEQ ID NO: 1854858 - DNA, 15 bp, Homo sapiens
ggacaactgttaaaa

SEQ ID NO: 1854859 - DNA, 15 bp, Homo sapiens
gacaactgttaaaat

SEQ ID NO: 1854860 - DNA, 15 bp, Homo sapiens
acaactgttaaaatc

SEQ ID NO: 1854861 - DNA, 15 bp, Homo sapiens
caactgttaaaatct

SEQ ID NO: 1854862 - DNA, 15 bp, Homo sapiens
aactgttaaaatctt

SEQ ID NO: 1854863 - DNA, 15 bp, Homo sapiens
actgttaaaatctta

SEQ ID NO: 1854864 - DNA, 15 bp, Homo sapiens
ctgttaaaatcttaa

SEQ ID NO: 1854865 - DNA, 15 bp, Homo sapiens
tgttaaaatcttaac

SEQ ID NO: 1854866 - DNA, 15 bp, Homo sapiens
gttaaaatcttaacc

SEQ ID NO: 1854867 - DNA, 15 bp, Homo sapiens
ttaaaatcttaacca

SEQ ID NO: 1854868 - DNA, 15 bp, Homo sapiens
taaaatcttaaccag

SEQ ID NO: 1854869 - DNA, 15 bp, Homo sapiens
aaaatcttaaccagt

SEQ ID NO: 1854870 - DNA, 15 bp, Homo sapiens
aaatcttaaccagtt

SEQ ID NO: 1854871 - DNA, 15 bp, Homo sapiens
aatcttaaccagttg

SEQ ID NO: 1854872 - DNA, 15 bp, Homo sapiens
atcttaaccagttgc

SEQ ID NO: 1854873 - DNA, 15 bp, Homo sapiens
tcttaaccagttgca

SEQ ID NO: 1854874 - DNA, 15 bp, Homo sapiens
cttaaccagttgcac

SEQ ID NO: 1854875 - DNA, 15 bp, Homo sapiens
ttaaccagttgcaca

SEQ ID NO: 1854876 - DNA, 15 bp, Homo sapiens
taaccagttgcacaa

SEQ ID NO: 1854877 - DNA, 15 bp, Homo sapiens
aaccagttgcacaac

SEQ ID NO: 1854878 - DNA, 15 bp, Homo sapiens
accagttgcacaact

SEQ ID NO: 1854879 - DNA, 15 bp, Homo sapiens
ccagttgcacaacta

SEQ ID NO: 1854880 - DNA, 15 bp, Homo sapiens
cagttgcacaactaa

SEQ ID NO: 1854881 - DNA, 15 bp, Homo sapiens
agttgcacaactaaa

SEQ ID NO: 1854882 - DNA, 15 bp, Homo sapiens
gttgcacaactaaag

SEQ ID NO: 1854883 - DNA, 15 bp, Homo sapiens
ttgcacaactaaagg

SEQ ID NO: 1854884 - DNA, 15 bp, Homo sapiens
tgcacaactaaagga

SEQ ID NO: 1854885 - DNA, 15 bp, Homo sapiens
gcacaactaaaggaa

SEQ ID NO: 1854886 - DNA, 15 bp, Homo sapiens
cacaactaaaggaat

SEQ ID NO: 1854887 - DNA, 15 bp, Homo sapiens
acaactaaaggaata

SEQ ID NO: 1854888 - DNA, 15 bp, Homo sapiens
caactaaaggaatac

SEQ ID NO: 1854889 - DNA, 15 bp, Homo sapiens
aactaaaggaataca

SEQ ID NO: 1854890 - DNA, 15 bp, Homo sapiens
actaaaggaatacat

SEQ ID NO: 1854891 - DNA, 15 bp, Homo sapiens
ctaaaggaatacatc

SEQ ID NO: 1854892 - DNA, 15 bp, Homo sapiens
taaaggaatacatcc

SEQ ID NO: 1854893 - DNA, 15 bp, Homo sapiens
aaaggaatacatcct

SEQ ID NO: 1854894 - DNA, 15 bp, Homo sapiens
aaggaatacatcctg

SEQ ID NO: 1854895 - DNA, 15 bp, Homo sapiens
aggaatacatcctgt

SEQ ID NO: 1854896 - DNA, 15 bp, Homo sapiens
ggaatacatcctgtg

SEQ ID NO: 1854897 - DNA, 15 bp, Homo sapiens
gaatacatcctgtga

SEQ ID NO: 1854898 - DNA, 15 bp, Homo sapiens
aatacatcctgtgaa

SEQ ID NO: 1854899 - DNA, 15 bp, Homo sapiens
atacatcctgtgaag

SEQ ID NO: 1854900 - DNA, 15 bp, Homo sapiens
tacatcctgtgaagt

SEQ ID NO: 1854901 - DNA, 15 bp, Homo sapiens
acatcctgtgaagtc

SEQ ID NO: 1854902 - DNA, 15 bp, Homo sapiens
catcctgtgaagtct

SEQ ID NO: 1854903 - DNA, 15 bp, Homo sapiens
atcctgtgaagtctc

SEQ ID NO: 1854904 - DNA, 15 bp, Homo sapiens
tcctgtgaagtctcc

SEQ ID NO: 1854905 - DNA, 15 bp, Homo sapiens
cctgtgaagtctcca

SEQ ID NO: 1854906 - DNA, 15 bp, Homo sapiens
ctgtgaagtctccat

SEQ ID NO: 1854907 - DNA, 15 bp, Homo sapiens
tgtgaagtctccatc

SEQ ID NO: 1854908 - DNA, 15 bp, Homo sapiens
gtgaagtctccatct

SEQ ID NO: 1854909 - DNA, 15 bp, Homo sapiens
tgaagtctccatctt

SEQ ID NO: 1854910 - DNA, 15 bp, Homo sapiens
gaagtctccatctta

SEQ ID NO: 1854911 - DNA, 15 bp, Homo sapiens
aagtctccatcttag

SEQ ID NO: 1854912 - DNA, 15 bp, Homo sapiens
agtctccatcttagg

SEQ ID NO: 1854913 - DNA, 15 bp, Homo sapiens
gtctccatcttagga

SEQ ID NO: 1854914 - DNA, 15 bp, Homo sapiens
tctccatcttaggaa

SEQ ID NO: 1854915 - DNA, 15 bp, Homo sapiens
ctccatcttaggaaa

SEQ ID NO: 1854916 - DNA, 15 bp, Homo sapiens
tccatcttaggaaaa

SEQ ID NO: 1854917 - DNA, 15 bp, Homo sapiens
ccatcttaggaaaag

SEQ ID NO: 1854918 - DNA, 15 bp, Homo sapiens
catcttaggaaaagg

SEQ ID NO: 1854919 - DNA, 15 bp, Homo sapiens
atcttaggaaaaggt

SEQ ID NO: 1854920 - DNA, 15 bp, Homo sapiens
tcttaggaaaaggtg

SEQ ID NO: 1854921 - DNA, 15 bp, Homo sapiens
cttaggaaaaggtgg

SEQ ID NO: 1854922 - DNA, 15 bp, Homo sapiens
ttaggaaaaggtggt

SEQ ID NO: 1854923 - DNA, 15 bp, Homo sapiens
taggaaaaggtggtg

SEQ ID NO: 1854924 - DNA, 15 bp, Homo sapiens
aggaaaaggtggtgg

SEQ ID NO: 1854925 - DNA, 15 bp, Homo sapiens
ggaaaaggtggtggg

SEQ ID NO: 1854926 - DNA, 15 bp, Homo sapiens
gaaaaggtggtggga

SEQ ID NO: 1854927 - DNA, 15 bp, Homo sapiens
aaaaggtggtgggaa

SEQ ID NO: 1854928 - DNA, 15 bp, Homo sapiens
aaaggtggtgggaat

SEQ ID NO: 1854929 - DNA, 15 bp, Homo sapiens
aaggtggtgggaatg

SEQ ID NO: 1854930 - DNA, 15 bp, Homo sapiens
aggtggtgggaatgg

SEQ ID NO: 1854931 - DNA, 15 bp, Homo sapiens
ggtggtgggaatggg

SEQ ID NO: 1854932 - DNA, 15 bp, Homo sapiens
gtggtgggaatgggg

SEQ ID NO: 1854933 - DNA, 15 bp, Homo sapiens
tggtgggaatggggc

SEQ ID NO: 1854934 - DNA, 15 bp, Homo sapiens
ggtgggaatggggct

SEQ ID NO: 1854935 - DNA, 15 bp, Homo sapiens
gtgggaatggggctg

SEQ ID NO: 1854936 - DNA, 15 bp, Homo sapiens
tgggaatggggctgg

SEQ ID NO: 1854937 - DNA, 15 bp, Homo sapiens
gggaatggggctggg

SEQ ID NO: 1854938 - DNA, 15 bp, Homo sapiens
ggaatggggctgggg

SEQ ID NO: 1854939 - DNA, 15 bp, Homo sapiens
gaatggggctggggc

SEQ ID NO: 1854940 - DNA, 15 bp, Homo sapiens
aatggggctggggcc

SEQ ID NO: 1854941 - DNA, 15 bp, Homo sapiens
atggggctggggcct

SEQ ID NO: 1854942 - DNA, 15 bp, Homo sapiens
tggggctggggcctg

SEQ ID NO: 1854943 - DNA, 15 bp, Homo sapiens
ggggctggggcctgg

SEQ ID NO: 1854944 - DNA, 15 bp, Homo sapiens
gggctggggcctggt

SEQ ID NO: 1854945 - DNA, 15 bp, Homo sapiens
ggctggggcctggta

SEQ ID NO: 1854946 - DNA, 15 bp, Homo sapiens
gctggggcctggtac

SEQ ID NO: 1854947 - DNA, 15 bp, Homo sapiens
ctggggcctggtacc

SEQ ID NO: 1854948 - DNA, 15 bp, Homo sapiens
tggggcctggtaccc

SEQ ID NO: 1854949 - DNA, 15 bp, Homo sapiens
ggggcctggtaccct

SEQ ID NO: 1854950 - DNA, 15 bp, Homo sapiens
gggcctggtaccctg

SEQ ID NO: 1854951 - DNA, 15 bp, Homo sapiens
ggcctggtaccctgc

SEQ ID NO: 1854952 - DNA, 15 bp, Homo sapiens
gcctggtaccctgca

SEQ ID NO: 1854953 - DNA, 15 bp, Homo sapiens
cctggtaccctgcag

SEQ ID NO: 1854954 - DNA, 15 bp, Homo sapiens
ctggtaccctgcagc

SEQ ID NO: 1854955 - DNA, 15 bp, Homo sapiens
tggtaccctgcagcc

SEQ ID NO: 1854956 - DNA, 15 bp, Homo sapiens
ggtaccctgcagcct

SEQ ID NO: 1854957 - DNA, 15 bp, Homo sapiens
gtaccctgcagcctt

SEQ ID NO: 1854958 - DNA, 15 bp, Homo sapiens
taccctgcagccttt

SEQ ID NO: 1854959 - DNA, 15 bp, Homo sapiens
accctgcagcctttg

SEQ ID NO: 1854960 - DNA, 15 bp, Homo sapiens
ccctgcagcctttgg

SEQ ID NO: 1854961 - DNA, 15 bp, Homo sapiens
cctgcagcctttgga

SEQ ID NO: 1854962 - DNA, 15 bp, Homo sapiens
ctgcagcctttggag

SEQ ID NO: 1854963 - DNA, 15 bp, Homo sapiens
tgcagcctttggaga

SEQ ID NO: 1854964 - DNA, 15 bp, Homo sapiens
gcagcctttggagac

SEQ ID NO: 1854965 - DNA, 15 bp, Homo sapiens
cagcctttggagaca

SEQ ID NO: 1854966 - DNA, 15 bp, Homo sapiens
agcctttggagacac

SEQ ID NO: 1854967 - DNA, 15 bp, Homo sapiens
gcctttggagacaca

SEQ ID NO: 1854968 - DNA, 15 bp, Homo sapiens
cctttggagacacag

SEQ ID NO: 1854969 - DNA, 15 bp, Homo sapiens
ctttggagacacaga

SEQ ID NO: 1854970 - DNA, 15 bp, Homo sapiens
tttggagacacagag

SEQ ID NO: 1854971 - DNA, 15 bp, Homo sapiens
ttggagacacagagg

SEQ ID NO: 1854972 - DNA, 15 bp, Homo sapiens
tggagacacagaggg

SEQ ID NO: 1854973 - DNA, 15 bp, Homo sapiens
ggagacacagagggc

SEQ ID NO: 1854974 - DNA, 15 bp, Homo sapiens
gagacacagagggct

SEQ ID NO: 1854975 - DNA, 15 bp, Homo sapiens
agacacagagggctc

SEQ ID NO: 1854976 - DNA, 15 bp, Homo sapiens
gacacagagggctca

SEQ ID NO: 1854977 - DNA, 15 bp, Homo sapiens
acacagagggctcaa

SEQ ID NO: 1854978 - DNA, 15 bp, Homo sapiens
cacagagggctcaaa

SEQ ID NO: 1854979 - DNA, 15 bp, Homo sapiens
acagagggctcaaag

SEQ ID NO: 1854980 - DNA, 15 bp, Homo sapiens
cagagggctcaaagc

SEQ ID NO: 1854981 - DNA, 15 bp, Homo sapiens
agagggctcaaagct

SEQ ID NO: 1854982 - DNA, 15 bp, Homo sapiens
gagggctcaaagcta

SEQ ID NO: 1854983 - DNA, 15 bp, Homo sapiens
agggctcaaagctag

SEQ ID NO: 1854984 - DNA, 15 bp, Homo sapiens
gggctcaaagctagg

SEQ ID NO: 1854985 - DNA, 15 bp, Homo sapiens
ggctcaaagctagga

SEQ ID NO: 1854986 - DNA, 15 bp, Homo sapiens
gctcaaagctaggaa

SEQ ID NO: 1854987 - DNA, 15 bp, Homo sapiens
ctcaaagctaggaac

SEQ ID NO: 1854988 - DNA, 15 bp, Homo sapiens
tcaaagctaggaact

SEQ ID NO: 1854989 - DNA, 15 bp, Homo sapiens
caaagctaggaactc

SEQ ID NO: 1854990 - DNA, 15 bp, Homo sapiens
aaagctaggaactcc

SEQ ID NO: 1854991 - DNA, 15 bp, Homo sapiens
aagctaggaactcca

SEQ ID NO: 1854992 - DNA, 15 bp, Homo sapiens
agctaggaactccat

SEQ ID NO: 1854993 - DNA, 15 bp, Homo sapiens
gctaggaactccatt

SEQ ID NO: 1854994 - DNA, 15 bp, Homo sapiens
ctaggaactccattt

SEQ ID NO: 1854995 - DNA, 15 bp, Homo sapiens
taggaactccatttt

SEQ ID NO: 1854996 - DNA, 15 bp, Homo sapiens
aggaactccattttg

SEQ ID NO: 1854997 - DNA, 15 bp, Homo sapiens
ggaactccattttgc

SEQ ID NO: 1854998 - DNA, 15 bp, Homo sapiens
gaactccattttgct

SEQ ID NO: 1854999 - DNA, 15 bp, Homo sapiens
aactccattttgcta

SEQ ID NO: 1855000 - DNA, 15 bp, Homo sapiens
actccattttgctat

SEQ ID NO: 1855001 - DNA, 15 bp, Homo sapiens
ctccattttgctata

SEQ ID NO: 1855002 - DNA, 15 bp, Homo sapiens
tccattttgctataa

SEQ ID NO: 1855003 - DNA, 15 bp, Homo sapiens
ccattttgctataat

SEQ ID NO: 1855004 - DNA, 15 bp, Homo sapiens
cattttgctataatt

SEQ ID NO: 1855005 - DNA, 15 bp, Homo sapiens
attttgctataattt

SEQ ID NO: 1855006 - DNA, 15 bp, Homo sapiens
ttttgctataattta

SEQ ID NO: 1855007 - DNA, 15 bp, Homo sapiens
tttgctataatttaa

SEQ ID NO: 1855008 - DNA, 15 bp, Homo sapiens
ttgctataatttaag

SEQ ID NO: 1855009 - DNA, 15 bp, Homo sapiens
tgctataatttaagc

SEQ ID NO: 1855010 - DNA, 15 bp, Homo sapiens
gctataatttaagcc

SEQ ID NO: 1855011 - DNA, 15 bp, Homo sapiens
ctataatttaagcca

SEQ ID NO: 1855012 - DNA, 15 bp, Homo sapiens
tataatttaagccac

SEQ ID NO: 1855013 - DNA, 15 bp, Homo sapiens
ataatttaagccact

SEQ ID NO: 1855014 - DNA, 15 bp, Homo sapiens
taatttaagccactc

SEQ ID NO: 1855015 - DNA, 15 bp, Homo sapiens
aatttaagccactcc

SEQ ID NO: 1855016 - DNA, 15 bp, Homo sapiens
atttaagccactcca

SEQ ID NO: 1855017 - DNA, 15 bp, Homo sapiens
tttaagccactccac

SEQ ID NO: 1855018 - DNA, 15 bp, Homo sapiens
ttaagccactccact

SEQ ID NO: 1855019 - DNA, 15 bp, Homo sapiens
taagccactccactc

SEQ ID NO: 1855020 - DNA, 15 bp, Homo sapiens
aagccactccactca

SEQ ID NO: 1855021 - DNA, 15 bp, Homo sapiens
agccactccactcag

SEQ ID NO: 1855022 - DNA, 15 bp, Homo sapiens
gccactccactcagc

SEQ ID NO: 1855023 - DNA, 15 bp, Homo sapiens
ccactccactcagca

SEQ ID NO: 1855024 - DNA, 15 bp, Homo sapiens
cactccactcagcat

SEQ ID NO: 1855025 - DNA, 15 bp, Homo sapiens
actccactcagcatc

SEQ ID NO: 1855026 - DNA, 15 bp, Homo sapiens
ctccactcagcatct

SEQ ID NO: 1855027 - DNA, 15 bp, Homo sapiens
tccactcagcatctg

SEQ ID NO: 1855028 - DNA, 15 bp, Homo sapiens
ccactcagcatctgg

SEQ ID NO: 1855029 - DNA, 15 bp, Homo sapiens
cactcagcatctggg

SEQ ID NO: 1855030 - DNA, 15 bp, Homo sapiens
actcagcatctggga

SEQ ID NO: 1855031 - DNA, 15 bp, Homo sapiens
ctcagcatctgggag

SEQ ID NO: 1855032 - DNA, 15 bp, Homo sapiens
tcagcatctgggagg

SEQ ID NO: 1855033 - DNA, 15 bp, Homo sapiens
cagcatctgggaggc

SEQ ID NO: 1855034 - DNA, 15 bp, Homo sapiens
agcatctgggaggcc

SEQ ID NO: 1855035 - DNA, 15 bp, Homo sapiens
gcatctgggaggcct

SEQ ID NO: 1855036 - DNA, 15 bp, Homo sapiens
catctgggaggcctg

SEQ ID NO: 1855037 - DNA, 15 bp, Homo sapiens
atctgggaggcctgg

SEQ ID NO: 1855038 - DNA, 15 bp, Homo sapiens
tctgggaggcctgga

SEQ ID NO: 1855039 - DNA, 15 bp, Homo sapiens
ctgggaggcctggac

SEQ ID NO: 1855040 - DNA, 15 bp, Homo sapiens
tgggaggcctggact

SEQ ID NO: 1855041 - DNA, 15 bp, Homo sapiens
gggaggcctggactt

SEQ ID NO: 1855042 - DNA, 15 bp, Homo sapiens
ggaggcctggacttt

SEQ ID NO: 1855043 - DNA, 15 bp, Homo sapiens
gaggcctggacttta

SEQ ID NO: 1855044 - DNA, 15 bp, Homo sapiens
aggcctggactttag

SEQ ID NO: 1855045 - DNA, 15 bp, Homo sapiens
ggcctggactttaga

SEQ ID NO: 1855046 - DNA, 15 bp, Homo sapiens
gcctggactttagac

SEQ ID NO: 1855047 - DNA, 15 bp, Homo sapiens
cctggactttagaca

SEQ ID NO: 1855048 - DNA, 15 bp, Homo sapiens
ctggactttagacac

SEQ ID NO: 1855049 - DNA, 15 bp, Homo sapiens
tggactttagacacc

SEQ ID NO: 1855050 - DNA, 15 bp, Homo sapiens
ggactttagacacct

SEQ ID NO: 1855051 - DNA, 15 bp, Homo sapiens
gactttagacaccta

SEQ ID NO: 1855052 - DNA, 15 bp, Homo sapiens
actttagacacctag

SEQ ID NO: 1855053 - DNA, 15 bp, Homo sapiens
ctttagacacctagg

SEQ ID NO: 1855054 - DNA, 15 bp, Homo sapiens
tttagacacctaggt

SEQ ID NO: 1855055 - DNA, 15 bp, Homo sapiens
ttagacacctaggta

SEQ ID NO: 1855056 - DNA, 15 bp, Homo sapiens
tagacacctaggtac

SEQ ID NO: 1855057 - DNA, 15 bp, Homo sapiens
agacacctaggtact

SEQ ID NO: 1855058 - DNA, 15 bp, Homo sapiens
gacacctaggtactg

SEQ ID NO: 1855059 - DNA, 15 bp, Homo sapiens
acacctaggtactgt

SEQ ID NO: 1855060 - DNA, 15 bp, Homo sapiens
cacctaggtactgtg

SEQ ID NO: 1855061 - DNA, 15 bp, Homo sapiens
acctaggtactgtgt

SEQ ID NO: 1855062 - DNA, 15 bp, Homo sapiens
cctaggtactgtgtg

SEQ ID NO: 1855063 - DNA, 15 bp, Homo sapiens
ctaggtactgtgtgg

SEQ ID NO: 1855064 - DNA, 15 bp, Homo sapiens
taggtactgtgtggt

SEQ ID NO: 1855065 - DNA, 15 bp, Homo sapiens
aggtactgtgtggtc

SEQ ID NO: 1855066 - DNA, 15 bp, Homo sapiens
ggtactgtgtggtcc

SEQ ID NO: 1855067 - DNA, 15 bp, Homo sapiens
gtactgtgtggtcca

SEQ ID NO: 1855068 - DNA, 15 bp, Homo sapiens
tactgtgtggtccaa

SEQ ID NO: 1855069 - DNA, 15 bp, Homo sapiens
actgtgtggtccaac

SEQ ID NO: 1855070 - DNA, 15 bp, Homo sapiens
ctgtgtggtccaacc

SEQ ID NO: 1855071 - DNA, 15 bp, Homo sapiens
tgtgtggtccaacca

SEQ ID NO: 1855072 - DNA, 15 bp, Homo sapiens
gtgtggtccaaccag

SEQ ID NO: 1855073 - DNA, 15 bp, Homo sapiens
tgtggtccaaccagg

SEQ ID NO: 1855074 - DNA, 15 bp, Homo sapiens
gtggtccaaccagga

SEQ ID NO: 1855075 - DNA, 15 bp, Homo sapiens
tggtccaaccaggag

SEQ ID NO: 1855076 - DNA, 15 bp, Homo sapiens
ggtccaaccaggaga

SEQ ID NO: 1855077 - DNA, 15 bp, Homo sapiens
gtccaaccaggagag

SEQ ID NO: 1855078 - DNA, 15 bp, Homo sapiens
tccaaccaggagagc

SEQ ID NO: 1855079 - DNA, 15 bp, Homo sapiens
ccaaccaggagagcc

SEQ ID NO: 1855080 - DNA, 15 bp, Homo sapiens
caaccaggagagcct

SEQ ID NO: 1855081 - DNA, 15 bp, Homo sapiens
aaccaggagagcctt

SEQ ID NO: 1855082 - DNA, 15 bp, Homo sapiens
accaggagagccttc

SEQ ID NO: 1855083 - DNA, 15 bp, Homo sapiens
ccaggagagccttct

SEQ ID NO: 1855084 - DNA, 15 bp, Homo sapiens
caggagagccttctt

SEQ ID NO: 1855085 - DNA, 15 bp, Homo sapiens
aggagagccttcttt

SEQ ID NO: 1855086 - DNA, 15 bp, Homo sapiens
ggagagccttctttg

SEQ ID NO: 1855087 - DNA, 15 bp, Homo sapiens
gagagccttctttga

SEQ ID NO: 1855088 - DNA, 15 bp, Homo sapiens
agagccttctttgaa

SEQ ID NO: 1855089 - DNA, 15 bp, Homo sapiens
gagccttctttgaaa

SEQ ID NO: 1855090 - DNA, 15 bp, Homo sapiens
agccttctttgaaag

SEQ ID NO: 1855091 - DNA, 15 bp, Homo sapiens
gccttctttgaaaga

SEQ ID NO: 1855092 - DNA, 15 bp, Homo sapiens
ccttctttgaaagag

SEQ ID NO: 1855093 - DNA, 15 bp, Homo sapiens
cttctttgaaagagt

SEQ ID NO: 1855094 - DNA, 15 bp, Homo sapiens
ttctttgaaagagtg

SEQ ID NO: 1855095 - DNA, 15 bp, Homo sapiens
tctttgaaagagtgt

SEQ ID NO: 1855096 - DNA, 15 bp, Homo sapiens
ctttgaaagagtgtt

SEQ ID NO: 1855097 - DNA, 15 bp, Homo sapiens
tttgaaagagtgttc

SEQ ID NO: 1855098 - DNA, 15 bp, Homo sapiens
ttgaaagagtgttca

SEQ ID NO: 1855099 - DNA, 15 bp, Homo sapiens
tgaaagagtgttcac

SEQ ID NO: 1855100 - DNA, 15 bp, Homo sapiens
gaaagagtgttcaca

SEQ ID NO: 1855101 - DNA, 15 bp, Homo sapiens
aaagagtgttcacat

SEQ ID NO: 1855102 - DNA, 15 bp, Homo sapiens
aagagtgttcacatg

SEQ ID NO: 1855103 - DNA, 15 bp, Homo sapiens
agagtgttcacatga

SEQ ID NO: 1855104 - DNA, 15 bp, Homo sapiens
gagtgttcacatgac

SEQ ID NO: 1855105 - DNA, 15 bp, Homo sapiens
agtgttcacatgact

SEQ ID NO: 1855106 - DNA, 15 bp, Homo sapiens
gtgttcacatgactg

SEQ ID NO: 1855107 - DNA, 15 bp, Homo sapiens
tgttcacatgactga

SEQ ID NO: 1855108 - DNA, 15 bp, Homo sapiens
gttcacatgactgaa

SEQ ID NO: 1855109 - DNA, 15 bp, Homo sapiens
ttcacatgactgaac

SEQ ID NO: 1855110 - DNA, 15 bp, Homo sapiens
tcacatgactgaacc

SEQ ID NO: 1855111 - DNA, 15 bp, Homo sapiens
cacatgactgaacct

SEQ ID NO: 1855112 - DNA, 15 bp, Homo sapiens
acatgactgaaccta

SEQ ID NO: 1855113 - DNA, 15 bp, Homo sapiens
catgactgaacctag

SEQ ID NO: 1855114 - DNA, 15 bp, Homo sapiens
atgactgaacctagg

SEQ ID NO: 1855115 - DNA, 15 bp, Homo sapiens
tgactgaacctaggg

SEQ ID NO: 1855116 - DNA, 15 bp, Homo sapiens
gactgaacctagggg

SEQ ID NO: 1855117 - DNA, 15 bp, Homo sapiens
actgaacctagggga

SEQ ID NO: 1855118 - DNA, 15 bp, Homo sapiens
ctgaacctaggggag

SEQ ID NO: 1855119 - DNA, 15 bp, Homo sapiens
tgaacctaggggagg

SEQ ID NO: 1855120 - DNA, 15 bp, Homo sapiens
gaacctaggggaggc

SEQ ID NO: 1855121 - DNA, 15 bp, Homo sapiens
aacctaggggaggcc

SEQ ID NO: 1855122 - DNA, 15 bp, Homo sapiens
acctaggggaggcca

SEQ ID NO: 1855123 - DNA, 15 bp, Homo sapiens
cctaggggaggccag

SEQ ID NO: 1855124 - DNA, 15 bp, Homo sapiens
ctaggggaggccagt

SEQ ID NO: 1855125 - DNA, 15 bp, Homo sapiens
taggggaggccagtt

SEQ ID NO: 1855126 - DNA, 15 bp, Homo sapiens
aggggaggccagttg

SEQ ID NO: 1855127 - DNA, 15 bp, Homo sapiens
ggggaggccagttgt

SEQ ID NO: 1855128 - DNA, 15 bp, Homo sapiens
gggaggccagttgtg

SEQ ID NO: 1855129 - DNA, 15 bp, Homo sapiens
ggaggccagttgtga

SEQ ID NO: 1855130 - DNA, 15 bp, Homo sapiens
gaggccagttgtgac

SEQ ID NO: 1855131 - DNA, 15 bp, Homo sapiens
aggccagttgtgact

SEQ ID NO: 1855132 - DNA, 15 bp, Homo sapiens
ggccagttgtgactt

SEQ ID NO: 1855133 - DNA, 15 bp, Homo sapiens
gccagttgtgacttg

SEQ ID NO: 1855134 - DNA, 15 bp, Homo sapiens
ccagttgtgacttgt

SEQ ID NO: 1855135 - DNA, 15 bp, Homo sapiens
cagttgtgacttgtg

SEQ ID NO: 1855136 - DNA, 15 bp, Homo sapiens
agttgtgacttgtgg

SEQ ID NO: 1855137 - DNA, 15 bp, Homo sapiens
gttgtgacttgtggc

SEQ ID NO: 1855138 - DNA, 15 bp, Homo sapiens
ttgtgacttgtggct

SEQ ID NO: 1855139 - DNA, 15 bp, Homo sapiens
tgtgacttgtggctg

SEQ ID NO: 1855140 - DNA, 15 bp, Homo sapiens
gtgacttgtggctgt

SEQ ID NO: 1855141 - DNA, 15 bp, Homo sapiens
tgacttgtggctgtc

SEQ ID NO: 1855142 - DNA, 15 bp, Homo sapiens
gacttgtggctgtca

SEQ ID NO: 1855143 - DNA, 15 bp, Homo sapiens
acttgtggctgtcag

SEQ ID NO: 1855144 - DNA, 15 bp, Homo sapiens
cttgtggctgtcaga

SEQ ID NO: 1855145 - DNA, 15 bp, Homo sapiens
ttgtggctgtcagaa

SEQ ID NO: 1855146 - DNA, 15 bp, Homo sapiens
tgtggctgtcagaag

SEQ ID NO: 1855147 - DNA, 15 bp, Homo sapiens
gtggctgtcagaagt

SEQ ID NO: 1855148 - DNA, 15 bp, Homo sapiens
tggctgtcagaagtc

SEQ ID NO: 1855149 - DNA, 15 bp, Homo sapiens
ggctgtcagaagtca

SEQ ID NO: 1855150 - DNA, 15 bp, Homo sapiens
gctgtcagaagtcag

SEQ ID NO: 1855151 - DNA, 15 bp, Homo sapiens
ctgtcagaagtcaga

SEQ ID NO: 1855152 - DNA, 15 bp, Homo sapiens
tgtcagaagtcagaa

SEQ ID NO: 1855153 - DNA, 15 bp, Homo sapiens
gtcagaagtcagaaa

SEQ ID NO: 1855154 - DNA, 15 bp, Homo sapiens
tcagaagtcagaaag

SEQ ID NO: 1855155 - DNA, 15 bp, Homo sapiens
cagaagtcagaaaga

SEQ ID NO: 1855156 - DNA, 15 bp, Homo sapiens
agaagtcagaaagac

SEQ ID NO: 1855157 - DNA, 15 bp, Homo sapiens
gaagtcagaaagaca

SEQ ID NO: 1855158 - DNA, 15 bp, Homo sapiens
aagtcagaaagacac

SEQ ID NO: 1855159 - DNA, 15 bp, Homo sapiens
agtcagaaagacacc

SEQ ID NO: 1855160 - DNA, 15 bp, Homo sapiens
gtcagaaagacaccc

SEQ ID NO: 1855161 - DNA, 15 bp, Homo sapiens
tcagaaagacacccc

SEQ ID NO: 1855162 - DNA, 15 bp, Homo sapiens
cagaaagacaccccc

SEQ ID NO: 1855163 - DNA, 15 bp, Homo sapiens
agaaagacaccccca

SEQ ID NO: 1855164 - DNA, 15 bp, Homo sapiens
gaaagacacccccac

SEQ ID NO: 1855165 - DNA, 15 bp, Homo sapiens
aaagacacccccacc

SEQ ID NO: 1855166 - DNA, 15 bp, Homo sapiens
aagacacccccacct

SEQ ID NO: 1855167 - DNA, 15 bp, Homo sapiens
agacacccccacctc

SEQ ID NO: 1855168 - DNA, 15 bp, Homo sapiens
gacacccccacctcc

SEQ ID NO: 1855169 - DNA, 15 bp, Homo sapiens
acacccccacctcca

SEQ ID NO: 1855170 - DNA, 15 bp, Homo sapiens
cacccccacctccac

SEQ ID NO: 1855171 - DNA, 15 bp, Homo sapiens
acccccacctccaca

SEQ ID NO: 1855172 - DNA, 15 bp, Homo sapiens
cccccacctccacat

SEQ ID NO: 1855173 - DNA, 15 bp, Homo sapiens
ccccacctccacatc

SEQ ID NO: 1855174 - DNA, 15 bp, Homo sapiens
cccacctccacatcc

SEQ ID NO: 1855175 - DNA, 15 bp, Homo sapiens
ccacctccacatccc

SEQ ID NO: 1855176 - DNA, 15 bp, Homo sapiens
cacctccacatccca

SEQ ID NO: 1855177 - DNA, 15 bp, Homo sapiens
acctccacatcccac

SEQ ID NO: 1855178 - DNA, 15 bp, Homo sapiens
cctccacatcccaca

SEQ ID NO: 1855179 - DNA, 15 bp, Homo sapiens
ctccacatcccacaa

SEQ ID NO: 1855180 - DNA, 15 bp, Homo sapiens
tccacatcccacaag

SEQ ID NO: 1855181 - DNA, 15 bp, Homo sapiens
ccacatcccacaaga

SEQ ID NO: 1855182 - DNA, 15 bp, Homo sapiens
cacatcccacaagaa

SEQ ID NO: 1855183 - DNA, 15 bp, Homo sapiens
acatcccacaagaag

SEQ ID NO: 1855184 - DNA, 15 bp, Homo sapiens
catcccacaagaagt

SEQ ID NO: 1855185 - DNA, 15 bp, Homo sapiens
atcccacaagaagtc

SEQ ID NO: 1855186 - DNA, 15 bp, Homo sapiens
tcccacaagaagtca

SEQ ID NO: 1855187 - DNA, 15 bp, Homo sapiens
cccacaagaagtcag

SEQ ID NO: 1855188 - DNA, 15 bp, Homo sapiens
ccacaagaagtcaga

SEQ ID NO: 1855189 - DNA, 15 bp, Homo sapiens
cacaagaagtcagaa

SEQ ID NO: 1855190 - DNA, 15 bp, Homo sapiens
acaagaagtcagaat

SEQ ID NO: 1855191 - DNA, 15 bp, Homo sapiens
caagaagtcagaatt

SEQ ID NO: 1855192 - DNA, 15 bp, Homo sapiens
aagaagtcagaattt

SEQ ID NO: 1855193 - DNA, 15 bp, Homo sapiens
agaagtcagaatttg

SEQ ID NO: 1855194 - DNA, 15 bp, Homo sapiens
gaagtcagaatttgc

SEQ ID NO: 1855195 - DNA, 15 bp, Homo sapiens
aagtcagaatttgct

SEQ ID NO: 1855196 - DNA, 15 bp, Homo sapiens
agtcagaatttgctg

SEQ ID NO: 1855197 - DNA, 15 bp, Homo sapiens
gtcagaatttgctgt

SEQ ID NO: 1855198 - DNA, 15 bp, Homo sapiens
tcagaatttgctgtt

SEQ ID NO: 1855199 - DNA, 15 bp, Homo sapiens
cagaatttgctgttt

SEQ ID NO: 1855200 - DNA, 15 bp, Homo sapiens
agaatttgctgttta

SEQ ID NO: 1855201 - DNA, 15 bp, Homo sapiens
gaatttgctgtttaa

SEQ ID NO: 1855202 - DNA, 15 bp, Homo sapiens
aatttgctgtttaaa

SEQ ID NO: 1855203 - DNA, 15 bp, Homo sapiens
atttgctgtttaaag

SEQ ID NO: 1855204 - DNA, 15 bp, Homo sapiens
tttgctgtttaaagc

SEQ ID NO: 1855205 - DNA, 15 bp, Homo sapiens
ttgctgtttaaagct

SEQ ID NO: 1855206 - DNA, 15 bp, Homo sapiens
tgctgtttaaagctg

SEQ ID NO: 1855207 - DNA, 15 bp, Homo sapiens
gctgtttaaagctgg

SEQ ID NO: 1855208 - DNA, 15 bp, Homo sapiens
ctgtttaaagctgga

SEQ ID NO: 1855209 - DNA, 15 bp, Homo sapiens
tgtttaaagctggat

SEQ ID NO: 1855210 - DNA, 15 bp, Homo sapiens
gtttaaagctggatc

SEQ ID NO: 1855211 - DNA, 15 bp, Homo sapiens
tttaaagctggatct

SEQ ID NO: 1855212 - DNA, 15 bp, Homo sapiens
ttaaagctggatctc

SEQ ID NO: 1855213 - DNA, 15 bp, Homo sapiens
taaagctggatctcg

SEQ ID NO: 1855214 - DNA, 15 bp, Homo sapiens
aaagctggatctcgg

SEQ ID NO: 1855215 - DNA, 15 bp, Homo sapiens
aagctggatctcggg

SEQ ID NO: 1855216 - DNA, 15 bp, Homo sapiens
agctggatctcgggg

SEQ ID NO: 1855217 - DNA, 15 bp, Homo sapiens
gctggatctcgggga

SEQ ID NO: 1855218 - DNA, 15 bp, Homo sapiens
ctggatctcggggat

SEQ ID NO: 1855219 - DNA, 15 bp, Homo sapiens
tggatctcggggata

SEQ ID NO: 1855220 - DNA, 15 bp, Homo sapiens
ggatctcggggatag

SEQ ID NO: 1855221 - DNA, 15 bp, Homo sapiens
gatctcggggatagc

SEQ ID NO: 1855222 - DNA, 15 bp, Homo sapiens
atctcggggatagct

SEQ ID NO: 1855223 - DNA, 15 bp, Homo sapiens
tctcggggatagctg

SEQ ID NO: 1855224 - DNA, 15 bp, Homo sapiens
ctcggggatagctgt

SEQ ID NO: 1855225 - DNA, 15 bp, Homo sapiens
tcggggatagctgtg

SEQ ID NO: 1855226 - DNA, 15 bp, Homo sapiens
cggggatagctgtgt

SEQ ID NO: 1855227 - DNA, 15 bp, Homo sapiens
ggggatagctgtgtg

SEQ ID NO: 1855228 - DNA, 15 bp, Homo sapiens
gggatagctgtgtgg

SEQ ID NO: 1855229 - DNA, 15 bp, Homo sapiens
ggatagctgtgtggg

SEQ ID NO: 1855230 - DNA, 15 bp, Homo sapiens
gatagctgtgtgggc

SEQ ID NO: 1855231 - DNA, 15 bp, Homo sapiens
atagctgtgtgggct

SEQ ID NO: 1855232 - DNA, 15 bp, Homo sapiens
tagctgtgtgggctc

SEQ ID NO: 1855233 - DNA, 15 bp, Homo sapiens
agctgtgtgggctct

SEQ ID NO: 1855234 - DNA, 15 bp, Homo sapiens
gctgtgtgggctctg

SEQ ID NO: 1855235 - DNA, 15 bp, Homo sapiens
ctgtgtgggctctgc

SEQ ID NO: 1855236 - DNA, 15 bp, Homo sapiens
tgtgtgggctctgct

SEQ ID NO: 1855237 - DNA, 15 bp, Homo sapiens
gtgtgggctctgctt

SEQ ID NO: 1855238 - DNA, 15 bp, Homo sapiens
tgtgggctctgcttc

SEQ ID NO: 1855239 - DNA, 15 bp, Homo sapiens
gtgggctctgcttcc

SEQ ID NO: 1855240 - DNA, 15 bp, Homo sapiens
tgggctctgcttccc

SEQ ID NO: 1855241 - DNA, 15 bp, Homo sapiens
gggctctgcttcccg

SEQ ID NO: 1855242 - DNA, 15 bp, Homo sapiens
ggctctgcttcccgt

SEQ ID NO: 1855243 - DNA, 15 bp, Homo sapiens
gctctgcttcccgtg

SEQ ID NO: 1855244 - DNA, 15 bp, Homo sapiens
ctctgcttcccgtgt

SEQ ID NO: 1855245 - DNA, 15 bp, Homo sapiens
tctgcttcccgtgtt

SEQ ID NO: 1855246 - DNA, 15 bp, Homo sapiens
ctgcttcccgtgttt

SEQ ID NO: 1855247 - DNA, 15 bp, Homo sapiens
tgcttcccgtgtttc

SEQ ID NO: 1855248 - DNA, 15 bp, Homo sapiens
gcttcccgtgtttca

SEQ ID NO: 1855249 - DNA, 15 bp, Homo sapiens
cttcccgtgtttcat

SEQ ID NO: 1855250 - DNA, 15 bp, Homo sapiens
ttcccgtgtttcatt

SEQ ID NO: 1855251 - DNA, 15 bp, Homo sapiens
tcccgtgtttcattg

SEQ ID NO: 1855252 - DNA, 15 bp, Homo sapiens
cccgtgtttcattgt

SEQ ID NO: 1855253 - DNA, 15 bp, Homo sapiens
ccgtgtttcattgta

SEQ ID NO: 1855254 - DNA, 15 bp, Homo sapiens
cgtgtttcattgtat

SEQ ID NO: 1855255 - DNA, 15 bp, Homo sapiens
gtgtttcattgtatc

SEQ ID NO: 1855256 - DNA, 15 bp, Homo sapiens
tgtttcattgtatct

SEQ ID NO: 1855257 - DNA, 15 bp, Homo sapiens
gtttcattgtatctg

SEQ ID NO: 1855258 - DNA, 15 bp, Homo sapiens
tttcattgtatctga

SEQ ID NO: 1855259 - DNA, 15 bp, Homo sapiens
ttcattgtatctgat

SEQ ID NO: 1855260 - DNA, 15 bp, Homo sapiens
tcattgtatctgatg

SEQ ID NO: 1855261 - DNA, 15 bp, Homo sapiens
cattgtatctgatgg

SEQ ID NO: 1855262 - DNA, 15 bp, Homo sapiens
attgtatctgatggt

SEQ ID NO: 1855263 - DNA, 15 bp, Homo sapiens
ttgtatctgatggtc

SEQ ID NO: 1855264 - DNA, 15 bp, Homo sapiens
tgtatctgatggtct

SEQ ID NO: 1855265 - DNA, 15 bp, Homo sapiens
gtatctgatggtctg

SEQ ID NO: 1855266 - DNA, 15 bp, Homo sapiens
tatctgatggtctga

SEQ ID NO: 1855267 - DNA, 15 bp, Homo sapiens
atctgatggtctgaa

SEQ ID NO: 1855268 - DNA, 15 bp, Homo sapiens
tctgatggtctgaaa

SEQ ID NO: 1855269 - DNA, 15 bp, Homo sapiens
ctgatggtctgaaag

SEQ ID NO: 1855270 - DNA, 15 bp, Homo sapiens
tgatggtctgaaagg

SEQ ID NO: 1855271 - DNA, 15 bp, Homo sapiens
gatggtctgaaaggt

SEQ ID NO: 1855272 - DNA, 15 bp, Homo sapiens
atggtctgaaaggtt

SEQ ID NO: 1855273 - DNA, 15 bp, Homo sapiens
tggtctgaaaggttt

SEQ ID NO: 1855274 - DNA, 15 bp, Homo sapiens
ggtctgaaaggtttg

SEQ ID NO: 1855275 - DNA, 15 bp, Homo sapiens
gtctgaaaggtttga

SEQ ID NO: 1855276 - DNA, 15 bp, Homo sapiens
tctgaaaggtttgag

SEQ ID NO: 1855277 - DNA, 15 bp, Homo sapiens
ctgaaaggtttgagg

SEQ ID NO: 1855278 - DNA, 15 bp, Homo sapiens
tgaaaggtttgagga

SEQ ID NO: 1855279 - DNA, 15 bp, Homo sapiens
gaaaggtttgaggaa

SEQ ID NO: 1855280 - DNA, 15 bp, Homo sapiens
aaaggtttgaggaat

SEQ ID NO: 1855281 - DNA, 15 bp, Homo sapiens
aaggtttgaggaatg

SEQ ID NO: 1855282 - DNA, 15 bp, Homo sapiens
aggtttgaggaatgg

SEQ ID NO: 1855283 - DNA, 15 bp, Homo sapiens
ggtttgaggaatggc

SEQ ID NO: 1855284 - DNA, 15 bp, Homo sapiens
gtttgaggaatggct

SEQ ID NO: 1855285 - DNA, 15 bp, Homo sapiens
tttgaggaatggctg

SEQ ID NO: 1855286 - DNA, 15 bp, Homo sapiens
ttgaggaatggctgg

SEQ ID NO: 1855287 - DNA, 15 bp, Homo sapiens
tgaggaatggctggc

SEQ ID NO: 1855288 - DNA, 15 bp, Homo sapiens
gaggaatggctggcc

SEQ ID NO: 1855289 - DNA, 15 bp, Homo sapiens
aggaatggctggcct

SEQ ID NO: 1855290 - DNA, 15 bp, Homo sapiens
ggaatggctggcctt

SEQ ID NO: 1855291 - DNA, 15 bp, Homo sapiens
gaatggctggccttg

SEQ ID NO: 1855292 - DNA, 15 bp, Homo sapiens
aatggctggccttgg

SEQ ID NO: 1855293 - DNA, 15 bp, Homo sapiens
atggctggccttggg

SEQ ID NO: 1855294 - DNA, 15 bp, Homo sapiens
tggctggccttgggg

SEQ ID NO: 1855295 - DNA, 15 bp, Homo sapiens
ggctggccttggggg

SEQ ID NO: 1855296 - DNA, 15 bp, Homo sapiens
gctggccttgggggg

SEQ ID NO: 1855297 - DNA, 15 bp, Homo sapiens
ctggccttggggggt

SEQ ID NO: 1855298 - DNA, 15 bp, Homo sapiens
tggccttggggggtt

SEQ ID NO: 1855299 - DNA, 15 bp, Homo sapiens
ggccttggggggttg

SEQ ID NO: 1855300 - DNA, 15 bp, Homo sapiens
gccttggggggttgc

SEQ ID NO: 1855301 - DNA, 15 bp, Homo sapiens
ccttggggggttgct

SEQ ID NO: 1855302 - DNA, 15 bp, Homo sapiens
cttggggggttgctg

SEQ ID NO: 1855303 - DNA, 15 bp, Homo sapiens
ttggggggttgctgg

SEQ ID NO: 1855304 - DNA, 15 bp, Homo sapiens
tggggggttgctggg

SEQ ID NO: 1855305 - DNA, 15 bp, Homo sapiens
ggggggttgctgggt

SEQ ID NO: 1855306 - DNA, 15 bp, Homo sapiens
gggggttgctgggtg

SEQ ID NO: 1855307 - DNA, 15 bp, Homo sapiens
ggggttgctgggtga

SEQ ID NO: 1855308 - DNA, 15 bp, Homo sapiens
gggttgctgggtgag

SEQ ID NO: 1855309 - DNA, 15 bp, Homo sapiens
ggttgctgggtgagc

SEQ ID NO: 1855310 - DNA, 15 bp, Homo sapiens
gttgctgggtgagct

SEQ ID NO: 1855311 - DNA, 15 bp, Homo sapiens
ttgctgggtgagctc

SEQ ID NO: 1855312 - DNA, 15 bp, Homo sapiens
tgctgggtgagctct

SEQ ID NO: 1855313 - DNA, 15 bp, Homo sapiens
gctgggtgagctctt

SEQ ID NO: 1855314 - DNA, 15 bp, Homo sapiens
ctgggtgagctcttg

SEQ ID NO: 1855315 - DNA, 15 bp, Homo sapiens
tgggtgagctcttga

SEQ ID NO: 1855316 - DNA, 15 bp, Homo sapiens
gggtgagctcttgag

SEQ ID NO: 1855317 - DNA, 15 bp, Homo sapiens
ggtgagctcttgagg

SEQ ID NO: 1855318 - DNA, 15 bp, Homo sapiens
gtgagctcttgaggg

SEQ ID NO: 1855319 - DNA, 15 bp, Homo sapiens
tgagctcttgaggga

SEQ ID NO: 1855320 - DNA, 15 bp, Homo sapiens
gagctcttgagggac

SEQ ID NO: 1855321 - DNA, 15 bp, Homo sapiens
agctcttgagggacc

SEQ ID NO: 1855322 - DNA, 15 bp, Homo sapiens
gctcttgagggaccc

SEQ ID NO: 1855323 - DNA, 15 bp, Homo sapiens
ctcttgagggaccca

SEQ ID NO: 1855324 - DNA, 15 bp, Homo sapiens
tcttgagggacccag

SEQ ID NO: 1855325 - DNA, 15 bp, Homo sapiens
cttgagggacccagg

SEQ ID NO: 1855326 - DNA, 15 bp, Homo sapiens
ttgagggacccaggt

SEQ ID NO: 1855327 - DNA, 15 bp, Homo sapiens
tgagggacccaggtg

SEQ ID NO: 1855328 - DNA, 15 bp, Homo sapiens
gagggacccaggtgg

SEQ ID NO: 1855329 - DNA, 15 bp, Homo sapiens
agggacccaggtggc

SEQ ID NO: 1855330 - DNA, 15 bp, Homo sapiens
gggacccaggtggcc

SEQ ID NO: 1855331 - DNA, 15 bp, Homo sapiens
ggacccaggtggcca

SEQ ID NO: 1855332 - DNA, 15 bp, Homo sapiens
gacccaggtggccag

SEQ ID NO: 1855333 - DNA, 15 bp, Homo sapiens
acccaggtggccagt

SEQ ID NO: 1855334 - DNA, 15 bp, Homo sapiens
cccaggtggccagta

SEQ ID NO: 1855335 - DNA, 15 bp, Homo sapiens
ccaggtggccagtat

SEQ ID NO: 1855336 - DNA, 15 bp, Homo sapiens
caggtggccagtatc

SEQ ID NO: 1855337 - DNA, 15 bp, Homo sapiens
aggtggccagtatcc

SEQ ID NO: 1855338 - DNA, 15 bp, Homo sapiens
ggtggccagtatcca

SEQ ID NO: 1855339 - DNA, 15 bp, Homo sapiens
gtggccagtatccat

SEQ ID NO: 1855340 - DNA, 15 bp, Homo sapiens
tggccagtatccatg

SEQ ID NO: 1855341 - DNA, 15 bp, Homo sapiens
ggccagtatccatgg

SEQ ID NO: 1855342 - DNA, 15 bp, Homo sapiens
gccagtatccatggg

SEQ ID NO: 1855343 - DNA, 15 bp, Homo sapiens
ccagtatccatgggc

SEQ ID NO: 1855344 - DNA, 15 bp, Homo sapiens
cagtatccatgggca

SEQ ID NO: 1855345 - DNA, 15 bp, Homo sapiens
agtatccatgggcag

SEQ ID NO: 1855346 - DNA, 15 bp, Homo sapiens
gtatccatgggcaga

SEQ ID NO: 1855347 - DNA, 15 bp, Homo sapiens
tatccatgggcagat

SEQ ID NO: 1855348 - DNA, 15 bp, Homo sapiens
atccatgggcagatc

SEQ ID NO: 1855349 - DNA, 15 bp, Homo sapiens
tccatgggcagatcc

SEQ ID NO: 1855350 - DNA, 15 bp, Homo sapiens
ccatgggcagatcca

SEQ ID NO: 1855351 - DNA, 15 bp, Homo sapiens
catgggcagatccag

SEQ ID NO: 1855352 - DNA, 15 bp, Homo sapiens
atgggcagatccagc

SEQ ID NO: 1855353 - DNA, 15 bp, Homo sapiens
tgggcagatccagcc

SEQ ID NO: 1855354 - DNA, 15 bp, Homo sapiens
gggcagatccagcct

SEQ ID NO: 1855355 - DNA, 15 bp, Homo sapiens
ggcagatccagcctg

SEQ ID NO: 1855356 - DNA, 15 bp, Homo sapiens
gcagatccagcctgc

SEQ ID NO: 1855357 - DNA, 15 bp, Homo sapiens
cagatccagcctgca

SEQ ID NO: 1855358 - DNA, 15 bp, Homo sapiens
agatccagcctgcaa

SEQ ID NO: 1855359 - DNA, 15 bp, Homo sapiens
gatccagcctgcaaa

SEQ ID NO: 1855360 - DNA, 15 bp, Homo sapiens
atccagcctgcaaat

SEQ ID NO: 1855361 - DNA, 15 bp, Homo sapiens
tccagcctgcaaatc

SEQ ID NO: 1855362 - DNA, 15 bp, Homo sapiens
ccagcctgcaaatcc

SEQ ID NO: 1855363 - DNA, 15 bp, Homo sapiens
cagcctgcaaatcca

SEQ ID NO: 1855364 - DNA, 15 bp, Homo sapiens
agcctgcaaatccag

SEQ ID NO: 1855365 - DNA, 15 bp, Homo sapiens
gcctgcaaatccaga

SEQ ID NO: 1855366 - DNA, 15 bp, Homo sapiens
cctgcaaatccagat

SEQ ID NO: 1855367 - DNA, 15 bp, Homo sapiens
ctgcaaatccagatc

SEQ ID NO: 1855368 - DNA, 15 bp, Homo sapiens
tgcaaatccagatcg

SEQ ID NO: 1855369 - DNA, 15 bp, Homo sapiens
gcaaatccagatcgg

SEQ ID NO: 1855370 - DNA, 15 bp, Homo sapiens
caaatccagatcgga

SEQ ID NO: 1855371 - DNA, 15 bp, Homo sapiens
aaatccagatcggaa

SEQ ID NO: 1855372 - DNA, 15 bp, Homo sapiens
aatccagatcggaag

SEQ ID NO: 1855373 - DNA, 15 bp, Homo sapiens
atccagatcggaagt

SEQ ID NO: 1855374 - DNA, 15 bp, Homo sapiens
tccagatcggaagtc

SEQ ID NO: 1855375 - DNA, 15 bp, Homo sapiens
ccagatcggaagtct

SEQ ID NO: 1855376 - DNA, 15 bp, Homo sapiens
cagatcggaagtctg

SEQ ID NO: 1855377 - DNA, 15 bp, Homo sapiens
agatcggaagtctgg

SEQ ID NO: 1855378 - DNA, 15 bp, Homo sapiens
gatcggaagtctggt

SEQ ID NO: 1855379 - DNA, 15 bp, Homo sapiens
atcggaagtctggtg

SEQ ID NO: 1855380 - DNA, 15 bp, Homo sapiens
tcggaagtctggtgt

SEQ ID NO: 1855381 - DNA, 15 bp, Homo sapiens
cggaagtctggtgtc

SEQ ID NO: 1855382 - DNA, 15 bp, Homo sapiens
ggaagtctggtgtct

SEQ ID NO: 1855383 - DNA, 15 bp, Homo sapiens
gaagtctggtgtctt

SEQ ID NO: 1855384 - DNA, 15 bp, Homo sapiens
aagtctggtgtcttg

SEQ ID NO: 1855385 - DNA, 15 bp, Homo sapiens
agtctggtgtcttga

SEQ ID NO: 1855386 - DNA, 15 bp, Homo sapiens
gtctggtgtcttgac

SEQ ID NO: 1855387 - DNA, 15 bp, Homo sapiens
tctggtgtcttgacc

SEQ ID NO: 1855388 - DNA, 15 bp, Homo sapiens
ctggtgtcttgacct

SEQ ID NO: 1855389 - DNA, 15 bp, Homo sapiens
tggtgtcttgacctg

SEQ ID NO: 1855390 - DNA, 15 bp, Homo sapiens
ggtgtcttgacctga

SEQ ID NO: 1855391 - DNA, 15 bp, Homo sapiens
gtgtcttgacctgag

SEQ ID NO: 1855392 - DNA, 15 bp, Homo sapiens
tgtcttgacctgaga

SEQ ID NO: 1855393 - DNA, 15 bp, Homo sapiens
gtcttgacctgagat

SEQ ID NO: 1855394 - DNA, 15 bp, Homo sapiens
tcttgacctgagatc

SEQ ID NO: 1855395 - DNA, 15 bp, Homo sapiens
cttgacctgagatct

SEQ ID NO: 1855396 - DNA, 15 bp, Homo sapiens
ttgacctgagatctg

SEQ ID NO: 1855397 - DNA, 15 bp, Homo sapiens
tgacctgagatctgg

SEQ ID NO: 1855398 - DNA, 15 bp, Homo sapiens
gacctgagatctggc

SEQ ID NO: 1855399 - DNA, 15 bp, Homo sapiens
acctgagatctggca

SEQ ID NO: 1855400 - DNA, 15 bp, Homo sapiens
cctgagatctggcac

SEQ ID NO: 1855401 - DNA, 15 bp, Homo sapiens
ctgagatctggcact

SEQ ID NO: 1855402 - DNA, 15 bp, Homo sapiens
tgagatctggcactg

SEQ ID NO: 1855403 - DNA, 15 bp, Homo sapiens
gagatctggcactgc

SEQ ID NO: 1855404 - DNA, 15 bp, Homo sapiens
agatctggcactgcg

SEQ ID NO: 1855405 - DNA, 15 bp, Homo sapiens
gatctggcactgcgt

SEQ ID NO: 1855406 - DNA, 15 bp, Homo sapiens
atctggcactgcgtt

SEQ ID NO: 1855407 - DNA, 15 bp, Homo sapiens
tctggcactgcgttt

SEQ ID NO: 1855408 - DNA, 15 bp, Homo sapiens
ctggcactgcgtttc

SEQ ID NO: 1855409 - DNA, 15 bp, Homo sapiens
tggcactgcgtttct

SEQ ID NO: 1855410 - DNA, 15 bp, Homo sapiens
ggcactgcgtttctc

SEQ ID NO: 1855411 - DNA, 15 bp, Homo sapiens
gcactgcgtttctct

SEQ ID NO: 1855412 - DNA, 15 bp, Homo sapiens
cactgcgtttctctc

SEQ ID NO: 1855413 - DNA, 15 bp, Homo sapiens
actgcgtttctctct

SEQ ID NO: 1855414 - DNA, 15 bp, Homo sapiens
ctgcgtttctctctt

SEQ ID NO: 1855415 - DNA, 15 bp, Homo sapiens
tgcgtttctctctta

SEQ ID NO: 1855416 - DNA, 15 bp, Homo sapiens
gcgtttctctcttaa

SEQ ID NO: 1855417 - DNA, 15 bp, Homo sapiens
cgtttctctcttaac

SEQ ID NO: 1855418 - DNA, 15 bp, Homo sapiens
gtttctctcttaacc

SEQ ID NO: 1855419 - DNA, 15 bp, Homo sapiens
tttctctcttaaccg

SEQ ID NO: 1855420 - DNA, 15 bp, Homo sapiens
ttctctcttaaccga

SEQ ID NO: 1855421 - DNA, 15 bp, Homo sapiens
tctctcttaaccgag

SEQ ID NO: 1855422 - DNA, 15 bp, Homo sapiens
ctctcttaaccgagg

SEQ ID NO: 1855423 - DNA, 15 bp, Homo sapiens
tctcttaaccgaggt

SEQ ID NO: 1855424 - DNA, 15 bp, Homo sapiens
ctcttaaccgaggtc

SEQ ID NO: 1855425 - DNA, 15 bp, Homo sapiens
tcttaaccgaggtcc

SEQ ID NO: 1855426 - DNA, 15 bp, Homo sapiens
cttaaccgaggtccc

SEQ ID NO: 1855427 - DNA, 15 bp, Homo sapiens
ttaaccgaggtccct

SEQ ID NO: 1855428 - DNA, 15 bp, Homo sapiens
taaccgaggtccctc

SEQ ID NO: 1855429 - DNA, 15 bp, Homo sapiens
aaccgaggtccctct

SEQ ID NO: 1855430 - DNA, 15 bp, Homo sapiens
accgaggtccctctt

SEQ ID NO: 1855431 - DNA, 15 bp, Homo sapiens
ccgaggtccctctta

SEQ ID NO: 1855432 - DNA, 15 bp, Homo sapiens
cgaggtccctcttaa

SEQ ID NO: 1855433 - DNA, 15 bp, Homo sapiens
gaggtccctcttaac

SEQ ID NO: 1855434 - DNA, 15 bp, Homo sapiens
aggtccctcttaact

SEQ ID NO: 1855435 - DNA, 15 bp, Homo sapiens
ggtccctcttaactt

SEQ ID NO: 1855436 - DNA, 15 bp, Homo sapiens
gtccctcttaacttt

SEQ ID NO: 1855437 - DNA, 15 bp, Homo sapiens
tccctcttaactttt

SEQ ID NO: 1855438 - DNA, 15 bp, Homo sapiens
ccctcttaacttttc

SEQ ID NO: 1855439 - DNA, 15 bp, Homo sapiens
cctcttaacttttct

SEQ ID NO: 1855440 - DNA, 15 bp, Homo sapiens
ctcttaacttttcta

SEQ ID NO: 1855441 - DNA, 15 bp, Homo sapiens
tcttaacttttctag

SEQ ID NO: 1855442 - DNA, 15 bp, Homo sapiens
cttaacttttctagg

SEQ ID NO: 1855443 - DNA, 15 bp, Homo sapiens
ttaacttttctaggc

SEQ ID NO: 1855444 - DNA, 15 bp, Homo sapiens
taacttttctaggcc

SEQ ID NO: 1855445 - DNA, 15 bp, Homo sapiens
aacttttctaggcct

SEQ ID NO: 1855446 - DNA, 15 bp, Homo sapiens
acttttctaggcctc

SEQ ID NO: 1855447 - DNA, 15 bp, Homo sapiens
cttttctaggcctct

SEQ ID NO: 1855448 - DNA, 15 bp, Homo sapiens
ttttctaggcctctt

SEQ ID NO: 1855449 - DNA, 15 bp, Homo sapiens
tttctaggcctcttt

SEQ ID NO: 1855450 - DNA, 15 bp, Homo sapiens
ttctaggcctctttt

SEQ ID NO: 1855451 - DNA, 15 bp, Homo sapiens
tctaggcctctttta

SEQ ID NO: 1855452 - DNA, 15 bp, Homo sapiens
ctaggcctcttttaa

SEQ ID NO: 1855453 - DNA, 15 bp, Homo sapiens
taggcctcttttaaa

SEQ ID NO: 1855454 - DNA, 15 bp, Homo sapiens
aggcctcttttaaaa

SEQ ID NO: 1855455 - DNA, 15 bp, Homo sapiens
ggcctcttttaaaat

SEQ ID NO: 1855456 - DNA, 15 bp, Homo sapiens
gcctcttttaaaatc

SEQ ID NO: 1855457 - DNA, 15 bp, Homo sapiens
cctcttttaaaatca

SEQ ID NO: 1855458 - DNA, 15 bp, Homo sapiens
ctcttttaaaatcag

SEQ ID NO: 1855459 - DNA, 15 bp, Homo sapiens
tcttttaaaatcagc

SEQ ID NO: 1855460 - DNA, 15 bp, Homo sapiens
cttttaaaatcagca

SEQ ID NO: 1855461 - DNA, 15 bp, Homo sapiens
ttttaaaatcagcat

SEQ ID NO: 1855462 - DNA, 15 bp, Homo sapiens
tttaaaatcagcatg

SEQ ID NO: 1855463 - DNA, 15 bp, Homo sapiens
ttaaaatcagcatga

SEQ ID NO: 1855464 - DNA, 15 bp, Homo sapiens
taaaatcagcatgat

SEQ ID NO: 1855465 - DNA, 15 bp, Homo sapiens
aaaatcagcatgatg

SEQ ID NO: 1855466 - DNA, 15 bp, Homo sapiens
aaatcagcatgatga

SEQ ID NO: 1855467 - DNA, 15 bp, Homo sapiens
aatcagcatgatgaa

SEQ ID NO: 1855468 - DNA, 15 bp, Homo sapiens
atcagcatgatgaaa

SEQ ID NO: 1855469 - DNA, 15 bp, Homo sapiens
tcagcatgatgaaag

SEQ ID NO: 1855470 - DNA, 15 bp, Homo sapiens
cagcatgatgaaaga

SEQ ID NO: 1855471 - DNA, 15 bp, Homo sapiens
agcatgatgaaagag

SEQ ID NO: 1855472 - DNA, 15 bp, Homo sapiens
gcatgatgaaagaga

SEQ ID NO: 1855473 - DNA, 15 bp, Homo sapiens
catgatgaaagagat

SEQ ID NO: 1855474 - DNA, 15 bp, Homo sapiens
atgatgaaagagatt

SEQ ID NO: 1855475 - DNA, 15 bp, Homo sapiens
tgatgaaagagatta

SEQ ID NO: 1855476 - DNA, 15 bp, Homo sapiens
gatgaaagagattag

SEQ ID NO: 1855477 - DNA, 15 bp, Homo sapiens
atgaaagagattagg

SEQ ID NO: 1855478 - DNA, 15 bp, Homo sapiens
tgaaagagattaggt

SEQ ID NO: 1855479 - DNA, 15 bp, Homo sapiens
gaaagagattaggtc

SEQ ID NO: 1855480 - DNA, 15 bp, Homo sapiens
aaagagattaggtca

SEQ ID NO: 1855481 - DNA, 15 bp, Homo sapiens
aagagattaggtcat

SEQ ID NO: 1855482 - DNA, 15 bp, Homo sapiens
agagattaggtcatt

SEQ ID NO: 1855483 - DNA, 15 bp, Homo sapiens
gagattaggtcattc

SEQ ID NO: 1855484 - DNA, 15 bp, Homo sapiens
agattaggtcattca

SEQ ID NO: 1855485 - DNA, 15 bp, Homo sapiens
gattaggtcattcat

SEQ ID NO: 1855486 - DNA, 15 bp, Homo sapiens
attaggtcattcatt

SEQ ID NO: 1855487 - DNA, 15 bp, Homo sapiens
ttaggtcattcattc

SEQ ID NO: 1855488 - DNA, 15 bp, Homo sapiens
taggtcattcattca

SEQ ID NO: 1855489 - DNA, 15 bp, Homo sapiens
aggtcattcattcat

SEQ ID NO: 1855490 - DNA, 15 bp, Homo sapiens
ggtcattcattcatt

SEQ ID NO: 1855491 - DNA, 15 bp, Homo sapiens
gtcattcattcattt

SEQ ID NO: 1855492 - DNA, 15 bp, Homo sapiens
tcattcattcattta

SEQ ID NO: 1855493 - DNA, 15 bp, Homo sapiens
cattcattcatttat

SEQ ID NO: 1855494 - DNA, 15 bp, Homo sapiens
attcattcatttatt

SEQ ID NO: 1855495 - DNA, 15 bp, Homo sapiens
ttcattcatttattc

SEQ ID NO: 1855496 - DNA, 15 bp, Homo sapiens
tcattcatttattca

SEQ ID NO: 1855497 - DNA, 15 bp, Homo sapiens
cattcatttattcat

SEQ ID NO: 1855498 - DNA, 15 bp, Homo sapiens
attcatttattcatt

SEQ ID NO: 1855499 - DNA, 15 bp, Homo sapiens
ttattcattcattgg

SEQ ID NO: 1855500 - DNA, 15 bp, Homo sapiens
tattcattcattggt

SEQ ID NO: 1855501 - DNA, 15 bp, Homo sapiens
attcattcattggtt

SEQ ID NO: 1855502 - DNA, 15 bp, Homo sapiens
ttcattcattggttc

SEQ ID NO: 1855503 - DNA, 15 bp, Homo sapiens
tcattcattggttca

SEQ ID NO: 1855504 - DNA, 15 bp, Homo sapiens
cattcattggttcag

SEQ ID NO: 1855505 - DNA, 15 bp, Homo sapiens
attcattggttcagt

SEQ ID NO: 1855506 - DNA, 15 bp, Homo sapiens
ttcattggttcagtc

SEQ ID NO: 1855507 - DNA, 15 bp, Homo sapiens
tcattggttcagtca

SEQ ID NO: 1855508 - DNA, 15 bp, Homo sapiens
cattggttcagtcat

SEQ ID NO: 1855509 - DNA, 15 bp, Homo sapiens
attggttcagtcatt

SEQ ID NO: 1855510 - DNA, 15 bp, Homo sapiens
ttggttcagtcattc

SEQ ID NO: 1855511 - DNA, 15 bp, Homo sapiens
tggttcagtcattca

SEQ ID NO: 1855512 - DNA, 15 bp, Homo sapiens
ggttcagtcattcat

SEQ ID NO: 1855513 - DNA, 15 bp, Homo sapiens
gttcagtcattcatt

SEQ ID NO: 1855514 - DNA, 15 bp, Homo sapiens
ttcagtcattcattt

SEQ ID NO: 1855515 - DNA, 15 bp, Homo sapiens
tcagtcattcatttt

SEQ ID NO: 1855516 - DNA, 15 bp, Homo sapiens
cagtcattcatttta

SEQ ID NO: 1855517 - DNA, 15 bp, Homo sapiens
agtcattcattttac

SEQ ID NO: 1855518 - DNA, 15 bp, Homo sapiens
gtcattcattttaca

SEQ ID NO: 1855519 - DNA, 15 bp, Homo sapiens
tcattcattttacag

SEQ ID NO: 1855520 - DNA, 15 bp, Homo sapiens
cattcattttacagg

SEQ ID NO: 1855521 - DNA, 15 bp, Homo sapiens
attcattttacaggc

SEQ ID NO: 1855522 - DNA, 15 bp, Homo sapiens
ttcattttacaggca

SEQ ID NO: 1855523 - DNA, 15 bp, Homo sapiens
tcattttacaggcat

SEQ ID NO: 1855524 - DNA, 15 bp, Homo sapiens
cattttacaggcatg

SEQ ID NO: 1855525 - DNA, 15 bp, Homo sapiens
attttacaggcatga

SEQ ID NO: 1855526 - DNA, 15 bp, Homo sapiens
ttttacaggcatgat

SEQ ID NO: 1855527 - DNA, 15 bp, Homo sapiens
tttacaggcatgatg

SEQ ID NO: 1855528 - DNA, 15 bp, Homo sapiens
ttacaggcatgatga

SEQ ID NO: 1855529 - DNA, 15 bp, Homo sapiens
tacaggcatgatgat

SEQ ID NO: 1855530 - DNA, 15 bp, Homo sapiens
acaggcatgatgatg

SEQ ID NO: 1855531 - DNA, 15 bp, Homo sapiens
caggcatgatgatgt

SEQ ID NO: 1855532 - DNA, 15 bp, Homo sapiens
aggcatgatgatgtg

SEQ ID NO: 1855533 - DNA, 15 bp, Homo sapiens
ggcatgatgatgtgc

SEQ ID NO: 1855534 - DNA, 15 bp, Homo sapiens
gcatgatgatgtgcc

SEQ ID NO: 1855535 - DNA, 15 bp, Homo sapiens
catgatgatgtgcct

SEQ ID NO: 1855536 - DNA, 15 bp, Homo sapiens
atgatgatgtgccta

SEQ ID NO: 1855537 - DNA, 15 bp, Homo sapiens
tgatgatgtgcctac

SEQ ID NO: 1855538 - DNA, 15 bp, Homo sapiens
gatgatgtgcctacc

SEQ ID NO: 1855539 - DNA, 15 bp, Homo sapiens
atgatgtgcctacct

SEQ ID NO: 1855540 - DNA, 15 bp, Homo sapiens
tgatgtgcctaccta

SEQ ID NO: 1855541 - DNA, 15 bp, Homo sapiens
gatgtgcctacctag

SEQ ID NO: 1855542 - DNA, 15 bp, Homo sapiens
atgtgcctacctaga

SEQ ID NO: 1855543 - DNA, 15 bp, Homo sapiens
tgtgcctacctagaa

SEQ ID NO: 1855544 - DNA, 15 bp, Homo sapiens
gtgcctacctagaaa

SEQ ID NO: 1855545 - DNA, 15 bp, Homo sapiens
tgcctacctagaaat

SEQ ID NO: 1855546 - DNA, 15 bp, Homo sapiens
gcctacctagaaatt

SEQ ID NO: 1855547 - DNA, 15 bp, Homo sapiens
cctacctagaaattt

SEQ ID NO: 1855548 - DNA, 15 bp, Homo sapiens
ctacctagaaatttg

SEQ ID NO: 1855549 - DNA, 15 bp, Homo sapiens
tacctagaaatttga

SEQ ID NO: 1855550 - DNA, 15 bp, Homo sapiens
acctagaaatttgag

SEQ ID NO: 1855551 - DNA, 15 bp, Homo sapiens
cctagaaatttgagg

SEQ ID NO: 1855552 - DNA, 15 bp, Homo sapiens
ctagaaatttgagga

SEQ ID NO: 1855553 - DNA, 15 bp, Homo sapiens
tagaaatttgaggat

SEQ ID NO: 1855554 - DNA, 15 bp, Homo sapiens
agaaatttgaggatt

SEQ ID NO: 1855555 - DNA, 15 bp, Homo sapiens
gaaatttgaggattc

SEQ ID NO: 1855556 - DNA, 15 bp, Homo sapiens
aaatttgaggattcc

SEQ ID NO: 1855557 - DNA, 15 bp, Homo sapiens
aatttgaggattccg

SEQ ID NO: 1855558 - DNA, 15 bp, Homo sapiens
atttgaggattccga

SEQ ID NO: 1855559 - DNA, 15 bp, Homo sapiens
tttgaggattccgat

SEQ ID NO: 1855560 - DNA, 15 bp, Homo sapiens
ttgaggattccgatg

SEQ ID NO: 1855561 - DNA, 15 bp, Homo sapiens
tgaggattccgatgc

SEQ ID NO: 1855562 - DNA, 15 bp, Homo sapiens
gaggattccgatgca

SEQ ID NO: 1855563 - DNA, 15 bp, Homo sapiens
aggattccgatgcag

SEQ ID NO: 1855564 - DNA, 15 bp, Homo sapiens
ggattccgatgcagt

SEQ ID NO: 1855565 - DNA, 15 bp, Homo sapiens
gattccgatgcagtg

SEQ ID NO: 1855566 - DNA, 15 bp, Homo sapiens
attccgatgcagtgc

SEQ ID NO: 1855567 - DNA, 15 bp, Homo sapiens
ttccgatgcagtgct

SEQ ID NO: 1855568 - DNA, 15 bp, Homo sapiens
tccgatgcagtgctg

SEQ ID NO: 1855569 - DNA, 15 bp, Homo sapiens
ccgatgcagtgctgt

SEQ ID NO: 1855570 - DNA, 15 bp, Homo sapiens
cgatgcagtgctgtg

SEQ ID NO: 1855571 - DNA, 15 bp, Homo sapiens
gatgcagtgctgtgt

SEQ ID NO: 1855572 - DNA, 15 bp, Homo sapiens
atgcagtgctgtgtt

SEQ ID NO: 1855573 - DNA, 15 bp, Homo sapiens
tgcagtgctgtgttc

SEQ ID NO: 1855574 - DNA, 15 bp, Homo sapiens
gcagtgctgtgttct

SEQ ID NO: 1855575 - DNA, 15 bp, Homo sapiens
cagtgctgtgttctt

SEQ ID NO: 1855576 - DNA, 15 bp, Homo sapiens
agtgctgtgttcttt

SEQ ID NO: 1855577 - DNA, 15 bp, Homo sapiens
gtgctgtgttctttt

SEQ ID NO: 1855578 - DNA, 15 bp, Homo sapiens
tgctgtgttcttttt

SEQ ID NO: 1855579 - DNA, 15 bp, Homo sapiens
gctgtgttctttttt

SEQ ID NO: 1855580 - DNA, 15 bp, Homo sapiens
ctgtgttcttttttt

SEQ ID NO: 1855581 - DNA, 15 bp, Homo sapiens
tgttctttttttttc

SEQ ID NO: 1855582 - DNA, 15 bp, Homo sapiens
gttctttttttttcc

SEQ ID NO: 1855583 - DNA, 15 bp, Homo sapiens
ttctttttttttccg

SEQ ID NO: 1855584 - DNA, 15 bp, Homo sapiens
tctttttttttccga

SEQ ID NO: 1855585 - DNA, 15 bp, Homo sapiens
ctttttttttccgag

SEQ ID NO: 1855586 - DNA, 15 bp, Homo sapiens
tttttttttccgaga

SEQ ID NO: 1855587 - DNA, 15 bp, Homo sapiens
ttttttttccgagac

SEQ ID NO: 1855588 - DNA, 15 bp, Homo sapiens
tttttttccgagaca

SEQ ID NO: 1855589 - DNA, 15 bp, Homo sapiens
ttttttccgagacag

SEQ ID NO: 1855590 - DNA, 15 bp, Homo sapiens
tttttccgagacagt

SEQ ID NO: 1855591 - DNA, 15 bp, Homo sapiens
ttttccgagacagtc

SEQ ID NO: 1855592 - DNA, 15 bp, Homo sapiens
tttccgagacagtct

SEQ ID NO: 1855593 - DNA, 15 bp, Homo sapiens
ttccgagacagtctc

SEQ ID NO: 1855594 - DNA, 15 bp, Homo sapiens
tccgagacagtctca

SEQ ID NO: 1855595 - DNA, 15 bp, Homo sapiens
ccgagacagtctcat

SEQ ID NO: 1855596 - DNA, 15 bp, Homo sapiens
cgagacagtctcatt

SEQ ID NO: 1855597 - DNA, 15 bp, Homo sapiens
gagacagtctcattc

SEQ ID NO: 1855598 - DNA, 15 bp, Homo sapiens
agacagtctcattct

SEQ ID NO: 1855599 - DNA, 15 bp, Homo sapiens
gacagtctcattctg

SEQ ID NO: 1855600 - DNA, 15 bp, Homo sapiens
acagtctcattctgt

SEQ ID NO: 1855601 - DNA, 15 bp, Homo sapiens
cagtctcattctgtg

SEQ ID NO: 1855602 - DNA, 15 bp, Homo sapiens
agtctcattctgtgc

SEQ ID NO: 1855603 - DNA, 15 bp, Homo sapiens
gtctcattctgtgcc

SEQ ID NO: 1855604 - DNA, 15 bp, Homo sapiens
tctcattctgtgccc

SEQ ID NO: 1855605 - DNA, 15 bp, Homo sapiens
ctcattctgtgccca

SEQ ID NO: 1855606 - DNA, 15 bp, Homo sapiens
tcattctgtgcccag

SEQ ID NO: 1855607 - DNA, 15 bp, Homo sapiens
cattctgtgcccagg

SEQ ID NO: 1855608 - DNA, 15 bp, Homo sapiens
attctgtgcccaggc

SEQ ID NO: 1855609 - DNA, 15 bp, Homo sapiens
ttctgtgcccaggct

SEQ ID NO: 1855610 - DNA, 15 bp, Homo sapiens
tctgtgcccaggctg

SEQ ID NO: 1855611 - DNA, 15 bp, Homo sapiens
ctgtgcccaggctgg

SEQ ID NO: 1855612 - DNA, 15 bp, Homo sapiens
tgtgcccaggctgga

SEQ ID NO: 1855613 - DNA, 15 bp, Homo sapiens
gtgcccaggctggag

SEQ ID NO: 1855614 - DNA, 15 bp, Homo sapiens
ggagtgcagtggccc

SEQ ID NO: 1855615 - DNA, 15 bp, Homo sapiens
gagtgcagtggcccg

SEQ ID NO: 1855616 - DNA, 15 bp, Homo sapiens
agtgcagtggcccga

SEQ ID NO: 1855617 - DNA, 15 bp, Homo sapiens
gtgcagtggcccgat

SEQ ID NO: 1855618 - DNA, 15 bp, Homo sapiens
tgcagtggcccgatc

SEQ ID NO: 1855619 - DNA, 15 bp, Homo sapiens
gcagtggcccgatct

SEQ ID NO: 1855620 - DNA, 15 bp, Homo sapiens
cagtggcccgatctc

SEQ ID NO: 1855621 - DNA, 15 bp, Homo sapiens
agtggcccgatctcg

SEQ ID NO: 1855622 - DNA, 15 bp, Homo sapiens
gtggcccgatctcgg

SEQ ID NO: 1855623 - DNA, 15 bp, Homo sapiens
tggcccgatctcggc

SEQ ID NO: 1855624 - DNA, 15 bp, Homo sapiens
ggcccgatctcggct

SEQ ID NO: 1855625 - DNA, 15 bp, Homo sapiens
gcccgatctcggctc

SEQ ID NO: 1855626 - DNA, 15 bp, Homo sapiens
cccgatctcggctca

SEQ ID NO: 1855627 - DNA, 15 bp, Homo sapiens
ccgatctcggctcac

SEQ ID NO: 1855628 - DNA, 15 bp, Homo sapiens
caagctccacctcct

SEQ ID NO: 1855629 - DNA, 15 bp, Homo sapiens
aagctccacctcctg

SEQ ID NO: 1855630 - DNA, 15 bp, Homo sapiens
agctccacctcctgg

SEQ ID NO: 1855631 - DNA, 15 bp, Homo sapiens
gctccacctcctggg

SEQ ID NO: 1855632 - DNA, 15 bp, Homo sapiens
gggttcacaccattg

SEQ ID NO: 1855633 - DNA, 15 bp, Homo sapiens
ggttcacaccattgt

SEQ ID NO: 1855634 - DNA, 15 bp, Homo sapiens
gttcacaccattgtc

SEQ ID NO: 1855635 - DNA, 15 bp, Homo sapiens
ttcacaccattgtcc

SEQ ID NO: 1855636 - DNA, 15 bp, Homo sapiens
tcacaccattgtcct

SEQ ID NO: 1855637 - DNA, 15 bp, Homo sapiens
cacaccattgtcctg

SEQ ID NO: 1855638 - DNA, 15 bp, Homo sapiens
acaccattgtcctgc

SEQ ID NO: 1855639 - DNA, 15 bp, Homo sapiens
caccattgtcctgcc

SEQ ID NO: 1855640 - DNA, 15 bp, Homo sapiens
accattgtcctgcct

SEQ ID NO: 1855641 - DNA, 15 bp, Homo sapiens
ccattgtcctgcctc

SEQ ID NO: 1855642 - DNA, 15 bp, Homo sapiens
cattgtcctgcctca

SEQ ID NO: 1855643 - DNA, 15 bp, Homo sapiens
attgtcctgcctcag

SEQ ID NO: 1855644 - DNA, 15 bp, Homo sapiens
ttgtcctgcctcagc

SEQ ID NO: 1855645 - DNA, 15 bp, Homo sapiens
actacaggtgcccgt

SEQ ID NO: 1855646 - DNA, 15 bp, Homo sapiens
ctacaggtgcccgtc

SEQ ID NO: 1855647 - DNA, 15 bp, Homo sapiens
tacaggtgcccgtca

SEQ ID NO: 1855648 - DNA, 15 bp, Homo sapiens
acaggtgcccgtcac

SEQ ID NO: 1855649 - DNA, 15 bp, Homo sapiens
caggtgcccgtcacc

SEQ ID NO: 1855650 - DNA, 15 bp, Homo sapiens
aggtgcccgtcacca

SEQ ID NO: 1855651 - DNA, 15 bp, Homo sapiens
ggtgcccgtcaccat

SEQ ID NO: 1855652 - DNA, 15 bp, Homo sapiens
gtgcccgtcaccatg

SEQ ID NO: 1855653 - DNA, 15 bp, Homo sapiens
tgcccgtcaccatgc

SEQ ID NO: 1855654 - DNA, 15 bp, Homo sapiens
gcccgtcaccatgcc

SEQ ID NO: 1855655 - DNA, 15 bp, Homo sapiens
cccgtcaccatgccc

SEQ ID NO: 1855656 - DNA, 15 bp, Homo sapiens
ccgtcaccatgccca

SEQ ID NO: 1855657 - DNA, 15 bp, Homo sapiens
cgtcaccatgcccag

SEQ ID NO: 1855658 - DNA, 15 bp, Homo sapiens
gtcaccatgcccagc

SEQ ID NO: 1855659 - DNA, 15 bp, Homo sapiens
tcaccatgcccagct

SEQ ID NO: 1855660 - DNA, 15 bp, Homo sapiens
acggggtttcaccga

SEQ ID NO: 1855661 - DNA, 15 bp, Homo sapiens
cggggtttcaccgag

SEQ ID NO: 1855662 - DNA, 15 bp, Homo sapiens
ggggtttcaccgagt

SEQ ID NO: 1855663 - DNA, 15 bp, Homo sapiens
gggtttcaccgagtt

SEQ ID NO: 1855664 - DNA, 15 bp, Homo sapiens
ggtttcaccgagtta

SEQ ID NO: 1855665 - DNA, 15 bp, Homo sapiens
gtttcaccgagttag

SEQ ID NO: 1855666 - DNA, 15 bp, Homo sapiens
tttcaccgagttagc

SEQ ID NO: 1855667 - DNA, 15 bp, Homo sapiens
ttcaccgagttagcc

SEQ ID NO: 1855668 - DNA, 15 bp, Homo sapiens
tcaccgagttagcca

SEQ ID NO: 1855669 - DNA, 15 bp, Homo sapiens
caccgagttagccag

SEQ ID NO: 1855670 - DNA, 15 bp, Homo sapiens
accgagttagccagg

SEQ ID NO: 1855671 - DNA, 15 bp, Homo sapiens
ccgagttagccagga

SEQ ID NO: 1855672 - DNA, 15 bp, Homo sapiens
cgagttagccaggat

SEQ ID NO: 1855673 - DNA, 15 bp, Homo sapiens
gagttagccaggatg

SEQ ID NO: 1855674 - DNA, 15 bp, Homo sapiens
agttagccaggatgg

SEQ ID NO: 1855675 - DNA, 15 bp, Homo sapiens
ctcctgacctcgtgt

SEQ ID NO: 1855676 - DNA, 15 bp, Homo sapiens
tcctgacctcgtgtg

SEQ ID NO: 1855677 - DNA, 15 bp, Homo sapiens
cctgacctcgtgtga

SEQ ID NO: 1855678 - DNA, 15 bp, Homo sapiens
ctgacctcgtgtgat

SEQ ID NO: 1855679 - DNA, 15 bp, Homo sapiens
tgacctcgtgtgatc

SEQ ID NO: 1855680 - DNA, 15 bp, Homo sapiens
gacctcgtgtgatct

SEQ ID NO: 1855681 - DNA, 15 bp, Homo sapiens
acctcgtgtgatctg

SEQ ID NO: 1855682 - DNA, 15 bp, Homo sapiens
cctcgtgtgatctgc

SEQ ID NO: 1855683 - DNA, 15 bp, Homo sapiens
ctcgtgtgatctgcc

SEQ ID NO: 1855684 - DNA, 15 bp, Homo sapiens
tcgtgtgatctgccc

SEQ ID NO: 1855685 - DNA, 15 bp, Homo sapiens
cgtgtgatctgccca

SEQ ID NO: 1855686 - DNA, 15 bp, Homo sapiens
gtgtgatctgcccac

SEQ ID NO: 1855687 - DNA, 15 bp, Homo sapiens
tgtgatctgcccacc

SEQ ID NO: 1855688 - DNA, 15 bp, Homo sapiens
gatctgcccacctct

SEQ ID NO: 1855689 - DNA, 15 bp, Homo sapiens
atctgcccacctctg

SEQ ID NO: 1855690 - DNA, 15 bp, Homo sapiens
tctgcccacctctgc

SEQ ID NO: 1855691 - DNA, 15 bp, Homo sapiens
ctgcccacctctgct

SEQ ID NO: 1855692 - DNA, 15 bp, Homo sapiens
tgcccacctctgctt

SEQ ID NO: 1855693 - DNA, 15 bp, Homo sapiens
gcccacctctgcttc

SEQ ID NO: 1855694 - DNA, 15 bp, Homo sapiens
cccacctctgcttcc

SEQ ID NO: 1855695 - DNA, 15 bp, Homo sapiens
ccacctctgcttccc

SEQ ID NO: 1855696 - DNA, 15 bp, Homo sapiens
cacctctgcttccca

SEQ ID NO: 1855697 - DNA, 15 bp, Homo sapiens
acctctgcttcccaa

SEQ ID NO: 1855698 - DNA, 15 bp, Homo sapiens
ccactgcacctggca

SEQ ID NO: 1855699 - DNA, 15 bp, Homo sapiens
cactgcacctggcag

SEQ ID NO: 1855700 - DNA, 15 bp, Homo sapiens
actgcacctggcagt

SEQ ID NO: 1855701 - DNA, 15 bp, Homo sapiens
ctgcacctggcagtg

SEQ ID NO: 1855702 - DNA, 15 bp, Homo sapiens
tgcacctggcagtgc

SEQ ID NO: 1855703 - DNA, 15 bp, Homo sapiens
gcacctggcagtgct

SEQ ID NO: 1855704 - DNA, 15 bp, Homo sapiens
cacctggcagtgctg

SEQ ID NO: 1855705 - DNA, 15 bp, Homo sapiens
acctggcagtgctgt

SEQ ID NO: 1855706 - DNA, 15 bp, Homo sapiens
cctggcagtgctgtg

SEQ ID NO: 1855707 - DNA, 15 bp, Homo sapiens
ctggcagtgctgtgt

SEQ ID NO: 1855708 - DNA, 15 bp, Homo sapiens
tggcagtgctgtgtt

SEQ ID NO: 1855709 - DNA, 15 bp, Homo sapiens
ggcagtgctgtgttc

SEQ ID NO: 1855710 - DNA, 15 bp, Homo sapiens
tgctgtgttctttta

SEQ ID NO: 1855711 - DNA, 15 bp, Homo sapiens
gctgtgttcttttat

SEQ ID NO: 1855712 - DNA, 15 bp, Homo sapiens
ctgtgttcttttata

SEQ ID NO: 1855713 - DNA, 15 bp, Homo sapiens
tgtgttcttttataa

SEQ ID NO: 1855714 - DNA, 15 bp, Homo sapiens
gtgttcttttataac

SEQ ID NO: 1855715 - DNA, 15 bp, Homo sapiens
tgttcttttataacc

SEQ ID NO: 1855716 - DNA, 15 bp, Homo sapiens
gttcttttataacca

SEQ ID NO: 1855717 - DNA, 15 bp, Homo sapiens
ttcttttataaccag

SEQ ID NO: 1855718 - DNA, 15 bp, Homo sapiens
tcttttataaccagg

SEQ ID NO: 1855719 - DNA, 15 bp, Homo sapiens
cttttataaccaggg

SEQ ID NO: 1855720 - DNA, 15 bp, Homo sapiens
ttttataaccagggt

SEQ ID NO: 1855721 - DNA, 15 bp, Homo sapiens
tttataaccagggtt

SEQ ID NO: 1855722 - DNA, 15 bp, Homo sapiens
ttataaccagggttc

SEQ ID NO: 1855723 - DNA, 15 bp, Homo sapiens
tataaccagggttca

SEQ ID NO: 1855724 - DNA, 15 bp, Homo sapiens
ataaccagggttcat

SEQ ID NO: 1855725 - DNA, 15 bp, Homo sapiens
taaccagggttcatt

SEQ ID NO: 1855726 - DNA, 15 bp, Homo sapiens
aaccagggttcattt

SEQ ID NO: 1855727 - DNA, 15 bp, Homo sapiens
accagggttcatttg

SEQ ID NO: 1855728 - DNA, 15 bp, Homo sapiens
ccagggttcatttga

SEQ ID NO: 1855729 - DNA, 15 bp, Homo sapiens
cagggttcatttgag

SEQ ID NO: 1855730 - DNA, 15 bp, Homo sapiens
agggttcatttgagt

SEQ ID NO: 1855731 - DNA, 15 bp, Homo sapiens
gggttcatttgagtt

SEQ ID NO: 1855732 - DNA, 15 bp, Homo sapiens
ggttcatttgagttc

SEQ ID NO: 1855733 - DNA, 15 bp, Homo sapiens
gttcatttgagttct

SEQ ID NO: 1855734 - DNA, 15 bp, Homo sapiens
ttcatttgagttctg

SEQ ID NO: 1855735 - DNA, 15 bp, Homo sapiens
tcatttgagttctgg

SEQ ID NO: 1855736 - DNA, 15 bp, Homo sapiens
catttgagttctggg

SEQ ID NO: 1855737 - DNA, 15 bp, Homo sapiens
atttgagttctgggt

SEQ ID NO: 1855738 - DNA, 15 bp, Homo sapiens
tttgagttctgggtt

SEQ ID NO: 1855739 - DNA, 15 bp, Homo sapiens
ttgagttctgggttg

SEQ ID NO: 1855740 - DNA, 15 bp, Homo sapiens
tgagttctgggttgg

SEQ ID NO: 1855741 - DNA, 15 bp, Homo sapiens
gagttctgggttggt

SEQ ID NO: 1855742 - DNA, 15 bp, Homo sapiens
agttctgggttggtt

SEQ ID NO: 1855743 - DNA, 15 bp, Homo sapiens
gttctgggttggttg

SEQ ID NO: 1855744 - DNA, 15 bp, Homo sapiens
ttctgggttggttga

SEQ ID NO: 1855745 - DNA, 15 bp, Homo sapiens
tctgggttggttgaa

SEQ ID NO: 1855746 - DNA, 15 bp, Homo sapiens
ctgggttggttgaac

SEQ ID NO: 1855747 - DNA, 15 bp, Homo sapiens
tgggttggttgaact

SEQ ID NO: 1855748 - DNA, 15 bp, Homo sapiens
gggttggttgaacta

SEQ ID NO: 1855749 - DNA, 15 bp, Homo sapiens
ggttggttgaactac

SEQ ID NO: 1855750 - DNA, 15 bp, Homo sapiens
gttggttgaactacc

SEQ ID NO: 1855751 - DNA, 15 bp, Homo sapiens
ttggttgaactacct

SEQ ID NO: 1855752 - DNA, 15 bp, Homo sapiens
tggttgaactacctg

SEQ ID NO: 1855753 - DNA, 15 bp, Homo sapiens
ggttgaactacctgg

SEQ ID NO: 1855754 - DNA, 15 bp, Homo sapiens
gttgaactacctggg

SEQ ID NO: 1855755 - DNA, 15 bp, Homo sapiens
ttgaactacctgggg

SEQ ID NO: 1855756 - DNA, 15 bp, Homo sapiens
tgaactacctggggc

SEQ ID NO: 1855757 - DNA, 15 bp, Homo sapiens
gaactacctggggca

SEQ ID NO: 1855758 - DNA, 15 bp, Homo sapiens
aactacctggggcag

SEQ ID NO: 1855759 - DNA, 15 bp, Homo sapiens
actacctggggcaga

SEQ ID NO: 1855760 - DNA, 15 bp, Homo sapiens
ctacctggggcagag

SEQ ID NO: 1855761 - DNA, 15 bp, Homo sapiens
tacctggggcagagc

SEQ ID NO: 1855762 - DNA, 15 bp, Homo sapiens
acctggggcagagct

SEQ ID NO: 1855763 - DNA, 15 bp, Homo sapiens
cctggggcagagctg

SEQ ID NO: 1855764 - DNA, 15 bp, Homo sapiens
ctggggcagagctgg

SEQ ID NO: 1855765 - DNA, 15 bp, Homo sapiens
tggggcagagctggg

SEQ ID NO: 1855766 - DNA, 15 bp, Homo sapiens
ggggcagagctggga

SEQ ID NO: 1855767 - DNA, 15 bp, Homo sapiens
gggcagagctgggac

SEQ ID NO: 1855768 - DNA, 15 bp, Homo sapiens
ggcagagctgggacc

SEQ ID NO: 1855769 - DNA, 15 bp, Homo sapiens
gcagagctgggaccc

SEQ ID NO: 1855770 - DNA, 15 bp, Homo sapiens
cagagctgggaccct

SEQ ID NO: 1855771 - DNA, 15 bp, Homo sapiens
agagctgggaccctt

SEQ ID NO: 1855772 - DNA, 15 bp, Homo sapiens
gagctgggacccttg

SEQ ID NO: 1855773 - DNA, 15 bp, Homo sapiens
agctgggacccttgg

SEQ ID NO: 1855774 - DNA, 15 bp, Homo sapiens
gctgggacccttggg

SEQ ID NO: 1855775 - DNA, 15 bp, Homo sapiens
ctgggacccttgggg

SEQ ID NO: 1855776 - DNA, 15 bp, Homo sapiens
tgggacccttggggt

SEQ ID NO: 1855777 - DNA, 15 bp, Homo sapiens
gggacccttggggta

SEQ ID NO: 1855778 - DNA, 15 bp, Homo sapiens
ggacccttggggtac

SEQ ID NO: 1855779 - DNA, 15 bp, Homo sapiens
gacccttggggtaca

SEQ ID NO: 1855780 - DNA, 15 bp, Homo sapiens
acccttggggtacag

SEQ ID NO: 1855781 - DNA, 15 bp, Homo sapiens
cccttggggtacagt

SEQ ID NO: 1855782 - DNA, 15 bp, Homo sapiens
ccttggggtacagtg

SEQ ID NO: 1855783 - DNA, 15 bp, Homo sapiens
cttggggtacagtgg

SEQ ID NO: 1855784 - DNA, 15 bp, Homo sapiens
ttggggtacagtggt

SEQ ID NO: 1855785 - DNA, 15 bp, Homo sapiens
tggggtacagtggtg

SEQ ID NO: 1855786 - DNA, 15 bp, Homo sapiens
ggggtacagtggtga

SEQ ID NO: 1855787 - DNA, 15 bp, Homo sapiens
gggtacagtggtgag

SEQ ID NO: 1855788 - DNA, 15 bp, Homo sapiens
ggtacagtggtgagt

SEQ ID NO: 1855789 - DNA, 15 bp, Homo sapiens
gtacagtggtgagta

SEQ ID NO: 1855790 - DNA, 15 bp, Homo sapiens
tacagtggtgagtag

SEQ ID NO: 1855791 - DNA, 15 bp, Homo sapiens
acagtggtgagtagg

SEQ ID NO: 1855792 - DNA, 15 bp, Homo sapiens
cagtggtgagtaggg

SEQ ID NO: 1855793 - DNA, 15 bp, Homo sapiens
agtggtgagtagggg

SEQ ID NO: 1855794 - DNA, 15 bp, Homo sapiens
gtggtgagtaggggc

SEQ ID NO: 1855795 - DNA, 15 bp, Homo sapiens
tggtgagtaggggct

SEQ ID NO: 1855796 - DNA, 15 bp, Homo sapiens
ggtgagtaggggctc

SEQ ID NO: 1855797 - DNA, 15 bp, Homo sapiens
gtgagtaggggctcc

SEQ ID NO: 1855798 - DNA, 15 bp, Homo sapiens
tgagtaggggctcct

SEQ ID NO: 1855799 - DNA, 15 bp, Homo sapiens
gagtaggggctcctc

SEQ ID NO: 1855800 - DNA, 15 bp, Homo sapiens
agtaggggctcctct

SEQ ID NO: 1855801 - DNA, 15 bp, Homo sapiens
gtaggggctcctctg

SEQ ID NO: 1855802 - DNA, 15 bp, Homo sapiens
taggggctcctctgt

SEQ ID NO: 1855803 - DNA, 15 bp, Homo sapiens
aggggctcctctgtc

SEQ ID NO: 1855804 - DNA, 15 bp, Homo sapiens
ggggctcctctgtct

SEQ ID NO: 1855805 - DNA, 15 bp, Homo sapiens
gggctcctctgtctt

SEQ ID NO: 1855806 - DNA, 15 bp, Homo sapiens
ggctcctctgtcttt

SEQ ID NO: 1855807 - DNA, 15 bp, Homo sapiens
gctcctctgtcttta

SEQ ID NO: 1855808 - DNA, 15 bp, Homo sapiens
ctcctctgtctttaa

SEQ ID NO: 1855809 - DNA, 15 bp, Homo sapiens
tcctctgtctttaac

SEQ ID NO: 1855810 - DNA, 15 bp, Homo sapiens
cctctgtctttaaca

SEQ ID NO: 1855811 - DNA, 15 bp, Homo sapiens
ctctgtctttaacag

SEQ ID NO: 1855812 - DNA, 15 bp, Homo sapiens
tctgtctttaacagt

SEQ ID NO: 1855813 - DNA, 15 bp, Homo sapiens
ctgtctttaacagta

SEQ ID NO: 1855814 - DNA, 15 bp, Homo sapiens
tgtctttaacagtac

SEQ ID NO: 1855815 - DNA, 15 bp, Homo sapiens
gtctttaacagtact

SEQ ID NO: 1855816 - DNA, 15 bp, Homo sapiens
tctttaacagtactt

SEQ ID NO: 1855817 - DNA, 15 bp, Homo sapiens
ctttaacagtactta

SEQ ID NO: 1855818 - DNA, 15 bp, Homo sapiens
tttaacagtacttag

SEQ ID NO: 1855819 - DNA, 15 bp, Homo sapiens
ttaacagtacttagg

SEQ ID NO: 1855820 - DNA, 15 bp, Homo sapiens
taacagtacttagga

SEQ ID NO: 1855821 - DNA, 15 bp, Homo sapiens
aacagtacttaggaa

SEQ ID NO: 1855822 - DNA, 15 bp, Homo sapiens
acagtacttaggaag

SEQ ID NO: 1855823 - DNA, 15 bp, Homo sapiens
cagtacttaggaagc

SEQ ID NO: 1855824 - DNA, 15 bp, Homo sapiens
agtacttaggaagct

SEQ ID NO: 1855825 - DNA, 15 bp, Homo sapiens
gtacttaggaagctc

SEQ ID NO: 1855826 - DNA, 15 bp, Homo sapiens
tacttaggaagctca

SEQ ID NO: 1855827 - DNA, 15 bp, Homo sapiens
acttaggaagctcag

SEQ ID NO: 1855828 - DNA, 15 bp, Homo sapiens
cttaggaagctcaga

SEQ ID NO: 1855829 - DNA, 15 bp, Homo sapiens
ttaggaagctcagaa

SEQ ID NO: 1855830 - DNA, 15 bp, Homo sapiens
taggaagctcagaac

SEQ ID NO: 1855831 - DNA, 15 bp, Homo sapiens
aggaagctcagaacg

SEQ ID NO: 1855832 - DNA, 15 bp, Homo sapiens
ggaagctcagaacgc

SEQ ID NO: 1855833 - DNA, 15 bp, Homo sapiens
gaagctcagaacgca

SEQ ID NO: 1855834 - DNA, 15 bp, Homo sapiens
aagctcagaacgcag

SEQ ID NO: 1855835 - DNA, 15 bp, Homo sapiens
agctcagaacgcagt

SEQ ID NO: 1855836 - DNA, 15 bp, Homo sapiens
gctcagaacgcagtt

SEQ ID NO: 1855837 - DNA, 15 bp, Homo sapiens
ctcagaacgcagttg

SEQ ID NO: 1855838 - DNA, 15 bp, Homo sapiens
tcagaacgcagttgc

SEQ ID NO: 1855839 - DNA, 15 bp, Homo sapiens
cagaacgcagttgct

SEQ ID NO: 1855840 - DNA, 15 bp, Homo sapiens
agaacgcagttgctg

SEQ ID NO: 1855841 - DNA, 15 bp, Homo sapiens
gaacgcagttgctga

SEQ ID NO: 1855842 - DNA, 15 bp, Homo sapiens
aacgcagttgctgag

SEQ ID NO: 1855843 - DNA, 15 bp, Homo sapiens
acgcagttgctgaga

SEQ ID NO: 1855844 - DNA, 15 bp, Homo sapiens
cgcagttgctgagac

SEQ ID NO: 1855845 - DNA, 15 bp, Homo sapiens
gcagttgctgagact

SEQ ID NO: 1855846 - DNA, 15 bp, Homo sapiens
cagttgctgagacta

SEQ ID NO: 1855847 - DNA, 15 bp, Homo sapiens
agttgctgagactat

SEQ ID NO: 1855848 - DNA, 15 bp, Homo sapiens
gttgctgagactatc

SEQ ID NO: 1855849 - DNA, 15 bp, Homo sapiens
ttgctgagactatcg

SEQ ID NO: 1855850 - DNA, 15 bp, Homo sapiens
tgctgagactatcgt

SEQ ID NO: 1855851 - DNA, 15 bp, Homo sapiens
gctgagactatcgtg

SEQ ID NO: 1855852 - DNA, 15 bp, Homo sapiens
ctgagactatcgtgg

SEQ ID NO: 1855853 - DNA, 15 bp, Homo sapiens
tgagactatcgtggg

SEQ ID NO: 1855854 - DNA, 15 bp, Homo sapiens
gagactatcgtggga

SEQ ID NO: 1855855 - DNA, 15 bp, Homo sapiens
agactatcgtgggac

SEQ ID NO: 1855856 - DNA, 15 bp, Homo sapiens
gactatcgtgggact

SEQ ID NO: 1855857 - DNA, 15 bp, Homo sapiens
actatcgtgggactc

SEQ ID NO: 1855858 - DNA, 15 bp, Homo sapiens
ctatcgtgggactcc

SEQ ID NO: 1855859 - DNA, 15 bp, Homo sapiens
tatcgtgggactccc

SEQ ID NO: 1855860 - DNA, 15 bp, Homo sapiens
atcgtgggactccca

SEQ ID NO: 1855861 - DNA, 15 bp, Homo sapiens
tcgtgggactcccag

SEQ ID NO: 1855862 - DNA, 15 bp, Homo sapiens
cgtgggactcccagc

SEQ ID NO: 1855863 - DNA, 15 bp, Homo sapiens
gtgggactcccagct

SEQ ID NO: 1855864 - DNA, 15 bp, Homo sapiens
tgggactcccagctc

SEQ ID NO: 1855865 - DNA, 15 bp, Homo sapiens
gggactcccagctcc

SEQ ID NO: 1855866 - DNA, 15 bp, Homo sapiens
ggactcccagctcct

SEQ ID NO: 1855867 - DNA, 15 bp, Homo sapiens
gactcccagctcctt

SEQ ID NO: 1855868 - DNA, 15 bp, Homo sapiens
actcccagctccttt

SEQ ID NO: 1855869 - DNA, 15 bp, Homo sapiens
ctcccagctccttta

SEQ ID NO: 1855870 - DNA, 15 bp, Homo sapiens
tcccagctcctttac

SEQ ID NO: 1855871 - DNA, 15 bp, Homo sapiens
cccagctcctttacc

SEQ ID NO: 1855872 - DNA, 15 bp, Homo sapiens
ccagctcctttacct

SEQ ID NO: 1855873 - DNA, 15 bp, Homo sapiens
cagctcctttacctt

SEQ ID NO: 1855874 - DNA, 15 bp, Homo sapiens
agctcctttaccttg

SEQ ID NO: 1855875 - DNA, 15 bp, Homo sapiens
gctcctttaccttgt

SEQ ID NO: 1855876 - DNA, 15 bp, Homo sapiens
ctcctttaccttgta

SEQ ID NO: 1855877 - DNA, 15 bp, Homo sapiens
tcctttaccttgtac

SEQ ID NO: 1855878 - DNA, 15 bp, Homo sapiens
cctttaccttgtact

SEQ ID NO: 1855879 - DNA, 15 bp, Homo sapiens
ctttaccttgtactc

SEQ ID NO: 1855880 - DNA, 15 bp, Homo sapiens
tttaccttgtactca

SEQ ID NO: 1855881 - DNA, 15 bp, Homo sapiens
ttaccttgtactcat

SEQ ID NO: 1855882 - DNA, 15 bp, Homo sapiens
taccttgtactcatt

SEQ ID NO: 1855883 - DNA, 15 bp, Homo sapiens
accttgtactcattc

SEQ ID NO: 1855884 - DNA, 15 bp, Homo sapiens
ccttgtactcattct

SEQ ID NO: 1855885 - DNA, 15 bp, Homo sapiens
cttgtactcattctc

SEQ ID NO: 1855886 - DNA, 15 bp, Homo sapiens
ttgtactcattctca

SEQ ID NO: 1855887 - DNA, 15 bp, Homo sapiens
tgtactcattctcaa

SEQ ID NO: 1855888 - DNA, 15 bp, Homo sapiens
gtactcattctcaat

SEQ ID NO: 1855889 - DNA, 15 bp, Homo sapiens
tactcattctcaata

SEQ ID NO: 1855890 - DNA, 15 bp, Homo sapiens
actcattctcaatag

SEQ ID NO: 1855891 - DNA, 15 bp, Homo sapiens
ctcattctcaatagt

SEQ ID NO: 1855892 - DNA, 15 bp, Homo sapiens
tcattctcaatagtt

SEQ ID NO: 1855893 - DNA, 15 bp, Homo sapiens
cattctcaatagttc

SEQ ID NO: 1855894 - DNA, 15 bp, Homo sapiens
attctcaatagttcg

SEQ ID NO: 1855895 - DNA, 15 bp, Homo sapiens
ttctcaatagttcgc

SEQ ID NO: 1855896 - DNA, 15 bp, Homo sapiens
tctcaatagttcgct

SEQ ID NO: 1855897 - DNA, 15 bp, Homo sapiens
ctcaatagttcgctc

SEQ ID NO: 1855898 - DNA, 15 bp, Homo sapiens
tcaatagttcgctcc

SEQ ID NO: 1855899 - DNA, 15 bp, Homo sapiens
caatagttcgctcct

SEQ ID NO: 1855900 - DNA, 15 bp, Homo sapiens
aatagttcgctcctt

SEQ ID NO: 1855901 - DNA, 15 bp, Homo sapiens
atagttcgctccttg

SEQ ID NO: 1855902 - DNA, 15 bp, Homo sapiens
tagttcgctccttgg

SEQ ID NO: 1855903 - DNA, 15 bp, Homo sapiens
agttcgctccttggc

SEQ ID NO: 1855904 - DNA, 15 bp, Homo sapiens
gttcgctccttggct

SEQ ID NO: 1855905 - DNA, 15 bp, Homo sapiens
ttcgctccttggctg

SEQ ID NO: 1855906 - DNA, 15 bp, Homo sapiens
tcgctccttggctgc

SEQ ID NO: 1855907 - DNA, 15 bp, Homo sapiens
cgctccttggctgct

SEQ ID NO: 1855908 - DNA, 15 bp, Homo sapiens
gctccttggctgctc

SEQ ID NO: 1855909 - DNA, 15 bp, Homo sapiens
ctccttggctgctcc

SEQ ID NO: 1855910 - DNA, 15 bp, Homo sapiens
tccttggctgctccc

SEQ ID NO: 1855911 - DNA, 15 bp, Homo sapiens
ccttggctgctcccc

SEQ ID NO: 1855912 - DNA, 15 bp, Homo sapiens
cttggctgctcccca

SEQ ID NO: 1855913 - DNA, 15 bp, Homo sapiens
ttggctgctccccag

SEQ ID NO: 1855914 - DNA, 15 bp, Homo sapiens
tggctgctccccagg

SEQ ID NO: 1855915 - DNA, 15 bp, Homo sapiens
ggctgctccccaggg

SEQ ID NO: 1855916 - DNA, 15 bp, Homo sapiens
gctgctccccagggt

SEQ ID NO: 1855917 - DNA, 15 bp, Homo sapiens
ctgctccccagggtt

SEQ ID NO: 1855918 - DNA, 15 bp, Homo sapiens
tgctccccagggttg

SEQ ID NO: 1855919 - DNA, 15 bp, Homo sapiens
gctccccagggttgg

SEQ ID NO: 1855920 - DNA, 15 bp, Homo sapiens
ctccccagggttggg

SEQ ID NO: 1855921 - DNA, 15 bp, Homo sapiens
tccccagggttgggt

SEQ ID NO: 1855922 - DNA, 15 bp, Homo sapiens
ccccagggttgggtt

SEQ ID NO: 1855923 - DNA, 15 bp, Homo sapiens
cccagggttgggttt

SEQ ID NO: 1855924 - DNA, 15 bp, Homo sapiens
ccagggttgggtttt

SEQ ID NO: 1855925 - DNA, 15 bp, Homo sapiens
cagggttgggttttc

SEQ ID NO: 1855926 - DNA, 15 bp, Homo sapiens
agggttgggttttca

SEQ ID NO: 1855927 - DNA, 15 bp, Homo sapiens
gggttgggttttcaa

SEQ ID NO: 1855928 - DNA, 15 bp, Homo sapiens
ggttgggttttcaaa

SEQ ID NO: 1855929 - DNA, 15 bp, Homo sapiens
gttgggttttcaaag

SEQ ID NO: 1855930 - DNA, 15 bp, Homo sapiens
ttgggttttcaaaga

SEQ ID NO: 1855931 - DNA, 15 bp, Homo sapiens
tgggttttcaaagac

SEQ ID NO: 1855932 - DNA, 15 bp, Homo sapiens
gggttttcaaagact

SEQ ID NO: 1855933 - DNA, 15 bp, Homo sapiens
ggttttcaaagactc

SEQ ID NO: 1855934 - DNA, 15 bp, Homo sapiens
gttttcaaagactct

SEQ ID NO: 1855935 - DNA, 15 bp, Homo sapiens
ttttcaaagactctg

SEQ ID NO: 1855936 - DNA, 15 bp, Homo sapiens
tttcaaagactctgt

SEQ ID NO: 1855937 - DNA, 15 bp, Homo sapiens
ttcaaagactctgtt

SEQ ID NO: 1855938 - DNA, 15 bp, Homo sapiens
tcaaagactctgttg

SEQ ID NO: 1855939 - DNA, 15 bp, Homo sapiens
caaagactctgttgg

SEQ ID NO: 1855940 - DNA, 15 bp, Homo sapiens
aaagactctgttgga

SEQ ID NO: 1855941 - DNA, 15 bp, Homo sapiens
aagactctgttggag

SEQ ID NO: 1855942 - DNA, 15 bp, Homo sapiens
agactctgttggagc

SEQ ID NO: 1855943 - DNA, 15 bp, Homo sapiens
gactctgttggagct

SEQ ID NO: 1855944 - DNA, 15 bp, Homo sapiens
actctgttggagctg

SEQ ID NO: 1855945 - DNA, 15 bp, Homo sapiens
ctctgttggagctgc

SEQ ID NO: 1855946 - DNA, 15 bp, Homo sapiens
tctgttggagctgct

SEQ ID NO: 1855947 - DNA, 15 bp, Homo sapiens
ctgttggagctgctc

SEQ ID NO: 1855948 - DNA, 15 bp, Homo sapiens
tgttggagctgctcg

SEQ ID NO: 1855949 - DNA, 15 bp, Homo sapiens
gttggagctgctcgg

SEQ ID NO: 1855950 - DNA, 15 bp, Homo sapiens
ttggagctgctcgga

SEQ ID NO: 1855951 - DNA, 15 bp, Homo sapiens
tggagctgctcggag

SEQ ID NO: 1855952 - DNA, 15 bp, Homo sapiens
ggagctgctcggaga

SEQ ID NO: 1855953 - DNA, 15 bp, Homo sapiens
gagctgctcggagaa

SEQ ID NO: 1855954 - DNA, 15 bp, Homo sapiens
agctgctcggagaaa

SEQ ID NO: 1855955 - DNA, 15 bp, Homo sapiens
gctgctcggagaaag

SEQ ID NO: 1855956 - DNA, 15 bp, Homo sapiens
ctgctcggagaaagg

SEQ ID NO: 1855957 - DNA, 15 bp, Homo sapiens
tgctcggagaaagga

SEQ ID NO: 1855958 - DNA, 15 bp, Homo sapiens
gctcggagaaaggaa

SEQ ID NO: 1855959 - DNA, 15 bp, Homo sapiens
ctcggagaaaggaat

SEQ ID NO: 1855960 - DNA, 15 bp, Homo sapiens
tcggagaaaggaatg

SEQ ID NO: 1855961 - DNA, 15 bp, Homo sapiens
cggagaaaggaatga

SEQ ID NO: 1855962 - DNA, 15 bp, Homo sapiens
ggagaaaggaatgag

SEQ ID NO: 1855963 - DNA, 15 bp, Homo sapiens
gagaaaggaatgagt

SEQ ID NO: 1855964 - DNA, 15 bp, Homo sapiens
agaaaggaatgagtc

SEQ ID NO: 1855965 - DNA, 15 bp, Homo sapiens
gaaaggaatgagtct

SEQ ID NO: 1855966 - DNA, 15 bp, Homo sapiens
aaaggaatgagtctt

SEQ ID NO: 1855967 - DNA, 15 bp, Homo sapiens
aaggaatgagtcttt

SEQ ID NO: 1855968 - DNA, 15 bp, Homo sapiens
aggaatgagtctttt

SEQ ID NO: 1855969 - DNA, 15 bp, Homo sapiens
ggaatgagtcttttt

SEQ ID NO: 1855970 - DNA, 15 bp, Homo sapiens
gaatgagtctttttc

SEQ ID NO: 1855971 - DNA, 15 bp, Homo sapiens
aatgagtctttttct

SEQ ID NO: 1855972 - DNA, 15 bp, Homo sapiens
atgagtctttttctc

SEQ ID NO: 1855973 - DNA, 15 bp, Homo sapiens
tgagtctttttctct

SEQ ID NO: 1855974 - DNA, 15 bp, Homo sapiens
gagtctttttctctc

SEQ ID NO: 1855975 - DNA, 15 bp, Homo sapiens
agtctttttctctcg

SEQ ID NO: 1855976 - DNA, 15 bp, Homo sapiens
gtctttttctctcgc

SEQ ID NO: 1855977 - DNA, 15 bp, Homo sapiens
tctttttctctcgca

SEQ ID NO: 1855978 - DNA, 15 bp, Homo sapiens
ctttttctctcgcag

SEQ ID NO: 1855979 - DNA, 15 bp, Homo sapiens
tttttctctcgcaga

SEQ ID NO: 1855980 - DNA, 15 bp, Homo sapiens
ttttctctcgcagaa

SEQ ID NO: 1855981 - DNA, 15 bp, Homo sapiens
tttctctcgcagaac

SEQ ID NO: 1855982 - DNA, 15 bp, Homo sapiens
ttctctcgcagaacc

SEQ ID NO: 1855983 - DNA, 15 bp, Homo sapiens
tctctcgcagaacct

SEQ ID NO: 1855984 - DNA, 15 bp, Homo sapiens
ctctcgcagaaccta

SEQ ID NO: 1855985 - DNA, 15 bp, Homo sapiens
tctcgcagaacctag

SEQ ID NO: 1855986 - DNA, 15 bp, Homo sapiens
ctcgcagaacctagt

SEQ ID NO: 1855987 - DNA, 15 bp, Homo sapiens
tcgcagaacctagtg

SEQ ID NO: 1855988 - DNA, 15 bp, Homo sapiens
cgcagaacctagtgc

SEQ ID NO: 1855989 - DNA, 15 bp, Homo sapiens
gcagaacctagtgct

SEQ ID NO: 1855990 - DNA, 15 bp, Homo sapiens
cagaacctagtgctt

SEQ ID NO: 1855991 - DNA, 15 bp, Homo sapiens
agaacctagtgctta

SEQ ID NO: 1855992 - DNA, 15 bp, Homo sapiens
gaacctagtgcttac

SEQ ID NO: 1855993 - DNA, 15 bp, Homo sapiens
aacctagtgcttacc

SEQ ID NO: 1855994 - DNA, 15 bp, Homo sapiens
acctagtgcttacca

SEQ ID NO: 1855995 - DNA, 15 bp, Homo sapiens
cctagtgcttaccaa

SEQ ID NO: 1855996 - DNA, 15 bp, Homo sapiens
ctagtgcttaccaag

SEQ ID NO: 1855997 - DNA, 15 bp, Homo sapiens
tagtgcttaccaagt

SEQ ID NO: 1855998 - DNA, 15 bp, Homo sapiens
agtgcttaccaagtg

SEQ ID NO: 1855999 - DNA, 15 bp, Homo sapiens
gtgcttaccaagtgc

SEQ ID NO: 1856000 - DNA, 15 bp, Homo sapiens
tgcttaccaagtgct

SEQ ID NO: 1856001 - DNA, 15 bp, Homo sapiens
gcttaccaagtgctt

SEQ ID NO: 1856002 - DNA, 15 bp, Homo sapiens
cttaccaagtgcttg

SEQ ID NO: 1856003 - DNA, 15 bp, Homo sapiens
ttaccaagtgcttga

SEQ ID NO: 1856004 - DNA, 15 bp, Homo sapiens
taccaagtgcttgat

SEQ ID NO: 1856005 - DNA, 15 bp, Homo sapiens
accaagtgcttgata

SEQ ID NO: 1856006 - DNA, 15 bp, Homo sapiens
ccaagtgcttgataa

SEQ ID NO: 1856007 - DNA, 15 bp, Homo sapiens
caagtgcttgataac

SEQ ID NO: 1856008 - DNA, 15 bp, Homo sapiens
aagtgcttgataaca

SEQ ID NO: 1856009 - DNA, 15 bp, Homo sapiens
agtgcttgataacac

SEQ ID NO: 1856010 - DNA, 15 bp, Homo sapiens
gtgcttgataacact

SEQ ID NO: 1856011 - DNA, 15 bp, Homo sapiens
tgcttgataacactt

SEQ ID NO: 1856012 - DNA, 15 bp, Homo sapiens
gcttgataacactta

SEQ ID NO: 1856013 - DNA, 15 bp, Homo sapiens
cttgataacacttag

SEQ ID NO: 1856014 - DNA, 15 bp, Homo sapiens
ttgataacacttagt

SEQ ID NO: 1856015 - DNA, 15 bp, Homo sapiens
tgataacacttagtg

SEQ ID NO: 1856016 - DNA, 15 bp, Homo sapiens
gataacacttagtgt

SEQ ID NO: 1856017 - DNA, 15 bp, Homo sapiens
ataacacttagtgtt

SEQ ID NO: 1856018 - DNA, 15 bp, Homo sapiens
taacacttagtgttg

SEQ ID NO: 1856019 - DNA, 15 bp, Homo sapiens
aacacttagtgttgc

SEQ ID NO: 1856020 - DNA, 15 bp, Homo sapiens
acacttagtgttgcg

SEQ ID NO: 1856021 - DNA, 15 bp, Homo sapiens
cacttagtgttgcgt

SEQ ID NO: 1856022 - DNA, 15 bp, Homo sapiens
acttagtgttgcgtg

SEQ ID NO: 1856023 - DNA, 15 bp, Homo sapiens
cttagtgttgcgtga

SEQ ID NO: 1856024 - DNA, 15 bp, Homo sapiens
ttagtgttgcgtgag

SEQ ID NO: 1856025 - DNA, 15 bp, Homo sapiens
tagtgttgcgtgagt

SEQ ID NO: 1856026 - DNA, 15 bp, Homo sapiens
agtgttgcgtgagtc

SEQ ID NO: 1856027 - DNA, 15 bp, Homo sapiens
gtgttgcgtgagtca

SEQ ID NO: 1856028 - DNA, 15 bp, Homo sapiens
tgttgcgtgagtcag

SEQ ID NO: 1856029 - DNA, 15 bp, Homo sapiens
gttgcgtgagtcagg

SEQ ID NO: 1856030 - DNA, 15 bp, Homo sapiens
ttgcgtgagtcagga

SEQ ID NO: 1856031 - DNA, 15 bp, Homo sapiens
tgcgtgagtcaggag

SEQ ID NO: 1856032 - DNA, 15 bp, Homo sapiens
gcgtgagtcaggagt

SEQ ID NO: 1856033 - DNA, 15 bp, Homo sapiens
cgtgagtcaggagtg

SEQ ID NO: 1856034 - DNA, 15 bp, Homo sapiens
gtgagtcaggagtgg

SEQ ID NO: 1856035 - DNA, 15 bp, Homo sapiens
tgagtcaggagtggc

SEQ ID NO: 1856036 - DNA, 15 bp, Homo sapiens
gagtcaggagtggcc

SEQ ID NO: 1856037 - DNA, 15 bp, Homo sapiens
agtcaggagtggcct

SEQ ID NO: 1856038 - DNA, 15 bp, Homo sapiens
gtcaggagtggccta

SEQ ID NO: 1856039 - DNA, 15 bp, Homo sapiens
tcaggagtggcctag

SEQ ID NO: 1856040 - DNA, 15 bp, Homo sapiens
caggagtggcctaga

SEQ ID NO: 1856041 - DNA, 15 bp, Homo sapiens
aggagtggcctagag

SEQ ID NO: 1856042 - DNA, 15 bp, Homo sapiens
ggagtggcctagagc

SEQ ID NO: 1856043 - DNA, 15 bp, Homo sapiens
gagtggcctagagct

SEQ ID NO: 1856044 - DNA, 15 bp, Homo sapiens
agtggcctagagctt

SEQ ID NO: 1856045 - DNA, 15 bp, Homo sapiens
gtggcctagagcttc

SEQ ID NO: 1856046 - DNA, 15 bp, Homo sapiens
tggcctagagcttct

SEQ ID NO: 1856047 - DNA, 15 bp, Homo sapiens
ggcctagagcttctg

SEQ ID NO: 1856048 - DNA, 15 bp, Homo sapiens
gcctagagcttctgt

SEQ ID NO: 1856049 - DNA, 15 bp, Homo sapiens
cctagagcttctgtc

SEQ ID NO: 1856050 - DNA, 15 bp, Homo sapiens
ctagagcttctgtct

SEQ ID NO: 1856051 - DNA, 15 bp, Homo sapiens
tagagcttctgtctg

SEQ ID NO: 1856052 - DNA, 15 bp, Homo sapiens
agagcttctgtctgc

SEQ ID NO: 1856053 - DNA, 15 bp, Homo sapiens
gagcttctgtctgcc

SEQ ID NO: 1856054 - DNA, 15 bp, Homo sapiens
agcttctgtctgcca

SEQ ID NO: 1856055 - DNA, 15 bp, Homo sapiens
gcttctgtctgccag

SEQ ID NO: 1856056 - DNA, 15 bp, Homo sapiens
cttctgtctgccagc

SEQ ID NO: 1856057 - DNA, 15 bp, Homo sapiens
ttctgtctgccagcc

SEQ ID NO: 1856058 - DNA, 15 bp, Homo sapiens
tctgtctgccagcca

SEQ ID NO: 1856059 - DNA, 15 bp, Homo sapiens
ctgtctgccagccag

SEQ ID NO: 1856060 - DNA, 15 bp, Homo sapiens
tgtctgccagccagc

SEQ ID NO: 1856061 - DNA, 15 bp, Homo sapiens
gtctgccagccagcc

SEQ ID NO: 1856062 - DNA, 15 bp, Homo sapiens
tctgccagccagcct

SEQ ID NO: 1856063 - DNA, 15 bp, Homo sapiens
ctgccagccagcctg

SEQ ID NO: 1856064 - DNA, 15 bp, Homo sapiens
tgccagccagcctgg

SEQ ID NO: 1856065 - DNA, 15 bp, Homo sapiens
gccagccagcctggg

SEQ ID NO: 1856066 - DNA, 15 bp, Homo sapiens
ccagccagcctgggc

SEQ ID NO: 1856067 - DNA, 15 bp, Homo sapiens
cagccagcctgggct

SEQ ID NO: 1856068 - DNA, 15 bp, Homo sapiens
agccagcctgggctc

SEQ ID NO: 1856069 - DNA, 15 bp, Homo sapiens
gccagcctgggctct

SEQ ID NO: 1856070 - DNA, 15 bp, Homo sapiens
ccagcctgggctctg

SEQ ID NO: 1856071 - DNA, 15 bp, Homo sapiens
cagcctgggctctgg

SEQ ID NO: 1856072 - DNA, 15 bp, Homo sapiens
agcctgggctctggg

SEQ ID NO: 1856073 - DNA, 15 bp, Homo sapiens
gcctgggctctgggg

SEQ ID NO: 1856074 - DNA, 15 bp, Homo sapiens
cctgggctctgggga

SEQ ID NO: 1856075 - DNA, 15 bp, Homo sapiens
ctgggctctggggaa

SEQ ID NO: 1856076 - DNA, 15 bp, Homo sapiens
tgggctctggggaac

SEQ ID NO: 1856077 - DNA, 15 bp, Homo sapiens
gggctctggggaaca

SEQ ID NO: 1856078 - DNA, 15 bp, Homo sapiens
ggctctggggaacag

SEQ ID NO: 1856079 - DNA, 15 bp, Homo sapiens
gctctggggaacagg

SEQ ID NO: 1856080 - DNA, 15 bp, Homo sapiens
ctctggggaacaggc

SEQ ID NO: 1856081 - DNA, 15 bp, Homo sapiens
tctggggaacaggcg

SEQ ID NO: 1856082 - DNA, 15 bp, Homo sapiens
ctggggaacaggcga

SEQ ID NO: 1856083 - DNA, 15 bp, Homo sapiens
tggggaacaggcgac

SEQ ID NO: 1856084 - DNA, 15 bp, Homo sapiens
ggggaacaggcgaca

SEQ ID NO: 1856085 - DNA, 15 bp, Homo sapiens
gggaacaggcgacac

SEQ ID NO: 1856086 - DNA, 15 bp, Homo sapiens
ggaacaggcgacaca

SEQ ID NO: 1856087 - DNA, 15 bp, Homo sapiens
gaacaggcgacacag

SEQ ID NO: 1856088 - DNA, 15 bp, Homo sapiens
aacaggcgacacagg

SEQ ID NO: 1856089 - DNA, 15 bp, Homo sapiens
acaggcgacacaggc

SEQ ID NO: 1856090 - DNA, 15 bp, Homo sapiens
caggcgacacaggcc

SEQ ID NO: 1856091 - DNA, 15 bp, Homo sapiens
aggcgacacaggcct

SEQ ID NO: 1856092 - DNA, 15 bp, Homo sapiens
ggcgacacaggccta

SEQ ID NO: 1856093 - DNA, 15 bp, Homo sapiens
gcgacacaggcctaa

SEQ ID NO: 1856094 - DNA, 15 bp, Homo sapiens
cgacacaggcctaag

SEQ ID NO: 1856095 - DNA, 15 bp, Homo sapiens
gacacaggcctaagg

SEQ ID NO: 1856096 - DNA, 15 bp, Homo sapiens
acacaggcctaaggt

SEQ ID NO: 1856097 - DNA, 15 bp, Homo sapiens
cacaggcctaaggtg

SEQ ID NO: 1856098 - DNA, 15 bp, Homo sapiens
acaggcctaaggtga

SEQ ID NO: 1856099 - DNA, 15 bp, Homo sapiens
caggcctaaggtgag

SEQ ID NO: 1856100 - DNA, 15 bp, Homo sapiens
aggcctaaggtgaga

SEQ ID NO: 1856101 - DNA, 15 bp, Homo sapiens
ggcctaaggtgagac

SEQ ID NO: 1856102 - DNA, 15 bp, Homo sapiens
gcctaaggtgagacc

SEQ ID NO: 1856103 - DNA, 15 bp, Homo sapiens
cctaaggtgagaccc

SEQ ID NO: 1856104 - DNA, 15 bp, Homo sapiens
ctaaggtgagaccct

SEQ ID NO: 1856105 - DNA, 15 bp, Homo sapiens
taaggtgagaccctg

SEQ ID NO: 1856106 - DNA, 15 bp, Homo sapiens
aaggtgagaccctga

SEQ ID NO: 1856107 - DNA, 15 bp, Homo sapiens
aggtgagaccctgac

SEQ ID NO: 1856108 - DNA, 15 bp, Homo sapiens
ggtgagaccctgact

SEQ ID NO: 1856109 - DNA, 15 bp, Homo sapiens
gtgagaccctgactt

SEQ ID NO: 1856110 - DNA, 15 bp, Homo sapiens
tgagaccctgacttc

SEQ ID NO: 1856111 - DNA, 15 bp, Homo sapiens
gagaccctgacttca

SEQ ID NO: 1856112 - DNA, 15 bp, Homo sapiens
agaccctgacttcag

SEQ ID NO: 1856113 - DNA, 15 bp, Homo sapiens
gaccctgacttcaga

SEQ ID NO: 1856114 - DNA, 15 bp, Homo sapiens
accctgacttcagag

SEQ ID NO: 1856115 - DNA, 15 bp, Homo sapiens
ccctgacttcagaga

SEQ ID NO: 1856116 - DNA, 15 bp, Homo sapiens
cctgacttcagagat

SEQ ID NO: 1856117 - DNA, 15 bp, Homo sapiens
ctgacttcagagatc

SEQ ID NO: 1856118 - DNA, 15 bp, Homo sapiens
tgacttcagagatct

SEQ ID NO: 1856119 - DNA, 15 bp, Homo sapiens
gacttcagagatctg

SEQ ID NO: 1856120 - DNA, 15 bp, Homo sapiens
acttcagagatctgt

SEQ ID NO: 1856121 - DNA, 15 bp, Homo sapiens
cttcagagatctgtc

SEQ ID NO: 1856122 - DNA, 15 bp, Homo sapiens
ttcagagatctgtct

SEQ ID NO: 1856123 - DNA, 15 bp, Homo sapiens
tcagagatctgtcta

SEQ ID NO: 1856124 - DNA, 15 bp, Homo sapiens
cagagatctgtctat

SEQ ID NO: 1856125 - DNA, 15 bp, Homo sapiens
agagatctgtctatg

SEQ ID NO: 1856126 - DNA, 15 bp, Homo sapiens
gagatctgtctatgc

SEQ ID NO: 1856127 - DNA, 15 bp, Homo sapiens
agatctgtctatgcg

SEQ ID NO: 1856128 - DNA, 15 bp, Homo sapiens
gatctgtctatgcgg

SEQ ID NO: 1856129 - DNA, 15 bp, Homo sapiens
atctgtctatgcgga

SEQ ID NO: 1856130 - DNA, 15 bp, Homo sapiens
tctgtctatgcggag

SEQ ID NO: 1856131 - DNA, 15 bp, Homo sapiens
ctgtctatgcggagc

SEQ ID NO: 1856132 - DNA, 15 bp, Homo sapiens
tgtctatgcggagct

SEQ ID NO: 1856133 - DNA, 15 bp, Homo sapiens
gtctatgcggagctt

SEQ ID NO: 1856134 - DNA, 15 bp, Homo sapiens
tctatgcggagcttt

SEQ ID NO: 1856135 - DNA, 15 bp, Homo sapiens
ctatgcggagctttt

SEQ ID NO: 1856136 - DNA, 15 bp, Homo sapiens
tatgcggagcttttc

SEQ ID NO: 1856137 - DNA, 15 bp, Homo sapiens
atgcggagcttttct

SEQ ID NO: 1856138 - DNA, 15 bp, Homo sapiens
tgcggagcttttctg

SEQ ID NO: 1856139 - DNA, 15 bp, Homo sapiens
gcggagcttttctgt

SEQ ID NO: 1856140 - DNA, 15 bp, Homo sapiens
cggagcttttctgtg

SEQ ID NO: 1856141 - DNA, 15 bp, Homo sapiens
ggagcttttctgtgg

SEQ ID NO: 1856142 - DNA, 15 bp, Homo sapiens
gagcttttctgtggg

SEQ ID NO: 1856143 - DNA, 15 bp, Homo sapiens
agcttttctgtgggt

SEQ ID NO: 1856144 - DNA, 15 bp, Homo sapiens
gcttttctgtgggtg

SEQ ID NO: 1856145 - DNA, 15 bp, Homo sapiens
cttttctgtgggtga

SEQ ID NO: 1856146 - DNA, 15 bp, Homo sapiens
ttttctgtgggtgag

SEQ ID NO: 1856147 - DNA, 15 bp, Homo sapiens
tttctgtgggtgaga

SEQ ID NO: 1856148 - DNA, 15 bp, Homo sapiens
ttctgtgggtgagag

SEQ ID NO: 1856149 - DNA, 15 bp, Homo sapiens
tctgtgggtgagaga

SEQ ID NO: 1856150 - DNA, 15 bp, Homo sapiens
ctgtgggtgagagat

SEQ ID NO: 1856151 - DNA, 15 bp, Homo sapiens
tgtgggtgagagatg

SEQ ID NO: 1856152 - DNA, 15 bp, Homo sapiens
gtgggtgagagatgg

SEQ ID NO: 1856153 - DNA, 15 bp, Homo sapiens
tgggtgagagatgga

SEQ ID NO: 1856154 - DNA, 15 bp, Homo sapiens
gtgagagatggaggt

SEQ ID NO: 1856155 - DNA, 15 bp, Homo sapiens
tgagagatggaggta

SEQ ID NO: 1856156 - DNA, 15 bp, Homo sapiens
gagagatggaggtat

SEQ ID NO: 1856157 - DNA, 15 bp, Homo sapiens
agagatggaggtatg

SEQ ID NO: 1856158 - DNA, 15 bp, Homo sapiens
gagatggaggtatgg

SEQ ID NO: 1856159 - DNA, 15 bp, Homo sapiens
agatggaggtatggc

SEQ ID NO: 1856160 - DNA, 15 bp, Homo sapiens
gatggaggtatggct

SEQ ID NO: 1856161 - DNA, 15 bp, Homo sapiens
atggaggtatggctc

SEQ ID NO: 1856162 - DNA, 15 bp, Homo sapiens
tggaggtatggctcc

SEQ ID NO: 1856163 - DNA, 15 bp, Homo sapiens
ggaggtatggctcct

SEQ ID NO: 1856164 - DNA, 15 bp, Homo sapiens
gaggtatggctcctt

SEQ ID NO: 1856165 - DNA, 15 bp, Homo sapiens
aggtatggctccttt

SEQ ID NO: 1856166 - DNA, 15 bp, Homo sapiens
ggtatggctccttta

SEQ ID NO: 1856167 - DNA, 15 bp, Homo sapiens
gtatggctcctttaa

SEQ ID NO: 1856168 - DNA, 15 bp, Homo sapiens
tatggctcctttaac

SEQ ID NO: 1856169 - DNA, 15 bp, Homo sapiens
atggctcctttaacc

SEQ ID NO: 1856170 - DNA, 15 bp, Homo sapiens
tggctcctttaacct

SEQ ID NO: 1856171 - DNA, 15 bp, Homo sapiens
ggctcctttaacctt

SEQ ID NO: 1856172 - DNA, 15 bp, Homo sapiens
gctcctttaaccttg

SEQ ID NO: 1856173 - DNA, 15 bp, Homo sapiens
ctcctttaaccttga

SEQ ID NO: 1856174 - DNA, 15 bp, Homo sapiens
tcctttaaccttgag

SEQ ID NO: 1856175 - DNA, 15 bp, Homo sapiens
cctttaaccttgagg

SEQ ID NO: 1856176 - DNA, 15 bp, Homo sapiens
ctttaaccttgaggc

SEQ ID NO: 1856177 - DNA, 15 bp, Homo sapiens
tttaaccttgaggcc

SEQ ID NO: 1856178 - DNA, 15 bp, Homo sapiens
ttaaccttgaggcca

SEQ ID NO: 1856179 - DNA, 15 bp, Homo sapiens
taaccttgaggccag

SEQ ID NO: 1856180 - DNA, 15 bp, Homo sapiens
aaccttgaggccagt

SEQ ID NO: 1856181 - DNA, 15 bp, Homo sapiens
accttgaggccagtc

SEQ ID NO: 1856182 - DNA, 15 bp, Homo sapiens
ccttgaggccagtct

SEQ ID NO: 1856183 - DNA, 15 bp, Homo sapiens
cttgaggccagtctg

SEQ ID NO: 1856184 - DNA, 15 bp, Homo sapiens
ttgaggccagtctgg

SEQ ID NO: 1856185 - DNA, 15 bp, Homo sapiens
tgaggccagtctgga

SEQ ID NO: 1856186 - DNA, 15 bp, Homo sapiens
gaggccagtctggat

SEQ ID NO: 1856187 - DNA, 15 bp, Homo sapiens
aggccagtctggatg

SEQ ID NO: 1856188 - DNA, 15 bp, Homo sapiens
ggccagtctggatgg

SEQ ID NO: 1856189 - DNA, 15 bp, Homo sapiens
gccagtctggatggc

SEQ ID NO: 1856190 - DNA, 15 bp, Homo sapiens
ccagtctggatggcc

SEQ ID NO: 1856191 - DNA, 15 bp, Homo sapiens
cagtctggatggcct

SEQ ID NO: 1856192 - DNA, 15 bp, Homo sapiens
agtctggatggcctg

SEQ ID NO: 1856193 - DNA, 15 bp, Homo sapiens
gtctggatggcctgg

SEQ ID NO: 1856194 - DNA, 15 bp, Homo sapiens
tctggatggcctggc

SEQ ID NO: 1856195 - DNA, 15 bp, Homo sapiens
ctggatggcctggcc

SEQ ID NO: 1856196 - DNA, 15 bp, Homo sapiens
tggatggcctggcca

SEQ ID NO: 1856197 - DNA, 15 bp, Homo sapiens
ggatggcctggccac

SEQ ID NO: 1856198 - DNA, 15 bp, Homo sapiens
gatggcctggccacc

SEQ ID NO: 1856199 - DNA, 15 bp, Homo sapiens
atggcctggccacct

SEQ ID NO: 1856200 - DNA, 15 bp, Homo sapiens
tggcctggccacctc

SEQ ID NO: 1856201 - DNA, 15 bp, Homo sapiens
ggcctggccacctcc

SEQ ID NO: 1856202 - DNA, 15 bp, Homo sapiens
gcctggccacctcca

SEQ ID NO: 1856203 - DNA, 15 bp, Homo sapiens
cctggccacctccag

SEQ ID NO: 1856204 - DNA, 15 bp, Homo sapiens
ctggccacctccagg

SEQ ID NO: 1856205 - DNA, 15 bp, Homo sapiens
tggccacctccagga

SEQ ID NO: 1856206 - DNA, 15 bp, Homo sapiens
ggccacctccaggaa

SEQ ID NO: 1856207 - DNA, 15 bp, Homo sapiens
gccacctccaggaaa

SEQ ID NO: 1856208 - DNA, 15 bp, Homo sapiens
ccacctccaggaaag

SEQ ID NO: 1856209 - DNA, 15 bp, Homo sapiens
cacctccaggaaaga

SEQ ID NO: 1856210 - DNA, 15 bp, Homo sapiens
acctccaggaaagag

SEQ ID NO: 1856211 - DNA, 15 bp, Homo sapiens
cctccaggaaagagg

SEQ ID NO: 1856212 - DNA, 15 bp, Homo sapiens
ctccaggaaagaggg

SEQ ID NO: 1856213 - DNA, 15 bp, Homo sapiens
tccaggaaagagggt

SEQ ID NO: 1856214 - DNA, 15 bp, Homo sapiens
ccaggaaagagggta

SEQ ID NO: 1856215 - DNA, 15 bp, Homo sapiens
caggaaagagggtag

SEQ ID NO: 1856216 - DNA, 15 bp, Homo sapiens
aggaaagagggtagg

SEQ ID NO: 1856217 - DNA, 15 bp, Homo sapiens
ggaaagagggtaggg

SEQ ID NO: 1856218 - DNA, 15 bp, Homo sapiens
gaaagagggtaggga

SEQ ID NO: 1856219 - DNA, 15 bp, Homo sapiens
aaagagggtagggac

SEQ ID NO: 1856220 - DNA, 15 bp, Homo sapiens
aagagggtagggact

SEQ ID NO: 1856221 - DNA, 15 bp, Homo sapiens
agagggtagggactc

SEQ ID NO: 1856222 - DNA, 15 bp, Homo sapiens
gagggtagggactcc

SEQ ID NO: 1856223 - DNA, 15 bp, Homo sapiens
agggtagggactcca

SEQ ID NO: 1856224 - DNA, 15 bp, Homo sapiens
gggtagggactccat

SEQ ID NO: 1856225 - DNA, 15 bp, Homo sapiens
ggtagggactccata

SEQ ID NO: 1856226 - DNA, 15 bp, Homo sapiens
gtagggactccatag

SEQ ID NO: 1856227 - DNA, 15 bp, Homo sapiens
tagggactccatagc

SEQ ID NO: 1856228 - DNA, 15 bp, Homo sapiens
agggactccatagcc

SEQ ID NO: 1856229 - DNA, 15 bp, Homo sapiens
gggactccatagcct

SEQ ID NO: 1856230 - DNA, 15 bp, Homo sapiens
ggactccatagcctg

SEQ ID NO: 1856231 - DNA, 15 bp, Homo sapiens
gactccatagcctgc

SEQ ID NO: 1856232 - DNA, 15 bp, Homo sapiens
actccatagcctgcc

SEQ ID NO: 1856233 - DNA, 15 bp, Homo sapiens
ctccatagcctgcct

SEQ ID NO: 1856234 - DNA, 15 bp, Homo sapiens
tccatagcctgcctg

SEQ ID NO: 1856235 - DNA, 15 bp, Homo sapiens
ccatagcctgcctgg

SEQ ID NO: 1856236 - DNA, 15 bp, Homo sapiens
catagcctgcctggg

SEQ ID NO: 1856237 - DNA, 15 bp, Homo sapiens
atagcctgcctgggg

SEQ ID NO: 1856238 - DNA, 15 bp, Homo sapiens
tagcctgcctgggga

SEQ ID NO: 1856239 - DNA, 15 bp, Homo sapiens
agcctgcctggggag

SEQ ID NO: 1856240 - DNA, 15 bp, Homo sapiens
gcctgcctggggagt

SEQ ID NO: 1856241 - DNA, 15 bp, Homo sapiens
cctgcctggggagtg

SEQ ID NO: 1856242 - DNA, 15 bp, Homo sapiens
ctgcctggggagtga

SEQ ID NO: 1856243 - DNA, 15 bp, Homo sapiens
tgcctggggagtgag

SEQ ID NO: 1856244 - DNA, 15 bp, Homo sapiens
gcctggggagtgaga

SEQ ID NO: 1856245 - DNA, 15 bp, Homo sapiens
cctggggagtgagag

SEQ ID NO: 1856246 - DNA, 15 bp, Homo sapiens
ctggggagtgagagc

SEQ ID NO: 1856247 - DNA, 15 bp, Homo sapiens
tggggagtgagagcc

SEQ ID NO: 1856248 - DNA, 15 bp, Homo sapiens
ggggagtgagagcca

SEQ ID NO: 1856249 - DNA, 15 bp, Homo sapiens
gggagtgagagccat

SEQ ID NO: 1856250 - DNA, 15 bp, Homo sapiens
ggagtgagagccatg

SEQ ID NO: 1856251 - DNA, 15 bp, Homo sapiens
gagtgagagccatgg

SEQ ID NO: 1856252 - DNA, 15 bp, Homo sapiens
agtgagagccatggg

SEQ ID NO: 1856253 - DNA, 15 bp, Homo sapiens
gtgagagccatggga

SEQ ID NO: 1856254 - DNA, 15 bp, Homo sapiens
tgagagccatgggat

SEQ ID NO: 1856255 - DNA, 15 bp, Homo sapiens
gagagccatgggata

SEQ ID NO: 1856256 - DNA, 15 bp, Homo sapiens
agagccatgggatag

SEQ ID NO: 1856257 - DNA, 15 bp, Homo sapiens
gagccatgggatagg

SEQ ID NO: 1856258 - DNA, 15 bp, Homo sapiens
agccatgggataggg

SEQ ID NO: 1856259 - DNA, 15 bp, Homo sapiens
gccatgggatagggc

SEQ ID NO: 1856260 - DNA, 15 bp, Homo sapiens
ccatgggatagggct

SEQ ID NO: 1856261 - DNA, 15 bp, Homo sapiens
catgggatagggctg

SEQ ID NO: 1856262 - DNA, 15 bp, Homo sapiens
atgggatagggctgg

SEQ ID NO: 1856263 - DNA, 15 bp, Homo sapiens
tgggatagggctgga

SEQ ID NO: 1856264 - DNA, 15 bp, Homo sapiens
gggatagggctggac

SEQ ID NO: 1856265 - DNA, 15 bp, Homo sapiens
ggatagggctggact

SEQ ID NO: 1856266 - DNA, 15 bp, Homo sapiens
gatagggctggactc

SEQ ID NO: 1856267 - DNA, 15 bp, Homo sapiens
atagggctggactct

SEQ ID NO: 1856268 - DNA, 15 bp, Homo sapiens
tagggctggactctt

SEQ ID NO: 1856269 - DNA, 15 bp, Homo sapiens
agggctggactcttg

SEQ ID NO: 1856270 - DNA, 15 bp, Homo sapiens
gggctggactcttgg

SEQ ID NO: 1856271 - DNA, 15 bp, Homo sapiens
ggctggactcttggg

SEQ ID NO: 1856272 - DNA, 15 bp, Homo sapiens
gctggactcttggga

SEQ ID NO: 1856273 - DNA, 15 bp, Homo sapiens
ctggactcttgggaa

SEQ ID NO: 1856274 - DNA, 15 bp, Homo sapiens
tggactcttgggaat

SEQ ID NO: 1856275 - DNA, 15 bp, Homo sapiens
ggactcttgggaata

SEQ ID NO: 1856276 - DNA, 15 bp, Homo sapiens
gactcttgggaatag

SEQ ID NO: 1856277 - DNA, 15 bp, Homo sapiens
actcttgggaatagc

SEQ ID NO: 1856278 - DNA, 15 bp, Homo sapiens
ctcttgggaatagcc

SEQ ID NO: 1856279 - DNA, 15 bp, Homo sapiens
tcttgggaatagccc

SEQ ID NO: 1856280 - DNA, 15 bp, Homo sapiens
cttgggaatagccca

SEQ ID NO: 1856281 - DNA, 15 bp, Homo sapiens
ttgggaatagcccag

SEQ ID NO: 1856282 - DNA, 15 bp, Homo sapiens
tgggaatagcccagc

SEQ ID NO: 1856283 - DNA, 15 bp, Homo sapiens
gggaatagcccagct

SEQ ID NO: 1856284 - DNA, 15 bp, Homo sapiens
ggaatagcccagctc

SEQ ID NO: 1856285 - DNA, 15 bp, Homo sapiens
gaatagcccagctca

SEQ ID NO: 1856286 - DNA, 15 bp, Homo sapiens
aatagcccagctcac

SEQ ID NO: 1856287 - DNA, 15 bp, Homo sapiens
atagcccagctcact

SEQ ID NO: 1856288 - DNA, 15 bp, Homo sapiens
tagcccagctcactg

SEQ ID NO: 1856289 - DNA, 15 bp, Homo sapiens
agcccagctcactgg

SEQ ID NO: 1856290 - DNA, 15 bp, Homo sapiens
gcccagctcactggg

SEQ ID NO: 1856291 - DNA, 15 bp, Homo sapiens
cccagctcactgggt

SEQ ID NO: 1856292 - DNA, 15 bp, Homo sapiens
ccagctcactgggtg

SEQ ID NO: 1856293 - DNA, 15 bp, Homo sapiens
cagctcactgggtgg

SEQ ID NO: 1856294 - DNA, 15 bp, Homo sapiens
agctcactgggtggc

SEQ ID NO: 1856295 - DNA, 15 bp, Homo sapiens
gctcactgggtggcc

SEQ ID NO: 1856296 - DNA, 15 bp, Homo sapiens
ctcactgggtggccc

SEQ ID NO: 1856297 - DNA, 15 bp, Homo sapiens
tcactgggtggccct

SEQ ID NO: 1856298 - DNA, 15 bp, Homo sapiens
cactgggtggccctt

SEQ ID NO: 1856299 - DNA, 15 bp, Homo sapiens
actgggtggcccttt

SEQ ID NO: 1856300 - DNA, 15 bp, Homo sapiens
ctgggtggccctttg

SEQ ID NO: 1856301 - DNA, 15 bp, Homo sapiens
tgggtggccctttga

SEQ ID NO: 1856302 - DNA, 15 bp, Homo sapiens
gggtggccctttgag

SEQ ID NO: 1856303 - DNA, 15 bp, Homo sapiens
ggtggccctttgagc

SEQ ID NO: 1856304 - DNA, 15 bp, Homo sapiens
gtggccctttgagct

SEQ ID NO: 1856305 - DNA, 15 bp, Homo sapiens
tggccctttgagcta

SEQ ID NO: 1856306 - DNA, 15 bp, Homo sapiens
ggccctttgagctag

SEQ ID NO: 1856307 - DNA, 15 bp, Homo sapiens
gccctttgagctagt

SEQ ID NO: 1856308 - DNA, 15 bp, Homo sapiens
ccctttgagctagtc

SEQ ID NO: 1856309 - DNA, 15 bp, Homo sapiens
cctttgagctagtca

SEQ ID NO: 1856310 - DNA, 15 bp, Homo sapiens
ctttgagctagtcag

SEQ ID NO: 1856311 - DNA, 15 bp, Homo sapiens
tttgagctagtcagt

SEQ ID NO: 1856312 - DNA, 15 bp, Homo sapiens
ttgagctagtcagtg

SEQ ID NO: 1856313 - DNA, 15 bp, Homo sapiens
tgagctagtcagtga

SEQ ID NO: 1856314 - DNA, 15 bp, Homo sapiens
gagctagtcagtgac

SEQ ID NO: 1856315 - DNA, 15 bp, Homo sapiens
agctagtcagtgacg

SEQ ID NO: 1856316 - DNA, 15 bp, Homo sapiens
gctagtcagtgacgc

SEQ ID NO: 1856317 - DNA, 15 bp, Homo sapiens
ctagtcagtgacgcc

SEQ ID NO: 1856318 - DNA, 15 bp, Homo sapiens
tagtcagtgacgcct

SEQ ID NO: 1856319 - DNA, 15 bp, Homo sapiens
agtcagtgacgcctc

SEQ ID NO: 1856320 - DNA, 15 bp, Homo sapiens
gtcagtgacgcctca

SEQ ID NO: 1856321 - DNA, 15 bp, Homo sapiens
tcagtgacgcctcag

SEQ ID NO: 1856322 - DNA, 15 bp, Homo sapiens
cagtgacgcctcagt

SEQ ID NO: 1856323 - DNA, 15 bp, Homo sapiens
agtgacgcctcagtt

SEQ ID NO: 1856324 - DNA, 15 bp, Homo sapiens
gtgacgcctcagttt

SEQ ID NO: 1856325 - DNA, 15 bp, Homo sapiens
tgacgcctcagttta

SEQ ID NO: 1856326 - DNA, 15 bp, Homo sapiens
gacgcctcagtttac

SEQ ID NO: 1856327 - DNA, 15 bp, Homo sapiens
acgcctcagtttacc

SEQ ID NO: 1856328 - DNA, 15 bp, Homo sapiens
cgcctcagtttacct

SEQ ID NO: 1856329 - DNA, 15 bp, Homo sapiens
gcctcagtttacctg

SEQ ID NO: 1856330 - DNA, 15 bp, Homo sapiens
cctcagtttacctgg

SEQ ID NO: 1856331 - DNA, 15 bp, Homo sapiens
ctcagtttacctggc

SEQ ID NO: 1856332 - DNA, 15 bp, Homo sapiens
tcagtttacctggct

SEQ ID NO: 1856333 - DNA, 15 bp, Homo sapiens
cagtttacctggctg

SEQ ID NO: 1856334 - DNA, 15 bp, Homo sapiens
agtttacctggctgc

SEQ ID NO: 1856335 - DNA, 15 bp, Homo sapiens
gtttacctggctgcc

SEQ ID NO: 1856336 - DNA, 15 bp, Homo sapiens
tttacctggctgcct

SEQ ID NO: 1856337 - DNA, 15 bp, Homo sapiens
ttacctggctgccta

SEQ ID NO: 1856338 - DNA, 15 bp, Homo sapiens
tacctggctgcctat

SEQ ID NO: 1856339 - DNA, 15 bp, Homo sapiens
acctggctgcctatg

SEQ ID NO: 1856340 - DNA, 15 bp, Homo sapiens
cctggctgcctatgg

SEQ ID NO: 1856341 - DNA, 15 bp, Homo sapiens
ctggctgcctatgga

SEQ ID NO: 1856342 - DNA, 15 bp, Homo sapiens
tggctgcctatggaa

SEQ ID NO: 1856343 - DNA, 15 bp, Homo sapiens
ggctgcctatggaac

SEQ ID NO: 1856344 - DNA, 15 bp, Homo sapiens
gctgcctatggaaca

SEQ ID NO: 1856345 - DNA, 15 bp, Homo sapiens
ctgcctatggaacag

SEQ ID NO: 1856346 - DNA, 15 bp, Homo sapiens
tgcctatggaacagg

SEQ ID NO: 1856347 - DNA, 15 bp, Homo sapiens
gcctatggaacaggt

SEQ ID NO: 1856348 - DNA, 15 bp, Homo sapiens
cctatggaacaggta

SEQ ID NO: 1856349 - DNA, 15 bp, Homo sapiens
ctatggaacaggtat

SEQ ID NO: 1856350 - DNA, 15 bp, Homo sapiens
tatggaacaggtata

SEQ ID NO: 1856351 - DNA, 15 bp, Homo sapiens
atggaacaggtatac

SEQ ID NO: 1856352 - DNA, 15 bp, Homo sapiens
tggaacaggtatact

SEQ ID NO: 1856353 - DNA, 15 bp, Homo sapiens
ggaacaggtatactt

SEQ ID NO: 1856354 - DNA, 15 bp, Homo sapiens
gaacaggtatacttt

SEQ ID NO: 1856355 - DNA, 15 bp, Homo sapiens
aacaggtatactttg

SEQ ID NO: 1856356 - DNA, 15 bp, Homo sapiens
acaggtatactttgc

SEQ ID NO: 1856357 - DNA, 15 bp, Homo sapiens
caggtatactttgct

SEQ ID NO: 1856358 - DNA, 15 bp, Homo sapiens
aggtatactttgctt

SEQ ID NO: 1856359 - DNA, 15 bp, Homo sapiens
ggtatactttgcttc

SEQ ID NO: 1856360 - DNA, 15 bp, Homo sapiens
gtatactttgcttct

SEQ ID NO: 1856361 - DNA, 15 bp, Homo sapiens
tatactttgcttctt

SEQ ID NO: 1856362 - DNA, 15 bp, Homo sapiens
atactttgcttcttc

SEQ ID NO: 1856363 - DNA, 15 bp, Homo sapiens
tactttgcttcttca

SEQ ID NO: 1856364 - DNA, 15 bp, Homo sapiens
actttgcttcttcac

SEQ ID NO: 1856365 - DNA, 15 bp, Homo sapiens
ctttgcttcttcaca

SEQ ID NO: 1856366 - DNA, 15 bp, Homo sapiens
tttgcttcttcacag

SEQ ID NO: 1856367 - DNA, 15 bp, Homo sapiens
ttgcttcttcacagg

SEQ ID NO: 1856368 - DNA, 15 bp, Homo sapiens
tgcttcttcacaggg

SEQ ID NO: 1856369 - DNA, 15 bp, Homo sapiens
gcttcttcacagggg

SEQ ID NO: 1856370 - DNA, 15 bp, Homo sapiens
cttcttcacaggggt

SEQ ID NO: 1856371 - DNA, 15 bp, Homo sapiens
ttcttcacaggggtg

SEQ ID NO: 1856372 - DNA, 15 bp, Homo sapiens
tcttcacaggggtgg

SEQ ID NO: 1856373 - DNA, 15 bp, Homo sapiens
cttcacaggggtggt

SEQ ID NO: 1856374 - DNA, 15 bp, Homo sapiens
ttcacaggggtggta

SEQ ID NO: 1856375 - DNA, 15 bp, Homo sapiens
tcacaggggtggtag

SEQ ID NO: 1856376 - DNA, 15 bp, Homo sapiens
cacaggggtggtagg

SEQ ID NO: 1856377 - DNA, 15 bp, Homo sapiens
acaggggtggtaggg

SEQ ID NO: 1856378 - DNA, 15 bp, Homo sapiens
caggggtggtaggga

SEQ ID NO: 1856379 - DNA, 15 bp, Homo sapiens
aggggtggtagggag

SEQ ID NO: 1856380 - DNA, 15 bp, Homo sapiens
ggggtggtagggagg

SEQ ID NO: 1856381 - DNA, 15 bp, Homo sapiens
gggtggtagggaggc

SEQ ID NO: 1856382 - DNA, 15 bp, Homo sapiens
ggtggtagggaggct

SEQ ID NO: 1856383 - DNA, 15 bp, Homo sapiens
gtggtagggaggctt

SEQ ID NO: 1856384 - DNA, 15 bp, Homo sapiens
tggtagggaggctta

SEQ ID NO: 1856385 - DNA, 15 bp, Homo sapiens
ggtagggaggcttaa

SEQ ID NO: 1856386 - DNA, 15 bp, Homo sapiens
gtagggaggcttaat

SEQ ID NO: 1856387 - DNA, 15 bp, Homo sapiens
tagggaggcttaatt

SEQ ID NO: 1856388 - DNA, 15 bp, Homo sapiens
agggaggcttaatta

SEQ ID NO: 1856389 - DNA, 15 bp, Homo sapiens
gggaggcttaattaa

SEQ ID NO: 1856390 - DNA, 15 bp, Homo sapiens
ggaggcttaattaac

SEQ ID NO: 1856391 - DNA, 15 bp, Homo sapiens
gaggcttaattaacg

SEQ ID NO: 1856392 - DNA, 15 bp, Homo sapiens
aggcttaattaacgt

SEQ ID NO: 1856393 - DNA, 15 bp, Homo sapiens
ggcttaattaacgtt

SEQ ID NO: 1856394 - DNA, 15 bp, Homo sapiens
gcttaattaacgttt

SEQ ID NO: 1856395 - DNA, 15 bp, Homo sapiens
cttaattaacgtttg

SEQ ID NO: 1856396 - DNA, 15 bp, Homo sapiens
ttaattaacgtttgt

SEQ ID NO: 1856397 - DNA, 15 bp, Homo sapiens
taattaacgtttgta

SEQ ID NO: 1856398 - DNA, 15 bp, Homo sapiens
aattaacgtttgtaa

SEQ ID NO: 1856399 - DNA, 15 bp, Homo sapiens
attaacgtttgtaaa

SEQ ID NO: 1856400 - DNA, 15 bp, Homo sapiens
ttaacgtttgtaaat

SEQ ID NO: 1856401 - DNA, 15 bp, Homo sapiens
taacgtttgtaaatc

SEQ ID NO: 1856402 - DNA, 15 bp, Homo sapiens
aacgtttgtaaatcc

SEQ ID NO: 1856403 - DNA, 15 bp, Homo sapiens
acgtttgtaaatccc

SEQ ID NO: 1856404 - DNA, 15 bp, Homo sapiens
cgtttgtaaatccct

SEQ ID NO: 1856405 - DNA, 15 bp, Homo sapiens
gtttgtaaatccctc

SEQ ID NO: 1856406 - DNA, 15 bp, Homo sapiens
tttgtaaatccctct

SEQ ID NO: 1856407 - DNA, 15 bp, Homo sapiens
ttgtaaatccctctt

SEQ ID NO: 1856408 - DNA, 15 bp, Homo sapiens
tgtaaatccctcttg

SEQ ID NO: 1856409 - DNA, 15 bp, Homo sapiens
gtaaatccctcttga

SEQ ID NO: 1856410 - DNA, 15 bp, Homo sapiens
taaatccctcttgag

SEQ ID NO: 1856411 - DNA, 15 bp, Homo sapiens
aaatccctcttgaga

SEQ ID NO: 1856412 - DNA, 15 bp, Homo sapiens
aatccctcttgagat

SEQ ID NO: 1856413 - DNA, 15 bp, Homo sapiens
atccctcttgagatc

SEQ ID NO: 1856414 - DNA, 15 bp, Homo sapiens
tccctcttgagatca

SEQ ID NO: 1856415 - DNA, 15 bp, Homo sapiens
ccctcttgagatcaa

SEQ ID NO: 1856416 - DNA, 15 bp, Homo sapiens
cctcttgagatcaaa

SEQ ID NO: 1856417 - DNA, 15 bp, Homo sapiens
ctcttgagatcaaag

SEQ ID NO: 1856418 - DNA, 15 bp, Homo sapiens
tcttgagatcaaagc

SEQ ID NO: 1856419 - DNA, 15 bp, Homo sapiens
cttgagatcaaagcc

SEQ ID NO: 1856420 - DNA, 15 bp, Homo sapiens
ttgagatcaaagcca

SEQ ID NO: 1856421 - DNA, 15 bp, Homo sapiens
tgagatcaaagccac

SEQ ID NO: 1856422 - DNA, 15 bp, Homo sapiens
gagatcaaagccact

SEQ ID NO: 1856423 - DNA, 15 bp, Homo sapiens
agatcaaagccactg

SEQ ID NO: 1856424 - DNA, 15 bp, Homo sapiens
gatcaaagccactgc

SEQ ID NO: 1856425 - DNA, 15 bp, Homo sapiens
atcaaagccactgca

SEQ ID NO: 1856426 - DNA, 15 bp, Homo sapiens
tcaaagccactgcag

SEQ ID NO: 1856427 - DNA, 15 bp, Homo sapiens
caaagccactgcaga

SEQ ID NO: 1856428 - DNA, 15 bp, Homo sapiens
aaagccactgcagaa

SEQ ID NO: 1856429 - DNA, 15 bp, Homo sapiens
aagccactgcagaag

SEQ ID NO: 1856430 - DNA, 15 bp, Homo sapiens
agccactgcagaagg

SEQ ID NO: 1856431 - DNA, 15 bp, Homo sapiens
gccactgcagaaggg

SEQ ID NO: 1856432 - DNA, 15 bp, Homo sapiens
ccactgcagaagggc

SEQ ID NO: 1856433 - DNA, 15 bp, Homo sapiens
cactgcagaagggca

SEQ ID NO: 1856434 - DNA, 15 bp, Homo sapiens
actgcagaagggcag

SEQ ID NO: 1856435 - DNA, 15 bp, Homo sapiens
ctgcagaagggcaga

SEQ ID NO: 1856436 - DNA, 15 bp, Homo sapiens
tgcagaagggcagag

SEQ ID NO: 1856437 - DNA, 15 bp, Homo sapiens
gcagaagggcagagc

SEQ ID NO: 1856438 - DNA, 15 bp, Homo sapiens
cagaagggcagagca

SEQ ID NO: 1856439 - DNA, 15 bp, Homo sapiens
agaagggcagagcac

SEQ ID NO: 1856440 - DNA, 15 bp, Homo sapiens
gaagggcagagcacc

SEQ ID NO: 1856441 - DNA, 15 bp, Homo sapiens
aagggcagagcacca

SEQ ID NO: 1856442 - DNA, 15 bp, Homo sapiens
agggcagagcaccat

SEQ ID NO: 1856443 - DNA, 15 bp, Homo sapiens
gggcagagcaccatt

SEQ ID NO: 1856444 - DNA, 15 bp, Homo sapiens
ggcagagcaccattt

SEQ ID NO: 1856445 - DNA, 15 bp, Homo sapiens
gcagagcaccatttc

SEQ ID NO: 1856446 - DNA, 15 bp, Homo sapiens
cagagcaccatttca

SEQ ID NO: 1856447 - DNA, 15 bp, Homo sapiens
agagcaccatttcac

SEQ ID NO: 1856448 - DNA, 15 bp, Homo sapiens
gagcaccatttcaca

SEQ ID NO: 1856449 - DNA, 15 bp, Homo sapiens
agcaccatttcacaa

SEQ ID NO: 1856450 - DNA, 15 bp, Homo sapiens
gcaccatttcacaaa

SEQ ID NO: 1856451 - DNA, 15 bp, Homo sapiens
caccatttcacaaaa

SEQ ID NO: 1856452 - DNA, 15 bp, Homo sapiens
accatttcacaaaaa

SEQ ID NO: 1856453 - DNA, 15 bp, Homo sapiens
ccatttcacaaaaat

SEQ ID NO: 1856454 - DNA, 15 bp, Homo sapiens
catttcacaaaaatg

SEQ ID NO: 1856455 - DNA, 15 bp, Homo sapiens
atttcacaaaaatgc

SEQ ID NO: 1856456 - DNA, 15 bp, Homo sapiens
tttcacaaaaatgct

SEQ ID NO: 1856457 - DNA, 15 bp, Homo sapiens
ttcacaaaaatgctt

SEQ ID NO: 1856458 - DNA, 15 bp, Homo sapiens
tcacaaaaatgcttg

SEQ ID NO: 1856459 - DNA, 15 bp, Homo sapiens
cacaaaaatgcttgt

SEQ ID NO: 1856460 - DNA, 15 bp, Homo sapiens
acaaaaatgcttgtg

SEQ ID NO: 1856461 - DNA, 15 bp, Homo sapiens
caaaaatgcttgtgg

SEQ ID NO: 1856462 - DNA, 15 bp, Homo sapiens
aaaaatgcttgtggt

SEQ ID NO: 1856463 - DNA, 15 bp, Homo sapiens
aaaatgcttgtggtt

SEQ ID NO: 1856464 - DNA, 15 bp, Homo sapiens
aaatgcttgtggttg

SEQ ID NO: 1856465 - DNA, 15 bp, Homo sapiens
aatgcttgtggttgc

SEQ ID NO: 1856466 - DNA, 15 bp, Homo sapiens
atgcttgtggttgcc

SEQ ID NO: 1856467 - DNA, 15 bp, Homo sapiens
tgcttgtggttgcct

SEQ ID NO: 1856468 - DNA, 15 bp, Homo sapiens
gcttgtggttgcctg

SEQ ID NO: 1856469 - DNA, 15 bp, Homo sapiens
cttgtggttgcctgt

SEQ ID NO: 1856470 - DNA, 15 bp, Homo sapiens
ttgtggttgcctgtg

SEQ ID NO: 1856471 - DNA, 15 bp, Homo sapiens
tgtggttgcctgtgt

SEQ ID NO: 1856472 - DNA, 15 bp, Homo sapiens
gtggttgcctgtgtg

SEQ ID NO: 1856473 - DNA, 15 bp, Homo sapiens
tggttgcctgtgtgg

SEQ ID NO: 1856474 - DNA, 15 bp, Homo sapiens
ggttgcctgtgtgga

SEQ ID NO: 1856475 - DNA, 15 bp, Homo sapiens
gttgcctgtgtggag

SEQ ID NO: 1856476 - DNA, 15 bp, Homo sapiens
ttgcctgtgtggagc

SEQ ID NO: 1856477 - DNA, 15 bp, Homo sapiens
tgcctgtgtggagct

SEQ ID NO: 1856478 - DNA, 15 bp, Homo sapiens
gcctgtgtggagctg

SEQ ID NO: 1856479 - DNA, 15 bp, Homo sapiens
cctgtgtggagctgg

SEQ ID NO: 1856480 - DNA, 15 bp, Homo sapiens
ctgtgtggagctggc

SEQ ID NO: 1856481 - DNA, 15 bp, Homo sapiens
tgtgtggagctggct

SEQ ID NO: 1856482 - DNA, 15 bp, Homo sapiens
gtgtggagctggctt

SEQ ID NO: 1856483 - DNA, 15 bp, Homo sapiens
tgtggagctggctta

SEQ ID NO: 1856484 - DNA, 15 bp, Homo sapiens
gtggagctggcttac

SEQ ID NO: 1856485 - DNA, 15 bp, Homo sapiens
tggagctggcttacc

SEQ ID NO: 1856486 - DNA, 15 bp, Homo sapiens
ggagctggcttacct

SEQ ID NO: 1856487 - DNA, 15 bp, Homo sapiens
gagctggcttacctt

SEQ ID NO: 1856488 - DNA, 15 bp, Homo sapiens
agctggcttaccttt

SEQ ID NO: 1856489 - DNA, 15 bp, Homo sapiens
gctggcttacctttg

SEQ ID NO: 1856490 - DNA, 15 bp, Homo sapiens
ctggcttacctttga

SEQ ID NO: 1856491 - DNA, 15 bp, Homo sapiens
tggcttacctttgat

SEQ ID NO: 1856492 - DNA, 15 bp, Homo sapiens
ggcttacctttgatc

SEQ ID NO: 1856493 - DNA, 15 bp, Homo sapiens
gcttacctttgatct

SEQ ID NO: 1856494 - DNA, 15 bp, Homo sapiens
cttacctttgatctg

SEQ ID NO: 1856495 - DNA, 15 bp, Homo sapiens
ttacctttgatctga

SEQ ID NO: 1856496 - DNA, 15 bp, Homo sapiens
tacctttgatctgag

SEQ ID NO: 1856497 - DNA, 15 bp, Homo sapiens
acctttgatctgaga

SEQ ID NO: 1856498 - DNA, 15 bp, Homo sapiens
cctttgatctgagat

SEQ ID NO: 1856499 - DNA, 15 bp, Homo sapiens
ctttgatctgagatg

SEQ ID NO: 1856500 - DNA, 15 bp, Homo sapiens
tttgatctgagatgg

SEQ ID NO: 1856501 - DNA, 15 bp, Homo sapiens
ttgatctgagatggg

SEQ ID NO: 1856502 - DNA, 15 bp, Homo sapiens
tgatctgagatgggc

SEQ ID NO: 1856503 - DNA, 15 bp, Homo sapiens
gatctgagatgggct

SEQ ID NO: 1856504 - DNA, 15 bp, Homo sapiens
atctgagatgggctg

SEQ ID NO: 1856505 - DNA, 15 bp, Homo sapiens
tctgagatgggctga

SEQ ID NO: 1856506 - DNA, 15 bp, Homo sapiens
ctgagatgggctgac

SEQ ID NO: 1856507 - DNA, 15 bp, Homo sapiens
tgagatgggctgaca

SEQ ID NO: 1856508 - DNA, 15 bp, Homo sapiens
gagatgggctgacac

SEQ ID NO: 1856509 - DNA, 15 bp, Homo sapiens
agatgggctgacacc

SEQ ID NO: 1856510 - DNA, 15 bp, Homo sapiens
gatgggctgacaccc

SEQ ID NO: 1856511 - DNA, 15 bp, Homo sapiens
atgggctgacaccct

SEQ ID NO: 1856512 - DNA, 15 bp, Homo sapiens
tgggctgacaccctg

SEQ ID NO: 1856513 - DNA, 15 bp, Homo sapiens
gggctgacaccctga

SEQ ID NO: 1856514 - DNA, 15 bp, Homo sapiens
ggctgacaccctgaa

SEQ ID NO: 1856515 - DNA, 15 bp, Homo sapiens
gctgacaccctgaat

SEQ ID NO: 1856516 - DNA, 15 bp, Homo sapiens
ctgacaccctgaatg

SEQ ID NO: 1856517 - DNA, 15 bp, Homo sapiens
tgacaccctgaatgt

SEQ ID NO: 1856518 - DNA, 15 bp, Homo sapiens
gacaccctgaatgtg

SEQ ID NO: 1856519 - DNA, 15 bp, Homo sapiens
acaccctgaatgtgg

SEQ ID NO: 1856520 - DNA, 15 bp, Homo sapiens
caccctgaatgtggt

SEQ ID NO: 1856521 - DNA, 15 bp, Homo sapiens
accctgaatgtggtc

SEQ ID NO: 1856522 - DNA, 15 bp, Homo sapiens
ccctgaatgtggtct

SEQ ID NO: 1856523 - DNA, 15 bp, Homo sapiens
cctgaatgtggtctc

SEQ ID NO: 1856524 - DNA, 15 bp, Homo sapiens
ctgaatgtggtctca

SEQ ID NO: 1856525 - DNA, 15 bp, Homo sapiens
tgaatgtggtctcag

SEQ ID NO: 1856526 - DNA, 15 bp, Homo sapiens
gaatgtggtctcagc

SEQ ID NO: 1856527 - DNA, 15 bp, Homo sapiens
aatgtggtctcagct

SEQ ID NO: 1856528 - DNA, 15 bp, Homo sapiens
atgtggtctcagctc

SEQ ID NO: 1856529 - DNA, 15 bp, Homo sapiens
tgtggtctcagctct

SEQ ID NO: 1856530 - DNA, 15 bp, Homo sapiens
gtggtctcagctctg

SEQ ID NO: 1856531 - DNA, 15 bp, Homo sapiens
tggtctcagctctgc

SEQ ID NO: 1856532 - DNA, 15 bp, Homo sapiens
ggtctcagctctgct

SEQ ID NO: 1856533 - DNA, 15 bp, Homo sapiens
gtctcagctctgctc

SEQ ID NO: 1856534 - DNA, 15 bp, Homo sapiens
tctcagctctgctct

SEQ ID NO: 1856535 - DNA, 15 bp, Homo sapiens
ctcagctctgctctg

SEQ ID NO: 1856536 - DNA, 15 bp, Homo sapiens
tcagctctgctctga

SEQ ID NO: 1856537 - DNA, 15 bp, Homo sapiens
cagctctgctctgag

SEQ ID NO: 1856538 - DNA, 15 bp, Homo sapiens
agctctgctctgaga

SEQ ID NO: 1856539 - DNA, 15 bp, Homo sapiens
gctctgctctgagat

SEQ ID NO: 1856540 - DNA, 15 bp, Homo sapiens
ctctgctctgagatg

SEQ ID NO: 1856541 - DNA, 15 bp, Homo sapiens
tctgctctgagatgc

SEQ ID NO: 1856542 - DNA, 15 bp, Homo sapiens
ctgctctgagatgcc

SEQ ID NO: 1856543 - DNA, 15 bp, Homo sapiens
tgctctgagatgccc

SEQ ID NO: 1856544 - DNA, 15 bp, Homo sapiens
gctctgagatgcccg

SEQ ID NO: 1856545 - DNA, 15 bp, Homo sapiens
ctctgagatgcccgg

SEQ ID NO: 1856546 - DNA, 15 bp, Homo sapiens
tctgagatgcccggc

SEQ ID NO: 1856547 - DNA, 15 bp, Homo sapiens
ctgagatgcccggct

SEQ ID NO: 1856548 - DNA, 15 bp, Homo sapiens
tgagatgcccggctt

SEQ ID NO: 1856549 - DNA, 15 bp, Homo sapiens
gagatgcccggcttt

SEQ ID NO: 1856550 - DNA, 15 bp, Homo sapiens
agatgcccggctttt

SEQ ID NO: 1856551 - DNA, 15 bp, Homo sapiens
gatgcccggcttttc

SEQ ID NO: 1856552 - DNA, 15 bp, Homo sapiens
atgcccggcttttcc

SEQ ID NO: 1856553 - DNA, 15 bp, Homo sapiens
tgcccggcttttcct

SEQ ID NO: 1856554 - DNA, 15 bp, Homo sapiens
gcccggcttttcctt

SEQ ID NO: 1856555 - DNA, 15 bp, Homo sapiens
cccggcttttccttt

SEQ ID NO: 1856556 - DNA, 15 bp, Homo sapiens
ccggcttttcctttg

SEQ ID NO: 1856557 - DNA, 15 bp, Homo sapiens
cggcttttcctttga

SEQ ID NO: 1856558 - DNA, 15 bp, Homo sapiens
ggcttttcctttgaa

SEQ ID NO: 1856559 - DNA, 15 bp, Homo sapiens
gcttttcctttgaaa

SEQ ID NO: 1856560 - DNA, 15 bp, Homo sapiens
cttttcctttgaaac

SEQ ID NO: 1856561 - DNA, 15 bp, Homo sapiens
ttttcctttgaaaca

SEQ ID NO: 1856562 - DNA, 15 bp, Homo sapiens
tttcctttgaaacac

SEQ ID NO: 1856563 - DNA, 15 bp, Homo sapiens
ttcctttgaaacaca

SEQ ID NO: 1856564 - DNA, 15 bp, Homo sapiens
tcctttgaaacacac

SEQ ID NO: 1856565 - DNA, 15 bp, Homo sapiens
cctttgaaacacacc

SEQ ID NO: 1856566 - DNA, 15 bp, Homo sapiens
ctttgaaacacacct

SEQ ID NO: 1856567 - DNA, 15 bp, Homo sapiens
tttgaaacacacctt

SEQ ID NO: 1856568 - DNA, 15 bp, Homo sapiens
ttgaaacacaccttg

SEQ ID NO: 1856569 - DNA, 15 bp, Homo sapiens
tgaaacacaccttgc

SEQ ID NO: 1856570 - DNA, 15 bp, Homo sapiens
gaaacacaccttgcc

SEQ ID NO: 1856571 - DNA, 15 bp, Homo sapiens
aaacacaccttgccc

SEQ ID NO: 1856572 - DNA, 15 bp, Homo sapiens
aacacaccttgcccc

SEQ ID NO: 1856573 - DNA, 15 bp, Homo sapiens
acacaccttgcccct

SEQ ID NO: 1856574 - DNA, 15 bp, Homo sapiens
cacaccttgcccctg

SEQ ID NO: 1856575 - DNA, 15 bp, Homo sapiens
acaccttgcccctgg

SEQ ID NO: 1856576 - DNA, 15 bp, Homo sapiens
caccttgcccctggg

SEQ ID NO: 1856577 - DNA, 15 bp, Homo sapiens
accttgcccctggga

SEQ ID NO: 1856578 - DNA, 15 bp, Homo sapiens
ccttgcccctgggat

SEQ ID NO: 1856579 - DNA, 15 bp, Homo sapiens
cttgcccctgggatt

SEQ ID NO: 1856580 - DNA, 15 bp, Homo sapiens
ttgcccctgggattc

SEQ ID NO: 1856581 - DNA, 15 bp, Homo sapiens
tgcccctgggattct

SEQ ID NO: 1856582 - DNA, 15 bp, Homo sapiens
gcccctgggattctg

SEQ ID NO: 1856583 - DNA, 15 bp, Homo sapiens
cccctgggattctgc

SEQ ID NO: 1856584 - DNA, 15 bp, Homo sapiens
ccctgggattctgcc

SEQ ID NO: 1856585 - DNA, 15 bp, Homo sapiens
cctgggattctgcca

SEQ ID NO: 1856586 - DNA, 15 bp, Homo sapiens
ctgggattctgccag

SEQ ID NO: 1856587 - DNA, 15 bp, Homo sapiens
tgggattctgccagc

SEQ ID NO: 1856588 - DNA, 15 bp, Homo sapiens
gggattctgccagcc

SEQ ID NO: 1856589 - DNA, 15 bp, Homo sapiens
ggattctgccagcca

SEQ ID NO: 1856590 - DNA, 15 bp, Homo sapiens
gattctgccagccaa

SEQ ID NO: 1856591 - DNA, 15 bp, Homo sapiens
attctgccagccaaa

SEQ ID NO: 1856592 - DNA, 15 bp, Homo sapiens
ttctgccagccaaag

SEQ ID NO: 1856593 - DNA, 15 bp, Homo sapiens
tctgccagccaaagg

SEQ ID NO: 1856594 - DNA, 15 bp, Homo sapiens
ctgccagccaaaggt

SEQ ID NO: 1856595 - DNA, 15 bp, Homo sapiens
tgccagccaaaggtg

SEQ ID NO: 1856596 - DNA, 15 bp, Homo sapiens
gccagccaaaggtgg

SEQ ID NO: 1856597 - DNA, 15 bp, Homo sapiens
ccagccaaaggtggc

SEQ ID NO: 1856598 - DNA, 15 bp, Homo sapiens
cagccaaaggtggcg

SEQ ID NO: 1856599 - DNA, 15 bp, Homo sapiens
agccaaaggtggcgg

SEQ ID NO: 1856600 - DNA, 15 bp, Homo sapiens
gccaaaggtggcggg

SEQ ID NO: 1856601 - DNA, 15 bp, Homo sapiens
ccaaaggtggcgggg

SEQ ID NO: 1856602 - DNA, 15 bp, Homo sapiens
caaaggtggcgggga

SEQ ID NO: 1856603 - DNA, 15 bp, Homo sapiens
aaaggtggcggggag

SEQ ID NO: 1856604 - DNA, 15 bp, Homo sapiens
aaggtggcggggagt

SEQ ID NO: 1856605 - DNA, 15 bp, Homo sapiens
aggtggcggggagtg

SEQ ID NO: 1856606 - DNA, 15 bp, Homo sapiens
ggtggcggggagtgg

SEQ ID NO: 1856607 - DNA, 15 bp, Homo sapiens
gtggcggggagtggc

SEQ ID NO: 1856608 - DNA, 15 bp, Homo sapiens
tggcggggagtggct

SEQ ID NO: 1856609 - DNA, 15 bp, Homo sapiens
ggcggggagtggctg

SEQ ID NO: 1856610 - DNA, 15 bp, Homo sapiens
gcggggagtggctgt

SEQ ID NO: 1856611 - DNA, 15 bp, Homo sapiens
cggggagtggctgtg

SEQ ID NO: 1856612 - DNA, 15 bp, Homo sapiens
ggggagtggctgtgg

SEQ ID NO: 1856613 - DNA, 15 bp, Homo sapiens
gggagtggctgtgga

SEQ ID NO: 1856614 - DNA, 15 bp, Homo sapiens
ggagtggctgtggat

SEQ ID NO: 1856615 - DNA, 15 bp, Homo sapiens
gagtggctgtggata

SEQ ID NO: 1856616 - DNA, 15 bp, Homo sapiens
agtggctgtggataa

SEQ ID NO: 1856617 - DNA, 15 bp, Homo sapiens
gtggctgtggataag

SEQ ID NO: 1856618 - DNA, 15 bp, Homo sapiens
tggctgtggataagt

SEQ ID NO: 1856619 - DNA, 15 bp, Homo sapiens
ggctgtggataagtc

SEQ ID NO: 1856620 - DNA, 15 bp, Homo sapiens
gctgtggataagtca

SEQ ID NO: 1856621 - DNA, 15 bp, Homo sapiens
ctgtggataagtcat

SEQ ID NO: 1856622 - DNA, 15 bp, Homo sapiens
tgtggataagtcatt

SEQ ID NO: 1856623 - DNA, 15 bp, Homo sapiens
gtggataagtcatta

SEQ ID NO: 1856624 - DNA, 15 bp, Homo sapiens
tggataagtcattat

SEQ ID NO: 1856625 - DNA, 15 bp, Homo sapiens
ggataagtcattatg

SEQ ID NO: 1856626 - DNA, 15 bp, Homo sapiens
gataagtcattatgt

SEQ ID NO: 1856627 - DNA, 15 bp, Homo sapiens
ataagtcattatgtt

SEQ ID NO: 1856628 - DNA, 15 bp, Homo sapiens
taagtcattatgttt

SEQ ID NO: 1856629 - DNA, 15 bp, Homo sapiens
aagtcattatgttta

SEQ ID NO: 1856630 - DNA, 15 bp, Homo sapiens
agtcattatgtttaa

SEQ ID NO: 1856631 - DNA, 15 bp, Homo sapiens
gtcattatgtttaat

SEQ ID NO: 1856632 - DNA, 15 bp, Homo sapiens
tcattatgtttaatg

SEQ ID NO: 1856633 - DNA, 15 bp, Homo sapiens
cattatgtttaatgt

SEQ ID NO: 1856634 - DNA, 15 bp, Homo sapiens
attatgtttaatgtg

SEQ ID NO: 1856635 - DNA, 15 bp, Homo sapiens
ttatgtttaatgtgg

SEQ ID NO: 1856636 - DNA, 15 bp, Homo sapiens
tatgtttaatgtggg

SEQ ID NO: 1856637 - DNA, 15 bp, Homo sapiens
atgtttaatgtgggg

SEQ ID NO: 1856638 - DNA, 15 bp, Homo sapiens
tgtttaatgtggggg

SEQ ID NO: 1856639 - DNA, 15 bp, Homo sapiens
gtttaatgtgggggt

SEQ ID NO: 1856640 - DNA, 15 bp, Homo sapiens
tttaatgtgggggtg

SEQ ID NO: 1856641 - DNA, 15 bp, Homo sapiens
ttaatgtgggggtgt

SEQ ID NO: 1856642 - DNA, 15 bp, Homo sapiens
taatgtgggggtgtc

SEQ ID NO: 1856643 - DNA, 15 bp, Homo sapiens
aatgtgggggtgtct

SEQ ID NO: 1856644 - DNA, 15 bp, Homo sapiens
atgtgggggtgtctt

SEQ ID NO: 1856645 - DNA, 15 bp, Homo sapiens
tgtgggggtgtcttc

SEQ ID NO: 1856646 - DNA, 15 bp, Homo sapiens
gtgggggtgtcttcc

SEQ ID NO: 1856647 - DNA, 15 bp, Homo sapiens
tgggggtgtcttcca

SEQ ID NO: 1856648 - DNA, 15 bp, Homo sapiens
gggggtgtcttccat

SEQ ID NO: 1856649 - DNA, 15 bp, Homo sapiens
ggggtgtcttccatc

SEQ ID NO: 1856650 - DNA, 15 bp, Homo sapiens
gggtgtcttccatct

SEQ ID NO: 1856651 - DNA, 15 bp, Homo sapiens
ggtgtcttccatctg

SEQ ID NO: 1856652 - DNA, 15 bp, Homo sapiens
gtgtcttccatctgg

SEQ ID NO: 1856653 - DNA, 15 bp, Homo sapiens
tgtcttccatctggg

SEQ ID NO: 1856654 - DNA, 15 bp, Homo sapiens
gtcttccatctggga

SEQ ID NO: 1856655 - DNA, 15 bp, Homo sapiens
tcttccatctgggag

SEQ ID NO: 1856656 - DNA, 15 bp, Homo sapiens
cttccatctgggagg

SEQ ID NO: 1856657 - DNA, 15 bp, Homo sapiens
ttccatctgggagga

SEQ ID NO: 1856658 - DNA, 15 bp, Homo sapiens
tccatctgggaggag

SEQ ID NO: 1856659 - DNA, 15 bp, Homo sapiens
ccatctgggaggagt

SEQ ID NO: 1856660 - DNA, 15 bp, Homo sapiens
catctgggaggagtg

SEQ ID NO: 1856661 - DNA, 15 bp, Homo sapiens
atctgggaggagtgg

SEQ ID NO: 1856662 - DNA, 15 bp, Homo sapiens
tctgggaggagtggg

SEQ ID NO: 1856663 - DNA, 15 bp, Homo sapiens
ctgggaggagtgggt

SEQ ID NO: 1856664 - DNA, 15 bp, Homo sapiens
tgggaggagtgggtg

SEQ ID NO: 1856665 - DNA, 15 bp, Homo sapiens
gggaggagtgggtgg

SEQ ID NO: 1856666 - DNA, 15 bp, Homo sapiens
ggaggagtgggtgga

SEQ ID NO: 1856667 - DNA, 15 bp, Homo sapiens
gaggagtgggtggag

SEQ ID NO: 1856668 - DNA, 15 bp, Homo sapiens
aggagtgggtggagg

SEQ ID NO: 1856669 - DNA, 15 bp, Homo sapiens
ggagtgggtggagga

SEQ ID NO: 1856670 - DNA, 15 bp, Homo sapiens
gagtgggtggaggag

SEQ ID NO: 1856671 - DNA, 15 bp, Homo sapiens
agtgggtggaggaga

SEQ ID NO: 1856672 - DNA, 15 bp, Homo sapiens
gtgggtggaggagag

SEQ ID NO: 1856673 - DNA, 15 bp, Homo sapiens
tgggtggaggagagg

SEQ ID NO: 1856674 - DNA, 15 bp, Homo sapiens
gggtggaggagaggg

SEQ ID NO: 1856675 - DNA, 15 bp, Homo sapiens
ggtggaggagagggt

SEQ ID NO: 1856676 - DNA, 15 bp, Homo sapiens
gtggaggagagggtt

SEQ ID NO: 1856677 - DNA, 15 bp, Homo sapiens
tggaggagagggttg

SEQ ID NO: 1856678 - DNA, 15 bp, Homo sapiens
ggaggagagggttga

SEQ ID NO: 1856679 - DNA, 15 bp, Homo sapiens
gaggagagggttgag

SEQ ID NO: 1856680 - DNA, 15 bp, Homo sapiens
aggagagggttgaga

SEQ ID NO: 1856681 - DNA, 15 bp, Homo sapiens
ggagagggttgagaa

SEQ ID NO: 1856682 - DNA, 15 bp, Homo sapiens
gagagggttgagaag

SEQ ID NO: 1856683 - DNA, 15 bp, Homo sapiens
agagggttgagaagc

SEQ ID NO: 1856684 - DNA, 15 bp, Homo sapiens
gagggttgagaagcc

SEQ ID NO: 1856685 - DNA, 15 bp, Homo sapiens
agggttgagaagcct

SEQ ID NO: 1856686 - DNA, 15 bp, Homo sapiens
gggttgagaagccta

SEQ ID NO: 1856687 - DNA, 15 bp, Homo sapiens
ggttgagaagcctat

SEQ ID NO: 1856688 - DNA, 15 bp, Homo sapiens
gttgagaagcctatc

SEQ ID NO: 1856689 - DNA, 15 bp, Homo sapiens
ttgagaagcctatct

SEQ ID NO: 1856690 - DNA, 15 bp, Homo sapiens
tgagaagcctatctc

SEQ ID NO: 1856691 - DNA, 15 bp, Homo sapiens
gagaagcctatctct

SEQ ID NO: 1856692 - DNA, 15 bp, Homo sapiens
agaagcctatctcta

SEQ ID NO: 1856693 - DNA, 15 bp, Homo sapiens
gaagcctatctctag

SEQ ID NO: 1856694 - DNA, 15 bp, Homo sapiens
aagcctatctctaga

SEQ ID NO: 1856695 - DNA, 15 bp, Homo sapiens
agcctatctctagaa

SEQ ID NO: 1856696 - DNA, 15 bp, Homo sapiens
gcctatctctagaaa

SEQ ID NO: 1856697 - DNA, 15 bp, Homo sapiens
cctatctctagaaaa

SEQ ID NO: 1856698 - DNA, 15 bp, Homo sapiens
ctatctctagaaaat

SEQ ID NO: 1856699 - DNA, 15 bp, Homo sapiens
tatctctagaaaatg

SEQ ID NO: 1856700 - DNA, 15 bp, Homo sapiens
atctctagaaaatga

SEQ ID NO: 1856701 - DNA, 15 bp, Homo sapiens
tctctagaaaatgat

SEQ ID NO: 1856702 - DNA, 15 bp, Homo sapiens
ctctagaaaatgatg

SEQ ID NO: 1856703 - DNA, 15 bp, Homo sapiens
tctagaaaatgatga

SEQ ID NO: 1856704 - DNA, 15 bp, Homo sapiens
tagaaaatgatgaag

SEQ ID NO: 1856705 - DNA, 15 bp, Homo sapiens
agaaaatgatgaagg

SEQ ID NO: 1856706 - DNA, 15 bp, Homo sapiens
gaaaatgatgaaggc

SEQ ID NO: 1856707 - DNA, 15 bp, Homo sapiens
aaaatgatgaaggcc

SEQ ID NO: 1856708 - DNA, 15 bp, Homo sapiens
aaatgatgaaggcca

SEQ ID NO: 1856709 - DNA, 15 bp, Homo sapiens
aatgatgaaggccat

SEQ ID NO: 1856710 - DNA, 15 bp, Homo sapiens
atgatgaaggccatc

SEQ ID NO: 1856711 - DNA, 15 bp, Homo sapiens
tgatgaaggccatca

SEQ ID NO: 1856712 - DNA, 15 bp, Homo sapiens
gatgaaggccatcaa

SEQ ID NO: 1856713 - DNA, 15 bp, Homo sapiens
atgaaggccatcaaa

SEQ ID NO: 1856714 - DNA, 15 bp, Homo sapiens
tgaaggccatcaaaa

SEQ ID NO: 1856715 - DNA, 15 bp, Homo sapiens
gaaggccatcaaaat

SEQ ID NO: 1856716 - DNA, 15 bp, Homo sapiens
aaggccatcaaaatg

SEQ ID NO: 1856717 - DNA, 15 bp, Homo sapiens
aggccatcaaaatgg

SEQ ID NO: 1856718 - DNA, 15 bp, Homo sapiens
ggccatcaaaatggt

SEQ ID NO: 1856719 - DNA, 15 bp, Homo sapiens
gccatcaaaatggtt

SEQ ID NO: 1856720 - DNA, 15 bp, Homo sapiens
ccatcaaaatggttt

SEQ ID NO: 1856721 - DNA, 15 bp, Homo sapiens
catcaaaatggttta

SEQ ID NO: 1856722 - DNA, 15 bp, Homo sapiens
atcaaaatggtttag

SEQ ID NO: 1856723 - DNA, 15 bp, Homo sapiens
tcaaaatggtttaga

SEQ ID NO: 1856724 - DNA, 15 bp, Homo sapiens
caaaatggtttagaa

SEQ ID NO: 1856725 - DNA, 15 bp, Homo sapiens
aaaatggtttagaaa

SEQ ID NO: 1856726 - DNA, 15 bp, Homo sapiens
aaatggtttagaaag

SEQ ID NO: 1856727 - DNA, 15 bp, Homo sapiens
aatggtttagaaagt

SEQ ID NO: 1856728 - DNA, 15 bp, Homo sapiens
atggtttagaaagtg

SEQ ID NO: 1856729 - DNA, 15 bp, Homo sapiens
tggtttagaaagtgc

SEQ ID NO: 1856730 - DNA, 15 bp, Homo sapiens
ggtttagaaagtgca

SEQ ID NO: 1856731 - DNA, 15 bp, Homo sapiens
gtttagaaagtgcag

SEQ ID NO: 1856732 - DNA, 15 bp, Homo sapiens
tttagaaagtgcagg

SEQ ID NO: 1856733 - DNA, 15 bp, Homo sapiens
ttagaaagtgcaggg

SEQ ID NO: 1856734 - DNA, 15 bp, Homo sapiens
tagaaagtgcagggt

SEQ ID NO: 1856735 - DNA, 15 bp, Homo sapiens
agaaagtgcagggta

SEQ ID NO: 1856736 - DNA, 15 bp, Homo sapiens
gaaagtgcagggtat

SEQ ID NO: 1856737 - DNA, 15 bp, Homo sapiens
aaagtgcagggtata

SEQ ID NO: 1856738 - DNA, 15 bp, Homo sapiens
aagtgcagggtatac

SEQ ID NO: 1856739 - DNA, 15 bp, Homo sapiens
agtgcagggtataca

SEQ ID NO: 1856740 - DNA, 15 bp, Homo sapiens
gtgcagggtatacac

SEQ ID NO: 1856741 - DNA, 15 bp, Homo sapiens
tgcagggtatacacc

SEQ ID NO: 1856742 - DNA, 15 bp, Homo sapiens
gcagggtatacacca

SEQ ID NO: 1856743 - DNA, 15 bp, Homo sapiens
cagggtatacaccat

SEQ ID NO: 1856744 - DNA, 15 bp, Homo sapiens
agggtatacaccatt

SEQ ID NO: 1856745 - DNA, 15 bp, Homo sapiens
gggtatacaccattt

SEQ ID NO: 1856746 - DNA, 15 bp, Homo sapiens
ggtatacaccattta

SEQ ID NO: 1856747 - DNA, 15 bp, Homo sapiens
gtatacaccatttaa

SEQ ID NO: 1856748 - DNA, 15 bp, Homo sapiens
tatacaccatttaac

SEQ ID NO: 1856749 - DNA, 15 bp, Homo sapiens
atacaccatttaaca

SEQ ID NO: 1856750 - DNA, 15 bp, Homo sapiens
tacaccatttaacaa

SEQ ID NO: 1856751 - DNA, 15 bp, Homo sapiens
acaccatttaacaag

SEQ ID NO: 1856752 - DNA, 15 bp, Homo sapiens
caccatttaacaagt

SEQ ID NO: 1856753 - DNA, 15 bp, Homo sapiens
accatttaacaagta

SEQ ID NO: 1856754 - DNA, 15 bp, Homo sapiens
ccatttaacaagtaa

SEQ ID NO: 1856755 - DNA, 15 bp, Homo sapiens
catttaacaagtaac

SEQ ID NO: 1856756 - DNA, 15 bp, Homo sapiens
atttaacaagtaact

SEQ ID NO: 1856757 - DNA, 15 bp, Homo sapiens
tttaacaagtaactc

SEQ ID NO: 1856758 - DNA, 15 bp, Homo sapiens
ttaacaagtaactcc

SEQ ID NO: 1856759 - DNA, 15 bp, Homo sapiens
taacaagtaactcca

SEQ ID NO: 1856760 - DNA, 15 bp, Homo sapiens
aacaagtaactccat

SEQ ID NO: 1856761 - DNA, 15 bp, Homo sapiens
acaagtaactccatt

SEQ ID NO: 1856762 - DNA, 15 bp, Homo sapiens
caagtaactccattt

SEQ ID NO: 1856763 - DNA, 15 bp, Homo sapiens
aagtaactccatttc

SEQ ID NO: 1856764 - DNA, 15 bp, Homo sapiens
agtaactccatttcc

SEQ ID NO: 1856765 - DNA, 15 bp, Homo sapiens
gtaactccatttcct

SEQ ID NO: 1856766 - DNA, 15 bp, Homo sapiens
taactccatttcctg

SEQ ID NO: 1856767 - DNA, 15 bp, Homo sapiens
aactccatttcctgc

SEQ ID NO: 1856768 - DNA, 15 bp, Homo sapiens
actccatttcctgcc

SEQ ID NO: 1856769 - DNA, 15 bp, Homo sapiens
ctccatttcctgcct

SEQ ID NO: 1856770 - DNA, 15 bp, Homo sapiens
tccatttcctgcctg

SEQ ID NO: 1856771 - DNA, 15 bp, Homo sapiens
ccatttcctgcctgc

SEQ ID NO: 1856772 - DNA, 15 bp, Homo sapiens
catttcctgcctgcc

SEQ ID NO: 1856773 - DNA, 15 bp, Homo sapiens
atttcctgcctgcct

SEQ ID NO: 1856774 - DNA, 15 bp, Homo sapiens
tttcctgcctgcctc

SEQ ID NO: 1856775 - DNA, 15 bp, Homo sapiens
ttcctgcctgcctct

SEQ ID NO: 1856776 - DNA, 15 bp, Homo sapiens
tcctgcctgcctcta

SEQ ID NO: 1856777 - DNA, 15 bp, Homo sapiens
cctgcctgcctctat

SEQ ID NO: 1856778 - DNA, 15 bp, Homo sapiens
ctgcctgcctctatt

SEQ ID NO: 1856779 - DNA, 15 bp, Homo sapiens
tgcctgcctctattg

SEQ ID NO: 1856780 - DNA, 15 bp, Homo sapiens
gcctgcctctattgt

SEQ ID NO: 1856781 - DNA, 15 bp, Homo sapiens
cctgcctctattgtt

SEQ ID NO: 1856782 - DNA, 15 bp, Homo sapiens
ctgcctctattgttt

SEQ ID NO: 1856783 - DNA, 15 bp, Homo sapiens
tgcctctattgtttt

SEQ ID NO: 1856784 - DNA, 15 bp, Homo sapiens
gcctctattgttttc

SEQ ID NO: 1856785 - DNA, 15 bp, Homo sapiens
cctctattgttttct

SEQ ID NO: 1856786 - DNA, 15 bp, Homo sapiens
ctctattgttttctg

SEQ ID NO: 1856787 - DNA, 15 bp, Homo sapiens
tctattgttttctgt

SEQ ID NO: 1856788 - DNA, 15 bp, Homo sapiens
ctattgttttctgtt

SEQ ID NO: 1856789 - DNA, 15 bp, Homo sapiens
tattgttttctgttt

SEQ ID NO: 1856790 - DNA, 15 bp, Homo sapiens
attgttttctgtttg

SEQ ID NO: 1856791 - DNA, 15 bp, Homo sapiens
ttgttttctgtttga

SEQ ID NO: 1856792 - DNA, 15 bp, Homo sapiens
tgttttctgtttgat

SEQ ID NO: 1856793 - DNA, 15 bp, Homo sapiens
gttttctgtttgatt

SEQ ID NO: 1856794 - DNA, 15 bp, Homo sapiens
ttttctgtttgatta

SEQ ID NO: 1856795 - DNA, 15 bp, Homo sapiens
tttctgtttgattaa

SEQ ID NO: 1856796 - DNA, 15 bp, Homo sapiens
ttctgtttgattaag

SEQ ID NO: 1856797 - DNA, 15 bp, Homo sapiens
tctgtttgattaagt

SEQ ID NO: 1856798 - DNA, 15 bp, Homo sapiens
ctgtttgattaagtg

SEQ ID NO: 1856799 - DNA, 15 bp, Homo sapiens
tgtttgattaagtgt

SEQ ID NO: 1856800 - DNA, 15 bp, Homo sapiens
gtttgattaagtgta

SEQ ID NO: 1856801 - DNA, 15 bp, Homo sapiens
tttgattaagtgtat

SEQ ID NO: 1856802 - DNA, 15 bp, Homo sapiens
ttgattaagtgtatc

SEQ ID NO: 1856803 - DNA, 15 bp, Homo sapiens
tgattaagtgtatcc

SEQ ID NO: 1856804 - DNA, 15 bp, Homo sapiens
gattaagtgtatcct

SEQ ID NO: 1856805 - DNA, 15 bp, Homo sapiens
attaagtgtatcctg

SEQ ID NO: 1856806 - DNA, 15 bp, Homo sapiens
ttaagtgtatcctgt

SEQ ID NO: 1856807 - DNA, 15 bp, Homo sapiens
taagtgtatcctgta

SEQ ID NO: 1856808 - DNA, 15 bp, Homo sapiens
aagtgtatcctgtaa

SEQ ID NO: 1856809 - DNA, 15 bp, Homo sapiens
agtgtatcctgtaaa

SEQ ID NO: 1856810 - DNA, 15 bp, Homo sapiens
gtgtatcctgtaaaa

SEQ ID NO: 1856811 - DNA, 15 bp, Homo sapiens
tgtatcctgtaaaac

SEQ ID NO: 1856812 - DNA, 15 bp, Homo sapiens
gtatcctgtaaaact

SEQ ID NO: 1856813 - DNA, 15 bp, Homo sapiens
tatcctgtaaaactg

SEQ ID NO: 1856814 - DNA, 15 bp, Homo sapiens
atcctgtaaaactgt

SEQ ID NO: 1856815 - DNA, 15 bp, Homo sapiens
tcctgtaaaactgta

SEQ ID NO: 1856816 - DNA, 15 bp, Homo sapiens
cctgtaaaactgtat

SEQ ID NO: 1856817 - DNA, 15 bp, Homo sapiens
ctgtaaaactgtata

SEQ ID NO: 1856818 - DNA, 15 bp, Homo sapiens
tgtaaaactgtatat

SEQ ID NO: 1856819 - DNA, 15 bp, Homo sapiens
gtaaaactgtatatt

SEQ ID NO: 1856820 - DNA, 15 bp, Homo sapiens
taaaactgtatattc

SEQ ID NO: 1856821 - DNA, 15 bp, Homo sapiens
aaaactgtatattcc

SEQ ID NO: 1856822 - DNA, 15 bp, Homo sapiens
aaactgtatattcct

SEQ ID NO: 1856823 - DNA, 15 bp, Homo sapiens
aactgtatattcctg

SEQ ID NO: 1856824 - DNA, 15 bp, Homo sapiens
actgtatattcctgt

SEQ ID NO: 1856825 - DNA, 15 bp, Homo sapiens
ctgtatattcctgtt

SEQ ID NO: 1856826 - DNA, 15 bp, Homo sapiens
tgtatattcctgtta

SEQ ID NO: 1856827 - DNA, 15 bp, Homo sapiens
gtatattcctgttag

SEQ ID NO: 1856828 - DNA, 15 bp, Homo sapiens
tatattcctgttagg

SEQ ID NO: 1856829 - DNA, 15 bp, Homo sapiens
atattcctgttagga

SEQ ID NO: 1856830 - DNA, 15 bp, Homo sapiens
tattcctgttaggaa

SEQ ID NO: 1856831 - DNA, 15 bp, Homo sapiens
attcctgttaggaat

SEQ ID NO: 1856832 - DNA, 15 bp, Homo sapiens
ttcctgttaggaatt

SEQ ID NO: 1856833 - DNA, 15 bp, Homo sapiens
tcctgttaggaatta

SEQ ID NO: 1856834 - DNA, 15 bp, Homo sapiens
cctgttaggaattag

SEQ ID NO: 1856835 - DNA, 15 bp, Homo sapiens
ctgttaggaattaga

SEQ ID NO: 1856836 - DNA, 15 bp, Homo sapiens
tgttaggaattagac

SEQ ID NO: 1856837 - DNA, 15 bp, Homo sapiens
gttaggaattagact

SEQ ID NO: 1856838 - DNA, 15 bp, Homo sapiens
ttaggaattagactt

SEQ ID NO: 1856839 - DNA, 15 bp, Homo sapiens
taggaattagacttt

SEQ ID NO: 1856840 - DNA, 15 bp, Homo sapiens
aggaattagacttta

SEQ ID NO: 1856841 - DNA, 15 bp, Homo sapiens
ggaattagactttac

SEQ ID NO: 1856842 - DNA, 15 bp, Homo sapiens
gaattagactttacc

SEQ ID NO: 1856843 - DNA, 15 bp, Homo sapiens
aattagactttaccc

SEQ ID NO: 1856844 - DNA, 15 bp, Homo sapiens
attagactttaccct

SEQ ID NO: 1856845 - DNA, 15 bp, Homo sapiens
ttagactttaccctg

SEQ ID NO: 1856846 - DNA, 15 bp, Homo sapiens
tagactttaccctga

SEQ ID NO: 1856847 - DNA, 15 bp, Homo sapiens
agactttaccctgat

SEQ ID NO: 1856848 - DNA, 15 bp, Homo sapiens
gactttaccctgata

SEQ ID NO: 1856849 - DNA, 15 bp, Homo sapiens
actttaccctgataa

SEQ ID NO: 1856850 - DNA, 15 bp, Homo sapiens
ctttaccctgataaa

SEQ ID NO: 1856851 - DNA, 15 bp, Homo sapiens
tttaccctgataaaa

SEQ ID NO: 1856852 - DNA, 15 bp, Homo sapiens
ttaccctgataaaat

SEQ ID NO: 1856853 - DNA, 15 bp, Homo sapiens
taccctgataaaatg

SEQ ID NO: 1856854 - DNA, 15 bp, Homo sapiens
accctgataaaatga

SEQ ID NO: 1856855 - DNA, 15 bp, Homo sapiens
ccctgataaaatgag

SEQ ID NO: 1856856 - DNA, 15 bp, Homo sapiens
cctgataaaatgaga

SEQ ID NO: 1856857 - DNA, 15 bp, Homo sapiens
ctgataaaatgagat

SEQ ID NO: 1856858 - DNA, 15 bp, Homo sapiens
tgataaaatgagatt

SEQ ID NO: 1856859 - DNA, 15 bp, Homo sapiens
gataaaatgagatta

SEQ ID NO: 1856860 - DNA, 15 bp, Homo sapiens
ataaaatgagattac

SEQ ID NO: 1856861 - DNA, 15 bp, Homo sapiens
taaaatgagattaca

SEQ ID NO: 1856862 - DNA, 15 bp, Homo sapiens
aaaatgagattacac

SEQ ID NO: 1856863 - DNA, 15 bp, Homo sapiens
aaatgagattacaca

SEQ ID NO: 1856864 - DNA, 15 bp, Homo sapiens
aatgagattacacac

SEQ ID NO: 1856865 - DNA, 15 bp, Homo sapiens
atgagattacacaca

SEQ ID NO: 1856866 - DNA, 15 bp, Homo sapiens
tgagattacacacac

SEQ ID NO: 1856867 - DNA, 15 bp, Homo sapiens
gagattacacacaca

SEQ ID NO: 1856868 - DNA, 15 bp, Homo sapiens
agattacacacacag

SEQ ID NO: 1856869 - DNA, 15 bp, Homo sapiens
gattacacacacagt

SEQ ID NO: 1856870 - DNA, 15 bp, Homo sapiens
attacacacacagtc

SEQ ID NO: 1856871 - DNA, 15 bp, Homo sapiens
ttacacacacagtct

SEQ ID NO: 1856872 - DNA, 15 bp, Homo sapiens
tacacacacagtctt

SEQ ID NO: 1856873 - DNA, 15 bp, Homo sapiens
acacacacagtcttc

SEQ ID NO: 1856874 - DNA, 15 bp, Homo sapiens
cacacacagtcttct

SEQ ID NO: 1856875 - DNA, 15 bp, Homo sapiens
acacacagtcttctt

SEQ ID NO: 1856876 - DNA, 15 bp, Homo sapiens
cacacagtcttcttt

SEQ ID NO: 1856877 - DNA, 15 bp, Homo sapiens
acacagtcttctttc

SEQ ID NO: 1856878 - DNA, 15 bp, Homo sapiens
cacagtcttctttcc

SEQ ID NO: 1856879 - DNA, 15 bp, Homo sapiens
acagtcttctttccc

SEQ ID NO: 1856880 - DNA, 15 bp, Homo sapiens
cagtcttctttcccc

SEQ ID NO: 1856881 - DNA, 15 bp, Homo sapiens
agtcttctttccccc

SEQ ID NO: 1856882 - DNA, 15 bp, Homo sapiens
gtcttctttccccct

SEQ ID NO: 1856883 - DNA, 15 bp, Homo sapiens
tcttctttcccccta

SEQ ID NO: 1856884 - DNA, 15 bp, Homo sapiens
cttctttccccctac

SEQ ID NO: 1856885 - DNA, 15 bp, Homo sapiens
ttctttccccctacc

SEQ ID NO: 1856886 - DNA, 15 bp, Homo sapiens
tctttccccctaccc

SEQ ID NO: 1856887 - DNA, 15 bp, Homo sapiens
ctttccccctaccca

SEQ ID NO: 1856888 - DNA, 15 bp, Homo sapiens
tttccccctacccac

SEQ ID NO: 1856889 - DNA, 15 bp, Homo sapiens
ttccccctacccacc

SEQ ID NO: 1856890 - DNA, 15 bp, Homo sapiens
tccccctacccaccg

SEQ ID NO: 1856891 - DNA, 15 bp, Homo sapiens
ccccctacccaccgc

SEQ ID NO: 1856892 - DNA, 15 bp, Homo sapiens
cccctacccaccgca

SEQ ID NO: 1856893 - DNA, 15 bp, Homo sapiens
ccctacccaccgcag

SEQ ID NO: 1856894 - DNA, 15 bp, Homo sapiens
cctacccaccgcagc

SEQ ID NO: 1856895 - DNA, 15 bp, Homo sapiens
ctacccaccgcagcc

SEQ ID NO: 1856896 - DNA, 15 bp, Homo sapiens
tacccaccgcagcca

SEQ ID NO: 1856897 - DNA, 15 bp, Homo sapiens
acccaccgcagccac

SEQ ID NO: 1856898 - DNA, 15 bp, Homo sapiens
cccaccgcagccacc

SEQ ID NO: 1856899 - DNA, 15 bp, Homo sapiens
ccaccgcagccacct

SEQ ID NO: 1856900 - DNA, 15 bp, Homo sapiens
caccgcagccacctc

SEQ ID NO: 1856901 - DNA, 15 bp, Homo sapiens
accgcagccacctca

SEQ ID NO: 1856902 - DNA, 15 bp, Homo sapiens
ccgcagccacctcac

SEQ ID NO: 1856903 - DNA, 15 bp, Homo sapiens
cgcagccacctcacc

SEQ ID NO: 1856904 - DNA, 15 bp, Homo sapiens
gcagccacctcaccc

SEQ ID NO: 1856905 - DNA, 15 bp, Homo sapiens
cagccacctcacccc

SEQ ID NO: 1856906 - DNA, 15 bp, Homo sapiens
agccacctcaccccc

SEQ ID NO: 1856907 - DNA, 15 bp, Homo sapiens
gccacctcaccccca

SEQ ID NO: 1856908 - DNA, 15 bp, Homo sapiens
ccacctcacccccac

SEQ ID NO: 1856909 - DNA, 15 bp, Homo sapiens
cacctcacccccacg

SEQ ID NO: 1856910 - DNA, 15 bp, Homo sapiens
acctcacccccacgc

SEQ ID NO: 1856911 - DNA, 15 bp, Homo sapiens
cctcacccccacgcc

SEQ ID NO: 1856912 - DNA, 15 bp, Homo sapiens
ctcacccccacgcct

SEQ ID NO: 1856913 - DNA, 15 bp, Homo sapiens
tcacccccacgcctg

SEQ ID NO: 1856914 - DNA, 15 bp, Homo sapiens
cacccccacgcctgc

SEQ ID NO: 1856915 - DNA, 15 bp, Homo sapiens
acccccacgcctgcc

SEQ ID NO: 1856916 - DNA, 15 bp, Homo sapiens
cccccacgcctgcct

SEQ ID NO: 1856917 - DNA, 15 bp, Homo sapiens
ccccacgcctgcctc

SEQ ID NO: 1856918 - DNA, 15 bp, Homo sapiens
cccacgcctgcctcc

SEQ ID NO: 1856919 - DNA, 15 bp, Homo sapiens
ccacgcctgcctcca

SEQ ID NO: 1856920 - DNA, 15 bp, Homo sapiens
cacgcctgcctccac

SEQ ID NO: 1856921 - DNA, 15 bp, Homo sapiens
acgcctgcctccact

SEQ ID NO: 1856922 - DNA, 15 bp, Homo sapiens
gcctgcctccacttc

SEQ ID NO: 1856923 - DNA, 15 bp, Homo sapiens
cctgcctccacttct

SEQ ID NO: 1856924 - DNA, 15 bp, Homo sapiens
ctgcctccacttctg

SEQ ID NO: 1856925 - DNA, 15 bp, Homo sapiens
tgcctccacttctgc

SEQ ID NO: 1856926 - DNA, 15 bp, Homo sapiens
gcctccacttctgcc

SEQ ID NO: 1856927 - DNA, 15 bp, Homo sapiens
cctccacttctgccc

SEQ ID NO: 1856928 - DNA, 15 bp, Homo sapiens
ctccacttctgcccc

SEQ ID NO: 1856929 - DNA, 15 bp, Homo sapiens
tccacttctgcccct

SEQ ID NO: 1856930 - DNA, 15 bp, Homo sapiens
ccacttctgcccctc

SEQ ID NO: 1856931 - DNA, 15 bp, Homo sapiens
cacttctgcccctcg

SEQ ID NO: 1856932 - DNA, 15 bp, Homo sapiens
acttctgcccctcgc

SEQ ID NO: 1856933 - DNA, 15 bp, Homo sapiens
cttctgcccctcgcc

SEQ ID NO: 1856934 - DNA, 15 bp, Homo sapiens
ttctgcccctcgccc

SEQ ID NO: 1856935 - DNA, 15 bp, Homo sapiens
tctgcccctcgcccg

SEQ ID NO: 1856936 - DNA, 15 bp, Homo sapiens
ctgcccctcgcccgc

SEQ ID NO: 1856937 - DNA, 15 bp, Homo sapiens
tgcccctcgcccgct

SEQ ID NO: 1856938 - DNA, 15 bp, Homo sapiens
gcccctcgcccgctt

SEQ ID NO: 1856939 - DNA, 15 bp, Homo sapiens
cccctcgcccgctta

SEQ ID NO: 1856940 - DNA, 15 bp, Homo sapiens
ccctcgcccgcttag

SEQ ID NO: 1856941 - DNA, 15 bp, Homo sapiens
cctcgcccgcttagg

SEQ ID NO: 1856942 - DNA, 15 bp, Homo sapiens
ctcgcccgcttagga

SEQ ID NO: 1856943 - DNA, 15 bp, Homo sapiens
tcgcccgcttaggag

SEQ ID NO: 1856944 - DNA, 15 bp, Homo sapiens
cgcccgcttaggaga

SEQ ID NO: 1856945 - DNA, 15 bp, Homo sapiens
gcccgcttaggagag

SEQ ID NO: 1856946 - DNA, 15 bp, Homo sapiens
cccgcttaggagagt

SEQ ID NO: 1856947 - DNA, 15 bp, Homo sapiens
ccgcttaggagagtt

SEQ ID NO: 1856948 - DNA, 15 bp, Homo sapiens
cgcttaggagagttc

SEQ ID NO: 1856949 - DNA, 15 bp, Homo sapiens
gcttaggagagttct

SEQ ID NO: 1856950 - DNA, 15 bp, Homo sapiens
cttaggagagttctt

SEQ ID NO: 1856951 - DNA, 15 bp, Homo sapiens
ttaggagagttcttg

SEQ ID NO: 1856952 - DNA, 15 bp, Homo sapiens
taggagagttcttga

SEQ ID NO: 1856953 - DNA, 15 bp, Homo sapiens
aggagagttcttgaa

SEQ ID NO: 1856954 - DNA, 15 bp, Homo sapiens
ggagagttcttgaaa

SEQ ID NO: 1856955 - DNA, 15 bp, Homo sapiens
gagagttcttgaaaa

SEQ ID NO: 1856956 - DNA, 15 bp, Homo sapiens
agagttcttgaaaag

SEQ ID NO: 1856957 - DNA, 15 bp, Homo sapiens
gagttcttgaaaagt

SEQ ID NO: 1856958 - DNA, 15 bp, Homo sapiens
agttcttgaaaagtt

SEQ ID NO: 1856959 - DNA, 15 bp, Homo sapiens
gttcttgaaaagttg

SEQ ID NO: 1856960 - DNA, 15 bp, Homo sapiens
ttcttgaaaagttgt

SEQ ID NO: 1856961 - DNA, 15 bp, Homo sapiens
tcttgaaaagttgtc

SEQ ID NO: 1856962 - DNA, 15 bp, Homo sapiens
cttgaaaagttgtcc

SEQ ID NO: 1856963 - DNA, 15 bp, Homo sapiens
ttgaaaagttgtcct

SEQ ID NO: 1856964 - DNA, 15 bp, Homo sapiens
tgaaaagttgtcctt

SEQ ID NO: 1856965 - DNA, 15 bp, Homo sapiens
gaaaagttgtccttc

SEQ ID NO: 1856966 - DNA, 15 bp, Homo sapiens
aaaagttgtccttcc

SEQ ID NO: 1856967 - DNA, 15 bp, Homo sapiens
aaagttgtccttcca

SEQ ID NO: 1856968 - DNA, 15 bp, Homo sapiens
aagttgtccttccag

SEQ ID NO: 1856969 - DNA, 15 bp, Homo sapiens
agttgtccttccagc

SEQ ID NO: 1856970 - DNA, 15 bp, Homo sapiens
gttgtccttccagcc

SEQ ID NO: 1856971 - DNA, 15 bp, Homo sapiens
ttgtccttccagcct

SEQ ID NO: 1856972 - DNA, 15 bp, Homo sapiens
tgtccttccagcctt

SEQ ID NO: 1856973 - DNA, 15 bp, Homo sapiens
gtccttccagccttg

SEQ ID NO: 1856974 - DNA, 15 bp, Homo sapiens
tccttccagccttga

SEQ ID NO: 1856975 - DNA, 15 bp, Homo sapiens
ccttccagccttgag

SEQ ID NO: 1856976 - DNA, 15 bp, Homo sapiens
cttccagccttgaga

SEQ ID NO: 1856977 - DNA, 15 bp, Homo sapiens
ttccagccttgagaa

SEQ ID NO: 1856978 - DNA, 15 bp, Homo sapiens
tccagccttgagaat

SEQ ID NO: 1856979 - DNA, 15 bp, Homo sapiens
ccagccttgagaatg

SEQ ID NO: 1856980 - DNA, 15 bp, Homo sapiens
cagccttgagaatgt

SEQ ID NO: 1856981 - DNA, 15 bp, Homo sapiens
agccttgagaatgtg

SEQ ID NO: 1856982 - DNA, 15 bp, Homo sapiens
gccttgagaatgtgg

SEQ ID NO: 1856983 - DNA, 15 bp, Homo sapiens
ccttgagaatgtggg

SEQ ID NO: 1856984 - DNA, 15 bp, Homo sapiens
cttgagaatgtggga

SEQ ID NO: 1856985 - DNA, 15 bp, Homo sapiens
ttgagaatgtgggag

SEQ ID NO: 1856986 - DNA, 15 bp, Homo sapiens
tgagaatgtgggaga

SEQ ID NO: 1856987 - DNA, 15 bp, Homo sapiens
gagaatgtgggagag

SEQ ID NO: 1856988 - DNA, 15 bp, Homo sapiens
agaatgtgggagagg

SEQ ID NO: 1856989 - DNA, 15 bp, Homo sapiens
gaatgtgggagaggg

SEQ ID NO: 1856990 - DNA, 15 bp, Homo sapiens
aatgtgggagaggga

SEQ ID NO: 1856991 - DNA, 15 bp, Homo sapiens
atgtgggagagggag

SEQ ID NO: 1856992 - DNA, 15 bp, Homo sapiens
tgtgggagagggagt

SEQ ID NO: 1856993 - DNA, 15 bp, Homo sapiens
gtgggagagggagtg

SEQ ID NO: 1856994 - DNA, 15 bp, Homo sapiens
tgggagagggagtga

SEQ ID NO: 1856995 - DNA, 15 bp, Homo sapiens
gggagagggagtgac

SEQ ID NO: 1856996 - DNA, 15 bp, Homo sapiens
ggagagggagtgacc

SEQ ID NO: 1856997 - DNA, 15 bp, Homo sapiens
gagagggagtgaccc

SEQ ID NO: 1856998 - DNA, 15 bp, Homo sapiens
agagggagtgaccct

SEQ ID NO: 1856999 - DNA, 15 bp, Homo sapiens
gagggagtgaccctg

SEQ ID NO: 1857000 - DNA, 15 bp, Homo sapiens
agggagtgaccctga

SEQ ID NO: 1857001 - DNA, 15 bp, Homo sapiens
gggagtgaccctgag

SEQ ID NO: 1857002 - DNA, 15 bp, Homo sapiens
ggagtgaccctgagt

SEQ ID NO: 1857003 - DNA, 15 bp, Homo sapiens
gagtgaccctgagtt

SEQ ID NO: 1857004 - DNA, 15 bp, Homo sapiens
agtgaccctgagtta

SEQ ID NO: 1857005 - DNA, 15 bp, Homo sapiens
gtgaccctgagttag

SEQ ID NO: 1857006 - DNA, 15 bp, Homo sapiens
tgaccctgagttaga

SEQ ID NO: 1857007 - DNA, 15 bp, Homo sapiens
gaccctgagttagag

SEQ ID NO: 1857008 - DNA, 15 bp, Homo sapiens
accctgagttagaga

SEQ ID NO: 1857009 - DNA, 15 bp, Homo sapiens
ccctgagttagagag

SEQ ID NO: 1857010 - DNA, 15 bp, Homo sapiens
cctgagttagagaga

SEQ ID NO: 1857011 - DNA, 15 bp, Homo sapiens
ctgagttagagagag

SEQ ID NO: 1857012 - DNA, 15 bp, Homo sapiens
tgagttagagagaga

SEQ ID NO: 1857013 - DNA, 15 bp, Homo sapiens
gagttagagagagaa

SEQ ID NO: 1857014 - DNA, 15 bp, Homo sapiens
agttagagagagaaa

SEQ ID NO: 1857015 - DNA, 15 bp, Homo sapiens
gttagagagagaaac

SEQ ID NO: 1857016 - DNA, 15 bp, Homo sapiens
ttagagagagaaact

SEQ ID NO: 1857017 - DNA, 15 bp, Homo sapiens
tagagagagaaactt

SEQ ID NO: 1857018 - DNA, 15 bp, Homo sapiens
agagagagaaactta

SEQ ID NO: 1857019 - DNA, 15 bp, Homo sapiens
gagagagaaacttag

SEQ ID NO: 1857020 - DNA, 15 bp, Homo sapiens
agagagaaacttagc

SEQ ID NO: 1857021 - DNA, 15 bp, Homo sapiens
gagagaaacttagca

SEQ ID NO: 1857022 - DNA, 15 bp, Homo sapiens
agagaaacttagcat

SEQ ID NO: 1857023 - DNA, 15 bp, Homo sapiens
gagaaacttagcatt

SEQ ID NO: 1857024 - DNA, 15 bp, Homo sapiens
agaaacttagcatta

SEQ ID NO: 1857025 - DNA, 15 bp, Homo sapiens
gaaacttagcattaa

SEQ ID NO: 1857026 - DNA, 15 bp, Homo sapiens
aaacttagcattaag

SEQ ID NO: 1857027 - DNA, 15 bp, Homo sapiens
aacttagcattaaga

SEQ ID NO: 1857028 - DNA, 15 bp, Homo sapiens
acttagcattaagag

SEQ ID NO: 1857029 - DNA, 15 bp, Homo sapiens
cttagcattaagagg

SEQ ID NO: 1857030 - DNA, 15 bp, Homo sapiens
ttagcattaagaggg

SEQ ID NO: 1857031 - DNA, 15 bp, Homo sapiens
tagcattaagagggc

SEQ ID NO: 1857032 - DNA, 15 bp, Homo sapiens
agcattaagagggca

SEQ ID NO: 1857033 - DNA, 15 bp, Homo sapiens
gcattaagagggcag

SEQ ID NO: 1857034 - DNA, 15 bp, Homo sapiens
cattaagagggcaga

SEQ ID NO: 1857035 - DNA, 15 bp, Homo sapiens
attaagagggcagac

SEQ ID NO: 1857036 - DNA, 15 bp, Homo sapiens
ttaagagggcagaca

SEQ ID NO: 1857037 - DNA, 15 bp, Homo sapiens
taagagggcagacag

SEQ ID NO: 1857038 - DNA, 15 bp, Homo sapiens
aagagggcagacagc

SEQ ID NO: 1857039 - DNA, 15 bp, Homo sapiens
agagggcagacagca

SEQ ID NO: 1857040 - DNA, 15 bp, Homo sapiens
gagggcagacagcag

SEQ ID NO: 1857041 - DNA, 15 bp, Homo sapiens
agggcagacagcaga

SEQ ID NO: 1857042 - DNA, 15 bp, Homo sapiens
gggcagacagcagaa

SEQ ID NO: 1857043 - DNA, 15 bp, Homo sapiens
ggcagacagcagaaa

SEQ ID NO: 1857044 - DNA, 15 bp, Homo sapiens
gcagacagcagaaac

SEQ ID NO: 1857045 - DNA, 15 bp, Homo sapiens
cagacagcagaaacc

SEQ ID NO: 1857046 - DNA, 15 bp, Homo sapiens
agacagcagaaaccc

SEQ ID NO: 1857047 - DNA, 15 bp, Homo sapiens
gacagcagaaaccca

SEQ ID NO: 1857048 - DNA, 15 bp, Homo sapiens
acagcagaaacccag

SEQ ID NO: 1857049 - DNA, 15 bp, Homo sapiens
cagcagaaacccaga

SEQ ID NO: 1857050 - DNA, 15 bp, Homo sapiens
agcagaaacccagag

SEQ ID NO: 1857051 - DNA, 15 bp, Homo sapiens
gcagaaacccagaga

SEQ ID NO: 1857052 - DNA, 15 bp, Homo sapiens
cagaaacccagagat

SEQ ID NO: 1857053 - DNA, 15 bp, Homo sapiens
agaaacccagagatg

SEQ ID NO: 1857054 - DNA, 15 bp, Homo sapiens
gaaacccagagatgg

SEQ ID NO: 1857055 - DNA, 15 bp, Homo sapiens
aaacccagagatggt

SEQ ID NO: 1857056 - DNA, 15 bp, Homo sapiens
aacccagagatggtt

SEQ ID NO: 1857057 - DNA, 15 bp, Homo sapiens
acccagagatggttt

SEQ ID NO: 1857058 - DNA, 15 bp, Homo sapiens
cccagagatggtttg

SEQ ID NO: 1857059 - DNA, 15 bp, Homo sapiens
ccagagatggtttgg

SEQ ID NO: 1857060 - DNA, 15 bp, Homo sapiens
cagagatggtttggg

SEQ ID NO: 1857061 - DNA, 15 bp, Homo sapiens
agagatggtttgggg

SEQ ID NO: 1857062 - DNA, 15 bp, Homo sapiens
gagatggtttggggc

SEQ ID NO: 1857063 - DNA, 15 bp, Homo sapiens
agatggtttggggct

SEQ ID NO: 1857064 - DNA, 15 bp, Homo sapiens
gatggtttggggcta

SEQ ID NO: 1857065 - DNA, 15 bp, Homo sapiens
atggtttggggctat

SEQ ID NO: 1857066 - DNA, 15 bp, Homo sapiens
tggtttggggctatg

SEQ ID NO: 1857067 - DNA, 15 bp, Homo sapiens
ggtttggggctatgt

SEQ ID NO: 1857068 - DNA, 15 bp, Homo sapiens
gtttggggctatgtg

SEQ ID NO: 1857069 - DNA, 15 bp, Homo sapiens
tttggggctatgtgt

SEQ ID NO: 1857070 - DNA, 15 bp, Homo sapiens
ttggggctatgtgta

SEQ ID NO: 1857071 - DNA, 15 bp, Homo sapiens
tggggctatgtgtag

SEQ ID NO: 1857072 - DNA, 15 bp, Homo sapiens
ggggctatgtgtagg

SEQ ID NO: 1857073 - DNA, 15 bp, Homo sapiens
gggctatgtgtaggc

SEQ ID NO: 1857074 - DNA, 15 bp, Homo sapiens
ggctatgtgtaggcc

SEQ ID NO: 1857075 - DNA, 15 bp, Homo sapiens
gctatgtgtaggcca

SEQ ID NO: 1857076 - DNA, 15 bp, Homo sapiens
ctatgtgtaggccac

SEQ ID NO: 1857077 - DNA, 15 bp, Homo sapiens
tatgtgtaggccact

SEQ ID NO: 1857078 - DNA, 15 bp, Homo sapiens
atgtgtaggccacta

SEQ ID NO: 1857079 - DNA, 15 bp, Homo sapiens
tgtgtaggccactaa

SEQ ID NO: 1857080 - DNA, 15 bp, Homo sapiens
gtgtaggccactaaa

SEQ ID NO: 1857081 - DNA, 15 bp, Homo sapiens
tgtaggccactaaag

SEQ ID NO: 1857082 - DNA, 15 bp, Homo sapiens
gtaggccactaaagg

SEQ ID NO: 1857083 - DNA, 15 bp, Homo sapiens
taggccactaaagga

SEQ ID NO: 1857084 - DNA, 15 bp, Homo sapiens
aggccactaaaggat

SEQ ID NO: 1857085 - DNA, 15 bp, Homo sapiens
ggccactaaaggatt

SEQ ID NO: 1857086 - DNA, 15 bp, Homo sapiens
gccactaaaggattc

SEQ ID NO: 1857087 - DNA, 15 bp, Homo sapiens
ccactaaaggattcc

SEQ ID NO: 1857088 - DNA, 15 bp, Homo sapiens
cactaaaggattccc

SEQ ID NO: 1857089 - DNA, 15 bp, Homo sapiens
actaaaggattccca

SEQ ID NO: 1857090 - DNA, 15 bp, Homo sapiens
ctaaaggattcccat

SEQ ID NO: 1857091 - DNA, 15 bp, Homo sapiens
taaaggattcccatg

SEQ ID NO: 1857092 - DNA, 15 bp, Homo sapiens
aaaggattcccatgg

SEQ ID NO: 1857093 - DNA, 15 bp, Homo sapiens
aaggattcccatggg

SEQ ID NO: 1857094 - DNA, 15 bp, Homo sapiens
aggattcccatgggc

SEQ ID NO: 1857095 - DNA, 15 bp, Homo sapiens
ggattcccatgggct

SEQ ID NO: 1857096 - DNA, 15 bp, Homo sapiens
gattcccatgggcta

SEQ ID NO: 1857097 - DNA, 15 bp, Homo sapiens
attcccatgggctac

SEQ ID NO: 1857098 - DNA, 15 bp, Homo sapiens
ttcccatgggctact

SEQ ID NO: 1857099 - DNA, 15 bp, Homo sapiens
tcccatgggctactt

SEQ ID NO: 1857100 - DNA, 15 bp, Homo sapiens
cccatgggctacttg

SEQ ID NO: 1857101 - DNA, 15 bp, Homo sapiens
ccatgggctacttgc

SEQ ID NO: 1857102 - DNA, 15 bp, Homo sapiens
catgggctacttgcc

SEQ ID NO: 1857103 - DNA, 15 bp, Homo sapiens
atgggctacttgccc

SEQ ID NO: 1857104 - DNA, 15 bp, Homo sapiens
tgggctacttgcccg

SEQ ID NO: 1857105 - DNA, 15 bp, Homo sapiens
gggctacttgcccgt

SEQ ID NO: 1857106 - DNA, 15 bp, Homo sapiens
ggctacttgcccgtc

SEQ ID NO: 1857107 - DNA, 15 bp, Homo sapiens
gctacttgcccgtct

SEQ ID NO: 1857108 - DNA, 15 bp, Homo sapiens
ctacttgcccgtctg

SEQ ID NO: 1857109 - DNA, 15 bp, Homo sapiens
tacttgcccgtctgc

SEQ ID NO: 1857110 - DNA, 15 bp, Homo sapiens
acttgcccgtctgct

SEQ ID NO: 1857111 - DNA, 15 bp, Homo sapiens
cttgcccgtctgctc

SEQ ID NO: 1857112 - DNA, 15 bp, Homo sapiens
ttgcccgtctgctct

SEQ ID NO: 1857113 - DNA, 15 bp, Homo sapiens
tgcccgtctgctctt

SEQ ID NO: 1857114 - DNA, 15 bp, Homo sapiens
gcccgtctgctcttt

SEQ ID NO: 1857115 - DNA, 15 bp, Homo sapiens
cccgtctgctctttt

SEQ ID NO: 1857116 - DNA, 15 bp, Homo sapiens
ccgtctgctcttttt

SEQ ID NO: 1857117 - DNA, 15 bp, Homo sapiens
cgtctgctctttttt

SEQ ID NO: 1857118 - DNA, 15 bp, Homo sapiens
gtctgctcttttttt

SEQ ID NO: 1857119 - DNA, 15 bp, Homo sapiens
tctgctctttttttt

SEQ ID NO: 1857120 - DNA, 15 bp, Homo sapiens
ctgctcttttttttt

SEQ ID NO: 1857121 - DNA, 15 bp, Homo sapiens
tgctctttttttttg

SEQ ID NO: 1857122 - DNA, 15 bp, Homo sapiens
gctctttttttttgg

SEQ ID NO: 1857123 - DNA, 15 bp, Homo sapiens
ctctttttttttggc

SEQ ID NO: 1857124 - DNA, 15 bp, Homo sapiens
tctttttttttggct

SEQ ID NO: 1857125 - DNA, 15 bp, Homo sapiens
ctttttttttggctt

SEQ ID NO: 1857126 - DNA, 15 bp, Homo sapiens
tttttttttggcttt

SEQ ID NO: 1857127 - DNA, 15 bp, Homo sapiens
ttttttttggctttc

SEQ ID NO: 1857128 - DNA, 15 bp, Homo sapiens
tttttttggctttcc

SEQ ID NO: 1857129 - DNA, 15 bp, Homo sapiens
ttttttggctttcct

SEQ ID NO: 1857130 - DNA, 15 bp, Homo sapiens
tttttggctttccta

SEQ ID NO: 1857131 - DNA, 15 bp, Homo sapiens
ttttggctttcctat

SEQ ID NO: 1857132 - DNA, 15 bp, Homo sapiens
tttggctttcctatt

SEQ ID NO: 1857133 - DNA, 15 bp, Homo sapiens
ttggctttcctattt

SEQ ID NO: 1857134 - DNA, 15 bp, Homo sapiens
tggctttcctatttg

SEQ ID NO: 1857135 - DNA, 15 bp, Homo sapiens
ggctttcctatttgc

SEQ ID NO: 1857136 - DNA, 15 bp, Homo sapiens
gctttcctatttgcc

SEQ ID NO: 1857137 - DNA, 15 bp, Homo sapiens
ctttcctatttgcca

SEQ ID NO: 1857138 - DNA, 15 bp, Homo sapiens
tttcctatttgccag

SEQ ID NO: 1857139 - DNA, 15 bp, Homo sapiens
ttcctatttgccagc

SEQ ID NO: 1857140 - DNA, 15 bp, Homo sapiens
tcctatttgccagca

SEQ ID NO: 1857141 - DNA, 15 bp, Homo sapiens
cctatttgccagcat

SEQ ID NO: 1857142 - DNA, 15 bp, Homo sapiens
ctatttgccagcatg

SEQ ID NO: 1857143 - DNA, 15 bp, Homo sapiens
tatttgccagcatgg

SEQ ID NO: 1857144 - DNA, 15 bp, Homo sapiens
atttgccagcatggc

SEQ ID NO: 1857145 - DNA, 15 bp, Homo sapiens
tttgccagcatggcc

SEQ ID NO: 1857146 - DNA, 15 bp, Homo sapiens
ttgccagcatggcca

SEQ ID NO: 1857147 - DNA, 15 bp, Homo sapiens
tgccagcatggccaa

SEQ ID NO: 1857148 - DNA, 15 bp, Homo sapiens
gccagcatggccaag

SEQ ID NO: 1857149 - DNA, 15 bp, Homo sapiens
ccagcatggccaagt

SEQ ID NO: 1857150 - DNA, 15 bp, Homo sapiens
cagcatggccaagtg

SEQ ID NO: 1857151 - DNA, 15 bp, Homo sapiens
agcatggccaagtgg

SEQ ID NO: 1857152 - DNA, 15 bp, Homo sapiens
gcatggccaagtggt

SEQ ID NO: 1857153 - DNA, 15 bp, Homo sapiens
catggccaagtggtt

SEQ ID NO: 1857154 - DNA, 15 bp, Homo sapiens
atggccaagtggttc

SEQ ID NO: 1857155 - DNA, 15 bp, Homo sapiens
tggccaagtggttcc

SEQ ID NO: 1857156 - DNA, 15 bp, Homo sapiens
ggccaagtggttcca

SEQ ID NO: 1857157 - DNA, 15 bp, Homo sapiens
gccaagtggttccaa

SEQ ID NO: 1857158 - DNA, 15 bp, Homo sapiens
ccaagtggttccaac

SEQ ID NO: 1857159 - DNA, 15 bp, Homo sapiens
caagtggttccaact

SEQ ID NO: 1857160 - DNA, 15 bp, Homo sapiens
aagtggttccaactg

SEQ ID NO: 1857161 - DNA, 15 bp, Homo sapiens
agtggttccaactgg

SEQ ID NO: 1857162 - DNA, 15 bp, Homo sapiens
gtggttccaactgga

SEQ ID NO: 1857163 - DNA, 15 bp, Homo sapiens
tggttccaactggaa

SEQ ID NO: 1857164 - DNA, 15 bp, Homo sapiens
ggttccaactggaaa

SEQ ID NO: 1857165 - DNA, 15 bp, Homo sapiens
gttccaactggaaac

SEQ ID NO: 1857166 - DNA, 15 bp, Homo sapiens
ttccaactggaaacc

SEQ ID NO: 1857167 - DNA, 15 bp, Homo sapiens
tccaactggaaaccc

SEQ ID NO: 1857168 - DNA, 15 bp, Homo sapiens
ccaactggaaaccca

SEQ ID NO: 1857169 - DNA, 15 bp, Homo sapiens
caactggaaacccac

SEQ ID NO: 1857170 - DNA, 15 bp, Homo sapiens
aactggaaacccaca

SEQ ID NO: 1857171 - DNA, 15 bp, Homo sapiens
actggaaacccacag

SEQ ID NO: 1857172 - DNA, 15 bp, Homo sapiens
ctggaaacccacagg

SEQ ID NO: 1857173 - DNA, 15 bp, Homo sapiens
tggaaacccacaggg

SEQ ID NO: 1857174 - DNA, 15 bp, Homo sapiens
ggaaacccacaggga

SEQ ID NO: 1857175 - DNA, 15 bp, Homo sapiens
gaaacccacagggac

SEQ ID NO: 1857176 - DNA, 15 bp, Homo sapiens
aaacccacagggaca

SEQ ID NO: 1857177 - DNA, 15 bp, Homo sapiens
aacccacagggacat

SEQ ID NO: 1857178 - DNA, 15 bp, Homo sapiens
acccacagggacatt

SEQ ID NO: 1857179 - DNA, 15 bp, Homo sapiens
cccacagggacattg

SEQ ID NO: 1857180 - DNA, 15 bp, Homo sapiens
ccacagggacattgt

SEQ ID NO: 1857181 - DNA, 15 bp, Homo sapiens
cacagggacattgtc

SEQ ID NO: 1857182 - DNA, 15 bp, Homo sapiens
acagggacattgtcc

SEQ ID NO: 1857183 - DNA, 15 bp, Homo sapiens
cagggacattgtcct

SEQ ID NO: 1857184 - DNA, 15 bp, Homo sapiens
agggacattgtcctg

SEQ ID NO: 1857185 - DNA, 15 bp, Homo sapiens
gggacattgtcctgg

SEQ ID NO: 1857186 - DNA, 15 bp, Homo sapiens
ggacattgtcctggt

SEQ ID NO: 1857187 - DNA, 15 bp, Homo sapiens
gacattgtcctggtg

SEQ ID NO: 1857188 - DNA, 15 bp, Homo sapiens
acattgtcctggtgg

SEQ ID NO: 1857189 - DNA, 15 bp, Homo sapiens
cattgtcctggtggc

SEQ ID NO: 1857190 - DNA, 15 bp, Homo sapiens
attgtcctggtggcc

SEQ ID NO: 1857191 - DNA, 15 bp, Homo sapiens
ttgtcctggtggcct

SEQ ID NO: 1857192 - DNA, 15 bp, Homo sapiens
tgtcctggtggcctg

SEQ ID NO: 1857193 - DNA, 15 bp, Homo sapiens
gtcctggtggcctgg

SEQ ID NO: 1857194 - DNA, 15 bp, Homo sapiens
tcctggtggcctggg

SEQ ID NO: 1857195 - DNA, 15 bp, Homo sapiens
cctggtggcctgggg

SEQ ID NO: 1857196 - DNA, 15 bp, Homo sapiens
ctggtggcctggggt

SEQ ID NO: 1857197 - DNA, 15 bp, Homo sapiens
tggtggcctggggta

SEQ ID NO: 1857198 - DNA, 15 bp, Homo sapiens
ggtggcctggggtag

SEQ ID NO: 1857199 - DNA, 15 bp, Homo sapiens
gtggcctggggtagg

SEQ ID NO: 1857200 - DNA, 15 bp, Homo sapiens
tggcctggggtagga

SEQ ID NO: 1857201 - DNA, 15 bp, Homo sapiens
ggcctggggtaggag

SEQ ID NO: 1857202 - DNA, 15 bp, Homo sapiens
gcctggggtaggagg

SEQ ID NO: 1857203 - DNA, 15 bp, Homo sapiens
cctggggtaggaggc

SEQ ID NO: 1857204 - DNA, 15 bp, Homo sapiens
ctggggtaggaggcc

SEQ ID NO: 1857205 - DNA, 15 bp, Homo sapiens
tggggtaggaggcct

SEQ ID NO: 1857206 - DNA, 15 bp, Homo sapiens
ggggtaggaggcctg

SEQ ID NO: 1857207 - DNA, 15 bp, Homo sapiens
gggtaggaggcctgg

SEQ ID NO: 1857208 - DNA, 15 bp, Homo sapiens
ggtaggaggcctggt

SEQ ID NO: 1857209 - DNA, 15 bp, Homo sapiens
gtaggaggcctggtg

SEQ ID NO: 1857210 - DNA, 15 bp, Homo sapiens
taggaggcctggtgt

SEQ ID NO: 1857211 - DNA, 15 bp, Homo sapiens
aggaggcctggtgtc

SEQ ID NO: 1857212 - DNA, 15 bp, Homo sapiens
ggaggcctggtgtct

SEQ ID NO: 1857213 - DNA, 15 bp, Homo sapiens
gaggcctggtgtctg

SEQ ID NO: 1857214 - DNA, 15 bp, Homo sapiens
aggcctggtgtctgc

SEQ ID NO: 1857215 - DNA, 15 bp, Homo sapiens
ggcctggtgtctgca

SEQ ID NO: 1857216 - DNA, 15 bp, Homo sapiens
gcctggtgtctgcac

SEQ ID NO: 1857217 - DNA, 15 bp, Homo sapiens
cctggtgtctgcacg

SEQ ID NO: 1857218 - DNA, 15 bp, Homo sapiens
ctggtgtctgcacga

SEQ ID NO: 1857219 - DNA, 15 bp, Homo sapiens
tggtgtctgcacgat

SEQ ID NO: 1857220 - DNA, 15 bp, Homo sapiens
ggtgtctgcacgatc

SEQ ID NO: 1857221 - DNA, 15 bp, Homo sapiens
gtgtctgcacgatcc

SEQ ID NO: 1857222 - DNA, 15 bp, Homo sapiens
tgtctgcacgatcca

SEQ ID NO: 1857223 - DNA, 15 bp, Homo sapiens
gtctgcacgatccaa

SEQ ID NO: 1857224 - DNA, 15 bp, Homo sapiens
tctgcacgatccaac

SEQ ID NO: 1857225 - DNA, 15 bp, Homo sapiens
ctgcacgatccaacc

SEQ ID NO: 1857226 - DNA, 15 bp, Homo sapiens
tgcacgatccaacct

SEQ ID NO: 1857227 - DNA, 15 bp, Homo sapiens
gcacgatccaacctg

SEQ ID NO: 1857228 - DNA, 15 bp, Homo sapiens
cacgatccaacctgt

SEQ ID NO: 1857229 - DNA, 15 bp, Homo sapiens
acgatccaacctgtt

SEQ ID NO: 1857230 - DNA, 15 bp, Homo sapiens
cgatccaacctgttg

SEQ ID NO: 1857231 - DNA, 15 bp, Homo sapiens
gatccaacctgttgt

SEQ ID NO: 1857232 - DNA, 15 bp, Homo sapiens
atccaacctgttgtg

SEQ ID NO: 1857233 - DNA, 15 bp, Homo sapiens
tccaacctgttgtgt

SEQ ID NO: 1857234 - DNA, 15 bp, Homo sapiens
ccaacctgttgtgtt

SEQ ID NO: 1857235 - DNA, 15 bp, Homo sapiens
caacctgttgtgttt

SEQ ID NO: 1857236 - DNA, 15 bp, Homo sapiens
aacctgttgtgtttg

SEQ ID NO: 1857237 - DNA, 15 bp, Homo sapiens
acctgttgtgtttgc

SEQ ID NO: 1857238 - DNA, 15 bp, Homo sapiens
cctgttgtgtttgct

SEQ ID NO: 1857239 - DNA, 15 bp, Homo sapiens
ctgttgtgtttgctg

SEQ ID NO: 1857240 - DNA, 15 bp, Homo sapiens
tgttgtgtttgctgc

SEQ ID NO: 1857241 - DNA, 15 bp, Homo sapiens
gttgtgtttgctgcg

SEQ ID NO: 1857242 - DNA, 15 bp, Homo sapiens
ttgtgtttgctgcgg

SEQ ID NO: 1857243 - DNA, 15 bp, Homo sapiens
tgtgtttgctgcgga

SEQ ID NO: 1857244 - DNA, 15 bp, Homo sapiens
gtgtttgctgcggac

SEQ ID NO: 1857245 - DNA, 15 bp, Homo sapiens
tgtttgctgcggacc

SEQ ID NO: 1857246 - DNA, 15 bp, Homo sapiens
gtttgctgcggacct

SEQ ID NO: 1857247 - DNA, 15 bp, Homo sapiens
tttgctgcggacctg

SEQ ID NO: 1857248 - DNA, 15 bp, Homo sapiens
ttgctgcggacctgg

SEQ ID NO: 1857249 - DNA, 15 bp, Homo sapiens
tgctgcggacctggg

SEQ ID NO: 1857250 - DNA, 15 bp, Homo sapiens
gctgcggacctgggc

SEQ ID NO: 1857251 - DNA, 15 bp, Homo sapiens
ctgcggacctgggca

SEQ ID NO: 1857252 - DNA, 15 bp, Homo sapiens
tgcggacctgggcag

SEQ ID NO: 1857253 - DNA, 15 bp, Homo sapiens
gcggacctgggcagc

SEQ ID NO: 1857254 - DNA, 15 bp, Homo sapiens
cggacctgggcagca

SEQ ID NO: 1857255 - DNA, 15 bp, Homo sapiens
ggacctgggcagcac

SEQ ID NO: 1857256 - DNA, 15 bp, Homo sapiens
gacctgggcagcacc

SEQ ID NO: 1857257 - DNA, 15 bp, Homo sapiens
acctgggcagcacct

SEQ ID NO: 1857258 - DNA, 15 bp, Homo sapiens
cctgggcagcacctt

SEQ ID NO: 1857259 - DNA, 15 bp, Homo sapiens
ctgggcagcaccttt

SEQ ID NO: 1857260 - DNA, 15 bp, Homo sapiens
tgggcagcacctttc

SEQ ID NO: 1857261 - DNA, 15 bp, Homo sapiens
gggcagcacctttcc

SEQ ID NO: 1857262 - DNA, 15 bp, Homo sapiens
ggcagcacctttcct

SEQ ID NO: 1857263 - DNA, 15 bp, Homo sapiens
gcagcacctttcctt

SEQ ID NO: 1857264 - DNA, 15 bp, Homo sapiens
cagcacctttcctta

SEQ ID NO: 1857265 - DNA, 15 bp, Homo sapiens
agcacctttccttag

SEQ ID NO: 1857266 - DNA, 15 bp, Homo sapiens
gcacctttccttagc

SEQ ID NO: 1857267 - DNA, 15 bp, Homo sapiens
cacctttccttagcc

SEQ ID NO: 1857268 - DNA, 15 bp, Homo sapiens
acctttccttagccg

SEQ ID NO: 1857269 - DNA, 15 bp, Homo sapiens
cctttccttagccgg

SEQ ID NO: 1857270 - DNA, 15 bp, Homo sapiens
ctttccttagccggg

SEQ ID NO: 1857271 - DNA, 15 bp, Homo sapiens
tttccttagccgggc

SEQ ID NO: 1857272 - DNA, 15 bp, Homo sapiens
ttccttagccgggct

SEQ ID NO: 1857273 - DNA, 15 bp, Homo sapiens
tccttagccgggctc

SEQ ID NO: 1857274 - DNA, 15 bp, Homo sapiens
ccttagccgggctct

SEQ ID NO: 1857275 - DNA, 15 bp, Homo sapiens
cttagccgggctctc

SEQ ID NO: 1857276 - DNA, 15 bp, Homo sapiens
ttagccgggctctcc

SEQ ID NO: 1857277 - DNA, 15 bp, Homo sapiens
tagccgggctctccg

SEQ ID NO: 1857278 - DNA, 15 bp, Homo sapiens
agccgggctctccgc

SEQ ID NO: 1857279 - DNA, 15 bp, Homo sapiens
gccgggctctccgct

SEQ ID NO: 1857280 - DNA, 15 bp, Homo sapiens
ccgggctctccgcta

SEQ ID NO: 1857281 - DNA, 15 bp, Homo sapiens
cgggctctccgctag

SEQ ID NO: 1857282 - DNA, 15 bp, Homo sapiens
gggctctccgctagg

SEQ ID NO: 1857283 - DNA, 15 bp, Homo sapiens
ggctctccgctagga

SEQ ID NO: 1857284 - DNA, 15 bp, Homo sapiens
gctctccgctaggac

SEQ ID NO: 1857285 - DNA, 15 bp, Homo sapiens
ctctccgctaggact

SEQ ID NO: 1857286 - DNA, 15 bp, Homo sapiens
tctccgctaggactt

SEQ ID NO: 1857287 - DNA, 15 bp, Homo sapiens
ctccgctaggacttc

SEQ ID NO: 1857288 - DNA, 15 bp, Homo sapiens
tccgctaggacttca

SEQ ID NO: 1857289 - DNA, 15 bp, Homo sapiens
ccgctaggacttcag

SEQ ID NO: 1857290 - DNA, 15 bp, Homo sapiens
cgctaggacttcagg

SEQ ID NO: 1857291 - DNA, 15 bp, Homo sapiens
gctaggacttcaggg

SEQ ID NO: 1857292 - DNA, 15 bp, Homo sapiens
ctaggacttcaggga

SEQ ID NO: 1857293 - DNA, 15 bp, Homo sapiens
taggacttcagggag

SEQ ID NO: 1857294 - DNA, 15 bp, Homo sapiens
aggacttcagggagt

SEQ ID NO: 1857295 - DNA, 15 bp, Homo sapiens
ggacttcagggagtt

SEQ ID NO: 1857296 - DNA, 15 bp, Homo sapiens
gacttcagggagttt

SEQ ID NO: 1857297 - DNA, 15 bp, Homo sapiens
acttcagggagtttg

SEQ ID NO: 1857298 - DNA, 15 bp, Homo sapiens
cttcagggagtttgg

SEQ ID NO: 1857299 - DNA, 15 bp, Homo sapiens
ttcagggagtttggc

SEQ ID NO: 1857300 - DNA, 15 bp, Homo sapiens
tcagggagtttggcg

SEQ ID NO: 1857301 - DNA, 15 bp, Homo sapiens
cagggagtttggcgc

SEQ ID NO: 1857302 - DNA, 15 bp, Homo sapiens
agggagtttggcgct

SEQ ID NO: 1857303 - DNA, 15 bp, Homo sapiens
gggagtttggcgctg

SEQ ID NO: 1857304 - DNA, 15 bp, Homo sapiens
ggagtttggcgctgc

SEQ ID NO: 1857305 - DNA, 15 bp, Homo sapiens
gagtttggcgctgcc

SEQ ID NO: 1857306 - DNA, 15 bp, Homo sapiens
agtttggcgctgcca

SEQ ID NO: 1857307 - DNA, 15 bp, Homo sapiens
gtttggcgctgccag

SEQ ID NO: 1857308 - DNA, 15 bp, Homo sapiens
tttggcgctgccagt

SEQ ID NO: 1857309 - DNA, 15 bp, Homo sapiens
ttggcgctgccagtg

SEQ ID NO: 1857310 - DNA, 15 bp, Homo sapiens
tggcgctgccagtgg

SEQ ID NO: 1857311 - DNA, 15 bp, Homo sapiens
ggcgctgccagtggt

SEQ ID NO: 1857312 - DNA, 15 bp, Homo sapiens
gcgctgccagtggtg

SEQ ID NO: 1857313 - DNA, 15 bp, Homo sapiens
cgctgccagtggtgc

SEQ ID NO: 1857314 - DNA, 15 bp, Homo sapiens
gctgccagtggtgca

SEQ ID NO: 1857315 - DNA, 15 bp, Homo sapiens
ctgccagtggtgcat

SEQ ID NO: 1857316 - DNA, 15 bp, Homo sapiens
tgccagtggtgcatg

SEQ ID NO: 1857317 - DNA, 15 bp, Homo sapiens
gccagtggtgcatga

SEQ ID NO: 1857318 - DNA, 15 bp, Homo sapiens
ccagtggtgcatgac

SEQ ID NO: 1857319 - DNA, 15 bp, Homo sapiens
cagtggtgcatgaca

SEQ ID NO: 1857320 - DNA, 15 bp, Homo sapiens
agtggtgcatgacaa

SEQ ID NO: 1857321 - DNA, 15 bp, Homo sapiens
gtggtgcatgacaag

SEQ ID NO: 1857322 - DNA, 15 bp, Homo sapiens
tggtgcatgacaagc

SEQ ID NO: 1857323 - DNA, 15 bp, Homo sapiens
ggtgcatgacaagct

SEQ ID NO: 1857324 - DNA, 15 bp, Homo sapiens
gtgcatgacaagctt

SEQ ID NO: 1857325 - DNA, 15 bp, Homo sapiens
tgcatgacaagctta

SEQ ID NO: 1857326 - DNA, 15 bp, Homo sapiens
gcatgacaagcttac

SEQ ID NO: 1857327 - DNA, 15 bp, Homo sapiens
catgacaagcttaca

SEQ ID NO: 1857328 - DNA, 15 bp, Homo sapiens
atgacaagcttacag

SEQ ID NO: 1857329 - DNA, 15 bp, Homo sapiens
tgacaagcttacagg

SEQ ID NO: 1857330 - DNA, 15 bp, Homo sapiens
gacaagcttacaggg

SEQ ID NO: 1857331 - DNA, 15 bp, Homo sapiens
acaagcttacagggt

SEQ ID NO: 1857332 - DNA, 15 bp, Homo sapiens
caagcttacagggtc

SEQ ID NO: 1857333 - DNA, 15 bp, Homo sapiens
aagcttacagggtct

SEQ ID NO: 1857334 - DNA, 15 bp, Homo sapiens
agcttacagggtctt

SEQ ID NO: 1857335 - DNA, 15 bp, Homo sapiens
gcttacagggtcttg

SEQ ID NO: 1857336 - DNA, 15 bp, Homo sapiens
cttacagggtcttgt

SEQ ID NO: 1857337 - DNA, 15 bp, Homo sapiens
ttacagggtcttgtg

SEQ ID NO: 1857338 - DNA, 15 bp, Homo sapiens
tacagggtcttgtgt

SEQ ID NO: 1857339 - DNA, 15 bp, Homo sapiens
acagggtcttgtgta

SEQ ID NO: 1857340 - DNA, 15 bp, Homo sapiens
cagggtcttgtgtat

SEQ ID NO: 1857341 - DNA, 15 bp, Homo sapiens
agggtcttgtgtatt

SEQ ID NO: 1857342 - DNA, 15 bp, Homo sapiens
gggtcttgtgtattt

SEQ ID NO: 1857343 - DNA, 15 bp, Homo sapiens
ggtcttgtgtatttg

SEQ ID NO: 1857344 - DNA, 15 bp, Homo sapiens
gtcttgtgtatttgt

SEQ ID NO: 1857345 - DNA, 15 bp, Homo sapiens
tcttgtgtatttgtg

SEQ ID NO: 1857346 - DNA, 15 bp, Homo sapiens
cttgtgtatttgtgt

SEQ ID NO: 1857347 - DNA, 15 bp, Homo sapiens
ttgtgtatttgtgtt

SEQ ID NO: 1857348 - DNA, 15 bp, Homo sapiens
tgtgtatttgtgttt

SEQ ID NO: 1857349 - DNA, 15 bp, Homo sapiens
gtgtatttgtgtttc

SEQ ID NO: 1857350 - DNA, 15 bp, Homo sapiens
tgtatttgtgtttca

SEQ ID NO: 1857351 - DNA, 15 bp, Homo sapiens
gtatttgtgtttcat

SEQ ID NO: 1857352 - DNA, 15 bp, Homo sapiens
tatttgtgtttcatg

SEQ ID NO: 1857353 - DNA, 15 bp, Homo sapiens
atttgtgtttcatgg

SEQ ID NO: 1857354 - DNA, 15 bp, Homo sapiens
tttgtgtttcatggg

SEQ ID NO: 1857355 - DNA, 15 bp, Homo sapiens
ttgtgtttcatggga

SEQ ID NO: 1857356 - DNA, 15 bp, Homo sapiens
tgtgtttcatgggac

SEQ ID NO: 1857357 - DNA, 15 bp, Homo sapiens
gtgtttcatgggact

SEQ ID NO: 1857358 - DNA, 15 bp, Homo sapiens
tgtttcatgggacta

SEQ ID NO: 1857359 - DNA, 15 bp, Homo sapiens
gtttcatgggactaa

SEQ ID NO: 1857360 - DNA, 15 bp, Homo sapiens
tttcatgggactaat

SEQ ID NO: 1857361 - DNA, 15 bp, Homo sapiens
ttcatgggactaatg

SEQ ID NO: 1857362 - DNA, 15 bp, Homo sapiens
tcatgggactaatga

SEQ ID NO: 1857363 - DNA, 15 bp, Homo sapiens
catgggactaatgag

SEQ ID NO: 1857364 - DNA, 15 bp, Homo sapiens
atgggactaatgagt

SEQ ID NO: 1857365 - DNA, 15 bp, Homo sapiens
tgggactaatgagtt

SEQ ID NO: 1857366 - DNA, 15 bp, Homo sapiens
gggactaatgagttg

SEQ ID NO: 1857367 - DNA, 15 bp, Homo sapiens
ggactaatgagttgt

SEQ ID NO: 1857368 - DNA, 15 bp, Homo sapiens
gactaatgagttgtg

SEQ ID NO: 1857369 - DNA, 15 bp, Homo sapiens
actaatgagttgtgg

SEQ ID NO: 1857370 - DNA, 15 bp, Homo sapiens
ctaatgagttgtggt

SEQ ID NO: 1857371 - DNA, 15 bp, Homo sapiens
taatgagttgtggtt

SEQ ID NO: 1857372 - DNA, 15 bp, Homo sapiens
aatgagttgtggttc

SEQ ID NO: 1857373 - DNA, 15 bp, Homo sapiens
atgagttgtggttca

SEQ ID NO: 1857374 - DNA, 15 bp, Homo sapiens
tgagttgtggttcat

SEQ ID NO: 1857375 - DNA, 15 bp, Homo sapiens
gagttgtggttcatg

SEQ ID NO: 1857376 - DNA, 15 bp, Homo sapiens
agttgtggttcatgg

SEQ ID NO: 1857377 - DNA, 15 bp, Homo sapiens
gttgtggttcatgga

SEQ ID NO: 1857378 - DNA, 15 bp, Homo sapiens
ttgtggttcatggac

SEQ ID NO: 1857379 - DNA, 15 bp, Homo sapiens
tgtggttcatggaca

SEQ ID NO: 1857380 - DNA, 15 bp, Homo sapiens
gtggttcatggacat

SEQ ID NO: 1857381 - DNA, 15 bp, Homo sapiens
tggttcatggacatt

SEQ ID NO: 1857382 - DNA, 15 bp, Homo sapiens
ggttcatggacatta

SEQ ID NO: 1857383 - DNA, 15 bp, Homo sapiens
gttcatggacattag

SEQ ID NO: 1857384 - DNA, 15 bp, Homo sapiens
ttcatggacattagg

SEQ ID NO: 1857385 - DNA, 15 bp, Homo sapiens
tcatggacattaggt

SEQ ID NO: 1857386 - DNA, 15 bp, Homo sapiens
catggacattaggtt

SEQ ID NO: 1857387 - DNA, 15 bp, Homo sapiens
atggacattaggttt

SEQ ID NO: 1857388 - DNA, 15 bp, Homo sapiens
tggacattaggtttt

SEQ ID NO: 1857389 - DNA, 15 bp, Homo sapiens
ggacattaggttttg

SEQ ID NO: 1857390 - DNA, 15 bp, Homo sapiens
gacattaggttttgc

SEQ ID NO: 1857391 - DNA, 15 bp, Homo sapiens
acattaggttttgct

SEQ ID NO: 1857392 - DNA, 15 bp, Homo sapiens
cattaggttttgctt

SEQ ID NO: 1857393 - DNA, 15 bp, Homo sapiens
attaggttttgcttt

SEQ ID NO: 1857394 - DNA, 15 bp, Homo sapiens
ttaggttttgcttta

SEQ ID NO: 1857395 - DNA, 15 bp, Homo sapiens
taggttttgctttaa

SEQ ID NO: 1857396 - DNA, 15 bp, Homo sapiens
aggttttgctttaat

SEQ ID NO: 1857397 - DNA, 15 bp, Homo sapiens
ggttttgctttaatt

SEQ ID NO: 1857398 - DNA, 15 bp, Homo sapiens
gttttgctttaattg

SEQ ID NO: 1857399 - DNA, 15 bp, Homo sapiens
ttttgctttaattgc

SEQ ID NO: 1857400 - DNA, 15 bp, Homo sapiens
tttgctttaattgct

SEQ ID NO: 1857401 - DNA, 15 bp, Homo sapiens
ttgctttaattgctt

SEQ ID NO: 1857402 - DNA, 15 bp, Homo sapiens
tgctttaattgcttg

SEQ ID NO: 1857403 - DNA, 15 bp, Homo sapiens
gctttaattgcttgg

SEQ ID NO: 1857404 - DNA, 15 bp, Homo sapiens
ctttaattgcttgga

SEQ ID NO: 1857405 - DNA, 15 bp, Homo sapiens
tttaattgcttggag

SEQ ID NO: 1857406 - DNA, 15 bp, Homo sapiens
ttaattgcttggagg

SEQ ID NO: 1857407 - DNA, 15 bp, Homo sapiens
taattgcttggaggg

SEQ ID NO: 1857408 - DNA, 15 bp, Homo sapiens
aattgcttggagggc

SEQ ID NO: 1857409 - DNA, 15 bp, Homo sapiens
attgcttggagggcg

SEQ ID NO: 1857410 - DNA, 15 bp, Homo sapiens
ttgcttggagggcgg

SEQ ID NO: 1857411 - DNA, 15 bp, Homo sapiens
tgcttggagggcggt

SEQ ID NO: 1857412 - DNA, 15 bp, Homo sapiens
gcttggagggcggtt

SEQ ID NO: 1857413 - DNA, 15 bp, Homo sapiens
cttggagggcggttg

SEQ ID NO: 1857414 - DNA, 15 bp, Homo sapiens
ttggagggcggttgt

SEQ ID NO: 1857415 - DNA, 15 bp, Homo sapiens
tggagggcggttgtg

SEQ ID NO: 1857416 - DNA, 15 bp, Homo sapiens
ggagggcggttgtgg

SEQ ID NO: 1857417 - DNA, 15 bp, Homo sapiens
gagggcggttgtgga

SEQ ID NO: 1857418 - DNA, 15 bp, Homo sapiens
agggcggttgtggag

SEQ ID NO: 1857419 - DNA, 15 bp, Homo sapiens
gggcggttgtggaga

SEQ ID NO: 1857420 - DNA, 15 bp, Homo sapiens
ggcggttgtggagac

SEQ ID NO: 1857421 - DNA, 15 bp, Homo sapiens
gcggttgtggagact

SEQ ID NO: 1857422 - DNA, 15 bp, Homo sapiens
cggttgtggagactg

SEQ ID NO: 1857423 - DNA, 15 bp, Homo sapiens
ggttgtggagactgt

SEQ ID NO: 1857424 - DNA, 15 bp, Homo sapiens
gttgtggagactgtt

SEQ ID NO: 1857425 - DNA, 15 bp, Homo sapiens
ttgtggagactgttt

SEQ ID NO: 1857426 - DNA, 15 bp, Homo sapiens
tgtggagactgtttc

SEQ ID NO: 1857427 - DNA, 15 bp, Homo sapiens
gtggagactgtttct

SEQ ID NO: 1857428 - DNA, 15 bp, Homo sapiens
tggagactgtttctc

SEQ ID NO: 1857429 - DNA, 15 bp, Homo sapiens
ggagactgtttctca

SEQ ID NO: 1857430 - DNA, 15 bp, Homo sapiens
gagactgtttctcag

SEQ ID NO: 1857431 - DNA, 15 bp, Homo sapiens
agactgtttctcagc

SEQ ID NO: 1857432 - DNA, 15 bp, Homo sapiens
gactgtttctcagct

SEQ ID NO: 1857433 - DNA, 15 bp, Homo sapiens
actgtttctcagctg

SEQ ID NO: 1857434 - DNA, 15 bp, Homo sapiens
ctgtttctcagctgg

SEQ ID NO: 1857435 - DNA, 15 bp, Homo sapiens
tgtttctcagctgga

SEQ ID NO: 1857436 - DNA, 15 bp, Homo sapiens
gtttctcagctggaa

SEQ ID NO: 1857437 - DNA, 15 bp, Homo sapiens
tttctcagctggaat

SEQ ID NO: 1857438 - DNA, 15 bp, Homo sapiens
ttctcagctggaatt

SEQ ID NO: 1857439 - DNA, 15 bp, Homo sapiens
tctcagctggaattg

SEQ ID NO: 1857440 - DNA, 15 bp, Homo sapiens
ctcagctggaattgt

SEQ ID NO: 1857441 - DNA, 15 bp, Homo sapiens
tcagctggaattgtc

SEQ ID NO: 1857442 - DNA, 15 bp, Homo sapiens
cagctggaattgtca

SEQ ID NO: 1857443 - DNA, 15 bp, Homo sapiens
agctggaattgtcat

SEQ ID NO: 1857444 - DNA, 15 bp, Homo sapiens
gctggaattgtcatt

SEQ ID NO: 1857445 - DNA, 15 bp, Homo sapiens
ctggaattgtcatta

SEQ ID NO: 1857446 - DNA, 15 bp, Homo sapiens
tggaattgtcattat

SEQ ID NO: 1857447 - DNA, 15 bp, Homo sapiens
ggaattgtcattatc

SEQ ID NO: 1857448 - DNA, 15 bp, Homo sapiens
gaattgtcattatcc

SEQ ID NO: 1857449 - DNA, 15 bp, Homo sapiens
aattgtcattatcct

SEQ ID NO: 1857450 - DNA, 15 bp, Homo sapiens
attgtcattatcctc

SEQ ID NO: 1857451 - DNA, 15 bp, Homo sapiens
ttgtcattatcctca

SEQ ID NO: 1857452 - DNA, 15 bp, Homo sapiens
tgtcattatcctcat

SEQ ID NO: 1857453 - DNA, 15 bp, Homo sapiens
gtcattatcctcatt

SEQ ID NO: 1857454 - DNA, 15 bp, Homo sapiens
tcattatcctcatta

SEQ ID NO: 1857455 - DNA, 15 bp, Homo sapiens
cattatcctcattaa

SEQ ID NO: 1857456 - DNA, 15 bp, Homo sapiens
attatcctcattaac

SEQ ID NO: 1857457 - DNA, 15 bp, Homo sapiens
ttatcctcattaacg

SEQ ID NO: 1857458 - DNA, 15 bp, Homo sapiens
tatcctcattaacgg

SEQ ID NO: 1857459 - DNA, 15 bp, Homo sapiens
atcctcattaacggt

SEQ ID NO: 1857460 - DNA, 15 bp, Homo sapiens
tcctcattaacggtg

SEQ ID NO: 1857461 - DNA, 15 bp, Homo sapiens
cctcattaacggtga

SEQ ID NO: 1857462 - DNA, 15 bp, Homo sapiens
ctcattaacggtgag

SEQ ID NO: 1857463 - DNA, 15 bp, Homo sapiens
tcattaacggtgagg

SEQ ID NO: 1857464 - DNA, 15 bp, Homo sapiens
cattaacggtgaggt

SEQ ID NO: 1857465 - DNA, 15 bp, Homo sapiens
attaacggtgaggtc

SEQ ID NO: 1857466 - DNA, 15 bp, Homo sapiens
ttaacggtgaggtca

SEQ ID NO: 1857467 - DNA, 15 bp, Homo sapiens
taacggtgaggtcac

SEQ ID NO: 1857468 - DNA, 15 bp, Homo sapiens
aacggtgaggtcact

SEQ ID NO: 1857469 - DNA, 15 bp, Homo sapiens
acggtgaggtcactg

SEQ ID NO: 1857470 - DNA, 15 bp, Homo sapiens
cggtgaggtcactgt

SEQ ID NO: 1857471 - DNA, 15 bp, Homo sapiens
ggtgaggtcactgtg

SEQ ID NO: 1857472 - DNA, 15 bp, Homo sapiens
gtgaggtcactgtgc

SEQ ID NO: 1857473 - DNA, 15 bp, Homo sapiens
tgaggtcactgtgca

SEQ ID NO: 1857474 - DNA, 15 bp, Homo sapiens
gaggtcactgtgcag

SEQ ID NO: 1857475 - DNA, 15 bp, Homo sapiens
aggtcactgtgcaga

SEQ ID NO: 1857476 - DNA, 15 bp, Homo sapiens
ggtcactgtgcagag

SEQ ID NO: 1857477 - DNA, 15 bp, Homo sapiens
gtcactgtgcagagt

SEQ ID NO: 1857478 - DNA, 15 bp, Homo sapiens
tcactgtgcagagta

SEQ ID NO: 1857479 - DNA, 15 bp, Homo sapiens
cactgtgcagagtac

SEQ ID NO: 1857480 - DNA, 15 bp, Homo sapiens
actgtgcagagtacc

SEQ ID NO: 1857481 - DNA, 15 bp, Homo sapiens
ctgtgcagagtacct

SEQ ID NO: 1857482 - DNA, 15 bp, Homo sapiens
tgtgcagagtacctg

SEQ ID NO: 1857483 - DNA, 15 bp, Homo sapiens
gtgcagagtacctga

SEQ ID NO: 1857484 - DNA, 15 bp, Homo sapiens
tgcagagtacctgag

SEQ ID NO: 1857485 - DNA, 15 bp, Homo sapiens
gcagagtacctgagg

SEQ ID NO: 1857486 - DNA, 15 bp, Homo sapiens
cagagtacctgaggg

SEQ ID NO: 1857487 - DNA, 15 bp, Homo sapiens
agagtacctgagggt

SEQ ID NO: 1857488 - DNA, 15 bp, Homo sapiens
gagtacctgagggtg

SEQ ID NO: 1857489 - DNA, 15 bp, Homo sapiens
agtacctgagggtga

SEQ ID NO: 1857490 - DNA, 15 bp, Homo sapiens
gtacctgagggtgac

SEQ ID NO: 1857491 - DNA, 15 bp, Homo sapiens
tacctgagggtgaca

SEQ ID NO: 1857492 - DNA, 15 bp, Homo sapiens
acctgagggtgacag

SEQ ID NO: 1857493 - DNA, 15 bp, Homo sapiens
cctgagggtgacaga

SEQ ID NO: 1857494 - DNA, 15 bp, Homo sapiens
ctgagggtgacagaa

SEQ ID NO: 1857495 - DNA, 15 bp, Homo sapiens
tgagggtgacagaag

SEQ ID NO: 1857496 - DNA, 15 bp, Homo sapiens
gagggtgacagaagt

SEQ ID NO: 1857497 - DNA, 15 bp, Homo sapiens
agggtgacagaagtt

SEQ ID NO: 1857498 - DNA, 15 bp, Homo sapiens
gggtgacagaagttg

SEQ ID NO: 1857499 - DNA, 15 bp, Homo sapiens
ggtgacagaagttga

SEQ ID NO: 1857500 - DNA, 15 bp, Homo sapiens
gtgacagaagttgaa

SEQ ID NO: 1857501 - DNA, 15 bp, Homo sapiens
tgacagaagttgaag

SEQ ID NO: 1857502 - DNA, 15 bp, Homo sapiens
gacagaagttgaaga

SEQ ID NO: 1857503 - DNA, 15 bp, Homo sapiens
acagaagttgaagag

SEQ ID NO: 1857504 - DNA, 15 bp, Homo sapiens
cagaagttgaagaga

SEQ ID NO: 1857505 - DNA, 15 bp, Homo sapiens
agaagttgaagagaa

SEQ ID NO: 1857506 - DNA, 15 bp, Homo sapiens
gaagttgaagagaag

SEQ ID NO: 1857507 - DNA, 15 bp, Homo sapiens
aagttgaagagaagt

SEQ ID NO: 1857508 - DNA, 15 bp, Homo sapiens
agttgaagagaagtc

SEQ ID NO: 1857509 - DNA, 15 bp, Homo sapiens
gttgaagagaagtct

SEQ ID NO: 1857510 - DNA, 15 bp, Homo sapiens
ttgaagagaagtcta

SEQ ID NO: 1857511 - DNA, 15 bp, Homo sapiens
tgaagagaagtctag

SEQ ID NO: 1857512 - DNA, 15 bp, Homo sapiens
gaagagaagtctagt

SEQ ID NO: 1857513 - DNA, 15 bp, Homo sapiens
aagagaagtctagtt

SEQ ID NO: 1857514 - DNA, 15 bp, Homo sapiens
agagaagtctagtta

SEQ ID NO: 1857515 - DNA, 15 bp, Homo sapiens
gagaagtctagttaa

SEQ ID NO: 1857516 - DNA, 15 bp, Homo sapiens
agaagtctagttaag

SEQ ID NO: 1857517 - DNA, 15 bp, Homo sapiens
gaagtctagttaagg

SEQ ID NO: 1857518 - DNA, 15 bp, Homo sapiens
aagtctagttaaggg

SEQ ID NO: 1857519 - DNA, 15 bp, Homo sapiens
agtctagttaagggc

SEQ ID NO: 1857520 - DNA, 15 bp, Homo sapiens
gtctagttaagggca

SEQ ID NO: 1857521 - DNA, 15 bp, Homo sapiens
tctagttaagggcag

SEQ ID NO: 1857522 - DNA, 15 bp, Homo sapiens
ctagttaagggcaga

SEQ ID NO: 1857523 - DNA, 15 bp, Homo sapiens
tagttaagggcagat

SEQ ID NO: 1857524 - DNA, 15 bp, Homo sapiens
agttaagggcagatg

SEQ ID NO: 1857525 - DNA, 15 bp, Homo sapiens
gttaagggcagatgc

SEQ ID NO: 1857526 - DNA, 15 bp, Homo sapiens
ttaagggcagatgca

SEQ ID NO: 1857527 - DNA, 15 bp, Homo sapiens
taagggcagatgcaa

SEQ ID NO: 1857528 - DNA, 15 bp, Homo sapiens
aagggcagatgcaat

SEQ ID NO: 1857529 - DNA, 15 bp, Homo sapiens
agggcagatgcaatc

SEQ ID NO: 1857530 - DNA, 15 bp, Homo sapiens
gggcagatgcaatct

SEQ ID NO: 1857531 - DNA, 15 bp, Homo sapiens
ggcagatgcaatcta

SEQ ID NO: 1857532 - DNA, 15 bp, Homo sapiens
gcagatgcaatctaa

SEQ ID NO: 1857533 - DNA, 15 bp, Homo sapiens
cagatgcaatctaaa

SEQ ID NO: 1857534 - DNA, 15 bp, Homo sapiens
agatgcaatctaaag

SEQ ID NO: 1857535 - DNA, 15 bp, Homo sapiens
gatgcaatctaaagg

SEQ ID NO: 1857536 - DNA, 15 bp, Homo sapiens
atgcaatctaaaggt

SEQ ID NO: 1857537 - DNA, 15 bp, Homo sapiens
tgcaatctaaaggta

SEQ ID NO: 1857538 - DNA, 15 bp, Homo sapiens
gcaatctaaaggtaa

SEQ ID NO: 1857539 - DNA, 15 bp, Homo sapiens
caatctaaaggtaaa

SEQ ID NO: 1857540 - DNA, 15 bp, Homo sapiens
aatctaaaggtaaaa

SEQ ID NO: 1857541 - DNA, 15 bp, Homo sapiens
atctaaaggtaaaaa

SEQ ID NO: 1857542 - DNA, 15 bp, Homo sapiens
tctaaaggtaaaaat

SEQ ID NO: 1857543 - DNA, 15 bp, Homo sapiens
ctaaaggtaaaaatc

SEQ ID NO: 1857544 - DNA, 15 bp, Homo sapiens
taaaggtaaaaatca

SEQ ID NO: 1857545 - DNA, 15 bp, Homo sapiens
aaaggtaaaaatcag

SEQ ID NO: 1857546 - DNA, 15 bp, Homo sapiens
aaggtaaaaatcagt

SEQ ID NO: 1857547 - DNA, 15 bp, Homo sapiens
aggtaaaaatcagtg

SEQ ID NO: 1857548 - DNA, 15 bp, Homo sapiens
ggtaaaaatcagtga

SEQ ID NO: 1857549 - DNA, 15 bp, Homo sapiens
gtaaaaatcagtgag

SEQ ID NO: 1857550 - DNA, 15 bp, Homo sapiens
taaaaatcagtgagg

SEQ ID NO: 1857551 - DNA, 15 bp, Homo sapiens
aaaaatcagtgagga

SEQ ID NO: 1857552 - DNA, 15 bp, Homo sapiens
aaaatcagtgaggaa

SEQ ID NO: 1857553 - DNA, 15 bp, Homo sapiens
aaatcagtgaggaaa

SEQ ID NO: 1857554 - DNA, 15 bp, Homo sapiens
aatcagtgaggaaac

SEQ ID NO: 1857555 - DNA, 15 bp, Homo sapiens
atcagtgaggaaact

SEQ ID NO: 1857556 - DNA, 15 bp, Homo sapiens
tcagtgaggaaactc

SEQ ID NO: 1857557 - DNA, 15 bp, Homo sapiens
cagtgaggaaactcc

SEQ ID NO: 1857558 - DNA, 15 bp, Homo sapiens
agtgaggaaactccg

SEQ ID NO: 1857559 - DNA, 15 bp, Homo sapiens
gtgaggaaactccga

SEQ ID NO: 1857560 - DNA, 15 bp, Homo sapiens
tgaggaaactccgag

SEQ ID NO: 1857561 - DNA, 15 bp, Homo sapiens
gaggaaactccgagt

SEQ ID NO: 1857562 - DNA, 15 bp, Homo sapiens
aggaaactccgagtg

SEQ ID NO: 1857563 - DNA, 15 bp, Homo sapiens
ggaaactccgagtgt

SEQ ID NO: 1857564 - DNA, 15 bp, Homo sapiens
gaaactccgagtgtt

SEQ ID NO: 1857565 - DNA, 15 bp, Homo sapiens
aaactccgagtgttg

SEQ ID NO: 1857566 - DNA, 15 bp, Homo sapiens
aactccgagtgttgg

SEQ ID NO: 1857567 - DNA, 15 bp, Homo sapiens
actccgagtgttggg

SEQ ID NO: 1857568 - DNA, 15 bp, Homo sapiens
ctccgagtgttgggt

SEQ ID NO: 1857569 - DNA, 15 bp, Homo sapiens
tccgagtgttgggtg

SEQ ID NO: 1857570 - DNA, 15 bp, Homo sapiens
ccgagtgttgggtgc

SEQ ID NO: 1857571 - DNA, 15 bp, Homo sapiens
cgagtgttgggtgcc

SEQ ID NO: 1857572 - DNA, 15 bp, Homo sapiens
gagtgttgggtgcca

SEQ ID NO: 1857573 - DNA, 15 bp, Homo sapiens
agtgttgggtgccaa

SEQ ID NO: 1857574 - DNA, 15 bp, Homo sapiens
gtgttgggtgccaaa

SEQ ID NO: 1857575 - DNA, 15 bp, Homo sapiens
tgttgggtgccaaat

SEQ ID NO: 1857576 - DNA, 15 bp, Homo sapiens
gttgggtgccaaatg

SEQ ID NO: 1857577 - DNA, 15 bp, Homo sapiens
ttgggtgccaaatgt

SEQ ID NO: 1857578 - DNA, 15 bp, Homo sapiens
tgggtgccaaatgtt

SEQ ID NO: 1857579 - DNA, 15 bp, Homo sapiens
gggtgccaaatgttt

SEQ ID NO: 1857580 - DNA, 15 bp, Homo sapiens
ggtgccaaatgtttt

SEQ ID NO: 1857581 - DNA, 15 bp, Homo sapiens
gtgccaaatgtttta

SEQ ID NO: 1857582 - DNA, 15 bp, Homo sapiens
tgccaaatgttttat

SEQ ID NO: 1857583 - DNA, 15 bp, Homo sapiens
ccaaatgttttatag

SEQ ID NO: 1857584 - DNA, 15 bp, Homo sapiens
caaatgttttatagg

SEQ ID NO: 1857585 - DNA, 15 bp, Homo sapiens
aaatgttttatagga

SEQ ID NO: 1857586 - DNA, 15 bp, Homo sapiens
aatgttttataggaa

SEQ ID NO: 1857587 - DNA, 15 bp, Homo sapiens
atgttttataggaac

SEQ ID NO: 1857588 - DNA, 15 bp, Homo sapiens
tgttttataggaact

SEQ ID NO: 1857589 - DNA, 15 bp, Homo sapiens
gttttataggaactg

SEQ ID NO: 1857590 - DNA, 15 bp, Homo sapiens
ttttataggaactga

SEQ ID NO: 1857591 - DNA, 15 bp, Homo sapiens
tttataggaactgag

SEQ ID NO: 1857592 - DNA, 15 bp, Homo sapiens
ttataggaactgagg

SEQ ID NO: 1857593 - DNA, 15 bp, Homo sapiens
tataggaactgaggg

SEQ ID NO: 1857594 - DNA, 15 bp, Homo sapiens
ataggaactgagggc

SEQ ID NO: 1857595 - DNA, 15 bp, Homo sapiens
taggaactgagggca

SEQ ID NO: 1857596 - DNA, 15 bp, Homo sapiens
aggaactgagggcag

SEQ ID NO: 1857597 - DNA, 15 bp, Homo sapiens
ggaactgagggcaga

SEQ ID NO: 1857598 - DNA, 15 bp, Homo sapiens
gaactgagggcagag

SEQ ID NO: 1857599 - DNA, 15 bp, Homo sapiens
aactgagggcagaga

SEQ ID NO: 1857600 - DNA, 15 bp, Homo sapiens
actgagggcagagag

SEQ ID NO: 1857601 - DNA, 15 bp, Homo sapiens
ctgagggcagagagc

SEQ ID NO: 1857602 - DNA, 15 bp, Homo sapiens
tgagggcagagagcc

SEQ ID NO: 1857603 - DNA, 15 bp, Homo sapiens
gagggcagagagcct

SEQ ID NO: 1857604 - DNA, 15 bp, Homo sapiens
agggcagagagcctt

SEQ ID NO: 1857605 - DNA, 15 bp, Homo sapiens
gggcagagagcctta

SEQ ID NO: 1857606 - DNA, 15 bp, Homo sapiens
ggcagagagccttag

SEQ ID NO: 1857607 - DNA, 15 bp, Homo sapiens
gcagagagccttagc

SEQ ID NO: 1857608 - DNA, 15 bp, Homo sapiens
cagagagccttagca

SEQ ID NO: 1857609 - DNA, 15 bp, Homo sapiens
agagagccttagcag

SEQ ID NO: 1857610 - DNA, 15 bp, Homo sapiens
gagagccttagcagg

SEQ ID NO: 1857611 - DNA, 15 bp, Homo sapiens
agagccttagcaggt

SEQ ID NO: 1857612 - DNA, 15 bp, Homo sapiens
gagccttagcaggtc

SEQ ID NO: 1857613 - DNA, 15 bp, Homo sapiens
agccttagcaggtct

SEQ ID NO: 1857614 - DNA, 15 bp, Homo sapiens
gccttagcaggtctg

SEQ ID NO: 1857615 - DNA, 15 bp, Homo sapiens
ccttagcaggtctgg

SEQ ID NO: 1857616 - DNA, 15 bp, Homo sapiens
cttagcaggtctggg

SEQ ID NO: 1857617 - DNA, 15 bp, Homo sapiens
ttagcaggtctgggg

SEQ ID NO: 1857618 - DNA, 15 bp, Homo sapiens
tagcaggtctggggt

SEQ ID NO: 1857619 - DNA, 15 bp, Homo sapiens
agcaggtctggggtt

SEQ ID NO: 1857620 - DNA, 15 bp, Homo sapiens
gcaggtctggggttg

SEQ ID NO: 1857621 - DNA, 15 bp, Homo sapiens
caggtctggggttgc

SEQ ID NO: 1857622 - DNA, 15 bp, Homo sapiens
aggtctggggttgcc

SEQ ID NO: 1857623 - DNA, 15 bp, Homo sapiens
ggtctggggttgcct

SEQ ID NO: 1857624 - DNA, 15 bp, Homo sapiens
gtctggggttgcctg

SEQ ID NO: 1857625 - DNA, 15 bp, Homo sapiens
tctggggttgcctgg

SEQ ID NO: 1857626 - DNA, 15 bp, Homo sapiens
ctggggttgcctggg

SEQ ID NO: 1857627 - DNA, 15 bp, Homo sapiens
tggggttgcctggga

SEQ ID NO: 1857628 - DNA, 15 bp, Homo sapiens
ggggttgcctgggaa

SEQ ID NO: 1857629 - DNA, 15 bp, Homo sapiens
gggttgcctgggaag

SEQ ID NO: 1857630 - DNA, 15 bp, Homo sapiens
ggttgcctgggaagg

SEQ ID NO: 1857631 - DNA, 15 bp, Homo sapiens
gttgcctgggaaggt

SEQ ID NO: 1857632 - DNA, 15 bp, Homo sapiens
ttgcctgggaaggtt

SEQ ID NO: 1857633 - DNA, 15 bp, Homo sapiens
tgcctgggaaggttt

SEQ ID NO: 1857634 - DNA, 15 bp, Homo sapiens
gcctgggaaggtttc

SEQ ID NO: 1857635 - DNA, 15 bp, Homo sapiens
cctgggaaggtttcc

SEQ ID NO: 1857636 - DNA, 15 bp, Homo sapiens
ctgggaaggtttcca

SEQ ID NO: 1857637 - DNA, 15 bp, Homo sapiens
tgggaaggtttccag

SEQ ID NO: 1857638 - DNA, 15 bp, Homo sapiens
gggaaggtttccaga

SEQ ID NO: 1857639 - DNA, 15 bp, Homo sapiens
ggaaggtttccagag

SEQ ID NO: 1857640 - DNA, 15 bp, Homo sapiens
gaaggtttccagaga

SEQ ID NO: 1857641 - DNA, 15 bp, Homo sapiens
aaggtttccagagat

SEQ ID NO: 1857642 - DNA, 15 bp, Homo sapiens
aggtttccagagatg

SEQ ID NO: 1857643 - DNA, 15 bp, Homo sapiens
ggtttccagagatga

SEQ ID NO: 1857644 - DNA, 15 bp, Homo sapiens
gtttccagagatgag

SEQ ID NO: 1857645 - DNA, 15 bp, Homo sapiens
tttccagagatgagg

SEQ ID NO: 1857646 - DNA, 15 bp, Homo sapiens
ttccagagatgaggg

SEQ ID NO: 1857647 - DNA, 15 bp, Homo sapiens
tccagagatgagggg

SEQ ID NO: 1857648 - DNA, 15 bp, Homo sapiens
ccagagatgaggggt

SEQ ID NO: 1857649 - DNA, 15 bp, Homo sapiens
cagagatgaggggtt

SEQ ID NO: 1857650 - DNA, 15 bp, Homo sapiens
agagatgaggggttt

SEQ ID NO: 1857651 - DNA, 15 bp, Homo sapiens
gagatgaggggtttg

SEQ ID NO: 1857652 - DNA, 15 bp, Homo sapiens
agatgaggggtttgg

SEQ ID NO: 1857653 - DNA, 15 bp, Homo sapiens
gatgaggggtttgga

SEQ ID NO: 1857654 - DNA, 15 bp, Homo sapiens
atgaggggtttggac

SEQ ID NO: 1857655 - DNA, 15 bp, Homo sapiens
tgaggggtttggact

SEQ ID NO: 1857656 - DNA, 15 bp, Homo sapiens
gaggggtttggacta

SEQ ID NO: 1857657 - DNA, 15 bp, Homo sapiens
aggggtttggactag

SEQ ID NO: 1857658 - DNA, 15 bp, Homo sapiens
ggggtttggactagc

SEQ ID NO: 1857659 - DNA, 15 bp, Homo sapiens
gggtttggactagcc

SEQ ID NO: 1857660 - DNA, 15 bp, Homo sapiens
ggtttggactagcct

SEQ ID NO: 1857661 - DNA, 15 bp, Homo sapiens
gtttggactagcctg

SEQ ID NO: 1857662 - DNA, 15 bp, Homo sapiens
tttggactagcctgg

SEQ ID NO: 1857663 - DNA, 15 bp, Homo sapiens
ttggactagcctggg

SEQ ID NO: 1857664 - DNA, 15 bp, Homo sapiens
tggactagcctggga

SEQ ID NO: 1857665 - DNA, 15 bp, Homo sapiens
ggactagcctgggag

SEQ ID NO: 1857666 - DNA, 15 bp, Homo sapiens
gactagcctgggaga

SEQ ID NO: 1857667 - DNA, 15 bp, Homo sapiens
actagcctgggagag

SEQ ID NO: 1857668 - DNA, 15 bp, Homo sapiens
ctagcctgggagagg

SEQ ID NO: 1857669 - DNA, 15 bp, Homo sapiens
tagcctgggagaggt

SEQ ID NO: 1857670 - DNA, 15 bp, Homo sapiens
agcctgggagaggta

SEQ ID NO: 1857671 - DNA, 15 bp, Homo sapiens
gcctgggagaggtag

SEQ ID NO: 1857672 - DNA, 15 bp, Homo sapiens
cctgggagaggtaga

SEQ ID NO: 1857673 - DNA, 15 bp, Homo sapiens
ctgggagaggtagaa

SEQ ID NO: 1857674 - DNA, 15 bp, Homo sapiens
tgggagaggtagaac

SEQ ID NO: 1857675 - DNA, 15 bp, Homo sapiens
gggagaggtagaaca

SEQ ID NO: 1857676 - DNA, 15 bp, Homo sapiens
ggagaggtagaacat

SEQ ID NO: 1857677 - DNA, 15 bp, Homo sapiens
gagaggtagaacatt

SEQ ID NO: 1857678 - DNA, 15 bp, Homo sapiens
agaggtagaacattt

SEQ ID NO: 1857679 - DNA, 15 bp, Homo sapiens
gaggtagaacatttc

SEQ ID NO: 1857680 - DNA, 15 bp, Homo sapiens
aggtagaacatttcc

SEQ ID NO: 1857681 - DNA, 15 bp, Homo sapiens
ggtagaacatttccc

SEQ ID NO: 1857682 - DNA, 15 bp, Homo sapiens
gtagaacatttcccc

SEQ ID NO: 1857683 - DNA, 15 bp, Homo sapiens
tagaacatttcccct

SEQ ID NO: 1857684 - DNA, 15 bp, Homo sapiens
agaacatttcccctc

SEQ ID NO: 1857685 - DNA, 15 bp, Homo sapiens
gaacatttcccctcc

SEQ ID NO: 1857686 - DNA, 15 bp, Homo sapiens
aacatttcccctccg

SEQ ID NO: 1857687 - DNA, 15 bp, Homo sapiens
acatttcccctccgg

SEQ ID NO: 1857688 - DNA, 15 bp, Homo sapiens
catttcccctccggc

SEQ ID NO: 1857689 - DNA, 15 bp, Homo sapiens
atttcccctccggct

SEQ ID NO: 1857690 - DNA, 15 bp, Homo sapiens
tttcccctccggctc

SEQ ID NO: 1857691 - DNA, 15 bp, Homo sapiens
ttcccctccggctcg

SEQ ID NO: 1857692 - DNA, 15 bp, Homo sapiens
tcccctccggctcgg

SEQ ID NO: 1857693 - DNA, 15 bp, Homo sapiens
cccctccggctcgga

SEQ ID NO: 1857694 - DNA, 15 bp, Homo sapiens
ccctccggctcggag

SEQ ID NO: 1857695 - DNA, 15 bp, Homo sapiens
cctccggctcggagc

SEQ ID NO: 1857696 - DNA, 15 bp, Homo sapiens
ctccggctcggagcc

SEQ ID NO: 1857697 - DNA, 15 bp, Homo sapiens
tccggctcggagcct

SEQ ID NO: 1857698 - DNA, 15 bp, Homo sapiens
ccggctcggagcctt

SEQ ID NO: 1857699 - DNA, 15 bp, Homo sapiens
cggctcggagccttg

SEQ ID NO: 1857700 - DNA, 15 bp, Homo sapiens
ggctcggagccttgc

SEQ ID NO: 1857701 - DNA, 15 bp, Homo sapiens
gctcggagccttgct

SEQ ID NO: 1857702 - DNA, 15 bp, Homo sapiens
ctcggagccttgctg

SEQ ID NO: 1857703 - DNA, 15 bp, Homo sapiens
tcggagccttgctga

SEQ ID NO: 1857704 - DNA, 15 bp, Homo sapiens
cggagccttgctgag

SEQ ID NO: 1857705 - DNA, 15 bp, Homo sapiens
ggagccttgctgaga

SEQ ID NO: 1857706 - DNA, 15 bp, Homo sapiens
gagccttgctgagaa

SEQ ID NO: 1857707 - DNA, 15 bp, Homo sapiens
agccttgctgagaat

SEQ ID NO: 1857708 - DNA, 15 bp, Homo sapiens
gccttgctgagaatg

SEQ ID NO: 1857709 - DNA, 15 bp, Homo sapiens
ccttgctgagaatgt

SEQ ID NO: 1857710 - DNA, 15 bp, Homo sapiens
cttgctgagaatgtt

SEQ ID NO: 1857711 - DNA, 15 bp, Homo sapiens
ttgctgagaatgttc

SEQ ID NO: 1857712 - DNA, 15 bp, Homo sapiens
tgctgagaatgttct

SEQ ID NO: 1857713 - DNA, 15 bp, Homo sapiens
gctgagaatgttctc

SEQ ID NO: 1857714 - DNA, 15 bp, Homo sapiens
ctgagaatgttctct

SEQ ID NO: 1857715 - DNA, 15 bp, Homo sapiens
tgagaatgttctctg

SEQ ID NO: 1857716 - DNA, 15 bp, Homo sapiens
gagaatgttctctgt

SEQ ID NO: 1857717 - DNA, 15 bp, Homo sapiens
agaatgttctctgtc

SEQ ID NO: 1857718 - DNA, 15 bp, Homo sapiens
gaatgttctctgtct

SEQ ID NO: 1857719 - DNA, 15 bp, Homo sapiens
aatgttctctgtctt

SEQ ID NO: 1857720 - DNA, 15 bp, Homo sapiens
atgttctctgtcttg

SEQ ID NO: 1857721 - DNA, 15 bp, Homo sapiens
tgttctctgtcttga

SEQ ID NO: 1857722 - DNA, 15 bp, Homo sapiens
gttctctgtcttgat

SEQ ID NO: 1857723 - DNA, 15 bp, Homo sapiens
ttctctgtcttgatc

SEQ ID NO: 1857724 - DNA, 15 bp, Homo sapiens
tctctgtcttgatct

SEQ ID NO: 1857725 - DNA, 15 bp, Homo sapiens
ctctgtcttgatctg

SEQ ID NO: 1857726 - DNA, 15 bp, Homo sapiens
tctgtcttgatctgg

SEQ ID NO: 1857727 - DNA, 15 bp, Homo sapiens
ctgtcttgatctggt

SEQ ID NO: 1857728 - DNA, 15 bp, Homo sapiens
tgtcttgatctggtg

SEQ ID NO: 1857729 - DNA, 15 bp, Homo sapiens
gtcttgatctggtgg

SEQ ID NO: 1857730 - DNA, 15 bp, Homo sapiens
tcttgatctggtggt

SEQ ID NO: 1857731 - DNA, 15 bp, Homo sapiens
cttgatctggtggtg

SEQ ID NO: 1857732 - DNA, 15 bp, Homo sapiens
ttgatctggtggtgg

SEQ ID NO: 1857733 - DNA, 15 bp, Homo sapiens
tgatctggtggtggt

SEQ ID NO: 1857734 - DNA, 15 bp, Homo sapiens
gatctggtggtggtt

SEQ ID NO: 1857735 - DNA, 15 bp, Homo sapiens
atctggtggtggtta

SEQ ID NO: 1857736 - DNA, 15 bp, Homo sapiens
tctggtggtggttac

SEQ ID NO: 1857737 - DNA, 15 bp, Homo sapiens
ctggtggtggttaca

SEQ ID NO: 1857738 - DNA, 15 bp, Homo sapiens
tggtggtggttacac

SEQ ID NO: 1857739 - DNA, 15 bp, Homo sapiens
ggtggtggttacaca

SEQ ID NO: 1857740 - DNA, 15 bp, Homo sapiens
gtggtggttacacag

SEQ ID NO: 1857741 - DNA, 15 bp, Homo sapiens
tggtggttacacaga

SEQ ID NO: 1857742 - DNA, 15 bp, Homo sapiens
ggtggttacacagat

SEQ ID NO: 1857743 - DNA, 15 bp, Homo sapiens
gtggttacacagatg

SEQ ID NO: 1857744 - DNA, 15 bp, Homo sapiens
tggttacacagatgt

SEQ ID NO: 1857745 - DNA, 15 bp, Homo sapiens
ggttacacagatgta

SEQ ID NO: 1857746 - DNA, 15 bp, Homo sapiens
gttacacagatgtat

SEQ ID NO: 1857747 - DNA, 15 bp, Homo sapiens
ttacacagatgtata

SEQ ID NO: 1857748 - DNA, 15 bp, Homo sapiens
tacacagatgtatac

SEQ ID NO: 1857749 - DNA, 15 bp, Homo sapiens
acacagatgtataca

SEQ ID NO: 1857750 - DNA, 15 bp, Homo sapiens
cacagatgtatacat

SEQ ID NO: 1857751 - DNA, 15 bp, Homo sapiens
acagatgtatacatg

SEQ ID NO: 1857752 - DNA, 15 bp, Homo sapiens
cagatgtatacatga

SEQ ID NO: 1857753 - DNA, 15 bp, Homo sapiens
agatgtatacatgag

SEQ ID NO: 1857754 - DNA, 15 bp, Homo sapiens
gatgtatacatgagt

SEQ ID NO: 1857755 - DNA, 15 bp, Homo sapiens
atgtatacatgagta

SEQ ID NO: 1857756 - DNA, 15 bp, Homo sapiens
tgtatacatgagtaa

SEQ ID NO: 1857757 - DNA, 15 bp, Homo sapiens
gtatacatgagtaac

SEQ ID NO: 1857758 - DNA, 15 bp, Homo sapiens
tatacatgagtaaca

SEQ ID NO: 1857759 - DNA, 15 bp, Homo sapiens
atacatgagtaacat

SEQ ID NO: 1857760 - DNA, 15 bp, Homo sapiens
tacatgagtaacatt

SEQ ID NO: 1857761 - DNA, 15 bp, Homo sapiens
acatgagtaacattc

SEQ ID NO: 1857762 - DNA, 15 bp, Homo sapiens
catgagtaacattca

SEQ ID NO: 1857763 - DNA, 15 bp, Homo sapiens
atgagtaacattcat

SEQ ID NO: 1857764 - DNA, 15 bp, Homo sapiens
tgagtaacattcatt

SEQ ID NO: 1857765 - DNA, 15 bp, Homo sapiens
gagtaacattcattg

SEQ ID NO: 1857766 - DNA, 15 bp, Homo sapiens
agtaacattcattgc

SEQ ID NO: 1857767 - DNA, 15 bp, Homo sapiens
gtaacattcattgcg

SEQ ID NO: 1857768 - DNA, 15 bp, Homo sapiens
taacattcattgcgt

SEQ ID NO: 1857769 - DNA, 15 bp, Homo sapiens
aacattcattgcgtc

SEQ ID NO: 1857770 - DNA, 15 bp, Homo sapiens
acattcattgcgtct

SEQ ID NO: 1857771 - DNA, 15 bp, Homo sapiens
cattcattgcgtcta

SEQ ID NO: 1857772 - DNA, 15 bp, Homo sapiens
attcattgcgtctac

SEQ ID NO: 1857773 - DNA, 15 bp, Homo sapiens
ttcattgcgtctact

SEQ ID NO: 1857774 - DNA, 15 bp, Homo sapiens
tcattgcgtctactt

SEQ ID NO: 1857775 - DNA, 15 bp, Homo sapiens
cattgcgtctacttg

SEQ ID NO: 1857776 - DNA, 15 bp, Homo sapiens
attgcgtctacttgg

SEQ ID NO: 1857777 - DNA, 15 bp, Homo sapiens
ttgcgtctacttggg

SEQ ID NO: 1857778 - DNA, 15 bp, Homo sapiens
tgcgtctacttggga

SEQ ID NO: 1857779 - DNA, 15 bp, Homo sapiens
gcgtctacttgggat

SEQ ID NO: 1857780 - DNA, 15 bp, Homo sapiens
cgtctacttgggatt

SEQ ID NO: 1857781 - DNA, 15 bp, Homo sapiens
gtctacttgggattt

SEQ ID NO: 1857782 - DNA, 15 bp, Homo sapiens
tctacttgggatttt

SEQ ID NO: 1857783 - DNA, 15 bp, Homo sapiens
ctacttgggattttg

SEQ ID NO: 1857784 - DNA, 15 bp, Homo sapiens
tacttgggattttgt

SEQ ID NO: 1857785 - DNA, 15 bp, Homo sapiens
acttgggattttgta

SEQ ID NO: 1857786 - DNA, 15 bp, Homo sapiens
cttgggattttgtat

SEQ ID NO: 1857787 - DNA, 15 bp, Homo sapiens
ttgggattttgtata

SEQ ID NO: 1857788 - DNA, 15 bp, Homo sapiens
tgggattttgtatac

SEQ ID NO: 1857789 - DNA, 15 bp, Homo sapiens
gggattttgtatact

SEQ ID NO: 1857790 - DNA, 15 bp, Homo sapiens
ggattttgtatactt

SEQ ID NO: 1857791 - DNA, 15 bp, Homo sapiens
gattttgtatacttt

SEQ ID NO: 1857792 - DNA, 15 bp, Homo sapiens
attttgtatactttg

SEQ ID NO: 1857793 - DNA, 15 bp, Homo sapiens
ttttgtatactttgc

SEQ ID NO: 1857794 - DNA, 15 bp, Homo sapiens
tttgtatactttgct

SEQ ID NO: 1857795 - DNA, 15 bp, Homo sapiens
ttgtatactttgctc

SEQ ID NO: 1857796 - DNA, 15 bp, Homo sapiens
tgtatactttgctct

SEQ ID NO: 1857797 - DNA, 15 bp, Homo sapiens
gtatactttgctcta

SEQ ID NO: 1857798 - DNA, 15 bp, Homo sapiens
tatactttgctctac

SEQ ID NO: 1857799 - DNA, 15 bp, Homo sapiens
atactttgctctact

SEQ ID NO: 1857800 - DNA, 15 bp, Homo sapiens
tactttgctctactt

SEQ ID NO: 1857801 - DNA, 15 bp, Homo sapiens
actttgctctactta

SEQ ID NO: 1857802 - DNA, 15 bp, Homo sapiens
ctttgctctacttaa

SEQ ID NO: 1857803 - DNA, 15 bp, Homo sapiens
tttgctctacttaag

SEQ ID NO: 1857804 - DNA, 15 bp, Homo sapiens
ttgctctacttaagt

SEQ ID NO: 1857805 - DNA, 15 bp, Homo sapiens
tgctctacttaagtt

SEQ ID NO: 1857806 - DNA, 15 bp, Homo sapiens
gctctacttaagtta

SEQ ID NO: 1857807 - DNA, 15 bp, Homo sapiens
ctctacttaagttag

SEQ ID NO: 1857808 - DNA, 15 bp, Homo sapiens
tctacttaagttagt

SEQ ID NO: 1857809 - DNA, 15 bp, Homo sapiens
ctacttaagttagtc

SEQ ID NO: 1857810 - DNA, 15 bp, Homo sapiens
tacttaagttagtcc

SEQ ID NO: 1857811 - DNA, 15 bp, Homo sapiens
acttaagttagtcct

SEQ ID NO: 1857812 - DNA, 15 bp, Homo sapiens
cttaagttagtcctc

SEQ ID NO: 1857813 - DNA, 15 bp, Homo sapiens
ttaagttagtcctca

SEQ ID NO: 1857814 - DNA, 15 bp, Homo sapiens
taagttagtcctcaa

SEQ ID NO: 1857815 - DNA, 15 bp, Homo sapiens
aagttagtcctcaat

SEQ ID NO: 1857816 - DNA, 15 bp, Homo sapiens
agttagtcctcaatt

SEQ ID NO: 1857817 - DNA, 15 bp, Homo sapiens
gttagtcctcaatta

SEQ ID NO: 1857818 - DNA, 15 bp, Homo sapiens
ttagtcctcaattaa

SEQ ID NO: 1857819 - DNA, 15 bp, Homo sapiens
tagtcctcaattaaa

SEQ ID NO: 1857820 - DNA, 15 bp, Homo sapiens
agtcctcaattaaaa

SEQ ID NO: 1857821 - DNA, 15 bp, Homo sapiens
gtcctcaattaaaaa

SEQ ID NO: 1857822 - DNA, 15 bp, Homo sapiens
tcctcaattaaaaaa

SEQ ID NO: 1857823 - DNA, 15 bp, Homo sapiens
cctcaattaaaaaag

SEQ ID NO: 1857824 - DNA, 15 bp, Homo sapiens
ctcaattaaaaaagg

SEQ ID NO: 1857825 - DNA, 15 bp, Homo sapiens
tcaattaaaaaaggg

SEQ ID NO: 1857826 - DNA, 15 bp, Homo sapiens
caattaaaaaagggg

SEQ ID NO: 1857827 - DNA, 15 bp, Homo sapiens
aattaaaaaagggga

SEQ ID NO: 1857828 - DNA, 15 bp, Homo sapiens
attaaaaaaggggaa

SEQ ID NO: 1857829 - DNA, 15 bp, Homo sapiens
ttaaaaaaggggaaa

SEQ ID NO: 1857830 - DNA, 15 bp, Homo sapiens
taaaaaaggggaaag

SEQ ID NO: 1857831 - DNA, 15 bp, Homo sapiens
aaaaaaggggaaaga

SEQ ID NO: 1857832 - DNA, 15 bp, Homo sapiens
aaaaaggggaaagaa

SEQ ID NO: 1857833 - DNA, 15 bp, Homo sapiens
aaaaggggaaagaag

SEQ ID NO: 1857834 - DNA, 15 bp, Homo sapiens
aaaggggaaagaagt

SEQ ID NO: 1857835 - DNA, 15 bp, Homo sapiens
aaggggaaagaagtc

SEQ ID NO: 1857836 - DNA, 15 bp, Homo sapiens
aggggaaagaagtcc

SEQ ID NO: 1857837 - DNA, 15 bp, Homo sapiens
ggggaaagaagtccc

SEQ ID NO: 1857838 - DNA, 15 bp, Homo sapiens
gggaaagaagtcccg

SEQ ID NO: 1857839 - DNA, 15 bp, Homo sapiens
ggaaagaagtcccgg

SEQ ID NO: 1857840 - DNA, 15 bp, Homo sapiens
gaaagaagtcccggc

SEQ ID NO: 1857841 - DNA, 15 bp, Homo sapiens
aaagaagtcccggca

SEQ ID NO: 1857842 - DNA, 15 bp, Homo sapiens
aagaagtcccggcag

SEQ ID NO: 1857843 - DNA, 15 bp, Homo sapiens
agaagtcccggcagc

SEQ ID NO: 1857844 - DNA, 15 bp, Homo sapiens
gaagtcccggcagcc

SEQ ID NO: 1857845 - DNA, 15 bp, Homo sapiens
aagtcccggcagccc

SEQ ID NO: 1857846 - DNA, 15 bp, Homo sapiens
agtcccggcagccca

SEQ ID NO: 1857847 - DNA, 15 bp, Homo sapiens
gtcccggcagcccaa

SEQ ID NO: 1857848 - DNA, 15 bp, Homo sapiens
tcccggcagcccaac

SEQ ID NO: 1857849 - DNA, 15 bp, Homo sapiens
cccggcagcccaaca

SEQ ID NO: 1857850 - DNA, 15 bp, Homo sapiens
ccggcagcccaacat

SEQ ID NO: 1857851 - DNA, 15 bp, Homo sapiens
cggcagcccaacatc

SEQ ID NO: 1857852 - DNA, 15 bp, Homo sapiens
ggcagcccaacatca

SEQ ID NO: 1857853 - DNA, 15 bp, Homo sapiens
gcagcccaacatcaa

SEQ ID NO: 1857854 - DNA, 15 bp, Homo sapiens
cagcccaacatcaat

SEQ ID NO: 1857855 - DNA, 15 bp, Homo sapiens
agcccaacatcaatc

SEQ ID NO: 1857856 - DNA, 15 bp, Homo sapiens
gcccaacatcaatct

SEQ ID NO: 1857857 - DNA, 15 bp, Homo sapiens
cccaacatcaatctt

SEQ ID NO: 1857858 - DNA, 15 bp, Homo sapiens
ccaacatcaatcttg

SEQ ID NO: 1857859 - DNA, 15 bp, Homo sapiens
caacatcaatcttga

SEQ ID NO: 1857860 - DNA, 15 bp, Homo sapiens
aacatcaatcttgag

SEQ ID NO: 1857861 - DNA, 15 bp, Homo sapiens
acatcaatcttgaga

SEQ ID NO: 1857862 - DNA, 15 bp, Homo sapiens
catcaatcttgagaa

SEQ ID NO: 1857863 - DNA, 15 bp, Homo sapiens
atcaatcttgagaat

SEQ ID NO: 1857864 - DNA, 15 bp, Homo sapiens
tcaatcttgagaatg

SEQ ID NO: 1857865 - DNA, 15 bp, Homo sapiens
caatcttgagaatgt

SEQ ID NO: 1857866 - DNA, 15 bp, Homo sapiens
aatcttgagaatgtt

SEQ ID NO: 1857867 - DNA, 15 bp, Homo sapiens
atcttgagaatgttt

SEQ ID NO: 1857868 - DNA, 15 bp, Homo sapiens
tcttgagaatgtttt

SEQ ID NO: 1857869 - DNA, 15 bp, Homo sapiens
cttgagaatgttttc

SEQ ID NO: 1857870 - DNA, 15 bp, Homo sapiens
ttgagaatgttttca

SEQ ID NO: 1857871 - DNA, 15 bp, Homo sapiens
tgagaatgttttcaa

SEQ ID NO: 1857872 - DNA, 15 bp, Homo sapiens
gagaatgttttcaag

SEQ ID NO: 1857873 - DNA, 15 bp, Homo sapiens
agaatgttttcaaga

SEQ ID NO: 1857874 - DNA, 15 bp, Homo sapiens
gaatgttttcaagaa

SEQ ID NO: 1857875 - DNA, 15 bp, Homo sapiens
aatgttttcaagaac

SEQ ID NO: 1857876 - DNA, 15 bp, Homo sapiens
atgttttcaagaact

SEQ ID NO: 1857877 - DNA, 15 bp, Homo sapiens
tgttttcaagaactg

SEQ ID NO: 1857878 - DNA, 15 bp, Homo sapiens
gttttcaagaactgg

SEQ ID NO: 1857879 - DNA, 15 bp, Homo sapiens
ttttcaagaactggg

SEQ ID NO: 1857880 - DNA, 15 bp, Homo sapiens
tttcaagaactggga

SEQ ID NO: 1857881 - DNA, 15 bp, Homo sapiens
ttcaagaactgggaa

SEQ ID NO: 1857882 - DNA, 15 bp, Homo sapiens
tcaagaactgggaaa

SEQ ID NO: 1857883 - DNA, 15 bp, Homo sapiens
caagaactgggaaac

SEQ ID NO: 1857884 - DNA, 15 bp, Homo sapiens
aagaactgggaaacc

SEQ ID NO: 1857885 - DNA, 15 bp, Homo sapiens
agaactgggaaacct

SEQ ID NO: 1857886 - DNA, 15 bp, Homo sapiens
gaactgggaaacctg

SEQ ID NO: 1857887 - DNA, 15 bp, Homo sapiens
aactgggaaacctgt

SEQ ID NO: 1857888 - DNA, 15 bp, Homo sapiens
actgggaaacctgtc

SEQ ID NO: 1857889 - DNA, 15 bp, Homo sapiens
ctgggaaacctgtct

SEQ ID NO: 1857890 - DNA, 15 bp, Homo sapiens
tgggaaacctgtctt

SEQ ID NO: 1857891 - DNA, 15 bp, Homo sapiens
gggaaacctgtcttt

SEQ ID NO: 1857892 - DNA, 15 bp, Homo sapiens
ggaaacctgtcttta

SEQ ID NO: 1857893 - DNA, 15 bp, Homo sapiens
gaaacctgtctttaa

SEQ ID NO: 1857894 - DNA, 15 bp, Homo sapiens
aaacctgtctttaaa

SEQ ID NO: 1857895 - DNA, 15 bp, Homo sapiens
acctgtctttaaaag

SEQ ID NO: 1857896 - DNA, 15 bp, Homo sapiens
cctgtctttaaaagg

SEQ ID NO: 1857897 - DNA, 15 bp, Homo sapiens
ctgtctttaaaagga

SEQ ID NO: 1857898 - DNA, 15 bp, Homo sapiens
tgtctttaaaaggat

SEQ ID NO: 1857899 - DNA, 15 bp, Homo sapiens
gtctttaaaaggatg

SEQ ID NO: 1857900 - DNA, 15 bp, Homo sapiens
tctttaaaaggatga

SEQ ID NO: 1857901 - DNA, 15 bp, Homo sapiens
ctttaaaaggatgaa

SEQ ID NO: 1857902 - DNA, 15 bp, Homo sapiens
tttaaaaggatgaag

SEQ ID NO: 1857903 - DNA, 15 bp, Homo sapiens
ttaaaaggatgaagg

SEQ ID NO: 1857904 - DNA, 15 bp, Homo sapiens
taaaaggatgaaggc

SEQ ID NO: 1857905 - DNA, 15 bp, Homo sapiens
aaaaggatgaaggca

SEQ ID NO: 1857906 - DNA, 15 bp, Homo sapiens
aaaggatgaaggcag

SEQ ID NO: 1857907 - DNA, 15 bp, Homo sapiens
aaggatgaaggcaga

SEQ ID NO: 1857908 - DNA, 15 bp, Homo sapiens
aggatgaaggcagag

SEQ ID NO: 1857909 - DNA, 15 bp, Homo sapiens
ggatgaaggcagaga

SEQ ID NO: 1857910 - DNA, 15 bp, Homo sapiens
gatgaaggcagagag

SEQ ID NO: 1857911 - DNA, 15 bp, Homo sapiens
atgaaggcagagagg

SEQ ID NO: 1857912 - DNA, 15 bp, Homo sapiens
tgaaggcagagagga

SEQ ID NO: 1857913 - DNA, 15 bp, Homo sapiens
gaaggcagagaggac

SEQ ID NO: 1857914 - DNA, 15 bp, Homo sapiens
aaggcagagaggaca

SEQ ID NO: 1857915 - DNA, 15 bp, Homo sapiens
aggcagagaggacat

SEQ ID NO: 1857916 - DNA, 15 bp, Homo sapiens
ggcagagaggacatg

SEQ ID NO: 1857917 - DNA, 15 bp, Homo sapiens
gcagagaggacatgg

SEQ ID NO: 1857918 - DNA, 15 bp, Homo sapiens
cagagaggacatggg

SEQ ID NO: 1857919 - DNA, 15 bp, Homo sapiens
agagaggacatgggc

SEQ ID NO: 1857920 - DNA, 15 bp, Homo sapiens
gagaggacatgggct

SEQ ID NO: 1857921 - DNA, 15 bp, Homo sapiens
agaggacatgggctc

SEQ ID NO: 1857922 - DNA, 15 bp, Homo sapiens
gaggacatgggctcc

SEQ ID NO: 1857923 - DNA, 15 bp, Homo sapiens
aggacatgggctcca

SEQ ID NO: 1857924 - DNA, 15 bp, Homo sapiens
ggacatgggctccaa

SEQ ID NO: 1857925 - DNA, 15 bp, Homo sapiens
gacatgggctccaag

SEQ ID NO: 1857926 - DNA, 15 bp, Homo sapiens
acatgggctccaagg

SEQ ID NO: 1857927 - DNA, 15 bp, Homo sapiens
catgggctccaagga

SEQ ID NO: 1857928 - DNA, 15 bp, Homo sapiens
atgggctccaaggag

SEQ ID NO: 1857929 - DNA, 15 bp, Homo sapiens
tgggctccaaggaga

SEQ ID NO: 1857930 - DNA, 15 bp, Homo sapiens
gggctccaaggagag

SEQ ID NO: 1857931 - DNA, 15 bp, Homo sapiens
ggctccaaggagaga

SEQ ID NO: 1857932 - DNA, 15 bp, Homo sapiens
gctccaaggagagag

SEQ ID NO: 1857933 - DNA, 15 bp, Homo sapiens
ctccaaggagagagc

SEQ ID NO: 1857934 - DNA, 15 bp, Homo sapiens
tccaaggagagagcc

SEQ ID NO: 1857935 - DNA, 15 bp, Homo sapiens
ccaaggagagagcct

SEQ ID NO: 1857936 - DNA, 15 bp, Homo sapiens
caaggagagagcctt

SEQ ID NO: 1857937 - DNA, 15 bp, Homo sapiens
aaggagagagccttc

SEQ ID NO: 1857938 - DNA, 15 bp, Homo sapiens
aggagagagccttct

SEQ ID NO: 1857939 - DNA, 15 bp, Homo sapiens
ggagagagccttctg

SEQ ID NO: 1857940 - DNA, 15 bp, Homo sapiens
gagagagccttctgc

SEQ ID NO: 1857941 - DNA, 15 bp, Homo sapiens
agagagccttctgcc

SEQ ID NO: 1857942 - DNA, 15 bp, Homo sapiens
gagagccttctgccc

SEQ ID NO: 1857943 - DNA, 15 bp, Homo sapiens
agagccttctgccct

SEQ ID NO: 1857944 - DNA, 15 bp, Homo sapiens
gagccttctgccctt

SEQ ID NO: 1857945 - DNA, 15 bp, Homo sapiens
agccttctgcccttg

SEQ ID NO: 1857946 - DNA, 15 bp, Homo sapiens
gccttctgcccttga

SEQ ID NO: 1857947 - DNA, 15 bp, Homo sapiens
ccttctgcccttgat

SEQ ID NO: 1857948 - DNA, 15 bp, Homo sapiens
cttctgcccttgatg

SEQ ID NO: 1857949 - DNA, 15 bp, Homo sapiens
ttctgcccttgatga

SEQ ID NO: 1857950 - DNA, 15 bp, Homo sapiens
tctgcccttgatgag

SEQ ID NO: 1857951 - DNA, 15 bp, Homo sapiens
ctgcccttgatgagg

SEQ ID NO: 1857952 - DNA, 15 bp, Homo sapiens
tgcccttgatgaggg

SEQ ID NO: 1857953 - DNA, 15 bp, Homo sapiens
gcccttgatgaggga

SEQ ID NO: 1857954 - DNA, 15 bp, Homo sapiens
cccttgatgagggat

SEQ ID NO: 1857955 - DNA, 15 bp, Homo sapiens
ccttgatgagggatg

SEQ ID NO: 1857956 - DNA, 15 bp, Homo sapiens
cttgatgagggatga

SEQ ID NO: 1857957 - DNA, 15 bp, Homo sapiens
ttgatgagggatgac

SEQ ID NO: 1857958 - DNA, 15 bp, Homo sapiens
tgatgagggatgaca

SEQ ID NO: 1857959 - DNA, 15 bp, Homo sapiens
gatgagggatgacag

SEQ ID NO: 1857960 - DNA, 15 bp, Homo sapiens
atgagggatgacaga

SEQ ID NO: 1857961 - DNA, 15 bp, Homo sapiens
tgagggatgacagag

SEQ ID NO: 1857962 - DNA, 15 bp, Homo sapiens
gagggatgacagagc

SEQ ID NO: 1857963 - DNA, 15 bp, Homo sapiens
agggatgacagagca

SEQ ID NO: 1857964 - DNA, 15 bp, Homo sapiens
gggatgacagagcaa

SEQ ID NO: 1857965 - DNA, 15 bp, Homo sapiens
ggatgacagagcaac

SEQ ID NO: 1857966 - DNA, 15 bp, Homo sapiens
gatgacagagcaacc

SEQ ID NO: 1857967 - DNA, 15 bp, Homo sapiens
atgacagagcaacca

SEQ ID NO: 1857968 - DNA, 15 bp, Homo sapiens
tgacagagcaaccag

SEQ ID NO: 1857969 - DNA, 15 bp, Homo sapiens
gacagagcaaccagg

SEQ ID NO: 1857970 - DNA, 15 bp, Homo sapiens
acagagcaaccaggg

SEQ ID NO: 1857971 - DNA, 15 bp, Homo sapiens
cagagcaaccagggt

SEQ ID NO: 1857972 - DNA, 15 bp, Homo sapiens
agagcaaccagggtt

SEQ ID NO: 1857973 - DNA, 15 bp, Homo sapiens
gagcaaccagggttg

SEQ ID NO: 1857974 - DNA, 15 bp, Homo sapiens
agcaaccagggttga

SEQ ID NO: 1857975 - DNA, 15 bp, Homo sapiens
gcaaccagggttgag

SEQ ID NO: 1857976 - DNA, 15 bp, Homo sapiens
caaccagggttgaga

SEQ ID NO: 1857977 - DNA, 15 bp, Homo sapiens
aaccagggttgagaa

SEQ ID NO: 1857978 - DNA, 15 bp, Homo sapiens
accagggttgagaaa

SEQ ID NO: 1857979 - DNA, 15 bp, Homo sapiens
ccagggttgagaaag

SEQ ID NO: 1857980 - DNA, 15 bp, Homo sapiens
cagggttgagaaagt

SEQ ID NO: 1857981 - DNA, 15 bp, Homo sapiens
agggttgagaaagtc

SEQ ID NO: 1857982 - DNA, 15 bp, Homo sapiens
gggttgagaaagtcc

SEQ ID NO: 1857983 - DNA, 15 bp, Homo sapiens
ggttgagaaagtcca

SEQ ID NO: 1857984 - DNA, 15 bp, Homo sapiens
gttgagaaagtccaa

SEQ ID NO: 1857985 - DNA, 15 bp, Homo sapiens
ttgagaaagtccaac

SEQ ID NO: 1857986 - DNA, 15 bp, Homo sapiens
tgagaaagtccaacc

SEQ ID NO: 1857987 - DNA, 15 bp, Homo sapiens
gagaaagtccaaccc

SEQ ID NO: 1857988 - DNA, 15 bp, Homo sapiens
agaaagtccaaccca

SEQ ID NO: 1857989 - DNA, 15 bp, Homo sapiens
gaaagtccaacccaa

SEQ ID NO: 1857990 - DNA, 15 bp, Homo sapiens
aaagtccaacccaaa

SEQ ID NO: 1857991 - DNA, 15 bp, Homo sapiens
aagtccaacccaaac

SEQ ID NO: 1857992 - DNA, 15 bp, Homo sapiens
agtccaacccaaacc

SEQ ID NO: 1857993 - DNA, 15 bp, Homo sapiens
gtccaacccaaacct

SEQ ID NO: 1857994 - DNA, 15 bp, Homo sapiens
tccaacccaaacctc

SEQ ID NO: 1857995 - DNA, 15 bp, Homo sapiens
ccaacccaaacctcc

SEQ ID NO: 1857996 - DNA, 15 bp, Homo sapiens
caacccaaacctcct

SEQ ID NO: 1857997 - DNA, 15 bp, Homo sapiens
aacccaaacctcctt

SEQ ID NO: 1857998 - DNA, 15 bp, Homo sapiens
acccaaacctccttt

SEQ ID NO: 1857999 - DNA, 15 bp, Homo sapiens
cccaaacctcctttg

SEQ ID NO: 1858000 - DNA, 15 bp, Homo sapiens
ccaaacctcctttga

SEQ ID NO: 1858001 - DNA, 15 bp, Homo sapiens
caaacctcctttgac

SEQ ID NO: 1858002 - DNA, 15 bp, Homo sapiens
aaacctcctttgacc

SEQ ID NO: 1858003 - DNA, 15 bp, Homo sapiens
aacctcctttgacct

SEQ ID NO: 1858004 - DNA, 15 bp, Homo sapiens
acctcctttgacctt

SEQ ID NO: 1858005 - DNA, 15 bp, Homo sapiens
cctcctttgaccttg

SEQ ID NO: 1858006 - DNA, 15 bp, Homo sapiens
ctcctttgaccttgg

SEQ ID NO: 1858007 - DNA, 15 bp, Homo sapiens
tcctttgaccttggg

SEQ ID NO: 1858008 - DNA, 15 bp, Homo sapiens
cctttgaccttggga

SEQ ID NO: 1858009 - DNA, 15 bp, Homo sapiens
ctttgaccttgggaa

SEQ ID NO: 1858010 - DNA, 15 bp, Homo sapiens
tttgaccttgggaac

SEQ ID NO: 1858011 - DNA, 15 bp, Homo sapiens
ttgaccttgggaacc

SEQ ID NO: 1858012 - DNA, 15 bp, Homo sapiens
tgaccttgggaacca

SEQ ID NO: 1858013 - DNA, 15 bp, Homo sapiens
gaccttgggaaccac

SEQ ID NO: 1858014 - DNA, 15 bp, Homo sapiens
accttgggaaccacc

SEQ ID NO: 1858015 - DNA, 15 bp, Homo sapiens
ccttgggaaccacct

SEQ ID NO: 1858016 - DNA, 15 bp, Homo sapiens
cttgggaaccacctg

SEQ ID NO: 1858017 - DNA, 15 bp, Homo sapiens
ttgggaaccacctgg

SEQ ID NO: 1858018 - DNA, 15 bp, Homo sapiens
tgggaaccacctggt

SEQ ID NO: 1858019 - DNA, 15 bp, Homo sapiens
gggaaccacctggta

SEQ ID NO: 1858020 - DNA, 15 bp, Homo sapiens
ggaaccacctggtat

SEQ ID NO: 1858021 - DNA, 15 bp, Homo sapiens
gaaccacctggtatc

SEQ ID NO: 1858022 - DNA, 15 bp, Homo sapiens
aaccacctggtatcc

SEQ ID NO: 1858023 - DNA, 15 bp, Homo sapiens
accacctggtatccg

SEQ ID NO: 1858024 - DNA, 15 bp, Homo sapiens
ccacctggtatccgt

SEQ ID NO: 1858025 - DNA, 15 bp, Homo sapiens
cacctggtatccgta

SEQ ID NO: 1858026 - DNA, 15 bp, Homo sapiens
acctggtatccgtaa

SEQ ID NO: 1858027 - DNA, 15 bp, Homo sapiens
cctggtatccgtaat

SEQ ID NO: 1858028 - DNA, 15 bp, Homo sapiens
ctggtatccgtaatg

SEQ ID NO: 1858029 - DNA, 15 bp, Homo sapiens
tggtatccgtaatgg

SEQ ID NO: 1858030 - DNA, 15 bp, Homo sapiens
ggtatccgtaatggg

SEQ ID NO: 1858031 - DNA, 15 bp, Homo sapiens
gtatccgtaatgggg

SEQ ID NO: 1858032 - DNA, 15 bp, Homo sapiens
tatccgtaatggggg

SEQ ID NO: 1858033 - DNA, 15 bp, Homo sapiens
atccgtaatggggga

SEQ ID NO: 1858034 - DNA, 15 bp, Homo sapiens
tccgtaatgggggac

SEQ ID NO: 1858035 - DNA, 15 bp, Homo sapiens
ccgtaatgggggact

SEQ ID NO: 1858036 - DNA, 15 bp, Homo sapiens
cgtaatgggggactg

SEQ ID NO: 1858037 - DNA, 15 bp, Homo sapiens
gtaatgggggactgg

SEQ ID NO: 1858038 - DNA, 15 bp, Homo sapiens
taatgggggactggt

SEQ ID NO: 1858039 - DNA, 15 bp, Homo sapiens
aatgggggactggta

SEQ ID NO: 1858040 - DNA, 15 bp, Homo sapiens
atgggggactggtaa

SEQ ID NO: 1858041 - DNA, 15 bp, Homo sapiens
tgggggactggtaat

SEQ ID NO: 1858042 - DNA, 15 bp, Homo sapiens
gggggactggtaatg

SEQ ID NO: 1858043 - DNA, 15 bp, Homo sapiens
ggggactggtaatgc

SEQ ID NO: 1858044 - DNA, 15 bp, Homo sapiens
gggactggtaatgca

SEQ ID NO: 1858045 - DNA, 15 bp, Homo sapiens
ggactggtaatgcaa

SEQ ID NO: 1858046 - DNA, 15 bp, Homo sapiens
gactggtaatgcaag

SEQ ID NO: 1858047 - DNA, 15 bp, Homo sapiens
actggtaatgcaaga

SEQ ID NO: 1858048 - DNA, 15 bp, Homo sapiens
ctggtaatgcaagag

SEQ ID NO: 1858049 - DNA, 15 bp, Homo sapiens
tggtaatgcaagaga

SEQ ID NO: 1858050 - DNA, 15 bp, Homo sapiens
ggtaatgcaagagaa

SEQ ID NO: 1858051 - DNA, 15 bp, Homo sapiens
gtaatgcaagagaaa

SEQ ID NO: 1858052 - DNA, 15 bp, Homo sapiens
taatgcaagagaaat

SEQ ID NO: 1858053 - DNA, 15 bp, Homo sapiens
aatgcaagagaaatt

SEQ ID NO: 1858054 - DNA, 15 bp, Homo sapiens
atgcaagagaaattc

SEQ ID NO: 1858055 - DNA, 15 bp, Homo sapiens
tgcaagagaaattcc

SEQ ID NO: 1858056 - DNA, 15 bp, Homo sapiens
gcaagagaaattcca

SEQ ID NO: 1858057 - DNA, 15 bp, Homo sapiens
caagagaaattccag

SEQ ID NO: 1858058 - DNA, 15 bp, Homo sapiens
aagagaaattccagc

SEQ ID NO: 1858059 - DNA, 15 bp, Homo sapiens
agagaaattccagcc

SEQ ID NO: 1858060 - DNA, 15 bp, Homo sapiens
gagaaattccagcca

SEQ ID NO: 1858061 - DNA, 15 bp, Homo sapiens
agaaattccagccag

SEQ ID NO: 1858062 - DNA, 15 bp, Homo sapiens
gaaattccagccagt

SEQ ID NO: 1858063 - DNA, 15 bp, Homo sapiens
aaattccagccagtc

SEQ ID NO: 1858064 - DNA, 15 bp, Homo sapiens
aattccagccagtct

SEQ ID NO: 1858065 - DNA, 15 bp, Homo sapiens
attccagccagtctc

SEQ ID NO: 1858066 - DNA, 15 bp, Homo sapiens
ttccagccagtctca

SEQ ID NO: 1858067 - DNA, 15 bp, Homo sapiens
tccagccagtctcat

SEQ ID NO: 1858068 - DNA, 15 bp, Homo sapiens
ccagccagtctcatt

SEQ ID NO: 1858069 - DNA, 15 bp, Homo sapiens
cagccagtctcattg

SEQ ID NO: 1858070 - DNA, 15 bp, Homo sapiens
agccagtctcattga

SEQ ID NO: 1858071 - DNA, 15 bp, Homo sapiens
gccagtctcattgag

SEQ ID NO: 1858072 - DNA, 15 bp, Homo sapiens
ccagtctcattgagc

SEQ ID NO: 1858073 - DNA, 15 bp, Homo sapiens
cagtctcattgagcc

SEQ ID NO: 1858074 - DNA, 15 bp, Homo sapiens
agtctcattgagcct

SEQ ID NO: 1858075 - DNA, 15 bp, Homo sapiens
gtctcattgagcctg

SEQ ID NO: 1858076 - DNA, 15 bp, Homo sapiens
tctcattgagcctga

SEQ ID NO: 1858077 - DNA, 15 bp, Homo sapiens
ctcattgagcctgac

SEQ ID NO: 1858078 - DNA, 15 bp, Homo sapiens
tcattgagcctgact

SEQ ID NO: 1858079 - DNA, 15 bp, Homo sapiens
cattgagcctgactc

SEQ ID NO: 1858080 - DNA, 15 bp, Homo sapiens
attgagcctgactcg

SEQ ID NO: 1858081 - DNA, 15 bp, Homo sapiens
ttgagcctgactcga

SEQ ID NO: 1858082 - DNA, 15 bp, Homo sapiens
tgagcctgactcgag

SEQ ID NO: 1858083 - DNA, 15 bp, Homo sapiens
gagcctgactcgagt

SEQ ID NO: 1858084 - DNA, 15 bp, Homo sapiens
agcctgactcgagta

SEQ ID NO: 1858085 - DNA, 15 bp, Homo sapiens
gcctgactcgagtaa

SEQ ID NO: 1858086 - DNA, 15 bp, Homo sapiens
cctgactcgagtaat

SEQ ID NO: 1858087 - DNA, 15 bp, Homo sapiens
ctgactcgagtaatg

SEQ ID NO: 1858088 - DNA, 15 bp, Homo sapiens
tgactcgagtaatga

SEQ ID NO: 1858089 - DNA, 15 bp, Homo sapiens
gactcgagtaatgat

SEQ ID NO: 1858090 - DNA, 15 bp, Homo sapiens
actcgagtaatgatt

SEQ ID NO: 1858091 - DNA, 15 bp, Homo sapiens
ctcgagtaatgatta

SEQ ID NO: 1858092 - DNA, 15 bp, Homo sapiens
tcgagtaatgattaa

SEQ ID NO: 1858093 - DNA, 15 bp, Homo sapiens
cgagtaatgattaac

SEQ ID NO: 1858094 - DNA, 15 bp, Homo sapiens
gagtaatgattaact

SEQ ID NO: 1858095 - DNA, 15 bp, Homo sapiens
agtaatgattaactg

SEQ ID NO: 1858096 - DNA, 15 bp, Homo sapiens
gtaatgattaactgg

SEQ ID NO: 1858097 - DNA, 15 bp, Homo sapiens
taatgattaactggc

SEQ ID NO: 1858098 - DNA, 15 bp, Homo sapiens
aatgattaactggct

SEQ ID NO: 1858099 - DNA, 15 bp, Homo sapiens
atgattaactggctg

SEQ ID NO: 1858100 - DNA, 15 bp, Homo sapiens
tgattaactggctgc

SEQ ID NO: 1858101 - DNA, 15 bp, Homo sapiens
gattaactggctgcc

SEQ ID NO: 1858102 - DNA, 15 bp, Homo sapiens
attaactggctgccc

SEQ ID NO: 1858103 - DNA, 15 bp, Homo sapiens
ttaactggctgcccg

SEQ ID NO: 1858104 - DNA, 15 bp, Homo sapiens
taactggctgcccgg

SEQ ID NO: 1858105 - DNA, 15 bp, Homo sapiens
aactggctgcccgga

SEQ ID NO: 1858106 - DNA, 15 bp, Homo sapiens
cttgttgaagacaga

SEQ ID NO: 1858107 - DNA, 15 bp, Homo sapiens
ttgttgaagacagat

SEQ ID NO: 1858108 - DNA, 15 bp, Homo sapiens
tgttgaagacagatc

SEQ ID NO: 1858109 - DNA, 15 bp, Homo sapiens
gttgaagacagatcc

SEQ ID NO: 1858110 - DNA, 15 bp, Homo sapiens
ttgaagacagatccc

SEQ ID NO: 1858111 - DNA, 15 bp, Homo sapiens
tgaagacagatccca

SEQ ID NO: 1858112 - DNA, 15 bp, Homo sapiens
gaagacagatcccaa

SEQ ID NO: 1858113 - DNA, 15 bp, Homo sapiens
aagacagatcccaag

SEQ ID NO: 1858114 - DNA, 15 bp, Homo sapiens
agacagatcccaagc

SEQ ID NO: 1858115 - DNA, 15 bp, Homo sapiens
gacagatcccaagca

SEQ ID NO: 1858116 - DNA, 15 bp, Homo sapiens
acagatcccaagcat

SEQ ID NO: 1858117 - DNA, 15 bp, Homo sapiens
cagatcccaagcata

SEQ ID NO: 1858118 - DNA, 15 bp, Homo sapiens
agatcccaagcatac

SEQ ID NO: 1858119 - DNA, 15 bp, Homo sapiens
gatcccaagcatacg

SEQ ID NO: 1858120 - DNA, 15 bp, Homo sapiens
atcccaagcatacga

SEQ ID NO: 1858121 - DNA, 15 bp, Homo sapiens
tcccaagcatacgat

SEQ ID NO: 1858122 - DNA, 15 bp, Homo sapiens
cccaagcatacgatg

SEQ ID NO: 1858123 - DNA, 15 bp, Homo sapiens
ccaagcatacgatgg

SEQ ID NO: 1858124 - DNA, 15 bp, Homo sapiens
caagcatacgatggg

SEQ ID NO: 1858125 - DNA, 15 bp, Homo sapiens
aagcatacgatggga

SEQ ID NO: 1858126 - DNA, 15 bp, Homo sapiens
agcatacgatgggat

SEQ ID NO: 1858127 - DNA, 15 bp, Homo sapiens
gcatacgatgggatt

SEQ ID NO: 1858128 - DNA, 15 bp, Homo sapiens
catacgatgggattt

SEQ ID NO: 1858129 - DNA, 15 bp, Homo sapiens
atacgatgggatttc

SEQ ID NO: 1858130 - DNA, 15 bp, Homo sapiens
tacgatgggatttca

SEQ ID NO: 1858131 - DNA, 15 bp, Homo sapiens
acgatgggatttcag

SEQ ID NO: 1858132 - DNA, 15 bp, Homo sapiens
cgatgggatttcaga

SEQ ID NO: 1858133 - DNA, 15 bp, Homo sapiens
gatgggatttcagag

SEQ ID NO: 1858134 - DNA, 15 bp, Homo sapiens
atgggatttcagagt

SEQ ID NO: 1858135 - DNA, 15 bp, Homo sapiens
tgggatttcagagta

SEQ ID NO: 1858136 - DNA, 15 bp, Homo sapiens
gggatttcagagtag

SEQ ID NO: 1858137 - DNA, 15 bp, Homo sapiens
ggatttcagagtaga

SEQ ID NO: 1858138 - DNA, 15 bp, Homo sapiens
gatttcagagtagat

SEQ ID NO: 1858139 - DNA, 15 bp, Homo sapiens
atttcagagtagatc

SEQ ID NO: 1858140 - DNA, 15 bp, Homo sapiens
tttcagagtagatct

SEQ ID NO: 1858141 - DNA, 15 bp, Homo sapiens
ttcagagtagatctg

SEQ ID NO: 1858142 - DNA, 15 bp, Homo sapiens
tcagagtagatctga

SEQ ID NO: 1858143 - DNA, 15 bp, Homo sapiens
cagagtagatctgag

SEQ ID NO: 1858144 - DNA, 15 bp, Homo sapiens
agagtagatctgagg

SEQ ID NO: 1858145 - DNA, 15 bp, Homo sapiens
gagtagatctgaggc

SEQ ID NO: 1858146 - DNA, 15 bp, Homo sapiens
agtagatctgaggct

SEQ ID NO: 1858147 - DNA, 15 bp, Homo sapiens
gtagatctgaggctt

SEQ ID NO: 1858148 - DNA, 15 bp, Homo sapiens
tagatctgaggcttc

SEQ ID NO: 1858149 - DNA, 15 bp, Homo sapiens
agatctgaggcttcc

SEQ ID NO: 1858150 - DNA, 15 bp, Homo sapiens
gatctgaggcttccc

SEQ ID NO: 1858151 - DNA, 15 bp, Homo sapiens
atctgaggcttccct

SEQ ID NO: 1858152 - DNA, 15 bp, Homo sapiens
tctgaggcttccctc

SEQ ID NO: 1858153 - DNA, 15 bp, Homo sapiens
ctgaggcttccctcc

SEQ ID NO: 1858154 - DNA, 15 bp, Homo sapiens
tgaggcttccctccc

SEQ ID NO: 1858155 - DNA, 15 bp, Homo sapiens
gaggcttccctccca

SEQ ID NO: 1858156 - DNA, 15 bp, Homo sapiens
aggcttccctcccaa

SEQ ID NO: 1858157 - DNA, 15 bp, Homo sapiens
ggcttccctcccaag

SEQ ID NO: 1858158 - DNA, 15 bp, Homo sapiens
gcttccctcccaagt

SEQ ID NO: 1858159 - DNA, 15 bp, Homo sapiens
cttccctcccaagtt

SEQ ID NO: 1858160 - DNA, 15 bp, Homo sapiens
ttccctcccaagttc

SEQ ID NO: 1858161 - DNA, 15 bp, Homo sapiens
tccctcccaagttct

SEQ ID NO: 1858162 - DNA, 15 bp, Homo sapiens
ccctcccaagttctg

SEQ ID NO: 1858163 - DNA, 15 bp, Homo sapiens
cctcccaagttctga

SEQ ID NO: 1858164 - DNA, 15 bp, Homo sapiens
ctcccaagttctgat

SEQ ID NO: 1858165 - DNA, 15 bp, Homo sapiens
tcccaagttctgatt

SEQ ID NO: 1858166 - DNA, 15 bp, Homo sapiens
cccaagttctgattc

SEQ ID NO: 1858167 - DNA, 15 bp, Homo sapiens
ccaagttctgattcc

SEQ ID NO: 1858168 - DNA, 15 bp, Homo sapiens
caagttctgattccc

SEQ ID NO: 1858169 - DNA, 15 bp, Homo sapiens
aagttctgattccca

SEQ ID NO: 1858170 - DNA, 15 bp, Homo sapiens
agttctgattcccag

SEQ ID NO: 1858171 - DNA, 15 bp, Homo sapiens
gttctgattcccagc

SEQ ID NO: 1858172 - DNA, 15 bp, Homo sapiens
ttctgattcccagcc

SEQ ID NO: 1858173 - DNA, 15 bp, Homo sapiens
tctgattcccagccc

SEQ ID NO: 1858174 - DNA, 15 bp, Homo sapiens
ctgattcccagccca

SEQ ID NO: 1858175 - DNA, 15 bp, Homo sapiens
tgattcccagcccag

SEQ ID NO: 1858176 - DNA, 15 bp, Homo sapiens
gattcccagcccagc

SEQ ID NO: 1858177 - DNA, 15 bp, Homo sapiens
attcccagcccagcc

SEQ ID NO: 1858178 - DNA, 15 bp, Homo sapiens
ttcccagcccagcct

SEQ ID NO: 1858179 - DNA, 15 bp, Homo sapiens
tcccagcccagcctg

SEQ ID NO: 1858180 - DNA, 15 bp, Homo sapiens
cccagcccagcctgc

SEQ ID NO: 1858181 - DNA, 15 bp, Homo sapiens
ccagcccagcctgct

SEQ ID NO: 1858182 - DNA, 15 bp, Homo sapiens
cagcccagcctgctg

SEQ ID NO: 1858183 - DNA, 15 bp, Homo sapiens
agcccagcctgctgc

SEQ ID NO: 1858184 - DNA, 15 bp, Homo sapiens
gcccagcctgctgca

SEQ ID NO: 1858185 - DNA, 15 bp, Homo sapiens
cccagcctgctgcag

SEQ ID NO: 1858186 - DNA, 15 bp, Homo sapiens
ccagcctgctgcagg

SEQ ID NO: 1858187 - DNA, 15 bp, Homo sapiens
cagcctgctgcagga

SEQ ID NO: 1858188 - DNA, 15 bp, Homo sapiens
agcctgctgcaggat

SEQ ID NO: 1858189 - DNA, 15 bp, Homo sapiens
gcctgctgcaggatt

SEQ ID NO: 1858190 - DNA, 15 bp, Homo sapiens
cctgctgcaggattt

SEQ ID NO: 1858191 - DNA, 15 bp, Homo sapiens
ctgctgcaggatttt

SEQ ID NO: 1858192 - DNA, 15 bp, Homo sapiens
tgctgcaggattttg

SEQ ID NO: 1858193 - DNA, 15 bp, Homo sapiens
gctgcaggattttgc

SEQ ID NO: 1858194 - DNA, 15 bp, Homo sapiens
ctgcaggattttgca

SEQ ID NO: 1858195 - DNA, 15 bp, Homo sapiens
tgcaggattttgcag

SEQ ID NO: 1858196 - DNA, 15 bp, Homo sapiens
gcaggattttgcagc

SEQ ID NO: 1858197 - DNA, 15 bp, Homo sapiens
caggattttgcagca

SEQ ID NO: 1858198 - DNA, 15 bp, Homo sapiens
aggattttgcagcac

SEQ ID NO: 1858199 - DNA, 15 bp, Homo sapiens
ggattttgcagcaca

SEQ ID NO: 1858200 - DNA, 15 bp, Homo sapiens
gattttgcagcacat

SEQ ID NO: 1858201 - DNA, 15 bp, Homo sapiens
attttgcagcacatg

SEQ ID NO: 1858202 - DNA, 15 bp, Homo sapiens
ttttgcagcacatgt

SEQ ID NO: 1858203 - DNA, 15 bp, Homo sapiens
tttgcagcacatgtc

SEQ ID NO: 1858204 - DNA, 15 bp, Homo sapiens
ttgcagcacatgtct

SEQ ID NO: 1858205 - DNA, 15 bp, Homo sapiens
tgcagcacatgtctg

SEQ ID NO: 1858206 - DNA, 15 bp, Homo sapiens
gcagcacatgtctgg

SEQ ID NO: 1858207 - DNA, 15 bp, Homo sapiens
cagcacatgtctggg

SEQ ID NO: 1858208 - DNA, 15 bp, Homo sapiens
agcacatgtctgggg

SEQ ID NO: 1858209 - DNA, 15 bp, Homo sapiens
gcacatgtctggggc

SEQ ID NO: 1858210 - DNA, 15 bp, Homo sapiens
cacatgtctggggct

SEQ ID NO: 1858211 - DNA, 15 bp, Homo sapiens
acatgtctggggctg

SEQ ID NO: 1858212 - DNA, 15 bp, Homo sapiens
catgtctggggctgg

SEQ ID NO: 1858213 - DNA, 15 bp, Homo sapiens
ctggggctgggagca

SEQ ID NO: 1858214 - DNA, 15 bp, Homo sapiens
tggggctgggagcac

SEQ ID NO: 1858215 - DNA, 15 bp, Homo sapiens
ggggctgggagcacc

SEQ ID NO: 1858216 - DNA, 15 bp, Homo sapiens
gggctgggagcacca

SEQ ID NO: 1858217 - DNA, 15 bp, Homo sapiens
ggctgggagcaccag

SEQ ID NO: 1858218 - DNA, 15 bp, Homo sapiens
gctgggagcaccagg

SEQ ID NO: 1858219 - DNA, 15 bp, Homo sapiens
ctgggagcaccaggg

SEQ ID NO: 1858220 - DNA, 15 bp, Homo sapiens
tgggagcaccagggt

SEQ ID NO: 1858221 - DNA, 15 bp, Homo sapiens
gggagcaccagggtg

SEQ ID NO: 1858222 - DNA, 15 bp, Homo sapiens
ggagcaccagggtgg

SEQ ID NO: 1858223 - DNA, 15 bp, Homo sapiens
gagcaccagggtggg

SEQ ID NO: 1858224 - DNA, 15 bp, Homo sapiens
agcaccagggtggga

SEQ ID NO: 1858225 - DNA, 15 bp, Homo sapiens
gcaccagggtgggag

SEQ ID NO: 1858226 - DNA, 15 bp, Homo sapiens
caccagggtgggagc

SEQ ID NO: 1858227 - DNA, 15 bp, Homo sapiens
accagggtgggagca

SEQ ID NO: 1858228 - DNA, 15 bp, Homo sapiens
ccagggtgggagcac

SEQ ID NO: 1858229 - DNA, 15 bp, Homo sapiens
cagggtgggagcact

SEQ ID NO: 1858230 - DNA, 15 bp, Homo sapiens
agggtgggagcactg

SEQ ID NO: 1858231 - DNA, 15 bp, Homo sapiens
gggtgggagcactgc

SEQ ID NO: 1858232 - DNA, 15 bp, Homo sapiens
ggtgggagcactgcc

SEQ ID NO: 1858233 - DNA, 15 bp, Homo sapiens
gtgggagcactgcca

SEQ ID NO: 1858234 - DNA, 15 bp, Homo sapiens
tgggagcactgccaa

SEQ ID NO: 1858235 - DNA, 15 bp, Homo sapiens
gggagcactgccaac

SEQ ID NO: 1858236 - DNA, 15 bp, Homo sapiens
ggagcactgccaaca

SEQ ID NO: 1858237 - DNA, 15 bp, Homo sapiens
gagcactgccaacag

SEQ ID NO: 1858238 - DNA, 15 bp, Homo sapiens
agcactgccaacagt

SEQ ID NO: 1858239 - DNA, 15 bp, Homo sapiens
gcactgccaacagta

SEQ ID NO: 1858240 - DNA, 15 bp, Homo sapiens
cactgccaacagtag

SEQ ID NO: 1858241 - DNA, 15 bp, Homo sapiens
actgccaacagtagg

SEQ ID NO: 1858242 - DNA, 15 bp, Homo sapiens
ctgccaacagtagga

SEQ ID NO: 1858243 - DNA, 15 bp, Homo sapiens
tgccaacagtaggag

SEQ ID NO: 1858244 - DNA, 15 bp, Homo sapiens
gccaacagtaggagc

SEQ ID NO: 1858245 - DNA, 15 bp, Homo sapiens
ccaacagtaggagct

SEQ ID NO: 1858246 - DNA, 15 bp, Homo sapiens
caacagtaggagctg

SEQ ID NO: 1858247 - DNA, 15 bp, Homo sapiens
aacagtaggagctgt

SEQ ID NO: 1858248 - DNA, 15 bp, Homo sapiens
acagtaggagctgta

SEQ ID NO: 1858249 - DNA, 15 bp, Homo sapiens
cagtaggagctgtaa

SEQ ID NO: 1858250 - DNA, 15 bp, Homo sapiens
agtaggagctgtaat

SEQ ID NO: 1858251 - DNA, 15 bp, Homo sapiens
gtaggagctgtaatt

SEQ ID NO: 1858252 - DNA, 15 bp, Homo sapiens
taggagctgtaattg

SEQ ID NO: 1858253 - DNA, 15 bp, Homo sapiens
aggagctgtaattgt

SEQ ID NO: 1858254 - DNA, 15 bp, Homo sapiens
ggagctgtaattgtt

SEQ ID NO: 1858255 - DNA, 15 bp, Homo sapiens
gagctgtaattgttc

SEQ ID NO: 1858256 - DNA, 15 bp, Homo sapiens
agctgtaattgttcc

SEQ ID NO: 1858257 - DNA, 15 bp, Homo sapiens
gctgtaattgttccc

SEQ ID NO: 1858258 - DNA, 15 bp, Homo sapiens
ctgtaattgttccct

SEQ ID NO: 1858259 - DNA, 15 bp, Homo sapiens
tgtaattgttcccta

SEQ ID NO: 1858260 - DNA, 15 bp, Homo sapiens
gtaattgttccctag

SEQ ID NO: 1858261 - DNA, 15 bp, Homo sapiens
taattgttccctagc

SEQ ID NO: 1858262 - DNA, 15 bp, Homo sapiens
aattgttccctagcg

SEQ ID NO: 1858263 - DNA, 15 bp, Homo sapiens
attgttccctagcgg

SEQ ID NO: 1858264 - DNA, 15 bp, Homo sapiens
ttgttccctagcggg

SEQ ID NO: 1858265 - DNA, 15 bp, Homo sapiens
tgttccctagcgggg

SEQ ID NO: 1858266 - DNA, 15 bp, Homo sapiens
gttccctagcggggc

SEQ ID NO: 1858267 - DNA, 15 bp, Homo sapiens
ttccctagcggggca

SEQ ID NO: 1858268 - DNA, 15 bp, Homo sapiens
tccctagcggggcag

SEQ ID NO: 1858269 - DNA, 15 bp, Homo sapiens
ccctagcggggcagg

SEQ ID NO: 1858270 - DNA, 15 bp, Homo sapiens
cctagcggggcaggt

SEQ ID NO: 1858271 - DNA, 15 bp, Homo sapiens
ctagcggggcaggtt

SEQ ID NO: 1858272 - DNA, 15 bp, Homo sapiens
tagcggggcaggttt

SEQ ID NO: 1858273 - DNA, 15 bp, Homo sapiens
agcggggcaggtttt

SEQ ID NO: 1858274 - DNA, 15 bp, Homo sapiens
gcggggcaggttttc

SEQ ID NO: 1858275 - DNA, 15 bp, Homo sapiens
cggggcaggttttcc

SEQ ID NO: 1858276 - DNA, 15 bp, Homo sapiens
ggggcaggttttcct

SEQ ID NO: 1858277 - DNA, 15 bp, Homo sapiens
gggcaggttttcctc

SEQ ID NO: 1858278 - DNA, 15 bp, Homo sapiens
ggcaggttttcctca

SEQ ID NO: 1858279 - DNA, 15 bp, Homo sapiens
gcaggttttcctcag

SEQ ID NO: 1858280 - DNA, 15 bp, Homo sapiens
caggttttcctcagg

SEQ ID NO: 1858281 - DNA, 15 bp, Homo sapiens
aggttttcctcaggg

SEQ ID NO: 1858282 - DNA, 15 bp, Homo sapiens
ggttttcctcagggc

SEQ ID NO: 1858283 - DNA, 15 bp, Homo sapiens
gttttcctcagggct

SEQ ID NO: 1858284 - DNA, 15 bp, Homo sapiens
ttttcctcagggctc

SEQ ID NO: 1858285 - DNA, 15 bp, Homo sapiens
tttcctcagggctca

SEQ ID NO: 1858286 - DNA, 15 bp, Homo sapiens
ttcctcagggctcac

SEQ ID NO: 1858287 - DNA, 15 bp, Homo sapiens
tcctcagggctcaca

SEQ ID NO: 1858288 - DNA, 15 bp, Homo sapiens
cctcagggctcacag

SEQ ID NO: 1858289 - DNA, 15 bp, Homo sapiens
ctcagggctcacagg

SEQ ID NO: 1858290 - DNA, 15 bp, Homo sapiens
tcagggctcacaggt

SEQ ID NO: 1858291 - DNA, 15 bp, Homo sapiens
cagggctcacaggta

SEQ ID NO: 1858292 - DNA, 15 bp, Homo sapiens
agggctcacaggtat

SEQ ID NO: 1858293 - DNA, 15 bp, Homo sapiens
gggctcacaggtatg

SEQ ID NO: 1858294 - DNA, 15 bp, Homo sapiens
ggctcacaggtatgc

SEQ ID NO: 1858295 - DNA, 15 bp, Homo sapiens
gctcacaggtatgcg

SEQ ID NO: 1858296 - DNA, 15 bp, Homo sapiens
ctcacaggtatgcgt

SEQ ID NO: 1858297 - DNA, 15 bp, Homo sapiens
tcacaggtatgcgtg

SEQ ID NO: 1858298 - DNA, 15 bp, Homo sapiens
cacaggtatgcgtga

SEQ ID NO: 1858299 - DNA, 15 bp, Homo sapiens
acaggtatgcgtgaa

SEQ ID NO: 1858300 - DNA, 15 bp, Homo sapiens
caggtatgcgtgaag

SEQ ID NO: 1858301 - DNA, 15 bp, Homo sapiens
aggtatgcgtgaagg

SEQ ID NO: 1858302 - DNA, 15 bp, Homo sapiens
ggtatgcgtgaaggc

SEQ ID NO: 1858303 - DNA, 15 bp, Homo sapiens
gtatgcgtgaaggcc

SEQ ID NO: 1858304 - DNA, 15 bp, Homo sapiens
tatgcgtgaaggcct

SEQ ID NO: 1858305 - DNA, 15 bp, Homo sapiens
atgcgtgaaggcctg

SEQ ID NO: 1858306 - DNA, 15 bp, Homo sapiens
tgcgtgaaggcctgg

SEQ ID NO: 1858307 - DNA, 15 bp, Homo sapiens
gcgtgaaggcctgga

SEQ ID NO: 1858308 - DNA, 15 bp, Homo sapiens
cgtgaaggcctggaa

SEQ ID NO: 1858309 - DNA, 15 bp, Homo sapiens
gtgaaggcctggaat

SEQ ID NO: 1858310 - DNA, 15 bp, Homo sapiens
tgaaggcctggaatg

SEQ ID NO: 1858311 - DNA, 15 bp, Homo sapiens
gaaggcctggaatgc

SEQ ID NO: 1858312 - DNA, 15 bp, Homo sapiens
aaggcctggaatgcc

SEQ ID NO: 1858313 - DNA, 15 bp, Homo sapiens
aggcctggaatgcca

SEQ ID NO: 1858314 - DNA, 15 bp, Homo sapiens
ggcctggaatgccag

SEQ ID NO: 1858315 - DNA, 15 bp, Homo sapiens
gcctggaatgccagt

SEQ ID NO: 1858316 - DNA, 15 bp, Homo sapiens
cctggaatgccagtg

SEQ ID NO: 1858317 - DNA, 15 bp, Homo sapiens
ctggaatgccagtgc

SEQ ID NO: 1858318 - DNA, 15 bp, Homo sapiens
tggaatgccagtgct

SEQ ID NO: 1858319 - DNA, 15 bp, Homo sapiens
ggaatgccagtgctg

SEQ ID NO: 1858320 - DNA, 15 bp, Homo sapiens
gaatgccagtgctgg

SEQ ID NO: 1858321 - DNA, 15 bp, Homo sapiens
aatgccagtgctggg

SEQ ID NO: 1858322 - DNA, 15 bp, Homo sapiens
atgccagtgctgggg

SEQ ID NO: 1858323 - DNA, 15 bp, Homo sapiens
tgccagtgctggggg

SEQ ID NO: 1858324 - DNA, 15 bp, Homo sapiens
gccagtgctgggggg

SEQ ID NO: 1858325 - DNA, 15 bp, Homo sapiens
ccagtgctggggggt

SEQ ID NO: 1858326 - DNA, 15 bp, Homo sapiens
cagtgctggggggtc

SEQ ID NO: 1858327 - DNA, 15 bp, Homo sapiens
agtgctggggggtca

SEQ ID NO: 1858328 - DNA, 15 bp, Homo sapiens
gtgctggggggtcac

SEQ ID NO: 1858329 - DNA, 15 bp, Homo sapiens
tgctggggggtcacg

SEQ ID NO: 1858330 - DNA, 15 bp, Homo sapiens
gctggggggtcacgg

SEQ ID NO: 1858331 - DNA, 15 bp, Homo sapiens
ctggggggtcacggg

SEQ ID NO: 1858332 - DNA, 15 bp, Homo sapiens
tggggggtcacgggg

SEQ ID NO: 1858333 - DNA, 15 bp, Homo sapiens
ggggggtcacggggc

SEQ ID NO: 1858334 - DNA, 15 bp, Homo sapiens
gggggtcacggggct

SEQ ID NO: 1858335 - DNA, 15 bp, Homo sapiens
ggggtcacggggctg

SEQ ID NO: 1858336 - DNA, 15 bp, Homo sapiens
gggtcacggggctgg

SEQ ID NO: 1858337 - DNA, 15 bp, Homo sapiens
ggtcacggggctggc

SEQ ID NO: 1858338 - DNA, 15 bp, Homo sapiens
gtcacggggctggct

SEQ ID NO: 1858339 - DNA, 15 bp, Homo sapiens
tcacggggctggctg

SEQ ID NO: 1858340 - DNA, 15 bp, Homo sapiens
cacggggctggctga

SEQ ID NO: 1858341 - DNA, 15 bp, Homo sapiens
acggggctggctgac

SEQ ID NO: 1858342 - DNA, 15 bp, Homo sapiens
cggggctggctgaca

SEQ ID NO: 1858343 - DNA, 15 bp, Homo sapiens
ggggctggctgacag

SEQ ID NO: 1858344 - DNA, 15 bp, Homo sapiens
gggctggctgacagg

SEQ ID NO: 1858345 - DNA, 15 bp, Homo sapiens
ggctggctgacaggc

SEQ ID NO: 1858346 - DNA, 15 bp, Homo sapiens
gctggctgacaggca

SEQ ID NO: 1858347 - DNA, 15 bp, Homo sapiens
ctggctgacaggcac

SEQ ID NO: 1858348 - DNA, 15 bp, Homo sapiens
tggctgacaggcacg

SEQ ID NO: 1858349 - DNA, 15 bp, Homo sapiens
ggctgacaggcacgg

SEQ ID NO: 1858350 - DNA, 15 bp, Homo sapiens
gctgacaggcacggg

SEQ ID NO: 1858351 - DNA, 15 bp, Homo sapiens
ctgacaggcacgggg

SEQ ID NO: 1858352 - DNA, 15 bp, Homo sapiens
tgacaggcacggggt

SEQ ID NO: 1858353 - DNA, 15 bp, Homo sapiens
gacaggcacggggta

SEQ ID NO: 1858354 - DNA, 15 bp, Homo sapiens
acaggcacggggtag

SEQ ID NO: 1858355 - DNA, 15 bp, Homo sapiens
caggcacggggtagc

SEQ ID NO: 1858356 - DNA, 15 bp, Homo sapiens
aggcacggggtagcc

SEQ ID NO: 1858357 - DNA, 15 bp, Homo sapiens
ggcacggggtagcca

SEQ ID NO: 1858358 - DNA, 15 bp, Homo sapiens
gcacggggtagccag

SEQ ID NO: 1858359 - DNA, 15 bp, Homo sapiens
cacggggtagccaga

SEQ ID NO: 1858360 - DNA, 15 bp, Homo sapiens
acggggtagccagag

SEQ ID NO: 1858361 - DNA, 15 bp, Homo sapiens
cggggtagccagagc

SEQ ID NO: 1858362 - DNA, 15 bp, Homo sapiens
ggggtagccagagca

SEQ ID NO: 1858363 - DNA, 15 bp, Homo sapiens
gggtagccagagcat

SEQ ID NO: 1858364 - DNA, 15 bp, Homo sapiens
ggtagccagagcatt

SEQ ID NO: 1858365 - DNA, 15 bp, Homo sapiens
gtagccagagcattg

SEQ ID NO: 1858366 - DNA, 15 bp, Homo sapiens
tagccagagcattgt

SEQ ID NO: 1858367 - DNA, 15 bp, Homo sapiens
agccagagcattgtt

SEQ ID NO: 1858368 - DNA, 15 bp, Homo sapiens
gccagagcattgttg

SEQ ID NO: 1858369 - DNA, 15 bp, Homo sapiens
ccagagcattgttgt

SEQ ID NO: 1858370 - DNA, 15 bp, Homo sapiens
cagagcattgttgtt

SEQ ID NO: 1858371 - DNA, 15 bp, Homo sapiens
agagcattgttgttc

SEQ ID NO: 1858372 - DNA, 15 bp, Homo sapiens
gagcattgttgttcc

SEQ ID NO: 1858373 - DNA, 15 bp, Homo sapiens
agcattgttgttcct

SEQ ID NO: 1858374 - DNA, 15 bp, Homo sapiens
gcattgttgttcctg

SEQ ID NO: 1858375 - DNA, 15 bp, Homo sapiens
cattgttgttcctga

SEQ ID NO: 1858376 - DNA, 15 bp, Homo sapiens
attgttgttcctgag

SEQ ID NO: 1858377 - DNA, 15 bp, Homo sapiens
ttgttgttcctgagg

SEQ ID NO: 1858378 - DNA, 15 bp, Homo sapiens
tgttgttcctgagga

SEQ ID NO: 1858379 - DNA, 15 bp, Homo sapiens
gttgttcctgaggat

SEQ ID NO: 1858380 - DNA, 15 bp, Homo sapiens
ttgttcctgaggatg

SEQ ID NO: 1858381 - DNA, 15 bp, Homo sapiens
tgttcctgaggatgc

SEQ ID NO: 1858382 - DNA, 15 bp, Homo sapiens
gttcctgaggatgcg

SEQ ID NO: 1858383 - DNA, 15 bp, Homo sapiens
ttcctgaggatgcga

SEQ ID NO: 1858384 - DNA, 15 bp, Homo sapiens
tcctgaggatgcgaa

SEQ ID NO: 1858385 - DNA, 15 bp, Homo sapiens
cctgaggatgcgaaa

SEQ ID NO: 1858386 - DNA, 15 bp, Homo sapiens
ctgaggatgcgaaaa

SEQ ID NO: 1858387 - DNA, 15 bp, Homo sapiens
tgaggatgcgaaaag

SEQ ID NO: 1858388 - DNA, 15 bp, Homo sapiens
gaggatgcgaaaaga

SEQ ID NO: 1858389 - DNA, 15 bp, Homo sapiens
aggatgcgaaaagag

SEQ ID NO: 1858390 - DNA, 15 bp, Homo sapiens
ggatgcgaaaagagg

SEQ ID NO: 1858391 - DNA, 15 bp, Homo sapiens
gatgcgaaaagaggg

SEQ ID NO: 1858392 - DNA, 15 bp, Homo sapiens
atgcgaaaagagggc

SEQ ID NO: 1858393 - DNA, 15 bp, Homo sapiens
tgcgaaaagagggca

SEQ ID NO: 1858394 - DNA, 15 bp, Homo sapiens
gcgaaaagagggcag

SEQ ID NO: 1858395 - DNA, 15 bp, Homo sapiens
cgaaaagagggcagt

SEQ ID NO: 1858396 - DNA, 15 bp, Homo sapiens
gaaaagagggcagta

SEQ ID NO: 1858397 - DNA, 15 bp, Homo sapiens
aaaagagggcagtac

SEQ ID NO: 1858398 - DNA, 15 bp, Homo sapiens
aaagagggcagtact

SEQ ID NO: 1858399 - DNA, 15 bp, Homo sapiens
aagagggcagtactt

SEQ ID NO: 1858400 - DNA, 15 bp, Homo sapiens
agagggcagtactta

SEQ ID NO: 1858401 - DNA, 15 bp, Homo sapiens
gagggcagtacttag

SEQ ID NO: 1858402 - DNA, 15 bp, Homo sapiens
agggcagtacttaga

SEQ ID NO: 1858403 - DNA, 15 bp, Homo sapiens
gggcagtacttagag

SEQ ID NO: 1858404 - DNA, 15 bp, Homo sapiens
ggcagtacttagaga

SEQ ID NO: 1858405 - DNA, 15 bp, Homo sapiens
gcagtacttagagaa

SEQ ID NO: 1858406 - DNA, 15 bp, Homo sapiens
cagtacttagagaaa

SEQ ID NO: 1858407 - DNA, 15 bp, Homo sapiens
agtacttagagaaac

SEQ ID NO: 1858408 - DNA, 15 bp, Homo sapiens
gtacttagagaaact

SEQ ID NO: 1858409 - DNA, 15 bp, Homo sapiens
tacttagagaaactc

SEQ ID NO: 1858410 - DNA, 15 bp, Homo sapiens
acttagagaaactca

SEQ ID NO: 1858411 - DNA, 15 bp, Homo sapiens
cttagagaaactcac

SEQ ID NO: 1858412 - DNA, 15 bp, Homo sapiens
ttagagaaactcact

SEQ ID NO: 1858413 - DNA, 15 bp, Homo sapiens
tagagaaactcactg

SEQ ID NO: 1858414 - DNA, 15 bp, Homo sapiens
agagaaactcactgg

SEQ ID NO: 1858415 - DNA, 15 bp, Homo sapiens
gagaaactcactggt

SEQ ID NO: 1858416 - DNA, 15 bp, Homo sapiens
agaaactcactggtt

SEQ ID NO: 1858417 - DNA, 15 bp, Homo sapiens
gaaactcactggtta

SEQ ID NO: 1858418 - DNA, 15 bp, Homo sapiens
aaactcactggttat

SEQ ID NO: 1858419 - DNA, 15 bp, Homo sapiens
aactcactggttatg

SEQ ID NO: 1858420 - DNA, 15 bp, Homo sapiens
actcactggttatgt

SEQ ID NO: 1858421 - DNA, 15 bp, Homo sapiens
ctcactggttatgta

SEQ ID NO: 1858422 - DNA, 15 bp, Homo sapiens
tcactggttatgtac

SEQ ID NO: 1858423 - DNA, 15 bp, Homo sapiens
cactggttatgtaca

SEQ ID NO: 1858424 - DNA, 15 bp, Homo sapiens
actggttatgtacat

SEQ ID NO: 1858425 - DNA, 15 bp, Homo sapiens
ctggttatgtacatg

SEQ ID NO: 1858426 - DNA, 15 bp, Homo sapiens
tggttatgtacatgg

SEQ ID NO: 1858427 - DNA, 15 bp, Homo sapiens
ggttatgtacatggg

SEQ ID NO: 1858428 - DNA, 15 bp, Homo sapiens
gttatgtacatggga

SEQ ID NO: 1858429 - DNA, 15 bp, Homo sapiens
ttatgtacatgggac

SEQ ID NO: 1858430 - DNA, 15 bp, Homo sapiens
tatgtacatgggacg

SEQ ID NO: 1858431 - DNA, 15 bp, Homo sapiens
atgtacatgggacgc

SEQ ID NO: 1858432 - DNA, 15 bp, Homo sapiens
tgtacatgggacgca

SEQ ID NO: 1858433 - DNA, 15 bp, Homo sapiens
gtacatgggacgcat

SEQ ID NO: 1858434 - DNA, 15 bp, Homo sapiens
tacatgggacgcatt

SEQ ID NO: 1858435 - DNA, 15 bp, Homo sapiens
acatgggacgcattt

SEQ ID NO: 1858436 - DNA, 15 bp, Homo sapiens
catgggacgcatttc

SEQ ID NO: 1858437 - DNA, 15 bp, Homo sapiens
atgggacgcatttca

SEQ ID NO: 1858438 - DNA, 15 bp, Homo sapiens
tgggacgcatttcat

SEQ ID NO: 1858439 - DNA, 15 bp, Homo sapiens
gggacgcatttcatg

SEQ ID NO: 1858440 - DNA, 15 bp, Homo sapiens
ggacgcatttcatgt

SEQ ID NO: 1858441 - DNA, 15 bp, Homo sapiens
gacgcatttcatgtt

SEQ ID NO: 1858442 - DNA, 15 bp, Homo sapiens
acgcatttcatgttg

SEQ ID NO: 1858443 - DNA, 15 bp, Homo sapiens
cgcatttcatgttgt

SEQ ID NO: 1858444 - DNA, 15 bp, Homo sapiens
gcatttcatgttgtt

SEQ ID NO: 1858445 - DNA, 15 bp, Homo sapiens
catttcatgttgttc

SEQ ID NO: 1858446 - DNA, 15 bp, Homo sapiens
atttcatgttgttct

SEQ ID NO: 1858447 - DNA, 15 bp, Homo sapiens
tttcatgttgttctg

SEQ ID NO: 1858448 - DNA, 15 bp, Homo sapiens
ttcatgttgttctga

SEQ ID NO: 1858449 - DNA, 15 bp, Homo sapiens
tcatgttgttctgaa

SEQ ID NO: 1858450 - DNA, 15 bp, Homo sapiens
catgttgttctgaag

SEQ ID NO: 1858451 - DNA, 15 bp, Homo sapiens
atgttgttctgaaga

SEQ ID NO: 1858452 - DNA, 15 bp, Homo sapiens
tgttgttctgaagaa

SEQ ID NO: 1858453 - DNA, 15 bp, Homo sapiens
gttgttctgaagaaa

SEQ ID NO: 1858454 - DNA, 15 bp, Homo sapiens
ttgttctgaagaaat

SEQ ID NO: 1858455 - DNA, 15 bp, Homo sapiens
tgttctgaagaaatc

SEQ ID NO: 1858456 - DNA, 15 bp, Homo sapiens
gttctgaagaaatcc

SEQ ID NO: 1858457 - DNA, 15 bp, Homo sapiens
ttctgaagaaatcct

SEQ ID NO: 1858458 - DNA, 15 bp, Homo sapiens
tctgaagaaatccta

SEQ ID NO: 1858459 - DNA, 15 bp, Homo sapiens
ctgaagaaatcctat

SEQ ID NO: 1858460 - DNA, 15 bp, Homo sapiens
tgaagaaatcctatt

SEQ ID NO: 1858461 - DNA, 15 bp, Homo sapiens
gaagaaatcctattt

SEQ ID NO: 1858462 - DNA, 15 bp, Homo sapiens
aagaaatcctatttc

SEQ ID NO: 1858463 - DNA, 15 bp, Homo sapiens
agaaatcctatttct

SEQ ID NO: 1858464 - DNA, 15 bp, Homo sapiens
gaaatcctatttcta

SEQ ID NO: 1858465 - DNA, 15 bp, Homo sapiens
aaatcctatttctac

SEQ ID NO: 1858466 - DNA, 15 bp, Homo sapiens
aatcctatttctacc

SEQ ID NO: 1858467 - DNA, 15 bp, Homo sapiens
atcctatttctacct

SEQ ID NO: 1858468 - DNA, 15 bp, Homo sapiens
tcctatttctacctg

SEQ ID NO: 1858469 - DNA, 15 bp, Homo sapiens
cctatttctacctgt

SEQ ID NO: 1858470 - DNA, 15 bp, Homo sapiens
ctatttctacctgtt

SEQ ID NO: 1858471 - DNA, 15 bp, Homo sapiens
tatttctacctgttt

SEQ ID NO: 1858472 - DNA, 15 bp, Homo sapiens
atttctacctgtttt

SEQ ID NO: 1858473 - DNA, 15 bp, Homo sapiens
tttctacctgttttt

SEQ ID NO: 1858474 - DNA, 15 bp, Homo sapiens
ttctacctgtttttc

SEQ ID NO: 1858475 - DNA, 15 bp, Homo sapiens
tctacctgtttttcc

SEQ ID NO: 1858476 - DNA, 15 bp, Homo sapiens
ctacctgtttttcca

SEQ ID NO: 1858477 - DNA, 15 bp, Homo sapiens
tacctgtttttccat

SEQ ID NO: 1858478 - DNA, 15 bp, Homo sapiens
acctgtttttccatc

SEQ ID NO: 1858479 - DNA, 15 bp, Homo sapiens
cctgtttttccatcc

SEQ ID NO: 1858480 - DNA, 15 bp, Homo sapiens
ctgtttttccatccc

SEQ ID NO: 1858481 - DNA, 15 bp, Homo sapiens
tgtttttccatcccc

SEQ ID NO: 1858482 - DNA, 15 bp, Homo sapiens
gtttttccatcccca

SEQ ID NO: 1858483 - DNA, 15 bp, Homo sapiens
tttttccatccccac

SEQ ID NO: 1858484 - DNA, 15 bp, Homo sapiens
ttttccatccccacc

SEQ ID NO: 1858485 - DNA, 15 bp, Homo sapiens
tttccatccccacca

SEQ ID NO: 1858486 - DNA, 15 bp, Homo sapiens
ttccatccccaccat

SEQ ID NO: 1858487 - DNA, 15 bp, Homo sapiens
tccatccccaccatg

SEQ ID NO: 1858488 - DNA, 15 bp, Homo sapiens
ccatccccaccatgt

SEQ ID NO: 1858489 - DNA, 15 bp, Homo sapiens
catccccaccatgtc

SEQ ID NO: 1858490 - DNA, 15 bp, Homo sapiens
atccccaccatgtca

SEQ ID NO: 1858491 - DNA, 15 bp, Homo sapiens
tccccaccatgtcat

SEQ ID NO: 1858492 - DNA, 15 bp, Homo sapiens
ccccaccatgtcatc

SEQ ID NO: 1858493 - DNA, 15 bp, Homo sapiens
cccaccatgtcatca

SEQ ID NO: 1858494 - DNA, 15 bp, Homo sapiens
ccaccatgtcatcac

SEQ ID NO: 1858495 - DNA, 15 bp, Homo sapiens
caccatgtcatcact

SEQ ID NO: 1858496 - DNA, 15 bp, Homo sapiens
accatgtcatcacta

SEQ ID NO: 1858497 - DNA, 15 bp, Homo sapiens
ccatgtcatcactag

SEQ ID NO: 1858498 - DNA, 15 bp, Homo sapiens
catgtcatcactaga

SEQ ID NO: 1858499 - DNA, 15 bp, Homo sapiens
atgtcatcactagat

SEQ ID NO: 1858500 - DNA, 15 bp, Homo sapiens
tgtcatcactagatt

SEQ ID NO: 1858501 - DNA, 15 bp, Homo sapiens
gtcatcactagattt

SEQ ID NO: 1858502 - DNA, 15 bp, Homo sapiens
tcatcactagatttt

SEQ ID NO: 1858503 - DNA, 15 bp, Homo sapiens
catcactagattttc

SEQ ID NO: 1858504 - DNA, 15 bp, Homo sapiens
atcactagattttct

SEQ ID NO: 1858505 - DNA, 15 bp, Homo sapiens
tcactagattttcta

SEQ ID NO: 1858506 - DNA, 15 bp, Homo sapiens
cactagattttctaa

SEQ ID NO: 1858507 - DNA, 15 bp, Homo sapiens
actagattttctaag

SEQ ID NO: 1858508 - DNA, 15 bp, Homo sapiens
ctagattttctaaga

SEQ ID NO: 1858509 - DNA, 15 bp, Homo sapiens
tagattttctaagaa

SEQ ID NO: 1858510 - DNA, 15 bp, Homo sapiens
agattttctaagaac

SEQ ID NO: 1858511 - DNA, 15 bp, Homo sapiens
gattttctaagaact

SEQ ID NO: 1858512 - DNA, 15 bp, Homo sapiens
attttctaagaactg

SEQ ID NO: 1858513 - DNA, 15 bp, Homo sapiens
ttttctaagaactgg

SEQ ID NO: 1858514 - DNA, 15 bp, Homo sapiens
tttctaagaactggc

SEQ ID NO: 1858515 - DNA, 15 bp, Homo sapiens
ttctaagaactggct

SEQ ID NO: 1858516 - DNA, 15 bp, Homo sapiens
tctaagaactggctg

SEQ ID NO: 1858517 - DNA, 15 bp, Homo sapiens
ctaagaactggctga

SEQ ID NO: 1858518 - DNA, 15 bp, Homo sapiens
taagaactggctgaa

SEQ ID NO: 1858519 - DNA, 15 bp, Homo sapiens
aagaactggctgaag

SEQ ID NO: 1858520 - DNA, 15 bp, Homo sapiens
agaactggctgaagc

SEQ ID NO: 1858521 - DNA, 15 bp, Homo sapiens
gaactggctgaagca

SEQ ID NO: 1858522 - DNA, 15 bp, Homo sapiens
aactggctgaagcaa

SEQ ID NO: 1858523 - DNA, 15 bp, Homo sapiens
actggctgaagcaag

SEQ ID NO: 1858524 - DNA, 15 bp, Homo sapiens
ctggctgaagcaaga

SEQ ID NO: 1858525 - DNA, 15 bp, Homo sapiens
tggctgaagcaagag

SEQ ID NO: 1858526 - DNA, 15 bp, Homo sapiens
ggctgaagcaagagg

SEQ ID NO: 1858527 - DNA, 15 bp, Homo sapiens
gctgaagcaagaggg

SEQ ID NO: 1858528 - DNA, 15 bp, Homo sapiens
ctgaagcaagaggga

SEQ ID NO: 1858529 - DNA, 15 bp, Homo sapiens
tgaagcaagagggaa

SEQ ID NO: 1858530 - DNA, 15 bp, Homo sapiens
gaagcaagagggaaa

SEQ ID NO: 1858531 - DNA, 15 bp, Homo sapiens
aagcaagagggaaaa

SEQ ID NO: 1858532 - DNA, 15 bp, Homo sapiens
agcaagagggaaaac

SEQ ID NO: 1858533 - DNA, 15 bp, Homo sapiens
gcaagagggaaaacg

SEQ ID NO: 1858534 - DNA, 15 bp, Homo sapiens
caagagggaaaacga

SEQ ID NO: 1858535 - DNA, 15 bp, Homo sapiens
aagagggaaaacgac

SEQ ID NO: 1858536 - DNA, 15 bp, Homo sapiens
agagggaaaacgacc

SEQ ID NO: 1858537 - DNA, 15 bp, Homo sapiens
gagggaaaacgacct

SEQ ID NO: 1858538 - DNA, 15 bp, Homo sapiens
agggaaaacgacctt

SEQ ID NO: 1858539 - DNA, 15 bp, Homo sapiens
gggaaaacgacctta

SEQ ID NO: 1858540 - DNA, 15 bp, Homo sapiens
ggaaaacgaccttaa

SEQ ID NO: 1858541 - DNA, 15 bp, Homo sapiens
gaaaacgaccttaaa

SEQ ID NO: 1858542 - DNA, 15 bp, Homo sapiens
aaaacgaccttaaaa

SEQ ID NO: 1858543 - DNA, 15 bp, Homo sapiens
aaacgaccttaaaaa

SEQ ID NO: 1858544 - DNA, 15 bp, Homo sapiens
aacgaccttaaaaac

SEQ ID NO: 1858545 - DNA, 15 bp, Homo sapiens
acgaccttaaaaaca

SEQ ID NO: 1858546 - DNA, 15 bp, Homo sapiens
cgaccttaaaaacag

SEQ ID NO: 1858547 - DNA, 15 bp, Homo sapiens
gaccttaaaaacaga

SEQ ID NO: 1858548 - DNA, 15 bp, Homo sapiens
accttaaaaacagaa

SEQ ID NO: 1858549 - DNA, 15 bp, Homo sapiens
ccttaaaaacagaaa

SEQ ID NO: 1858550 - DNA, 15 bp, Homo sapiens
cttaaaaacagaaat

SEQ ID NO: 1858551 - DNA, 15 bp, Homo sapiens
ttaaaaacagaaatt

SEQ ID NO: 1858552 - DNA, 15 bp, Homo sapiens
taaaaacagaaattc

SEQ ID NO: 1858553 - DNA, 15 bp, Homo sapiens
aaaaacagaaattcc

SEQ ID NO: 1858554 - DNA, 15 bp, Homo sapiens
aaaacagaaattcca

SEQ ID NO: 1858555 - DNA, 15 bp, Homo sapiens
aaacagaaattccag

SEQ ID NO: 1858556 - DNA, 15 bp, Homo sapiens
aacagaaattccagc

SEQ ID NO: 1858557 - DNA, 15 bp, Homo sapiens
acagaaattccagca

SEQ ID NO: 1858558 - DNA, 15 bp, Homo sapiens
cagaaattccagcag

SEQ ID NO: 1858559 - DNA, 15 bp, Homo sapiens
agaaattccagcaga

SEQ ID NO: 1858560 - DNA, 15 bp, Homo sapiens
gaaattccagcagag

SEQ ID NO: 1858561 - DNA, 15 bp, Homo sapiens
aaattccagcagagt

SEQ ID NO: 1858562 - DNA, 15 bp, Homo sapiens
aattccagcagagtt

SEQ ID NO: 1858563 - DNA, 15 bp, Homo sapiens
attccagcagagttt

SEQ ID NO: 1858564 - DNA, 15 bp, Homo sapiens
ttccagcagagtttt

SEQ ID NO: 1858565 - DNA, 15 bp, Homo sapiens
tccagcagagttttg

SEQ ID NO: 1858566 - DNA, 15 bp, Homo sapiens
ccagcagagttttgg

SEQ ID NO: 1858567 - DNA, 15 bp, Homo sapiens
cagcagagttttggg

SEQ ID NO: 1858568 - DNA, 15 bp, Homo sapiens
agcagagttttgggc

SEQ ID NO: 1858569 - DNA, 15 bp, Homo sapiens
gcagagttttgggca

SEQ ID NO: 1858570 - DNA, 15 bp, Homo sapiens
cagagttttgggcat

SEQ ID NO: 1858571 - DNA, 15 bp, Homo sapiens
agagttttgggcatt

SEQ ID NO: 1858572 - DNA, 15 bp, Homo sapiens
gagttttgggcattt

SEQ ID NO: 1858573 - DNA, 15 bp, Homo sapiens
agttttgggcatttg

SEQ ID NO: 1858574 - DNA, 15 bp, Homo sapiens
gttttgggcatttgg

SEQ ID NO: 1858575 - DNA, 15 bp, Homo sapiens
ttttgggcatttggc

SEQ ID NO: 1858576 - DNA, 15 bp, Homo sapiens
tttgggcatttggca

SEQ ID NO: 1858577 - DNA, 15 bp, Homo sapiens
ttgggcatttggcat

SEQ ID NO: 1858578 - DNA, 15 bp, Homo sapiens
tgggcatttggcatt

SEQ ID NO: 1858579 - DNA, 15 bp, Homo sapiens
gggcatttggcattt

SEQ ID NO: 1858580 - DNA, 15 bp, Homo sapiens
ggcatttggcatttc

SEQ ID NO: 1858581 - DNA, 15 bp, Homo sapiens
gcatttggcatttcc

SEQ ID NO: 1858582 - DNA, 15 bp, Homo sapiens
catttggcatttcct

SEQ ID NO: 1858583 - DNA, 15 bp, Homo sapiens
atttggcatttcctt

SEQ ID NO: 1858584 - DNA, 15 bp, Homo sapiens
tttggcatttccttg

SEQ ID NO: 1858585 - DNA, 15 bp, Homo sapiens
ttggcatttccttgc

SEQ ID NO: 1858586 - DNA, 15 bp, Homo sapiens
tggcatttccttgcc

SEQ ID NO: 1858587 - DNA, 15 bp, Homo sapiens
ggcatttccttgcct

SEQ ID NO: 1858588 - DNA, 15 bp, Homo sapiens
gcatttccttgcctg

SEQ ID NO: 1858589 - DNA, 15 bp, Homo sapiens
catttccttgcctgt

SEQ ID NO: 1858590 - DNA, 15 bp, Homo sapiens
atttccttgcctgta

SEQ ID NO: 1858591 - DNA, 15 bp, Homo sapiens
tttccttgcctgtag

SEQ ID NO: 1858592 - DNA, 15 bp, Homo sapiens
gacagaggagttgag

SEQ ID NO: 1858593 - DNA, 15 bp, Homo sapiens
acagaggagttgagg

SEQ ID NO: 1858594 - DNA, 15 bp, Homo sapiens
cagaggagttgagga

SEQ ID NO: 1858595 - DNA, 15 bp, Homo sapiens
agaggagttgaggag

SEQ ID NO: 1858596 - DNA, 15 bp, Homo sapiens
gaggagttgaggagg

SEQ ID NO: 1858597 - DNA, 15 bp, Homo sapiens
aggagttgaggaggg

SEQ ID NO: 1858598 - DNA, 15 bp, Homo sapiens
ggagttgaggaggga

SEQ ID NO: 1858599 - DNA, 15 bp, Homo sapiens
gagttgaggagggag

SEQ ID NO: 1858600 - DNA, 15 bp, Homo sapiens
agttgaggagggaga

SEQ ID NO: 1858601 - DNA, 15 bp, Homo sapiens
gttgaggagggagaa

SEQ ID NO: 1858602 - DNA, 15 bp, Homo sapiens
ttgaggagggagaaa

SEQ ID NO: 1858603 - DNA, 15 bp, Homo sapiens
tgaggagggagaaaa

SEQ ID NO: 1858604 - DNA, 15 bp, Homo sapiens
gaggagggagaaaag

SEQ ID NO: 1858605 - DNA, 15 bp, Homo sapiens
aggagggagaaaagg

SEQ ID NO: 1858606 - DNA, 15 bp, Homo sapiens
ggagggagaaaaggc

SEQ ID NO: 1858607 - DNA, 15 bp, Homo sapiens
gagggagaaaaggca

SEQ ID NO: 1858608 - DNA, 15 bp, Homo sapiens
agggagaaaaggcag

SEQ ID NO: 1858609 - DNA, 15 bp, Homo sapiens
gggagaaaaggcagc

SEQ ID NO: 1858610 - DNA, 15 bp, Homo sapiens
ggagaaaaggcagca

SEQ ID NO: 1858611 - DNA, 15 bp, Homo sapiens
gagaaaaggcagcag

SEQ ID NO: 1858612 - DNA, 15 bp, Homo sapiens
agaaaaggcagcagt

SEQ ID NO: 1858613 - DNA, 15 bp, Homo sapiens
gaaaaggcagcagtg

SEQ ID NO: 1858614 - DNA, 15 bp, Homo sapiens
aaaaggcagcagtgt

SEQ ID NO: 1858615 - DNA, 15 bp, Homo sapiens
aaaggcagcagtgtg

SEQ ID NO: 1858616 - DNA, 15 bp, Homo sapiens
aaggcagcagtgtgt

SEQ ID NO: 1858617 - DNA, 15 bp, Homo sapiens
aggcagcagtgtgtg

SEQ ID NO: 1858618 - DNA, 15 bp, Homo sapiens
ggcagcagtgtgtga

SEQ ID NO: 1858619 - DNA, 15 bp, Homo sapiens
gcagcagtgtgtgaa

SEQ ID NO: 1858620 - DNA, 15 bp, Homo sapiens
cagcagtgtgtgaac

SEQ ID NO: 1858621 - DNA, 15 bp, Homo sapiens
agcagtgtgtgaact

SEQ ID NO: 1858622 - DNA, 15 bp, Homo sapiens
gcagtgtgtgaactg

SEQ ID NO: 1858623 - DNA, 15 bp, Homo sapiens
cagtgtgtgaactgc

SEQ ID NO: 1858624 - DNA, 15 bp, Homo sapiens
agtgtgtgaactgca

SEQ ID NO: 1858625 - DNA, 15 bp, Homo sapiens
gtgtgtgaactgcat

SEQ ID NO: 1858626 - DNA, 15 bp, Homo sapiens
tgtgtgaactgcatc

SEQ ID NO: 1858627 - DNA, 15 bp, Homo sapiens
gtgtgaactgcatct

SEQ ID NO: 1858628 - DNA, 15 bp, Homo sapiens
tgtgaactgcatctt

SEQ ID NO: 1858629 - DNA, 15 bp, Homo sapiens
gtgaactgcatcttt

SEQ ID NO: 1858630 - DNA, 15 bp, Homo sapiens
tgaactgcatctttt

SEQ ID NO: 1858631 - DNA, 15 bp, Homo sapiens
gaactgcatcttttc

SEQ ID NO: 1858632 - DNA, 15 bp, Homo sapiens
aactgcatcttttct

SEQ ID NO: 1858633 - DNA, 15 bp, Homo sapiens
actgcatcttttctg

SEQ ID NO: 1858634 - DNA, 15 bp, Homo sapiens
ctgcatcttttctgc

SEQ ID NO: 1858635 - DNA, 15 bp, Homo sapiens
tgcatcttttctgct

SEQ ID NO: 1858636 - DNA, 15 bp, Homo sapiens
gcatcttttctgctt

SEQ ID NO: 1858637 - DNA, 15 bp, Homo sapiens
catcttttctgcttt

SEQ ID NO: 1858638 - DNA, 15 bp, Homo sapiens
atcttttctgctttc

SEQ ID NO: 1858639 - DNA, 15 bp, Homo sapiens
tcttttctgctttct

SEQ ID NO: 1858640 - DNA, 15 bp, Homo sapiens
cttttctgctttcta

SEQ ID NO: 1858641 - DNA, 15 bp, Homo sapiens
ttttctgctttctaa

SEQ ID NO: 1858642 - DNA, 15 bp, Homo sapiens
tttctgctttctaag

SEQ ID NO: 1858643 - DNA, 15 bp, Homo sapiens
ttctgctttctaagg

SEQ ID NO: 1858644 - DNA, 15 bp, Homo sapiens
tctgctttctaaggc

SEQ ID NO: 1858645 - DNA, 15 bp, Homo sapiens
ctgctttctaaggct

SEQ ID NO: 1858646 - DNA, 15 bp, Homo sapiens
tgctttctaaggctg

SEQ ID NO: 1858647 - DNA, 15 bp, Homo sapiens
gctttctaaggctga

SEQ ID NO: 1858648 - DNA, 15 bp, Homo sapiens
ctttctaaggctgag

SEQ ID NO: 1858649 - DNA, 15 bp, Homo sapiens
tttctaaggctgaga

SEQ ID NO: 1858650 - DNA, 15 bp, Homo sapiens
ttctaaggctgagag

SEQ ID NO: 1858651 - DNA, 15 bp, Homo sapiens
tctaaggctgagaga

SEQ ID NO: 1858652 - DNA, 15 bp, Homo sapiens
ctaaggctgagagag

SEQ ID NO: 1858653 - DNA, 15 bp, Homo sapiens
taaggctgagagagt

SEQ ID NO: 1858654 - DNA, 15 bp, Homo sapiens
aaggctgagagagtt

SEQ ID NO: 1858655 - DNA, 15 bp, Homo sapiens
aggctgagagagttc

SEQ ID NO: 1858656 - DNA, 15 bp, Homo sapiens
ggctgagagagttct

SEQ ID NO: 1858657 - DNA, 15 bp, Homo sapiens
gctgagagagttctt

SEQ ID NO: 1858658 - DNA, 15 bp, Homo sapiens
ctgagagagttcttg

SEQ ID NO: 1858659 - DNA, 15 bp, Homo sapiens
tgagagagttcttga

SEQ ID NO: 1858660 - DNA, 15 bp, Homo sapiens
gagagagttcttgaa

SEQ ID NO: 1858661 - DNA, 15 bp, Homo sapiens
agagagttcttgaaa

SEQ ID NO: 1858662 - DNA, 15 bp, Homo sapiens
gagagttcttgaaag

SEQ ID NO: 1858663 - DNA, 15 bp, Homo sapiens
agagttcttgaaaga

SEQ ID NO: 1858664 - DNA, 15 bp, Homo sapiens
gagttcttgaaagaa

SEQ ID NO: 1858665 - DNA, 15 bp, Homo sapiens
agttcttgaaagaaa

SEQ ID NO: 1858666 - DNA, 15 bp, Homo sapiens
gttcttgaaagaaag

SEQ ID NO: 1858667 - DNA, 15 bp, Homo sapiens
ttcttgaaagaaaga

SEQ ID NO: 1858668 - DNA, 15 bp, Homo sapiens
tcttgaaagaaagaa

SEQ ID NO: 1858669 - DNA, 15 bp, Homo sapiens
cttgaaagaaagaag

SEQ ID NO: 1858670 - DNA, 15 bp, Homo sapiens
ttgaaagaaagaagg

SEQ ID NO: 1858671 - DNA, 15 bp, Homo sapiens
tgaaagaaagaaggc

SEQ ID NO: 1858672 - DNA, 15 bp, Homo sapiens
gaaagaaagaaggcc

SEQ ID NO: 1858673 - DNA, 15 bp, Homo sapiens
aaagaaagaaggcca

SEQ ID NO: 1858674 - DNA, 15 bp, Homo sapiens
aagaaagaaggccaa

SEQ ID NO: 1858675 - DNA, 15 bp, Homo sapiens
agaaagaaggccaat

SEQ ID NO: 1858676 - DNA, 15 bp, Homo sapiens
gaaagaaggccaatg

SEQ ID NO: 1858677 - DNA, 15 bp, Homo sapiens
aaagaaggccaatga

SEQ ID NO: 1858678 - DNA, 15 bp, Homo sapiens
aagaaggccaatgag

SEQ ID NO: 1858679 - DNA, 15 bp, Homo sapiens
agaaggccaatgaga

SEQ ID NO: 1858680 - DNA, 15 bp, Homo sapiens
gaaggccaatgagag

SEQ ID NO: 1858681 - DNA, 15 bp, Homo sapiens
aaggccaatgagagg

SEQ ID NO: 1858682 - DNA, 15 bp, Homo sapiens
aggccaatgagagga

SEQ ID NO: 1858683 - DNA, 15 bp, Homo sapiens
ggccaatgagaggaa

SEQ ID NO: 1858684 - DNA, 15 bp, Homo sapiens
gccaatgagaggaaa

SEQ ID NO: 1858685 - DNA, 15 bp, Homo sapiens
ccaatgagaggaaag

SEQ ID NO: 1858686 - DNA, 15 bp, Homo sapiens
caatgagaggaaagg

SEQ ID NO: 1858687 - DNA, 15 bp, Homo sapiens
aatgagaggaaaggg

SEQ ID NO: 1858688 - DNA, 15 bp, Homo sapiens
atgagaggaaagggt

SEQ ID NO: 1858689 - DNA, 15 bp, Homo sapiens
tgagaggaaagggtc

SEQ ID NO: 1858690 - DNA, 15 bp, Homo sapiens
gagaggaaagggtct

SEQ ID NO: 1858691 - DNA, 15 bp, Homo sapiens
agaggaaagggtctc

SEQ ID NO: 1858692 - DNA, 15 bp, Homo sapiens
gaggaaagggtctca

SEQ ID NO: 1858693 - DNA, 15 bp, Homo sapiens
aggaaagggtctcag

SEQ ID NO: 1858694 - DNA, 15 bp, Homo sapiens
ggaaagggtctcagc

SEQ ID NO: 1858695 - DNA, 15 bp, Homo sapiens
gaaagggtctcagca

SEQ ID NO: 1858696 - DNA, 15 bp, Homo sapiens
aaagggtctcagcag

SEQ ID NO: 1858697 - DNA, 15 bp, Homo sapiens
aagggtctcagcaga

SEQ ID NO: 1858698 - DNA, 15 bp, Homo sapiens
agggtctcagcagaa

SEQ ID NO: 1858699 - DNA, 15 bp, Homo sapiens
gggtctcagcagaat

SEQ ID NO: 1858700 - DNA, 15 bp, Homo sapiens
ggtctcagcagaata

SEQ ID NO: 1858701 - DNA, 15 bp, Homo sapiens
gtctcagcagaataa

SEQ ID NO: 1858702 - DNA, 15 bp, Homo sapiens
tctcagcagaataac

SEQ ID NO: 1858703 - DNA, 15 bp, Homo sapiens
ctcagcagaataaca

SEQ ID NO: 1858704 - DNA, 15 bp, Homo sapiens
tcagcagaataacac

SEQ ID NO: 1858705 - DNA, 15 bp, Homo sapiens
cagcagaataacacg

SEQ ID NO: 1858706 - DNA, 15 bp, Homo sapiens
agcagaataacacgc

SEQ ID NO: 1858707 - DNA, 15 bp, Homo sapiens
gcagaataacacgct

SEQ ID NO: 1858708 - DNA, 15 bp, Homo sapiens
cagaataacacgctc

SEQ ID NO: 1858709 - DNA, 15 bp, Homo sapiens
agaataacacgctca

SEQ ID NO: 1858710 - DNA, 15 bp, Homo sapiens
gaataacacgctcag

SEQ ID NO: 1858711 - DNA, 15 bp, Homo sapiens
aataacacgctcagg

SEQ ID NO: 1858712 - DNA, 15 bp, Homo sapiens
ataacacgctcagga

SEQ ID NO: 1858713 - DNA, 15 bp, Homo sapiens
taacacgctcaggat

SEQ ID NO: 1858714 - DNA, 15 bp, Homo sapiens
aacacgctcaggatg

SEQ ID NO: 1858715 - DNA, 15 bp, Homo sapiens
acacgctcaggatgt

SEQ ID NO: 1858716 - DNA, 15 bp, Homo sapiens
cacgctcaggatgtt

SEQ ID NO: 1858717 - DNA, 15 bp, Homo sapiens
acgctcaggatgttg

SEQ ID NO: 1858718 - DNA, 15 bp, Homo sapiens
cgctcaggatgttgt

SEQ ID NO: 1858719 - DNA, 15 bp, Homo sapiens
gctcaggatgttgtt

SEQ ID NO: 1858720 - DNA, 15 bp, Homo sapiens
ctcaggatgttgtta

SEQ ID NO: 1858721 - DNA, 15 bp, Homo sapiens
tcaggatgttgttag

SEQ ID NO: 1858722 - DNA, 15 bp, Homo sapiens
caggatgttgttaga

SEQ ID NO: 1858723 - DNA, 15 bp, Homo sapiens
aggatgttgttagat

SEQ ID NO: 1858724 - DNA, 15 bp, Homo sapiens
ggatgttgttagatg

SEQ ID NO: 1858725 - DNA, 15 bp, Homo sapiens
gatgttgttagatgg

SEQ ID NO: 1858726 - DNA, 15 bp, Homo sapiens
atgttgttagatggt

SEQ ID NO: 1858727 - DNA, 15 bp, Homo sapiens
tgttgttagatggtt

SEQ ID NO: 1858728 - DNA, 15 bp, Homo sapiens
gttgttagatggttt

SEQ ID NO: 1858729 - DNA, 15 bp, Homo sapiens
ttgttagatggtttt

SEQ ID NO: 1858730 - DNA, 15 bp, Homo sapiens
tgttagatggtttta

SEQ ID NO: 1858731 - DNA, 15 bp, Homo sapiens
gttagatggttttat

SEQ ID NO: 1858732 - DNA, 15 bp, Homo sapiens
ttagatggttttatt

SEQ ID NO: 1858733 - DNA, 15 bp, Homo sapiens
tagatggttttattt

SEQ ID NO: 1858734 - DNA, 15 bp, Homo sapiens
agatggttttatttt

SEQ ID NO: 1858735 - DNA, 15 bp, Homo sapiens
gatggttttattttt

SEQ ID NO: 1858736 - DNA, 15 bp, Homo sapiens
atggttttatttttt

SEQ ID NO: 1858737 - DNA, 15 bp, Homo sapiens
tggttttatttttta

SEQ ID NO: 1858738 - DNA, 15 bp, Homo sapiens
ggttttattttttaa

SEQ ID NO: 1858739 - DNA, 15 bp, Homo sapiens
gttttattttttaaa

SEQ ID NO: 1858740 - DNA, 15 bp, Homo sapiens
ttttattttttaaac

SEQ ID NO: 1858741 - DNA, 15 bp, Homo sapiens
tttattttttaaacc

SEQ ID NO: 1858742 - DNA, 15 bp, Homo sapiens
ttattttttaaaccc

SEQ ID NO: 1858743 - DNA, 15 bp, Homo sapiens
tattttttaaaccct

SEQ ID NO: 1858744 - DNA, 15 bp, Homo sapiens
attttttaaaccctg

SEQ ID NO: 1858745 - DNA, 15 bp, Homo sapiens
ttttttaaaccctga

SEQ ID NO: 1858746 - DNA, 15 bp, Homo sapiens
tttttaaaccctgaa

SEQ ID NO: 1858747 - DNA, 15 bp, Homo sapiens
ttttaaaccctgaat

SEQ ID NO: 1858748 - DNA, 15 bp, Homo sapiens
tttaaaccctgaatg

SEQ ID NO: 1858749 - DNA, 15 bp, Homo sapiens
ttaaaccctgaatgt

SEQ ID NO: 1858750 - DNA, 15 bp, Homo sapiens
taaaccctgaatgtg

SEQ ID NO: 1858751 - DNA, 15 bp, Homo sapiens
aaaccctgaatgtgc

SEQ ID NO: 1858752 - DNA, 15 bp, Homo sapiens
aaccctgaatgtgca

SEQ ID NO: 1858753 - DNA, 15 bp, Homo sapiens
accctgaatgtgcag

SEQ ID NO: 1858754 - DNA, 15 bp, Homo sapiens
ccctgaatgtgcagg

SEQ ID NO: 1858755 - DNA, 15 bp, Homo sapiens
cctgaatgtgcaggg

SEQ ID NO: 1858756 - DNA, 15 bp, Homo sapiens
ctgaatgtgcaggga

SEQ ID NO: 1858757 - DNA, 15 bp, Homo sapiens
tgaatgtgcagggag

SEQ ID NO: 1858758 - DNA, 15 bp, Homo sapiens
gaatgtgcagggagg

SEQ ID NO: 1858759 - DNA, 15 bp, Homo sapiens
aatgtgcagggagga

SEQ ID NO: 1858760 - DNA, 15 bp, Homo sapiens
atgtgcagggaggag

SEQ ID NO: 1858761 - DNA, 15 bp, Homo sapiens
tgtgcagggaggagc

SEQ ID NO: 1858762 - DNA, 15 bp, Homo sapiens
gtgcagggaggagcc

SEQ ID NO: 1858763 - DNA, 15 bp, Homo sapiens
tgcagggaggagccc

SEQ ID NO: 1858764 - DNA, 15 bp, Homo sapiens
gcagggaggagcccc

SEQ ID NO: 1858765 - DNA, 15 bp, Homo sapiens
cagggaggagccccg

SEQ ID NO: 1858766 - DNA, 15 bp, Homo sapiens
agggaggagccccgg

SEQ ID NO: 1858767 - DNA, 15 bp, Homo sapiens
gggaggagccccggc

SEQ ID NO: 1858768 - DNA, 15 bp, Homo sapiens
ggaggagccccggcc

SEQ ID NO: 1858769 - DNA, 15 bp, Homo sapiens
gaggagccccggccc

SEQ ID NO: 1858770 - DNA, 15 bp, Homo sapiens
aggagccccggcccc

SEQ ID NO: 1858771 - DNA, 15 bp, Homo sapiens
ggagccccggcccct

SEQ ID NO: 1858772 - DNA, 15 bp, Homo sapiens
gagccccggcccctc

SEQ ID NO: 1858773 - DNA, 15 bp, Homo sapiens
agccccggcccctcc

SEQ ID NO: 1858774 - DNA, 15 bp, Homo sapiens
gccccggcccctcca

SEQ ID NO: 1858775 - DNA, 15 bp, Homo sapiens
ccccggcccctccaa

SEQ ID NO: 1858776 - DNA, 15 bp, Homo sapiens
cccggcccctccaaa

SEQ ID NO: 1858777 - DNA, 15 bp, Homo sapiens
ccggcccctccaaac

SEQ ID NO: 1858778 - DNA, 15 bp, Homo sapiens
cggcccctccaaacc

SEQ ID NO: 1858779 - DNA, 15 bp, Homo sapiens
ggcccctccaaacca

SEQ ID NO: 1858780 - DNA, 15 bp, Homo sapiens
gcccctccaaaccac

SEQ ID NO: 1858781 - DNA, 15 bp, Homo sapiens
cccctccaaaccaca

SEQ ID NO: 1858782 - DNA, 15 bp, Homo sapiens
ccctccaaaccacat

SEQ ID NO: 1858783 - DNA, 15 bp, Homo sapiens
cctccaaaccacatg

SEQ ID NO: 1858784 - DNA, 15 bp, Homo sapiens
ctccaaaccacatga

SEQ ID NO: 1858785 - DNA, 15 bp, Homo sapiens
tccaaaccacatgaa

SEQ ID NO: 1858786 - DNA, 15 bp, Homo sapiens
ccaaaccacatgaaa

SEQ ID NO: 1858787 - DNA, 15 bp, Homo sapiens
caaaccacatgaaat

SEQ ID NO: 1858788 - DNA, 15 bp, Homo sapiens
aaaccacatgaaata

SEQ ID NO: 1858789 - DNA, 15 bp, Homo sapiens
aaccacatgaaataa

SEQ ID NO: 1858790 - DNA, 15 bp, Homo sapiens
accacatgaaataag

SEQ ID NO: 1858791 - DNA, 15 bp, Homo sapiens
ccacatgaaataagc

SEQ ID NO: 1858792 - DNA, 15 bp, Homo sapiens
cacatgaaataagca

SEQ ID NO: 1858793 - DNA, 15 bp, Homo sapiens
acatgaaataagcaa

SEQ ID NO: 1858794 - DNA, 15 bp, Homo sapiens
catgaaataagcaag

SEQ ID NO: 1858795 - DNA, 15 bp, Homo sapiens
atgaaataagcaagg

SEQ ID NO: 1858796 - DNA, 15 bp, Homo sapiens
tgaaataagcaaggg

SEQ ID NO: 1858797 - DNA, 15 bp, Homo sapiens
gaaataagcaaggga

SEQ ID NO: 1858798 - DNA, 15 bp, Homo sapiens
aaataagcaagggaa

SEQ ID NO: 1858799 - DNA, 15 bp, Homo sapiens
aataagcaagggaag

SEQ ID NO: 1858800 - DNA, 15 bp, Homo sapiens
ataagcaagggaagt

SEQ ID NO: 1858801 - DNA, 15 bp, Homo sapiens
taagcaagggaagtg

SEQ ID NO: 1858802 - DNA, 15 bp, Homo sapiens
aagcaagggaagtgg

SEQ ID NO: 1858803 - DNA, 15 bp, Homo sapiens
agcaagggaagtggc

SEQ ID NO: 1858804 - DNA, 15 bp, Homo sapiens
gcaagggaagtggca

SEQ ID NO: 1858805 - DNA, 15 bp, Homo sapiens
caagggaagtggcag

SEQ ID NO: 1858806 - DNA, 15 bp, Homo sapiens
aagggaagtggcagc

SEQ ID NO: 1858807 - DNA, 15 bp, Homo sapiens
agggaagtggcagct

SEQ ID NO: 1858808 - DNA, 15 bp, Homo sapiens
gggaagtggcagctt

SEQ ID NO: 1858809 - DNA, 15 bp, Homo sapiens
ggaagtggcagcttt

SEQ ID NO: 1858810 - DNA, 15 bp, Homo sapiens
gaagtggcagctttt

SEQ ID NO: 1858811 - DNA, 15 bp, Homo sapiens
aagtggcagcttttg

SEQ ID NO: 1858812 - DNA, 15 bp, Homo sapiens
agtggcagcttttga

SEQ ID NO: 1858813 - DNA, 15 bp, Homo sapiens
gtggcagcttttgaa

SEQ ID NO: 1858814 - DNA, 15 bp, Homo sapiens
tggcagcttttgaaa

SEQ ID NO: 1858815 - DNA, 15 bp, Homo sapiens
ggcagcttttgaaag

SEQ ID NO: 1858816 - DNA, 15 bp, Homo sapiens
gcagcttttgaaagg

SEQ ID NO: 1858817 - DNA, 15 bp, Homo sapiens
cagcttttgaaaggg

SEQ ID NO: 1858818 - DNA, 15 bp, Homo sapiens
agcttttgaaagggt

SEQ ID NO: 1858819 - DNA, 15 bp, Homo sapiens
gcttttgaaagggtc

SEQ ID NO: 1858820 - DNA, 15 bp, Homo sapiens
cttttgaaagggtcc

SEQ ID NO: 1858821 - DNA, 15 bp, Homo sapiens
ttttgaaagggtcct

SEQ ID NO: 1858822 - DNA, 15 bp, Homo sapiens
tttgaaagggtcctt

SEQ ID NO: 1858823 - DNA, 15 bp, Homo sapiens
ttgaaagggtccttt

SEQ ID NO: 1858824 - DNA, 15 bp, Homo sapiens
tgaaagggtcctttc

SEQ ID NO: 1858825 - DNA, 15 bp, Homo sapiens
gaaagggtcctttcg

SEQ ID NO: 1858826 - DNA, 15 bp, Homo sapiens
aaagggtcctttcgg

SEQ ID NO: 1858827 - DNA, 15 bp, Homo sapiens
aagggtcctttcgga

SEQ ID NO: 1858828 - DNA, 15 bp, Homo sapiens
agggtcctttcggaa

SEQ ID NO: 1858829 - DNA, 15 bp, Homo sapiens
gggtcctttcggaag

SEQ ID NO: 1858830 - DNA, 15 bp, Homo sapiens
ggtcctttcggaagg

SEQ ID NO: 1858831 - DNA, 15 bp, Homo sapiens
gtcctttcggaaggt

SEQ ID NO: 1858832 - DNA, 15 bp, Homo sapiens
tcctttcggaaggtt

SEQ ID NO: 1858833 - DNA, 15 bp, Homo sapiens
cctttcggaaggttt

SEQ ID NO: 1858834 - DNA, 15 bp, Homo sapiens
ctttcggaaggtttg

SEQ ID NO: 1858835 - DNA, 15 bp, Homo sapiens
tttcggaaggtttgt

SEQ ID NO: 1858836 - DNA, 15 bp, Homo sapiens
ttcggaaggtttgtc

SEQ ID NO: 1858837 - DNA, 15 bp, Homo sapiens
tcggaaggtttgtct

SEQ ID NO: 1858838 - DNA, 15 bp, Homo sapiens
cggaaggtttgtctt

SEQ ID NO: 1858839 - DNA, 15 bp, Homo sapiens
ggaaggtttgtcttc

SEQ ID NO: 1858840 - DNA, 15 bp, Homo sapiens
gaaggtttgtcttct

SEQ ID NO: 1858841 - DNA, 15 bp, Homo sapiens
aaggtttgtcttctt

SEQ ID NO: 1858842 - DNA, 15 bp, Homo sapiens
aggtttgtcttcttg

SEQ ID NO: 1858843 - DNA, 15 bp, Homo sapiens
ggtttgtcttcttga

SEQ ID NO: 1858844 - DNA, 15 bp, Homo sapiens
gtttgtcttcttgat

SEQ ID NO: 1858845 - DNA, 15 bp, Homo sapiens
tttgtcttcttgata

SEQ ID NO: 1858846 - DNA, 15 bp, Homo sapiens
ttgtcttcttgataa

SEQ ID NO: 1858847 - DNA, 15 bp, Homo sapiens
tgtcttcttgataac

SEQ ID NO: 1858848 - DNA, 15 bp, Homo sapiens
gtcttcttgataaca

SEQ ID NO: 1858849 - DNA, 15 bp, Homo sapiens
tcttcttgataacat

SEQ ID NO: 1858850 - DNA, 15 bp, Homo sapiens
cttcttgataacatc

SEQ ID NO: 1858851 - DNA, 15 bp, Homo sapiens
ttcttgataacatct

SEQ ID NO: 1858852 - DNA, 15 bp, Homo sapiens
tcttgataacatctt

SEQ ID NO: 1858853 - DNA, 15 bp, Homo sapiens
cttgataacatcttg

SEQ ID NO: 1858854 - DNA, 15 bp, Homo sapiens
ttgataacatcttgt

SEQ ID NO: 1858855 - DNA, 15 bp, Homo sapiens
tgataacatcttgtc

SEQ ID NO: 1858856 - DNA, 15 bp, Homo sapiens
gataacatcttgtct

SEQ ID NO: 1858857 - DNA, 15 bp, Homo sapiens
ataacatcttgtctg

SEQ ID NO: 1858858 - DNA, 15 bp, Homo sapiens
taacatcttgtctgt

SEQ ID NO: 1858859 - DNA, 15 bp, Homo sapiens
aacatcttgtctgtc

SEQ ID NO: 1858860 - DNA, 15 bp, Homo sapiens
acatcttgtctgtct

SEQ ID NO: 1858861 - DNA, 15 bp, Homo sapiens
catcttgtctgtctc

SEQ ID NO: 1858862 - DNA, 15 bp, Homo sapiens
atcttgtctgtctcc

SEQ ID NO: 1858863 - DNA, 15 bp, Homo sapiens
tcttgtctgtctccc

SEQ ID NO: 1858864 - DNA, 15 bp, Homo sapiens
cttgtctgtctcccc

SEQ ID NO: 1858865 - DNA, 15 bp, Homo sapiens
ttgtctgtctcccct

SEQ ID NO: 1858866 - DNA, 15 bp, Homo sapiens
tgtctgtctcccctg

SEQ ID NO: 1858867 - DNA, 15 bp, Homo sapiens
gtctgtctcccctgc

SEQ ID NO: 1858868 - DNA, 15 bp, Homo sapiens
tctgtctcccctgcc

SEQ ID NO: 1858869 - DNA, 15 bp, Homo sapiens
ctgtctcccctgccg

SEQ ID NO: 1858870 - DNA, 15 bp, Homo sapiens
tgtctcccctgccgg

SEQ ID NO: 1858871 - DNA, 15 bp, Homo sapiens
gtctcccctgccgga

SEQ ID NO: 1858872 - DNA, 15 bp, Homo sapiens
tctcccctgccggag

SEQ ID NO: 1858873 - DNA, 15 bp, Homo sapiens
ctcccctgccggagg

SEQ ID NO: 1858874 - DNA, 15 bp, Homo sapiens
tcccctgccggagga

SEQ ID NO: 1858875 - DNA, 15 bp, Homo sapiens
cccctgccggaggaa

SEQ ID NO: 1858876 - DNA, 15 bp, Homo sapiens
ccctgccggaggaaa

SEQ ID NO: 1858877 - DNA, 15 bp, Homo sapiens
cctgccggaggaaat

SEQ ID NO: 1858878 - DNA, 15 bp, Homo sapiens
ctgccggaggaaatg

SEQ ID NO: 1858879 - DNA, 15 bp, Homo sapiens
tgccggaggaaatga

SEQ ID NO: 1858880 - DNA, 15 bp, Homo sapiens
gccggaggaaatgac

SEQ ID NO: 1858881 - DNA, 15 bp, Homo sapiens
ccggaggaaatgacg

SEQ ID NO: 1858882 - DNA, 15 bp, Homo sapiens
cggaggaaatgacga

SEQ ID NO: 1858883 - DNA, 15 bp, Homo sapiens
ggaggaaatgacgac

SEQ ID NO: 1858884 - DNA, 15 bp, Homo sapiens
gaggaaatgacgaca

SEQ ID NO: 1858885 - DNA, 15 bp, Homo sapiens
aggaaatgacgacac

SEQ ID NO: 1858886 - DNA, 15 bp, Homo sapiens
ggaaatgacgacacc

SEQ ID NO: 1858887 - DNA, 15 bp, Homo sapiens
gaaatgacgacacca

SEQ ID NO: 1858888 - DNA, 15 bp, Homo sapiens
aaatgacgacaccag

SEQ ID NO: 1858889 - DNA, 15 bp, Homo sapiens
aatgacgacaccagg

SEQ ID NO: 1858890 - DNA, 15 bp, Homo sapiens
atgacgacaccaggc

SEQ ID NO: 1858891 - DNA, 15 bp, Homo sapiens
tgacgacaccaggct

SEQ ID NO: 1858892 - DNA, 15 bp, Homo sapiens
gacgacaccaggctg

SEQ ID NO: 1858893 - DNA, 15 bp, Homo sapiens
acgacaccaggctga

SEQ ID NO: 1858894 - DNA, 15 bp, Homo sapiens
cgacaccaggctgag

SEQ ID NO: 1858895 - DNA, 15 bp, Homo sapiens
gacaccaggctgaga

SEQ ID NO: 1858896 - DNA, 15 bp, Homo sapiens
acaccaggctgagat

SEQ ID NO: 1858897 - DNA, 15 bp, Homo sapiens
caccaggctgagata

SEQ ID NO: 1858898 - DNA, 15 bp, Homo sapiens
accaggctgagatac

SEQ ID NO: 1858899 - DNA, 15 bp, Homo sapiens
ccaggctgagatacc

SEQ ID NO: 1858900 - DNA, 15 bp, Homo sapiens
caggctgagatacca

SEQ ID NO: 1858901 - DNA, 15 bp, Homo sapiens
aggctgagataccag

SEQ ID NO: 1858902 - DNA, 15 bp, Homo sapiens
ggctgagataccagc

SEQ ID NO: 1858903 - DNA, 15 bp, Homo sapiens
gctgagataccagcc

SEQ ID NO: 1858904 - DNA, 15 bp, Homo sapiens
ctgagataccagcct

SEQ ID NO: 1858905 - DNA, 15 bp, Homo sapiens
tgagataccagcctg

SEQ ID NO: 1858906 - DNA, 15 bp, Homo sapiens
gagataccagcctga

SEQ ID NO: 1858907 - DNA, 15 bp, Homo sapiens
agataccagcctgag

SEQ ID NO: 1858908 - DNA, 15 bp, Homo sapiens
gataccagcctgagt

SEQ ID NO: 1858909 - DNA, 15 bp, Homo sapiens
ataccagcctgagtg

SEQ ID NO: 1858910 - DNA, 15 bp, Homo sapiens
taccagcctgagtgc

SEQ ID NO: 1858911 - DNA, 15 bp, Homo sapiens
accagcctgagtgcc

SEQ ID NO: 1858912 - DNA, 15 bp, Homo sapiens
ccagcctgagtgcct

SEQ ID NO: 1858913 - DNA, 15 bp, Homo sapiens
cagcctgagtgcctc

SEQ ID NO: 1858914 - DNA, 15 bp, Homo sapiens
agcctgagtgcctcc

SEQ ID NO: 1858915 - DNA, 15 bp, Homo sapiens
gcctgagtgcctcct

SEQ ID NO: 1858916 - DNA, 15 bp, Homo sapiens
cctgagtgcctcctc

SEQ ID NO: 1858917 - DNA, 15 bp, Homo sapiens
ctgagtgcctcctca

SEQ ID NO: 1858918 - DNA, 15 bp, Homo sapiens
tgagtgcctcctcac

SEQ ID NO: 1858919 - DNA, 15 bp, Homo sapiens
gagtgcctcctcacc

SEQ ID NO: 1858920 - DNA, 15 bp, Homo sapiens
agtgcctcctcaccc

SEQ ID NO: 1858921 - DNA, 15 bp, Homo sapiens
gtgcctcctcacccg

SEQ ID NO: 1858922 - DNA, 15 bp, Homo sapiens
tgcctcctcacccgc

SEQ ID NO: 1858923 - DNA, 15 bp, Homo sapiens
gcctcctcacccgcc

SEQ ID NO: 1858924 - DNA, 15 bp, Homo sapiens
cctcctcacccgccc

SEQ ID NO: 1858925 - DNA, 15 bp, Homo sapiens
ctcctcacccgcccg

SEQ ID NO: 1858926 - DNA, 15 bp, Homo sapiens
tcctcacccgcccgt

SEQ ID NO: 1858927 - DNA, 15 bp, Homo sapiens
cctcacccgcccgtg

SEQ ID NO: 1858928 - DNA, 15 bp, Homo sapiens
ctcacccgcccgtgc

SEQ ID NO: 1858929 - DNA, 15 bp, Homo sapiens
tcacccgcccgtgcc

SEQ ID NO: 1858930 - DNA, 15 bp, Homo sapiens
cacccgcccgtgcca

SEQ ID NO: 1858931 - DNA, 15 bp, Homo sapiens
acccgcccgtgccat

SEQ ID NO: 1858932 - DNA, 15 bp, Homo sapiens
cccgcccgtgccatg

SEQ ID NO: 1858933 - DNA, 15 bp, Homo sapiens
ccgcccgtgccatgt

SEQ ID NO: 1858934 - DNA, 15 bp, Homo sapiens
cgcccgtgccatgtg

SEQ ID NO: 1858935 - DNA, 15 bp, Homo sapiens
gcccgtgccatgtga

SEQ ID NO: 1858936 - DNA, 15 bp, Homo sapiens
cccgtgccatgtgac

SEQ ID NO: 1858937 - DNA, 15 bp, Homo sapiens
ccgtgccatgtgacc

SEQ ID NO: 1858938 - DNA, 15 bp, Homo sapiens
cgtgccatgtgacct

SEQ ID NO: 1858939 - DNA, 15 bp, Homo sapiens
gtgccatgtgacctg

SEQ ID NO: 1858940 - DNA, 15 bp, Homo sapiens
tgccatgtgacctgt

SEQ ID NO: 1858941 - DNA, 15 bp, Homo sapiens
gccatgtgacctgtg

SEQ ID NO: 1858942 - DNA, 15 bp, Homo sapiens
ccatgtgacctgtga

SEQ ID NO: 1858943 - DNA, 15 bp, Homo sapiens
catgtgacctgtgaa

SEQ ID NO: 1858944 - DNA, 15 bp, Homo sapiens
atgtgacctgtgaag

SEQ ID NO: 1858945 - DNA, 15 bp, Homo sapiens
tgtgacctgtgaagc

SEQ ID NO: 1858946 - DNA, 15 bp, Homo sapiens
gtgacctgtgaagcc

SEQ ID NO: 1858947 - DNA, 15 bp, Homo sapiens
tgacctgtgaagccc

SEQ ID NO: 1858948 - DNA, 15 bp, Homo sapiens
gacctgtgaagccct

SEQ ID NO: 1858949 - DNA, 15 bp, Homo sapiens
acctgtgaagccctc

SEQ ID NO: 1858950 - DNA, 15 bp, Homo sapiens
cctgtgaagccctca

SEQ ID NO: 1858951 - DNA, 15 bp, Homo sapiens
ctgtgaagccctcag

SEQ ID NO: 1858952 - DNA, 15 bp, Homo sapiens
tgtgaagccctcagg

SEQ ID NO: 1858953 - DNA, 15 bp, Homo sapiens
gtgaagccctcagga

SEQ ID NO: 1858954 - DNA, 15 bp, Homo sapiens
tgaagccctcaggag

SEQ ID NO: 1858955 - DNA, 15 bp, Homo sapiens
gaagccctcaggaga

SEQ ID NO: 1858956 - DNA, 15 bp, Homo sapiens
aagccctcaggagat

SEQ ID NO: 1858957 - DNA, 15 bp, Homo sapiens
agccctcaggagatg

SEQ ID NO: 1858958 - DNA, 15 bp, Homo sapiens
gccctcaggagatgg

SEQ ID NO: 1858959 - DNA, 15 bp, Homo sapiens
ccctcaggagatggg

SEQ ID NO: 1858960 - DNA, 15 bp, Homo sapiens
cctcaggagatgggt

SEQ ID NO: 1858961 - DNA, 15 bp, Homo sapiens
ctcaggagatgggtg

SEQ ID NO: 1858962 - DNA, 15 bp, Homo sapiens
tcaggagatgggtgg

SEQ ID NO: 1858963 - DNA, 15 bp, Homo sapiens
caggagatgggtggg

SEQ ID NO: 1858964 - DNA, 15 bp, Homo sapiens
aggagatgggtgggc

SEQ ID NO: 1858965 - DNA, 15 bp, Homo sapiens
ggagatgggtgggct

SEQ ID NO: 1858966 - DNA, 15 bp, Homo sapiens
gagatgggtgggctt

SEQ ID NO: 1858967 - DNA, 15 bp, Homo sapiens
agatgggtgggcttt

SEQ ID NO: 1858968 - DNA, 15 bp, Homo sapiens
gatgggtgggctttt

SEQ ID NO: 1858969 - DNA, 15 bp, Homo sapiens
atgggtgggcttttt

SEQ ID NO: 1858970 - DNA, 15 bp, Homo sapiens
tgggtgggctttttt

SEQ ID NO: 1858971 - DNA, 15 bp, Homo sapiens
gggtgggcttttttt

SEQ ID NO: 1858972 - DNA, 15 bp, Homo sapiens
ggtgggctttttttt

SEQ ID NO: 1858973 - DNA, 15 bp, Homo sapiens
gtgggcttttttttt

SEQ ID NO: 1858974 - DNA, 15 bp, Homo sapiens
tgggctttttttttt

SEQ ID NO: 1858975 - DNA, 15 bp, Homo sapiens
gggcttttttttttt

SEQ ID NO: 1858976 - DNA, 15 bp, Homo sapiens
ggctttttttttttt

SEQ ID NO: 1858977 - DNA, 15 bp, Homo sapiens
ttttttcttttttga

SEQ ID NO: 1858978 - DNA, 15 bp, Homo sapiens
tttttcttttttgac

SEQ ID NO: 1858979 - DNA, 15 bp, Homo sapiens
ttttcttttttgaca

SEQ ID NO: 1858980 - DNA, 15 bp, Homo sapiens
tttcttttttgacaa

SEQ ID NO: 1858981 - DNA, 15 bp, Homo sapiens
ttcttttttgacaaa

SEQ ID NO: 1858982 - DNA, 15 bp, Homo sapiens
tcttttttgacaaag

SEQ ID NO: 1858983 - DNA, 15 bp, Homo sapiens
cttttttgacaaagt

SEQ ID NO: 1858984 - DNA, 15 bp, Homo sapiens
ttttttgacaaagtc

SEQ ID NO: 1858985 - DNA, 15 bp, Homo sapiens
tttttgacaaagtct

SEQ ID NO: 1858986 - DNA, 15 bp, Homo sapiens
ttttgacaaagtctc

SEQ ID NO: 1858987 - DNA, 15 bp, Homo sapiens
tttgacaaagtctcg

SEQ ID NO: 1858988 - DNA, 15 bp, Homo sapiens
ttgacaaagtctcgc

SEQ ID NO: 1858989 - DNA, 15 bp, Homo sapiens
tgacaaagtctcgct

SEQ ID NO: 1858990 - DNA, 15 bp, Homo sapiens
cagtggcgcgatttc

SEQ ID NO: 1858991 - DNA, 15 bp, Homo sapiens
agtggcgcgatttcg

SEQ ID NO: 1858992 - DNA, 15 bp, Homo sapiens
gtggcgcgatttcgg

SEQ ID NO: 1858993 - DNA, 15 bp, Homo sapiens
tggcgcgatttcggc

SEQ ID NO: 1858994 - DNA, 15 bp, Homo sapiens
ggcgcgatttcggct

SEQ ID NO: 1858995 - DNA, 15 bp, Homo sapiens
gcgcgatttcggctc

SEQ ID NO: 1858996 - DNA, 15 bp, Homo sapiens
cgcgatttcggctca

SEQ ID NO: 1858997 - DNA, 15 bp, Homo sapiens
gcgatttcggctcac

SEQ ID NO: 1858998 - DNA, 15 bp, Homo sapiens
cgatttcggctcaca

SEQ ID NO: 1858999 - DNA, 15 bp, Homo sapiens
gatttcggctcacac

SEQ ID NO: 1859000 - DNA, 15 bp, Homo sapiens
atttcggctcacaca

SEQ ID NO: 1859001 - DNA, 15 bp, Homo sapiens
tttcggctcacacag

SEQ ID NO: 1859002 - DNA, 15 bp, Homo sapiens
ttcggctcacacaga

SEQ ID NO: 1859003 - DNA, 15 bp, Homo sapiens
tcggctcacacagac

SEQ ID NO: 1859004 - DNA, 15 bp, Homo sapiens
cggctcacacagacg

SEQ ID NO: 1859005 - DNA, 15 bp, Homo sapiens
ggctcacacagacgg

SEQ ID NO: 1859006 - DNA, 15 bp, Homo sapiens
gctcacacagacgga

SEQ ID NO: 1859007 - DNA, 15 bp, Homo sapiens
ctcacacagacggag

SEQ ID NO: 1859008 - DNA, 15 bp, Homo sapiens
tcacacagacggagt

SEQ ID NO: 1859009 - DNA, 15 bp, Homo sapiens
cacacagacggagtc

SEQ ID NO: 1859010 - DNA, 15 bp, Homo sapiens
acacagacggagtct

SEQ ID NO: 1859011 - DNA, 15 bp, Homo sapiens
cacagacggagtctc

SEQ ID NO: 1859012 - DNA, 15 bp, Homo sapiens
acagacggagtctcg

SEQ ID NO: 1859013 - DNA, 15 bp, Homo sapiens
cagacggagtctcgc

SEQ ID NO: 1859014 - DNA, 15 bp, Homo sapiens
ctcgctctgtcacca

SEQ ID NO: 1859015 - DNA, 15 bp, Homo sapiens
tcgctctgtcaccag

SEQ ID NO: 1859016 - DNA, 15 bp, Homo sapiens
cgctctgtcaccagg

SEQ ID NO: 1859017 - DNA, 15 bp, Homo sapiens
tgcagtggcccgatt

SEQ ID NO: 1859018 - DNA, 15 bp, Homo sapiens
gcagtggcccgattt

SEQ ID NO: 1859019 - DNA, 15 bp, Homo sapiens
cagtggcccgatttc

SEQ ID NO: 1859020 - DNA, 15 bp, Homo sapiens
agtggcccgatttcg

SEQ ID NO: 1859021 - DNA, 15 bp, Homo sapiens
gtggcccgatttcgg

SEQ ID NO: 1859022 - DNA, 15 bp, Homo sapiens
tggcccgatttcggc

SEQ ID NO: 1859023 - DNA, 15 bp, Homo sapiens
ggcccgatttcggct

SEQ ID NO: 1859024 - DNA, 15 bp, Homo sapiens
gcccgatttcggctc

SEQ ID NO: 1859025 - DNA, 15 bp, Homo sapiens
cccgatttcggctca

SEQ ID NO: 1859026 - DNA, 15 bp, Homo sapiens
ccgatttcggctcac

SEQ ID NO: 1859027 - DNA, 15 bp, Homo sapiens
cgatttcggctcact

SEQ ID NO: 1859028 - DNA, 15 bp, Homo sapiens
gatttcggctcactg

SEQ ID NO: 1859029 - DNA, 15 bp, Homo sapiens
atttcggctcactgc

SEQ ID NO: 1859030 - DNA, 15 bp, Homo sapiens
tttcggctcactgca

SEQ ID NO: 1859031 - DNA, 15 bp, Homo sapiens
ttcggctcactgcaa

SEQ ID NO: 1859032 - DNA, 15 bp, Homo sapiens
ggattacaggcatcc

SEQ ID NO: 1859033 - DNA, 15 bp, Homo sapiens
gattacaggcatcca

SEQ ID NO: 1859034 - DNA, 15 bp, Homo sapiens
attacaggcatccac

SEQ ID NO: 1859035 - DNA, 15 bp, Homo sapiens
ttacaggcatccacc

SEQ ID NO: 1859036 - DNA, 15 bp, Homo sapiens
tacaggcatccacca

SEQ ID NO: 1859037 - DNA, 15 bp, Homo sapiens
acaggcatccaccac

SEQ ID NO: 1859038 - DNA, 15 bp, Homo sapiens
caggcatccaccact

SEQ ID NO: 1859039 - DNA, 15 bp, Homo sapiens
aggcatccaccactg

SEQ ID NO: 1859040 - DNA, 15 bp, Homo sapiens
ggcatccaccactgt

SEQ ID NO: 1859041 - DNA, 15 bp, Homo sapiens
gcatccaccactgtg

SEQ ID NO: 1859042 - DNA, 15 bp, Homo sapiens
catccaccactgtgc

SEQ ID NO: 1859043 - DNA, 15 bp, Homo sapiens
atccaccactgtgcc

SEQ ID NO: 1859044 - DNA, 15 bp, Homo sapiens
tccaccactgtgccc

SEQ ID NO: 1859045 - DNA, 15 bp, Homo sapiens
ccaccactgtgccca

SEQ ID NO: 1859046 - DNA, 15 bp, Homo sapiens
caccactgtgcccag

SEQ ID NO: 1859047 - DNA, 15 bp, Homo sapiens
accactgtgcccagc

SEQ ID NO: 1859048 - DNA, 15 bp, Homo sapiens
ccactgtgcccagct

SEQ ID NO: 1859049 - DNA, 15 bp, Homo sapiens
cactgtgcccagcta

SEQ ID NO: 1859050 - DNA, 15 bp, Homo sapiens
actgtgcccagctaa

SEQ ID NO: 1859051 - DNA, 15 bp, Homo sapiens
ctgtgcccagctaat

SEQ ID NO: 1859052 - DNA, 15 bp, Homo sapiens
tgtgcccagctaatt

SEQ ID NO: 1859053 - DNA, 15 bp, Homo sapiens
aactcctgacctcgg

SEQ ID NO: 1859054 - DNA, 15 bp, Homo sapiens
actcctgacctcgga

SEQ ID NO: 1859055 - DNA, 15 bp, Homo sapiens
ctcctgacctcggat

SEQ ID NO: 1859056 - DNA, 15 bp, Homo sapiens
tcctgacctcggatg

SEQ ID NO: 1859057 - DNA, 15 bp, Homo sapiens
cctgacctcggatga

SEQ ID NO: 1859058 - DNA, 15 bp, Homo sapiens
ctgacctcggatgat

SEQ ID NO: 1859059 - DNA, 15 bp, Homo sapiens
tgacctcggatgatc

SEQ ID NO: 1859060 - DNA, 15 bp, Homo sapiens
gacctcggatgatcc

SEQ ID NO: 1859061 - DNA, 15 bp, Homo sapiens
acctcggatgatcca

SEQ ID NO: 1859062 - DNA, 15 bp, Homo sapiens
cctcggatgatccac

SEQ ID NO: 1859063 - DNA, 15 bp, Homo sapiens
ctcggatgatccacc

SEQ ID NO: 1859064 - DNA, 15 bp, Homo sapiens
tcggatgatccaccc

SEQ ID NO: 1859065 - DNA, 15 bp, Homo sapiens
cggatgatccaccca

SEQ ID NO: 1859066 - DNA, 15 bp, Homo sapiens
ggatgatccacccac

SEQ ID NO: 1859067 - DNA, 15 bp, Homo sapiens
atgatccacccaccc

SEQ ID NO: 1859068 - DNA, 15 bp, Homo sapiens
tgatccacccaccct

SEQ ID NO: 1859069 - DNA, 15 bp, Homo sapiens
gatccacccaccctt

SEQ ID NO: 1859070 - DNA, 15 bp, Homo sapiens
atccacccacccttt

SEQ ID NO: 1859071 - DNA, 15 bp, Homo sapiens
tccacccaccctttc

SEQ ID NO: 1859072 - DNA, 15 bp, Homo sapiens
ccacccaccctttcc

SEQ ID NO: 1859073 - DNA, 15 bp, Homo sapiens
cacccaccctttcct

SEQ ID NO: 1859074 - DNA, 15 bp, Homo sapiens
acccaccctttcctc

SEQ ID NO: 1859075 - DNA, 15 bp, Homo sapiens
cccaccctttcctcc

SEQ ID NO: 1859076 - DNA, 15 bp, Homo sapiens
ccaccctttcctccc

SEQ ID NO: 1859077 - DNA, 15 bp, Homo sapiens
caccctttcctcccc

SEQ ID NO: 1859078 - DNA, 15 bp, Homo sapiens
accctttcctcccca

SEQ ID NO: 1859079 - DNA, 15 bp, Homo sapiens
ccctttcctccccaa

SEQ ID NO: 1859080 - DNA, 15 bp, Homo sapiens
cctttcctccccaag

SEQ ID NO: 1859081 - DNA, 15 bp, Homo sapiens
ctttcctccccaagt

SEQ ID NO: 1859082 - DNA, 15 bp, Homo sapiens
tttcctccccaagtg

SEQ ID NO: 1859083 - DNA, 15 bp, Homo sapiens
ttcctccccaagtgc

SEQ ID NO: 1859084 - DNA, 15 bp, Homo sapiens
tcctccccaagtgct

SEQ ID NO: 1859085 - DNA, 15 bp, Homo sapiens
cctccccaagtgctg

SEQ ID NO: 1859086 - DNA, 15 bp, Homo sapiens
ctccccaagtgctga

SEQ ID NO: 1859087 - DNA, 15 bp, Homo sapiens
tccccaagtgctgag

SEQ ID NO: 1859088 - DNA, 15 bp, Homo sapiens
ccccaagtgctgaga

SEQ ID NO: 1859089 - DNA, 15 bp, Homo sapiens
cccaagtgctgagat

SEQ ID NO: 1859090 - DNA, 15 bp, Homo sapiens
ccaagtgctgagatt

SEQ ID NO: 1859091 - DNA, 15 bp, Homo sapiens
caagtgctgagatta

SEQ ID NO: 1859092 - DNA, 15 bp, Homo sapiens
cactgcgcctggccg

SEQ ID NO: 1859093 - DNA, 15 bp, Homo sapiens
actgcgcctggccga

SEQ ID NO: 1859094 - DNA, 15 bp, Homo sapiens
ctgcgcctggccgat

SEQ ID NO: 1859095 - DNA, 15 bp, Homo sapiens
tgcgcctggccgatg

SEQ ID NO: 1859096 - DNA, 15 bp, Homo sapiens
gcgcctggccgatgg

SEQ ID NO: 1859097 - DNA, 15 bp, Homo sapiens
cgcctggccgatggg

SEQ ID NO: 1859098 - DNA, 15 bp, Homo sapiens
gcctggccgatgggt

SEQ ID NO: 1859099 - DNA, 15 bp, Homo sapiens
cctggccgatgggtg

SEQ ID NO: 1859100 - DNA, 15 bp, Homo sapiens
ctggccgatgggtgg

SEQ ID NO: 1859101 - DNA, 15 bp, Homo sapiens
tggccgatgggtggg

SEQ ID NO: 1859102 - DNA, 15 bp, Homo sapiens
ggccgatgggtgggc

SEQ ID NO: 1859103 - DNA, 15 bp, Homo sapiens
gccgatgggtgggct

SEQ ID NO: 1859104 - DNA, 15 bp, Homo sapiens
ccgatgggtgggctt

SEQ ID NO: 1859105 - DNA, 15 bp, Homo sapiens
cgatgggtgggcttt

SEQ ID NO: 1859106 - DNA, 15 bp, Homo sapiens
ggtgggctttttttc

SEQ ID NO: 1859107 - DNA, 15 bp, Homo sapiens
gtgggctttttttcc

SEQ ID NO: 1859108 - DNA, 15 bp, Homo sapiens
tgggctttttttccc

SEQ ID NO: 1859109 - DNA, 15 bp, Homo sapiens
gggctttttttcccc

SEQ ID NO: 1859110 - DNA, 15 bp, Homo sapiens
ggctttttttcccca

SEQ ID NO: 1859111 - DNA, 15 bp, Homo sapiens
gctttttttccccaa

SEQ ID NO: 1859112 - DNA, 15 bp, Homo sapiens
ctttttttccccaaa

SEQ ID NO: 1859113 - DNA, 15 bp, Homo sapiens
tttttttccccaaag

SEQ ID NO: 1859114 - DNA, 15 bp, Homo sapiens
ttttttccccaaagc

SEQ ID NO: 1859115 - DNA, 15 bp, Homo sapiens
tttttccccaaagct

SEQ ID NO: 1859116 - DNA, 15 bp, Homo sapiens
ttttccccaaagctc

SEQ ID NO: 1859117 - DNA, 15 bp, Homo sapiens
tttccccaaagctct

SEQ ID NO: 1859118 - DNA, 15 bp, Homo sapiens
ttccccaaagctctt

SEQ ID NO: 1859119 - DNA, 15 bp, Homo sapiens
tccccaaagctcttc

SEQ ID NO: 1859120 - DNA, 15 bp, Homo sapiens
ccccaaagctcttcc

SEQ ID NO: 1859121 - DNA, 15 bp, Homo sapiens
cccaaagctcttcca

SEQ ID NO: 1859122 - DNA, 15 bp, Homo sapiens
ccaaagctcttccag

SEQ ID NO: 1859123 - DNA, 15 bp, Homo sapiens
caaagctcttccagt

SEQ ID NO: 1859124 - DNA, 15 bp, Homo sapiens
aaagctcttccagtc

SEQ ID NO: 1859125 - DNA, 15 bp, Homo sapiens
aagctcttccagtcc

SEQ ID NO: 1859126 - DNA, 15 bp, Homo sapiens
agctcttccagtcct

SEQ ID NO: 1859127 - DNA, 15 bp, Homo sapiens
gctcttccagtccta

SEQ ID NO: 1859128 - DNA, 15 bp, Homo sapiens
ctcttccagtcctag

SEQ ID NO: 1859129 - DNA, 15 bp, Homo sapiens
tcttccagtcctaga

SEQ ID NO: 1859130 - DNA, 15 bp, Homo sapiens
cttccagtcctagaa

SEQ ID NO: 1859131 - DNA, 15 bp, Homo sapiens
ttccagtcctagaaa

SEQ ID NO: 1859132 - DNA, 15 bp, Homo sapiens
tccagtcctagaaag

SEQ ID NO: 1859133 - DNA, 15 bp, Homo sapiens
ccagtcctagaaaga

SEQ ID NO: 1859134 - DNA, 15 bp, Homo sapiens
cagtcctagaaagaa

SEQ ID NO: 1859135 - DNA, 15 bp, Homo sapiens
agtcctagaaagaaa

SEQ ID NO: 1859136 - DNA, 15 bp, Homo sapiens
gtcctagaaagaaac

SEQ ID NO: 1859137 - DNA, 15 bp, Homo sapiens
tcctagaaagaaact

SEQ ID NO: 1859138 - DNA, 15 bp, Homo sapiens
cctagaaagaaactg

SEQ ID NO: 1859139 - DNA, 15 bp, Homo sapiens
ctagaaagaaactgg

SEQ ID NO: 1859140 - DNA, 15 bp, Homo sapiens
tagaaagaaactggg

SEQ ID NO: 1859141 - DNA, 15 bp, Homo sapiens
agaaagaaactgggg

SEQ ID NO: 1859142 - DNA, 15 bp, Homo sapiens
gaaagaaactggggg

SEQ ID NO: 1859143 - DNA, 15 bp, Homo sapiens
aaagaaactgggggt

SEQ ID NO: 1859144 - DNA, 15 bp, Homo sapiens
aagaaactgggggta

SEQ ID NO: 1859145 - DNA, 15 bp, Homo sapiens
agaaactgggggtaa

SEQ ID NO: 1859146 - DNA, 15 bp, Homo sapiens
gaaactgggggtaaa

SEQ ID NO: 1859147 - DNA, 15 bp, Homo sapiens
aaactgggggtaaaa

SEQ ID NO: 1859148 - DNA, 15 bp, Homo sapiens
aactgggggtaaaac

SEQ ID NO: 1859149 - DNA, 15 bp, Homo sapiens
actgggggtaaaaca

SEQ ID NO: 1859150 - DNA, 15 bp, Homo sapiens
ctgggggtaaaacaa

SEQ ID NO: 1859151 - DNA, 15 bp, Homo sapiens
tgggggtaaaacaat

SEQ ID NO: 1859152 - DNA, 15 bp, Homo sapiens
gggggtaaaacaatc

SEQ ID NO: 1859153 - DNA, 15 bp, Homo sapiens
ggggtaaaacaatca

SEQ ID NO: 1859154 - DNA, 15 bp, Homo sapiens
gggtaaaacaatcat

SEQ ID NO: 1859155 - DNA, 15 bp, Homo sapiens
ggtaaaacaatcatt

SEQ ID NO: 1859156 - DNA, 15 bp, Homo sapiens
gtaaaacaatcatta

SEQ ID NO: 1859157 - DNA, 15 bp, Homo sapiens
taaaacaatcattaa

SEQ ID NO: 1859158 - DNA, 15 bp, Homo sapiens
aaaacaatcattaac

SEQ ID NO: 1859159 - DNA, 15 bp, Homo sapiens
aaacaatcattaact

SEQ ID NO: 1859160 - DNA, 15 bp, Homo sapiens
aacaatcattaactc

SEQ ID NO: 1859161 - DNA, 15 bp, Homo sapiens
acaatcattaactcc

SEQ ID NO: 1859162 - DNA, 15 bp, Homo sapiens
caatcattaactcct

SEQ ID NO: 1859163 - DNA, 15 bp, Homo sapiens
aatcattaactcctt

SEQ ID NO: 1859164 - DNA, 15 bp, Homo sapiens
atcattaactccttc

SEQ ID NO: 1859165 - DNA, 15 bp, Homo sapiens
tcattaactccttcc

SEQ ID NO: 1859166 - DNA, 15 bp, Homo sapiens
cattaactccttccc

SEQ ID NO: 1859167 - DNA, 15 bp, Homo sapiens
attaactccttcccc

SEQ ID NO: 1859168 - DNA, 15 bp, Homo sapiens
ttaactccttcccct

SEQ ID NO: 1859169 - DNA, 15 bp, Homo sapiens
taactccttcccctc

SEQ ID NO: 1859170 - DNA, 15 bp, Homo sapiens
aactccttcccctca

SEQ ID NO: 1859171 - DNA, 15 bp, Homo sapiens
actccttcccctcac

SEQ ID NO: 1859172 - DNA, 15 bp, Homo sapiens
ctccttcccctcacc

SEQ ID NO: 1859173 - DNA, 15 bp, Homo sapiens
tccttcccctcaccc

SEQ ID NO: 1859174 - DNA, 15 bp, Homo sapiens
cttcccctcacccct

SEQ ID NO: 1859175 - DNA, 15 bp, Homo sapiens
ttcccctcacccctc

SEQ ID NO: 1859176 - DNA, 15 bp, Homo sapiens
tcccctcacccctcc

SEQ ID NO: 1859177 - DNA, 15 bp, Homo sapiens
ctcacccctccaggt

SEQ ID NO: 1859178 - DNA, 15 bp, Homo sapiens
tcacccctccaggta

SEQ ID NO: 1859179 - DNA, 15 bp, Homo sapiens
cacccctccaggtaa

SEQ ID NO: 1859180 - DNA, 15 bp, Homo sapiens
acccctccaggtaat

SEQ ID NO: 1859181 - DNA, 15 bp, Homo sapiens
cccctccaggtaatt

SEQ ID NO: 1859182 - DNA, 15 bp, Homo sapiens
ccctccaggtaattg

SEQ ID NO: 1859183 - DNA, 15 bp, Homo sapiens
cctccaggtaattgt

SEQ ID NO: 1859184 - DNA, 15 bp, Homo sapiens
ctccaggtaattgta

SEQ ID NO: 1859185 - DNA, 15 bp, Homo sapiens
tccaggtaattgtag

SEQ ID NO: 1859186 - DNA, 15 bp, Homo sapiens
ccaggtaattgtaga

SEQ ID NO: 1859187 - DNA, 15 bp, Homo sapiens
caggtaattgtagac

SEQ ID NO: 1859188 - DNA, 15 bp, Homo sapiens
aggtaattgtagaca

SEQ ID NO: 1859189 - DNA, 15 bp, Homo sapiens
ggtaattgtagacac

SEQ ID NO: 1859190 - DNA, 15 bp, Homo sapiens
gtaattgtagacaca

SEQ ID NO: 1859191 - DNA, 15 bp, Homo sapiens
taattgtagacacag

SEQ ID NO: 1859192 - DNA, 15 bp, Homo sapiens
aattgtagacacaga

SEQ ID NO: 1859193 - DNA, 15 bp, Homo sapiens
attgtagacacagat

SEQ ID NO: 1859194 - DNA, 15 bp, Homo sapiens
ttgtagacacagata

SEQ ID NO: 1859195 - DNA, 15 bp, Homo sapiens
tgtagacacagatat

SEQ ID NO: 1859196 - DNA, 15 bp, Homo sapiens
gtagacacagatatt

SEQ ID NO: 1859197 - DNA, 15 bp, Homo sapiens
tagacacagatatta

SEQ ID NO: 1859198 - DNA, 15 bp, Homo sapiens
agacacagatattaa

SEQ ID NO: 1859199 - DNA, 15 bp, Homo sapiens
gacacagatattaat

SEQ ID NO: 1859200 - DNA, 15 bp, Homo sapiens
acacagatattaata

SEQ ID NO: 1859201 - DNA, 15 bp, Homo sapiens
cacagatattaataa

SEQ ID NO: 1859202 - DNA, 15 bp, Homo sapiens
acagatattaataag

SEQ ID NO: 1859203 - DNA, 15 bp, Homo sapiens
cagatattaataagg

SEQ ID NO: 1859204 - DNA, 15 bp, Homo sapiens
agatattaataagga

SEQ ID NO: 1859205 - DNA, 15 bp, Homo sapiens
gatattaataaggag

SEQ ID NO: 1859206 - DNA, 15 bp, Homo sapiens
atattaataaggagc

SEQ ID NO: 1859207 - DNA, 15 bp, Homo sapiens
tattaataaggagct

SEQ ID NO: 1859208 - DNA, 15 bp, Homo sapiens
attaataaggagctg

SEQ ID NO: 1859209 - DNA, 15 bp, Homo sapiens
ttaataaggagctgc

SEQ ID NO: 1859210 - DNA, 15 bp, Homo sapiens
taataaggagctgcc

SEQ ID NO: 1859211 - DNA, 15 bp, Homo sapiens
aataaggagctgcca

SEQ ID NO: 1859212 - DNA, 15 bp, Homo sapiens
ataaggagctgccag

SEQ ID NO: 1859213 - DNA, 15 bp, Homo sapiens
taaggagctgccagg

SEQ ID NO: 1859214 - DNA, 15 bp, Homo sapiens
aaggagctgccagga

SEQ ID NO: 1859215 - DNA, 15 bp, Homo sapiens
aggagctgccaggaa

SEQ ID NO: 1859216 - DNA, 15 bp, Homo sapiens
ggagctgccaggaag

SEQ ID NO: 1859217 - DNA, 15 bp, Homo sapiens
gagctgccaggaaga

SEQ ID NO: 1859218 - DNA, 15 bp, Homo sapiens
agctgccaggaagaa

SEQ ID NO: 1859219 - DNA, 15 bp, Homo sapiens
gctgccaggaagaag

SEQ ID NO: 1859220 - DNA, 15 bp, Homo sapiens
ctgccaggaagaagc

SEQ ID NO: 1859221 - DNA, 15 bp, Homo sapiens
tgccaggaagaagca

SEQ ID NO: 1859222 - DNA, 15 bp, Homo sapiens
gccaggaagaagcag

SEQ ID NO: 1859223 - DNA, 15 bp, Homo sapiens
ccaggaagaagcagt

SEQ ID NO: 1859224 - DNA, 15 bp, Homo sapiens
caggaagaagcagtg

SEQ ID NO: 1859225 - DNA, 15 bp, Homo sapiens
aggaagaagcagtga

SEQ ID NO: 1859226 - DNA, 15 bp, Homo sapiens
ggaagaagcagtgac

SEQ ID NO: 1859227 - DNA, 15 bp, Homo sapiens
gaagaagcagtgact

SEQ ID NO: 1859228 - DNA, 15 bp, Homo sapiens
aagaagcagtgactc

SEQ ID NO: 1859229 - DNA, 15 bp, Homo sapiens
agaagcagtgactct

SEQ ID NO: 1859230 - DNA, 15 bp, Homo sapiens
gaagcagtgactctc

SEQ ID NO: 1859231 - DNA, 15 bp, Homo sapiens
aagcagtgactctct

SEQ ID NO: 1859232 - DNA, 15 bp, Homo sapiens
agcagtgactctctg

SEQ ID NO: 1859233 - DNA, 15 bp, Homo sapiens
gcagtgactctctga

SEQ ID NO: 1859234 - DNA, 15 bp, Homo sapiens
cagtgactctctgaa

SEQ ID NO: 1859235 - DNA, 15 bp, Homo sapiens
agtgactctctgaag

SEQ ID NO: 1859236 - DNA, 15 bp, Homo sapiens
gtgactctctgaagg

SEQ ID NO: 1859237 - DNA, 15 bp, Homo sapiens
tgactctctgaaggg

SEQ ID NO: 1859238 - DNA, 15 bp, Homo sapiens
gactctctgaagggc

SEQ ID NO: 1859239 - DNA, 15 bp, Homo sapiens
actctctgaagggca

SEQ ID NO: 1859240 - DNA, 15 bp, Homo sapiens
ctctctgaagggcag

SEQ ID NO: 1859241 - DNA, 15 bp, Homo sapiens
tctctgaagggcagt

SEQ ID NO: 1859242 - DNA, 15 bp, Homo sapiens
ctctgaagggcagtg

SEQ ID NO: 1859243 - DNA, 15 bp, Homo sapiens
tctgaagggcagtgt

SEQ ID NO: 1859244 - DNA, 15 bp, Homo sapiens
ctgaagggcagtgtg

SEQ ID NO: 1859245 - DNA, 15 bp, Homo sapiens
tgaagggcagtgtgg

SEQ ID NO: 1859246 - DNA, 15 bp, Homo sapiens
gaagggcagtgtggc

SEQ ID NO: 1859247 - DNA, 15 bp, Homo sapiens
aagggcagtgtggct

SEQ ID NO: 1859248 - DNA, 15 bp, Homo sapiens
agggcagtgtggctt

SEQ ID NO: 1859249 - DNA, 15 bp, Homo sapiens
gggcagtgtggcttc

SEQ ID NO: 1859250 - DNA, 15 bp, Homo sapiens
ggcagtgtggcttca

SEQ ID NO: 1859251 - DNA, 15 bp, Homo sapiens
gcagtgtggcttcag

SEQ ID NO: 1859252 - DNA, 15 bp, Homo sapiens
cagtgtggcttcaga

SEQ ID NO: 1859253 - DNA, 15 bp, Homo sapiens
agtgtggcttcagaa

SEQ ID NO: 1859254 - DNA, 15 bp, Homo sapiens
gtgtggcttcagaag

SEQ ID NO: 1859255 - DNA, 15 bp, Homo sapiens
tgtggcttcagaaga

SEQ ID NO: 1859256 - DNA, 15 bp, Homo sapiens
gtggcttcagaagac

SEQ ID NO: 1859257 - DNA, 15 bp, Homo sapiens
tggcttcagaagact

SEQ ID NO: 1859258 - DNA, 15 bp, Homo sapiens
ggcttcagaagactg

SEQ ID NO: 1859259 - DNA, 15 bp, Homo sapiens
gcttcagaagactgc

SEQ ID NO: 1859260 - DNA, 15 bp, Homo sapiens
cttcagaagactgca

SEQ ID NO: 1859261 - DNA, 15 bp, Homo sapiens
ttcagaagactgcag

SEQ ID NO: 1859262 - DNA, 15 bp, Homo sapiens
tcagaagactgcaga

SEQ ID NO: 1859263 - DNA, 15 bp, Homo sapiens
cagaagactgcagag

SEQ ID NO: 1859264 - DNA, 15 bp, Homo sapiens
agaagactgcagaga

SEQ ID NO: 1859265 - DNA, 15 bp, Homo sapiens
gaagactgcagagag

SEQ ID NO: 1859266 - DNA, 15 bp, Homo sapiens
aagactgcagagaga

SEQ ID NO: 1859267 - DNA, 15 bp, Homo sapiens
agactgcagagagaa

SEQ ID NO: 1859268 - DNA, 15 bp, Homo sapiens
gactgcagagagaag

SEQ ID NO: 1859269 - DNA, 15 bp, Homo sapiens
actgcagagagaaga

SEQ ID NO: 1859270 - DNA, 15 bp, Homo sapiens
ctgcagagagaagag

SEQ ID NO: 1859271 - DNA, 15 bp, Homo sapiens
tgcagagagaagagg

SEQ ID NO: 1859272 - DNA, 15 bp, Homo sapiens
gcagagagaagaggg

SEQ ID NO: 1859273 - DNA, 15 bp, Homo sapiens
cagagagaagagggg

SEQ ID NO: 1859274 - DNA, 15 bp, Homo sapiens
agagagaagaggggg

SEQ ID NO: 1859275 - DNA, 15 bp, Homo sapiens
gagagaagagggggc

SEQ ID NO: 1859276 - DNA, 15 bp, Homo sapiens
agagaagagggggcc

SEQ ID NO: 1859277 - DNA, 15 bp, Homo sapiens
gagaagagggggcct

SEQ ID NO: 1859278 - DNA, 15 bp, Homo sapiens
agaagagggggcctt

SEQ ID NO: 1859279 - DNA, 15 bp, Homo sapiens
gaagagggggccttc

SEQ ID NO: 1859280 - DNA, 15 bp, Homo sapiens
aagagggggccttcc

SEQ ID NO: 1859281 - DNA, 15 bp, Homo sapiens
agagggggccttcca

SEQ ID NO: 1859282 - DNA, 15 bp, Homo sapiens
gagggggccttccac

SEQ ID NO: 1859283 - DNA, 15 bp, Homo sapiens
agggggccttccaca

SEQ ID NO: 1859284 - DNA, 15 bp, Homo sapiens
gggggccttccacat

SEQ ID NO: 1859285 - DNA, 15 bp, Homo sapiens
ggggccttccacatg

SEQ ID NO: 1859286 - DNA, 15 bp, Homo sapiens
gggccttccacatgg

SEQ ID NO: 1859287 - DNA, 15 bp, Homo sapiens
ggccttccacatggc

SEQ ID NO: 1859288 - DNA, 15 bp, Homo sapiens
gccttccacatggca

SEQ ID NO: 1859289 - DNA, 15 bp, Homo sapiens
ccttccacatggcaa

SEQ ID NO: 1859290 - DNA, 15 bp, Homo sapiens
cttccacatggcaag

SEQ ID NO: 1859291 - DNA, 15 bp, Homo sapiens
ttccacatggcaaga

SEQ ID NO: 1859292 - DNA, 15 bp, Homo sapiens
tccacatggcaagag

SEQ ID NO: 1859293 - DNA, 15 bp, Homo sapiens
ccacatggcaagagc

SEQ ID NO: 1859294 - DNA, 15 bp, Homo sapiens
cacatggcaagagca

SEQ ID NO: 1859295 - DNA, 15 bp, Homo sapiens
acatggcaagagcat

SEQ ID NO: 1859296 - DNA, 15 bp, Homo sapiens
catggcaagagcatt

SEQ ID NO: 1859297 - DNA, 15 bp, Homo sapiens
atggcaagagcattt

SEQ ID NO: 1859298 - DNA, 15 bp, Homo sapiens
tggcaagagcatttg

SEQ ID NO: 1859299 - DNA, 15 bp, Homo sapiens
ggcaagagcatttgt

SEQ ID NO: 1859300 - DNA, 15 bp, Homo sapiens
gcaagagcatttgtt

SEQ ID NO: 1859301 - DNA, 15 bp, Homo sapiens
caagagcatttgttt

SEQ ID NO: 1859302 - DNA, 15 bp, Homo sapiens
aagagcatttgtttt

SEQ ID NO: 1859303 - DNA, 15 bp, Homo sapiens
agagcatttgttttg

SEQ ID NO: 1859304 - DNA, 15 bp, Homo sapiens
gagcatttgttttga

SEQ ID NO: 1859305 - DNA, 15 bp, Homo sapiens
agcatttgttttgaa

SEQ ID NO: 1859306 - DNA, 15 bp, Homo sapiens
gcatttgttttgaat

SEQ ID NO: 1859307 - DNA, 15 bp, Homo sapiens
catttgttttgaatt

SEQ ID NO: 1859308 - DNA, 15 bp, Homo sapiens
atttgttttgaattt

SEQ ID NO: 1859309 - DNA, 15 bp, Homo sapiens
tttgttttgaatttc

SEQ ID NO: 1859310 - DNA, 15 bp, Homo sapiens
ttgttttgaatttca

SEQ ID NO: 1859311 - DNA, 15 bp, Homo sapiens
tgttttgaatttcag

SEQ ID NO: 1859312 - DNA, 15 bp, Homo sapiens
gttttgaatttcagc

SEQ ID NO: 1859313 - DNA, 15 bp, Homo sapiens
ttttgaatttcagct

SEQ ID NO: 1859314 - DNA, 15 bp, Homo sapiens
tttgaatttcagctc

SEQ ID NO: 1859315 - DNA, 15 bp, Homo sapiens
ttgaatttcagctct

SEQ ID NO: 1859316 - DNA, 15 bp, Homo sapiens
tgaatttcagctctt

SEQ ID NO: 1859317 - DNA, 15 bp, Homo sapiens
gaatttcagctcttg

SEQ ID NO: 1859318 - DNA, 15 bp, Homo sapiens
aatttcagctcttga

SEQ ID NO: 1859319 - DNA, 15 bp, Homo sapiens
atttcagctcttgat

SEQ ID NO: 1859320 - DNA, 15 bp, Homo sapiens
tttcagctcttgatt

SEQ ID NO: 1859321 - DNA, 15 bp, Homo sapiens
ttcagctcttgattt

SEQ ID NO: 1859322 - DNA, 15 bp, Homo sapiens
tcagctcttgattta

SEQ ID NO: 1859323 - DNA, 15 bp, Homo sapiens
cagctcttgatttac

SEQ ID NO: 1859324 - DNA, 15 bp, Homo sapiens
agctcttgatttact

SEQ ID NO: 1859325 - DNA, 15 bp, Homo sapiens
gctcttgatttacta

SEQ ID NO: 1859326 - DNA, 15 bp, Homo sapiens
ctcttgatttactaa

SEQ ID NO: 1859327 - DNA, 15 bp, Homo sapiens
tcttgatttactaat

SEQ ID NO: 1859328 - DNA, 15 bp, Homo sapiens
cttgatttactaatt

SEQ ID NO: 1859329 - DNA, 15 bp, Homo sapiens
ttgatttactaattc

SEQ ID NO: 1859330 - DNA, 15 bp, Homo sapiens
tgatttactaattcc

SEQ ID NO: 1859331 - DNA, 15 bp, Homo sapiens
gatttactaattcca

SEQ ID NO: 1859332 - DNA, 15 bp, Homo sapiens
atttactaattccaa

SEQ ID NO: 1859333 - DNA, 15 bp, Homo sapiens
tttactaattccaaa

SEQ ID NO: 1859334 - DNA, 15 bp, Homo sapiens
ttactaattccaaag

SEQ ID NO: 1859335 - DNA, 15 bp, Homo sapiens
tactaattccaaagg

SEQ ID NO: 1859336 - DNA, 15 bp, Homo sapiens
actaattccaaaggc

SEQ ID NO: 1859337 - DNA, 15 bp, Homo sapiens
ctaattccaaaggct

SEQ ID NO: 1859338 - DNA, 15 bp, Homo sapiens
taattccaaaggctt

SEQ ID NO: 1859339 - DNA, 15 bp, Homo sapiens
aattccaaaggcttc

SEQ ID NO: 1859340 - DNA, 15 bp, Homo sapiens
attccaaaggcttca

SEQ ID NO: 1859341 - DNA, 15 bp, Homo sapiens
ttccaaaggcttcaa

SEQ ID NO: 1859342 - DNA, 15 bp, Homo sapiens
tccaaaggcttcaaa

SEQ ID NO: 1859343 - DNA, 15 bp, Homo sapiens
ccaaaggcttcaaag

SEQ ID NO: 1859344 - DNA, 15 bp, Homo sapiens
caaaggcttcaaagt

SEQ ID NO: 1859345 - DNA, 15 bp, Homo sapiens
aaaggcttcaaagtt

SEQ ID NO: 1859346 - DNA, 15 bp, Homo sapiens
aaggcttcaaagttt

SEQ ID NO: 1859347 - DNA, 15 bp, Homo sapiens
aggcttcaaagtttg

SEQ ID NO: 1859348 - DNA, 15 bp, Homo sapiens
ggcttcaaagtttga

SEQ ID NO: 1859349 - DNA, 15 bp, Homo sapiens
gcttcaaagtttgag

SEQ ID NO: 1859350 - DNA, 15 bp, Homo sapiens
cttcaaagtttgagc

SEQ ID NO: 1859351 - DNA, 15 bp, Homo sapiens
ttcaaagtttgagct

SEQ ID NO: 1859352 - DNA, 15 bp, Homo sapiens
tcaaagtttgagctc

SEQ ID NO: 1859353 - DNA, 15 bp, Homo sapiens
caaagtttgagctcc

SEQ ID NO: 1859354 - DNA, 15 bp, Homo sapiens
aaagtttgagctcct

SEQ ID NO: 1859355 - DNA, 15 bp, Homo sapiens
aagtttgagctcctt

SEQ ID NO: 1859356 - DNA, 15 bp, Homo sapiens
agtttgagctccttc

SEQ ID NO: 1859357 - DNA, 15 bp, Homo sapiens
gtttgagctccttct

SEQ ID NO: 1859358 - DNA, 15 bp, Homo sapiens
tttgagctccttctt

SEQ ID NO: 1859359 - DNA, 15 bp, Homo sapiens
ttgagctccttcttc

SEQ ID NO: 1859360 - DNA, 15 bp, Homo sapiens
tgagctccttcttct

SEQ ID NO: 1859361 - DNA, 15 bp, Homo sapiens
gagctccttcttctt

SEQ ID NO: 1859362 - DNA, 15 bp, Homo sapiens
agctccttcttcttt

SEQ ID NO: 1859363 - DNA, 15 bp, Homo sapiens
gctccttcttctttc

SEQ ID NO: 1859364 - DNA, 15 bp, Homo sapiens
ctccttcttctttcc

SEQ ID NO: 1859365 - DNA, 15 bp, Homo sapiens
tccttcttctttccg

SEQ ID NO: 1859366 - DNA, 15 bp, Homo sapiens
ccttcttctttccgt

SEQ ID NO: 1859367 - DNA, 15 bp, Homo sapiens
cttcttctttccgtt

SEQ ID NO: 1859368 - DNA, 15 bp, Homo sapiens
ttcttctttccgttc

SEQ ID NO: 1859369 - DNA, 15 bp, Homo sapiens
tcttctttccgttca

SEQ ID NO: 1859370 - DNA, 15 bp, Homo sapiens
cttctttccgttcag

SEQ ID NO: 1859371 - DNA, 15 bp, Homo sapiens
ttctttccgttcaga

SEQ ID NO: 1859372 - DNA, 15 bp, Homo sapiens
tctttccgttcagag

SEQ ID NO: 1859373 - DNA, 15 bp, Homo sapiens
ctttccgttcagagt

SEQ ID NO: 1859374 - DNA, 15 bp, Homo sapiens
tttccgttcagagtt

SEQ ID NO: 1859375 - DNA, 15 bp, Homo sapiens
ttccgttcagagttg

SEQ ID NO: 1859376 - DNA, 15 bp, Homo sapiens
tccgttcagagttgg

SEQ ID NO: 1859377 - DNA, 15 bp, Homo sapiens
ccgttcagagttggt

SEQ ID NO: 1859378 - DNA, 15 bp, Homo sapiens
cgttcagagttggtg

SEQ ID NO: 1859379 - DNA, 15 bp, Homo sapiens
gttcagagttggtgc

SEQ ID NO: 1859380 - DNA, 15 bp, Homo sapiens
ttcagagttggtgca

SEQ ID NO: 1859381 - DNA, 15 bp, Homo sapiens
tcagagttggtgcag

SEQ ID NO: 1859382 - DNA, 15 bp, Homo sapiens
cagagttggtgcagt

SEQ ID NO: 1859383 - DNA, 15 bp, Homo sapiens
agagttggtgcagtg

SEQ ID NO: 1859384 - DNA, 15 bp, Homo sapiens
gagttggtgcagtgt

SEQ ID NO: 1859385 - DNA, 15 bp, Homo sapiens
agttggtgcagtgta

SEQ ID NO: 1859386 - DNA, 15 bp, Homo sapiens
gttggtgcagtgtat

SEQ ID NO: 1859387 - DNA, 15 bp, Homo sapiens
ttggtgcagtgtatt

SEQ ID NO: 1859388 - DNA, 15 bp, Homo sapiens
tggtgcagtgtattc

SEQ ID NO: 1859389 - DNA, 15 bp, Homo sapiens
ggtgcagtgtattca

SEQ ID NO: 1859390 - DNA, 15 bp, Homo sapiens
gtgcagtgtattcat

SEQ ID NO: 1859391 - DNA, 15 bp, Homo sapiens
tgcagtgtattcata

SEQ ID NO: 1859392 - DNA, 15 bp, Homo sapiens
gcagtgtattcataa

SEQ ID NO: 1859393 - DNA, 15 bp, Homo sapiens
cagtgtattcataat

SEQ ID NO: 1859394 - DNA, 15 bp, Homo sapiens
agtgtattcataatg

SEQ ID NO: 1859395 - DNA, 15 bp, Homo sapiens
gtgtattcataatgg

SEQ ID NO: 1859396 - DNA, 15 bp, Homo sapiens
tgtattcataatggg

SEQ ID NO: 1859397 - DNA, 15 bp, Homo sapiens
gtattcataatgggc

SEQ ID NO: 1859398 - DNA, 15 bp, Homo sapiens
tattcataatgggcc

SEQ ID NO: 1859399 - DNA, 15 bp, Homo sapiens
attcataatgggcca

SEQ ID NO: 1859400 - DNA, 15 bp, Homo sapiens
ttcataatgggccat

SEQ ID NO: 1859401 - DNA, 15 bp, Homo sapiens
tcataatgggccatg

SEQ ID NO: 1859402 - DNA, 15 bp, Homo sapiens
cataatgggccatgg

SEQ ID NO: 1859403 - DNA, 15 bp, Homo sapiens
ataatgggccatggt

SEQ ID NO: 1859404 - DNA, 15 bp, Homo sapiens
taatgggccatggtg

SEQ ID NO: 1859405 - DNA, 15 bp, Homo sapiens
aatgggccatggtgg

SEQ ID NO: 1859406 - DNA, 15 bp, Homo sapiens
atgggccatggtggg

SEQ ID NO: 1859407 - DNA, 15 bp, Homo sapiens
tgggccatggtgggg

SEQ ID NO: 1859408 - DNA, 15 bp, Homo sapiens
gggccatggtgggga

SEQ ID NO: 1859409 - DNA, 15 bp, Homo sapiens
ggccatggtggggag

SEQ ID NO: 1859410 - DNA, 15 bp, Homo sapiens
gccatggtggggagg

SEQ ID NO: 1859411 - DNA, 15 bp, Homo sapiens
ccatggtggggaggg

SEQ ID NO: 1859412 - DNA, 15 bp, Homo sapiens
catggtggggagggt

SEQ ID NO: 1859413 - DNA, 15 bp, Homo sapiens
atggtggggagggta

SEQ ID NO: 1859414 - DNA, 15 bp, Homo sapiens
tggtggggagggtac

SEQ ID NO: 1859415 - DNA, 15 bp, Homo sapiens
ggtggggagggtaca

SEQ ID NO: 1859416 - DNA, 15 bp, Homo sapiens
gtggggagggtacac

SEQ ID NO: 1859417 - DNA, 15 bp, Homo sapiens
tggggagggtacact

SEQ ID NO: 1859418 - DNA, 15 bp, Homo sapiens
ggggagggtacactg

SEQ ID NO: 1859419 - DNA, 15 bp, Homo sapiens
gggagggtacactgt

SEQ ID NO: 1859420 - DNA, 15 bp, Homo sapiens
ggagggtacactgtt

SEQ ID NO: 1859421 - DNA, 15 bp, Homo sapiens
gagggtacactgttt

SEQ ID NO: 1859422 - DNA, 15 bp, Homo sapiens
agggtacactgtttt

SEQ ID NO: 1859423 - DNA, 15 bp, Homo sapiens
gggtacactgttttg

SEQ ID NO: 1859424 - DNA, 15 bp, Homo sapiens
ggtacactgttttgg

SEQ ID NO: 1859425 - DNA, 15 bp, Homo sapiens
gtacactgttttggg

SEQ ID NO: 1859426 - DNA, 15 bp, Homo sapiens
tacactgttttgggg

SEQ ID NO: 1859427 - DNA, 15 bp, Homo sapiens
acactgttttggggg

SEQ ID NO: 1859428 - DNA, 15 bp, Homo sapiens
cactgttttgggggt

SEQ ID NO: 1859429 - DNA, 15 bp, Homo sapiens
actgttttgggggtt

SEQ ID NO: 1859430 - DNA, 15 bp, Homo sapiens
ctgttttgggggttg

SEQ ID NO: 1859431 - DNA, 15 bp, Homo sapiens
tgttttgggggttga

SEQ ID NO: 1859432 - DNA, 15 bp, Homo sapiens
gttttgggggttgat

SEQ ID NO: 1859433 - DNA, 15 bp, Homo sapiens
ttttgggggttgatg

SEQ ID NO: 1859434 - DNA, 15 bp, Homo sapiens
tttgggggttgatgt

SEQ ID NO: 1859435 - DNA, 15 bp, Homo sapiens
ttgggggttgatgtc

SEQ ID NO: 1859436 - DNA, 15 bp, Homo sapiens
tgggggttgatgtca

SEQ ID NO: 1859437 - DNA, 15 bp, Homo sapiens
gggggttgatgtcac

SEQ ID NO: 1859438 - DNA, 15 bp, Homo sapiens
ggggttgatgtcacc

SEQ ID NO: 1859439 - DNA, 15 bp, Homo sapiens
gggttgatgtcaccg

SEQ ID NO: 1859440 - DNA, 15 bp, Homo sapiens
ggttgatgtcaccgg

SEQ ID NO: 1859441 - DNA, 15 bp, Homo sapiens
gttgatgtcaccggc

SEQ ID NO: 1859442 - DNA, 15 bp, Homo sapiens
ttgatgtcaccggct

SEQ ID NO: 1859443 - DNA, 15 bp, Homo sapiens
tgatgtcaccggctt

SEQ ID NO: 1859444 - DNA, 15 bp, Homo sapiens
gatgtcaccggcttg

SEQ ID NO: 1859445 - DNA, 15 bp, Homo sapiens
atgtcaccggcttgg

SEQ ID NO: 1859446 - DNA, 15 bp, Homo sapiens
tgtcaccggcttggg

SEQ ID NO: 1859447 - DNA, 15 bp, Homo sapiens
gtcaccggcttgggg

SEQ ID NO: 1859448 - DNA, 15 bp, Homo sapiens
tcaccggcttggggg

SEQ ID NO: 1859449 - DNA, 15 bp, Homo sapiens
caccggcttgggggc

SEQ ID NO: 1859450 - DNA, 15 bp, Homo sapiens
accggcttgggggcg

SEQ ID NO: 1859451 - DNA, 15 bp, Homo sapiens
ccggcttgggggcgt

SEQ ID NO: 1859452 - DNA, 15 bp, Homo sapiens
cggcttgggggcgtc

SEQ ID NO: 1859453 - DNA, 15 bp, Homo sapiens
ggcttgggggcgtct

SEQ ID NO: 1859454 - DNA, 15 bp, Homo sapiens
gcttgggggcgtctg

SEQ ID NO: 1859455 - DNA, 15 bp, Homo sapiens
cttgggggcgtctgg

SEQ ID NO: 1859456 - DNA, 15 bp, Homo sapiens
ttgggggcgtctgga

SEQ ID NO: 1859457 - DNA, 15 bp, Homo sapiens
tgggggcgtctggag

SEQ ID NO: 1859458 - DNA, 15 bp, Homo sapiens
gggggcgtctggagg

SEQ ID NO: 1859459 - DNA, 15 bp, Homo sapiens
ggggcgtctggaggg

SEQ ID NO: 1859460 - DNA, 15 bp, Homo sapiens
gggcgtctggagggg

SEQ ID NO: 1859461 - DNA, 15 bp, Homo sapiens
ggcgtctggagggga

SEQ ID NO: 1859462 - DNA, 15 bp, Homo sapiens
gcgtctggaggggag

SEQ ID NO: 1859463 - DNA, 15 bp, Homo sapiens
cgtctggaggggagg

SEQ ID NO: 1859464 - DNA, 15 bp, Homo sapiens
gtctggaggggaggt

SEQ ID NO: 1859465 - DNA, 15 bp, Homo sapiens
tctggaggggaggtg

SEQ ID NO: 1859466 - DNA, 15 bp, Homo sapiens
ctggaggggaggtga

SEQ ID NO: 1859467 - DNA, 15 bp, Homo sapiens
tggaggggaggtgat

SEQ ID NO: 1859468 - DNA, 15 bp, Homo sapiens
ggaggggaggtgatg

SEQ ID NO: 1859469 - DNA, 15 bp, Homo sapiens
gaggggaggtgatgg

SEQ ID NO: 1859470 - DNA, 15 bp, Homo sapiens
aggggaggtgatggg

SEQ ID NO: 1859471 - DNA, 15 bp, Homo sapiens
ggggaggtgatgggc

SEQ ID NO: 1859472 - DNA, 15 bp, Homo sapiens
gggaggtgatgggca

SEQ ID NO: 1859473 - DNA, 15 bp, Homo sapiens
ggaggtgatgggcac

SEQ ID NO: 1859474 - DNA, 15 bp, Homo sapiens
gaggtgatgggcacg

SEQ ID NO: 1859475 - DNA, 15 bp, Homo sapiens
aggtgatgggcacgg

SEQ ID NO: 1859476 - DNA, 15 bp, Homo sapiens
ggtgatgggcacgga

SEQ ID NO: 1859477 - DNA, 15 bp, Homo sapiens
gtgatgggcacggag

SEQ ID NO: 1859478 - DNA, 15 bp, Homo sapiens
tgatgggcacggaga

SEQ ID NO: 1859479 - DNA, 15 bp, Homo sapiens
gatgggcacggagaa

SEQ ID NO: 1859480 - DNA, 15 bp, Homo sapiens
atgggcacggagaaa

SEQ ID NO: 1859481 - DNA, 15 bp, Homo sapiens
tgggcacggagaaaa

SEQ ID NO: 1859482 - DNA, 15 bp, Homo sapiens
gggcacggagaaaac

SEQ ID NO: 1859483 - DNA, 15 bp, Homo sapiens
ggcacggagaaaacc

SEQ ID NO: 1859484 - DNA, 15 bp, Homo sapiens
gcacggagaaaacct

SEQ ID NO: 1859485 - DNA, 15 bp, Homo sapiens
cacggagaaaaccta

SEQ ID NO: 1859486 - DNA, 15 bp, Homo sapiens
acggagaaaacctag

SEQ ID NO: 1859487 - DNA, 15 bp, Homo sapiens
cggagaaaacctagg

SEQ ID NO: 1859488 - DNA, 15 bp, Homo sapiens
ggagaaaacctaggg

SEQ ID NO: 1859489 - DNA, 15 bp, Homo sapiens
gagaaaacctagggc

SEQ ID NO: 1859490 - DNA, 15 bp, Homo sapiens
agaaaacctagggct

SEQ ID NO: 1859491 - DNA, 15 bp, Homo sapiens
gaaaacctagggctg

SEQ ID NO: 1859492 - DNA, 15 bp, Homo sapiens
aaaacctagggctgt

SEQ ID NO: 1859493 - DNA, 15 bp, Homo sapiens
aaacctagggctgtc

SEQ ID NO: 1859494 - DNA, 15 bp, Homo sapiens
aacctagggctgtcc

SEQ ID NO: 1859495 - DNA, 15 bp, Homo sapiens
acctagggctgtcct

SEQ ID NO: 1859496 - DNA, 15 bp, Homo sapiens
cctagggctgtcctc

SEQ ID NO: 1859497 - DNA, 15 bp, Homo sapiens
ctagggctgtcctct

SEQ ID NO: 1859498 - DNA, 15 bp, Homo sapiens
tagggctgtcctctt

SEQ ID NO: 1859499 - DNA, 15 bp, Homo sapiens
agggctgtcctcttt

SEQ ID NO: 1859500 - DNA, 15 bp, Homo sapiens
gggctgtcctctttg

SEQ ID NO: 1859501 - DNA, 15 bp, Homo sapiens
ggctgtcctctttgt

SEQ ID NO: 1859502 - DNA, 15 bp, Homo sapiens
gctgtcctctttgta

SEQ ID NO: 1859503 - DNA, 15 bp, Homo sapiens
ctgtcctctttgtag

SEQ ID NO: 1859504 - DNA, 15 bp, Homo sapiens
tgtcctctttgtagc

SEQ ID NO: 1859505 - DNA, 15 bp, Homo sapiens
gtcctctttgtagcg

SEQ ID NO: 1859506 - DNA, 15 bp, Homo sapiens
tcctctttgtagcga

SEQ ID NO: 1859507 - DNA, 15 bp, Homo sapiens
cctctttgtagcgag

SEQ ID NO: 1859508 - DNA, 15 bp, Homo sapiens
ctctttgtagcgaga

SEQ ID NO: 1859509 - DNA, 15 bp, Homo sapiens
tctttgtagcgagaa

SEQ ID NO: 1859510 - DNA, 15 bp, Homo sapiens
ctttgtagcgagaat

SEQ ID NO: 1859511 - DNA, 15 bp, Homo sapiens
tttgtagcgagaatg

SEQ ID NO: 1859512 - DNA, 15 bp, Homo sapiens
ttgtagcgagaatgc

SEQ ID NO: 1859513 - DNA, 15 bp, Homo sapiens
tgtagcgagaatgcc

SEQ ID NO: 1859514 - DNA, 15 bp, Homo sapiens
gtagcgagaatgcct

SEQ ID NO: 1859515 - DNA, 15 bp, Homo sapiens
tagcgagaatgcctt

SEQ ID NO: 1859516 - DNA, 15 bp, Homo sapiens
agcgagaatgccttc

SEQ ID NO: 1859517 - DNA, 15 bp, Homo sapiens
gcgagaatgccttcc

SEQ ID NO: 1859518 - DNA, 15 bp, Homo sapiens
cgagaatgccttcca

SEQ ID NO: 1859519 - DNA, 15 bp, Homo sapiens
gagaatgccttccaa

SEQ ID NO: 1859520 - DNA, 15 bp, Homo sapiens
agaatgccttccaaa

SEQ ID NO: 1859521 - DNA, 15 bp, Homo sapiens
gaatgccttccaaaa

SEQ ID NO: 1859522 - DNA, 15 bp, Homo sapiens
aatgccttccaaaag

SEQ ID NO: 1859523 - DNA, 15 bp, Homo sapiens
atgccttccaaaagg

SEQ ID NO: 1859524 - DNA, 15 bp, Homo sapiens
tgccttccaaaaggg

SEQ ID NO: 1859525 - DNA, 15 bp, Homo sapiens
gccttccaaaaggga

SEQ ID NO: 1859526 - DNA, 15 bp, Homo sapiens
ccttccaaaagggaa

SEQ ID NO: 1859527 - DNA, 15 bp, Homo sapiens
cttccaaaagggaac

SEQ ID NO: 1859528 - DNA, 15 bp, Homo sapiens
ttccaaaagggaact

SEQ ID NO: 1859529 - DNA, 15 bp, Homo sapiens
tccaaaagggaactt

SEQ ID NO: 1859530 - DNA, 15 bp, Homo sapiens
ccaaaagggaacttt

SEQ ID NO: 1859531 - DNA, 15 bp, Homo sapiens
caaaagggaacttta

SEQ ID NO: 1859532 - DNA, 15 bp, Homo sapiens
aaaagggaactttat

SEQ ID NO: 1859533 - DNA, 15 bp, Homo sapiens
aaagggaactttatt

SEQ ID NO: 1859534 - DNA, 15 bp, Homo sapiens
aagggaactttattg

SEQ ID NO: 1859535 - DNA, 15 bp, Homo sapiens
agggaactttattgg

SEQ ID NO: 1859536 - DNA, 15 bp, Homo sapiens
gggaactttattggc

SEQ ID NO: 1859537 - DNA, 15 bp, Homo sapiens
ggaactttattggcc

SEQ ID NO: 1859538 - DNA, 15 bp, Homo sapiens
gaactttattggccc

SEQ ID NO: 1859539 - DNA, 15 bp, Homo sapiens
aactttattggcccc

SEQ ID NO: 1859540 - DNA, 15 bp, Homo sapiens
actttattggcccct

SEQ ID NO: 1859541 - DNA, 15 bp, Homo sapiens
ctttattggcccctg

SEQ ID NO: 1859542 - DNA, 15 bp, Homo sapiens
tttattggcccctgt

SEQ ID NO: 1859543 - DNA, 15 bp, Homo sapiens
ttattggcccctgtc

SEQ ID NO: 1859544 - DNA, 15 bp, Homo sapiens
tattggcccctgtcc

SEQ ID NO: 1859545 - DNA, 15 bp, Homo sapiens
attggcccctgtcca

SEQ ID NO: 1859546 - DNA, 15 bp, Homo sapiens
ttggcccctgtccag

SEQ ID NO: 1859547 - DNA, 15 bp, Homo sapiens
tggcccctgtccagg

SEQ ID NO: 1859548 - DNA, 15 bp, Homo sapiens
ggcccctgtccaggg

SEQ ID NO: 1859549 - DNA, 15 bp, Homo sapiens
gcccctgtccagggc

SEQ ID NO: 1859550 - DNA, 15 bp, Homo sapiens
cccctgtccagggca

SEQ ID NO: 1859551 - DNA, 15 bp, Homo sapiens
ccctgtccagggcag

SEQ ID NO: 1859552 - DNA, 15 bp, Homo sapiens
cctgtccagggcaga

SEQ ID NO: 1859553 - DNA, 15 bp, Homo sapiens
ctgtccagggcagag

SEQ ID NO: 1859554 - DNA, 15 bp, Homo sapiens
tgtccagggcagaga

SEQ ID NO: 1859555 - DNA, 15 bp, Homo sapiens
gtccagggcagagag

SEQ ID NO: 1859556 - DNA, 15 bp, Homo sapiens
tccagggcagagagt

SEQ ID NO: 1859557 - DNA, 15 bp, Homo sapiens
ccagggcagagagtt

SEQ ID NO: 1859558 - DNA, 15 bp, Homo sapiens
cagggcagagagttt

SEQ ID NO: 1859559 - DNA, 15 bp, Homo sapiens
agggcagagagtttt

SEQ ID NO: 1859560 - DNA, 15 bp, Homo sapiens
gggcagagagttttg

SEQ ID NO: 1859561 - DNA, 15 bp, Homo sapiens
ggcagagagttttgt

SEQ ID NO: 1859562 - DNA, 15 bp, Homo sapiens
gcagagagttttgta

SEQ ID NO: 1859563 - DNA, 15 bp, Homo sapiens
cagagagttttgtaa

SEQ ID NO: 1859564 - DNA, 15 bp, Homo sapiens
agagagttttgtaaa

SEQ ID NO: 1859565 - DNA, 15 bp, Homo sapiens
gagagttttgtaaat

SEQ ID NO: 1859566 - DNA, 15 bp, Homo sapiens
agagttttgtaaatg

SEQ ID NO: 1859567 - DNA, 15 bp, Homo sapiens
gagttttgtaaatgg

SEQ ID NO: 1859568 - DNA, 15 bp, Homo sapiens
agttttgtaaatgga

SEQ ID NO: 1859569 - DNA, 15 bp, Homo sapiens
gttttgtaaatggag

SEQ ID NO: 1859570 - DNA, 15 bp, Homo sapiens
ttttgtaaatggaga

SEQ ID NO: 1859571 - DNA, 15 bp, Homo sapiens
tttgtaaatggagaa

SEQ ID NO: 1859572 - DNA, 15 bp, Homo sapiens
ttgtaaatggagaaa

SEQ ID NO: 1859573 - DNA, 15 bp, Homo sapiens
tgtaaatggagaaag

SEQ ID NO: 1859574 - DNA, 15 bp, Homo sapiens
gtaaatggagaaagc

SEQ ID NO: 1859575 - DNA, 15 bp, Homo sapiens
taaatggagaaagcc

SEQ ID NO: 1859576 - DNA, 15 bp, Homo sapiens
aaatggagaaagccc

SEQ ID NO: 1859577 - DNA, 15 bp, Homo sapiens
aatggagaaagccca

SEQ ID NO: 1859578 - DNA, 15 bp, Homo sapiens
atggagaaagcccaa

SEQ ID NO: 1859579 - DNA, 15 bp, Homo sapiens
tggagaaagcccaaa

SEQ ID NO: 1859580 - DNA, 15 bp, Homo sapiens
ggagaaagcccaaac

SEQ ID NO: 1859581 - DNA, 15 bp, Homo sapiens
gagaaagcccaaacc

SEQ ID NO: 1859582 - DNA, 15 bp, Homo sapiens
agaaagcccaaacct

SEQ ID NO: 1859583 - DNA, 15 bp, Homo sapiens
gaaagcccaaacctc

SEQ ID NO: 1859584 - DNA, 15 bp, Homo sapiens
aaagcccaaacctcc

SEQ ID NO: 1859585 - DNA, 15 bp, Homo sapiens
aagcccaaacctcct

SEQ ID NO: 1859586 - DNA, 15 bp, Homo sapiens
agcccaaacctcctc

SEQ ID NO: 1859587 - DNA, 15 bp, Homo sapiens
gcccaaacctcctcc

SEQ ID NO: 1859588 - DNA, 15 bp, Homo sapiens
cccaaacctcctcct

SEQ ID NO: 1859589 - DNA, 15 bp, Homo sapiens
ccaaacctcctcctt

SEQ ID NO: 1859590 - DNA, 15 bp, Homo sapiens
caaacctcctccttt

SEQ ID NO: 1859591 - DNA, 15 bp, Homo sapiens
aaacctcctcctttt

SEQ ID NO: 1859592 - DNA, 15 bp, Homo sapiens
aacctcctccttttc

SEQ ID NO: 1859593 - DNA, 15 bp, Homo sapiens
acctcctccttttca

SEQ ID NO: 1859594 - DNA, 15 bp, Homo sapiens
cctcctccttttcaa

SEQ ID NO: 1859595 - DNA, 15 bp, Homo sapiens
ctcctccttttcaag

SEQ ID NO: 1859596 - DNA, 15 bp, Homo sapiens
tcctccttttcaaga

SEQ ID NO: 1859597 - DNA, 15 bp, Homo sapiens
cctccttttcaagaa

SEQ ID NO: 1859598 - DNA, 15 bp, Homo sapiens
ctccttttcaagaag

SEQ ID NO: 1859599 - DNA, 15 bp, Homo sapiens
tccttttcaagaagt

SEQ ID NO: 1859600 - DNA, 15 bp, Homo sapiens
ccttttcaagaagtt

SEQ ID NO: 1859601 - DNA, 15 bp, Homo sapiens
cttttcaagaagttg

SEQ ID NO: 1859602 - DNA, 15 bp, Homo sapiens
ttttcaagaagttga

SEQ ID NO: 1859603 - DNA, 15 bp, Homo sapiens
tttcaagaagttgat

SEQ ID NO: 1859604 - DNA, 15 bp, Homo sapiens
ttcaagaagttgatc

SEQ ID NO: 1859605 - DNA, 15 bp, Homo sapiens
tcaagaagttgatcg

SEQ ID NO: 1859606 - DNA, 15 bp, Homo sapiens
caagaagttgatcgt

SEQ ID NO: 1859607 - DNA, 15 bp, Homo sapiens
aagaagttgatcgtt

SEQ ID NO: 1859608 - DNA, 15 bp, Homo sapiens
agaagttgatcgttc

SEQ ID NO: 1859609 - DNA, 15 bp, Homo sapiens
gaagttgatcgttcc

SEQ ID NO: 1859610 - DNA, 15 bp, Homo sapiens
aagttgatcgttcca

SEQ ID NO: 1859611 - DNA, 15 bp, Homo sapiens
agttgatcgttccat

SEQ ID NO: 1859612 - DNA, 15 bp, Homo sapiens
gttgatcgttccatg

SEQ ID NO: 1859613 - DNA, 15 bp, Homo sapiens
ttgatcgttccatgg

SEQ ID NO: 1859614 - DNA, 15 bp, Homo sapiens
tgatcgttccatggg

SEQ ID NO: 1859615 - DNA, 15 bp, Homo sapiens
gatcgttccatgggg

SEQ ID NO: 1859616 - DNA, 15 bp, Homo sapiens
atcgttccatggggg

SEQ ID NO: 1859617 - DNA, 15 bp, Homo sapiens
tcgttccatgggggg

SEQ ID NO: 1859618 - DNA, 15 bp, Homo sapiens
cgttccatggggggt

SEQ ID NO: 1859619 - DNA, 15 bp, Homo sapiens
gttccatggggggtg

SEQ ID NO: 1859620 - DNA, 15 bp, Homo sapiens
ttccatggggggtgg

SEQ ID NO: 1859621 - DNA, 15 bp, Homo sapiens
tccatggggggtggc

SEQ ID NO: 1859622 - DNA, 15 bp, Homo sapiens
ccatggggggtggcc

SEQ ID NO: 1859623 - DNA, 15 bp, Homo sapiens
catggggggtggcct

SEQ ID NO: 1859624 - DNA, 15 bp, Homo sapiens
atggggggtggcctg

SEQ ID NO: 1859625 - DNA, 15 bp, Homo sapiens
tggggggtggcctgg

SEQ ID NO: 1859626 - DNA, 15 bp, Homo sapiens
ggggggtggcctggg

SEQ ID NO: 1859627 - DNA, 15 bp, Homo sapiens
gggggtggcctgggt

SEQ ID NO: 1859628 - DNA, 15 bp, Homo sapiens
ggggtggcctgggtg

SEQ ID NO: 1859629 - DNA, 15 bp, Homo sapiens
gggtggcctgggtgt

SEQ ID NO: 1859630 - DNA, 15 bp, Homo sapiens
ggtggcctgggtgtg

SEQ ID NO: 1859631 - DNA, 15 bp, Homo sapiens
gtggcctgggtgtgt

SEQ ID NO: 1859632 - DNA, 15 bp, Homo sapiens
tggcctgggtgtgtc

SEQ ID NO: 1859633 - DNA, 15 bp, Homo sapiens
ggcctgggtgtgtct

SEQ ID NO: 1859634 - DNA, 15 bp, Homo sapiens
gcctgggtgtgtctg

SEQ ID NO: 1859635 - DNA, 15 bp, Homo sapiens
cctgggtgtgtctgc

SEQ ID NO: 1859636 - DNA, 15 bp, Homo sapiens
ctgggtgtgtctgcc

SEQ ID NO: 1859637 - DNA, 15 bp, Homo sapiens
tgggtgtgtctgcct

SEQ ID NO: 1859638 - DNA, 15 bp, Homo sapiens
gggtgtgtctgcctt

SEQ ID NO: 1859639 - DNA, 15 bp, Homo sapiens
ggtgtgtctgccttg

SEQ ID NO: 1859640 - DNA, 15 bp, Homo sapiens
gtgtgtctgccttgc

SEQ ID NO: 1859641 - DNA, 15 bp, Homo sapiens
tgtgtctgccttgct

SEQ ID NO: 1859642 - DNA, 15 bp, Homo sapiens
gtgtctgccttgctg

SEQ ID NO: 1859643 - DNA, 15 bp, Homo sapiens
tgtctgccttgctgt

SEQ ID NO: 1859644 - DNA, 15 bp, Homo sapiens
gtctgccttgctgtg

SEQ ID NO: 1859645 - DNA, 15 bp, Homo sapiens
tctgccttgctgtgg

SEQ ID NO: 1859646 - DNA, 15 bp, Homo sapiens
ctgccttgctgtgga

SEQ ID NO: 1859647 - DNA, 15 bp, Homo sapiens
tgccttgctgtggat

SEQ ID NO: 1859648 - DNA, 15 bp, Homo sapiens
gccttgctgtggatg

SEQ ID NO: 1859649 - DNA, 15 bp, Homo sapiens
ccttgctgtggatga

SEQ ID NO: 1859650 - DNA, 15 bp, Homo sapiens
cttgctgtggatgag

SEQ ID NO: 1859651 - DNA, 15 bp, Homo sapiens
ttgctgtggatgagg

SEQ ID NO: 1859652 - DNA, 15 bp, Homo sapiens
tgctgtggatgaggc

SEQ ID NO: 1859653 - DNA, 15 bp, Homo sapiens
gctgtggatgaggcc

SEQ ID NO: 1859654 - DNA, 15 bp, Homo sapiens
ctgtggatgaggcca

SEQ ID NO: 1859655 - DNA, 15 bp, Homo sapiens
tgtggatgaggccag

SEQ ID NO: 1859656 - DNA, 15 bp, Homo sapiens
gtggatgaggccagt

SEQ ID NO: 1859657 - DNA, 15 bp, Homo sapiens
tggatgaggccagtg

SEQ ID NO: 1859658 - DNA, 15 bp, Homo sapiens
ggatgaggccagtga

SEQ ID NO: 1859659 - DNA, 15 bp, Homo sapiens
gatgaggccagtgac

SEQ ID NO: 1859660 - DNA, 15 bp, Homo sapiens
atgaggccagtgact

SEQ ID NO: 1859661 - DNA, 15 bp, Homo sapiens
tgaggccagtgactg

SEQ ID NO: 1859662 - DNA, 15 bp, Homo sapiens
gaggccagtgactgg

SEQ ID NO: 1859663 - DNA, 15 bp, Homo sapiens
aggccagtgactgga

SEQ ID NO: 1859664 - DNA, 15 bp, Homo sapiens
ggccagtgactggat

SEQ ID NO: 1859665 - DNA, 15 bp, Homo sapiens
gccagtgactggatg

SEQ ID NO: 1859666 - DNA, 15 bp, Homo sapiens
ccagtgactggatgt

SEQ ID NO: 1859667 - DNA, 15 bp, Homo sapiens
cagtgactggatgtg

SEQ ID NO: 1859668 - DNA, 15 bp, Homo sapiens
agtgactggatgtgg

SEQ ID NO: 1859669 - DNA, 15 bp, Homo sapiens
gtgactggatgtggc

SEQ ID NO: 1859670 - DNA, 15 bp, Homo sapiens
tgactggatgtggca

SEQ ID NO: 1859671 - DNA, 15 bp, Homo sapiens
gactggatgtggcag

SEQ ID NO: 1859672 - DNA, 15 bp, Homo sapiens
actggatgtggcagg

SEQ ID NO: 1859673 - DNA, 15 bp, Homo sapiens
ctggatgtggcaggg

SEQ ID NO: 1859674 - DNA, 15 bp, Homo sapiens
tggatgtggcagggc

SEQ ID NO: 1859675 - DNA, 15 bp, Homo sapiens
ggatgtggcagggct

SEQ ID NO: 1859676 - DNA, 15 bp, Homo sapiens
gatgtggcagggctg

SEQ ID NO: 1859677 - DNA, 15 bp, Homo sapiens
atgtggcagggctgg

SEQ ID NO: 1859678 - DNA, 15 bp, Homo sapiens
tgtggcagggctgga

SEQ ID NO: 1859679 - DNA, 15 bp, Homo sapiens
gtggcagggctggat

SEQ ID NO: 1859680 - DNA, 15 bp, Homo sapiens
tggcagggctggatg

SEQ ID NO: 1859681 - DNA, 15 bp, Homo sapiens
ggcagggctggatgg

SEQ ID NO: 1859682 - DNA, 15 bp, Homo sapiens
gcagggctggatggg

SEQ ID NO: 1859683 - DNA, 15 bp, Homo sapiens
cagggctggatgggg

SEQ ID NO: 1859684 - DNA, 15 bp, Homo sapiens
agggctggatggggg

SEQ ID NO: 1859685 - DNA, 15 bp, Homo sapiens
gggctggatggggga

SEQ ID NO: 1859686 - DNA, 15 bp, Homo sapiens
ggctggatgggggaa

SEQ ID NO: 1859687 - DNA, 15 bp, Homo sapiens
gctggatgggggaag

SEQ ID NO: 1859688 - DNA, 15 bp, Homo sapiens
ctggatgggggaagg

SEQ ID NO: 1859689 - DNA, 15 bp, Homo sapiens
tggatgggggaaggg

SEQ ID NO: 1859690 - DNA, 15 bp, Homo sapiens
ggatgggggaagggg

SEQ ID NO: 1859691 - DNA, 15 bp, Homo sapiens
gatgggggaaggggc

SEQ ID NO: 1859692 - DNA, 15 bp, Homo sapiens
atgggggaaggggca

SEQ ID NO: 1859693 - DNA, 15 bp, Homo sapiens
tgggggaaggggcat

SEQ ID NO: 1859694 - DNA, 15 bp, Homo sapiens
gggggaaggggcata

SEQ ID NO: 1859695 - DNA, 15 bp, Homo sapiens
ggggaaggggcatag

SEQ ID NO: 1859696 - DNA, 15 bp, Homo sapiens
gggaaggggcatagc

SEQ ID NO: 1859697 - DNA, 15 bp, Homo sapiens
ggaaggggcatagca

SEQ ID NO: 1859698 - DNA, 15 bp, Homo sapiens
gaaggggcatagcag

SEQ ID NO: 1859699 - DNA, 15 bp, Homo sapiens
aaggggcatagcaga

SEQ ID NO: 1859700 - DNA, 15 bp, Homo sapiens
aggggcatagcagac

SEQ ID NO: 1859701 - DNA, 15 bp, Homo sapiens
ggggcatagcagaca

SEQ ID NO: 1859702 - DNA, 15 bp, Homo sapiens
gggcatagcagacac

SEQ ID NO: 1859703 - DNA, 15 bp, Homo sapiens
ggcatagcagacact

SEQ ID NO: 1859704 - DNA, 15 bp, Homo sapiens
gcatagcagacactg

SEQ ID NO: 1859705 - DNA, 15 bp, Homo sapiens
catagcagacactga

SEQ ID NO: 1859706 - DNA, 15 bp, Homo sapiens
atagcagacactgag

SEQ ID NO: 1859707 - DNA, 15 bp, Homo sapiens
tagcagacactgagg

SEQ ID NO: 1859708 - DNA, 15 bp, Homo sapiens
agcagacactgaggt

SEQ ID NO: 1859709 - DNA, 15 bp, Homo sapiens
gcagacactgaggtt

SEQ ID NO: 1859710 - DNA, 15 bp, Homo sapiens
cagacactgaggttg

SEQ ID NO: 1859711 - DNA, 15 bp, Homo sapiens
agacactgaggttgg

SEQ ID NO: 1859712 - DNA, 15 bp, Homo sapiens
gacactgaggttggg

SEQ ID NO: 1859713 - DNA, 15 bp, Homo sapiens
acactgaggttgggg

SEQ ID NO: 1859714 - DNA, 15 bp, Homo sapiens
cactgaggttggggg

SEQ ID NO: 1859715 - DNA, 15 bp, Homo sapiens
actgaggttgggggg

SEQ ID NO: 1859716 - DNA, 15 bp, Homo sapiens
ctgaggttggggggt

SEQ ID NO: 1859717 - DNA, 15 bp, Homo sapiens
tgaggttggggggtg

SEQ ID NO: 1859718 - DNA, 15 bp, Homo sapiens
gaggttggggggtgg

SEQ ID NO: 1859719 - DNA, 15 bp, Homo sapiens
aggttggggggtggg

SEQ ID NO: 1859720 - DNA, 15 bp, Homo sapiens
ggttggggggtggga

SEQ ID NO: 1859721 - DNA, 15 bp, Homo sapiens
gttggggggtgggag

SEQ ID NO: 1859722 - DNA, 15 bp, Homo sapiens
ttggggggtgggagc

SEQ ID NO: 1859723 - DNA, 15 bp, Homo sapiens
tggggggtgggagcc

SEQ ID NO: 1859724 - DNA, 15 bp, Homo sapiens
ggggggtgggagcct

SEQ ID NO: 1859725 - DNA, 15 bp, Homo sapiens
gggggtgggagcctg

SEQ ID NO: 1859726 - DNA, 15 bp, Homo sapiens
ggggtgggagcctgg

SEQ ID NO: 1859727 - DNA, 15 bp, Homo sapiens
gggtgggagcctggc

SEQ ID NO: 1859728 - DNA, 15 bp, Homo sapiens
ggtgggagcctggca

SEQ ID NO: 1859729 - DNA, 15 bp, Homo sapiens
gtgggagcctggcag

SEQ ID NO: 1859730 - DNA, 15 bp, Homo sapiens
tgggagcctggcagc

SEQ ID NO: 1859731 - DNA, 15 bp, Homo sapiens
gggagcctggcagca

SEQ ID NO: 1859732 - DNA, 15 bp, Homo sapiens
ggagcctggcagcaa

SEQ ID NO: 1859733 - DNA, 15 bp, Homo sapiens
gagcctggcagcaag

SEQ ID NO: 1859734 - DNA, 15 bp, Homo sapiens
agcctggcagcaagg

SEQ ID NO: 1859735 - DNA, 15 bp, Homo sapiens
gcctggcagcaaggt

SEQ ID NO: 1859736 - DNA, 15 bp, Homo sapiens
cctggcagcaaggtg

SEQ ID NO: 1859737 - DNA, 15 bp, Homo sapiens
ctggcagcaaggtgg

SEQ ID NO: 1859738 - DNA, 15 bp, Homo sapiens
tggcagcaaggtggg

SEQ ID NO: 1859739 - DNA, 15 bp, Homo sapiens
ggcagcaaggtgggg

SEQ ID NO: 1859740 - DNA, 15 bp, Homo sapiens
gcagcaaggtgggga

SEQ ID NO: 1859741 - DNA, 15 bp, Homo sapiens
cagcaaggtggggag

SEQ ID NO: 1859742 - DNA, 15 bp, Homo sapiens
agcaaggtggggagc

SEQ ID NO: 1859743 - DNA, 15 bp, Homo sapiens
gcaaggtggggagca

SEQ ID NO: 1859744 - DNA, 15 bp, Homo sapiens
caaggtggggagcag

SEQ ID NO: 1859745 - DNA, 15 bp, Homo sapiens
aaggtggggagcagt

SEQ ID NO: 1859746 - DNA, 15 bp, Homo sapiens
aggtggggagcagtg

SEQ ID NO: 1859747 - DNA, 15 bp, Homo sapiens
ggtggggagcagtga

SEQ ID NO: 1859748 - DNA, 15 bp, Homo sapiens
gtggggagcagtgaa

SEQ ID NO: 1859749 - DNA, 15 bp, Homo sapiens
tggggagcagtgaaa

SEQ ID NO: 1859750 - DNA, 15 bp, Homo sapiens
ggggagcagtgaaaa

SEQ ID NO: 1859751 - DNA, 15 bp, Homo sapiens
gggagcagtgaaaac

SEQ ID NO: 1859752 - DNA, 15 bp, Homo sapiens
ggagcagtgaaaact

SEQ ID NO: 1859753 - DNA, 15 bp, Homo sapiens
gagcagtgaaaactg

SEQ ID NO: 1859754 - DNA, 15 bp, Homo sapiens
agcagtgaaaactga

SEQ ID NO: 1859755 - DNA, 15 bp, Homo sapiens
gcagtgaaaactgag

SEQ ID NO: 1859756 - DNA, 15 bp, Homo sapiens
cagtgaaaactgagg

SEQ ID NO: 1859757 - DNA, 15 bp, Homo sapiens
agtgaaaactgagga

SEQ ID NO: 1859758 - DNA, 15 bp, Homo sapiens
gtgaaaactgaggag

SEQ ID NO: 1859759 - DNA, 15 bp, Homo sapiens
tgaaaactgaggagt

SEQ ID NO: 1859760 - DNA, 15 bp, Homo sapiens
gaaaactgaggagtt

SEQ ID NO: 1859761 - DNA, 15 bp, Homo sapiens
aaaactgaggagttt

SEQ ID NO: 1859762 - DNA, 15 bp, Homo sapiens
aaactgaggagtttc

SEQ ID NO: 1859763 - DNA, 15 bp, Homo sapiens
aactgaggagtttct

SEQ ID NO: 1859764 - DNA, 15 bp, Homo sapiens
actgaggagtttctc

SEQ ID NO: 1859765 - DNA, 15 bp, Homo sapiens
ctgaggagtttctcc

SEQ ID NO: 1859766 - DNA, 15 bp, Homo sapiens
tgaggagtttctccc

SEQ ID NO: 1859767 - DNA, 15 bp, Homo sapiens
gaggagtttctccct

SEQ ID NO: 1859768 - DNA, 15 bp, Homo sapiens
aggagtttctccctc

SEQ ID NO: 1859769 - DNA, 15 bp, Homo sapiens
ggagtttctccctcc

SEQ ID NO: 1859770 - DNA, 15 bp, Homo sapiens
gagtttctccctcct

SEQ ID NO: 1859771 - DNA, 15 bp, Homo sapiens
agtttctccctcctc

SEQ ID NO: 1859772 - DNA, 15 bp, Homo sapiens
gtttctccctcctcc

SEQ ID NO: 1859773 - DNA, 15 bp, Homo sapiens
tttctccctcctcct

SEQ ID NO: 1859774 - DNA, 15 bp, Homo sapiens
ttctccctcctcctc

SEQ ID NO: 1859775 - DNA, 15 bp, Homo sapiens
tctccctcctcctcc

SEQ ID NO: 1859776 - DNA, 15 bp, Homo sapiens
ctccctcctcctcct

SEQ ID NO: 1859777 - DNA, 15 bp, Homo sapiens
tccctcctcctcctt

SEQ ID NO: 1859778 - DNA, 15 bp, Homo sapiens
ccctcctcctccttg

SEQ ID NO: 1859779 - DNA, 15 bp, Homo sapiens
cctcctcctccttga

SEQ ID NO: 1859780 - DNA, 15 bp, Homo sapiens
ctcctcctccttgaa

SEQ ID NO: 1859781 - DNA, 15 bp, Homo sapiens
tcctcctccttgaaa

SEQ ID NO: 1859782 - DNA, 15 bp, Homo sapiens
cctcctccttgaaat

SEQ ID NO: 1859783 - DNA, 15 bp, Homo sapiens
ctcctccttgaaata

SEQ ID NO: 1859784 - DNA, 15 bp, Homo sapiens
tcctccttgaaataa

SEQ ID NO: 1859785 - DNA, 15 bp, Homo sapiens
cctccttgaaataac

SEQ ID NO: 1859786 - DNA, 15 bp, Homo sapiens
ctccttgaaataacc

SEQ ID NO: 1859787 - DNA, 15 bp, Homo sapiens
tccttgaaataacct

SEQ ID NO: 1859788 - DNA, 15 bp, Homo sapiens
ccttgaaataacctc

SEQ ID NO: 1859789 - DNA, 15 bp, Homo sapiens
cttgaaataacctct

SEQ ID NO: 1859790 - DNA, 15 bp, Homo sapiens
ttgaaataacctctc

SEQ ID NO: 1859791 - DNA, 15 bp, Homo sapiens
tgaaataacctctct

SEQ ID NO: 1859792 - DNA, 15 bp, Homo sapiens
gaaataacctctctg

SEQ ID NO: 1859793 - DNA, 15 bp, Homo sapiens
aaataacctctctga

SEQ ID NO: 1859794 - DNA, 15 bp, Homo sapiens
aataacctctctgag

SEQ ID NO: 1859795 - DNA, 15 bp, Homo sapiens
ataacctctctgagc

SEQ ID NO: 1859796 - DNA, 15 bp, Homo sapiens
taacctctctgagcc

SEQ ID NO: 1859797 - DNA, 15 bp, Homo sapiens
acctctctgagcctc

SEQ ID NO: 1859798 - DNA, 15 bp, Homo sapiens
cctctctgagcctct

SEQ ID NO: 1859799 - DNA, 15 bp, Homo sapiens
ctctctgagcctctt

SEQ ID NO: 1859800 - DNA, 15 bp, Homo sapiens
tctctgagcctcttt

SEQ ID NO: 1859801 - DNA, 15 bp, Homo sapiens
ctctgagcctctttc

SEQ ID NO: 1859802 - DNA, 15 bp, Homo sapiens
tctgagcctctttca

SEQ ID NO: 1859803 - DNA, 15 bp, Homo sapiens
ctgagcctctttcac

SEQ ID NO: 1859804 - DNA, 15 bp, Homo sapiens
tgagcctctttcaca

SEQ ID NO: 1859805 - DNA, 15 bp, Homo sapiens
gagcctctttcacag

SEQ ID NO: 1859806 - DNA, 15 bp, Homo sapiens
agcctctttcacagg

SEQ ID NO: 1859807 - DNA, 15 bp, Homo sapiens
gcctctttcacaggc

SEQ ID NO: 1859808 - DNA, 15 bp, Homo sapiens
cctctttcacaggcc

SEQ ID NO: 1859809 - DNA, 15 bp, Homo sapiens
ctctttcacaggccc

SEQ ID NO: 1859810 - DNA, 15 bp, Homo sapiens
tctttcacaggccct

SEQ ID NO: 1859811 - DNA, 15 bp, Homo sapiens
ctttcacaggccctg

SEQ ID NO: 1859812 - DNA, 15 bp, Homo sapiens
tttcacaggccctgt

SEQ ID NO: 1859813 - DNA, 15 bp, Homo sapiens
ttcacaggccctgtg

SEQ ID NO: 1859814 - DNA, 15 bp, Homo sapiens
tcacaggccctgtgt

SEQ ID NO: 1859815 - DNA, 15 bp, Homo sapiens
cacaggccctgtgtg

SEQ ID NO: 1859816 - DNA, 15 bp, Homo sapiens
acaggccctgtgtgc

SEQ ID NO: 1859817 - DNA, 15 bp, Homo sapiens
caggccctgtgtgct

SEQ ID NO: 1859818 - DNA, 15 bp, Homo sapiens
aggccctgtgtgctg

SEQ ID NO: 1859819 - DNA, 15 bp, Homo sapiens
ggccctgtgtgctgt

SEQ ID NO: 1859820 - DNA, 15 bp, Homo sapiens
gccctgtgtgctgtt

SEQ ID NO: 1859821 - DNA, 15 bp, Homo sapiens
ccctgtgtgctgttt

SEQ ID NO: 1859822 - DNA, 15 bp, Homo sapiens
cctgtgtgctgtttt

SEQ ID NO: 1859823 - DNA, 15 bp, Homo sapiens
ctgtgtgctgttttc

SEQ ID NO: 1859824 - DNA, 15 bp, Homo sapiens
tgtgtgctgttttcc

SEQ ID NO: 1859825 - DNA, 15 bp, Homo sapiens
gtgtgctgttttcct

SEQ ID NO: 1859826 - DNA, 15 bp, Homo sapiens
tgtgctgttttcctt

SEQ ID NO: 1859827 - DNA, 15 bp, Homo sapiens
gtgctgttttccttc

SEQ ID NO: 1859828 - DNA, 15 bp, Homo sapiens
tgctgttttccttcc

SEQ ID NO: 1859829 - DNA, 15 bp, Homo sapiens
gctgttttccttcct

SEQ ID NO: 1859830 - DNA, 15 bp, Homo sapiens
ctgttttccttcctg

SEQ ID NO: 1859831 - DNA, 15 bp, Homo sapiens
tgttttccttcctgt

SEQ ID NO: 1859832 - DNA, 15 bp, Homo sapiens
gttttccttcctgtc

SEQ ID NO: 1859833 - DNA, 15 bp, Homo sapiens
ttttccttcctgtcc

SEQ ID NO: 1859834 - DNA, 15 bp, Homo sapiens
tttccttcctgtcct

SEQ ID NO: 1859835 - DNA, 15 bp, Homo sapiens
ttccttcctgtcctg

SEQ ID NO: 1859836 - DNA, 15 bp, Homo sapiens
tccttcctgtcctgc

SEQ ID NO: 1859837 - DNA, 15 bp, Homo sapiens
ccttcctgtcctgcc

SEQ ID NO: 1859838 - DNA, 15 bp, Homo sapiens
cttcctgtcctgccc

SEQ ID NO: 1859839 - DNA, 15 bp, Homo sapiens
ttcctgtcctgccct

SEQ ID NO: 1859840 - DNA, 15 bp, Homo sapiens
tcctgtcctgccctg

SEQ ID NO: 1859841 - DNA, 15 bp, Homo sapiens
cctgtcctgccctgg

SEQ ID NO: 1859842 - DNA, 15 bp, Homo sapiens
ctgtcctgccctggc

SEQ ID NO: 1859843 - DNA, 15 bp, Homo sapiens
tgtcctgccctggct

SEQ ID NO: 1859844 - DNA, 15 bp, Homo sapiens
gtcctgccctggctg

SEQ ID NO: 1859845 - DNA, 15 bp, Homo sapiens
tcctgccctggctga

SEQ ID NO: 1859846 - DNA, 15 bp, Homo sapiens
cctgccctggctgag

SEQ ID NO: 1859847 - DNA, 15 bp, Homo sapiens
ctgccctggctgaga

SEQ ID NO: 1859848 - DNA, 15 bp, Homo sapiens
tgccctggctgagag

SEQ ID NO: 1859849 - DNA, 15 bp, Homo sapiens
gccctggctgagagc

SEQ ID NO: 1859850 - DNA, 15 bp, Homo sapiens
ccctggctgagagcg

SEQ ID NO: 1859851 - DNA, 15 bp, Homo sapiens
cctggctgagagcgg

SEQ ID NO: 1859852 - DNA, 15 bp, Homo sapiens
ctggctgagagcggg

SEQ ID NO: 1859853 - DNA, 15 bp, Homo sapiens
tggctgagagcgggc

SEQ ID NO: 1859854 - DNA, 15 bp, Homo sapiens
ggctgagagcgggct

SEQ ID NO: 1859855 - DNA, 15 bp, Homo sapiens
gctgagagcgggctt

SEQ ID NO: 1859856 - DNA, 15 bp, Homo sapiens
ctgagagcgggctta

SEQ ID NO: 1859857 - DNA, 15 bp, Homo sapiens
tgagagcgggcttaa

SEQ ID NO: 1859858 - DNA, 15 bp, Homo sapiens
gagagcgggcttaat

SEQ ID NO: 1859859 - DNA, 15 bp, Homo sapiens
agagcgggcttaatg

SEQ ID NO: 1859860 - DNA, 15 bp, Homo sapiens
gagcgggcttaatga

SEQ ID NO: 1859861 - DNA, 15 bp, Homo sapiens
agcgggcttaatgaa

SEQ ID NO: 1859862 - DNA, 15 bp, Homo sapiens
gcgggcttaatgaat

SEQ ID NO: 1859863 - DNA, 15 bp, Homo sapiens
cgggcttaatgaatg

SEQ ID NO: 1859864 - DNA, 15 bp, Homo sapiens
gggcttaatgaatgg

SEQ ID NO: 1859865 - DNA, 15 bp, Homo sapiens
ggcttaatgaatggg

SEQ ID NO: 1859866 - DNA, 15 bp, Homo sapiens
gcttaatgaatgggg

SEQ ID NO: 1859867 - DNA, 15 bp, Homo sapiens
cttaatgaatggggc

SEQ ID NO: 1859868 - DNA, 15 bp, Homo sapiens
ttaatgaatggggct

SEQ ID NO: 1859869 - DNA, 15 bp, Homo sapiens
taatgaatggggctc

SEQ ID NO: 1859870 - DNA, 15 bp, Homo sapiens
aatgaatggggctca

SEQ ID NO: 1859871 - DNA, 15 bp, Homo sapiens
atgaatggggctcag

SEQ ID NO: 1859872 - DNA, 15 bp, Homo sapiens
tgaatggggctcagt

SEQ ID NO: 1859873 - DNA, 15 bp, Homo sapiens
gaatggggctcagtt

SEQ ID NO: 1859874 - DNA, 15 bp, Homo sapiens
aatggggctcagttt

SEQ ID NO: 1859875 - DNA, 15 bp, Homo sapiens
atggggctcagttta

SEQ ID NO: 1859876 - DNA, 15 bp, Homo sapiens
tggggctcagtttag

SEQ ID NO: 1859877 - DNA, 15 bp, Homo sapiens
ggggctcagtttagg

SEQ ID NO: 1859878 - DNA, 15 bp, Homo sapiens
gggctcagtttaggg

SEQ ID NO: 1859879 - DNA, 15 bp, Homo sapiens
ggctcagtttagggt

SEQ ID NO: 1859880 - DNA, 15 bp, Homo sapiens
gctcagtttagggtg

SEQ ID NO: 1859881 - DNA, 15 bp, Homo sapiens
ctcagtttagggtgg

SEQ ID NO: 1859882 - DNA, 15 bp, Homo sapiens
tcagtttagggtggg

SEQ ID NO: 1859883 - DNA, 15 bp, Homo sapiens
cagtttagggtggga

SEQ ID NO: 1859884 - DNA, 15 bp, Homo sapiens
agtttagggtgggag

SEQ ID NO: 1859885 - DNA, 15 bp, Homo sapiens
gtttagggtgggagg

SEQ ID NO: 1859886 - DNA, 15 bp, Homo sapiens
tttagggtgggagga

SEQ ID NO: 1859887 - DNA, 15 bp, Homo sapiens
ttagggtgggaggaa

SEQ ID NO: 1859888 - DNA, 15 bp, Homo sapiens
tagggtgggaggaag

SEQ ID NO: 1859889 - DNA, 15 bp, Homo sapiens
gggtgggaggaaggt

SEQ ID NO: 1859890 - DNA, 15 bp, Homo sapiens
ggtgggaggaaggtc

SEQ ID NO: 1859891 - DNA, 15 bp, Homo sapiens
gtgggaggaaggtcg

SEQ ID NO: 1859892 - DNA, 15 bp, Homo sapiens
tgggaggaaggtcgg

SEQ ID NO: 1859893 - DNA, 15 bp, Homo sapiens
gggaggaaggtcggc

SEQ ID NO: 1859894 - DNA, 15 bp, Homo sapiens
ggaggaaggtcggca

SEQ ID NO: 1859895 - DNA, 15 bp, Homo sapiens
gaggaaggtcggcag

SEQ ID NO: 1859896 - DNA, 15 bp, Homo sapiens
aggaaggtcggcagc

SEQ ID NO: 1859897 - DNA, 15 bp, Homo sapiens
ggaaggtcggcagca

SEQ ID NO: 1859898 - DNA, 15 bp, Homo sapiens
gaaggtcggcagcag

SEQ ID NO: 1859899 - DNA, 15 bp, Homo sapiens
aaggtcggcagcagg

SEQ ID NO: 1859900 - DNA, 15 bp, Homo sapiens
aggtcggcagcagga

SEQ ID NO: 1859901 - DNA, 15 bp, Homo sapiens
ggtcggcagcaggag

SEQ ID NO: 1859902 - DNA, 15 bp, Homo sapiens
gtcggcagcaggagc

SEQ ID NO: 1859903 - DNA, 15 bp, Homo sapiens
tcggcagcaggagcc

SEQ ID NO: 1859904 - DNA, 15 bp, Homo sapiens
cggcagcaggagcca

SEQ ID NO: 1859905 - DNA, 15 bp, Homo sapiens
ggcagcaggagccag

SEQ ID NO: 1859906 - DNA, 15 bp, Homo sapiens
gcagcaggagccagg

SEQ ID NO: 1859907 - DNA, 15 bp, Homo sapiens
cagcaggagccaggg

SEQ ID NO: 1859908 - DNA, 15 bp, Homo sapiens
agcaggagccagggc

SEQ ID NO: 1859909 - DNA, 15 bp, Homo sapiens
gcaggagccagggct

SEQ ID NO: 1859910 - DNA, 15 bp, Homo sapiens
caggagccagggctt

SEQ ID NO: 1859911 - DNA, 15 bp, Homo sapiens
aggagccagggcttg

SEQ ID NO: 1859912 - DNA, 15 bp, Homo sapiens
ggagccagggcttga

SEQ ID NO: 1859913 - DNA, 15 bp, Homo sapiens
gagccagggcttgat

SEQ ID NO: 1859914 - DNA, 15 bp, Homo sapiens
agccagggcttgatt

SEQ ID NO: 1859915 - DNA, 15 bp, Homo sapiens
gccagggcttgattc

SEQ ID NO: 1859916 - DNA, 15 bp, Homo sapiens
ccagggcttgattct

SEQ ID NO: 1859917 - DNA, 15 bp, Homo sapiens
cagggcttgattctc

SEQ ID NO: 1859918 - DNA, 15 bp, Homo sapiens
agggcttgattctct

SEQ ID NO: 1859919 - DNA, 15 bp, Homo sapiens
gggcttgattctctt

SEQ ID NO: 1859920 - DNA, 15 bp, Homo sapiens
ggcttgattctcttg

SEQ ID NO: 1859921 - DNA, 15 bp, Homo sapiens
gcttgattctcttgg

SEQ ID NO: 1859922 - DNA, 15 bp, Homo sapiens
cttgattctcttggc

SEQ ID NO: 1859923 - DNA, 15 bp, Homo sapiens
ttgattctcttggca

SEQ ID NO: 1859924 - DNA, 15 bp, Homo sapiens
tgattctcttggcaa

SEQ ID NO: 1859925 - DNA, 15 bp, Homo sapiens
gattctcttggcaag

SEQ ID NO: 1859926 - DNA, 15 bp, Homo sapiens
attctcttggcaagg

SEQ ID NO: 1859927 - DNA, 15 bp, Homo sapiens
ttctcttggcaaggg

SEQ ID NO: 1859928 - DNA, 15 bp, Homo sapiens
tctcttggcaaggga

SEQ ID NO: 1859929 - DNA, 15 bp, Homo sapiens
ctcttggcaagggaa

SEQ ID NO: 1859930 - DNA, 15 bp, Homo sapiens
tcttggcaagggaag

SEQ ID NO: 1859931 - DNA, 15 bp, Homo sapiens
cttggcaagggaaga

SEQ ID NO: 1859932 - DNA, 15 bp, Homo sapiens
ttggcaagggaagaa

SEQ ID NO: 1859933 - DNA, 15 bp, Homo sapiens
tggcaagggaagaag

SEQ ID NO: 1859934 - DNA, 15 bp, Homo sapiens
ggcaagggaagaagg

SEQ ID NO: 1859935 - DNA, 15 bp, Homo sapiens
gcaagggaagaaggg

SEQ ID NO: 1859936 - DNA, 15 bp, Homo sapiens
caagggaagaaggga

SEQ ID NO: 1859937 - DNA, 15 bp, Homo sapiens
aagggaagaagggaa

SEQ ID NO: 1859938 - DNA, 15 bp, Homo sapiens
agggaagaagggaaa

SEQ ID NO: 1859939 - DNA, 15 bp, Homo sapiens
gggaagaagggaaag

SEQ ID NO: 1859940 - DNA, 15 bp, Homo sapiens
ggaagaagggaaaga

SEQ ID NO: 1859941 - DNA, 15 bp, Homo sapiens
gaagaagggaaagaa

SEQ ID NO: 1859942 - DNA, 15 bp, Homo sapiens
aagaagggaaagaaa

SEQ ID NO: 1859943 - DNA, 15 bp, Homo sapiens
agaagggaaagaaaa

SEQ ID NO: 1859944 - DNA, 15 bp, Homo sapiens
gaagggaaagaaaaa

SEQ ID NO: 1859945 - DNA, 15 bp, Homo sapiens
aagggaaagaaaaaa

SEQ ID NO: 1859946 - DNA, 15 bp, Homo sapiens
agggaaagaaaaaac

SEQ ID NO: 1859947 - DNA, 15 bp, Homo sapiens
gggaaagaaaaaaca

SEQ ID NO: 1859948 - DNA, 15 bp, Homo sapiens
ggaaagaaaaaacag

SEQ ID NO: 1859949 - DNA, 15 bp, Homo sapiens
gaaagaaaaaacagc

SEQ ID NO: 1859950 - DNA, 15 bp, Homo sapiens
aaagaaaaaacagcc

SEQ ID NO: 1859951 - DNA, 15 bp, Homo sapiens
aagaaaaaacagccg

SEQ ID NO: 1859952 - DNA, 15 bp, Homo sapiens
agaaaaaacagccga

SEQ ID NO: 1859953 - DNA, 15 bp, Homo sapiens
gaaaaaacagccgaa

SEQ ID NO: 1859954 - DNA, 15 bp, Homo sapiens
aaaaaacagccgaat

SEQ ID NO: 1859955 - DNA, 15 bp, Homo sapiens
aaaaacagccgaatg

SEQ ID NO: 1859956 - DNA, 15 bp, Homo sapiens
aaaacagccgaatgt

SEQ ID NO: 1859957 - DNA, 15 bp, Homo sapiens
aaacagccgaatgtg

SEQ ID NO: 1859958 - DNA, 15 bp, Homo sapiens
aacagccgaatgtga

SEQ ID NO: 1859959 - DNA, 15 bp, Homo sapiens
acagccgaatgtgaa

SEQ ID NO: 1859960 - DNA, 15 bp, Homo sapiens
cagccgaatgtgaaa

SEQ ID NO: 1859961 - DNA, 15 bp, Homo sapiens
agccgaatgtgaaaa

SEQ ID NO: 1859962 - DNA, 15 bp, Homo sapiens
gccgaatgtgaaaat

SEQ ID NO: 1859963 - DNA, 15 bp, Homo sapiens
ccgaatgtgaaaatg

SEQ ID NO: 1859964 - DNA, 15 bp, Homo sapiens
cgaatgtgaaaatgt

SEQ ID NO: 1859965 - DNA, 15 bp, Homo sapiens
gaatgtgaaaatgtg

SEQ ID NO: 1859966 - DNA, 15 bp, Homo sapiens
aatgtgaaaatgtgg

SEQ ID NO: 1859967 - DNA, 15 bp, Homo sapiens
atgtgaaaatgtggt

SEQ ID NO: 1859968 - DNA, 15 bp, Homo sapiens
tgtgaaaatgtggtg

SEQ ID NO: 1859969 - DNA, 15 bp, Homo sapiens
gtgaaaatgtggtgc

SEQ ID NO: 1859970 - DNA, 15 bp, Homo sapiens
tgaaaatgtggtgcc

SEQ ID NO: 1859971 - DNA, 15 bp, Homo sapiens
gaaaatgtggtgcct

SEQ ID NO: 1859972 - DNA, 15 bp, Homo sapiens
aaaatgtggtgcctc

SEQ ID NO: 1859973 - DNA, 15 bp, Homo sapiens
aaatgtggtgcctcg

SEQ ID NO: 1859974 - DNA, 15 bp, Homo sapiens
aatgtggtgcctcgg

SEQ ID NO: 1859975 - DNA, 15 bp, Homo sapiens
atgtggtgcctcgga

SEQ ID NO: 1859976 - DNA, 15 bp, Homo sapiens
tgtggtgcctcggag

SEQ ID NO: 1859977 - DNA, 15 bp, Homo sapiens
gtggtgcctcggagg

SEQ ID NO: 1859978 - DNA, 15 bp, Homo sapiens
tggtgcctcggaggt

SEQ ID NO: 1859979 - DNA, 15 bp, Homo sapiens
ggtgcctcggaggtg

SEQ ID NO: 1859980 - DNA, 15 bp, Homo sapiens
gtgcctcggaggtgg

SEQ ID NO: 1859981 - DNA, 15 bp, Homo sapiens
tgcctcggaggtggg

SEQ ID NO: 1859982 - DNA, 15 bp, Homo sapiens
gcctcggaggtgggg

SEQ ID NO: 1859983 - DNA, 15 bp, Homo sapiens
cctcggaggtggggg

SEQ ID NO: 1859984 - DNA, 15 bp, Homo sapiens
ctcggaggtgggggt

SEQ ID NO: 1859985 - DNA, 15 bp, Homo sapiens
tcggaggtgggggtg

SEQ ID NO: 1859986 - DNA, 15 bp, Homo sapiens
cggaggtgggggtgg

SEQ ID NO: 1859987 - DNA, 15 bp, Homo sapiens
ggaggtgggggtggg

SEQ ID NO: 1859988 - DNA, 15 bp, Homo sapiens
gaggtgggggtgggg

SEQ ID NO: 1859989 - DNA, 15 bp, Homo sapiens
aggtgggggtggggt

SEQ ID NO: 1859990 - DNA, 15 bp, Homo sapiens
gtgggggtggggtgt

SEQ ID NO: 1859991 - DNA, 15 bp, Homo sapiens
tgggggtggggtgtg

SEQ ID NO: 1859992 - DNA, 15 bp, Homo sapiens
gggggtggggtgtgc

SEQ ID NO: 1859993 - DNA, 15 bp, Homo sapiens
ggggtggggtgtgct

SEQ ID NO: 1859994 - DNA, 15 bp, Homo sapiens
gggtggggtgtgctc

SEQ ID NO: 1859995 - DNA, 15 bp, Homo sapiens
ggtggggtgtgctca

SEQ ID NO: 1859996 - DNA, 15 bp, Homo sapiens
gtggggtgtgctcaa

SEQ ID NO: 1859997 - DNA, 15 bp, Homo sapiens
tggggtgtgctcaaa

SEQ ID NO: 1859998 - DNA, 15 bp, Homo sapiens
ggggtgtgctcaaag

SEQ ID NO: 1859999 - DNA, 15 bp, Homo sapiens
gggtgtgctcaaagg

SEQ ID NO: 1860000 - DNA, 15 bp, Homo sapiens
ggtgtgctcaaaggc

SEQ ID NO: 1860001 - DNA, 15 bp, Homo sapiens
gtgtgctcaaaggcc

SEQ ID NO: 1860002 - DNA, 15 bp, Homo sapiens
tgtgctcaaaggccg

SEQ ID NO: 1860003 - DNA, 15 bp, Homo sapiens
gtgctcaaaggccgg

SEQ ID NO: 1860004 - DNA, 15 bp, Homo sapiens
tgctcaaaggccggt

SEQ ID NO: 1860005 - DNA, 15 bp, Homo sapiens
gctcaaaggccggtc

SEQ ID NO: 1860006 - DNA, 15 bp, Homo sapiens
ctcaaaggccggtcc

SEQ ID NO: 1860007 - DNA, 15 bp, Homo sapiens
tcaaaggccggtcct

SEQ ID NO: 1860008 - DNA, 15 bp, Homo sapiens
caaaggccggtcctc

SEQ ID NO: 1860009 - DNA, 15 bp, Homo sapiens
aaaggccggtcctct

SEQ ID NO: 1860010 - DNA, 15 bp, Homo sapiens
aaggccggtcctctc

SEQ ID NO: 1860011 - DNA, 15 bp, Homo sapiens
aggccggtcctctcc

SEQ ID NO: 1860012 - DNA, 15 bp, Homo sapiens
ggccggtcctctcct

SEQ ID NO: 1860013 - DNA, 15 bp, Homo sapiens
gccggtcctctcctg

SEQ ID NO: 1860014 - DNA, 15 bp, Homo sapiens
ccggtcctctcctga

SEQ ID NO: 1860015 - DNA, 15 bp, Homo sapiens
cggtcctctcctgaa

SEQ ID NO: 1860016 - DNA, 15 bp, Homo sapiens
ggtcctctcctgaaa

SEQ ID NO: 1860017 - DNA, 15 bp, Homo sapiens
gtcctctcctgaaat

SEQ ID NO: 1860018 - DNA, 15 bp, Homo sapiens
tcctctcctgaaatg

SEQ ID NO: 1860019 - DNA, 15 bp, Homo sapiens
cctctcctgaaatgc

SEQ ID NO: 1860020 - DNA, 15 bp, Homo sapiens
ctctcctgaaatgca

SEQ ID NO: 1860021 - DNA, 15 bp, Homo sapiens
tctcctgaaatgcag

SEQ ID NO: 1860022 - DNA, 15 bp, Homo sapiens
ctcctgaaatgcagg

SEQ ID NO: 1860023 - DNA, 15 bp, Homo sapiens
tcctgaaatgcaggg

SEQ ID NO: 1860024 - DNA, 15 bp, Homo sapiens
cctgaaatgcagggg

SEQ ID NO: 1860025 - DNA, 15 bp, Homo sapiens
ctgaaatgcaggggt

SEQ ID NO: 1860026 - DNA, 15 bp, Homo sapiens
tgaaatgcaggggtg

SEQ ID NO: 1860027 - DNA, 15 bp, Homo sapiens
gaaatgcaggggtga

SEQ ID NO: 1860028 - DNA, 15 bp, Homo sapiens
aaatgcaggggtgac

SEQ ID NO: 1860029 - DNA, 15 bp, Homo sapiens
aatgcaggggtgact

SEQ ID NO: 1860030 - DNA, 15 bp, Homo sapiens
atgcaggggtgactc

SEQ ID NO: 1860031 - DNA, 15 bp, Homo sapiens
tgcaggggtgactcc

SEQ ID NO: 1860032 - DNA, 15 bp, Homo sapiens
gcaggggtgactcca

SEQ ID NO: 1860033 - DNA, 15 bp, Homo sapiens
caggggtgactccaa

SEQ ID NO: 1860034 - DNA, 15 bp, Homo sapiens
aggggtgactccaag

SEQ ID NO: 1860035 - DNA, 15 bp, Homo sapiens
ggggtgactccaagg

SEQ ID NO: 1860036 - DNA, 15 bp, Homo sapiens
gggtgactccaaggc

SEQ ID NO: 1860037 - DNA, 15 bp, Homo sapiens
ggtgactccaaggct

SEQ ID NO: 1860038 - DNA, 15 bp, Homo sapiens
gtgactccaaggctg

SEQ ID NO: 1860039 - DNA, 15 bp, Homo sapiens
tgactccaaggctgg

SEQ ID NO: 1860040 - DNA, 15 bp, Homo sapiens
gactccaaggctggc

SEQ ID NO: 1860041 - DNA, 15 bp, Homo sapiens
actccaaggctggcc

SEQ ID NO: 1860042 - DNA, 15 bp, Homo sapiens
ctccaaggctggccc

SEQ ID NO: 1860043 - DNA, 15 bp, Homo sapiens
tccaaggctggccct

SEQ ID NO: 1860044 - DNA, 15 bp, Homo sapiens
ccaaggctggccctt

SEQ ID NO: 1860045 - DNA, 15 bp, Homo sapiens
caaggctggcccttc

SEQ ID NO: 1860046 - DNA, 15 bp, Homo sapiens
aaggctggcccttcc

SEQ ID NO: 1860047 - DNA, 15 bp, Homo sapiens
aggctggcccttccc

SEQ ID NO: 1860048 - DNA, 15 bp, Homo sapiens
ggctggcccttccct

SEQ ID NO: 1860049 - DNA, 15 bp, Homo sapiens
gctggcccttccctt

SEQ ID NO: 1860050 - DNA, 15 bp, Homo sapiens
ctggcccttcccttt

SEQ ID NO: 1860051 - DNA, 15 bp, Homo sapiens
tggcccttccctttc

SEQ ID NO: 1860052 - DNA, 15 bp, Homo sapiens
ggcccttccctttcc

SEQ ID NO: 1860053 - DNA, 15 bp, Homo sapiens
gcccttccctttcct

SEQ ID NO: 1860054 - DNA, 15 bp, Homo sapiens
cccttccctttcctg

SEQ ID NO: 1860055 - DNA, 15 bp, Homo sapiens
ccttccctttcctgc

SEQ ID NO: 1860056 - DNA, 15 bp, Homo sapiens
cttccctttcctgcg

SEQ ID NO: 1860057 - DNA, 15 bp, Homo sapiens
ttccctttcctgcgc

SEQ ID NO: 1860058 - DNA, 15 bp, Homo sapiens
tccctttcctgcgcc

SEQ ID NO: 1860059 - DNA, 15 bp, Homo sapiens
ccctttcctgcgccc

SEQ ID NO: 1860060 - DNA, 15 bp, Homo sapiens
cctttcctgcgccct

SEQ ID NO: 1860061 - DNA, 15 bp, Homo sapiens
ctttcctgcgccctt

SEQ ID NO: 1860062 - DNA, 15 bp, Homo sapiens
tttcctgcgcccttg

SEQ ID NO: 1860063 - DNA, 15 bp, Homo sapiens
ttcctgcgcccttgc

SEQ ID NO: 1860064 - DNA, 15 bp, Homo sapiens
tcctgcgcccttgca

SEQ ID NO: 1860065 - DNA, 15 bp, Homo sapiens
cctgcgcccttgcaa

SEQ ID NO: 1860066 - DNA, 15 bp, Homo sapiens
ctgcgcccttgcaaa

SEQ ID NO: 1860067 - DNA, 15 bp, Homo sapiens
tgcgcccttgcaaac

SEQ ID NO: 1860068 - DNA, 15 bp, Homo sapiens
gcgcccttgcaaact

SEQ ID NO: 1860069 - DNA, 15 bp, Homo sapiens
cgcccttgcaaactg

SEQ ID NO: 1860070 - DNA, 15 bp, Homo sapiens
gcccttgcaaactgc

SEQ ID NO: 1860071 - DNA, 15 bp, Homo sapiens
cccttgcaaactgcc

SEQ ID NO: 1860072 - DNA, 15 bp, Homo sapiens
ccttgcaaactgccc

SEQ ID NO: 1860073 - DNA, 15 bp, Homo sapiens
cttgcaaactgcccg

SEQ ID NO: 1860074 - DNA, 15 bp, Homo sapiens
ttgcaaactgcccgg

SEQ ID NO: 1860075 - DNA, 15 bp, Homo sapiens
tgcaaactgcccggg

SEQ ID NO: 1860076 - DNA, 15 bp, Homo sapiens
gcaaactgcccggga

SEQ ID NO: 1860077 - DNA, 15 bp, Homo sapiens
caaactgcccgggag

SEQ ID NO: 1860078 - DNA, 15 bp, Homo sapiens
aaactgcccgggagg

SEQ ID NO: 1860079 - DNA, 15 bp, Homo sapiens
aactgcccgggagga

SEQ ID NO: 1860080 - DNA, 15 bp, Homo sapiens
actgcccgggaggaa

SEQ ID NO: 1860081 - DNA, 15 bp, Homo sapiens
ctgcccgggaggaag

SEQ ID NO: 1860082 - DNA, 15 bp, Homo sapiens
tgcccgggaggaagg

SEQ ID NO: 1860083 - DNA, 15 bp, Homo sapiens
gcccgggaggaaggg

SEQ ID NO: 1860084 - DNA, 15 bp, Homo sapiens
cccgggaggaagggg

SEQ ID NO: 1860085 - DNA, 15 bp, Homo sapiens
ccgggaggaagggga

SEQ ID NO: 1860086 - DNA, 15 bp, Homo sapiens
cgggaggaaggggag

SEQ ID NO: 1860087 - DNA, 15 bp, Homo sapiens
gggaggaaggggagt

SEQ ID NO: 1860088 - DNA, 15 bp, Homo sapiens
ggaggaaggggagtg

SEQ ID NO: 1860089 - DNA, 15 bp, Homo sapiens
gaggaaggggagtgg

SEQ ID NO: 1860090 - DNA, 15 bp, Homo sapiens
aggaaggggagtggg

SEQ ID NO: 1860091 - DNA, 15 bp, Homo sapiens
ggaaggggagtgggc

SEQ ID NO: 1860092 - DNA, 15 bp, Homo sapiens
gaaggggagtgggcg

SEQ ID NO: 1860093 - DNA, 15 bp, Homo sapiens
aaggggagtgggcgg

SEQ ID NO: 1860094 - DNA, 15 bp, Homo sapiens
aggggagtgggcggg

SEQ ID NO: 1860095 - DNA, 15 bp, Homo sapiens
ggggagtgggcgggt

SEQ ID NO: 1860096 - DNA, 15 bp, Homo sapiens
gggagtgggcgggta

SEQ ID NO: 1860097 - DNA, 15 bp, Homo sapiens
ggagtgggcgggtag

SEQ ID NO: 1860098 - DNA, 15 bp, Homo sapiens
gagtgggcgggtagg

SEQ ID NO: 1860099 - DNA, 15 bp, Homo sapiens
agtgggcgggtagga

SEQ ID NO: 1860100 - DNA, 15 bp, Homo sapiens
gtgggcgggtaggag

SEQ ID NO: 1860101 - DNA, 15 bp, Homo sapiens
tgggcgggtaggagc

SEQ ID NO: 1860102 - DNA, 15 bp, Homo sapiens
gggcgggtaggagcc

SEQ ID NO: 1860103 - DNA, 15 bp, Homo sapiens
ggcgggtaggagccc

SEQ ID NO: 1860104 - DNA, 15 bp, Homo sapiens
gcgggtaggagcccg

SEQ ID NO: 1860105 - DNA, 15 bp, Homo sapiens
cgggtaggagcccgg

SEQ ID NO: 1860106 - DNA, 15 bp, Homo sapiens
gggtaggagcccggg

SEQ ID NO: 1860107 - DNA, 15 bp, Homo sapiens
ggtaggagcccgggg

SEQ ID NO: 1860108 - DNA, 15 bp, Homo sapiens
gtaggagcccggggg

SEQ ID NO: 1860109 - DNA, 15 bp, Homo sapiens
taggagcccgggggc

SEQ ID NO: 1860110 - DNA, 15 bp, Homo sapiens
aggagcccgggggcg

SEQ ID NO: 1860111 - DNA, 15 bp, Homo sapiens
ggagcccgggggcgg

SEQ ID NO: 1860112 - DNA, 15 bp, Homo sapiens
gagcccgggggcggg

SEQ ID NO: 1860113 - DNA, 15 bp, Homo sapiens
agcccgggggcgggg

SEQ ID NO: 1860114 - DNA, 15 bp, Homo sapiens
gcccgggggcggggc

SEQ ID NO: 1860115 - DNA, 15 bp, Homo sapiens
cccgggggcggggct

SEQ ID NO: 1860116 - DNA, 15 bp, Homo sapiens
ccgggggcggggctg

SEQ ID NO: 1860117 - DNA, 15 bp, Homo sapiens
cgggggcggggctgc

SEQ ID NO: 1860118 - DNA, 15 bp, Homo sapiens
gggggcggggctgct

SEQ ID NO: 1860119 - DNA, 15 bp, Homo sapiens
ggggcggggctgctg

SEQ ID NO: 1860120 - DNA, 15 bp, Homo sapiens
gggcggggctgctgg

SEQ ID NO: 1860121 - DNA, 15 bp, Homo sapiens
ggcggggctgctggc

SEQ ID NO: 1860122 - DNA, 15 bp, Homo sapiens
gcggggctgctggct

SEQ ID NO: 1860123 - DNA, 15 bp, Homo sapiens
cggggctgctggctg

SEQ ID NO: 1860124 - DNA, 15 bp, Homo sapiens
ggggctgctggctgc

SEQ ID NO: 1860125 - DNA, 15 bp, Homo sapiens
gggctgctggctgca

SEQ ID NO: 1860126 - DNA, 15 bp, Homo sapiens
ggctgctggctgcag

SEQ ID NO: 1860127 - DNA, 15 bp, Homo sapiens
gctgctggctgcagg

SEQ ID NO: 1860128 - DNA, 15 bp, Homo sapiens
ctgctggctgcaggt

SEQ ID NO: 1860129 - DNA, 15 bp, Homo sapiens
tgctggctgcaggtt

SEQ ID NO: 1860130 - DNA, 15 bp, Homo sapiens
gctggctgcaggttg

SEQ ID NO: 1860131 - DNA, 15 bp, Homo sapiens
ctggctgcaggttgg

SEQ ID NO: 1860132 - DNA, 15 bp, Homo sapiens
tggctgcaggttgga

SEQ ID NO: 1860133 - DNA, 15 bp, Homo sapiens
ggctgcaggttggaa

SEQ ID NO: 1860134 - DNA, 15 bp, Homo sapiens
gctgcaggttggaat

SEQ ID NO: 1860135 - DNA, 15 bp, Homo sapiens
ctgcaggttggaatt

SEQ ID NO: 1860136 - DNA, 15 bp, Homo sapiens
tgcaggttggaattc

SEQ ID NO: 1860137 - DNA, 15 bp, Homo sapiens
gcaggttggaattcc

SEQ ID NO: 1860138 - DNA, 15 bp, Homo sapiens
caggttggaattcca

SEQ ID NO: 1860139 - DNA, 15 bp, Homo sapiens
aggttggaattccag

SEQ ID NO: 1860140 - DNA, 15 bp, Homo sapiens
ggttggaattccagc

SEQ ID NO: 1860141 - DNA, 15 bp, Homo sapiens
gttggaattccagca

SEQ ID NO: 1860142 - DNA, 15 bp, Homo sapiens
ttggaattccagcat

SEQ ID NO: 1860143 - DNA, 15 bp, Homo sapiens
tggaattccagcatt

SEQ ID NO: 1860144 - DNA, 15 bp, Homo sapiens
ggaattccagcattg

SEQ ID NO: 1860145 - DNA, 15 bp, Homo sapiens
gaattccagcattgc

SEQ ID NO: 1860146 - DNA, 15 bp, Homo sapiens
aattccagcattgca

SEQ ID NO: 1860147 - DNA, 15 bp, Homo sapiens
attccagcattgcag

SEQ ID NO: 1860148 - DNA, 15 bp, Homo sapiens
ttccagcattgcagc

SEQ ID NO: 1860149 - DNA, 15 bp, Homo sapiens
tccagcattgcagct

SEQ ID NO: 1860150 - DNA, 15 bp, Homo sapiens
ccagcattgcagctt

SEQ ID NO: 1860151 - DNA, 15 bp, Homo sapiens
cagcattgcagcttt

SEQ ID NO: 1860152 - DNA, 15 bp, Homo sapiens
agcattgcagctttg

SEQ ID NO: 1860153 - DNA, 15 bp, Homo sapiens
gcattgcagctttgt

SEQ ID NO: 1860154 - DNA, 15 bp, Homo sapiens
cattgcagctttgtt

SEQ ID NO: 1860155 - DNA, 15 bp, Homo sapiens
attgcagctttgttt

SEQ ID NO: 1860156 - DNA, 15 bp, Homo sapiens
ttgcagctttgtttt

SEQ ID NO: 1860157 - DNA, 15 bp, Homo sapiens
tgcagctttgttttg

SEQ ID NO: 1860158 - DNA, 15 bp, Homo sapiens
gcagctttgttttgg

SEQ ID NO: 1860159 - DNA, 15 bp, Homo sapiens
cagctttgttttggg

SEQ ID NO: 1860160 - DNA, 15 bp, Homo sapiens
agctttgttttgggg

SEQ ID NO: 1860161 - DNA, 15 bp, Homo sapiens
gctttgttttggggg

SEQ ID NO: 1860162 - DNA, 15 bp, Homo sapiens
ctttgttttgggggg

SEQ ID NO: 1860163 - DNA, 15 bp, Homo sapiens
tttgttttggggggg

SEQ ID NO: 1860164 - DNA, 15 bp, Homo sapiens
ttgttttgggggggt

SEQ ID NO: 1860165 - DNA, 15 bp, Homo sapiens
tgttttgggggggtg

SEQ ID NO: 1860166 - DNA, 15 bp, Homo sapiens
gttttgggggggtgt

SEQ ID NO: 1860167 - DNA, 15 bp, Homo sapiens
ttttgggggggtgtg

SEQ ID NO: 1860168 - DNA, 15 bp, Homo sapiens
tttgggggggtgtgg

SEQ ID NO: 1860169 - DNA, 15 bp, Homo sapiens
ttgggggggtgtggg

SEQ ID NO: 1860170 - DNA, 15 bp, Homo sapiens
tgggggggtgtgggg

SEQ ID NO: 1860171 - DNA, 15 bp, Homo sapiens
gggggggtgtggggg

SEQ ID NO: 1860172 - DNA, 15 bp, Homo sapiens
ggggggtgtgggggg

SEQ ID NO: 1860173 - DNA, 15 bp, Homo sapiens
gggggtgtggggggg

SEQ ID NO: 1860174 - DNA, 15 bp, Homo sapiens
ggggtgtgggggggt

SEQ ID NO: 1860175 - DNA, 15 bp, Homo sapiens
gggtgtgggggggtg

SEQ ID NO: 1860176 - DNA, 15 bp, Homo sapiens
ggtgtgggggggtgg

SEQ ID NO: 1860177 - DNA, 15 bp, Homo sapiens
gtgtgggggggtggg

SEQ ID NO: 1860178 - DNA, 15 bp, Homo sapiens
tgtgggggggtgggt

SEQ ID NO: 1860179 - DNA, 15 bp, Homo sapiens
gtgggggggtgggta

SEQ ID NO: 1860180 - DNA, 15 bp, Homo sapiens
tgggggggtgggtag

SEQ ID NO: 1860181 - DNA, 15 bp, Homo sapiens
gggggggtgggtaga

SEQ ID NO: 1860182 - DNA, 15 bp, Homo sapiens
ggggggtgggtagac

SEQ ID NO: 1860183 - DNA, 15 bp, Homo sapiens
gggggtgggtagacg

SEQ ID NO: 1860184 - DNA, 15 bp, Homo sapiens
ggggtgggtagacga

SEQ ID NO: 1860185 - DNA, 15 bp, Homo sapiens
gggtgggtagacgac

SEQ ID NO: 1860186 - DNA, 15 bp, Homo sapiens
ggtgggtagacgaca

SEQ ID NO: 1860187 - DNA, 15 bp, Homo sapiens
gtgggtagacgacag

SEQ ID NO: 1860188 - DNA, 15 bp, Homo sapiens
tgggtagacgacagg

SEQ ID NO: 1860189 - DNA, 15 bp, Homo sapiens
gggtagacgacaggc

SEQ ID NO: 1860190 - DNA, 15 bp, Homo sapiens
ggtagacgacaggcc

SEQ ID NO: 1860191 - DNA, 15 bp, Homo sapiens
gtagacgacaggcct

SEQ ID NO: 1860192 - DNA, 15 bp, Homo sapiens
tagacgacaggcctg

SEQ ID NO: 1860193 - DNA, 15 bp, Homo sapiens
agacgacaggcctgg

SEQ ID NO: 1860194 - DNA, 15 bp, Homo sapiens
gacgacaggcctggt

SEQ ID NO: 1860195 - DNA, 15 bp, Homo sapiens
acgacaggcctggtc

SEQ ID NO: 1860196 - DNA, 15 bp, Homo sapiens
cgacaggcctggtcg

SEQ ID NO: 1860197 - DNA, 15 bp, Homo sapiens
gacaggcctggtcgt

SEQ ID NO: 1860198 - DNA, 15 bp, Homo sapiens
acaggcctggtcgtt

SEQ ID NO: 1860199 - DNA, 15 bp, Homo sapiens
caggcctggtcgtta

SEQ ID NO: 1860200 - DNA, 15 bp, Homo sapiens
aggcctggtcgttag

SEQ ID NO: 1860201 - DNA, 15 bp, Homo sapiens
ggcctggtcgttagg

SEQ ID NO: 1860202 - DNA, 15 bp, Homo sapiens
gcctggtcgttaggg

SEQ ID NO: 1860203 - DNA, 15 bp, Homo sapiens
cctggtcgttaggga

SEQ ID NO: 1860204 - DNA, 15 bp, Homo sapiens
ctggtcgttagggac

SEQ ID NO: 1860205 - DNA, 15 bp, Homo sapiens
tggtcgttagggact

SEQ ID NO: 1860206 - DNA, 15 bp, Homo sapiens
ggtcgttagggactt

SEQ ID NO: 1860207 - DNA, 15 bp, Homo sapiens
gtcgttagggacttg

SEQ ID NO: 1860208 - DNA, 15 bp, Homo sapiens
tcgttagggacttgc

SEQ ID NO: 1860209 - DNA, 15 bp, Homo sapiens
cgttagggacttgca

SEQ ID NO: 1860210 - DNA, 15 bp, Homo sapiens
gttagggacttgcag

SEQ ID NO: 1860211 - DNA, 15 bp, Homo sapiens
ttagggacttgcagt

SEQ ID NO: 1860212 - DNA, 15 bp, Homo sapiens
tagggacttgcagtg

SEQ ID NO: 1860213 - DNA, 15 bp, Homo sapiens
agggacttgcagtga

SEQ ID NO: 1860214 - DNA, 15 bp, Homo sapiens
gggacttgcagtgaa

SEQ ID NO: 1860215 - DNA, 15 bp, Homo sapiens
ggacttgcagtgaaa

SEQ ID NO: 1860216 - DNA, 15 bp, Homo sapiens
gacttgcagtgaaac

SEQ ID NO: 1860217 - DNA, 15 bp, Homo sapiens
acttgcagtgaaaca

SEQ ID NO: 1860218 - DNA, 15 bp, Homo sapiens
cttgcagtgaaacac

SEQ ID NO: 1860219 - DNA, 15 bp, Homo sapiens
ttgcagtgaaacaca

SEQ ID NO: 1860220 - DNA, 15 bp, Homo sapiens
tgcagtgaaacacac

SEQ ID NO: 1860221 - DNA, 15 bp, Homo sapiens
gcagtgaaacacacc

SEQ ID NO: 1860222 - DNA, 15 bp, Homo sapiens
cagtgaaacacaccc

SEQ ID NO: 1860223 - DNA, 15 bp, Homo sapiens
agtgaaacacacccc

SEQ ID NO: 1860224 - DNA, 15 bp, Homo sapiens
gtgaaacacacccca

SEQ ID NO: 1860225 - DNA, 15 bp, Homo sapiens
tgaaacacaccccac

SEQ ID NO: 1860226 - DNA, 15 bp, Homo sapiens
gaaacacaccccacc

SEQ ID NO: 1860227 - DNA, 15 bp, Homo sapiens
aaacacaccccaccc

SEQ ID NO: 1860228 - DNA, 15 bp, Homo sapiens
aacacaccccaccct

SEQ ID NO: 1860229 - DNA, 15 bp, Homo sapiens
acacaccccaccctt

SEQ ID NO: 1860230 - DNA, 15 bp, Homo sapiens
cacaccccacccttg

SEQ ID NO: 1860231 - DNA, 15 bp, Homo sapiens
acaccccacccttgc

SEQ ID NO: 1860232 - DNA, 15 bp, Homo sapiens
caccccacccttgca

SEQ ID NO: 1860233 - DNA, 15 bp, Homo sapiens
accccacccttgcaa

SEQ ID NO: 1860234 - DNA, 15 bp, Homo sapiens
ccccacccttgcaag

SEQ ID NO: 1860235 - DNA, 15 bp, Homo sapiens
cccacccttgcaagt

SEQ ID NO: 1860236 - DNA, 15 bp, Homo sapiens
ccacccttgcaagtt

SEQ ID NO: 1860237 - DNA, 15 bp, Homo sapiens
cacccttgcaagttt

SEQ ID NO: 1860238 - DNA, 15 bp, Homo sapiens
acccttgcaagtttc

SEQ ID NO: 1860239 - DNA, 15 bp, Homo sapiens
cccttgcaagtttcc

SEQ ID NO: 1860240 - DNA, 15 bp, Homo sapiens
ccttgcaagtttcct

SEQ ID NO: 1860241 - DNA, 15 bp, Homo sapiens
cttgcaagtttcctc

SEQ ID NO: 1860242 - DNA, 15 bp, Homo sapiens
ttgcaagtttcctcg

SEQ ID NO: 1860243 - DNA, 15 bp, Homo sapiens
tgcaagtttcctcgg

SEQ ID NO: 1860244 - DNA, 15 bp, Homo sapiens
gcaagtttcctcggt

SEQ ID NO: 1860245 - DNA, 15 bp, Homo sapiens
caagtttcctcggtc

SEQ ID NO: 1860246 - DNA, 15 bp, Homo sapiens
aagtttcctcggtct

SEQ ID NO: 1860247 - DNA, 15 bp, Homo sapiens
agtttcctcggtctg

SEQ ID NO: 1860248 - DNA, 15 bp, Homo sapiens
gtttcctcggtctgg

SEQ ID NO: 1860249 - DNA, 15 bp, Homo sapiens
tttcctcggtctggg

SEQ ID NO: 1860250 - DNA, 15 bp, Homo sapiens
ttcctcggtctggga

SEQ ID NO: 1860251 - DNA, 15 bp, Homo sapiens
tcctcggtctgggaa

SEQ ID NO: 1860252 - DNA, 15 bp, Homo sapiens
cctcggtctgggaaa

SEQ ID NO: 1860253 - DNA, 15 bp, Homo sapiens
ctcggtctgggaaaa

SEQ ID NO: 1860254 - DNA, 15 bp, Homo sapiens
tcggtctgggaaaat

SEQ ID NO: 1860255 - DNA, 15 bp, Homo sapiens
cggtctgggaaaatg

SEQ ID NO: 1860256 - DNA, 15 bp, Homo sapiens
ggtctgggaaaatgg

SEQ ID NO: 1860257 - DNA, 15 bp, Homo sapiens
gtctgggaaaatggg

SEQ ID NO: 1860258 - DNA, 15 bp, Homo sapiens
tctgggaaaatggga

SEQ ID NO: 1860259 - DNA, 15 bp, Homo sapiens
ctgggaaaatgggac

SEQ ID NO: 1860260 - DNA, 15 bp, Homo sapiens
tgggaaaatgggaca

SEQ ID NO: 1860261 - DNA, 15 bp, Homo sapiens
gggaaaatgggacat

SEQ ID NO: 1860262 - DNA, 15 bp, Homo sapiens
ggaaaatgggacatt

SEQ ID NO: 1860263 - DNA, 15 bp, Homo sapiens
gaaaatgggacattt

SEQ ID NO: 1860264 - DNA, 15 bp, Homo sapiens
aaaatgggacatttt

SEQ ID NO: 1860265 - DNA, 15 bp, Homo sapiens
aaatgggacattttt

SEQ ID NO: 1860266 - DNA, 15 bp, Homo sapiens
aatgggacattttta

SEQ ID NO: 1860267 - DNA, 15 bp, Homo sapiens
atgggacatttttag

SEQ ID NO: 1860268 - DNA, 15 bp, Homo sapiens
tgggacatttttaga

SEQ ID NO: 1860269 - DNA, 15 bp, Homo sapiens
gggacatttttagaa

SEQ ID NO: 1860270 - DNA, 15 bp, Homo sapiens
ggacatttttagaag

SEQ ID NO: 1860271 - DNA, 15 bp, Homo sapiens
gacatttttagaagg

SEQ ID NO: 1860272 - DNA, 15 bp, Homo sapiens
acatttttagaaggc

SEQ ID NO: 1860273 - DNA, 15 bp, Homo sapiens
catttttagaaggca

SEQ ID NO: 1860274 - DNA, 15 bp, Homo sapiens
atttttagaaggcag

SEQ ID NO: 1860275 - DNA, 15 bp, Homo sapiens
tttttagaaggcagt

SEQ ID NO: 1860276 - DNA, 15 bp, Homo sapiens
ttttagaaggcagtg

SEQ ID NO: 1860277 - DNA, 15 bp, Homo sapiens
tttagaaggcagtga

SEQ ID NO: 1860278 - DNA, 15 bp, Homo sapiens
ttagaaggcagtgac

SEQ ID NO: 1860279 - DNA, 15 bp, Homo sapiens
tagaaggcagtgact

SEQ ID NO: 1860280 - DNA, 15 bp, Homo sapiens
agaaggcagtgactt

SEQ ID NO: 1860281 - DNA, 15 bp, Homo sapiens
gaaggcagtgacttg

SEQ ID NO: 1860282 - DNA, 15 bp, Homo sapiens
aaggcagtgacttgc

SEQ ID NO: 1860283 - DNA, 15 bp, Homo sapiens
aggcagtgacttgct

SEQ ID NO: 1860284 - DNA, 15 bp, Homo sapiens
ggcagtgacttgctt

SEQ ID NO: 1860285 - DNA, 15 bp, Homo sapiens
gcagtgacttgcttc

SEQ ID NO: 1860286 - DNA, 15 bp, Homo sapiens
cagtgacttgcttcc

SEQ ID NO: 1860287 - DNA, 15 bp, Homo sapiens
agtgacttgcttcca

SEQ ID NO: 1860288 - DNA, 15 bp, Homo sapiens
gtgacttgcttccag

SEQ ID NO: 1860289 - DNA, 15 bp, Homo sapiens
tgacttgcttccagg

SEQ ID NO: 1860290 - DNA, 15 bp, Homo sapiens
gacttgcttccagga

SEQ ID NO: 1860291 - DNA, 15 bp, Homo sapiens
acttgcttccaggag

SEQ ID NO: 1860292 - DNA, 15 bp, Homo sapiens
cttgcttccaggaga

SEQ ID NO: 1860293 - DNA, 15 bp, Homo sapiens
ttgcttccaggagat

SEQ ID NO: 1860294 - DNA, 15 bp, Homo sapiens
tgcttccaggagatt

SEQ ID NO: 1860295 - DNA, 15 bp, Homo sapiens
gcttccaggagattg

SEQ ID NO: 1860296 - DNA, 15 bp, Homo sapiens
cttccaggagattgt

SEQ ID NO: 1860297 - DNA, 15 bp, Homo sapiens
ttccaggagattgta

SEQ ID NO: 1860298 - DNA, 15 bp, Homo sapiens
tccaggagattgtac

SEQ ID NO: 1860299 - DNA, 15 bp, Homo sapiens
ccaggagattgtact

SEQ ID NO: 1860300 - DNA, 15 bp, Homo sapiens
caggagattgtactt

SEQ ID NO: 1860301 - DNA, 15 bp, Homo sapiens
aggagattgtacttt

SEQ ID NO: 1860302 - DNA, 15 bp, Homo sapiens
ggagattgtactttc

SEQ ID NO: 1860303 - DNA, 15 bp, Homo sapiens
gagattgtactttca

SEQ ID NO: 1860304 - DNA, 15 bp, Homo sapiens
agattgtactttcat

SEQ ID NO: 1860305 - DNA, 15 bp, Homo sapiens
gattgtactttcatt

SEQ ID NO: 1860306 - DNA, 15 bp, Homo sapiens
attgtactttcattt

SEQ ID NO: 1860307 - DNA, 15 bp, Homo sapiens
ttgtactttcatttt

SEQ ID NO: 1860308 - DNA, 15 bp, Homo sapiens
tgtactttcattttt

SEQ ID NO: 1860309 - DNA, 15 bp, Homo sapiens
gtactttcatttttg

SEQ ID NO: 1860310 - DNA, 15 bp, Homo sapiens
tactttcatttttga

SEQ ID NO: 1860311 - DNA, 15 bp, Homo sapiens
actttcatttttgac

SEQ ID NO: 1860312 - DNA, 15 bp, Homo sapiens
ctttcatttttgaca

SEQ ID NO: 1860313 - DNA, 15 bp, Homo sapiens
tttcatttttgacag

SEQ ID NO: 1860314 - DNA, 15 bp, Homo sapiens
ttcatttttgacagc

SEQ ID NO: 1860315 - DNA, 15 bp, Homo sapiens
tcatttttgacagct

SEQ ID NO: 1860316 - DNA, 15 bp, Homo sapiens
catttttgacagctg

SEQ ID NO: 1860317 - DNA, 15 bp, Homo sapiens
atttttgacagctgg

SEQ ID NO: 1860318 - DNA, 15 bp, Homo sapiens
tttttgacagctggc

SEQ ID NO: 1860319 - DNA, 15 bp, Homo sapiens
ttttgacagctggct

SEQ ID NO: 1860320 - DNA, 15 bp, Homo sapiens
tttgacagctggctc

SEQ ID NO: 1860321 - DNA, 15 bp, Homo sapiens
ttgacagctggctct

SEQ ID NO: 1860322 - DNA, 15 bp, Homo sapiens
tgacagctggctctc

SEQ ID NO: 1860323 - DNA, 15 bp, Homo sapiens
gacagctggctctct

SEQ ID NO: 1860324 - DNA, 15 bp, Homo sapiens
acagctggctctctg

SEQ ID NO: 1860325 - DNA, 15 bp, Homo sapiens
cagctggctctctga

SEQ ID NO: 1860326 - DNA, 15 bp, Homo sapiens
agctggctctctgag

SEQ ID NO: 1860327 - DNA, 15 bp, Homo sapiens
gctggctctctgaga

SEQ ID NO: 1860328 - DNA, 15 bp, Homo sapiens
ctggctctctgagac

SEQ ID NO: 1860329 - DNA, 15 bp, Homo sapiens
tggctctctgagaca

SEQ ID NO: 1860330 - DNA, 15 bp, Homo sapiens
ggctctctgagacag

SEQ ID NO: 1860331 - DNA, 15 bp, Homo sapiens
gctctctgagacaga

SEQ ID NO: 1860332 - DNA, 15 bp, Homo sapiens
ctctctgagacagat

SEQ ID NO: 1860333 - DNA, 15 bp, Homo sapiens
tctctgagacagatg

SEQ ID NO: 1860334 - DNA, 15 bp, Homo sapiens
ctctgagacagatgg

SEQ ID NO: 1860335 - DNA, 15 bp, Homo sapiens
tctgagacagatgga

SEQ ID NO: 1860336 - DNA, 15 bp, Homo sapiens
ctgagacagatggat

SEQ ID NO: 1860337 - DNA, 15 bp, Homo sapiens
tgagacagatggatt

SEQ ID NO: 1860338 - DNA, 15 bp, Homo sapiens
gagacagatggattg

SEQ ID NO: 1860339 - DNA, 15 bp, Homo sapiens
agacagatggattgc

SEQ ID NO: 1860340 - DNA, 15 bp, Homo sapiens
gacagatggattgct

SEQ ID NO: 1860341 - DNA, 15 bp, Homo sapiens
acagatggattgctg

SEQ ID NO: 1860342 - DNA, 15 bp, Homo sapiens
cagatggattgctgg

SEQ ID NO: 1860343 - DNA, 15 bp, Homo sapiens
agatggattgctggg

SEQ ID NO: 1860344 - DNA, 15 bp, Homo sapiens
gatggattgctgggt

SEQ ID NO: 1860345 - DNA, 15 bp, Homo sapiens
atggattgctgggtg

SEQ ID NO: 1860346 - DNA, 15 bp, Homo sapiens
tggattgctgggtgc

SEQ ID NO: 1860347 - DNA, 15 bp, Homo sapiens
ggattgctgggtgca

SEQ ID NO: 1860348 - DNA, 15 bp, Homo sapiens
gattgctgggtgcaa

SEQ ID NO: 1860349 - DNA, 15 bp, Homo sapiens
attgctgggtgcaag

SEQ ID NO: 1860350 - DNA, 15 bp, Homo sapiens
ttgctgggtgcaagc

SEQ ID NO: 1860351 - DNA, 15 bp, Homo sapiens
tgctgggtgcaagct

SEQ ID NO: 1860352 - DNA, 15 bp, Homo sapiens
gctgggtgcaagctt

SEQ ID NO: 1860353 - DNA, 15 bp, Homo sapiens
ctgggtgcaagcttg

SEQ ID NO: 1860354 - DNA, 15 bp, Homo sapiens
tgggtgcaagcttgt

SEQ ID NO: 1860355 - DNA, 15 bp, Homo sapiens
gggtgcaagcttgtg

SEQ ID NO: 1860356 - DNA, 15 bp, Homo sapiens
ggtgcaagcttgtgt

SEQ ID NO: 1860357 - DNA, 15 bp, Homo sapiens
gtgcaagcttgtgtg

SEQ ID NO: 1860358 - DNA, 15 bp, Homo sapiens
tgcaagcttgtgtgt

SEQ ID NO: 1860359 - DNA, 15 bp, Homo sapiens
gcaagcttgtgtgtg

SEQ ID NO: 1860360 - DNA, 15 bp, Homo sapiens
caagcttgtgtgtgt

SEQ ID NO: 1860361 - DNA, 15 bp, Homo sapiens
aagcttgtgtgtgta

SEQ ID NO: 1860362 - DNA, 15 bp, Homo sapiens
agcttgtgtgtgtat

SEQ ID NO: 1860363 - DNA, 15 bp, Homo sapiens
gcttgtgtgtgtatg

SEQ ID NO: 1860364 - DNA, 15 bp, Homo sapiens
cttgtgtgtgtatgc

SEQ ID NO: 1860365 - DNA, 15 bp, Homo sapiens
ttgtgtgtgtatgcg

SEQ ID NO: 1860366 - DNA, 15 bp, Homo sapiens
tgtgtgtgtatgcgt

SEQ ID NO: 1860367 - DNA, 15 bp, Homo sapiens
gtgtgtgtatgcgtg

SEQ ID NO: 1860368 - DNA, 15 bp, Homo sapiens
tgtgtgtatgcgtgt

SEQ ID NO: 1860369 - DNA, 15 bp, Homo sapiens
gtgtgtatgcgtgtg

SEQ ID NO: 1860370 - DNA, 15 bp, Homo sapiens
tatgcgtgtgtgtgt

SEQ ID NO: 1860371 - DNA, 15 bp, Homo sapiens
atgcgtgtgtgtgtg

SEQ ID NO: 1860372 - DNA, 15 bp, Homo sapiens
tgcgtgtgtgtgtgt

SEQ ID NO: 1860373 - DNA, 15 bp, Homo sapiens
gcgtgtgtgtgtgtt

SEQ ID NO: 1860374 - DNA, 15 bp, Homo sapiens
cgtgtgtgtgtgttg

SEQ ID NO: 1860375 - DNA, 15 bp, Homo sapiens
gtgtgtgtgttgtgg

SEQ ID NO: 1860376 - DNA, 15 bp, Homo sapiens
tgtgtgtgttgtggg

SEQ ID NO: 1860377 - DNA, 15 bp, Homo sapiens
gtgtgtgttgtgggg

SEQ ID NO: 1860378 - DNA, 15 bp, Homo sapiens
tgtgtgttgtggggg

SEQ ID NO: 1860379 - DNA, 15 bp, Homo sapiens
gtgtgttgtgggggt

SEQ ID NO: 1860380 - DNA, 15 bp, Homo sapiens
tgtgttgtgggggtg

SEQ ID NO: 1860381 - DNA, 15 bp, Homo sapiens
gtgttgtgggggtgg

SEQ ID NO: 1860382 - DNA, 15 bp, Homo sapiens
tgttgtgggggtggg

SEQ ID NO: 1860383 - DNA, 15 bp, Homo sapiens
gttgtgggggtgggt

SEQ ID NO: 1860384 - DNA, 15 bp, Homo sapiens
ttgtgggggtgggtg

SEQ ID NO: 1860385 - DNA, 15 bp, Homo sapiens
tgtgggggtgggtgt

SEQ ID NO: 1860386 - DNA, 15 bp, Homo sapiens
gtgggggtgggtgtg

SEQ ID NO: 1860387 - DNA, 15 bp, Homo sapiens
tgggggtgggtgtgt

SEQ ID NO: 1860388 - DNA, 15 bp, Homo sapiens
gggggtgggtgtgtg

SEQ ID NO: 1860389 - DNA, 15 bp, Homo sapiens
ggggtgggtgtgtgg

SEQ ID NO: 1860390 - DNA, 15 bp, Homo sapiens
gggtgggtgtgtggg

SEQ ID NO: 1860391 - DNA, 15 bp, Homo sapiens
ggtgggtgtgtgggt

SEQ ID NO: 1860392 - DNA, 15 bp, Homo sapiens
gtgggtgtgtgggtg

SEQ ID NO: 1860393 - DNA, 15 bp, Homo sapiens
tgggtgtgtgggtgg

SEQ ID NO: 1860394 - DNA, 15 bp, Homo sapiens
gggtgtgtgggtggg

SEQ ID NO: 1860395 - DNA, 15 bp, Homo sapiens
ggtgtgtgggtgggt

SEQ ID NO: 1860396 - DNA, 15 bp, Homo sapiens
gtgtgtgggtgggtg

SEQ ID NO: 1860397 - DNA, 15 bp, Homo sapiens
tgtgtgggtgggtgg

SEQ ID NO: 1860398 - DNA, 15 bp, Homo sapiens
gtgtgggtgggtggg

SEQ ID NO: 1860399 - DNA, 15 bp, Homo sapiens
tgtgggtgggtgggt

SEQ ID NO: 1860400 - DNA, 15 bp, Homo sapiens
gtgggtgggtgggtt

SEQ ID NO: 1860401 - DNA, 15 bp, Homo sapiens
tgggtgggtgggttt

SEQ ID NO: 1860402 - DNA, 15 bp, Homo sapiens
gggtgggtgggtttt

SEQ ID NO: 1860403 - DNA, 15 bp, Homo sapiens
ggtgggtgggttttg

SEQ ID NO: 1860404 - DNA, 15 bp, Homo sapiens
gtgggtgggttttgc

SEQ ID NO: 1860405 - DNA, 15 bp, Homo sapiens
tgggtgggttttgcc

SEQ ID NO: 1860406 - DNA, 15 bp, Homo sapiens
gggtgggttttgccg

SEQ ID NO: 1860407 - DNA, 15 bp, Homo sapiens
ggtgggttttgccgc

SEQ ID NO: 1860408 - DNA, 15 bp, Homo sapiens
gtgggttttgccgca

SEQ ID NO: 1860409 - DNA, 15 bp, Homo sapiens
tgggttttgccgcag

SEQ ID NO: 1860410 - DNA, 15 bp, Homo sapiens
gggttttgccgcaga

SEQ ID NO: 1860411 - DNA, 15 bp, Homo sapiens
ggttttgccgcagac

SEQ ID NO: 1860412 - DNA, 15 bp, Homo sapiens
gttttgccgcagacg

SEQ ID NO: 1860413 - DNA, 15 bp, Homo sapiens
ttttgccgcagacgt

SEQ ID NO: 1860414 - DNA, 15 bp, Homo sapiens
tttgccgcagacgta

SEQ ID NO: 1860415 - DNA, 15 bp, Homo sapiens
ttgccgcagacgtac

SEQ ID NO: 1860416 - DNA, 15 bp, Homo sapiens
tgccgcagacgtaca

SEQ ID NO: 1860417 - DNA, 15 bp, Homo sapiens
gccgcagacgtacag

SEQ ID NO: 1860418 - DNA, 15 bp, Homo sapiens
ccgcagacgtacaga

SEQ ID NO: 1860419 - DNA, 15 bp, Homo sapiens
cgcagacgtacagat

SEQ ID NO: 1860420 - DNA, 15 bp, Homo sapiens
gcagacgtacagata

SEQ ID NO: 1860421 - DNA, 15 bp, Homo sapiens
cagacgtacagatag

SEQ ID NO: 1860422 - DNA, 15 bp, Homo sapiens
agacgtacagataga

SEQ ID NO: 1860423 - DNA, 15 bp, Homo sapiens
gacgtacagatagac

SEQ ID NO: 1860424 - DNA, 15 bp, Homo sapiens
acgtacagatagaca

SEQ ID NO: 1860425 - DNA, 15 bp, Homo sapiens
cgtacagatagacaa

SEQ ID NO: 1860426 - DNA, 15 bp, Homo sapiens
gtacagatagacaat

SEQ ID NO: 1860427 - DNA, 15 bp, Homo sapiens
tacagatagacaatc

SEQ ID NO: 1860428 - DNA, 15 bp, Homo sapiens
acagatagacaatcc

SEQ ID NO: 1860429 - DNA, 15 bp, Homo sapiens
cagatagacaatccc

SEQ ID NO: 1860430 - DNA, 15 bp, Homo sapiens
agatagacaatcccg

SEQ ID NO: 1860431 - DNA, 15 bp, Homo sapiens
gatagacaatcccgt

SEQ ID NO: 1860432 - DNA, 15 bp, Homo sapiens
atagacaatcccgtg

SEQ ID NO: 1860433 - DNA, 15 bp, Homo sapiens
tagacaatcccgtgc

SEQ ID NO: 1860434 - DNA, 15 bp, Homo sapiens
agacaatcccgtgcg

SEQ ID NO: 1860435 - DNA, 15 bp, Homo sapiens
gacaatcccgtgcgc

SEQ ID NO: 1860436 - DNA, 15 bp, Homo sapiens
acaatcccgtgcgca

SEQ ID NO: 1860437 - DNA, 15 bp, Homo sapiens
caatcccgtgcgcaa

SEQ ID NO: 1860438 - DNA, 15 bp, Homo sapiens
aatcccgtgcgcaaa

SEQ ID NO: 1860439 - DNA, 15 bp, Homo sapiens
atcccgtgcgcaaac

SEQ ID NO: 1860440 - DNA, 15 bp, Homo sapiens
tcccgtgcgcaaaca

SEQ ID NO: 1860441 - DNA, 15 bp, Homo sapiens
cccgtgcgcaaacac

SEQ ID NO: 1860442 - DNA, 15 bp, Homo sapiens
ccgtgcgcaaacaca

SEQ ID NO: 1860443 - DNA, 15 bp, Homo sapiens
cgtgcgcaaacacat

SEQ ID NO: 1860444 - DNA, 15 bp, Homo sapiens
gtgcgcaaacacatg

SEQ ID NO: 1860445 - DNA, 15 bp, Homo sapiens
tgcgcaaacacatga

SEQ ID NO: 1860446 - DNA, 15 bp, Homo sapiens
gcgcaaacacatgag

SEQ ID NO: 1860447 - DNA, 15 bp, Homo sapiens
cgcaaacacatgaga

SEQ ID NO: 1860448 - DNA, 15 bp, Homo sapiens
gcaaacacatgagag

SEQ ID NO: 1860449 - DNA, 15 bp, Homo sapiens
caaacacatgagagc

SEQ ID NO: 1860450 - DNA, 15 bp, Homo sapiens
aaacacatgagagcg

SEQ ID NO: 1860451 - DNA, 15 bp, Homo sapiens
aacacatgagagcgt

SEQ ID NO: 1860452 - DNA, 15 bp, Homo sapiens
acacatgagagcgtg

SEQ ID NO: 1860453 - DNA, 15 bp, Homo sapiens
cacatgagagcgtgc

SEQ ID NO: 1860454 - DNA, 15 bp, Homo sapiens
acatgagagcgtgcg

SEQ ID NO: 1860455 - DNA, 15 bp, Homo sapiens
catgagagcgtgcgg

SEQ ID NO: 1860456 - DNA, 15 bp, Homo sapiens
atgagagcgtgcgga

SEQ ID NO: 1860457 - DNA, 15 bp, Homo sapiens
tgagagcgtgcggat

SEQ ID NO: 1860458 - DNA, 15 bp, Homo sapiens
gagagcgtgcggatg

SEQ ID NO: 1860459 - DNA, 15 bp, Homo sapiens
agagcgtgcggatgc

SEQ ID NO: 1860460 - DNA, 15 bp, Homo sapiens
gagcgtgcggatgcc

SEQ ID NO: 1860461 - DNA, 15 bp, Homo sapiens
agcgtgcggatgccc

SEQ ID NO: 1860462 - DNA, 15 bp, Homo sapiens
gcgtgcggatgccca

SEQ ID NO: 1860463 - DNA, 15 bp, Homo sapiens
cgtgcggatgcccac

SEQ ID NO: 1860464 - DNA, 15 bp, Homo sapiens
gtgcggatgcccaca

SEQ ID NO: 1860465 - DNA, 15 bp, Homo sapiens
tgcggatgcccacag

SEQ ID NO: 1860466 - DNA, 15 bp, Homo sapiens
gcggatgcccacagg

SEQ ID NO: 1860467 - DNA, 15 bp, Homo sapiens
cggatgcccacaggc

SEQ ID NO: 1860468 - DNA, 15 bp, Homo sapiens
ggatgcccacaggca

SEQ ID NO: 1860469 - DNA, 15 bp, Homo sapiens
gatgcccacaggcag

SEQ ID NO: 1860470 - DNA, 15 bp, Homo sapiens
atgcccacaggcagg

SEQ ID NO: 1860471 - DNA, 15 bp, Homo sapiens
tgcccacaggcaggc

SEQ ID NO: 1860472 - DNA, 15 bp, Homo sapiens
gcccacaggcaggct

SEQ ID NO: 1860473 - DNA, 15 bp, Homo sapiens
cccacaggcaggctc

SEQ ID NO: 1860474 - DNA, 15 bp, Homo sapiens
ccacaggcaggctct

SEQ ID NO: 1860475 - DNA, 15 bp, Homo sapiens
cacaggcaggctctg

SEQ ID NO: 1860476 - DNA, 15 bp, Homo sapiens
acaggcaggctctgg

SEQ ID NO: 1860477 - DNA, 15 bp, Homo sapiens
caggcaggctctggg

SEQ ID NO: 1860478 - DNA, 15 bp, Homo sapiens
aggcaggctctggga

SEQ ID NO: 1860479 - DNA, 15 bp, Homo sapiens
ggcaggctctgggat

SEQ ID NO: 1860480 - DNA, 15 bp, Homo sapiens
gcaggctctgggata

SEQ ID NO: 1860481 - DNA, 15 bp, Homo sapiens
caggctctgggatag

SEQ ID NO: 1860482 - DNA, 15 bp, Homo sapiens
aggctctgggatagg

SEQ ID NO: 1860483 - DNA, 15 bp, Homo sapiens
ggctctgggataggg

SEQ ID NO: 1860484 - DNA, 15 bp, Homo sapiens
gctctgggatagggt

SEQ ID NO: 1860485 - DNA, 15 bp, Homo sapiens
ctctgggatagggtg

SEQ ID NO: 1860486 - DNA, 15 bp, Homo sapiens
tctgggatagggtgg

SEQ ID NO: 1860487 - DNA, 15 bp, Homo sapiens
ctgggatagggtggg

SEQ ID NO: 1860488 - DNA, 15 bp, Homo sapiens
tgggatagggtgggt

SEQ ID NO: 1860489 - DNA, 15 bp, Homo sapiens
gggatagggtgggtc

SEQ ID NO: 1860490 - DNA, 15 bp, Homo sapiens
ggatagggtgggtcc

SEQ ID NO: 1860491 - DNA, 15 bp, Homo sapiens
gatagggtgggtccc

SEQ ID NO: 1860492 - DNA, 15 bp, Homo sapiens
atagggtgggtccct

SEQ ID NO: 1860493 - DNA, 15 bp, Homo sapiens
tagggtgggtccctg

SEQ ID NO: 1860494 - DNA, 15 bp, Homo sapiens
agggtgggtccctgt

SEQ ID NO: 1860495 - DNA, 15 bp, Homo sapiens
gggtgggtccctgtc

SEQ ID NO: 1860496 - DNA, 15 bp, Homo sapiens
ggtgggtccctgtcg

SEQ ID NO: 1860497 - DNA, 15 bp, Homo sapiens
gtgggtccctgtcgc

SEQ ID NO: 1860498 - DNA, 15 bp, Homo sapiens
tgggtccctgtcgct

SEQ ID NO: 1860499 - DNA, 15 bp, Homo sapiens
gggtccctgtcgctg

SEQ ID NO: 1860500 - DNA, 15 bp, Homo sapiens
ggtccctgtcgctgg

SEQ ID NO: 1860501 - DNA, 15 bp, Homo sapiens
gtccctgtcgctggg

SEQ ID NO: 1860502 - DNA, 15 bp, Homo sapiens
tccctgtcgctgggg

SEQ ID NO: 1860503 - DNA, 15 bp, Homo sapiens
ccctgtcgctggggt

SEQ ID NO: 1860504 - DNA, 15 bp, Homo sapiens
cctgtcgctggggtg

SEQ ID NO: 1860505 - DNA, 15 bp, Homo sapiens
ctgtcgctggggtgg

SEQ ID NO: 1860506 - DNA, 15 bp, Homo sapiens
tgtcgctggggtggg

SEQ ID NO: 1860507 - DNA, 15 bp, Homo sapiens
gtcgctggggtgggt

SEQ ID NO: 1860508 - DNA, 15 bp, Homo sapiens
tcgctggggtgggtt

SEQ ID NO: 1860509 - DNA, 15 bp, Homo sapiens
cgctggggtgggttg

SEQ ID NO: 1860510 - DNA, 15 bp, Homo sapiens
gctggggtgggttga

SEQ ID NO: 1860511 - DNA, 15 bp, Homo sapiens
ctggggtgggttgat

SEQ ID NO: 1860512 - DNA, 15 bp, Homo sapiens
tggggtgggttgatg

SEQ ID NO: 1860513 - DNA, 15 bp, Homo sapiens
ggggtgggttgatgt

SEQ ID NO: 1860514 - DNA, 15 bp, Homo sapiens
gggtgggttgatgtc

SEQ ID NO: 1860515 - DNA, 15 bp, Homo sapiens
ggtgggttgatgtca

SEQ ID NO: 1860516 - DNA, 15 bp, Homo sapiens
gtgggttgatgtcag

SEQ ID NO: 1860517 - DNA, 15 bp, Homo sapiens
tgggttgatgtcagg

SEQ ID NO: 1860518 - DNA, 15 bp, Homo sapiens
gggttgatgtcaggg

SEQ ID NO: 1860519 - DNA, 15 bp, Homo sapiens
ggttgatgtcagggc

SEQ ID NO: 1860520 - DNA, 15 bp, Homo sapiens
gttgatgtcagggcg

SEQ ID NO: 1860521 - DNA, 15 bp, Homo sapiens
ttgatgtcagggcgg

SEQ ID NO: 1860522 - DNA, 15 bp, Homo sapiens
tgatgtcagggcggc

SEQ ID NO: 1860523 - DNA, 15 bp, Homo sapiens
gatgtcagggcggcc

SEQ ID NO: 1860524 - DNA, 15 bp, Homo sapiens
atgtcagggcggcct

SEQ ID NO: 1860525 - DNA, 15 bp, Homo sapiens
tgtcagggcggcctc

SEQ ID NO: 1860526 - DNA, 15 bp, Homo sapiens
gtcagggcggcctct

SEQ ID NO: 1860527 - DNA, 15 bp, Homo sapiens
tcagggcggcctctc

SEQ ID NO: 1860528 - DNA, 15 bp, Homo sapiens
cagggcggcctctcc

SEQ ID NO: 1860529 - DNA, 15 bp, Homo sapiens
agggcggcctctcca

SEQ ID NO: 1860530 - DNA, 15 bp, Homo sapiens
gggcggcctctccaa

SEQ ID NO: 1860531 - DNA, 15 bp, Homo sapiens
ggcggcctctccaag

SEQ ID NO: 1860532 - DNA, 15 bp, Homo sapiens
gcggcctctccaaga

SEQ ID NO: 1860533 - DNA, 15 bp, Homo sapiens
cggcctctccaagag

SEQ ID NO: 1860534 - DNA, 15 bp, Homo sapiens
ggcctctccaagagg

SEQ ID NO: 1860535 - DNA, 15 bp, Homo sapiens
gcctctccaagaggt

SEQ ID NO: 1860536 - DNA, 15 bp, Homo sapiens
cctctccaagaggtt

SEQ ID NO: 1860537 - DNA, 15 bp, Homo sapiens
ctctccaagaggttg

SEQ ID NO: 1860538 - DNA, 15 bp, Homo sapiens
tctccaagaggttgt

SEQ ID NO: 1860539 - DNA, 15 bp, Homo sapiens
ctccaagaggttgtg

SEQ ID NO: 1860540 - DNA, 15 bp, Homo sapiens
tccaagaggttgtgg

SEQ ID NO: 1860541 - DNA, 15 bp, Homo sapiens
ccaagaggttgtgga

SEQ ID NO: 1860542 - DNA, 15 bp, Homo sapiens
caagaggttgtggac

SEQ ID NO: 1860543 - DNA, 15 bp, Homo sapiens
aagaggttgtggact

SEQ ID NO: 1860544 - DNA, 15 bp, Homo sapiens
agaggttgtggactt

SEQ ID NO: 1860545 - DNA, 15 bp, Homo sapiens
gaggttgtggacttg

SEQ ID NO: 1860546 - DNA, 15 bp, Homo sapiens
aggttgtggacttgt

SEQ ID NO: 1860547 - DNA, 15 bp, Homo sapiens
ggttgtggacttgtg

SEQ ID NO: 1860548 - DNA, 15 bp, Homo sapiens
gttgtggacttgtgg

SEQ ID NO: 1860549 - DNA, 15 bp, Homo sapiens
ttgtggacttgtggg

SEQ ID NO: 1860550 - DNA, 15 bp, Homo sapiens
tgtggacttgtgggg

SEQ ID NO: 1860551 - DNA, 15 bp, Homo sapiens
gtggacttgtggggt

SEQ ID NO: 1860552 - DNA, 15 bp, Homo sapiens
tggacttgtggggtg

SEQ ID NO: 1860553 - DNA, 15 bp, Homo sapiens
ggacttgtggggtgg

SEQ ID NO: 1860554 - DNA, 15 bp, Homo sapiens
gacttgtggggtgga

SEQ ID NO: 1860555 - DNA, 15 bp, Homo sapiens
acttgtggggtggag

SEQ ID NO: 1860556 - DNA, 15 bp, Homo sapiens
cttgtggggtggagt

SEQ ID NO: 1860557 - DNA, 15 bp, Homo sapiens
ttgtggggtggagtt

SEQ ID NO: 1860558 - DNA, 15 bp, Homo sapiens
tgtggggtggagttt

SEQ ID NO: 1860559 - DNA, 15 bp, Homo sapiens
gtggggtggagtttg

SEQ ID NO: 1860560 - DNA, 15 bp, Homo sapiens
tggggtggagtttgt

SEQ ID NO: 1860561 - DNA, 15 bp, Homo sapiens
ggggtggagtttgtg

SEQ ID NO: 1860562 - DNA, 15 bp, Homo sapiens
gggtggagtttgtgg

SEQ ID NO: 1860563 - DNA, 15 bp, Homo sapiens
ggtggagtttgtgga

SEQ ID NO: 1860564 - DNA, 15 bp, Homo sapiens
gtggagtttgtggat

SEQ ID NO: 1860565 - DNA, 15 bp, Homo sapiens
tggagtttgtggatt

SEQ ID NO: 1860566 - DNA, 15 bp, Homo sapiens
ggagtttgtggattg

SEQ ID NO: 1860567 - DNA, 15 bp, Homo sapiens
gagtttgtggattga

SEQ ID NO: 1860568 - DNA, 15 bp, Homo sapiens
agtttgtggattgat

SEQ ID NO: 1860569 - DNA, 15 bp, Homo sapiens
gtttgtggattgatt

SEQ ID NO: 1860570 - DNA, 15 bp, Homo sapiens
tttgtggattgattc

SEQ ID NO: 1860571 - DNA, 15 bp, Homo sapiens
ttgtggattgattct

SEQ ID NO: 1860572 - DNA, 15 bp, Homo sapiens
tgtggattgattctg

SEQ ID NO: 1860573 - DNA, 15 bp, Homo sapiens
gtggattgattctgc

SEQ ID NO: 1860574 - DNA, 15 bp, Homo sapiens
tggattgattctgct

SEQ ID NO: 1860575 - DNA, 15 bp, Homo sapiens
ggattgattctgctt

SEQ ID NO: 1860576 - DNA, 15 bp, Homo sapiens
gattgattctgcttt

SEQ ID NO: 1860577 - DNA, 15 bp, Homo sapiens
attgattctgctttg

SEQ ID NO: 1860578 - DNA, 15 bp, Homo sapiens
ttgattctgctttgt

SEQ ID NO: 1860579 - DNA, 15 bp, Homo sapiens
tgattctgctttgtg

SEQ ID NO: 1860580 - DNA, 15 bp, Homo sapiens
gattctgctttgtga

SEQ ID NO: 1860581 - DNA, 15 bp, Homo sapiens
attctgctttgtgat

SEQ ID NO: 1860582 - DNA, 15 bp, Homo sapiens
ttctgctttgtgatt

SEQ ID NO: 1860583 - DNA, 15 bp, Homo sapiens
tctgctttgtgattt

SEQ ID NO: 1860584 - DNA, 15 bp, Homo sapiens
ctgctttgtgatttg

SEQ ID NO: 1860585 - DNA, 15 bp, Homo sapiens
tgctttgtgatttgg

SEQ ID NO: 1860586 - DNA, 15 bp, Homo sapiens
gctttgtgatttggc

SEQ ID NO: 1860587 - DNA, 15 bp, Homo sapiens
ctttgtgatttggca

SEQ ID NO: 1860588 - DNA, 15 bp, Homo sapiens
tttgtgatttggcag

SEQ ID NO: 1860589 - DNA, 15 bp, Homo sapiens
ttgtgatttggcagt

SEQ ID NO: 1860590 - DNA, 15 bp, Homo sapiens
tgtgatttggcagtc

SEQ ID NO: 1860591 - DNA, 15 bp, Homo sapiens
gtgatttggcagtct

SEQ ID NO: 1860592 - DNA, 15 bp, Homo sapiens
tgatttggcagtctg

SEQ ID NO: 1860593 - DNA, 15 bp, Homo sapiens
gatttggcagtctgt

SEQ ID NO: 1860594 - DNA, 15 bp, Homo sapiens
atttggcagtctgtg

SEQ ID NO: 1860595 - DNA, 15 bp, Homo sapiens
tttggcagtctgtgc

SEQ ID NO: 1860596 - DNA, 15 bp, Homo sapiens
ttggcagtctgtgcc

SEQ ID NO: 1860597 - DNA, 15 bp, Homo sapiens
tggcagtctgtgcct

SEQ ID NO: 1860598 - DNA, 15 bp, Homo sapiens
ggcagtctgtgcctg

SEQ ID NO: 1860599 - DNA, 15 bp, Homo sapiens
gcagtctgtgcctga

SEQ ID NO: 1860600 - DNA, 15 bp, Homo sapiens
cagtctgtgcctgac

SEQ ID NO: 1860601 - DNA, 15 bp, Homo sapiens
agtctgtgcctgact

SEQ ID NO: 1860602 - DNA, 15 bp, Homo sapiens
gtctgtgcctgactc

SEQ ID NO: 1860603 - DNA, 15 bp, Homo sapiens
tctgtgcctgactct

SEQ ID NO: 1860604 - DNA, 15 bp, Homo sapiens
ctgtgcctgactctc

SEQ ID NO: 1860605 - DNA, 15 bp, Homo sapiens
tgtgcctgactctct

SEQ ID NO: 1860606 - DNA, 15 bp, Homo sapiens
gtgcctgactctctg

SEQ ID NO: 1860607 - DNA, 15 bp, Homo sapiens
tgcctgactctctgg

SEQ ID NO: 1860608 - DNA, 15 bp, Homo sapiens
gcctgactctctggg

SEQ ID NO: 1860609 - DNA, 15 bp, Homo sapiens
cctgactctctggga

SEQ ID NO: 1860610 - DNA, 15 bp, Homo sapiens
ctgactctctgggat

SEQ ID NO: 1860611 - DNA, 15 bp, Homo sapiens
tgactctctgggatg

SEQ ID NO: 1860612 - DNA, 15 bp, Homo sapiens
gactctctgggatgg

SEQ ID NO: 1860613 - DNA, 15 bp, Homo sapiens
actctctgggatggg

SEQ ID NO: 1860614 - DNA, 15 bp, Homo sapiens
ctctctgggatgggt

SEQ ID NO: 1860615 - DNA, 15 bp, Homo sapiens
tctctgggatgggtg

SEQ ID NO: 1860616 - DNA, 15 bp, Homo sapiens
ctctgggatgggtgt

SEQ ID NO: 1860617 - DNA, 15 bp, Homo sapiens
tctgggatgggtgtc

SEQ ID NO: 1860618 - DNA, 15 bp, Homo sapiens
ctgggatgggtgtct

SEQ ID NO: 1860619 - DNA, 15 bp, Homo sapiens
tgggatgggtgtctt

SEQ ID NO: 1860620 - DNA, 15 bp, Homo sapiens
gggatgggtgtcttt

SEQ ID NO: 1860621 - DNA, 15 bp, Homo sapiens
ggatgggtgtctttt

SEQ ID NO: 1860622 - DNA, 15 bp, Homo sapiens
gatgggtgtcttttg

SEQ ID NO: 1860623 - DNA, 15 bp, Homo sapiens
atgggtgtcttttga

SEQ ID NO: 1860624 - DNA, 15 bp, Homo sapiens
tgggtgtcttttgaa

SEQ ID NO: 1860625 - DNA, 15 bp, Homo sapiens
gggtgtcttttgaaa

SEQ ID NO: 1860626 - DNA, 15 bp, Homo sapiens
ggtgtcttttgaaag

SEQ ID NO: 1860627 - DNA, 15 bp, Homo sapiens
gtgtcttttgaaagg

SEQ ID NO: 1860628 - DNA, 15 bp, Homo sapiens
tgtcttttgaaaggc

SEQ ID NO: 1860629 - DNA, 15 bp, Homo sapiens
gtcttttgaaaggca

SEQ ID NO: 1860630 - DNA, 15 bp, Homo sapiens
tcttttgaaaggcat

SEQ ID NO: 1860631 - DNA, 15 bp, Homo sapiens
cttttgaaaggcatg

SEQ ID NO: 1860632 - DNA, 15 bp, Homo sapiens
ttttgaaaggcatgc

SEQ ID NO: 1860633 - DNA, 15 bp, Homo sapiens
tttgaaaggcatgca

SEQ ID NO: 1860634 - DNA, 15 bp, Homo sapiens
ttgaaaggcatgcaa

SEQ ID NO: 1860635 - DNA, 15 bp, Homo sapiens
tgaaaggcatgcaac

SEQ ID NO: 1860636 - DNA, 15 bp, Homo sapiens
gaaaggcatgcaact

SEQ ID NO: 1860637 - DNA, 15 bp, Homo sapiens
aaaggcatgcaactc

SEQ ID NO: 1860638 - DNA, 15 bp, Homo sapiens
aaggcatgcaactcc

SEQ ID NO: 1860639 - DNA, 15 bp, Homo sapiens
aggcatgcaactcca

SEQ ID NO: 1860640 - DNA, 15 bp, Homo sapiens
ggcatgcaactccag

SEQ ID NO: 1860641 - DNA, 15 bp, Homo sapiens
gcatgcaactccaga

SEQ ID NO: 1860642 - DNA, 15 bp, Homo sapiens
catgcaactccagaa

SEQ ID NO: 1860643 - DNA, 15 bp, Homo sapiens
atgcaactccagaac

SEQ ID NO: 1860644 - DNA, 15 bp, Homo sapiens
tgcaactccagaaca

SEQ ID NO: 1860645 - DNA, 15 bp, Homo sapiens
gcaactccagaacag

SEQ ID NO: 1860646 - DNA, 15 bp, Homo sapiens
caactccagaacagg

SEQ ID NO: 1860647 - DNA, 15 bp, Homo sapiens
aactccagaacaggt

SEQ ID NO: 1860648 - DNA, 15 bp, Homo sapiens
actccagaacaggtc

SEQ ID NO: 1860649 - DNA, 15 bp, Homo sapiens
ctccagaacaggtcc

SEQ ID NO: 1860650 - DNA, 15 bp, Homo sapiens
tccagaacaggtcct

SEQ ID NO: 1860651 - DNA, 15 bp, Homo sapiens
ccagaacaggtcctt

SEQ ID NO: 1860652 - DNA, 15 bp, Homo sapiens
cagaacaggtccttg

SEQ ID NO: 1860653 - DNA, 15 bp, Homo sapiens
agaacaggtccttgc

SEQ ID NO: 1860654 - DNA, 15 bp, Homo sapiens
gaacaggtccttgct

SEQ ID NO: 1860655 - DNA, 15 bp, Homo sapiens
aacaggtccttgctg

SEQ ID NO: 1860656 - DNA, 15 bp, Homo sapiens
acaggtccttgctgc

SEQ ID NO: 1860657 - DNA, 15 bp, Homo sapiens
caggtccttgctgct

SEQ ID NO: 1860658 - DNA, 15 bp, Homo sapiens
aggtccttgctgctg

SEQ ID NO: 1860659 - DNA, 15 bp, Homo sapiens
ggtccttgctgctgc

SEQ ID NO: 1860660 - DNA, 15 bp, Homo sapiens
gtccttgctgctgct

SEQ ID NO: 1860661 - DNA, 15 bp, Homo sapiens
tccttgctgctgctt

SEQ ID NO: 1860662 - DNA, 15 bp, Homo sapiens
ccttgctgctgcttg

SEQ ID NO: 1860663 - DNA, 15 bp, Homo sapiens
cttgctgctgcttgg

SEQ ID NO: 1860664 - DNA, 15 bp, Homo sapiens
ttgctgctgcttgga

SEQ ID NO: 1860665 - DNA, 15 bp, Homo sapiens
tgctgctgcttggac

SEQ ID NO: 1860666 - DNA, 15 bp, Homo sapiens
gctgctgcttggaca

SEQ ID NO: 1860667 - DNA, 15 bp, Homo sapiens
ctgctgcttggacat

SEQ ID NO: 1860668 - DNA, 15 bp, Homo sapiens
tgctgcttggacatg

SEQ ID NO: 1860669 - DNA, 15 bp, Homo sapiens
gctgcttggacatgg

SEQ ID NO: 1860670 - DNA, 15 bp, Homo sapiens
ctgcttggacatgga

SEQ ID NO: 1860671 - DNA, 15 bp, Homo sapiens
tgcttggacatggat

SEQ ID NO: 1860672 - DNA, 15 bp, Homo sapiens
gcttggacatggatg

SEQ ID NO: 1860673 - DNA, 15 bp, Homo sapiens
cttggacatggatgt

SEQ ID NO: 1860674 - DNA, 15 bp, Homo sapiens
ttggacatggatgtg

SEQ ID NO: 1860675 - DNA, 15 bp, Homo sapiens
tggacatggatgtgt

SEQ ID NO: 1860676 - DNA, 15 bp, Homo sapiens
ggacatggatgtgtc

SEQ ID NO: 1860677 - DNA, 15 bp, Homo sapiens
gacatggatgtgtca

SEQ ID NO: 1860678 - DNA, 15 bp, Homo sapiens
acatggatgtgtcat

SEQ ID NO: 1860679 - DNA, 15 bp, Homo sapiens
catggatgtgtcatg

SEQ ID NO: 1860680 - DNA, 15 bp, Homo sapiens
atggatgtgtcatgg

SEQ ID NO: 1860681 - DNA, 15 bp, Homo sapiens
tggatgtgtcatggc

SEQ ID NO: 1860682 - DNA, 15 bp, Homo sapiens
ggatgtgtcatggct

SEQ ID NO: 1860683 - DNA, 15 bp, Homo sapiens
gatgtgtcatggctc

SEQ ID NO: 1860684 - DNA, 15 bp, Homo sapiens
atgtgtcatggctca

SEQ ID NO: 1860685 - DNA, 15 bp, Homo sapiens
tgtgtcatggctcag

SEQ ID NO: 1860686 - DNA, 15 bp, Homo sapiens
gtgtcatggctcagg

SEQ ID NO: 1860687 - DNA, 15 bp, Homo sapiens
tgtcatggctcagga

SEQ ID NO: 1860688 - DNA, 15 bp, Homo sapiens
gtcatggctcaggaa

SEQ ID NO: 1860689 - DNA, 15 bp, Homo sapiens
tcatggctcaggaag

SEQ ID NO: 1860690 - DNA, 15 bp, Homo sapiens
catggctcaggaaga

SEQ ID NO: 1860691 - DNA, 15 bp, Homo sapiens
atggctcaggaagat

SEQ ID NO: 1860692 - DNA, 15 bp, Homo sapiens
tggctcaggaagatc

SEQ ID NO: 1860693 - DNA, 15 bp, Homo sapiens
ggctcaggaagatca

SEQ ID NO: 1860694 - DNA, 15 bp, Homo sapiens
gctcaggaagatcac

SEQ ID NO: 1860695 - DNA, 15 bp, Homo sapiens
ctcaggaagatcacc

SEQ ID NO: 1860696 - DNA, 15 bp, Homo sapiens
tcaggaagatcacct

SEQ ID NO: 1860697 - DNA, 15 bp, Homo sapiens
caggaagatcacctg

SEQ ID NO: 1860698 - DNA, 15 bp, Homo sapiens
aggaagatcacctgg

SEQ ID NO: 1860699 - DNA, 15 bp, Homo sapiens
ggaagatcacctggg

SEQ ID NO: 1860700 - DNA, 15 bp, Homo sapiens
gaagatcacctggga

SEQ ID NO: 1860701 - DNA, 15 bp, Homo sapiens
aagatcacctgggag

SEQ ID NO: 1860702 - DNA, 15 bp, Homo sapiens
agatcacctgggaga

SEQ ID NO: 1860703 - DNA, 15 bp, Homo sapiens
gatcacctgggagag

SEQ ID NO: 1860704 - DNA, 15 bp, Homo sapiens
atcacctgggagagg

SEQ ID NO: 1860705 - DNA, 15 bp, Homo sapiens
tcacctgggagaggt

SEQ ID NO: 1860706 - DNA, 15 bp, Homo sapiens
cacctgggagaggtc

SEQ ID NO: 1860707 - DNA, 15 bp, Homo sapiens
acctgggagaggtct

SEQ ID NO: 1860708 - DNA, 15 bp, Homo sapiens
cctgggagaggtctg

SEQ ID NO: 1860709 - DNA, 15 bp, Homo sapiens
ctgggagaggtctga

SEQ ID NO: 1860710 - DNA, 15 bp, Homo sapiens
tgggagaggtctgat

SEQ ID NO: 1860711 - DNA, 15 bp, Homo sapiens
gggagaggtctgatg

SEQ ID NO: 1860712 - DNA, 15 bp, Homo sapiens
ggagaggtctgatgt

SEQ ID NO: 1860713 - DNA, 15 bp, Homo sapiens
gagaggtctgatgta

SEQ ID NO: 1860714 - DNA, 15 bp, Homo sapiens
agaggtctgatgtag

SEQ ID NO: 1860715 - DNA, 15 bp, Homo sapiens
gaggtctgatgtagc

SEQ ID NO: 1860716 - DNA, 15 bp, Homo sapiens
aggtctgatgtagct

SEQ ID NO: 1860717 - DNA, 15 bp, Homo sapiens
ggtctgatgtagctg

SEQ ID NO: 1860718 - DNA, 15 bp, Homo sapiens
gtctgatgtagctgg

SEQ ID NO: 1860719 - DNA, 15 bp, Homo sapiens
tctgatgtagctggg

SEQ ID NO: 1860720 - DNA, 15 bp, Homo sapiens
ctgatgtagctggga

SEQ ID NO: 1860721 - DNA, 15 bp, Homo sapiens
tgatgtagctgggaa

SEQ ID NO: 1860722 - DNA, 15 bp, Homo sapiens
gatgtagctgggaag

SEQ ID NO: 1860723 - DNA, 15 bp, Homo sapiens
atgtagctgggaagc

SEQ ID NO: 1860724 - DNA, 15 bp, Homo sapiens
tgtagctgggaagcc

SEQ ID NO: 1860725 - DNA, 15 bp, Homo sapiens
gtagctgggaagcct

SEQ ID NO: 1860726 - DNA, 15 bp, Homo sapiens
tagctgggaagcctc

SEQ ID NO: 1860727 - DNA, 15 bp, Homo sapiens
agctgggaagcctct

SEQ ID NO: 1860728 - DNA, 15 bp, Homo sapiens
gctgggaagcctcta

SEQ ID NO: 1860729 - DNA, 15 bp, Homo sapiens
ctgggaagcctctag

SEQ ID NO: 1860730 - DNA, 15 bp, Homo sapiens
tgggaagcctctagg

SEQ ID NO: 1860731 - DNA, 15 bp, Homo sapiens
gggaagcctctaggc

SEQ ID NO: 1860732 - DNA, 15 bp, Homo sapiens
gaagcctctaggctc

SEQ ID NO: 1860733 - DNA, 15 bp, Homo sapiens
aagcctctaggctca

SEQ ID NO: 1860734 - DNA, 15 bp, Homo sapiens
agcctctaggctcag

SEQ ID NO: 1860735 - DNA, 15 bp, Homo sapiens
gcctctaggctcagc

SEQ ID NO: 1860736 - DNA, 15 bp, Homo sapiens
cctctaggctcagct

SEQ ID NO: 1860737 - DNA, 15 bp, Homo sapiens
ctctaggctcagctc

SEQ ID NO: 1860738 - DNA, 15 bp, Homo sapiens
tctaggctcagctcc

SEQ ID NO: 1860739 - DNA, 15 bp, Homo sapiens
ctaggctcagctccg

SEQ ID NO: 1860740 - DNA, 15 bp, Homo sapiens
taggctcagctccgt

SEQ ID NO: 1860741 - DNA, 15 bp, Homo sapiens
aggctcagctccgtc

SEQ ID NO: 1860742 - DNA, 15 bp, Homo sapiens
ggctcagctccgtcg

SEQ ID NO: 1860743 - DNA, 15 bp, Homo sapiens
gctcagctccgtcgt

SEQ ID NO: 1860744 - DNA, 15 bp, Homo sapiens
ctcagctccgtcgtg

SEQ ID NO: 1860745 - DNA, 15 bp, Homo sapiens
tcagctccgtcgtgg

SEQ ID NO: 1860746 - DNA, 15 bp, Homo sapiens
cagctccgtcgtgga

SEQ ID NO: 1860747 - DNA, 15 bp, Homo sapiens
agctccgtcgtggag

SEQ ID NO: 1860748 - DNA, 15 bp, Homo sapiens
gctccgtcgtggaga

SEQ ID NO: 1860749 - DNA, 15 bp, Homo sapiens
ctccgtcgtggagat

SEQ ID NO: 1860750 - DNA, 15 bp, Homo sapiens
tccgtcgtggagatg

SEQ ID NO: 1860751 - DNA, 15 bp, Homo sapiens
ccgtcgtggagatgg

SEQ ID NO: 1860752 - DNA, 15 bp, Homo sapiens
cgtcgtggagatgga

SEQ ID NO: 1860753 - DNA, 15 bp, Homo sapiens
gtcgtggagatggaa

SEQ ID NO: 1860754 - DNA, 15 bp, Homo sapiens
tcgtggagatggaaa

SEQ ID NO: 1860755 - DNA, 15 bp, Homo sapiens
cgtggagatggaaag

SEQ ID NO: 1860756 - DNA, 15 bp, Homo sapiens
gtggagatggaaagg

SEQ ID NO: 1860757 - DNA, 15 bp, Homo sapiens
tggagatggaaagga

SEQ ID NO: 1860758 - DNA, 15 bp, Homo sapiens
ggagatggaaaggat

SEQ ID NO: 1860759 - DNA, 15 bp, Homo sapiens
gagatggaaaggatt

SEQ ID NO: 1860760 - DNA, 15 bp, Homo sapiens
agatggaaaggattt

SEQ ID NO: 1860761 - DNA, 15 bp, Homo sapiens
gatggaaaggatttg

SEQ ID NO: 1860762 - DNA, 15 bp, Homo sapiens
atggaaaggatttgc

SEQ ID NO: 1860763 - DNA, 15 bp, Homo sapiens
tggaaaggatttgct

SEQ ID NO: 1860764 - DNA, 15 bp, Homo sapiens
ggaaaggatttgctc

SEQ ID NO: 1860765 - DNA, 15 bp, Homo sapiens
gaaaggatttgctcc

SEQ ID NO: 1860766 - DNA, 15 bp, Homo sapiens
aaaggatttgctccc

SEQ ID NO: 1860767 - DNA, 15 bp, Homo sapiens
aaggatttgctccca

SEQ ID NO: 1860768 - DNA, 15 bp, Homo sapiens
aggatttgctcccag

SEQ ID NO: 1860769 - DNA, 15 bp, Homo sapiens
ggatttgctcccaga

SEQ ID NO: 1860770 - DNA, 15 bp, Homo sapiens
gatttgctcccagag

SEQ ID NO: 1860771 - DNA, 15 bp, Homo sapiens
atttgctcccagagc

SEQ ID NO: 1860772 - DNA, 15 bp, Homo sapiens
tttgctcccagagct

SEQ ID NO: 1860773 - DNA, 15 bp, Homo sapiens
ttgctcccagagctt

SEQ ID NO: 1860774 - DNA, 15 bp, Homo sapiens
tgctcccagagcttt

SEQ ID NO: 1860775 - DNA, 15 bp, Homo sapiens
gctcccagagctttc

SEQ ID NO: 1860776 - DNA, 15 bp, Homo sapiens
ctcccagagctttcc

SEQ ID NO: 1860777 - DNA, 15 bp, Homo sapiens
tcccagagctttccg

SEQ ID NO: 1860778 - DNA, 15 bp, Homo sapiens
cccagagctttccgg

SEQ ID NO: 1860779 - DNA, 15 bp, Homo sapiens
ccagagctttccggg

SEQ ID NO: 1860780 - DNA, 15 bp, Homo sapiens
cagagctttccgggg

SEQ ID NO: 1860781 - DNA, 15 bp, Homo sapiens
agagctttccgggga

SEQ ID NO: 1860782 - DNA, 15 bp, Homo sapiens
gagctttccggggat

SEQ ID NO: 1860783 - DNA, 15 bp, Homo sapiens
agctttccggggatc

SEQ ID NO: 1860784 - DNA, 15 bp, Homo sapiens
gctttccggggatca

SEQ ID NO: 1860785 - DNA, 15 bp, Homo sapiens
ctttccggggatcac

SEQ ID NO: 1860786 - DNA, 15 bp, Homo sapiens
tttccggggatcact

SEQ ID NO: 1860787 - DNA, 15 bp, Homo sapiens
ttccggggatcactg

SEQ ID NO: 1860788 - DNA, 15 bp, Homo sapiens
tccggggatcactgg

SEQ ID NO: 1860789 - DNA, 15 bp, Homo sapiens
ccggggatcactggg

SEQ ID NO: 1860790 - DNA, 15 bp, Homo sapiens
cggggatcactggga

SEQ ID NO: 1860791 - DNA, 15 bp, Homo sapiens
ggggatcactgggaa

SEQ ID NO: 1860792 - DNA, 15 bp, Homo sapiens
gggatcactgggaat

SEQ ID NO: 1860793 - DNA, 15 bp, Homo sapiens
ggatcactgggaatg

SEQ ID NO: 1860794 - DNA, 15 bp, Homo sapiens
gatcactgggaatgc

SEQ ID NO: 1860795 - DNA, 15 bp, Homo sapiens
atcactgggaatgca

SEQ ID NO: 1860796 - DNA, 15 bp, Homo sapiens
tcactgggaatgcag

SEQ ID NO: 1860797 - DNA, 15 bp, Homo sapiens
cactgggaatgcaga

SEQ ID NO: 1860798 - DNA, 15 bp, Homo sapiens
actgggaatgcagag

SEQ ID NO: 1860799 - DNA, 15 bp, Homo sapiens
ctgggaatgcagagc

SEQ ID NO: 1860800 - DNA, 15 bp, Homo sapiens
tgggaatgcagagca

SEQ ID NO: 1860801 - DNA, 15 bp, Homo sapiens
gggaatgcagagcat

SEQ ID NO: 1860802 - DNA, 15 bp, Homo sapiens
ggaatgcagagcatg

SEQ ID NO: 1860803 - DNA, 15 bp, Homo sapiens
gaatgcagagcatgt

SEQ ID NO: 1860804 - DNA, 15 bp, Homo sapiens
aatgcagagcatgtg

SEQ ID NO: 1860805 - DNA, 15 bp, Homo sapiens
atgcagagcatgtgt

SEQ ID NO: 1860806 - DNA, 15 bp, Homo sapiens
tgcagagcatgtgtt

SEQ ID NO: 1860807 - DNA, 15 bp, Homo sapiens
gcagagcatgtgttg

SEQ ID NO: 1860808 - DNA, 15 bp, Homo sapiens
cagagcatgtgttgg

SEQ ID NO: 1860809 - DNA, 15 bp, Homo sapiens
agagcatgtgttgga

SEQ ID NO: 1860810 - DNA, 15 bp, Homo sapiens
gagcatgtgttggaa

SEQ ID NO: 1860811 - DNA, 15 bp, Homo sapiens
agcatgtgttggaag

SEQ ID NO: 1860812 - DNA, 15 bp, Homo sapiens
gcatgtgttggaagc

SEQ ID NO: 1860813 - DNA, 15 bp, Homo sapiens
catgtgttggaagct

SEQ ID NO: 1860814 - DNA, 15 bp, Homo sapiens
atgtgttggaagcta

SEQ ID NO: 1860815 - DNA, 15 bp, Homo sapiens
tgtgttggaagctat

SEQ ID NO: 1860816 - DNA, 15 bp, Homo sapiens
gtgttggaagctatc

SEQ ID NO: 1860817 - DNA, 15 bp, Homo sapiens
tgttggaagctatca

SEQ ID NO: 1860818 - DNA, 15 bp, Homo sapiens
gttggaagctatcat

SEQ ID NO: 1860819 - DNA, 15 bp, Homo sapiens
ttggaagctatcatc

SEQ ID NO: 1860820 - DNA, 15 bp, Homo sapiens
tggaagctatcatct

SEQ ID NO: 1860821 - DNA, 15 bp, Homo sapiens
ggaagctatcatctt

SEQ ID NO: 1860822 - DNA, 15 bp, Homo sapiens
gaagctatcatcttt

SEQ ID NO: 1860823 - DNA, 15 bp, Homo sapiens
aagctatcatctttg

SEQ ID NO: 1860824 - DNA, 15 bp, Homo sapiens
agctatcatctttgc

SEQ ID NO: 1860825 - DNA, 15 bp, Homo sapiens
gctatcatctttgca

SEQ ID NO: 1860826 - DNA, 15 bp, Homo sapiens
ctatcatctttgcag

SEQ ID NO: 1860827 - DNA, 15 bp, Homo sapiens
tatcatctttgcagc

SEQ ID NO: 1860828 - DNA, 15 bp, Homo sapiens
atcatctttgcagcc

SEQ ID NO: 1860829 - DNA, 15 bp, Homo sapiens
tcatctttgcagcct

SEQ ID NO: 1860830 - DNA, 15 bp, Homo sapiens
catctttgcagcctc

SEQ ID NO: 1860831 - DNA, 15 bp, Homo sapiens
atctttgcagcctcc

SEQ ID NO: 1860832 - DNA, 15 bp, Homo sapiens
tctttgcagcctcca

SEQ ID NO: 1860833 - DNA, 15 bp, Homo sapiens
ctttgcagcctccat

SEQ ID NO: 1860834 - DNA, 15 bp, Homo sapiens
tttgcagcctccatc

SEQ ID NO: 1860835 - DNA, 15 bp, Homo sapiens
ttgcagcctccatct

SEQ ID NO: 1860836 - DNA, 15 bp, Homo sapiens
tgcagcctccatctg

SEQ ID NO: 1860837 - DNA, 15 bp, Homo sapiens
gcagcctccatctgg

SEQ ID NO: 1860838 - DNA, 15 bp, Homo sapiens
cagcctccatctgga

SEQ ID NO: 1860839 - DNA, 15 bp, Homo sapiens
agcctccatctggag

SEQ ID NO: 1860840 - DNA, 15 bp, Homo sapiens
gcctccatctggagt

SEQ ID NO: 1860841 - DNA, 15 bp, Homo sapiens
cctccatctggagtt

SEQ ID NO: 1860842 - DNA, 15 bp, Homo sapiens
ctccatctggagttt

SEQ ID NO: 1860843 - DNA, 15 bp, Homo sapiens
tccatctggagtttc

SEQ ID NO: 1860844 - DNA, 15 bp, Homo sapiens
ccatctggagtttct

SEQ ID NO: 1860845 - DNA, 15 bp, Homo sapiens
catctggagtttctg

SEQ ID NO: 1860846 - DNA, 15 bp, Homo sapiens
atctggagtttctgt

SEQ ID NO: 1860847 - DNA, 15 bp, Homo sapiens
tctggagtttctgtc

SEQ ID NO: 1860848 - DNA, 15 bp, Homo sapiens
ctggagtttctgtct

SEQ ID NO: 1860849 - DNA, 15 bp, Homo sapiens
tggagtttctgtctg

SEQ ID NO: 1860850 - DNA, 15 bp, Homo sapiens
ggagtttctgtctgg

SEQ ID NO: 1860851 - DNA, 15 bp, Homo sapiens
gagtttctgtctggg

SEQ ID NO: 1860852 - DNA, 15 bp, Homo sapiens
agtttctgtctgggg

SEQ ID NO: 1860853 - DNA, 15 bp, Homo sapiens
gtttctgtctggggg

SEQ ID NO: 1860854 - DNA, 15 bp, Homo sapiens
tttctgtctgggggc

SEQ ID NO: 1860855 - DNA, 15 bp, Homo sapiens
ttctgtctgggggct

SEQ ID NO: 1860856 - DNA, 15 bp, Homo sapiens
tctgtctgggggctt

SEQ ID NO: 1860857 - DNA, 15 bp, Homo sapiens
ctgtctgggggcttt

SEQ ID NO: 1860858 - DNA, 15 bp, Homo sapiens
tgtctgggggctttc

SEQ ID NO: 1860859 - DNA, 15 bp, Homo sapiens
gtctgggggctttca

SEQ ID NO: 1860860 - DNA, 15 bp, Homo sapiens
tctgggggctttcat

SEQ ID NO: 1860861 - DNA, 15 bp, Homo sapiens
ctgggggctttcatt

SEQ ID NO: 1860862 - DNA, 15 bp, Homo sapiens
tgggggctttcattt

SEQ ID NO: 1860863 - DNA, 15 bp, Homo sapiens
gggggctttcatttt

SEQ ID NO: 1860864 - DNA, 15 bp, Homo sapiens
ggggctttcattttg

SEQ ID NO: 1860865 - DNA, 15 bp, Homo sapiens
gggctttcattttgc

SEQ ID NO: 1860866 - DNA, 15 bp, Homo sapiens
ggctttcattttgcc

SEQ ID NO: 1860867 - DNA, 15 bp, Homo sapiens
gctttcattttgcct

SEQ ID NO: 1860868 - DNA, 15 bp, Homo sapiens
ctttcattttgcctg

SEQ ID NO: 1860869 - DNA, 15 bp, Homo sapiens
tttcattttgcctgt

SEQ ID NO: 1860870 - DNA, 15 bp, Homo sapiens
ttcattttgcctgtc

SEQ ID NO: 1860871 - DNA, 15 bp, Homo sapiens
tcattttgcctgtct

SEQ ID NO: 1860872 - DNA, 15 bp, Homo sapiens
cattttgcctgtctg

SEQ ID NO: 1860873 - DNA, 15 bp, Homo sapiens
attttgcctgtctgc

SEQ ID NO: 1860874 - DNA, 15 bp, Homo sapiens
ttttgcctgtctgct

SEQ ID NO: 1860875 - DNA, 15 bp, Homo sapiens
tttgcctgtctgctg

SEQ ID NO: 1860876 - DNA, 15 bp, Homo sapiens
ttgcctgtctgctgt

SEQ ID NO: 1860877 - DNA, 15 bp, Homo sapiens
tgcctgtctgctgtc

SEQ ID NO: 1860878 - DNA, 15 bp, Homo sapiens
gcctgtctgctgtcc

SEQ ID NO: 1860879 - DNA, 15 bp, Homo sapiens
cctgtctgctgtcct

SEQ ID NO: 1860880 - DNA, 15 bp, Homo sapiens
ctgtctgctgtcctg

SEQ ID NO: 1860881 - DNA, 15 bp, Homo sapiens
tgtctgctgtcctgg

SEQ ID NO: 1860882 - DNA, 15 bp, Homo sapiens
gtctgctgtcctggt

SEQ ID NO: 1860883 - DNA, 15 bp, Homo sapiens
tctgctgtcctggtt

SEQ ID NO: 1860884 - DNA, 15 bp, Homo sapiens
ctgctgtcctggttt

SEQ ID NO: 1860885 - DNA, 15 bp, Homo sapiens
tgctgtcctggtttg

SEQ ID NO: 1860886 - DNA, 15 bp, Homo sapiens
gctgtcctggtttga

SEQ ID NO: 1860887 - DNA, 15 bp, Homo sapiens
ctgtcctggtttgag

SEQ ID NO: 1860888 - DNA, 15 bp, Homo sapiens
tgtcctggtttgagt

SEQ ID NO: 1860889 - DNA, 15 bp, Homo sapiens
gtcctggtttgagtg

SEQ ID NO: 1860890 - DNA, 15 bp, Homo sapiens
tcctggtttgagtgg

SEQ ID NO: 1860891 - DNA, 15 bp, Homo sapiens
cctggtttgagtggg

SEQ ID NO: 1860892 - DNA, 15 bp, Homo sapiens
ctggtttgagtgggt

SEQ ID NO: 1860893 - DNA, 15 bp, Homo sapiens
tggtttgagtgggtt

SEQ ID NO: 1860894 - DNA, 15 bp, Homo sapiens
ggtttgagtgggttg

SEQ ID NO: 1860895 - DNA, 15 bp, Homo sapiens
gtttgagtgggttga

SEQ ID NO: 1860896 - DNA, 15 bp, Homo sapiens
tttgagtgggttgag

SEQ ID NO: 1860897 - DNA, 15 bp, Homo sapiens
ttgagtgggttgagg

SEQ ID NO: 1860898 - DNA, 15 bp, Homo sapiens
tgagtgggttgaggg

SEQ ID NO: 1860899 - DNA, 15 bp, Homo sapiens
gagtgggttgaggga

SEQ ID NO: 1860900 - DNA, 15 bp, Homo sapiens
agtgggttgagggag

SEQ ID NO: 1860901 - DNA, 15 bp, Homo sapiens
gtgggttgagggagc

SEQ ID NO: 1860902 - DNA, 15 bp, Homo sapiens
tgggttgagggagca

SEQ ID NO: 1860903 - DNA, 15 bp, Homo sapiens
gggttgagggagcag

SEQ ID NO: 1860904 - DNA, 15 bp, Homo sapiens
ggttgagggagcagc

SEQ ID NO: 1860905 - DNA, 15 bp, Homo sapiens
gttgagggagcagca

SEQ ID NO: 1860906 - DNA, 15 bp, Homo sapiens
ttgagggagcagcat

SEQ ID NO: 1860907 - DNA, 15 bp, Homo sapiens
tgagggagcagcatc

SEQ ID NO: 1860908 - DNA, 15 bp, Homo sapiens
gagggagcagcatct

SEQ ID NO: 1860909 - DNA, 15 bp, Homo sapiens
agggagcagcatctc

SEQ ID NO: 1860910 - DNA, 15 bp, Homo sapiens
gggagcagcatctcc

SEQ ID NO: 1860911 - DNA, 15 bp, Homo sapiens
ggagcagcatctccc

SEQ ID NO: 1860912 - DNA, 15 bp, Homo sapiens
gagcagcatctccct

SEQ ID NO: 1860913 - DNA, 15 bp, Homo sapiens
agcagcatctccctt

SEQ ID NO: 1860914 - DNA, 15 bp, Homo sapiens
gcagcatctcccttg

SEQ ID NO: 1860915 - DNA, 15 bp, Homo sapiens
cagcatctcccttgt

SEQ ID NO: 1860916 - DNA, 15 bp, Homo sapiens
agcatctcccttgtg

SEQ ID NO: 1860917 - DNA, 15 bp, Homo sapiens
gcatctcccttgtga

SEQ ID NO: 1860918 - DNA, 15 bp, Homo sapiens
catctcccttgtgag

SEQ ID NO: 1860919 - DNA, 15 bp, Homo sapiens
atctcccttgtgagt

SEQ ID NO: 1860920 - DNA, 15 bp, Homo sapiens
tctcccttgtgagtt

SEQ ID NO: 1860921 - DNA, 15 bp, Homo sapiens
ctcccttgtgagttg

SEQ ID NO: 1860922 - DNA, 15 bp, Homo sapiens
tcccttgtgagttgt

SEQ ID NO: 1860923 - DNA, 15 bp, Homo sapiens
cccttgtgagttgta

SEQ ID NO: 1860924 - DNA, 15 bp, Homo sapiens
ccttgtgagttgtag

SEQ ID NO: 1860925 - DNA, 15 bp, Homo sapiens
cttgtgagttgtagg

SEQ ID NO: 1860926 - DNA, 15 bp, Homo sapiens
ttgtgagttgtaggt

SEQ ID NO: 1860927 - DNA, 15 bp, Homo sapiens
tgtgagttgtaggtt

SEQ ID NO: 1860928 - DNA, 15 bp, Homo sapiens
gtgagttgtaggtta

SEQ ID NO: 1860929 - DNA, 15 bp, Homo sapiens
tgagttgtaggttat

SEQ ID NO: 1860930 - DNA, 15 bp, Homo sapiens
gagttgtaggttatt

SEQ ID NO: 1860931 - DNA, 15 bp, Homo sapiens
agttgtaggttattc

SEQ ID NO: 1860932 - DNA, 15 bp, Homo sapiens
gttgtaggttattca

SEQ ID NO: 1860933 - DNA, 15 bp, Homo sapiens
ttgtaggttattcag

SEQ ID NO: 1860934 - DNA, 15 bp, Homo sapiens
tgtaggttattcagc

SEQ ID NO: 1860935 - DNA, 15 bp, Homo sapiens
gtaggttattcagct

SEQ ID NO: 1860936 - DNA, 15 bp, Homo sapiens
taggttattcagctg

SEQ ID NO: 1860937 - DNA, 15 bp, Homo sapiens
aggttattcagctgc

SEQ ID NO: 1860938 - DNA, 15 bp, Homo sapiens
ggttattcagctgca

SEQ ID NO: 1860939 - DNA, 15 bp, Homo sapiens
gttattcagctgcag

SEQ ID NO: 1860940 - DNA, 15 bp, Homo sapiens
ttattcagctgcaga

SEQ ID NO: 1860941 - DNA, 15 bp, Homo sapiens
tattcagctgcagac

SEQ ID NO: 1860942 - DNA, 15 bp, Homo sapiens
attcagctgcagact

SEQ ID NO: 1860943 - DNA, 15 bp, Homo sapiens
ttcagctgcagactc

SEQ ID NO: 1860944 - DNA, 15 bp, Homo sapiens
tcagctgcagactca

SEQ ID NO: 1860945 - DNA, 15 bp, Homo sapiens
cagctgcagactcat

SEQ ID NO: 1860946 - DNA, 15 bp, Homo sapiens
agctgcagactcatc

SEQ ID NO: 1860947 - DNA, 15 bp, Homo sapiens
gctgcagactcatct

SEQ ID NO: 1860948 - DNA, 15 bp, Homo sapiens
ctgcagactcatctt

SEQ ID NO: 1860949 - DNA, 15 bp, Homo sapiens
tgcagactcatcttc

SEQ ID NO: 1860950 - DNA, 15 bp, Homo sapiens
gcagactcatcttct

SEQ ID NO: 1860951 - DNA, 15 bp, Homo sapiens
cagactcatcttcta

SEQ ID NO: 1860952 - DNA, 15 bp, Homo sapiens
agactcatcttctag

SEQ ID NO: 1860953 - DNA, 15 bp, Homo sapiens
gactcatcttctagc

SEQ ID NO: 1860954 - DNA, 15 bp, Homo sapiens
actcatcttctagcc

SEQ ID NO: 1860955 - DNA, 15 bp, Homo sapiens
ctcatcttctagcct

SEQ ID NO: 1860956 - DNA, 15 bp, Homo sapiens
tcatcttctagcctc

SEQ ID NO: 1860957 - DNA, 15 bp, Homo sapiens
catcttctagcctcc

SEQ ID NO: 1860958 - DNA, 15 bp, Homo sapiens
atcttctagcctcct

SEQ ID NO: 1860959 - DNA, 15 bp, Homo sapiens
tcttctagcctcctc

SEQ ID NO: 1860960 - DNA, 15 bp, Homo sapiens
cttctagcctcctcc

SEQ ID NO: 1860961 - DNA, 15 bp, Homo sapiens
ttctagcctcctcct

SEQ ID NO: 1860962 - DNA, 15 bp, Homo sapiens
tctagcctcctcctt

SEQ ID NO: 1860963 - DNA, 15 bp, Homo sapiens
ctagcctcctccttt

SEQ ID NO: 1860964 - DNA, 15 bp, Homo sapiens
tagcctcctccttta

SEQ ID NO: 1860965 - DNA, 15 bp, Homo sapiens
agcctcctcctttat

SEQ ID NO: 1860966 - DNA, 15 bp, Homo sapiens
gcctcctcctttata

SEQ ID NO: 1860967 - DNA, 15 bp, Homo sapiens
cctcctcctttatat

SEQ ID NO: 1860968 - DNA, 15 bp, Homo sapiens
ctcctcctttatata

SEQ ID NO: 1860969 - DNA, 15 bp, Homo sapiens
tcctcctttatatat

SEQ ID NO: 1860970 - DNA, 15 bp, Homo sapiens
cctcctttatatatg

SEQ ID NO: 1860971 - DNA, 15 bp, Homo sapiens
ctcctttatatatga

SEQ ID NO: 1860972 - DNA, 15 bp, Homo sapiens
tcctttatatatgaa

SEQ ID NO: 1860973 - DNA, 15 bp, Homo sapiens
cctttatatatgaat

SEQ ID NO: 1860974 - DNA, 15 bp, Homo sapiens
ctttatatatgaatg

SEQ ID NO: 1860975 - DNA, 15 bp, Homo sapiens
tttatatatgaatgt

SEQ ID NO: 1860976 - DNA, 15 bp, Homo sapiens
ttatatatgaatgtc

SEQ ID NO: 1860977 - DNA, 15 bp, Homo sapiens
tatatatgaatgtct

SEQ ID NO: 1860978 - DNA, 15 bp, Homo sapiens
atatatgaatgtctg

SEQ ID NO: 1860979 - DNA, 15 bp, Homo sapiens
tatatgaatgtctgg

SEQ ID NO: 1860980 - DNA, 15 bp, Homo sapiens
atatgaatgtctgga

SEQ ID NO: 1860981 - DNA, 15 bp, Homo sapiens
tatgaatgtctggag

SEQ ID NO: 1860982 - DNA, 15 bp, Homo sapiens
atgaatgtctggagc

SEQ ID NO: 1860983 - DNA, 15 bp, Homo sapiens
tgaatgtctggagct

SEQ ID NO: 1860984 - DNA, 15 bp, Homo sapiens
gaatgtctggagctg

SEQ ID NO: 1860985 - DNA, 15 bp, Homo sapiens
aatgtctggagctgg

SEQ ID NO: 1860986 - DNA, 15 bp, Homo sapiens
atgtctggagctggc

SEQ ID NO: 1860987 - DNA, 15 bp, Homo sapiens
tgtctggagctggct

SEQ ID NO: 1860988 - DNA, 15 bp, Homo sapiens
gtctggagctggctg

SEQ ID NO: 1860989 - DNA, 15 bp, Homo sapiens
tctggagctggctgg

SEQ ID NO: 1860990 - DNA, 15 bp, Homo sapiens
ctggagctggctggg

SEQ ID NO: 1860991 - DNA, 15 bp, Homo sapiens
tggagctggctgggc

SEQ ID NO: 1860992 - DNA, 15 bp, Homo sapiens
ggagctggctgggcc

SEQ ID NO: 1860993 - DNA, 15 bp, Homo sapiens
gagctggctgggcct

SEQ ID NO: 1860994 - DNA, 15 bp, Homo sapiens
agctggctgggcctc

SEQ ID NO: 1860995 - DNA, 15 bp, Homo sapiens
gctggctgggcctca

SEQ ID NO: 1860996 - DNA, 15 bp, Homo sapiens
ctggctgggcctcag

SEQ ID NO: 1860997 - DNA, 15 bp, Homo sapiens
tggctgggcctcagc

SEQ ID NO: 1860998 - DNA, 15 bp, Homo sapiens
ggctgggcctcagcc

SEQ ID NO: 1860999 - DNA, 15 bp, Homo sapiens
gctgggcctcagcca

SEQ ID NO: 1861000 - DNA, 15 bp, Homo sapiens
ctgggcctcagccat

SEQ ID NO: 1861001 - DNA, 15 bp, Homo sapiens
tgggcctcagccata

SEQ ID NO: 1861002 - DNA, 15 bp, Homo sapiens
gggcctcagccatat

SEQ ID NO: 1861003 - DNA, 15 bp, Homo sapiens
ggcctcagccatatg

SEQ ID NO: 1861004 - DNA, 15 bp, Homo sapiens
gcctcagccatatgg

SEQ ID NO: 1861005 - DNA, 15 bp, Homo sapiens
cctcagccatatgga

SEQ ID NO: 1861006 - DNA, 15 bp, Homo sapiens
ctcagccatatggac

SEQ ID NO: 1861007 - DNA, 15 bp, Homo sapiens
tcagccatatggacc

SEQ ID NO: 1861008 - DNA, 15 bp, Homo sapiens
cagccatatggacct

SEQ ID NO: 1861009 - DNA, 15 bp, Homo sapiens
agccatatggacctg

SEQ ID NO: 1861010 - DNA, 15 bp, Homo sapiens
gccatatggacctgc

SEQ ID NO: 1861011 - DNA, 15 bp, Homo sapiens
ccatatggacctgcc

SEQ ID NO: 1861012 - DNA, 15 bp, Homo sapiens
catatggacctgccc

SEQ ID NO: 1861013 - DNA, 15 bp, Homo sapiens
atatggacctgccca

SEQ ID NO: 1861014 - DNA, 15 bp, Homo sapiens
tatggacctgcccag

SEQ ID NO: 1861015 - DNA, 15 bp, Homo sapiens
atggacctgcccagt

SEQ ID NO: 1861016 - DNA, 15 bp, Homo sapiens
tggacctgcccagtt

SEQ ID NO: 1861017 - DNA, 15 bp, Homo sapiens
ggacctgcccagtta

SEQ ID NO: 1861018 - DNA, 15 bp, Homo sapiens
gacctgcccagttag

SEQ ID NO: 1861019 - DNA, 15 bp, Homo sapiens
acctgcccagttagg

SEQ ID NO: 1861020 - DNA, 15 bp, Homo sapiens
cctgcccagttaggg

SEQ ID NO: 1861021 - DNA, 15 bp, Homo sapiens
ctgcccagttagggt

SEQ ID NO: 1861022 - DNA, 15 bp, Homo sapiens
tgcccagttagggta

SEQ ID NO: 1861023 - DNA, 15 bp, Homo sapiens
gcccagttagggtag

SEQ ID NO: 1861024 - DNA, 15 bp, Homo sapiens
cccagttagggtagg

SEQ ID NO: 1861025 - DNA, 15 bp, Homo sapiens
ccagttagggtaggg

SEQ ID NO: 1861026 - DNA, 15 bp, Homo sapiens
cagttagggtaggga

SEQ ID NO: 1861027 - DNA, 15 bp, Homo sapiens
agttagggtagggat

SEQ ID NO: 1861028 - DNA, 15 bp, Homo sapiens
gttagggtagggatt

SEQ ID NO: 1861029 - DNA, 15 bp, Homo sapiens
ttagggtagggattg

SEQ ID NO: 1861030 - DNA, 15 bp, Homo sapiens
tagggtagggattgg

SEQ ID NO: 1861031 - DNA, 15 bp, Homo sapiens
agggtagggattgga

SEQ ID NO: 1861032 - DNA, 15 bp, Homo sapiens
gggtagggattggaa

SEQ ID NO: 1861033 - DNA, 15 bp, Homo sapiens
ggtagggattggaag

SEQ ID NO: 1861034 - DNA, 15 bp, Homo sapiens
gtagggattggaagc

SEQ ID NO: 1861035 - DNA, 15 bp, Homo sapiens
tagggattggaagcc

SEQ ID NO: 1861036 - DNA, 15 bp, Homo sapiens
agggattggaagcca

SEQ ID NO: 1861037 - DNA, 15 bp, Homo sapiens
gggattggaagccag

SEQ ID NO: 1861038 - DNA, 15 bp, Homo sapiens
ggattggaagccagc

SEQ ID NO: 1861039 - DNA, 15 bp, Homo sapiens
gattggaagccagca

SEQ ID NO: 1861040 - DNA, 15 bp, Homo sapiens
attggaagccagcaa

SEQ ID NO: 1861041 - DNA, 15 bp, Homo sapiens
ttggaagccagcaac

SEQ ID NO: 1861042 - DNA, 15 bp, Homo sapiens
tggaagccagcaacc

SEQ ID NO: 1861043 - DNA, 15 bp, Homo sapiens
ggaagccagcaacca

SEQ ID NO: 1861044 - DNA, 15 bp, Homo sapiens
gaagccagcaaccac

SEQ ID NO: 1861045 - DNA, 15 bp, Homo sapiens
aagccagcaaccact

SEQ ID NO: 1861046 - DNA, 15 bp, Homo sapiens
agccagcaaccactt

SEQ ID NO: 1861047 - DNA, 15 bp, Homo sapiens
gccagcaaccacttg

SEQ ID NO: 1861048 - DNA, 15 bp, Homo sapiens
ccagcaaccacttgt

SEQ ID NO: 1861049 - DNA, 15 bp, Homo sapiens
cagcaaccacttgta

SEQ ID NO: 1861050 - DNA, 15 bp, Homo sapiens
agcaaccacttgtag

SEQ ID NO: 1861051 - DNA, 15 bp, Homo sapiens
gcaaccacttgtagt

SEQ ID NO: 1861052 - DNA, 15 bp, Homo sapiens
caaccacttgtagtt

SEQ ID NO: 1861053 - DNA, 15 bp, Homo sapiens
aaccacttgtagtta

SEQ ID NO: 1861054 - DNA, 15 bp, Homo sapiens
accacttgtagttat

SEQ ID NO: 1861055 - DNA, 15 bp, Homo sapiens
ccacttgtagttatt

SEQ ID NO: 1861056 - DNA, 15 bp, Homo sapiens
cacttgtagttattt

SEQ ID NO: 1861057 - DNA, 15 bp, Homo sapiens
acttgtagttattta

SEQ ID NO: 1861058 - DNA, 15 bp, Homo sapiens
cttgtagttatttaa

SEQ ID NO: 1861059 - DNA, 15 bp, Homo sapiens
ttgtagttatttaaa

SEQ ID NO: 1861060 - DNA, 15 bp, Homo sapiens
tgtagttatttaaac

SEQ ID NO: 1861061 - DNA, 15 bp, Homo sapiens
gtagttatttaaact

SEQ ID NO: 1861062 - DNA, 15 bp, Homo sapiens
tagttatttaaactt

SEQ ID NO: 1861063 - DNA, 15 bp, Homo sapiens
agttatttaaacttc

SEQ ID NO: 1861064 - DNA, 15 bp, Homo sapiens
gttatttaaacttca

SEQ ID NO: 1861065 - DNA, 15 bp, Homo sapiens
ttatttaaacttcaa

SEQ ID NO: 1861066 - DNA, 15 bp, Homo sapiens
tatttaaacttcaaa

SEQ ID NO: 1861067 - DNA, 15 bp, Homo sapiens
atttaaacttcaaaa

SEQ ID NO: 1861068 - DNA, 15 bp, Homo sapiens
tttaaacttcaaaag

SEQ ID NO: 1861069 - DNA, 15 bp, Homo sapiens
ttaaacttcaaaaga

SEQ ID NO: 1861070 - DNA, 15 bp, Homo sapiens
taaacttcaaaagaa

SEQ ID NO: 1861071 - DNA, 15 bp, Homo sapiens
aaacttcaaaagaag

SEQ ID NO: 1861072 - DNA, 15 bp, Homo sapiens
aacttcaaaagaagt

SEQ ID NO: 1861073 - DNA, 15 bp, Homo sapiens
acttcaaaagaagtg

SEQ ID NO: 1861074 - DNA, 15 bp, Homo sapiens
cttcaaaagaagtgc

SEQ ID NO: 1861075 - DNA, 15 bp, Homo sapiens
ttcaaaagaagtgct

SEQ ID NO: 1861076 - DNA, 15 bp, Homo sapiens
tcaaaagaagtgctc

SEQ ID NO: 1861077 - DNA, 15 bp, Homo sapiens
caaaagaagtgctcc

SEQ ID NO: 1861078 - DNA, 15 bp, Homo sapiens
aaaagaagtgctccc

SEQ ID NO: 1861079 - DNA, 15 bp, Homo sapiens
aaagaagtgctccca

SEQ ID NO: 1861080 - DNA, 15 bp, Homo sapiens
aagaagtgctcccat

SEQ ID NO: 1861081 - DNA, 15 bp, Homo sapiens
agaagtgctcccatg

SEQ ID NO: 1861082 - DNA, 15 bp, Homo sapiens
gaagtgctcccatgg

SEQ ID NO: 1861083 - DNA, 15 bp, Homo sapiens
aagtgctcccatgga

SEQ ID NO: 1861084 - DNA, 15 bp, Homo sapiens
agtgctcccatggat

SEQ ID NO: 1861085 - DNA, 15 bp, Homo sapiens
gtgctcccatggatc

SEQ ID NO: 1861086 - DNA, 15 bp, Homo sapiens
tgctcccatggatct

SEQ ID NO: 1861087 - DNA, 15 bp, Homo sapiens
gctcccatggatctc

SEQ ID NO: 1861088 - DNA, 15 bp, Homo sapiens
ctcccatggatctca

SEQ ID NO: 1861089 - DNA, 15 bp, Homo sapiens
tcccatggatctcaa

SEQ ID NO: 1861090 - DNA, 15 bp, Homo sapiens
cccatggatctcaag

SEQ ID NO: 1861091 - DNA, 15 bp, Homo sapiens
ccatggatctcaagg

SEQ ID NO: 1861092 - DNA, 15 bp, Homo sapiens
catggatctcaagga

SEQ ID NO: 1861093 - DNA, 15 bp, Homo sapiens
atggatctcaaggag

SEQ ID NO: 1861094 - DNA, 15 bp, Homo sapiens
tggatctcaaggagg

SEQ ID NO: 1861095 - DNA, 15 bp, Homo sapiens
ggatctcaaggaggg

SEQ ID NO: 1861096 - DNA, 15 bp, Homo sapiens
gatctcaaggaggga

SEQ ID NO: 1861097 - DNA, 15 bp, Homo sapiens
atctcaaggagggag

SEQ ID NO: 1861098 - DNA, 15 bp, Homo sapiens
tctcaaggagggagg

SEQ ID NO: 1861099 - DNA, 15 bp, Homo sapiens
ctcaaggagggaggt

SEQ ID NO: 1861100 - DNA, 15 bp, Homo sapiens
tcaaggagggaggta

SEQ ID NO: 1861101 - DNA, 15 bp, Homo sapiens
caaggagggaggtag

SEQ ID NO: 1861102 - DNA, 15 bp, Homo sapiens
aaggagggaggtagg

SEQ ID NO: 1861103 - DNA, 15 bp, Homo sapiens
aggagggaggtagga

SEQ ID NO: 1861104 - DNA, 15 bp, Homo sapiens
ggagggaggtaggag

SEQ ID NO: 1861105 - DNA, 15 bp, Homo sapiens
gagggaggtaggagg

SEQ ID NO: 1861106 - DNA, 15 bp, Homo sapiens
agggaggtaggaggc

SEQ ID NO: 1861107 - DNA, 15 bp, Homo sapiens
gggaggtaggaggca

SEQ ID NO: 1861108 - DNA, 15 bp, Homo sapiens
ggaggtaggaggcag

SEQ ID NO: 1861109 - DNA, 15 bp, Homo sapiens
gaggtaggaggcagt

SEQ ID NO: 1861110 - DNA, 15 bp, Homo sapiens
aggtaggaggcagtg

SEQ ID NO: 1861111 - DNA, 15 bp, Homo sapiens
ggtaggaggcagtgg

SEQ ID NO: 1861112 - DNA, 15 bp, Homo sapiens
gtaggaggcagtgga

SEQ ID NO: 1861113 - DNA, 15 bp, Homo sapiens
taggaggcagtggag

SEQ ID NO: 1861114 - DNA, 15 bp, Homo sapiens
aggaggcagtggaga

SEQ ID NO: 1861115 - DNA, 15 bp, Homo sapiens
ggaggcagtggagac

SEQ ID NO: 1861116 - DNA, 15 bp, Homo sapiens
gaggcagtggagaca

SEQ ID NO: 1861117 - DNA, 15 bp, Homo sapiens
aggcagtggagacag

SEQ ID NO: 1861118 - DNA, 15 bp, Homo sapiens
ggcagtggagacaga

SEQ ID NO: 1861119 - DNA, 15 bp, Homo sapiens
gcagtggagacagaa

SEQ ID NO: 1861120 - DNA, 15 bp, Homo sapiens
cagtggagacagaag

SEQ ID NO: 1861121 - DNA, 15 bp, Homo sapiens
agtggagacagaagt

SEQ ID NO: 1861122 - DNA, 15 bp, Homo sapiens
gtggagacagaagtg

SEQ ID NO: 1861123 - DNA, 15 bp, Homo sapiens
tggagacagaagtgc

SEQ ID NO: 1861124 - DNA, 15 bp, Homo sapiens
ggagacagaagtgct

SEQ ID NO: 1861125 - DNA, 15 bp, Homo sapiens
gagacagaagtgctc

SEQ ID NO: 1861126 - DNA, 15 bp, Homo sapiens
agacagaagtgctca

SEQ ID NO: 1861127 - DNA, 15 bp, Homo sapiens
gacagaagtgctcac

SEQ ID NO: 1861128 - DNA, 15 bp, Homo sapiens
acagaagtgctcacg

SEQ ID NO: 1861129 - DNA, 15 bp, Homo sapiens
cagaagtgctcacgt

SEQ ID NO: 1861130 - DNA, 15 bp, Homo sapiens
agaagtgctcacgtg

SEQ ID NO: 1861131 - DNA, 15 bp, Homo sapiens
gaagtgctcacgtgt

SEQ ID NO: 1861132 - DNA, 15 bp, Homo sapiens
aagtgctcacgtgtc

SEQ ID NO: 1861133 - DNA, 15 bp, Homo sapiens
agtgctcacgtgtcc

SEQ ID NO: 1861134 - DNA, 15 bp, Homo sapiens
gtgctcacgtgtcct

SEQ ID NO: 1861135 - DNA, 15 bp, Homo sapiens
tgctcacgtgtcctg

SEQ ID NO: 1861136 - DNA, 15 bp, Homo sapiens
gctcacgtgtcctgg

SEQ ID NO: 1861137 - DNA, 15 bp, Homo sapiens
ctcacgtgtcctggg

SEQ ID NO: 1861138 - DNA, 15 bp, Homo sapiens
tcacgtgtcctggga

SEQ ID NO: 1861139 - DNA, 15 bp, Homo sapiens
cacgtgtcctgggaa

SEQ ID NO: 1861140 - DNA, 15 bp, Homo sapiens
acgtgtcctgggaaa

SEQ ID NO: 1861141 - DNA, 15 bp, Homo sapiens
cgtgtcctgggaaac

SEQ ID NO: 1861142 - DNA, 15 bp, Homo sapiens
gtgtcctgggaaact

SEQ ID NO: 1861143 - DNA, 15 bp, Homo sapiens
tgtcctgggaaactc

SEQ ID NO: 1861144 - DNA, 15 bp, Homo sapiens
gtcctgggaaactcc

SEQ ID NO: 1861145 - DNA, 15 bp, Homo sapiens
tcctgggaaactcca

SEQ ID NO: 1861146 - DNA, 15 bp, Homo sapiens
cctgggaaactccat

SEQ ID NO: 1861147 - DNA, 15 bp, Homo sapiens
ctgggaaactccatc

SEQ ID NO: 1861148 - DNA, 15 bp, Homo sapiens
tgggaaactccatct

SEQ ID NO: 1861149 - DNA, 15 bp, Homo sapiens
gggaaactccatctc

SEQ ID NO: 1861150 - DNA, 15 bp, Homo sapiens
ggaaactccatctct

SEQ ID NO: 1861151 - DNA, 15 bp, Homo sapiens
gaaactccatctctt

SEQ ID NO: 1861152 - DNA, 15 bp, Homo sapiens
aaactccatctcttg

SEQ ID NO: 1861153 - DNA, 15 bp, Homo sapiens
aactccatctcttgg

SEQ ID NO: 1861154 - DNA, 15 bp, Homo sapiens
actccatctcttggc

SEQ ID NO: 1861155 - DNA, 15 bp, Homo sapiens
ctccatctcttggct

SEQ ID NO: 1861156 - DNA, 15 bp, Homo sapiens
tccatctcttggctg

SEQ ID NO: 1861157 - DNA, 15 bp, Homo sapiens
ccatctcttggctgt

SEQ ID NO: 1861158 - DNA, 15 bp, Homo sapiens
catctcttggctgtg

SEQ ID NO: 1861159 - DNA, 15 bp, Homo sapiens
atctcttggctgtgc

SEQ ID NO: 1861160 - DNA, 15 bp, Homo sapiens
tctcttggctgtgcg

SEQ ID NO: 1861161 - DNA, 15 bp, Homo sapiens
ctcttggctgtgcga

SEQ ID NO: 1861162 - DNA, 15 bp, Homo sapiens
tcttggctgtgcgaa

SEQ ID NO: 1861163 - DNA, 15 bp, Homo sapiens
cttggctgtgcgaag

SEQ ID NO: 1861164 - DNA, 15 bp, Homo sapiens
ttggctgtgcgaagt

SEQ ID NO: 1861165 - DNA, 15 bp, Homo sapiens
tggctgtgcgaagtc

SEQ ID NO: 1861166 - DNA, 15 bp, Homo sapiens
ggctgtgcgaagtca

SEQ ID NO: 1861167 - DNA, 15 bp, Homo sapiens
gctgtgcgaagtcat

SEQ ID NO: 1861168 - DNA, 15 bp, Homo sapiens
ctgtgcgaagtcatg

SEQ ID NO: 1861169 - DNA, 15 bp, Homo sapiens
tgtgcgaagtcatgc

SEQ ID NO: 1861170 - DNA, 15 bp, Homo sapiens
gtgcgaagtcatgct

SEQ ID NO: 1861171 - DNA, 15 bp, Homo sapiens
tgcgaagtcatgctt

SEQ ID NO: 1861172 - DNA, 15 bp, Homo sapiens
gcgaagtcatgcttg

SEQ ID NO: 1861173 - DNA, 15 bp, Homo sapiens
cgaagtcatgcttgt

SEQ ID NO: 1861174 - DNA, 15 bp, Homo sapiens
gaagtcatgcttgtt

SEQ ID NO: 1861175 - DNA, 15 bp, Homo sapiens
aagtcatgcttgttg

SEQ ID NO: 1861176 - DNA, 15 bp, Homo sapiens
agtcatgcttgttgg

SEQ ID NO: 1861177 - DNA, 15 bp, Homo sapiens
gtcatgcttgttgga

SEQ ID NO: 1861178 - DNA, 15 bp, Homo sapiens
tcatgcttgttggag

SEQ ID NO: 1861179 - DNA, 15 bp, Homo sapiens
catgcttgttggaga

SEQ ID NO: 1861180 - DNA, 15 bp, Homo sapiens
atgcttgttggagag

SEQ ID NO: 1861181 - DNA, 15 bp, Homo sapiens
tgcttgttggagaga

SEQ ID NO: 1861182 - DNA, 15 bp, Homo sapiens
gcttgttggagagac

SEQ ID NO: 1861183 - DNA, 15 bp, Homo sapiens
cttgttggagagacc

SEQ ID NO: 1861184 - DNA, 15 bp, Homo sapiens
ttgttggagagaccc

SEQ ID NO: 1861185 - DNA, 15 bp, Homo sapiens
tgttggagagacccg

SEQ ID NO: 1861186 - DNA, 15 bp, Homo sapiens
gttggagagacccgg

SEQ ID NO: 1861187 - DNA, 15 bp, Homo sapiens
ttggagagacccggc

SEQ ID NO: 1861188 - DNA, 15 bp, Homo sapiens
tggagagacccggca

SEQ ID NO: 1861189 - DNA, 15 bp, Homo sapiens
ggagagacccggcac

SEQ ID NO: 1861190 - DNA, 15 bp, Homo sapiens
gagagacccggcacc

SEQ ID NO: 1861191 - DNA, 15 bp, Homo sapiens
agagacccggcacca

SEQ ID NO: 1861192 - DNA, 15 bp, Homo sapiens
gagacccggcaccat

SEQ ID NO: 1861193 - DNA, 15 bp, Homo sapiens
actgcgcccggcctc

SEQ ID NO: 1861194 - DNA, 15 bp, Homo sapiens
ctgcgcccggcctct

SEQ ID NO: 1861195 - DNA, 15 bp, Homo sapiens
tgcgcccggcctctt

SEQ ID NO: 1861196 - DNA, 15 bp, Homo sapiens
gcgcccggcctcttt

SEQ ID NO: 1861197 - DNA, 15 bp, Homo sapiens
cgcccggcctctttg

SEQ ID NO: 1861198 - DNA, 15 bp, Homo sapiens
gcccggcctctttgc

SEQ ID NO: 1861199 - DNA, 15 bp, Homo sapiens
cccggcctctttgct

SEQ ID NO: 1861200 - DNA, 15 bp, Homo sapiens
ccggcctctttgctc

SEQ ID NO: 1861201 - DNA, 15 bp, Homo sapiens
cggcctctttgctcc

SEQ ID NO: 1861202 - DNA, 15 bp, Homo sapiens
ggcctctttgctcct

SEQ ID NO: 1861203 - DNA, 15 bp, Homo sapiens
gcctctttgctcctt

SEQ ID NO: 1861204 - DNA, 15 bp, Homo sapiens
cctctttgctccttt

SEQ ID NO: 1861205 - DNA, 15 bp, Homo sapiens
ctctttgctccttta

SEQ ID NO: 1861206 - DNA, 15 bp, Homo sapiens
tctttgctcctttat

SEQ ID NO: 1861207 - DNA, 15 bp, Homo sapiens
ctttgctcctttatt

SEQ ID NO: 1861208 - DNA, 15 bp, Homo sapiens
tttgctcctttatta

SEQ ID NO: 1861209 - DNA, 15 bp, Homo sapiens
ttgctcctttattat

SEQ ID NO: 1861210 - DNA, 15 bp, Homo sapiens
tgctcctttattatt

SEQ ID NO: 1861211 - DNA, 15 bp, Homo sapiens
gctcctttattattg

SEQ ID NO: 1861212 - DNA, 15 bp, Homo sapiens
ctcctttattattgt

SEQ ID NO: 1861213 - DNA, 15 bp, Homo sapiens
tcctttattattgtt

SEQ ID NO: 1861214 - DNA, 15 bp, Homo sapiens
cctttattattgttg

SEQ ID NO: 1861215 - DNA, 15 bp, Homo sapiens
ctttattattgttgt

SEQ ID NO: 1861216 - DNA, 15 bp, Homo sapiens
tttattattgttgtt

SEQ ID NO: 1861217 - DNA, 15 bp, Homo sapiens
ttattattgttgtta

SEQ ID NO: 1861218 - DNA, 15 bp, Homo sapiens
tattattgttgttac

SEQ ID NO: 1861219 - DNA, 15 bp, Homo sapiens
attattgttgttact

SEQ ID NO: 1861220 - DNA, 15 bp, Homo sapiens
ttattgttgttactg

SEQ ID NO: 1861221 - DNA, 15 bp, Homo sapiens
tattgttgttactgt

SEQ ID NO: 1861222 - DNA, 15 bp, Homo sapiens
attgttgttactgtg

SEQ ID NO: 1861223 - DNA, 15 bp, Homo sapiens
ttgttgttactgtgt

SEQ ID NO: 1861224 - DNA, 15 bp, Homo sapiens
tgttgttactgtgtc

SEQ ID NO: 1861225 - DNA, 15 bp, Homo sapiens
gttgttactgtgtca

SEQ ID NO: 1861226 - DNA, 15 bp, Homo sapiens
ttgttactgtgtcat

SEQ ID NO: 1861227 - DNA, 15 bp, Homo sapiens
tgttactgtgtcata

SEQ ID NO: 1861228 - DNA, 15 bp, Homo sapiens
gttactgtgtcataa

SEQ ID NO: 1861229 - DNA, 15 bp, Homo sapiens
ttactgtgtcataat

SEQ ID NO: 1861230 - DNA, 15 bp, Homo sapiens
tactgtgtcataatt

SEQ ID NO: 1861231 - DNA, 15 bp, Homo sapiens
actgtgtcataattc

SEQ ID NO: 1861232 - DNA, 15 bp, Homo sapiens
ctgtgtcataattcc

SEQ ID NO: 1861233 - DNA, 15 bp, Homo sapiens
tgtgtcataattcct

SEQ ID NO: 1861234 - DNA, 15 bp, Homo sapiens
gtgtcataattcctt

SEQ ID NO: 1861235 - DNA, 15 bp, Homo sapiens
tgtcataattccttg

SEQ ID NO: 1861236 - DNA, 15 bp, Homo sapiens
gtcataattccttgc

SEQ ID NO: 1861237 - DNA, 15 bp, Homo sapiens
tcataattccttgca

SEQ ID NO: 1861238 - DNA, 15 bp, Homo sapiens
cataattccttgcag

SEQ ID NO: 1861239 - DNA, 15 bp, Homo sapiens
ataattccttgcaga

SEQ ID NO: 1861240 - DNA, 15 bp, Homo sapiens
taattccttgcagaa

SEQ ID NO: 1861241 - DNA, 15 bp, Homo sapiens
aattccttgcagaat

SEQ ID NO: 1861242 - DNA, 15 bp, Homo sapiens
attccttgcagaatt

SEQ ID NO: 1861243 - DNA, 15 bp, Homo sapiens
ttccttgcagaatta

SEQ ID NO: 1861244 - DNA, 15 bp, Homo sapiens
tccttgcagaattat

SEQ ID NO: 1861245 - DNA, 15 bp, Homo sapiens
ccttgcagaattatg

SEQ ID NO: 1861246 - DNA, 15 bp, Homo sapiens
cttgcagaattatga

SEQ ID NO: 1861247 - DNA, 15 bp, Homo sapiens
ttgcagaattatgat

SEQ ID NO: 1861248 - DNA, 15 bp, Homo sapiens
tgcagaattatgatg

SEQ ID NO: 1861249 - DNA, 15 bp, Homo sapiens
gcagaattatgatgg

SEQ ID NO: 1861250 - DNA, 15 bp, Homo sapiens
cagaattatgatggc

SEQ ID NO: 1861251 - DNA, 15 bp, Homo sapiens
agaattatgatggcc

SEQ ID NO: 1861252 - DNA, 15 bp, Homo sapiens
gaattatgatggcca

SEQ ID NO: 1861253 - DNA, 15 bp, Homo sapiens
aattatgatggccag

SEQ ID NO: 1861254 - DNA, 15 bp, Homo sapiens
attatgatggccagg

SEQ ID NO: 1861255 - DNA, 15 bp, Homo sapiens
ttatgatggccaggc

SEQ ID NO: 1861256 - DNA, 15 bp, Homo sapiens
tatgatggccaggct

SEQ ID NO: 1861257 - DNA, 15 bp, Homo sapiens
atgatggccaggctg

SEQ ID NO: 1861258 - DNA, 15 bp, Homo sapiens
tgatggccaggctgg

SEQ ID NO: 1861259 - DNA, 15 bp, Homo sapiens
gatggccaggctggt

SEQ ID NO: 1861260 - DNA, 15 bp, Homo sapiens
atggccaggctggtc

SEQ ID NO: 1861261 - DNA, 15 bp, Homo sapiens
gccaggctggtcttt

SEQ ID NO: 1861262 - DNA, 15 bp, Homo sapiens
ccaggctggtcttta

SEQ ID NO: 1861263 - DNA, 15 bp, Homo sapiens
caggctggtctttac

SEQ ID NO: 1861264 - DNA, 15 bp, Homo sapiens
aggctggtctttact

SEQ ID NO: 1861265 - DNA, 15 bp, Homo sapiens
ggctggtctttactt

SEQ ID NO: 1861266 - DNA, 15 bp, Homo sapiens
gctggtctttacttc

SEQ ID NO: 1861267 - DNA, 15 bp, Homo sapiens
ctggtctttacttcc

SEQ ID NO: 1861268 - DNA, 15 bp, Homo sapiens
tggtctttacttcct

SEQ ID NO: 1861269 - DNA, 15 bp, Homo sapiens
ggtctttacttcctt

SEQ ID NO: 1861270 - DNA, 15 bp, Homo sapiens
gtctttacttccttc

SEQ ID NO: 1861271 - DNA, 15 bp, Homo sapiens
tctttacttccttcg

SEQ ID NO: 1861272 - DNA, 15 bp, Homo sapiens
ctttacttccttcgg

SEQ ID NO: 1861273 - DNA, 15 bp, Homo sapiens
tttacttccttcggt

SEQ ID NO: 1861274 - DNA, 15 bp, Homo sapiens
ttacttccttcggtc

SEQ ID NO: 1861275 - DNA, 15 bp, Homo sapiens
tacttccttcggtcc

SEQ ID NO: 1861276 - DNA, 15 bp, Homo sapiens
acttccttcggtcca

SEQ ID NO: 1861277 - DNA, 15 bp, Homo sapiens
cttccttcggtccag

SEQ ID NO: 1861278 - DNA, 15 bp, Homo sapiens
ttccttcggtccagg

SEQ ID NO: 1861279 - DNA, 15 bp, Homo sapiens
tccttcggtccaggc

SEQ ID NO: 1861280 - DNA, 15 bp, Homo sapiens
ccttcggtccaggcc

SEQ ID NO: 1861281 - DNA, 15 bp, Homo sapiens
cttcggtccaggcct

SEQ ID NO: 1861282 - DNA, 15 bp, Homo sapiens
ttcggtccaggcctt

SEQ ID NO: 1861283 - DNA, 15 bp, Homo sapiens
tcggtccaggccttg

SEQ ID NO: 1861284 - DNA, 15 bp, Homo sapiens
cggtccaggccttga

SEQ ID NO: 1861285 - DNA, 15 bp, Homo sapiens
ggtccaggccttgaa

SEQ ID NO: 1861286 - DNA, 15 bp, Homo sapiens
gtccaggccttgaac

SEQ ID NO: 1861287 - DNA, 15 bp, Homo sapiens
tccaggccttgaact

SEQ ID NO: 1861288 - DNA, 15 bp, Homo sapiens
ccaggccttgaactc

SEQ ID NO: 1861289 - DNA, 15 bp, Homo sapiens
caggccttgaactcg

SEQ ID NO: 1861290 - DNA, 15 bp, Homo sapiens
aggccttgaactcgg

SEQ ID NO: 1861291 - DNA, 15 bp, Homo sapiens
ggccttgaactcgga

SEQ ID NO: 1861292 - DNA, 15 bp, Homo sapiens
gccttgaactcggag

SEQ ID NO: 1861293 - DNA, 15 bp, Homo sapiens
ccttgaactcggagc

SEQ ID NO: 1861294 - DNA, 15 bp, Homo sapiens
cttgaactcggagca

SEQ ID NO: 1861295 - DNA, 15 bp, Homo sapiens
ttgaactcggagcag

SEQ ID NO: 1861296 - DNA, 15 bp, Homo sapiens
tgaactcggagcagc

SEQ ID NO: 1861297 - DNA, 15 bp, Homo sapiens
gaactcggagcagca

SEQ ID NO: 1861298 - DNA, 15 bp, Homo sapiens
aactcggagcagcac

SEQ ID NO: 1861299 - DNA, 15 bp, Homo sapiens
actcggagcagcact

SEQ ID NO: 1861300 - DNA, 15 bp, Homo sapiens
ctcggagcagcactc

SEQ ID NO: 1861301 - DNA, 15 bp, Homo sapiens
tcggagcagcactct

SEQ ID NO: 1861302 - DNA, 15 bp, Homo sapiens
cggagcagcactctc

SEQ ID NO: 1861303 - DNA, 15 bp, Homo sapiens
ggagcagcactctca

SEQ ID NO: 1861304 - DNA, 15 bp, Homo sapiens
gagcagcactctcaa

SEQ ID NO: 1861305 - DNA, 15 bp, Homo sapiens
agcagcactctcaaa

SEQ ID NO: 1861306 - DNA, 15 bp, Homo sapiens
gcagcactctcaaag

SEQ ID NO: 1861307 - DNA, 15 bp, Homo sapiens
cagcactctcaaagc

SEQ ID NO: 1861308 - DNA, 15 bp, Homo sapiens
agcactctcaaagca

SEQ ID NO: 1861309 - DNA, 15 bp, Homo sapiens
gcactctcaaagcag

SEQ ID NO: 1861310 - DNA, 15 bp, Homo sapiens
cactctcaaagcagt

SEQ ID NO: 1861311 - DNA, 15 bp, Homo sapiens
actctcaaagcagtt

SEQ ID NO: 1861312 - DNA, 15 bp, Homo sapiens
ctctcaaagcagttg

SEQ ID NO: 1861313 - DNA, 15 bp, Homo sapiens
tctcaaagcagttgt

SEQ ID NO: 1861314 - DNA, 15 bp, Homo sapiens
ctcaaagcagttgtc

SEQ ID NO: 1861315 - DNA, 15 bp, Homo sapiens
tcaaagcagttgtct

SEQ ID NO: 1861316 - DNA, 15 bp, Homo sapiens
caaagcagttgtctt

SEQ ID NO: 1861317 - DNA, 15 bp, Homo sapiens
aaagcagttgtcttc

SEQ ID NO: 1861318 - DNA, 15 bp, Homo sapiens
aagcagttgtcttca

SEQ ID NO: 1861319 - DNA, 15 bp, Homo sapiens
agcagttgtcttcac

SEQ ID NO: 1861320 - DNA, 15 bp, Homo sapiens
gcagttgtcttcacc

SEQ ID NO: 1861321 - DNA, 15 bp, Homo sapiens
cagttgtcttcacct

SEQ ID NO: 1861322 - DNA, 15 bp, Homo sapiens
agttgtcttcacctg

SEQ ID NO: 1861323 - DNA, 15 bp, Homo sapiens
gttgtcttcacctgg

SEQ ID NO: 1861324 - DNA, 15 bp, Homo sapiens
ttgtcttcacctggc

SEQ ID NO: 1861325 - DNA, 15 bp, Homo sapiens
tgtcttcacctggca

SEQ ID NO: 1861326 - DNA, 15 bp, Homo sapiens
gtcttcacctggcag

SEQ ID NO: 1861327 - DNA, 15 bp, Homo sapiens
tcttcacctggcaga

SEQ ID NO: 1861328 - DNA, 15 bp, Homo sapiens
cttcacctggcagaa

SEQ ID NO: 1861329 - DNA, 15 bp, Homo sapiens
ttcacctggcagaag

SEQ ID NO: 1861330 - DNA, 15 bp, Homo sapiens
tcacctggcagaaga

SEQ ID NO: 1861331 - DNA, 15 bp, Homo sapiens
cacctggcagaagaa

SEQ ID NO: 1861332 - DNA, 15 bp, Homo sapiens
acctggcagaagaaa

SEQ ID NO: 1861333 - DNA, 15 bp, Homo sapiens
cctggcagaagaaaa

SEQ ID NO: 1861334 - DNA, 15 bp, Homo sapiens
ctggcagaagaaaaa

SEQ ID NO: 1861335 - DNA, 15 bp, Homo sapiens
tggcagaagaaaaaa

SEQ ID NO: 1861336 - DNA, 15 bp, Homo sapiens
ggcagaagaaaaaaa

SEQ ID NO: 1861337 - DNA, 15 bp, Homo sapiens
gcagaagaaaaaaaa

SEQ ID NO: 1861338 - DNA, 15 bp, Homo sapiens
cagaagaaaaaaaag

SEQ ID NO: 1861339 - DNA, 15 bp, Homo sapiens
agaagaaaaaaaagg

SEQ ID NO: 1861340 - DNA, 15 bp, Homo sapiens
gaagaaaaaaaaggt

SEQ ID NO: 1861341 - DNA, 15 bp, Homo sapiens
aagaaaaaaaaggtg

SEQ ID NO: 1861342 - DNA, 15 bp, Homo sapiens
agaaaaaaaaggtgt

SEQ ID NO: 1861343 - DNA, 15 bp, Homo sapiens
gaaaaaaaaggtgta

SEQ ID NO: 1861344 - DNA, 15 bp, Homo sapiens
aaaaaaaaggtgtaa

SEQ ID NO: 1861345 - DNA, 15 bp, Homo sapiens
aaaaaaaggtgtaaa

SEQ ID NO: 1861346 - DNA, 15 bp, Homo sapiens
aaaaaaggtgtaaag

SEQ ID NO: 1861347 - DNA, 15 bp, Homo sapiens
aaaaaggtgtaaagt

SEQ ID NO: 1861348 - DNA, 15 bp, Homo sapiens
aaaaggtgtaaagtg

SEQ ID NO: 1861349 - DNA, 15 bp, Homo sapiens
aaaggtgtaaagtgc

SEQ ID NO: 1861350 - DNA, 15 bp, Homo sapiens
aaggtgtaaagtgct

SEQ ID NO: 1861351 - DNA, 15 bp, Homo sapiens
aggtgtaaagtgctg

SEQ ID NO: 1861352 - DNA, 15 bp, Homo sapiens
ggtgtaaagtgctgg

SEQ ID NO: 1861353 - DNA, 15 bp, Homo sapiens
gtgtaaagtgctggt

SEQ ID NO: 1861354 - DNA, 15 bp, Homo sapiens
tgtaaagtgctggtt

SEQ ID NO: 1861355 - DNA, 15 bp, Homo sapiens
gtaaagtgctggttc

SEQ ID NO: 1861356 - DNA, 15 bp, Homo sapiens
taaagtgctggttcc

SEQ ID NO: 1861357 - DNA, 15 bp, Homo sapiens
aaagtgctggttcct

SEQ ID NO: 1861358 - DNA, 15 bp, Homo sapiens
aagtgctggttcctg

SEQ ID NO: 1861359 - DNA, 15 bp, Homo sapiens
agtgctggttcctgg

SEQ ID NO: 1861360 - DNA, 15 bp, Homo sapiens
gtgctggttcctgga

SEQ ID NO: 1861361 - DNA, 15 bp, Homo sapiens
tgctggttcctggac

SEQ ID NO: 1861362 - DNA, 15 bp, Homo sapiens
gctggttcctggact

SEQ ID NO: 1861363 - DNA, 15 bp, Homo sapiens
ctggttcctggactt

SEQ ID NO: 1861364 - DNA, 15 bp, Homo sapiens
tggttcctggacttg

SEQ ID NO: 1861365 - DNA, 15 bp, Homo sapiens
ggttcctggacttgc

SEQ ID NO: 1861366 - DNA, 15 bp, Homo sapiens
gttcctggacttgct

SEQ ID NO: 1861367 - DNA, 15 bp, Homo sapiens
ttcctggacttgctc

SEQ ID NO: 1861368 - DNA, 15 bp, Homo sapiens
tcctggacttgctcg

SEQ ID NO: 1861369 - DNA, 15 bp, Homo sapiens
cctggacttgctcgc

SEQ ID NO: 1861370 - DNA, 15 bp, Homo sapiens
ctggacttgctcgca

SEQ ID NO: 1861371 - DNA, 15 bp, Homo sapiens
tggacttgctcgcac

SEQ ID NO: 1861372 - DNA, 15 bp, Homo sapiens
ggacttgctcgcaca

SEQ ID NO: 1861373 - DNA, 15 bp, Homo sapiens
gacttgctcgcacac

SEQ ID NO: 1861374 - DNA, 15 bp, Homo sapiens
acttgctcgcacact

SEQ ID NO: 1861375 - DNA, 15 bp, Homo sapiens
cttgctcgcacacta

SEQ ID NO: 1861376 - DNA, 15 bp, Homo sapiens
ttgctcgcacactaa

SEQ ID NO: 1861377 - DNA, 15 bp, Homo sapiens
tgctcgcacactaaa

SEQ ID NO: 1861378 - DNA, 15 bp, Homo sapiens
gctcgcacactaaaa

SEQ ID NO: 1861379 - DNA, 15 bp, Homo sapiens
ctcgcacactaaaat

SEQ ID NO: 1861380 - DNA, 15 bp, Homo sapiens
tcgcacactaaaatc

SEQ ID NO: 1861381 - DNA, 15 bp, Homo sapiens
cgcacactaaaatcc

SEQ ID NO: 1861382 - DNA, 15 bp, Homo sapiens
gcacactaaaatccc

SEQ ID NO: 1861383 - DNA, 15 bp, Homo sapiens
cacactaaaatccct

SEQ ID NO: 1861384 - DNA, 15 bp, Homo sapiens
acactaaaatccctc

SEQ ID NO: 1861385 - DNA, 15 bp, Homo sapiens
cactaaaatccctcg

SEQ ID NO: 1861386 - DNA, 15 bp, Homo sapiens
actaaaatccctcgg

SEQ ID NO: 1861387 - DNA, 15 bp, Homo sapiens
ctaaaatccctcggg

SEQ ID NO: 1861388 - DNA, 15 bp, Homo sapiens
taaaatccctcggga

SEQ ID NO: 1861389 - DNA, 15 bp, Homo sapiens
aaaatccctcgggat

SEQ ID NO: 1861390 - DNA, 15 bp, Homo sapiens
aaatccctcgggatt

SEQ ID NO: 1861391 - DNA, 15 bp, Homo sapiens
aatccctcgggattc

SEQ ID NO: 1861392 - DNA, 15 bp, Homo sapiens
atccctcgggattca

SEQ ID NO: 1861393 - DNA, 15 bp, Homo sapiens
tccctcgggattcag

SEQ ID NO: 1861394 - DNA, 15 bp, Homo sapiens
ccctcgggattcagc

SEQ ID NO: 1861395 - DNA, 15 bp, Homo sapiens
cctcgggattcagct

SEQ ID NO: 1861396 - DNA, 15 bp, Homo sapiens
ctcgggattcagctt

SEQ ID NO: 1861397 - DNA, 15 bp, Homo sapiens
tcgggattcagcttc

SEQ ID NO: 1861398 - DNA, 15 bp, Homo sapiens
cgggattcagcttcc

SEQ ID NO: 1861399 - DNA, 15 bp, Homo sapiens
gggattcagcttccc

SEQ ID NO: 1861400 - DNA, 15 bp, Homo sapiens
ggattcagcttccca

SEQ ID NO: 1861401 - DNA, 15 bp, Homo sapiens
gattcagcttcccag

SEQ ID NO: 1861402 - DNA, 15 bp, Homo sapiens
attcagcttcccaga

SEQ ID NO: 1861403 - DNA, 15 bp, Homo sapiens
ttcagcttcccagat

SEQ ID NO: 1861404 - DNA, 15 bp, Homo sapiens
tcagcttcccagata

SEQ ID NO: 1861405 - DNA, 15 bp, Homo sapiens
cagcttcccagataa

SEQ ID NO: 1861406 - DNA, 15 bp, Homo sapiens
agcttcccagataac

SEQ ID NO: 1861407 - DNA, 15 bp, Homo sapiens
gcttcccagataact

SEQ ID NO: 1861408 - DNA, 15 bp, Homo sapiens
cttcccagataactt

SEQ ID NO: 1861409 - DNA, 15 bp, Homo sapiens
ttcccagataacttt

SEQ ID NO: 1861410 - DNA, 15 bp, Homo sapiens
tcccagataactttc

SEQ ID NO: 1861411 - DNA, 15 bp, Homo sapiens
cccagataactttct

SEQ ID NO: 1861412 - DNA, 15 bp, Homo sapiens
ccagataactttctt

SEQ ID NO: 1861413 - DNA, 15 bp, Homo sapiens
cagataactttcttg

SEQ ID NO: 1861414 - DNA, 15 bp, Homo sapiens
agataactttcttgc

SEQ ID NO: 1861415 - DNA, 15 bp, Homo sapiens
gataactttcttgct

SEQ ID NO: 1861416 - DNA, 15 bp, Homo sapiens
ataactttcttgctt

SEQ ID NO: 1861417 - DNA, 15 bp, Homo sapiens
taactttcttgcttc

SEQ ID NO: 1861418 - DNA, 15 bp, Homo sapiens
aactttcttgcttct

SEQ ID NO: 1861419 - DNA, 15 bp, Homo sapiens
actttcttgcttctt

SEQ ID NO: 1861420 - DNA, 15 bp, Homo sapiens
ctttcttgcttcttt

SEQ ID NO: 1861421 - DNA, 15 bp, Homo sapiens
tttcttgcttctttg

SEQ ID NO: 1861422 - DNA, 15 bp, Homo sapiens
ttcttgcttctttgt

SEQ ID NO: 1861423 - DNA, 15 bp, Homo sapiens
tcttgcttctttgta

SEQ ID NO: 1861424 - DNA, 15 bp, Homo sapiens
cttgcttctttgtag

SEQ ID NO: 1861425 - DNA, 15 bp, Homo sapiens
ttgcttctttgtaga

SEQ ID NO: 1861426 - DNA, 15 bp, Homo sapiens
tgcttctttgtagag

SEQ ID NO: 1861427 - DNA, 15 bp, Homo sapiens
gcttctttgtagaga

SEQ ID NO: 1861428 - DNA, 15 bp, Homo sapiens
cttctttgtagagac

SEQ ID NO: 1861429 - DNA, 15 bp, Homo sapiens
ttctttgtagagaca

SEQ ID NO: 1861430 - DNA, 15 bp, Homo sapiens
tctttgtagagacat

SEQ ID NO: 1861431 - DNA, 15 bp, Homo sapiens
ctttgtagagacatt

SEQ ID NO: 1861432 - DNA, 15 bp, Homo sapiens
tttgtagagacattt

SEQ ID NO: 1861433 - DNA, 15 bp, Homo sapiens
ttgtagagacatttg

SEQ ID NO: 1861434 - DNA, 15 bp, Homo sapiens
tgtagagacatttga

SEQ ID NO: 1861435 - DNA, 15 bp, Homo sapiens
gtagagacatttgag

SEQ ID NO: 1861436 - DNA, 15 bp, Homo sapiens
tagagacatttgaga

SEQ ID NO: 1861437 - DNA, 15 bp, Homo sapiens
agagacatttgagag

SEQ ID NO: 1861438 - DNA, 15 bp, Homo sapiens
gagacatttgagaga

SEQ ID NO: 1861439 - DNA, 15 bp, Homo sapiens
agacatttgagagaa

SEQ ID NO: 1861440 - DNA, 15 bp, Homo sapiens
gacatttgagagaaa

SEQ ID NO: 1861441 - DNA, 15 bp, Homo sapiens
acatttgagagaaaa

SEQ ID NO: 1861442 - DNA, 15 bp, Homo sapiens
catttgagagaaaac

SEQ ID NO: 1861443 - DNA, 15 bp, Homo sapiens
atttgagagaaaact

SEQ ID NO: 1861444 - DNA, 15 bp, Homo sapiens
tttgagagaaaacta

SEQ ID NO: 1861445 - DNA, 15 bp, Homo sapiens
ttgagagaaaactat

SEQ ID NO: 1861446 - DNA, 15 bp, Homo sapiens
tgagagaaaactatt

SEQ ID NO: 1861447 - DNA, 15 bp, Homo sapiens
gagagaaaactatta

SEQ ID NO: 1861448 - DNA, 15 bp, Homo sapiens
agagaaaactattat

SEQ ID NO: 1861449 - DNA, 15 bp, Homo sapiens
gagaaaactattatt

SEQ ID NO: 1861450 - DNA, 15 bp, Homo sapiens
agaaaactattatta

SEQ ID NO: 1861451 - DNA, 15 bp, Homo sapiens
gaaaactattattaa

SEQ ID NO: 1861452 - DNA, 15 bp, Homo sapiens
aaaactattattaac

SEQ ID NO: 1861453 - DNA, 15 bp, Homo sapiens
aaactattattaact

SEQ ID NO: 1861454 - DNA, 15 bp, Homo sapiens
actattattaactat

SEQ ID NO: 1861455 - DNA, 15 bp, Homo sapiens
ctattattaactata

SEQ ID NO: 1861456 - DNA, 15 bp, Homo sapiens
tattattaactatac

SEQ ID NO: 1861457 - DNA, 15 bp, Homo sapiens
attattaactataca

SEQ ID NO: 1861458 - DNA, 15 bp, Homo sapiens
ttattaactatacat

SEQ ID NO: 1861459 - DNA, 15 bp, Homo sapiens
tattaactatacatg

SEQ ID NO: 1861460 - DNA, 15 bp, Homo sapiens
attaactatacatgg

SEQ ID NO: 1861461 - DNA, 15 bp, Homo sapiens
ttaactatacatggt

SEQ ID NO: 1861462 - DNA, 15 bp, Homo sapiens
taactatacatggtc

SEQ ID NO: 1861463 - DNA, 15 bp, Homo sapiens
aactatacatggtcc

SEQ ID NO: 1861464 - DNA, 15 bp, Homo sapiens
actatacatggtcca

SEQ ID NO: 1861465 - DNA, 15 bp, Homo sapiens
ctatacatggtccac

SEQ ID NO: 1861466 - DNA, 15 bp, Homo sapiens
tatacatggtccact

SEQ ID NO: 1861467 - DNA, 15 bp, Homo sapiens
atacatggtccactg

SEQ ID NO: 1861468 - DNA, 15 bp, Homo sapiens
tacatggtccactgt

SEQ ID NO: 1861469 - DNA, 15 bp, Homo sapiens
acatggtccactgtt

SEQ ID NO: 1861470 - DNA, 15 bp, Homo sapiens
catggtccactgttt

SEQ ID NO: 1861471 - DNA, 15 bp, Homo sapiens
atggtccactgtttt

SEQ ID NO: 1861472 - DNA, 15 bp, Homo sapiens
tggtccactgttttg

SEQ ID NO: 1861473 - DNA, 15 bp, Homo sapiens
ggtccactgttttgc

SEQ ID NO: 1861474 - DNA, 15 bp, Homo sapiens
gtccactgttttgct

SEQ ID NO: 1861475 - DNA, 15 bp, Homo sapiens
tccactgttttgctt

SEQ ID NO: 1861476 - DNA, 15 bp, Homo sapiens
ccactgttttgcttt

SEQ ID NO: 1861477 - DNA, 15 bp, Homo sapiens
cactgttttgctttg

SEQ ID NO: 1861478 - DNA, 15 bp, Homo sapiens
actgttttgctttgc

SEQ ID NO: 1861479 - DNA, 15 bp, Homo sapiens
ctgttttgctttgct

SEQ ID NO: 1861480 - DNA, 15 bp, Homo sapiens
tgttttgctttgctg

SEQ ID NO: 1861481 - DNA, 15 bp, Homo sapiens
gttttgctttgctgt

SEQ ID NO: 1861482 - DNA, 15 bp, Homo sapiens
ttttgctttgctgtc

SEQ ID NO: 1861483 - DNA, 15 bp, Homo sapiens
tttgctttgctgtca

SEQ ID NO: 1861484 - DNA, 15 bp, Homo sapiens
ttgctttgctgtcat

SEQ ID NO: 1861485 - DNA, 15 bp, Homo sapiens
tgctttgctgtcatg

SEQ ID NO: 1861486 - DNA, 15 bp, Homo sapiens
gctttgctgtcatga

SEQ ID NO: 1861487 - DNA, 15 bp, Homo sapiens
ctttgctgtcatgaa

SEQ ID NO: 1861488 - DNA, 15 bp, Homo sapiens
tttgctgtcatgaat

SEQ ID NO: 1861489 - DNA, 15 bp, Homo sapiens
ttgctgtcatgaatg

SEQ ID NO: 1861490 - DNA, 15 bp, Homo sapiens
tgctgtcatgaatgg

SEQ ID NO: 1861491 - DNA, 15 bp, Homo sapiens
gctgtcatgaatggg

SEQ ID NO: 1861492 - DNA, 15 bp, Homo sapiens
ctgtcatgaatggga

SEQ ID NO: 1861493 - DNA, 15 bp, Homo sapiens
tgtcatgaatgggat

SEQ ID NO: 1861494 - DNA, 15 bp, Homo sapiens
gtcatgaatgggatt

SEQ ID NO: 1861495 - DNA, 15 bp, Homo sapiens
tcatgaatgggattg

SEQ ID NO: 1861496 - DNA, 15 bp, Homo sapiens
catgaatgggattgt

SEQ ID NO: 1861497 - DNA, 15 bp, Homo sapiens
atgaatgggattgta

SEQ ID NO: 1861498 - DNA, 15 bp, Homo sapiens
tgaatgggattgtaa

SEQ ID NO: 1861499 - DNA, 15 bp, Homo sapiens
gaatgggattgtaaa

SEQ ID NO: 1861500 - DNA, 15 bp, Homo sapiens
aatgggattgtaaaa

SEQ ID NO: 1861501 - DNA, 15 bp, Homo sapiens
atgggattgtaaaag

SEQ ID NO: 1861502 - DNA, 15 bp, Homo sapiens
tgggattgtaaaagg

SEQ ID NO: 1861503 - DNA, 15 bp, Homo sapiens
gggattgtaaaaggg

SEQ ID NO: 1861504 - DNA, 15 bp, Homo sapiens
ggattgtaaaaggga

SEQ ID NO: 1861505 - DNA, 15 bp, Homo sapiens
gattgtaaaagggac

SEQ ID NO: 1861506 - DNA, 15 bp, Homo sapiens
attgtaaaagggacc

SEQ ID NO: 1861507 - DNA, 15 bp, Homo sapiens
ttgtaaaagggaccc

SEQ ID NO: 1861508 - DNA, 15 bp, Homo sapiens
tgtaaaagggaccca

SEQ ID NO: 1861509 - DNA, 15 bp, Homo sapiens
gtaaaagggacccat

SEQ ID NO: 1861510 - DNA, 15 bp, Homo sapiens
taaaagggacccatg

SEQ ID NO: 1861511 - DNA, 15 bp, Homo sapiens
aaaagggacccatgg

SEQ ID NO: 1861512 - DNA, 15 bp, Homo sapiens
aaagggacccatggg

SEQ ID NO: 1861513 - DNA, 15 bp, Homo sapiens
aagggacccatggga

SEQ ID NO: 1861514 - DNA, 15 bp, Homo sapiens
agggacccatgggac

SEQ ID NO: 1861515 - DNA, 15 bp, Homo sapiens
gggacccatgggacc

SEQ ID NO: 1861516 - DNA, 15 bp, Homo sapiens
ggacccatgggaccg

SEQ ID NO: 1861517 - DNA, 15 bp, Homo sapiens
gacccatgggaccgg

SEQ ID NO: 1861518 - DNA, 15 bp, Homo sapiens
acccatgggaccggg

SEQ ID NO: 1861519 - DNA, 15 bp, Homo sapiens
cccatgggaccgggt

SEQ ID NO: 1861520 - DNA, 15 bp, Homo sapiens
ccatgggaccgggtt

SEQ ID NO: 1861521 - DNA, 15 bp, Homo sapiens
catgggaccgggttt

SEQ ID NO: 1861522 - DNA, 15 bp, Homo sapiens
atgggaccgggtttc

SEQ ID NO: 1861523 - DNA, 15 bp, Homo sapiens
tgggaccgggtttcc

SEQ ID NO: 1861524 - DNA, 15 bp, Homo sapiens
gggaccgggtttcct

SEQ ID NO: 1861525 - DNA, 15 bp, Homo sapiens
ggaccgggtttcctt

SEQ ID NO: 1861526 - DNA, 15 bp, Homo sapiens
gaccgggtttccttt

SEQ ID NO: 1861527 - DNA, 15 bp, Homo sapiens
accgggtttcctttt

SEQ ID NO: 1861528 - DNA, 15 bp, Homo sapiens
ccgggtttccttttg

SEQ ID NO: 1861529 - DNA, 15 bp, Homo sapiens
cgggtttccttttgg

SEQ ID NO: 1861530 - DNA, 15 bp, Homo sapiens
gggtttccttttggg

SEQ ID NO: 1861531 - DNA, 15 bp, Homo sapiens
ggtttccttttggga

SEQ ID NO: 1861532 - DNA, 15 bp, Homo sapiens
gtttccttttgggac

SEQ ID NO: 1861533 - DNA, 15 bp, Homo sapiens
tttccttttgggacg

SEQ ID NO: 1861534 - DNA, 15 bp, Homo sapiens
ttccttttgggacga

SEQ ID NO: 1861535 - DNA, 15 bp, Homo sapiens
tccttttgggacgat

SEQ ID NO: 1861536 - DNA, 15 bp, Homo sapiens
ccttttgggacgatg

SEQ ID NO: 1861537 - DNA, 15 bp, Homo sapiens
cttttgggacgatga

SEQ ID NO: 1861538 - DNA, 15 bp, Homo sapiens
ttttgggacgatgaa

SEQ ID NO: 1861539 - DNA, 15 bp, Homo sapiens
tttgggacgatgaaa

SEQ ID NO: 1861540 - DNA, 15 bp, Homo sapiens
ttgggacgatgaaaa

SEQ ID NO: 1861541 - DNA, 15 bp, Homo sapiens
tgggacgatgaaaat

SEQ ID NO: 1861542 - DNA, 15 bp, Homo sapiens
gggacgatgaaaatg

SEQ ID NO: 1861543 - DNA, 15 bp, Homo sapiens
ggacgatgaaaatgt

SEQ ID NO: 1861544 - DNA, 15 bp, Homo sapiens
gacgatgaaaatgtt

SEQ ID NO: 1861545 - DNA, 15 bp, Homo sapiens
acgatgaaaatgttc

SEQ ID NO: 1861546 - DNA, 15 bp, Homo sapiens
cgatgaaaatgttct

SEQ ID NO: 1861547 - DNA, 15 bp, Homo sapiens
gatgaaaatgttctg

SEQ ID NO: 1861548 - DNA, 15 bp, Homo sapiens
atgaaaatgttctgg

SEQ ID NO: 1861549 - DNA, 15 bp, Homo sapiens
tgaaaatgttctgga

SEQ ID NO: 1861550 - DNA, 15 bp, Homo sapiens
gaaaatgttctggaa

SEQ ID NO: 1861551 - DNA, 15 bp, Homo sapiens
aaaatgttctggaac

SEQ ID NO: 1861552 - DNA, 15 bp, Homo sapiens
aaatgttctggaact

SEQ ID NO: 1861553 - DNA, 15 bp, Homo sapiens
aatgttctggaactg

SEQ ID NO: 1861554 - DNA, 15 bp, Homo sapiens
atgttctggaactgt

SEQ ID NO: 1861555 - DNA, 15 bp, Homo sapiens
tgttctggaactgta

SEQ ID NO: 1861556 - DNA, 15 bp, Homo sapiens
gttctggaactgtag

SEQ ID NO: 1861557 - DNA, 15 bp, Homo sapiens
ttctggaactgtaga

SEQ ID NO: 1861558 - DNA, 15 bp, Homo sapiens
tctggaactgtagag

SEQ ID NO: 1861559 - DNA, 15 bp, Homo sapiens
ctggaactgtagagt

SEQ ID NO: 1861560 - DNA, 15 bp, Homo sapiens
tggaactgtagagtg

SEQ ID NO: 1861561 - DNA, 15 bp, Homo sapiens
ggaactgtagagtgg

SEQ ID NO: 1861562 - DNA, 15 bp, Homo sapiens
gaactgtagagtggt

SEQ ID NO: 1861563 - DNA, 15 bp, Homo sapiens
aactgtagagtggtg

SEQ ID NO: 1861564 - DNA, 15 bp, Homo sapiens
actgtagagtggtga

SEQ ID NO: 1861565 - DNA, 15 bp, Homo sapiens
ctgtagagtggtgat

SEQ ID NO: 1861566 - DNA, 15 bp, Homo sapiens
tgtagagtggtgatg

SEQ ID NO: 1861567 - DNA, 15 bp, Homo sapiens
gtagagtggtgatgg

SEQ ID NO: 1861568 - DNA, 15 bp, Homo sapiens
tagagtggtgatggt

SEQ ID NO: 1861569 - DNA, 15 bp, Homo sapiens
agagtggtgatggtt

SEQ ID NO: 1861570 - DNA, 15 bp, Homo sapiens
gagtggtgatggttg

SEQ ID NO: 1861571 - DNA, 15 bp, Homo sapiens
agtggtgatggttgc

SEQ ID NO: 1861572 - DNA, 15 bp, Homo sapiens
gtggtgatggttgca

SEQ ID NO: 1861573 - DNA, 15 bp, Homo sapiens
tggtgatggttgcac

SEQ ID NO: 1861574 - DNA, 15 bp, Homo sapiens
ggtgatggttgcaca

SEQ ID NO: 1861575 - DNA, 15 bp, Homo sapiens
gtgatggttgcacag

SEQ ID NO: 1861576 - DNA, 15 bp, Homo sapiens
tgatggttgcacagt

SEQ ID NO: 1861577 - DNA, 15 bp, Homo sapiens
gatggttgcacagtt

SEQ ID NO: 1861578 - DNA, 15 bp, Homo sapiens
atggttgcacagttc

SEQ ID NO: 1861579 - DNA, 15 bp, Homo sapiens
tggttgcacagttca

SEQ ID NO: 1861580 - DNA, 15 bp, Homo sapiens
ggttgcacagttcac

SEQ ID NO: 1861581 - DNA, 15 bp, Homo sapiens
gttgcacagttcacc

SEQ ID NO: 1861582 - DNA, 15 bp, Homo sapiens
ttgcacagttcaccg

SEQ ID NO: 1861583 - DNA, 15 bp, Homo sapiens
tgcacagttcaccga

SEQ ID NO: 1861584 - DNA, 15 bp, Homo sapiens
gcacagttcaccgaa

SEQ ID NO: 1861585 - DNA, 15 bp, Homo sapiens
cacagttcaccgaat

SEQ ID NO: 1861586 - DNA, 15 bp, Homo sapiens
acagttcaccgaatg

SEQ ID NO: 1861587 - DNA, 15 bp, Homo sapiens
cagttcaccgaatgt

SEQ ID NO: 1861588 - DNA, 15 bp, Homo sapiens
agttcaccgaatgta

SEQ ID NO: 1861589 - DNA, 15 bp, Homo sapiens
gttcaccgaatgtat

SEQ ID NO: 1861590 - DNA, 15 bp, Homo sapiens
ttcaccgaatgtatt

SEQ ID NO: 1861591 - DNA, 15 bp, Homo sapiens
tcaccgaatgtattc

SEQ ID NO: 1861592 - DNA, 15 bp, Homo sapiens
caccgaatgtattca

SEQ ID NO: 1861593 - DNA, 15 bp, Homo sapiens
accgaatgtattcaa

SEQ ID NO: 1861594 - DNA, 15 bp, Homo sapiens
ccgaatgtattcaat

SEQ ID NO: 1861595 - DNA, 15 bp, Homo sapiens
cgaatgtattcaatg

SEQ ID NO: 1861596 - DNA, 15 bp, Homo sapiens
gaatgtattcaatgc

SEQ ID NO: 1861597 - DNA, 15 bp, Homo sapiens
aatgtattcaatgcc

SEQ ID NO: 1861598 - DNA, 15 bp, Homo sapiens
atgtattcaatgcca

SEQ ID NO: 1861599 - DNA, 15 bp, Homo sapiens
tgtattcaatgccat

SEQ ID NO: 1861600 - DNA, 15 bp, Homo sapiens
gtattcaatgccatt

SEQ ID NO: 1861601 - DNA, 15 bp, Homo sapiens
tattcaatgccattg

SEQ ID NO: 1861602 - DNA, 15 bp, Homo sapiens
attcaatgccattgg

SEQ ID NO: 1861603 - DNA, 15 bp, Homo sapiens
ttcaatgccattggt

SEQ ID NO: 1861604 - DNA, 15 bp, Homo sapiens
tcaatgccattggtg

SEQ ID NO: 1861605 - DNA, 15 bp, Homo sapiens
caatgccattggtgg

SEQ ID NO: 1861606 - DNA, 15 bp, Homo sapiens
aatgccattggtggc

SEQ ID NO: 1861607 - DNA, 15 bp, Homo sapiens
atgccattggtggca

SEQ ID NO: 1861608 - DNA, 15 bp, Homo sapiens
tgccattggtggcac

SEQ ID NO: 1861609 - DNA, 15 bp, Homo sapiens
gccattggtggcaca

SEQ ID NO: 1861610 - DNA, 15 bp, Homo sapiens
ccattggtggcacat

SEQ ID NO: 1861611 - DNA, 15 bp, Homo sapiens
cattggtggcacatt

SEQ ID NO: 1861612 - DNA, 15 bp, Homo sapiens
attggtggcacattt

SEQ ID NO: 1861613 - DNA, 15 bp, Homo sapiens
ttggtggcacatttt

SEQ ID NO: 1861614 - DNA, 15 bp, Homo sapiens
tggtggcacatttta

SEQ ID NO: 1861615 - DNA, 15 bp, Homo sapiens
ggtggcacattttaa

SEQ ID NO: 1861616 - DNA, 15 bp, Homo sapiens
gtggcacattttaag

SEQ ID NO: 1861617 - DNA, 15 bp, Homo sapiens
tggcacattttaagt

SEQ ID NO: 1861618 - DNA, 15 bp, Homo sapiens
ggcacattttaagtt

SEQ ID NO: 1861619 - DNA, 15 bp, Homo sapiens
gcacattttaagtta

SEQ ID NO: 1861620 - DNA, 15 bp, Homo sapiens
cacattttaagttat

SEQ ID NO: 1861621 - DNA, 15 bp, Homo sapiens
acattttaagttatg

SEQ ID NO: 1861622 - DNA, 15 bp, Homo sapiens
cattttaagttatgt

SEQ ID NO: 1861623 - DNA, 15 bp, Homo sapiens
attttaagttatgtg

SEQ ID NO: 1861624 - DNA, 15 bp, Homo sapiens
ttttaagttatgtgt

SEQ ID NO: 1861625 - DNA, 15 bp, Homo sapiens
tttaagttatgtgta

SEQ ID NO: 1861626 - DNA, 15 bp, Homo sapiens
ttaagttatgtgtat

SEQ ID NO: 1861627 - DNA, 15 bp, Homo sapiens
taagttatgtgtatt

SEQ ID NO: 1861628 - DNA, 15 bp, Homo sapiens
aagttatgtgtattt

SEQ ID NO: 1861629 - DNA, 15 bp, Homo sapiens
agttatgtgtatttt

SEQ ID NO: 1861630 - DNA, 15 bp, Homo sapiens
gttatgtgtatttta

SEQ ID NO: 1861631 - DNA, 15 bp, Homo sapiens
ttatgtgtattttac

SEQ ID NO: 1861632 - DNA, 15 bp, Homo sapiens
tatgtgtattttacc

SEQ ID NO: 1861633 - DNA, 15 bp, Homo sapiens
atgtgtattttacca

SEQ ID NO: 1861634 - DNA, 15 bp, Homo sapiens
tgtgtattttaccac

SEQ ID NO: 1861635 - DNA, 15 bp, Homo sapiens
gtgtattttaccaca

SEQ ID NO: 1861636 - DNA, 15 bp, Homo sapiens
tgtattttaccacaa

SEQ ID NO: 1861637 - DNA, 15 bp, Homo sapiens
gtattttaccacaag

SEQ ID NO: 1861638 - DNA, 15 bp, Homo sapiens
tattttaccacaagt

SEQ ID NO: 1861639 - DNA, 15 bp, Homo sapiens
attttaccacaagtt

SEQ ID NO: 1861640 - DNA, 15 bp, Homo sapiens
ttttaccacaagttt

SEQ ID NO: 1861641 - DNA, 15 bp, Homo sapiens
tttaccacaagtttg

SEQ ID NO: 1861642 - DNA, 15 bp, Homo sapiens
ttaccacaagtttga

SEQ ID NO: 1861643 - DNA, 15 bp, Homo sapiens
taccacaagtttgac

SEQ ID NO: 1861644 - DNA, 15 bp, Homo sapiens
accacaagtttgacc

SEQ ID NO: 1861645 - DNA, 15 bp, Homo sapiens
ccacaagtttgacca

SEQ ID NO: 1861646 - DNA, 15 bp, Homo sapiens
cacaagtttgaccaa

SEQ ID NO: 1861647 - DNA, 15 bp, Homo sapiens
acaagtttgaccaaa

SEQ ID NO: 1861648 - DNA, 15 bp, Homo sapiens
caagtttgaccaaaa

SEQ ID NO: 1861649 - DNA, 15 bp, Homo sapiens
aagtttgaccaaaaa

SEQ ID NO: 1861650 - DNA, 15 bp, Homo sapiens
agtttgaccaaaaaa

SEQ ID NO: 1861651 - DNA, 15 bp, Homo sapiens
gtttgaccaaaaaat

SEQ ID NO: 1861652 - DNA, 15 bp, Homo sapiens
tttgaccaaaaaatg

SEQ ID NO: 1861653 - DNA, 15 bp, Homo sapiens
ttgaccaaaaaatgg

SEQ ID NO: 1861654 - DNA, 15 bp, Homo sapiens
tgaccaaaaaatggc

SEQ ID NO: 1861655 - DNA, 15 bp, Homo sapiens
gaccaaaaaatggcc

SEQ ID NO: 1861656 - DNA, 15 bp, Homo sapiens
accaaaaaatggcca

SEQ ID NO: 1861657 - DNA, 15 bp, Homo sapiens
ccaaaaaatggccag

SEQ ID NO: 1861658 - DNA, 15 bp, Homo sapiens
caaaaaatggccagc

SEQ ID NO: 1861659 - DNA, 15 bp, Homo sapiens
aaaaaatggccagcg

SEQ ID NO: 1861660 - DNA, 15 bp, Homo sapiens
aaaaatggccagcgg

SEQ ID NO: 1861661 - DNA, 15 bp, Homo sapiens
aaaatggccagcggt

SEQ ID NO: 1861662 - DNA, 15 bp, Homo sapiens
aaatggccagcggta

SEQ ID NO: 1861663 - DNA, 15 bp, Homo sapiens
aatggccagcggtag

SEQ ID NO: 1861664 - DNA, 15 bp, Homo sapiens
atggccagcggtagg

SEQ ID NO: 1861665 - DNA, 15 bp, Homo sapiens
tggccagcggtaggt

SEQ ID NO: 1861666 - DNA, 15 bp, Homo sapiens
ggccagcggtaggtt

SEQ ID NO: 1861667 - DNA, 15 bp, Homo sapiens
gccagcggtaggttt

SEQ ID NO: 1861668 - DNA, 15 bp, Homo sapiens
ccagcggtaggtttt

SEQ ID NO: 1861669 - DNA, 15 bp, Homo sapiens
cagcggtaggtttta

SEQ ID NO: 1861670 - DNA, 15 bp, Homo sapiens
agcggtaggttttaa

SEQ ID NO: 1861671 - DNA, 15 bp, Homo sapiens
gcggtaggttttaaa

SEQ ID NO: 1861672 - DNA, 15 bp, Homo sapiens
cggtaggttttaaat

SEQ ID NO: 1861673 - DNA, 15 bp, Homo sapiens
ggtaggttttaaata

SEQ ID NO: 1861674 - DNA, 15 bp, Homo sapiens
gtaggttttaaatac

SEQ ID NO: 1861675 - DNA, 15 bp, Homo sapiens
taggttttaaataca

SEQ ID NO: 1861676 - DNA, 15 bp, Homo sapiens
aggttttaaatacat

SEQ ID NO: 1861677 - DNA, 15 bp, Homo sapiens
ggttttaaatacatg

SEQ ID NO: 1861678 - DNA, 15 bp, Homo sapiens
gttttaaatacatgt

SEQ ID NO: 1861679 - DNA, 15 bp, Homo sapiens
ttttaaatacatgta

SEQ ID NO: 1861680 - DNA, 15 bp, Homo sapiens
tttaaatacatgtag

SEQ ID NO: 1861681 - DNA, 15 bp, Homo sapiens
ttaaatacatgtaga

SEQ ID NO: 1861682 - DNA, 15 bp, Homo sapiens
taaatacatgtagat

SEQ ID NO: 1861683 - DNA, 15 bp, Homo sapiens
aaatacatgtagata

SEQ ID NO: 1861684 - DNA, 15 bp, Homo sapiens
aatacatgtagatac

SEQ ID NO: 1861685 - DNA, 15 bp, Homo sapiens
atacatgtagatact

SEQ ID NO: 1861686 - DNA, 15 bp, Homo sapiens
tacatgtagatactt

SEQ ID NO: 1861687 - DNA, 15 bp, Homo sapiens
acatgtagatacttg

SEQ ID NO: 1861688 - DNA, 15 bp, Homo sapiens
catgtagatacttgg

SEQ ID NO: 1861689 - DNA, 15 bp, Homo sapiens
atgtagatacttgga

SEQ ID NO: 1861690 - DNA, 15 bp, Homo sapiens
tgtagatacttggat

SEQ ID NO: 1861691 - DNA, 15 bp, Homo sapiens
gtagatacttggata

SEQ ID NO: 1861692 - DNA, 15 bp, Homo sapiens
tagatacttggataa

SEQ ID NO: 1861693 - DNA, 15 bp, Homo sapiens
agatacttggataat

SEQ ID NO: 1861694 - DNA, 15 bp, Homo sapiens
gatacttggataatc

SEQ ID NO: 1861695 - DNA, 15 bp, Homo sapiens
atacttggataatct

SEQ ID NO: 1861696 - DNA, 15 bp, Homo sapiens
tacttggataatcta

SEQ ID NO: 1861697 - DNA, 15 bp, Homo sapiens
acttggataatctat

SEQ ID NO: 1861698 - DNA, 15 bp, Homo sapiens
cttggataatctata

SEQ ID NO: 1861699 - DNA, 15 bp, Homo sapiens
ttggataatctataa

SEQ ID NO: 1861700 - DNA, 15 bp, Homo sapiens
tggataatctataag

SEQ ID NO: 1861701 - DNA, 15 bp, Homo sapiens
ggataatctataagg

SEQ ID NO: 1861702 - DNA, 15 bp, Homo sapiens
gataatctataagga

SEQ ID NO: 1861703 - DNA, 15 bp, Homo sapiens
ataatctataaggaa

SEQ ID NO: 1861704 - DNA, 15 bp, Homo sapiens
taatctataaggaac

SEQ ID NO: 1861705 - DNA, 15 bp, Homo sapiens
aatctataaggaaca

SEQ ID NO: 1861706 - DNA, 15 bp, Homo sapiens
atctataaggaacag

SEQ ID NO: 1861707 - DNA, 15 bp, Homo sapiens
tctataaggaacagt

SEQ ID NO: 1861708 - DNA, 15 bp, Homo sapiens
ctataaggaacagtg

SEQ ID NO: 1861709 - DNA, 15 bp, Homo sapiens
tataaggaacagtga

SEQ ID NO: 1861710 - DNA, 15 bp, Homo sapiens
ataaggaacagtgat

SEQ ID NO: 1861711 - DNA, 15 bp, Homo sapiens
tgtgtgtgtgttttg

SEQ ID NO: 1861712 - DNA, 15 bp, Homo sapiens
gtgtgtgtgttttga

SEQ ID NO: 1861713 - DNA, 15 bp, Homo sapiens
tgtgtgtgttttgag

SEQ ID NO: 1861714 - DNA, 15 bp, Homo sapiens
gtgtgtgttttgaga

SEQ ID NO: 1861715 - DNA, 15 bp, Homo sapiens
tgtgtgttttgagat

SEQ ID NO: 1861716 - DNA, 15 bp, Homo sapiens
gtgtgttttgagatg

SEQ ID NO: 1861717 - DNA, 15 bp, Homo sapiens
tgtgttttgagatgg

SEQ ID NO: 1861718 - DNA, 15 bp, Homo sapiens
gtgttttgagatgga

SEQ ID NO: 1861719 - DNA, 15 bp, Homo sapiens
tcactctgtcaccct

SEQ ID NO: 1861720 - DNA, 15 bp, Homo sapiens
cactctgtcaccctg

SEQ ID NO: 1861721 - DNA, 15 bp, Homo sapiens
actctgtcaccctgg

SEQ ID NO: 1861722 - DNA, 15 bp, Homo sapiens
ctctgtcaccctggc

SEQ ID NO: 1861723 - DNA, 15 bp, Homo sapiens
tctgtcaccctggct

SEQ ID NO: 1861724 - DNA, 15 bp, Homo sapiens
ctgtcaccctggctg

SEQ ID NO: 1861725 - DNA, 15 bp, Homo sapiens
tgtcaccctggctgg

SEQ ID NO: 1861726 - DNA, 15 bp, Homo sapiens
gtcaccctggctgga

SEQ ID NO: 1861727 - DNA, 15 bp, Homo sapiens
tcaccctggctggag

SEQ ID NO: 1861728 - DNA, 15 bp, Homo sapiens
caccctggctggagg

SEQ ID NO: 1861729 - DNA, 15 bp, Homo sapiens
accctggctggaggg

SEQ ID NO: 1861730 - DNA, 15 bp, Homo sapiens
ccctggctggagggc

SEQ ID NO: 1861731 - DNA, 15 bp, Homo sapiens
cctggctggagggca

SEQ ID NO: 1861732 - DNA, 15 bp, Homo sapiens
ctggctggagggcag

SEQ ID NO: 1861733 - DNA, 15 bp, Homo sapiens
tggctggagggcagt

SEQ ID NO: 1861734 - DNA, 15 bp, Homo sapiens
ggctggagggcagtg

SEQ ID NO: 1861735 - DNA, 15 bp, Homo sapiens
gctggagggcagtgg

SEQ ID NO: 1861736 - DNA, 15 bp, Homo sapiens
ctggagggcagtggc

SEQ ID NO: 1861737 - DNA, 15 bp, Homo sapiens
tggagggcagtggcg

SEQ ID NO: 1861738 - DNA, 15 bp, Homo sapiens
ggagggcagtggcgt

SEQ ID NO: 1861739 - DNA, 15 bp, Homo sapiens
gagggcagtggcgtg

SEQ ID NO: 1861740 - DNA, 15 bp, Homo sapiens
agggcagtggcgtga

SEQ ID NO: 1861741 - DNA, 15 bp, Homo sapiens
gggcagtggcgtgat

SEQ ID NO: 1861742 - DNA, 15 bp, Homo sapiens
ggcagtggcgtgatc

SEQ ID NO: 1861743 - DNA, 15 bp, Homo sapiens
gatctcggctcacta

SEQ ID NO: 1861744 - DNA, 15 bp, Homo sapiens
tcctgggttcaagcc

SEQ ID NO: 1861745 - DNA, 15 bp, Homo sapiens
cctgggttcaagcca

SEQ ID NO: 1861746 - DNA, 15 bp, Homo sapiens
ctgggttcaagccat

SEQ ID NO: 1861747 - DNA, 15 bp, Homo sapiens
tgggttcaagccatt

SEQ ID NO: 1861748 - DNA, 15 bp, Homo sapiens
gttcaagccattctc

SEQ ID NO: 1861749 - DNA, 15 bp, Homo sapiens
ttcaagccattctca

SEQ ID NO: 1861750 - DNA, 15 bp, Homo sapiens
tcaagccattctcat

SEQ ID NO: 1861751 - DNA, 15 bp, Homo sapiens
caagccattctcatg

SEQ ID NO: 1861752 - DNA, 15 bp, Homo sapiens
aagccattctcatgc

SEQ ID NO: 1861753 - DNA, 15 bp, Homo sapiens
agccattctcatgcg

SEQ ID NO: 1861754 - DNA, 15 bp, Homo sapiens
gccattctcatgcgt

SEQ ID NO: 1861755 - DNA, 15 bp, Homo sapiens
ccattctcatgcgtc

SEQ ID NO: 1861756 - DNA, 15 bp, Homo sapiens
cattctcatgcgtca

SEQ ID NO: 1861757 - DNA, 15 bp, Homo sapiens
attctcatgcgtcag

SEQ ID NO: 1861758 - DNA, 15 bp, Homo sapiens
ttctcatgcgtcagt

SEQ ID NO: 1861759 - DNA, 15 bp, Homo sapiens
tctcatgcgtcagta

SEQ ID NO: 1861760 - DNA, 15 bp, Homo sapiens
ctcatgcgtcagtat

SEQ ID NO: 1861761 - DNA, 15 bp, Homo sapiens
tcatgcgtcagtatc

SEQ ID NO: 1861762 - DNA, 15 bp, Homo sapiens
catgcgtcagtatcc

SEQ ID NO: 1861763 - DNA, 15 bp, Homo sapiens
atgcgtcagtatccc

SEQ ID NO: 1861764 - DNA, 15 bp, Homo sapiens
tgcgtcagtatccct

SEQ ID NO: 1861765 - DNA, 15 bp, Homo sapiens
gcgtcagtatcccta

SEQ ID NO: 1861766 - DNA, 15 bp, Homo sapiens
cgtcagtatccctag

SEQ ID NO: 1861767 - DNA, 15 bp, Homo sapiens
gtcagtatccctagc

SEQ ID NO: 1861768 - DNA, 15 bp, Homo sapiens
tcagtatccctagca

SEQ ID NO: 1861769 - DNA, 15 bp, Homo sapiens
cagtatccctagcag

SEQ ID NO: 1861770 - DNA, 15 bp, Homo sapiens
agtatccctagcagc

SEQ ID NO: 1861771 - DNA, 15 bp, Homo sapiens
gtatccctagcagct

SEQ ID NO: 1861772 - DNA, 15 bp, Homo sapiens
tatccctagcagctg

SEQ ID NO: 1861773 - DNA, 15 bp, Homo sapiens
atccctagcagctgg

SEQ ID NO: 1861774 - DNA, 15 bp, Homo sapiens
tccctagcagctggg

SEQ ID NO: 1861775 - DNA, 15 bp, Homo sapiens
ccctagcagctggga

SEQ ID NO: 1861776 - DNA, 15 bp, Homo sapiens
cctagcagctgggat

SEQ ID NO: 1861777 - DNA, 15 bp, Homo sapiens
ctagcagctgggatt

SEQ ID NO: 1861778 - DNA, 15 bp, Homo sapiens
tagcagctgggatta

SEQ ID NO: 1861779 - DNA, 15 bp, Homo sapiens
gattacaggcgtgcc

SEQ ID NO: 1861780 - DNA, 15 bp, Homo sapiens
attacaggcgtgcca

SEQ ID NO: 1861781 - DNA, 15 bp, Homo sapiens
ttacaggcgtgccac

SEQ ID NO: 1861782 - DNA, 15 bp, Homo sapiens
tacaggcgtgccaca

SEQ ID NO: 1861783 - DNA, 15 bp, Homo sapiens
acaggcgtgccacac

SEQ ID NO: 1861784 - DNA, 15 bp, Homo sapiens
caggcgtgccacacc

SEQ ID NO: 1861785 - DNA, 15 bp, Homo sapiens
aggcgtgccacacca

SEQ ID NO: 1861786 - DNA, 15 bp, Homo sapiens
ggcgtgccacaccat

SEQ ID NO: 1861787 - DNA, 15 bp, Homo sapiens
gcgtgccacaccatg

SEQ ID NO: 1861788 - DNA, 15 bp, Homo sapiens
cgtgccacaccatgc

SEQ ID NO: 1861789 - DNA, 15 bp, Homo sapiens
gtgccacaccatgcc

SEQ ID NO: 1861790 - DNA, 15 bp, Homo sapiens
tgccacaccatgcct

SEQ ID NO: 1861791 - DNA, 15 bp, Homo sapiens
gccacaccatgcctg

SEQ ID NO: 1861792 - DNA, 15 bp, Homo sapiens
ccacaccatgcctgg

SEQ ID NO: 1861793 - DNA, 15 bp, Homo sapiens
cacaccatgcctggc

SEQ ID NO: 1861794 - DNA, 15 bp, Homo sapiens
tggctaatttttttc

SEQ ID NO: 1861795 - DNA, 15 bp, Homo sapiens
ggctaatttttttct

SEQ ID NO: 1861796 - DNA, 15 bp, Homo sapiens
gctaatttttttcta

SEQ ID NO: 1861797 - DNA, 15 bp, Homo sapiens
ctaatttttttctag

SEQ ID NO: 1861798 - DNA, 15 bp, Homo sapiens
taatttttttctagt

SEQ ID NO: 1861799 - DNA, 15 bp, Homo sapiens
aatttttttctagta

SEQ ID NO: 1861800 - DNA, 15 bp, Homo sapiens
atttttttctagtag

SEQ ID NO: 1861801 - DNA, 15 bp, Homo sapiens
tttttttctagtaga

SEQ ID NO: 1861802 - DNA, 15 bp, Homo sapiens
ttttttctagtagaa

SEQ ID NO: 1861803 - DNA, 15 bp, Homo sapiens
tttttctagtagaaa

SEQ ID NO: 1861804 - DNA, 15 bp, Homo sapiens
ttttctagtagaaag

SEQ ID NO: 1861805 - DNA, 15 bp, Homo sapiens
tttctagtagaaagg

SEQ ID NO: 1861806 - DNA, 15 bp, Homo sapiens
ttctagtagaaaggg

SEQ ID NO: 1861807 - DNA, 15 bp, Homo sapiens
tctagtagaaagggc

SEQ ID NO: 1861808 - DNA, 15 bp, Homo sapiens
ctagtagaaagggcg

SEQ ID NO: 1861809 - DNA, 15 bp, Homo sapiens
tagtagaaagggcgt

SEQ ID NO: 1861810 - DNA, 15 bp, Homo sapiens
agtagaaagggcgtt

SEQ ID NO: 1861811 - DNA, 15 bp, Homo sapiens
gtagaaagggcgttt

SEQ ID NO: 1861812 - DNA, 15 bp, Homo sapiens
tagaaagggcgtttc

SEQ ID NO: 1861813 - DNA, 15 bp, Homo sapiens
agaaagggcgtttca

SEQ ID NO: 1861814 - DNA, 15 bp, Homo sapiens
gaaagggcgtttcac

SEQ ID NO: 1861815 - DNA, 15 bp, Homo sapiens
aaagggcgtttcacc

SEQ ID NO: 1861816 - DNA, 15 bp, Homo sapiens
aagggcgtttcacca

SEQ ID NO: 1861817 - DNA, 15 bp, Homo sapiens
agggcgtttcaccat

SEQ ID NO: 1861818 - DNA, 15 bp, Homo sapiens
gggcgtttcaccatg

SEQ ID NO: 1861819 - DNA, 15 bp, Homo sapiens
ggccagactggtctc

SEQ ID NO: 1861820 - DNA, 15 bp, Homo sapiens
gccagactggtctcg

SEQ ID NO: 1861821 - DNA, 15 bp, Homo sapiens
ccagactggtctcga

SEQ ID NO: 1861822 - DNA, 15 bp, Homo sapiens
gtctcgaactcctaa

SEQ ID NO: 1861823 - DNA, 15 bp, Homo sapiens
tctcgaactcctaac

SEQ ID NO: 1861824 - DNA, 15 bp, Homo sapiens
ctcgaactcctaacc

SEQ ID NO: 1861825 - DNA, 15 bp, Homo sapiens
tcgaactcctaacct

SEQ ID NO: 1861826 - DNA, 15 bp, Homo sapiens
cgaactcctaacctc

SEQ ID NO: 1861827 - DNA, 15 bp, Homo sapiens
gaactcctaacctca

SEQ ID NO: 1861828 - DNA, 15 bp, Homo sapiens
actcctaacctcaag

SEQ ID NO: 1861829 - DNA, 15 bp, Homo sapiens
ctcctaacctcaagt

SEQ ID NO: 1861830 - DNA, 15 bp, Homo sapiens
tcctaacctcaagtg

SEQ ID NO: 1861831 - DNA, 15 bp, Homo sapiens
cctaacctcaagtga

SEQ ID NO: 1861832 - DNA, 15 bp, Homo sapiens
ctaacctcaagtgat

SEQ ID NO: 1861833 - DNA, 15 bp, Homo sapiens
taacctcaagtgatc

SEQ ID NO: 1861834 - DNA, 15 bp, Homo sapiens
aacctcaagtgatcc

SEQ ID NO: 1861835 - DNA, 15 bp, Homo sapiens
tgatcctcccgactt

SEQ ID NO: 1861836 - DNA, 15 bp, Homo sapiens
gatcctcccgactta

SEQ ID NO: 1861837 - DNA, 15 bp, Homo sapiens
atcctcccgacttag

SEQ ID NO: 1861838 - DNA, 15 bp, Homo sapiens
tcctcccgacttagc

SEQ ID NO: 1861839 - DNA, 15 bp, Homo sapiens
cctcccgacttagcc

SEQ ID NO: 1861840 - DNA, 15 bp, Homo sapiens
ctcccgacttagcct

SEQ ID NO: 1861841 - DNA, 15 bp, Homo sapiens
tcccgacttagcctc

SEQ ID NO: 1861842 - DNA, 15 bp, Homo sapiens
cccgacttagcctcc

SEQ ID NO: 1861843 - DNA, 15 bp, Homo sapiens
ccgacttagcctccc

SEQ ID NO: 1861844 - DNA, 15 bp, Homo sapiens
cgacttagcctccca

SEQ ID NO: 1861845 - DNA, 15 bp, Homo sapiens
gacttagcctcccaa

SEQ ID NO: 1861846 - DNA, 15 bp, Homo sapiens
acttagcctcccaaa

SEQ ID NO: 1861847 - DNA, 15 bp, Homo sapiens
gattataggcgtgta

SEQ ID NO: 1861848 - DNA, 15 bp, Homo sapiens
attataggcgtgtac

SEQ ID NO: 1861849 - DNA, 15 bp, Homo sapiens
ttataggcgtgtacc

SEQ ID NO: 1861850 - DNA, 15 bp, Homo sapiens
tataggcgtgtacca

SEQ ID NO: 1861851 - DNA, 15 bp, Homo sapiens
ataggcgtgtaccac

SEQ ID NO: 1861852 - DNA, 15 bp, Homo sapiens
taggcgtgtaccacc

SEQ ID NO: 1861853 - DNA, 15 bp, Homo sapiens
aggcgtgtaccacca

SEQ ID NO: 1861854 - DNA, 15 bp, Homo sapiens
ggcgtgtaccaccac

SEQ ID NO: 1861855 - DNA, 15 bp, Homo sapiens
gcgtgtaccaccacg

SEQ ID NO: 1861856 - DNA, 15 bp, Homo sapiens
cgtgtaccaccacgc

SEQ ID NO: 1861857 - DNA, 15 bp, Homo sapiens
gtgtaccaccacgcc

SEQ ID NO: 1861858 - DNA, 15 bp, Homo sapiens
tgtaccaccacgcct

SEQ ID NO: 1861859 - DNA, 15 bp, Homo sapiens
gtaccaccacgcctg

SEQ ID NO: 1861860 - DNA, 15 bp, Homo sapiens
taccaccacgcctgg

SEQ ID NO: 1861861 - DNA, 15 bp, Homo sapiens
accacgcctggcctt

SEQ ID NO: 1861862 - DNA, 15 bp, Homo sapiens
ccacgcctggccttc

SEQ ID NO: 1861863 - DNA, 15 bp, Homo sapiens
cacgcctggccttct

SEQ ID NO: 1861864 - DNA, 15 bp, Homo sapiens
acgcctggccttctg

SEQ ID NO: 1861865 - DNA, 15 bp, Homo sapiens
cgcctggccttctgc

SEQ ID NO: 1861866 - DNA, 15 bp, Homo sapiens
gcctggccttctgct

SEQ ID NO: 1861867 - DNA, 15 bp, Homo sapiens
cctggccttctgctg

SEQ ID NO: 1861868 - DNA, 15 bp, Homo sapiens
ctggccttctgctgt

SEQ ID NO: 1861869 - DNA, 15 bp, Homo sapiens
tggccttctgctgtg

SEQ ID NO: 1861870 - DNA, 15 bp, Homo sapiens
ggccttctgctgtgt

SEQ ID NO: 1861871 - DNA, 15 bp, Homo sapiens
gccttctgctgtgtg

SEQ ID NO: 1861872 - DNA, 15 bp, Homo sapiens
ccttctgctgtgtgt

SEQ ID NO: 1861873 - DNA, 15 bp, Homo sapiens
cttctgctgtgtgtt

SEQ ID NO: 1861874 - DNA, 15 bp, Homo sapiens
ttctgctgtgtgtta

SEQ ID NO: 1861875 - DNA, 15 bp, Homo sapiens
tctgctgtgtgttac

SEQ ID NO: 1861876 - DNA, 15 bp, Homo sapiens
ctgctgtgtgttacc

SEQ ID NO: 1861877 - DNA, 15 bp, Homo sapiens
tgctgtgtgttacct

SEQ ID NO: 1861878 - DNA, 15 bp, Homo sapiens
gctgtgtgttacctg

SEQ ID NO: 1861879 - DNA, 15 bp, Homo sapiens
ctgtgtgttacctga

SEQ ID NO: 1861880 - DNA, 15 bp, Homo sapiens
tgtgtgttacctgag

SEQ ID NO: 1861881 - DNA, 15 bp, Homo sapiens
gtgtgttacctgagc

SEQ ID NO: 1861882 - DNA, 15 bp, Homo sapiens
tgtgttacctgagca

SEQ ID NO: 1861883 - DNA, 15 bp, Homo sapiens
gtgttacctgagcaa

SEQ ID NO: 1861884 - DNA, 15 bp, Homo sapiens
tgttacctgagcaag

SEQ ID NO: 1861885 - DNA, 15 bp, Homo sapiens
gttacctgagcaagc

SEQ ID NO: 1861886 - DNA, 15 bp, Homo sapiens
ttacctgagcaagca

SEQ ID NO: 1861887 - DNA, 15 bp, Homo sapiens
tacctgagcaagcag

SEQ ID NO: 1861888 - DNA, 15 bp, Homo sapiens
acctgagcaagcaga

SEQ ID NO: 1861889 - DNA, 15 bp, Homo sapiens
cctgagcaagcagac

SEQ ID NO: 1861890 - DNA, 15 bp, Homo sapiens
ctgagcaagcagaca

SEQ ID NO: 1861891 - DNA, 15 bp, Homo sapiens
tgagcaagcagacac

SEQ ID NO: 1861892 - DNA, 15 bp, Homo sapiens
gagcaagcagacaca

SEQ ID NO: 1861893 - DNA, 15 bp, Homo sapiens
agcaagcagacacat

SEQ ID NO: 1861894 - DNA, 15 bp, Homo sapiens
gcaagcagacacatc

SEQ ID NO: 1861895 - DNA, 15 bp, Homo sapiens
caagcagacacatct

SEQ ID NO: 1861896 - DNA, 15 bp, Homo sapiens
aagcagacacatctg

SEQ ID NO: 1861897 - DNA, 15 bp, Homo sapiens
agcagacacatctgt

SEQ ID NO: 1861898 - DNA, 15 bp, Homo sapiens
gcagacacatctgtg

SEQ ID NO: 1861899 - DNA, 15 bp, Homo sapiens
cagacacatctgtgc

SEQ ID NO: 1861900 - DNA, 15 bp, Homo sapiens
agacacatctgtgct

SEQ ID NO: 1861901 - DNA, 15 bp, Homo sapiens
gacacatctgtgctg

SEQ ID NO: 1861902 - DNA, 15 bp, Homo sapiens
acacatctgtgctga

SEQ ID NO: 1861903 - DNA, 15 bp, Homo sapiens
cacatctgtgctgat

SEQ ID NO: 1861904 - DNA, 15 bp, Homo sapiens
acatctgtgctgatc

SEQ ID NO: 1861905 - DNA, 15 bp, Homo sapiens
catctgtgctgatcc

SEQ ID NO: 1861906 - DNA, 15 bp, Homo sapiens
atctgtgctgatcct

SEQ ID NO: 1861907 - DNA, 15 bp, Homo sapiens
tctgtgctgatcctt

SEQ ID NO: 1861908 - DNA, 15 bp, Homo sapiens
ctgtgctgatccttc

SEQ ID NO: 1861909 - DNA, 15 bp, Homo sapiens
tgtgctgatccttcg

SEQ ID NO: 1861910 - DNA, 15 bp, Homo sapiens
gtgctgatccttcga

SEQ ID NO: 1861911 - DNA, 15 bp, Homo sapiens
tgctgatccttcgac

SEQ ID NO: 1861912 - DNA, 15 bp, Homo sapiens
gctgatccttcgacc

SEQ ID NO: 1861913 - DNA, 15 bp, Homo sapiens
ctgatccttcgacct

SEQ ID NO: 1861914 - DNA, 15 bp, Homo sapiens
tgatccttcgacctt

SEQ ID NO: 1861915 - DNA, 15 bp, Homo sapiens
gatccttcgaccttc

SEQ ID NO: 1861916 - DNA, 15 bp, Homo sapiens
atccttcgaccttcc

SEQ ID NO: 1861917 - DNA, 15 bp, Homo sapiens
tccttcgaccttcct

SEQ ID NO: 1861918 - DNA, 15 bp, Homo sapiens
ccttcgaccttcctt

SEQ ID NO: 1861919 - DNA, 15 bp, Homo sapiens
cttcgaccttccttt

SEQ ID NO: 1861920 - DNA, 15 bp, Homo sapiens
ttcgaccttcctttt

SEQ ID NO: 1861921 - DNA, 15 bp, Homo sapiens
tcgaccttccttttt

SEQ ID NO: 1861922 - DNA, 15 bp, Homo sapiens
cgaccttcctttttt

SEQ ID NO: 1861923 - DNA, 15 bp, Homo sapiens
gaccttccttttttc

SEQ ID NO: 1861924 - DNA, 15 bp, Homo sapiens
accttccttttttct

SEQ ID NO: 1861925 - DNA, 15 bp, Homo sapiens
ccttccttttttctt

SEQ ID NO: 1861926 - DNA, 15 bp, Homo sapiens
cttccttttttcttc

SEQ ID NO: 1861927 - DNA, 15 bp, Homo sapiens
ttccttttttcttcg

SEQ ID NO: 1861928 - DNA, 15 bp, Homo sapiens
tccttttttcttcgt

SEQ ID NO: 1861929 - DNA, 15 bp, Homo sapiens
ccttttttcttcgtg

SEQ ID NO: 1861930 - DNA, 15 bp, Homo sapiens
cttttttcttcgtgg

SEQ ID NO: 1861931 - DNA, 15 bp, Homo sapiens
ttttttcttcgtggg

SEQ ID NO: 1861932 - DNA, 15 bp, Homo sapiens
tttttcttcgtgggt

SEQ ID NO: 1861933 - DNA, 15 bp, Homo sapiens
ttttcttcgtgggtt

SEQ ID NO: 1861934 - DNA, 15 bp, Homo sapiens
tttcttcgtgggttc

SEQ ID NO: 1861935 - DNA, 15 bp, Homo sapiens
ttcttcgtgggttcc

SEQ ID NO: 1861936 - DNA, 15 bp, Homo sapiens
tcttcgtgggttcca

SEQ ID NO: 1861937 - DNA, 15 bp, Homo sapiens
cttcgtgggttccag

SEQ ID NO: 1861938 - DNA, 15 bp, Homo sapiens
ttcgtgggttccaga

SEQ ID NO: 1861939 - DNA, 15 bp, Homo sapiens
tcgtgggttccagaa

SEQ ID NO: 1861940 - DNA, 15 bp, Homo sapiens
cgtgggttccagaaa

SEQ ID NO: 1861941 - DNA, 15 bp, Homo sapiens
gtgggttccagaaat

SEQ ID NO: 1861942 - DNA, 15 bp, Homo sapiens
tgggttccagaaatg

SEQ ID NO: 1861943 - DNA, 15 bp, Homo sapiens
gggttccagaaatga

SEQ ID NO: 1861944 - DNA, 15 bp, Homo sapiens
ggttccagaaatgag

SEQ ID NO: 1861945 - DNA, 15 bp, Homo sapiens
gttccagaaatgaga

SEQ ID NO: 1861946 - DNA, 15 bp, Homo sapiens
ttccagaaatgagag

SEQ ID NO: 1861947 - DNA, 15 bp, Homo sapiens
tccagaaatgagaga

SEQ ID NO: 1861948 - DNA, 15 bp, Homo sapiens
ccagaaatgagagac

SEQ ID NO: 1861949 - DNA, 15 bp, Homo sapiens
cagaaatgagagaca

SEQ ID NO: 1861950 - DNA, 15 bp, Homo sapiens
agaaatgagagacag

SEQ ID NO: 1861951 - DNA, 15 bp, Homo sapiens
gaaatgagagacagg

SEQ ID NO: 1861952 - DNA, 15 bp, Homo sapiens
aaatgagagacagga

SEQ ID NO: 1861953 - DNA, 15 bp, Homo sapiens
aatgagagacaggaa

SEQ ID NO: 1861954 - DNA, 15 bp, Homo sapiens
atgagagacaggaaa

SEQ ID NO: 1861955 - DNA, 15 bp, Homo sapiens
tgagagacaggaaag

SEQ ID NO: 1861956 - DNA, 15 bp, Homo sapiens
gagagacaggaaagt

SEQ ID NO: 1861957 - DNA, 15 bp, Homo sapiens
agagacaggaaagtt

SEQ ID NO: 1861958 - DNA, 15 bp, Homo sapiens
gagacaggaaagttc

SEQ ID NO: 1861959 - DNA, 15 bp, Homo sapiens
agacaggaaagttcc

SEQ ID NO: 1861960 - DNA, 15 bp, Homo sapiens
gacaggaaagttccc

SEQ ID NO: 1861961 - DNA, 15 bp, Homo sapiens
acaggaaagttccct

SEQ ID NO: 1861962 - DNA, 15 bp, Homo sapiens
caggaaagttccctc

SEQ ID NO: 1861963 - DNA, 15 bp, Homo sapiens
aggaaagttccctct

SEQ ID NO: 1861964 - DNA, 15 bp, Homo sapiens
ggaaagttccctctg

SEQ ID NO: 1861965 - DNA, 15 bp, Homo sapiens
gaaagttccctctgg

SEQ ID NO: 1861966 - DNA, 15 bp, Homo sapiens
aaagttccctctggt

SEQ ID NO: 1861967 - DNA, 15 bp, Homo sapiens
aagttccctctggtt

SEQ ID NO: 1861968 - DNA, 15 bp, Homo sapiens
agttccctctggttt

SEQ ID NO: 1861969 - DNA, 15 bp, Homo sapiens
gttccctctggtttg

SEQ ID NO: 1861970 - DNA, 15 bp, Homo sapiens
ttccctctggtttga

SEQ ID NO: 1861971 - DNA, 15 bp, Homo sapiens
tccctctggtttgat

SEQ ID NO: 1861972 - DNA, 15 bp, Homo sapiens
ccctctggtttgatt

SEQ ID NO: 1861973 - DNA, 15 bp, Homo sapiens
cctctggtttgattc

SEQ ID NO: 1861974 - DNA, 15 bp, Homo sapiens
ctctggtttgattcc

SEQ ID NO: 1861975 - DNA, 15 bp, Homo sapiens
tctggtttgattccc

SEQ ID NO: 1861976 - DNA, 15 bp, Homo sapiens
ctggtttgattcccg

SEQ ID NO: 1861977 - DNA, 15 bp, Homo sapiens
tggtttgattcccgg

SEQ ID NO: 1861978 - DNA, 15 bp, Homo sapiens
ggtttgattcccggc

SEQ ID NO: 1861979 - DNA, 15 bp, Homo sapiens
gtttgattcccggcc

SEQ ID NO: 1861980 - DNA, 15 bp, Homo sapiens
tttgattcccggcct

SEQ ID NO: 1861981 - DNA, 15 bp, Homo sapiens
ttgattcccggcctg

SEQ ID NO: 1861982 - DNA, 15 bp, Homo sapiens
tgattcccggcctga

SEQ ID NO: 1861983 - DNA, 15 bp, Homo sapiens
gattcccggcctgac

SEQ ID NO: 1861984 - DNA, 15 bp, Homo sapiens
attcccggcctgact

SEQ ID NO: 1861985 - DNA, 15 bp, Homo sapiens
ttcccggcctgactt

SEQ ID NO: 1861986 - DNA, 15 bp, Homo sapiens
tcccggcctgacttt

SEQ ID NO: 1861987 - DNA, 15 bp, Homo sapiens
cccggcctgactttt

SEQ ID NO: 1861988 - DNA, 15 bp, Homo sapiens
ccggcctgacttttc

SEQ ID NO: 1861989 - DNA, 15 bp, Homo sapiens
cggcctgacttttct

SEQ ID NO: 1861990 - DNA, 15 bp, Homo sapiens
ggcctgacttttctg

SEQ ID NO: 1861991 - DNA, 15 bp, Homo sapiens
gcctgacttttctgc

SEQ ID NO: 1861992 - DNA, 15 bp, Homo sapiens
cctgacttttctgct

SEQ ID NO: 1861993 - DNA, 15 bp, Homo sapiens
ctgacttttctgctg

SEQ ID NO: 1861994 - DNA, 15 bp, Homo sapiens
tgacttttctgctgg

SEQ ID NO: 1861995 - DNA, 15 bp, Homo sapiens
gacttttctgctggg

SEQ ID NO: 1861996 - DNA, 15 bp, Homo sapiens
acttttctgctgggg

SEQ ID NO: 1861997 - DNA, 15 bp, Homo sapiens
cttttctgctggggg

SEQ ID NO: 1861998 - DNA, 15 bp, Homo sapiens
ttttctgctggggga

SEQ ID NO: 1861999 - DNA, 15 bp, Homo sapiens
tttctgctgggggaa

SEQ ID NO: 1862000 - DNA, 15 bp, Homo sapiens
ttctgctgggggaag

SEQ ID NO: 1862001 - DNA, 15 bp, Homo sapiens
tctgctgggggaagt

SEQ ID NO: 1862002 - DNA, 15 bp, Homo sapiens
ctgctgggggaagtg

SEQ ID NO: 1862003 - DNA, 15 bp, Homo sapiens
tgctgggggaagtga

SEQ ID NO: 1862004 - DNA, 15 bp, Homo sapiens
gctgggggaagtgaa

SEQ ID NO: 1862005 - DNA, 15 bp, Homo sapiens
ctgggggaagtgaat

SEQ ID NO: 1862006 - DNA, 15 bp, Homo sapiens
tgggggaagtgaata

SEQ ID NO: 1862007 - DNA, 15 bp, Homo sapiens
gggggaagtgaatat

SEQ ID NO: 1862008 - DNA, 15 bp, Homo sapiens
ggggaagtgaatatg

SEQ ID NO: 1862009 - DNA, 15 bp, Homo sapiens
gggaagtgaatatgc

SEQ ID NO: 1862010 - DNA, 15 bp, Homo sapiens
ggaagtgaatatgct

SEQ ID NO: 1862011 - DNA, 15 bp, Homo sapiens
gaagtgaatatgctt

SEQ ID NO: 1862012 - DNA, 15 bp, Homo sapiens
aagtgaatatgcttg

SEQ ID NO: 1862013 - DNA, 15 bp, Homo sapiens
agtgaatatgcttgt

SEQ ID NO: 1862014 - DNA, 15 bp, Homo sapiens
gtgaatatgcttgtt

SEQ ID NO: 1862015 - DNA, 15 bp, Homo sapiens
tgaatatgcttgttc

SEQ ID NO: 1862016 - DNA, 15 bp, Homo sapiens
gaatatgcttgttct

SEQ ID NO: 1862017 - DNA, 15 bp, Homo sapiens
aatatgcttgttctc

SEQ ID NO: 1862018 - DNA, 15 bp, Homo sapiens
atatgcttgttctca

SEQ ID NO: 1862019 - DNA, 15 bp, Homo sapiens
tatgcttgttctcac

SEQ ID NO: 1862020 - DNA, 15 bp, Homo sapiens
atgcttgttctcact

SEQ ID NO: 1862021 - DNA, 15 bp, Homo sapiens
tgcttgttctcactc

SEQ ID NO: 1862022 - DNA, 15 bp, Homo sapiens
gcttgttctcactct

SEQ ID NO: 1862023 - DNA, 15 bp, Homo sapiens
cttgttctcactctg

SEQ ID NO: 1862024 - DNA, 15 bp, Homo sapiens
ttgttctcactctgc

SEQ ID NO: 1862025 - DNA, 15 bp, Homo sapiens
tgttctcactctgcg

SEQ ID NO: 1862026 - DNA, 15 bp, Homo sapiens
gttctcactctgcgg

SEQ ID NO: 1862027 - DNA, 15 bp, Homo sapiens
ttctcactctgcggg

SEQ ID NO: 1862028 - DNA, 15 bp, Homo sapiens
tctcactctgcgggg

SEQ ID NO: 1862029 - DNA, 15 bp, Homo sapiens
ctcactctgcggggt

SEQ ID NO: 1862030 - DNA, 15 bp, Homo sapiens
tcactctgcggggtc

SEQ ID NO: 1862031 - DNA, 15 bp, Homo sapiens
cactctgcggggtcc

SEQ ID NO: 1862032 - DNA, 15 bp, Homo sapiens
actctgcggggtccc

SEQ ID NO: 1862033 - DNA, 15 bp, Homo sapiens
ctctgcggggtcccc

SEQ ID NO: 1862034 - DNA, 15 bp, Homo sapiens
tctgcggggtccccc

SEQ ID NO: 1862035 - DNA, 15 bp, Homo sapiens
ctgcggggtccccct

SEQ ID NO: 1862036 - DNA, 15 bp, Homo sapiens
tgcggggtccccctg

SEQ ID NO: 1862037 - DNA, 15 bp, Homo sapiens
gcggggtccccctgg

SEQ ID NO: 1862038 - DNA, 15 bp, Homo sapiens
cggggtccccctggc

SEQ ID NO: 1862039 - DNA, 15 bp, Homo sapiens
ggggtccccctggcc

SEQ ID NO: 1862040 - DNA, 15 bp, Homo sapiens
gggtccccctggcct

SEQ ID NO: 1862041 - DNA, 15 bp, Homo sapiens
ggtccccctggcctg

SEQ ID NO: 1862042 - DNA, 15 bp, Homo sapiens
gtccccctggcctgc

SEQ ID NO: 1862043 - DNA, 15 bp, Homo sapiens
tccccctggcctgcc

SEQ ID NO: 1862044 - DNA, 15 bp, Homo sapiens
ccccctggcctgccc

SEQ ID NO: 1862045 - DNA, 15 bp, Homo sapiens
ccctggcctgcccat

SEQ ID NO: 1862046 - DNA, 15 bp, Homo sapiens
cctggcctgcccatc

SEQ ID NO: 1862047 - DNA, 15 bp, Homo sapiens
ctggcctgcccatcc

SEQ ID NO: 1862048 - DNA, 15 bp, Homo sapiens
tggcctgcccatccc

SEQ ID NO: 1862049 - DNA, 15 bp, Homo sapiens
ggcctgcccatccca

SEQ ID NO: 1862050 - DNA, 15 bp, Homo sapiens
gcctgcccatcccag

SEQ ID NO: 1862051 - DNA, 15 bp, Homo sapiens
cctgcccatcccagt

SEQ ID NO: 1862052 - DNA, 15 bp, Homo sapiens
ctgcccatcccagtg

SEQ ID NO: 1862053 - DNA, 15 bp, Homo sapiens
tgcccatcccagtga

SEQ ID NO: 1862054 - DNA, 15 bp, Homo sapiens
gcccatcccagtgac

SEQ ID NO: 1862055 - DNA, 15 bp, Homo sapiens
cccatcccagtgact

SEQ ID NO: 1862056 - DNA, 15 bp, Homo sapiens
ccatcccagtgactg

SEQ ID NO: 1862057 - DNA, 15 bp, Homo sapiens
catcccagtgactgc

SEQ ID NO: 1862058 - DNA, 15 bp, Homo sapiens
atcccagtgactgcg

SEQ ID NO: 1862059 - DNA, 15 bp, Homo sapiens
tcccagtgactgcga

SEQ ID NO: 1862060 - DNA, 15 bp, Homo sapiens
cccagtgactgcgaa

SEQ ID NO: 1862061 - DNA, 15 bp, Homo sapiens
ccagtgactgcgaac

SEQ ID NO: 1862062 - DNA, 15 bp, Homo sapiens
cagtgactgcgaacc

SEQ ID NO: 1862063 - DNA, 15 bp, Homo sapiens
agtgactgcgaacca

SEQ ID NO: 1862064 - DNA, 15 bp, Homo sapiens
gtgactgcgaaccag

SEQ ID NO: 1862065 - DNA, 15 bp, Homo sapiens
tgactgcgaaccagg

SEQ ID NO: 1862066 - DNA, 15 bp, Homo sapiens
gactgcgaaccagga

SEQ ID NO: 1862067 - DNA, 15 bp, Homo sapiens
actgcgaaccaggat

SEQ ID NO: 1862068 - DNA, 15 bp, Homo sapiens
ctgcgaaccaggatg

SEQ ID NO: 1862069 - DNA, 15 bp, Homo sapiens
tgcgaaccaggatgg

SEQ ID NO: 1862070 - DNA, 15 bp, Homo sapiens
gcgaaccaggatggt

SEQ ID NO: 1862071 - DNA, 15 bp, Homo sapiens
cgaaccaggatggtg

SEQ ID NO: 1862072 - DNA, 15 bp, Homo sapiens
caggatggtgccagg

SEQ ID NO: 1862073 - DNA, 15 bp, Homo sapiens
aggatggtgccaggg

SEQ ID NO: 1862074 - DNA, 15 bp, Homo sapiens
ggatggtgccagggt

SEQ ID NO: 1862075 - DNA, 15 bp, Homo sapiens
gatggtgccagggtt

SEQ ID NO: 1862076 - DNA, 15 bp, Homo sapiens
atggtgccagggttg

SEQ ID NO: 1862077 - DNA, 15 bp, Homo sapiens
tggtgccagggttgg

SEQ ID NO: 1862078 - DNA, 15 bp, Homo sapiens
ggtgccagggttggc

SEQ ID NO: 1862079 - DNA, 15 bp, Homo sapiens
gtgccagggttggct

SEQ ID NO: 1862080 - DNA, 15 bp, Homo sapiens
tgccagggttggctc

SEQ ID NO: 1862081 - DNA, 15 bp, Homo sapiens
gccagggttggctcc

SEQ ID NO: 1862082 - DNA, 15 bp, Homo sapiens
ccagggttggctcca

SEQ ID NO: 1862083 - DNA, 15 bp, Homo sapiens
cagggttggctccaa

SEQ ID NO: 1862084 - DNA, 15 bp, Homo sapiens
agggttggctccaaa

SEQ ID NO: 1862085 - DNA, 15 bp, Homo sapiens
gggttggctccaaaa

SEQ ID NO: 1862086 - DNA, 15 bp, Homo sapiens
ggttggctccaaaag

SEQ ID NO: 1862087 - DNA, 15 bp, Homo sapiens
gttggctccaaaagc

SEQ ID NO: 1862088 - DNA, 15 bp, Homo sapiens
ttggctccaaaagct

SEQ ID NO: 1862089 - DNA, 15 bp, Homo sapiens
tggctccaaaagctg

SEQ ID NO: 1862090 - DNA, 15 bp, Homo sapiens
ggctccaaaagctgg

SEQ ID NO: 1862091 - DNA, 15 bp, Homo sapiens
gctccaaaagctggt

SEQ ID NO: 1862092 - DNA, 15 bp, Homo sapiens
ctccaaaagctggtg

SEQ ID NO: 1862093 - DNA, 15 bp, Homo sapiens
tccaaaagctggtga

SEQ ID NO: 1862094 - DNA, 15 bp, Homo sapiens
ccaaaagctggtgat

SEQ ID NO: 1862095 - DNA, 15 bp, Homo sapiens
caaaagctggtgatc

SEQ ID NO: 1862096 - DNA, 15 bp, Homo sapiens
aaaagctggtgatcc

SEQ ID NO: 1862097 - DNA, 15 bp, Homo sapiens
aaagctggtgatcca

SEQ ID NO: 1862098 - DNA, 15 bp, Homo sapiens
aagctggtgatccag

SEQ ID NO: 1862099 - DNA, 15 bp, Homo sapiens
agctggtgatccaga

SEQ ID NO: 1862100 - DNA, 15 bp, Homo sapiens
gctggtgatccagac

SEQ ID NO: 1862101 - DNA, 15 bp, Homo sapiens
ctggtgatccagacc

SEQ ID NO: 1862102 - DNA, 15 bp, Homo sapiens
tggtgatccagaccc

SEQ ID NO: 1862103 - DNA, 15 bp, Homo sapiens
ggtgatccagaccct

SEQ ID NO: 1862104 - DNA, 15 bp, Homo sapiens
gtgatccagaccctt

SEQ ID NO: 1862105 - DNA, 15 bp, Homo sapiens
tgatccagacccttc

SEQ ID NO: 1862106 - DNA, 15 bp, Homo sapiens
gatccagacccttcc

SEQ ID NO: 1862107 - DNA, 15 bp, Homo sapiens
atccagacccttcct

SEQ ID NO: 1862108 - DNA, 15 bp, Homo sapiens
tccagacccttcctg

SEQ ID NO: 1862109 - DNA, 15 bp, Homo sapiens
ccagacccttcctgg

SEQ ID NO: 1862110 - DNA, 15 bp, Homo sapiens
cagacccttcctggg

SEQ ID NO: 1862111 - DNA, 15 bp, Homo sapiens
agacccttcctgggc

SEQ ID NO: 1862112 - DNA, 15 bp, Homo sapiens
gacccttcctgggcc

SEQ ID NO: 1862113 - DNA, 15 bp, Homo sapiens
acccttcctgggccc

SEQ ID NO: 1862114 - DNA, 15 bp, Homo sapiens
cccttcctgggcccc

SEQ ID NO: 1862115 - DNA, 15 bp, Homo sapiens
ccttcctgggcccct

SEQ ID NO: 1862116 - DNA, 15 bp, Homo sapiens
cttcctgggcccctg

SEQ ID NO: 1862117 - DNA, 15 bp, Homo sapiens
ttcctgggcccctgg

SEQ ID NO: 1862118 - DNA, 15 bp, Homo sapiens
tcctgggcccctgga

SEQ ID NO: 1862119 - DNA, 15 bp, Homo sapiens
cctgggcccctggag

SEQ ID NO: 1862120 - DNA, 15 bp, Homo sapiens
ctgggcccctggaga

SEQ ID NO: 1862121 - DNA, 15 bp, Homo sapiens
tgggcccctggagac

SEQ ID NO: 1862122 - DNA, 15 bp, Homo sapiens
gggcccctggagacc

SEQ ID NO: 1862123 - DNA, 15 bp, Homo sapiens
ggcccctggagaccc

SEQ ID NO: 1862124 - DNA, 15 bp, Homo sapiens
gcccctggagacccc

SEQ ID NO: 1862125 - DNA, 15 bp, Homo sapiens
cccctggagacccca

SEQ ID NO: 1862126 - DNA, 15 bp, Homo sapiens
ccctggagaccccag

SEQ ID NO: 1862127 - DNA, 15 bp, Homo sapiens
cctggagaccccagt

SEQ ID NO: 1862128 - DNA, 15 bp, Homo sapiens
ctggagaccccagtc

SEQ ID NO: 1862129 - DNA, 15 bp, Homo sapiens
tggagaccccagtcc

SEQ ID NO: 1862130 - DNA, 15 bp, Homo sapiens
ggagaccccagtccc

SEQ ID NO: 1862131 - DNA, 15 bp, Homo sapiens
gagaccccagtccct

SEQ ID NO: 1862132 - DNA, 15 bp, Homo sapiens
agaccccagtccctg

SEQ ID NO: 1862133 - DNA, 15 bp, Homo sapiens
gaccccagtccctgt

SEQ ID NO: 1862134 - DNA, 15 bp, Homo sapiens
accccagtccctgtg

SEQ ID NO: 1862135 - DNA, 15 bp, Homo sapiens
ccccagtccctgtga

SEQ ID NO: 1862136 - DNA, 15 bp, Homo sapiens
cccagtccctgtgat

SEQ ID NO: 1862137 - DNA, 15 bp, Homo sapiens
ccagtccctgtgatg

SEQ ID NO: 1862138 - DNA, 15 bp, Homo sapiens
cagtccctgtgatgt

SEQ ID NO: 1862139 - DNA, 15 bp, Homo sapiens
agtccctgtgatgtc

SEQ ID NO: 1862140 - DNA, 15 bp, Homo sapiens
gtccctgtgatgtcc

SEQ ID NO: 1862141 - DNA, 15 bp, Homo sapiens
tccctgtgatgtcct

SEQ ID NO: 1862142 - DNA, 15 bp, Homo sapiens
ccctgtgatgtcctt

SEQ ID NO: 1862143 - DNA, 15 bp, Homo sapiens
cctgtgatgtccttg

SEQ ID NO: 1862144 - DNA, 15 bp, Homo sapiens
ctgtgatgtccttgc

SEQ ID NO: 1862145 - DNA, 15 bp, Homo sapiens
tgtgatgtccttgcc

SEQ ID NO: 1862146 - DNA, 15 bp, Homo sapiens
gtgatgtccttgccc

SEQ ID NO: 1862147 - DNA, 15 bp, Homo sapiens
tgatgtccttgccca

SEQ ID NO: 1862148 - DNA, 15 bp, Homo sapiens
gatgtccttgcccaa

SEQ ID NO: 1862149 - DNA, 15 bp, Homo sapiens
atgtccttgcccaag

SEQ ID NO: 1862150 - DNA, 15 bp, Homo sapiens
tgtccttgcccaagt

SEQ ID NO: 1862151 - DNA, 15 bp, Homo sapiens
gtccttgcccaagtt

SEQ ID NO: 1862152 - DNA, 15 bp, Homo sapiens
tccttgcccaagttc

SEQ ID NO: 1862153 - DNA, 15 bp, Homo sapiens
ccttgcccaagttct

SEQ ID NO: 1862154 - DNA, 15 bp, Homo sapiens
cttgcccaagttcta

SEQ ID NO: 1862155 - DNA, 15 bp, Homo sapiens
ttgcccaagttctag

SEQ ID NO: 1862156 - DNA, 15 bp, Homo sapiens
tgcccaagttctagg

SEQ ID NO: 1862157 - DNA, 15 bp, Homo sapiens
gcccaagttctaggg

SEQ ID NO: 1862158 - DNA, 15 bp, Homo sapiens
cccaagttctagggc

SEQ ID NO: 1862159 - DNA, 15 bp, Homo sapiens
ccaagttctagggct

SEQ ID NO: 1862160 - DNA, 15 bp, Homo sapiens
caagttctagggctg

SEQ ID NO: 1862161 - DNA, 15 bp, Homo sapiens
aagttctagggctgc

SEQ ID NO: 1862162 - DNA, 15 bp, Homo sapiens
agttctagggctgca

SEQ ID NO: 1862163 - DNA, 15 bp, Homo sapiens
gttctagggctgcag

SEQ ID NO: 1862164 - DNA, 15 bp, Homo sapiens
ttctagggctgcagt

SEQ ID NO: 1862165 - DNA, 15 bp, Homo sapiens
tctagggctgcagtg

SEQ ID NO: 1862166 - DNA, 15 bp, Homo sapiens
ctagggctgcagtgg

SEQ ID NO: 1862167 - DNA, 15 bp, Homo sapiens
tagggctgcagtggc

SEQ ID NO: 1862168 - DNA, 15 bp, Homo sapiens
agggctgcagtggcc

SEQ ID NO: 1862169 - DNA, 15 bp, Homo sapiens
gggctgcagtggccg

SEQ ID NO: 1862170 - DNA, 15 bp, Homo sapiens
ggctgcagtggccgt

SEQ ID NO: 1862171 - DNA, 15 bp, Homo sapiens
gctgcagtggccgta

SEQ ID NO: 1862172 - DNA, 15 bp, Homo sapiens
ctgcagtggccgtag

SEQ ID NO: 1862173 - DNA, 15 bp, Homo sapiens
tgcagtggccgtagg

SEQ ID NO: 1862174 - DNA, 15 bp, Homo sapiens
gcagtggccgtaggt

SEQ ID NO: 1862175 - DNA, 15 bp, Homo sapiens
cagtggccgtaggtg

SEQ ID NO: 1862176 - DNA, 15 bp, Homo sapiens
agtggccgtaggtga

SEQ ID NO: 1862177 - DNA, 15 bp, Homo sapiens
gtggccgtaggtgac

SEQ ID NO: 1862178 - DNA, 15 bp, Homo sapiens
tggccgtaggtgact

SEQ ID NO: 1862179 - DNA, 15 bp, Homo sapiens
ggccgtaggtgactg

SEQ ID NO: 1862180 - DNA, 15 bp, Homo sapiens
gccgtaggtgactgg

SEQ ID NO: 1862181 - DNA, 15 bp, Homo sapiens
ccgtaggtgactggc

SEQ ID NO: 1862182 - DNA, 15 bp, Homo sapiens
cgtaggtgactggcc

SEQ ID NO: 1862183 - DNA, 15 bp, Homo sapiens
gtaggtgactggccc

SEQ ID NO: 1862184 - DNA, 15 bp, Homo sapiens
taggtgactggcccg

SEQ ID NO: 1862185 - DNA, 15 bp, Homo sapiens
aggtgactggcccgg

SEQ ID NO: 1862186 - DNA, 15 bp, Homo sapiens
ggtgactggcccggg

SEQ ID NO: 1862187 - DNA, 15 bp, Homo sapiens
gtgactggcccgggc

SEQ ID NO: 1862188 - DNA, 15 bp, Homo sapiens
tgactggcccgggca

SEQ ID NO: 1862189 - DNA, 15 bp, Homo sapiens
gactggcccgggcac

SEQ ID NO: 1862190 - DNA, 15 bp, Homo sapiens
actggcccgggcacc

SEQ ID NO: 1862191 - DNA, 15 bp, Homo sapiens
ctggcccgggcaccc

SEQ ID NO: 1862192 - DNA, 15 bp, Homo sapiens
tggcccgggcaccct

SEQ ID NO: 1862193 - DNA, 15 bp, Homo sapiens
ggcccgggcaccctc

SEQ ID NO: 1862194 - DNA, 15 bp, Homo sapiens
gcccgggcaccctcc

SEQ ID NO: 1862195 - DNA, 15 bp, Homo sapiens
cccgggcaccctccc

SEQ ID NO: 1862196 - DNA, 15 bp, Homo sapiens
ccgggcaccctccct

SEQ ID NO: 1862197 - DNA, 15 bp, Homo sapiens
cgggcaccctccctt

SEQ ID NO: 1862198 - DNA, 15 bp, Homo sapiens
gggcaccctcccttt

SEQ ID NO: 1862199 - DNA, 15 bp, Homo sapiens
ggcaccctccctttg

SEQ ID NO: 1862200 - DNA, 15 bp, Homo sapiens
gcaccctccctttgc

SEQ ID NO: 1862201 - DNA, 15 bp, Homo sapiens
caccctccctttgcg

SEQ ID NO: 1862202 - DNA, 15 bp, Homo sapiens
accctccctttgcgg

SEQ ID NO: 1862203 - DNA, 15 bp, Homo sapiens
ccctccctttgcggg

SEQ ID NO: 1862204 - DNA, 15 bp, Homo sapiens
cctccctttgcggga

SEQ ID NO: 1862205 - DNA, 15 bp, Homo sapiens
ctccctttgcgggag

SEQ ID NO: 1862206 - DNA, 15 bp, Homo sapiens
tccctttgcgggagc

SEQ ID NO: 1862207 - DNA, 15 bp, Homo sapiens
ccctttgcgggagcc

SEQ ID NO: 1862208 - DNA, 15 bp, Homo sapiens
cctttgcgggagcct

SEQ ID NO: 1862209 - DNA, 15 bp, Homo sapiens
ctttgcgggagcctc

SEQ ID NO: 1862210 - DNA, 15 bp, Homo sapiens
tttgcgggagcctcg

SEQ ID NO: 1862211 - DNA, 15 bp, Homo sapiens
ttgcgggagcctcgt

SEQ ID NO: 1862212 - DNA, 15 bp, Homo sapiens
tgcgggagcctcgtg

SEQ ID NO: 1862213 - DNA, 15 bp, Homo sapiens
gcgggagcctcgtga

SEQ ID NO: 1862214 - DNA, 15 bp, Homo sapiens
cgggagcctcgtgaa

SEQ ID NO: 1862215 - DNA, 15 bp, Homo sapiens
gggagcctcgtgaaa

SEQ ID NO: 1862216 - DNA, 15 bp, Homo sapiens
ggagcctcgtgaaag

SEQ ID NO: 1862217 - DNA, 15 bp, Homo sapiens
gagcctcgtgaaagg

SEQ ID NO: 1862218 - DNA, 15 bp, Homo sapiens
agcctcgtgaaagga

SEQ ID NO: 1862219 - DNA, 15 bp, Homo sapiens
gcctcgtgaaaggat

SEQ ID NO: 1862220 - DNA, 15 bp, Homo sapiens
cctcgtgaaaggata

SEQ ID NO: 1862221 - DNA, 15 bp, Homo sapiens
ctcgtgaaaggatac

SEQ ID NO: 1862222 - DNA, 15 bp, Homo sapiens
tcgtgaaaggatact

SEQ ID NO: 1862223 - DNA, 15 bp, Homo sapiens
cgtgaaaggatactg

SEQ ID NO: 1862224 - DNA, 15 bp, Homo sapiens
gtgaaaggatactgt

SEQ ID NO: 1862225 - DNA, 15 bp, Homo sapiens
tgaaaggatactgta

SEQ ID NO: 1862226 - DNA, 15 bp, Homo sapiens
gaaaggatactgtaa

SEQ ID NO: 1862227 - DNA, 15 bp, Homo sapiens
aaaggatactgtaag

SEQ ID NO: 1862228 - DNA, 15 bp, Homo sapiens
aaggatactgtaagc

SEQ ID NO: 1862229 - DNA, 15 bp, Homo sapiens
aggatactgtaagca

SEQ ID NO: 1862230 - DNA, 15 bp, Homo sapiens
ggatactgtaagcac

SEQ ID NO: 1862231 - DNA, 15 bp, Homo sapiens
gatactgtaagcaca

SEQ ID NO: 1862232 - DNA, 15 bp, Homo sapiens
atactgtaagcacag

SEQ ID NO: 1862233 - DNA, 15 bp, Homo sapiens
tactgtaagcacagc

SEQ ID NO: 1862234 - DNA, 15 bp, Homo sapiens
actgtaagcacagcc

SEQ ID NO: 1862235 - DNA, 15 bp, Homo sapiens
ctgtaagcacagcca

SEQ ID NO: 1862236 - DNA, 15 bp, Homo sapiens
tgtaagcacagccac

SEQ ID NO: 1862237 - DNA, 15 bp, Homo sapiens
gtaagcacagccaca

SEQ ID NO: 1862238 - DNA, 15 bp, Homo sapiens
taagcacagccacag

SEQ ID NO: 1862239 - DNA, 15 bp, Homo sapiens
aagcacagccacagg

SEQ ID NO: 1862240 - DNA, 15 bp, Homo sapiens
agcacagccacaggg

SEQ ID NO: 1862241 - DNA, 15 bp, Homo sapiens
gcacagccacaggga

SEQ ID NO: 1862242 - DNA, 15 bp, Homo sapiens
cacagccacagggag

SEQ ID NO: 1862243 - DNA, 15 bp, Homo sapiens
acagccacagggagg

SEQ ID NO: 1862244 - DNA, 15 bp, Homo sapiens
cagccacagggaggt

SEQ ID NO: 1862245 - DNA, 15 bp, Homo sapiens
agccacagggaggtc

SEQ ID NO: 1862246 - DNA, 15 bp, Homo sapiens
gccacagggaggtca

SEQ ID NO: 1862247 - DNA, 15 bp, Homo sapiens
ccacagggaggtcac

SEQ ID NO: 1862248 - DNA, 15 bp, Homo sapiens
cacagggaggtcacc

SEQ ID NO: 1862249 - DNA, 15 bp, Homo sapiens
acagggaggtcacca

SEQ ID NO: 1862250 - DNA, 15 bp, Homo sapiens
cagggaggtcaccac

SEQ ID NO: 1862251 - DNA, 15 bp, Homo sapiens
agggaggtcaccact

SEQ ID NO: 1862252 - DNA, 15 bp, Homo sapiens
gggaggtcaccactg

SEQ ID NO: 1862253 - DNA, 15 bp, Homo sapiens
ggaggtcaccactgg

SEQ ID NO: 1862254 - DNA, 15 bp, Homo sapiens
gaggtcaccactggc

SEQ ID NO: 1862255 - DNA, 15 bp, Homo sapiens
aggtcaccactggcc

SEQ ID NO: 1862256 - DNA, 15 bp, Homo sapiens
ggtcaccactggccc

SEQ ID NO: 1862257 - DNA, 15 bp, Homo sapiens
gtcaccactggccct

SEQ ID NO: 1862258 - DNA, 15 bp, Homo sapiens
tcaccactggcccta

SEQ ID NO: 1862259 - DNA, 15 bp, Homo sapiens
caccactggccctac

SEQ ID NO: 1862260 - DNA, 15 bp, Homo sapiens
accactggccctacc

SEQ ID NO: 1862261 - DNA, 15 bp, Homo sapiens
ccactggccctacca

SEQ ID NO: 1862262 - DNA, 15 bp, Homo sapiens
cactggccctaccac

SEQ ID NO: 1862263 - DNA, 15 bp, Homo sapiens
actggccctaccacc

SEQ ID NO: 1862264 - DNA, 15 bp, Homo sapiens
ctggccctaccacct

SEQ ID NO: 1862265 - DNA, 15 bp, Homo sapiens
tggccctaccacctc

SEQ ID NO: 1862266 - DNA, 15 bp, Homo sapiens
ggccctaccacctct

SEQ ID NO: 1862267 - DNA, 15 bp, Homo sapiens
gccctaccacctctc

SEQ ID NO: 1862268 - DNA, 15 bp, Homo sapiens
ccctaccacctctcg

SEQ ID NO: 1862269 - DNA, 15 bp, Homo sapiens
cctaccacctctcgc

SEQ ID NO: 1862270 - DNA, 15 bp, Homo sapiens
ctaccacctctcgct

SEQ ID NO: 1862271 - DNA, 15 bp, Homo sapiens
taccacctctcgctc

SEQ ID NO: 1862272 - DNA, 15 bp, Homo sapiens
accacctctcgctcg

SEQ ID NO: 1862273 - DNA, 15 bp, Homo sapiens
ccacctctcgctcgg

SEQ ID NO: 1862274 - DNA, 15 bp, Homo sapiens
cacctctcgctcggt

SEQ ID NO: 1862275 - DNA, 15 bp, Homo sapiens
acctctcgctcggta

SEQ ID NO: 1862276 - DNA, 15 bp, Homo sapiens
cctctcgctcggtat

SEQ ID NO: 1862277 - DNA, 15 bp, Homo sapiens
ctctcgctcggtatt

SEQ ID NO: 1862278 - DNA, 15 bp, Homo sapiens
tctcgctcggtattg

SEQ ID NO: 1862279 - DNA, 15 bp, Homo sapiens
ctcgctcggtattga

SEQ ID NO: 1862280 - DNA, 15 bp, Homo sapiens
tcgctcggtattgaa

SEQ ID NO: 1862281 - DNA, 15 bp, Homo sapiens
cgctcggtattgaat

SEQ ID NO: 1862282 - DNA, 15 bp, Homo sapiens
gctcggtattgaatg

SEQ ID NO: 1862283 - DNA, 15 bp, Homo sapiens
ctcggtattgaatgg

SEQ ID NO: 1862284 - DNA, 15 bp, Homo sapiens
tcggtattgaatggc

SEQ ID NO: 1862285 - DNA, 15 bp, Homo sapiens
cggtattgaatggct

SEQ ID NO: 1862286 - DNA, 15 bp, Homo sapiens
ggtattgaatggcta

SEQ ID NO: 1862287 - DNA, 15 bp, Homo sapiens
gtattgaatggctag

SEQ ID NO: 1862288 - DNA, 15 bp, Homo sapiens
tattgaatggctagc

SEQ ID NO: 1862289 - DNA, 15 bp, Homo sapiens
attgaatggctagcc

SEQ ID NO: 1862290 - DNA, 15 bp, Homo sapiens
ttgaatggctagccc

SEQ ID NO: 1862291 - DNA, 15 bp, Homo sapiens
tgaatggctagcccc

SEQ ID NO: 1862292 - DNA, 15 bp, Homo sapiens
gaatggctagcccca

SEQ ID NO: 1862293 - DNA, 15 bp, Homo sapiens
aatggctagccccaa

SEQ ID NO: 1862294 - DNA, 15 bp, Homo sapiens
atggctagccccaag

SEQ ID NO: 1862295 - DNA, 15 bp, Homo sapiens
tggctagccccaagc

SEQ ID NO: 1862296 - DNA, 15 bp, Homo sapiens
ggctagccccaagcc

SEQ ID NO: 1862297 - DNA, 15 bp, Homo sapiens
gctagccccaagcct

SEQ ID NO: 1862298 - DNA, 15 bp, Homo sapiens
ctagccccaagcctg

SEQ ID NO: 1862299 - DNA, 15 bp, Homo sapiens
tagccccaagcctgg

SEQ ID NO: 1862300 - DNA, 15 bp, Homo sapiens
agccccaagcctggc

SEQ ID NO: 1862301 - DNA, 15 bp, Homo sapiens
gccccaagcctggct

SEQ ID NO: 1862302 - DNA, 15 bp, Homo sapiens
ccccaagcctggctg

SEQ ID NO: 1862303 - DNA, 15 bp, Homo sapiens
cccaagcctggctgc

SEQ ID NO: 1862304 - DNA, 15 bp, Homo sapiens
ccaagcctggctgcc

SEQ ID NO: 1862305 - DNA, 15 bp, Homo sapiens
caagcctggctgcct

SEQ ID NO: 1862306 - DNA, 15 bp, Homo sapiens
aagcctggctgcctg

SEQ ID NO: 1862307 - DNA, 15 bp, Homo sapiens
agcctggctgcctgc

SEQ ID NO: 1862308 - DNA, 15 bp, Homo sapiens
gcctggctgcctgcc

SEQ ID NO: 1862309 - DNA, 15 bp, Homo sapiens
cctggctgcctgcct

SEQ ID NO: 1862310 - DNA, 15 bp, Homo sapiens
ctggctgcctgccta

SEQ ID NO: 1862311 - DNA, 15 bp, Homo sapiens
tggctgcctgcctac

SEQ ID NO: 1862312 - DNA, 15 bp, Homo sapiens
ggctgcctgcctact

SEQ ID NO: 1862313 - DNA, 15 bp, Homo sapiens
gctgcctgcctactg

SEQ ID NO: 1862314 - DNA, 15 bp, Homo sapiens
ctgcctgcctactgt

SEQ ID NO: 1862315 - DNA, 15 bp, Homo sapiens
tgcctgcctactgtc

SEQ ID NO: 1862316 - DNA, 15 bp, Homo sapiens
gcctgcctactgtca

SEQ ID NO: 1862317 - DNA, 15 bp, Homo sapiens
cctgcctactgtcac

SEQ ID NO: 1862318 - DNA, 15 bp, Homo sapiens
ctgcctactgtcaca

SEQ ID NO: 1862319 - DNA, 15 bp, Homo sapiens
tgcctactgtcacac

SEQ ID NO: 1862320 - DNA, 15 bp, Homo sapiens
gcctactgtcacaca

SEQ ID NO: 1862321 - DNA, 15 bp, Homo sapiens
cctactgtcacacag

SEQ ID NO: 1862322 - DNA, 15 bp, Homo sapiens
ctactgtcacacaga

SEQ ID NO: 1862323 - DNA, 15 bp, Homo sapiens
tactgtcacacagag

SEQ ID NO: 1862324 - DNA, 15 bp, Homo sapiens
actgtcacacagagg

SEQ ID NO: 1862325 - DNA, 15 bp, Homo sapiens
ctgtcacacagaggc

SEQ ID NO: 1862326 - DNA, 15 bp, Homo sapiens
tgtcacacagaggct

SEQ ID NO: 1862327 - DNA, 15 bp, Homo sapiens
gtcacacagaggctt

SEQ ID NO: 1862328 - DNA, 15 bp, Homo sapiens
tcacacagaggcttc

SEQ ID NO: 1862329 - DNA, 15 bp, Homo sapiens
cacacagaggcttcc

SEQ ID NO: 1862330 - DNA, 15 bp, Homo sapiens
acacagaggcttcct

SEQ ID NO: 1862331 - DNA, 15 bp, Homo sapiens
cacagaggcttcctc

SEQ ID NO: 1862332 - DNA, 15 bp, Homo sapiens
acagaggcttcctct

SEQ ID NO: 1862333 - DNA, 15 bp, Homo sapiens
cagaggcttcctctc

SEQ ID NO: 1862334 - DNA, 15 bp, Homo sapiens
agaggcttcctctcc

SEQ ID NO: 1862335 - DNA, 15 bp, Homo sapiens
gaggcttcctctccg

SEQ ID NO: 1862336 - DNA, 15 bp, Homo sapiens
aggcttcctctccgg

SEQ ID NO: 1862337 - DNA, 15 bp, Homo sapiens
ggcttcctctccggg

SEQ ID NO: 1862338 - DNA, 15 bp, Homo sapiens
gcttcctctccgggc

SEQ ID NO: 1862339 - DNA, 15 bp, Homo sapiens
cttcctctccgggct

SEQ ID NO: 1862340 - DNA, 15 bp, Homo sapiens
ttcctctccgggcta

SEQ ID NO: 1862341 - DNA, 15 bp, Homo sapiens
tcctctccgggctat

SEQ ID NO: 1862342 - DNA, 15 bp, Homo sapiens
cctctccgggctatt

SEQ ID NO: 1862343 - DNA, 15 bp, Homo sapiens
ctctccgggctattt

SEQ ID NO: 1862344 - DNA, 15 bp, Homo sapiens
tctccgggctatttt

SEQ ID NO: 1862345 - DNA, 15 bp, Homo sapiens
ctccgggctattttc

SEQ ID NO: 1862346 - DNA, 15 bp, Homo sapiens
tccgggctattttca

SEQ ID NO: 1862347 - DNA, 15 bp, Homo sapiens
ccgggctattttcag

SEQ ID NO: 1862348 - DNA, 15 bp, Homo sapiens
cgggctattttcagc

SEQ ID NO: 1862349 - DNA, 15 bp, Homo sapiens
gggctattttcagcg

SEQ ID NO: 1862350 - DNA, 15 bp, Homo sapiens
ggctattttcagcgg

SEQ ID NO: 1862351 - DNA, 15 bp, Homo sapiens
gctattttcagcggg

SEQ ID NO: 1862352 - DNA, 15 bp, Homo sapiens
ctattttcagcggga

SEQ ID NO: 1862353 - DNA, 15 bp, Homo sapiens
tattttcagcgggaa

SEQ ID NO: 1862354 - DNA, 15 bp, Homo sapiens
attttcagcgggaag

SEQ ID NO: 1862355 - DNA, 15 bp, Homo sapiens
ttttcagcgggaaga

SEQ ID NO: 1862356 - DNA, 15 bp, Homo sapiens
tttcagcgggaagat

SEQ ID NO: 1862357 - DNA, 15 bp, Homo sapiens
ttcagcgggaagata

SEQ ID NO: 1862358 - DNA, 15 bp, Homo sapiens
tcagcgggaagatat

SEQ ID NO: 1862359 - DNA, 15 bp, Homo sapiens
cagcgggaagatatt

SEQ ID NO: 1862360 - DNA, 15 bp, Homo sapiens
agcgggaagatatta

SEQ ID NO: 1862361 - DNA, 15 bp, Homo sapiens
gcgggaagatattat

SEQ ID NO: 1862362 - DNA, 15 bp, Homo sapiens
cgggaagatattatt

SEQ ID NO: 1862363 - DNA, 15 bp, Homo sapiens
gggaagatattatta

SEQ ID NO: 1862364 - DNA, 15 bp, Homo sapiens
ggaagatattattaa

SEQ ID NO: 1862365 - DNA, 15 bp, Homo sapiens
gaagatattattaac

SEQ ID NO: 1862366 - DNA, 15 bp, Homo sapiens
aagatattattaact

SEQ ID NO: 1862367 - DNA, 15 bp, Homo sapiens
agatattattaactg

SEQ ID NO: 1862368 - DNA, 15 bp, Homo sapiens
gatattattaactgc

SEQ ID NO: 1862369 - DNA, 15 bp, Homo sapiens
atattattaactgct

SEQ ID NO: 1862370 - DNA, 15 bp, Homo sapiens
tattattaactgctg

SEQ ID NO: 1862371 - DNA, 15 bp, Homo sapiens
attattaactgctga

SEQ ID NO: 1862372 - DNA, 15 bp, Homo sapiens
ttattaactgctgag

SEQ ID NO: 1862373 - DNA, 15 bp, Homo sapiens
tattaactgctgagg

SEQ ID NO: 1862374 - DNA, 15 bp, Homo sapiens
attaactgctgaggc

SEQ ID NO: 1862375 - DNA, 15 bp, Homo sapiens
ttaactgctgaggca

SEQ ID NO: 1862376 - DNA, 15 bp, Homo sapiens
taactgctgaggcac

SEQ ID NO: 1862377 - DNA, 15 bp, Homo sapiens
aactgctgaggcaca

SEQ ID NO: 1862378 - DNA, 15 bp, Homo sapiens
actgctgaggcacag

SEQ ID NO: 1862379 - DNA, 15 bp, Homo sapiens
ctgctgaggcacagt

SEQ ID NO: 1862380 - DNA, 15 bp, Homo sapiens
tgctgaggcacagtt

SEQ ID NO: 1862381 - DNA, 15 bp, Homo sapiens
gctgaggcacagttc

SEQ ID NO: 1862382 - DNA, 15 bp, Homo sapiens
ctgaggcacagttct

SEQ ID NO: 1862383 - DNA, 15 bp, Homo sapiens
tgaggcacagttctc

SEQ ID NO: 1862384 - DNA, 15 bp, Homo sapiens
gaggcacagttctca

SEQ ID NO: 1862385 - DNA, 15 bp, Homo sapiens
aggcacagttctcaa

SEQ ID NO: 1862386 - DNA, 15 bp, Homo sapiens
ggcacagttctcaat

SEQ ID NO: 1862387 - DNA, 15 bp, Homo sapiens
gcacagttctcaatt

SEQ ID NO: 1862388 - DNA, 15 bp, Homo sapiens
cacagttctcaattt

SEQ ID NO: 1862389 - DNA, 15 bp, Homo sapiens
acagttctcaattta

SEQ ID NO: 1862390 - DNA, 15 bp, Homo sapiens
cagttctcaatttag

SEQ ID NO: 1862391 - DNA, 15 bp, Homo sapiens
agttctcaatttagt

SEQ ID NO: 1862392 - DNA, 15 bp, Homo sapiens
gttctcaatttagtg

SEQ ID NO: 1862393 - DNA, 15 bp, Homo sapiens
ttctcaatttagtgg

SEQ ID NO: 1862394 - DNA, 15 bp, Homo sapiens
tctcaatttagtggt

SEQ ID NO: 1862395 - DNA, 15 bp, Homo sapiens
ctcaatttagtggtt

SEQ ID NO: 1862396 - DNA, 15 bp, Homo sapiens
tcaatttagtggtta

SEQ ID NO: 1862397 - DNA, 15 bp, Homo sapiens
caatttagtggttaa

SEQ ID NO: 1862398 - DNA, 15 bp, Homo sapiens
aatttagtggttaac

SEQ ID NO: 1862399 - DNA, 15 bp, Homo sapiens
atttagtggttaaca

SEQ ID NO: 1862400 - DNA, 15 bp, Homo sapiens
tttagtggttaacac

SEQ ID NO: 1862401 - DNA, 15 bp, Homo sapiens
ttagtggttaacaca

SEQ ID NO: 1862402 - DNA, 15 bp, Homo sapiens
tagtggttaacacac

SEQ ID NO: 1862403 - DNA, 15 bp, Homo sapiens
agtggttaacacacc

SEQ ID NO: 1862404 - DNA, 15 bp, Homo sapiens
gtggttaacacacca

SEQ ID NO: 1862405 - DNA, 15 bp, Homo sapiens
tggttaacacaccaa

SEQ ID NO: 1862406 - DNA, 15 bp, Homo sapiens
ggttaacacaccaag

SEQ ID NO: 1862407 - DNA, 15 bp, Homo sapiens
gttaacacaccaaga

SEQ ID NO: 1862408 - DNA, 15 bp, Homo sapiens
ttaacacaccaagaa

SEQ ID NO: 1862409 - DNA, 15 bp, Homo sapiens
taacacaccaagaaa

SEQ ID NO: 1862410 - DNA, 15 bp, Homo sapiens
aacacaccaagaaag

SEQ ID NO: 1862411 - DNA, 15 bp, Homo sapiens
acacaccaagaaagc

SEQ ID NO: 1862412 - DNA, 15 bp, Homo sapiens
cacaccaagaaagca

SEQ ID NO: 1862413 - DNA, 15 bp, Homo sapiens
acaccaagaaagcaa

SEQ ID NO: 1862414 - DNA, 15 bp, Homo sapiens
caccaagaaagcaac

SEQ ID NO: 1862415 - DNA, 15 bp, Homo sapiens
accaagaaagcaaca

SEQ ID NO: 1862416 - DNA, 15 bp, Homo sapiens
ccaagaaagcaacac

SEQ ID NO: 1862417 - DNA, 15 bp, Homo sapiens
caagaaagcaacact

SEQ ID NO: 1862418 - DNA, 15 bp, Homo sapiens
aagaaagcaacactc

SEQ ID NO: 1862419 - DNA, 15 bp, Homo sapiens
agaaagcaacactca

SEQ ID NO: 1862420 - DNA, 15 bp, Homo sapiens
gaaagcaacactcac

SEQ ID NO: 1862421 - DNA, 15 bp, Homo sapiens
aaagcaacactcacc

SEQ ID NO: 1862422 - DNA, 15 bp, Homo sapiens
aagcaacactcacct

SEQ ID NO: 1862423 - DNA, 15 bp, Homo sapiens
agcaacactcacctg

SEQ ID NO: 1862424 - DNA, 15 bp, Homo sapiens
gcaacactcacctga

SEQ ID NO: 1862425 - DNA, 15 bp, Homo sapiens
caacactcacctgat

SEQ ID NO: 1862426 - DNA, 15 bp, Homo sapiens
aacactcacctgatc

SEQ ID NO: 1862427 - DNA, 15 bp, Homo sapiens
acactcacctgatcc

SEQ ID NO: 1862428 - DNA, 15 bp, Homo sapiens
cactcacctgatccc

SEQ ID NO: 1862429 - DNA, 15 bp, Homo sapiens
actcacctgatcccg

SEQ ID NO: 1862430 - DNA, 15 bp, Homo sapiens
ctcacctgatcccgg

SEQ ID NO: 1862431 - DNA, 15 bp, Homo sapiens
tcacctgatcccggc

SEQ ID NO: 1862432 - DNA, 15 bp, Homo sapiens
cacctgatcccggcc

SEQ ID NO: 1862433 - DNA, 15 bp, Homo sapiens
acctgatcccggcca

SEQ ID NO: 1862434 - DNA, 15 bp, Homo sapiens
cctgatcccggccac

SEQ ID NO: 1862435 - DNA, 15 bp, Homo sapiens
ctgatcccggccact

SEQ ID NO: 1862436 - DNA, 15 bp, Homo sapiens
tgatcccggccactc

SEQ ID NO: 1862437 - DNA, 15 bp, Homo sapiens
gatcccggccactct

SEQ ID NO: 1862438 - DNA, 15 bp, Homo sapiens
atcccggccactcta

SEQ ID NO: 1862439 - DNA, 15 bp, Homo sapiens
tcccggccactctac

SEQ ID NO: 1862440 - DNA, 15 bp, Homo sapiens
cccggccactctacc

SEQ ID NO: 1862441 - DNA, 15 bp, Homo sapiens
ccggccactctacct

SEQ ID NO: 1862442 - DNA, 15 bp, Homo sapiens
cggccactctaccta

SEQ ID NO: 1862443 - DNA, 15 bp, Homo sapiens
ggccactctacctaa

SEQ ID NO: 1862444 - DNA, 15 bp, Homo sapiens
gccactctacctaaa

SEQ ID NO: 1862445 - DNA, 15 bp, Homo sapiens
ccactctacctaaac

SEQ ID NO: 1862446 - DNA, 15 bp, Homo sapiens
cactctacctaaacc

SEQ ID NO: 1862447 - DNA, 15 bp, Homo sapiens
actctacctaaacct

SEQ ID NO: 1862448 - DNA, 15 bp, Homo sapiens
ctctacctaaacctg

SEQ ID NO: 1862449 - DNA, 15 bp, Homo sapiens
tctacctaaacctgt

SEQ ID NO: 1862450 - DNA, 15 bp, Homo sapiens
ctacctaaacctgtt

SEQ ID NO: 1862451 - DNA, 15 bp, Homo sapiens
acctaaacctgttgg

SEQ ID NO: 1862452 - DNA, 15 bp, Homo sapiens
cctaaacctgttggc

SEQ ID NO: 1862453 - DNA, 15 bp, Homo sapiens
ctaaacctgttggct

SEQ ID NO: 1862454 - DNA, 15 bp, Homo sapiens
taaacctgttggctc

SEQ ID NO: 1862455 - DNA, 15 bp, Homo sapiens
aaacctgttggctca

SEQ ID NO: 1862456 - DNA, 15 bp, Homo sapiens
aacctgttggctcac

SEQ ID NO: 1862457 - DNA, 15 bp, Homo sapiens
acctgttggctcact

SEQ ID NO: 1862458 - DNA, 15 bp, Homo sapiens
cctgttggctcactt

SEQ ID NO: 1862459 - DNA, 15 bp, Homo sapiens
ctgttggctcacttg

SEQ ID NO: 1862460 - DNA, 15 bp, Homo sapiens
tgttggctcacttgg

SEQ ID NO: 1862461 - DNA, 15 bp, Homo sapiens
gttggctcacttggg

SEQ ID NO: 1862462 - DNA, 15 bp, Homo sapiens
ttggctcacttgggg

SEQ ID NO: 1862463 - DNA, 15 bp, Homo sapiens
tggctcacttggggg

SEQ ID NO: 1862464 - DNA, 15 bp, Homo sapiens
ggctcacttggggga

SEQ ID NO: 1862465 - DNA, 15 bp, Homo sapiens
gctcacttgggggac

SEQ ID NO: 1862466 - DNA, 15 bp, Homo sapiens
ctcacttgggggact

SEQ ID NO: 1862467 - DNA, 15 bp, Homo sapiens
tcacttgggggactc

SEQ ID NO: 1862468 - DNA, 15 bp, Homo sapiens
cacttgggggactcg

SEQ ID NO: 1862469 - DNA, 15 bp, Homo sapiens
acttgggggactcgg

SEQ ID NO: 1862470 - DNA, 15 bp, Homo sapiens
cttgggggactcggc

SEQ ID NO: 1862471 - DNA, 15 bp, Homo sapiens
ttgggggactcggct

SEQ ID NO: 1862472 - DNA, 15 bp, Homo sapiens
tgggggactcggctg

SEQ ID NO: 1862473 - DNA, 15 bp, Homo sapiens
gggggactcggctgc

SEQ ID NO: 1862474 - DNA, 15 bp, Homo sapiens
ggggactcggctgcc

SEQ ID NO: 1862475 - DNA, 15 bp, Homo sapiens
gggactcggctgccc

SEQ ID NO: 1862476 - DNA, 15 bp, Homo sapiens
ggactcggctgcccc

SEQ ID NO: 1862477 - DNA, 15 bp, Homo sapiens
gactcggctgccccc

SEQ ID NO: 1862478 - DNA, 15 bp, Homo sapiens
actcggctgcccccc

SEQ ID NO: 1862479 - DNA, 15 bp, Homo sapiens
ctcggctgcccccca

SEQ ID NO: 1862480 - DNA, 15 bp, Homo sapiens
tcggctgccccccag

SEQ ID NO: 1862481 - DNA, 15 bp, Homo sapiens
cggctgccccccagc

SEQ ID NO: 1862482 - DNA, 15 bp, Homo sapiens
ggctgccccccagcc

SEQ ID NO: 1862483 - DNA, 15 bp, Homo sapiens
gctgccccccagcct

SEQ ID NO: 1862484 - DNA, 15 bp, Homo sapiens
ctgccccccagcctc

SEQ ID NO: 1862485 - DNA, 15 bp, Homo sapiens
tgccccccagcctct

SEQ ID NO: 1862486 - DNA, 15 bp, Homo sapiens
gccccccagcctctc

SEQ ID NO: 1862487 - DNA, 15 bp, Homo sapiens
ccccccagcctctct

SEQ ID NO: 1862488 - DNA, 15 bp, Homo sapiens
cccccagcctctctg

SEQ ID NO: 1862489 - DNA, 15 bp, Homo sapiens
ccccagcctctctgt

SEQ ID NO: 1862490 - DNA, 15 bp, Homo sapiens
cccagcctctctgtt

SEQ ID NO: 1862491 - DNA, 15 bp, Homo sapiens
ccagcctctctgttt

SEQ ID NO: 1862492 - DNA, 15 bp, Homo sapiens
cagcctctctgtttc

SEQ ID NO: 1862493 - DNA, 15 bp, Homo sapiens
agcctctctgtttct

SEQ ID NO: 1862494 - DNA, 15 bp, Homo sapiens
gcctctctgtttctc

SEQ ID NO: 1862495 - DNA, 15 bp, Homo sapiens
cctctctgtttctct

SEQ ID NO: 1862496 - DNA, 15 bp, Homo sapiens
ctctctgtttctctc

SEQ ID NO: 1862497 - DNA, 15 bp, Homo sapiens
ctctgtttctctctg

SEQ ID NO: 1862498 - DNA, 15 bp, Homo sapiens
tctgtttctctctgt

SEQ ID NO: 1862499 - DNA, 15 bp, Homo sapiens
ctgtttctctctgtg

SEQ ID NO: 1862500 - DNA, 15 bp, Homo sapiens
tgtttctctctgtgg

SEQ ID NO: 1862501 - DNA, 15 bp, Homo sapiens
gtttctctctgtggg

SEQ ID NO: 1862502 - DNA, 15 bp, Homo sapiens
tttctctctgtgggt

SEQ ID NO: 1862503 - DNA, 15 bp, Homo sapiens
ttctctctgtgggtt

SEQ ID NO: 1862504 - DNA, 15 bp, Homo sapiens
tctctctgtgggttc

SEQ ID NO: 1862505 - DNA, 15 bp, Homo sapiens
ctctctgtgggttca

SEQ ID NO: 1862506 - DNA, 15 bp, Homo sapiens
tctctgtgggttcac

SEQ ID NO: 1862507 - DNA, 15 bp, Homo sapiens
ctctgtgggttcacc

SEQ ID NO: 1862508 - DNA, 15 bp, Homo sapiens
tctgtgggttcacct

SEQ ID NO: 1862509 - DNA, 15 bp, Homo sapiens
ctgtgggttcacctg

SEQ ID NO: 1862510 - DNA, 15 bp, Homo sapiens
tgtgggttcacctgg

SEQ ID NO: 1862511 - DNA, 15 bp, Homo sapiens
gtgggttcacctggg

SEQ ID NO: 1862512 - DNA, 15 bp, Homo sapiens
tgggttcacctggga

SEQ ID NO: 1862513 - DNA, 15 bp, Homo sapiens
gggttcacctgggag

SEQ ID NO: 1862514 - DNA, 15 bp, Homo sapiens
ggttcacctgggaga

SEQ ID NO: 1862515 - DNA, 15 bp, Homo sapiens
gttcacctgggagat

SEQ ID NO: 1862516 - DNA, 15 bp, Homo sapiens
ttcacctgggagatg

SEQ ID NO: 1862517 - DNA, 15 bp, Homo sapiens
tcacctgggagatgt

SEQ ID NO: 1862518 - DNA, 15 bp, Homo sapiens
cacctgggagatgtg

SEQ ID NO: 1862519 - DNA, 15 bp, Homo sapiens
acctgggagatgtgg

SEQ ID NO: 1862520 - DNA, 15 bp, Homo sapiens
cctgggagatgtggg

SEQ ID NO: 1862521 - DNA, 15 bp, Homo sapiens
ctgggagatgtgggc

SEQ ID NO: 1862522 - DNA, 15 bp, Homo sapiens
tgggagatgtgggct

SEQ ID NO: 1862523 - DNA, 15 bp, Homo sapiens
gggagatgtgggctt

SEQ ID NO: 1862524 - DNA, 15 bp, Homo sapiens
ggagatgtgggcttc

SEQ ID NO: 1862525 - DNA, 15 bp, Homo sapiens
gagatgtgggcttcc

SEQ ID NO: 1862526 - DNA, 15 bp, Homo sapiens
agatgtgggcttcca

SEQ ID NO: 1862527 - DNA, 15 bp, Homo sapiens
gatgtgggcttccac

SEQ ID NO: 1862528 - DNA, 15 bp, Homo sapiens
atgtgggcttccact

SEQ ID NO: 1862529 - DNA, 15 bp, Homo sapiens
tgtgggcttccactc

SEQ ID NO: 1862530 - DNA, 15 bp, Homo sapiens
gtgggcttccactcc

SEQ ID NO: 1862531 - DNA, 15 bp, Homo sapiens
tgggcttccactccc

SEQ ID NO: 1862532 - DNA, 15 bp, Homo sapiens
gggcttccactcccg

SEQ ID NO: 1862533 - DNA, 15 bp, Homo sapiens
ggcttccactcccgt

SEQ ID NO: 1862534 - DNA, 15 bp, Homo sapiens
gcttccactcccgtg

SEQ ID NO: 1862535 - DNA, 15 bp, Homo sapiens
cttccactcccgtgg

SEQ ID NO: 1862536 - DNA, 15 bp, Homo sapiens
ttccactcccgtgga

SEQ ID NO: 1862537 - DNA, 15 bp, Homo sapiens
tccactcccgtggaa

SEQ ID NO: 1862538 - DNA, 15 bp, Homo sapiens
ccactcccgtggaag

SEQ ID NO: 1862539 - DNA, 15 bp, Homo sapiens
cactcccgtggaagg

SEQ ID NO: 1862540 - DNA, 15 bp, Homo sapiens
actcccgtggaaggt

SEQ ID NO: 1862541 - DNA, 15 bp, Homo sapiens
ctcccgtggaaggtg

SEQ ID NO: 1862542 - DNA, 15 bp, Homo sapiens
tcccgtggaaggtgc

SEQ ID NO: 1862543 - DNA, 15 bp, Homo sapiens
cccgtggaaggtgcc

SEQ ID NO: 1862544 - DNA, 15 bp, Homo sapiens
ccgtggaaggtgccc

SEQ ID NO: 1862545 - DNA, 15 bp, Homo sapiens
cgtggaaggtgcccc

SEQ ID NO: 1862546 - DNA, 15 bp, Homo sapiens
gtggaaggtgccccg

SEQ ID NO: 1862547 - DNA, 15 bp, Homo sapiens
tggaaggtgccccgt

SEQ ID NO: 1862548 - DNA, 15 bp, Homo sapiens
ggaaggtgccccgtg

SEQ ID NO: 1862549 - DNA, 15 bp, Homo sapiens
gaaggtgccccgtgg

SEQ ID NO: 1862550 - DNA, 15 bp, Homo sapiens
aaggtgccccgtgga

SEQ ID NO: 1862551 - DNA, 15 bp, Homo sapiens
aggtgccccgtggat

SEQ ID NO: 1862552 - DNA, 15 bp, Homo sapiens
ggtgccccgtggatt

SEQ ID NO: 1862553 - DNA, 15 bp, Homo sapiens
gtgccccgtggattc

SEQ ID NO: 1862554 - DNA, 15 bp, Homo sapiens
tgccccgtggattca

SEQ ID NO: 1862555 - DNA, 15 bp, Homo sapiens
gccccgtggattcag

SEQ ID NO: 1862556 - DNA, 15 bp, Homo sapiens
ccccgtggattcagt

SEQ ID NO: 1862557 - DNA, 15 bp, Homo sapiens
cccgtggattcagta

SEQ ID NO: 1862558 - DNA, 15 bp, Homo sapiens
ccgtggattcagtat

SEQ ID NO: 1862559 - DNA, 15 bp, Homo sapiens
cgtggattcagtatc

SEQ ID NO: 1862560 - DNA, 15 bp, Homo sapiens
gtggattcagtatct

SEQ ID NO: 1862561 - DNA, 15 bp, Homo sapiens
tggattcagtatctg

SEQ ID NO: 1862562 - DNA, 15 bp, Homo sapiens
ggattcagtatctgc

SEQ ID NO: 1862563 - DNA, 15 bp, Homo sapiens
gattcagtatctgct

SEQ ID NO: 1862564 - DNA, 15 bp, Homo sapiens
attcagtatctgcta

SEQ ID NO: 1862565 - DNA, 15 bp, Homo sapiens
ttcagtatctgctag

SEQ ID NO: 1862566 - DNA, 15 bp, Homo sapiens
tcagtatctgctaga

SEQ ID NO: 1862567 - DNA, 15 bp, Homo sapiens
cagtatctgctagag

SEQ ID NO: 1862568 - DNA, 15 bp, Homo sapiens
agtatctgctagaga

SEQ ID NO: 1862569 - DNA, 15 bp, Homo sapiens
gtatctgctagagag

SEQ ID NO: 1862570 - DNA, 15 bp, Homo sapiens
tatctgctagagaga

SEQ ID NO: 1862571 - DNA, 15 bp, Homo sapiens
atctgctagagagag

SEQ ID NO: 1862572 - DNA, 15 bp, Homo sapiens
tctgctagagagaga

SEQ ID NO: 1862573 - DNA, 15 bp, Homo sapiens
ctgctagagagagaa

SEQ ID NO: 1862574 - DNA, 15 bp, Homo sapiens
tgctagagagagaac

SEQ ID NO: 1862575 - DNA, 15 bp, Homo sapiens
gctagagagagaacc

SEQ ID NO: 1862576 - DNA, 15 bp, Homo sapiens
ctagagagagaacca

SEQ ID NO: 1862577 - DNA, 15 bp, Homo sapiens
tagagagagaaccag

SEQ ID NO: 1862578 - DNA, 15 bp, Homo sapiens
agagagagaaccagg

SEQ ID NO: 1862579 - DNA, 15 bp, Homo sapiens
gagagagaaccaggc

SEQ ID NO: 1862580 - DNA, 15 bp, Homo sapiens
agagagaaccaggct

SEQ ID NO: 1862581 - DNA, 15 bp, Homo sapiens
gagagaaccaggctt

SEQ ID NO: 1862582 - DNA, 15 bp, Homo sapiens
agagaaccaggcttc

SEQ ID NO: 1862583 - DNA, 15 bp, Homo sapiens
gagaaccaggcttct

SEQ ID NO: 1862584 - DNA, 15 bp, Homo sapiens
agaaccaggcttctt

SEQ ID NO: 1862585 - DNA, 15 bp, Homo sapiens
gaaccaggcttctta

SEQ ID NO: 1862586 - DNA, 15 bp, Homo sapiens
aaccaggcttcttac

SEQ ID NO: 1862587 - DNA, 15 bp, Homo sapiens
accaggcttcttacg

SEQ ID NO: 1862588 - DNA, 15 bp, Homo sapiens
ccaggcttcttacga

SEQ ID NO: 1862589 - DNA, 15 bp, Homo sapiens
caggcttcttacgaa

SEQ ID NO: 1862590 - DNA, 15 bp, Homo sapiens
aggcttcttacgaag

SEQ ID NO: 1862591 - DNA, 15 bp, Homo sapiens
ggcttcttacgaagc

SEQ ID NO: 1862592 - DNA, 15 bp, Homo sapiens
gcttcttacgaagcc

SEQ ID NO: 1862593 - DNA, 15 bp, Homo sapiens
cttcttacgaagcca

SEQ ID NO: 1862594 - DNA, 15 bp, Homo sapiens
ttcttacgaagccaa

SEQ ID NO: 1862595 - DNA, 15 bp, Homo sapiens
tcttacgaagccaac

SEQ ID NO: 1862596 - DNA, 15 bp, Homo sapiens
cttacgaagccaact

SEQ ID NO: 1862597 - DNA, 15 bp, Homo sapiens
ttacgaagccaactc

SEQ ID NO: 1862598 - DNA, 15 bp, Homo sapiens
tacgaagccaactct

SEQ ID NO: 1862599 - DNA, 15 bp, Homo sapiens
acgaagccaactctt

SEQ ID NO: 1862600 - DNA, 15 bp, Homo sapiens
cgaagccaactctta

SEQ ID NO: 1862601 - DNA, 15 bp, Homo sapiens
gaagccaactcttaa

SEQ ID NO: 1862602 - DNA, 15 bp, Homo sapiens
aagccaactcttaaa

SEQ ID NO: 1862603 - DNA, 15 bp, Homo sapiens
agccaactcttaaaa

SEQ ID NO: 1862604 - DNA, 15 bp, Homo sapiens
gccaactcttaaaag

SEQ ID NO: 1862605 - DNA, 15 bp, Homo sapiens
ccaactcttaaaagg

SEQ ID NO: 1862606 - DNA, 15 bp, Homo sapiens
caactcttaaaaggt

SEQ ID NO: 1862607 - DNA, 15 bp, Homo sapiens
aactcttaaaaggtg

SEQ ID NO: 1862608 - DNA, 15 bp, Homo sapiens
actcttaaaaggtgt

SEQ ID NO: 1862609 - DNA, 15 bp, Homo sapiens
ctcttaaaaggtgta

SEQ ID NO: 1862610 - DNA, 15 bp, Homo sapiens
tcttaaaaggtgtag

SEQ ID NO: 1862611 - DNA, 15 bp, Homo sapiens
cttaaaaggtgtaga

SEQ ID NO: 1862612 - DNA, 15 bp, Homo sapiens
ttaaaaggtgtagaa

SEQ ID NO: 1862613 - DNA, 15 bp, Homo sapiens
taaaaggtgtagaaa

SEQ ID NO: 1862614 - DNA, 15 bp, Homo sapiens
aaaaggtgtagaaaa

SEQ ID NO: 1862615 - DNA, 15 bp, Homo sapiens
aaaggtgtagaaaat

SEQ ID NO: 1862616 - DNA, 15 bp, Homo sapiens
aaggtgtagaaaatg

SEQ ID NO: 1862617 - DNA, 15 bp, Homo sapiens
aggtgtagaaaatga

SEQ ID NO: 1862618 - DNA, 15 bp, Homo sapiens
ggtgtagaaaatgat

SEQ ID NO: 1862619 - DNA, 15 bp, Homo sapiens
gtgtagaaaatgatc

SEQ ID NO: 1862620 - DNA, 15 bp, Homo sapiens
tgtagaaaatgatcg

SEQ ID NO: 1862621 - DNA, 15 bp, Homo sapiens
gtagaaaatgatcgt

SEQ ID NO: 1862622 - DNA, 15 bp, Homo sapiens
tagaaaatgatcgta

SEQ ID NO: 1862623 - DNA, 15 bp, Homo sapiens
agaaaatgatcgtat

SEQ ID NO: 1862624 - DNA, 15 bp, Homo sapiens
gaaaatgatcgtatt

SEQ ID NO: 1862625 - DNA, 15 bp, Homo sapiens
aaaatgatcgtattt

SEQ ID NO: 1862626 - DNA, 15 bp, Homo sapiens
aaatgatcgtattta

SEQ ID NO: 1862627 - DNA, 15 bp, Homo sapiens
aatgatcgtatttat

SEQ ID NO: 1862628 - DNA, 15 bp, Homo sapiens
atgatcgtatttata

SEQ ID NO: 1862629 - DNA, 15 bp, Homo sapiens
tgatcgtatttatac

SEQ ID NO: 1862630 - DNA, 15 bp, Homo sapiens
gatcgtatttatact

SEQ ID NO: 1862631 - DNA, 15 bp, Homo sapiens
atcgtatttatactc

SEQ ID NO: 1862632 - DNA, 15 bp, Homo sapiens
tcgtatttatactct

SEQ ID NO: 1862633 - DNA, 15 bp, Homo sapiens
cgtatttatactcta

SEQ ID NO: 1862634 - DNA, 15 bp, Homo sapiens
gtatttatactctaa

SEQ ID NO: 1862635 - DNA, 15 bp, Homo sapiens
tatttatactctaag

SEQ ID NO: 1862636 - DNA, 15 bp, Homo sapiens
atttatactctaaga

SEQ ID NO: 1862637 - DNA, 15 bp, Homo sapiens
tttatactctaagat

SEQ ID NO: 1862638 - DNA, 15 bp, Homo sapiens
ttatactctaagatg

SEQ ID NO: 1862639 - DNA, 15 bp, Homo sapiens
tatactctaagatgg

SEQ ID NO: 1862640 - DNA, 15 bp, Homo sapiens
atactctaagatggg

SEQ ID NO: 1862641 - DNA, 15 bp, Homo sapiens
tactctaagatgggg

SEQ ID NO: 1862642 - DNA, 15 bp, Homo sapiens
actctaagatgggga

SEQ ID NO: 1862643 - DNA, 15 bp, Homo sapiens
ctctaagatggggac

SEQ ID NO: 1862644 - DNA, 15 bp, Homo sapiens
tctaagatggggaca

SEQ ID NO: 1862645 - DNA, 15 bp, Homo sapiens
aagatggggacattt

SEQ ID NO: 1862646 - DNA, 15 bp, Homo sapiens
agatggggacatttt

SEQ ID NO: 1862647 - DNA, 15 bp, Homo sapiens
gatggggacattttt

SEQ ID NO: 1862648 - DNA, 15 bp, Homo sapiens
atggggacatttttt

SEQ ID NO: 1862649 - DNA, 15 bp, Homo sapiens
tggggacattttttg

SEQ ID NO: 1862650 - DNA, 15 bp, Homo sapiens
ggggacattttttga

SEQ ID NO: 1862651 - DNA, 15 bp, Homo sapiens
gggacattttttgat

SEQ ID NO: 1862652 - DNA, 15 bp, Homo sapiens
ggacattttttgata

SEQ ID NO: 1862653 - DNA, 15 bp, Homo sapiens
gacattttttgatag

SEQ ID NO: 1862654 - DNA, 15 bp, Homo sapiens
acattttttgatagg

SEQ ID NO: 1862655 - DNA, 15 bp, Homo sapiens
cattttttgataggg

SEQ ID NO: 1862656 - DNA, 15 bp, Homo sapiens
attttttgatagggg

SEQ ID NO: 1862657 - DNA, 15 bp, Homo sapiens
ttttttgataggggt

SEQ ID NO: 1862658 - DNA, 15 bp, Homo sapiens
tttttgataggggtg

SEQ ID NO: 1862659 - DNA, 15 bp, Homo sapiens
ttttgataggggtgg

SEQ ID NO: 1862660 - DNA, 15 bp, Homo sapiens
tttgataggggtggg

SEQ ID NO: 1862661 - DNA, 15 bp, Homo sapiens
ttgataggggtgggc

SEQ ID NO: 1862662 - DNA, 15 bp, Homo sapiens
tgataggggtgggca

SEQ ID NO: 1862663 - DNA, 15 bp, Homo sapiens
gataggggtgggcac

SEQ ID NO: 1862664 - DNA, 15 bp, Homo sapiens
ataggggtgggcact

SEQ ID NO: 1862665 - DNA, 15 bp, Homo sapiens
taggggtgggcactg

SEQ ID NO: 1862666 - DNA, 15 bp, Homo sapiens
aggggtgggcactgg

SEQ ID NO: 1862667 - DNA, 15 bp, Homo sapiens
ggggtgggcactggc

SEQ ID NO: 1862668 - DNA, 15 bp, Homo sapiens
gggtgggcactggct

SEQ ID NO: 1862669 - DNA, 15 bp, Homo sapiens
ggtgggcactggctg

SEQ ID NO: 1862670 - DNA, 15 bp, Homo sapiens
gtgggcactggctgg

SEQ ID NO: 1862671 - DNA, 15 bp, Homo sapiens
tgggcactggctggg

SEQ ID NO: 1862672 - DNA, 15 bp, Homo sapiens
gggcactggctggga

SEQ ID NO: 1862673 - DNA, 15 bp, Homo sapiens
ggcactggctgggaa

SEQ ID NO: 1862674 - DNA, 15 bp, Homo sapiens
gcactggctgggaaa

SEQ ID NO: 1862675 - DNA, 15 bp, Homo sapiens
cactggctgggaaaa

SEQ ID NO: 1862676 - DNA, 15 bp, Homo sapiens
actggctgggaaaag

SEQ ID NO: 1862677 - DNA, 15 bp, Homo sapiens
ctggctgggaaaagg

SEQ ID NO: 1862678 - DNA, 15 bp, Homo sapiens
tggctgggaaaaggg

SEQ ID NO: 1862679 - DNA, 15 bp, Homo sapiens
ggctgggaaaaggga

SEQ ID NO: 1862680 - DNA, 15 bp, Homo sapiens
gctgggaaaagggac

SEQ ID NO: 1862681 - DNA, 15 bp, Homo sapiens
ctgggaaaagggact

SEQ ID NO: 1862682 - DNA, 15 bp, Homo sapiens
tgggaaaagggactt

SEQ ID NO: 1862683 - DNA, 15 bp, Homo sapiens
gggaaaagggacttt

SEQ ID NO: 1862684 - DNA, 15 bp, Homo sapiens
ggaaaagggactttc

SEQ ID NO: 1862685 - DNA, 15 bp, Homo sapiens
gaaaagggactttca

SEQ ID NO: 1862686 - DNA, 15 bp, Homo sapiens
aaaagggactttcag

SEQ ID NO: 1862687 - DNA, 15 bp, Homo sapiens
aaagggactttcagc

SEQ ID NO: 1862688 - DNA, 15 bp, Homo sapiens
aagggactttcagcg

SEQ ID NO: 1862689 - DNA, 15 bp, Homo sapiens
agggactttcagcgg

SEQ ID NO: 1862690 - DNA, 15 bp, Homo sapiens
gggactttcagcggt

SEQ ID NO: 1862691 - DNA, 15 bp, Homo sapiens
ggactttcagcggtg

SEQ ID NO: 1862692 - DNA, 15 bp, Homo sapiens
gactttcagcggtgt

SEQ ID NO: 1862693 - DNA, 15 bp, Homo sapiens
actttcagcggtgtt

SEQ ID NO: 1862694 - DNA, 15 bp, Homo sapiens
ctttcagcggtgttg

SEQ ID NO: 1862695 - DNA, 15 bp, Homo sapiens
tttcagcggtgttga

SEQ ID NO: 1862696 - DNA, 15 bp, Homo sapiens
ttcagcggtgttgag

SEQ ID NO: 1862697 - DNA, 15 bp, Homo sapiens
tcagcggtgttgagg

SEQ ID NO: 1862698 - DNA, 15 bp, Homo sapiens
cagcggtgttgagga

SEQ ID NO: 1862699 - DNA, 15 bp, Homo sapiens
agcggtgttgaggac

SEQ ID NO: 1862700 - DNA, 15 bp, Homo sapiens
gcggtgttgaggaca

SEQ ID NO: 1862701 - DNA, 15 bp, Homo sapiens
cggtgttgaggacag

SEQ ID NO: 1862702 - DNA, 15 bp, Homo sapiens
ggtgttgaggacagt

SEQ ID NO: 1862703 - DNA, 15 bp, Homo sapiens
gtgttgaggacagtt

SEQ ID NO: 1862704 - DNA, 15 bp, Homo sapiens
tgttgaggacagtta

SEQ ID NO: 1862705 - DNA, 15 bp, Homo sapiens
gttgaggacagttat

SEQ ID NO: 1862706 - DNA, 15 bp, Homo sapiens
ttgaggacagttatt

SEQ ID NO: 1862707 - DNA, 15 bp, Homo sapiens
tgaggacagttattt

SEQ ID NO: 1862708 - DNA, 15 bp, Homo sapiens
gaggacagttattta

SEQ ID NO: 1862709 - DNA, 15 bp, Homo sapiens
aggacagttatttaa

SEQ ID NO: 1862710 - DNA, 15 bp, Homo sapiens
ggacagttatttaaa

SEQ ID NO: 1862711 - DNA, 15 bp, Homo sapiens
gacagttatttaaaa

SEQ ID NO: 1862712 - DNA, 15 bp, Homo sapiens
acagttatttaaaac

SEQ ID NO: 1862713 - DNA, 15 bp, Homo sapiens
cagttatttaaaaca

SEQ ID NO: 1862714 - DNA, 15 bp, Homo sapiens
agttatttaaaacag

SEQ ID NO: 1862715 - DNA, 15 bp, Homo sapiens
gttatttaaaacagg

SEQ ID NO: 1862716 - DNA, 15 bp, Homo sapiens
ttatttaaaacaggg

SEQ ID NO: 1862717 - DNA, 15 bp, Homo sapiens
tatttaaaacagggt

SEQ ID NO: 1862718 - DNA, 15 bp, Homo sapiens
atttaaaacagggtg

SEQ ID NO: 1862719 - DNA, 15 bp, Homo sapiens
tttaaaacagggtga

SEQ ID NO: 1862720 - DNA, 15 bp, Homo sapiens
ttaaaacagggtgat

SEQ ID NO: 1862721 - DNA, 15 bp, Homo sapiens
taaaacagggtgata

SEQ ID NO: 1862722 - DNA, 15 bp, Homo sapiens
aaaacagggtgataa

SEQ ID NO: 1862723 - DNA, 15 bp, Homo sapiens
aaacagggtgataac

SEQ ID NO: 1862724 - DNA, 15 bp, Homo sapiens
aacagggtgataact

SEQ ID NO: 1862725 - DNA, 15 bp, Homo sapiens
acagggtgataactt

SEQ ID NO: 1862726 - DNA, 15 bp, Homo sapiens
cagggtgataacttt

SEQ ID NO: 1862727 - DNA, 15 bp, Homo sapiens
agggtgataactttc

SEQ ID NO: 1862728 - DNA, 15 bp, Homo sapiens
gggtgataactttca

SEQ ID NO: 1862729 - DNA, 15 bp, Homo sapiens
ggtgataactttcac

SEQ ID NO: 1862730 - DNA, 15 bp, Homo sapiens
gtgataactttcacc

SEQ ID NO: 1862731 - DNA, 15 bp, Homo sapiens
tgataactttcacct

SEQ ID NO: 1862732 - DNA, 15 bp, Homo sapiens
gataactttcacctt

SEQ ID NO: 1862733 - DNA, 15 bp, Homo sapiens
ataactttcaccttg

SEQ ID NO: 1862734 - DNA, 15 bp, Homo sapiens
taactttcaccttgt

SEQ ID NO: 1862735 - DNA, 15 bp, Homo sapiens
aactttcaccttgta

SEQ ID NO: 1862736 - DNA, 15 bp, Homo sapiens
actttcaccttgtaa

SEQ ID NO: 1862737 - DNA, 15 bp, Homo sapiens
ctttcaccttgtaag

SEQ ID NO: 1862738 - DNA, 15 bp, Homo sapiens
tttcaccttgtaagt

SEQ ID NO: 1862739 - DNA, 15 bp, Homo sapiens
ttcaccttgtaagtt

SEQ ID NO: 1862740 - DNA, 15 bp, Homo sapiens
tcaccttgtaagtta

SEQ ID NO: 1862741 - DNA, 15 bp, Homo sapiens
caccttgtaagttaa

SEQ ID NO: 1862742 - DNA, 15 bp, Homo sapiens
accttgtaagttaac

SEQ ID NO: 1862743 - DNA, 15 bp, Homo sapiens
ccttgtaagttaaca

SEQ ID NO: 1862744 - DNA, 15 bp, Homo sapiens
cttgtaagttaacag

SEQ ID NO: 1862745 - DNA, 15 bp, Homo sapiens
ttgtaagttaacagg

SEQ ID NO: 1862746 - DNA, 15 bp, Homo sapiens
tgtaagttaacagga

SEQ ID NO: 1862747 - DNA, 15 bp, Homo sapiens
gtaagttaacaggaa

SEQ ID NO: 1862748 - DNA, 15 bp, Homo sapiens
taagttaacaggaaa

SEQ ID NO: 1862749 - DNA, 15 bp, Homo sapiens
aagttaacaggaaat

SEQ ID NO: 1862750 - DNA, 15 bp, Homo sapiens
agttaacaggaaata

SEQ ID NO: 1862751 - DNA, 15 bp, Homo sapiens
gttaacaggaaatat

SEQ ID NO: 1862752 - DNA, 15 bp, Homo sapiens
ttaacaggaaatatt

SEQ ID NO: 1862753 - DNA, 15 bp, Homo sapiens
taacaggaaatattg

SEQ ID NO: 1862754 - DNA, 15 bp, Homo sapiens
aacaggaaatattgg

SEQ ID NO: 1862755 - DNA, 15 bp, Homo sapiens
acaggaaatattggg

SEQ ID NO: 1862756 - DNA, 15 bp, Homo sapiens
caggaaatattggga

SEQ ID NO: 1862757 - DNA, 15 bp, Homo sapiens
aggaaatattgggac

SEQ ID NO: 1862758 - DNA, 15 bp, Homo sapiens
ggaaatattgggaca

SEQ ID NO: 1862759 - DNA, 15 bp, Homo sapiens
gaaatattgggacaa

SEQ ID NO: 1862760 - DNA, 15 bp, Homo sapiens
aaatattgggacaag

SEQ ID NO: 1862761 - DNA, 15 bp, Homo sapiens
aatattgggacaaga

SEQ ID NO: 1862762 - DNA, 15 bp, Homo sapiens
atattgggacaagac

SEQ ID NO: 1862763 - DNA, 15 bp, Homo sapiens
tattgggacaagaca

SEQ ID NO: 1862764 - DNA, 15 bp, Homo sapiens
attgggacaagacag

SEQ ID NO: 1862765 - DNA, 15 bp, Homo sapiens
ttgggacaagacagg

SEQ ID NO: 1862766 - DNA, 15 bp, Homo sapiens
tgggacaagacagga

SEQ ID NO: 1862767 - DNA, 15 bp, Homo sapiens
gggacaagacaggaa

SEQ ID NO: 1862768 - DNA, 15 bp, Homo sapiens
ggacaagacaggaaa

SEQ ID NO: 1862769 - DNA, 15 bp, Homo sapiens
gacaagacaggaaat

SEQ ID NO: 1862770 - DNA, 15 bp, Homo sapiens
acaagacaggaaatt

SEQ ID NO: 1862771 - DNA, 15 bp, Homo sapiens
caagacaggaaattg

SEQ ID NO: 1862772 - DNA, 15 bp, Homo sapiens
aagacaggaaattgc

SEQ ID NO: 1862773 - DNA, 15 bp, Homo sapiens
agacaggaaattgca

SEQ ID NO: 1862774 - DNA, 15 bp, Homo sapiens
gacaggaaattgcat

SEQ ID NO: 1862775 - DNA, 15 bp, Homo sapiens
acaggaaattgcatc

SEQ ID NO: 1862776 - DNA, 15 bp, Homo sapiens
caggaaattgcatca

SEQ ID NO: 1862777 - DNA, 15 bp, Homo sapiens
aggaaattgcatcat

SEQ ID NO: 1862778 - DNA, 15 bp, Homo sapiens
ggaaattgcatcatc

SEQ ID NO: 1862779 - DNA, 15 bp, Homo sapiens
gaaattgcatcatct

SEQ ID NO: 1862780 - DNA, 15 bp, Homo sapiens
aaattgcatcatctt

SEQ ID NO: 1862781 - DNA, 15 bp, Homo sapiens
aattgcatcatcttt

SEQ ID NO: 1862782 - DNA, 15 bp, Homo sapiens
attgcatcatctttt

SEQ ID NO: 1862783 - DNA, 15 bp, Homo sapiens
ttgcatcatcttttt

SEQ ID NO: 1862784 - DNA, 15 bp, Homo sapiens
tgcatcatctttttt

SEQ ID NO: 1862785 - DNA, 15 bp, Homo sapiens
gcatcatcttttttt

SEQ ID NO: 1862786 - DNA, 15 bp, Homo sapiens
catcatctttttttt

SEQ ID NO: 1862787 - DNA, 15 bp, Homo sapiens
atcatcttttttttt

SEQ ID NO: 1862788 - DNA, 15 bp, Homo sapiens
tcatctttttttttg

SEQ ID NO: 1862789 - DNA, 15 bp, Homo sapiens
catctttttttttga

SEQ ID NO: 1862790 - DNA, 15 bp, Homo sapiens
atctttttttttgag

SEQ ID NO: 1862791 - DNA, 15 bp, Homo sapiens
ctttttttttgagaa

SEQ ID NO: 1862792 - DNA, 15 bp, Homo sapiens
tttttttttgagaat

SEQ ID NO: 1862793 - DNA, 15 bp, Homo sapiens
ttttttttgagaata

SEQ ID NO: 1862794 - DNA, 15 bp, Homo sapiens
tttttttgagaataa

SEQ ID NO: 1862795 - DNA, 15 bp, Homo sapiens
ttttttgagaataac

SEQ ID NO: 1862796 - DNA, 15 bp, Homo sapiens
tttttgagaataact

SEQ ID NO: 1862797 - DNA, 15 bp, Homo sapiens
ttttgagaataactc

SEQ ID NO: 1862798 - DNA, 15 bp, Homo sapiens
tttgagaataactcc

SEQ ID NO: 1862799 - DNA, 15 bp, Homo sapiens
ttgagaataactcca

SEQ ID NO: 1862800 - DNA, 15 bp, Homo sapiens
tgagaataactccag

SEQ ID NO: 1862801 - DNA, 15 bp, Homo sapiens
gagaataactccaga

SEQ ID NO: 1862802 - DNA, 15 bp, Homo sapiens
agaataactccagag

SEQ ID NO: 1862803 - DNA, 15 bp, Homo sapiens
gaataactccagaga

SEQ ID NO: 1862804 - DNA, 15 bp, Homo sapiens
aataactccagagaa

SEQ ID NO: 1862805 - DNA, 15 bp, Homo sapiens
ataactccagagaaa

SEQ ID NO: 1862806 - DNA, 15 bp, Homo sapiens
taactccagagaaaa

SEQ ID NO: 1862807 - DNA, 15 bp, Homo sapiens
aactccagagaaaag

SEQ ID NO: 1862808 - DNA, 15 bp, Homo sapiens
actccagagaaaagt

SEQ ID NO: 1862809 - DNA, 15 bp, Homo sapiens
ctccagagaaaagtg

SEQ ID NO: 1862810 - DNA, 15 bp, Homo sapiens
tccagagaaaagtgg

SEQ ID NO: 1862811 - DNA, 15 bp, Homo sapiens
ccagagaaaagtggt

SEQ ID NO: 1862812 - DNA, 15 bp, Homo sapiens
cagagaaaagtggtt

SEQ ID NO: 1862813 - DNA, 15 bp, Homo sapiens
agagaaaagtggttc

SEQ ID NO: 1862814 - DNA, 15 bp, Homo sapiens
gagaaaagtggttcg

SEQ ID NO: 1862815 - DNA, 15 bp, Homo sapiens
agaaaagtggttcgt

SEQ ID NO: 1862816 - DNA, 15 bp, Homo sapiens
gaaaagtggttcgtg

SEQ ID NO: 1862817 - DNA, 15 bp, Homo sapiens
aaaagtggttcgtga

SEQ ID NO: 1862818 - DNA, 15 bp, Homo sapiens
aaagtggttcgtgaa

SEQ ID NO: 1862819 - DNA, 15 bp, Homo sapiens
aagtggttcgtgaaa

SEQ ID NO: 1862820 - DNA, 15 bp, Homo sapiens
agtggttcgtgaaag

SEQ ID NO: 1862821 - DNA, 15 bp, Homo sapiens
gtggttcgtgaaagg

SEQ ID NO: 1862822 - DNA, 15 bp, Homo sapiens
tggttcgtgaaaggt

SEQ ID NO: 1862823 - DNA, 15 bp, Homo sapiens
ggttcgtgaaaggta

SEQ ID NO: 1862824 - DNA, 15 bp, Homo sapiens
gttcgtgaaaggtag

SEQ ID NO: 1862825 - DNA, 15 bp, Homo sapiens
ttcgtgaaaggtagt

SEQ ID NO: 1862826 - DNA, 15 bp, Homo sapiens
tcgtgaaaggtagtg

SEQ ID NO: 1862827 - DNA, 15 bp, Homo sapiens
cgtgaaaggtagtgg

SEQ ID NO: 1862828 - DNA, 15 bp, Homo sapiens
gtgaaaggtagtggc

SEQ ID NO: 1862829 - DNA, 15 bp, Homo sapiens
tgaaaggtagtggct

SEQ ID NO: 1862830 - DNA, 15 bp, Homo sapiens
gaaaggtagtggctg

SEQ ID NO: 1862831 - DNA, 15 bp, Homo sapiens
aaaggtagtggctga

SEQ ID NO: 1862832 - DNA, 15 bp, Homo sapiens
aaggtagtggctgag

SEQ ID NO: 1862833 - DNA, 15 bp, Homo sapiens
aggtagtggctgaga

SEQ ID NO: 1862834 - DNA, 15 bp, Homo sapiens
ggtagtggctgagaa

SEQ ID NO: 1862835 - DNA, 15 bp, Homo sapiens
gtagtggctgagaaa

SEQ ID NO: 1862836 - DNA, 15 bp, Homo sapiens
tagtggctgagaaac

SEQ ID NO: 1862837 - DNA, 15 bp, Homo sapiens
agtggctgagaaacg

SEQ ID NO: 1862838 - DNA, 15 bp, Homo sapiens
gtggctgagaaacgg

SEQ ID NO: 1862839 - DNA, 15 bp, Homo sapiens
tggctgagaaacggc

SEQ ID NO: 1862840 - DNA, 15 bp, Homo sapiens
ggctgagaaacggct

SEQ ID NO: 1862841 - DNA, 15 bp, Homo sapiens
gctgagaaacggcta

SEQ ID NO: 1862842 - DNA, 15 bp, Homo sapiens
ctgagaaacggctag

SEQ ID NO: 1862843 - DNA, 15 bp, Homo sapiens
tgagaaacggctagc

SEQ ID NO: 1862844 - DNA, 15 bp, Homo sapiens
gagaaacggctagcc

SEQ ID NO: 1862845 - DNA, 15 bp, Homo sapiens
agaaacggctagcct

SEQ ID NO: 1862846 - DNA, 15 bp, Homo sapiens
gaaacggctagcctg

SEQ ID NO: 1862847 - DNA, 15 bp, Homo sapiens
aaacggctagcctgt

SEQ ID NO: 1862848 - DNA, 15 bp, Homo sapiens
aacggctagcctgtt

SEQ ID NO: 1862849 - DNA, 15 bp, Homo sapiens
acggctagcctgttt

SEQ ID NO: 1862850 - DNA, 15 bp, Homo sapiens
cggctagcctgtttt

SEQ ID NO: 1862851 - DNA, 15 bp, Homo sapiens
ggctagcctgttttc

SEQ ID NO: 1862852 - DNA, 15 bp, Homo sapiens
gctagcctgttttct

SEQ ID NO: 1862853 - DNA, 15 bp, Homo sapiens
ctagcctgttttctg

SEQ ID NO: 1862854 - DNA, 15 bp, Homo sapiens
tagcctgttttctgt

SEQ ID NO: 1862855 - DNA, 15 bp, Homo sapiens
agcctgttttctgtt

SEQ ID NO: 1862856 - DNA, 15 bp, Homo sapiens
gcctgttttctgttt

SEQ ID NO: 1862857 - DNA, 15 bp, Homo sapiens
cctgttttctgtttt

SEQ ID NO: 1862858 - DNA, 15 bp, Homo sapiens
ctgttttctgttttg

SEQ ID NO: 1862859 - DNA, 15 bp, Homo sapiens
tgttttctgttttgt

SEQ ID NO: 1862860 - DNA, 15 bp, Homo sapiens
gttttctgttttgtg

SEQ ID NO: 1862861 - DNA, 15 bp, Homo sapiens
ttttctgttttgtgt

SEQ ID NO: 1862862 - DNA, 15 bp, Homo sapiens
tttctgttttgtgtt

SEQ ID NO: 1862863 - DNA, 15 bp, Homo sapiens
ttctgttttgtgttt

SEQ ID NO: 1862864 - DNA, 15 bp, Homo sapiens
tctgttttgtgtttt

SEQ ID NO: 1862865 - DNA, 15 bp, Homo sapiens
ctgttttgtgttttt

SEQ ID NO: 1862866 - DNA, 15 bp, Homo sapiens
tgttttgtgtttttt

SEQ ID NO: 1862867 - DNA, 15 bp, Homo sapiens
gttttgtgttttttt

SEQ ID NO: 1862868 - DNA, 15 bp, Homo sapiens
ttttgtgtttttttt

SEQ ID NO: 1862869 - DNA, 15 bp, Homo sapiens
tttgtgttttttttt

SEQ ID NO: 1862870 - DNA, 15 bp, Homo sapiens
ttgtgtttttttttt

SEQ ID NO: 1862871 - DNA, 15 bp, Homo sapiens
tgtgttttttttttc

SEQ ID NO: 1862872 - DNA, 15 bp, Homo sapiens
gttttttttttcttc

SEQ ID NO: 1862873 - DNA, 15 bp, Homo sapiens
ttttttttttcttcc

SEQ ID NO: 1862874 - DNA, 15 bp, Homo sapiens
tttttttttcttccc

SEQ ID NO: 1862875 - DNA, 15 bp, Homo sapiens
ttttttcttcccttc

SEQ ID NO: 1862876 - DNA, 15 bp, Homo sapiens
tttttcttcccttcc

SEQ ID NO: 1862877 - DNA, 15 bp, Homo sapiens
ttttcttcccttcca

SEQ ID NO: 1862878 - DNA, 15 bp, Homo sapiens
tttcttcccttccac

SEQ ID NO: 1862879 - DNA, 15 bp, Homo sapiens
ttcttcccttccact

SEQ ID NO: 1862880 - DNA, 15 bp, Homo sapiens
tcttcccttccactc

SEQ ID NO: 1862881 - DNA, 15 bp, Homo sapiens
cttcccttccactcc

SEQ ID NO: 1862882 - DNA, 15 bp, Homo sapiens
ttcccttccactccc

SEQ ID NO: 1862883 - DNA, 15 bp, Homo sapiens
tcccttccactccca

SEQ ID NO: 1862884 - DNA, 15 bp, Homo sapiens
cccttccactcccac

SEQ ID NO: 1862885 - DNA, 15 bp, Homo sapiens
ccttccactcccacg

SEQ ID NO: 1862886 - DNA, 15 bp, Homo sapiens
cttccactcccacga

SEQ ID NO: 1862887 - DNA, 15 bp, Homo sapiens
ttccactcccacgag

SEQ ID NO: 1862888 - DNA, 15 bp, Homo sapiens
tccactcccacgaga

SEQ ID NO: 1862889 - DNA, 15 bp, Homo sapiens
ccactcccacgagaa

SEQ ID NO: 1862890 - DNA, 15 bp, Homo sapiens
cactcccacgagaac

SEQ ID NO: 1862891 - DNA, 15 bp, Homo sapiens
actcccacgagaaca

SEQ ID NO: 1862892 - DNA, 15 bp, Homo sapiens
ctcccacgagaacat

SEQ ID NO: 1862893 - DNA, 15 bp, Homo sapiens
tcccacgagaacatg

SEQ ID NO: 1862894 - DNA, 15 bp, Homo sapiens
cccacgagaacatgt

SEQ ID NO: 1862895 - DNA, 15 bp, Homo sapiens
ccacgagaacatgta

SEQ ID NO: 1862896 - DNA, 15 bp, Homo sapiens
cacgagaacatgtag

SEQ ID NO: 1862897 - DNA, 15 bp, Homo sapiens
acgagaacatgtagg

SEQ ID NO: 1862898 - DNA, 15 bp, Homo sapiens
cgagaacatgtaggc

SEQ ID NO: 1862899 - DNA, 15 bp, Homo sapiens
gagaacatgtaggcc

SEQ ID NO: 1862900 - DNA, 15 bp, Homo sapiens
agaacatgtaggcca

SEQ ID NO: 1862901 - DNA, 15 bp, Homo sapiens
gaacatgtaggccat

SEQ ID NO: 1862902 - DNA, 15 bp, Homo sapiens
aacatgtaggccatt

SEQ ID NO: 1862903 - DNA, 15 bp, Homo sapiens
acatgtaggccattt

SEQ ID NO: 1862904 - DNA, 15 bp, Homo sapiens
catgtaggccatttt

SEQ ID NO: 1862905 - DNA, 15 bp, Homo sapiens
atgtaggccattttc

SEQ ID NO: 1862906 - DNA, 15 bp, Homo sapiens
tgtaggccattttct

SEQ ID NO: 1862907 - DNA, 15 bp, Homo sapiens
gtaggccattttctt

SEQ ID NO: 1862908 - DNA, 15 bp, Homo sapiens
taggccattttcttt

SEQ ID NO: 1862909 - DNA, 15 bp, Homo sapiens
aggccattttcttta

SEQ ID NO: 1862910 - DNA, 15 bp, Homo sapiens
ggccattttctttaa

SEQ ID NO: 1862911 - DNA, 15 bp, Homo sapiens
gccattttctttaag

SEQ ID NO: 1862912 - DNA, 15 bp, Homo sapiens
ccattttctttaaga

SEQ ID NO: 1862913 - DNA, 15 bp, Homo sapiens
cattttctttaagaa

SEQ ID NO: 1862914 - DNA, 15 bp, Homo sapiens
attttctttaagaaa

SEQ ID NO: 1862915 - DNA, 15 bp, Homo sapiens
ttttctttaagaaag

SEQ ID NO: 1862916 - DNA, 15 bp, Homo sapiens
tttctttaagaaaga

SEQ ID NO: 1862917 - DNA, 15 bp, Homo sapiens
ttctttaagaaagag

SEQ ID NO: 1862918 - DNA, 15 bp, Homo sapiens
tctttaagaaagagg

SEQ ID NO: 1862919 - DNA, 15 bp, Homo sapiens
ctttaagaaagaggc

SEQ ID NO: 1862920 - DNA, 15 bp, Homo sapiens
tttaagaaagaggct

SEQ ID NO: 1862921 - DNA, 15 bp, Homo sapiens
ttaagaaagaggctg

SEQ ID NO: 1862922 - DNA, 15 bp, Homo sapiens
taagaaagaggctgt

SEQ ID NO: 1862923 - DNA, 15 bp, Homo sapiens
aagaaagaggctgtt

SEQ ID NO: 1862924 - DNA, 15 bp, Homo sapiens
agaaagaggctgttt

SEQ ID NO: 1862925 - DNA, 15 bp, Homo sapiens
gaaagaggctgtttg

SEQ ID NO: 1862926 - DNA, 15 bp, Homo sapiens
aaagaggctgtttga

SEQ ID NO: 1862927 - DNA, 15 bp, Homo sapiens
aagaggctgtttgag

SEQ ID NO: 1862928 - DNA, 15 bp, Homo sapiens
agaggctgtttgaga

SEQ ID NO: 1862929 - DNA, 15 bp, Homo sapiens
gaggctgtttgagaa

SEQ ID NO: 1862930 - DNA, 15 bp, Homo sapiens
aggctgtttgagaac

SEQ ID NO: 1862931 - DNA, 15 bp, Homo sapiens
ggctgtttgagaact

SEQ ID NO: 1862932 - DNA, 15 bp, Homo sapiens
gctgtttgagaactt

SEQ ID NO: 1862933 - DNA, 15 bp, Homo sapiens
ctgtttgagaacttt

SEQ ID NO: 1862934 - DNA, 15 bp, Homo sapiens
tgtttgagaacttta

SEQ ID NO: 1862935 - DNA, 15 bp, Homo sapiens
gtttgagaactttat

SEQ ID NO: 1862936 - DNA, 15 bp, Homo sapiens
tttgagaactttatg

SEQ ID NO: 1862937 - DNA, 15 bp, Homo sapiens
ttgagaactttatgt

SEQ ID NO: 1862938 - DNA, 15 bp, Homo sapiens
tgagaactttatgtt

SEQ ID NO: 1862939 - DNA, 15 bp, Homo sapiens
gagaactttatgtta

SEQ ID NO: 1862940 - DNA, 15 bp, Homo sapiens
agaactttatgttat

SEQ ID NO: 1862941 - DNA, 15 bp, Homo sapiens
gaactttatgttatt

SEQ ID NO: 1862942 - DNA, 15 bp, Homo sapiens
aactttatgttattt

SEQ ID NO: 1862943 - DNA, 15 bp, Homo sapiens
actttatgttatttt

SEQ ID NO: 1862944 - DNA, 15 bp, Homo sapiens
ctttatgttattttt

SEQ ID NO: 1862945 - DNA, 15 bp, Homo sapiens
tttatgttattttta

SEQ ID NO: 1862946 - DNA, 15 bp, Homo sapiens
ttatgttatttttat

SEQ ID NO: 1862947 - DNA, 15 bp, Homo sapiens
tatgttatttttatt

SEQ ID NO: 1862948 - DNA, 15 bp, Homo sapiens
atgttatttttatta

SEQ ID NO: 1862949 - DNA, 15 bp, Homo sapiens
tgttatttttattat

SEQ ID NO: 1862950 - DNA, 15 bp, Homo sapiens
gttatttttattatt

SEQ ID NO: 1862951 - DNA, 15 bp, Homo sapiens
ttatttttattattt

SEQ ID NO: 1862952 - DNA, 15 bp, Homo sapiens
tatttttattattta

SEQ ID NO: 1862953 - DNA, 15 bp, Homo sapiens
atttttattatttaa

SEQ ID NO: 1862954 - DNA, 15 bp, Homo sapiens
tttttattatttaaa

SEQ ID NO: 1862955 - DNA, 15 bp, Homo sapiens
ttttattatttaaaa

SEQ ID NO: 1862956 - DNA, 15 bp, Homo sapiens
tttattatttaaaaa

SEQ ID NO: 1862957 - DNA, 15 bp, Homo sapiens
ttattatttaaaaaa

SEQ ID NO: 1862958 - DNA, 15 bp, Homo sapiens
tattatttaaaaaaa

SEQ ID NO: 1862959 - DNA, 15 bp, Homo sapiens
attatttaaaaaaat

SEQ ID NO: 1862960 - DNA, 15 bp, Homo sapiens
ttatttaaaaaaata

SEQ ID NO: 1862961 - DNA, 15 bp, Homo sapiens
tatttaaaaaaatat

SEQ ID NO: 1862962 - DNA, 15 bp, Homo sapiens
atttaaaaaaatatt

SEQ ID NO: 1862963 - DNA, 15 bp, Homo sapiens
tttaaaaaaatattt

SEQ ID NO: 1862964 - DNA, 15 bp, Homo sapiens
ttaaaaaaatatttt

SEQ ID NO: 1862965 - DNA, 15 bp, Homo sapiens
taaaaaaatatttta

SEQ ID NO: 1862966 - DNA, 15 bp, Homo sapiens
aaaaaaatattttac

SEQ ID NO: 1862967 - DNA, 15 bp, Homo sapiens
aaaaaatattttacc

SEQ ID NO: 1862968 - DNA, 15 bp, Homo sapiens
aaaaatattttacca

SEQ ID NO: 1862969 - DNA, 15 bp, Homo sapiens
aaaatattttaccag

SEQ ID NO: 1862970 - DNA, 15 bp, Homo sapiens
aaatattttaccaga

SEQ ID NO: 1862971 - DNA, 15 bp, Homo sapiens
aatattttaccagaa

SEQ ID NO: 1862972 - DNA, 15 bp, Homo sapiens
atattttaccagaag

SEQ ID NO: 1862973 - DNA, 15 bp, Homo sapiens
tattttaccagaagg

SEQ ID NO: 1862974 - DNA, 15 bp, Homo sapiens
attttaccagaaggg

SEQ ID NO: 1862975 - DNA, 15 bp, Homo sapiens
ttttaccagaagggt

SEQ ID NO: 1862976 - DNA, 15 bp, Homo sapiens
tttaccagaagggtc

SEQ ID NO: 1862977 - DNA, 15 bp, Homo sapiens
ttaccagaagggtca

SEQ ID NO: 1862978 - DNA, 15 bp, Homo sapiens
taccagaagggtcac

SEQ ID NO: 1862979 - DNA, 15 bp, Homo sapiens
accagaagggtcacc

SEQ ID NO: 1862980 - DNA, 15 bp, Homo sapiens
ccagaagggtcacct

SEQ ID NO: 1862981 - DNA, 15 bp, Homo sapiens
cagaagggtcacctt

SEQ ID NO: 1862982 - DNA, 15 bp, Homo sapiens
agaagggtcaccttc

SEQ ID NO: 1862983 - DNA, 15 bp, Homo sapiens
gaagggtcaccttca

SEQ ID NO: 1862984 - DNA, 15 bp, Homo sapiens
aagggtcaccttcag

SEQ ID NO: 1862985 - DNA, 15 bp, Homo sapiens
agggtcaccttcagt

SEQ ID NO: 1862986 - DNA, 15 bp, Homo sapiens
gggtcaccttcagtt

SEQ ID NO: 1862987 - DNA, 15 bp, Homo sapiens
ggtcaccttcagttg

SEQ ID NO: 1862988 - DNA, 15 bp, Homo sapiens
gtcaccttcagttga

SEQ ID NO: 1862989 - DNA, 15 bp, Homo sapiens
tcaccttcagttgaa

SEQ ID NO: 1862990 - DNA, 15 bp, Homo sapiens
caccttcagttgaaa

SEQ ID NO: 1862991 - DNA, 15 bp, Homo sapiens
accttcagttgaaat

SEQ ID NO: 1862992 - DNA, 15 bp, Homo sapiens
ccttcagttgaaatg

SEQ ID NO: 1862993 - DNA, 15 bp, Homo sapiens
cttcagttgaaatgt

SEQ ID NO: 1862994 - DNA, 15 bp, Homo sapiens
ttcagttgaaatgtt

SEQ ID NO: 1862995 - DNA, 15 bp, Homo sapiens
tcagttgaaatgtta

SEQ ID NO: 1862996 - DNA, 15 bp, Homo sapiens
cagttgaaatgttaa

SEQ ID NO: 1862997 - DNA, 15 bp, Homo sapiens
agttgaaatgttaac

SEQ ID NO: 1862998 - DNA, 15 bp, Homo sapiens
gttgaaatgttaact

SEQ ID NO: 1862999 - DNA, 15 bp, Homo sapiens
ttgaaatgttaactg

SEQ ID NO: 1863000 - DNA, 15 bp, Homo sapiens
tgaaatgttaactgc

SEQ ID NO: 1863001 - DNA, 15 bp, Homo sapiens
gaaatgttaactgcc

SEQ ID NO: 1863002 - DNA, 15 bp, Homo sapiens
aaatgttaactgccg

SEQ ID NO: 1863003 - DNA, 15 bp, Homo sapiens
aatgttaactgccgc

SEQ ID NO: 1863004 - DNA, 15 bp, Homo sapiens
atgttaactgccgcc

SEQ ID NO: 1863005 - DNA, 15 bp, Homo sapiens
tgttaactgccgcct

SEQ ID NO: 1863006 - DNA, 15 bp, Homo sapiens
gttaactgccgcctt

SEQ ID NO: 1863007 - DNA, 15 bp, Homo sapiens
ttaactgccgcctta

SEQ ID NO: 1863008 - DNA, 15 bp, Homo sapiens
taactgccgccttat

SEQ ID NO: 1863009 - DNA, 15 bp, Homo sapiens
aactgccgccttatt

SEQ ID NO: 1863010 - DNA, 15 bp, Homo sapiens
actgccgccttattt

SEQ ID NO: 1863011 - DNA, 15 bp, Homo sapiens
ctgccgccttatttc

SEQ ID NO: 1863012 - DNA, 15 bp, Homo sapiens
tgccgccttatttcc

SEQ ID NO: 1863013 - DNA, 15 bp, Homo sapiens
gccgccttatttccc

SEQ ID NO: 1863014 - DNA, 15 bp, Homo sapiens
ccgccttatttccca

SEQ ID NO: 1863015 - DNA, 15 bp, Homo sapiens
cgccttatttcccat

SEQ ID NO: 1863016 - DNA, 15 bp, Homo sapiens
gccttatttcccatt

SEQ ID NO: 1863017 - DNA, 15 bp, Homo sapiens
ccttatttcccattt

SEQ ID NO: 1863018 - DNA, 15 bp, Homo sapiens
cttatttcccatttt

SEQ ID NO: 1863019 - DNA, 15 bp, Homo sapiens
ttatttcccatttta

SEQ ID NO: 1863020 - DNA, 15 bp, Homo sapiens
tatttcccattttac

SEQ ID NO: 1863021 - DNA, 15 bp, Homo sapiens
atttcccattttact

SEQ ID NO: 1863022 - DNA, 15 bp, Homo sapiens
tttcccattttacta

SEQ ID NO: 1863023 - DNA, 15 bp, Homo sapiens
ttcccattttactaa

SEQ ID NO: 1863024 - DNA, 15 bp, Homo sapiens
tcccattttactaaa

SEQ ID NO: 1863025 - DNA, 15 bp, Homo sapiens
cccattttactaaag

SEQ ID NO: 1863026 - DNA, 15 bp, Homo sapiens
ccattttactaaaga

SEQ ID NO: 1863027 - DNA, 15 bp, Homo sapiens
cattttactaaagaa

SEQ ID NO: 1863028 - DNA, 15 bp, Homo sapiens
attttactaaagaat

SEQ ID NO: 1863029 - DNA, 15 bp, Homo sapiens
ttttactaaagaatc

SEQ ID NO: 1863030 - DNA, 15 bp, Homo sapiens
tttactaaagaatct

SEQ ID NO: 1863031 - DNA, 15 bp, Homo sapiens
ttactaaagaatctt

SEQ ID NO: 1863032 - DNA, 15 bp, Homo sapiens
tactaaagaatcttt

SEQ ID NO: 1863033 - DNA, 15 bp, Homo sapiens
actaaagaatctttc

SEQ ID NO: 1863034 - DNA, 15 bp, Homo sapiens
ctaaagaatctttca

SEQ ID NO: 1863035 - DNA, 15 bp, Homo sapiens
taaagaatctttcat

SEQ ID NO: 1863036 - DNA, 15 bp, Homo sapiens
aaagaatctttcatg

SEQ ID NO: 1863037 - DNA, 15 bp, Homo sapiens
aagaatctttcatga

SEQ ID NO: 1863038 - DNA, 15 bp, Homo sapiens
agaatctttcatgac

SEQ ID NO: 1863039 - DNA, 15 bp, Homo sapiens
gaatctttcatgact

SEQ ID NO: 1863040 - DNA, 15 bp, Homo sapiens
aatctttcatgactt

SEQ ID NO: 1863041 - DNA, 15 bp, Homo sapiens
atctttcatgacttt

SEQ ID NO: 1863042 - DNA, 15 bp, Homo sapiens
tctttcatgactttt

SEQ ID NO: 1863043 - DNA, 15 bp, Homo sapiens
ctttcatgacttttt

SEQ ID NO: 1863044 - DNA, 15 bp, Homo sapiens
tttcatgactttttc

SEQ ID NO: 1863045 - DNA, 15 bp, Homo sapiens
ttcatgactttttca

SEQ ID NO: 1863046 - DNA, 15 bp, Homo sapiens
tcatgactttttcag

SEQ ID NO: 1863047 - DNA, 15 bp, Homo sapiens
catgactttttcagc

SEQ ID NO: 1863048 - DNA, 15 bp, Homo sapiens
atgactttttcagct

SEQ ID NO: 1863049 - DNA, 15 bp, Homo sapiens
tgactttttcagctt

SEQ ID NO: 1863050 - DNA, 15 bp, Homo sapiens
gactttttcagcttc

SEQ ID NO: 1863051 - DNA, 15 bp, Homo sapiens
actttttcagcttcc

SEQ ID NO: 1863052 - DNA, 15 bp, Homo sapiens
ctttttcagcttcct

SEQ ID NO: 1863053 - DNA, 15 bp, Homo sapiens
tttttcagcttcctt

SEQ ID NO: 1863054 - DNA, 15 bp, Homo sapiens
ttttcagcttccttc

SEQ ID NO: 1863055 - DNA, 15 bp, Homo sapiens
tttcagcttccttcc

SEQ ID NO: 1863056 - DNA, 15 bp, Homo sapiens
ttcagcttccttccc

SEQ ID NO: 1863057 - DNA, 15 bp, Homo sapiens
tcagcttccttcccc

SEQ ID NO: 1863058 - DNA, 15 bp, Homo sapiens
cagcttccttcccca

SEQ ID NO: 1863059 - DNA, 15 bp, Homo sapiens
agcttccttccccaa

SEQ ID NO: 1863060 - DNA, 15 bp, Homo sapiens
gcttccttccccaaa

SEQ ID NO: 1863061 - DNA, 15 bp, Homo sapiens
cttccttccccaaat

SEQ ID NO: 1863062 - DNA, 15 bp, Homo sapiens
ttccttccccaaatg

SEQ ID NO: 1863063 - DNA, 15 bp, Homo sapiens
tccttccccaaatgg

SEQ ID NO: 1863064 - DNA, 15 bp, Homo sapiens
ccttccccaaatggt

SEQ ID NO: 1863065 - DNA, 15 bp, Homo sapiens
cttccccaaatggta

SEQ ID NO: 1863066 - DNA, 15 bp, Homo sapiens
ttccccaaatggtaa

SEQ ID NO: 1863067 - DNA, 15 bp, Homo sapiens
tccccaaatggtaag

SEQ ID NO: 1863068 - DNA, 15 bp, Homo sapiens
ccccaaatggtaagg

SEQ ID NO: 1863069 - DNA, 15 bp, Homo sapiens
cccaaatggtaaggc

SEQ ID NO: 1863070 - DNA, 15 bp, Homo sapiens
ccaaatggtaaggcc

SEQ ID NO: 1863071 - DNA, 15 bp, Homo sapiens
caaatggtaaggcca

SEQ ID NO: 1863072 - DNA, 15 bp, Homo sapiens
aaatggtaaggccaa

SEQ ID NO: 1863073 - DNA, 15 bp, Homo sapiens
aatggtaaggccaag

SEQ ID NO: 1863074 - DNA, 15 bp, Homo sapiens
atggtaaggccaagc

SEQ ID NO: 1863075 - DNA, 15 bp, Homo sapiens
tggtaaggccaagca

SEQ ID NO: 1863076 - DNA, 15 bp, Homo sapiens
ggtaaggccaagcag

SEQ ID NO: 1863077 - DNA, 15 bp, Homo sapiens
gtaaggccaagcagc

SEQ ID NO: 1863078 - DNA, 15 bp, Homo sapiens
taaggccaagcagct

SEQ ID NO: 1863079 - DNA, 15 bp, Homo sapiens
aaggccaagcagctc

SEQ ID NO: 1863080 - DNA, 15 bp, Homo sapiens
aggccaagcagctct

SEQ ID NO: 1863081 - DNA, 15 bp, Homo sapiens
ggccaagcagctctt

SEQ ID NO: 1863082 - DNA, 15 bp, Homo sapiens
gccaagcagctcttg

SEQ ID NO: 1863083 - DNA, 15 bp, Homo sapiens
ccaagcagctcttgg

SEQ ID NO: 1863084 - DNA, 15 bp, Homo sapiens
caagcagctcttggc

SEQ ID NO: 1863085 - DNA, 15 bp, Homo sapiens
aagcagctcttggct

SEQ ID NO: 1863086 - DNA, 15 bp, Homo sapiens
agcagctcttggctg

SEQ ID NO: 1863087 - DNA, 15 bp, Homo sapiens
gcagctcttggctgg

SEQ ID NO: 1863088 - DNA, 15 bp, Homo sapiens
cagctcttggctgga

SEQ ID NO: 1863089 - DNA, 15 bp, Homo sapiens
agctcttggctggaa

SEQ ID NO: 1863090 - DNA, 15 bp, Homo sapiens
gctcttggctggaag

SEQ ID NO: 1863091 - DNA, 15 bp, Homo sapiens
ctcttggctggaagc

SEQ ID NO: 1863092 - DNA, 15 bp, Homo sapiens
tcttggctggaagct

SEQ ID NO: 1863093 - DNA, 15 bp, Homo sapiens
cttggctggaagcta

SEQ ID NO: 1863094 - DNA, 15 bp, Homo sapiens
ttggctggaagctaa

SEQ ID NO: 1863095 - DNA, 15 bp, Homo sapiens
tggctggaagctaat

SEQ ID NO: 1863096 - DNA, 15 bp, Homo sapiens
ggctggaagctaatt

SEQ ID NO: 1863097 - DNA, 15 bp, Homo sapiens
gctggaagctaattt

SEQ ID NO: 1863098 - DNA, 15 bp, Homo sapiens
ctggaagctaatttt

SEQ ID NO: 1863099 - DNA, 15 bp, Homo sapiens
tggaagctaattttg

SEQ ID NO: 1863100 - DNA, 15 bp, Homo sapiens
ggaagctaattttgg

SEQ ID NO: 1863101 - DNA, 15 bp, Homo sapiens
gaagctaattttggt

SEQ ID NO: 1863102 - DNA, 15 bp, Homo sapiens
aagctaattttggtt

SEQ ID NO: 1863103 - DNA, 15 bp, Homo sapiens
agctaattttggttt

SEQ ID NO: 1863104 - DNA, 15 bp, Homo sapiens
gctaattttggtttg

SEQ ID NO: 1863105 - DNA, 15 bp, Homo sapiens
ctaattttggtttgg

SEQ ID NO: 1863106 - DNA, 15 bp, Homo sapiens
taattttggtttggc

SEQ ID NO: 1863107 - DNA, 15 bp, Homo sapiens
aattttggtttggct

SEQ ID NO: 1863108 - DNA, 15 bp, Homo sapiens
attttggtttggctg

SEQ ID NO: 1863109 - DNA, 15 bp, Homo sapiens
ttttggtttggctgg

SEQ ID NO: 1863110 - DNA, 15 bp, Homo sapiens
tttggtttggctggg

SEQ ID NO: 1863111 - DNA, 15 bp, Homo sapiens
ttggtttggctgggg

SEQ ID NO: 1863112 - DNA, 15 bp, Homo sapiens
tggtttggctgggga

SEQ ID NO: 1863113 - DNA, 15 bp, Homo sapiens
ggtttggctggggag

SEQ ID NO: 1863114 - DNA, 15 bp, Homo sapiens
gtttggctggggagt

SEQ ID NO: 1863115 - DNA, 15 bp, Homo sapiens
tttggctggggagtc

SEQ ID NO: 1863116 - DNA, 15 bp, Homo sapiens
ttggctggggagtcc

SEQ ID NO: 1863117 - DNA, 15 bp, Homo sapiens
tggctggggagtcct

SEQ ID NO: 1863118 - DNA, 15 bp, Homo sapiens
ggctggggagtcctc

SEQ ID NO: 1863119 - DNA, 15 bp, Homo sapiens
gctggggagtcctca

SEQ ID NO: 1863120 - DNA, 15 bp, Homo sapiens
ctggggagtcctcaa

SEQ ID NO: 1863121 - DNA, 15 bp, Homo sapiens
tggggagtcctcaac

SEQ ID NO: 1863122 - DNA, 15 bp, Homo sapiens
ggggagtcctcaaca

SEQ ID NO: 1863123 - DNA, 15 bp, Homo sapiens
gggagtcctcaacac

SEQ ID NO: 1863124 - DNA, 15 bp, Homo sapiens
ggagtcctcaacact

SEQ ID NO: 1863125 - DNA, 15 bp, Homo sapiens
gagtcctcaacactg

SEQ ID NO: 1863126 - DNA, 15 bp, Homo sapiens
agtcctcaacactga

SEQ ID NO: 1863127 - DNA, 15 bp, Homo sapiens
gtcctcaacactgag

SEQ ID NO: 1863128 - DNA, 15 bp, Homo sapiens
tcctcaacactgagc

SEQ ID NO: 1863129 - DNA, 15 bp, Homo sapiens
cctcaacactgagcc

SEQ ID NO: 1863130 - DNA, 15 bp, Homo sapiens
ctcaacactgagccc

SEQ ID NO: 1863131 - DNA, 15 bp, Homo sapiens
tcaacactgagcccc

SEQ ID NO: 1863132 - DNA, 15 bp, Homo sapiens
caacactgagcccca

SEQ ID NO: 1863133 - DNA, 15 bp, Homo sapiens
aacactgagccccac

SEQ ID NO: 1863134 - DNA, 15 bp, Homo sapiens
acactgagccccacc

SEQ ID NO: 1863135 - DNA, 15 bp, Homo sapiens
cactgagccccaccc

SEQ ID NO: 1863136 - DNA, 15 bp, Homo sapiens
actgagccccaccca

SEQ ID NO: 1863137 - DNA, 15 bp, Homo sapiens
ctgagccccacccag

SEQ ID NO: 1863138 - DNA, 15 bp, Homo sapiens
tgagccccacccagt

SEQ ID NO: 1863139 - DNA, 15 bp, Homo sapiens
gagccccacccagtg

SEQ ID NO: 1863140 - DNA, 15 bp, Homo sapiens
agccccacccagtgt

SEQ ID NO: 1863141 - DNA, 15 bp, Homo sapiens
gccccacccagtgtc

SEQ ID NO: 1863142 - DNA, 15 bp, Homo sapiens
ccccacccagtgtca

SEQ ID NO: 1863143 - DNA, 15 bp, Homo sapiens
cccacccagtgtcat

SEQ ID NO: 1863144 - DNA, 15 bp, Homo sapiens
ccacccagtgtcatt

SEQ ID NO: 1863145 - DNA, 15 bp, Homo sapiens
cacccagtgtcatta

SEQ ID NO: 1863146 - DNA, 15 bp, Homo sapiens
acccagtgtcattag

SEQ ID NO: 1863147 - DNA, 15 bp, Homo sapiens
cccagtgtcattagc

SEQ ID NO: 1863148 - DNA, 15 bp, Homo sapiens
ccagtgtcattagct

SEQ ID NO: 1863149 - DNA, 15 bp, Homo sapiens
cagtgtcattagctc

SEQ ID NO: 1863150 - DNA, 15 bp, Homo sapiens
agtgtcattagctca

SEQ ID NO: 1863151 - DNA, 15 bp, Homo sapiens
gtgtcattagctcag

SEQ ID NO: 1863152 - DNA, 15 bp, Homo sapiens
tgtcattagctcagt

SEQ ID NO: 1863153 - DNA, 15 bp, Homo sapiens
gtcattagctcagtt

SEQ ID NO: 1863154 - DNA, 15 bp, Homo sapiens
tcattagctcagttt

SEQ ID NO: 1863155 - DNA, 15 bp, Homo sapiens
cattagctcagtttt

SEQ ID NO: 1863156 - DNA, 15 bp, Homo sapiens
attagctcagtttta

SEQ ID NO: 1863157 - DNA, 15 bp, Homo sapiens
ttagctcagttttaa

SEQ ID NO: 1863158 - DNA, 15 bp, Homo sapiens
tagctcagttttaac

SEQ ID NO: 1863159 - DNA, 15 bp, Homo sapiens
agctcagttttaact

SEQ ID NO: 1863160 - DNA, 15 bp, Homo sapiens
gctcagttttaactt

SEQ ID NO: 1863161 - DNA, 15 bp, Homo sapiens
ctcagttttaacttg

SEQ ID NO: 1863162 - DNA, 15 bp, Homo sapiens
tcagttttaacttgc

SEQ ID NO: 1863163 - DNA, 15 bp, Homo sapiens
cagttttaacttgca

SEQ ID NO: 1863164 - DNA, 15 bp, Homo sapiens
agttttaacttgcaa

SEQ ID NO: 1863165 - DNA, 15 bp, Homo sapiens
gttttaacttgcaaa

SEQ ID NO: 1863166 - DNA, 15 bp, Homo sapiens
ttttaacttgcaaaa

SEQ ID NO: 1863167 - DNA, 15 bp, Homo sapiens
tttaacttgcaaaaa

SEQ ID NO: 1863168 - DNA, 15 bp, Homo sapiens
ttaacttgcaaaaaa

SEQ ID NO: 1863169 - DNA, 15 bp, Homo sapiens
taacttgcaaaaaaa

SEQ ID NO: 1863170 - DNA, 15 bp, Homo sapiens
aacttgcaaaaaaaa

SEQ ID NO: 1863171 - DNA, 15 bp, Homo sapiens
acttgcaaaaaaaag

SEQ ID NO: 1863172 - DNA, 15 bp, Homo sapiens
cttgcaaaaaaaaga

SEQ ID NO: 1863173 - DNA, 15 bp, Homo sapiens
ttgcaaaaaaaagat

SEQ ID NO: 1863174 - DNA, 15 bp, Homo sapiens
tgcaaaaaaaagatt

SEQ ID NO: 1863175 - DNA, 15 bp, Homo sapiens
gcaaaaaaaagattg

SEQ ID NO: 1863176 - DNA, 15 bp, Homo sapiens
caaaaaaaagattgt

SEQ ID NO: 1863177 - DNA, 15 bp, Homo sapiens
aaaaaaaagattgta

SEQ ID NO: 1863178 - DNA, 15 bp, Homo sapiens
aaaaaaagattgtat

SEQ ID NO: 1863179 - DNA, 15 bp, Homo sapiens
aaaaaagattgtatt

SEQ ID NO: 1863180 - DNA, 15 bp, Homo sapiens
aaaaagattgtattt

SEQ ID NO: 1863181 - DNA, 15 bp, Homo sapiens
aaaagattgtatttt

SEQ ID NO: 1863182 - DNA, 15 bp, Homo sapiens
aaagattgtattttt

SEQ ID NO: 1863183 - DNA, 15 bp, Homo sapiens
aagattgtatttttt

SEQ ID NO: 1863184 - DNA, 15 bp, Homo sapiens
agattgtattttttt

SEQ ID NO: 1863185 - DNA, 15 bp, Homo sapiens
gattgtatttttttt

SEQ ID NO: 1863186 - DNA, 15 bp, Homo sapiens
attgtattttttttt

SEQ ID NO: 1863187 - DNA, 15 bp, Homo sapiens
ttgtatttttttttt

SEQ ID NO: 1863188 - DNA, 15 bp, Homo sapiens
gtatttttttttttg

SEQ ID NO: 1863189 - DNA, 15 bp, Homo sapiens
atttttttttttgat

SEQ ID NO: 1863190 - DNA, 15 bp, Homo sapiens
tttttttttttgatg

SEQ ID NO: 1863191 - DNA, 15 bp, Homo sapiens
ttttttttttgatgg

SEQ ID NO: 1863192 - DNA, 15 bp, Homo sapiens
tttttttttgatggg

SEQ ID NO: 1863193 - DNA, 15 bp, Homo sapiens
ttttttttgatgggg

SEQ ID NO: 1863194 - DNA, 15 bp, Homo sapiens
tttttttgatggggg

SEQ ID NO: 1863195 - DNA, 15 bp, Homo sapiens
ttttttgatgggggg

SEQ ID NO: 1863196 - DNA, 15 bp, Homo sapiens
tttttgatggggggt

SEQ ID NO: 1863197 - DNA, 15 bp, Homo sapiens
ttttgatggggggta

SEQ ID NO: 1863198 - DNA, 15 bp, Homo sapiens
tttgatggggggtac

SEQ ID NO: 1863199 - DNA, 15 bp, Homo sapiens
ttgatggggggtacg

SEQ ID NO: 1863200 - DNA, 15 bp, Homo sapiens
tgatggggggtacgt

SEQ ID NO: 1863201 - DNA, 15 bp, Homo sapiens
gatggggggtacgta

SEQ ID NO: 1863202 - DNA, 15 bp, Homo sapiens
atggggggtacgtaa

SEQ ID NO: 1863203 - DNA, 15 bp, Homo sapiens
tggggggtacgtaag

SEQ ID NO: 1863204 - DNA, 15 bp, Homo sapiens
ggggggtacgtaaga

SEQ ID NO: 1863205 - DNA, 15 bp, Homo sapiens
gggggtacgtaagaa

SEQ ID NO: 1863206 - DNA, 15 bp, Homo sapiens
ggggtacgtaagaat

SEQ ID NO: 1863207 - DNA, 15 bp, Homo sapiens
gggtacgtaagaatt

SEQ ID NO: 1863208 - DNA, 15 bp, Homo sapiens
ggtacgtaagaattt

SEQ ID NO: 1863209 - DNA, 15 bp, Homo sapiens
gtacgtaagaattta

SEQ ID NO: 1863210 - DNA, 15 bp, Homo sapiens
tacgtaagaatttac

SEQ ID NO: 1863211 - DNA, 15 bp, Homo sapiens
acgtaagaatttact

SEQ ID NO: 1863212 - DNA, 15 bp, Homo sapiens
cgtaagaatttactc

SEQ ID NO: 1863213 - DNA, 15 bp, Homo sapiens
gtaagaatttactca

SEQ ID NO: 1863214 - DNA, 15 bp, Homo sapiens
taagaatttactcac

SEQ ID NO: 1863215 - DNA, 15 bp, Homo sapiens
aagaatttactcacg

SEQ ID NO: 1863216 - DNA, 15 bp, Homo sapiens
agaatttactcacgc

SEQ ID NO: 1863217 - DNA, 15 bp, Homo sapiens
gaatttactcacgcc

SEQ ID NO: 1863218 - DNA, 15 bp, Homo sapiens
aatttactcacgcct

SEQ ID NO: 1863219 - DNA, 15 bp, Homo sapiens
atttactcacgcctt

SEQ ID NO: 1863220 - DNA, 15 bp, Homo sapiens
tttactcacgccttt

SEQ ID NO: 1863221 - DNA, 15 bp, Homo sapiens
ttactcacgccttta

SEQ ID NO: 1863222 - DNA, 15 bp, Homo sapiens
tactcacgcctttag

SEQ ID NO: 1863223 - DNA, 15 bp, Homo sapiens
actcacgcctttagc

SEQ ID NO: 1863224 - DNA, 15 bp, Homo sapiens
ctcacgcctttagcc

SEQ ID NO: 1863225 - DNA, 15 bp, Homo sapiens
tcacgcctttagcct

SEQ ID NO: 1863226 - DNA, 15 bp, Homo sapiens
cacgcctttagcctt

SEQ ID NO: 1863227 - DNA, 15 bp, Homo sapiens
acgcctttagccttt

SEQ ID NO: 1863228 - DNA, 15 bp, Homo sapiens
cgcctttagcctttt

SEQ ID NO: 1863229 - DNA, 15 bp, Homo sapiens
caaatatgtattgac

SEQ ID NO: 1863230 - DNA, 15 bp, Homo sapiens
aaatatgtattgaca

SEQ ID NO: 1863231 - DNA, 15 bp, Homo sapiens
aatatgtattgacac

SEQ ID NO: 1863232 - DNA, 15 bp, Homo sapiens
atatgtattgacacc

SEQ ID NO: 1863233 - DNA, 15 bp, Homo sapiens
tatgtattgacacct

SEQ ID NO: 1863234 - DNA, 15 bp, Homo sapiens
atgtattgacaccta

SEQ ID NO: 1863235 - DNA, 15 bp, Homo sapiens
tgtattgacacctat

SEQ ID NO: 1863236 - DNA, 15 bp, Homo sapiens
gtattgacacctatt

SEQ ID NO: 1863237 - DNA, 15 bp, Homo sapiens
tattgacacctatta

SEQ ID NO: 1863238 - DNA, 15 bp, Homo sapiens
attgacacctattat

SEQ ID NO: 1863239 - DNA, 15 bp, Homo sapiens
ttgacacctattatg

SEQ ID NO: 1863240 - DNA, 15 bp, Homo sapiens
tgacacctattatgt

SEQ ID NO: 1863241 - DNA, 15 bp, Homo sapiens
gacacctattatgtg

SEQ ID NO: 1863242 - DNA, 15 bp, Homo sapiens
acacctattatgtgc

SEQ ID NO: 1863243 - DNA, 15 bp, Homo sapiens
cacctattatgtgcc

SEQ ID NO: 1863244 - DNA, 15 bp, Homo sapiens
acctattatgtgcca

SEQ ID NO: 1863245 - DNA, 15 bp, Homo sapiens
cctattatgtgccag

SEQ ID NO: 1863246 - DNA, 15 bp, Homo sapiens
ctattatgtgccagg

SEQ ID NO: 1863247 - DNA, 15 bp, Homo sapiens
tattatgtgccaggc

SEQ ID NO: 1863248 - DNA, 15 bp, Homo sapiens
attatgtgccaggct

SEQ ID NO: 1863249 - DNA, 15 bp, Homo sapiens
ttatgtgccaggctg

SEQ ID NO: 1863250 - DNA, 15 bp, Homo sapiens
tatgtgccaggctgt

SEQ ID NO: 1863251 - DNA, 15 bp, Homo sapiens
atgtgccaggctgtg

SEQ ID NO: 1863252 - DNA, 15 bp, Homo sapiens
tgtgccaggctgtgt

SEQ ID NO: 1863253 - DNA, 15 bp, Homo sapiens
gtgccaggctgtgtg

SEQ ID NO: 1863254 - DNA, 15 bp, Homo sapiens
tgccaggctgtgtgc

SEQ ID NO: 1863255 - DNA, 15 bp, Homo sapiens
gccaggctgtgtgct

SEQ ID NO: 1863256 - DNA, 15 bp, Homo sapiens
ccaggctgtgtgctg

SEQ ID NO: 1863257 - DNA, 15 bp, Homo sapiens
caggctgtgtgctgt

SEQ ID NO: 1863258 - DNA, 15 bp, Homo sapiens
aggctgtgtgctgtg

SEQ ID NO: 1863259 - DNA, 15 bp, Homo sapiens
ggctgtgtgctgtgc

SEQ ID NO: 1863260 - DNA, 15 bp, Homo sapiens
gctgtgtgctgtgca

SEQ ID NO: 1863261 - DNA, 15 bp, Homo sapiens
ctgtgtgctgtgcag

SEQ ID NO: 1863262 - DNA, 15 bp, Homo sapiens
tgtgtgctgtgcaga

SEQ ID NO: 1863263 - DNA, 15 bp, Homo sapiens
gtgtgctgtgcagag

SEQ ID NO: 1863264 - DNA, 15 bp, Homo sapiens
tgtgctgtgcagagg

SEQ ID NO: 1863265 - DNA, 15 bp, Homo sapiens
gtgctgtgcagagga

SEQ ID NO: 1863266 - DNA, 15 bp, Homo sapiens
tgctgtgcagaggac

SEQ ID NO: 1863267 - DNA, 15 bp, Homo sapiens
gctgtgcagaggacc

SEQ ID NO: 1863268 - DNA, 15 bp, Homo sapiens
ctgtgcagaggacca

SEQ ID NO: 1863269 - DNA, 15 bp, Homo sapiens
tgtgcagaggaccag

SEQ ID NO: 1863270 - DNA, 15 bp, Homo sapiens
gtgcagaggaccagt

SEQ ID NO: 1863271 - DNA, 15 bp, Homo sapiens
tgcagaggaccagtt

SEQ ID NO: 1863272 - DNA, 15 bp, Homo sapiens
gcagaggaccagttc

SEQ ID NO: 1863273 - DNA, 15 bp, Homo sapiens
cagaggaccagttcc

SEQ ID NO: 1863274 - DNA, 15 bp, Homo sapiens
agaggaccagttcct

SEQ ID NO: 1863275 - DNA, 15 bp, Homo sapiens
gaggaccagttcctg

SEQ ID NO: 1863276 - DNA, 15 bp, Homo sapiens
aggaccagttcctgg

SEQ ID NO: 1863277 - DNA, 15 bp, Homo sapiens
ggaccagttcctggg

SEQ ID NO: 1863278 - DNA, 15 bp, Homo sapiens
gaccagttcctgggc

SEQ ID NO: 1863279 - DNA, 15 bp, Homo sapiens
accagttcctgggct

SEQ ID NO: 1863280 - DNA, 15 bp, Homo sapiens
ccagttcctgggctg

SEQ ID NO: 1863281 - DNA, 15 bp, Homo sapiens
cagttcctgggctgg

SEQ ID NO: 1863282 - DNA, 15 bp, Homo sapiens
agttcctgggctggg

SEQ ID NO: 1863283 - DNA, 15 bp, Homo sapiens
gttcctgggctgggt

SEQ ID NO: 1863284 - DNA, 15 bp, Homo sapiens
ttcctgggctgggtt

SEQ ID NO: 1863285 - DNA, 15 bp, Homo sapiens
tcctgggctgggtta

SEQ ID NO: 1863286 - DNA, 15 bp, Homo sapiens
cctgggctgggttag

SEQ ID NO: 1863287 - DNA, 15 bp, Homo sapiens
ctgggctgggttaga

SEQ ID NO: 1863288 - DNA, 15 bp, Homo sapiens
tgggctgggttagaa

SEQ ID NO: 1863289 - DNA, 15 bp, Homo sapiens
gggctgggttagaat

SEQ ID NO: 1863290 - DNA, 15 bp, Homo sapiens
ggctgggttagaatt

SEQ ID NO: 1863291 - DNA, 15 bp, Homo sapiens
gctgggttagaatta

SEQ ID NO: 1863292 - DNA, 15 bp, Homo sapiens
ctgggttagaattaa

SEQ ID NO: 1863293 - DNA, 15 bp, Homo sapiens
tgggttagaattaag

SEQ ID NO: 1863294 - DNA, 15 bp, Homo sapiens
gggttagaattaaga

SEQ ID NO: 1863295 - DNA, 15 bp, Homo sapiens
ggttagaattaagaa

SEQ ID NO: 1863296 - DNA, 15 bp, Homo sapiens
gttagaattaagaat

SEQ ID NO: 1863297 - DNA, 15 bp, Homo sapiens
ttagaattaagaatt

SEQ ID NO: 1863298 - DNA, 15 bp, Homo sapiens
tagaattaagaattg

SEQ ID NO: 1863299 - DNA, 15 bp, Homo sapiens
agaattaagaattgg

SEQ ID NO: 1863300 - DNA, 15 bp, Homo sapiens
gaattaagaattggc

SEQ ID NO: 1863301 - DNA, 15 bp, Homo sapiens
aattaagaattggca

SEQ ID NO: 1863302 - DNA, 15 bp, Homo sapiens
attaagaattggcag

SEQ ID NO: 1863303 - DNA, 15 bp, Homo sapiens
ttaagaattggcagt

SEQ ID NO: 1863304 - DNA, 15 bp, Homo sapiens
taagaattggcagtt

SEQ ID NO: 1863305 - DNA, 15 bp, Homo sapiens
aagaattggcagttg

SEQ ID NO: 1863306 - DNA, 15 bp, Homo sapiens
agaattggcagttgg

SEQ ID NO: 1863307 - DNA, 15 bp, Homo sapiens
gaattggcagttgga

SEQ ID NO: 1863308 - DNA, 15 bp, Homo sapiens
aattggcagttggaa

SEQ ID NO: 1863309 - DNA, 15 bp, Homo sapiens
attggcagttggaat

SEQ ID NO: 1863310 - DNA, 15 bp, Homo sapiens
ttggcagttggaatg

SEQ ID NO: 1863311 - DNA, 15 bp, Homo sapiens
tggcagttggaatgg

SEQ ID NO: 1863312 - DNA, 15 bp, Homo sapiens
ggcagttggaatggc

SEQ ID NO: 1863313 - DNA, 15 bp, Homo sapiens
gcagttggaatggct

SEQ ID NO: 1863314 - DNA, 15 bp, Homo sapiens
cagttggaatggctt

SEQ ID NO: 1863315 - DNA, 15 bp, Homo sapiens
agttggaatggcttg

SEQ ID NO: 1863316 - DNA, 15 bp, Homo sapiens
gttggaatggcttgt

SEQ ID NO: 1863317 - DNA, 15 bp, Homo sapiens
ttggaatggcttgtc

SEQ ID NO: 1863318 - DNA, 15 bp, Homo sapiens
tggaatggcttgtcc

SEQ ID NO: 1863319 - DNA, 15 bp, Homo sapiens
ggaatggcttgtccg

SEQ ID NO: 1863320 - DNA, 15 bp, Homo sapiens
gaatggcttgtccga

SEQ ID NO: 1863321 - DNA, 15 bp, Homo sapiens
aatggcttgtccgaa

SEQ ID NO: 1863322 - DNA, 15 bp, Homo sapiens
atggcttgtccgaag

SEQ ID NO: 1863323 - DNA, 15 bp, Homo sapiens
tggcttgtccgaagg

SEQ ID NO: 1863324 - DNA, 15 bp, Homo sapiens
ggcttgtccgaaggt

SEQ ID NO: 1863325 - DNA, 15 bp, Homo sapiens
gcttgtccgaaggtg

SEQ ID NO: 1863326 - DNA, 15 bp, Homo sapiens
cttgtccgaaggtga

SEQ ID NO: 1863327 - DNA, 15 bp, Homo sapiens
ttgtccgaaggtgat

SEQ ID NO: 1863328 - DNA, 15 bp, Homo sapiens
tgtccgaaggtgatg

SEQ ID NO: 1863329 - DNA, 15 bp, Homo sapiens
gtccgaaggtgatgt

SEQ ID NO: 1863330 - DNA, 15 bp, Homo sapiens
tccgaaggtgatgtt

SEQ ID NO: 1863331 - DNA, 15 bp, Homo sapiens
ccgaaggtgatgttg

SEQ ID NO: 1863332 - DNA, 15 bp, Homo sapiens
cgaaggtgatgttga

SEQ ID NO: 1863333 - DNA, 15 bp, Homo sapiens
gaaggtgatgttgaa

SEQ ID NO: 1863334 - DNA, 15 bp, Homo sapiens
aaggtgatgttgaat

SEQ ID NO: 1863335 - DNA, 15 bp, Homo sapiens
aggtgatgttgaatc

SEQ ID NO: 1863336 - DNA, 15 bp, Homo sapiens
ggtgatgttgaatcc

SEQ ID NO: 1863337 - DNA, 15 bp, Homo sapiens
gtgatgttgaatcca

SEQ ID NO: 1863338 - DNA, 15 bp, Homo sapiens
tgatgttgaatccat

SEQ ID NO: 1863339 - DNA, 15 bp, Homo sapiens
gatgttgaatccatg

SEQ ID NO: 1863340 - DNA, 15 bp, Homo sapiens
atgttgaatccatgg

SEQ ID NO: 1863341 - DNA, 15 bp, Homo sapiens
tgttgaatccatggg

SEQ ID NO: 1863342 - DNA, 15 bp, Homo sapiens
gttgaatccatgggg

SEQ ID NO: 1863343 - DNA, 15 bp, Homo sapiens
ttgaatccatgggga

SEQ ID NO: 1863344 - DNA, 15 bp, Homo sapiens
tgaatccatggggat

SEQ ID NO: 1863345 - DNA, 15 bp, Homo sapiens
gaatccatggggatg

SEQ ID NO: 1863346 - DNA, 15 bp, Homo sapiens
aatccatggggatgg

SEQ ID NO: 1863347 - DNA, 15 bp, Homo sapiens
atccatggggatgga

SEQ ID NO: 1863348 - DNA, 15 bp, Homo sapiens
tccatggggatggag

SEQ ID NO: 1863349 - DNA, 15 bp, Homo sapiens
ccatggggatggagc

SEQ ID NO: 1863350 - DNA, 15 bp, Homo sapiens
catggggatggagcc

SEQ ID NO: 1863351 - DNA, 15 bp, Homo sapiens
atggggatggagccg

SEQ ID NO: 1863352 - DNA, 15 bp, Homo sapiens
tggggatggagccgg

SEQ ID NO: 1863353 - DNA, 15 bp, Homo sapiens
ggggatggagccggc

SEQ ID NO: 1863354 - DNA, 15 bp, Homo sapiens
gggatggagccggcg

SEQ ID NO: 1863355 - DNA, 15 bp, Homo sapiens
ggatggagccggcgg

SEQ ID NO: 1863356 - DNA, 15 bp, Homo sapiens
gatggagccggcggg

SEQ ID NO: 1863357 - DNA, 15 bp, Homo sapiens
atggagccggcggga

SEQ ID NO: 1863358 - DNA, 15 bp, Homo sapiens
tggagccggcgggag

SEQ ID NO: 1863359 - DNA, 15 bp, Homo sapiens
ggagccggcgggagg

SEQ ID NO: 1863360 - DNA, 15 bp, Homo sapiens
gagccggcgggaggg

SEQ ID NO: 1863361 - DNA, 15 bp, Homo sapiens
agccggcgggagggg

SEQ ID NO: 1863362 - DNA, 15 bp, Homo sapiens
gccggcgggaggggg

SEQ ID NO: 1863363 - DNA, 15 bp, Homo sapiens
ccggcgggagggggg

SEQ ID NO: 1863364 - DNA, 15 bp, Homo sapiens
cggcgggagggggga

SEQ ID NO: 1863365 - DNA, 15 bp, Homo sapiens
ggcgggaggggggat

SEQ ID NO: 1863366 - DNA, 15 bp, Homo sapiens
gcgggaggggggatt

SEQ ID NO: 1863367 - DNA, 15 bp, Homo sapiens
cgggaggggggattg

SEQ ID NO: 1863368 - DNA, 15 bp, Homo sapiens
gggaggggggattga

SEQ ID NO: 1863369 - DNA, 15 bp, Homo sapiens
ggaggggggattgac

SEQ ID NO: 1863370 - DNA, 15 bp, Homo sapiens
gaggggggattgact

SEQ ID NO: 1863371 - DNA, 15 bp, Homo sapiens
aggggggattgacta

SEQ ID NO: 1863372 - DNA, 15 bp, Homo sapiens
ggggggattgactag

SEQ ID NO: 1863373 - DNA, 15 bp, Homo sapiens
gggggattgactagg

SEQ ID NO: 1863374 - DNA, 15 bp, Homo sapiens
ggggattgactagga

SEQ ID NO: 1863375 - DNA, 15 bp, Homo sapiens
gggattgactaggag

SEQ ID NO: 1863376 - DNA, 15 bp, Homo sapiens
ggattgactaggagt

SEQ ID NO: 1863377 - DNA, 15 bp, Homo sapiens
gattgactaggagtt

SEQ ID NO: 1863378 - DNA, 15 bp, Homo sapiens
attgactaggagttg

SEQ ID NO: 1863379 - DNA, 15 bp, Homo sapiens
ttgactaggagttgc

SEQ ID NO: 1863380 - DNA, 15 bp, Homo sapiens
tgactaggagttgcc

SEQ ID NO: 1863381 - DNA, 15 bp, Homo sapiens
gactaggagttgcct

SEQ ID NO: 1863382 - DNA, 15 bp, Homo sapiens
actaggagttgcctc

SEQ ID NO: 1863383 - DNA, 15 bp, Homo sapiens
ctaggagttgcctct

SEQ ID NO: 1863384 - DNA, 15 bp, Homo sapiens
taggagttgcctcta

SEQ ID NO: 1863385 - DNA, 15 bp, Homo sapiens
aggagttgcctctac

SEQ ID NO: 1863386 - DNA, 15 bp, Homo sapiens
ggagttgcctctacc

SEQ ID NO: 1863387 - DNA, 15 bp, Homo sapiens
gagttgcctctacct

SEQ ID NO: 1863388 - DNA, 15 bp, Homo sapiens
agttgcctctacctg

SEQ ID NO: 1863389 - DNA, 15 bp, Homo sapiens
gttgcctctacctgg

SEQ ID NO: 1863390 - DNA, 15 bp, Homo sapiens
ttgcctctacctgga

SEQ ID NO: 1863391 - DNA, 15 bp, Homo sapiens
tgcctctacctggag

SEQ ID NO: 1863392 - DNA, 15 bp, Homo sapiens
gcctctacctggagg

SEQ ID NO: 1863393 - DNA, 15 bp, Homo sapiens
cctctacctggaggc

SEQ ID NO: 1863394 - DNA, 15 bp, Homo sapiens
ctctacctggaggca

SEQ ID NO: 1863395 - DNA, 15 bp, Homo sapiens
tctacctggaggcag

SEQ ID NO: 1863396 - DNA, 15 bp, Homo sapiens
ctacctggaggcagg

SEQ ID NO: 1863397 - DNA, 15 bp, Homo sapiens
tacctggaggcaggc

SEQ ID NO: 1863398 - DNA, 15 bp, Homo sapiens
acctggaggcaggca

SEQ ID NO: 1863399 - DNA, 15 bp, Homo sapiens
cctggaggcaggcag

SEQ ID NO: 1863400 - DNA, 15 bp, Homo sapiens
ctggaggcaggcagg

SEQ ID NO: 1863401 - DNA, 15 bp, Homo sapiens
tggaggcaggcaggg

SEQ ID NO: 1863402 - DNA, 15 bp, Homo sapiens
ggaggcaggcagggg

SEQ ID NO: 1863403 - DNA, 15 bp, Homo sapiens
gaggcaggcaggggc

SEQ ID NO: 1863404 - DNA, 15 bp, Homo sapiens
aggcaggcaggggca

SEQ ID NO: 1863405 - DNA, 15 bp, Homo sapiens
ggcaggcaggggcag

SEQ ID NO: 1863406 - DNA, 15 bp, Homo sapiens
gcaggcaggggcagc

SEQ ID NO: 1863407 - DNA, 15 bp, Homo sapiens
caggcaggggcagct

SEQ ID NO: 1863408 - DNA, 15 bp, Homo sapiens
aggcaggggcagctt

SEQ ID NO: 1863409 - DNA, 15 bp, Homo sapiens
ggcaggggcagcttc

SEQ ID NO: 1863410 - DNA, 15 bp, Homo sapiens
gcaggggcagcttct

SEQ ID NO: 1863411 - DNA, 15 bp, Homo sapiens
caggggcagcttctg

SEQ ID NO: 1863412 - DNA, 15 bp, Homo sapiens
aggggcagcttctgt

SEQ ID NO: 1863413 - DNA, 15 bp, Homo sapiens
ggggcagcttctgta

SEQ ID NO: 1863414 - DNA, 15 bp, Homo sapiens
gggcagcttctgtag

SEQ ID NO: 1863415 - DNA, 15 bp, Homo sapiens
ggcagcttctgtagg

SEQ ID NO: 1863416 - DNA, 15 bp, Homo sapiens
gcagcttctgtagga

SEQ ID NO: 1863417 - DNA, 15 bp, Homo sapiens
cagcttctgtaggac

SEQ ID NO: 1863418 - DNA, 15 bp, Homo sapiens
agcttctgtaggaca

SEQ ID NO: 1863419 - DNA, 15 bp, Homo sapiens
gcttctgtaggacag

SEQ ID NO: 1863420 - DNA, 15 bp, Homo sapiens
cttctgtaggacaga

SEQ ID NO: 1863421 - DNA, 15 bp, Homo sapiens
ttctgtaggacagag

SEQ ID NO: 1863422 - DNA, 15 bp, Homo sapiens
tctgtaggacagagg

SEQ ID NO: 1863423 - DNA, 15 bp, Homo sapiens
ctgtaggacagagga

SEQ ID NO: 1863424 - DNA, 15 bp, Homo sapiens
tgtaggacagaggag

SEQ ID NO: 1863425 - DNA, 15 bp, Homo sapiens
gtaggacagaggagc

SEQ ID NO: 1863426 - DNA, 15 bp, Homo sapiens
taggacagaggagcc

SEQ ID NO: 1863427 - DNA, 15 bp, Homo sapiens
aggacagaggagcct

SEQ ID NO: 1863428 - DNA, 15 bp, Homo sapiens
ggacagaggagcctg

SEQ ID NO: 1863429 - DNA, 15 bp, Homo sapiens
gacagaggagcctgg

SEQ ID NO: 1863430 - DNA, 15 bp, Homo sapiens
acagaggagcctggt

SEQ ID NO: 1863431 - DNA, 15 bp, Homo sapiens
cagaggagcctggtc

SEQ ID NO: 1863432 - DNA, 15 bp, Homo sapiens
agaggagcctggtcc

SEQ ID NO: 1863433 - DNA, 15 bp, Homo sapiens
gaggagcctggtccc

SEQ ID NO: 1863434 - DNA, 15 bp, Homo sapiens
aggagcctggtccct

SEQ ID NO: 1863435 - DNA, 15 bp, Homo sapiens
ggagcctggtccctc

SEQ ID NO: 1863436 - DNA, 15 bp, Homo sapiens
gagcctggtccctcc

SEQ ID NO: 1863437 - DNA, 15 bp, Homo sapiens
agcctggtccctcca

SEQ ID NO: 1863438 - DNA, 15 bp, Homo sapiens
gcctggtccctccat

SEQ ID NO: 1863439 - DNA, 15 bp, Homo sapiens
cctggtccctccatg

SEQ ID NO: 1863440 - DNA, 15 bp, Homo sapiens
ctggtccctccatga

SEQ ID NO: 1863441 - DNA, 15 bp, Homo sapiens
tggtccctccatgaa

SEQ ID NO: 1863442 - DNA, 15 bp, Homo sapiens
ggtccctccatgaag

SEQ ID NO: 1863443 - DNA, 15 bp, Homo sapiens
gtccctccatgaagc

SEQ ID NO: 1863444 - DNA, 15 bp, Homo sapiens
tccctccatgaagcc

SEQ ID NO: 1863445 - DNA, 15 bp, Homo sapiens
ccctccatgaagcca

SEQ ID NO: 1863446 - DNA, 15 bp, Homo sapiens
cctccatgaagccag

SEQ ID NO: 1863447 - DNA, 15 bp, Homo sapiens
ctccatgaagccagg

SEQ ID NO: 1863448 - DNA, 15 bp, Homo sapiens
tccatgaagccaggc

SEQ ID NO: 1863449 - DNA, 15 bp, Homo sapiens
ccatgaagccaggcc

SEQ ID NO: 1863450 - DNA, 15 bp, Homo sapiens
catgaagccaggcca

SEQ ID NO: 1863451 - DNA, 15 bp, Homo sapiens
atgaagccaggccat

SEQ ID NO: 1863452 - DNA, 15 bp, Homo sapiens
tgaagccaggccata

SEQ ID NO: 1863453 - DNA, 15 bp, Homo sapiens
gaagccaggccatag

SEQ ID NO: 1863454 - DNA, 15 bp, Homo sapiens
aagccaggccatagg

SEQ ID NO: 1863455 - DNA, 15 bp, Homo sapiens
agccaggccataggt

SEQ ID NO: 1863456 - DNA, 15 bp, Homo sapiens
gccaggccataggtg

SEQ ID NO: 1863457 - DNA, 15 bp, Homo sapiens
ccaggccataggtgg

SEQ ID NO: 1863458 - DNA, 15 bp, Homo sapiens
caggccataggtggg

SEQ ID NO: 1863459 - DNA, 15 bp, Homo sapiens
aggccataggtgggg

SEQ ID NO: 1863460 - DNA, 15 bp, Homo sapiens
ggccataggtggggg

SEQ ID NO: 1863461 - DNA, 15 bp, Homo sapiens
gccataggtggggga

SEQ ID NO: 1863462 - DNA, 15 bp, Homo sapiens
ccataggtgggggag

SEQ ID NO: 1863463 - DNA, 15 bp, Homo sapiens
cataggtgggggagg

SEQ ID NO: 1863464 - DNA, 15 bp, Homo sapiens
ataggtgggggaggt

SEQ ID NO: 1863465 - DNA, 15 bp, Homo sapiens
taggtgggggaggtg

SEQ ID NO: 1863466 - DNA, 15 bp, Homo sapiens
aggtgggggaggtgc

SEQ ID NO: 1863467 - DNA, 15 bp, Homo sapiens
ggtgggggaggtgca

SEQ ID NO: 1863468 - DNA, 15 bp, Homo sapiens
gtgggggaggtgcag

SEQ ID NO: 1863469 - DNA, 15 bp, Homo sapiens
tgggggaggtgcagg

SEQ ID NO: 1863470 - DNA, 15 bp, Homo sapiens
gggggaggtgcaggg

SEQ ID NO: 1863471 - DNA, 15 bp, Homo sapiens
ggggaggtgcagggt

SEQ ID NO: 1863472 - DNA, 15 bp, Homo sapiens
gggaggtgcagggtg

SEQ ID NO: 1863473 - DNA, 15 bp, Homo sapiens
ggaggtgcagggtgg

SEQ ID NO: 1863474 - DNA, 15 bp, Homo sapiens
gaggtgcagggtggg

SEQ ID NO: 1863475 - DNA, 15 bp, Homo sapiens
aggtgcagggtgggc

SEQ ID NO: 1863476 - DNA, 15 bp, Homo sapiens
ggtgcagggtgggcc

SEQ ID NO: 1863477 - DNA, 15 bp, Homo sapiens
gtgcagggtgggccc

SEQ ID NO: 1863478 - DNA, 15 bp, Homo sapiens
tgcagggtgggcccc

SEQ ID NO: 1863479 - DNA, 15 bp, Homo sapiens
gcagggtgggccccc

SEQ ID NO: 1863480 - DNA, 15 bp, Homo sapiens
cagggtgggccccct

SEQ ID NO: 1863481 - DNA, 15 bp, Homo sapiens
agggtgggccccctg

SEQ ID NO: 1863482 - DNA, 15 bp, Homo sapiens
gggtgggccccctgg

SEQ ID NO: 1863483 - DNA, 15 bp, Homo sapiens
ggtgggccccctggg

SEQ ID NO: 1863484 - DNA, 15 bp, Homo sapiens
gtgggccccctggga

SEQ ID NO: 1863485 - DNA, 15 bp, Homo sapiens
tgggccccctgggat

SEQ ID NO: 1863486 - DNA, 15 bp, Homo sapiens
gggccccctgggatg

SEQ ID NO: 1863487 - DNA, 15 bp, Homo sapiens
ggccccctgggatgg

SEQ ID NO: 1863488 - DNA, 15 bp, Homo sapiens
gccccctgggatggg

SEQ ID NO: 1863489 - DNA, 15 bp, Homo sapiens
ccccctgggatgggc

SEQ ID NO: 1863490 - DNA, 15 bp, Homo sapiens
cccctgggatgggcc

SEQ ID NO: 1863491 - DNA, 15 bp, Homo sapiens
ccctgggatgggcct

SEQ ID NO: 1863492 - DNA, 15 bp, Homo sapiens
cctgggatgggccta

SEQ ID NO: 1863493 - DNA, 15 bp, Homo sapiens
ctgggatgggcctag

SEQ ID NO: 1863494 - DNA, 15 bp, Homo sapiens
tgggatgggcctagc

SEQ ID NO: 1863495 - DNA, 15 bp, Homo sapiens
gggatgggcctagct

SEQ ID NO: 1863496 - DNA, 15 bp, Homo sapiens
ggatgggcctagctc

SEQ ID NO: 1863497 - DNA, 15 bp, Homo sapiens
gatgggcctagctct

SEQ ID NO: 1863498 - DNA, 15 bp, Homo sapiens
atgggcctagctctt

SEQ ID NO: 1863499 - DNA, 15 bp, Homo sapiens
tgggcctagctcttg

SEQ ID NO: 1863500 - DNA, 15 bp, Homo sapiens
gggcctagctcttga

SEQ ID NO: 1863501 - DNA, 15 bp, Homo sapiens
ggcctagctcttgag

SEQ ID NO: 1863502 - DNA, 15 bp, Homo sapiens
gcctagctcttgagt

SEQ ID NO: 1863503 - DNA, 15 bp, Homo sapiens
cctagctcttgagtc

SEQ ID NO: 1863504 - DNA, 15 bp, Homo sapiens
ctagctcttgagtca

SEQ ID NO: 1863505 - DNA, 15 bp, Homo sapiens
tagctcttgagtcat

SEQ ID NO: 1863506 - DNA, 15 bp, Homo sapiens
agctcttgagtcatc

SEQ ID NO: 1863507 - DNA, 15 bp, Homo sapiens
gctcttgagtcatcc

SEQ ID NO: 1863508 - DNA, 15 bp, Homo sapiens
ctcttgagtcatcca

SEQ ID NO: 1863509 - DNA, 15 bp, Homo sapiens
tcttgagtcatccac

SEQ ID NO: 1863510 - DNA, 15 bp, Homo sapiens
cttgagtcatccact

SEQ ID NO: 1863511 - DNA, 15 bp, Homo sapiens
ttgagtcatccactt

SEQ ID NO: 1863512 - DNA, 15 bp, Homo sapiens
tgagtcatccacttc

SEQ ID NO: 1863513 - DNA, 15 bp, Homo sapiens
gagtcatccacttct

SEQ ID NO: 1863514 - DNA, 15 bp, Homo sapiens
agtcatccacttcta

SEQ ID NO: 1863515 - DNA, 15 bp, Homo sapiens
gtcatccacttctac

SEQ ID NO: 1863516 - DNA, 15 bp, Homo sapiens
tcatccacttctact

SEQ ID NO: 1863517 - DNA, 15 bp, Homo sapiens
catccacttctactt

SEQ ID NO: 1863518 - DNA, 15 bp, Homo sapiens
atccacttctacttc

SEQ ID NO: 1863519 - DNA, 15 bp, Homo sapiens
tccacttctacttct

SEQ ID NO: 1863520 - DNA, 15 bp, Homo sapiens
ccacttctacttctg

SEQ ID NO: 1863521 - DNA, 15 bp, Homo sapiens
cacttctacttctgc

SEQ ID NO: 1863522 - DNA, 15 bp, Homo sapiens
acttctacttctgct

SEQ ID NO: 1863523 - DNA, 15 bp, Homo sapiens
cttctacttctgctt

SEQ ID NO: 1863524 - DNA, 15 bp, Homo sapiens
ttctacttctgcttt

SEQ ID NO: 1863525 - DNA, 15 bp, Homo sapiens
tctacttctgctttg

SEQ ID NO: 1863526 - DNA, 15 bp, Homo sapiens
ctacttctgctttgg

SEQ ID NO: 1863527 - DNA, 15 bp, Homo sapiens
tacttctgctttggt

SEQ ID NO: 1863528 - DNA, 15 bp, Homo sapiens
acttctgctttggtt

SEQ ID NO: 1863529 - DNA, 15 bp, Homo sapiens
cttctgctttggttg

SEQ ID NO: 1863530 - DNA, 15 bp, Homo sapiens
ttctgctttggttgt

SEQ ID NO: 1863531 - DNA, 15 bp, Homo sapiens
tctgctttggttgtg

SEQ ID NO: 1863532 - DNA, 15 bp, Homo sapiens
ctgctttggttgtgt

SEQ ID NO: 1863533 - DNA, 15 bp, Homo sapiens
tgctttggttgtgtg

SEQ ID NO: 1863534 - DNA, 15 bp, Homo sapiens
gctttggttgtgtgg

SEQ ID NO: 1863535 - DNA, 15 bp, Homo sapiens
ctttggttgtgtggt

SEQ ID NO: 1863536 - DNA, 15 bp, Homo sapiens
tttggttgtgtggtc

SEQ ID NO: 1863537 - DNA, 15 bp, Homo sapiens
ttggttgtgtggtct

SEQ ID NO: 1863538 - DNA, 15 bp, Homo sapiens
tggttgtgtggtctg

SEQ ID NO: 1863539 - DNA, 15 bp, Homo sapiens
ggttgtgtggtctgt

SEQ ID NO: 1863540 - DNA, 15 bp, Homo sapiens
gttgtgtggtctgtt

SEQ ID NO: 1863541 - DNA, 15 bp, Homo sapiens
ttgtgtggtctgttg

SEQ ID NO: 1863542 - DNA, 15 bp, Homo sapiens
tgtgtggtctgttga

SEQ ID NO: 1863543 - DNA, 15 bp, Homo sapiens
gtgtggtctgttgag

SEQ ID NO: 1863544 - DNA, 15 bp, Homo sapiens
tgtggtctgttgaga

SEQ ID NO: 1863545 - DNA, 15 bp, Homo sapiens
gtggtctgttgagaa

SEQ ID NO: 1863546 - DNA, 15 bp, Homo sapiens
tggtctgttgagaat

SEQ ID NO: 1863547 - DNA, 15 bp, Homo sapiens
ggtctgttgagaatt

SEQ ID NO: 1863548 - DNA, 15 bp, Homo sapiens
gtctgttgagaattg

SEQ ID NO: 1863549 - DNA, 15 bp, Homo sapiens
tctgttgagaattga

SEQ ID NO: 1863550 - DNA, 15 bp, Homo sapiens
ctgttgagaattgag

SEQ ID NO: 1863551 - DNA, 15 bp, Homo sapiens
tgttgagaattgaga

SEQ ID NO: 1863552 - DNA, 15 bp, Homo sapiens
gttgagaattgagat

SEQ ID NO: 1863553 - DNA, 15 bp, Homo sapiens
ttgagaattgagata

SEQ ID NO: 1863554 - DNA, 15 bp, Homo sapiens
tgagaattgagataa

SEQ ID NO: 1863555 - DNA, 15 bp, Homo sapiens
gagaattgagataaa

SEQ ID NO: 1863556 - DNA, 15 bp, Homo sapiens
agaattgagataaag

SEQ ID NO: 1863557 - DNA, 15 bp, Homo sapiens
gaattgagataaagc

SEQ ID NO: 1863558 - DNA, 15 bp, Homo sapiens
aattgagataaagca

SEQ ID NO: 1863559 - DNA, 15 bp, Homo sapiens
attgagataaagcaa

SEQ ID NO: 1863560 - DNA, 15 bp, Homo sapiens
ttgagataaagcaaa

SEQ ID NO: 1863561 - DNA, 15 bp, Homo sapiens
tgagataaagcaaag

SEQ ID NO: 1863562 - DNA, 15 bp, Homo sapiens
gagataaagcaaagc

SEQ ID NO: 1863563 - DNA, 15 bp, Homo sapiens
agataaagcaaagct

SEQ ID NO: 1863564 - DNA, 15 bp, Homo sapiens
gataaagcaaagctt

SEQ ID NO: 1863565 - DNA, 15 bp, Homo sapiens
ataaagcaaagcttg

SEQ ID NO: 1863566 - DNA, 15 bp, Homo sapiens
taaagcaaagcttgt

SEQ ID NO: 1863567 - DNA, 15 bp, Homo sapiens
aaagcaaagcttgtg

SEQ ID NO: 1863568 - DNA, 15 bp, Homo sapiens
aagcaaagcttgtgg

SEQ ID NO: 1863569 - DNA, 15 bp, Homo sapiens
agcaaagcttgtgga

SEQ ID NO: 1863570 - DNA, 15 bp, Homo sapiens
gcaaagcttgtggat

SEQ ID NO: 1863571 - DNA, 15 bp, Homo sapiens
caaagcttgtggata

SEQ ID NO: 1863572 - DNA, 15 bp, Homo sapiens
aaagcttgtggataa

SEQ ID NO: 1863573 - DNA, 15 bp, Homo sapiens
aagcttgtggataaa

SEQ ID NO: 1863574 - DNA, 15 bp, Homo sapiens
agcttgtggataaac

SEQ ID NO: 1863575 - DNA, 15 bp, Homo sapiens
gcttgtggataaaca

SEQ ID NO: 1863576 - DNA, 15 bp, Homo sapiens
cttgtggataaacag

SEQ ID NO: 1863577 - DNA, 15 bp, Homo sapiens
ttgtggataaacaga

SEQ ID NO: 1863578 - DNA, 15 bp, Homo sapiens
tgtggataaacagag

SEQ ID NO: 1863579 - DNA, 15 bp, Homo sapiens
gtggataaacagagg

SEQ ID NO: 1863580 - DNA, 15 bp, Homo sapiens
tggataaacagaggt

SEQ ID NO: 1863581 - DNA, 15 bp, Homo sapiens
ggataaacagaggta

SEQ ID NO: 1863582 - DNA, 15 bp, Homo sapiens
gataaacagaggtag

SEQ ID NO: 1863583 - DNA, 15 bp, Homo sapiens
ataaacagaggtagg

SEQ ID NO: 1863584 - DNA, 15 bp, Homo sapiens
taaacagaggtaggt

SEQ ID NO: 1863585 - DNA, 15 bp, Homo sapiens
aaacagaggtaggtc

SEQ ID NO: 1863586 - DNA, 15 bp, Homo sapiens
aacagaggtaggtct

SEQ ID NO: 1863587 - DNA, 15 bp, Homo sapiens
acagaggtaggtctc

SEQ ID NO: 1863588 - DNA, 15 bp, Homo sapiens
cagaggtaggtctcc

SEQ ID NO: 1863589 - DNA, 15 bp, Homo sapiens
agaggtaggtctccc

SEQ ID NO: 1863590 - DNA, 15 bp, Homo sapiens
gaggtaggtctcccg

SEQ ID NO: 1863591 - DNA, 15 bp, Homo sapiens
aggtaggtctcccgg

SEQ ID NO: 1863592 - DNA, 15 bp, Homo sapiens
ggtaggtctcccggg

SEQ ID NO: 1863593 - DNA, 15 bp, Homo sapiens
gtaggtctcccgggt

SEQ ID NO: 1863594 - DNA, 15 bp, Homo sapiens
taggtctcccgggtt

SEQ ID NO: 1863595 - DNA, 15 bp, Homo sapiens
aggtctcccgggttt

SEQ ID NO: 1863596 - DNA, 15 bp, Homo sapiens
ggtctcccgggtttt

SEQ ID NO: 1863597 - DNA, 15 bp, Homo sapiens
gtctcccgggttttg

SEQ ID NO: 1863598 - DNA, 15 bp, Homo sapiens
tctcccgggttttgg

SEQ ID NO: 1863599 - DNA, 15 bp, Homo sapiens
ctcccgggttttggt

SEQ ID NO: 1863600 - DNA, 15 bp, Homo sapiens
tcccgggttttggtt

SEQ ID NO: 1863601 - DNA, 15 bp, Homo sapiens
cccgggttttggttc

SEQ ID NO: 1863602 - DNA, 15 bp, Homo sapiens
ccgggttttggttcc

SEQ ID NO: 1863603 - DNA, 15 bp, Homo sapiens
cgggttttggttcca

SEQ ID NO: 1863604 - DNA, 15 bp, Homo sapiens
gggttttggttccag

SEQ ID NO: 1863605 - DNA, 15 bp, Homo sapiens
ggttttggttccagc

SEQ ID NO: 1863606 - DNA, 15 bp, Homo sapiens
gttttggttccagcc

SEQ ID NO: 1863607 - DNA, 15 bp, Homo sapiens
ttttggttccagccc

SEQ ID NO: 1863608 - DNA, 15 bp, Homo sapiens
tttggttccagcccg

SEQ ID NO: 1863609 - DNA, 15 bp, Homo sapiens
ttggttccagcccgc

SEQ ID NO: 1863610 - DNA, 15 bp, Homo sapiens
tggttccagcccgcc

SEQ ID NO: 1863611 - DNA, 15 bp, Homo sapiens
ggttccagcccgcct

SEQ ID NO: 1863612 - DNA, 15 bp, Homo sapiens
gttccagcccgcctc

SEQ ID NO: 1863613 - DNA, 15 bp, Homo sapiens
ttccagcccgcctcc

SEQ ID NO: 1863614 - DNA, 15 bp, Homo sapiens
tccagcccgcctccc

SEQ ID NO: 1863615 - DNA, 15 bp, Homo sapiens
ccagcccgcctcccc

SEQ ID NO: 1863616 - DNA, 15 bp, Homo sapiens
cagcccgcctcccca

SEQ ID NO: 1863617 - DNA, 15 bp, Homo sapiens
agcccgcctccccac

SEQ ID NO: 1863618 - DNA, 15 bp, Homo sapiens
ccgcctccccacccc

SEQ ID NO: 1863619 - DNA, 15 bp, Homo sapiens
cgcctccccaccccg

SEQ ID NO: 1863620 - DNA, 15 bp, Homo sapiens
gcctccccaccccgc

SEQ ID NO: 1863621 - DNA, 15 bp, Homo sapiens
cctccccaccccgct

SEQ ID NO: 1863622 - DNA, 15 bp, Homo sapiens
ctccccaccccgctt

SEQ ID NO: 1863623 - DNA, 15 bp, Homo sapiens
tccccaccccgcttc

SEQ ID NO: 1863624 - DNA, 15 bp, Homo sapiens
ccccaccccgcttct

SEQ ID NO: 1863625 - DNA, 15 bp, Homo sapiens
cccaccccgcttctt

SEQ ID NO: 1863626 - DNA, 15 bp, Homo sapiens
ccaccccgcttcttg

SEQ ID NO: 1863627 - DNA, 15 bp, Homo sapiens
caccccgcttcttgc

SEQ ID NO: 1863628 - DNA, 15 bp, Homo sapiens
accccgcttcttgct

SEQ ID NO: 1863629 - DNA, 15 bp, Homo sapiens
ccccgcttcttgctg

SEQ ID NO: 1863630 - DNA, 15 bp, Homo sapiens
cccgcttcttgctga

SEQ ID NO: 1863631 - DNA, 15 bp, Homo sapiens
ccgcttcttgctgat

SEQ ID NO: 1863632 - DNA, 15 bp, Homo sapiens
cgcttcttgctgatt

SEQ ID NO: 1863633 - DNA, 15 bp, Homo sapiens
gcttcttgctgattg

SEQ ID NO: 1863634 - DNA, 15 bp, Homo sapiens
cttcttgctgattgt

SEQ ID NO: 1863635 - DNA, 15 bp, Homo sapiens
ttcttgctgattgta

SEQ ID NO: 1863636 - DNA, 15 bp, Homo sapiens
tcttgctgattgtaa

SEQ ID NO: 1863637 - DNA, 15 bp, Homo sapiens
cttgctgattgtaag

SEQ ID NO: 1863638 - DNA, 15 bp, Homo sapiens
ttgctgattgtaaga

SEQ ID NO: 1863639 - DNA, 15 bp, Homo sapiens
tgctgattgtaagat

SEQ ID NO: 1863640 - DNA, 15 bp, Homo sapiens
gctgattgtaagatg

SEQ ID NO: 1863641 - DNA, 15 bp, Homo sapiens
ctgattgtaagatga

SEQ ID NO: 1863642 - DNA, 15 bp, Homo sapiens
tgattgtaagatgac

SEQ ID NO: 1863643 - DNA, 15 bp, Homo sapiens
gattgtaagatgaca

SEQ ID NO: 1863644 - DNA, 15 bp, Homo sapiens
attgtaagatgacag

SEQ ID NO: 1863645 - DNA, 15 bp, Homo sapiens
ttgtaagatgacagc

SEQ ID NO: 1863646 - DNA, 15 bp, Homo sapiens
tgtaagatgacagca

SEQ ID NO: 1863647 - DNA, 15 bp, Homo sapiens
gtaagatgacagcag

SEQ ID NO: 1863648 - DNA, 15 bp, Homo sapiens
taagatgacagcagg

SEQ ID NO: 1863649 - DNA, 15 bp, Homo sapiens
aagatgacagcagga

SEQ ID NO: 1863650 - DNA, 15 bp, Homo sapiens
agatgacagcaggaa

SEQ ID NO: 1863651 - DNA, 15 bp, Homo sapiens
gatgacagcaggaag

SEQ ID NO: 1863652 - DNA, 15 bp, Homo sapiens
atgacagcaggaaga

SEQ ID NO: 1863653 - DNA, 15 bp, Homo sapiens
tgacagcaggaagaa

SEQ ID NO: 1863654 - DNA, 15 bp, Homo sapiens
gacagcaggaagaac

SEQ ID NO: 1863655 - DNA, 15 bp, Homo sapiens
acagcaggaagaaca

SEQ ID NO: 1863656 - DNA, 15 bp, Homo sapiens
cagcaggaagaacag

SEQ ID NO: 1863657 - DNA, 15 bp, Homo sapiens
agcaggaagaacagg

SEQ ID NO: 1863658 - DNA, 15 bp, Homo sapiens
gcaggaagaacagga

SEQ ID NO: 1863659 - DNA, 15 bp, Homo sapiens
caggaagaacaggag

SEQ ID NO: 1863660 - DNA, 15 bp, Homo sapiens
aggaagaacaggagc

SEQ ID NO: 1863661 - DNA, 15 bp, Homo sapiens
ggaagaacaggagct

SEQ ID NO: 1863662 - DNA, 15 bp, Homo sapiens
gaagaacaggagctg

SEQ ID NO: 1863663 - DNA, 15 bp, Homo sapiens
aagaacaggagctgt

SEQ ID NO: 1863664 - DNA, 15 bp, Homo sapiens
agaacaggagctgtg

SEQ ID NO: 1863665 - DNA, 15 bp, Homo sapiens
gaacaggagctgtgg

SEQ ID NO: 1863666 - DNA, 15 bp, Homo sapiens
aacaggagctgtggt

SEQ ID NO: 1863667 - DNA, 15 bp, Homo sapiens
acaggagctgtggtt

SEQ ID NO: 1863668 - DNA, 15 bp, Homo sapiens
caggagctgtggtta

SEQ ID NO: 1863669 - DNA, 15 bp, Homo sapiens
aggagctgtggttat

SEQ ID NO: 1863670 - DNA, 15 bp, Homo sapiens
ggagctgtggttata

SEQ ID NO: 1863671 - DNA, 15 bp, Homo sapiens
gagctgtggttataa

SEQ ID NO: 1863672 - DNA, 15 bp, Homo sapiens
agctgtggttataat

SEQ ID NO: 1863673 - DNA, 15 bp, Homo sapiens
gctgtggttataatc

SEQ ID NO: 1863674 - DNA, 15 bp, Homo sapiens
ctgtggttataatcc

SEQ ID NO: 1863675 - DNA, 15 bp, Homo sapiens
tgtggttataatcca

SEQ ID NO: 1863676 - DNA, 15 bp, Homo sapiens
gtggttataatccac

SEQ ID NO: 1863677 - DNA, 15 bp, Homo sapiens
tggttataatccacc

SEQ ID NO: 1863678 - DNA, 15 bp, Homo sapiens
ggttataatccaccc

SEQ ID NO: 1863679 - DNA, 15 bp, Homo sapiens
gttataatccaccct

SEQ ID NO: 1863680 - DNA, 15 bp, Homo sapiens
ttataatccaccctc

SEQ ID NO: 1863681 - DNA, 15 bp, Homo sapiens
tataatccaccctcc

SEQ ID NO: 1863682 - DNA, 15 bp, Homo sapiens
ataatccaccctcca

SEQ ID NO: 1863683 - DNA, 15 bp, Homo sapiens
taatccaccctccag

SEQ ID NO: 1863684 - DNA, 15 bp, Homo sapiens
aatccaccctccaga

SEQ ID NO: 1863685 - DNA, 15 bp, Homo sapiens
atccaccctccagac

SEQ ID NO: 1863686 - DNA, 15 bp, Homo sapiens
tccaccctccagacc

SEQ ID NO: 1863687 - DNA, 15 bp, Homo sapiens
ccaccctccagaccc

SEQ ID NO: 1863688 - DNA, 15 bp, Homo sapiens
caccctccagaccct

SEQ ID NO: 1863689 - DNA, 15 bp, Homo sapiens
accctccagaccctg

SEQ ID NO: 1863690 - DNA, 15 bp, Homo sapiens
ccctccagaccctgg

SEQ ID NO: 1863691 - DNA, 15 bp, Homo sapiens
cctccagaccctggt

SEQ ID NO: 1863692 - DNA, 15 bp, Homo sapiens
ctccagaccctggta

SEQ ID NO: 1863693 - DNA, 15 bp, Homo sapiens
tccagaccctggtag

SEQ ID NO: 1863694 - DNA, 15 bp, Homo sapiens
ccagaccctggtagt

SEQ ID NO: 1863695 - DNA, 15 bp, Homo sapiens
cagaccctggtagta

SEQ ID NO: 1863696 - DNA, 15 bp, Homo sapiens
agaccctggtagtac

SEQ ID NO: 1863697 - DNA, 15 bp, Homo sapiens
gaccctggtagtacc

SEQ ID NO: 1863698 - DNA, 15 bp, Homo sapiens
accctggtagtacct

SEQ ID NO: 1863699 - DNA, 15 bp, Homo sapiens
ccctggtagtacctg

SEQ ID NO: 1863700 - DNA, 15 bp, Homo sapiens
cctggtagtacctgg

SEQ ID NO: 1863701 - DNA, 15 bp, Homo sapiens
ctggtagtacctggg

SEQ ID NO: 1863702 - DNA, 15 bp, Homo sapiens
tggtagtacctgggg

SEQ ID NO: 1863703 - DNA, 15 bp, Homo sapiens
ggtagtacctggggc

SEQ ID NO: 1863704 - DNA, 15 bp, Homo sapiens
gtagtacctggggca

SEQ ID NO: 1863705 - DNA, 15 bp, Homo sapiens
tagtacctggggcac

SEQ ID NO: 1863706 - DNA, 15 bp, Homo sapiens
agtacctggggcaca

SEQ ID NO: 1863707 - DNA, 15 bp, Homo sapiens
gtacctggggcacag

SEQ ID NO: 1863708 - DNA, 15 bp, Homo sapiens
tacctggggcacagc

SEQ ID NO: 1863709 - DNA, 15 bp, Homo sapiens
acctggggcacagca

SEQ ID NO: 1863710 - DNA, 15 bp, Homo sapiens
cctggggcacagcac

SEQ ID NO: 1863711 - DNA, 15 bp, Homo sapiens
ctggggcacagcaca

SEQ ID NO: 1863712 - DNA, 15 bp, Homo sapiens
tggggcacagcacag

SEQ ID NO: 1863713 - DNA, 15 bp, Homo sapiens
ggggcacagcacaga

SEQ ID NO: 1863714 - DNA, 15 bp, Homo sapiens
gggcacagcacagag

SEQ ID NO: 1863715 - DNA, 15 bp, Homo sapiens
ggcacagcacagagt

SEQ ID NO: 1863716 - DNA, 15 bp, Homo sapiens
gcacagcacagagtg

SEQ ID NO: 1863717 - DNA, 15 bp, Homo sapiens
cacagcacagagtgg

SEQ ID NO: 1863718 - DNA, 15 bp, Homo sapiens
acagcacagagtgga

SEQ ID NO: 1863719 - DNA, 15 bp, Homo sapiens
cagcacagagtggaa

SEQ ID NO: 1863720 - DNA, 15 bp, Homo sapiens
agcacagagtggaag

SEQ ID NO: 1863721 - DNA, 15 bp, Homo sapiens
gcacagagtggaagt

SEQ ID NO: 1863722 - DNA, 15 bp, Homo sapiens
cacagagtggaagtg

SEQ ID NO: 1863723 - DNA, 15 bp, Homo sapiens
acagagtggaagtga

SEQ ID NO: 1863724 - DNA, 15 bp, Homo sapiens
cagagtggaagtgac

SEQ ID NO: 1863725 - DNA, 15 bp, Homo sapiens
agagtggaagtgacc

SEQ ID NO: 1863726 - DNA, 15 bp, Homo sapiens
gagtggaagtgacca

SEQ ID NO: 1863727 - DNA, 15 bp, Homo sapiens
agtggaagtgaccag

SEQ ID NO: 1863728 - DNA, 15 bp, Homo sapiens
gtggaagtgaccagc

SEQ ID NO: 1863729 - DNA, 15 bp, Homo sapiens
tggaagtgaccagcc

SEQ ID NO: 1863730 - DNA, 15 bp, Homo sapiens
ggaagtgaccagcct

SEQ ID NO: 1863731 - DNA, 15 bp, Homo sapiens
gaagtgaccagccta

SEQ ID NO: 1863732 - DNA, 15 bp, Homo sapiens
aagtgaccagcctag

SEQ ID NO: 1863733 - DNA, 15 bp, Homo sapiens
agtgaccagcctagc

SEQ ID NO: 1863734 - DNA, 15 bp, Homo sapiens
gtgaccagcctagcg

SEQ ID NO: 1863735 - DNA, 15 bp, Homo sapiens
tgaccagcctagcgc

SEQ ID NO: 1863736 - DNA, 15 bp, Homo sapiens
gaccagcctagcgcc

SEQ ID NO: 1863737 - DNA, 15 bp, Homo sapiens
accagcctagcgcca

SEQ ID NO: 1863738 - DNA, 15 bp, Homo sapiens
ccagcctagcgccag

SEQ ID NO: 1863739 - DNA, 15 bp, Homo sapiens
cagcctagcgccagg

SEQ ID NO: 1863740 - DNA, 15 bp, Homo sapiens
agcctagcgccaggc

SEQ ID NO: 1863741 - DNA, 15 bp, Homo sapiens
gcctagcgccaggct

SEQ ID NO: 1863742 - DNA, 15 bp, Homo sapiens
cctagcgccaggctc

SEQ ID NO: 1863743 - DNA, 15 bp, Homo sapiens
ctagcgccaggctcc

SEQ ID NO: 1863744 - DNA, 15 bp, Homo sapiens
tagcgccaggctcct

SEQ ID NO: 1863745 - DNA, 15 bp, Homo sapiens
agcgccaggctcctc

SEQ ID NO: 1863746 - DNA, 15 bp, Homo sapiens
gcgccaggctcctca

SEQ ID NO: 1863747 - DNA, 15 bp, Homo sapiens
cgccaggctcctcag

SEQ ID NO: 1863748 - DNA, 15 bp, Homo sapiens
gccaggctcctcagt

SEQ ID NO: 1863749 - DNA, 15 bp, Homo sapiens
ccaggctcctcagtg

SEQ ID NO: 1863750 - DNA, 15 bp, Homo sapiens
caggctcctcagtgg

SEQ ID NO: 1863751 - DNA, 15 bp, Homo sapiens
aggctcctcagtgga

SEQ ID NO: 1863752 - DNA, 15 bp, Homo sapiens
ggctcctcagtggac

SEQ ID NO: 1863753 - DNA, 15 bp, Homo sapiens
gctcctcagtggacc

SEQ ID NO: 1863754 - DNA, 15 bp, Homo sapiens
ctcctcagtggacca

SEQ ID NO: 1863755 - DNA, 15 bp, Homo sapiens
tcctcagtggaccac

SEQ ID NO: 1863756 - DNA, 15 bp, Homo sapiens
cctcagtggaccacg

SEQ ID NO: 1863757 - DNA, 15 bp, Homo sapiens
ctcagtggaccacgg

SEQ ID NO: 1863758 - DNA, 15 bp, Homo sapiens
tcagtggaccacggc

SEQ ID NO: 1863759 - DNA, 15 bp, Homo sapiens
cagtggaccacggcc

SEQ ID NO: 1863760 - DNA, 15 bp, Homo sapiens
agtggaccacggcca

SEQ ID NO: 1863761 - DNA, 15 bp, Homo sapiens
gtggaccacggccaa

SEQ ID NO: 1863762 - DNA, 15 bp, Homo sapiens
tggaccacggccaag

SEQ ID NO: 1863763 - DNA, 15 bp, Homo sapiens
ggaccacggccaagg

SEQ ID NO: 1863764 - DNA, 15 bp, Homo sapiens
gaccacggccaaggg

SEQ ID NO: 1863765 - DNA, 15 bp, Homo sapiens
accacggccaagggg

SEQ ID NO: 1863766 - DNA, 15 bp, Homo sapiens
ccacggccaaggggt

SEQ ID NO: 1863767 - DNA, 15 bp, Homo sapiens
cacggccaaggggtg

SEQ ID NO: 1863768 - DNA, 15 bp, Homo sapiens
acggccaaggggtgg

SEQ ID NO: 1863769 - DNA, 15 bp, Homo sapiens
cggccaaggggtggg

SEQ ID NO: 1863770 - DNA, 15 bp, Homo sapiens
ggccaaggggtgggg

SEQ ID NO: 1863771 - DNA, 15 bp, Homo sapiens
gccaaggggtgggga

SEQ ID NO: 1863772 - DNA, 15 bp, Homo sapiens
ccaaggggtggggaa

SEQ ID NO: 1863773 - DNA, 15 bp, Homo sapiens
caaggggtggggaaa

SEQ ID NO: 1863774 - DNA, 15 bp, Homo sapiens
aaggggtggggaaac

SEQ ID NO: 1863775 - DNA, 15 bp, Homo sapiens
aggggtggggaaaca

SEQ ID NO: 1863776 - DNA, 15 bp, Homo sapiens
ggggtggggaaacat

SEQ ID NO: 1863777 - DNA, 15 bp, Homo sapiens
gggtggggaaacatc

SEQ ID NO: 1863778 - DNA, 15 bp, Homo sapiens
ggtggggaaacatct

SEQ ID NO: 1863779 - DNA, 15 bp, Homo sapiens
gtggggaaacatctg

SEQ ID NO: 1863780 - DNA, 15 bp, Homo sapiens
tggggaaacatctgg

SEQ ID NO: 1863781 - DNA, 15 bp, Homo sapiens
ggggaaacatctgga

SEQ ID NO: 1863782 - DNA, 15 bp, Homo sapiens
gggaaacatctggaa

SEQ ID NO: 1863783 - DNA, 15 bp, Homo sapiens
ggaaacatctggaaa

SEQ ID NO: 1863784 - DNA, 15 bp, Homo sapiens
gaaacatctggaaag

SEQ ID NO: 1863785 - DNA, 15 bp, Homo sapiens
aaacatctggaaaga

SEQ ID NO: 1863786 - DNA, 15 bp, Homo sapiens
aacatctggaaagac

SEQ ID NO: 1863787 - DNA, 15 bp, Homo sapiens
acatctggaaagaca

SEQ ID NO: 1863788 - DNA, 15 bp, Homo sapiens
catctggaaagacag

SEQ ID NO: 1863789 - DNA, 15 bp, Homo sapiens
atctggaaagacagt

SEQ ID NO: 1863790 - DNA, 15 bp, Homo sapiens
tctggaaagacagta

SEQ ID NO: 1863791 - DNA, 15 bp, Homo sapiens
ctggaaagacagtat

SEQ ID NO: 1863792 - DNA, 15 bp, Homo sapiens
tggaaagacagtatc

SEQ ID NO: 1863793 - DNA, 15 bp, Homo sapiens
ggaaagacagtatct

SEQ ID NO: 1863794 - DNA, 15 bp, Homo sapiens
gaaagacagtatcta

SEQ ID NO: 1863795 - DNA, 15 bp, Homo sapiens
aaagacagtatctaa

SEQ ID NO: 1863796 - DNA, 15 bp, Homo sapiens
aagacagtatctaat

SEQ ID NO: 1863797 - DNA, 15 bp, Homo sapiens
agacagtatctaatg

SEQ ID NO: 1863798 - DNA, 15 bp, Homo sapiens
gacagtatctaatgt

SEQ ID NO: 1863799 - DNA, 15 bp, Homo sapiens
acagtatctaatgtc

SEQ ID NO: 1863800 - DNA, 15 bp, Homo sapiens
cagtatctaatgtct

SEQ ID NO: 1863801 - DNA, 15 bp, Homo sapiens
agtatctaatgtctt

SEQ ID NO: 1863802 - DNA, 15 bp, Homo sapiens
gtatctaatgtcttg

SEQ ID NO: 1863803 - DNA, 15 bp, Homo sapiens
tatctaatgtcttga

SEQ ID NO: 1863804 - DNA, 15 bp, Homo sapiens
atctaatgtcttgac

SEQ ID NO: 1863805 - DNA, 15 bp, Homo sapiens
tctaatgtcttgaca

SEQ ID NO: 1863806 - DNA, 15 bp, Homo sapiens
ctaatgtcttgacag

SEQ ID NO: 1863807 - DNA, 15 bp, Homo sapiens
taatgtcttgacagc

SEQ ID NO: 1863808 - DNA, 15 bp, Homo sapiens
aatgtcttgacagcc

SEQ ID NO: 1863809 - DNA, 15 bp, Homo sapiens
atgtcttgacagcca

SEQ ID NO: 1863810 - DNA, 15 bp, Homo sapiens
tgtcttgacagccag

SEQ ID NO: 1863811 - DNA, 15 bp, Homo sapiens
gtcttgacagccaga

SEQ ID NO: 1863812 - DNA, 15 bp, Homo sapiens
tcttgacagccagag

SEQ ID NO: 1863813 - DNA, 15 bp, Homo sapiens
cttgacagccagagg

SEQ ID NO: 1863814 - DNA, 15 bp, Homo sapiens
ttgacagccagagga

SEQ ID NO: 1863815 - DNA, 15 bp, Homo sapiens
tgacagccagaggag

SEQ ID NO: 1863816 - DNA, 15 bp, Homo sapiens
gacagccagaggaga

SEQ ID NO: 1863817 - DNA, 15 bp, Homo sapiens
acagccagaggagaa

SEQ ID NO: 1863818 - DNA, 15 bp, Homo sapiens
cagccagaggagaag

SEQ ID NO: 1863819 - DNA, 15 bp, Homo sapiens
agccagaggagaagt

SEQ ID NO: 1863820 - DNA, 15 bp, Homo sapiens
gccagaggagaagtg

SEQ ID NO: 1863821 - DNA, 15 bp, Homo sapiens
ccagaggagaagtgg

SEQ ID NO: 1863822 - DNA, 15 bp, Homo sapiens
cagaggagaagtggg

SEQ ID NO: 1863823 - DNA, 15 bp, Homo sapiens
agaggagaagtggga

SEQ ID NO: 1863824 - DNA, 15 bp, Homo sapiens
gaggagaagtgggat

SEQ ID NO: 1863825 - DNA, 15 bp, Homo sapiens
aggagaagtgggatg

SEQ ID NO: 1863826 - DNA, 15 bp, Homo sapiens
ggagaagtgggatgt

SEQ ID NO: 1863827 - DNA, 15 bp, Homo sapiens
gagaagtgggatgtt

SEQ ID NO: 1863828 - DNA, 15 bp, Homo sapiens
agaagtgggatgttt

SEQ ID NO: 1863829 - DNA, 15 bp, Homo sapiens
gaagtgggatgtttt

SEQ ID NO: 1863830 - DNA, 15 bp, Homo sapiens
aagtgggatgttttc

SEQ ID NO: 1863831 - DNA, 15 bp, Homo sapiens
agtgggatgttttca

SEQ ID NO: 1863832 - DNA, 15 bp, Homo sapiens
gtgggatgttttcaa

SEQ ID NO: 1863833 - DNA, 15 bp, Homo sapiens
tgggatgttttcaaa

SEQ ID NO: 1863834 - DNA, 15 bp, Homo sapiens
gggatgttttcaaag

SEQ ID NO: 1863835 - DNA, 15 bp, Homo sapiens
ggatgttttcaaagc

SEQ ID NO: 1863836 - DNA, 15 bp, Homo sapiens
gatgttttcaaagcc

SEQ ID NO: 1863837 - DNA, 15 bp, Homo sapiens
atgttttcaaagccc

SEQ ID NO: 1863838 - DNA, 15 bp, Homo sapiens
tgttttcaaagccca

SEQ ID NO: 1863839 - DNA, 15 bp, Homo sapiens
gttttcaaagcccag

SEQ ID NO: 1863840 - DNA, 15 bp, Homo sapiens
ttttcaaagcccagg

SEQ ID NO: 1863841 - DNA, 15 bp, Homo sapiens
tttcaaagcccagga

SEQ ID NO: 1863842 - DNA, 15 bp, Homo sapiens
ttcaaagcccaggag

SEQ ID NO: 1863843 - DNA, 15 bp, Homo sapiens
tcaaagcccaggagt

SEQ ID NO: 1863844 - DNA, 15 bp, Homo sapiens
caaagcccaggagtg

SEQ ID NO: 1863845 - DNA, 15 bp, Homo sapiens
aaagcccaggagtga

SEQ ID NO: 1863846 - DNA, 15 bp, Homo sapiens
aagcccaggagtgac

SEQ ID NO: 1863847 - DNA, 15 bp, Homo sapiens
agcccaggagtgact

SEQ ID NO: 1863848 - DNA, 15 bp, Homo sapiens
gcccaggagtgactt

SEQ ID NO: 1863849 - DNA, 15 bp, Homo sapiens
cccaggagtgacttt

SEQ ID NO: 1863850 - DNA, 15 bp, Homo sapiens
ccaggagtgactttc

SEQ ID NO: 1863851 - DNA, 15 bp, Homo sapiens
caggagtgactttcc

SEQ ID NO: 1863852 - DNA, 15 bp, Homo sapiens
aggagtgactttccc

SEQ ID NO: 1863853 - DNA, 15 bp, Homo sapiens
ggagtgactttccct

SEQ ID NO: 1863854 - DNA, 15 bp, Homo sapiens
gagtgactttccctt

SEQ ID NO: 1863855 - DNA, 15 bp, Homo sapiens
agtgactttcccttt

SEQ ID NO: 1863856 - DNA, 15 bp, Homo sapiens
gtgactttccctttg

SEQ ID NO: 1863857 - DNA, 15 bp, Homo sapiens
tgactttccctttgt

SEQ ID NO: 1863858 - DNA, 15 bp, Homo sapiens
gactttccctttgta

SEQ ID NO: 1863859 - DNA, 15 bp, Homo sapiens
actttccctttgtaa

SEQ ID NO: 1863860 - DNA, 15 bp, Homo sapiens
ctttccctttgtaac

SEQ ID NO: 1863861 - DNA, 15 bp, Homo sapiens
tttccctttgtaact

SEQ ID NO: 1863862 - DNA, 15 bp, Homo sapiens
ttccctttgtaactc

SEQ ID NO: 1863863 - DNA, 15 bp, Homo sapiens
tccctttgtaactcc

SEQ ID NO: 1863864 - DNA, 15 bp, Homo sapiens
ccctttgtaactcca

SEQ ID NO: 1863865 - DNA, 15 bp, Homo sapiens
cctttgtaactccag

SEQ ID NO: 1863866 - DNA, 15 bp, Homo sapiens
ctttgtaactccaga

SEQ ID NO: 1863867 - DNA, 15 bp, Homo sapiens
tttgtaactccagag

SEQ ID NO: 1863868 - DNA, 15 bp, Homo sapiens
ttgtaactccagagg

SEQ ID NO: 1863869 - DNA, 15 bp, Homo sapiens
tgtaactccagagga

SEQ ID NO: 1863870 - DNA, 15 bp, Homo sapiens
gtaactccagaggac

SEQ ID NO: 1863871 - DNA, 15 bp, Homo sapiens
taactccagaggact

SEQ ID NO: 1863872 - DNA, 15 bp, Homo sapiens
aactccagaggactt

SEQ ID NO: 1863873 - DNA, 15 bp, Homo sapiens
actccagaggacttg

SEQ ID NO: 1863874 - DNA, 15 bp, Homo sapiens
ctccagaggacttga

SEQ ID NO: 1863875 - DNA, 15 bp, Homo sapiens
tccagaggacttgat

SEQ ID NO: 1863876 - DNA, 15 bp, Homo sapiens
ccagaggacttgatt

SEQ ID NO: 1863877 - DNA, 15 bp, Homo sapiens
cagaggacttgattc

SEQ ID NO: 1863878 - DNA, 15 bp, Homo sapiens
agaggacttgattcg

SEQ ID NO: 1863879 - DNA, 15 bp, Homo sapiens
gaggacttgattcgc

SEQ ID NO: 1863880 - DNA, 15 bp, Homo sapiens
aggacttgattcgca

SEQ ID NO: 1863881 - DNA, 15 bp, Homo sapiens
ggacttgattcgcaa

SEQ ID NO: 1863882 - DNA, 15 bp, Homo sapiens
gacttgattcgcaac

SEQ ID NO: 1863883 - DNA, 15 bp, Homo sapiens
acttgattcgcaacg

SEQ ID NO: 1863884 - DNA, 15 bp, Homo sapiens
cttgattcgcaacga

SEQ ID NO: 1863885 - DNA, 15 bp, Homo sapiens
ttgattcgcaacgaa

SEQ ID NO: 1863886 - DNA, 15 bp, Homo sapiens
tgattcgcaacgaag

SEQ ID NO: 1863887 - DNA, 15 bp, Homo sapiens
gattcgcaacgaaga

SEQ ID NO: 1863888 - DNA, 15 bp, Homo sapiens
attcgcaacgaagac

SEQ ID NO: 1863889 - DNA, 15 bp, Homo sapiens
ttcgcaacgaagacc

SEQ ID NO: 1863890 - DNA, 15 bp, Homo sapiens
tcgcaacgaagacca

SEQ ID NO: 1863891 - DNA, 15 bp, Homo sapiens
cgcaacgaagaccat

SEQ ID NO: 1863892 - DNA, 15 bp, Homo sapiens
gcaacgaagaccatc

SEQ ID NO: 1863893 - DNA, 15 bp, Homo sapiens
caacgaagaccatct

SEQ ID NO: 1863894 - DNA, 15 bp, Homo sapiens
aacgaagaccatctg

SEQ ID NO: 1863895 - DNA, 15 bp, Homo sapiens
acgaagaccatctgg

SEQ ID NO: 1863896 - DNA, 15 bp, Homo sapiens
cgaagaccatctggg

SEQ ID NO: 1863897 - DNA, 15 bp, Homo sapiens
gaagaccatctgggg

SEQ ID NO: 1863898 - DNA, 15 bp, Homo sapiens
aagaccatctggggg

SEQ ID NO: 1863899 - DNA, 15 bp, Homo sapiens
agaccatctggggga

SEQ ID NO: 1863900 - DNA, 15 bp, Homo sapiens
gaccatctgggggat

SEQ ID NO: 1863901 - DNA, 15 bp, Homo sapiens
accatctgggggatg

SEQ ID NO: 1863902 - DNA, 15 bp, Homo sapiens
ccatctgggggatga

SEQ ID NO: 1863903 - DNA, 15 bp, Homo sapiens
catctgggggatgaa

SEQ ID NO: 1863904 - DNA, 15 bp, Homo sapiens
atctgggggatgaag

SEQ ID NO: 1863905 - DNA, 15 bp, Homo sapiens
tctgggggatgaagg

SEQ ID NO: 1863906 - DNA, 15 bp, Homo sapiens
ctgggggatgaagga

SEQ ID NO: 1863907 - DNA, 15 bp, Homo sapiens
tgggggatgaaggaa

SEQ ID NO: 1863908 - DNA, 15 bp, Homo sapiens
gggggatgaaggaaa

SEQ ID NO: 1863909 - DNA, 15 bp, Homo sapiens
ggggatgaaggaaat

SEQ ID NO: 1863910 - DNA, 15 bp, Homo sapiens
gggatgaaggaaatt

SEQ ID NO: 1863911 - DNA, 15 bp, Homo sapiens
ggatgaaggaaattc

SEQ ID NO: 1863912 - DNA, 15 bp, Homo sapiens
gatgaaggaaattct

SEQ ID NO: 1863913 - DNA, 15 bp, Homo sapiens
atgaaggaaattctt

SEQ ID NO: 1863914 - DNA, 15 bp, Homo sapiens
tgaaggaaattcttg

SEQ ID NO: 1863915 - DNA, 15 bp, Homo sapiens
gaaggaaattcttgc

SEQ ID NO: 1863916 - DNA, 15 bp, Homo sapiens
aaggaaattcttgct

SEQ ID NO: 1863917 - DNA, 15 bp, Homo sapiens
aggaaattcttgctt

SEQ ID NO: 1863918 - DNA, 15 bp, Homo sapiens
ggaaattcttgcttt

SEQ ID NO: 1863919 - DNA, 15 bp, Homo sapiens
gaaattcttgctttt

SEQ ID NO: 1863920 - DNA, 15 bp, Homo sapiens
aaattcttgcttttt

SEQ ID NO: 1863921 - DNA, 15 bp, Homo sapiens
aattcttgcttttta

SEQ ID NO: 1863922 - DNA, 15 bp, Homo sapiens
attcttgctttttaa

SEQ ID NO: 1863923 - DNA, 15 bp, Homo sapiens
ttcttgctttttaat

SEQ ID NO: 1863924 - DNA, 15 bp, Homo sapiens
tcttgctttttaatt

SEQ ID NO: 1863925 - DNA, 15 bp, Homo sapiens
cttgctttttaattt

SEQ ID NO: 1863926 - DNA, 15 bp, Homo sapiens
ttgctttttaatttt

SEQ ID NO: 1863927 - DNA, 15 bp, Homo sapiens
tgctttttaatttta

SEQ ID NO: 1863928 - DNA, 15 bp, Homo sapiens
gctttttaattttaa

SEQ ID NO: 1863929 - DNA, 15 bp, Homo sapiens
ctttttaattttaaa

SEQ ID NO: 1863930 - DNA, 15 bp, Homo sapiens
tttttaattttaaat

SEQ ID NO: 1863931 - DNA, 15 bp, Homo sapiens
ttttaattttaaatc

SEQ ID NO: 1863932 - DNA, 15 bp, Homo sapiens
tttaattttaaatct

SEQ ID NO: 1863933 - DNA, 15 bp, Homo sapiens
ttaattttaaatctg

SEQ ID NO: 1863934 - DNA, 15 bp, Homo sapiens
taattttaaatctga

SEQ ID NO: 1863935 - DNA, 15 bp, Homo sapiens
aattttaaatctgag

SEQ ID NO: 1863936 - DNA, 15 bp, Homo sapiens
attttaaatctgagg

SEQ ID NO: 1863937 - DNA, 15 bp, Homo sapiens
ttttaaatctgaggg

SEQ ID NO: 1863938 - DNA, 15 bp, Homo sapiens
tttaaatctgagggt

SEQ ID NO: 1863939 - DNA, 15 bp, Homo sapiens
ttaaatctgagggtt

SEQ ID NO: 1863940 - DNA, 15 bp, Homo sapiens
taaatctgagggtta

SEQ ID NO: 1863941 - DNA, 15 bp, Homo sapiens
aaatctgagggttaa

SEQ ID NO: 1863942 - DNA, 15 bp, Homo sapiens
aatctgagggttaag

SEQ ID NO: 1863943 - DNA, 15 bp, Homo sapiens
atctgagggttaagc

SEQ ID NO: 1863944 - DNA, 15 bp, Homo sapiens
tctgagggttaagcc

SEQ ID NO: 1863945 - DNA, 15 bp, Homo sapiens
ctgagggttaagccc

SEQ ID NO: 1863946 - DNA, 15 bp, Homo sapiens
tgagggttaagcccg

SEQ ID NO: 1863947 - DNA, 15 bp, Homo sapiens
gagggttaagcccgt

SEQ ID NO: 1863948 - DNA, 15 bp, Homo sapiens
agggttaagcccgtt

SEQ ID NO: 1863949 - DNA, 15 bp, Homo sapiens
gggttaagcccgttt

SEQ ID NO: 1863950 - DNA, 15 bp, Homo sapiens
ggttaagcccgtttc

SEQ ID NO: 1863951 - DNA, 15 bp, Homo sapiens
gttaagcccgtttct

SEQ ID NO: 1863952 - DNA, 15 bp, Homo sapiens
ttaagcccgtttctg

SEQ ID NO: 1863953 - DNA, 15 bp, Homo sapiens
taagcccgtttctga

SEQ ID NO: 1863954 - DNA, 15 bp, Homo sapiens
aagcccgtttctgag

SEQ ID NO: 1863955 - DNA, 15 bp, Homo sapiens
agcccgtttctgagg

SEQ ID NO: 1863956 - DNA, 15 bp, Homo sapiens
gcccgtttctgaggt

SEQ ID NO: 1863957 - DNA, 15 bp, Homo sapiens
cccgtttctgaggtg

SEQ ID NO: 1863958 - DNA, 15 bp, Homo sapiens
ccgtttctgaggtgt

SEQ ID NO: 1863959 - DNA, 15 bp, Homo sapiens
cgtttctgaggtgtc

SEQ ID NO: 1863960 - DNA, 15 bp, Homo sapiens
gtttctgaggtgtca

SEQ ID NO: 1863961 - DNA, 15 bp, Homo sapiens
tttctgaggtgtcag

SEQ ID NO: 1863962 - DNA, 15 bp, Homo sapiens
ttctgaggtgtcagc

SEQ ID NO: 1863963 - DNA, 15 bp, Homo sapiens
tctgaggtgtcagcc

SEQ ID NO: 1863964 - DNA, 15 bp, Homo sapiens
ctgaggtgtcagccc

SEQ ID NO: 1863965 - DNA, 15 bp, Homo sapiens
tgaggtgtcagccct

SEQ ID NO: 1863966 - DNA, 15 bp, Homo sapiens
gaggtgtcagccctg

SEQ ID NO: 1863967 - DNA, 15 bp, Homo sapiens
aggtgtcagccctgt

SEQ ID NO: 1863968 - DNA, 15 bp, Homo sapiens
ggtgtcagccctgtg

SEQ ID NO: 1863969 - DNA, 15 bp, Homo sapiens
gtgtcagccctgtgt

SEQ ID NO: 1863970 - DNA, 15 bp, Homo sapiens
tgtcagccctgtgtg

SEQ ID NO: 1863971 - DNA, 15 bp, Homo sapiens
gtcagccctgtgtgt

SEQ ID NO: 1863972 - DNA, 15 bp, Homo sapiens
tcagccctgtgtgtg

SEQ ID NO: 1863973 - DNA, 15 bp, Homo sapiens
cagccctgtgtgtga

SEQ ID NO: 1863974 - DNA, 15 bp, Homo sapiens
agccctgtgtgtgag

SEQ ID NO: 1863975 - DNA, 15 bp, Homo sapiens
gccctgtgtgtgagg

SEQ ID NO: 1863976 - DNA, 15 bp, Homo sapiens
ccctgtgtgtgaggc

SEQ ID NO: 1863977 - DNA, 15 bp, Homo sapiens
cctgtgtgtgaggcc

SEQ ID NO: 1863978 - DNA, 15 bp, Homo sapiens
ctgtgtgtgaggccc

SEQ ID NO: 1863979 - DNA, 15 bp, Homo sapiens
tgtgtgtgaggccct

SEQ ID NO: 1863980 - DNA, 15 bp, Homo sapiens
gtgtgtgaggccctg

SEQ ID NO: 1863981 - DNA, 15 bp, Homo sapiens
tgtgtgaggccctgg

SEQ ID NO: 1863982 - DNA, 15 bp, Homo sapiens
gtgtgaggccctggc

SEQ ID NO: 1863983 - DNA, 15 bp, Homo sapiens
tgtgaggccctggcc

SEQ ID NO: 1863984 - DNA, 15 bp, Homo sapiens
gtgaggccctggcct

SEQ ID NO: 1863985 - DNA, 15 bp, Homo sapiens
gaggccctggcctgt

SEQ ID NO: 1863986 - DNA, 15 bp, Homo sapiens
aggccctggcctgtc

SEQ ID NO: 1863987 - DNA, 15 bp, Homo sapiens
ggccctggcctgtct

SEQ ID NO: 1863988 - DNA, 15 bp, Homo sapiens
gccctggcctgtctg

SEQ ID NO: 1863989 - DNA, 15 bp, Homo sapiens
ccctggcctgtctgg

SEQ ID NO: 1863990 - DNA, 15 bp, Homo sapiens
cctggcctgtctggg

SEQ ID NO: 1863991 - DNA, 15 bp, Homo sapiens
ctggcctgtctgggg

SEQ ID NO: 1863992 - DNA, 15 bp, Homo sapiens
tggcctgtctggggt

SEQ ID NO: 1863993 - DNA, 15 bp, Homo sapiens
ggcctgtctggggtt

SEQ ID NO: 1863994 - DNA, 15 bp, Homo sapiens
gcctgtctggggttg

SEQ ID NO: 1863995 - DNA, 15 bp, Homo sapiens
cctgtctggggttgg

SEQ ID NO: 1863996 - DNA, 15 bp, Homo sapiens
ctgtctggggttggg

SEQ ID NO: 1863997 - DNA, 15 bp, Homo sapiens
tgtctggggttgggt

SEQ ID NO: 1863998 - DNA, 15 bp, Homo sapiens
gtctggggttgggtt

SEQ ID NO: 1863999 - DNA, 15 bp, Homo sapiens
tctggggttgggttt

SEQ ID NO: 1864000 - DNA, 15 bp, Homo sapiens
ctggggttgggtttg

SEQ ID NO: 1864001 - DNA, 15 bp, Homo sapiens
tggggttgggtttgg

SEQ ID NO: 1864002 - DNA, 15 bp, Homo sapiens
ggggttgggtttgga

SEQ ID NO: 1864003 - DNA, 15 bp, Homo sapiens
gggttgggtttggat

SEQ ID NO: 1864004 - DNA, 15 bp, Homo sapiens
ggttgggtttggatg

SEQ ID NO: 1864005 - DNA, 15 bp, Homo sapiens
gttgggtttggatga

SEQ ID NO: 1864006 - DNA, 15 bp, Homo sapiens
ttgggtttggatgaa

SEQ ID NO: 1864007 - DNA, 15 bp, Homo sapiens
tgggtttggatgaaa

SEQ ID NO: 1864008 - DNA, 15 bp, Homo sapiens
gggtttggatgaaat

SEQ ID NO: 1864009 - DNA, 15 bp, Homo sapiens
ggtttggatgaaata

SEQ ID NO: 1864010 - DNA, 15 bp, Homo sapiens
gtttggatgaaataa

SEQ ID NO: 1864011 - DNA, 15 bp, Homo sapiens
tttggatgaaataat

SEQ ID NO: 1864012 - DNA, 15 bp, Homo sapiens
ttggatgaaataatc

SEQ ID NO: 1864013 - DNA, 15 bp, Homo sapiens
tggatgaaataatct

SEQ ID NO: 1864014 - DNA, 15 bp, Homo sapiens
ggatgaaataatcta

SEQ ID NO: 1864015 - DNA, 15 bp, Homo sapiens
gatgaaataatctaa

SEQ ID NO: 1864016 - DNA, 15 bp, Homo sapiens
atgaaataatctaag

SEQ ID NO: 1864017 - DNA, 15 bp, Homo sapiens
tgaaataatctaaga

SEQ ID NO: 1864018 - DNA, 15 bp, Homo sapiens
gaaataatctaagat

SEQ ID NO: 1864019 - DNA, 15 bp, Homo sapiens
aaataatctaagatg

SEQ ID NO: 1864020 - DNA, 15 bp, Homo sapiens
aataatctaagatgc

SEQ ID NO: 1864021 - DNA, 15 bp, Homo sapiens
ataatctaagatgca

SEQ ID NO: 1864022 - DNA, 15 bp, Homo sapiens
taatctaagatgcag

SEQ ID NO: 1864023 - DNA, 15 bp, Homo sapiens
aatctaagatgcagt

SEQ ID NO: 1864024 - DNA, 15 bp, Homo sapiens
atctaagatgcagtt

SEQ ID NO: 1864025 - DNA, 15 bp, Homo sapiens
tctaagatgcagtta

SEQ ID NO: 1864026 - DNA, 15 bp, Homo sapiens
ctaagatgcagttac

SEQ ID NO: 1864027 - DNA, 15 bp, Homo sapiens
taagatgcagttacc

SEQ ID NO: 1864028 - DNA, 15 bp, Homo sapiens
aagatgcagttacca

SEQ ID NO: 1864029 - DNA, 15 bp, Homo sapiens
agatgcagttaccag

SEQ ID NO: 1864030 - DNA, 15 bp, Homo sapiens
gatgcagttaccagg

SEQ ID NO: 1864031 - DNA, 15 bp, Homo sapiens
atgcagttaccaggg

SEQ ID NO: 1864032 - DNA, 15 bp, Homo sapiens
tgcagttaccagggt

SEQ ID NO: 1864033 - DNA, 15 bp, Homo sapiens
gcagttaccagggtg

SEQ ID NO: 1864034 - DNA, 15 bp, Homo sapiens
cagttaccagggtgt

SEQ ID NO: 1864035 - DNA, 15 bp, Homo sapiens
agttaccagggtgtt

SEQ ID NO: 1864036 - DNA, 15 bp, Homo sapiens
gttaccagggtgttt

SEQ ID NO: 1864037 - DNA, 15 bp, Homo sapiens
ttaccagggtgtttc

SEQ ID NO: 1864038 - DNA, 15 bp, Homo sapiens
taccagggtgtttcc

SEQ ID NO: 1864039 - DNA, 15 bp, Homo sapiens
accagggtgtttcct

SEQ ID NO: 1864040 - DNA, 15 bp, Homo sapiens
ccagggtgtttcctt

SEQ ID NO: 1864041 - DNA, 15 bp, Homo sapiens
cagggtgtttccttt

SEQ ID NO: 1864042 - DNA, 15 bp, Homo sapiens
agggtgtttcctttt

SEQ ID NO: 1864043 - DNA, 15 bp, Homo sapiens
gggtgtttccttttc

SEQ ID NO: 1864044 - DNA, 15 bp, Homo sapiens
ggtgtttccttttca

SEQ ID NO: 1864045 - DNA, 15 bp, Homo sapiens
gtgtttccttttcac

SEQ ID NO: 1864046 - DNA, 15 bp, Homo sapiens
tgtttccttttcaca

SEQ ID NO: 1864047 - DNA, 15 bp, Homo sapiens
gtttccttttcacat

SEQ ID NO: 1864048 - DNA, 15 bp, Homo sapiens
tttccttttcacatt

SEQ ID NO: 1864049 - DNA, 15 bp, Homo sapiens
ttccttttcacattc

SEQ ID NO: 1864050 - DNA, 15 bp, Homo sapiens
tccttttcacattca

SEQ ID NO: 1864051 - DNA, 15 bp, Homo sapiens
ccttttcacattcat

SEQ ID NO: 1864052 - DNA, 15 bp, Homo sapiens
cttttcacattcatc

SEQ ID NO: 1864053 - DNA, 15 bp, Homo sapiens
ttttcacattcatcc

SEQ ID NO: 1864054 - DNA, 15 bp, Homo sapiens
tttcacattcatcct

SEQ ID NO: 1864055 - DNA, 15 bp, Homo sapiens
ttcacattcatcctt

SEQ ID NO: 1864056 - DNA, 15 bp, Homo sapiens
tcacattcatccttc

SEQ ID NO: 1864057 - DNA, 15 bp, Homo sapiens
cacattcatccttct

SEQ ID NO: 1864058 - DNA, 15 bp, Homo sapiens
acattcatccttctc

SEQ ID NO: 1864059 - DNA, 15 bp, Homo sapiens
cattcatccttctct

SEQ ID NO: 1864060 - DNA, 15 bp, Homo sapiens
attcatccttctctg

SEQ ID NO: 1864061 - DNA, 15 bp, Homo sapiens
ttcatccttctctgt

SEQ ID NO: 1864062 - DNA, 15 bp, Homo sapiens
tcatccttctctgtc

SEQ ID NO: 1864063 - DNA, 15 bp, Homo sapiens
catccttctctgtct

SEQ ID NO: 1864064 - DNA, 15 bp, Homo sapiens
atccttctctgtctg

SEQ ID NO: 1864065 - DNA, 15 bp, Homo sapiens
tccttctctgtctgt

SEQ ID NO: 1864066 - DNA, 15 bp, Homo sapiens
ccttctctgtctgtt

SEQ ID NO: 1864067 - DNA, 15 bp, Homo sapiens
cttctctgtctgttc

SEQ ID NO: 1864068 - DNA, 15 bp, Homo sapiens
ttctctgtctgttcc

SEQ ID NO: 1864069 - DNA, 15 bp, Homo sapiens
tctctgtctgttccc

SEQ ID NO: 1864070 - DNA, 15 bp, Homo sapiens
ctctgtctgttcccc

SEQ ID NO: 1864071 - DNA, 15 bp, Homo sapiens
tctgtctgttccccc

SEQ ID NO: 1864072 - DNA, 15 bp, Homo sapiens
ctgtctgttcccccg

SEQ ID NO: 1864073 - DNA, 15 bp, Homo sapiens
tgtctgttcccccgg

SEQ ID NO: 1864074 - DNA, 15 bp, Homo sapiens
gtctgttcccccggg

SEQ ID NO: 1864075 - DNA, 15 bp, Homo sapiens
tctgttcccccgggg

SEQ ID NO: 1864076 - DNA, 15 bp, Homo sapiens
ctgttcccccggggc

SEQ ID NO: 1864077 - DNA, 15 bp, Homo sapiens
tgttcccccggggcc

SEQ ID NO: 1864078 - DNA, 15 bp, Homo sapiens
gttcccccggggcca

SEQ ID NO: 1864079 - DNA, 15 bp, Homo sapiens
ttcccccggggccaa

SEQ ID NO: 1864080 - DNA, 15 bp, Homo sapiens
tcccccggggccaac

SEQ ID NO: 1864081 - DNA, 15 bp, Homo sapiens
cccccggggccaacc

SEQ ID NO: 1864082 - DNA, 15 bp, Homo sapiens
ccccggggccaaccg

SEQ ID NO: 1864083 - DNA, 15 bp, Homo sapiens
cccggggccaaccga

SEQ ID NO: 1864084 - DNA, 15 bp, Homo sapiens
ccggggccaaccgat

SEQ ID NO: 1864085 - DNA, 15 bp, Homo sapiens
cggggccaaccgatg

SEQ ID NO: 1864086 - DNA, 15 bp, Homo sapiens
ggggccaaccgatgg

SEQ ID NO: 1864087 - DNA, 15 bp, Homo sapiens
gggccaaccgatggc

SEQ ID NO: 1864088 - DNA, 15 bp, Homo sapiens
ggccaaccgatggct

SEQ ID NO: 1864089 - DNA, 15 bp, Homo sapiens
gccaaccgatggctt

SEQ ID NO: 1864090 - DNA, 15 bp, Homo sapiens
ccaaccgatggcttc

SEQ ID NO: 1864091 - DNA, 15 bp, Homo sapiens
caaccgatggcttcc

SEQ ID NO: 1864092 - DNA, 15 bp, Homo sapiens
aaccgatggcttcca

SEQ ID NO: 1864093 - DNA, 15 bp, Homo sapiens
accgatggcttccaa

SEQ ID NO: 1864094 - DNA, 15 bp, Homo sapiens
ccgatggcttccaag

SEQ ID NO: 1864095 - DNA, 15 bp, Homo sapiens
cgatggcttccaagc

SEQ ID NO: 1864096 - DNA, 15 bp, Homo sapiens
gatggcttccaagct

SEQ ID NO: 1864097 - DNA, 15 bp, Homo sapiens
atggcttccaagctc

SEQ ID NO: 1864098 - DNA, 15 bp, Homo sapiens
tggcttccaagctct

SEQ ID NO: 1864099 - DNA, 15 bp, Homo sapiens
ggcttccaagctctg

SEQ ID NO: 1864100 - DNA, 15 bp, Homo sapiens
gcttccaagctctgt

SEQ ID NO: 1864101 - DNA, 15 bp, Homo sapiens
cttccaagctctgtg

SEQ ID NO: 1864102 - DNA, 15 bp, Homo sapiens
ttccaagctctgtgg

SEQ ID NO: 1864103 - DNA, 15 bp, Homo sapiens
tccaagctctgtgga

SEQ ID NO: 1864104 - DNA, 15 bp, Homo sapiens
ccaagctctgtggag

SEQ ID NO: 1864105 - DNA, 15 bp, Homo sapiens
caagctctgtggagt

SEQ ID NO: 1864106 - DNA, 15 bp, Homo sapiens
aagctctgtggagtt

SEQ ID NO: 1864107 - DNA, 15 bp, Homo sapiens
agctctgtggagttc

SEQ ID NO: 1864108 - DNA, 15 bp, Homo sapiens
gctctgtggagttca

SEQ ID NO: 1864109 - DNA, 15 bp, Homo sapiens
ctctgtggagttcac

SEQ ID NO: 1864110 - DNA, 15 bp, Homo sapiens
tctgtggagttcact

SEQ ID NO: 1864111 - DNA, 15 bp, Homo sapiens
ctgtggagttcacta

SEQ ID NO: 1864112 - DNA, 15 bp, Homo sapiens
tgtggagttcactaa

SEQ ID NO: 1864113 - DNA, 15 bp, Homo sapiens
gtggagttcactaat

SEQ ID NO: 1864114 - DNA, 15 bp, Homo sapiens
tggagttcactaatt

SEQ ID NO: 1864115 - DNA, 15 bp, Homo sapiens
ggagttcactaattg

SEQ ID NO: 1864116 - DNA, 15 bp, Homo sapiens
gagttcactaattga

SEQ ID NO: 1864117 - DNA, 15 bp, Homo sapiens
agttcactaattgaa

SEQ ID NO: 1864118 - DNA, 15 bp, Homo sapiens
gttcactaattgaat

SEQ ID NO: 1864119 - DNA, 15 bp, Homo sapiens
ttcactaattgaatt

SEQ ID NO: 1864120 - DNA, 15 bp, Homo sapiens
tcactaattgaatta

SEQ ID NO: 1864121 - DNA, 15 bp, Homo sapiens
cactaattgaattac

SEQ ID NO: 1864122 - DNA, 15 bp, Homo sapiens
actaattgaattact

SEQ ID NO: 1864123 - DNA, 15 bp, Homo sapiens
ctaattgaattactc

SEQ ID NO: 1864124 - DNA, 15 bp, Homo sapiens
taattgaattactct

SEQ ID NO: 1864125 - DNA, 15 bp, Homo sapiens
aattgaattactctt

SEQ ID NO: 1864126 - DNA, 15 bp, Homo sapiens
attgaattactcttc

SEQ ID NO: 1864127 - DNA, 15 bp, Homo sapiens
ttgaattactcttct

SEQ ID NO: 1864128 - DNA, 15 bp, Homo sapiens
tgaattactcttctc

SEQ ID NO: 1864129 - DNA, 15 bp, Homo sapiens
gaattactcttctcg

SEQ ID NO: 1864130 - DNA, 15 bp, Homo sapiens
aattactcttctcgc

SEQ ID NO: 1864131 - DNA, 15 bp, Homo sapiens
attactcttctcgct

SEQ ID NO: 1864132 - DNA, 15 bp, Homo sapiens
ttactcttctcgctc

SEQ ID NO: 1864133 - DNA, 15 bp, Homo sapiens
tactcttctcgctcc

SEQ ID NO: 1864134 - DNA, 15 bp, Homo sapiens
actcttctcgctcct

SEQ ID NO: 1864135 - DNA, 15 bp, Homo sapiens
ctcttctcgctcctc

SEQ ID NO: 1864136 - DNA, 15 bp, Homo sapiens
tcttctcgctcctcc

SEQ ID NO: 1864137 - DNA, 15 bp, Homo sapiens
cttctcgctcctccg

SEQ ID NO: 1864138 - DNA, 15 bp, Homo sapiens
ttctcgctcctccgt

SEQ ID NO: 1864139 - DNA, 15 bp, Homo sapiens
tctcgctcctccgtg

SEQ ID NO: 1864140 - DNA, 15 bp, Homo sapiens
ctcgctcctccgtga

SEQ ID NO: 1864141 - DNA, 15 bp, Homo sapiens
tcgctcctccgtgaa

SEQ ID NO: 1864142 - DNA, 15 bp, Homo sapiens
cgctcctccgtgaag

SEQ ID NO: 1864143 - DNA, 15 bp, Homo sapiens
gctcctccgtgaagc

SEQ ID NO: 1864144 - DNA, 15 bp, Homo sapiens
ctcctccgtgaagcc

SEQ ID NO: 1864145 - DNA, 15 bp, Homo sapiens
tcctccgtgaagccc

SEQ ID NO: 1864146 - DNA, 15 bp, Homo sapiens
cctccgtgaagcccc

SEQ ID NO: 1864147 - DNA, 15 bp, Homo sapiens
ctccgtgaagcccca

SEQ ID NO: 1864148 - DNA, 15 bp, Homo sapiens
tccgtgaagccccac

SEQ ID NO: 1864149 - DNA, 15 bp, Homo sapiens
ccgtgaagccccacc

SEQ ID NO: 1864150 - DNA, 15 bp, Homo sapiens
cgtgaagccccacca

SEQ ID NO: 1864151 - DNA, 15 bp, Homo sapiens
gtgaagccccaccag

SEQ ID NO: 1864152 - DNA, 15 bp, Homo sapiens
tgaagccccaccagg

SEQ ID NO: 1864153 - DNA, 15 bp, Homo sapiens
gaagccccaccagga

SEQ ID NO: 1864154 - DNA, 15 bp, Homo sapiens
aagccccaccaggaa

SEQ ID NO: 1864155 - DNA, 15 bp, Homo sapiens
agccccaccaggaag

SEQ ID NO: 1864156 - DNA, 15 bp, Homo sapiens
gccccaccaggaaga

SEQ ID NO: 1864157 - DNA, 15 bp, Homo sapiens
ccccaccaggaagaa

SEQ ID NO: 1864158 - DNA, 15 bp, Homo sapiens
cccaccaggaagaaa

SEQ ID NO: 1864159 - DNA, 15 bp, Homo sapiens
ccaccaggaagaaaa

SEQ ID NO: 1864160 - DNA, 15 bp, Homo sapiens
caccaggaagaaaag

SEQ ID NO: 1864161 - DNA, 15 bp, Homo sapiens
accaggaagaaaagg

SEQ ID NO: 1864162 - DNA, 15 bp, Homo sapiens
ccaggaagaaaaggc

SEQ ID NO: 1864163 - DNA, 15 bp, Homo sapiens
caggaagaaaaggcg

SEQ ID NO: 1864164 - DNA, 15 bp, Homo sapiens
aggaagaaaaggcgg

SEQ ID NO: 1864165 - DNA, 15 bp, Homo sapiens
ggaagaaaaggcggg

SEQ ID NO: 1864166 - DNA, 15 bp, Homo sapiens
gaagaaaaggcgggg

SEQ ID NO: 1864167 - DNA, 15 bp, Homo sapiens
aagaaaaggcgggga

SEQ ID NO: 1864168 - DNA, 15 bp, Homo sapiens
agaaaaggcggggag

SEQ ID NO: 1864169 - DNA, 15 bp, Homo sapiens
gaaaaggcggggaga

SEQ ID NO: 1864170 - DNA, 15 bp, Homo sapiens
aaaaggcggggagag

SEQ ID NO: 1864171 - DNA, 15 bp, Homo sapiens
aaaggcggggagagc

SEQ ID NO: 1864172 - DNA, 15 bp, Homo sapiens
aaggcggggagagct

SEQ ID NO: 1864173 - DNA, 15 bp, Homo sapiens
aggcggggagagctg

SEQ ID NO: 1864174 - DNA, 15 bp, Homo sapiens
ggcggggagagctgc

SEQ ID NO: 1864175 - DNA, 15 bp, Homo sapiens
gcggggagagctgct

SEQ ID NO: 1864176 - DNA, 15 bp, Homo sapiens
cggggagagctgctt

SEQ ID NO: 1864177 - DNA, 15 bp, Homo sapiens
ggggagagctgcttt

SEQ ID NO: 1864178 - DNA, 15 bp, Homo sapiens
gggagagctgctttt

SEQ ID NO: 1864179 - DNA, 15 bp, Homo sapiens
ggagagctgcttttg

SEQ ID NO: 1864180 - DNA, 15 bp, Homo sapiens
gagagctgcttttgc

SEQ ID NO: 1864181 - DNA, 15 bp, Homo sapiens
agagctgcttttgct

SEQ ID NO: 1864182 - DNA, 15 bp, Homo sapiens
gagctgcttttgctg

SEQ ID NO: 1864183 - DNA, 15 bp, Homo sapiens
agctgcttttgctgg

SEQ ID NO: 1864184 - DNA, 15 bp, Homo sapiens
gctgcttttgctggg

SEQ ID NO: 1864185 - DNA, 15 bp, Homo sapiens
ctgcttttgctgggg

SEQ ID NO: 1864186 - DNA, 15 bp, Homo sapiens
tgcttttgctggggg

SEQ ID NO: 1864187 - DNA, 15 bp, Homo sapiens
gcttttgctgggggg

SEQ ID NO: 1864188 - DNA, 15 bp, Homo sapiens
cttttgctggggggt

SEQ ID NO: 1864189 - DNA, 15 bp, Homo sapiens
ttttgctggggggtt

SEQ ID NO: 1864190 - DNA, 15 bp, Homo sapiens
tttgctggggggttt

SEQ ID NO: 1864191 - DNA, 15 bp, Homo sapiens
ttgctggggggtttg

SEQ ID NO: 1864192 - DNA, 15 bp, Homo sapiens
tgctggggggtttga

SEQ ID NO: 1864193 - DNA, 15 bp, Homo sapiens
gctggggggtttgat

SEQ ID NO: 1864194 - DNA, 15 bp, Homo sapiens
ctggggggtttgatc

SEQ ID NO: 1864195 - DNA, 15 bp, Homo sapiens
tggggggtttgatca

SEQ ID NO: 1864196 - DNA, 15 bp, Homo sapiens
ggggggtttgatcag

SEQ ID NO: 1864197 - DNA, 15 bp, Homo sapiens
gggggtttgatcaga

SEQ ID NO: 1864198 - DNA, 15 bp, Homo sapiens
ggggtttgatcagag

SEQ ID NO: 1864199 - DNA, 15 bp, Homo sapiens
gggtttgatcagagc

SEQ ID NO: 1864200 - DNA, 15 bp, Homo sapiens
ggtttgatcagagca

SEQ ID NO: 1864201 - DNA, 15 bp, Homo sapiens
gtttgatcagagcag

SEQ ID NO: 1864202 - DNA, 15 bp, Homo sapiens
tttgatcagagcaga

SEQ ID NO: 1864203 - DNA, 15 bp, Homo sapiens
ttgatcagagcagaa

SEQ ID NO: 1864204 - DNA, 15 bp, Homo sapiens
tgatcagagcagaaa

SEQ ID NO: 1864205 - DNA, 15 bp, Homo sapiens
gatcagagcagaaag

SEQ ID NO: 1864206 - DNA, 15 bp, Homo sapiens
atcagagcagaaagg

SEQ ID NO: 1864207 - DNA, 15 bp, Homo sapiens
tcagagcagaaaggg

SEQ ID NO: 1864208 - DNA, 15 bp, Homo sapiens
cagagcagaaaggga

SEQ ID NO: 1864209 - DNA, 15 bp, Homo sapiens
agagcagaaagggaa

SEQ ID NO: 1864210 - DNA, 15 bp, Homo sapiens
gagcagaaagggaag

SEQ ID NO: 1864211 - DNA, 15 bp, Homo sapiens
agcagaaagggaaga

SEQ ID NO: 1864212 - DNA, 15 bp, Homo sapiens
gcagaaagggaagat

SEQ ID NO: 1864213 - DNA, 15 bp, Homo sapiens
cagaaagggaagatc

SEQ ID NO: 1864214 - DNA, 15 bp, Homo sapiens
agaaagggaagatct

SEQ ID NO: 1864215 - DNA, 15 bp, Homo sapiens
gaaagggaagatctg

SEQ ID NO: 1864216 - DNA, 15 bp, Homo sapiens
aaagggaagatctgg

SEQ ID NO: 1864217 - DNA, 15 bp, Homo sapiens
aagggaagatctggt

SEQ ID NO: 1864218 - DNA, 15 bp, Homo sapiens
agggaagatctggtc

SEQ ID NO: 1864219 - DNA, 15 bp, Homo sapiens
gggaagatctggtct

SEQ ID NO: 1864220 - DNA, 15 bp, Homo sapiens
gaagatctggtctca

SEQ ID NO: 1864221 - DNA, 15 bp, Homo sapiens
aagatctggtctcaa

SEQ ID NO: 1864222 - DNA, 15 bp, Homo sapiens
agatctggtctcaat

SEQ ID NO: 1864223 - DNA, 15 bp, Homo sapiens
gatctggtctcaatt

SEQ ID NO: 1864224 - DNA, 15 bp, Homo sapiens
atctggtctcaattc

SEQ ID NO: 1864225 - DNA, 15 bp, Homo sapiens
tctggtctcaattcc

SEQ ID NO: 1864226 - DNA, 15 bp, Homo sapiens
ctggtctcaattcca

SEQ ID NO: 1864227 - DNA, 15 bp, Homo sapiens
tggtctcaattccaa

SEQ ID NO: 1864228 - DNA, 15 bp, Homo sapiens
ggtctcaattccaat

SEQ ID NO: 1864229 - DNA, 15 bp, Homo sapiens
gtctcaattccaatt

SEQ ID NO: 1864230 - DNA, 15 bp, Homo sapiens
tctcaattccaattt

SEQ ID NO: 1864231 - DNA, 15 bp, Homo sapiens
ctcaattccaatttc

SEQ ID NO: 1864232 - DNA, 15 bp, Homo sapiens
tcaattccaatttca

SEQ ID NO: 1864233 - DNA, 15 bp, Homo sapiens
caattccaatttcat

SEQ ID NO: 1864234 - DNA, 15 bp, Homo sapiens
aattccaatttcatc

SEQ ID NO: 1864235 - DNA, 15 bp, Homo sapiens
attccaatttcatct

SEQ ID NO: 1864236 - DNA, 15 bp, Homo sapiens
ttccaatttcatctt

SEQ ID NO: 1864237 - DNA, 15 bp, Homo sapiens
tccaatttcatcttg

SEQ ID NO: 1864238 - DNA, 15 bp, Homo sapiens
ccaatttcatcttgc

SEQ ID NO: 1864239 - DNA, 15 bp, Homo sapiens
caatttcatcttgca

SEQ ID NO: 1864240 - DNA, 15 bp, Homo sapiens
aatttcatcttgcaa

SEQ ID NO: 1864241 - DNA, 15 bp, Homo sapiens
atttcatcttgcaaa

SEQ ID NO: 1864242 - DNA, 15 bp, Homo sapiens
tttcatcttgcaaag

SEQ ID NO: 1864243 - DNA, 15 bp, Homo sapiens
ttcatcttgcaaagt

SEQ ID NO: 1864244 - DNA, 15 bp, Homo sapiens
tcatcttgcaaagtc

SEQ ID NO: 1864245 - DNA, 15 bp, Homo sapiens
catcttgcaaagtcg

SEQ ID NO: 1864246 - DNA, 15 bp, Homo sapiens
atcttgcaaagtcgg

SEQ ID NO: 1864247 - DNA, 15 bp, Homo sapiens
tcttgcaaagtcggg

SEQ ID NO: 1864248 - DNA, 15 bp, Homo sapiens
cttgcaaagtcggga

SEQ ID NO: 1864249 - DNA, 15 bp, Homo sapiens
ttgcaaagtcgggac

SEQ ID NO: 1864250 - DNA, 15 bp, Homo sapiens
tgcaaagtcgggact

SEQ ID NO: 1864251 - DNA, 15 bp, Homo sapiens
gcaaagtcgggactt

SEQ ID NO: 1864252 - DNA, 15 bp, Homo sapiens
caaagtcgggacttt

SEQ ID NO: 1864253 - DNA, 15 bp, Homo sapiens
aaagtcgggactttc

SEQ ID NO: 1864254 - DNA, 15 bp, Homo sapiens
aagtcgggactttct

SEQ ID NO: 1864255 - DNA, 15 bp, Homo sapiens
agtcgggactttctt

SEQ ID NO: 1864256 - DNA, 15 bp, Homo sapiens
gtcgggactttcttt

SEQ ID NO: 1864257 - DNA, 15 bp, Homo sapiens
tcgggactttctttc

SEQ ID NO: 1864258 - DNA, 15 bp, Homo sapiens
cgggactttctttca

SEQ ID NO: 1864259 - DNA, 15 bp, Homo sapiens
gggactttctttcag

SEQ ID NO: 1864260 - DNA, 15 bp, Homo sapiens
ggactttctttcagc

SEQ ID NO: 1864261 - DNA, 15 bp, Homo sapiens
gactttctttcagcc

SEQ ID NO: 1864262 - DNA, 15 bp, Homo sapiens
actttctttcagcca

SEQ ID NO: 1864263 - DNA, 15 bp, Homo sapiens
ctttctttcagccag

SEQ ID NO: 1864264 - DNA, 15 bp, Homo sapiens
tttctttcagccaga

SEQ ID NO: 1864265 - DNA, 15 bp, Homo sapiens
ttctttcagccagaa

SEQ ID NO: 1864266 - DNA, 15 bp, Homo sapiens
tctttcagccagaag

SEQ ID NO: 1864267 - DNA, 15 bp, Homo sapiens
ctttcagccagaaga

SEQ ID NO: 1864268 - DNA, 15 bp, Homo sapiens
tttcagccagaagac

SEQ ID NO: 1864269 - DNA, 15 bp, Homo sapiens
ttcagccagaagaca

SEQ ID NO: 1864270 - DNA, 15 bp, Homo sapiens
tcagccagaagacaa

SEQ ID NO: 1864271 - DNA, 15 bp, Homo sapiens
cagccagaagacaac

SEQ ID NO: 1864272 - DNA, 15 bp, Homo sapiens
agccagaagacaact

SEQ ID NO: 1864273 - DNA, 15 bp, Homo sapiens
gccagaagacaactc

SEQ ID NO: 1864274 - DNA, 15 bp, Homo sapiens
ccagaagacaactca

SEQ ID NO: 1864275 - DNA, 15 bp, Homo sapiens
cagaagacaactcag

SEQ ID NO: 1864276 - DNA, 15 bp, Homo sapiens
agaagacaactcaga

SEQ ID NO: 1864277 - DNA, 15 bp, Homo sapiens
gaagacaactcagat

SEQ ID NO: 1864278 - DNA, 15 bp, Homo sapiens
aagacaactcagata

SEQ ID NO: 1864279 - DNA, 15 bp, Homo sapiens
agacaactcagataa

SEQ ID NO: 1864280 - DNA, 15 bp, Homo sapiens
gacaactcagataac

SEQ ID NO: 1864281 - DNA, 15 bp, Homo sapiens
acaactcagataacc

SEQ ID NO: 1864282 - DNA, 15 bp, Homo sapiens
caactcagataacca

SEQ ID NO: 1864283 - DNA, 15 bp, Homo sapiens
aactcagataaccag

SEQ ID NO: 1864284 - DNA, 15 bp, Homo sapiens
actcagataaccagg

SEQ ID NO: 1864285 - DNA, 15 bp, Homo sapiens
ctcagataaccaggc

SEQ ID NO: 1864286 - DNA, 15 bp, Homo sapiens
tcagataaccaggcc

SEQ ID NO: 1864287 - DNA, 15 bp, Homo sapiens
cagataaccaggcca

SEQ ID NO: 1864288 - DNA, 15 bp, Homo sapiens
agataaccaggccag

SEQ ID NO: 1864289 - DNA, 15 bp, Homo sapiens
gataaccaggccagc

SEQ ID NO: 1864290 - DNA, 15 bp, Homo sapiens
ataaccaggccagcg

SEQ ID NO: 1864291 - DNA, 15 bp, Homo sapiens
taaccaggccagcga

SEQ ID NO: 1864292 - DNA, 15 bp, Homo sapiens
aaccaggccagcgac

SEQ ID NO: 1864293 - DNA, 15 bp, Homo sapiens
accaggccagcgact

SEQ ID NO: 1864294 - DNA, 15 bp, Homo sapiens
ccaggccagcgactg

SEQ ID NO: 1864295 - DNA, 15 bp, Homo sapiens
caggccagcgactgt

SEQ ID NO: 1864296 - DNA, 15 bp, Homo sapiens
aggccagcgactgtg

SEQ ID NO: 1864297 - DNA, 15 bp, Homo sapiens
ggccagcgactgtgt

SEQ ID NO: 1864298 - DNA, 15 bp, Homo sapiens
gccagcgactgtgtg

SEQ ID NO: 1864299 - DNA, 15 bp, Homo sapiens
ccagcgactgtgtgc

SEQ ID NO: 1864300 - DNA, 15 bp, Homo sapiens
cagcgactgtgtgct

SEQ ID NO: 1864301 - DNA, 15 bp, Homo sapiens
agcgactgtgtgctc

SEQ ID NO: 1864302 - DNA, 15 bp, Homo sapiens
gcgactgtgtgctca

SEQ ID NO: 1864303 - DNA, 15 bp, Homo sapiens
cgactgtgtgctcat

SEQ ID NO: 1864304 - DNA, 15 bp, Homo sapiens
gactgtgtgctcatt

SEQ ID NO: 1864305 - DNA, 15 bp, Homo sapiens
actgtgtgctcattt

SEQ ID NO: 1864306 - DNA, 15 bp, Homo sapiens
ctgtgtgctcatttc

SEQ ID NO: 1864307 - DNA, 15 bp, Homo sapiens
tgtgtgctcatttca

SEQ ID NO: 1864308 - DNA, 15 bp, Homo sapiens
gtgtgctcatttcag

SEQ ID NO: 1864309 - DNA, 15 bp, Homo sapiens
tgtgctcatttcagt

SEQ ID NO: 1864310 - DNA, 15 bp, Homo sapiens
gtgctcatttcagta

SEQ ID NO: 1864311 - DNA, 15 bp, Homo sapiens
tgctcatttcagtat

SEQ ID NO: 1864312 - DNA, 15 bp, Homo sapiens
gctcatttcagtatt

SEQ ID NO: 1864313 - DNA, 15 bp, Homo sapiens
ctcatttcagtattg

SEQ ID NO: 1864314 - DNA, 15 bp, Homo sapiens
tcatttcagtattgc

SEQ ID NO: 1864315 - DNA, 15 bp, Homo sapiens
catttcagtattgct

SEQ ID NO: 1864316 - DNA, 15 bp, Homo sapiens
atttcagtattgctt

SEQ ID NO: 1864317 - DNA, 15 bp, Homo sapiens
tttcagtattgcttt

SEQ ID NO: 1864318 - DNA, 15 bp, Homo sapiens
ttcagtattgctttc

SEQ ID NO: 1864319 - DNA, 15 bp, Homo sapiens
tcagtattgctttct

SEQ ID NO: 1864320 - DNA, 15 bp, Homo sapiens
cagtattgctttctt

SEQ ID NO: 1864321 - DNA, 15 bp, Homo sapiens
agtattgctttctta

SEQ ID NO: 1864322 - DNA, 15 bp, Homo sapiens
gtattgctttcttac

SEQ ID NO: 1864323 - DNA, 15 bp, Homo sapiens
tattgctttcttacg

SEQ ID NO: 1864324 - DNA, 15 bp, Homo sapiens
attgctttcttacgt

SEQ ID NO: 1864325 - DNA, 15 bp, Homo sapiens
ttgctttcttacgtt

SEQ ID NO: 1864326 - DNA, 15 bp, Homo sapiens
tgctttcttacgttt

SEQ ID NO: 1864327 - DNA, 15 bp, Homo sapiens
gctttcttacgtttt

SEQ ID NO: 1864328 - DNA, 15 bp, Homo sapiens
ctttcttacgttttg

SEQ ID NO: 1864329 - DNA, 15 bp, Homo sapiens
tttcttacgttttga

SEQ ID NO: 1864330 - DNA, 15 bp, Homo sapiens
ttcttacgttttgat

SEQ ID NO: 1864331 - DNA, 15 bp, Homo sapiens
tcttacgttttgatc

SEQ ID NO: 1864332 - DNA, 15 bp, Homo sapiens
cttacgttttgatct

SEQ ID NO: 1864333 - DNA, 15 bp, Homo sapiens
ttacgttttgatctg

SEQ ID NO: 1864334 - DNA, 15 bp, Homo sapiens
tacgttttgatctgc

SEQ ID NO: 1864335 - DNA, 15 bp, Homo sapiens
acgttttgatctgcg

SEQ ID NO: 1864336 - DNA, 15 bp, Homo sapiens
cgttttgatctgcga

SEQ ID NO: 1864337 - DNA, 15 bp, Homo sapiens
gttttgatctgcgac

SEQ ID NO: 1864338 - DNA, 15 bp, Homo sapiens
ttttgatctgcgact

SEQ ID NO: 1864339 - DNA, 15 bp, Homo sapiens
tttgatctgcgactg

SEQ ID NO: 1864340 - DNA, 15 bp, Homo sapiens
ttgatctgcgactgt

SEQ ID NO: 1864341 - DNA, 15 bp, Homo sapiens
tgatctgcgactgtc

SEQ ID NO: 1864342 - DNA, 15 bp, Homo sapiens
gatctgcgactgtca

SEQ ID NO: 1864343 - DNA, 15 bp, Homo sapiens
atctgcgactgtcac

SEQ ID NO: 1864344 - DNA, 15 bp, Homo sapiens
tctgcgactgtcact

SEQ ID NO: 1864345 - DNA, 15 bp, Homo sapiens
ctgcgactgtcactc

SEQ ID NO: 1864346 - DNA, 15 bp, Homo sapiens
tgcgactgtcactca

SEQ ID NO: 1864347 - DNA, 15 bp, Homo sapiens
gcgactgtcactcaa

SEQ ID NO: 1864348 - DNA, 15 bp, Homo sapiens
cgactgtcactcaac

SEQ ID NO: 1864349 - DNA, 15 bp, Homo sapiens
gactgtcactcaaca

SEQ ID NO: 1864350 - DNA, 15 bp, Homo sapiens
actgtcactcaacag

SEQ ID NO: 1864351 - DNA, 15 bp, Homo sapiens
ctgtcactcaacagg

SEQ ID NO: 1864352 - DNA, 15 bp, Homo sapiens
tgtcactcaacagga

SEQ ID NO: 1864353 - DNA, 15 bp, Homo sapiens
gtcactcaacaggaa

SEQ ID NO: 1864354 - DNA, 15 bp, Homo sapiens
tcactcaacaggaac

SEQ ID NO: 1864355 - DNA, 15 bp, Homo sapiens
cactcaacaggaaca

SEQ ID NO: 1864356 - DNA, 15 bp, Homo sapiens
actcaacaggaacaa

SEQ ID NO: 1864357 - DNA, 15 bp, Homo sapiens
ctcaacaggaacaaa

SEQ ID NO: 1864358 - DNA, 15 bp, Homo sapiens
tcaacaggaacaaaa

SEQ ID NO: 1864359 - DNA, 15 bp, Homo sapiens
caacaggaacaaaaa

SEQ ID NO: 1864360 - DNA, 15 bp, Homo sapiens
aacaggaacaaaaac

SEQ ID NO: 1864361 - DNA, 15 bp, Homo sapiens
acaggaacaaaaaca

SEQ ID NO: 1864362 - DNA, 15 bp, Homo sapiens
caggaacaaaaacaa

SEQ ID NO: 1864363 - DNA, 15 bp, Homo sapiens
aggaacaaaaacaat

SEQ ID NO: 1864364 - DNA, 15 bp, Homo sapiens
ggaacaaaaacaata

SEQ ID NO: 1864365 - DNA, 15 bp, Homo sapiens
gaacaaaaacaataa

SEQ ID NO: 1864366 - DNA, 15 bp, Homo sapiens
aacaaaaacaataag

SEQ ID NO: 1864367 - DNA, 15 bp, Homo sapiens
acaaaaacaataaga

SEQ ID NO: 1864368 - DNA, 15 bp, Homo sapiens
caaaaacaataagac

SEQ ID NO: 1864369 - DNA, 15 bp, Homo sapiens
aaaaacaataagacg

SEQ ID NO: 1864370 - DNA, 15 bp, Homo sapiens
aaaacaataagacgc

SEQ ID NO: 1864371 - DNA, 15 bp, Homo sapiens
aaacaataagacgcc

SEQ ID NO: 1864372 - DNA, 15 bp, Homo sapiens
aacaataagacgcca

SEQ ID NO: 1864373 - DNA, 15 bp, Homo sapiens
acaataagacgccaa

SEQ ID NO: 1864374 - DNA, 15 bp, Homo sapiens
caataagacgccaag

SEQ ID NO: 1864375 - DNA, 15 bp, Homo sapiens
aataagacgccaaga

SEQ ID NO: 1864376 - DNA, 15 bp, Homo sapiens
ataagacgccaagat

SEQ ID NO: 1864377 - DNA, 15 bp, Homo sapiens
taagacgccaagata

SEQ ID NO: 1864378 - DNA, 15 bp, Homo sapiens
aagacgccaagatat

SEQ ID NO: 1864379 - DNA, 15 bp, Homo sapiens
agacgccaagatatg

SEQ ID NO: 1864380 - DNA, 15 bp, Homo sapiens
gacgccaagatatga

SEQ ID NO: 1864381 - DNA, 15 bp, Homo sapiens
acgccaagatatgac

SEQ ID NO: 1864382 - DNA, 15 bp, Homo sapiens
cgccaagatatgact

SEQ ID NO: 1864383 - DNA, 15 bp, Homo sapiens
gccaagatatgactg

SEQ ID NO: 1864384 - DNA, 15 bp, Homo sapiens
ccaagatatgactgt

SEQ ID NO: 1864385 - DNA, 15 bp, Homo sapiens
caagatatgactgtg

SEQ ID NO: 1864386 - DNA, 15 bp, Homo sapiens
aagatatgactgtgc

SEQ ID NO: 1864387 - DNA, 15 bp, Homo sapiens
agatatgactgtgcc

SEQ ID NO: 1864388 - DNA, 15 bp, Homo sapiens
gatatgactgtgccg

SEQ ID NO: 1864389 - DNA, 15 bp, Homo sapiens
atatgactgtgccgt

SEQ ID NO: 1864390 - DNA, 15 bp, Homo sapiens
tatgactgtgccgtt

SEQ ID NO: 1864391 - DNA, 15 bp, Homo sapiens
atgactgtgccgttg

SEQ ID NO: 1864392 - DNA, 15 bp, Homo sapiens
tgactgtgccgttgg

SEQ ID NO: 1864393 - DNA, 15 bp, Homo sapiens
gactgtgccgttggc

SEQ ID NO: 1864394 - DNA, 15 bp, Homo sapiens
actgtgccgttggca

SEQ ID NO: 1864395 - DNA, 15 bp, Homo sapiens
ctgtgccgttggcag

SEQ ID NO: 1864396 - DNA, 15 bp, Homo sapiens
tgtgccgttggcaga

SEQ ID NO: 1864397 - DNA, 15 bp, Homo sapiens
gtgccgttggcagat

SEQ ID NO: 1864398 - DNA, 15 bp, Homo sapiens
tgccgttggcagatt

SEQ ID NO: 1864399 - DNA, 15 bp, Homo sapiens
gccgttggcagatta

SEQ ID NO: 1864400 - DNA, 15 bp, Homo sapiens
ccgttggcagattag

SEQ ID NO: 1864401 - DNA, 15 bp, Homo sapiens
cgttggcagattagc

SEQ ID NO: 1864402 - DNA, 15 bp, Homo sapiens
gttggcagattagct

SEQ ID NO: 1864403 - DNA, 15 bp, Homo sapiens
ttggcagattagctg

SEQ ID NO: 1864404 - DNA, 15 bp, Homo sapiens
tggcagattagctgt

SEQ ID NO: 1864405 - DNA, 15 bp, Homo sapiens
ggcagattagctgtc

SEQ ID NO: 1864406 - DNA, 15 bp, Homo sapiens
gcagattagctgtct

SEQ ID NO: 1864407 - DNA, 15 bp, Homo sapiens
cagattagctgtctg

SEQ ID NO: 1864408 - DNA, 15 bp, Homo sapiens
agattagctgtctgc

SEQ ID NO: 1864409 - DNA, 15 bp, Homo sapiens
gattagctgtctgca

SEQ ID NO: 1864410 - DNA, 15 bp, Homo sapiens
attagctgtctgcat

SEQ ID NO: 1864411 - DNA, 15 bp, Homo sapiens
ttagctgtctgcatt

SEQ ID NO: 1864412 - DNA, 15 bp, Homo sapiens
tagctgtctgcattt

SEQ ID NO: 1864413 - DNA, 15 bp, Homo sapiens
agctgtctgcatttt

SEQ ID NO: 1864414 - DNA, 15 bp, Homo sapiens
gctgtctgcattttc

SEQ ID NO: 1864415 - DNA, 15 bp, Homo sapiens
ctgtctgcattttct

SEQ ID NO: 1864416 - DNA, 15 bp, Homo sapiens
tgtctgcattttctg

SEQ ID NO: 1864417 - DNA, 15 bp, Homo sapiens
gtctgcattttctgg

SEQ ID NO: 1864418 - DNA, 15 bp, Homo sapiens
tctgcattttctggg

SEQ ID NO: 1864419 - DNA, 15 bp, Homo sapiens
ctgcattttctgggg

SEQ ID NO: 1864420 - DNA, 15 bp, Homo sapiens
tgcattttctggggt

SEQ ID NO: 1864421 - DNA, 15 bp, Homo sapiens
gcattttctggggtg

SEQ ID NO: 1864422 - DNA, 15 bp, Homo sapiens
cattttctggggtgg

SEQ ID NO: 1864423 - DNA, 15 bp, Homo sapiens
attttctggggtggc

SEQ ID NO: 1864424 - DNA, 15 bp, Homo sapiens
ttttctggggtggct

SEQ ID NO: 1864425 - DNA, 15 bp, Homo sapiens
tttctggggtggctc

SEQ ID NO: 1864426 - DNA, 15 bp, Homo sapiens
ttctggggtggctca

SEQ ID NO: 1864427 - DNA, 15 bp, Homo sapiens
tctggggtggctcac

SEQ ID NO: 1864428 - DNA, 15 bp, Homo sapiens
ctggggtggctcact

SEQ ID NO: 1864429 - DNA, 15 bp, Homo sapiens
tggggtggctcactc

SEQ ID NO: 1864430 - DNA, 15 bp, Homo sapiens
ggggtggctcactcg

SEQ ID NO: 1864431 - DNA, 15 bp, Homo sapiens
gggtggctcactcgg

SEQ ID NO: 1864432 - DNA, 15 bp, Homo sapiens
ggtggctcactcgga

SEQ ID NO: 1864433 - DNA, 15 bp, Homo sapiens
gtggctcactcggag

SEQ ID NO: 1864434 - DNA, 15 bp, Homo sapiens
tggctcactcggagg

SEQ ID NO: 1864435 - DNA, 15 bp, Homo sapiens
ggctcactcggaggt

SEQ ID NO: 1864436 - DNA, 15 bp, Homo sapiens
gctcactcggaggtt

SEQ ID NO: 1864437 - DNA, 15 bp, Homo sapiens
ctcactcggaggtta

SEQ ID NO: 1864438 - DNA, 15 bp, Homo sapiens
tcactcggaggttaa

SEQ ID NO: 1864439 - DNA, 15 bp, Homo sapiens
cactcggaggttaaa

SEQ ID NO: 1864440 - DNA, 15 bp, Homo sapiens
actcggaggttaaat

SEQ ID NO: 1864441 - DNA, 15 bp, Homo sapiens
ctcggaggttaaatg

SEQ ID NO: 1864442 - DNA, 15 bp, Homo sapiens
tcggaggttaaatga

SEQ ID NO: 1864443 - DNA, 15 bp, Homo sapiens
cggaggttaaatgat

SEQ ID NO: 1864444 - DNA, 15 bp, Homo sapiens
ggaggttaaatgatt

SEQ ID NO: 1864445 - DNA, 15 bp, Homo sapiens
gaggttaaatgattg

SEQ ID NO: 1864446 - DNA, 15 bp, Homo sapiens
aggttaaatgattgt

SEQ ID NO: 1864447 - DNA, 15 bp, Homo sapiens
ggttaaatgattgtc

SEQ ID NO: 1864448 - DNA, 15 bp, Homo sapiens
gttaaatgattgtcc

SEQ ID NO: 1864449 - DNA, 15 bp, Homo sapiens
ttaaatgattgtccc

SEQ ID NO: 1864450 - DNA, 15 bp, Homo sapiens
taaatgattgtccct

SEQ ID NO: 1864451 - DNA, 15 bp, Homo sapiens
aaatgattgtccctg

SEQ ID NO: 1864452 - DNA, 15 bp, Homo sapiens
aatgattgtccctgt

SEQ ID NO: 1864453 - DNA, 15 bp, Homo sapiens
atgattgtccctgtc

SEQ ID NO: 1864454 - DNA, 15 bp, Homo sapiens
tgattgtccctgtcc

SEQ ID NO: 1864455 - DNA, 15 bp, Homo sapiens
gattgtccctgtccc

SEQ ID NO: 1864456 - DNA, 15 bp, Homo sapiens
attgtccctgtcccc

SEQ ID NO: 1864457 - DNA, 15 bp, Homo sapiens
ttgtccctgtcccct

SEQ ID NO: 1864458 - DNA, 15 bp, Homo sapiens
tgtccctgtcccctg

SEQ ID NO: 1864459 - DNA, 15 bp, Homo sapiens
gtccctgtcccctgt

SEQ ID NO: 1864460 - DNA, 15 bp, Homo sapiens
tccctgtcccctgtc

SEQ ID NO: 1864461 - DNA, 15 bp, Homo sapiens
ccctgtcccctgtcc

SEQ ID NO: 1864462 - DNA, 15 bp, Homo sapiens
cctgtcccctgtccc

SEQ ID NO: 1864463 - DNA, 15 bp, Homo sapiens
ctgtcccctgtccca

SEQ ID NO: 1864464 - DNA, 15 bp, Homo sapiens
tgtcccctgtcccac

SEQ ID NO: 1864465 - DNA, 15 bp, Homo sapiens
gtcccctgtcccacc

SEQ ID NO: 1864466 - DNA, 15 bp, Homo sapiens
tcccctgtcccacct

SEQ ID NO: 1864467 - DNA, 15 bp, Homo sapiens
cccctgtcccacctt

SEQ ID NO: 1864468 - DNA, 15 bp, Homo sapiens
ccctgtcccaccttc

SEQ ID NO: 1864469 - DNA, 15 bp, Homo sapiens
cctgtcccaccttcc

SEQ ID NO: 1864470 - DNA, 15 bp, Homo sapiens
ctgtcccaccttcca

SEQ ID NO: 1864471 - DNA, 15 bp, Homo sapiens
tgtcccaccttccag

SEQ ID NO: 1864472 - DNA, 15 bp, Homo sapiens
gtcccaccttccagt

SEQ ID NO: 1864473 - DNA, 15 bp, Homo sapiens
tcccaccttccagtc

SEQ ID NO: 1864474 - DNA, 15 bp, Homo sapiens
cccaccttccagtca

SEQ ID NO: 1864475 - DNA, 15 bp, Homo sapiens
ccaccttccagtcac

SEQ ID NO: 1864476 - DNA, 15 bp, Homo sapiens
caccttccagtcacc

SEQ ID NO: 1864477 - DNA, 15 bp, Homo sapiens
accttccagtcacct

SEQ ID NO: 1864478 - DNA, 15 bp, Homo sapiens
ccttccagtcacctc

SEQ ID NO: 1864479 - DNA, 15 bp, Homo sapiens
cttccagtcacctca

SEQ ID NO: 1864480 - DNA, 15 bp, Homo sapiens
ttccagtcacctcat

SEQ ID NO: 1864481 - DNA, 15 bp, Homo sapiens
tccagtcacctcatg

SEQ ID NO: 1864482 - DNA, 15 bp, Homo sapiens
ccagtcacctcatga

SEQ ID NO: 1864483 - DNA, 15 bp, Homo sapiens
cagtcacctcatgaa

SEQ ID NO: 1864484 - DNA, 15 bp, Homo sapiens
agtcacctcatgaag

SEQ ID NO: 1864485 - DNA, 15 bp, Homo sapiens
gtcacctcatgaagc

SEQ ID NO: 1864486 - DNA, 15 bp, Homo sapiens
tcacctcatgaagct

SEQ ID NO: 1864487 - DNA, 15 bp, Homo sapiens
cacctcatgaagctg

SEQ ID NO: 1864488 - DNA, 15 bp, Homo sapiens
acctcatgaagctgt

SEQ ID NO: 1864489 - DNA, 15 bp, Homo sapiens
cctcatgaagctgtt

SEQ ID NO: 1864490 - DNA, 15 bp, Homo sapiens
ctcatgaagctgtta

SEQ ID NO: 1864491 - DNA, 15 bp, Homo sapiens
tcatgaagctgttaa

SEQ ID NO: 1864492 - DNA, 15 bp, Homo sapiens
catgaagctgttaag

SEQ ID NO: 1864493 - DNA, 15 bp, Homo sapiens
atgaagctgttaagt

SEQ ID NO: 1864494 - DNA, 15 bp, Homo sapiens
tgaagctgttaagtg

SEQ ID NO: 1864495 - DNA, 15 bp, Homo sapiens
gaagctgttaagtgt

SEQ ID NO: 1864496 - DNA, 15 bp, Homo sapiens
aagctgttaagtgtc

SEQ ID NO: 1864497 - DNA, 15 bp, Homo sapiens
agctgttaagtgtct

SEQ ID NO: 1864498 - DNA, 15 bp, Homo sapiens
gctgttaagtgtctc

SEQ ID NO: 1864499 - DNA, 15 bp, Homo sapiens
ctgttaagtgtctcc

SEQ ID NO: 1864500 - DNA, 15 bp, Homo sapiens
tgttaagtgtctcct

SEQ ID NO: 1864501 - DNA, 15 bp, Homo sapiens
gttaagtgtctcctt

SEQ ID NO: 1864502 - DNA, 15 bp, Homo sapiens
ttaagtgtctccttc

SEQ ID NO: 1864503 - DNA, 15 bp, Homo sapiens
taagtgtctccttcc

SEQ ID NO: 1864504 - DNA, 15 bp, Homo sapiens
aagtgtctccttccc

SEQ ID NO: 1864505 - DNA, 15 bp, Homo sapiens
agtgtctccttcccc

SEQ ID NO: 1864506 - DNA, 15 bp, Homo sapiens
gtgtctccttcccct

SEQ ID NO: 1864507 - DNA, 15 bp, Homo sapiens
tgtctccttcccctg

SEQ ID NO: 1864508 - DNA, 15 bp, Homo sapiens
gtctccttcccctgc

SEQ ID NO: 1864509 - DNA, 15 bp, Homo sapiens
tctccttcccctgca

SEQ ID NO: 1864510 - DNA, 15 bp, Homo sapiens
ctccttcccctgcag

SEQ ID NO: 1864511 - DNA, 15 bp, Homo sapiens
tccttcccctgcagg

SEQ ID NO: 1864512 - DNA, 15 bp, Homo sapiens
ccttcccctgcaggc

SEQ ID NO: 1864513 - DNA, 15 bp, Homo sapiens
cttcccctgcaggct

SEQ ID NO: 1864514 - DNA, 15 bp, Homo sapiens
ttcccctgcaggcta

SEQ ID NO: 1864515 - DNA, 15 bp, Homo sapiens
tcccctgcaggctaa

SEQ ID NO: 1864516 - DNA, 15 bp, Homo sapiens
cccctgcaggctaag

SEQ ID NO: 1864517 - DNA, 15 bp, Homo sapiens
ccctgcaggctaagt

SEQ ID NO: 1864518 - DNA, 15 bp, Homo sapiens
cctgcaggctaagtg

SEQ ID NO: 1864519 - DNA, 15 bp, Homo sapiens
ctgcaggctaagtga

SEQ ID NO: 1864520 - DNA, 15 bp, Homo sapiens
tgcaggctaagtgag

SEQ ID NO: 1864521 - DNA, 15 bp, Homo sapiens
gcaggctaagtgagg

SEQ ID NO: 1864522 - DNA, 15 bp, Homo sapiens
caggctaagtgagga

SEQ ID NO: 1864523 - DNA, 15 bp, Homo sapiens
aggctaagtgaggat

SEQ ID NO: 1864524 - DNA, 15 bp, Homo sapiens
ggctaagtgaggatc

SEQ ID NO: 1864525 - DNA, 15 bp, Homo sapiens
gctaagtgaggatca

SEQ ID NO: 1864526 - DNA, 15 bp, Homo sapiens
ctaagtgaggatcat

SEQ ID NO: 1864527 - DNA, 15 bp, Homo sapiens
taagtgaggatcatc

SEQ ID NO: 1864528 - DNA, 15 bp, Homo sapiens
aagtgaggatcatca

SEQ ID NO: 1864529 - DNA, 15 bp, Homo sapiens
agtgaggatcatcaa

SEQ ID NO: 1864530 - DNA, 15 bp, Homo sapiens
gtgaggatcatcaag

SEQ ID NO: 1864531 - DNA, 15 bp, Homo sapiens
tgaggatcatcaaga

SEQ ID NO: 1864532 - DNA, 15 bp, Homo sapiens
gaggatcatcaagag

SEQ ID NO: 1864533 - DNA, 15 bp, Homo sapiens
aggatcatcaagagc

SEQ ID NO: 1864534 - DNA, 15 bp, Homo sapiens
ggatcatcaagagct

SEQ ID NO: 1864535 - DNA, 15 bp, Homo sapiens
gatcatcaagagctg

SEQ ID NO: 1864536 - DNA, 15 bp, Homo sapiens
atcatcaagagctgg

SEQ ID NO: 1864537 - DNA, 15 bp, Homo sapiens
tcatcaagagctggg

SEQ ID NO: 1864538 - DNA, 15 bp, Homo sapiens
catcaagagctgggc

SEQ ID NO: 1864539 - DNA, 15 bp, Homo sapiens
atcaagagctgggcc

SEQ ID NO: 1864540 - DNA, 15 bp, Homo sapiens
tcaagagctgggcct

SEQ ID NO: 1864541 - DNA, 15 bp, Homo sapiens
caagagctgggcctg

SEQ ID NO: 1864542 - DNA, 15 bp, Homo sapiens
aagagctgggcctgg

SEQ ID NO: 1864543 - DNA, 15 bp, Homo sapiens
agagctgggcctggg

SEQ ID NO: 1864544 - DNA, 15 bp, Homo sapiens
gagctgggcctgggg

SEQ ID NO: 1864545 - DNA, 15 bp, Homo sapiens
agctgggcctgggga

SEQ ID NO: 1864546 - DNA, 15 bp, Homo sapiens
gctgggcctggggac

SEQ ID NO: 1864547 - DNA, 15 bp, Homo sapiens
ctgggcctggggacc

SEQ ID NO: 1864548 - DNA, 15 bp, Homo sapiens
tgggcctggggacct

SEQ ID NO: 1864549 - DNA, 15 bp, Homo sapiens
gggcctggggacctt

SEQ ID NO: 1864550 - DNA, 15 bp, Homo sapiens
ggcctggggaccttg

SEQ ID NO: 1864551 - DNA, 15 bp, Homo sapiens
gcctggggaccttgt

SEQ ID NO: 1864552 - DNA, 15 bp, Homo sapiens
cctggggaccttgtc

SEQ ID NO: 1864553 - DNA, 15 bp, Homo sapiens
ctggggaccttgtca

SEQ ID NO: 1864554 - DNA, 15 bp, Homo sapiens
tggggaccttgtcag

SEQ ID NO: 1864555 - DNA, 15 bp, Homo sapiens
ggggaccttgtcagc

SEQ ID NO: 1864556 - DNA, 15 bp, Homo sapiens
gggaccttgtcagcc

SEQ ID NO: 1864557 - DNA, 15 bp, Homo sapiens
ggaccttgtcagcct

SEQ ID NO: 1864558 - DNA, 15 bp, Homo sapiens
gaccttgtcagcctc

SEQ ID NO: 1864559 - DNA, 15 bp, Homo sapiens
accttgtcagcctca

SEQ ID NO: 1864560 - DNA, 15 bp, Homo sapiens
ccttgtcagcctcac

SEQ ID NO: 1864561 - DNA, 15 bp, Homo sapiens
cttgtcagcctcact

SEQ ID NO: 1864562 - DNA, 15 bp, Homo sapiens
ttgtcagcctcactg

SEQ ID NO: 1864563 - DNA, 15 bp, Homo sapiens
tgtcagcctcactgc

SEQ ID NO: 1864564 - DNA, 15 bp, Homo sapiens
gtcagcctcactgca

SEQ ID NO: 1864565 - DNA, 15 bp, Homo sapiens
tcagcctcactgcag

SEQ ID NO: 1864566 - DNA, 15 bp, Homo sapiens
cagcctcactgcagc

SEQ ID NO: 1864567 - DNA, 15 bp, Homo sapiens
agcctcactgcagcc

SEQ ID NO: 1864568 - DNA, 15 bp, Homo sapiens
gcctcactgcagcct

SEQ ID NO: 1864569 - DNA, 15 bp, Homo sapiens
cctcactgcagcctc

SEQ ID NO: 1864570 - DNA, 15 bp, Homo sapiens
tcactgcagcctctg

SEQ ID NO: 1864571 - DNA, 15 bp, Homo sapiens
cactgcagcctctga

SEQ ID NO: 1864572 - DNA, 15 bp, Homo sapiens
actgcagcctctgag

SEQ ID NO: 1864573 - DNA, 15 bp, Homo sapiens
ctgcagcctctgagc

SEQ ID NO: 1864574 - DNA, 15 bp, Homo sapiens
tgcagcctctgagcc

SEQ ID NO: 1864575 - DNA, 15 bp, Homo sapiens
gcagcctctgagcca

SEQ ID NO: 1864576 - DNA, 15 bp, Homo sapiens
cagcctctgagccag

SEQ ID NO: 1864577 - DNA, 15 bp, Homo sapiens
agcctctgagccagc

SEQ ID NO: 1864578 - DNA, 15 bp, Homo sapiens
gcctctgagccagcc

SEQ ID NO: 1864579 - DNA, 15 bp, Homo sapiens
cctctgagccagccc

SEQ ID NO: 1864580 - DNA, 15 bp, Homo sapiens
ctctgagccagccct

SEQ ID NO: 1864581 - DNA, 15 bp, Homo sapiens
tctgagccagccctg

SEQ ID NO: 1864582 - DNA, 15 bp, Homo sapiens
ctgagccagccctgc

SEQ ID NO: 1864583 - DNA, 15 bp, Homo sapiens
tgagccagccctgcc

SEQ ID NO: 1864584 - DNA, 15 bp, Homo sapiens
gagccagccctgccc

SEQ ID NO: 1864585 - DNA, 15 bp, Homo sapiens
agccagccctgcccc

SEQ ID NO: 1864586 - DNA, 15 bp, Homo sapiens
gccagccctgcccca

SEQ ID NO: 1864587 - DNA, 15 bp, Homo sapiens
ccagccctgccccac

SEQ ID NO: 1864588 - DNA, 15 bp, Homo sapiens
cagccctgccccacc

SEQ ID NO: 1864589 - DNA, 15 bp, Homo sapiens
agccctgccccaccc

SEQ ID NO: 1864590 - DNA, 15 bp, Homo sapiens
gccctgccccacccc

SEQ ID NO: 1864591 - DNA, 15 bp, Homo sapiens
ccctgccccaccccc

SEQ ID NO: 1864592 - DNA, 15 bp, Homo sapiens
cctgccccaccccct

SEQ ID NO: 1864593 - DNA, 15 bp, Homo sapiens
ctgccccaccccctc

SEQ ID NO: 1864594 - DNA, 15 bp, Homo sapiens
tgccccaccccctca

SEQ ID NO: 1864595 - DNA, 15 bp, Homo sapiens
gccccaccccctcat

SEQ ID NO: 1864596 - DNA, 15 bp, Homo sapiens
ccccaccccctcatg

SEQ ID NO: 1864597 - DNA, 15 bp, Homo sapiens
cccaccccctcatga

SEQ ID NO: 1864598 - DNA, 15 bp, Homo sapiens
ccaccccctcatgaa

SEQ ID NO: 1864599 - DNA, 15 bp, Homo sapiens
caccccctcatgaat

SEQ ID NO: 1864600 - DNA, 15 bp, Homo sapiens
accccctcatgaatc

SEQ ID NO: 1864601 - DNA, 15 bp, Homo sapiens
ccccctcatgaatca

SEQ ID NO: 1864602 - DNA, 15 bp, Homo sapiens
cccctcatgaatcag

SEQ ID NO: 1864603 - DNA, 15 bp, Homo sapiens
ccctcatgaatcagt

SEQ ID NO: 1864604 - DNA, 15 bp, Homo sapiens
cctcatgaatcagta

SEQ ID NO: 1864605 - DNA, 15 bp, Homo sapiens
ctcatgaatcagtaa

SEQ ID NO: 1864606 - DNA, 15 bp, Homo sapiens
tcatgaatcagtaac

SEQ ID NO: 1864607 - DNA, 15 bp, Homo sapiens
catgaatcagtaacc

SEQ ID NO: 1864608 - DNA, 15 bp, Homo sapiens
atgaatcagtaacca

SEQ ID NO: 1864609 - DNA, 15 bp, Homo sapiens
tgaatcagtaaccaa

SEQ ID NO: 1864610 - DNA, 15 bp, Homo sapiens
gaatcagtaaccaag

SEQ ID NO: 1864611 - DNA, 15 bp, Homo sapiens
aatcagtaaccaaga

SEQ ID NO: 1864612 - DNA, 15 bp, Homo sapiens
atcagtaaccaagag

SEQ ID NO: 1864613 - DNA, 15 bp, Homo sapiens
tcagtaaccaagagg

SEQ ID NO: 1864614 - DNA, 15 bp, Homo sapiens
cagtaaccaagaggg

SEQ ID NO: 1864615 - DNA, 15 bp, Homo sapiens
agtaaccaagaggga

SEQ ID NO: 1864616 - DNA, 15 bp, Homo sapiens
gtaaccaagagggaa

SEQ ID NO: 1864617 - DNA, 15 bp, Homo sapiens
taaccaagagggaaa

SEQ ID NO: 1864618 - DNA, 15 bp, Homo sapiens
aaccaagagggaaaa

SEQ ID NO: 1864619 - DNA, 15 bp, Homo sapiens
accaagagggaaaat

SEQ ID NO: 1864620 - DNA, 15 bp, Homo sapiens
ccaagagggaaaatt

SEQ ID NO: 1864621 - DNA, 15 bp, Homo sapiens
caagagggaaaatta

SEQ ID NO: 1864622 - DNA, 15 bp, Homo sapiens
aagagggaaaattaa

SEQ ID NO: 1864623 - DNA, 15 bp, Homo sapiens
agagggaaaattaaa

SEQ ID NO: 1864624 - DNA, 15 bp, Homo sapiens
gagggaaaattaaaa

SEQ ID NO: 1864625 - DNA, 15 bp, Homo sapiens
agggaaaattaaaaa

SEQ ID NO: 1864626 - DNA, 15 bp, Homo sapiens
gggaaaattaaaaag

SEQ ID NO: 1864627 - DNA, 15 bp, Homo sapiens
ggaaaattaaaaagt

SEQ ID NO: 1864628 - DNA, 15 bp, Homo sapiens
gaaaattaaaaagtt

SEQ ID NO: 1864629 - DNA, 15 bp, Homo sapiens
aaaattaaaaagtta

SEQ ID NO: 1864630 - DNA, 15 bp, Homo sapiens
aaattaaaaagttag

SEQ ID NO: 1864631 - DNA, 15 bp, Homo sapiens
aattaaaaagttagt

SEQ ID NO: 1864632 - DNA, 15 bp, Homo sapiens
attaaaaagttagtt

SEQ ID NO: 1864633 - DNA, 15 bp, Homo sapiens
ttaaaaagttagtta

SEQ ID NO: 1864634 - DNA, 15 bp, Homo sapiens
taaaaagttagttat

SEQ ID NO: 1864635 - DNA, 15 bp, Homo sapiens
aaaaagttagttatc

SEQ ID NO: 1864636 - DNA, 15 bp, Homo sapiens
aaaagttagttatca

SEQ ID NO: 1864637 - DNA, 15 bp, Homo sapiens
aaagttagttatcag

SEQ ID NO: 1864638 - DNA, 15 bp, Homo sapiens
aagttagttatcagt

SEQ ID NO: 1864639 - DNA, 15 bp, Homo sapiens
agttagttatcagtg

SEQ ID NO: 1864640 - DNA, 15 bp, Homo sapiens
gttagttatcagtgt

SEQ ID NO: 1864641 - DNA, 15 bp, Homo sapiens
ttagttatcagtgtg

SEQ ID NO: 1864642 - DNA, 15 bp, Homo sapiens
tagttatcagtgtga

SEQ ID NO: 1864643 - DNA, 15 bp, Homo sapiens
agttatcagtgtgat

SEQ ID NO: 1864644 - DNA, 15 bp, Homo sapiens
gttatcagtgtgatc

SEQ ID NO: 1864645 - DNA, 15 bp, Homo sapiens
ttatcagtgtgatct

SEQ ID NO: 1864646 - DNA, 15 bp, Homo sapiens
tatcagtgtgatctg

SEQ ID NO: 1864647 - DNA, 15 bp, Homo sapiens
atcagtgtgatctga

SEQ ID NO: 1864648 - DNA, 15 bp, Homo sapiens
tcagtgtgatctgag

SEQ ID NO: 1864649 - DNA, 15 bp, Homo sapiens
cagtgtgatctgagt

SEQ ID NO: 1864650 - DNA, 15 bp, Homo sapiens
agtgtgatctgagtg

SEQ ID NO: 1864651 - DNA, 15 bp, Homo sapiens
gtgtgatctgagtgc

SEQ ID NO: 1864652 - DNA, 15 bp, Homo sapiens
tgtgatctgagtgca

SEQ ID NO: 1864653 - DNA, 15 bp, Homo sapiens
gtgatctgagtgcac

SEQ ID NO: 1864654 - DNA, 15 bp, Homo sapiens
tgatctgagtgcacc

SEQ ID NO: 1864655 - DNA, 15 bp, Homo sapiens
gatctgagtgcacca

SEQ ID NO: 1864656 - DNA, 15 bp, Homo sapiens
atctgagtgcaccat

SEQ ID NO: 1864657 - DNA, 15 bp, Homo sapiens
tctgagtgcaccata

SEQ ID NO: 1864658 - DNA, 15 bp, Homo sapiens
ctgagtgcaccatac

SEQ ID NO: 1864659 - DNA, 15 bp, Homo sapiens
tgagtgcaccatacc

SEQ ID NO: 1864660 - DNA, 15 bp, Homo sapiens
gagtgcaccataccg

SEQ ID NO: 1864661 - DNA, 15 bp, Homo sapiens
agtgcaccataccgt

SEQ ID NO: 1864662 - DNA, 15 bp, Homo sapiens
gtgcaccataccgtt

SEQ ID NO: 1864663 - DNA, 15 bp, Homo sapiens
tgcaccataccgttc

SEQ ID NO: 1864664 - DNA, 15 bp, Homo sapiens
gcaccataccgttct

SEQ ID NO: 1864665 - DNA, 15 bp, Homo sapiens
caccataccgttctt

SEQ ID NO: 1864666 - DNA, 15 bp, Homo sapiens
accataccgttctta

SEQ ID NO: 1864667 - DNA, 15 bp, Homo sapiens
ccataccgttcttac

SEQ ID NO: 1864668 - DNA, 15 bp, Homo sapiens
cataccgttcttaca

SEQ ID NO: 1864669 - DNA, 15 bp, Homo sapiens
ataccgttcttacaa

SEQ ID NO: 1864670 - DNA, 15 bp, Homo sapiens
taccgttcttacaaa

SEQ ID NO: 1864671 - DNA, 15 bp, Homo sapiens
accgttcttacaaat

SEQ ID NO: 1864672 - DNA, 15 bp, Homo sapiens
ccgttcttacaaata

SEQ ID NO: 1864673 - DNA, 15 bp, Homo sapiens
cgttcttacaaatag

SEQ ID NO: 1864674 - DNA, 15 bp, Homo sapiens
gttcttacaaataga

SEQ ID NO: 1864675 - DNA, 15 bp, Homo sapiens
ttcttacaaatagat

SEQ ID NO: 1864676 - DNA, 15 bp, Homo sapiens
tcttacaaatagatg

SEQ ID NO: 1864677 - DNA, 15 bp, Homo sapiens
cttacaaatagatgg

SEQ ID NO: 1864678 - DNA, 15 bp, Homo sapiens
ttacaaatagatggg

SEQ ID NO: 1864679 - DNA, 15 bp, Homo sapiens
tacaaatagatgggc

SEQ ID NO: 1864680 - DNA, 15 bp, Homo sapiens
acaaatagatgggcc

SEQ ID NO: 1864681 - DNA, 15 bp, Homo sapiens
caaatagatgggccc

SEQ ID NO: 1864682 - DNA, 15 bp, Homo sapiens
ttttaagtgtatagt

SEQ ID NO: 1864683 - DNA, 15 bp, Homo sapiens
tttaagtgtatagtt

SEQ ID NO: 1864684 - DNA, 15 bp, Homo sapiens
ttaagtgtatagttc

SEQ ID NO: 1864685 - DNA, 15 bp, Homo sapiens
taagtgtatagttct

SEQ ID NO: 1864686 - DNA, 15 bp, Homo sapiens
aagtgtatagttctg

SEQ ID NO: 1864687 - DNA, 15 bp, Homo sapiens
agtgtatagttctgt

SEQ ID NO: 1864688 - DNA, 15 bp, Homo sapiens
gtgtatagttctgtg

SEQ ID NO: 1864689 - DNA, 15 bp, Homo sapiens
tgtatagttctgtgg

SEQ ID NO: 1864690 - DNA, 15 bp, Homo sapiens
gtatagttctgtggc

SEQ ID NO: 1864691 - DNA, 15 bp, Homo sapiens
tatagttctgtggca

SEQ ID NO: 1864692 - DNA, 15 bp, Homo sapiens
atagttctgtggcat

SEQ ID NO: 1864693 - DNA, 15 bp, Homo sapiens
tagttctgtggcatt

SEQ ID NO: 1864694 - DNA, 15 bp, Homo sapiens
agttctgtggcatta

SEQ ID NO: 1864695 - DNA, 15 bp, Homo sapiens
gttctgtggcattaa

SEQ ID NO: 1864696 - DNA, 15 bp, Homo sapiens
ttctgtggcattaag

SEQ ID NO: 1864697 - DNA, 15 bp, Homo sapiens
tctgtggcattaagt

SEQ ID NO: 1864698 - DNA, 15 bp, Homo sapiens
ctgtggcattaagta

SEQ ID NO: 1864699 - DNA, 15 bp, Homo sapiens
tgtggcattaagtac

SEQ ID NO: 1864700 - DNA, 15 bp, Homo sapiens
attaagtacattcat

SEQ ID NO: 1864701 - DNA, 15 bp, Homo sapiens
ttaagtacattcata

SEQ ID NO: 1864702 - DNA, 15 bp, Homo sapiens
taagtacattcatat

SEQ ID NO: 1864703 - DNA, 15 bp, Homo sapiens
aagtacattcatatt

SEQ ID NO: 1864704 - DNA, 15 bp, Homo sapiens
agtacattcatattg

SEQ ID NO: 1864705 - DNA, 15 bp, Homo sapiens
gtacattcatattgt

SEQ ID NO: 1864706 - DNA, 15 bp, Homo sapiens
tacattcatattgtg

SEQ ID NO: 1864707 - DNA, 15 bp, Homo sapiens
acattcatattgtgc

SEQ ID NO: 1864708 - DNA, 15 bp, Homo sapiens
cattcatattgtgct

SEQ ID NO: 1864709 - DNA, 15 bp, Homo sapiens
attcatattgtgcta

SEQ ID NO: 1864710 - DNA, 15 bp, Homo sapiens
ttcatattgtgctat

SEQ ID NO: 1864711 - DNA, 15 bp, Homo sapiens
tcatattgtgctatt

SEQ ID NO: 1864712 - DNA, 15 bp, Homo sapiens
catattgtgctatta

SEQ ID NO: 1864713 - DNA, 15 bp, Homo sapiens
atattgtgctattat

SEQ ID NO: 1864714 - DNA, 15 bp, Homo sapiens
tattgtgctattatc

SEQ ID NO: 1864715 - DNA, 15 bp, Homo sapiens
attgtgctattatcc

SEQ ID NO: 1864716 - DNA, 15 bp, Homo sapiens
ttgtgctattatccc

SEQ ID NO: 1864717 - DNA, 15 bp, Homo sapiens
tgtgctattatcccc

SEQ ID NO: 1864718 - DNA, 15 bp, Homo sapiens
gtgctattatcccca

SEQ ID NO: 1864719 - DNA, 15 bp, Homo sapiens
tgctattatccccac

SEQ ID NO: 1864720 - DNA, 15 bp, Homo sapiens
gctattatccccacc

SEQ ID NO: 1864721 - DNA, 15 bp, Homo sapiens
ctattatccccaccg

SEQ ID NO: 1864722 - DNA, 15 bp, Homo sapiens
tattatccccaccgt

SEQ ID NO: 1864723 - DNA, 15 bp, Homo sapiens
attatccccaccgtc

SEQ ID NO: 1864724 - DNA, 15 bp, Homo sapiens
ttatccccaccgtcc

SEQ ID NO: 1864725 - DNA, 15 bp, Homo sapiens
ccccaccgtccacat

SEQ ID NO: 1864726 - DNA, 15 bp, Homo sapiens
cccaccgtccacatc

SEQ ID NO: 1864727 - DNA, 15 bp, Homo sapiens
ccaccgtccacatcc

SEQ ID NO: 1864728 - DNA, 15 bp, Homo sapiens
caccgtccacatcca

SEQ ID NO: 1864729 - DNA, 15 bp, Homo sapiens
accgtccacatccag

SEQ ID NO: 1864730 - DNA, 15 bp, Homo sapiens
ccgtccacatccaga

SEQ ID NO: 1864731 - DNA, 15 bp, Homo sapiens
cgtccacatccagaa

SEQ ID NO: 1864732 - DNA, 15 bp, Homo sapiens
gtccacatccagaac

SEQ ID NO: 1864733 - DNA, 15 bp, Homo sapiens
tccacatccagaact

SEQ ID NO: 1864734 - DNA, 15 bp, Homo sapiens
ccacatccagaactt

SEQ ID NO: 1864735 - DNA, 15 bp, Homo sapiens
cacatccagaacttt

SEQ ID NO: 1864736 - DNA, 15 bp, Homo sapiens
acatccagaactttt

SEQ ID NO: 1864737 - DNA, 15 bp, Homo sapiens
catccagaacttttt

SEQ ID NO: 1864738 - DNA, 15 bp, Homo sapiens
atccagaactttttc

SEQ ID NO: 1864739 - DNA, 15 bp, Homo sapiens
tccagaactttttca

SEQ ID NO: 1864740 - DNA, 15 bp, Homo sapiens
ccagaactttttcat

SEQ ID NO: 1864741 - DNA, 15 bp, Homo sapiens
cagaactttttcatc

SEQ ID NO: 1864742 - DNA, 15 bp, Homo sapiens
agaactttttcatct

SEQ ID NO: 1864743 - DNA, 15 bp, Homo sapiens
gaactttttcatctt

SEQ ID NO: 1864744 - DNA, 15 bp, Homo sapiens
aactttttcatcttc

SEQ ID NO: 1864745 - DNA, 15 bp, Homo sapiens
actttttcatcttcc

SEQ ID NO: 1864746 - DNA, 15 bp, Homo sapiens
ctttttcatcttccc

SEQ ID NO: 1864747 - DNA, 15 bp, Homo sapiens
tttttcatcttccct

SEQ ID NO: 1864748 - DNA, 15 bp, Homo sapiens
ttttcatcttcccta

SEQ ID NO: 1864749 - DNA, 15 bp, Homo sapiens
tttcatcttccctag

SEQ ID NO: 1864750 - DNA, 15 bp, Homo sapiens
ttcatcttccctagc

SEQ ID NO: 1864751 - DNA, 15 bp, Homo sapiens
tcatcttccctagct

SEQ ID NO: 1864752 - DNA, 15 bp, Homo sapiens
catcttccctagctg

SEQ ID NO: 1864753 - DNA, 15 bp, Homo sapiens
atcttccctagctga

SEQ ID NO: 1864754 - DNA, 15 bp, Homo sapiens
tcttccctagctgaa

SEQ ID NO: 1864755 - DNA, 15 bp, Homo sapiens
cttccctagctgaaa

SEQ ID NO: 1864756 - DNA, 15 bp, Homo sapiens
ttccctagctgaaac

SEQ ID NO: 1864757 - DNA, 15 bp, Homo sapiens
tccctagctgaaact

SEQ ID NO: 1864758 - DNA, 15 bp, Homo sapiens
ccctagctgaaactt

SEQ ID NO: 1864759 - DNA, 15 bp, Homo sapiens
cctagctgaaacttt

SEQ ID NO: 1864760 - DNA, 15 bp, Homo sapiens
ctagctgaaactttg

SEQ ID NO: 1864761 - DNA, 15 bp, Homo sapiens
tagctgaaactttgt

SEQ ID NO: 1864762 - DNA, 15 bp, Homo sapiens
agctgaaactttgtt

SEQ ID NO: 1864763 - DNA, 15 bp, Homo sapiens
gctgaaactttgttc

SEQ ID NO: 1864764 - DNA, 15 bp, Homo sapiens
ctgaaactttgttcc

SEQ ID NO: 1864765 - DNA, 15 bp, Homo sapiens
tgaaactttgttccc

SEQ ID NO: 1864766 - DNA, 15 bp, Homo sapiens
gaaactttgttccca

SEQ ID NO: 1864767 - DNA, 15 bp, Homo sapiens
aaactttgttcccat

SEQ ID NO: 1864768 - DNA, 15 bp, Homo sapiens
aactttgttcccatg

SEQ ID NO: 1864769 - DNA, 15 bp, Homo sapiens
actttgttcccatga

SEQ ID NO: 1864770 - DNA, 15 bp, Homo sapiens
ctttgttcccatgaa

SEQ ID NO: 1864771 - DNA, 15 bp, Homo sapiens
tttgttcccatgaaa

SEQ ID NO: 1864772 - DNA, 15 bp, Homo sapiens
ttgttcccatgaaac

SEQ ID NO: 1864773 - DNA, 15 bp, Homo sapiens
tgttcccatgaaaca

SEQ ID NO: 1864774 - DNA, 15 bp, Homo sapiens
gttcccatgaaacac

SEQ ID NO: 1864775 - DNA, 15 bp, Homo sapiens
ttcccatgaaacact

SEQ ID NO: 1864776 - DNA, 15 bp, Homo sapiens
tcccatgaaacacta

SEQ ID NO: 1864777 - DNA, 15 bp, Homo sapiens
cccatgaaacactaa

SEQ ID NO: 1864778 - DNA, 15 bp, Homo sapiens
ccatgaaacactaac

SEQ ID NO: 1864779 - DNA, 15 bp, Homo sapiens
catgaaacactaact

SEQ ID NO: 1864780 - DNA, 15 bp, Homo sapiens
atgaaacactaactt

SEQ ID NO: 1864781 - DNA, 15 bp, Homo sapiens
tgaaacactaacttc

SEQ ID NO: 1864782 - DNA, 15 bp, Homo sapiens
gaaacactaacttcc

SEQ ID NO: 1864783 - DNA, 15 bp, Homo sapiens
aaacactaacttccc

SEQ ID NO: 1864784 - DNA, 15 bp, Homo sapiens
aacactaacttccct

SEQ ID NO: 1864785 - DNA, 15 bp, Homo sapiens
acactaacttccctt

SEQ ID NO: 1864786 - DNA, 15 bp, Homo sapiens
cactaacttcccttc

SEQ ID NO: 1864787 - DNA, 15 bp, Homo sapiens
actaacttcccttct

SEQ ID NO: 1864788 - DNA, 15 bp, Homo sapiens
ctaacttcccttctc

SEQ ID NO: 1864789 - DNA, 15 bp, Homo sapiens
taacttcccttctcc

SEQ ID NO: 1864790 - DNA, 15 bp, Homo sapiens
aacttcccttctccc

SEQ ID NO: 1864791 - DNA, 15 bp, Homo sapiens
acttcccttctcccc

SEQ ID NO: 1864792 - DNA, 15 bp, Homo sapiens
cttcccttctcccct

SEQ ID NO: 1864793 - DNA, 15 bp, Homo sapiens
ttcccttctcccctc

SEQ ID NO: 1864794 - DNA, 15 bp, Homo sapiens
tcccttctcccctcc

SEQ ID NO: 1864795 - DNA, 15 bp, Homo sapiens
ttctcccctccccca

SEQ ID NO: 1864796 - DNA, 15 bp, Homo sapiens
tctcccctcccccag

SEQ ID NO: 1864797 - DNA, 15 bp, Homo sapiens
ctcccctcccccagc

SEQ ID NO: 1864798 - DNA, 15 bp, Homo sapiens
tcccctcccccagca

SEQ ID NO: 1864799 - DNA, 15 bp, Homo sapiens
cccctcccccagcac

SEQ ID NO: 1864800 - DNA, 15 bp, Homo sapiens
ccctcccccagcact

SEQ ID NO: 1864801 - DNA, 15 bp, Homo sapiens
cctcccccagcactt

SEQ ID NO: 1864802 - DNA, 15 bp, Homo sapiens
ctcccccagcacttg

SEQ ID NO: 1864803 - DNA, 15 bp, Homo sapiens
tcccccagcacttgg

SEQ ID NO: 1864804 - DNA, 15 bp, Homo sapiens
cccccagcacttggc

SEQ ID NO: 1864805 - DNA, 15 bp, Homo sapiens
ccccagcacttggca

SEQ ID NO: 1864806 - DNA, 15 bp, Homo sapiens
cccagcacttggcac

SEQ ID NO: 1864807 - DNA, 15 bp, Homo sapiens
ccagcacttggcacc

SEQ ID NO: 1864808 - DNA, 15 bp, Homo sapiens
cagcacttggcaccc

SEQ ID NO: 1864809 - DNA, 15 bp, Homo sapiens
agcacttggcaccca

SEQ ID NO: 1864810 - DNA, 15 bp, Homo sapiens
gcacttggcacccac

SEQ ID NO: 1864811 - DNA, 15 bp, Homo sapiens
cacttggcacccacc

SEQ ID NO: 1864812 - DNA, 15 bp, Homo sapiens
acttggcacccacca

SEQ ID NO: 1864813 - DNA, 15 bp, Homo sapiens
cttggcacccaccat

SEQ ID NO: 1864814 - DNA, 15 bp, Homo sapiens
ttggcacccaccatt

SEQ ID NO: 1864815 - DNA, 15 bp, Homo sapiens
tggcacccaccattc

SEQ ID NO: 1864816 - DNA, 15 bp, Homo sapiens
ggcacccaccattct

SEQ ID NO: 1864817 - DNA, 15 bp, Homo sapiens
gcacccaccattctt

SEQ ID NO: 1864818 - DNA, 15 bp, Homo sapiens
cacccaccattcttt

SEQ ID NO: 1864819 - DNA, 15 bp, Homo sapiens
acccaccattctttc

SEQ ID NO: 1864820 - DNA, 15 bp, Homo sapiens
cccaccattctttct

SEQ ID NO: 1864821 - DNA, 15 bp, Homo sapiens
ccaccattctttctg

SEQ ID NO: 1864822 - DNA, 15 bp, Homo sapiens
caccattctttctgt

SEQ ID NO: 1864823 - DNA, 15 bp, Homo sapiens
accattctttctgtc

SEQ ID NO: 1864824 - DNA, 15 bp, Homo sapiens
ccattctttctgtct

SEQ ID NO: 1864825 - DNA, 15 bp, Homo sapiens
cattctttctgtcta

SEQ ID NO: 1864826 - DNA, 15 bp, Homo sapiens
attctttctgtctat

SEQ ID NO: 1864827 - DNA, 15 bp, Homo sapiens
ttctttctgtctatg

SEQ ID NO: 1864828 - DNA, 15 bp, Homo sapiens
tctttctgtctatga

SEQ ID NO: 1864829 - DNA, 15 bp, Homo sapiens
ctttctgtctatgaa

SEQ ID NO: 1864830 - DNA, 15 bp, Homo sapiens
tttctgtctatgaat

SEQ ID NO: 1864831 - DNA, 15 bp, Homo sapiens
ttctgtctatgaatt

SEQ ID NO: 1864832 - DNA, 15 bp, Homo sapiens
tctgtctatgaattt

SEQ ID NO: 1864833 - DNA, 15 bp, Homo sapiens
ctgtctatgaatttg

SEQ ID NO: 1864834 - DNA, 15 bp, Homo sapiens
tgtctatgaatttgc

SEQ ID NO: 1864835 - DNA, 15 bp, Homo sapiens
gtctatgaatttgcc

SEQ ID NO: 1864836 - DNA, 15 bp, Homo sapiens
tctatgaatttgcct

SEQ ID NO: 1864837 - DNA, 15 bp, Homo sapiens
ctatgaatttgcctc

SEQ ID NO: 1864838 - DNA, 15 bp, Homo sapiens
tatgaatttgcctcc

SEQ ID NO: 1864839 - DNA, 15 bp, Homo sapiens
atgaatttgcctcct

SEQ ID NO: 1864840 - DNA, 15 bp, Homo sapiens
tgaatttgcctcctc

SEQ ID NO: 1864841 - DNA, 15 bp, Homo sapiens
gaatttgcctcctcc

SEQ ID NO: 1864842 - DNA, 15 bp, Homo sapiens
aatttgcctcctcct

SEQ ID NO: 1864843 - DNA, 15 bp, Homo sapiens
atttgcctcctcctc

SEQ ID NO: 1864844 - DNA, 15 bp, Homo sapiens
tttgcctcctcctct

SEQ ID NO: 1864845 - DNA, 15 bp, Homo sapiens
ttgcctcctcctcta

SEQ ID NO: 1864846 - DNA, 15 bp, Homo sapiens
tgcctcctcctctag

SEQ ID NO: 1864847 - DNA, 15 bp, Homo sapiens
gcctcctcctctagg

SEQ ID NO: 1864848 - DNA, 15 bp, Homo sapiens
cctcctcctctaggt

SEQ ID NO: 1864849 - DNA, 15 bp, Homo sapiens
ctcctcctctaggta

SEQ ID NO: 1864850 - DNA, 15 bp, Homo sapiens
tcctcctctaggtac

SEQ ID NO: 1864851 - DNA, 15 bp, Homo sapiens
cctcctctaggtact

SEQ ID NO: 1864852 - DNA, 15 bp, Homo sapiens
ctcctctaggtactt

SEQ ID NO: 1864853 - DNA, 15 bp, Homo sapiens
tcctctaggtacttc

SEQ ID NO: 1864854 - DNA, 15 bp, Homo sapiens
cctctaggtacttca

SEQ ID NO: 1864855 - DNA, 15 bp, Homo sapiens
ctctaggtacttcat

SEQ ID NO: 1864856 - DNA, 15 bp, Homo sapiens
tctaggtacttcata

SEQ ID NO: 1864857 - DNA, 15 bp, Homo sapiens
ctaggtacttcatag

SEQ ID NO: 1864858 - DNA, 15 bp, Homo sapiens
taggtacttcataga

SEQ ID NO: 1864859 - DNA, 15 bp, Homo sapiens
aggtacttcatagaa

SEQ ID NO: 1864860 - DNA, 15 bp, Homo sapiens
ggtacttcatagaat

SEQ ID NO: 1864861 - DNA, 15 bp, Homo sapiens
gtacttcatagaata

SEQ ID NO: 1864862 - DNA, 15 bp, Homo sapiens
tacttcatagaatag

SEQ ID NO: 1864863 - DNA, 15 bp, Homo sapiens
acttcatagaatagt

SEQ ID NO: 1864864 - DNA, 15 bp, Homo sapiens
cttcatagaatagtg

SEQ ID NO: 1864865 - DNA, 15 bp, Homo sapiens
ttcatagaatagtgg

SEQ ID NO: 1864866 - DNA, 15 bp, Homo sapiens
tcatagaatagtgga

SEQ ID NO: 1864867 - DNA, 15 bp, Homo sapiens
catagaatagtggaa

SEQ ID NO: 1864868 - DNA, 15 bp, Homo sapiens
atagaatagtggaat

SEQ ID NO: 1864869 - DNA, 15 bp, Homo sapiens
tagaatagtggaatc

SEQ ID NO: 1864870 - DNA, 15 bp, Homo sapiens
agaatagtggaatca

SEQ ID NO: 1864871 - DNA, 15 bp, Homo sapiens
gaatagtggaatcag

SEQ ID NO: 1864872 - DNA, 15 bp, Homo sapiens
aatagtggaatcaga

SEQ ID NO: 1864873 - DNA, 15 bp, Homo sapiens
atagtggaatcagac

SEQ ID NO: 1864874 - DNA, 15 bp, Homo sapiens
tagtggaatcagaca

SEQ ID NO: 1864875 - DNA, 15 bp, Homo sapiens
agtggaatcagacag

SEQ ID NO: 1864876 - DNA, 15 bp, Homo sapiens
gtggaatcagacagt

SEQ ID NO: 1864877 - DNA, 15 bp, Homo sapiens
tggaatcagacagtg

SEQ ID NO: 1864878 - DNA, 15 bp, Homo sapiens
ggaatcagacagtgt

SEQ ID NO: 1864879 - DNA, 15 bp, Homo sapiens
gaatcagacagtgtt

SEQ ID NO: 1864880 - DNA, 15 bp, Homo sapiens
aatcagacagtgttt

SEQ ID NO: 1864881 - DNA, 15 bp, Homo sapiens
atcagacagtgtttg

SEQ ID NO: 1864882 - DNA, 15 bp, Homo sapiens
tcagacagtgtttgt

SEQ ID NO: 1864883 - DNA, 15 bp, Homo sapiens
cagacagtgtttgtc

SEQ ID NO: 1864884 - DNA, 15 bp, Homo sapiens
agacagtgtttgtcc

SEQ ID NO: 1864885 - DNA, 15 bp, Homo sapiens
gacagtgtttgtcct

SEQ ID NO: 1864886 - DNA, 15 bp, Homo sapiens
acagtgtttgtcctt

SEQ ID NO: 1864887 - DNA, 15 bp, Homo sapiens
cagtgtttgtccttt

SEQ ID NO: 1864888 - DNA, 15 bp, Homo sapiens
agtgtttgtcctttt

SEQ ID NO: 1864889 - DNA, 15 bp, Homo sapiens
gtgtttgtccttttg

SEQ ID NO: 1864890 - DNA, 15 bp, Homo sapiens
tgtttgtccttttgt

SEQ ID NO: 1864891 - DNA, 15 bp, Homo sapiens
gtttgtccttttgtg

SEQ ID NO: 1864892 - DNA, 15 bp, Homo sapiens
tttgtccttttgtga

SEQ ID NO: 1864893 - DNA, 15 bp, Homo sapiens
ttgtccttttgtgat

SEQ ID NO: 1864894 - DNA, 15 bp, Homo sapiens
tgtccttttgtgatc

SEQ ID NO: 1864895 - DNA, 15 bp, Homo sapiens
gtccttttgtgatcg

SEQ ID NO: 1864896 - DNA, 15 bp, Homo sapiens
tccttttgtgatcgg

SEQ ID NO: 1864897 - DNA, 15 bp, Homo sapiens
ccttttgtgatcggc

SEQ ID NO: 1864898 - DNA, 15 bp, Homo sapiens
cttttgtgatcggct

SEQ ID NO: 1864899 - DNA, 15 bp, Homo sapiens
ttttgtgatcggctt

SEQ ID NO: 1864900 - DNA, 15 bp, Homo sapiens
tttgtgatcggctta

SEQ ID NO: 1864901 - DNA, 15 bp, Homo sapiens
ttgtgatcggcttat

SEQ ID NO: 1864902 - DNA, 15 bp, Homo sapiens
tgtgatcggcttatt

SEQ ID NO: 1864903 - DNA, 15 bp, Homo sapiens
gtgatcggcttattt

SEQ ID NO: 1864904 - DNA, 15 bp, Homo sapiens
tgatcggcttatttc

SEQ ID NO: 1864905 - DNA, 15 bp, Homo sapiens
gatcggcttatttca

SEQ ID NO: 1864906 - DNA, 15 bp, Homo sapiens
atcggcttatttcac

SEQ ID NO: 1864907 - DNA, 15 bp, Homo sapiens
tcggcttatttcact

SEQ ID NO: 1864908 - DNA, 15 bp, Homo sapiens
cggcttatttcactt

SEQ ID NO: 1864909 - DNA, 15 bp, Homo sapiens
atttcacttaacata

SEQ ID NO: 1864910 - DNA, 15 bp, Homo sapiens
tttcacttaacataa

SEQ ID NO: 1864911 - DNA, 15 bp, Homo sapiens
ttcacttaacataat

SEQ ID NO: 1864912 - DNA, 15 bp, Homo sapiens
tcacttaacataatg

SEQ ID NO: 1864913 - DNA, 15 bp, Homo sapiens
cacttaacataatgc

SEQ ID NO: 1864914 - DNA, 15 bp, Homo sapiens
acttaacataatgcc

SEQ ID NO: 1864915 - DNA, 15 bp, Homo sapiens
cttaacataatgccc

SEQ ID NO: 1864916 - DNA, 15 bp, Homo sapiens
ttaacataatgccct

SEQ ID NO: 1864917 - DNA, 15 bp, Homo sapiens
taacataatgccctc

SEQ ID NO: 1864918 - DNA, 15 bp, Homo sapiens
aacataatgccctca

SEQ ID NO: 1864919 - DNA, 15 bp, Homo sapiens
acataatgccctcag

SEQ ID NO: 1864920 - DNA, 15 bp, Homo sapiens
cataatgccctcagg

SEQ ID NO: 1864921 - DNA, 15 bp, Homo sapiens
ataatgccctcaggg

SEQ ID NO: 1864922 - DNA, 15 bp, Homo sapiens
taatgccctcagggt

SEQ ID NO: 1864923 - DNA, 15 bp, Homo sapiens
aatgccctcagggtt

SEQ ID NO: 1864924 - DNA, 15 bp, Homo sapiens
atgccctcagggttc

SEQ ID NO: 1864925 - DNA, 15 bp, Homo sapiens
tgccctcagggttca

SEQ ID NO: 1864926 - DNA, 15 bp, Homo sapiens
gccctcagggttcat

SEQ ID NO: 1864927 - DNA, 15 bp, Homo sapiens
ccctcagggttcatc

SEQ ID NO: 1864928 - DNA, 15 bp, Homo sapiens
cctcagggttcatcc

SEQ ID NO: 1864929 - DNA, 15 bp, Homo sapiens
ctcagggttcatcca

SEQ ID NO: 1864930 - DNA, 15 bp, Homo sapiens
tcagggttcatccat

SEQ ID NO: 1864931 - DNA, 15 bp, Homo sapiens
cagggttcatccata

SEQ ID NO: 1864932 - DNA, 15 bp, Homo sapiens
agggttcatccatac

SEQ ID NO: 1864933 - DNA, 15 bp, Homo sapiens
gggttcatccatact

SEQ ID NO: 1864934 - DNA, 15 bp, Homo sapiens
ggttcatccatactc

SEQ ID NO: 1864935 - DNA, 15 bp, Homo sapiens
gttcatccatactct

SEQ ID NO: 1864936 - DNA, 15 bp, Homo sapiens
ttcatccatactcta

SEQ ID NO: 1864937 - DNA, 15 bp, Homo sapiens
tcatccatactctag

SEQ ID NO: 1864938 - DNA, 15 bp, Homo sapiens
catccatactctagc

SEQ ID NO: 1864939 - DNA, 15 bp, Homo sapiens
atccatactctagcg

SEQ ID NO: 1864940 - DNA, 15 bp, Homo sapiens
tccatactctagcgt

SEQ ID NO: 1864941 - DNA, 15 bp, Homo sapiens
ccatactctagcgta

SEQ ID NO: 1864942 - DNA, 15 bp, Homo sapiens
catactctagcgtat

SEQ ID NO: 1864943 - DNA, 15 bp, Homo sapiens
atactctagcgtatg

SEQ ID NO: 1864944 - DNA, 15 bp, Homo sapiens
tactctagcgtatgt

SEQ ID NO: 1864945 - DNA, 15 bp, Homo sapiens
actctagcgtatgtc

SEQ ID NO: 1864946 - DNA, 15 bp, Homo sapiens
ctctagcgtatgtca

SEQ ID NO: 1864947 - DNA, 15 bp, Homo sapiens
tctagcgtatgtcag

SEQ ID NO: 1864948 - DNA, 15 bp, Homo sapiens
ctagcgtatgtcaga

SEQ ID NO: 1864949 - DNA, 15 bp, Homo sapiens
tagcgtatgtcagaa

SEQ ID NO: 1864950 - DNA, 15 bp, Homo sapiens
agcgtatgtcagaat

SEQ ID NO: 1864951 - DNA, 15 bp, Homo sapiens
gcgtatgtcagaatt

SEQ ID NO: 1864952 - DNA, 15 bp, Homo sapiens
cgtatgtcagaattt

SEQ ID NO: 1864953 - DNA, 15 bp, Homo sapiens
gtatgtcagaatttc

SEQ ID NO: 1864954 - DNA, 15 bp, Homo sapiens
tatgtcagaatttcc

SEQ ID NO: 1864955 - DNA, 15 bp, Homo sapiens
tcagaatttccttct

SEQ ID NO: 1864956 - DNA, 15 bp, Homo sapiens
cagaatttccttctt

SEQ ID NO: 1864957 - DNA, 15 bp, Homo sapiens
agaatttccttcttt

SEQ ID NO: 1864958 - DNA, 15 bp, Homo sapiens
gaatttccttctttt

SEQ ID NO: 1864959 - DNA, 15 bp, Homo sapiens
aatttccttcttttt

SEQ ID NO: 1864960 - DNA, 15 bp, Homo sapiens
atttccttctttttt

SEQ ID NO: 1864961 - DNA, 15 bp, Homo sapiens
tttccttctttttta

SEQ ID NO: 1864962 - DNA, 15 bp, Homo sapiens
ttccttcttttttaa

SEQ ID NO: 1864963 - DNA, 15 bp, Homo sapiens
tccttcttttttaag

SEQ ID NO: 1864964 - DNA, 15 bp, Homo sapiens
ccttcttttttaagg

SEQ ID NO: 1864965 - DNA, 15 bp, Homo sapiens
cttcttttttaaggc

SEQ ID NO: 1864966 - DNA, 15 bp, Homo sapiens
ttcttttttaaggct

SEQ ID NO: 1864967 - DNA, 15 bp, Homo sapiens
tcttttttaaggctg

SEQ ID NO: 1864968 - DNA, 15 bp, Homo sapiens
cttttttaaggctga

SEQ ID NO: 1864969 - DNA, 15 bp, Homo sapiens
ttttttaaggctgaa

SEQ ID NO: 1864970 - DNA, 15 bp, Homo sapiens
tttttaaggctgaat

SEQ ID NO: 1864971 - DNA, 15 bp, Homo sapiens
ttttaaggctgaata

SEQ ID NO: 1864972 - DNA, 15 bp, Homo sapiens
tttaaggctgaataa

SEQ ID NO: 1864973 - DNA, 15 bp, Homo sapiens
ttaaggctgaataat

SEQ ID NO: 1864974 - DNA, 15 bp, Homo sapiens
taaggctgaataata

SEQ ID NO: 1864975 - DNA, 15 bp, Homo sapiens
aaggctgaataatat

SEQ ID NO: 1864976 - DNA, 15 bp, Homo sapiens
aggctgaataatatt

SEQ ID NO: 1864977 - DNA, 15 bp, Homo sapiens
ggctgaataatattt

SEQ ID NO: 1864978 - DNA, 15 bp, Homo sapiens
gctgaataatatttt

SEQ ID NO: 1864979 - DNA, 15 bp, Homo sapiens
ctgaataatatttta

SEQ ID NO: 1864980 - DNA, 15 bp, Homo sapiens
tgaataatattttat

SEQ ID NO: 1864981 - DNA, 15 bp, Homo sapiens
gaataatattttatt

SEQ ID NO: 1864982 - DNA, 15 bp, Homo sapiens
aataatattttattg

SEQ ID NO: 1864983 - DNA, 15 bp, Homo sapiens
ataatattttattgt

SEQ ID NO: 1864984 - DNA, 15 bp, Homo sapiens
taatattttattgta

SEQ ID NO: 1864985 - DNA, 15 bp, Homo sapiens
aatattttattgtat

SEQ ID NO: 1864986 - DNA, 15 bp, Homo sapiens
atattttattgtatg

SEQ ID NO: 1864987 - DNA, 15 bp, Homo sapiens
tattttattgtatga

SEQ ID NO: 1864988 - DNA, 15 bp, Homo sapiens
attttattgtatgaa

SEQ ID NO: 1864989 - DNA, 15 bp, Homo sapiens
ttttattgtatgaat

SEQ ID NO: 1864990 - DNA, 15 bp, Homo sapiens
tttattgtatgaata

SEQ ID NO: 1864991 - DNA, 15 bp, Homo sapiens
ttattgtatgaatat

SEQ ID NO: 1864992 - DNA, 15 bp, Homo sapiens
tattgtatgaatatt

SEQ ID NO: 1864993 - DNA, 15 bp, Homo sapiens
attgtatgaatattc

SEQ ID NO: 1864994 - DNA, 15 bp, Homo sapiens
ttgtatgaatattcc

SEQ ID NO: 1864995 - DNA, 15 bp, Homo sapiens
tgtatgaatattcca

SEQ ID NO: 1864996 - DNA, 15 bp, Homo sapiens
gtatgaatattccat

SEQ ID NO: 1864997 - DNA, 15 bp, Homo sapiens
tatgaatattccatg

SEQ ID NO: 1864998 - DNA, 15 bp, Homo sapiens
atgaatattccatgt

SEQ ID NO: 1864999 - DNA, 15 bp, Homo sapiens
tgaatattccatgtc

SEQ ID NO: 1865000 - DNA, 15 bp, Homo sapiens
gaatattccatgtct

SEQ ID NO: 1865001 - DNA, 15 bp, Homo sapiens
aatattccatgtctg

SEQ ID NO: 1865002 - DNA, 15 bp, Homo sapiens
atattccatgtctgg

SEQ ID NO: 1865003 - DNA, 15 bp, Homo sapiens
tattccatgtctggt

SEQ ID NO: 1865004 - DNA, 15 bp, Homo sapiens
attccatgtctggtt

SEQ ID NO: 1865005 - DNA, 15 bp, Homo sapiens
ttccatgtctggttg

SEQ ID NO: 1865006 - DNA, 15 bp, Homo sapiens
tccatgtctggttga

SEQ ID NO: 1865007 - DNA, 15 bp, Homo sapiens
ccatgtctggttgat

SEQ ID NO: 1865008 - DNA, 15 bp, Homo sapiens
catgtctggttgatt

SEQ ID NO: 1865009 - DNA, 15 bp, Homo sapiens
atgtctggttgattt

SEQ ID NO: 1865010 - DNA, 15 bp, Homo sapiens
tgtctggttgattta

SEQ ID NO: 1865011 - DNA, 15 bp, Homo sapiens
gtctggttgatttat

SEQ ID NO: 1865012 - DNA, 15 bp, Homo sapiens
tctggttgatttatt

SEQ ID NO: 1865013 - DNA, 15 bp, Homo sapiens
ctggttgatttattg

SEQ ID NO: 1865014 - DNA, 15 bp, Homo sapiens
tggttgatttattgc

SEQ ID NO: 1865015 - DNA, 15 bp, Homo sapiens
ggttgatttattgct

SEQ ID NO: 1865016 - DNA, 15 bp, Homo sapiens
gttgatttattgctt

SEQ ID NO: 1865017 - DNA, 15 bp, Homo sapiens
ttgatttattgcttg

SEQ ID NO: 1865018 - DNA, 15 bp, Homo sapiens
tgatttattgcttga

SEQ ID NO: 1865019 - DNA, 15 bp, Homo sapiens
gatttattgcttgat

SEQ ID NO: 1865020 - DNA, 15 bp, Homo sapiens
atttattgcttgatg

SEQ ID NO: 1865021 - DNA, 15 bp, Homo sapiens
tttattgcttgatgg

SEQ ID NO: 1865022 - DNA, 15 bp, Homo sapiens
ttattgcttgatgga

SEQ ID NO: 1865023 - DNA, 15 bp, Homo sapiens
tattgcttgatggac

SEQ ID NO: 1865024 - DNA, 15 bp, Homo sapiens
attgcttgatggaca

SEQ ID NO: 1865025 - DNA, 15 bp, Homo sapiens
ttgcttgatggacac

SEQ ID NO: 1865026 - DNA, 15 bp, Homo sapiens
tgcttgatggacact

SEQ ID NO: 1865027 - DNA, 15 bp, Homo sapiens
gcttgatggacactt

SEQ ID NO: 1865028 - DNA, 15 bp, Homo sapiens
cttgatggacacttg

SEQ ID NO: 1865029 - DNA, 15 bp, Homo sapiens
ttgatggacacttgg

SEQ ID NO: 1865030 - DNA, 15 bp, Homo sapiens
tgatggacacttggc

SEQ ID NO: 1865031 - DNA, 15 bp, Homo sapiens
gatggacacttggct

SEQ ID NO: 1865032 - DNA, 15 bp, Homo sapiens
atggacacttggctt

SEQ ID NO: 1865033 - DNA, 15 bp, Homo sapiens
tggacacttggcttg

SEQ ID NO: 1865034 - DNA, 15 bp, Homo sapiens
ggacacttggcttgc

SEQ ID NO: 1865035 - DNA, 15 bp, Homo sapiens
gacacttggcttgct

SEQ ID NO: 1865036 - DNA, 15 bp, Homo sapiens
acacttggcttgctt

SEQ ID NO: 1865037 - DNA, 15 bp, Homo sapiens
cacttggcttgcttc

SEQ ID NO: 1865038 - DNA, 15 bp, Homo sapiens
acttggcttgcttct

SEQ ID NO: 1865039 - DNA, 15 bp, Homo sapiens
cttggcttgcttcta

SEQ ID NO: 1865040 - DNA, 15 bp, Homo sapiens
ttggcttgcttctac

SEQ ID NO: 1865041 - DNA, 15 bp, Homo sapiens
tggcttgcttctacc

SEQ ID NO: 1865042 - DNA, 15 bp, Homo sapiens
ggcttgcttctacct

SEQ ID NO: 1865043 - DNA, 15 bp, Homo sapiens
gcttgcttctacctt

SEQ ID NO: 1865044 - DNA, 15 bp, Homo sapiens
cttgcttctaccttt

SEQ ID NO: 1865045 - DNA, 15 bp, Homo sapiens
ttgcttctacctttt

SEQ ID NO: 1865046 - DNA, 15 bp, Homo sapiens
tgcttctaccttttg

SEQ ID NO: 1865047 - DNA, 15 bp, Homo sapiens
gcttctaccttttgg

SEQ ID NO: 1865048 - DNA, 15 bp, Homo sapiens
cttctaccttttggc

SEQ ID NO: 1865049 - DNA, 15 bp, Homo sapiens
ttctaccttttggct

SEQ ID NO: 1865050 - DNA, 15 bp, Homo sapiens
tctaccttttggcta

SEQ ID NO: 1865051 - DNA, 15 bp, Homo sapiens
ctaccttttggctat

SEQ ID NO: 1865052 - DNA, 15 bp, Homo sapiens
taccttttggctatt

SEQ ID NO: 1865053 - DNA, 15 bp, Homo sapiens
accttttggctattg

SEQ ID NO: 1865054 - DNA, 15 bp, Homo sapiens
ccttttggctattgt

SEQ ID NO: 1865055 - DNA, 15 bp, Homo sapiens
cttttggctattgtg

SEQ ID NO: 1865056 - DNA, 15 bp, Homo sapiens
tttggctattgtgaa

SEQ ID NO: 1865057 - DNA, 15 bp, Homo sapiens
ttggctattgtgaat

SEQ ID NO: 1865058 - DNA, 15 bp, Homo sapiens
tggctattgtgaata

SEQ ID NO: 1865059 - DNA, 15 bp, Homo sapiens
ggctattgtgaataa

SEQ ID NO: 1865060 - DNA, 15 bp, Homo sapiens
gctattgtgaataat

SEQ ID NO: 1865061 - DNA, 15 bp, Homo sapiens
ctattgtgaataatg

SEQ ID NO: 1865062 - DNA, 15 bp, Homo sapiens
tattgtgaataatgc

SEQ ID NO: 1865063 - DNA, 15 bp, Homo sapiens
attgtgaataatgct

SEQ ID NO: 1865064 - DNA, 15 bp, Homo sapiens
ttgtgaataatgctg

SEQ ID NO: 1865065 - DNA, 15 bp, Homo sapiens
tgtgaataatgctgc

SEQ ID NO: 1865066 - DNA, 15 bp, Homo sapiens
gtgaataatgctgct

SEQ ID NO: 1865067 - DNA, 15 bp, Homo sapiens
tgaataatgctgctg

SEQ ID NO: 1865068 - DNA, 15 bp, Homo sapiens
gaataatgctgctgt

SEQ ID NO: 1865069 - DNA, 15 bp, Homo sapiens
aataatgctgctgtg

SEQ ID NO: 1865070 - DNA, 15 bp, Homo sapiens
ataatgctgctgtga

SEQ ID NO: 1865071 - DNA, 15 bp, Homo sapiens
taatgctgctgtgaa

SEQ ID NO: 1865072 - DNA, 15 bp, Homo sapiens
aatgctgctgtgaac

SEQ ID NO: 1865073 - DNA, 15 bp, Homo sapiens
atgctgctgtgaaca

SEQ ID NO: 1865074 - DNA, 15 bp, Homo sapiens
tgctgctgtgaacat

SEQ ID NO: 1865075 - DNA, 15 bp, Homo sapiens
gctgctgtgaacatg

SEQ ID NO: 1865076 - DNA, 15 bp, Homo sapiens
ctgctgtgaacatgg

SEQ ID NO: 1865077 - DNA, 15 bp, Homo sapiens
tgctgtgaacatgga

SEQ ID NO: 1865078 - DNA, 15 bp, Homo sapiens
gctgtgaacatggat

SEQ ID NO: 1865079 - DNA, 15 bp, Homo sapiens
ctgtgaacatggatg

SEQ ID NO: 1865080 - DNA, 15 bp, Homo sapiens
tgtgaacatggatgt

SEQ ID NO: 1865081 - DNA, 15 bp, Homo sapiens
gtgaacatggatgtg

SEQ ID NO: 1865082 - DNA, 15 bp, Homo sapiens
tgaacatggatgtgc

SEQ ID NO: 1865083 - DNA, 15 bp, Homo sapiens
gaacatggatgtgca

SEQ ID NO: 1865084 - DNA, 15 bp, Homo sapiens
aacatggatgtgcaa

SEQ ID NO: 1865085 - DNA, 15 bp, Homo sapiens
acatggatgtgcaaa

SEQ ID NO: 1865086 - DNA, 15 bp, Homo sapiens
catggatgtgcaaat

SEQ ID NO: 1865087 - DNA, 15 bp, Homo sapiens
atggatgtgcaaata

SEQ ID NO: 1865088 - DNA, 15 bp, Homo sapiens
tggatgtgcaaatac

SEQ ID NO: 1865089 - DNA, 15 bp, Homo sapiens
ggatgtgcaaatacc

SEQ ID NO: 1865090 - DNA, 15 bp, Homo sapiens
gatgtgcaaatacca

SEQ ID NO: 1865091 - DNA, 15 bp, Homo sapiens
atgtgcaaataccac

SEQ ID NO: 1865092 - DNA, 15 bp, Homo sapiens
tgtgcaaataccact

SEQ ID NO: 1865093 - DNA, 15 bp, Homo sapiens
gtgcaaataccactg

SEQ ID NO: 1865094 - DNA, 15 bp, Homo sapiens
tgcaaataccactgg

SEQ ID NO: 1865095 - DNA, 15 bp, Homo sapiens
gcaaataccactgga

SEQ ID NO: 1865096 - DNA, 15 bp, Homo sapiens
caaataccactggag

SEQ ID NO: 1865097 - DNA, 15 bp, Homo sapiens
aaataccactggagt

SEQ ID NO: 1865098 - DNA, 15 bp, Homo sapiens
aataccactggagtc

SEQ ID NO: 1865099 - DNA, 15 bp, Homo sapiens
ataccactggagtcg

SEQ ID NO: 1865100 - DNA, 15 bp, Homo sapiens
taccactggagtcgc

SEQ ID NO: 1865101 - DNA, 15 bp, Homo sapiens
accactggagtcgcc

SEQ ID NO: 1865102 - DNA, 15 bp, Homo sapiens
ccactggagtcgccg

SEQ ID NO: 1865103 - DNA, 15 bp, Homo sapiens
cactggagtcgccgc

SEQ ID NO: 1865104 - DNA, 15 bp, Homo sapiens
actggagtcgccgct

SEQ ID NO: 1865105 - DNA, 15 bp, Homo sapiens
ctggagtcgccgctt

SEQ ID NO: 1865106 - DNA, 15 bp, Homo sapiens
tggagtcgccgcttt

SEQ ID NO: 1865107 - DNA, 15 bp, Homo sapiens
ggagtcgccgctttc

SEQ ID NO: 1865108 - DNA, 15 bp, Homo sapiens
gagtcgccgctttca

SEQ ID NO: 1865109 - DNA, 15 bp, Homo sapiens
agtcgccgctttcag

SEQ ID NO: 1865110 - DNA, 15 bp, Homo sapiens
gtcgccgctttcagt

SEQ ID NO: 1865111 - DNA, 15 bp, Homo sapiens
tcgccgctttcagtt

SEQ ID NO: 1865112 - DNA, 15 bp, Homo sapiens
cgccgctttcagttc

SEQ ID NO: 1865113 - DNA, 15 bp, Homo sapiens
gccgctttcagttct

SEQ ID NO: 1865114 - DNA, 15 bp, Homo sapiens
ccgctttcagttctt

SEQ ID NO: 1865115 - DNA, 15 bp, Homo sapiens
cgctttcagttcttc

SEQ ID NO: 1865116 - DNA, 15 bp, Homo sapiens
gctttcagttcttct

SEQ ID NO: 1865117 - DNA, 15 bp, Homo sapiens
ctttcagttcttctg

SEQ ID NO: 1865118 - DNA, 15 bp, Homo sapiens
tttcagttcttctgg

SEQ ID NO: 1865119 - DNA, 15 bp, Homo sapiens
ttcagttcttctggg

SEQ ID NO: 1865120 - DNA, 15 bp, Homo sapiens
tcagttcttctgggt

SEQ ID NO: 1865121 - DNA, 15 bp, Homo sapiens
cagttcttctgggta

SEQ ID NO: 1865122 - DNA, 15 bp, Homo sapiens
agttcttctgggtat

SEQ ID NO: 1865123 - DNA, 15 bp, Homo sapiens
gttcttctgggtata

SEQ ID NO: 1865124 - DNA, 15 bp, Homo sapiens
ttcttctgggtatat

SEQ ID NO: 1865125 - DNA, 15 bp, Homo sapiens
tcttctgggtatata

SEQ ID NO: 1865126 - DNA, 15 bp, Homo sapiens
cttctgggtatatac

SEQ ID NO: 1865127 - DNA, 15 bp, Homo sapiens
ttctgggtatatacc

SEQ ID NO: 1865128 - DNA, 15 bp, Homo sapiens
ggtatatacccagag

SEQ ID NO: 1865129 - DNA, 15 bp, Homo sapiens
gtatatacccagagg

SEQ ID NO: 1865130 - DNA, 15 bp, Homo sapiens
tatatacccagaggt

SEQ ID NO: 1865131 - DNA, 15 bp, Homo sapiens
atatacccagaggtg

SEQ ID NO: 1865132 - DNA, 15 bp, Homo sapiens
tatacccagaggtgg

SEQ ID NO: 1865133 - DNA, 15 bp, Homo sapiens
atacccagaggtgga

SEQ ID NO: 1865134 - DNA, 15 bp, Homo sapiens
tacccagaggtggaa

SEQ ID NO: 1865135 - DNA, 15 bp, Homo sapiens
acccagaggtggaat

SEQ ID NO: 1865136 - DNA, 15 bp, Homo sapiens
cccagaggtggaatt

SEQ ID NO: 1865137 - DNA, 15 bp, Homo sapiens
ccagaggtggaattg

SEQ ID NO: 1865138 - DNA, 15 bp, Homo sapiens
cagaggtggaattgc

SEQ ID NO: 1865139 - DNA, 15 bp, Homo sapiens
agaggtggaattgct

SEQ ID NO: 1865140 - DNA, 15 bp, Homo sapiens
gaggtggaattgcta

SEQ ID NO: 1865141 - DNA, 15 bp, Homo sapiens
aggtggaattgctaa

SEQ ID NO: 1865142 - DNA, 15 bp, Homo sapiens
ggtggaattgctaaa

SEQ ID NO: 1865143 - DNA, 15 bp, Homo sapiens
gtggaattgctaaat

SEQ ID NO: 1865144 - DNA, 15 bp, Homo sapiens
tggaattgctaaatt

SEQ ID NO: 1865145 - DNA, 15 bp, Homo sapiens
ggaattgctaaatta

SEQ ID NO: 1865146 - DNA, 15 bp, Homo sapiens
gaattgctaaattac

SEQ ID NO: 1865147 - DNA, 15 bp, Homo sapiens
aattgctaaattaca

SEQ ID NO: 1865148 - DNA, 15 bp, Homo sapiens
attgctaaattacac

SEQ ID NO: 1865149 - DNA, 15 bp, Homo sapiens
ttgctaaattacact

SEQ ID NO: 1865150 - DNA, 15 bp, Homo sapiens
tgctaaattacactg

SEQ ID NO: 1865151 - DNA, 15 bp, Homo sapiens
gctaaattacactgt

SEQ ID NO: 1865152 - DNA, 15 bp, Homo sapiens
ctaaattacactgtc

SEQ ID NO: 1865153 - DNA, 15 bp, Homo sapiens
taaattacactgtca

SEQ ID NO: 1865154 - DNA, 15 bp, Homo sapiens
aaattacactgtcat

SEQ ID NO: 1865155 - DNA, 15 bp, Homo sapiens
aattacactgtcatt

SEQ ID NO: 1865156 - DNA, 15 bp, Homo sapiens
attacactgtcattc

SEQ ID NO: 1865157 - DNA, 15 bp, Homo sapiens
ttacactgtcattct

SEQ ID NO: 1865158 - DNA, 15 bp, Homo sapiens
tacactgtcattctg

SEQ ID NO: 1865159 - DNA, 15 bp, Homo sapiens
acactgtcattctgt

SEQ ID NO: 1865160 - DNA, 15 bp, Homo sapiens
cactgtcattctgtg

SEQ ID NO: 1865161 - DNA, 15 bp, Homo sapiens
actgtcattctgtgt

SEQ ID NO: 1865162 - DNA, 15 bp, Homo sapiens
ctgtcattctgtgtt

SEQ ID NO: 1865163 - DNA, 15 bp, Homo sapiens
tgtcattctgtgttt

SEQ ID NO: 1865164 - DNA, 15 bp, Homo sapiens
gtcattctgtgttta

SEQ ID NO: 1865165 - DNA, 15 bp, Homo sapiens
tcattctgtgtttaa

SEQ ID NO: 1865166 - DNA, 15 bp, Homo sapiens
cattctgtgtttaat

SEQ ID NO: 1865167 - DNA, 15 bp, Homo sapiens
attctgtgtttaatt

SEQ ID NO: 1865168 - DNA, 15 bp, Homo sapiens
ttctgtgtttaattt

SEQ ID NO: 1865169 - DNA, 15 bp, Homo sapiens
tctgtgtttaatttt

SEQ ID NO: 1865170 - DNA, 15 bp, Homo sapiens
ctgtgtttaattttt

SEQ ID NO: 1865171 - DNA, 15 bp, Homo sapiens
tgtgtttaatttttt

SEQ ID NO: 1865172 - DNA, 15 bp, Homo sapiens
gtgtttaatttttta

SEQ ID NO: 1865173 - DNA, 15 bp, Homo sapiens
tgtttaattttttaa

SEQ ID NO: 1865174 - DNA, 15 bp, Homo sapiens
gtttaattttttaag

SEQ ID NO: 1865175 - DNA, 15 bp, Homo sapiens
tttaattttttaagg

SEQ ID NO: 1865176 - DNA, 15 bp, Homo sapiens
ttaattttttaaggc

SEQ ID NO: 1865177 - DNA, 15 bp, Homo sapiens
taattttttaaggca

SEQ ID NO: 1865178 - DNA, 15 bp, Homo sapiens
aattttttaaggcat

SEQ ID NO: 1865179 - DNA, 15 bp, Homo sapiens
attttttaaggcatc

SEQ ID NO: 1865180 - DNA, 15 bp, Homo sapiens
ttttttaaggcatcg

SEQ ID NO: 1865181 - DNA, 15 bp, Homo sapiens
tttttaaggcatcgc

SEQ ID NO: 1865182 - DNA, 15 bp, Homo sapiens
ttttaaggcatcgcc

SEQ ID NO: 1865183 - DNA, 15 bp, Homo sapiens
tttaaggcatcgcca

SEQ ID NO: 1865184 - DNA, 15 bp, Homo sapiens
ttaaggcatcgccaa

SEQ ID NO: 1865185 - DNA, 15 bp, Homo sapiens
taaggcatcgccaac

SEQ ID NO: 1865186 - DNA, 15 bp, Homo sapiens
aaggcatcgccaacg

SEQ ID NO: 1865187 - DNA, 15 bp, Homo sapiens
aggcatcgccaacgg

SEQ ID NO: 1865188 - DNA, 15 bp, Homo sapiens
ggcatcgccaacggt

SEQ ID NO: 1865189 - DNA, 15 bp, Homo sapiens
gcatcgccaacggta

SEQ ID NO: 1865190 - DNA, 15 bp, Homo sapiens
catcgccaacggtag

SEQ ID NO: 1865191 - DNA, 15 bp, Homo sapiens
atcgccaacggtagg

SEQ ID NO: 1865192 - DNA, 15 bp, Homo sapiens
tcgccaacggtaggg

SEQ ID NO: 1865193 - DNA, 15 bp, Homo sapiens
cgccaacggtagggc

SEQ ID NO: 1865194 - DNA, 15 bp, Homo sapiens
gccaacggtagggcc

SEQ ID NO: 1865195 - DNA, 15 bp, Homo sapiens
ccaacggtagggcct

SEQ ID NO: 1865196 - DNA, 15 bp, Homo sapiens
caacggtagggcctc

SEQ ID NO: 1865197 - DNA, 15 bp, Homo sapiens
aacggtagggcctcc

SEQ ID NO: 1865198 - DNA, 15 bp, Homo sapiens
acggtagggcctcct

SEQ ID NO: 1865199 - DNA, 15 bp, Homo sapiens
cggtagggcctcctt

SEQ ID NO: 1865200 - DNA, 15 bp, Homo sapiens
ggtagggcctccttg

SEQ ID NO: 1865201 - DNA, 15 bp, Homo sapiens
gtagggcctccttga

SEQ ID NO: 1865202 - DNA, 15 bp, Homo sapiens
tagggcctccttgac

SEQ ID NO: 1865203 - DNA, 15 bp, Homo sapiens
agggcctccttgact

SEQ ID NO: 1865204 - DNA, 15 bp, Homo sapiens
gggcctccttgactt

SEQ ID NO: 1865205 - DNA, 15 bp, Homo sapiens
ggcctccttgacttg

SEQ ID NO: 1865206 - DNA, 15 bp, Homo sapiens
gcctccttgacttgt

SEQ ID NO: 1865207 - DNA, 15 bp, Homo sapiens
cctccttgacttgtg

SEQ ID NO: 1865208 - DNA, 15 bp, Homo sapiens
ctccttgacttgtgc

SEQ ID NO: 1865209 - DNA, 15 bp, Homo sapiens
tccttgacttgtgcc

SEQ ID NO: 1865210 - DNA, 15 bp, Homo sapiens
ccttgacttgtgcct

SEQ ID NO: 1865211 - DNA, 15 bp, Homo sapiens
cttgacttgtgcctc

SEQ ID NO: 1865212 - DNA, 15 bp, Homo sapiens
ttgacttgtgcctca

SEQ ID NO: 1865213 - DNA, 15 bp, Homo sapiens
tgacttgtgcctcat

SEQ ID NO: 1865214 - DNA, 15 bp, Homo sapiens
gacttgtgcctcatg

SEQ ID NO: 1865215 - DNA, 15 bp, Homo sapiens
acttgtgcctcatgt

SEQ ID NO: 1865216 - DNA, 15 bp, Homo sapiens
cttgtgcctcatgtg

SEQ ID NO: 1865217 - DNA, 15 bp, Homo sapiens
ttgtgcctcatgtgt

SEQ ID NO: 1865218 - DNA, 15 bp, Homo sapiens
tgtgcctcatgtgtc

SEQ ID NO: 1865219 - DNA, 15 bp, Homo sapiens
gtgcctcatgtgtcg

SEQ ID NO: 1865220 - DNA, 15 bp, Homo sapiens
tgcctcatgtgtcgg

SEQ ID NO: 1865221 - DNA, 15 bp, Homo sapiens
gcctcatgtgtcggc

SEQ ID NO: 1865222 - DNA, 15 bp, Homo sapiens
cctcatgtgtcggca

SEQ ID NO: 1865223 - DNA, 15 bp, Homo sapiens
ctcatgtgtcggcac

SEQ ID NO: 1865224 - DNA, 15 bp, Homo sapiens
tcatgtgtcggcaca

SEQ ID NO: 1865225 - DNA, 15 bp, Homo sapiens
catgtgtcggcacac

SEQ ID NO: 1865226 - DNA, 15 bp, Homo sapiens
atgtgtcggcacaca

SEQ ID NO: 1865227 - DNA, 15 bp, Homo sapiens
tgtgtcggcacacac

SEQ ID NO: 1865228 - DNA, 15 bp, Homo sapiens
gtgtcggcacacacc

SEQ ID NO: 1865229 - DNA, 15 bp, Homo sapiens
tgtcggcacacaccg

SEQ ID NO: 1865230 - DNA, 15 bp, Homo sapiens
gtcggcacacaccga

SEQ ID NO: 1865231 - DNA, 15 bp, Homo sapiens
tcggcacacaccgat

SEQ ID NO: 1865232 - DNA, 15 bp, Homo sapiens
cggcacacaccgatc

SEQ ID NO: 1865233 - DNA, 15 bp, Homo sapiens
ggcacacaccgatcg

SEQ ID NO: 1865234 - DNA, 15 bp, Homo sapiens
gcacacaccgatcgc

SEQ ID NO: 1865235 - DNA, 15 bp, Homo sapiens
cacacaccgatcgca

SEQ ID NO: 1865236 - DNA, 15 bp, Homo sapiens
acacaccgatcgcat

SEQ ID NO: 1865237 - DNA, 15 bp, Homo sapiens
cacaccgatcgcatg

SEQ ID NO: 1865238 - DNA, 15 bp, Homo sapiens
acaccgatcgcatgc

SEQ ID NO: 1865239 - DNA, 15 bp, Homo sapiens
caccgatcgcatgcg

SEQ ID NO: 1865240 - DNA, 15 bp, Homo sapiens
accgatcgcatgcgg

SEQ ID NO: 1865241 - DNA, 15 bp, Homo sapiens
ccgatcgcatgcggt

SEQ ID NO: 1865242 - DNA, 15 bp, Homo sapiens
cgatcgcatgcggtg

SEQ ID NO: 1865243 - DNA, 15 bp, Homo sapiens
gatcgcatgcggtgg

SEQ ID NO: 1865244 - DNA, 15 bp, Homo sapiens
atcgcatgcggtggg

SEQ ID NO: 1865245 - DNA, 15 bp, Homo sapiens
tcgcatgcggtgggg

SEQ ID NO: 1865246 - DNA, 15 bp, Homo sapiens
cgcatgcggtggggg

SEQ ID NO: 1865247 - DNA, 15 bp, Homo sapiens
gcatgcggtggggga

SEQ ID NO: 1865248 - DNA, 15 bp, Homo sapiens
catgcggtgggggag

SEQ ID NO: 1865249 - DNA, 15 bp, Homo sapiens
atgcggtgggggagc

SEQ ID NO: 1865250 - DNA, 15 bp, Homo sapiens
tgcggtgggggagcc

SEQ ID NO: 1865251 - DNA, 15 bp, Homo sapiens
gcggtgggggagccc

SEQ ID NO: 1865252 - DNA, 15 bp, Homo sapiens
cggtgggggagccct

SEQ ID NO: 1865253 - DNA, 15 bp, Homo sapiens
ggtgggggagcccta

SEQ ID NO: 1865254 - DNA, 15 bp, Homo sapiens
gtgggggagccctac

SEQ ID NO: 1865255 - DNA, 15 bp, Homo sapiens
tgggggagccctacc

SEQ ID NO: 1865256 - DNA, 15 bp, Homo sapiens
gggggagccctaccc

SEQ ID NO: 1865257 - DNA, 15 bp, Homo sapiens
ggggagccctaccca

SEQ ID NO: 1865258 - DNA, 15 bp, Homo sapiens
gggagccctacccac

SEQ ID NO: 1865259 - DNA, 15 bp, Homo sapiens
ggagccctacccacc

SEQ ID NO: 1865260 - DNA, 15 bp, Homo sapiens
gagccctacccaccg

SEQ ID NO: 1865261 - DNA, 15 bp, Homo sapiens
agccctacccaccgg

SEQ ID NO: 1865262 - DNA, 15 bp, Homo sapiens
gccctacccaccggg

SEQ ID NO: 1865263 - DNA, 15 bp, Homo sapiens
ccctacccaccgggg

SEQ ID NO: 1865264 - DNA, 15 bp, Homo sapiens
cctacccaccggggt

SEQ ID NO: 1865265 - DNA, 15 bp, Homo sapiens
ctacccaccggggtg

SEQ ID NO: 1865266 - DNA, 15 bp, Homo sapiens
tacccaccggggtgg

SEQ ID NO: 1865267 - DNA, 15 bp, Homo sapiens
acccaccggggtggg

SEQ ID NO: 1865268 - DNA, 15 bp, Homo sapiens
cccaccggggtgggc

SEQ ID NO: 1865269 - DNA, 15 bp, Homo sapiens
ccaccggggtgggct

SEQ ID NO: 1865270 - DNA, 15 bp, Homo sapiens
caccggggtgggctt

SEQ ID NO: 1865271 - DNA, 15 bp, Homo sapiens
accggggtgggcttg

SEQ ID NO: 1865272 - DNA, 15 bp, Homo sapiens
ccggggtgggcttga

SEQ ID NO: 1865273 - DNA, 15 bp, Homo sapiens
cggggtgggcttgag

SEQ ID NO: 1865274 - DNA, 15 bp, Homo sapiens
ggggtgggcttgagg

SEQ ID NO: 1865275 - DNA, 15 bp, Homo sapiens
gggtgggcttgaggg

SEQ ID NO: 1865276 - DNA, 15 bp, Homo sapiens
ggtgggcttgagggc

SEQ ID NO: 1865277 - DNA, 15 bp, Homo sapiens
gtgggcttgagggcg

SEQ ID NO: 1865278 - DNA, 15 bp, Homo sapiens
tgggcttgagggcga

SEQ ID NO: 1865279 - DNA, 15 bp, Homo sapiens
gggcttgagggcgaa

SEQ ID NO: 1865280 - DNA, 15 bp, Homo sapiens
ggcttgagggcgaat

SEQ ID NO: 1865281 - DNA, 15 bp, Homo sapiens
gcttgagggcgaatc

SEQ ID NO: 1865282 - DNA, 15 bp, Homo sapiens
cttgagggcgaatcc

SEQ ID NO: 1865283 - DNA, 15 bp, Homo sapiens
ttgagggcgaatcct

SEQ ID NO: 1865284 - DNA, 15 bp, Homo sapiens
tgagggcgaatcctg

SEQ ID NO: 1865285 - DNA, 15 bp, Homo sapiens
gagggcgaatcctgg

SEQ ID NO: 1865286 - DNA, 15 bp, Homo sapiens
agggcgaatcctggg

SEQ ID NO: 1865287 - DNA, 15 bp, Homo sapiens
gggcgaatcctgggg

SEQ ID NO: 1865288 - DNA, 15 bp, Homo sapiens
ggcgaatcctggggc

SEQ ID NO: 1865289 - DNA, 15 bp, Homo sapiens
gcgaatcctggggca

SEQ ID NO: 1865290 - DNA, 15 bp, Homo sapiens
cgaatcctggggcag

SEQ ID NO: 1865291 - DNA, 15 bp, Homo sapiens
gaatcctggggcaga

SEQ ID NO: 1865292 - DNA, 15 bp, Homo sapiens
aatcctggggcagag

SEQ ID NO: 1865293 - DNA, 15 bp, Homo sapiens
atcctggggcagagg

SEQ ID NO: 1865294 - DNA, 15 bp, Homo sapiens
tcctggggcagaggg

SEQ ID NO: 1865295 - DNA, 15 bp, Homo sapiens
cctggggcagaggga

SEQ ID NO: 1865296 - DNA, 15 bp, Homo sapiens
ctggggcagagggag

SEQ ID NO: 1865297 - DNA, 15 bp, Homo sapiens
tggggcagagggagt

SEQ ID NO: 1865298 - DNA, 15 bp, Homo sapiens
ggggcagagggagtg

SEQ ID NO: 1865299 - DNA, 15 bp, Homo sapiens
gggcagagggagtga

SEQ ID NO: 1865300 - DNA, 15 bp, Homo sapiens
ggcagagggagtgag

SEQ ID NO: 1865301 - DNA, 15 bp, Homo sapiens
gcagagggagtgaga

SEQ ID NO: 1865302 - DNA, 15 bp, Homo sapiens
cagagggagtgagaa

SEQ ID NO: 1865303 - DNA, 15 bp, Homo sapiens
agagggagtgagaaa

SEQ ID NO: 1865304 - DNA, 15 bp, Homo sapiens
gagggagtgagaaag

SEQ ID NO: 1865305 - DNA, 15 bp, Homo sapiens
agggagtgagaaagc

SEQ ID NO: 1865306 - DNA, 15 bp, Homo sapiens
gggagtgagaaagcg

SEQ ID NO: 1865307 - DNA, 15 bp, Homo sapiens
ggagtgagaaagcgg

SEQ ID NO: 1865308 - DNA, 15 bp, Homo sapiens
gagtgagaaagcggg

SEQ ID NO: 1865309 - DNA, 15 bp, Homo sapiens
agtgagaaagcgggg

SEQ ID NO: 1865310 - DNA, 15 bp, Homo sapiens
gtgagaaagcgggga

SEQ ID NO: 1865311 - DNA, 15 bp, Homo sapiens
tgagaaagcggggag

SEQ ID NO: 1865312 - DNA, 15 bp, Homo sapiens
gagaaagcggggagg

SEQ ID NO: 1865313 - DNA, 15 bp, Homo sapiens
agaaagcggggaggg

SEQ ID NO: 1865314 - DNA, 15 bp, Homo sapiens
gaaagcggggagggg

SEQ ID NO: 1865315 - DNA, 15 bp, Homo sapiens
aaagcggggagggga

SEQ ID NO: 1865316 - DNA, 15 bp, Homo sapiens
aagcggggaggggac

SEQ ID NO: 1865317 - DNA, 15 bp, Homo sapiens
agcggggaggggaca

SEQ ID NO: 1865318 - DNA, 15 bp, Homo sapiens
gcggggaggggacag

SEQ ID NO: 1865319 - DNA, 15 bp, Homo sapiens
cggggaggggacagt

SEQ ID NO: 1865320 - DNA, 15 bp, Homo sapiens
ggggaggggacagtc

SEQ ID NO: 1865321 - DNA, 15 bp, Homo sapiens
gggaggggacagtct

SEQ ID NO: 1865322 - DNA, 15 bp, Homo sapiens
ggaggggacagtctg

SEQ ID NO: 1865323 - DNA, 15 bp, Homo sapiens
gaggggacagtctgt

SEQ ID NO: 1865324 - DNA, 15 bp, Homo sapiens
aggggacagtctgtc

SEQ ID NO: 1865325 - DNA, 15 bp, Homo sapiens
ggggacagtctgtcc

SEQ ID NO: 1865326 - DNA, 15 bp, Homo sapiens
gggacagtctgtccc

SEQ ID NO: 1865327 - DNA, 15 bp, Homo sapiens
ggacagtctgtccct

SEQ ID NO: 1865328 - DNA, 15 bp, Homo sapiens
gacagtctgtccctg

SEQ ID NO: 1865329 - DNA, 15 bp, Homo sapiens
acagtctgtccctgc

SEQ ID NO: 1865330 - DNA, 15 bp, Homo sapiens
cagtctgtccctgcg

SEQ ID NO: 1865331 - DNA, 15 bp, Homo sapiens
agtctgtccctgcgc

SEQ ID NO: 1865332 - DNA, 15 bp, Homo sapiens
gtctgtccctgcgcg

SEQ ID NO: 1865333 - DNA, 15 bp, Homo sapiens
tctgtccctgcgcgg

SEQ ID NO: 1865334 - DNA, 15 bp, Homo sapiens
ctgtccctgcgcggt

SEQ ID NO: 1865335 - DNA, 15 bp, Homo sapiens
tgtccctgcgcggtg

SEQ ID NO: 1865336 - DNA, 15 bp, Homo sapiens
gtccctgcgcggtgg

SEQ ID NO: 1865337 - DNA, 15 bp, Homo sapiens
tccctgcgcggtggg

SEQ ID NO: 1865338 - DNA, 15 bp, Homo sapiens
ccctgcgcggtgggg

SEQ ID NO: 1865339 - DNA, 15 bp, Homo sapiens
cctgcgcggtggggg

SEQ ID NO: 1865340 - DNA, 15 bp, Homo sapiens
ctgcgcggtggggga

SEQ ID NO: 1865341 - DNA, 15 bp, Homo sapiens
tgcgcggtgggggag

SEQ ID NO: 1865342 - DNA, 15 bp, Homo sapiens
gcgcggtgggggagg

SEQ ID NO: 1865343 - DNA, 15 bp, Homo sapiens
cgcggtgggggaggg

SEQ ID NO: 1865344 - DNA, 15 bp, Homo sapiens
gcggtgggggagggg

SEQ ID NO: 1865345 - DNA, 15 bp, Homo sapiens
cggtgggggaggggc

SEQ ID NO: 1865346 - DNA, 15 bp, Homo sapiens
ggtgggggaggggca

SEQ ID NO: 1865347 - DNA, 15 bp, Homo sapiens
gtgggggaggggcag

SEQ ID NO: 1865348 - DNA, 15 bp, Homo sapiens
tgggggaggggcagt

SEQ ID NO: 1865349 - DNA, 15 bp, Homo sapiens
gggggaggggcagtg

SEQ ID NO: 1865350 - DNA, 15 bp, Homo sapiens
ggggaggggcagtgc

SEQ ID NO: 1865351 - DNA, 15 bp, Homo sapiens
gggaggggcagtgct

SEQ ID NO: 1865352 - DNA, 15 bp, Homo sapiens
ggaggggcagtgctg

SEQ ID NO: 1865353 - DNA, 15 bp, Homo sapiens
gaggggcagtgctgg

SEQ ID NO: 1865354 - DNA, 15 bp, Homo sapiens
aggggcagtgctggg

SEQ ID NO: 1865355 - DNA, 15 bp, Homo sapiens
ggggcagtgctgggc

SEQ ID NO: 1865356 - DNA, 15 bp, Homo sapiens
gggcagtgctgggct

SEQ ID NO: 1865357 - DNA, 15 bp, Homo sapiens
ggcagtgctgggctg

SEQ ID NO: 1865358 - DNA, 15 bp, Homo sapiens
gcagtgctgggctgc

SEQ ID NO: 1865359 - DNA, 15 bp, Homo sapiens
cagtgctgggctgct

SEQ ID NO: 1865360 - DNA, 15 bp, Homo sapiens
agtgctgggctgctg

SEQ ID NO: 1865361 - DNA, 15 bp, Homo sapiens
gtgctgggctgctgc

SEQ ID NO: 1865362 - DNA, 15 bp, Homo sapiens
tgctgggctgctgca

SEQ ID NO: 1865363 - DNA, 15 bp, Homo sapiens
gctgggctgctgcag

SEQ ID NO: 1865364 - DNA, 15 bp, Homo sapiens
ctgggctgctgcagt

SEQ ID NO: 1865365 - DNA, 15 bp, Homo sapiens
tgggctgctgcagtc

SEQ ID NO: 1865366 - DNA, 15 bp, Homo sapiens
gggctgctgcagtca

SEQ ID NO: 1865367 - DNA, 15 bp, Homo sapiens
ggctgctgcagtcac

SEQ ID NO: 1865368 - DNA, 15 bp, Homo sapiens
gctgctgcagtcacc

SEQ ID NO: 1865369 - DNA, 15 bp, Homo sapiens
ctgctgcagtcacca

SEQ ID NO: 1865370 - DNA, 15 bp, Homo sapiens
tgctgcagtcaccag

SEQ ID NO: 1865371 - DNA, 15 bp, Homo sapiens
gctgcagtcaccagc

SEQ ID NO: 1865372 - DNA, 15 bp, Homo sapiens
ctgcagtcaccagcc

SEQ ID NO: 1865373 - DNA, 15 bp, Homo sapiens
tgcagtcaccagcca

SEQ ID NO: 1865374 - DNA, 15 bp, Homo sapiens
gcagtcaccagccag

SEQ ID NO: 1865375 - DNA, 15 bp, Homo sapiens
cagtcaccagccaga

SEQ ID NO: 1865376 - DNA, 15 bp, Homo sapiens
agtcaccagccagat

SEQ ID NO: 1865377 - DNA, 15 bp, Homo sapiens
gtcaccagccagatt

SEQ ID NO: 1865378 - DNA, 15 bp, Homo sapiens
tcaccagccagattg

SEQ ID NO: 1865379 - DNA, 15 bp, Homo sapiens
caccagccagattgg

SEQ ID NO: 1865380 - DNA, 15 bp, Homo sapiens
accagccagattgga

SEQ ID NO: 1865381 - DNA, 15 bp, Homo sapiens
ccagccagattggag

SEQ ID NO: 1865382 - DNA, 15 bp, Homo sapiens
cagccagattggagc

SEQ ID NO: 1865383 - DNA, 15 bp, Homo sapiens
agccagattggagct

SEQ ID NO: 1865384 - DNA, 15 bp, Homo sapiens
gccagattggagctc

SEQ ID NO: 1865385 - DNA, 15 bp, Homo sapiens
ccagattggagctca

SEQ ID NO: 1865386 - DNA, 15 bp, Homo sapiens
cagattggagctcac

SEQ ID NO: 1865387 - DNA, 15 bp, Homo sapiens
agattggagctcaca

SEQ ID NO: 1865388 - DNA, 15 bp, Homo sapiens
gattggagctcacat

SEQ ID NO: 1865389 - DNA, 15 bp, Homo sapiens
attggagctcacatt

SEQ ID NO: 1865390 - DNA, 15 bp, Homo sapiens
ttggagctcacattt

SEQ ID NO: 1865391 - DNA, 15 bp, Homo sapiens
tggagctcacattta

SEQ ID NO: 1865392 - DNA, 15 bp, Homo sapiens
ggagctcacatttat

SEQ ID NO: 1865393 - DNA, 15 bp, Homo sapiens
gagctcacatttatg

SEQ ID NO: 1865394 - DNA, 15 bp, Homo sapiens
agctcacatttatgg

SEQ ID NO: 1865395 - DNA, 15 bp, Homo sapiens
gctcacatttatggg

SEQ ID NO: 1865396 - DNA, 15 bp, Homo sapiens
ctcacatttatggga

SEQ ID NO: 1865397 - DNA, 15 bp, Homo sapiens
tcacatttatgggag

SEQ ID NO: 1865398 - DNA, 15 bp, Homo sapiens
cacatttatgggagc

SEQ ID NO: 1865399 - DNA, 15 bp, Homo sapiens
acatttatgggagcc

SEQ ID NO: 1865400 - DNA, 15 bp, Homo sapiens
catttatgggagccc

SEQ ID NO: 1865401 - DNA, 15 bp, Homo sapiens
atttatgggagccca

SEQ ID NO: 1865402 - DNA, 15 bp, Homo sapiens
tttatgggagcccat

SEQ ID NO: 1865403 - DNA, 15 bp, Homo sapiens
ttatgggagcccatg

SEQ ID NO: 1865404 - DNA, 15 bp, Homo sapiens
tatgggagcccatgt

SEQ ID NO: 1865405 - DNA, 15 bp, Homo sapiens
atgggagcccatgtt

SEQ ID NO: 1865406 - DNA, 15 bp, Homo sapiens
tgggagcccatgttt

SEQ ID NO: 1865407 - DNA, 15 bp, Homo sapiens
gggagcccatgttta

SEQ ID NO: 1865408 - DNA, 15 bp, Homo sapiens
ggagcccatgtttat

SEQ ID NO: 1865409 - DNA, 15 bp, Homo sapiens
gagcccatgtttatg

SEQ ID NO: 1865410 - DNA, 15 bp, Homo sapiens
agcccatgtttatgg

SEQ ID NO: 1865411 - DNA, 15 bp, Homo sapiens
gcccatgtttatggg

SEQ ID NO: 1865412 - DNA, 15 bp, Homo sapiens
cccatgtttatggga

SEQ ID NO: 1865413 - DNA, 15 bp, Homo sapiens
ccatgtttatgggag

SEQ ID NO: 1865414 - DNA, 15 bp, Homo sapiens
catgtttatgggagg

SEQ ID NO: 1865415 - DNA, 15 bp, Homo sapiens
atgtttatgggaggc

SEQ ID NO: 1865416 - DNA, 15 bp, Homo sapiens
tgtttatgggaggcc

SEQ ID NO: 1865417 - DNA, 15 bp, Homo sapiens
gtttatgggaggcct

SEQ ID NO: 1865418 - DNA, 15 bp, Homo sapiens
tttatgggaggcctg

SEQ ID NO: 1865419 - DNA, 15 bp, Homo sapiens
ttatgggaggcctgg

SEQ ID NO: 1865420 - DNA, 15 bp, Homo sapiens
tatgggaggcctgga

SEQ ID NO: 1865421 - DNA, 15 bp, Homo sapiens
atgggaggcctggag

SEQ ID NO: 1865422 - DNA, 15 bp, Homo sapiens
tgggaggcctggagg

SEQ ID NO: 1865423 - DNA, 15 bp, Homo sapiens
gggaggcctggaggc

SEQ ID NO: 1865424 - DNA, 15 bp, Homo sapiens
ggaggcctggaggct

SEQ ID NO: 1865425 - DNA, 15 bp, Homo sapiens
gaggcctggaggctc

SEQ ID NO: 1865426 - DNA, 15 bp, Homo sapiens
aggcctggaggctct

SEQ ID NO: 1865427 - DNA, 15 bp, Homo sapiens
ggcctggaggctctg

SEQ ID NO: 1865428 - DNA, 15 bp, Homo sapiens
gcctggaggctctga

SEQ ID NO: 1865429 - DNA, 15 bp, Homo sapiens
cctggaggctctgaa

SEQ ID NO: 1865430 - DNA, 15 bp, Homo sapiens
ctggaggctctgaaa

SEQ ID NO: 1865431 - DNA, 15 bp, Homo sapiens
tggaggctctgaaag

SEQ ID NO: 1865432 - DNA, 15 bp, Homo sapiens
ggaggctctgaaagg

SEQ ID NO: 1865433 - DNA, 15 bp, Homo sapiens
gaggctctgaaaggt

SEQ ID NO: 1865434 - DNA, 15 bp, Homo sapiens
aggctctgaaaggtg

SEQ ID NO: 1865435 - DNA, 15 bp, Homo sapiens
ggctctgaaaggtgg

SEQ ID NO: 1865436 - DNA, 15 bp, Homo sapiens
gctctgaaaggtggg

SEQ ID NO: 1865437 - DNA, 15 bp, Homo sapiens
ctctgaaaggtgggg

SEQ ID NO: 1865438 - DNA, 15 bp, Homo sapiens
tctgaaaggtggggc

SEQ ID NO: 1865439 - DNA, 15 bp, Homo sapiens
ctgaaaggtggggca

SEQ ID NO: 1865440 - DNA, 15 bp, Homo sapiens
tgaaaggtggggcac

SEQ ID NO: 1865441 - DNA, 15 bp, Homo sapiens
gaaaggtggggcacc

SEQ ID NO: 1865442 - DNA, 15 bp, Homo sapiens
aaaggtggggcaccc

SEQ ID NO: 1865443 - DNA, 15 bp, Homo sapiens
aaggtggggcaccca

SEQ ID NO: 1865444 - DNA, 15 bp, Homo sapiens
aggtggggcacccag

SEQ ID NO: 1865445 - DNA, 15 bp, Homo sapiens
ggtggggcacccagc

SEQ ID NO: 1865446 - DNA, 15 bp, Homo sapiens
gtggggcacccagca

SEQ ID NO: 1865447 - DNA, 15 bp, Homo sapiens
tggggcacccagcac

SEQ ID NO: 1865448 - DNA, 15 bp, Homo sapiens
ggggcacccagcaca

SEQ ID NO: 1865449 - DNA, 15 bp, Homo sapiens
gggcacccagcacag

SEQ ID NO: 1865450 - DNA, 15 bp, Homo sapiens
ggcacccagcacaga

SEQ ID NO: 1865451 - DNA, 15 bp, Homo sapiens
gcacccagcacagag

SEQ ID NO: 1865452 - DNA, 15 bp, Homo sapiens
cacccagcacagagc

SEQ ID NO: 1865453 - DNA, 15 bp, Homo sapiens
acccagcacagagca

SEQ ID NO: 1865454 - DNA, 15 bp, Homo sapiens
cccagcacagagcag

SEQ ID NO: 1865455 - DNA, 15 bp, Homo sapiens
ccagcacagagcagc

SEQ ID NO: 1865456 - DNA, 15 bp, Homo sapiens
cagcacagagcagct

SEQ ID NO: 1865457 - DNA, 15 bp, Homo sapiens
agcacagagcagctg

SEQ ID NO: 1865458 - DNA, 15 bp, Homo sapiens
gcacagagcagctgg

SEQ ID NO: 1865459 - DNA, 15 bp, Homo sapiens
cacagagcagctggc

SEQ ID NO: 1865460 - DNA, 15 bp, Homo sapiens
acagagcagctggcc

SEQ ID NO: 1865461 - DNA, 15 bp, Homo sapiens
cagagcagctggccg

SEQ ID NO: 1865462 - DNA, 15 bp, Homo sapiens
agagcagctggccgt

SEQ ID NO: 1865463 - DNA, 15 bp, Homo sapiens
gagcagctggccgtg

SEQ ID NO: 1865464 - DNA, 15 bp, Homo sapiens
agcagctggccgtgt

SEQ ID NO: 1865465 - DNA, 15 bp, Homo sapiens
gcagctggccgtgta

SEQ ID NO: 1865466 - DNA, 15 bp, Homo sapiens
cagctggccgtgtat

SEQ ID NO: 1865467 - DNA, 15 bp, Homo sapiens
agctggccgtgtatg

SEQ ID NO: 1865468 - DNA, 15 bp, Homo sapiens
gctggccgtgtatgt

SEQ ID NO: 1865469 - DNA, 15 bp, Homo sapiens
ctggccgtgtatgtt

SEQ ID NO: 1865470 - DNA, 15 bp, Homo sapiens
tggccgtgtatgttg

SEQ ID NO: 1865471 - DNA, 15 bp, Homo sapiens
ggccgtgtatgttgg

SEQ ID NO: 1865472 - DNA, 15 bp, Homo sapiens
gccgtgtatgttgga

SEQ ID NO: 1865473 - DNA, 15 bp, Homo sapiens
ccgtgtatgttggac

SEQ ID NO: 1865474 - DNA, 15 bp, Homo sapiens
cgtgtatgttggact

SEQ ID NO: 1865475 - DNA, 15 bp, Homo sapiens
gtgtatgttggactc

SEQ ID NO: 1865476 - DNA, 15 bp, Homo sapiens
tgtatgttggactcc

SEQ ID NO: 1865477 - DNA, 15 bp, Homo sapiens
gtatgttggactcca

SEQ ID NO: 1865478 - DNA, 15 bp, Homo sapiens
tatgttggactccag

SEQ ID NO: 1865479 - DNA, 15 bp, Homo sapiens
atgttggactccagg

SEQ ID NO: 1865480 - DNA, 15 bp, Homo sapiens
tgttggactccaggg

SEQ ID NO: 1865481 - DNA, 15 bp, Homo sapiens
gttggactccagggc

SEQ ID NO: 1865482 - DNA, 15 bp, Homo sapiens
ttggactccagggcc

SEQ ID NO: 1865483 - DNA, 15 bp, Homo sapiens
tggactccagggcct

SEQ ID NO: 1865484 - DNA, 15 bp, Homo sapiens
ggactccagggcctt

SEQ ID NO: 1865485 - DNA, 15 bp, Homo sapiens
gactccagggccttg

SEQ ID NO: 1865486 - DNA, 15 bp, Homo sapiens
actccagggccttgt

SEQ ID NO: 1865487 - DNA, 15 bp, Homo sapiens
ctccagggccttgtg

SEQ ID NO: 1865488 - DNA, 15 bp, Homo sapiens
tccagggccttgtga

SEQ ID NO: 1865489 - DNA, 15 bp, Homo sapiens
ccagggccttgtgac

SEQ ID NO: 1865490 - DNA, 15 bp, Homo sapiens
cagggccttgtgaca

SEQ ID NO: 1865491 - DNA, 15 bp, Homo sapiens
agggccttgtgacag

SEQ ID NO: 1865492 - DNA, 15 bp, Homo sapiens
gggccttgtgacagc

SEQ ID NO: 1865493 - DNA, 15 bp, Homo sapiens
ggccttgtgacagca

SEQ ID NO: 1865494 - DNA, 15 bp, Homo sapiens
gccttgtgacagcag

SEQ ID NO: 1865495 - DNA, 15 bp, Homo sapiens
ccttgtgacagcagc

SEQ ID NO: 1865496 - DNA, 15 bp, Homo sapiens
cttgtgacagcagct

SEQ ID NO: 1865497 - DNA, 15 bp, Homo sapiens
ttgtgacagcagctt

SEQ ID NO: 1865498 - DNA, 15 bp, Homo sapiens
tgtgacagcagcttc

SEQ ID NO: 1865499 - DNA, 15 bp, Homo sapiens
gtgacagcagcttct

SEQ ID NO: 1865500 - DNA, 15 bp, Homo sapiens
tgacagcagcttctg

SEQ ID NO: 1865501 - DNA, 15 bp, Homo sapiens
gacagcagcttctgg

SEQ ID NO: 1865502 - DNA, 15 bp, Homo sapiens
acagcagcttctggg

SEQ ID NO: 1865503 - DNA, 15 bp, Homo sapiens
cagcagcttctgggt

SEQ ID NO: 1865504 - DNA, 15 bp, Homo sapiens
agcagcttctgggtg

SEQ ID NO: 1865505 - DNA, 15 bp, Homo sapiens
gcagcttctgggtgg

SEQ ID NO: 1865506 - DNA, 15 bp, Homo sapiens
cagcttctgggtggg

SEQ ID NO: 1865507 - DNA, 15 bp, Homo sapiens
agcttctgggtgggg

SEQ ID NO: 1865508 - DNA, 15 bp, Homo sapiens
gcttctgggtggggg

SEQ ID NO: 1865509 - DNA, 15 bp, Homo sapiens
cttctgggtggggga

SEQ ID NO: 1865510 - DNA, 15 bp, Homo sapiens
ttctgggtgggggac

SEQ ID NO: 1865511 - DNA, 15 bp, Homo sapiens
tctgggtgggggacc

SEQ ID NO: 1865512 - DNA, 15 bp, Homo sapiens
ctgggtgggggaccc

SEQ ID NO: 1865513 - DNA, 15 bp, Homo sapiens
tgggtgggggaccct

SEQ ID NO: 1865514 - DNA, 15 bp, Homo sapiens
gggtgggggaccctt

SEQ ID NO: 1865515 - DNA, 15 bp, Homo sapiens
ggtgggggacccttt

SEQ ID NO: 1865516 - DNA, 15 bp, Homo sapiens
gtgggggaccctttc

SEQ ID NO: 1865517 - DNA, 15 bp, Homo sapiens
tgggggaccctttca

SEQ ID NO: 1865518 - DNA, 15 bp, Homo sapiens
gggggaccctttcat

SEQ ID NO: 1865519 - DNA, 15 bp, Homo sapiens
ggggaccctttcatt

SEQ ID NO: 1865520 - DNA, 15 bp, Homo sapiens
gggaccctttcattc

SEQ ID NO: 1865521 - DNA, 15 bp, Homo sapiens
ggaccctttcattct

SEQ ID NO: 1865522 - DNA, 15 bp, Homo sapiens
gaccctttcattctt

SEQ ID NO: 1865523 - DNA, 15 bp, Homo sapiens
accctttcattcttc

SEQ ID NO: 1865524 - DNA, 15 bp, Homo sapiens
ccctttcattcttct

SEQ ID NO: 1865525 - DNA, 15 bp, Homo sapiens
cctttcattcttctt

SEQ ID NO: 1865526 - DNA, 15 bp, Homo sapiens
ctttcattcttcttt

SEQ ID NO: 1865527 - DNA, 15 bp, Homo sapiens
tttcattcttctttt

SEQ ID NO: 1865528 - DNA, 15 bp, Homo sapiens
ttcattcttctttta

SEQ ID NO: 1865529 - DNA, 15 bp, Homo sapiens
tcattcttcttttat

SEQ ID NO: 1865530 - DNA, 15 bp, Homo sapiens
cattcttcttttatt

SEQ ID NO: 1865531 - DNA, 15 bp, Homo sapiens
attcttcttttattc

SEQ ID NO: 1865532 - DNA, 15 bp, Homo sapiens
ttcttcttttattcc

SEQ ID NO: 1865533 - DNA, 15 bp, Homo sapiens
tcttcttttattccc

SEQ ID NO: 1865534 - DNA, 15 bp, Homo sapiens
cttcttttattccct

SEQ ID NO: 1865535 - DNA, 15 bp, Homo sapiens
ttcttttattccctt

SEQ ID NO: 1865536 - DNA, 15 bp, Homo sapiens
tcttttattcccttg

SEQ ID NO: 1865537 - DNA, 15 bp, Homo sapiens
cttttattcccttga

SEQ ID NO: 1865538 - DNA, 15 bp, Homo sapiens
ttttattcccttgac

SEQ ID NO: 1865539 - DNA, 15 bp, Homo sapiens
tttattcccttgacc

SEQ ID NO: 1865540 - DNA, 15 bp, Homo sapiens
ttattcccttgacct

SEQ ID NO: 1865541 - DNA, 15 bp, Homo sapiens
tattcccttgacctc

SEQ ID NO: 1865542 - DNA, 15 bp, Homo sapiens
attcccttgacctcc

SEQ ID NO: 1865543 - DNA, 15 bp, Homo sapiens
ttcccttgacctcct

SEQ ID NO: 1865544 - DNA, 15 bp, Homo sapiens
tcccttgacctccta

SEQ ID NO: 1865545 - DNA, 15 bp, Homo sapiens
cccttgacctcctaa

SEQ ID NO: 1865546 - DNA, 15 bp, Homo sapiens
ccttgacctcctaac

SEQ ID NO: 1865547 - DNA, 15 bp, Homo sapiens
cttgacctcctaact

SEQ ID NO: 1865548 - DNA, 15 bp, Homo sapiens
ttgacctcctaactg

SEQ ID NO: 1865549 - DNA, 15 bp, Homo sapiens
tgacctcctaactgg

SEQ ID NO: 1865550 - DNA, 15 bp, Homo sapiens
gacctcctaactgga

SEQ ID NO: 1865551 - DNA, 15 bp, Homo sapiens
acctcctaactggag

SEQ ID NO: 1865552 - DNA, 15 bp, Homo sapiens
cctcctaactggagg

SEQ ID NO: 1865553 - DNA, 15 bp, Homo sapiens
ctcctaactggaggt

SEQ ID NO: 1865554 - DNA, 15 bp, Homo sapiens
tcctaactggaggtt

SEQ ID NO: 1865555 - DNA, 15 bp, Homo sapiens
cctaactggaggtta

SEQ ID NO: 1865556 - DNA, 15 bp, Homo sapiens
ctaactggaggttag

SEQ ID NO: 1865557 - DNA, 15 bp, Homo sapiens
taactggaggttagg

SEQ ID NO: 1865558 - DNA, 15 bp, Homo sapiens
aactggaggttagga

SEQ ID NO: 1865559 - DNA, 15 bp, Homo sapiens
actggaggttaggag

SEQ ID NO: 1865560 - DNA, 15 bp, Homo sapiens
ctggaggttaggagt

SEQ ID NO: 1865561 - DNA, 15 bp, Homo sapiens
tggaggttaggagtg

SEQ ID NO: 1865562 - DNA, 15 bp, Homo sapiens
ggaggttaggagtgg

SEQ ID NO: 1865563 - DNA, 15 bp, Homo sapiens
gaggttaggagtggg

SEQ ID NO: 1865564 - DNA, 15 bp, Homo sapiens
aggttaggagtggga

SEQ ID NO: 1865565 - DNA, 15 bp, Homo sapiens
ggttaggagtgggag

SEQ ID NO: 1865566 - DNA, 15 bp, Homo sapiens
gttaggagtgggagg

SEQ ID NO: 1865567 - DNA, 15 bp, Homo sapiens
ttaggagtgggagga

SEQ ID NO: 1865568 - DNA, 15 bp, Homo sapiens
taggagtgggaggac

SEQ ID NO: 1865569 - DNA, 15 bp, Homo sapiens
aggagtgggaggacc

SEQ ID NO: 1865570 - DNA, 15 bp, Homo sapiens
ggagtgggaggaccc

SEQ ID NO: 1865571 - DNA, 15 bp, Homo sapiens
gagtgggaggacccg

SEQ ID NO: 1865572 - DNA, 15 bp, Homo sapiens
agtgggaggacccgc

SEQ ID NO: 1865573 - DNA, 15 bp, Homo sapiens
gtgggaggacccgcc

SEQ ID NO: 1865574 - DNA, 15 bp, Homo sapiens
tgggaggacccgcca

SEQ ID NO: 1865575 - DNA, 15 bp, Homo sapiens
gggaggacccgccag

SEQ ID NO: 1865576 - DNA, 15 bp, Homo sapiens
ggaggacccgccaga

SEQ ID NO: 1865577 - DNA, 15 bp, Homo sapiens
gaggacccgccagag

SEQ ID NO: 1865578 - DNA, 15 bp, Homo sapiens
aggacccgccagagg

SEQ ID NO: 1865579 - DNA, 15 bp, Homo sapiens
ggacccgccagaggg

SEQ ID NO: 1865580 - DNA, 15 bp, Homo sapiens
gacccgccagaggga

SEQ ID NO: 1865581 - DNA, 15 bp, Homo sapiens
acccgccagagggag

SEQ ID NO: 1865582 - DNA, 15 bp, Homo sapiens
cccgccagagggagt

SEQ ID NO: 1865583 - DNA, 15 bp, Homo sapiens
ccgccagagggagtg

SEQ ID NO: 1865584 - DNA, 15 bp, Homo sapiens
cgccagagggagtgg

SEQ ID NO: 1865585 - DNA, 15 bp, Homo sapiens
gccagagggagtggg

SEQ ID NO: 1865586 - DNA, 15 bp, Homo sapiens
ccagagggagtgggg

SEQ ID NO: 1865587 - DNA, 15 bp, Homo sapiens
cagagggagtggggg

SEQ ID NO: 1865588 - DNA, 15 bp, Homo sapiens
agagggagtgggggc

SEQ ID NO: 1865589 - DNA, 15 bp, Homo sapiens
gagggagtgggggct

SEQ ID NO: 1865590 - DNA, 15 bp, Homo sapiens
agggagtgggggctt

SEQ ID NO: 1865591 - DNA, 15 bp, Homo sapiens
gggagtgggggcttg

SEQ ID NO: 1865592 - DNA, 15 bp, Homo sapiens
ggagtgggggcttgg

SEQ ID NO: 1865593 - DNA, 15 bp, Homo sapiens
gagtgggggcttggg

SEQ ID NO: 1865594 - DNA, 15 bp, Homo sapiens
agtgggggcttgggt

SEQ ID NO: 1865595 - DNA, 15 bp, Homo sapiens
gtgggggcttgggtc

SEQ ID NO: 1865596 - DNA, 15 bp, Homo sapiens
tgggggcttgggtct

SEQ ID NO: 1865597 - DNA, 15 bp, Homo sapiens
gggggcttgggtctg

SEQ ID NO: 1865598 - DNA, 15 bp, Homo sapiens
ggggcttgggtctgg

SEQ ID NO: 1865599 - DNA, 15 bp, Homo sapiens
gggcttgggtctggg

SEQ ID NO: 1865600 - DNA, 15 bp, Homo sapiens
ggcttgggtctggga

SEQ ID NO: 1865601 - DNA, 15 bp, Homo sapiens
gcttgggtctgggag

SEQ ID NO: 1865602 - DNA, 15 bp, Homo sapiens
cttgggtctgggagg

SEQ ID NO: 1865603 - DNA, 15 bp, Homo sapiens
ttgggtctgggaggt

SEQ ID NO: 1865604 - DNA, 15 bp, Homo sapiens
tgggtctgggaggtc

SEQ ID NO: 1865605 - DNA, 15 bp, Homo sapiens
gggtctgggaggtcc

SEQ ID NO: 1865606 - DNA, 15 bp, Homo sapiens
ggtctgggaggtcct

SEQ ID NO: 1865607 - DNA, 15 bp, Homo sapiens
gtctgggaggtcctg

SEQ ID NO: 1865608 - DNA, 15 bp, Homo sapiens
tctgggaggtcctgg

SEQ ID NO: 1865609 - DNA, 15 bp, Homo sapiens
ctgggaggtcctggg

SEQ ID NO: 1865610 - DNA, 15 bp, Homo sapiens
tgggaggtcctgggt

SEQ ID NO: 1865611 - DNA, 15 bp, Homo sapiens
gggaggtcctgggtg

SEQ ID NO: 1865612 - DNA, 15 bp, Homo sapiens
ggaggtcctgggtgc

SEQ ID NO: 1865613 - DNA, 15 bp, Homo sapiens
gaggtcctgggtgct

SEQ ID NO: 1865614 - DNA, 15 bp, Homo sapiens
aggtcctgggtgctt

SEQ ID NO: 1865615 - DNA, 15 bp, Homo sapiens
ggtcctgggtgcttt

SEQ ID NO: 1865616 - DNA, 15 bp, Homo sapiens
gtcctgggtgcttta

SEQ ID NO: 1865617 - DNA, 15 bp, Homo sapiens
tcctgggtgctttag

SEQ ID NO: 1865618 - DNA, 15 bp, Homo sapiens
cctgggtgctttagg

SEQ ID NO: 1865619 - DNA, 15 bp, Homo sapiens
ctgggtgctttaggg

SEQ ID NO: 1865620 - DNA, 15 bp, Homo sapiens
tgggtgctttagggg

SEQ ID NO: 1865621 - DNA, 15 bp, Homo sapiens
gggtgctttaggggt

SEQ ID NO: 1865622 - DNA, 15 bp, Homo sapiens
ggtgctttaggggtg

SEQ ID NO: 1865623 - DNA, 15 bp, Homo sapiens
gtgctttaggggtga

SEQ ID NO: 1865624 - DNA, 15 bp, Homo sapiens
tgctttaggggtgaa

SEQ ID NO: 1865625 - DNA, 15 bp, Homo sapiens
gctttaggggtgaaa

SEQ ID NO: 1865626 - DNA, 15 bp, Homo sapiens
ctttaggggtgaaag

SEQ ID NO: 1865627 - DNA, 15 bp, Homo sapiens
tttaggggtgaaagg

SEQ ID NO: 1865628 - DNA, 15 bp, Homo sapiens
ttaggggtgaaaggg

SEQ ID NO: 1865629 - DNA, 15 bp, Homo sapiens
taggggtgaaagggc

SEQ ID NO: 1865630 - DNA, 15 bp, Homo sapiens
aggggtgaaagggct

SEQ ID NO: 1865631 - DNA, 15 bp, Homo sapiens
ggggtgaaagggctg

SEQ ID NO: 1865632 - DNA, 15 bp, Homo sapiens
gggtgaaagggctgg

SEQ ID NO: 1865633 - DNA, 15 bp, Homo sapiens
ggtgaaagggctggg

SEQ ID NO: 1865634 - DNA, 15 bp, Homo sapiens
gtgaaagggctggga

SEQ ID NO: 1865635 - DNA, 15 bp, Homo sapiens
tgaaagggctgggat

SEQ ID NO: 1865636 - DNA, 15 bp, Homo sapiens
gaaagggctgggatg

SEQ ID NO: 1865637 - DNA, 15 bp, Homo sapiens
aaagggctgggatgg

SEQ ID NO: 1865638 - DNA, 15 bp, Homo sapiens
aagggctgggatggc

SEQ ID NO: 1865639 - DNA, 15 bp, Homo sapiens
agggctgggatggct

SEQ ID NO: 1865640 - DNA, 15 bp, Homo sapiens
gggctgggatggctg

SEQ ID NO: 1865641 - DNA, 15 bp, Homo sapiens
ggctgggatggctga

SEQ ID NO: 1865642 - DNA, 15 bp, Homo sapiens
gctgggatggctgaa

SEQ ID NO: 1865643 - DNA, 15 bp, Homo sapiens
ctgggatggctgaac

SEQ ID NO: 1865644 - DNA, 15 bp, Homo sapiens
tgggatggctgaaca

SEQ ID NO: 1865645 - DNA, 15 bp, Homo sapiens
gggatggctgaacag

SEQ ID NO: 1865646 - DNA, 15 bp, Homo sapiens
ggatggctgaacagt

SEQ ID NO: 1865647 - DNA, 15 bp, Homo sapiens
gatggctgaacagtg

SEQ ID NO: 1865648 - DNA, 15 bp, Homo sapiens
atggctgaacagtga

SEQ ID NO: 1865649 - DNA, 15 bp, Homo sapiens
tggctgaacagtgag

SEQ ID NO: 1865650 - DNA, 15 bp, Homo sapiens
ggctgaacagtgagt

SEQ ID NO: 1865651 - DNA, 15 bp, Homo sapiens
gctgaacagtgagtg

SEQ ID NO: 1865652 - DNA, 15 bp, Homo sapiens
ctgaacagtgagtgt

SEQ ID NO: 1865653 - DNA, 15 bp, Homo sapiens
tgaacagtgagtgtg

SEQ ID NO: 1865654 - DNA, 15 bp, Homo sapiens
gaacagtgagtgtgt

SEQ ID NO: 1865655 - DNA, 15 bp, Homo sapiens
aacagtgagtgtgtc

SEQ ID NO: 1865656 - DNA, 15 bp, Homo sapiens
acagtgagtgtgtcc

SEQ ID NO: 1865657 - DNA, 15 bp, Homo sapiens
cagtgagtgtgtcca

SEQ ID NO: 1865658 - DNA, 15 bp, Homo sapiens
agtgagtgtgtccaa

SEQ ID NO: 1865659 - DNA, 15 bp, Homo sapiens
gtgagtgtgtccaag

SEQ ID NO: 1865660 - DNA, 15 bp, Homo sapiens
tgagtgtgtccaagc

SEQ ID NO: 1865661 - DNA, 15 bp, Homo sapiens
gagtgtgtccaagcg

SEQ ID NO: 1865662 - DNA, 15 bp, Homo sapiens
agtgtgtccaagcgg

SEQ ID NO: 1865663 - DNA, 15 bp, Homo sapiens
gtgtgtccaagcggg

SEQ ID NO: 1865664 - DNA, 15 bp, Homo sapiens
tgtgtccaagcggga

SEQ ID NO: 1865665 - DNA, 15 bp, Homo sapiens
gtgtccaagcgggag

SEQ ID NO: 1865666 - DNA, 15 bp, Homo sapiens
tgtccaagcgggaga

SEQ ID NO: 1865667 - DNA, 15 bp, Homo sapiens
gtccaagcgggagag

SEQ ID NO: 1865668 - DNA, 15 bp, Homo sapiens
tccaagcgggagaga

SEQ ID NO: 1865669 - DNA, 15 bp, Homo sapiens
ccaagcgggagagat

SEQ ID NO: 1865670 - DNA, 15 bp, Homo sapiens
caagcgggagagatt

SEQ ID NO: 1865671 - DNA, 15 bp, Homo sapiens
aagcgggagagatta

SEQ ID NO: 1865672 - DNA, 15 bp, Homo sapiens
agcgggagagattag

SEQ ID NO: 1865673 - DNA, 15 bp, Homo sapiens
gcgggagagattaga

SEQ ID NO: 1865674 - DNA, 15 bp, Homo sapiens
cgggagagattagat

SEQ ID NO: 1865675 - DNA, 15 bp, Homo sapiens
gggagagattagatt

SEQ ID NO: 1865676 - DNA, 15 bp, Homo sapiens
ggagagattagatta

SEQ ID NO: 1865677 - DNA, 15 bp, Homo sapiens
gagagattagattac

SEQ ID NO: 1865678 - DNA, 15 bp, Homo sapiens
agagattagattacg

SEQ ID NO: 1865679 - DNA, 15 bp, Homo sapiens
gagattagattacgg

SEQ ID NO: 1865680 - DNA, 15 bp, Homo sapiens
agattagattacgga

SEQ ID NO: 1865681 - DNA, 15 bp, Homo sapiens
gattagattacggag

SEQ ID NO: 1865682 - DNA, 15 bp, Homo sapiens
attagattacggagg

SEQ ID NO: 1865683 - DNA, 15 bp, Homo sapiens
ttagattacggaggc

SEQ ID NO: 1865684 - DNA, 15 bp, Homo sapiens
tagattacggaggca

SEQ ID NO: 1865685 - DNA, 15 bp, Homo sapiens
agattacggaggcag

SEQ ID NO: 1865686 - DNA, 15 bp, Homo sapiens
gattacggaggcaga

SEQ ID NO: 1865687 - DNA, 15 bp, Homo sapiens
attacggaggcagac

SEQ ID NO: 1865688 - DNA, 15 bp, Homo sapiens
ttacggaggcagaca

SEQ ID NO: 1865689 - DNA, 15 bp, Homo sapiens
tacggaggcagacag

SEQ ID NO: 1865690 - DNA, 15 bp, Homo sapiens
acggaggcagacaga

SEQ ID NO: 1865691 - DNA, 15 bp, Homo sapiens
cggaggcagacagaa

SEQ ID NO: 1865692 - DNA, 15 bp, Homo sapiens
ggaggcagacagaag

SEQ ID NO: 1865693 - DNA, 15 bp, Homo sapiens
gaggcagacagaagt

SEQ ID NO: 1865694 - DNA, 15 bp, Homo sapiens
aggcagacagaagta

SEQ ID NO: 1865695 - DNA, 15 bp, Homo sapiens
ggcagacagaagtaa

SEQ ID NO: 1865696 - DNA, 15 bp, Homo sapiens
gcagacagaagtaat

SEQ ID NO: 1865697 - DNA, 15 bp, Homo sapiens
cagacagaagtaatg

SEQ ID NO: 1865698 - DNA, 15 bp, Homo sapiens
agacagaagtaatga

SEQ ID NO: 1865699 - DNA, 15 bp, Homo sapiens
gacagaagtaatgat

SEQ ID NO: 1865700 - DNA, 15 bp, Homo sapiens
acagaagtaatgatt

SEQ ID NO: 1865701 - DNA, 15 bp, Homo sapiens
cagaagtaatgatta

SEQ ID NO: 1865702 - DNA, 15 bp, Homo sapiens
agaagtaatgattaa

SEQ ID NO: 1865703 - DNA, 15 bp, Homo sapiens
gaagtaatgattaac

SEQ ID NO: 1865704 - DNA, 15 bp, Homo sapiens
aagtaatgattaact

SEQ ID NO: 1865705 - DNA, 15 bp, Homo sapiens
agtaatgattaactt

SEQ ID NO: 1865706 - DNA, 15 bp, Homo sapiens
gtaatgattaacttt

SEQ ID NO: 1865707 - DNA, 15 bp, Homo sapiens
taatgattaactttt

SEQ ID NO: 1865708 - DNA, 15 bp, Homo sapiens
aatgattaacttttc

SEQ ID NO: 1865709 - DNA, 15 bp, Homo sapiens
atgattaacttttcc

SEQ ID NO: 1865710 - DNA, 15 bp, Homo sapiens
tgattaacttttcca

SEQ ID NO: 1865711 - DNA, 15 bp, Homo sapiens
gattaacttttccag

SEQ ID NO: 1865712 - DNA, 15 bp, Homo sapiens
attaacttttccagt

SEQ ID NO: 1865713 - DNA, 15 bp, Homo sapiens
ttaacttttccagtc

SEQ ID NO: 1865714 - DNA, 15 bp, Homo sapiens
taacttttccagtct

SEQ ID NO: 1865715 - DNA, 15 bp, Homo sapiens
aacttttccagtctg

SEQ ID NO: 1865716 - DNA, 15 bp, Homo sapiens
acttttccagtctgc

SEQ ID NO: 1865717 - DNA, 15 bp, Homo sapiens
cttttccagtctgca

SEQ ID NO: 1865718 - DNA, 15 bp, Homo sapiens
ttttccagtctgcac

SEQ ID NO: 1865719 - DNA, 15 bp, Homo sapiens
tttccagtctgcacg

SEQ ID NO: 1865720 - DNA, 15 bp, Homo sapiens
ttccagtctgcacgc

SEQ ID NO: 1865721 - DNA, 15 bp, Homo sapiens
tccagtctgcacgct

SEQ ID NO: 1865722 - DNA, 15 bp, Homo sapiens
ccagtctgcacgctg

SEQ ID NO: 1865723 - DNA, 15 bp, Homo sapiens
cagtctgcacgctgt

SEQ ID NO: 1865724 - DNA, 15 bp, Homo sapiens
agtctgcacgctgtc

SEQ ID NO: 1865725 - DNA, 15 bp, Homo sapiens
gtctgcacgctgtct

SEQ ID NO: 1865726 - DNA, 15 bp, Homo sapiens
tctgcacgctgtctc

SEQ ID NO: 1865727 - DNA, 15 bp, Homo sapiens
ctgcacgctgtctcc

SEQ ID NO: 1865728 - DNA, 15 bp, Homo sapiens
tgcacgctgtctcca

SEQ ID NO: 1865729 - DNA, 15 bp, Homo sapiens
gcacgctgtctccag

SEQ ID NO: 1865730 - DNA, 15 bp, Homo sapiens
cacgctgtctccagg

SEQ ID NO: 1865731 - DNA, 15 bp, Homo sapiens
acgctgtctccaggc

SEQ ID NO: 1865732 - DNA, 15 bp, Homo sapiens
cgctgtctccaggct

SEQ ID NO: 1865733 - DNA, 15 bp, Homo sapiens
gctgtctccaggctg

SEQ ID NO: 1865734 - DNA, 15 bp, Homo sapiens
ctgtctccaggctgt

SEQ ID NO: 1865735 - DNA, 15 bp, Homo sapiens
tgtctccaggctgtc

SEQ ID NO: 1865736 - DNA, 15 bp, Homo sapiens
gtctccaggctgtcg

SEQ ID NO: 1865737 - DNA, 15 bp, Homo sapiens
tctccaggctgtcgt

SEQ ID NO: 1865738 - DNA, 15 bp, Homo sapiens
ctccaggctgtcgta

SEQ ID NO: 1865739 - DNA, 15 bp, Homo sapiens
tccaggctgtcgtac

SEQ ID NO: 1865740 - DNA, 15 bp, Homo sapiens
ccaggctgtcgtact

SEQ ID NO: 1865741 - DNA, 15 bp, Homo sapiens
caggctgtcgtactg

SEQ ID NO: 1865742 - DNA, 15 bp, Homo sapiens
aggctgtcgtactgt

SEQ ID NO: 1865743 - DNA, 15 bp, Homo sapiens
ggctgtcgtactgtt

SEQ ID NO: 1865744 - DNA, 15 bp, Homo sapiens
gctgtcgtactgttg

SEQ ID NO: 1865745 - DNA, 15 bp, Homo sapiens
ctgtcgtactgttgt

SEQ ID NO: 1865746 - DNA, 15 bp, Homo sapiens
tgtcgtactgttgtt

SEQ ID NO: 1865747 - DNA, 15 bp, Homo sapiens
gtcgtactgttgttt

SEQ ID NO: 1865748 - DNA, 15 bp, Homo sapiens
tcgtactgttgtttt

SEQ ID NO: 1865749 - DNA, 15 bp, Homo sapiens
cgtactgttgttttt

SEQ ID NO: 1865750 - DNA, 15 bp, Homo sapiens
gtactgttgtttttc

SEQ ID NO: 1865751 - DNA, 15 bp, Homo sapiens
tactgttgtttttcc

SEQ ID NO: 1865752 - DNA, 15 bp, Homo sapiens
actgttgtttttccc

SEQ ID NO: 1865753 - DNA, 15 bp, Homo sapiens
ctgttgtttttccct

SEQ ID NO: 1865754 - DNA, 15 bp, Homo sapiens
tgttgtttttccctc

SEQ ID NO: 1865755 - DNA, 15 bp, Homo sapiens
gttgtttttccctct

SEQ ID NO: 1865756 - DNA, 15 bp, Homo sapiens
ttgtttttccctcta

SEQ ID NO: 1865757 - DNA, 15 bp, Homo sapiens
tgtttttccctctaa

SEQ ID NO: 1865758 - DNA, 15 bp, Homo sapiens
gtttttccctctaag

SEQ ID NO: 1865759 - DNA, 15 bp, Homo sapiens
tttttccctctaagt

SEQ ID NO: 1865760 - DNA, 15 bp, Homo sapiens
ttttccctctaagta

SEQ ID NO: 1865761 - DNA, 15 bp, Homo sapiens
tttccctctaagtac

SEQ ID NO: 1865762 - DNA, 15 bp, Homo sapiens
ttccctctaagtaca

SEQ ID NO: 1865763 - DNA, 15 bp, Homo sapiens
tccctctaagtacag

SEQ ID NO: 1865764 - DNA, 15 bp, Homo sapiens
ccctctaagtacagt

SEQ ID NO: 1865765 - DNA, 15 bp, Homo sapiens
cctctaagtacagtg

SEQ ID NO: 1865766 - DNA, 15 bp, Homo sapiens
ctctaagtacagtgc

SEQ ID NO: 1865767 - DNA, 15 bp, Homo sapiens
tctaagtacagtgcg

SEQ ID NO: 1865768 - DNA, 15 bp, Homo sapiens
ctaagtacagtgcgg

SEQ ID NO: 1865769 - DNA, 15 bp, Homo sapiens
taagtacagtgcggc

SEQ ID NO: 1865770 - DNA, 15 bp, Homo sapiens
aagtacagtgcggcc

SEQ ID NO: 1865771 - DNA, 15 bp, Homo sapiens
agtacagtgcggccc

SEQ ID NO: 1865772 - DNA, 15 bp, Homo sapiens
gtacagtgcggccct

SEQ ID NO: 1865773 - DNA, 15 bp, Homo sapiens
tacagtgcggccctg

SEQ ID NO: 1865774 - DNA, 15 bp, Homo sapiens
acagtgcggccctgg

SEQ ID NO: 1865775 - DNA, 15 bp, Homo sapiens
cagtgcggccctggc

SEQ ID NO: 1865776 - DNA, 15 bp, Homo sapiens
agtgcggccctggcc

SEQ ID NO: 1865777 - DNA, 15 bp, Homo sapiens
gtgcggccctggcct

SEQ ID NO: 1865778 - DNA, 15 bp, Homo sapiens
tgcggccctggcctg

SEQ ID NO: 1865779 - DNA, 15 bp, Homo sapiens
gcggccctggcctgg

SEQ ID NO: 1865780 - DNA, 15 bp, Homo sapiens
cggccctggcctggc

SEQ ID NO: 1865781 - DNA, 15 bp, Homo sapiens
ggccctggcctggcc

SEQ ID NO: 1865782 - DNA, 15 bp, Homo sapiens
gccctggcctggcca

SEQ ID NO: 1865783 - DNA, 15 bp, Homo sapiens
ccctggcctggccag

SEQ ID NO: 1865784 - DNA, 15 bp, Homo sapiens
cctggcctggccagg

SEQ ID NO: 1865785 - DNA, 15 bp, Homo sapiens
ctggcctggccaggc

SEQ ID NO: 1865786 - DNA, 15 bp, Homo sapiens
tggcctggccaggcc

SEQ ID NO: 1865787 - DNA, 15 bp, Homo sapiens
ggcctggccaggccc

SEQ ID NO: 1865788 - DNA, 15 bp, Homo sapiens
gcctggccaggccct

SEQ ID NO: 1865789 - DNA, 15 bp, Homo sapiens
cctggccaggccctg

SEQ ID NO: 1865790 - DNA, 15 bp, Homo sapiens
ctggccaggccctgg

SEQ ID NO: 1865791 - DNA, 15 bp, Homo sapiens
tggccaggccctggt

SEQ ID NO: 1865792 - DNA, 15 bp, Homo sapiens
ggccaggccctggta

SEQ ID NO: 1865793 - DNA, 15 bp, Homo sapiens
gccaggccctggtat

SEQ ID NO: 1865794 - DNA, 15 bp, Homo sapiens
ccaggccctggtatt

SEQ ID NO: 1865795 - DNA, 15 bp, Homo sapiens
caggccctggtattg

SEQ ID NO: 1865796 - DNA, 15 bp, Homo sapiens
aggccctggtattgg

SEQ ID NO: 1865797 - DNA, 15 bp, Homo sapiens
ggccctggtattggg

SEQ ID NO: 1865798 - DNA, 15 bp, Homo sapiens
gccctggtattgggt

SEQ ID NO: 1865799 - DNA, 15 bp, Homo sapiens
ccctggtattgggtt

SEQ ID NO: 1865800 - DNA, 15 bp, Homo sapiens
cctggtattgggttg

SEQ ID NO: 1865801 - DNA, 15 bp, Homo sapiens
ctggtattgggttgt

SEQ ID NO: 1865802 - DNA, 15 bp, Homo sapiens
tggtattgggttgta

SEQ ID NO: 1865803 - DNA, 15 bp, Homo sapiens
ggtattgggttgtaa

SEQ ID NO: 1865804 - DNA, 15 bp, Homo sapiens
gtattgggttgtaaa

SEQ ID NO: 1865805 - DNA, 15 bp, Homo sapiens
tattgggttgtaaag

SEQ ID NO: 1865806 - DNA, 15 bp, Homo sapiens
attgggttgtaaagt

SEQ ID NO: 1865807 - DNA, 15 bp, Homo sapiens
ttgggttgtaaagtg

SEQ ID NO: 1865808 - DNA, 15 bp, Homo sapiens
tgggttgtaaagtga

SEQ ID NO: 1865809 - DNA, 15 bp, Homo sapiens
gggttgtaaagtgag

SEQ ID NO: 1865810 - DNA, 15 bp, Homo sapiens
ggttgtaaagtgaga

SEQ ID NO: 1865811 - DNA, 15 bp, Homo sapiens
gttgtaaagtgagag

SEQ ID NO: 1865812 - DNA, 15 bp, Homo sapiens
ttgtaaagtgagaga

SEQ ID NO: 1865813 - DNA, 15 bp, Homo sapiens
tgtaaagtgagagat

SEQ ID NO: 1865814 - DNA, 15 bp, Homo sapiens
gtaaagtgagagatg

SEQ ID NO: 1865815 - DNA, 15 bp, Homo sapiens
taaagtgagagatgg

SEQ ID NO: 1865816 - DNA, 15 bp, Homo sapiens
aaagtgagagatgga

SEQ ID NO: 1865817 - DNA, 15 bp, Homo sapiens
aagtgagagatggaa

SEQ ID NO: 1865818 - DNA, 15 bp, Homo sapiens
agtgagagatggaat

SEQ ID NO: 1865819 - DNA, 15 bp, Homo sapiens
gtgagagatggaatg

SEQ ID NO: 1865820 - DNA, 15 bp, Homo sapiens
tgagagatggaatga

SEQ ID NO: 1865821 - DNA, 15 bp, Homo sapiens
gagagatggaatgag

SEQ ID NO: 1865822 - DNA, 15 bp, Homo sapiens
agagatggaatgagg

SEQ ID NO: 1865823 - DNA, 15 bp, Homo sapiens
gagatggaatgaggg

SEQ ID NO: 1865824 - DNA, 15 bp, Homo sapiens
agatggaatgagggc

SEQ ID NO: 1865825 - DNA, 15 bp, Homo sapiens
gatggaatgagggct

SEQ ID NO: 1865826 - DNA, 15 bp, Homo sapiens
atggaatgagggctg

SEQ ID NO: 1865827 - DNA, 15 bp, Homo sapiens
tggaatgagggctgg

SEQ ID NO: 1865828 - DNA, 15 bp, Homo sapiens
ggaatgagggctggg

SEQ ID NO: 1865829 - DNA, 15 bp, Homo sapiens
gaatgagggctggga

SEQ ID NO: 1865830 - DNA, 15 bp, Homo sapiens
aatgagggctgggag

SEQ ID NO: 1865831 - DNA, 15 bp, Homo sapiens
atgagggctgggagt

SEQ ID NO: 1865832 - DNA, 15 bp, Homo sapiens
tgagggctgggagtg

SEQ ID NO: 1865833 - DNA, 15 bp, Homo sapiens
gagggctgggagtgc

SEQ ID NO: 1865834 - DNA, 15 bp, Homo sapiens
agggctgggagtgca

SEQ ID NO: 1865835 - DNA, 15 bp, Homo sapiens
gggctgggagtgcac

SEQ ID NO: 1865836 - DNA, 15 bp, Homo sapiens
ggctgggagtgcacg

SEQ ID NO: 1865837 - DNA, 15 bp, Homo sapiens
gctgggagtgcacgg

SEQ ID NO: 1865838 - DNA, 15 bp, Homo sapiens
ctgggagtgcacggg

SEQ ID NO: 1865839 - DNA, 15 bp, Homo sapiens
tgggagtgcacgggg

SEQ ID NO: 1865840 - DNA, 15 bp, Homo sapiens
gggagtgcacgggga

SEQ ID NO: 1865841 - DNA, 15 bp, Homo sapiens
ggagtgcacggggag

SEQ ID NO: 1865842 - DNA, 15 bp, Homo sapiens
gagtgcacggggagg

SEQ ID NO: 1865843 - DNA, 15 bp, Homo sapiens
agtgcacggggaggg

SEQ ID NO: 1865844 - DNA, 15 bp, Homo sapiens
gtgcacggggagggg

SEQ ID NO: 1865845 - DNA, 15 bp, Homo sapiens
tgcacggggaggggg

SEQ ID NO: 1865846 - DNA, 15 bp, Homo sapiens
gcacggggagggggg

SEQ ID NO: 1865847 - DNA, 15 bp, Homo sapiens
cacggggaggggggc

SEQ ID NO: 1865848 - DNA, 15 bp, Homo sapiens
acggggaggggggcc

SEQ ID NO: 1865849 - DNA, 15 bp, Homo sapiens
cggggaggggggcca

SEQ ID NO: 1865850 - DNA, 15 bp, Homo sapiens
ggggaggggggccag

SEQ ID NO: 1865851 - DNA, 15 bp, Homo sapiens
gggaggggggccagg

SEQ ID NO: 1865852 - DNA, 15 bp, Homo sapiens
ggaggggggccaggg

SEQ ID NO: 1865853 - DNA, 15 bp, Homo sapiens
gaggggggccaggga

SEQ ID NO: 1865854 - DNA, 15 bp, Homo sapiens
aggggggccagggag

SEQ ID NO: 1865855 - DNA, 15 bp, Homo sapiens
ggggggccagggagg

SEQ ID NO: 1865856 - DNA, 15 bp, Homo sapiens
gggggccagggaggg

SEQ ID NO: 1865857 - DNA, 15 bp, Homo sapiens
ggggccagggaggga

SEQ ID NO: 1865858 - DNA, 15 bp, Homo sapiens
gggccagggagggag

SEQ ID NO: 1865859 - DNA, 15 bp, Homo sapiens
ggccagggagggagc

SEQ ID NO: 1865860 - DNA, 15 bp, Homo sapiens
gccagggagggagct

SEQ ID NO: 1865861 - DNA, 15 bp, Homo sapiens
ccagggagggagctc

SEQ ID NO: 1865862 - DNA, 15 bp, Homo sapiens
cagggagggagctcg

SEQ ID NO: 1865863 - DNA, 15 bp, Homo sapiens
agggagggagctcgc

SEQ ID NO: 1865864 - DNA, 15 bp, Homo sapiens
gggagggagctcgca

SEQ ID NO: 1865865 - DNA, 15 bp, Homo sapiens
ggagggagctcgcag

SEQ ID NO: 1865866 - DNA, 15 bp, Homo sapiens
gagggagctcgcagg

SEQ ID NO: 1865867 - DNA, 15 bp, Homo sapiens
agggagctcgcagga

SEQ ID NO: 1865868 - DNA, 15 bp, Homo sapiens
gggagctcgcaggag

SEQ ID NO: 1865869 - DNA, 15 bp, Homo sapiens
ggagctcgcaggaga

SEQ ID NO: 1865870 - DNA, 15 bp, Homo sapiens
gagctcgcaggagaa

SEQ ID NO: 1865871 - DNA, 15 bp, Homo sapiens
agctcgcaggagaag

SEQ ID NO: 1865872 - DNA, 15 bp, Homo sapiens
gctcgcaggagaaga

SEQ ID NO: 1865873 - DNA, 15 bp, Homo sapiens
ctcgcaggagaagaa

SEQ ID NO: 1865874 - DNA, 15 bp, Homo sapiens
tcgcaggagaagaag

SEQ ID NO: 1865875 - DNA, 15 bp, Homo sapiens
cgcaggagaagaagg

SEQ ID NO: 1865876 - DNA, 15 bp, Homo sapiens
gcaggagaagaagga

SEQ ID NO: 1865877 - DNA, 15 bp, Homo sapiens
caggagaagaaggag

SEQ ID NO: 1865878 - DNA, 15 bp, Homo sapiens
aggagaagaaggagc

SEQ ID NO: 1865879 - DNA, 15 bp, Homo sapiens
ggagaagaaggagct

SEQ ID NO: 1865880 - DNA, 15 bp, Homo sapiens
gagaagaaggagctt

SEQ ID NO: 1865881 - DNA, 15 bp, Homo sapiens
agaagaaggagcttt

SEQ ID NO: 1865882 - DNA, 15 bp, Homo sapiens
gaagaaggagctttt

SEQ ID NO: 1865883 - DNA, 15 bp, Homo sapiens
aagaaggagcttttc

SEQ ID NO: 1865884 - DNA, 15 bp, Homo sapiens
agaaggagcttttcc

SEQ ID NO: 1865885 - DNA, 15 bp, Homo sapiens
gaaggagcttttcca

SEQ ID NO: 1865886 - DNA, 15 bp, Homo sapiens
aaggagcttttccat

SEQ ID NO: 1865887 - DNA, 15 bp, Homo sapiens
aggagcttttccatc

SEQ ID NO: 1865888 - DNA, 15 bp, Homo sapiens
ggagcttttccatcg

SEQ ID NO: 1865889 - DNA, 15 bp, Homo sapiens
gagcttttccatcgg

SEQ ID NO: 1865890 - DNA, 15 bp, Homo sapiens
agcttttccatcgga

SEQ ID NO: 1865891 - DNA, 15 bp, Homo sapiens
gcttttccatcggat

SEQ ID NO: 1865892 - DNA, 15 bp, Homo sapiens
cttttccatcggatc

SEQ ID NO: 1865893 - DNA, 15 bp, Homo sapiens
ttttccatcggatcc

SEQ ID NO: 1865894 - DNA, 15 bp, Homo sapiens
tttccatcggatcct

SEQ ID NO: 1865895 - DNA, 15 bp, Homo sapiens
ttccatcggatcctg

SEQ ID NO: 1865896 - DNA, 15 bp, Homo sapiens
tccatcggatcctgc

SEQ ID NO: 1865897 - DNA, 15 bp, Homo sapiens
ccatcggatcctgca

SEQ ID NO: 1865898 - DNA, 15 bp, Homo sapiens
catcggatcctgcat

SEQ ID NO: 1865899 - DNA, 15 bp, Homo sapiens
atcggatcctgcatt

SEQ ID NO: 1865900 - DNA, 15 bp, Homo sapiens
tcggatcctgcattg

SEQ ID NO: 1865901 - DNA, 15 bp, Homo sapiens
cggatcctgcattgg

SEQ ID NO: 1865902 - DNA, 15 bp, Homo sapiens
ggatcctgcattgga

SEQ ID NO: 1865903 - DNA, 15 bp, Homo sapiens
gatcctgcattggaa

SEQ ID NO: 1865904 - DNA, 15 bp, Homo sapiens
atcctgcattggaat

SEQ ID NO: 1865905 - DNA, 15 bp, Homo sapiens
tcctgcattggaatt

SEQ ID NO: 1865906 - DNA, 15 bp, Homo sapiens
cctgcattggaattt

SEQ ID NO: 1865907 - DNA, 15 bp, Homo sapiens
ctgcattggaattta

SEQ ID NO: 1865908 - DNA, 15 bp, Homo sapiens
tgcattggaatttat

SEQ ID NO: 1865909 - DNA, 15 bp, Homo sapiens
gcattggaatttatt

SEQ ID NO: 1865910 - DNA, 15 bp, Homo sapiens
cattggaatttattg

SEQ ID NO: 1865911 - DNA, 15 bp, Homo sapiens
attggaatttattgg

SEQ ID NO: 1865912 - DNA, 15 bp, Homo sapiens
ttggaatttattggc

SEQ ID NO: 1865913 - DNA, 15 bp, Homo sapiens
tggaatttattggcc

SEQ ID NO: 1865914 - DNA, 15 bp, Homo sapiens
ggaatttattggccg

SEQ ID NO: 1865915 - DNA, 15 bp, Homo sapiens
gaatttattggccgg

SEQ ID NO: 1865916 - DNA, 15 bp, Homo sapiens
aatttattggccgga

SEQ ID NO: 1865917 - DNA, 15 bp, Homo sapiens
atttattggccggaa

SEQ ID NO: 1865918 - DNA, 15 bp, Homo sapiens
tttattggccggaat

SEQ ID NO: 1865919 - DNA, 15 bp, Homo sapiens
ttattggccggaatg

SEQ ID NO: 1865920 - DNA, 15 bp, Homo sapiens
tattggccggaatgc

SEQ ID NO: 1865921 - DNA, 15 bp, Homo sapiens
attggccggaatgca

SEQ ID NO: 1865922 - DNA, 15 bp, Homo sapiens
ttggccggaatgcag

SEQ ID NO: 1865923 - DNA, 15 bp, Homo sapiens
tggccggaatgcagt

SEQ ID NO: 1865924 - DNA, 15 bp, Homo sapiens
ggccggaatgcagta

SEQ ID NO: 1865925 - DNA, 15 bp, Homo sapiens
gccggaatgcagtaa

SEQ ID NO: 1865926 - DNA, 15 bp, Homo sapiens
ccggaatgcagtaaa

SEQ ID NO: 1865927 - DNA, 15 bp, Homo sapiens
cggaatgcagtaaat

SEQ ID NO: 1865928 - DNA, 15 bp, Homo sapiens
ggaatgcagtaaatg

SEQ ID NO: 1865929 - DNA, 15 bp, Homo sapiens
gaatgcagtaaatgt

SEQ ID NO: 1865930 - DNA, 15 bp, Homo sapiens
gcagtaaatgttcaa

SEQ ID NO: 1865931 - DNA, 15 bp, Homo sapiens
cagtaaatgttcaaa

SEQ ID NO: 1865932 - DNA, 15 bp, Homo sapiens
agtaaatgttcaaaa

SEQ ID NO: 1865933 - DNA, 15 bp, Homo sapiens
gtaaatgttcaaaat

SEQ ID NO: 1865934 - DNA, 15 bp, Homo sapiens
taaatgttcaaaatg

SEQ ID NO: 1865935 - DNA, 15 bp, Homo sapiens
aaatgttcaaaatgc

SEQ ID NO: 1865936 - DNA, 15 bp, Homo sapiens
aatgttcaaaatgcc

SEQ ID NO: 1865937 - DNA, 15 bp, Homo sapiens
atgttcaaaatgcca

SEQ ID NO: 1865938 - DNA, 15 bp, Homo sapiens
tgttcaaaatgccat

SEQ ID NO: 1865939 - DNA, 15 bp, Homo sapiens
gttcaaaatgccatc

SEQ ID NO: 1865940 - DNA, 15 bp, Homo sapiens
ttcaaaatgccatcc

SEQ ID NO: 1865941 - DNA, 15 bp, Homo sapiens
tcaaaatgccatccc

SEQ ID NO: 1865942 - DNA, 15 bp, Homo sapiens
aaaatgccatcccat

SEQ ID NO: 1865943 - DNA, 15 bp, Homo sapiens
aaatgccatcccatc

SEQ ID NO: 1865944 - DNA, 15 bp, Homo sapiens
aatgccatcccatcc

SEQ ID NO: 1865945 - DNA, 15 bp, Homo sapiens
atgccatcccatcca

SEQ ID NO: 1865946 - DNA, 15 bp, Homo sapiens
tgccatcccatccaa

SEQ ID NO: 1865947 - DNA, 15 bp, Homo sapiens
gccatcccatccaac

SEQ ID NO: 1865948 - DNA, 15 bp, Homo sapiens
ccatcccatccaaca

SEQ ID NO: 1865949 - DNA, 15 bp, Homo sapiens
catcccatccaacag

SEQ ID NO: 1865950 - DNA, 15 bp, Homo sapiens
atcccatccaacagt

SEQ ID NO: 1865951 - DNA, 15 bp, Homo sapiens
tcccatccaacagtt

SEQ ID NO: 1865952 - DNA, 15 bp, Homo sapiens
cccatccaacagttt

SEQ ID NO: 1865953 - DNA, 15 bp, Homo sapiens
ccatccaacagtttt

SEQ ID NO: 1865954 - DNA, 15 bp, Homo sapiens
catccaacagttttc

SEQ ID NO: 1865955 - DNA, 15 bp, Homo sapiens
atccaacagttttca

SEQ ID NO: 1865956 - DNA, 15 bp, Homo sapiens
tccaacagttttcat

SEQ ID NO: 1865957 - DNA, 15 bp, Homo sapiens
ccaacagttttcata

SEQ ID NO: 1865958 - DNA, 15 bp, Homo sapiens
caacagttttcataa

SEQ ID NO: 1865959 - DNA, 15 bp, Homo sapiens
aacagttttcataat

SEQ ID NO: 1865960 - DNA, 15 bp, Homo sapiens
acagttttcataatt

SEQ ID NO: 1865961 - DNA, 15 bp, Homo sapiens
cagttttcataattg

SEQ ID NO: 1865962 - DNA, 15 bp, Homo sapiens
agttttcataattgt

SEQ ID NO: 1865963 - DNA, 15 bp, Homo sapiens
gttttcataattgtt

SEQ ID NO: 1865964 - DNA, 15 bp, Homo sapiens
ttttcataattgtta

SEQ ID NO: 1865965 - DNA, 15 bp, Homo sapiens
tttcataattgttat

SEQ ID NO: 1865966 - DNA, 15 bp, Homo sapiens
ttcataattgttatg

SEQ ID NO: 1865967 - DNA, 15 bp, Homo sapiens
tcataattgttatgg

SEQ ID NO: 1865968 - DNA, 15 bp, Homo sapiens
cataattgttatgga

SEQ ID NO: 1865969 - DNA, 15 bp, Homo sapiens
ataattgttatggaa

SEQ ID NO: 1865970 - DNA, 15 bp, Homo sapiens
taattgttatggaac

SEQ ID NO: 1865971 - DNA, 15 bp, Homo sapiens
aattgttatggaaca

SEQ ID NO: 1865972 - DNA, 15 bp, Homo sapiens
attgttatggaacaa

SEQ ID NO: 1865973 - DNA, 15 bp, Homo sapiens
ttgttatggaacaag

SEQ ID NO: 1865974 - DNA, 15 bp, Homo sapiens
tgttatggaacaagg

SEQ ID NO: 1865975 - DNA, 15 bp, Homo sapiens
gttatggaacaaggg

SEQ ID NO: 1865976 - DNA, 15 bp, Homo sapiens
ttatggaacaagggg

SEQ ID NO: 1865977 - DNA, 15 bp, Homo sapiens
tatggaacaagggga

SEQ ID NO: 1865978 - DNA, 15 bp, Homo sapiens
atggaacaaggggag

SEQ ID NO: 1865979 - DNA, 15 bp, Homo sapiens
tggaacaaggggagc

SEQ ID NO: 1865980 - DNA, 15 bp, Homo sapiens
ggaacaaggggagcc

SEQ ID NO: 1865981 - DNA, 15 bp, Homo sapiens
gaacaaggggagccg

SEQ ID NO: 1865982 - DNA, 15 bp, Homo sapiens
aacaaggggagccgg

SEQ ID NO: 1865983 - DNA, 15 bp, Homo sapiens
acaaggggagccggg

SEQ ID NO: 1865984 - DNA, 15 bp, Homo sapiens
caaggggagccgggg

SEQ ID NO: 1865985 - DNA, 15 bp, Homo sapiens
aaggggagccggggg

SEQ ID NO: 1865986 - DNA, 15 bp, Homo sapiens
aggggagccggggga

SEQ ID NO: 1865987 - DNA, 15 bp, Homo sapiens
ggggagccgggggag

SEQ ID NO: 1865988 - DNA, 15 bp, Homo sapiens
gggagccgggggagg

SEQ ID NO: 1865989 - DNA, 15 bp, Homo sapiens
ggagccgggggaggg

SEQ ID NO: 1865990 - DNA, 15 bp, Homo sapiens
gagccgggggagggg

SEQ ID NO: 1865991 - DNA, 15 bp, Homo sapiens
agccgggggagggga

SEQ ID NO: 1865992 - DNA, 15 bp, Homo sapiens
gccgggggaggggag

SEQ ID NO: 1865993 - DNA, 15 bp, Homo sapiens
ccgggggaggggagg

SEQ ID NO: 1865994 - DNA, 15 bp, Homo sapiens
cgggggaggggagga

SEQ ID NO: 1865995 - DNA, 15 bp, Homo sapiens
gggggaggggaggaa

SEQ ID NO: 1865996 - DNA, 15 bp, Homo sapiens
ggggaggggaggaat

SEQ ID NO: 1865997 - DNA, 15 bp, Homo sapiens
gggaggggaggaatg

SEQ ID NO: 1865998 - DNA, 15 bp, Homo sapiens
ggaggggaggaatga

SEQ ID NO: 1865999 - DNA, 15 bp, Homo sapiens
gaggggaggaatgaa

SEQ ID NO: 1866000 - DNA, 15 bp, Homo sapiens
aggggaggaatgaaa

SEQ ID NO: 1866001 - DNA, 15 bp, Homo sapiens
ggggaggaatgaaaa

SEQ ID NO: 1866002 - DNA, 15 bp, Homo sapiens
gggaggaatgaaaag

SEQ ID NO: 1866003 - DNA, 15 bp, Homo sapiens
ggaggaatgaaaagg

SEQ ID NO: 1866004 - DNA, 15 bp, Homo sapiens
gaggaatgaaaagga

SEQ ID NO: 1866005 - DNA, 15 bp, Homo sapiens
aggaatgaaaaggac

SEQ ID NO: 1866006 - DNA, 15 bp, Homo sapiens
ggaatgaaaaggact

SEQ ID NO: 1866007 - DNA, 15 bp, Homo sapiens
gaatgaaaaggactt

SEQ ID NO: 1866008 - DNA, 15 bp, Homo sapiens
aatgaaaaggacttt

SEQ ID NO: 1866009 - DNA, 15 bp, Homo sapiens
atgaaaaggactttt

SEQ ID NO: 1866010 - DNA, 15 bp, Homo sapiens
tgaaaaggacttttg

SEQ ID NO: 1866011 - DNA, 15 bp, Homo sapiens
gaaaaggacttttgt

SEQ ID NO: 1866012 - DNA, 15 bp, Homo sapiens
aaaaggacttttgtt

SEQ ID NO: 1866013 - DNA, 15 bp, Homo sapiens
aaaggacttttgttt

SEQ ID NO: 1866014 - DNA, 15 bp, Homo sapiens
aaggacttttgtttc

SEQ ID NO: 1866015 - DNA, 15 bp, Homo sapiens
aggacttttgtttct

SEQ ID NO: 1866016 - DNA, 15 bp, Homo sapiens
ggacttttgtttctc

SEQ ID NO: 1866017 - DNA, 15 bp, Homo sapiens
gacttttgtttctca

SEQ ID NO: 1866018 - DNA, 15 bp, Homo sapiens
acttttgtttctcac

SEQ ID NO: 1866019 - DNA, 15 bp, Homo sapiens
cttttgtttctcact

SEQ ID NO: 1866020 - DNA, 15 bp, Homo sapiens
ttttgtttctcactg

SEQ ID NO: 1866021 - DNA, 15 bp, Homo sapiens
tttgtttctcactgt

SEQ ID NO: 1866022 - DNA, 15 bp, Homo sapiens
ttgtttctcactgta

SEQ ID NO: 1866023 - DNA, 15 bp, Homo sapiens
tgtttctcactgtat

SEQ ID NO: 1866024 - DNA, 15 bp, Homo sapiens
gtttctcactgtatt

SEQ ID NO: 1866025 - DNA, 15 bp, Homo sapiens
tttctcactgtattt

SEQ ID NO: 1866026 - DNA, 15 bp, Homo sapiens
ttctcactgtatttt

SEQ ID NO: 1866027 - DNA, 15 bp, Homo sapiens
tctcactgtattttt

SEQ ID NO: 1866028 - DNA, 15 bp, Homo sapiens
ctcactgtatttttc

SEQ ID NO: 1866029 - DNA, 15 bp, Homo sapiens
tcactgtatttttcc

SEQ ID NO: 1866030 - DNA, 15 bp, Homo sapiens
cactgtatttttcca

SEQ ID NO: 1866031 - DNA, 15 bp, Homo sapiens
actgtatttttccat

SEQ ID NO: 1866032 - DNA, 15 bp, Homo sapiens
ctgtatttttccatg

SEQ ID NO: 1866033 - DNA, 15 bp, Homo sapiens
tgtatttttccatgt

SEQ ID NO: 1866034 - DNA, 15 bp, Homo sapiens
gtatttttccatgtc

SEQ ID NO: 1866035 - DNA, 15 bp, Homo sapiens
tatttttccatgtct

SEQ ID NO: 1866036 - DNA, 15 bp, Homo sapiens
atttttccatgtctt

SEQ ID NO: 1866037 - DNA, 15 bp, Homo sapiens
tttttccatgtcttc

SEQ ID NO: 1866038 - DNA, 15 bp, Homo sapiens
ttttccatgtcttcg

SEQ ID NO: 1866039 - DNA, 15 bp, Homo sapiens
tttccatgtcttcgg

SEQ ID NO: 1866040 - DNA, 15 bp, Homo sapiens
ttccatgtcttcgga

SEQ ID NO: 1866041 - DNA, 15 bp, Homo sapiens
tccatgtcttcggac

SEQ ID NO: 1866042 - DNA, 15 bp, Homo sapiens
ccatgtcttcggaca

SEQ ID NO: 1866043 - DNA, 15 bp, Homo sapiens
catgtcttcggacag

SEQ ID NO: 1866044 - DNA, 15 bp, Homo sapiens
atgtcttcggacagt

SEQ ID NO: 1866045 - DNA, 15 bp, Homo sapiens
tgtcttcggacagtt

SEQ ID NO: 1866046 - DNA, 15 bp, Homo sapiens
gtcttcggacagttt

SEQ ID NO: 1866047 - DNA, 15 bp, Homo sapiens
tcttcggacagtttt

SEQ ID NO: 1866048 - DNA, 15 bp, Homo sapiens
cttcggacagttttc

SEQ ID NO: 1866049 - DNA, 15 bp, Homo sapiens
ttcggacagttttcc

SEQ ID NO: 1866050 - DNA, 15 bp, Homo sapiens
tcggacagttttcct

SEQ ID NO: 1866051 - DNA, 15 bp, Homo sapiens
cggacagttttccta

SEQ ID NO: 1866052 - DNA, 15 bp, Homo sapiens
ggacagttttcctac

SEQ ID NO: 1866053 - DNA, 15 bp, Homo sapiens
gacagttttcctacc

SEQ ID NO: 1866054 - DNA, 15 bp, Homo sapiens
acagttttcctaccc

SEQ ID NO: 1866055 - DNA, 15 bp, Homo sapiens
cagttttcctaccct

SEQ ID NO: 1866056 - DNA, 15 bp, Homo sapiens
agttttcctaccctc

SEQ ID NO: 1866057 - DNA, 15 bp, Homo sapiens
gttttcctaccctct

SEQ ID NO: 1866058 - DNA, 15 bp, Homo sapiens
ttttcctaccctcta

SEQ ID NO: 1866059 - DNA, 15 bp, Homo sapiens
tttcctaccctctag

SEQ ID NO: 1866060 - DNA, 15 bp, Homo sapiens
ttcctaccctctaga

SEQ ID NO: 1866061 - DNA, 15 bp, Homo sapiens
tcctaccctctagaa

SEQ ID NO: 1866062 - DNA, 15 bp, Homo sapiens
cctaccctctagaaa

SEQ ID NO: 1866063 - DNA, 15 bp, Homo sapiens
ctaccctctagaaac

SEQ ID NO: 1866064 - DNA, 15 bp, Homo sapiens
taccctctagaaact

SEQ ID NO: 1866065 - DNA, 15 bp, Homo sapiens
accctctagaaactg

SEQ ID NO: 1866066 - DNA, 15 bp, Homo sapiens
ccctctagaaactgg

SEQ ID NO: 1866067 - DNA, 15 bp, Homo sapiens
cctctagaaactgga

SEQ ID NO: 1866068 - DNA, 15 bp, Homo sapiens
ctctagaaactggag

SEQ ID NO: 1866069 - DNA, 15 bp, Homo sapiens
tctagaaactggagt

SEQ ID NO: 1866070 - DNA, 15 bp, Homo sapiens
ctagaaactggagtg

SEQ ID NO: 1866071 - DNA, 15 bp, Homo sapiens
tagaaactggagtgg

SEQ ID NO: 1866072 - DNA, 15 bp, Homo sapiens
agaaactggagtgga

SEQ ID NO: 1866073 - DNA, 15 bp, Homo sapiens
gaaactggagtggag

SEQ ID NO: 1866074 - DNA, 15 bp, Homo sapiens
aaactggagtggagt

SEQ ID NO: 1866075 - DNA, 15 bp, Homo sapiens
aactggagtggagtt

SEQ ID NO: 1866076 - DNA, 15 bp, Homo sapiens
actggagtggagttg

SEQ ID NO: 1866077 - DNA, 15 bp, Homo sapiens
ctggagtggagttgg

SEQ ID NO: 1866078 - DNA, 15 bp, Homo sapiens
tggagtggagttgga

SEQ ID NO: 1866079 - DNA, 15 bp, Homo sapiens
ggagtggagttggat

SEQ ID NO: 1866080 - DNA, 15 bp, Homo sapiens
gagtggagttggatc

SEQ ID NO: 1866081 - DNA, 15 bp, Homo sapiens
agtggagttggatct

SEQ ID NO: 1866082 - DNA, 15 bp, Homo sapiens
gtggagttggatctg

SEQ ID NO: 1866083 - DNA, 15 bp, Homo sapiens
tggagttggatctgt

SEQ ID NO: 1866084 - DNA, 15 bp, Homo sapiens
ggagttggatctgtg

SEQ ID NO: 1866085 - DNA, 15 bp, Homo sapiens
gagttggatctgtgg

SEQ ID NO: 1866086 - DNA, 15 bp, Homo sapiens
agttggatctgtggg

SEQ ID NO: 1866087 - DNA, 15 bp, Homo sapiens
gttggatctgtgggg

SEQ ID NO: 1866088 - DNA, 15 bp, Homo sapiens
ttggatctgtggggg

SEQ ID NO: 1866089 - DNA, 15 bp, Homo sapiens
tggatctgtggggga

SEQ ID NO: 1866090 - DNA, 15 bp, Homo sapiens
ggatctgtgggggat

SEQ ID NO: 1866091 - DNA, 15 bp, Homo sapiens
gatctgtgggggata

SEQ ID NO: 1866092 - DNA, 15 bp, Homo sapiens
atctgtgggggatag

SEQ ID NO: 1866093 - DNA, 15 bp, Homo sapiens
tctgtgggggatagg

SEQ ID NO: 1866094 - DNA, 15 bp, Homo sapiens
ctgtgggggataggg

SEQ ID NO: 1866095 - DNA, 15 bp, Homo sapiens
tgtgggggatagggt

SEQ ID NO: 1866096 - DNA, 15 bp, Homo sapiens
gtgggggatagggtg

SEQ ID NO: 1866097 - DNA, 15 bp, Homo sapiens
tgggggatagggtgg

SEQ ID NO: 1866098 - DNA, 15 bp, Homo sapiens
gggggatagggtggg

SEQ ID NO: 1866099 - DNA, 15 bp, Homo sapiens
ggggatagggtggga

SEQ ID NO: 1866100 - DNA, 15 bp, Homo sapiens
gggatagggtgggag

SEQ ID NO: 1866101 - DNA, 15 bp, Homo sapiens
ggatagggtgggaga

SEQ ID NO: 1866102 - DNA, 15 bp, Homo sapiens
gatagggtgggagaa

SEQ ID NO: 1866103 - DNA, 15 bp, Homo sapiens
atagggtgggagaag

SEQ ID NO: 1866104 - DNA, 15 bp, Homo sapiens
tagggtgggagaagg

SEQ ID NO: 1866105 - DNA, 15 bp, Homo sapiens
agggtgggagaaggg

SEQ ID NO: 1866106 - DNA, 15 bp, Homo sapiens
gggtgggagaagggt

SEQ ID NO: 1866107 - DNA, 15 bp, Homo sapiens
ggtgggagaagggtc

SEQ ID NO: 1866108 - DNA, 15 bp, Homo sapiens
gtgggagaagggtct

SEQ ID NO: 1866109 - DNA, 15 bp, Homo sapiens
tgggagaagggtctg

SEQ ID NO: 1866110 - DNA, 15 bp, Homo sapiens
gggagaagggtctgc

SEQ ID NO: 1866111 - DNA, 15 bp, Homo sapiens
ggagaagggtctgcc

SEQ ID NO: 1866112 - DNA, 15 bp, Homo sapiens
gagaagggtctgcct

SEQ ID NO: 1866113 - DNA, 15 bp, Homo sapiens
agaagggtctgcctt

SEQ ID NO: 1866114 - DNA, 15 bp, Homo sapiens
gaagggtctgccttt

SEQ ID NO: 1866115 - DNA, 15 bp, Homo sapiens
aagggtctgcctttg

SEQ ID NO: 1866116 - DNA, 15 bp, Homo sapiens
agggtctgcctttgg

SEQ ID NO: 1866117 - DNA, 15 bp, Homo sapiens
gggtctgcctttggg

SEQ ID NO: 1866118 - DNA, 15 bp, Homo sapiens
ggtctgcctttgggt

SEQ ID NO: 1866119 - DNA, 15 bp, Homo sapiens
gtctgcctttgggtc

SEQ ID NO: 1866120 - DNA, 15 bp, Homo sapiens
tctgcctttgggtcc

SEQ ID NO: 1866121 - DNA, 15 bp, Homo sapiens
ctgcctttgggtcct

SEQ ID NO: 1866122 - DNA, 15 bp, Homo sapiens
tgcctttgggtcctg

SEQ ID NO: 1866123 - DNA, 15 bp, Homo sapiens
gcctttgggtcctgt

SEQ ID NO: 1866124 - DNA, 15 bp, Homo sapiens
cctttgggtcctgtg

SEQ ID NO: 1866125 - DNA, 15 bp, Homo sapiens
ctttgggtcctgtga

SEQ ID NO: 1866126 - DNA, 15 bp, Homo sapiens
tttgggtcctgtgat

SEQ ID NO: 1866127 - DNA, 15 bp, Homo sapiens
ttgggtcctgtgatg

SEQ ID NO: 1866128 - DNA, 15 bp, Homo sapiens
tgggtcctgtgatgc

SEQ ID NO: 1866129 - DNA, 15 bp, Homo sapiens
gggtcctgtgatgcc

SEQ ID NO: 1866130 - DNA, 15 bp, Homo sapiens
ggtcctgtgatgcct

SEQ ID NO: 1866131 - DNA, 15 bp, Homo sapiens
gtcctgtgatgcctt

SEQ ID NO: 1866132 - DNA, 15 bp, Homo sapiens
tcctgtgatgccttc

SEQ ID NO: 1866133 - DNA, 15 bp, Homo sapiens
cctgtgatgccttcc

SEQ ID NO: 1866134 - DNA, 15 bp, Homo sapiens
ctgtgatgccttcca

SEQ ID NO: 1866135 - DNA, 15 bp, Homo sapiens
tgtgatgccttccaa

SEQ ID NO: 1866136 - DNA, 15 bp, Homo sapiens
gtgatgccttccaag

SEQ ID NO: 1866137 - DNA, 15 bp, Homo sapiens
tgatgccttccaagg

SEQ ID NO: 1866138 - DNA, 15 bp, Homo sapiens
gatgccttccaagga

SEQ ID NO: 1866139 - DNA, 15 bp, Homo sapiens
atgccttccaaggac

SEQ ID NO: 1866140 - DNA, 15 bp, Homo sapiens
tgccttccaaggact

SEQ ID NO: 1866141 - DNA, 15 bp, Homo sapiens
gccttccaaggacta

SEQ ID NO: 1866142 - DNA, 15 bp, Homo sapiens
ccttccaaggactag

SEQ ID NO: 1866143 - DNA, 15 bp, Homo sapiens
cttccaaggactagg

SEQ ID NO: 1866144 - DNA, 15 bp, Homo sapiens
ttccaaggactaggg

SEQ ID NO: 1866145 - DNA, 15 bp, Homo sapiens
tccaaggactagggg

SEQ ID NO: 1866146 - DNA, 15 bp, Homo sapiens
ccaaggactaggggt

SEQ ID NO: 1866147 - DNA, 15 bp, Homo sapiens
caaggactaggggtc

SEQ ID NO: 1866148 - DNA, 15 bp, Homo sapiens
aaggactaggggtcc

SEQ ID NO: 1866149 - DNA, 15 bp, Homo sapiens
aggactaggggtcct

SEQ ID NO: 1866150 - DNA, 15 bp, Homo sapiens
ggactaggggtcctg

SEQ ID NO: 1866151 - DNA, 15 bp, Homo sapiens
gactaggggtcctgg

SEQ ID NO: 1866152 - DNA, 15 bp, Homo sapiens
actaggggtcctggt

SEQ ID NO: 1866153 - DNA, 15 bp, Homo sapiens
ctaggggtcctggta

SEQ ID NO: 1866154 - DNA, 15 bp, Homo sapiens
taggggtcctggtag

SEQ ID NO: 1866155 - DNA, 15 bp, Homo sapiens
aggggtcctggtagc

SEQ ID NO: 1866156 - DNA, 15 bp, Homo sapiens
ggggtcctggtagcc

SEQ ID NO: 1866157 - DNA, 15 bp, Homo sapiens
gggtcctggtagcct

SEQ ID NO: 1866158 - DNA, 15 bp, Homo sapiens
ggtcctggtagcctg

SEQ ID NO: 1866159 - DNA, 15 bp, Homo sapiens
gtcctggtagcctgg

SEQ ID NO: 1866160 - DNA, 15 bp, Homo sapiens
tcctggtagcctggg

SEQ ID NO: 1866161 - DNA, 15 bp, Homo sapiens
cctggtagcctgggg

SEQ ID NO: 1866162 - DNA, 15 bp, Homo sapiens
ctggtagcctggggc

SEQ ID NO: 1866163 - DNA, 15 bp, Homo sapiens
tggtagcctggggct

SEQ ID NO: 1866164 - DNA, 15 bp, Homo sapiens
ggtagcctggggctt

SEQ ID NO: 1866165 - DNA, 15 bp, Homo sapiens
gtagcctggggcttt

SEQ ID NO: 1866166 - DNA, 15 bp, Homo sapiens
tagcctggggcttta

SEQ ID NO: 1866167 - DNA, 15 bp, Homo sapiens
agcctggggctttat

SEQ ID NO: 1866168 - DNA, 15 bp, Homo sapiens
gcctggggctttatt

SEQ ID NO: 1866169 - DNA, 15 bp, Homo sapiens
cctggggctttatta

SEQ ID NO: 1866170 - DNA, 15 bp, Homo sapiens
ctggggctttattaa

SEQ ID NO: 1866171 - DNA, 15 bp, Homo sapiens
tggggctttattaaa

SEQ ID NO: 1866172 - DNA, 15 bp, Homo sapiens
ggggctttattaaaa

SEQ ID NO: 1866173 - DNA, 15 bp, Homo sapiens
gggctttattaaaac

SEQ ID NO: 1866174 - DNA, 15 bp, Homo sapiens
ggctttattaaaacg

SEQ ID NO: 1866175 - DNA, 15 bp, Homo sapiens
gctttattaaaacga

SEQ ID NO: 1866176 - DNA, 15 bp, Homo sapiens
ctttattaaaacgag

SEQ ID NO: 1866177 - DNA, 15 bp, Homo sapiens
tttattaaaacgagg

SEQ ID NO: 1866178 - DNA, 15 bp, Homo sapiens
ttattaaaacgaggc

SEQ ID NO: 1866179 - DNA, 15 bp, Homo sapiens
tattaaaacgaggcc

SEQ ID NO: 1866180 - DNA, 15 bp, Homo sapiens
attaaaacgaggccc

SEQ ID NO: 1866181 - DNA, 15 bp, Homo sapiens
ttaaaacgaggccca

SEQ ID NO: 1866182 - DNA, 15 bp, Homo sapiens
taaaacgaggcccac

SEQ ID NO: 1866183 - DNA, 15 bp, Homo sapiens
aaaacgaggcccaca

SEQ ID NO: 1866184 - DNA, 15 bp, Homo sapiens
aaacgaggcccacag

SEQ ID NO: 1866185 - DNA, 15 bp, Homo sapiens
aacgaggcccacagc

SEQ ID NO: 1866186 - DNA, 15 bp, Homo sapiens
acgaggcccacagca

SEQ ID NO: 1866187 - DNA, 15 bp, Homo sapiens
cgaggcccacagcaa

SEQ ID NO: 1866188 - DNA, 15 bp, Homo sapiens
ggcccacagcaaaag

SEQ ID NO: 1866189 - DNA, 15 bp, Homo sapiens
gcccacagcaaaagt

SEQ ID NO: 1866190 - DNA, 15 bp, Homo sapiens
cccacagcaaaagta

SEQ ID NO: 1866191 - DNA, 15 bp, Homo sapiens
ccacagcaaaagtag

SEQ ID NO: 1866192 - DNA, 15 bp, Homo sapiens
cacagcaaaagtagc

SEQ ID NO: 1866193 - DNA, 15 bp, Homo sapiens
acagcaaaagtagct

SEQ ID NO: 1866194 - DNA, 15 bp, Homo sapiens
cagcaaaagtagctt

SEQ ID NO: 1866195 - DNA, 15 bp, Homo sapiens
agcaaaagtagcttg

SEQ ID NO: 1866196 - DNA, 15 bp, Homo sapiens
gcaaaagtagcttgg

SEQ ID NO: 1866197 - DNA, 15 bp, Homo sapiens
caaaagtagcttggt

SEQ ID NO: 1866198 - DNA, 15 bp, Homo sapiens
aaaagtagcttggtt

SEQ ID NO: 1866199 - DNA, 15 bp, Homo sapiens
aaagtagcttggttt

SEQ ID NO: 1866200 - DNA, 15 bp, Homo sapiens
aagtagcttggtttc

SEQ ID NO: 1866201 - DNA, 15 bp, Homo sapiens
agtagcttggtttct

SEQ ID NO: 1866202 - DNA, 15 bp, Homo sapiens
gtagcttggtttctt

SEQ ID NO: 1866203 - DNA, 15 bp, Homo sapiens
tagcttggtttcttg

SEQ ID NO: 1866204 - DNA, 15 bp, Homo sapiens
agcttggtttcttgc

SEQ ID NO: 1866205 - DNA, 15 bp, Homo sapiens
gcttggtttcttgca

SEQ ID NO: 1866206 - DNA, 15 bp, Homo sapiens
cttggtttcttgcac

SEQ ID NO: 1866207 - DNA, 15 bp, Homo sapiens
ttggtttcttgcaca

SEQ ID NO: 1866208 - DNA, 15 bp, Homo sapiens
tggtttcttgcacac

SEQ ID NO: 1866209 - DNA, 15 bp, Homo sapiens
ggtttcttgcacaca

SEQ ID NO: 1866210 - DNA, 15 bp, Homo sapiens
gtttcttgcacacac

SEQ ID NO: 1866211 - DNA, 15 bp, Homo sapiens
tttcttgcacacaca

SEQ ID NO: 1866212 - DNA, 15 bp, Homo sapiens
ttcttgcacacacag

SEQ ID NO: 1866213 - DNA, 15 bp, Homo sapiens
tcttgcacacacaga

SEQ ID NO: 1866214 - DNA, 15 bp, Homo sapiens
cttgcacacacagag

SEQ ID NO: 1866215 - DNA, 15 bp, Homo sapiens
ttgcacacacagagc

SEQ ID NO: 1866216 - DNA, 15 bp, Homo sapiens
tgcacacacagagcc

SEQ ID NO: 1866217 - DNA, 15 bp, Homo sapiens
gcacacacagagccc

SEQ ID NO: 1866218 - DNA, 15 bp, Homo sapiens
cacacacagagcccc

SEQ ID NO: 1866219 - DNA, 15 bp, Homo sapiens
acacacagagccccc

SEQ ID NO: 1866220 - DNA, 15 bp, Homo sapiens
cacacagagcccccc

SEQ ID NO: 1866221 - DNA, 15 bp, Homo sapiens
acacagagccccccc

SEQ ID NO: 1866222 - DNA, 15 bp, Homo sapiens
cacagagccccccca

SEQ ID NO: 1866223 - DNA, 15 bp, Homo sapiens
acagagcccccccac

SEQ ID NO: 1866224 - DNA, 15 bp, Homo sapiens
cagagcccccccacc

SEQ ID NO: 1866225 - DNA, 15 bp, Homo sapiens
agagcccccccacca

SEQ ID NO: 1866226 - DNA, 15 bp, Homo sapiens
gagcccccccaccac

SEQ ID NO: 1866227 - DNA, 15 bp, Homo sapiens
agcccccccaccacc

SEQ ID NO: 1866228 - DNA, 15 bp, Homo sapiens
gcccccccaccacct

SEQ ID NO: 1866229 - DNA, 15 bp, Homo sapiens
cccccccaccacctg

SEQ ID NO: 1866230 - DNA, 15 bp, Homo sapiens
ccccccaccacctgc

SEQ ID NO: 1866231 - DNA, 15 bp, Homo sapiens
cccccaccacctgca

SEQ ID NO: 1866232 - DNA, 15 bp, Homo sapiens
ccccaccacctgcaa

SEQ ID NO: 1866233 - DNA, 15 bp, Homo sapiens
cccaccacctgcaaa

SEQ ID NO: 1866234 - DNA, 15 bp, Homo sapiens
ccaccacctgcaaaa

SEQ ID NO: 1866235 - DNA, 15 bp, Homo sapiens
caccacctgcaaaac

SEQ ID NO: 1866236 - DNA, 15 bp, Homo sapiens
accacctgcaaaacc

SEQ ID NO: 1866237 - DNA, 15 bp, Homo sapiens
ccacctgcaaaacca

SEQ ID NO: 1866238 - DNA, 15 bp, Homo sapiens
cacctgcaaaaccag

SEQ ID NO: 1866239 - DNA, 15 bp, Homo sapiens
acctgcaaaaccagg

SEQ ID NO: 1866240 - DNA, 15 bp, Homo sapiens
cctgcaaaaccaggg

SEQ ID NO: 1866241 - DNA, 15 bp, Homo sapiens
ctgcaaaaccaggga

SEQ ID NO: 1866242 - DNA, 15 bp, Homo sapiens
tgcaaaaccagggaa

SEQ ID NO: 1866243 - DNA, 15 bp, Homo sapiens
gcaaaaccagggaaa

SEQ ID NO: 1866244 - DNA, 15 bp, Homo sapiens
caaaaccagggaaaa

SEQ ID NO: 1866245 - DNA, 15 bp, Homo sapiens
aaaaccagggaaaaa

SEQ ID NO: 1866246 - DNA, 15 bp, Homo sapiens
aaaccagggaaaaac

SEQ ID NO: 1866247 - DNA, 15 bp, Homo sapiens
aaccagggaaaaact

SEQ ID NO: 1866248 - DNA, 15 bp, Homo sapiens
accagggaaaaactg

SEQ ID NO: 1866249 - DNA, 15 bp, Homo sapiens
ccagggaaaaactgt

SEQ ID NO: 1866250 - DNA, 15 bp, Homo sapiens
cagggaaaaactgtc

SEQ ID NO: 1866251 - DNA, 15 bp, Homo sapiens
agggaaaaactgtcc

SEQ ID NO: 1866252 - DNA, 15 bp, Homo sapiens
gggaaaaactgtcct

SEQ ID NO: 1866253 - DNA, 15 bp, Homo sapiens
ggaaaaactgtcctg

SEQ ID NO: 1866254 - DNA, 15 bp, Homo sapiens
gaaaaactgtcctgt

SEQ ID NO: 1866255 - DNA, 15 bp, Homo sapiens
aaaaactgtcctgtc

SEQ ID NO: 1866256 - DNA, 15 bp, Homo sapiens
aaaactgtcctgtcc

SEQ ID NO: 1866257 - DNA, 15 bp, Homo sapiens
aaactgtcctgtcct

SEQ ID NO: 1866258 - DNA, 15 bp, Homo sapiens
aactgtcctgtcctt

SEQ ID NO: 1866259 - DNA, 15 bp, Homo sapiens
actgtcctgtccttc

SEQ ID NO: 1866260 - DNA, 15 bp, Homo sapiens
ctgtcctgtccttct

SEQ ID NO: 1866261 - DNA, 15 bp, Homo sapiens
tgtcctgtccttcta

SEQ ID NO: 1866262 - DNA, 15 bp, Homo sapiens
gtcctgtccttctag

SEQ ID NO: 1866263 - DNA, 15 bp, Homo sapiens
tcctgtccttctagg

SEQ ID NO: 1866264 - DNA, 15 bp, Homo sapiens
cctgtccttctaggg

SEQ ID NO: 1866265 - DNA, 15 bp, Homo sapiens
ctgtccttctagggg

SEQ ID NO: 1866266 - DNA, 15 bp, Homo sapiens
tgtccttctaggggt

SEQ ID NO: 1866267 - DNA, 15 bp, Homo sapiens
gtccttctaggggtt

SEQ ID NO: 1866268 - DNA, 15 bp, Homo sapiens
tccttctaggggttt

SEQ ID NO: 1866269 - DNA, 15 bp, Homo sapiens
ccttctaggggtttt

SEQ ID NO: 1866270 - DNA, 15 bp, Homo sapiens
cttctaggggttttg

SEQ ID NO: 1866271 - DNA, 15 bp, Homo sapiens
ttctaggggttttgt

SEQ ID NO: 1866272 - DNA, 15 bp, Homo sapiens
tctaggggttttgtc

SEQ ID NO: 1866273 - DNA, 15 bp, Homo sapiens
ctaggggttttgtcc

SEQ ID NO: 1866274 - DNA, 15 bp, Homo sapiens
taggggttttgtcct

SEQ ID NO: 1866275 - DNA, 15 bp, Homo sapiens
aggggttttgtcctt

SEQ ID NO: 1866276 - DNA, 15 bp, Homo sapiens
ggggttttgtccttt

SEQ ID NO: 1866277 - DNA, 15 bp, Homo sapiens
gggttttgtcctttt

SEQ ID NO: 1866278 - DNA, 15 bp, Homo sapiens
ggttttgtccttttg

SEQ ID NO: 1866279 - DNA, 15 bp, Homo sapiens
gttttgtccttttgg

SEQ ID NO: 1866280 - DNA, 15 bp, Homo sapiens
ttttgtccttttgga

SEQ ID NO: 1866281 - DNA, 15 bp, Homo sapiens
tttgtccttttggaa

SEQ ID NO: 1866282 - DNA, 15 bp, Homo sapiens
ttgtccttttggaaa

SEQ ID NO: 1866283 - DNA, 15 bp, Homo sapiens
tgtccttttggaaaa

SEQ ID NO: 1866284 - DNA, 15 bp, Homo sapiens
gtccttttggaaaat

SEQ ID NO: 1866285 - DNA, 15 bp, Homo sapiens
tccttttggaaaatt

SEQ ID NO: 1866286 - DNA, 15 bp, Homo sapiens
ccttttggaaaattg

SEQ ID NO: 1866287 - DNA, 15 bp, Homo sapiens
cttttggaaaattgg

SEQ ID NO: 1866288 - DNA, 15 bp, Homo sapiens
ttttggaaaattggc

SEQ ID NO: 1866289 - DNA, 15 bp, Homo sapiens
tttggaaaattggct

SEQ ID NO: 1866290 - DNA, 15 bp, Homo sapiens
ttggaaaattggctt

SEQ ID NO: 1866291 - DNA, 15 bp, Homo sapiens
tggaaaattggctta

SEQ ID NO: 1866292 - DNA, 15 bp, Homo sapiens
ggaaaattggcttaa

SEQ ID NO: 1866293 - DNA, 15 bp, Homo sapiens
gaaaattggcttaat

SEQ ID NO: 1866294 - DNA, 15 bp, Homo sapiens
aaaattggcttaatg

SEQ ID NO: 1866295 - DNA, 15 bp, Homo sapiens
aaattggcttaatga

SEQ ID NO: 1866296 - DNA, 15 bp, Homo sapiens
aattggcttaatgat

SEQ ID NO: 1866297 - DNA, 15 bp, Homo sapiens
attggcttaatgatg

SEQ ID NO: 1866298 - DNA, 15 bp, Homo sapiens
ttggcttaatgatgc

SEQ ID NO: 1866299 - DNA, 15 bp, Homo sapiens
tggcttaatgatgca

SEQ ID NO: 1866300 - DNA, 15 bp, Homo sapiens
ggcttaatgatgcag

SEQ ID NO: 1866301 - DNA, 15 bp, Homo sapiens
gcttaatgatgcagt

SEQ ID NO: 1866302 - DNA, 15 bp, Homo sapiens
cttaatgatgcagtg

SEQ ID NO: 1866303 - DNA, 15 bp, Homo sapiens
ttaatgatgcagtgg

SEQ ID NO: 1866304 - DNA, 15 bp, Homo sapiens
taatgatgcagtggt

SEQ ID NO: 1866305 - DNA, 15 bp, Homo sapiens
aatgatgcagtggtt

SEQ ID NO: 1866306 - DNA, 15 bp, Homo sapiens
atgatgcagtggttt

SEQ ID NO: 1866307 - DNA, 15 bp, Homo sapiens
tgatgcagtggtttg

SEQ ID NO: 1866308 - DNA, 15 bp, Homo sapiens
gatgcagtggtttgt

SEQ ID NO: 1866309 - DNA, 15 bp, Homo sapiens
atgcagtggtttgta

SEQ ID NO: 1866310 - DNA, 15 bp, Homo sapiens
tgcagtggtttgtat

SEQ ID NO: 1866311 - DNA, 15 bp, Homo sapiens
gcagtggtttgtatt

SEQ ID NO: 1866312 - DNA, 15 bp, Homo sapiens
cagtggtttgtatta

SEQ ID NO: 1866313 - DNA, 15 bp, Homo sapiens
agtggtttgtattaa

SEQ ID NO: 1866314 - DNA, 15 bp, Homo sapiens
gtggtttgtattaag

SEQ ID NO: 1866315 - DNA, 15 bp, Homo sapiens
tggtttgtattaaga

SEQ ID NO: 1866316 - DNA, 15 bp, Homo sapiens
ggtttgtattaagat

SEQ ID NO: 1866317 - DNA, 15 bp, Homo sapiens
gtttgtattaagatt

SEQ ID NO: 1866318 - DNA, 15 bp, Homo sapiens
tttgtattaagattt

SEQ ID NO: 1866319 - DNA, 15 bp, Homo sapiens
ttgtattaagatttt

SEQ ID NO: 1866320 - DNA, 15 bp, Homo sapiens
tgtattaagattttc

SEQ ID NO: 1866321 - DNA, 15 bp, Homo sapiens
gtattaagattttca

SEQ ID NO: 1866322 - DNA, 15 bp, Homo sapiens
tattaagattttcat

SEQ ID NO: 1866323 - DNA, 15 bp, Homo sapiens
attaagattttcatg

SEQ ID NO: 1866324 - DNA, 15 bp, Homo sapiens
ttaagattttcatga

SEQ ID NO: 1866325 - DNA, 15 bp, Homo sapiens
taagattttcatgat

SEQ ID NO: 1866326 - DNA, 15 bp, Homo sapiens
aagattttcatgatg

SEQ ID NO: 1866327 - DNA, 15 bp, Homo sapiens
agattttcatgatgc

SEQ ID NO: 1866328 - DNA, 15 bp, Homo sapiens
gattttcatgatgct

SEQ ID NO: 1866329 - DNA, 15 bp, Homo sapiens
attttcatgatgctt

SEQ ID NO: 1866330 - DNA, 15 bp, Homo sapiens
ttttcatgatgcttt

SEQ ID NO: 1866331 - DNA, 15 bp, Homo sapiens
tttcatgatgcttta

SEQ ID NO: 1866332 - DNA, 15 bp, Homo sapiens
ttcatgatgctttaa

SEQ ID NO: 1866333 - DNA, 15 bp, Homo sapiens
tcatgatgctttaac

SEQ ID NO: 1866334 - DNA, 15 bp, Homo sapiens
catgatgctttaacg

SEQ ID NO: 1866335 - DNA, 15 bp, Homo sapiens
atgatgctttaacgt

SEQ ID NO: 1866336 - DNA, 15 bp, Homo sapiens
tgatgctttaacgtg

SEQ ID NO: 1866337 - DNA, 15 bp, Homo sapiens
gatgctttaacgtgt

SEQ ID NO: 1866338 - DNA, 15 bp, Homo sapiens
atgctttaacgtgtg

SEQ ID NO: 1866339 - DNA, 15 bp, Homo sapiens
tgctttaacgtgtgt

SEQ ID NO: 1866340 - DNA, 15 bp, Homo sapiens
gctttaacgtgtgtg

SEQ ID NO: 1866341 - DNA, 15 bp, Homo sapiens
ctttaacgtgtgtgt

SEQ ID NO: 1866342 - DNA, 15 bp, Homo sapiens
tttaacgtgtgtgtg

SEQ ID NO: 1866343 - DNA, 15 bp, Homo sapiens
ttaacgtgtgtgtgt

SEQ ID NO: 1866344 - DNA, 15 bp, Homo sapiens
taacgtgtgtgtgtg

SEQ ID NO: 1866345 - DNA, 15 bp, Homo sapiens
aacgtgtgtgtgtgt

SEQ ID NO: 1866346 - DNA, 15 bp, Homo sapiens
acgtgtgtgtgtgtg

SEQ ID NO: 1866347 - DNA, 15 bp, Homo sapiens
tgtgtgtgtgtgagt

SEQ ID NO: 1866348 - DNA, 15 bp, Homo sapiens
gtgtgtgtgtgagtg

SEQ ID NO: 1866349 - DNA, 15 bp, Homo sapiens
tgtgtgtgtgagtga

SEQ ID NO: 1866350 - DNA, 15 bp, Homo sapiens
gtgtgtgtgagtgag

SEQ ID NO: 1866351 - DNA, 15 bp, Homo sapiens
tgtgtgtgagtgaga

SEQ ID NO: 1866352 - DNA, 15 bp, Homo sapiens
gtgtgtgagtgagag

SEQ ID NO: 1866353 - DNA, 15 bp, Homo sapiens
tgtgtgagtgagaga

SEQ ID NO: 1866354 - DNA, 15 bp, Homo sapiens
gtgtgagtgagagag

SEQ ID NO: 1866355 - DNA, 15 bp, Homo sapiens
tgtgagtgagagaga

SEQ ID NO: 1866356 - DNA, 15 bp, Homo sapiens
gtgagtgagagagag

SEQ ID NO: 1866357 - DNA, 15 bp, Homo sapiens
tgagtgagagagaga

SEQ ID NO: 1866358 - DNA, 15 bp, Homo sapiens
gagtgagagagagag

SEQ ID NO: 1866359 - DNA, 15 bp, Homo sapiens
agtgagagagagaga

SEQ ID NO: 1866360 - DNA, 15 bp, Homo sapiens
gtgagagagagagag

SEQ ID NO: 1866361 - DNA, 15 bp, Homo sapiens
tgagagagagagaga

SEQ ID NO: 1866362 - DNA, 15 bp, Homo sapiens
gagagagagagaaag

SEQ ID NO: 1866363 - DNA, 15 bp, Homo sapiens
gagagaaagagagaa

SEQ ID NO: 1866364 - DNA, 15 bp, Homo sapiens
agagaaagagagaaa

SEQ ID NO: 1866365 - DNA, 15 bp, Homo sapiens
gagaaagagagaaag

SEQ ID NO: 1866366 - DNA, 15 bp, Homo sapiens
agaaagagagaaaga

SEQ ID NO: 1866367 - DNA, 15 bp, Homo sapiens
gaaagagagaaagag

SEQ ID NO: 1866368 - DNA, 15 bp, Homo sapiens
aaagagagaaagaga

SEQ ID NO: 1866369 - DNA, 15 bp, Homo sapiens
aagagagaaagagat

SEQ ID NO: 1866370 - DNA, 15 bp, Homo sapiens
agagagaaagagatt

SEQ ID NO: 1866371 - DNA, 15 bp, Homo sapiens
gagagaaagagattg

SEQ ID NO: 1866372 - DNA, 15 bp, Homo sapiens
agagaaagagattga

SEQ ID NO: 1866373 - DNA, 15 bp, Homo sapiens
gagaaagagattgag

SEQ ID NO: 1866374 - DNA, 15 bp, Homo sapiens
agaaagagattgaga

SEQ ID NO: 1866375 - DNA, 15 bp, Homo sapiens
gaaagagattgagag

SEQ ID NO: 1866376 - DNA, 15 bp, Homo sapiens
aaagagattgagaga

SEQ ID NO: 1866377 - DNA, 15 bp, Homo sapiens
aagagattgagagag

SEQ ID NO: 1866378 - DNA, 15 bp, Homo sapiens
agagattgagagaga

SEQ ID NO: 1866379 - DNA, 15 bp, Homo sapiens
gagattgagagagag

SEQ ID NO: 1866380 - DNA, 15 bp, Homo sapiens
agattgagagagaga

SEQ ID NO: 1866381 - DNA, 15 bp, Homo sapiens
gattgagagagagag

SEQ ID NO: 1866382 - DNA, 15 bp, Homo sapiens
attgagagagagaga

SEQ ID NO: 1866383 - DNA, 15 bp, Homo sapiens
ttgagagagagagag

SEQ ID NO: 1866384 - DNA, 15 bp, Homo sapiens
agagagagagagaat

SEQ ID NO: 1866385 - DNA, 15 bp, Homo sapiens
gagagagagagaatg

SEQ ID NO: 1866386 - DNA, 15 bp, Homo sapiens
agagagagagaatga

SEQ ID NO: 1866387 - DNA, 15 bp, Homo sapiens
gagagagagaatgaa

SEQ ID NO: 1866388 - DNA, 15 bp, Homo sapiens
agagagagaatgaat

SEQ ID NO: 1866389 - DNA, 15 bp, Homo sapiens
gagagagaatgaatc

SEQ ID NO: 1866390 - DNA, 15 bp, Homo sapiens
agagagaatgaatca

SEQ ID NO: 1866391 - DNA, 15 bp, Homo sapiens
gagagaatgaatcag

SEQ ID NO: 1866392 - DNA, 15 bp, Homo sapiens
agagaatgaatcagc

SEQ ID NO: 1866393 - DNA, 15 bp, Homo sapiens
gagaatgaatcagca

SEQ ID NO: 1866394 - DNA, 15 bp, Homo sapiens
agaatgaatcagcat

SEQ ID NO: 1866395 - DNA, 15 bp, Homo sapiens
gaatgaatcagcatt

SEQ ID NO: 1866396 - DNA, 15 bp, Homo sapiens
aatgaatcagcattc

SEQ ID NO: 1866397 - DNA, 15 bp, Homo sapiens
atgaatcagcattca

SEQ ID NO: 1866398 - DNA, 15 bp, Homo sapiens
tgaatcagcattcag

SEQ ID NO: 1866399 - DNA, 15 bp, Homo sapiens
gaatcagcattcagt

SEQ ID NO: 1866400 - DNA, 15 bp, Homo sapiens
aatcagcattcagtg

SEQ ID NO: 1866401 - DNA, 15 bp, Homo sapiens
atcagcattcagtgc

SEQ ID NO: 1866402 - DNA, 15 bp, Homo sapiens
tcagcattcagtgcc

SEQ ID NO: 1866403 - DNA, 15 bp, Homo sapiens
cagcattcagtgcca

SEQ ID NO: 1866404 - DNA, 15 bp, Homo sapiens
agcattcagtgccag

SEQ ID NO: 1866405 - DNA, 15 bp, Homo sapiens
gcattcagtgccagc

SEQ ID NO: 1866406 - DNA, 15 bp, Homo sapiens
cattcagtgccagct

SEQ ID NO: 1866407 - DNA, 15 bp, Homo sapiens
attcagtgccagctg

SEQ ID NO: 1866408 - DNA, 15 bp, Homo sapiens
ttcagtgccagctgc

SEQ ID NO: 1866409 - DNA, 15 bp, Homo sapiens
tcagtgccagctgcc

SEQ ID NO: 1866410 - DNA, 15 bp, Homo sapiens
cagtgccagctgccc

SEQ ID NO: 1866411 - DNA, 15 bp, Homo sapiens
agtgccagctgccca

SEQ ID NO: 1866412 - DNA, 15 bp, Homo sapiens
gtgccagctgcccag

SEQ ID NO: 1866413 - DNA, 15 bp, Homo sapiens
tgccagctgcccagt

SEQ ID NO: 1866414 - DNA, 15 bp, Homo sapiens
gccagctgcccagtt

SEQ ID NO: 1866415 - DNA, 15 bp, Homo sapiens
ccagctgcccagttg

SEQ ID NO: 1866416 - DNA, 15 bp, Homo sapiens
cagctgcccagttgg

SEQ ID NO: 1866417 - DNA, 15 bp, Homo sapiens
agctgcccagttggg

SEQ ID NO: 1866418 - DNA, 15 bp, Homo sapiens
gctgcccagttggga

SEQ ID NO: 1866419 - DNA, 15 bp, Homo sapiens
ctgcccagttgggaa

SEQ ID NO: 1866420 - DNA, 15 bp, Homo sapiens
tgcccagttgggaat

SEQ ID NO: 1866421 - DNA, 15 bp, Homo sapiens
gcccagttgggaatc

SEQ ID NO: 1866422 - DNA, 15 bp, Homo sapiens
cccagttgggaatcc

SEQ ID NO: 1866423 - DNA, 15 bp, Homo sapiens
ccagttgggaatcca

SEQ ID NO: 1866424 - DNA, 15 bp, Homo sapiens
cagttgggaatccag

SEQ ID NO: 1866425 - DNA, 15 bp, Homo sapiens
agttgggaatccaga

SEQ ID NO: 1866426 - DNA, 15 bp, Homo sapiens
gttgggaatccagat

SEQ ID NO: 1866427 - DNA, 15 bp, Homo sapiens
ttgggaatccagata

SEQ ID NO: 1866428 - DNA, 15 bp, Homo sapiens
tgggaatccagatag

SEQ ID NO: 1866429 - DNA, 15 bp, Homo sapiens
gggaatccagatagg

SEQ ID NO: 1866430 - DNA, 15 bp, Homo sapiens
ggaatccagataggg

SEQ ID NO: 1866431 - DNA, 15 bp, Homo sapiens
gaatccagataggga

SEQ ID NO: 1866432 - DNA, 15 bp, Homo sapiens
aatccagatagggaa

SEQ ID NO: 1866433 - DNA, 15 bp, Homo sapiens
atccagatagggaat

SEQ ID NO: 1866434 - DNA, 15 bp, Homo sapiens
tccagatagggaatt

SEQ ID NO: 1866435 - DNA, 15 bp, Homo sapiens
ccagatagggaattt

SEQ ID NO: 1866436 - DNA, 15 bp, Homo sapiens
cagatagggaatttg

SEQ ID NO: 1866437 - DNA, 15 bp, Homo sapiens
agatagggaatttgg

SEQ ID NO: 1866438 - DNA, 15 bp, Homo sapiens
gatagggaatttggg

SEQ ID NO: 1866439 - DNA, 15 bp, Homo sapiens
atagggaatttgggg

SEQ ID NO: 1866440 - DNA, 15 bp, Homo sapiens
tagggaatttgggga

SEQ ID NO: 1866441 - DNA, 15 bp, Homo sapiens
agggaatttggggaa

SEQ ID NO: 1866442 - DNA, 15 bp, Homo sapiens
gggaatttggggaat

SEQ ID NO: 1866443 - DNA, 15 bp, Homo sapiens
ggaatttggggaatc

SEQ ID NO: 1866444 - DNA, 15 bp, Homo sapiens
gaatttggggaatct

SEQ ID NO: 1866445 - DNA, 15 bp, Homo sapiens
aatttggggaatctc

SEQ ID NO: 1866446 - DNA, 15 bp, Homo sapiens
atttggggaatctcc

SEQ ID NO: 1866447 - DNA, 15 bp, Homo sapiens
tttggggaatctcct

SEQ ID NO: 1866448 - DNA, 15 bp, Homo sapiens
ttggggaatctccta

SEQ ID NO: 1866449 - DNA, 15 bp, Homo sapiens
tggggaatctcctac

SEQ ID NO: 1866450 - DNA, 15 bp, Homo sapiens
ggggaatctcctaca

SEQ ID NO: 1866451 - DNA, 15 bp, Homo sapiens
gggaatctcctacac

SEQ ID NO: 1866452 - DNA, 15 bp, Homo sapiens
ggaatctcctacact

SEQ ID NO: 1866453 - DNA, 15 bp, Homo sapiens
gaatctcctacactc

SEQ ID NO: 1866454 - DNA, 15 bp, Homo sapiens
aatctcctacactct

SEQ ID NO: 1866455 - DNA, 15 bp, Homo sapiens
atctcctacactctc

SEQ ID NO: 1866456 - DNA, 15 bp, Homo sapiens
tctcctacactctca

SEQ ID NO: 1866457 - DNA, 15 bp, Homo sapiens
ctcctacactctcag

SEQ ID NO: 1866458 - DNA, 15 bp, Homo sapiens
tcctacactctcagg

SEQ ID NO: 1866459 - DNA, 15 bp, Homo sapiens
cctacactctcaggg

SEQ ID NO: 1866460 - DNA, 15 bp, Homo sapiens
ctacactctcagggt

SEQ ID NO: 1866461 - DNA, 15 bp, Homo sapiens
tacactctcagggtg

SEQ ID NO: 1866462 - DNA, 15 bp, Homo sapiens
acactctcagggtgg

SEQ ID NO: 1866463 - DNA, 15 bp, Homo sapiens
cactctcagggtggc

SEQ ID NO: 1866464 - DNA, 15 bp, Homo sapiens
actctcagggtggca

SEQ ID NO: 1866465 - DNA, 15 bp, Homo sapiens
ctctcagggtggcag

SEQ ID NO: 1866466 - DNA, 15 bp, Homo sapiens
tctcagggtggcagg

SEQ ID NO: 1866467 - DNA, 15 bp, Homo sapiens
ctcagggtggcaggt

SEQ ID NO: 1866468 - DNA, 15 bp, Homo sapiens
tcagggtggcaggtg

SEQ ID NO: 1866469 - DNA, 15 bp, Homo sapiens
cagggtggcaggtgg

SEQ ID NO: 1866470 - DNA, 15 bp, Homo sapiens
agggtggcaggtggg

SEQ ID NO: 1866471 - DNA, 15 bp, Homo sapiens
gggtggcaggtgggt

SEQ ID NO: 1866472 - DNA, 15 bp, Homo sapiens
ggtggcaggtgggta

SEQ ID NO: 1866473 - DNA, 15 bp, Homo sapiens
gtggcaggtgggtag

SEQ ID NO: 1866474 - DNA, 15 bp, Homo sapiens
tggcaggtgggtagg

SEQ ID NO: 1866475 - DNA, 15 bp, Homo sapiens
ggcaggtgggtaggt

SEQ ID NO: 1866476 - DNA, 15 bp, Homo sapiens
gcaggtgggtaggtg

SEQ ID NO: 1866477 - DNA, 15 bp, Homo sapiens
caggtgggtaggtgg

SEQ ID NO: 1866478 - DNA, 15 bp, Homo sapiens
aggtgggtaggtggg

SEQ ID NO: 1866479 - DNA, 15 bp, Homo sapiens
ggtgggtaggtgggt

SEQ ID NO: 1866480 - DNA, 15 bp, Homo sapiens
gtgggtaggtgggtg

SEQ ID NO: 1866481 - DNA, 15 bp, Homo sapiens
tgggtaggtgggtga

SEQ ID NO: 1866482 - DNA, 15 bp, Homo sapiens
gggtaggtgggtgag

SEQ ID NO: 1866483 - DNA, 15 bp, Homo sapiens
ggtaggtgggtgagg

SEQ ID NO: 1866484 - DNA, 15 bp, Homo sapiens
gtaggtgggtgaggt

SEQ ID NO: 1866485 - DNA, 15 bp, Homo sapiens
taggtgggtgaggta

SEQ ID NO: 1866486 - DNA, 15 bp, Homo sapiens
aggtgggtgaggtaa

SEQ ID NO: 1866487 - DNA, 15 bp, Homo sapiens
ggtgggtgaggtaag

SEQ ID NO: 1866488 - DNA, 15 bp, Homo sapiens
gtgggtgaggtaaga

SEQ ID NO: 1866489 - DNA, 15 bp, Homo sapiens
tgggtgaggtaagag

SEQ ID NO: 1866490 - DNA, 15 bp, Homo sapiens
gggtgaggtaagaga

SEQ ID NO: 1866491 - DNA, 15 bp, Homo sapiens
ggtgaggtaagagac

SEQ ID NO: 1866492 - DNA, 15 bp, Homo sapiens
gtgaggtaagagact

SEQ ID NO: 1866493 - DNA, 15 bp, Homo sapiens
tgaggtaagagactt

SEQ ID NO: 1866494 - DNA, 15 bp, Homo sapiens
gaggtaagagacttg

SEQ ID NO: 1866495 - DNA, 15 bp, Homo sapiens
aggtaagagacttga

SEQ ID NO: 1866496 - DNA, 15 bp, Homo sapiens
ggtaagagacttgac

SEQ ID NO: 1866497 - DNA, 15 bp, Homo sapiens
gtaagagacttgact

SEQ ID NO: 1866498 - DNA, 15 bp, Homo sapiens
taagagacttgactt

SEQ ID NO: 1866499 - DNA, 15 bp, Homo sapiens
aagagacttgacttg

SEQ ID NO: 1866500 - DNA, 15 bp, Homo sapiens
agagacttgacttgg

SEQ ID NO: 1866501 - DNA, 15 bp, Homo sapiens
gagacttgacttggt

SEQ ID NO: 1866502 - DNA, 15 bp, Homo sapiens
agacttgacttggta

SEQ ID NO: 1866503 - DNA, 15 bp, Homo sapiens
gacttgacttggtag

SEQ ID NO: 1866504 - DNA, 15 bp, Homo sapiens
acttgacttggtagt

SEQ ID NO: 1866505 - DNA, 15 bp, Homo sapiens
cttgacttggtagtt

SEQ ID NO: 1866506 - DNA, 15 bp, Homo sapiens
ttgacttggtagttt

SEQ ID NO: 1866507 - DNA, 15 bp, Homo sapiens
tgacttggtagtttc

SEQ ID NO: 1866508 - DNA, 15 bp, Homo sapiens
gacttggtagtttct

SEQ ID NO: 1866509 - DNA, 15 bp, Homo sapiens
acttggtagtttctc

SEQ ID NO: 1866510 - DNA, 15 bp, Homo sapiens
cttggtagtttctct

SEQ ID NO: 1866511 - DNA, 15 bp, Homo sapiens
ttggtagtttctctt

SEQ ID NO: 1866512 - DNA, 15 bp, Homo sapiens
tggtagtttctcttg

SEQ ID NO: 1866513 - DNA, 15 bp, Homo sapiens
ggtagtttctcttgg

SEQ ID NO: 1866514 - DNA, 15 bp, Homo sapiens
gtagtttctcttgga

SEQ ID NO: 1866515 - DNA, 15 bp, Homo sapiens
tagtttctcttggac

SEQ ID NO: 1866516 - DNA, 15 bp, Homo sapiens
agtttctcttggaca

SEQ ID NO: 1866517 - DNA, 15 bp, Homo sapiens
gtttctcttggacac

SEQ ID NO: 1866518 - DNA, 15 bp, Homo sapiens
tttctcttggacacg

SEQ ID NO: 1866519 - DNA, 15 bp, Homo sapiens
ttctcttggacacga

SEQ ID NO: 1866520 - DNA, 15 bp, Homo sapiens
tctcttggacacgac

SEQ ID NO: 1866521 - DNA, 15 bp, Homo sapiens
ctcttggacacgaca

SEQ ID NO: 1866522 - DNA, 15 bp, Homo sapiens
tcttggacacgacag

SEQ ID NO: 1866523 - DNA, 15 bp, Homo sapiens
cttggacacgacaga

SEQ ID NO: 1866524 - DNA, 15 bp, Homo sapiens
ttggacacgacagac

SEQ ID NO: 1866525 - DNA, 15 bp, Homo sapiens
tggacacgacagact

SEQ ID NO: 1866526 - DNA, 15 bp, Homo sapiens
ggacacgacagactt

SEQ ID NO: 1866527 - DNA, 15 bp, Homo sapiens
gacacgacagacttt

SEQ ID NO: 1866528 - DNA, 15 bp, Homo sapiens
acacgacagactttc

SEQ ID NO: 1866529 - DNA, 15 bp, Homo sapiens
cacgacagactttct

SEQ ID NO: 1866530 - DNA, 15 bp, Homo sapiens
acgacagactttctg

SEQ ID NO: 1866531 - DNA, 15 bp, Homo sapiens
cgacagactttctgt

SEQ ID NO: 1866532 - DNA, 15 bp, Homo sapiens
gacagactttctgtt

SEQ ID NO: 1866533 - DNA, 15 bp, Homo sapiens
acagactttctgttc

SEQ ID NO: 1866534 - DNA, 15 bp, Homo sapiens
cagactttctgttcc

SEQ ID NO: 1866535 - DNA, 15 bp, Homo sapiens
agactttctgttcca

SEQ ID NO: 1866536 - DNA, 15 bp, Homo sapiens
gactttctgttccat

SEQ ID NO: 1866537 - DNA, 15 bp, Homo sapiens
actttctgttccatg

SEQ ID NO: 1866538 - DNA, 15 bp, Homo sapiens
ctttctgttccatgc

SEQ ID NO: 1866539 - DNA, 15 bp, Homo sapiens
tttctgttccatgct

SEQ ID NO: 1866540 - DNA, 15 bp, Homo sapiens
ttctgttccatgctt

SEQ ID NO: 1866541 - DNA, 15 bp, Homo sapiens
tctgttccatgcttg

SEQ ID NO: 1866542 - DNA, 15 bp, Homo sapiens
ctgttccatgcttgt

SEQ ID NO: 1866543 - DNA, 15 bp, Homo sapiens
tgttccatgcttgtc

SEQ ID NO: 1866544 - DNA, 15 bp, Homo sapiens
gttccatgcttgtcc

SEQ ID NO: 1866545 - DNA, 15 bp, Homo sapiens
ttccatgcttgtccc

SEQ ID NO: 1866546 - DNA, 15 bp, Homo sapiens
tccatgcttgtccca

SEQ ID NO: 1866547 - DNA, 15 bp, Homo sapiens
ccatgcttgtcccag

SEQ ID NO: 1866548 - DNA, 15 bp, Homo sapiens
catgcttgtcccagc

SEQ ID NO: 1866549 - DNA, 15 bp, Homo sapiens
atgcttgtcccagcc

SEQ ID NO: 1866550 - DNA, 15 bp, Homo sapiens
tgcttgtcccagccc

SEQ ID NO: 1866551 - DNA, 15 bp, Homo sapiens
gcttgtcccagccct

SEQ ID NO: 1866552 - DNA, 15 bp, Homo sapiens
cttgtcccagccctt

SEQ ID NO: 1866553 - DNA, 15 bp, Homo sapiens
ttgtcccagcccttg

SEQ ID NO: 1866554 - DNA, 15 bp, Homo sapiens
tgtcccagcccttgt

SEQ ID NO: 1866555 - DNA, 15 bp, Homo sapiens
gtcccagcccttgtg

SEQ ID NO: 1866556 - DNA, 15 bp, Homo sapiens
tcccagcccttgtgt

SEQ ID NO: 1866557 - DNA, 15 bp, Homo sapiens
cccagcccttgtgtc

SEQ ID NO: 1866558 - DNA, 15 bp, Homo sapiens
ccagcccttgtgtct

SEQ ID NO: 1866559 - DNA, 15 bp, Homo sapiens
cagcccttgtgtctt

SEQ ID NO: 1866560 - DNA, 15 bp, Homo sapiens
agcccttgtgtcttc

SEQ ID NO: 1866561 - DNA, 15 bp, Homo sapiens
gcccttgtgtcttcc

SEQ ID NO: 1866562 - DNA, 15 bp, Homo sapiens
cccttgtgtcttcct

SEQ ID NO: 1866563 - DNA, 15 bp, Homo sapiens
ccttgtgtcttcctg

SEQ ID NO: 1866564 - DNA, 15 bp, Homo sapiens
cttgtgtcttcctgg

SEQ ID NO: 1866565 - DNA, 15 bp, Homo sapiens
ttgtgtcttcctggg

SEQ ID NO: 1866566 - DNA, 15 bp, Homo sapiens
tgtgtcttcctgggg

SEQ ID NO: 1866567 - DNA, 15 bp, Homo sapiens
gtgtcttcctggggg

SEQ ID NO: 1866568 - DNA, 15 bp, Homo sapiens
tgtcttcctgggggt

SEQ ID NO: 1866569 - DNA, 15 bp, Homo sapiens
gtcttcctgggggtg

SEQ ID NO: 1866570 - DNA, 15 bp, Homo sapiens
tcttcctgggggtgc

SEQ ID NO: 1866571 - DNA, 15 bp, Homo sapiens
cttcctgggggtgcc

SEQ ID NO: 1866572 - DNA, 15 bp, Homo sapiens
ttcctgggggtgcca

SEQ ID NO: 1866573 - DNA, 15 bp, Homo sapiens
tcctgggggtgccag

SEQ ID NO: 1866574 - DNA, 15 bp, Homo sapiens
cctgggggtgccagg

SEQ ID NO: 1866575 - DNA, 15 bp, Homo sapiens
ctgggggtgccaggg

SEQ ID NO: 1866576 - DNA, 15 bp, Homo sapiens
tgggggtgccagggt

SEQ ID NO: 1866577 - DNA, 15 bp, Homo sapiens
gggggtgccagggtc

SEQ ID NO: 1866578 - DNA, 15 bp, Homo sapiens
ggggtgccagggtca

SEQ ID NO: 1866579 - DNA, 15 bp, Homo sapiens
gggtgccagggtcat

SEQ ID NO: 1866580 - DNA, 15 bp, Homo sapiens
ggtgccagggtcatg

SEQ ID NO: 1866581 - DNA, 15 bp, Homo sapiens
gtgccagggtcatgc

SEQ ID NO: 1866582 - DNA, 15 bp, Homo sapiens
tgccagggtcatgcc

SEQ ID NO: 1866583 - DNA, 15 bp, Homo sapiens
gccagggtcatgccc

SEQ ID NO: 1866584 - DNA, 15 bp, Homo sapiens
ccagggtcatgccca

SEQ ID NO: 1866585 - DNA, 15 bp, Homo sapiens
cagggtcatgcccag

SEQ ID NO: 1866586 - DNA, 15 bp, Homo sapiens
agggtcatgcccaga

SEQ ID NO: 1866587 - DNA, 15 bp, Homo sapiens
gggtcatgcccagag

SEQ ID NO: 1866588 - DNA, 15 bp, Homo sapiens
ggtcatgcccagagg

SEQ ID NO: 1866589 - DNA, 15 bp, Homo sapiens
gtcatgcccagaggg

SEQ ID NO: 1866590 - DNA, 15 bp, Homo sapiens
tcatgcccagaggga

SEQ ID NO: 1866591 - DNA, 15 bp, Homo sapiens
catgcccagagggaa

SEQ ID NO: 1866592 - DNA, 15 bp, Homo sapiens
atgcccagagggaag

SEQ ID NO: 1866593 - DNA, 15 bp, Homo sapiens
tgcccagagggaagg

SEQ ID NO: 1866594 - DNA, 15 bp, Homo sapiens
gcccagagggaaggc

SEQ ID NO: 1866595 - DNA, 15 bp, Homo sapiens
cccagagggaaggca

SEQ ID NO: 1866596 - DNA, 15 bp, Homo sapiens
ccagagggaaggcag

SEQ ID NO: 1866597 - DNA, 15 bp, Homo sapiens
cagagggaaggcagc

SEQ ID NO: 1866598 - DNA, 15 bp, Homo sapiens
agagggaaggcagct

SEQ ID NO: 1866599 - DNA, 15 bp, Homo sapiens
gagggaaggcagctg

SEQ ID NO: 1866600 - DNA, 15 bp, Homo sapiens
agggaaggcagctga

SEQ ID NO: 1866601 - DNA, 15 bp, Homo sapiens
gggaaggcagctgag

SEQ ID NO: 1866602 - DNA, 15 bp, Homo sapiens
ggaaggcagctgagc

SEQ ID NO: 1866603 - DNA, 15 bp, Homo sapiens
gaaggcagctgagca

SEQ ID NO: 1866604 - DNA, 15 bp, Homo sapiens
aaggcagctgagcag

SEQ ID NO: 1866605 - DNA, 15 bp, Homo sapiens
aggcagctgagcaga

SEQ ID NO: 1866606 - DNA, 15 bp, Homo sapiens
ggcagctgagcagac

SEQ ID NO: 1866607 - DNA, 15 bp, Homo sapiens
gcagctgagcagaca

SEQ ID NO: 1866608 - DNA, 15 bp, Homo sapiens
cagctgagcagacaa

SEQ ID NO: 1866609 - DNA, 15 bp, Homo sapiens
agctgagcagacaat

SEQ ID NO: 1866610 - DNA, 15 bp, Homo sapiens
gctgagcagacaatg

SEQ ID NO: 1866611 - DNA, 15 bp, Homo sapiens
ctgagcagacaatgc

SEQ ID NO: 1866612 - DNA, 15 bp, Homo sapiens
accccctttctgaag

SEQ ID NO: 1866613 - DNA, 15 bp, Homo sapiens
ccccctttctgaaga

SEQ ID NO: 1866614 - DNA, 15 bp, Homo sapiens
cccctttctgaagag

SEQ ID NO: 1866615 - DNA, 15 bp, Homo sapiens
ccctttctgaagaga

SEQ ID NO: 1866616 - DNA, 15 bp, Homo sapiens
cctttctgaagagag

SEQ ID NO: 1866617 - DNA, 15 bp, Homo sapiens
ctttctgaagagagc

SEQ ID NO: 1866618 - DNA, 15 bp, Homo sapiens
tttctgaagagagct

SEQ ID NO: 1866619 - DNA, 15 bp, Homo sapiens
ttctgaagagagctg

SEQ ID NO: 1866620 - DNA, 15 bp, Homo sapiens
tctgaagagagctgc

SEQ ID NO: 1866621 - DNA, 15 bp, Homo sapiens
ctgaagagagctgct

SEQ ID NO: 1866622 - DNA, 15 bp, Homo sapiens
tgaagagagctgctc

SEQ ID NO: 1866623 - DNA, 15 bp, Homo sapiens
gaagagagctgctct

SEQ ID NO: 1866624 - DNA, 15 bp, Homo sapiens
aagagagctgctctg

SEQ ID NO: 1866625 - DNA, 15 bp, Homo sapiens
agagagctgctctga

SEQ ID NO: 1866626 - DNA, 15 bp, Homo sapiens
gagagctgctctgag

SEQ ID NO: 1866627 - DNA, 15 bp, Homo sapiens
agagctgctctgagt

SEQ ID NO: 1866628 - DNA, 15 bp, Homo sapiens
gagctgctctgagtt

SEQ ID NO: 1866629 - DNA, 15 bp, Homo sapiens
agctgctctgagtta

SEQ ID NO: 1866630 - DNA, 15 bp, Homo sapiens
gctgctctgagttac

SEQ ID NO: 1866631 - DNA, 15 bp, Homo sapiens
ctgctctgagttact

SEQ ID NO: 1866632 - DNA, 15 bp, Homo sapiens
tgctctgagttactt

SEQ ID NO: 1866633 - DNA, 15 bp, Homo sapiens
gctctgagttacttg

SEQ ID NO: 1866634 - DNA, 15 bp, Homo sapiens
ctctgagttacttgg

SEQ ID NO: 1866635 - DNA, 15 bp, Homo sapiens
tctgagttacttggg

SEQ ID NO: 1866636 - DNA, 15 bp, Homo sapiens
ctgagttacttgggg

SEQ ID NO: 1866637 - DNA, 15 bp, Homo sapiens
tgagttacttggggg

SEQ ID NO: 1866638 - DNA, 15 bp, Homo sapiens
gagttacttgggggg

SEQ ID NO: 1866639 - DNA, 15 bp, Homo sapiens
agttacttggggggt

SEQ ID NO: 1866640 - DNA, 15 bp, Homo sapiens
gttacttggggggta

SEQ ID NO: 1866641 - DNA, 15 bp, Homo sapiens
ttacttggggggtaa

SEQ ID NO: 1866642 - DNA, 15 bp, Homo sapiens
tacttggggggtaac

SEQ ID NO: 1866643 - DNA, 15 bp, Homo sapiens
acttggggggtaaca

SEQ ID NO: 1866644 - DNA, 15 bp, Homo sapiens
cttggggggtaacag

SEQ ID NO: 1866645 - DNA, 15 bp, Homo sapiens
ttggggggtaacagt

SEQ ID NO: 1866646 - DNA, 15 bp, Homo sapiens
tggggggtaacagtg

SEQ ID NO: 1866647 - DNA, 15 bp, Homo sapiens
ggggggtaacagtgg

SEQ ID NO: 1866648 - DNA, 15 bp, Homo sapiens
gggggtaacagtggg

SEQ ID NO: 1866649 - DNA, 15 bp, Homo sapiens
ggggtaacagtggga

SEQ ID NO: 1866650 - DNA, 15 bp, Homo sapiens
gggtaacagtgggaa

SEQ ID NO: 1866651 - DNA, 15 bp, Homo sapiens
ggtaacagtgggaac

SEQ ID NO: 1866652 - DNA, 15 bp, Homo sapiens
gtaacagtgggaacc

SEQ ID NO: 1866653 - DNA, 15 bp, Homo sapiens
taacagtgggaacct

SEQ ID NO: 1866654 - DNA, 15 bp, Homo sapiens
aacagtgggaacctg

SEQ ID NO: 1866655 - DNA, 15 bp, Homo sapiens
acagtgggaacctgg

SEQ ID NO: 1866656 - DNA, 15 bp, Homo sapiens
cagtgggaacctggt

SEQ ID NO: 1866657 - DNA, 15 bp, Homo sapiens
agtgggaacctggtt

SEQ ID NO: 1866658 - DNA, 15 bp, Homo sapiens
gtgggaacctggttg

SEQ ID NO: 1866659 - DNA, 15 bp, Homo sapiens
tgggaacctggttgg

SEQ ID NO: 1866660 - DNA, 15 bp, Homo sapiens
gggaacctggttggt

SEQ ID NO: 1866661 - DNA, 15 bp, Homo sapiens
ggaacctggttggtg

SEQ ID NO: 1866662 - DNA, 15 bp, Homo sapiens
gaacctggttggtgt

SEQ ID NO: 1866663 - DNA, 15 bp, Homo sapiens
aacctggttggtgta

SEQ ID NO: 1866664 - DNA, 15 bp, Homo sapiens
acctggttggtgtac

SEQ ID NO: 1866665 - DNA, 15 bp, Homo sapiens
cctggttggtgtacc

SEQ ID NO: 1866666 - DNA, 15 bp, Homo sapiens
ctggttggtgtacca

SEQ ID NO: 1866667 - DNA, 15 bp, Homo sapiens
tggttggtgtaccat

SEQ ID NO: 1866668 - DNA, 15 bp, Homo sapiens
ggttggtgtaccatg

SEQ ID NO: 1866669 - DNA, 15 bp, Homo sapiens
gttggtgtaccatgg

SEQ ID NO: 1866670 - DNA, 15 bp, Homo sapiens
ttggtgtaccatgga

SEQ ID NO: 1866671 - DNA, 15 bp, Homo sapiens
tggtgtaccatggag

SEQ ID NO: 1866672 - DNA, 15 bp, Homo sapiens
ggtgtaccatggagg

SEQ ID NO: 1866673 - DNA, 15 bp, Homo sapiens
gtgtaccatggaggg

SEQ ID NO: 1866674 - DNA, 15 bp, Homo sapiens
tgtaccatggagggg

SEQ ID NO: 1866675 - DNA, 15 bp, Homo sapiens
gtaccatggagggga

SEQ ID NO: 1866676 - DNA, 15 bp, Homo sapiens
taccatggaggggaa

SEQ ID NO: 1866677 - DNA, 15 bp, Homo sapiens
accatggaggggaag

SEQ ID NO: 1866678 - DNA, 15 bp, Homo sapiens
ccatggaggggaagt

SEQ ID NO: 1866679 - DNA, 15 bp, Homo sapiens
catggaggggaagta

SEQ ID NO: 1866680 - DNA, 15 bp, Homo sapiens
atggaggggaagtat

SEQ ID NO: 1866681 - DNA, 15 bp, Homo sapiens
tggaggggaagtatc

SEQ ID NO: 1866682 - DNA, 15 bp, Homo sapiens
ggaggggaagtatct

SEQ ID NO: 1866683 - DNA, 15 bp, Homo sapiens
gaggggaagtatctg

SEQ ID NO: 1866684 - DNA, 15 bp, Homo sapiens
aggggaagtatctgg

SEQ ID NO: 1866685 - DNA, 15 bp, Homo sapiens
ggggaagtatctgga

SEQ ID NO: 1866686 - DNA, 15 bp, Homo sapiens
gggaagtatctggaa

SEQ ID NO: 1866687 - DNA, 15 bp, Homo sapiens
ggaagtatctggaaa

SEQ ID NO: 1866688 - DNA, 15 bp, Homo sapiens
gaagtatctggaaat

SEQ ID NO: 1866689 - DNA, 15 bp, Homo sapiens
aagtatctggaaatt

SEQ ID NO: 1866690 - DNA, 15 bp, Homo sapiens
agtatctggaaattt

SEQ ID NO: 1866691 - DNA, 15 bp, Homo sapiens
gtatctggaaatttg

SEQ ID NO: 1866692 - DNA, 15 bp, Homo sapiens
tatctggaaatttga

SEQ ID NO: 1866693 - DNA, 15 bp, Homo sapiens
atctggaaatttgaa

SEQ ID NO: 1866694 - DNA, 15 bp, Homo sapiens
tctggaaatttgaac

SEQ ID NO: 1866695 - DNA, 15 bp, Homo sapiens
ctggaaatttgaact

SEQ ID NO: 1866696 - DNA, 15 bp, Homo sapiens
tggaaatttgaactc

SEQ ID NO: 1866697 - DNA, 15 bp, Homo sapiens
ggaaatttgaactcg

SEQ ID NO: 1866698 - DNA, 15 bp, Homo sapiens
gaaatttgaactcga

SEQ ID NO: 1866699 - DNA, 15 bp, Homo sapiens
aaatttgaactcgag

SEQ ID NO: 1866700 - DNA, 15 bp, Homo sapiens
aatttgaactcgaga

SEQ ID NO: 1866701 - DNA, 15 bp, Homo sapiens
atttgaactcgagaa

SEQ ID NO: 1866702 - DNA, 15 bp, Homo sapiens
tttgaactcgagaaa

SEQ ID NO: 1866703 - DNA, 15 bp, Homo sapiens
ttgaactcgagaaat

SEQ ID NO: 1866704 - DNA, 15 bp, Homo sapiens
tgaactcgagaaatg

SEQ ID NO: 1866705 - DNA, 15 bp, Homo sapiens
gaactcgagaaatga

SEQ ID NO: 1866706 - DNA, 15 bp, Homo sapiens
aactcgagaaatgat

SEQ ID NO: 1866707 - DNA, 15 bp, Homo sapiens
actcgagaaatgatt

SEQ ID NO: 1866708 - DNA, 15 bp, Homo sapiens
ctcgagaaatgattc

SEQ ID NO: 1866709 - DNA, 15 bp, Homo sapiens
tcgagaaatgattcg

SEQ ID NO: 1866710 - DNA, 15 bp, Homo sapiens
cgagaaatgattcga

SEQ ID NO: 1866711 - DNA, 15 bp, Homo sapiens
gagaaatgattcgac

SEQ ID NO: 1866712 - DNA, 15 bp, Homo sapiens
agaaatgattcgact

SEQ ID NO: 1866713 - DNA, 15 bp, Homo sapiens
gaaatgattcgactg

SEQ ID NO: 1866714 - DNA, 15 bp, Homo sapiens
aaatgattcgactgc

SEQ ID NO: 1866715 - DNA, 15 bp, Homo sapiens
aatgattcgactgca

SEQ ID NO: 1866716 - DNA, 15 bp, Homo sapiens
atgattcgactgcat

SEQ ID NO: 1866717 - DNA, 15 bp, Homo sapiens
tgattcgactgcatg

SEQ ID NO: 1866718 - DNA, 15 bp, Homo sapiens
gattcgactgcatgc

SEQ ID NO: 1866719 - DNA, 15 bp, Homo sapiens
attcgactgcatgca

SEQ ID NO: 1866720 - DNA, 15 bp, Homo sapiens
ttcgactgcatgcac

SEQ ID NO: 1866721 - DNA, 15 bp, Homo sapiens
tcgactgcatgcaca

SEQ ID NO: 1866722 - DNA, 15 bp, Homo sapiens
cgactgcatgcacac

SEQ ID NO: 1866723 - DNA, 15 bp, Homo sapiens
gactgcatgcacact

SEQ ID NO: 1866724 - DNA, 15 bp, Homo sapiens
actgcatgcacacta

SEQ ID NO: 1866725 - DNA, 15 bp, Homo sapiens
ctgcatgcacactaa

SEQ ID NO: 1866726 - DNA, 15 bp, Homo sapiens
tgcatgcacactaaa

SEQ ID NO: 1866727 - DNA, 15 bp, Homo sapiens
gcatgcacactaaac

SEQ ID NO: 1866728 - DNA, 15 bp, Homo sapiens
catgcacactaaaca

SEQ ID NO: 1866729 - DNA, 15 bp, Homo sapiens
atgcacactaaacag

SEQ ID NO: 1866730 - DNA, 15 bp, Homo sapiens
tgcacactaaacagc

SEQ ID NO: 1866731 - DNA, 15 bp, Homo sapiens
gcacactaaacagca

SEQ ID NO: 1866732 - DNA, 15 bp, Homo sapiens
cacactaaacagcag

SEQ ID NO: 1866733 - DNA, 15 bp, Homo sapiens
acactaaacagcagc

SEQ ID NO: 1866734 - DNA, 15 bp, Homo sapiens
cactaaacagcagcc

SEQ ID NO: 1866735 - DNA, 15 bp, Homo sapiens
actaaacagcagcca

SEQ ID NO: 1866736 - DNA, 15 bp, Homo sapiens
ctaaacagcagccag

SEQ ID NO: 1866737 - DNA, 15 bp, Homo sapiens
taaacagcagccaga

SEQ ID NO: 1866738 - DNA, 15 bp, Homo sapiens
aaacagcagccagag

SEQ ID NO: 1866739 - DNA, 15 bp, Homo sapiens
aacagcagccagaga

SEQ ID NO: 1866740 - DNA, 15 bp, Homo sapiens
acagcagccagagag

SEQ ID NO: 1866741 - DNA, 15 bp, Homo sapiens
cagcagccagagagg

SEQ ID NO: 1866742 - DNA, 15 bp, Homo sapiens
agcagccagagaggc

SEQ ID NO: 1866743 - DNA, 15 bp, Homo sapiens
gcagccagagaggcc

SEQ ID NO: 1866744 - DNA, 15 bp, Homo sapiens
cagccagagaggccc

SEQ ID NO: 1866745 - DNA, 15 bp, Homo sapiens
agccagagaggccct

SEQ ID NO: 1866746 - DNA, 15 bp, Homo sapiens
gccagagaggccctt

SEQ ID NO: 1866747 - DNA, 15 bp, Homo sapiens
ccagagaggcccttt

SEQ ID NO: 1866748 - DNA, 15 bp, Homo sapiens
cagagaggcccttta

SEQ ID NO: 1866749 - DNA, 15 bp, Homo sapiens
agagaggccctttac

SEQ ID NO: 1866750 - DNA, 15 bp, Homo sapiens
gagaggccctttact

SEQ ID NO: 1866751 - DNA, 15 bp, Homo sapiens
agaggccctttactg

SEQ ID NO: 1866752 - DNA, 15 bp, Homo sapiens
gaggccctttactgt

SEQ ID NO: 1866753 - DNA, 15 bp, Homo sapiens
aggccctttactgtc

SEQ ID NO: 1866754 - DNA, 15 bp, Homo sapiens
ggccctttactgtca

SEQ ID NO: 1866755 - DNA, 15 bp, Homo sapiens
gccctttactgtcaa

SEQ ID NO: 1866756 - DNA, 15 bp, Homo sapiens
ccctttactgtcaat

SEQ ID NO: 1866757 - DNA, 15 bp, Homo sapiens
cctttactgtcaata

SEQ ID NO: 1866758 - DNA, 15 bp, Homo sapiens
ctttactgtcaatat

SEQ ID NO: 1866759 - DNA, 15 bp, Homo sapiens
tttactgtcaatatt

SEQ ID NO: 1866760 - DNA, 15 bp, Homo sapiens
ttactgtcaatatta

SEQ ID NO: 1866761 - DNA, 15 bp, Homo sapiens
tactgtcaatattat

SEQ ID NO: 1866762 - DNA, 15 bp, Homo sapiens
actgtcaatattatg

SEQ ID NO: 1866763 - DNA, 15 bp, Homo sapiens
ctgtcaatattatga

SEQ ID NO: 1866764 - DNA, 15 bp, Homo sapiens
tgtcaatattatgaa

SEQ ID NO: 1866765 - DNA, 15 bp, Homo sapiens
gtcaatattatgaat

SEQ ID NO: 1866766 - DNA, 15 bp, Homo sapiens
tcaatattatgaatg

SEQ ID NO: 1866767 - DNA, 15 bp, Homo sapiens
caatattatgaatgg

SEQ ID NO: 1866768 - DNA, 15 bp, Homo sapiens
aatattatgaatgga

SEQ ID NO: 1866769 - DNA, 15 bp, Homo sapiens
atattatgaatggag

SEQ ID NO: 1866770 - DNA, 15 bp, Homo sapiens
tattatgaatggagt

SEQ ID NO: 1866771 - DNA, 15 bp, Homo sapiens
attatgaatggagtt

SEQ ID NO: 1866772 - DNA, 15 bp, Homo sapiens
ttatgaatggagttg

SEQ ID NO: 1866773 - DNA, 15 bp, Homo sapiens
tatgaatggagttgg

SEQ ID NO: 1866774 - DNA, 15 bp, Homo sapiens
atgaatggagttggc

SEQ ID NO: 1866775 - DNA, 15 bp, Homo sapiens
tgaatggagttggct

SEQ ID NO: 1866776 - DNA, 15 bp, Homo sapiens
gaatggagttggctg

SEQ ID NO: 1866777 - DNA, 15 bp, Homo sapiens
aatggagttggctgg

SEQ ID NO: 1866778 - DNA, 15 bp, Homo sapiens
atggagttggctggg

SEQ ID NO: 1866779 - DNA, 15 bp, Homo sapiens
tggagttggctgggt

SEQ ID NO: 1866780 - DNA, 15 bp, Homo sapiens
ggagttggctgggtc

SEQ ID NO: 1866781 - DNA, 15 bp, Homo sapiens
gagttggctgggtcg

SEQ ID NO: 1866782 - DNA, 15 bp, Homo sapiens
agttggctgggtcgg

SEQ ID NO: 1866783 - DNA, 15 bp, Homo sapiens
gttggctgggtcggg

SEQ ID NO: 1866784 - DNA, 15 bp, Homo sapiens
ttggctgggtcggga

SEQ ID NO: 1866785 - DNA, 15 bp, Homo sapiens
tggctgggtcgggag

SEQ ID NO: 1866786 - DNA, 15 bp, Homo sapiens
ggctgggtcgggagt

SEQ ID NO: 1866787 - DNA, 15 bp, Homo sapiens
gctgggtcgggagtc

SEQ ID NO: 1866788 - DNA, 15 bp, Homo sapiens
ctgggtcgggagtcc

SEQ ID NO: 1866789 - DNA, 15 bp, Homo sapiens
tgggtcgggagtccc

SEQ ID NO: 1866790 - DNA, 15 bp, Homo sapiens
gggtcgggagtcccc

SEQ ID NO: 1866791 - DNA, 15 bp, Homo sapiens
ggtcgggagtcccca

SEQ ID NO: 1866792 - DNA, 15 bp, Homo sapiens
gtcgggagtccccac

SEQ ID NO: 1866793 - DNA, 15 bp, Homo sapiens
tcgggagtccccacc

SEQ ID NO: 1866794 - DNA, 15 bp, Homo sapiens
cgggagtccccaccc

SEQ ID NO: 1866795 - DNA, 15 bp, Homo sapiens
gggagtccccaccct

SEQ ID NO: 1866796 - DNA, 15 bp, Homo sapiens
ggagtccccaccctt

SEQ ID NO: 1866797 - DNA, 15 bp, Homo sapiens
gagtccccacccttc

SEQ ID NO: 1866798 - DNA, 15 bp, Homo sapiens
gtccccacccttcct

SEQ ID NO: 1866799 - DNA, 15 bp, Homo sapiens
tccccacccttcctc

SEQ ID NO: 1866800 - DNA, 15 bp, Homo sapiens
ccccacccttcctct

SEQ ID NO: 1866801 - DNA, 15 bp, Homo sapiens
cccacccttcctctg

SEQ ID NO: 1866802 - DNA, 15 bp, Homo sapiens
ccacccttcctctga

SEQ ID NO: 1866803 - DNA, 15 bp, Homo sapiens
cacccttcctctgag

SEQ ID NO: 1866804 - DNA, 15 bp, Homo sapiens
acccttcctctgagg

SEQ ID NO: 1866805 - DNA, 15 bp, Homo sapiens
cccttcctctgaggc

SEQ ID NO: 1866806 - DNA, 15 bp, Homo sapiens
ccttcctctgaggcc

SEQ ID NO: 1866807 - DNA, 15 bp, Homo sapiens
cttcctctgaggcct

SEQ ID NO: 1866808 - DNA, 15 bp, Homo sapiens
ttcctctgaggcctc

SEQ ID NO: 1866809 - DNA, 15 bp, Homo sapiens
tcctctgaggcctct

SEQ ID NO: 1866810 - DNA, 15 bp, Homo sapiens
cctctgaggcctctc

SEQ ID NO: 1866811 - DNA, 15 bp, Homo sapiens
ctctgaggcctctct

SEQ ID NO: 1866812 - DNA, 15 bp, Homo sapiens
tctgaggcctctctc

SEQ ID NO: 1866813 - DNA, 15 bp, Homo sapiens
ctgaggcctctctca

SEQ ID NO: 1866814 - DNA, 15 bp, Homo sapiens
tgaggcctctctcag

SEQ ID NO: 1866815 - DNA, 15 bp, Homo sapiens
gaggcctctctcaga

SEQ ID NO: 1866816 - DNA, 15 bp, Homo sapiens
aggcctctctcagag

SEQ ID NO: 1866817 - DNA, 15 bp, Homo sapiens
ggcctctctcagagg

SEQ ID NO: 1866818 - DNA, 15 bp, Homo sapiens
gcctctctcagagga

SEQ ID NO: 1866819 - DNA, 15 bp, Homo sapiens
cctctctcagaggag

SEQ ID NO: 1866820 - DNA, 15 bp, Homo sapiens
ctctctcagaggagc

SEQ ID NO: 1866821 - DNA, 15 bp, Homo sapiens
tctctcagaggagcc

SEQ ID NO: 1866822 - DNA, 15 bp, Homo sapiens
ctctcagaggagcct

SEQ ID NO: 1866823 - DNA, 15 bp, Homo sapiens
tctcagaggagcctg

SEQ ID NO: 1866824 - DNA, 15 bp, Homo sapiens
ctcagaggagcctgg

SEQ ID NO: 1866825 - DNA, 15 bp, Homo sapiens
tcagaggagcctggg

SEQ ID NO: 1866826 - DNA, 15 bp, Homo sapiens
cagaggagcctgggc

SEQ ID NO: 1866827 - DNA, 15 bp, Homo sapiens
agaggagcctgggca

SEQ ID NO: 1866828 - DNA, 15 bp, Homo sapiens
gaggagcctgggcag

SEQ ID NO: 1866829 - DNA, 15 bp, Homo sapiens
aggagcctgggcaga

SEQ ID NO: 1866830 - DNA, 15 bp, Homo sapiens
ggagcctgggcagag

SEQ ID NO: 1866831 - DNA, 15 bp, Homo sapiens
gagcctgggcagagt

SEQ ID NO: 1866832 - DNA, 15 bp, Homo sapiens
agcctgggcagagtg

SEQ ID NO: 1866833 - DNA, 15 bp, Homo sapiens
gcctgggcagagtgg

SEQ ID NO: 1866834 - DNA, 15 bp, Homo sapiens
cctgggcagagtggg

SEQ ID NO: 1866835 - DNA, 15 bp, Homo sapiens
ctgggcagagtgggc

SEQ ID NO: 1866836 - DNA, 15 bp, Homo sapiens
tgggcagagtgggcc

SEQ ID NO: 1866837 - DNA, 15 bp, Homo sapiens
gggcagagtgggcct

SEQ ID NO: 1866838 - DNA, 15 bp, Homo sapiens
ggcagagtgggcctc

SEQ ID NO: 1866839 - DNA, 15 bp, Homo sapiens
gcagagtgggcctcc

SEQ ID NO: 1866840 - DNA, 15 bp, Homo sapiens
cagagtgggcctcct

SEQ ID NO: 1866841 - DNA, 15 bp, Homo sapiens
agagtgggcctcctc

SEQ ID NO: 1866842 - DNA, 15 bp, Homo sapiens
gagtgggcctcctca

SEQ ID NO: 1866843 - DNA, 15 bp, Homo sapiens
agtgggcctcctcag

SEQ ID NO: 1866844 - DNA, 15 bp, Homo sapiens
gtgggcctcctcaga

SEQ ID NO: 1866845 - DNA, 15 bp, Homo sapiens
tgggcctcctcagac

SEQ ID NO: 1866846 - DNA, 15 bp, Homo sapiens
gggcctcctcagaca

SEQ ID NO: 1866847 - DNA, 15 bp, Homo sapiens
ggcctcctcagacag

SEQ ID NO: 1866848 - DNA, 15 bp, Homo sapiens
gcctcctcagacagc

SEQ ID NO: 1866849 - DNA, 15 bp, Homo sapiens
cctcctcagacagca

SEQ ID NO: 1866850 - DNA, 15 bp, Homo sapiens
ctcctcagacagcag

SEQ ID NO: 1866851 - DNA, 15 bp, Homo sapiens
tcctcagacagcagt

SEQ ID NO: 1866852 - DNA, 15 bp, Homo sapiens
cctcagacagcagtg

SEQ ID NO: 1866853 - DNA, 15 bp, Homo sapiens
ctcagacagcagtgg

SEQ ID NO: 1866854 - DNA, 15 bp, Homo sapiens
tcagacagcagtggc

SEQ ID NO: 1866855 - DNA, 15 bp, Homo sapiens
cagacagcagtggct

SEQ ID NO: 1866856 - DNA, 15 bp, Homo sapiens
agacagcagtggctg

SEQ ID NO: 1866857 - DNA, 15 bp, Homo sapiens
gacagcagtggctgc

SEQ ID NO: 1866858 - DNA, 15 bp, Homo sapiens
acagcagtggctgca

SEQ ID NO: 1866859 - DNA, 15 bp, Homo sapiens
cagcagtggctgcag

SEQ ID NO: 1866860 - DNA, 15 bp, Homo sapiens
agcagtggctgcagg

SEQ ID NO: 1866861 - DNA, 15 bp, Homo sapiens
gcagtggctgcaggc

SEQ ID NO: 1866862 - DNA, 15 bp, Homo sapiens
cagtggctgcaggca

SEQ ID NO: 1866863 - DNA, 15 bp, Homo sapiens
agtggctgcaggcag

SEQ ID NO: 1866864 - DNA, 15 bp, Homo sapiens
gtggctgcaggcagc

SEQ ID NO: 1866865 - DNA, 15 bp, Homo sapiens
tggctgcaggcagct

SEQ ID NO: 1866866 - DNA, 15 bp, Homo sapiens
ggctgcaggcagctg

SEQ ID NO: 1866867 - DNA, 15 bp, Homo sapiens
gctgcaggcagctgg

SEQ ID NO: 1866868 - DNA, 15 bp, Homo sapiens
ctgcaggcagctggg

SEQ ID NO: 1866869 - DNA, 15 bp, Homo sapiens
tgcaggcagctgggt

SEQ ID NO: 1866870 - DNA, 15 bp, Homo sapiens
gcaggcagctgggta

SEQ ID NO: 1866871 - DNA, 15 bp, Homo sapiens
caggcagctgggtac

SEQ ID NO: 1866872 - DNA, 15 bp, Homo sapiens
aggcagctgggtaca

SEQ ID NO: 1866873 - DNA, 15 bp, Homo sapiens
ggcagctgggtacac

SEQ ID NO: 1866874 - DNA, 15 bp, Homo sapiens
gcagctgggtacacg

SEQ ID NO: 1866875 - DNA, 15 bp, Homo sapiens
cagctgggtacacgc

SEQ ID NO: 1866876 - DNA, 15 bp, Homo sapiens
agctgggtacacgct

SEQ ID NO: 1866877 - DNA, 15 bp, Homo sapiens
gctgggtacacgctg

SEQ ID NO: 1866878 - DNA, 15 bp, Homo sapiens
ctgggtacacgctgt

SEQ ID NO: 1866879 - DNA, 15 bp, Homo sapiens
tgggtacacgctgta

SEQ ID NO: 1866880 - DNA, 15 bp, Homo sapiens
gggtacacgctgtaa

SEQ ID NO: 1866881 - DNA, 15 bp, Homo sapiens
ggtacacgctgtaat

SEQ ID NO: 1866882 - DNA, 15 bp, Homo sapiens
gtacacgctgtaatt

SEQ ID NO: 1866883 - DNA, 15 bp, Homo sapiens
tacacgctgtaattt

SEQ ID NO: 1866884 - DNA, 15 bp, Homo sapiens
acacgctgtaatttg

SEQ ID NO: 1866885 - DNA, 15 bp, Homo sapiens
cacgctgtaatttgc

SEQ ID NO: 1866886 - DNA, 15 bp, Homo sapiens
acgctgtaatttgca

SEQ ID NO: 1866887 - DNA, 15 bp, Homo sapiens
cgctgtaatttgcat

SEQ ID NO: 1866888 - DNA, 15 bp, Homo sapiens
gctgtaatttgcatg

SEQ ID NO: 1866889 - DNA, 15 bp, Homo sapiens
ctgtaatttgcatgg

SEQ ID NO: 1866890 - DNA, 15 bp, Homo sapiens
tgtaatttgcatggc

SEQ ID NO: 1866891 - DNA, 15 bp, Homo sapiens
gtaatttgcatggct

SEQ ID NO: 1866892 - DNA, 15 bp, Homo sapiens
taatttgcatggctg

SEQ ID NO: 1866893 - DNA, 15 bp, Homo sapiens
aatttgcatggctga

SEQ ID NO: 1866894 - DNA, 15 bp, Homo sapiens
atttgcatggctgaa

SEQ ID NO: 1866895 - DNA, 15 bp, Homo sapiens
tttgcatggctgaat

SEQ ID NO: 1866896 - DNA, 15 bp, Homo sapiens
ttgcatggctgaatg

SEQ ID NO: 1866897 - DNA, 15 bp, Homo sapiens
tgcatggctgaatgc

SEQ ID NO: 1866898 - DNA, 15 bp, Homo sapiens
gcatggctgaatgct

SEQ ID NO: 1866899 - DNA, 15 bp, Homo sapiens
catggctgaatgctg

SEQ ID NO: 1866900 - DNA, 15 bp, Homo sapiens
atggctgaatgctgg

SEQ ID NO: 1866901 - DNA, 15 bp, Homo sapiens
tggctgaatgctggg

SEQ ID NO: 1866902 - DNA, 15 bp, Homo sapiens
ggctgaatgctgggg

SEQ ID NO: 1866903 - DNA, 15 bp, Homo sapiens
gctgaatgctggggc

SEQ ID NO: 1866904 - DNA, 15 bp, Homo sapiens
ctgaatgctggggca

SEQ ID NO: 1866905 - DNA, 15 bp, Homo sapiens
tgaatgctggggcac

SEQ ID NO: 1866906 - DNA, 15 bp, Homo sapiens
gaatgctggggcaca

SEQ ID NO: 1866907 - DNA, 15 bp, Homo sapiens
aatgctggggcacag

SEQ ID NO: 1866908 - DNA, 15 bp, Homo sapiens
atgctggggcacagg

SEQ ID NO: 1866909 - DNA, 15 bp, Homo sapiens
tgctggggcacagga

SEQ ID NO: 1866910 - DNA, 15 bp, Homo sapiens
gctggggcacaggaa

SEQ ID NO: 1866911 - DNA, 15 bp, Homo sapiens
ctggggcacaggaag

SEQ ID NO: 1866912 - DNA, 15 bp, Homo sapiens
tggggcacaggaagc

SEQ ID NO: 1866913 - DNA, 15 bp, Homo sapiens
ggggcacaggaagcc

SEQ ID NO: 1866914 - DNA, 15 bp, Homo sapiens
gggcacaggaagccg

SEQ ID NO: 1866915 - DNA, 15 bp, Homo sapiens
ggcacaggaagccgc

SEQ ID NO: 1866916 - DNA, 15 bp, Homo sapiens
gcacaggaagccgcg

SEQ ID NO: 1866917 - DNA, 15 bp, Homo sapiens
cacaggaagccgcgt

SEQ ID NO: 1866918 - DNA, 15 bp, Homo sapiens
acaggaagccgcgtc

SEQ ID NO: 1866919 - DNA, 15 bp, Homo sapiens
caggaagccgcgtca

SEQ ID NO: 1866920 - DNA, 15 bp, Homo sapiens
aggaagccgcgtcag

SEQ ID NO: 1866921 - DNA, 15 bp, Homo sapiens
ggaagccgcgtcagc

SEQ ID NO: 1866922 - DNA, 15 bp, Homo sapiens
gaagccgcgtcagcc

SEQ ID NO: 1866923 - DNA, 15 bp, Homo sapiens
aagccgcgtcagcct

SEQ ID NO: 1866924 - DNA, 15 bp, Homo sapiens
agccgcgtcagcctg

SEQ ID NO: 1866925 - DNA, 15 bp, Homo sapiens
gccgcgtcagcctga

SEQ ID NO: 1866926 - DNA, 15 bp, Homo sapiens
ccgcgtcagcctgac

SEQ ID NO: 1866927 - DNA, 15 bp, Homo sapiens
cgcgtcagcctgact

SEQ ID NO: 1866928 - DNA, 15 bp, Homo sapiens
gcgtcagcctgactg

SEQ ID NO: 1866929 - DNA, 15 bp, Homo sapiens
cgtcagcctgactgg

SEQ ID NO: 1866930 - DNA, 15 bp, Homo sapiens
gtcagcctgactggc

SEQ ID NO: 1866931 - DNA, 15 bp, Homo sapiens
tcagcctgactggcg

SEQ ID NO: 1866932 - DNA, 15 bp, Homo sapiens
cagcctgactggcga

SEQ ID NO: 1866933 - DNA, 15 bp, Homo sapiens
agcctgactggcgag

SEQ ID NO: 1866934 - DNA, 15 bp, Homo sapiens
gcctgactggcgaga

SEQ ID NO: 1866935 - DNA, 15 bp, Homo sapiens
cctgactggcgagac

SEQ ID NO: 1866936 - DNA, 15 bp, Homo sapiens
ctgactggcgagaca

SEQ ID NO: 1866937 - DNA, 15 bp, Homo sapiens
tgactggcgagacag

SEQ ID NO: 1866938 - DNA, 15 bp, Homo sapiens
gactggcgagacaga

SEQ ID NO: 1866939 - DNA, 15 bp, Homo sapiens
actggcgagacagac

SEQ ID NO: 1866940 - DNA, 15 bp, Homo sapiens
ctggcgagacagaca

SEQ ID NO: 1866941 - DNA, 15 bp, Homo sapiens
tggcgagacagacaa

SEQ ID NO: 1866942 - DNA, 15 bp, Homo sapiens
ggcgagacagacaag

SEQ ID NO: 1866943 - DNA, 15 bp, Homo sapiens
gcgagacagacaaga

SEQ ID NO: 1866944 - DNA, 15 bp, Homo sapiens
cgagacagacaagag

SEQ ID NO: 1866945 - DNA, 15 bp, Homo sapiens
gagacagacaagagc

SEQ ID NO: 1866946 - DNA, 15 bp, Homo sapiens
agacagacaagagct

SEQ ID NO: 1866947 - DNA, 15 bp, Homo sapiens
gacagacaagagctt

SEQ ID NO: 1866948 - DNA, 15 bp, Homo sapiens
acagacaagagcttt

SEQ ID NO: 1866949 - DNA, 15 bp, Homo sapiens
cagacaagagctttt

SEQ ID NO: 1866950 - DNA, 15 bp, Homo sapiens
agacaagagcttttg

SEQ ID NO: 1866951 - DNA, 15 bp, Homo sapiens
gacaagagcttttga

SEQ ID NO: 1866952 - DNA, 15 bp, Homo sapiens
acaagagcttttgat

SEQ ID NO: 1866953 - DNA, 15 bp, Homo sapiens
caagagcttttgatt

SEQ ID NO: 1866954 - DNA, 15 bp, Homo sapiens
aagagcttttgattt

SEQ ID NO: 1866955 - DNA, 15 bp, Homo sapiens
agagcttttgatttg

SEQ ID NO: 1866956 - DNA, 15 bp, Homo sapiens
gagcttttgatttgt

SEQ ID NO: 1866957 - DNA, 15 bp, Homo sapiens
agcttttgatttgtg

SEQ ID NO: 1866958 - DNA, 15 bp, Homo sapiens
gcttttgatttgtgt

SEQ ID NO: 1866959 - DNA, 15 bp, Homo sapiens
cttttgatttgtgtg

SEQ ID NO: 1866960 - DNA, 15 bp, Homo sapiens
ttttgatttgtgtgg

SEQ ID NO: 1866961 - DNA, 15 bp, Homo sapiens
tttgatttgtgtggc

SEQ ID NO: 1866962 - DNA, 15 bp, Homo sapiens
ttgatttgtgtggct

SEQ ID NO: 1866963 - DNA, 15 bp, Homo sapiens
tgatttgtgtggctt

SEQ ID NO: 1866964 - DNA, 15 bp, Homo sapiens
gatttgtgtggcttt

SEQ ID NO: 1866965 - DNA, 15 bp, Homo sapiens
atttgtgtggctttc

SEQ ID NO: 1866966 - DNA, 15 bp, Homo sapiens
tttgtgtggctttcc

SEQ ID NO: 1866967 - DNA, 15 bp, Homo sapiens
ttgtgtggctttcct

SEQ ID NO: 1866968 - DNA, 15 bp, Homo sapiens
tgtgtggctttcctc

SEQ ID NO: 1866969 - DNA, 15 bp, Homo sapiens
gtgtggctttcctcc

SEQ ID NO: 1866970 - DNA, 15 bp, Homo sapiens
tgtggctttcctccc

SEQ ID NO: 1866971 - DNA, 15 bp, Homo sapiens
gtggctttcctcccc

SEQ ID NO: 1866972 - DNA, 15 bp, Homo sapiens
tggctttcctcccct

SEQ ID NO: 1866973 - DNA, 15 bp, Homo sapiens
ggctttcctcccctg

SEQ ID NO: 1866974 - DNA, 15 bp, Homo sapiens
gctttcctcccctgc

SEQ ID NO: 1866975 - DNA, 15 bp, Homo sapiens
ctttcctcccctgcc

SEQ ID NO: 1866976 - DNA, 15 bp, Homo sapiens
tttcctcccctgccc

SEQ ID NO: 1866977 - DNA, 15 bp, Homo sapiens
ttcctcccctgcccc

SEQ ID NO: 1866978 - DNA, 15 bp, Homo sapiens
tcctcccctgccccg

SEQ ID NO: 1866979 - DNA, 15 bp, Homo sapiens
cctcccctgccccgt

SEQ ID NO: 1866980 - DNA, 15 bp, Homo sapiens
ctcccctgccccgtg

SEQ ID NO: 1866981 - DNA, 15 bp, Homo sapiens
tcccctgccccgtgc

SEQ ID NO: 1866982 - DNA, 15 bp, Homo sapiens
cccctgccccgtgcc

SEQ ID NO: 1866983 - DNA, 15 bp, Homo sapiens
ccctgccccgtgcca

SEQ ID NO: 1866984 - DNA, 15 bp, Homo sapiens
cctgccccgtgccac

SEQ ID NO: 1866985 - DNA, 15 bp, Homo sapiens
ctgccccgtgccacc

SEQ ID NO: 1866986 - DNA, 15 bp, Homo sapiens
tgccccgtgccaccc

SEQ ID NO: 1866987 - DNA, 15 bp, Homo sapiens
gccccgtgccaccct

SEQ ID NO: 1866988 - DNA, 15 bp, Homo sapiens
ccccgtgccaccctc

SEQ ID NO: 1866989 - DNA, 15 bp, Homo sapiens
cccgtgccaccctca

SEQ ID NO: 1866990 - DNA, 15 bp, Homo sapiens
ccgtgccaccctcaa

SEQ ID NO: 1866991 - DNA, 15 bp, Homo sapiens
cgtgccaccctcaat

SEQ ID NO: 1866992 - DNA, 15 bp, Homo sapiens
gtgccaccctcaatt

SEQ ID NO: 1866993 - DNA, 15 bp, Homo sapiens
tgccaccctcaatta

SEQ ID NO: 1866994 - DNA, 15 bp, Homo sapiens
gccaccctcaattac

SEQ ID NO: 1866995 - DNA, 15 bp, Homo sapiens
ccaccctcaattaca

SEQ ID NO: 1866996 - DNA, 15 bp, Homo sapiens
caccctcaattacat

SEQ ID NO: 1866997 - DNA, 15 bp, Homo sapiens
accctcaattacatt

SEQ ID NO: 1866998 - DNA, 15 bp, Homo sapiens
ccctcaattacattc

SEQ ID NO: 1866999 - DNA, 15 bp, Homo sapiens
cctcaattacattct

SEQ ID NO: 1867000 - DNA, 15 bp, Homo sapiens
ctcaattacattctc

SEQ ID NO: 1867001 - DNA, 15 bp, Homo sapiens
tcaattacattctcc

SEQ ID NO: 1867002 - DNA, 15 bp, Homo sapiens
caattacattctcca

SEQ ID NO: 1867003 - DNA, 15 bp, Homo sapiens
aattacattctccat

SEQ ID NO: 1867004 - DNA, 15 bp, Homo sapiens
attacattctccatg

SEQ ID NO: 1867005 - DNA, 15 bp, Homo sapiens
ttacattctccatgg

SEQ ID NO: 1867006 - DNA, 15 bp, Homo sapiens
tacattctccatggc

SEQ ID NO: 1867007 - DNA, 15 bp, Homo sapiens
acattctccatggcg

SEQ ID NO: 1867008 - DNA, 15 bp, Homo sapiens
cattctccatggcga

SEQ ID NO: 1867009 - DNA, 15 bp, Homo sapiens
attctccatggcgag

SEQ ID NO: 1867010 - DNA, 15 bp, Homo sapiens
ttctccatggcgaga

SEQ ID NO: 1867011 - DNA, 15 bp, Homo sapiens
tctccatggcgagat

SEQ ID NO: 1867012 - DNA, 15 bp, Homo sapiens
ctccatggcgagata

SEQ ID NO: 1867013 - DNA, 15 bp, Homo sapiens
tccatggcgagataa

SEQ ID NO: 1867014 - DNA, 15 bp, Homo sapiens
ccatggcgagataaa

SEQ ID NO: 1867015 - DNA, 15 bp, Homo sapiens
catggcgagataaat

SEQ ID NO: 1867016 - DNA, 15 bp, Homo sapiens
atggcgagataaatg

SEQ ID NO: 1867017 - DNA, 15 bp, Homo sapiens
tggcgagataaatgc

SEQ ID NO: 1867018 - DNA, 15 bp, Homo sapiens
ggcgagataaatgct

SEQ ID NO: 1867019 - DNA, 15 bp, Homo sapiens
gcgagataaatgctc

SEQ ID NO: 1867020 - DNA, 15 bp, Homo sapiens
cgagataaatgctct

SEQ ID NO: 1867021 - DNA, 15 bp, Homo sapiens
gagataaatgctctt

SEQ ID NO: 1867022 - DNA, 15 bp, Homo sapiens
agataaatgctctta

SEQ ID NO: 1867023 - DNA, 15 bp, Homo sapiens
gataaatgctcttag

SEQ ID NO: 1867024 - DNA, 15 bp, Homo sapiens
ataaatgctcttagg

SEQ ID NO: 1867025 - DNA, 15 bp, Homo sapiens
taaatgctcttagga

SEQ ID NO: 1867026 - DNA, 15 bp, Homo sapiens
aaatgctcttaggag

SEQ ID NO: 1867027 - DNA, 15 bp, Homo sapiens
aatgctcttaggagc

SEQ ID NO: 1867028 - DNA, 15 bp, Homo sapiens
atgctcttaggagca

SEQ ID NO: 1867029 - DNA, 15 bp, Homo sapiens
tgctcttaggagcat

SEQ ID NO: 1867030 - DNA, 15 bp, Homo sapiens
gctcttaggagcatt

SEQ ID NO: 1867031 - DNA, 15 bp, Homo sapiens
ctcttaggagcattc

SEQ ID NO: 1867032 - DNA, 15 bp, Homo sapiens
tcttaggagcattca

SEQ ID NO: 1867033 - DNA, 15 bp, Homo sapiens
cttaggagcattcat

SEQ ID NO: 1867034 - DNA, 15 bp, Homo sapiens
ttaggagcattcatc

SEQ ID NO: 1867035 - DNA, 15 bp, Homo sapiens
taggagcattcatcc

SEQ ID NO: 1867036 - DNA, 15 bp, Homo sapiens
aggagcattcatccc

SEQ ID NO: 1867037 - DNA, 15 bp, Homo sapiens
ggagcattcatcccc

SEQ ID NO: 1867038 - DNA, 15 bp, Homo sapiens
gagcattcatcccca

SEQ ID NO: 1867039 - DNA, 15 bp, Homo sapiens
agcattcatccccag

SEQ ID NO: 1867040 - DNA, 15 bp, Homo sapiens
gcattcatccccagg

SEQ ID NO: 1867041 - DNA, 15 bp, Homo sapiens
cattcatccccaggt

SEQ ID NO: 1867042 - DNA, 15 bp, Homo sapiens
attcatccccaggtt

SEQ ID NO: 1867043 - DNA, 15 bp, Homo sapiens
ttcatccccaggttg

SEQ ID NO: 1867044 - DNA, 15 bp, Homo sapiens
tcatccccaggttgg

SEQ ID NO: 1867045 - DNA, 15 bp, Homo sapiens
catccccaggttggg

SEQ ID NO: 1867046 - DNA, 15 bp, Homo sapiens
atccccaggttgggg

SEQ ID NO: 1867047 - DNA, 15 bp, Homo sapiens
tccccaggttggggg

SEQ ID NO: 1867048 - DNA, 15 bp, Homo sapiens
ccccaggttgggggc

SEQ ID NO: 1867049 - DNA, 15 bp, Homo sapiens
cccaggttgggggct

SEQ ID NO: 1867050 - DNA, 15 bp, Homo sapiens
ccaggttgggggctt

SEQ ID NO: 1867051 - DNA, 15 bp, Homo sapiens
caggttgggggcttc

SEQ ID NO: 1867052 - DNA, 15 bp, Homo sapiens
aggttgggggcttca

SEQ ID NO: 1867053 - DNA, 15 bp, Homo sapiens
ggttgggggcttcag

SEQ ID NO: 1867054 - DNA, 15 bp, Homo sapiens
gttgggggcttcaga

SEQ ID NO: 1867055 - DNA, 15 bp, Homo sapiens
ttgggggcttcagac

SEQ ID NO: 1867056 - DNA, 15 bp, Homo sapiens
tgggggcttcagact

SEQ ID NO: 1867057 - DNA, 15 bp, Homo sapiens
gggggcttcagactc

SEQ ID NO: 1867058 - DNA, 15 bp, Homo sapiens
ggggcttcagactca

SEQ ID NO: 1867059 - DNA, 15 bp, Homo sapiens
gggcttcagactcag

SEQ ID NO: 1867060 - DNA, 15 bp, Homo sapiens
ggcttcagactcaga

SEQ ID NO: 1867061 - DNA, 15 bp, Homo sapiens
gcttcagactcagat

SEQ ID NO: 1867062 - DNA, 15 bp, Homo sapiens
cttcagactcagatg

SEQ ID NO: 1867063 - DNA, 15 bp, Homo sapiens
ttcagactcagatgc

SEQ ID NO: 1867064 - DNA, 15 bp, Homo sapiens
tcagactcagatgct

SEQ ID NO: 1867065 - DNA, 15 bp, Homo sapiens
cagactcagatgctt

SEQ ID NO: 1867066 - DNA, 15 bp, Homo sapiens
agactcagatgcttg

SEQ ID NO: 1867067 - DNA, 15 bp, Homo sapiens
gactcagatgcttgg

SEQ ID NO: 1867068 - DNA, 15 bp, Homo sapiens
actcagatgcttggg

SEQ ID NO: 1867069 - DNA, 15 bp, Homo sapiens
ctcagatgcttgggg

SEQ ID NO: 1867070 - DNA, 15 bp, Homo sapiens
tcagatgcttggggg

SEQ ID NO: 1867071 - DNA, 15 bp, Homo sapiens
cagatgcttgggggg

SEQ ID NO: 1867072 - DNA, 15 bp, Homo sapiens
agatgcttggggggt

SEQ ID NO: 1867073 - DNA, 15 bp, Homo sapiens
gatgcttggggggtt

SEQ ID NO: 1867074 - DNA, 15 bp, Homo sapiens
atgcttggggggttt

SEQ ID NO: 1867075 - DNA, 15 bp, Homo sapiens
tgcttggggggtttt

SEQ ID NO: 1867076 - DNA, 15 bp, Homo sapiens
gcttggggggttttg

SEQ ID NO: 1867077 - DNA, 15 bp, Homo sapiens
cttggggggttttgg

SEQ ID NO: 1867078 - DNA, 15 bp, Homo sapiens
ttggggggttttggg

SEQ ID NO: 1867079 - DNA, 15 bp, Homo sapiens
tggggggttttggga

SEQ ID NO: 1867080 - DNA, 15 bp, Homo sapiens
ggggggttttgggag

SEQ ID NO: 1867081 - DNA, 15 bp, Homo sapiens
gggggttttgggagg

SEQ ID NO: 1867082 - DNA, 15 bp, Homo sapiens
ggggttttgggaggt

SEQ ID NO: 1867083 - DNA, 15 bp, Homo sapiens
gggttttgggaggtg

SEQ ID NO: 1867084 - DNA, 15 bp, Homo sapiens
ggttttgggaggtgg

SEQ ID NO: 1867085 - DNA, 15 bp, Homo sapiens
gttttgggaggtggt

SEQ ID NO: 1867086 - DNA, 15 bp, Homo sapiens
ttttgggaggtggtg

SEQ ID NO: 1867087 - DNA, 15 bp, Homo sapiens
tttgggaggtggtgt

SEQ ID NO: 1867088 - DNA, 15 bp, Homo sapiens
ttgggaggtggtgtg

SEQ ID NO: 1867089 - DNA, 15 bp, Homo sapiens
tgggaggtggtgtgg

SEQ ID NO: 1867090 - DNA, 15 bp, Homo sapiens
gggaggtggtgtggg

SEQ ID NO: 1867091 - DNA, 15 bp, Homo sapiens
ggaggtggtgtggga

SEQ ID NO: 1867092 - DNA, 15 bp, Homo sapiens
gaggtggtgtgggac

SEQ ID NO: 1867093 - DNA, 15 bp, Homo sapiens
aggtggtgtgggacc

SEQ ID NO: 1867094 - DNA, 15 bp, Homo sapiens
ggtggtgtgggacca

SEQ ID NO: 1867095 - DNA, 15 bp, Homo sapiens
gtggtgtgggaccag

SEQ ID NO: 1867096 - DNA, 15 bp, Homo sapiens
tggtgtgggaccagt

SEQ ID NO: 1867097 - DNA, 15 bp, Homo sapiens
ggtgtgggaccagtt

SEQ ID NO: 1867098 - DNA, 15 bp, Homo sapiens
gtgtgggaccagttt

SEQ ID NO: 1867099 - DNA, 15 bp, Homo sapiens
tgtgggaccagtttg

SEQ ID NO: 1867100 - DNA, 15 bp, Homo sapiens
gtgggaccagtttgg

SEQ ID NO: 1867101 - DNA, 15 bp, Homo sapiens
tgggaccagtttggg

SEQ ID NO: 1867102 - DNA, 15 bp, Homo sapiens
gaggcaaccgttggt

SEQ ID NO: 1867103 - DNA, 15 bp, Homo sapiens
aggcaaccgttggtg

SEQ ID NO: 1867104 - DNA, 15 bp, Homo sapiens
ggcaaccgttggtgg

SEQ ID NO: 1867105 - DNA, 15 bp, Homo sapiens
gcaaccgttggtggc

SEQ ID NO: 1867106 - DNA, 15 bp, Homo sapiens
caaccgttggtggcg

SEQ ID NO: 1867107 - DNA, 15 bp, Homo sapiens
aaccgttggtggcgc

SEQ ID NO: 1867108 - DNA, 15 bp, Homo sapiens
accgttggtggcgcc

SEQ ID NO: 1867109 - DNA, 15 bp, Homo sapiens
ccgttggtggcgcct

SEQ ID NO: 1867110 - DNA, 15 bp, Homo sapiens
cgttggtggcgcctg

SEQ ID NO: 1867111 - DNA, 15 bp, Homo sapiens
gttggtggcgcctgg

SEQ ID NO: 1867112 - DNA, 15 bp, Homo sapiens
ttggtggcgcctggg

SEQ ID NO: 1867113 - DNA, 15 bp, Homo sapiens
tggtggcgcctgggt

SEQ ID NO: 1867114 - DNA, 15 bp, Homo sapiens
ggtggcgcctgggtc

SEQ ID NO: 1867115 - DNA, 15 bp, Homo sapiens
gtggcgcctgggtcc

SEQ ID NO: 1867116 - DNA, 15 bp, Homo sapiens
tggcgcctgggtcct

SEQ ID NO: 1867117 - DNA, 15 bp, Homo sapiens
ggcgcctgggtcctg

SEQ ID NO: 1867118 - DNA, 15 bp, Homo sapiens
gcgcctgggtcctga

SEQ ID NO: 1867119 - DNA, 15 bp, Homo sapiens
cgcctgggtcctgag

SEQ ID NO: 1867120 - DNA, 15 bp, Homo sapiens
gcctgggtcctgagg

SEQ ID NO: 1867121 - DNA, 15 bp, Homo sapiens
cctgggtcctgagga

SEQ ID NO: 1867122 - DNA, 15 bp, Homo sapiens
ctgggtcctgaggag

SEQ ID NO: 1867123 - DNA, 15 bp, Homo sapiens
tgggtcctgaggagg

SEQ ID NO: 1867124 - DNA, 15 bp, Homo sapiens
gggtcctgaggaggg

SEQ ID NO: 1867125 - DNA, 15 bp, Homo sapiens
ggtcctgaggaggga

SEQ ID NO: 1867126 - DNA, 15 bp, Homo sapiens
gtcctgaggagggag

SEQ ID NO: 1867127 - DNA, 15 bp, Homo sapiens
tcctgaggagggagg

SEQ ID NO: 1867128 - DNA, 15 bp, Homo sapiens
tgaggagggaggacc

SEQ ID NO: 1867129 - DNA, 15 bp, Homo sapiens
gaggagggaggaccc

SEQ ID NO: 1867130 - DNA, 15 bp, Homo sapiens
aggagggaggaccct

SEQ ID NO: 1867131 - DNA, 15 bp, Homo sapiens
ggagggaggaccctg

SEQ ID NO: 1867132 - DNA, 15 bp, Homo sapiens
gagggaggaccctgg

SEQ ID NO: 1867133 - DNA, 15 bp, Homo sapiens
agggaggaccctgga

SEQ ID NO: 1867134 - DNA, 15 bp, Homo sapiens
gggaggaccctggac

SEQ ID NO: 1867135 - DNA, 15 bp, Homo sapiens
ggaggaccctggacc

SEQ ID NO: 1867136 - DNA, 15 bp, Homo sapiens
gaggaccctggacct

SEQ ID NO: 1867137 - DNA, 15 bp, Homo sapiens
aggaccctggacctg

SEQ ID NO: 1867138 - DNA, 15 bp, Homo sapiens
ggaccctggacctgg

SEQ ID NO: 1867139 - DNA, 15 bp, Homo sapiens
gaccctggacctggc

SEQ ID NO: 1867140 - DNA, 15 bp, Homo sapiens
accctggacctggcg

SEQ ID NO: 1867141 - DNA, 15 bp, Homo sapiens
ccctggacctggcgt

SEQ ID NO: 1867142 - DNA, 15 bp, Homo sapiens
cctggacctggcgtt

SEQ ID NO: 1867143 - DNA, 15 bp, Homo sapiens
ctggacctggcgtta

SEQ ID NO: 1867144 - DNA, 15 bp, Homo sapiens
tggacctggcgttag

SEQ ID NO: 1867145 - DNA, 15 bp, Homo sapiens
ggacctggcgttagc

SEQ ID NO: 1867146 - DNA, 15 bp, Homo sapiens
gacctggcgttagcg

SEQ ID NO: 1867147 - DNA, 15 bp, Homo sapiens
acctggcgttagcga

SEQ ID NO: 1867148 - DNA, 15 bp, Homo sapiens
cctggcgttagcgag

SEQ ID NO: 1867149 - DNA, 15 bp, Homo sapiens
ctggcgttagcgagg

SEQ ID NO: 1867150 - DNA, 15 bp, Homo sapiens
tggcgttagcgaggc

SEQ ID NO: 1867151 - DNA, 15 bp, Homo sapiens
ggcgttagcgaggcg

SEQ ID NO: 1867152 - DNA, 15 bp, Homo sapiens
gcgttagcgaggcgt

SEQ ID NO: 1867153 - DNA, 15 bp, Homo sapiens
cgttagcgaggcgtg

SEQ ID NO: 1867154 - DNA, 15 bp, Homo sapiens
gttagcgaggcgtgg

SEQ ID NO: 1867155 - DNA, 15 bp, Homo sapiens
ttagcgaggcgtggt

SEQ ID NO: 1867156 - DNA, 15 bp, Homo sapiens
tagcgaggcgtggtg

SEQ ID NO: 1867157 - DNA, 15 bp, Homo sapiens
agcgaggcgtggtga

SEQ ID NO: 1867158 - DNA, 15 bp, Homo sapiens
gcgaggcgtggtgat

SEQ ID NO: 1867159 - DNA, 15 bp, Homo sapiens
cgaggcgtggtgatg

SEQ ID NO: 1867160 - DNA, 15 bp, Homo sapiens
gaggcgtggtgatgt

SEQ ID NO: 1867161 - DNA, 15 bp, Homo sapiens
aggcgtggtgatgtt

SEQ ID NO: 1867162 - DNA, 15 bp, Homo sapiens
ggcgtggtgatgttt

SEQ ID NO: 1867163 - DNA, 15 bp, Homo sapiens
gcgtggtgatgtttg

SEQ ID NO: 1867164 - DNA, 15 bp, Homo sapiens
cgtggtgatgtttgc

SEQ ID NO: 1867165 - DNA, 15 bp, Homo sapiens
gtggtgatgtttgcg

SEQ ID NO: 1867166 - DNA, 15 bp, Homo sapiens
tggtgatgtttgcgc

SEQ ID NO: 1867167 - DNA, 15 bp, Homo sapiens
ggtgatgtttgcgct

SEQ ID NO: 1867168 - DNA, 15 bp, Homo sapiens
gtgatgtttgcgctc

SEQ ID NO: 1867169 - DNA, 15 bp, Homo sapiens
tgatgtttgcgctcc

SEQ ID NO: 1867170 - DNA, 15 bp, Homo sapiens
gatgtttgcgctccc

SEQ ID NO: 1867171 - DNA, 15 bp, Homo sapiens
atgtttgcgctccca

SEQ ID NO: 1867172 - DNA, 15 bp, Homo sapiens
tgtttgcgctcccag

SEQ ID NO: 1867173 - DNA, 15 bp, Homo sapiens
gtttgcgctcccagg

SEQ ID NO: 1867174 - DNA, 15 bp, Homo sapiens
tttgcgctcccaggt

SEQ ID NO: 1867175 - DNA, 15 bp, Homo sapiens
ttgcgctcccaggtt

SEQ ID NO: 1867176 - DNA, 15 bp, Homo sapiens
tgcgctcccaggttg

SEQ ID NO: 1867177 - DNA, 15 bp, Homo sapiens
gcgctcccaggttgc

SEQ ID NO: 1867178 - DNA, 15 bp, Homo sapiens
cgctcccaggttgcc

SEQ ID NO: 1867179 - DNA, 15 bp, Homo sapiens
gctcccaggttgcca

SEQ ID NO: 1867180 - DNA, 15 bp, Homo sapiens
ctcccaggttgccag

SEQ ID NO: 1867181 - DNA, 15 bp, Homo sapiens
tcccaggttgccagg

SEQ ID NO: 1867182 - DNA, 15 bp, Homo sapiens
cccaggttgccaggt

SEQ ID NO: 1867183 - DNA, 15 bp, Homo sapiens
ccaggttgccaggtg

SEQ ID NO: 1867184 - DNA, 15 bp, Homo sapiens
caggttgccaggtgc

SEQ ID NO: 1867185 - DNA, 15 bp, Homo sapiens
aggttgccaggtgca

SEQ ID NO: 1867186 - DNA, 15 bp, Homo sapiens
ggttgccaggtgcaa

SEQ ID NO: 1867187 - DNA, 15 bp, Homo sapiens
gttgccaggtgcaag

SEQ ID NO: 1867188 - DNA, 15 bp, Homo sapiens
ttgccaggtgcaagc

SEQ ID NO: 1867189 - DNA, 15 bp, Homo sapiens
tgccaggtgcaagct

SEQ ID NO: 1867190 - DNA, 15 bp, Homo sapiens
gccaggtgcaagctg

SEQ ID NO: 1867191 - DNA, 15 bp, Homo sapiens
ccaggtgcaagctgt

SEQ ID NO: 1867192 - DNA, 15 bp, Homo sapiens
caggtgcaagctgtc

SEQ ID NO: 1867193 - DNA, 15 bp, Homo sapiens
aggtgcaagctgtct

SEQ ID NO: 1867194 - DNA, 15 bp, Homo sapiens
ggtgcaagctgtctg

SEQ ID NO: 1867195 - DNA, 15 bp, Homo sapiens
gtgcaagctgtctgt

SEQ ID NO: 1867196 - DNA, 15 bp, Homo sapiens
tgcaagctgtctgtg

SEQ ID NO: 1867197 - DNA, 15 bp, Homo sapiens
gcaagctgtctgtgt

SEQ ID NO: 1867198 - DNA, 15 bp, Homo sapiens
caagctgtctgtgtc

SEQ ID NO: 1867199 - DNA, 15 bp, Homo sapiens
aagctgtctgtgtcc

SEQ ID NO: 1867200 - DNA, 15 bp, Homo sapiens
agctgtctgtgtcca

SEQ ID NO: 1867201 - DNA, 15 bp, Homo sapiens
gctgtctgtgtccac

SEQ ID NO: 1867202 - DNA, 15 bp, Homo sapiens
ctgtctgtgtccaca

SEQ ID NO: 1867203 - DNA, 15 bp, Homo sapiens
tgtctgtgtccacat

SEQ ID NO: 1867204 - DNA, 15 bp, Homo sapiens
gtctgtgtccacatt

SEQ ID NO: 1867205 - DNA, 15 bp, Homo sapiens
tctgtgtccacattt

SEQ ID NO: 1867206 - DNA, 15 bp, Homo sapiens
ctgtgtccacatttc

SEQ ID NO: 1867207 - DNA, 15 bp, Homo sapiens
tgtgtccacatttct

SEQ ID NO: 1867208 - DNA, 15 bp, Homo sapiens
gtgtccacatttctg

SEQ ID NO: 1867209 - DNA, 15 bp, Homo sapiens
tgtccacatttctgc

SEQ ID NO: 1867210 - DNA, 15 bp, Homo sapiens
gtccacatttctgcc

SEQ ID NO: 1867211 - DNA, 15 bp, Homo sapiens
tccacatttctgccc

SEQ ID NO: 1867212 - DNA, 15 bp, Homo sapiens
ccacatttctgccct

SEQ ID NO: 1867213 - DNA, 15 bp, Homo sapiens
cacatttctgccctt

SEQ ID NO: 1867214 - DNA, 15 bp, Homo sapiens
acatttctgcccttc

SEQ ID NO: 1867215 - DNA, 15 bp, Homo sapiens
catttctgcccttca

SEQ ID NO: 1867216 - DNA, 15 bp, Homo sapiens
atttctgcccttcat

SEQ ID NO: 1867217 - DNA, 15 bp, Homo sapiens
tttctgcccttcatt

SEQ ID NO: 1867218 - DNA, 15 bp, Homo sapiens
ttctgcccttcattt

SEQ ID NO: 1867219 - DNA, 15 bp, Homo sapiens
tctgcccttcatttg

SEQ ID NO: 1867220 - DNA, 15 bp, Homo sapiens
ctgcccttcatttgc

SEQ ID NO: 1867221 - DNA, 15 bp, Homo sapiens
tgcccttcatttgcc

SEQ ID NO: 1867222 - DNA, 15 bp, Homo sapiens
gcccttcatttgccc

SEQ ID NO: 1867223 - DNA, 15 bp, Homo sapiens
cccttcatttgcccc

SEQ ID NO: 1867224 - DNA, 15 bp, Homo sapiens
ccttcatttgcccct

SEQ ID NO: 1867225 - DNA, 15 bp, Homo sapiens
cttcatttgcccctg

SEQ ID NO: 1867226 - DNA, 15 bp, Homo sapiens
ttcatttgcccctga

SEQ ID NO: 1867227 - DNA, 15 bp, Homo sapiens
tcatttgcccctgat

SEQ ID NO: 1867228 - DNA, 15 bp, Homo sapiens
catttgcccctgatt

SEQ ID NO: 1867229 - DNA, 15 bp, Homo sapiens
atttgcccctgattg

SEQ ID NO: 1867230 - DNA, 15 bp, Homo sapiens
tttgcccctgattgg

SEQ ID NO: 1867231 - DNA, 15 bp, Homo sapiens
ttgcccctgattggc

SEQ ID NO: 1867232 - DNA, 15 bp, Homo sapiens
tgcccctgattggca

SEQ ID NO: 1867233 - DNA, 15 bp, Homo sapiens
gcccctgattggcac

SEQ ID NO: 1867234 - DNA, 15 bp, Homo sapiens
cccctgattggcaca

SEQ ID NO: 1867235 - DNA, 15 bp, Homo sapiens
ccctgattggcacag

SEQ ID NO: 1867236 - DNA, 15 bp, Homo sapiens
cctgattggcacagg

SEQ ID NO: 1867237 - DNA, 15 bp, Homo sapiens
ctgattggcacaggg

SEQ ID NO: 1867238 - DNA, 15 bp, Homo sapiens
tgattggcacaggga

SEQ ID NO: 1867239 - DNA, 15 bp, Homo sapiens
gattggcacagggag

SEQ ID NO: 1867240 - DNA, 15 bp, Homo sapiens
attggcacagggagc

SEQ ID NO: 1867241 - DNA, 15 bp, Homo sapiens
ttggcacagggagcc

SEQ ID NO: 1867242 - DNA, 15 bp, Homo sapiens
tggcacagggagcct

SEQ ID NO: 1867243 - DNA, 15 bp, Homo sapiens
ggcacagggagcctg

SEQ ID NO: 1867244 - DNA, 15 bp, Homo sapiens
gcacagggagcctgc

SEQ ID NO: 1867245 - DNA, 15 bp, Homo sapiens
cacagggagcctgca

SEQ ID NO: 1867246 - DNA, 15 bp, Homo sapiens
acagggagcctgcag

SEQ ID NO: 1867247 - DNA, 15 bp, Homo sapiens
cagggagcctgcagg

SEQ ID NO: 1867248 - DNA, 15 bp, Homo sapiens
agggagcctgcagga

SEQ ID NO: 1867249 - DNA, 15 bp, Homo sapiens
gggagcctgcaggag

SEQ ID NO: 1867250 - DNA, 15 bp, Homo sapiens
ggagcctgcaggagg

SEQ ID NO: 1867251 - DNA, 15 bp, Homo sapiens
gagcctgcaggaggc

SEQ ID NO: 1867252 - DNA, 15 bp, Homo sapiens
agcctgcaggaggcg

SEQ ID NO: 1867253 - DNA, 15 bp, Homo sapiens
gcctgcaggaggcgg

SEQ ID NO: 1867254 - DNA, 15 bp, Homo sapiens
cctgcaggaggcggc

SEQ ID NO: 1867255 - DNA, 15 bp, Homo sapiens
tgcaggaggcggccg

SEQ ID NO: 1867256 - DNA, 15 bp, Homo sapiens
gcaggaggcggccgt

SEQ ID NO: 1867257 - DNA, 15 bp, Homo sapiens
caggaggcggccgtg

SEQ ID NO: 1867258 - DNA, 15 bp, Homo sapiens
aggaggcggccgtgc

SEQ ID NO: 1867259 - DNA, 15 bp, Homo sapiens
ggaggcggccgtgcc

SEQ ID NO: 1867260 - DNA, 15 bp, Homo sapiens
gaggcggccgtgcct

SEQ ID NO: 1867261 - DNA, 15 bp, Homo sapiens
aggcggccgtgcctg

SEQ ID NO: 1867262 - DNA, 15 bp, Homo sapiens
ggcggccgtgcctgc

SEQ ID NO: 1867263 - DNA, 15 bp, Homo sapiens
gcggccgtgcctgcc

SEQ ID NO: 1867264 - DNA, 15 bp, Homo sapiens
cggccgtgcctgccc

SEQ ID NO: 1867265 - DNA, 15 bp, Homo sapiens
ggccgtgcctgccca

SEQ ID NO: 1867266 - DNA, 15 bp, Homo sapiens
gccgtgcctgcccag

SEQ ID NO: 1867267 - DNA, 15 bp, Homo sapiens
ccgtgcctgcccagg

SEQ ID NO: 1867268 - DNA, 15 bp, Homo sapiens
cgtgcctgcccaggc

SEQ ID NO: 1867269 - DNA, 15 bp, Homo sapiens
gtgcctgcccaggcg

SEQ ID NO: 1867270 - DNA, 15 bp, Homo sapiens
tgcctgcccaggcgc

SEQ ID NO: 1867271 - DNA, 15 bp, Homo sapiens
gcctgcccaggcgcc

SEQ ID NO: 1867272 - DNA, 15 bp, Homo sapiens
cctgcccaggcgccc

SEQ ID NO: 1867273 - DNA, 15 bp, Homo sapiens
ctgcccaggcgccct

SEQ ID NO: 1867274 - DNA, 15 bp, Homo sapiens
tgcccaggcgccctt

SEQ ID NO: 1867275 - DNA, 15 bp, Homo sapiens
gcccaggcgcccttc

SEQ ID NO: 1867276 - DNA, 15 bp, Homo sapiens
cccaggcgcccttcc

SEQ ID NO: 1867277 - DNA, 15 bp, Homo sapiens
ccaggcgcccttcct

SEQ ID NO: 1867278 - DNA, 15 bp, Homo sapiens
caggcgcccttcctc

SEQ ID NO: 1867279 - DNA, 15 bp, Homo sapiens
aggcgcccttcctcc

SEQ ID NO: 1867280 - DNA, 15 bp, Homo sapiens
ggcgcccttcctccc

SEQ ID NO: 1867281 - DNA, 15 bp, Homo sapiens
gcgcccttcctcccc

SEQ ID NO: 1867282 - DNA, 15 bp, Homo sapiens
cgcccttcctcccca

SEQ ID NO: 1867283 - DNA, 15 bp, Homo sapiens
gcccttcctccccaa

SEQ ID NO: 1867284 - DNA, 15 bp, Homo sapiens
cccttcctccccaac

SEQ ID NO: 1867285 - DNA, 15 bp, Homo sapiens
ccttcctccccaact

SEQ ID NO: 1867286 - DNA, 15 bp, Homo sapiens
cttcctccccaactt

SEQ ID NO: 1867287 - DNA, 15 bp, Homo sapiens
ttcctccccaacttc

SEQ ID NO: 1867288 - DNA, 15 bp, Homo sapiens
tcctccccaacttct

SEQ ID NO: 1867289 - DNA, 15 bp, Homo sapiens
cctccccaacttctc

SEQ ID NO: 1867290 - DNA, 15 bp, Homo sapiens
ctccccaacttctcc

SEQ ID NO: 1867291 - DNA, 15 bp, Homo sapiens
tccccaacttctccg

SEQ ID NO: 1867292 - DNA, 15 bp, Homo sapiens
ccccaacttctccgt

SEQ ID NO: 1867293 - DNA, 15 bp, Homo sapiens
cccaacttctccgtc

SEQ ID NO: 1867294 - DNA, 15 bp, Homo sapiens
ccaacttctccgtcc

SEQ ID NO: 1867295 - DNA, 15 bp, Homo sapiens
caacttctccgtcct

SEQ ID NO: 1867296 - DNA, 15 bp, Homo sapiens
aacttctccgtcctc

SEQ ID NO: 1867297 - DNA, 15 bp, Homo sapiens
acttctccgtcctca

SEQ ID NO: 1867298 - DNA, 15 bp, Homo sapiens
cttctccgtcctcag

SEQ ID NO: 1867299 - DNA, 15 bp, Homo sapiens
ttctccgtcctcagc

SEQ ID NO: 1867300 - DNA, 15 bp, Homo sapiens
tctccgtcctcagcc

SEQ ID NO: 1867301 - DNA, 15 bp, Homo sapiens
ctccgtcctcagcct

SEQ ID NO: 1867302 - DNA, 15 bp, Homo sapiens
tccgtcctcagcctt

SEQ ID NO: 1867303 - DNA, 15 bp, Homo sapiens
ccgtcctcagccttc

SEQ ID NO: 1867304 - DNA, 15 bp, Homo sapiens
cgtcctcagccttct

SEQ ID NO: 1867305 - DNA, 15 bp, Homo sapiens
gtcctcagccttctg

SEQ ID NO: 1867306 - DNA, 15 bp, Homo sapiens
tcctcagccttctgc

SEQ ID NO: 1867307 - DNA, 15 bp, Homo sapiens
cctcagccttctgct

SEQ ID NO: 1867308 - DNA, 15 bp, Homo sapiens
ctcagccttctgctc

SEQ ID NO: 1867309 - DNA, 15 bp, Homo sapiens
tcagccttctgctct

SEQ ID NO: 1867310 - DNA, 15 bp, Homo sapiens
cagccttctgctctg

SEQ ID NO: 1867311 - DNA, 15 bp, Homo sapiens
agccttctgctctgc

SEQ ID NO: 1867312 - DNA, 15 bp, Homo sapiens
gccttctgctctgct

SEQ ID NO: 1867313 - DNA, 15 bp, Homo sapiens
ccttctgctctgctg

SEQ ID NO: 1867314 - DNA, 15 bp, Homo sapiens
cttctgctctgctgg

SEQ ID NO: 1867315 - DNA, 15 bp, Homo sapiens
ttctgctctgctgga

SEQ ID NO: 1867316 - DNA, 15 bp, Homo sapiens
tctgctctgctggac

SEQ ID NO: 1867317 - DNA, 15 bp, Homo sapiens
ctgctctgctggacc

SEQ ID NO: 1867318 - DNA, 15 bp, Homo sapiens
tgctctgctggacca

SEQ ID NO: 1867319 - DNA, 15 bp, Homo sapiens
gctctgctggaccat

SEQ ID NO: 1867320 - DNA, 15 bp, Homo sapiens
ctctgctggaccatg

SEQ ID NO: 1867321 - DNA, 15 bp, Homo sapiens
tctgctggaccatgg

SEQ ID NO: 1867322 - DNA, 15 bp, Homo sapiens
ctgctggaccatgga

SEQ ID NO: 1867323 - DNA, 15 bp, Homo sapiens
tgctggaccatggag

SEQ ID NO: 1867324 - DNA, 15 bp, Homo sapiens
gctggaccatggagg

SEQ ID NO: 1867325 - DNA, 15 bp, Homo sapiens
ctggaccatggagga

SEQ ID NO: 1867326 - DNA, 15 bp, Homo sapiens
tggaccatggaggag

SEQ ID NO: 1867327 - DNA, 15 bp, Homo sapiens
ggaccatggaggagg

SEQ ID NO: 1867328 - DNA, 15 bp, Homo sapiens
gaccatggaggaggg

SEQ ID NO: 1867329 - DNA, 15 bp, Homo sapiens
accatggaggagggg

SEQ ID NO: 1867330 - DNA, 15 bp, Homo sapiens
ccatggaggaggggg

SEQ ID NO: 1867331 - DNA, 15 bp, Homo sapiens
catggaggagggggc

SEQ ID NO: 1867332 - DNA, 15 bp, Homo sapiens
atggaggagggggct

SEQ ID NO: 1867333 - DNA, 15 bp, Homo sapiens
tggaggagggggctg

SEQ ID NO: 1867334 - DNA, 15 bp, Homo sapiens
ggaggagggggctga

SEQ ID NO: 1867335 - DNA, 15 bp, Homo sapiens
gaggagggggctgat

SEQ ID NO: 1867336 - DNA, 15 bp, Homo sapiens
aggagggggctgata

SEQ ID NO: 1867337 - DNA, 15 bp, Homo sapiens
ggagggggctgatag

SEQ ID NO: 1867338 - DNA, 15 bp, Homo sapiens
gagggggctgatagg

SEQ ID NO: 1867339 - DNA, 15 bp, Homo sapiens
agggggctgataggc

SEQ ID NO: 1867340 - DNA, 15 bp, Homo sapiens
gggggctgataggcc

SEQ ID NO: 1867341 - DNA, 15 bp, Homo sapiens
ggggctgataggccc

SEQ ID NO: 1867342 - DNA, 15 bp, Homo sapiens
gggctgataggcccg

SEQ ID NO: 1867343 - DNA, 15 bp, Homo sapiens
ggctgataggcccgt

SEQ ID NO: 1867344 - DNA, 15 bp, Homo sapiens
gctgataggcccgtg

SEQ ID NO: 1867345 - DNA, 15 bp, Homo sapiens
ctgataggcccgtgg

SEQ ID NO: 1867346 - DNA, 15 bp, Homo sapiens
tgataggcccgtggc

SEQ ID NO: 1867347 - DNA, 15 bp, Homo sapiens
gataggcccgtggcc

SEQ ID NO: 1867348 - DNA, 15 bp, Homo sapiens
ataggcccgtggccc

SEQ ID NO: 1867349 - DNA, 15 bp, Homo sapiens
taggcccgtggccct

SEQ ID NO: 1867350 - DNA, 15 bp, Homo sapiens
aggcccgtggccctg

SEQ ID NO: 1867351 - DNA, 15 bp, Homo sapiens
ggcccgtggccctgt

SEQ ID NO: 1867352 - DNA, 15 bp, Homo sapiens
gcccgtggccctgtt

SEQ ID NO: 1867353 - DNA, 15 bp, Homo sapiens
cccgtggccctgttg

SEQ ID NO: 1867354 - DNA, 15 bp, Homo sapiens
ccgtggccctgttgg

SEQ ID NO: 1867355 - DNA, 15 bp, Homo sapiens
cgtggccctgttgga

SEQ ID NO: 1867356 - DNA, 15 bp, Homo sapiens
gtggccctgttggac

SEQ ID NO: 1867357 - DNA, 15 bp, Homo sapiens
tggccctgttggact

SEQ ID NO: 1867358 - DNA, 15 bp, Homo sapiens
ggccctgttggactt

SEQ ID NO: 1867359 - DNA, 15 bp, Homo sapiens
gccctgttggacttt

SEQ ID NO: 1867360 - DNA, 15 bp, Homo sapiens
ccctgttggactttg

SEQ ID NO: 1867361 - DNA, 15 bp, Homo sapiens
cctgttggactttgg

SEQ ID NO: 1867362 - DNA, 15 bp, Homo sapiens
ctgttggactttggc

SEQ ID NO: 1867363 - DNA, 15 bp, Homo sapiens
tgttggactttggca

SEQ ID NO: 1867364 - DNA, 15 bp, Homo sapiens
gttggactttggcag

SEQ ID NO: 1867365 - DNA, 15 bp, Homo sapiens
ttggactttggcaga

SEQ ID NO: 1867366 - DNA, 15 bp, Homo sapiens
tggactttggcagag

SEQ ID NO: 1867367 - DNA, 15 bp, Homo sapiens
ggactttggcagagg

SEQ ID NO: 1867368 - DNA, 15 bp, Homo sapiens
gactttggcagagga

SEQ ID NO: 1867369 - DNA, 15 bp, Homo sapiens
actttggcagaggaa

SEQ ID NO: 1867370 - DNA, 15 bp, Homo sapiens
ctttggcagaggaat

SEQ ID NO: 1867371 - DNA, 15 bp, Homo sapiens
tttggcagaggaata

SEQ ID NO: 1867372 - DNA, 15 bp, Homo sapiens
ttggcagaggaatat

SEQ ID NO: 1867373 - DNA, 15 bp, Homo sapiens
tggcagaggaatatc

SEQ ID NO: 1867374 - DNA, 15 bp, Homo sapiens
ggcagaggaatatca

SEQ ID NO: 1867375 - DNA, 15 bp, Homo sapiens
gcagaggaatatcac

SEQ ID NO: 1867376 - DNA, 15 bp, Homo sapiens
cagaggaatatcact

SEQ ID NO: 1867377 - DNA, 15 bp, Homo sapiens
agaggaatatcactt

SEQ ID NO: 1867378 - DNA, 15 bp, Homo sapiens
gaggaatatcacttc

SEQ ID NO: 1867379 - DNA, 15 bp, Homo sapiens
aggaatatcacttca

SEQ ID NO: 1867380 - DNA, 15 bp, Homo sapiens
ggaatatcacttcat

SEQ ID NO: 1867381 - DNA, 15 bp, Homo sapiens
gaatatcacttcatt

SEQ ID NO: 1867382 - DNA, 15 bp, Homo sapiens
aatatcacttcatta

SEQ ID NO: 1867383 - DNA, 15 bp, Homo sapiens
atatcacttcattat

SEQ ID NO: 1867384 - DNA, 15 bp, Homo sapiens
tatcacttcattatc

SEQ ID NO: 1867385 - DNA, 15 bp, Homo sapiens
atcacttcattatcc

SEQ ID NO: 1867386 - DNA, 15 bp, Homo sapiens
tcacttcattatcca

SEQ ID NO: 1867387 - DNA, 15 bp, Homo sapiens
cacttcattatccaa

SEQ ID NO: 1867388 - DNA, 15 bp, Homo sapiens
acttcattatccaag

SEQ ID NO: 1867389 - DNA, 15 bp, Homo sapiens
cttcattatccaagt

SEQ ID NO: 1867390 - DNA, 15 bp, Homo sapiens
ttcattatccaagtg

SEQ ID NO: 1867391 - DNA, 15 bp, Homo sapiens
tcattatccaagtgc

SEQ ID NO: 1867392 - DNA, 15 bp, Homo sapiens
cattatccaagtgcc

SEQ ID NO: 1867393 - DNA, 15 bp, Homo sapiens
attatccaagtgcct

SEQ ID NO: 1867394 - DNA, 15 bp, Homo sapiens
ttatccaagtgcctc

SEQ ID NO: 1867395 - DNA, 15 bp, Homo sapiens
tatccaagtgcctca

SEQ ID NO: 1867396 - DNA, 15 bp, Homo sapiens
atccaagtgcctcac

SEQ ID NO: 1867397 - DNA, 15 bp, Homo sapiens
tccaagtgcctcaca

SEQ ID NO: 1867398 - DNA, 15 bp, Homo sapiens
ccaagtgcctcacag

SEQ ID NO: 1867399 - DNA, 15 bp, Homo sapiens
caagtgcctcacaga

SEQ ID NO: 1867400 - DNA, 15 bp, Homo sapiens
aagtgcctcacagag

SEQ ID NO: 1867401 - DNA, 15 bp, Homo sapiens
agtgcctcacagaga

SEQ ID NO: 1867402 - DNA, 15 bp, Homo sapiens
gtgcctcacagagat

SEQ ID NO: 1867403 - DNA, 15 bp, Homo sapiens
tgcctcacagagatg

SEQ ID NO: 1867404 - DNA, 15 bp, Homo sapiens
gcctcacagagatga

SEQ ID NO: 1867405 - DNA, 15 bp, Homo sapiens
cctcacagagatgag

SEQ ID NO: 1867406 - DNA, 15 bp, Homo sapiens
ctcacagagatgaga

SEQ ID NO: 1867407 - DNA, 15 bp, Homo sapiens
tcacagagatgagag

SEQ ID NO: 1867408 - DNA, 15 bp, Homo sapiens
cacagagatgagagc

SEQ ID NO: 1867409 - DNA, 15 bp, Homo sapiens
acagagatgagagcc

SEQ ID NO: 1867410 - DNA, 15 bp, Homo sapiens
cagagatgagagccg

SEQ ID NO: 1867411 - DNA, 15 bp, Homo sapiens
agagatgagagccgg

SEQ ID NO: 1867412 - DNA, 15 bp, Homo sapiens
gagatgagagccggt

SEQ ID NO: 1867413 - DNA, 15 bp, Homo sapiens
agatgagagccggtg

SEQ ID NO: 1867414 - DNA, 15 bp, Homo sapiens
gatgagagccggtgg

SEQ ID NO: 1867415 - DNA, 15 bp, Homo sapiens
atgagagccggtgga

SEQ ID NO: 1867416 - DNA, 15 bp, Homo sapiens
tgagagccggtggag

SEQ ID NO: 1867417 - DNA, 15 bp, Homo sapiens
gagagccggtggaga

SEQ ID NO: 1867418 - DNA, 15 bp, Homo sapiens
agagccggtggagac

SEQ ID NO: 1867419 - DNA, 15 bp, Homo sapiens
gagccggtggagacc

SEQ ID NO: 1867420 - DNA, 15 bp, Homo sapiens
agccggtggagaccc

SEQ ID NO: 1867421 - DNA, 15 bp, Homo sapiens
gccggtggagacccg

SEQ ID NO: 1867422 - DNA, 15 bp, Homo sapiens
ccggtggagacccgt

SEQ ID NO: 1867423 - DNA, 15 bp, Homo sapiens
cggtggagacccgtc

SEQ ID NO: 1867424 - DNA, 15 bp, Homo sapiens
ggtggagacccgtcc

SEQ ID NO: 1867425 - DNA, 15 bp, Homo sapiens
gtggagacccgtcct

SEQ ID NO: 1867426 - DNA, 15 bp, Homo sapiens
tggagacccgtcctc

SEQ ID NO: 1867427 - DNA, 15 bp, Homo sapiens
ggagacccgtcctca

SEQ ID NO: 1867428 - DNA, 15 bp, Homo sapiens
gagacccgtcctcac

SEQ ID NO: 1867429 - DNA, 15 bp, Homo sapiens
agacccgtcctcact

SEQ ID NO: 1867430 - DNA, 15 bp, Homo sapiens
gacccgtcctcactc

SEQ ID NO: 1867431 - DNA, 15 bp, Homo sapiens
acccgtcctcactcg

SEQ ID NO: 1867432 - DNA, 15 bp, Homo sapiens
cccgtcctcactcgc

SEQ ID NO: 1867433 - DNA, 15 bp, Homo sapiens
ccgtcctcactcgcc

SEQ ID NO: 1867434 - DNA, 15 bp, Homo sapiens
cgtcctcactcgcct

SEQ ID NO: 1867435 - DNA, 15 bp, Homo sapiens
gtcctcactcgcctt

SEQ ID NO: 1867436 - DNA, 15 bp, Homo sapiens
tcctcactcgccttt

SEQ ID NO: 1867437 - DNA, 15 bp, Homo sapiens
cctcactcgcctttg

SEQ ID NO: 1867438 - DNA, 15 bp, Homo sapiens
ctcactcgcctttga

SEQ ID NO: 1867439 - DNA, 15 bp, Homo sapiens
tcactcgcctttgac

SEQ ID NO: 1867440 - DNA, 15 bp, Homo sapiens
cactcgcctttgacc

SEQ ID NO: 1867441 - DNA, 15 bp, Homo sapiens
actcgcctttgaccc

SEQ ID NO: 1867442 - DNA, 15 bp, Homo sapiens
ctcgcctttgacccc

SEQ ID NO: 1867443 - DNA, 15 bp, Homo sapiens
tcgcctttgacccca

SEQ ID NO: 1867444 - DNA, 15 bp, Homo sapiens
cgcctttgaccccag

SEQ ID NO: 1867445 - DNA, 15 bp, Homo sapiens
gcctttgaccccagc

SEQ ID NO: 1867446 - DNA, 15 bp, Homo sapiens
cctttgaccccagct

SEQ ID NO: 1867447 - DNA, 15 bp, Homo sapiens
ctttgaccccagctc

SEQ ID NO: 1867448 - DNA, 15 bp, Homo sapiens
tttgaccccagctcc

SEQ ID NO: 1867449 - DNA, 15 bp, Homo sapiens
tgaccccagctcccg

SEQ ID NO: 1867450 - DNA, 15 bp, Homo sapiens
gaccccagctcccgg

SEQ ID NO: 1867451 - DNA, 15 bp, Homo sapiens
accccagctcccggt

SEQ ID NO: 1867452 - DNA, 15 bp, Homo sapiens
ccccagctcccggta

SEQ ID NO: 1867453 - DNA, 15 bp, Homo sapiens
cccagctcccggtac

SEQ ID NO: 1867454 - DNA, 15 bp, Homo sapiens
ccagctcccggtacc

SEQ ID NO: 1867455 - DNA, 15 bp, Homo sapiens
cagctcccggtaccc

SEQ ID NO: 1867456 - DNA, 15 bp, Homo sapiens
agctcccggtaccct

SEQ ID NO: 1867457 - DNA, 15 bp, Homo sapiens
gctcccggtacccta

SEQ ID NO: 1867458 - DNA, 15 bp, Homo sapiens
ctcccggtaccctag

SEQ ID NO: 1867459 - DNA, 15 bp, Homo sapiens
tcccggtaccctagc

SEQ ID NO: 1867460 - DNA, 15 bp, Homo sapiens
cccggtaccctagca

SEQ ID NO: 1867461 - DNA, 15 bp, Homo sapiens
ccggtaccctagcaa

SEQ ID NO: 1867462 - DNA, 15 bp, Homo sapiens
cggtaccctagcaat

SEQ ID NO: 1867463 - DNA, 15 bp, Homo sapiens
ggtaccctagcaatt

SEQ ID NO: 1867464 - DNA, 15 bp, Homo sapiens
gtaccctagcaattg

SEQ ID NO: 1867465 - DNA, 15 bp, Homo sapiens
taccctagcaattgg

SEQ ID NO: 1867466 - DNA, 15 bp, Homo sapiens
accctagcaattggg

SEQ ID NO: 1867467 - DNA, 15 bp, Homo sapiens
ccctagcaattgggc

SEQ ID NO: 1867468 - DNA, 15 bp, Homo sapiens
cctagcaattgggca

SEQ ID NO: 1867469 - DNA, 15 bp, Homo sapiens
ctagcaattgggcac

SEQ ID NO: 1867470 - DNA, 15 bp, Homo sapiens
tagcaattgggcaca

SEQ ID NO: 1867471 - DNA, 15 bp, Homo sapiens
agcaattgggcacat

SEQ ID NO: 1867472 - DNA, 15 bp, Homo sapiens
gcaattgggcacatt

SEQ ID NO: 1867473 - DNA, 15 bp, Homo sapiens
caattgggcacattt

SEQ ID NO: 1867474 - DNA, 15 bp, Homo sapiens
aattgggcacattta

SEQ ID NO: 1867475 - DNA, 15 bp, Homo sapiens
attgggcacatttaa

SEQ ID NO: 1867476 - DNA, 15 bp, Homo sapiens
ttgggcacatttaac

SEQ ID NO: 1867477 - DNA, 15 bp, Homo sapiens
tgggcacatttaacc

SEQ ID NO: 1867478 - DNA, 15 bp, Homo sapiens
gggcacatttaaccg

SEQ ID NO: 1867479 - DNA, 15 bp, Homo sapiens
ggcacatttaaccgt

SEQ ID NO: 1867480 - DNA, 15 bp, Homo sapiens
gcacatttaaccgtg

SEQ ID NO: 1867481 - DNA, 15 bp, Homo sapiens
cacatttaaccgtgg

SEQ ID NO: 1867482 - DNA, 15 bp, Homo sapiens
acatttaaccgtggg

SEQ ID NO: 1867483 - DNA, 15 bp, Homo sapiens
catttaaccgtgggt

SEQ ID NO: 1867484 - DNA, 15 bp, Homo sapiens
atttaaccgtgggtc

SEQ ID NO: 1867485 - DNA, 15 bp, Homo sapiens
tttaaccgtgggtca

SEQ ID NO: 1867486 - DNA, 15 bp, Homo sapiens
ttaaccgtgggtcat

SEQ ID NO: 1867487 - DNA, 15 bp, Homo sapiens
taaccgtgggtcatc

SEQ ID NO: 1867488 - DNA, 15 bp, Homo sapiens
aaccgtgggtcatca

SEQ ID NO: 1867489 - DNA, 15 bp, Homo sapiens
accgtgggtcatcag

SEQ ID NO: 1867490 - DNA, 15 bp, Homo sapiens
ccgtgggtcatcagc

SEQ ID NO: 1867491 - DNA, 15 bp, Homo sapiens
cgtgggtcatcagct

SEQ ID NO: 1867492 - DNA, 15 bp, Homo sapiens
gtgggtcatcagctg

SEQ ID NO: 1867493 - DNA, 15 bp, Homo sapiens
tgggtcatcagctga

SEQ ID NO: 1867494 - DNA, 15 bp, Homo sapiens
gggtcatcagctgat

SEQ ID NO: 1867495 - DNA, 15 bp, Homo sapiens
ggtcatcagctgatg

SEQ ID NO: 1867496 - DNA, 15 bp, Homo sapiens
gtcatcagctgatgg

SEQ ID NO: 1867497 - DNA, 15 bp, Homo sapiens
tcatcagctgatgga

SEQ ID NO: 1867498 - DNA, 15 bp, Homo sapiens
catcagctgatggag

SEQ ID NO: 1867499 - DNA, 15 bp, Homo sapiens
atcagctgatggagc

SEQ ID NO: 1867500 - DNA, 15 bp, Homo sapiens
tcagctgatggagct

SEQ ID NO: 1867501 - DNA, 15 bp, Homo sapiens
agctgatggagctca

SEQ ID NO: 1867502 - DNA, 15 bp, Homo sapiens
gctgatggagctcat

SEQ ID NO: 1867503 - DNA, 15 bp, Homo sapiens
ctgatggagctcatg

SEQ ID NO: 1867504 - DNA, 15 bp, Homo sapiens
tgatggagctcatgt

SEQ ID NO: 1867505 - DNA, 15 bp, Homo sapiens
gatggagctcatgtc

SEQ ID NO: 1867506 - DNA, 15 bp, Homo sapiens
atggagctcatgtct

SEQ ID NO: 1867507 - DNA, 15 bp, Homo sapiens
tggagctcatgtctt

SEQ ID NO: 1867508 - DNA, 15 bp, Homo sapiens
ggagctcatgtcttt

SEQ ID NO: 1867509 - DNA, 15 bp, Homo sapiens
gagctcatgtcttta

SEQ ID NO: 1867510 - DNA, 15 bp, Homo sapiens
agctcatgtctttac

SEQ ID NO: 1867511 - DNA, 15 bp, Homo sapiens
gctcatgtctttact

SEQ ID NO: 1867512 - DNA, 15 bp, Homo sapiens
ctcatgtctttactg

SEQ ID NO: 1867513 - DNA, 15 bp, Homo sapiens
tcatgtctttactgg

SEQ ID NO: 1867514 - DNA, 15 bp, Homo sapiens
catgtctttactggc

SEQ ID NO: 1867515 - DNA, 15 bp, Homo sapiens
atgtctttactggct

SEQ ID NO: 1867516 - DNA, 15 bp, Homo sapiens
tgtctttactggctt

SEQ ID NO: 1867517 - DNA, 15 bp, Homo sapiens
gtctttactggcttt

SEQ ID NO: 1867518 - DNA, 15 bp, Homo sapiens
tctttactggctttt

SEQ ID NO: 1867519 - DNA, 15 bp, Homo sapiens
ctttactggcttttt

SEQ ID NO: 1867520 - DNA, 15 bp, Homo sapiens
tttactggctttttt

SEQ ID NO: 1867521 - DNA, 15 bp, Homo sapiens
ttactggcttttttc

SEQ ID NO: 1867522 - DNA, 15 bp, Homo sapiens
tactggcttttttcc

SEQ ID NO: 1867523 - DNA, 15 bp, Homo sapiens
actggcttttttccc

SEQ ID NO: 1867524 - DNA, 15 bp, Homo sapiens
ctggcttttttcccc

SEQ ID NO: 1867525 - DNA, 15 bp, Homo sapiens
tggcttttttcccca

SEQ ID NO: 1867526 - DNA, 15 bp, Homo sapiens
ggcttttttccccaa

SEQ ID NO: 1867527 - DNA, 15 bp, Homo sapiens
gcttttttccccaag

SEQ ID NO: 1867528 - DNA, 15 bp, Homo sapiens
cttttttccccaagc

SEQ ID NO: 1867529 - DNA, 15 bp, Homo sapiens
ttttttccccaagct

SEQ ID NO: 1867530 - DNA, 15 bp, Homo sapiens
tttttccccaagctt

SEQ ID NO: 1867531 - DNA, 15 bp, Homo sapiens
ttttccccaagcttg

SEQ ID NO: 1867532 - DNA, 15 bp, Homo sapiens
tttccccaagcttgc

SEQ ID NO: 1867533 - DNA, 15 bp, Homo sapiens
ttccccaagcttgcc

SEQ ID NO: 1867534 - DNA, 15 bp, Homo sapiens
tccccaagcttgccc

SEQ ID NO: 1867535 - DNA, 15 bp, Homo sapiens
ccccaagcttgccct

SEQ ID NO: 1867536 - DNA, 15 bp, Homo sapiens
cccaagcttgccctt

SEQ ID NO: 1867537 - DNA, 15 bp, Homo sapiens
ccaagcttgcccttg

SEQ ID NO: 1867538 - DNA, 15 bp, Homo sapiens
caagcttgcccttgt

SEQ ID NO: 1867539 - DNA, 15 bp, Homo sapiens
aagcttgcccttgtt

SEQ ID NO: 1867540 - DNA, 15 bp, Homo sapiens
agcttgcccttgttc

SEQ ID NO: 1867541 - DNA, 15 bp, Homo sapiens
gcttgcccttgttcc

SEQ ID NO: 1867542 - DNA, 15 bp, Homo sapiens
cttgcccttgttcct

SEQ ID NO: 1867543 - DNA, 15 bp, Homo sapiens
ttgcccttgttccta

SEQ ID NO: 1867544 - DNA, 15 bp, Homo sapiens
tgcccttgttcctaa

SEQ ID NO: 1867545 - DNA, 15 bp, Homo sapiens
gcccttgttcctaaa

SEQ ID NO: 1867546 - DNA, 15 bp, Homo sapiens
cccttgttcctaaat

SEQ ID NO: 1867547 - DNA, 15 bp, Homo sapiens
ccttgttcctaaatg

SEQ ID NO: 1867548 - DNA, 15 bp, Homo sapiens
cttgttcctaaatgg

SEQ ID NO: 1867549 - DNA, 15 bp, Homo sapiens
ttgttcctaaatgga

SEQ ID NO: 1867550 - DNA, 15 bp, Homo sapiens
tgttcctaaatggaa

SEQ ID NO: 1867551 - DNA, 15 bp, Homo sapiens
gttcctaaatggaat

SEQ ID NO: 1867552 - DNA, 15 bp, Homo sapiens
ttcctaaatggaatc

SEQ ID NO: 1867553 - DNA, 15 bp, Homo sapiens
tcctaaatggaatct

SEQ ID NO: 1867554 - DNA, 15 bp, Homo sapiens
cctaaatggaatctt

SEQ ID NO: 1867555 - DNA, 15 bp, Homo sapiens
ctaaatggaatcttg

SEQ ID NO: 1867556 - DNA, 15 bp, Homo sapiens
taaatggaatcttgg

SEQ ID NO: 1867557 - DNA, 15 bp, Homo sapiens
aaatggaatcttggg

SEQ ID NO: 1867558 - DNA, 15 bp, Homo sapiens
aatggaatcttgggg

SEQ ID NO: 1867559 - DNA, 15 bp, Homo sapiens
atggaatcttggggg

SEQ ID NO: 1867560 - DNA, 15 bp, Homo sapiens
tggaatcttggggga

SEQ ID NO: 1867561 - DNA, 15 bp, Homo sapiens
ggaatcttgggggac

SEQ ID NO: 1867562 - DNA, 15 bp, Homo sapiens
gaatcttgggggacc

SEQ ID NO: 1867563 - DNA, 15 bp, Homo sapiens
aatcttgggggaccc

SEQ ID NO: 1867564 - DNA, 15 bp, Homo sapiens
atcttgggggacccc

SEQ ID NO: 1867565 - DNA, 15 bp, Homo sapiens
tcttgggggaccccc

SEQ ID NO: 1867566 - DNA, 15 bp, Homo sapiens
cttgggggaccccct

SEQ ID NO: 1867567 - DNA, 15 bp, Homo sapiens
ttgggggaccccctc

SEQ ID NO: 1867568 - DNA, 15 bp, Homo sapiens
tgggggaccccctcc

SEQ ID NO: 1867569 - DNA, 15 bp, Homo sapiens
gggggaccccctccc

SEQ ID NO: 1867570 - DNA, 15 bp, Homo sapiens
ggggaccccctcccc

SEQ ID NO: 1867571 - DNA, 15 bp, Homo sapiens
gggaccccctcccca

SEQ ID NO: 1867572 - DNA, 15 bp, Homo sapiens
ggaccccctccccac

SEQ ID NO: 1867573 - DNA, 15 bp, Homo sapiens
gaccccctccccaca

SEQ ID NO: 1867574 - DNA, 15 bp, Homo sapiens
accccctccccacaa

SEQ ID NO: 1867575 - DNA, 15 bp, Homo sapiens
ccccctccccacaag

SEQ ID NO: 1867576 - DNA, 15 bp, Homo sapiens
cccctccccacaagt

SEQ ID NO: 1867577 - DNA, 15 bp, Homo sapiens
ccctccccacaagta

SEQ ID NO: 1867578 - DNA, 15 bp, Homo sapiens
cctccccacaagtac

SEQ ID NO: 1867579 - DNA, 15 bp, Homo sapiens
ctccccacaagtacg

SEQ ID NO: 1867580 - DNA, 15 bp, Homo sapiens
tccccacaagtacgt

SEQ ID NO: 1867581 - DNA, 15 bp, Homo sapiens
ccccacaagtacgtt

SEQ ID NO: 1867582 - DNA, 15 bp, Homo sapiens
cccacaagtacgttc

SEQ ID NO: 1867583 - DNA, 15 bp, Homo sapiens
ccacaagtacgttct

SEQ ID NO: 1867584 - DNA, 15 bp, Homo sapiens
cacaagtacgttctt

SEQ ID NO: 1867585 - DNA, 15 bp, Homo sapiens
acaagtacgttcttt

SEQ ID NO: 1867586 - DNA, 15 bp, Homo sapiens
caagtacgttctttg

SEQ ID NO: 1867587 - DNA, 15 bp, Homo sapiens
aagtacgttctttgt

SEQ ID NO: 1867588 - DNA, 15 bp, Homo sapiens
agtacgttctttgtg

SEQ ID NO: 1867589 - DNA, 15 bp, Homo sapiens
gtacgttctttgtgt

SEQ ID NO: 1867590 - DNA, 15 bp, Homo sapiens
tacgttctttgtgtg

SEQ ID NO: 1867591 - DNA, 15 bp, Homo sapiens
acgttctttgtgtgt

SEQ ID NO: 1867592 - DNA, 15 bp, Homo sapiens
cgttctttgtgtgtc

SEQ ID NO: 1867593 - DNA, 15 bp, Homo sapiens
gttctttgtgtgtct

SEQ ID NO: 1867594 - DNA, 15 bp, Homo sapiens
ttctttgtgtgtctg

SEQ ID NO: 1867595 - DNA, 15 bp, Homo sapiens
tctttgtgtgtctgg

SEQ ID NO: 1867596 - DNA, 15 bp, Homo sapiens
ctttgtgtgtctggg

SEQ ID NO: 1867597 - DNA, 15 bp, Homo sapiens
tttgtgtgtctgggc

SEQ ID NO: 1867598 - DNA, 15 bp, Homo sapiens
ttgtgtgtctgggcc

SEQ ID NO: 1867599 - DNA, 15 bp, Homo sapiens
tgtgtgtctgggccc

SEQ ID NO: 1867600 - DNA, 15 bp, Homo sapiens
gtgtgtctgggccca

SEQ ID NO: 1867601 - DNA, 15 bp, Homo sapiens
tgtgtctgggcccag

SEQ ID NO: 1867602 - DNA, 15 bp, Homo sapiens
gtgtctgggcccagt

SEQ ID NO: 1867603 - DNA, 15 bp, Homo sapiens
tgtctgggcccagtc

SEQ ID NO: 1867604 - DNA, 15 bp, Homo sapiens
gtctgggcccagtca

SEQ ID NO: 1867605 - DNA, 15 bp, Homo sapiens
tctgggcccagtcag

SEQ ID NO: 1867606 - DNA, 15 bp, Homo sapiens
ctgggcccagtcagg

SEQ ID NO: 1867607 - DNA, 15 bp, Homo sapiens
tgggcccagtcaggc

SEQ ID NO: 1867608 - DNA, 15 bp, Homo sapiens
gggcccagtcaggcc

SEQ ID NO: 1867609 - DNA, 15 bp, Homo sapiens
ggcccagtcaggccc

SEQ ID NO: 1867610 - DNA, 15 bp, Homo sapiens
gcccagtcaggccca

SEQ ID NO: 1867611 - DNA, 15 bp, Homo sapiens
cccagtcaggcccag

SEQ ID NO: 1867612 - DNA, 15 bp, Homo sapiens
ccagtcaggcccaga

SEQ ID NO: 1867613 - DNA, 15 bp, Homo sapiens
cagtcaggcccagat

SEQ ID NO: 1867614 - DNA, 15 bp, Homo sapiens
agtcaggcccagata

SEQ ID NO: 1867615 - DNA, 15 bp, Homo sapiens
gtcaggcccagatag

SEQ ID NO: 1867616 - DNA, 15 bp, Homo sapiens
tcaggcccagatagc

SEQ ID NO: 1867617 - DNA, 15 bp, Homo sapiens
caggcccagatagct

SEQ ID NO: 1867618 - DNA, 15 bp, Homo sapiens
aggcccagatagctt

SEQ ID NO: 1867619 - DNA, 15 bp, Homo sapiens
ggcccagatagcttc

SEQ ID NO: 1867620 - DNA, 15 bp, Homo sapiens
gcccagatagcttct

SEQ ID NO: 1867621 - DNA, 15 bp, Homo sapiens
cccagatagcttctc

SEQ ID NO: 1867622 - DNA, 15 bp, Homo sapiens
ccagatagcttctct

SEQ ID NO: 1867623 - DNA, 15 bp, Homo sapiens
cagatagcttctctt

SEQ ID NO: 1867624 - DNA, 15 bp, Homo sapiens
agatagcttctcttc

SEQ ID NO: 1867625 - DNA, 15 bp, Homo sapiens
gatagcttctcttcc

SEQ ID NO: 1867626 - DNA, 15 bp, Homo sapiens
atagcttctcttcca

SEQ ID NO: 1867627 - DNA, 15 bp, Homo sapiens
tagcttctcttccac

SEQ ID NO: 1867628 - DNA, 15 bp, Homo sapiens
agcttctcttccacg

SEQ ID NO: 1867629 - DNA, 15 bp, Homo sapiens
gcttctcttccacgc

SEQ ID NO: 1867630 - DNA, 15 bp, Homo sapiens
cttctcttccacgcg

SEQ ID NO: 1867631 - DNA, 15 bp, Homo sapiens
ttctcttccacgcgt

SEQ ID NO: 1867632 - DNA, 15 bp, Homo sapiens
tctcttccacgcgtg

SEQ ID NO: 1867633 - DNA, 15 bp, Homo sapiens
ctcttccacgcgtgc

SEQ ID NO: 1867634 - DNA, 15 bp, Homo sapiens
tcttccacgcgtgcc

SEQ ID NO: 1867635 - DNA, 15 bp, Homo sapiens
cttccacgcgtgccc

SEQ ID NO: 1867636 - DNA, 15 bp, Homo sapiens
ttccacgcgtgcccg

SEQ ID NO: 1867637 - DNA, 15 bp, Homo sapiens
tccacgcgtgcccgt

SEQ ID NO: 1867638 - DNA, 15 bp, Homo sapiens
ccacgcgtgcccgtg

SEQ ID NO: 1867639 - DNA, 15 bp, Homo sapiens
cacgcgtgcccgtgt

SEQ ID NO: 1867640 - DNA, 15 bp, Homo sapiens
acgcgtgcccgtgtt

SEQ ID NO: 1867641 - DNA, 15 bp, Homo sapiens
cgcgtgcccgtgttc

SEQ ID NO: 1867642 - DNA, 15 bp, Homo sapiens
gcgtgcccgtgttct

SEQ ID NO: 1867643 - DNA, 15 bp, Homo sapiens
cgtgcccgtgttctc

SEQ ID NO: 1867644 - DNA, 15 bp, Homo sapiens
gtgcccgtgttctca

SEQ ID NO: 1867645 - DNA, 15 bp, Homo sapiens
tgcccgtgttctcat

SEQ ID NO: 1867646 - DNA, 15 bp, Homo sapiens
gcccgtgttctcata

SEQ ID NO: 1867647 - DNA, 15 bp, Homo sapiens
cccgtgttctcataa

SEQ ID NO: 1867648 - DNA, 15 bp, Homo sapiens
ccgtgttctcataac

SEQ ID NO: 1867649 - DNA, 15 bp, Homo sapiens
cgtgttctcataacc

SEQ ID NO: 1867650 - DNA, 15 bp, Homo sapiens
gtgttctcataaccc

SEQ ID NO: 1867651 - DNA, 15 bp, Homo sapiens
tgttctcataacccc

SEQ ID NO: 1867652 - DNA, 15 bp, Homo sapiens
gttctcataacccca

SEQ ID NO: 1867653 - DNA, 15 bp, Homo sapiens
ttctcataaccccat

SEQ ID NO: 1867654 - DNA, 15 bp, Homo sapiens
tctcataaccccatg

SEQ ID NO: 1867655 - DNA, 15 bp, Homo sapiens
ctcataaccccatgg

SEQ ID NO: 1867656 - DNA, 15 bp, Homo sapiens
tcataaccccatggc

SEQ ID NO: 1867657 - DNA, 15 bp, Homo sapiens
cataaccccatggct

SEQ ID NO: 1867658 - DNA, 15 bp, Homo sapiens
ataaccccatggctg

SEQ ID NO: 1867659 - DNA, 15 bp, Homo sapiens
taaccccatggctgt

SEQ ID NO: 1867660 - DNA, 15 bp, Homo sapiens
aaccccatggctgtt

SEQ ID NO: 1867661 - DNA, 15 bp, Homo sapiens
accccatggctgttc

SEQ ID NO: 1867662 - DNA, 15 bp, Homo sapiens
ccccatggctgttct

SEQ ID NO: 1867663 - DNA, 15 bp, Homo sapiens
cccatggctgttctt

SEQ ID NO: 1867664 - DNA, 15 bp, Homo sapiens
ccatggctgttcttg

SEQ ID NO: 1867665 - DNA, 15 bp, Homo sapiens
catggctgttcttgg

SEQ ID NO: 1867666 - DNA, 15 bp, Homo sapiens
atggctgttcttgga

SEQ ID NO: 1867667 - DNA, 15 bp, Homo sapiens
tggctgttcttggag

SEQ ID NO: 1867668 - DNA, 15 bp, Homo sapiens
ggctgttcttggagc

SEQ ID NO: 1867669 - DNA, 15 bp, Homo sapiens
gctgttcttggagct

SEQ ID NO: 1867670 - DNA, 15 bp, Homo sapiens
ctgttcttggagctg

SEQ ID NO: 1867671 - DNA, 15 bp, Homo sapiens
tgttcttggagctgc

SEQ ID NO: 1867672 - DNA, 15 bp, Homo sapiens
gttcttggagctgct

SEQ ID NO: 1867673 - DNA, 15 bp, Homo sapiens
ttcttggagctgctc

SEQ ID NO: 1867674 - DNA, 15 bp, Homo sapiens
tcttggagctgctct

SEQ ID NO: 1867675 - DNA, 15 bp, Homo sapiens
cttggagctgctctg

SEQ ID NO: 1867676 - DNA, 15 bp, Homo sapiens
ttggagctgctctgc

SEQ ID NO: 1867677 - DNA, 15 bp, Homo sapiens
tggagctgctctgcc

SEQ ID NO: 1867678 - DNA, 15 bp, Homo sapiens
ggagctgctctgcct

SEQ ID NO: 1867679 - DNA, 15 bp, Homo sapiens
gagctgctctgcctc

SEQ ID NO: 1867680 - DNA, 15 bp, Homo sapiens
agctgctctgcctct

SEQ ID NO: 1867681 - DNA, 15 bp, Homo sapiens
gctgctctgcctctc

SEQ ID NO: 1867682 - DNA, 15 bp, Homo sapiens
ctgctctgcctctct

SEQ ID NO: 1867683 - DNA, 15 bp, Homo sapiens
tgctctgcctctctg

SEQ ID NO: 1867684 - DNA, 15 bp, Homo sapiens
gctctgcctctctgc

SEQ ID NO: 1867685 - DNA, 15 bp, Homo sapiens
ctctgcctctctgcc

SEQ ID NO: 1867686 - DNA, 15 bp, Homo sapiens
tctgcctctctgccc

SEQ ID NO: 1867687 - DNA, 15 bp, Homo sapiens
ctgcctctctgccct

SEQ ID NO: 1867688 - DNA, 15 bp, Homo sapiens
tgcctctctgccctc

SEQ ID NO: 1867689 - DNA, 15 bp, Homo sapiens
gcctctctgccctct

SEQ ID NO: 1867690 - DNA, 15 bp, Homo sapiens
cctctctgccctctg

SEQ ID NO: 1867691 - DNA, 15 bp, Homo sapiens
ctctctgccctctgc

SEQ ID NO: 1867692 - DNA, 15 bp, Homo sapiens
tctctgccctctgcc

SEQ ID NO: 1867693 - DNA, 15 bp, Homo sapiens
ctctgccctctgcct

SEQ ID NO: 1867694 - DNA, 15 bp, Homo sapiens
tctgccctctgcctt

SEQ ID NO: 1867695 - DNA, 15 bp, Homo sapiens
ctgccctctgccttc

SEQ ID NO: 1867696 - DNA, 15 bp, Homo sapiens
tgccctctgccttca

SEQ ID NO: 1867697 - DNA, 15 bp, Homo sapiens
gccctctgccttcag

SEQ ID NO: 1867698 - DNA, 15 bp, Homo sapiens
ccctctgccttcagg

SEQ ID NO: 1867699 - DNA, 15 bp, Homo sapiens
cctctgccttcaggt

SEQ ID NO: 1867700 - DNA, 15 bp, Homo sapiens
ctctgccttcaggtg

SEQ ID NO: 1867701 - DNA, 15 bp, Homo sapiens
tctgccttcaggtgg

SEQ ID NO: 1867702 - DNA, 15 bp, Homo sapiens
ctgccttcaggtgga

SEQ ID NO: 1867703 - DNA, 15 bp, Homo sapiens
tgccttcaggtggag

SEQ ID NO: 1867704 - DNA, 15 bp, Homo sapiens
gccttcaggtggaga

SEQ ID NO: 1867705 - DNA, 15 bp, Homo sapiens
ccttcaggtggagaa

SEQ ID NO: 1867706 - DNA, 15 bp, Homo sapiens
cttcaggtggagaat

SEQ ID NO: 1867707 - DNA, 15 bp, Homo sapiens
ttcaggtggagaatg

SEQ ID NO: 1867708 - DNA, 15 bp, Homo sapiens
tcaggtggagaatgg

SEQ ID NO: 1867709 - DNA, 15 bp, Homo sapiens
caggtggagaatggt

SEQ ID NO: 1867710 - DNA, 15 bp, Homo sapiens
aggtggagaatggta

SEQ ID NO: 1867711 - DNA, 15 bp, Homo sapiens
ggtggagaatggtat

SEQ ID NO: 1867712 - DNA, 15 bp, Homo sapiens
gtggagaatggtatt

SEQ ID NO: 1867713 - DNA, 15 bp, Homo sapiens
tggagaatggtattg

SEQ ID NO: 1867714 - DNA, 15 bp, Homo sapiens
ggagaatggtattgt

SEQ ID NO: 1867715 - DNA, 15 bp, Homo sapiens
gagaatggtattgtt

SEQ ID NO: 1867716 - DNA, 15 bp, Homo sapiens
agaatggtattgttg

SEQ ID NO: 1867717 - DNA, 15 bp, Homo sapiens
gaatggtattgttga

SEQ ID NO: 1867718 - DNA, 15 bp, Homo sapiens
aatggtattgttgag

SEQ ID NO: 1867719 - DNA, 15 bp, Homo sapiens
atggtattgttgagg

SEQ ID NO: 1867720 - DNA, 15 bp, Homo sapiens
tggtattgttgaggc

SEQ ID NO: 1867721 - DNA, 15 bp, Homo sapiens
ggtattgttgaggca

SEQ ID NO: 1867722 - DNA, 15 bp, Homo sapiens
gtattgttgaggcac

SEQ ID NO: 1867723 - DNA, 15 bp, Homo sapiens
tattgttgaggcact

SEQ ID NO: 1867724 - DNA, 15 bp, Homo sapiens
attgttgaggcactg

SEQ ID NO: 1867725 - DNA, 15 bp, Homo sapiens
ttgttgaggcactga

SEQ ID NO: 1867726 - DNA, 15 bp, Homo sapiens
tgttgaggcactgag

SEQ ID NO: 1867727 - DNA, 15 bp, Homo sapiens
gttgaggcactgagc

SEQ ID NO: 1867728 - DNA, 15 bp, Homo sapiens
ttgaggcactgagca

SEQ ID NO: 1867729 - DNA, 15 bp, Homo sapiens
tgaggcactgagcaa

SEQ ID NO: 1867730 - DNA, 15 bp, Homo sapiens
gaggcactgagcaag

SEQ ID NO: 1867731 - DNA, 15 bp, Homo sapiens
aggcactgagcaagg

SEQ ID NO: 1867732 - DNA, 15 bp, Homo sapiens
ggcactgagcaaggc

SEQ ID NO: 1867733 - DNA, 15 bp, Homo sapiens
gcactgagcaaggcc

SEQ ID NO: 1867734 - DNA, 15 bp, Homo sapiens
cactgagcaaggcct

SEQ ID NO: 1867735 - DNA, 15 bp, Homo sapiens
actgagcaaggcctt

SEQ ID NO: 1867736 - DNA, 15 bp, Homo sapiens
ctgagcaaggccttt

SEQ ID NO: 1867737 - DNA, 15 bp, Homo sapiens
tgagcaaggcctttc

SEQ ID NO: 1867738 - DNA, 15 bp, Homo sapiens
gagcaaggcctttcc

SEQ ID NO: 1867739 - DNA, 15 bp, Homo sapiens
agcaaggcctttccc

SEQ ID NO: 1867740 - DNA, 15 bp, Homo sapiens
gcaaggcctttcccc

SEQ ID NO: 1867741 - DNA, 15 bp, Homo sapiens
caaggcctttccccc

SEQ ID NO: 1867742 - DNA, 15 bp, Homo sapiens
aaggcctttcccccc

SEQ ID NO: 1867743 - DNA, 15 bp, Homo sapiens
aggcctttcccccct

SEQ ID NO: 1867744 - DNA, 15 bp, Homo sapiens
ggcctttcccccctc

SEQ ID NO: 1867745 - DNA, 15 bp, Homo sapiens
gcctttcccccctcc

SEQ ID NO: 1867746 - DNA, 15 bp, Homo sapiens
cctttcccccctcct

SEQ ID NO: 1867747 - DNA, 15 bp, Homo sapiens
ctttcccccctcctc

SEQ ID NO: 1867748 - DNA, 15 bp, Homo sapiens
tttcccccctcctcc

SEQ ID NO: 1867749 - DNA, 15 bp, Homo sapiens
ttcccccctcctccc

SEQ ID NO: 1867750 - DNA, 15 bp, Homo sapiens
tcccccctcctccca

SEQ ID NO: 1867751 - DNA, 15 bp, Homo sapiens
cccccctcctcccat

SEQ ID NO: 1867752 - DNA, 15 bp, Homo sapiens
ccccctcctcccatt

SEQ ID NO: 1867753 - DNA, 15 bp, Homo sapiens
cccctcctcccattt

SEQ ID NO: 1867754 - DNA, 15 bp, Homo sapiens
ccctcctcccatttt

SEQ ID NO: 1867755 - DNA, 15 bp, Homo sapiens
cctcctcccattttt

SEQ ID NO: 1867756 - DNA, 15 bp, Homo sapiens
ctcctcccatttttc

SEQ ID NO: 1867757 - DNA, 15 bp, Homo sapiens
tcctcccatttttct

SEQ ID NO: 1867758 - DNA, 15 bp, Homo sapiens
cctcccatttttctt

SEQ ID NO: 1867759 - DNA, 15 bp, Homo sapiens
ctcccatttttcttc

SEQ ID NO: 1867760 - DNA, 15 bp, Homo sapiens
tcccatttttcttct

SEQ ID NO: 1867761 - DNA, 15 bp, Homo sapiens
cccatttttcttctt

SEQ ID NO: 1867762 - DNA, 15 bp, Homo sapiens
ccatttttcttcttt

SEQ ID NO: 1867763 - DNA, 15 bp, Homo sapiens
catttttcttctttc

SEQ ID NO: 1867764 - DNA, 15 bp, Homo sapiens
atttttcttctttct

SEQ ID NO: 1867765 - DNA, 15 bp, Homo sapiens
tttttcttctttctc

SEQ ID NO: 1867766 - DNA, 15 bp, Homo sapiens
ttttcttctttctca

SEQ ID NO: 1867767 - DNA, 15 bp, Homo sapiens
tttcttctttctcat

SEQ ID NO: 1867768 - DNA, 15 bp, Homo sapiens
ttcttctttctcatc

SEQ ID NO: 1867769 - DNA, 15 bp, Homo sapiens
tcttctttctcatct

SEQ ID NO: 1867770 - DNA, 15 bp, Homo sapiens
cttctttctcatctc

SEQ ID NO: 1867771 - DNA, 15 bp, Homo sapiens
ttctttctcatctcc

SEQ ID NO: 1867772 - DNA, 15 bp, Homo sapiens
tctttctcatctcct

SEQ ID NO: 1867773 - DNA, 15 bp, Homo sapiens
ctttctcatctcctg

SEQ ID NO: 1867774 - DNA, 15 bp, Homo sapiens
tttctcatctcctga

SEQ ID NO: 1867775 - DNA, 15 bp, Homo sapiens
ttctcatctcctgac

SEQ ID NO: 1867776 - DNA, 15 bp, Homo sapiens
tctcatctcctgacg

SEQ ID NO: 1867777 - DNA, 15 bp, Homo sapiens
ctcatctcctgacgc

SEQ ID NO: 1867778 - DNA, 15 bp, Homo sapiens
tcatctcctgacgcc

SEQ ID NO: 1867779 - DNA, 15 bp, Homo sapiens
catctcctgacgcct

SEQ ID NO: 1867780 - DNA, 15 bp, Homo sapiens
atctcctgacgcctt

SEQ ID NO: 1867781 - DNA, 15 bp, Homo sapiens
tctcctgacgccttc

SEQ ID NO: 1867782 - DNA, 15 bp, Homo sapiens
ctcctgacgccttca

SEQ ID NO: 1867783 - DNA, 15 bp, Homo sapiens
tcctgacgccttcaa

SEQ ID NO: 1867784 - DNA, 15 bp, Homo sapiens
cctgacgccttcaaa

SEQ ID NO: 1867785 - DNA, 15 bp, Homo sapiens
ctgacgccttcaaat

SEQ ID NO: 1867786 - DNA, 15 bp, Homo sapiens
tgacgccttcaaatt

SEQ ID NO: 1867787 - DNA, 15 bp, Homo sapiens
gacgccttcaaatta

SEQ ID NO: 1867788 - DNA, 15 bp, Homo sapiens
acgccttcaaattaa

SEQ ID NO: 1867789 - DNA, 15 bp, Homo sapiens
cgccttcaaattaaa

SEQ ID NO: 1867790 - DNA, 15 bp, Homo sapiens
gccttcaaattaaaa

SEQ ID NO: 1867791 - DNA, 15 bp, Homo sapiens
ccttcaaattaaaaa

SEQ ID NO: 1867792 - DNA, 15 bp, Homo sapiens
cttcaaattaaaaat

SEQ ID NO: 1867793 - DNA, 15 bp, Homo sapiens
ttcaaattaaaaatt

SEQ ID NO: 1867794 - DNA, 15 bp, Homo sapiens
tcaaattaaaaattt

SEQ ID NO: 1867795 - DNA, 15 bp, Homo sapiens
caaattaaaaattta

SEQ ID NO: 1867796 - DNA, 15 bp, Homo sapiens
aaattaaaaatttaa

SEQ ID NO: 1867797 - DNA, 15 bp, Homo sapiens
aattaaaaatttaag

SEQ ID NO: 1867798 - DNA, 15 bp, Homo sapiens
attaaaaatttaaga

SEQ ID NO: 1867799 - DNA, 15 bp, Homo sapiens
ttaaaaatttaagaa

SEQ ID NO: 1867800 - DNA, 15 bp, Homo sapiens
taaaaatttaagaag

SEQ ID NO: 1867801 - DNA, 15 bp, Homo sapiens
aaaaatttaagaagg

SEQ ID NO: 1867802 - DNA, 15 bp, Homo sapiens
aaaatttaagaaggg

SEQ ID NO: 1867803 - DNA, 15 bp, Homo sapiens
aaatttaagaagggg

SEQ ID NO: 1867804 - DNA, 15 bp, Homo sapiens
aatttaagaaggggt

SEQ ID NO: 1867805 - DNA, 15 bp, Homo sapiens
atttaagaaggggtc

SEQ ID NO: 1867806 - DNA, 15 bp, Homo sapiens
tttaagaaggggtct

SEQ ID NO: 1867807 - DNA, 15 bp, Homo sapiens
ttaagaaggggtctg

SEQ ID NO: 1867808 - DNA, 15 bp, Homo sapiens
taagaaggggtctgg

SEQ ID NO: 1867809 - DNA, 15 bp, Homo sapiens
aagaaggggtctggg

SEQ ID NO: 1867810 - DNA, 15 bp, Homo sapiens
agaaggggtctgggt

SEQ ID NO: 1867811 - DNA, 15 bp, Homo sapiens
gaaggggtctgggtg

SEQ ID NO: 1867812 - DNA, 15 bp, Homo sapiens
aaggggtctgggtgc

SEQ ID NO: 1867813 - DNA, 15 bp, Homo sapiens
aggggtctgggtgcg

SEQ ID NO: 1867814 - DNA, 15 bp, Homo sapiens
ggggtctgggtgcgg

SEQ ID NO: 1867815 - DNA, 15 bp, Homo sapiens
gggtctgggtgcggc

SEQ ID NO: 1867816 - DNA, 15 bp, Homo sapiens
ggtctgggtgcggcg

SEQ ID NO: 1867817 - DNA, 15 bp, Homo sapiens
gtctgggtgcggcgg

SEQ ID NO: 1867818 - DNA, 15 bp, Homo sapiens
tctgggtgcggcggc

SEQ ID NO: 1867819 - DNA, 15 bp, Homo sapiens
ctgggtgcggcggct

SEQ ID NO: 1867820 - DNA, 15 bp, Homo sapiens
tgggtgcggcggctc

SEQ ID NO: 1867821 - DNA, 15 bp, Homo sapiens
gggtgcggcggctca

SEQ ID NO: 1867822 - DNA, 15 bp, Homo sapiens
ggtgcggcggctcac

SEQ ID NO: 1867823 - DNA, 15 bp, Homo sapiens
gtgcggcggctcacg

SEQ ID NO: 1867824 - DNA, 15 bp, Homo sapiens
tgcggcggctcacgc

SEQ ID NO: 1867825 - DNA, 15 bp, Homo sapiens
gcggcggctcacgcc

SEQ ID NO: 1867826 - DNA, 15 bp, Homo sapiens
ggcggctcacgccta

SEQ ID NO: 1867827 - DNA, 15 bp, Homo sapiens
gcggctcacgcctat

SEQ ID NO: 1867828 - DNA, 15 bp, Homo sapiens
cggctcacgcctata

SEQ ID NO: 1867829 - DNA, 15 bp, Homo sapiens
tgggaggctgaggct

SEQ ID NO: 1867830 - DNA, 15 bp, Homo sapiens
gggaggctgaggctg

SEQ ID NO: 1867831 - DNA, 15 bp, Homo sapiens
ggaggctgaggctgg

SEQ ID NO: 1867832 - DNA, 15 bp, Homo sapiens
gaggctgaggctggc

SEQ ID NO: 1867833 - DNA, 15 bp, Homo sapiens
aggctgaggctggcg

SEQ ID NO: 1867834 - DNA, 15 bp, Homo sapiens
ggctgaggctggcgg

SEQ ID NO: 1867835 - DNA, 15 bp, Homo sapiens
gctgaggctggcgga

SEQ ID NO: 1867836 - DNA, 15 bp, Homo sapiens
ctgaggctggcggat

SEQ ID NO: 1867837 - DNA, 15 bp, Homo sapiens
tgaggctggcggatc

SEQ ID NO: 1867838 - DNA, 15 bp, Homo sapiens
ggctggcggatcacg

SEQ ID NO: 1867839 - DNA, 15 bp, Homo sapiens
aaaaaaagaaaaaca

SEQ ID NO: 1867840 - DNA, 15 bp, Homo sapiens
aaaaaagaaaaacat

SEQ ID NO: 1867841 - DNA, 15 bp, Homo sapiens
aaaaagaaaaacatt

SEQ ID NO: 1867842 - DNA, 15 bp, Homo sapiens
aaaagaaaaacattt

SEQ ID NO: 1867843 - DNA, 15 bp, Homo sapiens
aaagaaaaacattta

SEQ ID NO: 1867844 - DNA, 15 bp, Homo sapiens
aagaaaaacatttaa

SEQ ID NO: 1867845 - DNA, 15 bp, Homo sapiens
agaaaaacatttaag

SEQ ID NO: 1867846 - DNA, 15 bp, Homo sapiens
gaaaaacatttaaga

SEQ ID NO: 1867847 - DNA, 15 bp, Homo sapiens
aaaaacatttaagaa

SEQ ID NO: 1867848 - DNA, 15 bp, Homo sapiens
aaaacatttaagaag

SEQ ID NO: 1867849 - DNA, 15 bp, Homo sapiens
aaacatttaagaagg

SEQ ID NO: 1867850 - DNA, 15 bp, Homo sapiens
aacatttaagaaggg

SEQ ID NO: 1867851 - DNA, 15 bp, Homo sapiens
acatttaagaagggg

SEQ ID NO: 1867852 - DNA, 15 bp, Homo sapiens
catttaagaagggga

SEQ ID NO: 1867853 - DNA, 15 bp, Homo sapiens
atttaagaaggggaa

SEQ ID NO: 1867854 - DNA, 15 bp, Homo sapiens
tttaagaaggggaaa

SEQ ID NO: 1867855 - DNA, 15 bp, Homo sapiens
ttaagaaggggaaaa

SEQ ID NO: 1867856 - DNA, 15 bp, Homo sapiens
taagaaggggaaaat

SEQ ID NO: 1867857 - DNA, 15 bp, Homo sapiens
aagaaggggaaaatt

SEQ ID NO: 1867858 - DNA, 15 bp, Homo sapiens
agaaggggaaaattc

SEQ ID NO: 1867859 - DNA, 15 bp, Homo sapiens
gaaggggaaaattcc

SEQ ID NO: 1867860 - DNA, 15 bp, Homo sapiens
aaggggaaaattcct

SEQ ID NO: 1867861 - DNA, 15 bp, Homo sapiens
aggggaaaattcctt

SEQ ID NO: 1867862 - DNA, 15 bp, Homo sapiens
ggggaaaattccttg

SEQ ID NO: 1867863 - DNA, 15 bp, Homo sapiens
gggaaaattccttgc

SEQ ID NO: 1867864 - DNA, 15 bp, Homo sapiens
ggaaaattccttgct

SEQ ID NO: 1867865 - DNA, 15 bp, Homo sapiens
gaaaattccttgctt

SEQ ID NO: 1867866 - DNA, 15 bp, Homo sapiens
aaaattccttgctta

SEQ ID NO: 1867867 - DNA, 15 bp, Homo sapiens
aaattccttgcttaa

SEQ ID NO: 1867868 - DNA, 15 bp, Homo sapiens
aattccttgcttaac

SEQ ID NO: 1867869 - DNA, 15 bp, Homo sapiens
attccttgcttaacc

SEQ ID NO: 1867870 - DNA, 15 bp, Homo sapiens
ttccttgcttaacct

SEQ ID NO: 1867871 - DNA, 15 bp, Homo sapiens
tccttgcttaaccta

SEQ ID NO: 1867872 - DNA, 15 bp, Homo sapiens
ccttgcttaacctaa

SEQ ID NO: 1867873 - DNA, 15 bp, Homo sapiens
cttgcttaacctaaa

SEQ ID NO: 1867874 - DNA, 15 bp, Homo sapiens
ttgcttaacctaaaa

SEQ ID NO: 1867875 - DNA, 15 bp, Homo sapiens
tgcttaacctaaaat

SEQ ID NO: 1867876 - DNA, 15 bp, Homo sapiens
gcttaacctaaaatg

SEQ ID NO: 1867877 - DNA, 15 bp, Homo sapiens
cttaacctaaaatgt

SEQ ID NO: 1867878 - DNA, 15 bp, Homo sapiens
ttaacctaaaatgtg

SEQ ID NO: 1867879 - DNA, 15 bp, Homo sapiens
taacctaaaatgtgg

SEQ ID NO: 1867880 - DNA, 15 bp, Homo sapiens
aacctaaaatgtggc

SEQ ID NO: 1867881 - DNA, 15 bp, Homo sapiens
acctaaaatgtggcc

SEQ ID NO: 1867882 - DNA, 15 bp, Homo sapiens
cctaaaatgtggcct

SEQ ID NO: 1867883 - DNA, 15 bp, Homo sapiens
ctaaaatgtggcctt

SEQ ID NO: 1867884 - DNA, 15 bp, Homo sapiens
taaaatgtggccttg

SEQ ID NO: 1867885 - DNA, 15 bp, Homo sapiens
aaaatgtggccttga

SEQ ID NO: 1867886 - DNA, 15 bp, Homo sapiens
aaatgtggccttgag

SEQ ID NO: 1867887 - DNA, 15 bp, Homo sapiens
aatgtggccttgagg

SEQ ID NO: 1867888 - DNA, 15 bp, Homo sapiens
atgtggccttgaggc

SEQ ID NO: 1867889 - DNA, 15 bp, Homo sapiens
tgtggccttgaggcc

SEQ ID NO: 1867890 - DNA, 15 bp, Homo sapiens
gtggccttgaggcct

SEQ ID NO: 1867891 - DNA, 15 bp, Homo sapiens
tggccttgaggcctg

SEQ ID NO: 1867892 - DNA, 15 bp, Homo sapiens
ggccttgaggcctgg

SEQ ID NO: 1867893 - DNA, 15 bp, Homo sapiens
gccttgaggcctggt

SEQ ID NO: 1867894 - DNA, 15 bp, Homo sapiens
cttgaggcctggtca

SEQ ID NO: 1867895 - DNA, 15 bp, Homo sapiens
ttgaggcctggtcac

SEQ ID NO: 1867896 - DNA, 15 bp, Homo sapiens
tgaggcctggtcacc

SEQ ID NO: 1867897 - DNA, 15 bp, Homo sapiens
gaggcctggtcaccc

SEQ ID NO: 1867898 - DNA, 15 bp, Homo sapiens
aggcctggtcaccct

SEQ ID NO: 1867899 - DNA, 15 bp, Homo sapiens
ggcctggtcaccctg

SEQ ID NO: 1867900 - DNA, 15 bp, Homo sapiens
gcctggtcaccctgt

SEQ ID NO: 1867901 - DNA, 15 bp, Homo sapiens
cctggtcaccctgtg

SEQ ID NO: 1867902 - DNA, 15 bp, Homo sapiens
ctggtcaccctgtgc

SEQ ID NO: 1867903 - DNA, 15 bp, Homo sapiens
tggtcaccctgtgcc

SEQ ID NO: 1867904 - DNA, 15 bp, Homo sapiens
ggtcaccctgtgcca

SEQ ID NO: 1867905 - DNA, 15 bp, Homo sapiens
gtcaccctgtgccat

SEQ ID NO: 1867906 - DNA, 15 bp, Homo sapiens
tcaccctgtgccatt

SEQ ID NO: 1867907 - DNA, 15 bp, Homo sapiens
caccctgtgccattg

SEQ ID NO: 1867908 - DNA, 15 bp, Homo sapiens
accctgtgccattga

SEQ ID NO: 1867909 - DNA, 15 bp, Homo sapiens
ccctgtgccattgag

SEQ ID NO: 1867910 - DNA, 15 bp, Homo sapiens
cctgtgccattgaga

SEQ ID NO: 1867911 - DNA, 15 bp, Homo sapiens
ctgtgccattgagac

SEQ ID NO: 1867912 - DNA, 15 bp, Homo sapiens
tgtgccattgagacc

SEQ ID NO: 1867913 - DNA, 15 bp, Homo sapiens
gtgccattgagacct

SEQ ID NO: 1867914 - DNA, 15 bp, Homo sapiens
tgccattgagacctg

SEQ ID NO: 1867915 - DNA, 15 bp, Homo sapiens
gccattgagacctgg

SEQ ID NO: 1867916 - DNA, 15 bp, Homo sapiens
ccattgagacctggg

SEQ ID NO: 1867917 - DNA, 15 bp, Homo sapiens
cattgagacctgggg

SEQ ID NO: 1867918 - DNA, 15 bp, Homo sapiens
attgagacctggggt

SEQ ID NO: 1867919 - DNA, 15 bp, Homo sapiens
ttgagacctggggtg

SEQ ID NO: 1867920 - DNA, 15 bp, Homo sapiens
tgagacctggggtgt

SEQ ID NO: 1867921 - DNA, 15 bp, Homo sapiens
gagacctggggtgtg

SEQ ID NO: 1867922 - DNA, 15 bp, Homo sapiens
agacctggggtgtga

SEQ ID NO: 1867923 - DNA, 15 bp, Homo sapiens
gacctggggtgtgag

SEQ ID NO: 1867924 - DNA, 15 bp, Homo sapiens
acctggggtgtgagg

SEQ ID NO: 1867925 - DNA, 15 bp, Homo sapiens
cctggggtgtgaggt

SEQ ID NO: 1867926 - DNA, 15 bp, Homo sapiens
ctggggtgtgaggtt

SEQ ID NO: 1867927 - DNA, 15 bp, Homo sapiens
tggggtgtgaggttc

SEQ ID NO: 1867928 - DNA, 15 bp, Homo sapiens
ggggtgtgaggttca

SEQ ID NO: 1867929 - DNA, 15 bp, Homo sapiens
gggtgtgaggttcat

SEQ ID NO: 1867930 - DNA, 15 bp, Homo sapiens
ggtgtgaggttcatt

SEQ ID NO: 1867931 - DNA, 15 bp, Homo sapiens
gtgtgaggttcattc

SEQ ID NO: 1867932 - DNA, 15 bp, Homo sapiens
tgtgaggttcattca

SEQ ID NO: 1867933 - DNA, 15 bp, Homo sapiens
gtgaggttcattcac

SEQ ID NO: 1867934 - DNA, 15 bp, Homo sapiens
tgaggttcattcacg

SEQ ID NO: 1867935 - DNA, 15 bp, Homo sapiens
gaggttcattcacga

SEQ ID NO: 1867936 - DNA, 15 bp, Homo sapiens
aggttcattcacgag

SEQ ID NO: 1867937 - DNA, 15 bp, Homo sapiens
ggttcattcacgagc

SEQ ID NO: 1867938 - DNA, 15 bp, Homo sapiens
gttcattcacgagcc

SEQ ID NO: 1867939 - DNA, 15 bp, Homo sapiens
ttcattcacgagcct

SEQ ID NO: 1867940 - DNA, 15 bp, Homo sapiens
tcattcacgagcctc

SEQ ID NO: 1867941 - DNA, 15 bp, Homo sapiens
cattcacgagcctct

SEQ ID NO: 1867942 - DNA, 15 bp, Homo sapiens
attcacgagcctctg

SEQ ID NO: 1867943 - DNA, 15 bp, Homo sapiens
ttcacgagcctctgg

SEQ ID NO: 1867944 - DNA, 15 bp, Homo sapiens
tcacgagcctctggt

SEQ ID NO: 1867945 - DNA, 15 bp, Homo sapiens
cacgagcctctggtc

SEQ ID NO: 1867946 - DNA, 15 bp, Homo sapiens
acgagcctctggtct

SEQ ID NO: 1867947 - DNA, 15 bp, Homo sapiens
cgagcctctggtctc

SEQ ID NO: 1867948 - DNA, 15 bp, Homo sapiens
gagcctctggtctcc

SEQ ID NO: 1867949 - DNA, 15 bp, Homo sapiens
agcctctggtctcct

SEQ ID NO: 1867950 - DNA, 15 bp, Homo sapiens
gcctctggtctcctg

SEQ ID NO: 1867951 - DNA, 15 bp, Homo sapiens
cctctggtctcctgg

SEQ ID NO: 1867952 - DNA, 15 bp, Homo sapiens
ctctggtctcctgga

SEQ ID NO: 1867953 - DNA, 15 bp, Homo sapiens
tctggtctcctggaa

SEQ ID NO: 1867954 - DNA, 15 bp, Homo sapiens
ctggtctcctggaag

SEQ ID NO: 1867955 - DNA, 15 bp, Homo sapiens
tggtctcctggaagg

SEQ ID NO: 1867956 - DNA, 15 bp, Homo sapiens
ggtctcctggaaggg

SEQ ID NO: 1867957 - DNA, 15 bp, Homo sapiens
gtctcctggaagggt

SEQ ID NO: 1867958 - DNA, 15 bp, Homo sapiens
tctcctggaagggtc

SEQ ID NO: 1867959 - DNA, 15 bp, Homo sapiens
ctcctggaagggtct

SEQ ID NO: 1867960 - DNA, 15 bp, Homo sapiens
tcctggaagggtctg

SEQ ID NO: 1867961 - DNA, 15 bp, Homo sapiens
cctggaagggtctgg

SEQ ID NO: 1867962 - DNA, 15 bp, Homo sapiens
ctggaagggtctggt

SEQ ID NO: 1867963 - DNA, 15 bp, Homo sapiens
tggaagggtctggtc

SEQ ID NO: 1867964 - DNA, 15 bp, Homo sapiens
ggaagggtctggtct

SEQ ID NO: 1867965 - DNA, 15 bp, Homo sapiens
gaagggtctggtctg

SEQ ID NO: 1867966 - DNA, 15 bp, Homo sapiens
aagggtctggtctgt

SEQ ID NO: 1867967 - DNA, 15 bp, Homo sapiens
agggtctggtctgtt

SEQ ID NO: 1867968 - DNA, 15 bp, Homo sapiens
gggtctggtctgttc

SEQ ID NO: 1867969 - DNA, 15 bp, Homo sapiens
ggtctggtctgttca

SEQ ID NO: 1867970 - DNA, 15 bp, Homo sapiens
gtctggtctgttcat

SEQ ID NO: 1867971 - DNA, 15 bp, Homo sapiens
tctggtctgttcatt

SEQ ID NO: 1867972 - DNA, 15 bp, Homo sapiens
ctggtctgttcattc

SEQ ID NO: 1867973 - DNA, 15 bp, Homo sapiens
tggtctgttcattca

SEQ ID NO: 1867974 - DNA, 15 bp, Homo sapiens
ggtctgttcattcat

SEQ ID NO: 1867975 - DNA, 15 bp, Homo sapiens
gtctgttcattcatg

SEQ ID NO: 1867976 - DNA, 15 bp, Homo sapiens
tctgttcattcatga

SEQ ID NO: 1867977 - DNA, 15 bp, Homo sapiens
ctgttcattcatgag

SEQ ID NO: 1867978 - DNA, 15 bp, Homo sapiens
tgttcattcatgagc

SEQ ID NO: 1867979 - DNA, 15 bp, Homo sapiens
gttcattcatgagca

SEQ ID NO: 1867980 - DNA, 15 bp, Homo sapiens
ttcattcatgagcag

SEQ ID NO: 1867981 - DNA, 15 bp, Homo sapiens
tcattcatgagcagg

SEQ ID NO: 1867982 - DNA, 15 bp, Homo sapiens
cattcatgagcaggg

SEQ ID NO: 1867983 - DNA, 15 bp, Homo sapiens
attcatgagcagggt

SEQ ID NO: 1867984 - DNA, 15 bp, Homo sapiens
ttcatgagcagggta

SEQ ID NO: 1867985 - DNA, 15 bp, Homo sapiens
tcatgagcagggtaa

SEQ ID NO: 1867986 - DNA, 15 bp, Homo sapiens
catgagcagggtaat

SEQ ID NO: 1867987 - DNA, 15 bp, Homo sapiens
atgagcagggtaatt

SEQ ID NO: 1867988 - DNA, 15 bp, Homo sapiens
tgagcagggtaatta

SEQ ID NO: 1867989 - DNA, 15 bp, Homo sapiens
gagcagggtaattaa

SEQ ID NO: 1867990 - DNA, 15 bp, Homo sapiens
agcagggtaattaaa

SEQ ID NO: 1867991 - DNA, 15 bp, Homo sapiens
gcagggtaattaaat

SEQ ID NO: 1867992 - DNA, 15 bp, Homo sapiens
cagggtaattaaata

SEQ ID NO: 1867993 - DNA, 15 bp, Homo sapiens
agggtaattaaataa

SEQ ID NO: 1867994 - DNA, 15 bp, Homo sapiens
gggtaattaaataac

SEQ ID NO: 1867995 - DNA, 15 bp, Homo sapiens
ggtaattaaataact

SEQ ID NO: 1867996 - DNA, 15 bp, Homo sapiens
gtaattaaataactc

SEQ ID NO: 1867997 - DNA, 15 bp, Homo sapiens
taattaaataactct

SEQ ID NO: 1867998 - DNA, 15 bp, Homo sapiens
aattaaataactctt

SEQ ID NO: 1867999 - DNA, 15 bp, Homo sapiens
attaaataactcttt

SEQ ID NO: 1868000 - DNA, 15 bp, Homo sapiens
ttaaataactctttg

SEQ ID NO: 1868001 - DNA, 15 bp, Homo sapiens
taaataactctttgt

SEQ ID NO: 1868002 - DNA, 15 bp, Homo sapiens
aaataactctttgta

SEQ ID NO: 1868003 - DNA, 15 bp, Homo sapiens
aataactctttgtaa

SEQ ID NO: 1868004 - DNA, 15 bp, Homo sapiens
ataactctttgtaag

SEQ ID NO: 1868005 - DNA, 15 bp, Homo sapiens
taactctttgtaaga

SEQ ID NO: 1868006 - DNA, 15 bp, Homo sapiens
aactctttgtaagag

SEQ ID NO: 1868007 - DNA, 15 bp, Homo sapiens
actctttgtaagagt

SEQ ID NO: 1868008 - DNA, 15 bp, Homo sapiens
ctctttgtaagagtc

SEQ ID NO: 1868009 - DNA, 15 bp, Homo sapiens
tctttgtaagagtca

SEQ ID NO: 1868010 - DNA, 15 bp, Homo sapiens
ctttgtaagagtcag

SEQ ID NO: 1868011 - DNA, 15 bp, Homo sapiens
tttgtaagagtcagg

SEQ ID NO: 1868012 - DNA, 15 bp, Homo sapiens
ttgtaagagtcaggg

SEQ ID NO: 1868013 - DNA, 15 bp, Homo sapiens
tgtaagagtcaggga

SEQ ID NO: 1868014 - DNA, 15 bp, Homo sapiens
gtaagagtcagggag

SEQ ID NO: 1868015 - DNA, 15 bp, Homo sapiens
taagagtcagggagc

SEQ ID NO: 1868016 - DNA, 15 bp, Homo sapiens
aagagtcagggagct

SEQ ID NO: 1868017 - DNA, 15 bp, Homo sapiens
agagtcagggagctc

SEQ ID NO: 1868018 - DNA, 15 bp, Homo sapiens
gagtcagggagctcc

SEQ ID NO: 1868019 - DNA, 15 bp, Homo sapiens
agtcagggagctcct

SEQ ID NO: 1868020 - DNA, 15 bp, Homo sapiens
gtcagggagctcctt

SEQ ID NO: 1868021 - DNA, 15 bp, Homo sapiens
tcagggagctccttg

SEQ ID NO: 1868022 - DNA, 15 bp, Homo sapiens
cagggagctccttgc

SEQ ID NO: 1868023 - DNA, 15 bp, Homo sapiens
agggagctccttgct

SEQ ID NO: 1868024 - DNA, 15 bp, Homo sapiens
gggagctccttgcta

SEQ ID NO: 1868025 - DNA, 15 bp, Homo sapiens
ggagctccttgctaa

SEQ ID NO: 1868026 - DNA, 15 bp, Homo sapiens
gagctccttgctaag

SEQ ID NO: 1868027 - DNA, 15 bp, Homo sapiens
agctccttgctaagt

SEQ ID NO: 1868028 - DNA, 15 bp, Homo sapiens
gctccttgctaagtg

SEQ ID NO: 1868029 - DNA, 15 bp, Homo sapiens
ctccttgctaagtgg

SEQ ID NO: 1868030 - DNA, 15 bp, Homo sapiens
tccttgctaagtggt

SEQ ID NO: 1868031 - DNA, 15 bp, Homo sapiens
ccttgctaagtggtc

SEQ ID NO: 1868032 - DNA, 15 bp, Homo sapiens
cttgctaagtggtct

SEQ ID NO: 1868033 - DNA, 15 bp, Homo sapiens
ttgctaagtggtctt

SEQ ID NO: 1868034 - DNA, 15 bp, Homo sapiens
tgctaagtggtcttc

SEQ ID NO: 1868035 - DNA, 15 bp, Homo sapiens
gctaagtggtcttcc

SEQ ID NO: 1868036 - DNA, 15 bp, Homo sapiens
ctaagtggtcttccc

SEQ ID NO: 1868037 - DNA, 15 bp, Homo sapiens
taagtggtcttcccc

SEQ ID NO: 1868038 - DNA, 15 bp, Homo sapiens
aagtggtcttcccca

SEQ ID NO: 1868039 - DNA, 15 bp, Homo sapiens
agtggtcttccccag

SEQ ID NO: 1868040 - DNA, 15 bp, Homo sapiens
gtggtcttccccagt

SEQ ID NO: 1868041 - DNA, 15 bp, Homo sapiens
tggtcttccccagtt

SEQ ID NO: 1868042 - DNA, 15 bp, Homo sapiens
ggtcttccccagttg

SEQ ID NO: 1868043 - DNA, 15 bp, Homo sapiens
gtcttccccagttgg

SEQ ID NO: 1868044 - DNA, 15 bp, Homo sapiens
tcttccccagttgga

SEQ ID NO: 1868045 - DNA, 15 bp, Homo sapiens
cttccccagttggag

SEQ ID NO: 1868046 - DNA, 15 bp, Homo sapiens
ttccccagttggagc

SEQ ID NO: 1868047 - DNA, 15 bp, Homo sapiens
tccccagttggagcg

SEQ ID NO: 1868048 - DNA, 15 bp, Homo sapiens
ccccagttggagcgc

SEQ ID NO: 1868049 - DNA, 15 bp, Homo sapiens
cccagttggagcgca

SEQ ID NO: 1868050 - DNA, 15 bp, Homo sapiens
ccagttggagcgcaa

SEQ ID NO: 1868051 - DNA, 15 bp, Homo sapiens
cagttggagcgcaaa

SEQ ID NO: 1868052 - DNA, 15 bp, Homo sapiens
agttggagcgcaaac

SEQ ID NO: 1868053 - DNA, 15 bp, Homo sapiens
gttggagcgcaaaca

SEQ ID NO: 1868054 - DNA, 15 bp, Homo sapiens
ttggagcgcaaacac

SEQ ID NO: 1868055 - DNA, 15 bp, Homo sapiens
tggagcgcaaacaca

SEQ ID NO: 1868056 - DNA, 15 bp, Homo sapiens
ggagcgcaaacacag

SEQ ID NO: 1868057 - DNA, 15 bp, Homo sapiens
gagcgcaaacacagg

SEQ ID NO: 1868058 - DNA, 15 bp, Homo sapiens
agcgcaaacacaggc

SEQ ID NO: 1868059 - DNA, 15 bp, Homo sapiens
gcgcaaacacaggct

SEQ ID NO: 1868060 - DNA, 15 bp, Homo sapiens
cgcaaacacaggctg

SEQ ID NO: 1868061 - DNA, 15 bp, Homo sapiens
gcaaacacaggctga

SEQ ID NO: 1868062 - DNA, 15 bp, Homo sapiens
caaacacaggctgaa

SEQ ID NO: 1868063 - DNA, 15 bp, Homo sapiens
aaacacaggctgaag

SEQ ID NO: 1868064 - DNA, 15 bp, Homo sapiens
aacacaggctgaagt

SEQ ID NO: 1868065 - DNA, 15 bp, Homo sapiens
acacaggctgaagtc

SEQ ID NO: 1868066 - DNA, 15 bp, Homo sapiens
cacaggctgaagtcc

SEQ ID NO: 1868067 - DNA, 15 bp, Homo sapiens
acaggctgaagtcct

SEQ ID NO: 1868068 - DNA, 15 bp, Homo sapiens
caggctgaagtcctc

SEQ ID NO: 1868069 - DNA, 15 bp, Homo sapiens
aggctgaagtcctct

SEQ ID NO: 1868070 - DNA, 15 bp, Homo sapiens
ggctgaagtcctctc

SEQ ID NO: 1868071 - DNA, 15 bp, Homo sapiens
gctgaagtcctctcc

SEQ ID NO: 1868072 - DNA, 15 bp, Homo sapiens
ctgaagtcctctcct

SEQ ID NO: 1868073 - DNA, 15 bp, Homo sapiens
tgaagtcctctcctt

SEQ ID NO: 1868074 - DNA, 15 bp, Homo sapiens
gaagtcctctccttt

SEQ ID NO: 1868075 - DNA, 15 bp, Homo sapiens
aagtcctctcctttc

SEQ ID NO: 1868076 - DNA, 15 bp, Homo sapiens
agtcctctcctttct

SEQ ID NO: 1868077 - DNA, 15 bp, Homo sapiens
gtcctctcctttctc

SEQ ID NO: 1868078 - DNA, 15 bp, Homo sapiens
tcctctcctttctca

SEQ ID NO: 1868079 - DNA, 15 bp, Homo sapiens
cctctcctttctcaa

SEQ ID NO: 1868080 - DNA, 15 bp, Homo sapiens
ctctcctttctcaac

SEQ ID NO: 1868081 - DNA, 15 bp, Homo sapiens
tctcctttctcaaca

SEQ ID NO: 1868082 - DNA, 15 bp, Homo sapiens
ctcctttctcaacac

SEQ ID NO: 1868083 - DNA, 15 bp, Homo sapiens
tcctttctcaacacc

SEQ ID NO: 1868084 - DNA, 15 bp, Homo sapiens
cctttctcaacaccc

SEQ ID NO: 1868085 - DNA, 15 bp, Homo sapiens
ctttctcaacaccca

SEQ ID NO: 1868086 - DNA, 15 bp, Homo sapiens
tttctcaacacccac

SEQ ID NO: 1868087 - DNA, 15 bp, Homo sapiens
ttctcaacacccacc

SEQ ID NO: 1868088 - DNA, 15 bp, Homo sapiens
tctcaacacccacct

SEQ ID NO: 1868089 - DNA, 15 bp, Homo sapiens
ctcaacacccacctc

SEQ ID NO: 1868090 - DNA, 15 bp, Homo sapiens
tcaacacccacctcc

SEQ ID NO: 1868091 - DNA, 15 bp, Homo sapiens
caacacccacctccc

SEQ ID NO: 1868092 - DNA, 15 bp, Homo sapiens
aacacccacctcccc

SEQ ID NO: 1868093 - DNA, 15 bp, Homo sapiens
acacccacctccccc

SEQ ID NO: 1868094 - DNA, 15 bp, Homo sapiens
cacccacctccccct

SEQ ID NO: 1868095 - DNA, 15 bp, Homo sapiens
acccacctccccctt

SEQ ID NO: 1868096 - DNA, 15 bp, Homo sapiens
cccacctcccccttc

SEQ ID NO: 1868097 - DNA, 15 bp, Homo sapiens
ccacctcccccttcc

SEQ ID NO: 1868098 - DNA, 15 bp, Homo sapiens
cacctcccccttccc

SEQ ID NO: 1868099 - DNA, 15 bp, Homo sapiens
acctcccccttccct

SEQ ID NO: 1868100 - DNA, 15 bp, Homo sapiens
cctcccccttccctt

SEQ ID NO: 1868101 - DNA, 15 bp, Homo sapiens
ctcccccttcccttt

SEQ ID NO: 1868102 - DNA, 15 bp, Homo sapiens
tcccccttcccttta

SEQ ID NO: 1868103 - DNA, 15 bp, Homo sapiens
cccccttccctttaa

SEQ ID NO: 1868104 - DNA, 15 bp, Homo sapiens
ccccttccctttaaa

SEQ ID NO: 1868105 - DNA, 15 bp, Homo sapiens
cccttccctttaaag

SEQ ID NO: 1868106 - DNA, 15 bp, Homo sapiens
ccttccctttaaagg

SEQ ID NO: 1868107 - DNA, 15 bp, Homo sapiens
cttccctttaaaggg

SEQ ID NO: 1868108 - DNA, 15 bp, Homo sapiens
ttccctttaaaggga

SEQ ID NO: 1868109 - DNA, 15 bp, Homo sapiens
tccctttaaagggag

SEQ ID NO: 1868110 - DNA, 15 bp, Homo sapiens
ccctttaaagggagg

SEQ ID NO: 1868111 - DNA, 15 bp, Homo sapiens
cctttaaagggagga

SEQ ID NO: 1868112 - DNA, 15 bp, Homo sapiens
ctttaaagggaggat

SEQ ID NO: 1868113 - DNA, 15 bp, Homo sapiens
tttaaagggaggatt

SEQ ID NO: 1868114 - DNA, 15 bp, Homo sapiens
ttaaagggaggattt

SEQ ID NO: 1868115 - DNA, 15 bp, Homo sapiens
taaagggaggatttt

SEQ ID NO: 1868116 - DNA, 15 bp, Homo sapiens
aaagggaggatttta

SEQ ID NO: 1868117 - DNA, 15 bp, Homo sapiens
aagggaggattttat

SEQ ID NO: 1868118 - DNA, 15 bp, Homo sapiens
agggaggattttatg

SEQ ID NO: 1868119 - DNA, 15 bp, Homo sapiens
gggaggattttatgc

SEQ ID NO: 1868120 - DNA, 15 bp, Homo sapiens
ggaggattttatgct

SEQ ID NO: 1868121 - DNA, 15 bp, Homo sapiens
gaggattttatgctt

SEQ ID NO: 1868122 - DNA, 15 bp, Homo sapiens
aggattttatgcttt

SEQ ID NO: 1868123 - DNA, 15 bp, Homo sapiens
ggattttatgcttta

SEQ ID NO: 1868124 - DNA, 15 bp, Homo sapiens
gattttatgctttaa

SEQ ID NO: 1868125 - DNA, 15 bp, Homo sapiens
attttatgctttaag

SEQ ID NO: 1868126 - DNA, 15 bp, Homo sapiens
ttttatgctttaagg

SEQ ID NO: 1868127 - DNA, 15 bp, Homo sapiens
tttatgctttaaggg

SEQ ID NO: 1868128 - DNA, 15 bp, Homo sapiens
ttatgctttaaggga

SEQ ID NO: 1868129 - DNA, 15 bp, Homo sapiens
tatgctttaagggaa

SEQ ID NO: 1868130 - DNA, 15 bp, Homo sapiens
atgctttaagggaaa

SEQ ID NO: 1868131 - DNA, 15 bp, Homo sapiens
tgctttaagggaaat

SEQ ID NO: 1868132 - DNA, 15 bp, Homo sapiens
gctttaagggaaatg

SEQ ID NO: 1868133 - DNA, 15 bp, Homo sapiens
ctttaagggaaatgg

SEQ ID NO: 1868134 - DNA, 15 bp, Homo sapiens
tttaagggaaatggg

SEQ ID NO: 1868135 - DNA, 15 bp, Homo sapiens
ttaagggaaatgggg

SEQ ID NO: 1868136 - DNA, 15 bp, Homo sapiens
taagggaaatgggga

SEQ ID NO: 1868137 - DNA, 15 bp, Homo sapiens
aagggaaatggggaa

SEQ ID NO: 1868138 - DNA, 15 bp, Homo sapiens
agggaaatggggaag

SEQ ID NO: 1868139 - DNA, 15 bp, Homo sapiens
gggaaatggggaagg

SEQ ID NO: 1868140 - DNA, 15 bp, Homo sapiens
ggaaatggggaaggt

SEQ ID NO: 1868141 - DNA, 15 bp, Homo sapiens
gaaatggggaaggtt

SEQ ID NO: 1868142 - DNA, 15 bp, Homo sapiens
aaatggggaaggttg

SEQ ID NO: 1868143 - DNA, 15 bp, Homo sapiens
aatggggaaggttgg

SEQ ID NO: 1868144 - DNA, 15 bp, Homo sapiens
atggggaaggttggg

SEQ ID NO: 1868145 - DNA, 15 bp, Homo sapiens
tggggaaggttgggg

SEQ ID NO: 1868146 - DNA, 15 bp, Homo sapiens
ggggaaggttggggg

SEQ ID NO: 1868147 - DNA, 15 bp, Homo sapiens
gggaaggttgggggg

SEQ ID NO: 1868148 - DNA, 15 bp, Homo sapiens
ggaaggttggggggg

SEQ ID NO: 1868149 - DNA, 15 bp, Homo sapiens
gaaggttgggggggg

SEQ ID NO: 1868150 - DNA, 15 bp, Homo sapiens
aaggttggggggggg

SEQ ID NO: 1868151 - DNA, 15 bp, Homo sapiens
aggttgggggggggc

SEQ ID NO: 1868152 - DNA, 15 bp, Homo sapiens
ggttgggggggggca

SEQ ID NO: 1868153 - DNA, 15 bp, Homo sapiens
gttgggggggggcaa

SEQ ID NO: 1868154 - DNA, 15 bp, Homo sapiens
ttgggggggggcaac

SEQ ID NO: 1868155 - DNA, 15 bp, Homo sapiens
tgggggggggcaaca

SEQ ID NO: 1868156 - DNA, 15 bp, Homo sapiens
gggggggggcaacac

SEQ ID NO: 1868157 - DNA, 15 bp, Homo sapiens
ggggggggcaacacc

SEQ ID NO: 1868158 - DNA, 15 bp, Homo sapiens
gggggggcaacacct

SEQ ID NO: 1868159 - DNA, 15 bp, Homo sapiens
ggggggcaacacctt

SEQ ID NO: 1868160 - DNA, 15 bp, Homo sapiens
gggggcaacacctta

SEQ ID NO: 1868161 - DNA, 15 bp, Homo sapiens
ggggcaacaccttaa

SEQ ID NO: 1868162 - DNA, 15 bp, Homo sapiens
gggcaacaccttaaa

SEQ ID NO: 1868163 - DNA, 15 bp, Homo sapiens
ggcaacaccttaaag

SEQ ID NO: 1868164 - DNA, 15 bp, Homo sapiens
gcaacaccttaaagg

SEQ ID NO: 1868165 - DNA, 15 bp, Homo sapiens
caacaccttaaagga

SEQ ID NO: 1868166 - DNA, 15 bp, Homo sapiens
aacaccttaaaggaa

SEQ ID NO: 1868167 - DNA, 15 bp, Homo sapiens
acaccttaaaggaat

SEQ ID NO: 1868168 - DNA, 15 bp, Homo sapiens
caccttaaaggaatt

SEQ ID NO: 1868169 - DNA, 15 bp, Homo sapiens
accttaaaggaattt

SEQ ID NO: 1868170 - DNA, 15 bp, Homo sapiens
ccttaaaggaatttt

SEQ ID NO: 1868171 - DNA, 15 bp, Homo sapiens
cttaaaggaatttta

SEQ ID NO: 1868172 - DNA, 15 bp, Homo sapiens
ttaaaggaattttag

SEQ ID NO: 1868173 - DNA, 15 bp, Homo sapiens
taaaggaattttagg

SEQ ID NO: 1868174 - DNA, 15 bp, Homo sapiens
aaaggaattttaggc

SEQ ID NO: 1868175 - DNA, 15 bp, Homo sapiens
aaggaattttaggca

SEQ ID NO: 1868176 - DNA, 15 bp, Homo sapiens
aggaattttaggcag

SEQ ID NO: 1868177 - DNA, 15 bp, Homo sapiens
ggaattttaggcaga

SEQ ID NO: 1868178 - DNA, 15 bp, Homo sapiens
gaattttaggcagat

SEQ ID NO: 1868179 - DNA, 15 bp, Homo sapiens
aattttaggcagatt

SEQ ID NO: 1868180 - DNA, 15 bp, Homo sapiens
attttaggcagattc

SEQ ID NO: 1868181 - DNA, 15 bp, Homo sapiens
ttttaggcagattca

SEQ ID NO: 1868182 - DNA, 15 bp, Homo sapiens
tttaggcagattcag

SEQ ID NO: 1868183 - DNA, 15 bp, Homo sapiens
ttaggcagattcagc

SEQ ID NO: 1868184 - DNA, 15 bp, Homo sapiens
taggcagattcagca

SEQ ID NO: 1868185 - DNA, 15 bp, Homo sapiens
aggcagattcagcat

SEQ ID NO: 1868186 - DNA, 15 bp, Homo sapiens
ggcagattcagcatt

SEQ ID NO: 1868187 - DNA, 15 bp, Homo sapiens
gcagattcagcattt

SEQ ID NO: 1868188 - DNA, 15 bp, Homo sapiens
cagattcagcatttt

SEQ ID NO: 1868189 - DNA, 15 bp, Homo sapiens
agattcagcattttt

SEQ ID NO: 1868190 - DNA, 15 bp, Homo sapiens
gattcagcatttttc

SEQ ID NO: 1868191 - DNA, 15 bp, Homo sapiens
ttcagcatttttctg

SEQ ID NO: 1868192 - DNA, 15 bp, Homo sapiens
tcagcatttttctgg

SEQ ID NO: 1868193 - DNA, 15 bp, Homo sapiens
cagcatttttctggt

SEQ ID NO: 1868194 - DNA, 15 bp, Homo sapiens
agcatttttctggtg

SEQ ID NO: 1868195 - DNA, 15 bp, Homo sapiens
gcatttttctggtgt

SEQ ID NO: 1868196 - DNA, 15 bp, Homo sapiens
catttttctggtgtt

SEQ ID NO: 1868197 - DNA, 15 bp, Homo sapiens
atttttctggtgttg

SEQ ID NO: 1868198 - DNA, 15 bp, Homo sapiens
tttttctggtgttgc

SEQ ID NO: 1868199 - DNA, 15 bp, Homo sapiens
ttttctggtgttgct

SEQ ID NO: 1868200 - DNA, 15 bp, Homo sapiens
tttctggtgttgctc

SEQ ID NO: 1868201 - DNA, 15 bp, Homo sapiens
ttctggtgttgctcc

SEQ ID NO: 1868202 - DNA, 15 bp, Homo sapiens
tctggtgttgctcca

SEQ ID NO: 1868203 - DNA, 15 bp, Homo sapiens
ctggtgttgctccaa

SEQ ID NO: 1868204 - DNA, 15 bp, Homo sapiens
tggtgttgctccaaa

SEQ ID NO: 1868205 - DNA, 15 bp, Homo sapiens
ggtgttgctccaaaa

SEQ ID NO: 1868206 - DNA, 15 bp, Homo sapiens
gtgttgctccaaaaa

SEQ ID NO: 1868207 - DNA, 15 bp, Homo sapiens
tgttgctccaaaaat

SEQ ID NO: 1868208 - DNA, 15 bp, Homo sapiens
gttgctccaaaaatt

SEQ ID NO: 1868209 - DNA, 15 bp, Homo sapiens
ttgctccaaaaattc

SEQ ID NO: 1868210 - DNA, 15 bp, Homo sapiens
tgctccaaaaattcc

SEQ ID NO: 1868211 - DNA, 15 bp, Homo sapiens
gctccaaaaattccc

SEQ ID NO: 1868212 - DNA, 15 bp, Homo sapiens
ctccaaaaattcccc

SEQ ID NO: 1868213 - DNA, 15 bp, Homo sapiens
tccaaaaattcccca

SEQ ID NO: 1868214 - DNA, 15 bp, Homo sapiens
ccaaaaattccccac

SEQ ID NO: 1868215 - DNA, 15 bp, Homo sapiens
caaaaattccccaca

SEQ ID NO: 1868216 - DNA, 15 bp, Homo sapiens
aaaaattccccacac

SEQ ID NO: 1868217 - DNA, 15 bp, Homo sapiens
aaaattccccacact

SEQ ID NO: 1868218 - DNA, 15 bp, Homo sapiens
aaattccccacactg

SEQ ID NO: 1868219 - DNA, 15 bp, Homo sapiens
aattccccacactgt

SEQ ID NO: 1868220 - DNA, 15 bp, Homo sapiens
attccccacactgta

SEQ ID NO: 1868221 - DNA, 15 bp, Homo sapiens
ttccccacactgtaa

SEQ ID NO: 1868222 - DNA, 15 bp, Homo sapiens
tccccacactgtaat

SEQ ID NO: 1868223 - DNA, 15 bp, Homo sapiens
ccccacactgtaata

SEQ ID NO: 1868224 - DNA, 15 bp, Homo sapiens
cccacactgtaataa

SEQ ID NO: 1868225 - DNA, 15 bp, Homo sapiens
ccacactgtaataaa

SEQ ID NO: 1868226 - DNA, 15 bp, Homo sapiens
cacactgtaataaaa

SEQ ID NO: 1868227 - DNA, 15 bp, Homo sapiens
acactgtaataaaaa

SEQ ID NO: 1868228 - DNA, 15 bp, Homo sapiens
cactgtaataaaaag

SEQ ID NO: 1868229 - DNA, 15 bp, Homo sapiens
actgtaataaaaaga

SEQ ID NO: 1868230 - DNA, 15 bp, Homo sapiens
ctgtaataaaaagat

SEQ ID NO: 1868231 - DNA, 15 bp, Homo sapiens
tgtaataaaaagata

SEQ ID NO: 1868232 - DNA, 15 bp, Homo sapiens
gtaataaaaagatac

SEQ ID NO: 1868233 - DNA, 15 bp, Homo sapiens
taataaaaagataca

SEQ ID NO: 1868234 - DNA, 15 bp, Homo sapiens
aataaaaagatacaa

SEQ ID NO: 1868235 - DNA, 15 bp, Homo sapiens
ataaaaagatacaac

SEQ ID NO: 1868236 - DNA, 15 bp, Homo sapiens
taaaaagatacaact

SEQ ID NO: 1868237 - DNA, 15 bp, Homo sapiens
aaaaagatacaactg

SEQ ID NO: 1868238 - DNA, 15 bp, Homo sapiens
aaaagatacaactgt

SEQ ID NO: 1868239 - DNA, 15 bp, Homo sapiens
aaagatacaactgtg

SEQ ID NO: 1868240 - DNA, 15 bp, Homo sapiens
aagatacaactgtga

SEQ ID NO: 1868241 - DNA, 15 bp, Homo sapiens
agatacaactgtgag

SEQ ID NO: 1868242 - DNA, 15 bp, Homo sapiens
gatacaactgtgagc

SEQ ID NO: 1868243 - DNA, 15 bp, Homo sapiens
atacaactgtgagca

SEQ ID NO: 1868244 - DNA, 15 bp, Homo sapiens
tacaactgtgagcag

SEQ ID NO: 1868245 - DNA, 15 bp, Homo sapiens
acaactgtgagcagg

SEQ ID NO: 1868246 - DNA, 15 bp, Homo sapiens
caactgtgagcaggc

SEQ ID NO: 1868247 - DNA, 15 bp, Homo sapiens
aactgtgagcaggca

SEQ ID NO: 1868248 - DNA, 15 bp, Homo sapiens
actgtgagcaggcat

SEQ ID NO: 1868249 - DNA, 15 bp, Homo sapiens
ctgtgagcaggcatc

SEQ ID NO: 1868250 - DNA, 15 bp, Homo sapiens
tgtgagcaggcatct

SEQ ID NO: 1868251 - DNA, 15 bp, Homo sapiens
gtgagcaggcatctg

SEQ ID NO: 1868252 - DNA, 15 bp, Homo sapiens
tgagcaggcatctga

SEQ ID NO: 1868253 - DNA, 15 bp, Homo sapiens
gagcaggcatctgat

SEQ ID NO: 1868254 - DNA, 15 bp, Homo sapiens
agcaggcatctgatt

SEQ ID NO: 1868255 - DNA, 15 bp, Homo sapiens
gcaggcatctgatta

SEQ ID NO: 1868256 - DNA, 15 bp, Homo sapiens
caggcatctgattag

SEQ ID NO: 1868257 - DNA, 15 bp, Homo sapiens
aggcatctgattagt

SEQ ID NO: 1868258 - DNA, 15 bp, Homo sapiens
ggcatctgattagtg

SEQ ID NO: 1868259 - DNA, 15 bp, Homo sapiens
gcatctgattagtga

SEQ ID NO: 1868260 - DNA, 15 bp, Homo sapiens
catctgattagtgag

SEQ ID NO: 1868261 - DNA, 15 bp, Homo sapiens
atctgattagtgagc

SEQ ID NO: 1868262 - DNA, 15 bp, Homo sapiens
tctgattagtgagct

SEQ ID NO: 1868263 - DNA, 15 bp, Homo sapiens
ctgattagtgagctt

SEQ ID NO: 1868264 - DNA, 15 bp, Homo sapiens
tgattagtgagcttt

SEQ ID NO: 1868265 - DNA, 15 bp, Homo sapiens
gattagtgagctttt

SEQ ID NO: 1868266 - DNA, 15 bp, Homo sapiens
attagtgagcttttt

SEQ ID NO: 1868267 - DNA, 15 bp, Homo sapiens
ttagtgagcttttta

SEQ ID NO: 1868268 - DNA, 15 bp, Homo sapiens
tagtgagctttttac

SEQ ID NO: 1868269 - DNA, 15 bp, Homo sapiens
agtgagctttttaca

SEQ ID NO: 1868270 - DNA, 15 bp, Homo sapiens
gtgagctttttacaa

SEQ ID NO: 1868271 - DNA, 15 bp, Homo sapiens
tgagctttttacaac

SEQ ID NO: 1868272 - DNA, 15 bp, Homo sapiens
gagctttttacaaca

SEQ ID NO: 1868273 - DNA, 15 bp, Homo sapiens
agctttttacaacac

SEQ ID NO: 1868274 - DNA, 15 bp, Homo sapiens
gctttttacaacaca

SEQ ID NO: 1868275 - DNA, 15 bp, Homo sapiens
ctttttacaacacag

SEQ ID NO: 1868276 - DNA, 15 bp, Homo sapiens
tttttacaacacagc

SEQ ID NO: 1868277 - DNA, 15 bp, Homo sapiens
ttttacaacacagct

SEQ ID NO: 1868278 - DNA, 15 bp, Homo sapiens
tttacaacacagctt

SEQ ID NO: 1868279 - DNA, 15 bp, Homo sapiens
ttacaacacagcttt

SEQ ID NO: 1868280 - DNA, 15 bp, Homo sapiens
tacaacacagctttt

SEQ ID NO: 1868281 - DNA, 15 bp, Homo sapiens
acaacacagcttttc

SEQ ID NO: 1868282 - DNA, 15 bp, Homo sapiens
caacacagcttttct

SEQ ID NO: 1868283 - DNA, 15 bp, Homo sapiens
aacacagcttttctt

SEQ ID NO: 1868284 - DNA, 15 bp, Homo sapiens
acacagcttttcttt

SEQ ID NO: 1868285 - DNA, 15 bp, Homo sapiens
cacagcttttctttt

SEQ ID NO: 1868286 - DNA, 15 bp, Homo sapiens
acagcttttcttttg

SEQ ID NO: 1868287 - DNA, 15 bp, Homo sapiens
cagcttttcttttgg

SEQ ID NO: 1868288 - DNA, 15 bp, Homo sapiens
agcttttcttttgga

SEQ ID NO: 1868289 - DNA, 15 bp, Homo sapiens
gcttttcttttggat

SEQ ID NO: 1868290 - DNA, 15 bp, Homo sapiens
cttttcttttggatg

SEQ ID NO: 1868291 - DNA, 15 bp, Homo sapiens
ttttcttttggatgc

SEQ ID NO: 1868292 - DNA, 15 bp, Homo sapiens
tttcttttggatgct

SEQ ID NO: 1868293 - DNA, 15 bp, Homo sapiens
ttcttttggatgctt

SEQ ID NO: 1868294 - DNA, 15 bp, Homo sapiens
tcttttggatgcttt

SEQ ID NO: 1868295 - DNA, 15 bp, Homo sapiens
cttttggatgcttta

SEQ ID NO: 1868296 - DNA, 15 bp, Homo sapiens
ttttggatgctttaa

SEQ ID NO: 1868297 - DNA, 15 bp, Homo sapiens
tttggatgctttaaa

SEQ ID NO: 1868298 - DNA, 15 bp, Homo sapiens
ttggatgctttaaaa

SEQ ID NO: 1868299 - DNA, 15 bp, Homo sapiens
tggatgctttaaaat

SEQ ID NO: 1868300 - DNA, 15 bp, Homo sapiens
ggatgctttaaaatg

SEQ ID NO: 1868301 - DNA, 15 bp, Homo sapiens
gatgctttaaaatga

SEQ ID NO: 1868302 - DNA, 15 bp, Homo sapiens
atgctttaaaatgaa

SEQ ID NO: 1868303 - DNA, 15 bp, Homo sapiens
tgctttaaaatgaac

SEQ ID NO: 1868304 - DNA, 15 bp, Homo sapiens
gctttaaaatgaaca

SEQ ID NO: 1868305 - DNA, 15 bp, Homo sapiens
ctttaaaatgaacac

SEQ ID NO: 1868306 - DNA, 15 bp, Homo sapiens
tttaaaatgaacaca

SEQ ID NO: 1868307 - DNA, 15 bp, Homo sapiens
ttaaaatgaacacat

SEQ ID NO: 1868308 - DNA, 15 bp, Homo sapiens
taaaatgaacacata

SEQ ID NO: 1868309 - DNA, 15 bp, Homo sapiens
aaaatgaacacatac

SEQ ID NO: 1868310 - DNA, 15 bp, Homo sapiens
aaatgaacacatact

SEQ ID NO: 1868311 - DNA, 15 bp, Homo sapiens
aatgaacacatactg

SEQ ID NO: 1868312 - DNA, 15 bp, Homo sapiens
atgaacacatactgt

SEQ ID NO: 1868313 - DNA, 15 bp, Homo sapiens
tgaacacatactgtt

SEQ ID NO: 1868314 - DNA, 15 bp, Homo sapiens
gaacacatactgttt

SEQ ID NO: 1868315 - DNA, 15 bp, Homo sapiens
aacacatactgtttt

SEQ ID NO: 1868316 - DNA, 15 bp, Homo sapiens
acacatactgtttta

SEQ ID NO: 1868317 - DNA, 15 bp, Homo sapiens
cacatactgttttaa

SEQ ID NO: 1868318 - DNA, 15 bp, Homo sapiens
acatactgttttaaa

SEQ ID NO: 1868319 - DNA, 15 bp, Homo sapiens
catactgttttaaaa

SEQ ID NO: 1868320 - DNA, 15 bp, Homo sapiens
atactgttttaaaac

SEQ ID NO: 1868321 - DNA, 15 bp, Homo sapiens
tactgttttaaaaca

SEQ ID NO: 1868322 - DNA, 15 bp, Homo sapiens
actgttttaaaacaa

SEQ ID NO: 1868323 - DNA, 15 bp, Homo sapiens
ctgttttaaaacaag

SEQ ID NO: 1868324 - DNA, 15 bp, Homo sapiens
tgttttaaaacaagc

SEQ ID NO: 1868325 - DNA, 15 bp, Homo sapiens
gttttaaaacaagcc

SEQ ID NO: 1868326 - DNA, 15 bp, Homo sapiens
tttaaaacaagcccc

SEQ ID NO: 1868327 - DNA, 15 bp, Homo sapiens
ttaaaacaagcccct

SEQ ID NO: 1868328 - DNA, 15 bp, Homo sapiens
taaaacaagcccctg

SEQ ID NO: 1868329 - DNA, 15 bp, Homo sapiens
aaaacaagcccctgt

SEQ ID NO: 1868330 - DNA, 15 bp, Homo sapiens
aaacaagcccctgta

SEQ ID NO: 1868331 - DNA, 15 bp, Homo sapiens
aacaagcccctgtac

SEQ ID NO: 1868332 - DNA, 15 bp, Homo sapiens
acaagcccctgtaca

SEQ ID NO: 1868333 - DNA, 15 bp, Homo sapiens
caagcccctgtacag

SEQ ID NO: 1868334 - DNA, 15 bp, Homo sapiens
aagcccctgtacagt

SEQ ID NO: 1868335 - DNA, 15 bp, Homo sapiens
agcccctgtacagtt

SEQ ID NO: 1868336 - DNA, 15 bp, Homo sapiens
gcccctgtacagttt

SEQ ID NO: 1868337 - DNA, 15 bp, Homo sapiens
cccctgtacagtttt

SEQ ID NO: 1868338 - DNA, 15 bp, Homo sapiens
ccctgtacagttttc

SEQ ID NO: 1868339 - DNA, 15 bp, Homo sapiens
cctgtacagttttct

SEQ ID NO: 1868340 - DNA, 15 bp, Homo sapiens
ctgtacagttttctg

SEQ ID NO: 1868341 - DNA, 15 bp, Homo sapiens
tgtacagttttctgg

SEQ ID NO: 1868342 - DNA, 15 bp, Homo sapiens
gtacagttttctggg

SEQ ID NO: 1868343 - DNA, 15 bp, Homo sapiens
tacagttttctgggg

SEQ ID NO: 1868344 - DNA, 15 bp, Homo sapiens
acagttttctgggga

SEQ ID NO: 1868345 - DNA, 15 bp, Homo sapiens
cagttttctggggag

SEQ ID NO: 1868346 - DNA, 15 bp, Homo sapiens
agttttctggggagg

SEQ ID NO: 1868347 - DNA, 15 bp, Homo sapiens
gttttctggggaggg

SEQ ID NO: 1868348 - DNA, 15 bp, Homo sapiens
ttttctggggagggg

SEQ ID NO: 1868349 - DNA, 15 bp, Homo sapiens
tttctggggaggggg

SEQ ID NO: 1868350 - DNA, 15 bp, Homo sapiens
ttctggggaggggga

SEQ ID NO: 1868351 - DNA, 15 bp, Homo sapiens
tctggggagggggag

SEQ ID NO: 1868352 - DNA, 15 bp, Homo sapiens
ctggggagggggaga

SEQ ID NO: 1868353 - DNA, 15 bp, Homo sapiens
tggggagggggagaa

SEQ ID NO: 1868354 - DNA, 15 bp, Homo sapiens
gggagggggagaagt

SEQ ID NO: 1868355 - DNA, 15 bp, Homo sapiens
ggagggggagaagtt

SEQ ID NO: 1868356 - DNA, 15 bp, Homo sapiens
gagggggagaagttt

SEQ ID NO: 1868357 - DNA, 15 bp, Homo sapiens
agggggagaagtttg

SEQ ID NO: 1868358 - DNA, 15 bp, Homo sapiens
gggggagaagtttgt

SEQ ID NO: 1868359 - DNA, 15 bp, Homo sapiens
ggggagaagtttgtg

SEQ ID NO: 1868360 - DNA, 15 bp, Homo sapiens
gggagaagtttgtgg

SEQ ID NO: 1868361 - DNA, 15 bp, Homo sapiens
ggagaagtttgtgga

SEQ ID NO: 1868362 - DNA, 15 bp, Homo sapiens
gagaagtttgtggaa

SEQ ID NO: 1868363 - DNA, 15 bp, Homo sapiens
agaagtttgtggaaa

SEQ ID NO: 1868364 - DNA, 15 bp, Homo sapiens
gaagtttgtggaaaa

SEQ ID NO: 1868365 - DNA, 15 bp, Homo sapiens
aagtttgtggaaaat

SEQ ID NO: 1868366 - DNA, 15 bp, Homo sapiens
agtttgtggaaaata

SEQ ID NO: 1868367 - DNA, 15 bp, Homo sapiens
gtttgtggaaaatac

SEQ ID NO: 1868368 - DNA, 15 bp, Homo sapiens
tttgtggaaaatacc

SEQ ID NO: 1868369 - DNA, 15 bp, Homo sapiens
ttgtggaaaataccg

SEQ ID NO: 1868370 - DNA, 15 bp, Homo sapiens
tgtggaaaataccgg

SEQ ID NO: 1868371 - DNA, 15 bp, Homo sapiens
gtggaaaataccgga

SEQ ID NO: 1868372 - DNA, 15 bp, Homo sapiens
tggaaaataccggaa

SEQ ID NO: 1868373 - DNA, 15 bp, Homo sapiens
ggaaaataccggaaa

SEQ ID NO: 1868374 - DNA, 15 bp, Homo sapiens
gaaaataccggaaaa

SEQ ID NO: 1868375 - DNA, 15 bp, Homo sapiens
aaaataccggaaaag

SEQ ID NO: 1868376 - DNA, 15 bp, Homo sapiens
aaataccggaaaagg

SEQ ID NO: 1868377 - DNA, 15 bp, Homo sapiens
aataccggaaaaggt

SEQ ID NO: 1868378 - DNA, 15 bp, Homo sapiens
ataccggaaaaggtt

SEQ ID NO: 1868379 - DNA, 15 bp, Homo sapiens
taccggaaaaggtta

SEQ ID NO: 1868380 - DNA, 15 bp, Homo sapiens
accggaaaaggttat

SEQ ID NO: 1868381 - DNA, 15 bp, Homo sapiens
ccggaaaaggttata

SEQ ID NO: 1868382 - DNA, 15 bp, Homo sapiens
cggaaaaggttataa

SEQ ID NO: 1868383 - DNA, 15 bp, Homo sapiens
ggaaaaggttataaa

SEQ ID NO: 1868384 - DNA, 15 bp, Homo sapiens
gaaaaggttataaag

SEQ ID NO: 1868385 - DNA, 15 bp, Homo sapiens
aaaaggttataaagc

SEQ ID NO: 1868386 - DNA, 15 bp, Homo sapiens
aaaggttataaagct

SEQ ID NO: 1868387 - DNA, 15 bp, Homo sapiens
aaggttataaagctg

SEQ ID NO: 1868388 - DNA, 15 bp, Homo sapiens
aggttataaagctga

SEQ ID NO: 1868389 - DNA, 15 bp, Homo sapiens
ggttataaagctgag

SEQ ID NO: 1868390 - DNA, 15 bp, Homo sapiens
gttataaagctgagg

SEQ ID NO: 1868391 - DNA, 15 bp, Homo sapiens
ttataaagctgaggg

SEQ ID NO: 1868392 - DNA, 15 bp, Homo sapiens
tataaagctgaggga

SEQ ID NO: 1868393 - DNA, 15 bp, Homo sapiens
ataaagctgagggaa

SEQ ID NO: 1868394 - DNA, 15 bp, Homo sapiens
taaagctgagggaaa

SEQ ID NO: 1868395 - DNA, 15 bp, Homo sapiens
aaagctgagggaaat

SEQ ID NO: 1868396 - DNA, 15 bp, Homo sapiens
aagctgagggaaatt

SEQ ID NO: 1868397 - DNA, 15 bp, Homo sapiens
agctgagggaaatta

SEQ ID NO: 1868398 - DNA, 15 bp, Homo sapiens
gctgagggaaattaa

SEQ ID NO: 1868399 - DNA, 15 bp, Homo sapiens
ctgagggaaattaac

SEQ ID NO: 1868400 - DNA, 15 bp, Homo sapiens
tgagggaaattaaca

SEQ ID NO: 1868401 - DNA, 15 bp, Homo sapiens
gagggaaattaacaa

SEQ ID NO: 1868402 - DNA, 15 bp, Homo sapiens
agggaaattaacaaa

SEQ ID NO: 1868403 - DNA, 15 bp, Homo sapiens
gggaaattaacaaag

SEQ ID NO: 1868404 - DNA, 15 bp, Homo sapiens
ggaaattaacaaagg

SEQ ID NO: 1868405 - DNA, 15 bp, Homo sapiens
gaaattaacaaagga

SEQ ID NO: 1868406 - DNA, 15 bp, Homo sapiens
aaattaacaaaggac

SEQ ID NO: 1868407 - DNA, 15 bp, Homo sapiens
aattaacaaaggact

SEQ ID NO: 1868408 - DNA, 15 bp, Homo sapiens
attaacaaaggactg

SEQ ID NO: 1868409 - DNA, 15 bp, Homo sapiens
ttaacaaaggactgt

SEQ ID NO: 1868410 - DNA, 15 bp, Homo sapiens
taacaaaggactgtg

SEQ ID NO: 1868411 - DNA, 15 bp, Homo sapiens
aacaaaggactgtga

SEQ ID NO: 1868412 - DNA, 15 bp, Homo sapiens
acaaaggactgtgag

SEQ ID NO: 1868413 - DNA, 15 bp, Homo sapiens
caaaggactgtgagt

SEQ ID NO: 1868414 - DNA, 15 bp, Homo sapiens
aaaggactgtgagtt

SEQ ID NO: 1868415 - DNA, 15 bp, Homo sapiens
aaggactgtgagttt

SEQ ID NO: 1868416 - DNA, 15 bp, Homo sapiens
aggactgtgagtttt

SEQ ID NO: 1868417 - DNA, 15 bp, Homo sapiens
ggactgtgagttttg

SEQ ID NO: 1868418 - DNA, 15 bp, Homo sapiens
gactgtgagttttgc

SEQ ID NO: 1868419 - DNA, 15 bp, Homo sapiens
actgtgagttttgcc

SEQ ID NO: 1868420 - DNA, 15 bp, Homo sapiens
ctgtgagttttgcct

SEQ ID NO: 1868421 - DNA, 15 bp, Homo sapiens
tgtgagttttgcctt

SEQ ID NO: 1868422 - DNA, 15 bp, Homo sapiens
gtgagttttgccttc

SEQ ID NO: 1868423 - DNA, 15 bp, Homo sapiens
tgagttttgccttca

SEQ ID NO: 1868424 - DNA, 15 bp, Homo sapiens
gagttttgccttcag

SEQ ID NO: 1868425 - DNA, 15 bp, Homo sapiens
agttttgccttcaga

SEQ ID NO: 1868426 - DNA, 15 bp, Homo sapiens
gttttgccttcagag

SEQ ID NO: 1868427 - DNA, 15 bp, Homo sapiens
ttttgccttcagagg

SEQ ID NO: 1868428 - DNA, 15 bp, Homo sapiens
tttgccttcagaggt

SEQ ID NO: 1868429 - DNA, 15 bp, Homo sapiens
ttgccttcagaggtt

SEQ ID NO: 1868430 - DNA, 15 bp, Homo sapiens
tgccttcagaggtta

SEQ ID NO: 1868431 - DNA, 15 bp, Homo sapiens
gccttcagaggttaa

SEQ ID NO: 1868432 - DNA, 15 bp, Homo sapiens
ccttcagaggttaac

SEQ ID NO: 1868433 - DNA, 15 bp, Homo sapiens
cttcagaggttaact

SEQ ID NO: 1868434 - DNA, 15 bp, Homo sapiens
ttcagaggttaacta

SEQ ID NO: 1868435 - DNA, 15 bp, Homo sapiens
tcagaggttaactat

SEQ ID NO: 1868436 - DNA, 15 bp, Homo sapiens
cagaggttaactatc

SEQ ID NO: 1868437 - DNA, 15 bp, Homo sapiens
agaggttaactatca

SEQ ID NO: 1868438 - DNA, 15 bp, Homo sapiens
gaggttaactatcag

SEQ ID NO: 1868439 - DNA, 15 bp, Homo sapiens
aggttaactatcagc

SEQ ID NO: 1868440 - DNA, 15 bp, Homo sapiens
ggttaactatcagcg

SEQ ID NO: 1868441 - DNA, 15 bp, Homo sapiens
gttaactatcagcga

SEQ ID NO: 1868442 - DNA, 15 bp, Homo sapiens
ttaactatcagcgag

SEQ ID NO: 1868443 - DNA, 15 bp, Homo sapiens
taactatcagcgaga

SEQ ID NO: 1868444 - DNA, 15 bp, Homo sapiens
aactatcagcgagag

SEQ ID NO: 1868445 - DNA, 15 bp, Homo sapiens
actatcagcgagagg

SEQ ID NO: 1868446 - DNA, 15 bp, Homo sapiens
ctatcagcgagaggc

SEQ ID NO: 1868447 - DNA, 15 bp, Homo sapiens
tatcagcgagaggcc

SEQ ID NO: 1868448 - DNA, 15 bp, Homo sapiens
atcagcgagaggcca

SEQ ID NO: 1868449 - DNA, 15 bp, Homo sapiens
tcagcgagaggccaa

SEQ ID NO: 1868450 - DNA, 15 bp, Homo sapiens
cagcgagaggccaag

SEQ ID NO: 1868451 - DNA, 15 bp, Homo sapiens
agcgagaggccaagg

SEQ ID NO: 1868452 - DNA, 15 bp, Homo sapiens
gcgagaggccaaggc

SEQ ID NO: 1868453 - DNA, 15 bp, Homo sapiens
cgagaggccaaggct

SEQ ID NO: 1868454 - DNA, 15 bp, Homo sapiens
gagaggccaaggctc

SEQ ID NO: 1868455 - DNA, 15 bp, Homo sapiens
agaggccaaggctct

SEQ ID NO: 1868456 - DNA, 15 bp, Homo sapiens
gaggccaaggctctt

SEQ ID NO: 1868457 - DNA, 15 bp, Homo sapiens
aggccaaggctcttc

SEQ ID NO: 1868458 - DNA, 15 bp, Homo sapiens
ggccaaggctcttcc

SEQ ID NO: 1868459 - DNA, 15 bp, Homo sapiens
gccaaggctcttcct

SEQ ID NO: 1868460 - DNA, 15 bp, Homo sapiens
ccaaggctcttcctt

SEQ ID NO: 1868461 - DNA, 15 bp, Homo sapiens
caaggctcttcctta

SEQ ID NO: 1868462 - DNA, 15 bp, Homo sapiens
aaggctcttccttag

SEQ ID NO: 1868463 - DNA, 15 bp, Homo sapiens
aggctcttccttagt

SEQ ID NO: 1868464 - DNA, 15 bp, Homo sapiens
ggctcttccttagtc

SEQ ID NO: 1868465 - DNA, 15 bp, Homo sapiens
gctcttccttagtcc

SEQ ID NO: 1868466 - DNA, 15 bp, Homo sapiens
ctcttccttagtcct

SEQ ID NO: 1868467 - DNA, 15 bp, Homo sapiens
tcttccttagtcctt

SEQ ID NO: 1868468 - DNA, 15 bp, Homo sapiens
cttccttagtccttg

SEQ ID NO: 1868469 - DNA, 15 bp, Homo sapiens
ttccttagtccttgt

SEQ ID NO: 1868470 - DNA, 15 bp, Homo sapiens
tccttagtccttgta

SEQ ID NO: 1868471 - DNA, 15 bp, Homo sapiens
ccttagtccttgtac

SEQ ID NO: 1868472 - DNA, 15 bp, Homo sapiens
cttagtccttgtact

SEQ ID NO: 1868473 - DNA, 15 bp, Homo sapiens
ttagtccttgtactg

SEQ ID NO: 1868474 - DNA, 15 bp, Homo sapiens
tagtccttgtactga

SEQ ID NO: 1868475 - DNA, 15 bp, Homo sapiens
agtccttgtactgac

SEQ ID NO: 1868476 - DNA, 15 bp, Homo sapiens
gtccttgtactgact

SEQ ID NO: 1868477 - DNA, 15 bp, Homo sapiens
tccttgtactgactg

SEQ ID NO: 1868478 - DNA, 15 bp, Homo sapiens
ccttgtactgactga

SEQ ID NO: 1868479 - DNA, 15 bp, Homo sapiens
cttgtactgactgaa

SEQ ID NO: 1868480 - DNA, 15 bp, Homo sapiens
ttgtactgactgaac

SEQ ID NO: 1868481 - DNA, 15 bp, Homo sapiens
tgtactgactgaact

SEQ ID NO: 1868482 - DNA, 15 bp, Homo sapiens
gtactgactgaactt

SEQ ID NO: 1868483 - DNA, 15 bp, Homo sapiens
tactgactgaacttc

SEQ ID NO: 1868484 - DNA, 15 bp, Homo sapiens
actgactgaacttcc

SEQ ID NO: 1868485 - DNA, 15 bp, Homo sapiens
ctgactgaacttccc

SEQ ID NO: 1868486 - DNA, 15 bp, Homo sapiens
tgactgaacttccca

SEQ ID NO: 1868487 - DNA, 15 bp, Homo sapiens
gactgaacttcccag

SEQ ID NO: 1868488 - DNA, 15 bp, Homo sapiens
actgaacttcccagc

SEQ ID NO: 1868489 - DNA, 15 bp, Homo sapiens
ctgaacttcccagcc

SEQ ID NO: 1868490 - DNA, 15 bp, Homo sapiens
tgaacttcccagccc

SEQ ID NO: 1868491 - DNA, 15 bp, Homo sapiens
gaacttcccagcccc

SEQ ID NO: 1868492 - DNA, 15 bp, Homo sapiens
aacttcccagcccct

SEQ ID NO: 1868493 - DNA, 15 bp, Homo sapiens
acttcccagcccctc

SEQ ID NO: 1868494 - DNA, 15 bp, Homo sapiens
cttcccagcccctcg

SEQ ID NO: 1868495 - DNA, 15 bp, Homo sapiens
ttcccagcccctcga

SEQ ID NO: 1868496 - DNA, 15 bp, Homo sapiens
tcccagcccctcgac

SEQ ID NO: 1868497 - DNA, 15 bp, Homo sapiens
cccagcccctcgaca

SEQ ID NO: 1868498 - DNA, 15 bp, Homo sapiens
ccagcccctcgacac

SEQ ID NO: 1868499 - DNA, 15 bp, Homo sapiens
cagcccctcgacacg

SEQ ID NO: 1868500 - DNA, 15 bp, Homo sapiens
agcccctcgacacgt

SEQ ID NO: 1868501 - DNA, 15 bp, Homo sapiens
gcccctcgacacgtg

SEQ ID NO: 1868502 - DNA, 15 bp, Homo sapiens
cccctcgacacgtgg

SEQ ID NO: 1868503 - DNA, 15 bp, Homo sapiens
ccctcgacacgtggc

SEQ ID NO: 1868504 - DNA, 15 bp, Homo sapiens
cctcgacacgtggcc

SEQ ID NO: 1868505 - DNA, 15 bp, Homo sapiens
ctcgacacgtggccc

SEQ ID NO: 1868506 - DNA, 15 bp, Homo sapiens
tcgacacgtggcccg

SEQ ID NO: 1868507 - DNA, 15 bp, Homo sapiens
cgacacgtggcccgg

SEQ ID NO: 1868508 - DNA, 15 bp, Homo sapiens
gacacgtggcccggg

SEQ ID NO: 1868509 - DNA, 15 bp, Homo sapiens
acacgtggcccggga

SEQ ID NO: 1868510 - DNA, 15 bp, Homo sapiens
cacgtggcccgggaa

SEQ ID NO: 1868511 - DNA, 15 bp, Homo sapiens
acgtggcccgggaag

SEQ ID NO: 1868512 - DNA, 15 bp, Homo sapiens
cgtggcccgggaagt

SEQ ID NO: 1868513 - DNA, 15 bp, Homo sapiens
gtggcccgggaagtc

SEQ ID NO: 1868514 - DNA, 15 bp, Homo sapiens
tggcccgggaagtcc

SEQ ID NO: 1868515 - DNA, 15 bp, Homo sapiens
ggcccgggaagtccc

SEQ ID NO: 1868516 - DNA, 15 bp, Homo sapiens
gcccgggaagtccct

SEQ ID NO: 1868517 - DNA, 15 bp, Homo sapiens
cccgggaagtccctg

SEQ ID NO: 1868518 - DNA, 15 bp, Homo sapiens
ccgggaagtccctgg

SEQ ID NO: 1868519 - DNA, 15 bp, Homo sapiens
cgggaagtccctggg

SEQ ID NO: 1868520 - DNA, 15 bp, Homo sapiens
gggaagtccctggga

SEQ ID NO: 1868521 - DNA, 15 bp, Homo sapiens
ggaagtccctgggag

SEQ ID NO: 1868522 - DNA, 15 bp, Homo sapiens
gaagtccctgggagc

SEQ ID NO: 1868523 - DNA, 15 bp, Homo sapiens
aagtccctgggagca

SEQ ID NO: 1868524 - DNA, 15 bp, Homo sapiens
agtccctgggagcaa

SEQ ID NO: 1868525 - DNA, 15 bp, Homo sapiens
gtccctgggagcaaa

SEQ ID NO: 1868526 - DNA, 15 bp, Homo sapiens
tccctgggagcaaag

SEQ ID NO: 1868527 - DNA, 15 bp, Homo sapiens
ccctgggagcaaagc

SEQ ID NO: 1868528 - DNA, 15 bp, Homo sapiens
cctgggagcaaagcg

SEQ ID NO: 1868529 - DNA, 15 bp, Homo sapiens
ctgggagcaaagcgt

SEQ ID NO: 1868530 - DNA, 15 bp, Homo sapiens
tgggagcaaagcgtc

SEQ ID NO: 1868531 - DNA, 15 bp, Homo sapiens
gggagcaaagcgtcc

SEQ ID NO: 1868532 - DNA, 15 bp, Homo sapiens
ggagcaaagcgtcca

SEQ ID NO: 1868533 - DNA, 15 bp, Homo sapiens
gagcaaagcgtccac

SEQ ID NO: 1868534 - DNA, 15 bp, Homo sapiens
agcaaagcgtccaca

SEQ ID NO: 1868535 - DNA, 15 bp, Homo sapiens
gcaaagcgtccacac

SEQ ID NO: 1868536 - DNA, 15 bp, Homo sapiens
caaagcgtccacaca

SEQ ID NO: 1868537 - DNA, 15 bp, Homo sapiens
aaagcgtccacacag

SEQ ID NO: 1868538 - DNA, 15 bp, Homo sapiens
aagcgtccacacaga

SEQ ID NO: 1868539 - DNA, 15 bp, Homo sapiens
agcgtccacacagac

SEQ ID NO: 1868540 - DNA, 15 bp, Homo sapiens
gcgtccacacagacc

SEQ ID NO: 1868541 - DNA, 15 bp, Homo sapiens
cgtccacacagacct

SEQ ID NO: 1868542 - DNA, 15 bp, Homo sapiens
gtccacacagacctt

SEQ ID NO: 1868543 - DNA, 15 bp, Homo sapiens
tccacacagaccttt

SEQ ID NO: 1868544 - DNA, 15 bp, Homo sapiens
ccacacagacctttg

SEQ ID NO: 1868545 - DNA, 15 bp, Homo sapiens
cacacagacctttgt

SEQ ID NO: 1868546 - DNA, 15 bp, Homo sapiens
acacagacctttgtg

SEQ ID NO: 1868547 - DNA, 15 bp, Homo sapiens
cacagacctttgtgg

SEQ ID NO: 1868548 - DNA, 15 bp, Homo sapiens
acagacctttgtggg

SEQ ID NO: 1868549 - DNA, 15 bp, Homo sapiens
cagacctttgtgggg

SEQ ID NO: 1868550 - DNA, 15 bp, Homo sapiens
agacctttgtgggga

SEQ ID NO: 1868551 - DNA, 15 bp, Homo sapiens
gacctttgtggggag

SEQ ID NO: 1868552 - DNA, 15 bp, Homo sapiens
acctttgtggggaga

SEQ ID NO: 1868553 - DNA, 15 bp, Homo sapiens
cctttgtggggagac

SEQ ID NO: 1868554 - DNA, 15 bp, Homo sapiens
ctttgtggggagact

SEQ ID NO: 1868555 - DNA, 15 bp, Homo sapiens
tttgtggggagactc

SEQ ID NO: 1868556 - DNA, 15 bp, Homo sapiens
ttgtggggagactcg

SEQ ID NO: 1868557 - DNA, 15 bp, Homo sapiens
tgtggggagactcgt

SEQ ID NO: 1868558 - DNA, 15 bp, Homo sapiens
gtggggagactcgtg

SEQ ID NO: 1868559 - DNA, 15 bp, Homo sapiens
tggggagactcgtgt

SEQ ID NO: 1868560 - DNA, 15 bp, Homo sapiens
ggggagactcgtgtg

SEQ ID NO: 1868561 - DNA, 15 bp, Homo sapiens
gggagactcgtgtgg

SEQ ID NO: 1868562 - DNA, 15 bp, Homo sapiens
ggagactcgtgtggg

SEQ ID NO: 1868563 - DNA, 15 bp, Homo sapiens
gagactcgtgtgggc

SEQ ID NO: 1868564 - DNA, 15 bp, Homo sapiens
agactcgtgtgggct

SEQ ID NO: 1868565 - DNA, 15 bp, Homo sapiens
gactcgtgtgggctg

SEQ ID NO: 1868566 - DNA, 15 bp, Homo sapiens
actcgtgtgggctgt

SEQ ID NO: 1868567 - DNA, 15 bp, Homo sapiens
ctcgtgtgggctgtg

SEQ ID NO: 1868568 - DNA, 15 bp, Homo sapiens
tcgtgtgggctgtgg

SEQ ID NO: 1868569 - DNA, 15 bp, Homo sapiens
cgtgtgggctgtggg

SEQ ID NO: 1868570 - DNA, 15 bp, Homo sapiens
gtgtgggctgtgggc

SEQ ID NO: 1868571 - DNA, 15 bp, Homo sapiens
tgtgggctgtgggcc

SEQ ID NO: 1868572 - DNA, 15 bp, Homo sapiens
gtgggctgtgggccc

SEQ ID NO: 1868573 - DNA, 15 bp, Homo sapiens
tgggctgtgggcccg

SEQ ID NO: 1868574 - DNA, 15 bp, Homo sapiens
gggctgtgggcccga

SEQ ID NO: 1868575 - DNA, 15 bp, Homo sapiens
ggctgtgggcccgat

SEQ ID NO: 1868576 - DNA, 15 bp, Homo sapiens
gctgtgggcccgatt

SEQ ID NO: 1868577 - DNA, 15 bp, Homo sapiens
ctgtgggcccgattc

SEQ ID NO: 1868578 - DNA, 15 bp, Homo sapiens
tgtgggcccgattca

SEQ ID NO: 1868579 - DNA, 15 bp, Homo sapiens
gtgggcccgattcag

SEQ ID NO: 1868580 - DNA, 15 bp, Homo sapiens
tgggcccgattcagg

SEQ ID NO: 1868581 - DNA, 15 bp, Homo sapiens
gggcccgattcaggg

SEQ ID NO: 1868582 - DNA, 15 bp, Homo sapiens
ggcccgattcaggga

SEQ ID NO: 1868583 - DNA, 15 bp, Homo sapiens
gcccgattcagggaa

SEQ ID NO: 1868584 - DNA, 15 bp, Homo sapiens
cccgattcagggaac

SEQ ID NO: 1868585 - DNA, 15 bp, Homo sapiens
ccgattcagggaact

SEQ ID NO: 1868586 - DNA, 15 bp, Homo sapiens
cgattcagggaactg

SEQ ID NO: 1868587 - DNA, 15 bp, Homo sapiens
gattcagggaactgt

SEQ ID NO: 1868588 - DNA, 15 bp, Homo sapiens
attcagggaactgtg

SEQ ID NO: 1868589 - DNA, 15 bp, Homo sapiens
tcagggaactgtgtt

SEQ ID NO: 1868590 - DNA, 15 bp, Homo sapiens
cagggaactgtgttt

SEQ ID NO: 1868591 - DNA, 15 bp, Homo sapiens
agggaactgtgtttc

SEQ ID NO: 1868592 - DNA, 15 bp, Homo sapiens
gggaactgtgtttct

SEQ ID NO: 1868593 - DNA, 15 bp, Homo sapiens
ggaactgtgtttctg

SEQ ID NO: 1868594 - DNA, 15 bp, Homo sapiens
gaactgtgtttctgt

SEQ ID NO: 1868595 - DNA, 15 bp, Homo sapiens
aactgtgtttctgtg

SEQ ID NO: 1868596 - DNA, 15 bp, Homo sapiens
actgtgtttctgtga

SEQ ID NO: 1868597 - DNA, 15 bp, Homo sapiens
ctgtgtttctgtgaa

SEQ ID NO: 1868598 - DNA, 15 bp, Homo sapiens
tgtgtttctgtgaag

SEQ ID NO: 1868599 - DNA, 15 bp, Homo sapiens
gtgtttctgtgaaga

SEQ ID NO: 1868600 - DNA, 15 bp, Homo sapiens
tgtttctgtgaagat

SEQ ID NO: 1868601 - DNA, 15 bp, Homo sapiens
gtttctgtgaagatg

SEQ ID NO: 1868602 - DNA, 15 bp, Homo sapiens
tttctgtgaagatga

SEQ ID NO: 1868603 - DNA, 15 bp, Homo sapiens
ttctgtgaagatgaa

SEQ ID NO: 1868604 - DNA, 15 bp, Homo sapiens
tctgtgaagatgaag

SEQ ID NO: 1868605 - DNA, 15 bp, Homo sapiens
ctgtgaagatgaagc

SEQ ID NO: 1868606 - DNA, 15 bp, Homo sapiens
tgtgaagatgaagct

SEQ ID NO: 1868607 - DNA, 15 bp, Homo sapiens
gtgaagatgaagctg

SEQ ID NO: 1868608 - DNA, 15 bp, Homo sapiens
tgaagatgaagctga

SEQ ID NO: 1868609 - DNA, 15 bp, Homo sapiens
gaagatgaagctgag

SEQ ID NO: 1868610 - DNA, 15 bp, Homo sapiens
aagatgaagctgagc

SEQ ID NO: 1868611 - DNA, 15 bp, Homo sapiens
agatgaagctgagca

SEQ ID NO: 1868612 - DNA, 15 bp, Homo sapiens
gatgaagctgagcat

SEQ ID NO: 1868613 - DNA, 15 bp, Homo sapiens
atgaagctgagcatt

SEQ ID NO: 1868614 - DNA, 15 bp, Homo sapiens
tgaagctgagcattt

SEQ ID NO: 1868615 - DNA, 15 bp, Homo sapiens
gaagctgagcatttc

SEQ ID NO: 1868616 - DNA, 15 bp, Homo sapiens
aagctgagcatttcc

SEQ ID NO: 1868617 - DNA, 15 bp, Homo sapiens
agctgagcatttccc

SEQ ID NO: 1868618 - DNA, 15 bp, Homo sapiens
gctgagcatttccca

SEQ ID NO: 1868619 - DNA, 15 bp, Homo sapiens
ctgagcatttcccag

SEQ ID NO: 1868620 - DNA, 15 bp, Homo sapiens
tgagcatttcccaga

SEQ ID NO: 1868621 - DNA, 15 bp, Homo sapiens
gagcatttcccagaa

SEQ ID NO: 1868622 - DNA, 15 bp, Homo sapiens
agcatttcccagaaa

SEQ ID NO: 1868623 - DNA, 15 bp, Homo sapiens
gcatttcccagaaat

SEQ ID NO: 1868624 - DNA, 15 bp, Homo sapiens
catttcccagaaatg

SEQ ID NO: 1868625 - DNA, 15 bp, Homo sapiens
atttcccagaaatga

SEQ ID NO: 1868626 - DNA, 15 bp, Homo sapiens
tttcccagaaatgag

SEQ ID NO: 1868627 - DNA, 15 bp, Homo sapiens
ttcccagaaatgagc

SEQ ID NO: 1868628 - DNA, 15 bp, Homo sapiens
tcccagaaatgagcc

SEQ ID NO: 1868629 - DNA, 15 bp, Homo sapiens
cccagaaatgagccc

SEQ ID NO: 1868630 - DNA, 15 bp, Homo sapiens
ccagaaatgagccca

SEQ ID NO: 1868631 - DNA, 15 bp, Homo sapiens
cagaaatgagcccaa

SEQ ID NO: 1868632 - DNA, 15 bp, Homo sapiens
agaaatgagcccaaa

SEQ ID NO: 1868633 - DNA, 15 bp, Homo sapiens
gaaatgagcccaaat

SEQ ID NO: 1868634 - DNA, 15 bp, Homo sapiens
aaatgagcccaaatg

SEQ ID NO: 1868635 - DNA, 15 bp, Homo sapiens
aatgagcccaaatgg

SEQ ID NO: 1868636 - DNA, 15 bp, Homo sapiens
atgagcccaaatggc

SEQ ID NO: 1868637 - DNA, 15 bp, Homo sapiens
tgagcccaaatggcg

SEQ ID NO: 1868638 - DNA, 15 bp, Homo sapiens
gagcccaaatggcgg

SEQ ID NO: 1868639 - DNA, 15 bp, Homo sapiens
agcccaaatggcggg

SEQ ID NO: 1868640 - DNA, 15 bp, Homo sapiens
gcccaaatggcgggg

SEQ ID NO: 1868641 - DNA, 15 bp, Homo sapiens
cccaaatggcgggga

SEQ ID NO: 1868642 - DNA, 15 bp, Homo sapiens
ccaaatggcggggaa

SEQ ID NO: 1868643 - DNA, 15 bp, Homo sapiens
caaatggcggggaat

SEQ ID NO: 1868644 - DNA, 15 bp, Homo sapiens
aaatggcggggaatt

SEQ ID NO: 1868645 - DNA, 15 bp, Homo sapiens
aatggcggggaattc

SEQ ID NO: 1868646 - DNA, 15 bp, Homo sapiens
atggcggggaattca

SEQ ID NO: 1868647 - DNA, 15 bp, Homo sapiens
tggcggggaattcag

SEQ ID NO: 1868648 - DNA, 15 bp, Homo sapiens
ggcggggaattcagg

SEQ ID NO: 1868649 - DNA, 15 bp, Homo sapiens
gcggggaattcaggg

SEQ ID NO: 1868650 - DNA, 15 bp, Homo sapiens
cggggaattcagggc

SEQ ID NO: 1868651 - DNA, 15 bp, Homo sapiens
ggggaattcagggca

SEQ ID NO: 1868652 - DNA, 15 bp, Homo sapiens
gggaattcagggcaa

SEQ ID NO: 1868653 - DNA, 15 bp, Homo sapiens
ggaattcagggcaaa

SEQ ID NO: 1868654 - DNA, 15 bp, Homo sapiens
gaattcagggcaaag

SEQ ID NO: 1868655 - DNA, 15 bp, Homo sapiens
aattcagggcaaagg

SEQ ID NO: 1868656 - DNA, 15 bp, Homo sapiens
attcagggcaaaggg

SEQ ID NO: 1868657 - DNA, 15 bp, Homo sapiens
ttcagggcaaagggg

SEQ ID NO: 1868658 - DNA, 15 bp, Homo sapiens
tcagggcaaagggga

SEQ ID NO: 1868659 - DNA, 15 bp, Homo sapiens
cagggcaaaggggaa

SEQ ID NO: 1868660 - DNA, 15 bp, Homo sapiens
agggcaaaggggaat

SEQ ID NO: 1868661 - DNA, 15 bp, Homo sapiens
gggcaaaggggaatc

SEQ ID NO: 1868662 - DNA, 15 bp, Homo sapiens
ggcaaaggggaatct

SEQ ID NO: 1868663 - DNA, 15 bp, Homo sapiens
gcaaaggggaatctc

SEQ ID NO: 1868664 - DNA, 15 bp, Homo sapiens
caaaggggaatctct

SEQ ID NO: 1868665 - DNA, 15 bp, Homo sapiens
aaaggggaatctctg

SEQ ID NO: 1868666 - DNA, 15 bp, Homo sapiens
aaggggaatctctgt

SEQ ID NO: 1868667 - DNA, 15 bp, Homo sapiens
aggggaatctctgta

SEQ ID NO: 1868668 - DNA, 15 bp, Homo sapiens
ggggaatctctgtag

SEQ ID NO: 1868669 - DNA, 15 bp, Homo sapiens
gggaatctctgtagt

SEQ ID NO: 1868670 - DNA, 15 bp, Homo sapiens
ggaatctctgtagtg

SEQ ID NO: 1868671 - DNA, 15 bp, Homo sapiens
gaatctctgtagtgg

SEQ ID NO: 1868672 - DNA, 15 bp, Homo sapiens
aatctctgtagtggc

SEQ ID NO: 1868673 - DNA, 15 bp, Homo sapiens
atctctgtagtggca

SEQ ID NO: 1868674 - DNA, 15 bp, Homo sapiens
tctctgtagtggcaa

SEQ ID NO: 1868675 - DNA, 15 bp, Homo sapiens
ctctgtagtggcaat

SEQ ID NO: 1868676 - DNA, 15 bp, Homo sapiens
tctgtagtggcaatg

SEQ ID NO: 1868677 - DNA, 15 bp, Homo sapiens
ctgtagtggcaatgg

SEQ ID NO: 1868678 - DNA, 15 bp, Homo sapiens
tgtagtggcaatggg

SEQ ID NO: 1868679 - DNA, 15 bp, Homo sapiens
gtagtggcaatgggg

SEQ ID NO: 1868680 - DNA, 15 bp, Homo sapiens
tagtggcaatggggg

SEQ ID NO: 1868681 - DNA, 15 bp, Homo sapiens
agtggcaatggggga

SEQ ID NO: 1868682 - DNA, 15 bp, Homo sapiens
gtggcaatgggggat

SEQ ID NO: 1868683 - DNA, 15 bp, Homo sapiens
tggcaatgggggatg

SEQ ID NO: 1868684 - DNA, 15 bp, Homo sapiens
ggcaatgggggatgt

SEQ ID NO: 1868685 - DNA, 15 bp, Homo sapiens
gcaatgggggatgtc

SEQ ID NO: 1868686 - DNA, 15 bp, Homo sapiens
caatgggggatgtcg

SEQ ID NO: 1868687 - DNA, 15 bp, Homo sapiens
aatgggggatgtcgt

SEQ ID NO: 1868688 - DNA, 15 bp, Homo sapiens
atgggggatgtcgtg

SEQ ID NO: 1868689 - DNA, 15 bp, Homo sapiens
tgggggatgtcgtgc

SEQ ID NO: 1868690 - DNA, 15 bp, Homo sapiens
gggggatgtcgtgcg

SEQ ID NO: 1868691 - DNA, 15 bp, Homo sapiens
ggggatgtcgtgcgg

SEQ ID NO: 1868692 - DNA, 15 bp, Homo sapiens
gggatgtcgtgcggg

SEQ ID NO: 1868693 - DNA, 15 bp, Homo sapiens
ggatgtcgtgcgggg

SEQ ID NO: 1868694 - DNA, 15 bp, Homo sapiens
gatgtcgtgcggggt

SEQ ID NO: 1868695 - DNA, 15 bp, Homo sapiens
atgtcgtgcggggtc

SEQ ID NO: 1868696 - DNA, 15 bp, Homo sapiens
tgtcgtgcggggtcc

SEQ ID NO: 1868697 - DNA, 15 bp, Homo sapiens
gtcgtgcggggtccc

SEQ ID NO: 1868698 - DNA, 15 bp, Homo sapiens
tcgtgcggggtcccc

SEQ ID NO: 1868699 - DNA, 15 bp, Homo sapiens
cgtgcggggtcccca

SEQ ID NO: 1868700 - DNA, 15 bp, Homo sapiens
gtgcggggtccccag

SEQ ID NO: 1868701 - DNA, 15 bp, Homo sapiens
tgcggggtccccaga

SEQ ID NO: 1868702 - DNA, 15 bp, Homo sapiens
gcggggtccccagaa

SEQ ID NO: 1868703 - DNA, 15 bp, Homo sapiens
cggggtccccagaag

SEQ ID NO: 1868704 - DNA, 15 bp, Homo sapiens
ggggtccccagaagg

SEQ ID NO: 1868705 - DNA, 15 bp, Homo sapiens
gggtccccagaaggt

SEQ ID NO: 1868706 - DNA, 15 bp, Homo sapiens
ggtccccagaaggtg

SEQ ID NO: 1868707 - DNA, 15 bp, Homo sapiens
gtccccagaaggtgt

SEQ ID NO: 1868708 - DNA, 15 bp, Homo sapiens
tccccagaaggtgtg

SEQ ID NO: 1868709 - DNA, 15 bp, Homo sapiens
ccccagaaggtgtga

SEQ ID NO: 1868710 - DNA, 15 bp, Homo sapiens
cccagaaggtgtgat

SEQ ID NO: 1868711 - DNA, 15 bp, Homo sapiens
ccagaaggtgtgatg

SEQ ID NO: 1868712 - DNA, 15 bp, Homo sapiens
cagaaggtgtgatgt

SEQ ID NO: 1868713 - DNA, 15 bp, Homo sapiens
agaaggtgtgatgtc

SEQ ID NO: 1868714 - DNA, 15 bp, Homo sapiens
gaaggtgtgatgtcc

SEQ ID NO: 1868715 - DNA, 15 bp, Homo sapiens
aaggtgtgatgtcca

SEQ ID NO: 1868716 - DNA, 15 bp, Homo sapiens
aggtgtgatgtccac

SEQ ID NO: 1868717 - DNA, 15 bp, Homo sapiens
ggtgtgatgtccaca

SEQ ID NO: 1868718 - DNA, 15 bp, Homo sapiens
gtgtgatgtccacac

SEQ ID NO: 1868719 - DNA, 15 bp, Homo sapiens
tgtgatgtccacaca

SEQ ID NO: 1868720 - DNA, 15 bp, Homo sapiens
gtgatgtccacacaa

SEQ ID NO: 1868721 - DNA, 15 bp, Homo sapiens
tgatgtccacacaag

SEQ ID NO: 1868722 - DNA, 15 bp, Homo sapiens
gatgtccacacaagg

SEQ ID NO: 1868723 - DNA, 15 bp, Homo sapiens
atgtccacacaaggg

SEQ ID NO: 1868724 - DNA, 15 bp, Homo sapiens
tgtccacacaagggt

SEQ ID NO: 1868725 - DNA, 15 bp, Homo sapiens
gtccacacaagggtg

SEQ ID NO: 1868726 - DNA, 15 bp, Homo sapiens
tccacacaagggtgt

SEQ ID NO: 1868727 - DNA, 15 bp, Homo sapiens
ccacacaagggtgtg

SEQ ID NO: 1868728 - DNA, 15 bp, Homo sapiens
cacacaagggtgtgt

SEQ ID NO: 1868729 - DNA, 15 bp, Homo sapiens
acacaagggtgtgtg

SEQ ID NO: 1868730 - DNA, 15 bp, Homo sapiens
cacaagggtgtgtgt

SEQ ID NO: 1868731 - DNA, 15 bp, Homo sapiens
acaagggtgtgtgtt

SEQ ID NO: 1868732 - DNA, 15 bp, Homo sapiens
caagggtgtgtgttc

SEQ ID NO: 1868733 - DNA, 15 bp, Homo sapiens
aagggtgtgtgttcg

SEQ ID NO: 1868734 - DNA, 15 bp, Homo sapiens
agggtgtgtgttcga

SEQ ID NO: 1868735 - DNA, 15 bp, Homo sapiens
gggtgtgtgttcgag

SEQ ID NO: 1868736 - DNA, 15 bp, Homo sapiens
ggtgtgtgttcgagg

SEQ ID NO: 1868737 - DNA, 15 bp, Homo sapiens
gtgtgtgttcgaggg

SEQ ID NO: 1868738 - DNA, 15 bp, Homo sapiens
tgtgtgttcgagggg

SEQ ID NO: 1868739 - DNA, 15 bp, Homo sapiens
gtgtgttcgaggggc

SEQ ID NO: 1868740 - DNA, 15 bp, Homo sapiens
tgtgttcgaggggcc

SEQ ID NO: 1868741 - DNA, 15 bp, Homo sapiens
gtgttcgaggggcct

SEQ ID NO: 1868742 - DNA, 15 bp, Homo sapiens
tgttcgaggggcctt

SEQ ID NO: 1868743 - DNA, 15 bp, Homo sapiens
gttcgaggggccttt

SEQ ID NO: 1868744 - DNA, 15 bp, Homo sapiens
ttcgaggggcctttg

SEQ ID NO: 1868745 - DNA, 15 bp, Homo sapiens
tcgaggggcctttgc

SEQ ID NO: 1868746 - DNA, 15 bp, Homo sapiens
cgaggggcctttgct

SEQ ID NO: 1868747 - DNA, 15 bp, Homo sapiens
gaggggcctttgctg

SEQ ID NO: 1868748 - DNA, 15 bp, Homo sapiens
aggggcctttgctgt

SEQ ID NO: 1868749 - DNA, 15 bp, Homo sapiens
ggggcctttgctgtt

SEQ ID NO: 1868750 - DNA, 15 bp, Homo sapiens
gggcctttgctgttg

SEQ ID NO: 1868751 - DNA, 15 bp, Homo sapiens
ggcctttgctgttgc

SEQ ID NO: 1868752 - DNA, 15 bp, Homo sapiens
gcctttgctgttgcc

SEQ ID NO: 1868753 - DNA, 15 bp, Homo sapiens
cctttgctgttgccg

SEQ ID NO: 1868754 - DNA, 15 bp, Homo sapiens
ctttgctgttgccga

SEQ ID NO: 1868755 - DNA, 15 bp, Homo sapiens
tttgctgttgccgaa

SEQ ID NO: 1868756 - DNA, 15 bp, Homo sapiens
ttgctgttgccgaat

SEQ ID NO: 1868757 - DNA, 15 bp, Homo sapiens
tgctgttgccgaatg

SEQ ID NO: 1868758 - DNA, 15 bp, Homo sapiens
gctgttgccgaatgg

SEQ ID NO: 1868759 - DNA, 15 bp, Homo sapiens
ctgttgccgaatggt

SEQ ID NO: 1868760 - DNA, 15 bp, Homo sapiens
tgttgccgaatggtt

SEQ ID NO: 1868761 - DNA, 15 bp, Homo sapiens
gttgccgaatggttt

SEQ ID NO: 1868762 - DNA, 15 bp, Homo sapiens
ttgccgaatggtttt

SEQ ID NO: 1868763 - DNA, 15 bp, Homo sapiens
tgccgaatggttttg

SEQ ID NO: 1868764 - DNA, 15 bp, Homo sapiens
gccgaatggttttgc

SEQ ID NO: 1868765 - DNA, 15 bp, Homo sapiens
ccgaatggttttgct

SEQ ID NO: 1868766 - DNA, 15 bp, Homo sapiens
cgaatggttttgctg

SEQ ID NO: 1868767 - DNA, 15 bp, Homo sapiens
gaatggttttgctgg

SEQ ID NO: 1868768 - DNA, 15 bp, Homo sapiens
aatggttttgctgga

SEQ ID NO: 1868769 - DNA, 15 bp, Homo sapiens
atggttttgctggaa

SEQ ID NO: 1868770 - DNA, 15 bp, Homo sapiens
tggttttgctggaaa

SEQ ID NO: 1868771 - DNA, 15 bp, Homo sapiens
ggttttgctggaaag

SEQ ID NO: 1868772 - DNA, 15 bp, Homo sapiens
gttttgctggaaagc

SEQ ID NO: 1868773 - DNA, 15 bp, Homo sapiens
ttttgctggaaagct

SEQ ID NO: 1868774 - DNA, 15 bp, Homo sapiens
tttgctggaaagctt

SEQ ID NO: 1868775 - DNA, 15 bp, Homo sapiens
ttgctggaaagcttg

SEQ ID NO: 1868776 - DNA, 15 bp, Homo sapiens
tgctggaaagcttgt

SEQ ID NO: 1868777 - DNA, 15 bp, Homo sapiens
gctggaaagcttgtt

SEQ ID NO: 1868778 - DNA, 15 bp, Homo sapiens
ctggaaagcttgttt

SEQ ID NO: 1868779 - DNA, 15 bp, Homo sapiens
tggaaagcttgtttt

SEQ ID NO: 1868780 - DNA, 15 bp, Homo sapiens
ggaaagcttgttttt

SEQ ID NO: 1868781 - DNA, 15 bp, Homo sapiens
gaaagcttgtttttt

SEQ ID NO: 1868782 - DNA, 15 bp, Homo sapiens
aaagcttgttttttg

SEQ ID NO: 1868783 - DNA, 15 bp, Homo sapiens
aagcttgttttttgt

SEQ ID NO: 1868784 - DNA, 15 bp, Homo sapiens
agcttgttttttgtg

SEQ ID NO: 1868785 - DNA, 15 bp, Homo sapiens
gcttgttttttgtgt

SEQ ID NO: 1868786 - DNA, 15 bp, Homo sapiens
cttgttttttgtgtg

SEQ ID NO: 1868787 - DNA, 15 bp, Homo sapiens
ttgttttttgtgtgt

SEQ ID NO: 1868788 - DNA, 15 bp, Homo sapiens
tgttttttgtgtgtg

SEQ ID NO: 1868789 - DNA, 15 bp, Homo sapiens
gttttttgtgtgtgc

SEQ ID NO: 1868790 - DNA, 15 bp, Homo sapiens
ttttttgtgtgtgct

SEQ ID NO: 1868791 - DNA, 15 bp, Homo sapiens
tttttgtgtgtgctt

SEQ ID NO: 1868792 - DNA, 15 bp, Homo sapiens
ttttgtgtgtgctta

SEQ ID NO: 1868793 - DNA, 15 bp, Homo sapiens
tttgtgtgtgcttag

SEQ ID NO: 1868794 - DNA, 15 bp, Homo sapiens
ttgtgtgtgcttaga

SEQ ID NO: 1868795 - DNA, 15 bp, Homo sapiens
tgtgtgtgcttagag

SEQ ID NO: 1868796 - DNA, 15 bp, Homo sapiens
gtgtgtgcttagaga

SEQ ID NO: 1868797 - DNA, 15 bp, Homo sapiens
tgtgtgcttagagat

SEQ ID NO: 1868798 - DNA, 15 bp, Homo sapiens
gtgtgcttagagata

SEQ ID NO: 1868799 - DNA, 15 bp, Homo sapiens
tgtgcttagagatag

SEQ ID NO: 1868800 - DNA, 15 bp, Homo sapiens
gtgcttagagatagt

SEQ ID NO: 1868801 - DNA, 15 bp, Homo sapiens
tgcttagagatagtc

SEQ ID NO: 1868802 - DNA, 15 bp, Homo sapiens
gcttagagatagtcc

SEQ ID NO: 1868803 - DNA, 15 bp, Homo sapiens
cttagagatagtccc

SEQ ID NO: 1868804 - DNA, 15 bp, Homo sapiens
ttagagatagtcccg

SEQ ID NO: 1868805 - DNA, 15 bp, Homo sapiens
tagagatagtcccgg

SEQ ID NO: 1868806 - DNA, 15 bp, Homo sapiens
agagatagtcccggc

SEQ ID NO: 1868807 - DNA, 15 bp, Homo sapiens
gagatagtcccggca

SEQ ID NO: 1868808 - DNA, 15 bp, Homo sapiens
agatagtcccggcag

SEQ ID NO: 1868809 - DNA, 15 bp, Homo sapiens
gatagtcccggcagg

SEQ ID NO: 1868810 - DNA, 15 bp, Homo sapiens
atagtcccggcagga

SEQ ID NO: 1868811 - DNA, 15 bp, Homo sapiens
tagtcccggcaggag

SEQ ID NO: 1868812 - DNA, 15 bp, Homo sapiens
agtcccggcaggagg

SEQ ID NO: 1868813 - DNA, 15 bp, Homo sapiens
gtcccggcaggagga

SEQ ID NO: 1868814 - DNA, 15 bp, Homo sapiens
tcccggcaggaggag

SEQ ID NO: 1868815 - DNA, 15 bp, Homo sapiens
cccggcaggaggaga

SEQ ID NO: 1868816 - DNA, 15 bp, Homo sapiens
ccggcaggaggagac

SEQ ID NO: 1868817 - DNA, 15 bp, Homo sapiens
cggcaggaggagact

SEQ ID NO: 1868818 - DNA, 15 bp, Homo sapiens
ggcaggaggagactg

SEQ ID NO: 1868819 - DNA, 15 bp, Homo sapiens
gcaggaggagactgg

SEQ ID NO: 1868820 - DNA, 15 bp, Homo sapiens
caggaggagactgga

SEQ ID NO: 1868821 - DNA, 15 bp, Homo sapiens
aggaggagactggag

SEQ ID NO: 1868822 - DNA, 15 bp, Homo sapiens
ggaggagactggagc

SEQ ID NO: 1868823 - DNA, 15 bp, Homo sapiens
gaggagactggagct

SEQ ID NO: 1868824 - DNA, 15 bp, Homo sapiens
aggagactggagctg

SEQ ID NO: 1868825 - DNA, 15 bp, Homo sapiens
ggagactggagctgt

SEQ ID NO: 1868826 - DNA, 15 bp, Homo sapiens
gagactggagctgtc

SEQ ID NO: 1868827 - DNA, 15 bp, Homo sapiens
agactggagctgtcc

SEQ ID NO: 1868828 - DNA, 15 bp, Homo sapiens
gactggagctgtcct

SEQ ID NO: 1868829 - DNA, 15 bp, Homo sapiens
actggagctgtccta

SEQ ID NO: 1868830 - DNA, 15 bp, Homo sapiens
ctggagctgtcctaa

SEQ ID NO: 1868831 - DNA, 15 bp, Homo sapiens
tggagctgtcctaac

SEQ ID NO: 1868832 - DNA, 15 bp, Homo sapiens
ggagctgtcctaacg

SEQ ID NO: 1868833 - DNA, 15 bp, Homo sapiens
gagctgtcctaacgg

SEQ ID NO: 1868834 - DNA, 15 bp, Homo sapiens
agctgtcctaacggg

SEQ ID NO: 1868835 - DNA, 15 bp, Homo sapiens
gctgtcctaacggga

SEQ ID NO: 1868836 - DNA, 15 bp, Homo sapiens
ctgtcctaacgggag

SEQ ID NO: 1868837 - DNA, 15 bp, Homo sapiens
tgtcctaacgggagg

SEQ ID NO: 1868838 - DNA, 15 bp, Homo sapiens
gtcctaacgggagga

SEQ ID NO: 1868839 - DNA, 15 bp, Homo sapiens
tcctaacgggaggac

SEQ ID NO: 1868840 - DNA, 15 bp, Homo sapiens
cctaacgggaggaca

SEQ ID NO: 1868841 - DNA, 15 bp, Homo sapiens
ctaacgggaggacag

SEQ ID NO: 1868842 - DNA, 15 bp, Homo sapiens
taacgggaggacaga

SEQ ID NO: 1868843 - DNA, 15 bp, Homo sapiens
aacgggaggacagag

SEQ ID NO: 1868844 - DNA, 15 bp, Homo sapiens
acgggaggacagagg

SEQ ID NO: 1868845 - DNA, 15 bp, Homo sapiens
cgggaggacagaggc

SEQ ID NO: 1868846 - DNA, 15 bp, Homo sapiens
gggaggacagaggct

SEQ ID NO: 1868847 - DNA, 15 bp, Homo sapiens
ggaggacagaggctg

SEQ ID NO: 1868848 - DNA, 15 bp, Homo sapiens
gaggacagaggctgc

SEQ ID NO: 1868849 - DNA, 15 bp, Homo sapiens
aggacagaggctgct

SEQ ID NO: 1868850 - DNA, 15 bp, Homo sapiens
ggacagaggctgctg

SEQ ID NO: 1868851 - DNA, 15 bp, Homo sapiens
gacagaggctgctgg

SEQ ID NO: 1868852 - DNA, 15 bp, Homo sapiens
acagaggctgctggt

SEQ ID NO: 1868853 - DNA, 15 bp, Homo sapiens
cagaggctgctggtg

SEQ ID NO: 1868854 - DNA, 15 bp, Homo sapiens
agaggctgctggtgg

SEQ ID NO: 1868855 - DNA, 15 bp, Homo sapiens
gaggctgctggtggg

SEQ ID NO: 1868856 - DNA, 15 bp, Homo sapiens
aggctgctggtgggg

SEQ ID NO: 1868857 - DNA, 15 bp, Homo sapiens
ggctgctggtggggg

SEQ ID NO: 1868858 - DNA, 15 bp, Homo sapiens
gctgctggtggggga

SEQ ID NO: 1868859 - DNA, 15 bp, Homo sapiens
ctgctggtgggggag

SEQ ID NO: 1868860 - DNA, 15 bp, Homo sapiens
tgctggtgggggagc

SEQ ID NO: 1868861 - DNA, 15 bp, Homo sapiens
gctggtgggggagct

SEQ ID NO: 1868862 - DNA, 15 bp, Homo sapiens
ctggtgggggagctg

SEQ ID NO: 1868863 - DNA, 15 bp, Homo sapiens
tggtgggggagctgg

SEQ ID NO: 1868864 - DNA, 15 bp, Homo sapiens
ggtgggggagctgga

SEQ ID NO: 1868865 - DNA, 15 bp, Homo sapiens
gtgggggagctggag

SEQ ID NO: 1868866 - DNA, 15 bp, Homo sapiens
tgggggagctggagg

SEQ ID NO: 1868867 - DNA, 15 bp, Homo sapiens
gggggagctggaggg

SEQ ID NO: 1868868 - DNA, 15 bp, Homo sapiens
ggggagctggagggg

SEQ ID NO: 1868869 - DNA, 15 bp, Homo sapiens
gggagctggagggga

SEQ ID NO: 1868870 - DNA, 15 bp, Homo sapiens
ggagctggaggggac

SEQ ID NO: 1868871 - DNA, 15 bp, Homo sapiens
gagctggaggggaca

SEQ ID NO: 1868872 - DNA, 15 bp, Homo sapiens
agctggaggggacag

SEQ ID NO: 1868873 - DNA, 15 bp, Homo sapiens
gctggaggggacagc

SEQ ID NO: 1868874 - DNA, 15 bp, Homo sapiens
ctggaggggacagcg

SEQ ID NO: 1868875 - DNA, 15 bp, Homo sapiens
tggaggggacagcga

SEQ ID NO: 1868876 - DNA, 15 bp, Homo sapiens
ggaggggacagcgag

SEQ ID NO: 1868877 - DNA, 15 bp, Homo sapiens
gaggggacagcgagg

SEQ ID NO: 1868878 - DNA, 15 bp, Homo sapiens
aggggacagcgaggg

SEQ ID NO: 1868879 - DNA, 15 bp, Homo sapiens
ggggacagcgaggga

SEQ ID NO: 1868880 - DNA, 15 bp, Homo sapiens
gggacagcgagggag

SEQ ID NO: 1868881 - DNA, 15 bp, Homo sapiens
ggacagcgagggagg

SEQ ID NO: 1868882 - DNA, 15 bp, Homo sapiens
gacagcgagggagga

SEQ ID NO: 1868883 - DNA, 15 bp, Homo sapiens
acagcgagggaggag

SEQ ID NO: 1868884 - DNA, 15 bp, Homo sapiens
cagcgagggaggagc

SEQ ID NO: 1868885 - DNA, 15 bp, Homo sapiens
agcgagggaggagca

SEQ ID NO: 1868886 - DNA, 15 bp, Homo sapiens
gcgagggaggagcag

SEQ ID NO: 1868887 - DNA, 15 bp, Homo sapiens
cgagggaggagcagg

SEQ ID NO: 1868888 - DNA, 15 bp, Homo sapiens
gagggaggagcaggc

SEQ ID NO: 1868889 - DNA, 15 bp, Homo sapiens
agggaggagcaggca

SEQ ID NO: 1868890 - DNA, 15 bp, Homo sapiens
gggaggagcaggcag

SEQ ID NO: 1868891 - DNA, 15 bp, Homo sapiens
ggaggagcaggcagg

SEQ ID NO: 1868892 - DNA, 15 bp, Homo sapiens
gaggagcaggcagga

SEQ ID NO: 1868893 - DNA, 15 bp, Homo sapiens
aggagcaggcaggag

SEQ ID NO: 1868894 - DNA, 15 bp, Homo sapiens
ggagcaggcaggagt

SEQ ID NO: 1868895 - DNA, 15 bp, Homo sapiens
gagcaggcaggagtc

SEQ ID NO: 1868896 - DNA, 15 bp, Homo sapiens
agcaggcaggagtct

SEQ ID NO: 1868897 - DNA, 15 bp, Homo sapiens
gcaggcaggagtctc

SEQ ID NO: 1868898 - DNA, 15 bp, Homo sapiens
caggcaggagtctcc

SEQ ID NO: 1868899 - DNA, 15 bp, Homo sapiens
aggcaggagtctccc

SEQ ID NO: 1868900 - DNA, 15 bp, Homo sapiens
ggcaggagtctccct

SEQ ID NO: 1868901 - DNA, 15 bp, Homo sapiens
gcaggagtctccctg

SEQ ID NO: 1868902 - DNA, 15 bp, Homo sapiens
caggagtctccctgc

SEQ ID NO: 1868903 - DNA, 15 bp, Homo sapiens
aggagtctccctgcg

SEQ ID NO: 1868904 - DNA, 15 bp, Homo sapiens
ggagtctccctgcgg

SEQ ID NO: 1868905 - DNA, 15 bp, Homo sapiens
gagtctccctgcggt

SEQ ID NO: 1868906 - DNA, 15 bp, Homo sapiens
agtctccctgcggtg

SEQ ID NO: 1868907 - DNA, 15 bp, Homo sapiens
gtctccctgcggtgg

SEQ ID NO: 1868908 - DNA, 15 bp, Homo sapiens
tctccctgcggtggg

SEQ ID NO: 1868909 - DNA, 15 bp, Homo sapiens
ctccctgcggtgggt

SEQ ID NO: 1868910 - DNA, 15 bp, Homo sapiens
tccctgcggtgggtt

SEQ ID NO: 1868911 - DNA, 15 bp, Homo sapiens
ccctgcggtgggtta

SEQ ID NO: 1868912 - DNA, 15 bp, Homo sapiens
cctgcggtgggttag

SEQ ID NO: 1868913 - DNA, 15 bp, Homo sapiens
ctgcggtgggttagg

SEQ ID NO: 1868914 - DNA, 15 bp, Homo sapiens
tgcggtgggttaggg

SEQ ID NO: 1868915 - DNA, 15 bp, Homo sapiens
gcggtgggttagggc

SEQ ID NO: 1868916 - DNA, 15 bp, Homo sapiens
cggtgggttagggca

SEQ ID NO: 1868917 - DNA, 15 bp, Homo sapiens
ggtgggttagggcac

SEQ ID NO: 1868918 - DNA, 15 bp, Homo sapiens
gtgggttagggcacc

SEQ ID NO: 1868919 - DNA, 15 bp, Homo sapiens
tgggttagggcacca

SEQ ID NO: 1868920 - DNA, 15 bp, Homo sapiens
gggttagggcaccaa

SEQ ID NO: 1868921 - DNA, 15 bp, Homo sapiens
ggttagggcaccaaa

SEQ ID NO: 1868922 - DNA, 15 bp, Homo sapiens
gttagggcaccaaat

SEQ ID NO: 1868923 - DNA, 15 bp, Homo sapiens
ttagggcaccaaatg

SEQ ID NO: 1868924 - DNA, 15 bp, Homo sapiens
tagggcaccaaatgg

SEQ ID NO: 1868925 - DNA, 15 bp, Homo sapiens
agggcaccaaatgga

SEQ ID NO: 1868926 - DNA, 15 bp, Homo sapiens
gggcaccaaatggac

SEQ ID NO: 1868927 - DNA, 15 bp, Homo sapiens
ggcaccaaatggact

SEQ ID NO: 1868928 - DNA, 15 bp, Homo sapiens
gcaccaaatggactt

SEQ ID NO: 1868929 - DNA, 15 bp, Homo sapiens
caccaaatggacttc

SEQ ID NO: 1868930 - DNA, 15 bp, Homo sapiens
accaaatggacttca

SEQ ID NO: 1868931 - DNA, 15 bp, Homo sapiens
ccaaatggacttcag

SEQ ID NO: 1868932 - DNA, 15 bp, Homo sapiens
caaatggacttcagg

SEQ ID NO: 1868933 - DNA, 15 bp, Homo sapiens
aaatggacttcaggg

SEQ ID NO: 1868934 - DNA, 15 bp, Homo sapiens
aatggacttcagggc

SEQ ID NO: 1868935 - DNA, 15 bp, Homo sapiens
atggacttcagggcc

SEQ ID NO: 1868936 - DNA, 15 bp, Homo sapiens
tggacttcagggccc

SEQ ID NO: 1868937 - DNA, 15 bp, Homo sapiens
ggacttcagggccct

SEQ ID NO: 1868938 - DNA, 15 bp, Homo sapiens
gacttcagggccctt

SEQ ID NO: 1868939 - DNA, 15 bp, Homo sapiens
acttcagggcccttg

SEQ ID NO: 1868940 - DNA, 15 bp, Homo sapiens
cttcagggcccttgt

SEQ ID NO: 1868941 - DNA, 15 bp, Homo sapiens
ttcagggcccttgtt

SEQ ID NO: 1868942 - DNA, 15 bp, Homo sapiens
tcagggcccttgttc

SEQ ID NO: 1868943 - DNA, 15 bp, Homo sapiens
cagggcccttgttca

SEQ ID NO: 1868944 - DNA, 15 bp, Homo sapiens
agggcccttgttcac

SEQ ID NO: 1868945 - DNA, 15 bp, Homo sapiens
gggcccttgttcaca

SEQ ID NO: 1868946 - DNA, 15 bp, Homo sapiens
ggcccttgttcacac

SEQ ID NO: 1868947 - DNA, 15 bp, Homo sapiens
gcccttgttcacaca

SEQ ID NO: 1868948 - DNA, 15 bp, Homo sapiens
cccttgttcacacac

SEQ ID NO: 1868949 - DNA, 15 bp, Homo sapiens
ccttgttcacacaca

SEQ ID NO: 1868950 - DNA, 15 bp, Homo sapiens
cttgttcacacacag

SEQ ID NO: 1868951 - DNA, 15 bp, Homo sapiens
ttgttcacacacagc

SEQ ID NO: 1868952 - DNA, 15 bp, Homo sapiens
tgttcacacacagca

SEQ ID NO: 1868953 - DNA, 15 bp, Homo sapiens
gttcacacacagcag

SEQ ID NO: 1868954 - DNA, 15 bp, Homo sapiens
ttcacacacagcagc

SEQ ID NO: 1868955 - DNA, 15 bp, Homo sapiens
tcacacacagcagca

SEQ ID NO: 1868956 - DNA, 15 bp, Homo sapiens
cacacacagcagcat

SEQ ID NO: 1868957 - DNA, 15 bp, Homo sapiens
acacacagcagcatt

SEQ ID NO: 1868958 - DNA, 15 bp, Homo sapiens
cacacagcagcattc

SEQ ID NO: 1868959 - DNA, 15 bp, Homo sapiens
acacagcagcattca

SEQ ID NO: 1868960 - DNA, 15 bp, Homo sapiens
cacagcagcattcac

SEQ ID NO: 1868961 - DNA, 15 bp, Homo sapiens
acagcagcattcacg

SEQ ID NO: 1868962 - DNA, 15 bp, Homo sapiens
cagcagcattcacga

SEQ ID NO: 1868963 - DNA, 15 bp, Homo sapiens
agcagcattcacgac

SEQ ID NO: 1868964 - DNA, 15 bp, Homo sapiens
gcagcattcacgaca

SEQ ID NO: 1868965 - DNA, 15 bp, Homo sapiens
cagcattcacgacat

SEQ ID NO: 1868966 - DNA, 15 bp, Homo sapiens
agcattcacgacatc

SEQ ID NO: 1868967 - DNA, 15 bp, Homo sapiens
gcattcacgacatcc

SEQ ID NO: 1868968 - DNA, 15 bp, Homo sapiens
cattcacgacatcca

SEQ ID NO: 1868969 - DNA, 15 bp, Homo sapiens
attcacgacatccat

SEQ ID NO: 1868970 - DNA, 15 bp, Homo sapiens
ttcacgacatccatg

SEQ ID NO: 1868971 - DNA, 15 bp, Homo sapiens
tcacgacatccatgc

SEQ ID NO: 1868972 - DNA, 15 bp, Homo sapiens
cacgacatccatgca

SEQ ID NO: 1868973 - DNA, 15 bp, Homo sapiens
acgacatccatgcat

SEQ ID NO: 1868974 - DNA, 15 bp, Homo sapiens
cgacatccatgcatt

SEQ ID NO: 1868975 - DNA, 15 bp, Homo sapiens
gacatccatgcattg

SEQ ID NO: 1868976 - DNA, 15 bp, Homo sapiens
acatccatgcattgc

SEQ ID NO: 1868977 - DNA, 15 bp, Homo sapiens
catccatgcattgca

SEQ ID NO: 1868978 - DNA, 15 bp, Homo sapiens
atccatgcattgcag

SEQ ID NO: 1868979 - DNA, 15 bp, Homo sapiens
tccatgcattgcagt

SEQ ID NO: 1868980 - DNA, 15 bp, Homo sapiens
ccatgcattgcagtt

SEQ ID NO: 1868981 - DNA, 15 bp, Homo sapiens
catgcattgcagttt

SEQ ID NO: 1868982 - DNA, 15 bp, Homo sapiens
atgcattgcagtttt

SEQ ID NO: 1868983 - DNA, 15 bp, Homo sapiens
tgcattgcagttttt

SEQ ID NO: 1868984 - DNA, 15 bp, Homo sapiens
gcattgcagtttttc

SEQ ID NO: 1868985 - DNA, 15 bp, Homo sapiens
cattgcagtttttct

SEQ ID NO: 1868986 - DNA, 15 bp, Homo sapiens
attgcagtttttctg

SEQ ID NO: 1868987 - DNA, 15 bp, Homo sapiens
ttgcagtttttctgg

SEQ ID NO: 1868988 - DNA, 15 bp, Homo sapiens
tgcagtttttctggg

SEQ ID NO: 1868989 - DNA, 15 bp, Homo sapiens
gcagtttttctgggc

SEQ ID NO: 1868990 - DNA, 15 bp, Homo sapiens
cagtttttctgggct

SEQ ID NO: 1868991 - DNA, 15 bp, Homo sapiens
agtttttctgggctg

SEQ ID NO: 1868992 - DNA, 15 bp, Homo sapiens
gtttttctgggctgg

SEQ ID NO: 1868993 - DNA, 15 bp, Homo sapiens
tttttctgggctggg

SEQ ID NO: 1868994 - DNA, 15 bp, Homo sapiens
ttttctgggctgggc

SEQ ID NO: 1868995 - DNA, 15 bp, Homo sapiens
tttctgggctgggcc

SEQ ID NO: 1868996 - DNA, 15 bp, Homo sapiens
ttctgggctgggcca

SEQ ID NO: 1868997 - DNA, 15 bp, Homo sapiens
tctgggctgggccat

SEQ ID NO: 1868998 - DNA, 15 bp, Homo sapiens
ctgggctgggccatt

SEQ ID NO: 1868999 - DNA, 15 bp, Homo sapiens
tgggctgggccatta

SEQ ID NO: 1869000 - DNA, 15 bp, Homo sapiens
gggctgggccattaa

SEQ ID NO: 1869001 - DNA, 15 bp, Homo sapiens
ggctgggccattaac

SEQ ID NO: 1869002 - DNA, 15 bp, Homo sapiens
gctgggccattaacc

SEQ ID NO: 1869003 - DNA, 15 bp, Homo sapiens
ctgggccattaacct

SEQ ID NO: 1869004 - DNA, 15 bp, Homo sapiens
tgggccattaacctc

SEQ ID NO: 1869005 - DNA, 15 bp, Homo sapiens
gggccattaacctca

SEQ ID NO: 1869006 - DNA, 15 bp, Homo sapiens
ggccattaacctcag

SEQ ID NO: 1869007 - DNA, 15 bp, Homo sapiens
gccattaacctcagc

SEQ ID NO: 1869008 - DNA, 15 bp, Homo sapiens
ccattaacctcagca

SEQ ID NO: 1869009 - DNA, 15 bp, Homo sapiens
cattaacctcagcag

SEQ ID NO: 1869010 - DNA, 15 bp, Homo sapiens
attaacctcagcaga

SEQ ID NO: 1869011 - DNA, 15 bp, Homo sapiens
ttaacctcagcagaa

SEQ ID NO: 1869012 - DNA, 15 bp, Homo sapiens
taacctcagcagaaa

SEQ ID NO: 1869013 - DNA, 15 bp, Homo sapiens
aacctcagcagaaaa

SEQ ID NO: 1869014 - DNA, 15 bp, Homo sapiens
acctcagcagaaaaa

SEQ ID NO: 1869015 - DNA, 15 bp, Homo sapiens
cctcagcagaaaaat

SEQ ID NO: 1869016 - DNA, 15 bp, Homo sapiens
ctcagcagaaaaatg

SEQ ID NO: 1869017 - DNA, 15 bp, Homo sapiens
tcagcagaaaaatgc

SEQ ID NO: 1869018 - DNA, 15 bp, Homo sapiens
cagcagaaaaatgct

SEQ ID NO: 1869019 - DNA, 15 bp, Homo sapiens
agcagaaaaatgctt

SEQ ID NO: 1869020 - DNA, 15 bp, Homo sapiens
gcagaaaaatgcttt

SEQ ID NO: 1869021 - DNA, 15 bp, Homo sapiens
cagaaaaatgctttt

SEQ ID NO: 1869022 - DNA, 15 bp, Homo sapiens
agaaaaatgcttttt

SEQ ID NO: 1869023 - DNA, 15 bp, Homo sapiens
gaaaaatgctttttc

SEQ ID NO: 1869024 - DNA, 15 bp, Homo sapiens
aaaaatgctttttcc

SEQ ID NO: 1869025 - DNA, 15 bp, Homo sapiens
aaaatgctttttcca

SEQ ID NO: 1869026 - DNA, 15 bp, Homo sapiens
aaatgctttttccag

SEQ ID NO: 1869027 - DNA, 15 bp, Homo sapiens
aatgctttttccagg

SEQ ID NO: 1869028 - DNA, 15 bp, Homo sapiens
atgctttttccaggg

SEQ ID NO: 1869029 - DNA, 15 bp, Homo sapiens
tgctttttccagggg

SEQ ID NO: 1869030 - DNA, 15 bp, Homo sapiens
gctttttccaggggg

SEQ ID NO: 1869031 - DNA, 15 bp, Homo sapiens
ctttttccagggggt

SEQ ID NO: 1869032 - DNA, 15 bp, Homo sapiens
tttttccagggggtg

SEQ ID NO: 1869033 - DNA, 15 bp, Homo sapiens
ttttccagggggtgt

SEQ ID NO: 1869034 - DNA, 15 bp, Homo sapiens
tttccagggggtgtc

SEQ ID NO: 1869035 - DNA, 15 bp, Homo sapiens
ttccagggggtgtct

SEQ ID NO: 1869036 - DNA, 15 bp, Homo sapiens
tccagggggtgtctg

SEQ ID NO: 1869037 - DNA, 15 bp, Homo sapiens
ccagggggtgtctgg

SEQ ID NO: 1869038 - DNA, 15 bp, Homo sapiens
cagggggtgtctggc

SEQ ID NO: 1869039 - DNA, 15 bp, Homo sapiens
agggggtgtctggca

SEQ ID NO: 1869040 - DNA, 15 bp, Homo sapiens
gggggtgtctggcag

SEQ ID NO: 1869041 - DNA, 15 bp, Homo sapiens
ggggtgtctggcagc

SEQ ID NO: 1869042 - DNA, 15 bp, Homo sapiens
gggtgtctggcagca

SEQ ID NO: 1869043 - DNA, 15 bp, Homo sapiens
ggtgtctggcagcac

SEQ ID NO: 1869044 - DNA, 15 bp, Homo sapiens
gtgtctggcagcaca

SEQ ID NO: 1869045 - DNA, 15 bp, Homo sapiens
tgtctggcagcacat

SEQ ID NO: 1869046 - DNA, 15 bp, Homo sapiens
gtctggcagcacatt

SEQ ID NO: 1869047 - DNA, 15 bp, Homo sapiens
tctggcagcacattg

SEQ ID NO: 1869048 - DNA, 15 bp, Homo sapiens
ctggcagcacattgc

SEQ ID NO: 1869049 - DNA, 15 bp, Homo sapiens
tggcagcacattgct

SEQ ID NO: 1869050 - DNA, 15 bp, Homo sapiens
ggcagcacattgctg

SEQ ID NO: 1869051 - DNA, 15 bp, Homo sapiens
gcagcacattgctgg

SEQ ID NO: 1869052 - DNA, 15 bp, Homo sapiens
cagcacattgctggc

SEQ ID NO: 1869053 - DNA, 15 bp, Homo sapiens
agcacattgctggcg

SEQ ID NO: 1869054 - DNA, 15 bp, Homo sapiens
gcacattgctggcgg

SEQ ID NO: 1869055 - DNA, 15 bp, Homo sapiens
cacattgctggcggg

SEQ ID NO: 1869056 - DNA, 15 bp, Homo sapiens
acattgctggcgggc

SEQ ID NO: 1869057 - DNA, 15 bp, Homo sapiens
cattgctggcgggct

SEQ ID NO: 1869058 - DNA, 15 bp, Homo sapiens
attgctggcgggctg

SEQ ID NO: 1869059 - DNA, 15 bp, Homo sapiens
ttgctggcgggctgc

SEQ ID NO: 1869060 - DNA, 15 bp, Homo sapiens
tgctggcgggctgca

SEQ ID NO: 1869061 - DNA, 15 bp, Homo sapiens
gctggcgggctgcac

SEQ ID NO: 1869062 - DNA, 15 bp, Homo sapiens
ctggcgggctgcaca

SEQ ID NO: 1869063 - DNA, 15 bp, Homo sapiens
tggcgggctgcacag

SEQ ID NO: 1869064 - DNA, 15 bp, Homo sapiens
ggcgggctgcacaga

SEQ ID NO: 1869065 - DNA, 15 bp, Homo sapiens
gcgggctgcacagat

SEQ ID NO: 1869066 - DNA, 15 bp, Homo sapiens
cgggctgcacagatg

SEQ ID NO: 1869067 - DNA, 15 bp, Homo sapiens
gggctgcacagatga

SEQ ID NO: 1869068 - DNA, 15 bp, Homo sapiens
ggctgcacagatgaa

SEQ ID NO: 1869069 - DNA, 15 bp, Homo sapiens
gctgcacagatgaaa

SEQ ID NO: 1869070 - DNA, 15 bp, Homo sapiens
ctgcacagatgaaac

SEQ ID NO: 1869071 - DNA, 15 bp, Homo sapiens
tgcacagatgaaaca

SEQ ID NO: 1869072 - DNA, 15 bp, Homo sapiens
gcacagatgaaacag

SEQ ID NO: 1869073 - DNA, 15 bp, Homo sapiens
cacagatgaaacaga

SEQ ID NO: 1869074 - DNA, 15 bp, Homo sapiens
acagatgaaacagaa

SEQ ID NO: 1869075 - DNA, 15 bp, Homo sapiens
cagatgaaacagaaa

SEQ ID NO: 1869076 - DNA, 15 bp, Homo sapiens
agatgaaacagaaac

SEQ ID NO: 1869077 - DNA, 15 bp, Homo sapiens
gatgaaacagaaacc

SEQ ID NO: 1869078 - DNA, 15 bp, Homo sapiens
atgaaacagaaaccc

SEQ ID NO: 1869079 - DNA, 15 bp, Homo sapiens
tgaaacagaaaccca

SEQ ID NO: 1869080 - DNA, 15 bp, Homo sapiens
gaaacagaaacccac

SEQ ID NO: 1869081 - DNA, 15 bp, Homo sapiens
aaacagaaacccacc

SEQ ID NO: 1869082 - DNA, 15 bp, Homo sapiens
aacagaaacccacct

SEQ ID NO: 1869083 - DNA, 15 bp, Homo sapiens
acagaaacccacctg

SEQ ID NO: 1869084 - DNA, 15 bp, Homo sapiens
cagaaacccacctga

SEQ ID NO: 1869085 - DNA, 15 bp, Homo sapiens
agaaacccacctgac

SEQ ID NO: 1869086 - DNA, 15 bp, Homo sapiens
gaaacccacctgaca

SEQ ID NO: 1869087 - DNA, 15 bp, Homo sapiens
aaacccacctgacac

SEQ ID NO: 1869088 - DNA, 15 bp, Homo sapiens
aacccacctgacact

SEQ ID NO: 1869089 - DNA, 15 bp, Homo sapiens
acccacctgacactt

SEQ ID NO: 1869090 - DNA, 15 bp, Homo sapiens
gttgtcccgaattgg

SEQ ID NO: 1869091 - DNA, 15 bp, Homo sapiens
ttgtcccgaattggg

SEQ ID NO: 1869092 - DNA, 15 bp, Homo sapiens
tgtcccgaattggga

SEQ ID NO: 1869093 - DNA, 15 bp, Homo sapiens
gtcccgaattgggaa

SEQ ID NO: 1869094 - DNA, 15 bp, Homo sapiens
tcccgaattgggaaa

SEQ ID NO: 1869095 - DNA, 15 bp, Homo sapiens
cccgaattgggaaaa

SEQ ID NO: 1869096 - DNA, 15 bp, Homo sapiens
ccgaattgggaaaat

SEQ ID NO: 1869097 - DNA, 15 bp, Homo sapiens
cgaattgggaaaata

SEQ ID NO: 1869098 - DNA, 15 bp, Homo sapiens
gaattgggaaaataa

SEQ ID NO: 1869099 - DNA, 15 bp, Homo sapiens
aattgggaaaataag

SEQ ID NO: 1869100 - DNA, 15 bp, Homo sapiens
attgggaaaataagc

SEQ ID NO: 1869101 - DNA, 15 bp, Homo sapiens
ttgggaaaataagca

SEQ ID NO: 1869102 - DNA, 15 bp, Homo sapiens
tgggaaaataagcaa

SEQ ID NO: 1869103 - DNA, 15 bp, Homo sapiens
gggaaaataagcaaa

SEQ ID NO: 1869104 - DNA, 15 bp, Homo sapiens
ggaaaataagcaaaa

SEQ ID NO: 1869105 - DNA, 15 bp, Homo sapiens
gaaaataagcaaaag

SEQ ID NO: 1869106 - DNA, 15 bp, Homo sapiens
aaaataagcaaaagc

SEQ ID NO: 1869107 - DNA, 15 bp, Homo sapiens
aaataagcaaaagct

SEQ ID NO: 1869108 - DNA, 15 bp, Homo sapiens
aataagcaaaagctt

SEQ ID NO: 1869109 - DNA, 15 bp, Homo sapiens
ataagcaaaagcttc

SEQ ID NO: 1869110 - DNA, 15 bp, Homo sapiens
taagcaaaagcttct

SEQ ID NO: 1869111 - DNA, 15 bp, Homo sapiens
aagcaaaagcttctt

SEQ ID NO: 1869112 - DNA, 15 bp, Homo sapiens
agcaaaagcttcttg

SEQ ID NO: 1869113 - DNA, 15 bp, Homo sapiens
gcaaaagcttcttgt

SEQ ID NO: 1869114 - DNA, 15 bp, Homo sapiens
caaaagcttcttgtg

SEQ ID NO: 1869115 - DNA, 15 bp, Homo sapiens
aaaagcttcttgtgt

SEQ ID NO: 1869116 - DNA, 15 bp, Homo sapiens
aagcttcttgtgttt

SEQ ID NO: 1869117 - DNA, 15 bp, Homo sapiens
cttcttgtgtttcag

SEQ ID NO: 1869118 - DNA, 15 bp, Homo sapiens
ttcttgtgtttcaga

SEQ ID NO: 1869119 - DNA, 15 bp, Homo sapiens
tcttgtgtttcagaa

SEQ ID NO: 1869120 - DNA, 15 bp, Homo sapiens
cttgtgtttcagaac

SEQ ID NO: 1869121 - DNA, 15 bp, Homo sapiens
ttgtgtttcagaaca

SEQ ID NO: 1869122 - DNA, 15 bp, Homo sapiens
tgtgtttcagaacac

SEQ ID NO: 1869123 - DNA, 15 bp, Homo sapiens
gtgtttcagaacacc

SEQ ID NO: 1869124 - DNA, 15 bp, Homo sapiens
tgtttcagaacaccc

SEQ ID NO: 1869125 - DNA, 15 bp, Homo sapiens
gtttcagaacaccct

SEQ ID NO: 1869126 - DNA, 15 bp, Homo sapiens
tttcagaacaccctc

SEQ ID NO: 1869127 - DNA, 15 bp, Homo sapiens
ttcagaacaccctcc

SEQ ID NO: 1869128 - DNA, 15 bp, Homo sapiens
cagaacaccctcctc

SEQ ID NO: 1869129 - DNA, 15 bp, Homo sapiens
agaacaccctcctcc

SEQ ID NO: 1869130 - DNA, 15 bp, Homo sapiens
gaacaccctcctcca

SEQ ID NO: 1869131 - DNA, 15 bp, Homo sapiens
aacaccctcctccac

SEQ ID NO: 1869132 - DNA, 15 bp, Homo sapiens
acaccctcctccaca

SEQ ID NO: 1869133 - DNA, 15 bp, Homo sapiens
caccctcctccacac

SEQ ID NO: 1869134 - DNA, 15 bp, Homo sapiens
accctcctccacacc

SEQ ID NO: 1869135 - DNA, 15 bp, Homo sapiens
ccctcctccacacca

SEQ ID NO: 1869136 - DNA, 15 bp, Homo sapiens
cctcctccacaccaa

SEQ ID NO: 1869137 - DNA, 15 bp, Homo sapiens
ctcctccacaccaaa

SEQ ID NO: 1869138 - DNA, 15 bp, Homo sapiens
cctccacaccaaaag

SEQ ID NO: 1869139 - DNA, 15 bp, Homo sapiens
ctccacaccaaaagg

SEQ ID NO: 1869140 - DNA, 15 bp, Homo sapiens
tccacaccaaaaggg

SEQ ID NO: 1869141 - DNA, 15 bp, Homo sapiens
ccacaccaaaagggt

SEQ ID NO: 1869142 - DNA, 15 bp, Homo sapiens
cacaccaaaagggtg

SEQ ID NO: 1869143 - DNA, 15 bp, Homo sapiens
acaccaaaagggtgg

SEQ ID NO: 1869144 - DNA, 15 bp, Homo sapiens
caccaaaagggtgga

SEQ ID NO: 1869145 - DNA, 15 bp, Homo sapiens
accaaaagggtggat

SEQ ID NO: 1869146 - DNA, 15 bp, Homo sapiens
ccaaaagggtggatg

SEQ ID NO: 1869147 - DNA, 15 bp, Homo sapiens
caaaagggtggatgt

SEQ ID NO: 1869148 - DNA, 15 bp, Homo sapiens
aaaagggtggatgtg

SEQ ID NO: 1869149 - DNA, 15 bp, Homo sapiens
aaagggtggatgtgc

SEQ ID NO: 1869150 - DNA, 15 bp, Homo sapiens
aagggtggatgtgct

SEQ ID NO: 1869151 - DNA, 15 bp, Homo sapiens
agggtggatgtgctg

SEQ ID NO: 1869152 - DNA, 15 bp, Homo sapiens
gggtggatgtgctgt

SEQ ID NO: 1869153 - DNA, 15 bp, Homo sapiens
ggtggatgtgctgtg

SEQ ID NO: 1869154 - DNA, 15 bp, Homo sapiens
gtggatgtgctgtgc

SEQ ID NO: 1869155 - DNA, 15 bp, Homo sapiens
tggatgtgctgtgcc

SEQ ID NO: 1869156 - DNA, 15 bp, Homo sapiens
ggatgtgctgtgcct

SEQ ID NO: 1869157 - DNA, 15 bp, Homo sapiens
gatgtgctgtgcctc

SEQ ID NO: 1869158 - DNA, 15 bp, Homo sapiens
atgtgctgtgcctcc

SEQ ID NO: 1869159 - DNA, 15 bp, Homo sapiens
tgtgctgtgcctccc

SEQ ID NO: 1869160 - DNA, 15 bp, Homo sapiens
gtgctgtgcctcccg

SEQ ID NO: 1869161 - DNA, 15 bp, Homo sapiens
tgctgtgcctcccgg

SEQ ID NO: 1869162 - DNA, 15 bp, Homo sapiens
gctgtgcctcccgga

SEQ ID NO: 1869163 - DNA, 15 bp, Homo sapiens
ctgtgcctcccggaa

SEQ ID NO: 1869164 - DNA, 15 bp, Homo sapiens
tgtgcctcccggaag

SEQ ID NO: 1869165 - DNA, 15 bp, Homo sapiens
gtgcctcccggaaga

SEQ ID NO: 1869166 - DNA, 15 bp, Homo sapiens
tgcctcccggaagag

SEQ ID NO: 1869167 - DNA, 15 bp, Homo sapiens
gcctcccggaagagg

SEQ ID NO: 1869168 - DNA, 15 bp, Homo sapiens
cctcccggaagaggg

SEQ ID NO: 1869169 - DNA, 15 bp, Homo sapiens
ctcccggaagagggc

SEQ ID NO: 1869170 - DNA, 15 bp, Homo sapiens
tcccggaagagggct

SEQ ID NO: 1869171 - DNA, 15 bp, Homo sapiens
cccggaagagggctt

SEQ ID NO: 1869172 - DNA, 15 bp, Homo sapiens
ccggaagagggcttt

SEQ ID NO: 1869173 - DNA, 15 bp, Homo sapiens
cggaagagggctttc

SEQ ID NO: 1869174 - DNA, 15 bp, Homo sapiens
ggaagagggctttct

SEQ ID NO: 1869175 - DNA, 15 bp, Homo sapiens
gaagagggctttctc

SEQ ID NO: 1869176 - DNA, 15 bp, Homo sapiens
aagagggctttctcc

SEQ ID NO: 1869177 - DNA, 15 bp, Homo sapiens
agagggctttctccc

SEQ ID NO: 1869178 - DNA, 15 bp, Homo sapiens
gagggctttctcccc

SEQ ID NO: 1869179 - DNA, 15 bp, Homo sapiens
agggctttctccccc

SEQ ID NO: 1869180 - DNA, 15 bp, Homo sapiens
gggctttctcccccg

SEQ ID NO: 1869181 - DNA, 15 bp, Homo sapiens
ggctttctcccccgc

SEQ ID NO: 1869182 - DNA, 15 bp, Homo sapiens
gctttctcccccgct

SEQ ID NO: 1869183 - DNA, 15 bp, Homo sapiens
ctttctcccccgctt

SEQ ID NO: 1869184 - DNA, 15 bp, Homo sapiens
tttctcccccgcttc

SEQ ID NO: 1869185 - DNA, 15 bp, Homo sapiens
ttctcccccgcttca

SEQ ID NO: 1869186 - DNA, 15 bp, Homo sapiens
tctcccccgcttcac

SEQ ID NO: 1869187 - DNA, 15 bp, Homo sapiens
ctcccccgcttcaca

SEQ ID NO: 1869188 - DNA, 15 bp, Homo sapiens
tcccccgcttcacac

SEQ ID NO: 1869189 - DNA, 15 bp, Homo sapiens
cccccgcttcacact

SEQ ID NO: 1869190 - DNA, 15 bp, Homo sapiens
ccccgcttcacactt

SEQ ID NO: 1869191 - DNA, 15 bp, Homo sapiens
cccgcttcacacttg

SEQ ID NO: 1869192 - DNA, 15 bp, Homo sapiens
ccgcttcacacttga

SEQ ID NO: 1869193 - DNA, 15 bp, Homo sapiens
cgcttcacacttgat

SEQ ID NO: 1869194 - DNA, 15 bp, Homo sapiens
gcttcacacttgatg

SEQ ID NO: 1869195 - DNA, 15 bp, Homo sapiens
cttcacacttgatgc

SEQ ID NO: 1869196 - DNA, 15 bp, Homo sapiens
ttcacacttgatgcc

SEQ ID NO: 1869197 - DNA, 15 bp, Homo sapiens
tcacacttgatgcca

SEQ ID NO: 1869198 - DNA, 15 bp, Homo sapiens
cacacttgatgccaa

SEQ ID NO: 1869199 - DNA, 15 bp, Homo sapiens
acacttgatgccaat

SEQ ID NO: 1869200 - DNA, 15 bp, Homo sapiens
cacttgatgccaatg

SEQ ID NO: 1869201 - DNA, 15 bp, Homo sapiens
acttgatgccaatgt

SEQ ID NO: 1869202 - DNA, 15 bp, Homo sapiens
cttgatgccaatgtg

SEQ ID NO: 1869203 - DNA, 15 bp, Homo sapiens
ttgatgccaatgtgt

SEQ ID NO: 1869204 - DNA, 15 bp, Homo sapiens
tgatgccaatgtgtc

SEQ ID NO: 1869205 - DNA, 15 bp, Homo sapiens
gatgccaatgtgtcc

SEQ ID NO: 1869206 - DNA, 15 bp, Homo sapiens
atgccaatgtgtcct

SEQ ID NO: 1869207 - DNA, 15 bp, Homo sapiens
tgccaatgtgtcctt

SEQ ID NO: 1869208 - DNA, 15 bp, Homo sapiens
gccaatgtgtccttc

SEQ ID NO: 1869209 - DNA, 15 bp, Homo sapiens
ccaatgtgtccttcc

SEQ ID NO: 1869210 - DNA, 15 bp, Homo sapiens
caatgtgtccttcct

SEQ ID NO: 1869211 - DNA, 15 bp, Homo sapiens
aatgtgtccttcctt

SEQ ID NO: 1869212 - DNA, 15 bp, Homo sapiens
atgtgtccttccttc

SEQ ID NO: 1869213 - DNA, 15 bp, Homo sapiens
tgtgtccttccttcc

SEQ ID NO: 1869214 - DNA, 15 bp, Homo sapiens
gtgtccttccttccc

SEQ ID NO: 1869215 - DNA, 15 bp, Homo sapiens
tgtccttccttccct

SEQ ID NO: 1869216 - DNA, 15 bp, Homo sapiens
gtccttccttccctg

SEQ ID NO: 1869217 - DNA, 15 bp, Homo sapiens
tccttccttccctgg

SEQ ID NO: 1869218 - DNA, 15 bp, Homo sapiens
ccttccttccctggg

SEQ ID NO: 1869219 - DNA, 15 bp, Homo sapiens
cttccttccctgggc

SEQ ID NO: 1869220 - DNA, 15 bp, Homo sapiens
ttccttccctgggcg

SEQ ID NO: 1869221 - DNA, 15 bp, Homo sapiens
tccttccctgggcgt

SEQ ID NO: 1869222 - DNA, 15 bp, Homo sapiens
ccttccctgggcgtt

SEQ ID NO: 1869223 - DNA, 15 bp, Homo sapiens
cttccctgggcgttc

SEQ ID NO: 1869224 - DNA, 15 bp, Homo sapiens
ttccctgggcgttca

SEQ ID NO: 1869225 - DNA, 15 bp, Homo sapiens
tccctgggcgttcag

SEQ ID NO: 1869226 - DNA, 15 bp, Homo sapiens
ccctgggcgttcagg

SEQ ID NO: 1869227 - DNA, 15 bp, Homo sapiens
cctgggcgttcaggt

SEQ ID NO: 1869228 - DNA, 15 bp, Homo sapiens
ctgggcgttcaggtc

SEQ ID NO: 1869229 - DNA, 15 bp, Homo sapiens
tgggcgttcaggtct

SEQ ID NO: 1869230 - DNA, 15 bp, Homo sapiens
gggcgttcaggtctt

SEQ ID NO: 1869231 - DNA, 15 bp, Homo sapiens
ggcgttcaggtcttt

SEQ ID NO: 1869232 - DNA, 15 bp, Homo sapiens
gcgttcaggtctttg

SEQ ID NO: 1869233 - DNA, 15 bp, Homo sapiens
cgttcaggtctttgg

SEQ ID NO: 1869234 - DNA, 15 bp, Homo sapiens
gttcaggtctttggt

SEQ ID NO: 1869235 - DNA, 15 bp, Homo sapiens
ttcaggtctttggtg

SEQ ID NO: 1869236 - DNA, 15 bp, Homo sapiens
tcaggtctttggtgt

SEQ ID NO: 1869237 - DNA, 15 bp, Homo sapiens
caggtctttggtgta

SEQ ID NO: 1869238 - DNA, 15 bp, Homo sapiens
aggtctttggtgtag

SEQ ID NO: 1869239 - DNA, 15 bp, Homo sapiens
ggtctttggtgtagc

SEQ ID NO: 1869240 - DNA, 15 bp, Homo sapiens
gtctttggtgtagcc

SEQ ID NO: 1869241 - DNA, 15 bp, Homo sapiens
tctttggtgtagcct

SEQ ID NO: 1869242 - DNA, 15 bp, Homo sapiens
ctttggtgtagcctt

SEQ ID NO: 1869243 - DNA, 15 bp, Homo sapiens
tttggtgtagccttc

SEQ ID NO: 1869244 - DNA, 15 bp, Homo sapiens
ttggtgtagccttca

SEQ ID NO: 1869245 - DNA, 15 bp, Homo sapiens
tggtgtagccttcag

SEQ ID NO: 1869246 - DNA, 15 bp, Homo sapiens
ggtgtagccttcaga

SEQ ID NO: 1869247 - DNA, 15 bp, Homo sapiens
gtgtagccttcagag

SEQ ID NO: 1869248 - DNA, 15 bp, Homo sapiens
tgtagccttcagagc

SEQ ID NO: 1869249 - DNA, 15 bp, Homo sapiens
gtagccttcagagct

SEQ ID NO: 1869250 - DNA, 15 bp, Homo sapiens
tagccttcagagctg

SEQ ID NO: 1869251 - DNA, 15 bp, Homo sapiens
agccttcagagctga

SEQ ID NO: 1869252 - DNA, 15 bp, Homo sapiens
gccttcagagctgag

SEQ ID NO: 1869253 - DNA, 15 bp, Homo sapiens
ccttcagagctgagt

SEQ ID NO: 1869254 - DNA, 15 bp, Homo sapiens
cttcagagctgagtt

SEQ ID NO: 1869255 - DNA, 15 bp, Homo sapiens
ttcagagctgagttc

SEQ ID NO: 1869256 - DNA, 15 bp, Homo sapiens
tcagagctgagttcc

SEQ ID NO: 1869257 - DNA, 15 bp, Homo sapiens
cagagctgagttccc

SEQ ID NO: 1869258 - DNA, 15 bp, Homo sapiens
agagctgagttccct

SEQ ID NO: 1869259 - DNA, 15 bp, Homo sapiens
gagctgagttccctc

SEQ ID NO: 1869260 - DNA, 15 bp, Homo sapiens
agctgagttccctca

SEQ ID NO: 1869261 - DNA, 15 bp, Homo sapiens
gctgagttccctcag

SEQ ID NO: 1869262 - DNA, 15 bp, Homo sapiens
ctgagttccctcagc

SEQ ID NO: 1869263 - DNA, 15 bp, Homo sapiens
tgagttccctcagca

SEQ ID NO: 1869264 - DNA, 15 bp, Homo sapiens
gagttccctcagcaa

SEQ ID NO: 1869265 - DNA, 15 bp, Homo sapiens
agttccctcagcaag

SEQ ID NO: 1869266 - DNA, 15 bp, Homo sapiens
gttccctcagcaaga

SEQ ID NO: 1869267 - DNA, 15 bp, Homo sapiens
ttccctcagcaagaa

SEQ ID NO: 1869268 - DNA, 15 bp, Homo sapiens
tccctcagcaagaaa

SEQ ID NO: 1869269 - DNA, 15 bp, Homo sapiens
ccctcagcaagaaag

SEQ ID NO: 1869270 - DNA, 15 bp, Homo sapiens
cctcagcaagaaagt

SEQ ID NO: 1869271 - DNA, 15 bp, Homo sapiens
ctcagcaagaaagtt

SEQ ID NO: 1869272 - DNA, 15 bp, Homo sapiens
tcagcaagaaagttc

SEQ ID NO: 1869273 - DNA, 15 bp, Homo sapiens
cagcaagaaagttca

SEQ ID NO: 1869274 - DNA, 15 bp, Homo sapiens
agcaagaaagttcaa

SEQ ID NO: 1869275 - DNA, 15 bp, Homo sapiens
gcaagaaagttcaaa

SEQ ID NO: 1869276 - DNA, 15 bp, Homo sapiens
caagaaagttcaaag

SEQ ID NO: 1869277 - DNA, 15 bp, Homo sapiens
aagaaagttcaaaga

SEQ ID NO: 1869278 - DNA, 15 bp, Homo sapiens
agaaagttcaaagat

SEQ ID NO: 1869279 - DNA, 15 bp, Homo sapiens
gaaagttcaaagatt

SEQ ID NO: 1869280 - DNA, 15 bp, Homo sapiens
aaagttcaaagattg

SEQ ID NO: 1869281 - DNA, 15 bp, Homo sapiens
aagttcaaagattgc

SEQ ID NO: 1869282 - DNA, 15 bp, Homo sapiens
agttcaaagattgcc

SEQ ID NO: 1869283 - DNA, 15 bp, Homo sapiens
gttcaaagattgcca

SEQ ID NO: 1869284 - DNA, 15 bp, Homo sapiens
ttcaaagattgccag

SEQ ID NO: 1869285 - DNA, 15 bp, Homo sapiens
tcaaagattgccagc

SEQ ID NO: 1869286 - DNA, 15 bp, Homo sapiens
caaagattgccagcg

SEQ ID NO: 1869287 - DNA, 15 bp, Homo sapiens
aaagattgccagcgc

SEQ ID NO: 1869288 - DNA, 15 bp, Homo sapiens
aagattgccagcgct

SEQ ID NO: 1869289 - DNA, 15 bp, Homo sapiens
agattgccagcgctc

SEQ ID NO: 1869290 - DNA, 15 bp, Homo sapiens
gattgccagcgctca

SEQ ID NO: 1869291 - DNA, 15 bp, Homo sapiens
attgccagcgctcac

SEQ ID NO: 1869292 - DNA, 15 bp, Homo sapiens
ttgccagcgctcaca

SEQ ID NO: 1869293 - DNA, 15 bp, Homo sapiens
tgccagcgctcacaa

SEQ ID NO: 1869294 - DNA, 15 bp, Homo sapiens
gccagcgctcacaag

SEQ ID NO: 1869295 - DNA, 15 bp, Homo sapiens
ccagcgctcacaagt

SEQ ID NO: 1869296 - DNA, 15 bp, Homo sapiens
cagcgctcacaagtt

SEQ ID NO: 1869297 - DNA, 15 bp, Homo sapiens
agcgctcacaagttt

SEQ ID NO: 1869298 - DNA, 15 bp, Homo sapiens
gcgctcacaagttta

SEQ ID NO: 1869299 - DNA, 15 bp, Homo sapiens
cgctcacaagtttat

SEQ ID NO: 1869300 - DNA, 15 bp, Homo sapiens
gctcacaagtttatt

SEQ ID NO: 1869301 - DNA, 15 bp, Homo sapiens
ctcacaagtttatta

SEQ ID NO: 1869302 - DNA, 15 bp, Homo sapiens
tcacaagtttattag

SEQ ID NO: 1869303 - DNA, 15 bp, Homo sapiens
cacaagtttattagc

SEQ ID NO: 1869304 - DNA, 15 bp, Homo sapiens
acaagtttattagca

SEQ ID NO: 1869305 - DNA, 15 bp, Homo sapiens
caagtttattagcag

SEQ ID NO: 1869306 - DNA, 15 bp, Homo sapiens
aagtttattagcagt

SEQ ID NO: 1869307 - DNA, 15 bp, Homo sapiens
agtttattagcagtt

SEQ ID NO: 1869308 - DNA, 15 bp, Homo sapiens
gtttattagcagttg

SEQ ID NO: 1869309 - DNA, 15 bp, Homo sapiens
tttattagcagttga

SEQ ID NO: 1869310 - DNA, 15 bp, Homo sapiens
ttattagcagttgat

SEQ ID NO: 1869311 - DNA, 15 bp, Homo sapiens
tattagcagttgatg

SEQ ID NO: 1869312 - DNA, 15 bp, Homo sapiens
attagcagttgatgg

SEQ ID NO: 1869313 - DNA, 15 bp, Homo sapiens
ttagcagttgatgga

SEQ ID NO: 1869314 - DNA, 15 bp, Homo sapiens
tagcagttgatggat

SEQ ID NO: 1869315 - DNA, 15 bp, Homo sapiens
agcagttgatggata

SEQ ID NO: 1869316 - DNA, 15 bp, Homo sapiens
gcagttgatggatac

SEQ ID NO: 1869317 - DNA, 15 bp, Homo sapiens
cagttgatggatact

SEQ ID NO: 1869318 - DNA, 15 bp, Homo sapiens
agttgatggatactt

SEQ ID NO: 1869319 - DNA, 15 bp, Homo sapiens
gttgatggatacttt

SEQ ID NO: 1869320 - DNA, 15 bp, Homo sapiens
ttgatggatactttg

SEQ ID NO: 1869321 - DNA, 15 bp, Homo sapiens
tgatggatactttgc

SEQ ID NO: 1869322 - DNA, 15 bp, Homo sapiens
gatggatactttgca

SEQ ID NO: 1869323 - DNA, 15 bp, Homo sapiens
atggatactttgcag

SEQ ID NO: 1869324 - DNA, 15 bp, Homo sapiens
tggatactttgcaga

SEQ ID NO: 1869325 - DNA, 15 bp, Homo sapiens
ggatactttgcagaa

SEQ ID NO: 1869326 - DNA, 15 bp, Homo sapiens
gatactttgcagaaa

SEQ ID NO: 1869327 - DNA, 15 bp, Homo sapiens
atactttgcagaaac

SEQ ID NO: 1869328 - DNA, 15 bp, Homo sapiens
tactttgcagaaaca

SEQ ID NO: 1869329 - DNA, 15 bp, Homo sapiens
actttgcagaaacaa

SEQ ID NO: 1869330 - DNA, 15 bp, Homo sapiens
ctttgcagaaacaag

SEQ ID NO: 1869331 - DNA, 15 bp, Homo sapiens
tttgcagaaacaagt

SEQ ID NO: 1869332 - DNA, 15 bp, Homo sapiens
ttgcagaaacaagtg

SEQ ID NO: 1869333 - DNA, 15 bp, Homo sapiens
tgcagaaacaagtga

SEQ ID NO: 1869334 - DNA, 15 bp, Homo sapiens
gcagaaacaagtgaa

SEQ ID NO: 1869335 - DNA, 15 bp, Homo sapiens
cagaaacaagtgaat

SEQ ID NO: 1869336 - DNA, 15 bp, Homo sapiens
agaaacaagtgaatg

SEQ ID NO: 1869337 - DNA, 15 bp, Homo sapiens
gaaacaagtgaatgc

SEQ ID NO: 1869338 - DNA, 15 bp, Homo sapiens
aaacaagtgaatgcc

SEQ ID NO: 1869339 - DNA, 15 bp, Homo sapiens
aacaagtgaatgcct

SEQ ID NO: 1869340 - DNA, 15 bp, Homo sapiens
acaagtgaatgcctg

SEQ ID NO: 1869341 - DNA, 15 bp, Homo sapiens
caagtgaatgcctga

SEQ ID NO: 1869342 - DNA, 15 bp, Homo sapiens
aagtgaatgcctgat

SEQ ID NO: 1869343 - DNA, 15 bp, Homo sapiens
agtgaatgcctgatg

SEQ ID NO: 1869344 - DNA, 15 bp, Homo sapiens
gtgaatgcctgatga

SEQ ID NO: 1869345 - DNA, 15 bp, Homo sapiens
tgaatgcctgatgag

SEQ ID NO: 1869346 - DNA, 15 bp, Homo sapiens
gaatgcctgatgagt

SEQ ID NO: 1869347 - DNA, 15 bp, Homo sapiens
aatgcctgatgagtc

SEQ ID NO: 1869348 - DNA, 15 bp, Homo sapiens
atgcctgatgagtca

SEQ ID NO: 1869349 - DNA, 15 bp, Homo sapiens
tgcctgatgagtcac

SEQ ID NO: 1869350 - DNA, 15 bp, Homo sapiens
gcctgatgagtcacc

SEQ ID NO: 1869351 - DNA, 15 bp, Homo sapiens
cctgatgagtcacct

SEQ ID NO: 1869352 - DNA, 15 bp, Homo sapiens
ctgatgagtcacctt

SEQ ID NO: 1869353 - DNA, 15 bp, Homo sapiens
tgatgagtcaccttc

SEQ ID NO: 1869354 - DNA, 15 bp, Homo sapiens
gatgagtcaccttct

SEQ ID NO: 1869355 - DNA, 15 bp, Homo sapiens
atgagtcaccttctc

SEQ ID NO: 1869356 - DNA, 15 bp, Homo sapiens
tgagtcaccttctcc

SEQ ID NO: 1869357 - DNA, 15 bp, Homo sapiens
gagtcaccttctccc

SEQ ID NO: 1869358 - DNA, 15 bp, Homo sapiens
agtcaccttctccct

SEQ ID NO: 1869359 - DNA, 15 bp, Homo sapiens
gtcaccttctccctg

SEQ ID NO: 1869360 - DNA, 15 bp, Homo sapiens
tcaccttctccctgt

SEQ ID NO: 1869361 - DNA, 15 bp, Homo sapiens
caccttctccctgtc

SEQ ID NO: 1869362 - DNA, 15 bp, Homo sapiens
accttctccctgtcc

SEQ ID NO: 1869363 - DNA, 15 bp, Homo sapiens
ccttctccctgtccc

SEQ ID NO: 1869364 - DNA, 15 bp, Homo sapiens
cttctccctgtccct

SEQ ID NO: 1869365 - DNA, 15 bp, Homo sapiens
ttctccctgtccctg

SEQ ID NO: 1869366 - DNA, 15 bp, Homo sapiens
tctccctgtccctgt

SEQ ID NO: 1869367 - DNA, 15 bp, Homo sapiens
ctccctgtccctgtc

SEQ ID NO: 1869368 - DNA, 15 bp, Homo sapiens
tccctgtccctgtct

SEQ ID NO: 1869369 - DNA, 15 bp, Homo sapiens
ccctgtccctgtctt

SEQ ID NO: 1869370 - DNA, 15 bp, Homo sapiens
cctgtccctgtcttg

SEQ ID NO: 1869371 - DNA, 15 bp, Homo sapiens
ctgtccctgtcttgt

SEQ ID NO: 1869372 - DNA, 15 bp, Homo sapiens
tgtccctgtcttgtt

SEQ ID NO: 1869373 - DNA, 15 bp, Homo sapiens
gtccctgtcttgttt

SEQ ID NO: 1869374 - DNA, 15 bp, Homo sapiens
tccctgtcttgtttt

SEQ ID NO: 1869375 - DNA, 15 bp, Homo sapiens
ctgtcttgttttcca

SEQ ID NO: 1869376 - DNA, 15 bp, Homo sapiens
tgtcttgttttccat

SEQ ID NO: 1869377 - DNA, 15 bp, Homo sapiens
gtcttgttttccata

SEQ ID NO: 1869378 - DNA, 15 bp, Homo sapiens
tcttgttttccatat

SEQ ID NO: 1869379 - DNA, 15 bp, Homo sapiens
cttgttttccatatg

SEQ ID NO: 1869380 - DNA, 15 bp, Homo sapiens
ttgttttccatatgt

SEQ ID NO: 1869381 - DNA, 15 bp, Homo sapiens
tgttttccatatgtt

SEQ ID NO: 1869382 - DNA, 15 bp, Homo sapiens
gttttccatatgttc

SEQ ID NO: 1869383 - DNA, 15 bp, Homo sapiens
ttttccatatgttcc

SEQ ID NO: 1869384 - DNA, 15 bp, Homo sapiens
tttccatatgttcca

SEQ ID NO: 1869385 - DNA, 15 bp, Homo sapiens
ttccatatgttccag

SEQ ID NO: 1869386 - DNA, 15 bp, Homo sapiens
tccatatgttccagt

SEQ ID NO: 1869387 - DNA, 15 bp, Homo sapiens
ccatatgttccagta

SEQ ID NO: 1869388 - DNA, 15 bp, Homo sapiens
catatgttccagtac

SEQ ID NO: 1869389 - DNA, 15 bp, Homo sapiens
atatgttccagtacg

SEQ ID NO: 1869390 - DNA, 15 bp, Homo sapiens
tatgttccagtacgt

SEQ ID NO: 1869391 - DNA, 15 bp, Homo sapiens
atgttccagtacgta

SEQ ID NO: 1869392 - DNA, 15 bp, Homo sapiens
tgttccagtacgtat

SEQ ID NO: 1869393 - DNA, 15 bp, Homo sapiens
gttccagtacgtatg

SEQ ID NO: 1869394 - DNA, 15 bp, Homo sapiens
ttccagtacgtatgt

SEQ ID NO: 1869395 - DNA, 15 bp, Homo sapiens
tccagtacgtatgtg

SEQ ID NO: 1869396 - DNA, 15 bp, Homo sapiens
ccagtacgtatgtgc

SEQ ID NO: 1869397 - DNA, 15 bp, Homo sapiens
cagtacgtatgtgca

SEQ ID NO: 1869398 - DNA, 15 bp, Homo sapiens
agtacgtatgtgcac

SEQ ID NO: 1869399 - DNA, 15 bp, Homo sapiens
gtacgtatgtgcaca

SEQ ID NO: 1869400 - DNA, 15 bp, Homo sapiens
tacgtatgtgcacac

SEQ ID NO: 1869401 - DNA, 15 bp, Homo sapiens
acgtatgtgcacaca

SEQ ID NO: 1869402 - DNA, 15 bp, Homo sapiens
cgtatgtgcacacag

SEQ ID NO: 1869403 - DNA, 15 bp, Homo sapiens
gtatgtgcacacaga

SEQ ID NO: 1869404 - DNA, 15 bp, Homo sapiens
tatgtgcacacagaa

SEQ ID NO: 1869405 - DNA, 15 bp, Homo sapiens
atgtgcacacagaaa

SEQ ID NO: 1869406 - DNA, 15 bp, Homo sapiens
tgtgcacacagaaac

SEQ ID NO: 1869407 - DNA, 15 bp, Homo sapiens
gtgcacacagaaaca

SEQ ID NO: 1869408 - DNA, 15 bp, Homo sapiens
tgcacacagaaacac

SEQ ID NO: 1869409 - DNA, 15 bp, Homo sapiens
gcacacagaaacaca

SEQ ID NO: 1869410 - DNA, 15 bp, Homo sapiens
cacacagaaacacac

SEQ ID NO: 1869411 - DNA, 15 bp, Homo sapiens
acacagaaacacaca

SEQ ID NO: 1869412 - DNA, 15 bp, Homo sapiens
cacagaaacacacat

SEQ ID NO: 1869413 - DNA, 15 bp, Homo sapiens
acagaaacacacata

SEQ ID NO: 1869414 - DNA, 15 bp, Homo sapiens
cagaaacacacataa

SEQ ID NO: 1869415 - DNA, 15 bp, Homo sapiens
agaaacacacataac

SEQ ID NO: 1869416 - DNA, 15 bp, Homo sapiens
gaaacacacataaca

SEQ ID NO: 1869417 - DNA, 15 bp, Homo sapiens
aaacacacataacac

SEQ ID NO: 1869418 - DNA, 15 bp, Homo sapiens
aacacacataacaca

SEQ ID NO: 1869419 - DNA, 15 bp, Homo sapiens
acacacataacacac

SEQ ID NO: 1869420 - DNA, 15 bp, Homo sapiens
cacacataacacaca

SEQ ID NO: 1869421 - DNA, 15 bp, Homo sapiens
cacataacacacact

SEQ ID NO: 1869422 - DNA, 15 bp, Homo sapiens
acataacacacactc

SEQ ID NO: 1869423 - DNA, 15 bp, Homo sapiens
cataacacacactcg

SEQ ID NO: 1869424 - DNA, 15 bp, Homo sapiens
ataacacacactcgt

SEQ ID NO: 1869425 - DNA, 15 bp, Homo sapiens
taacacacactcgta

SEQ ID NO: 1869426 - DNA, 15 bp, Homo sapiens
aacacacactcgtac

SEQ ID NO: 1869427 - DNA, 15 bp, Homo sapiens
acacacactcgtaca

SEQ ID NO: 1869428 - DNA, 15 bp, Homo sapiens
cacacactcgtacac

SEQ ID NO: 1869429 - DNA, 15 bp, Homo sapiens
acacactcgtacaca

SEQ ID NO: 1869430 - DNA, 15 bp, Homo sapiens
cacactcgtacacac

SEQ ID NO: 1869431 - DNA, 15 bp, Homo sapiens
acactcgtacacact

SEQ ID NO: 1869432 - DNA, 15 bp, Homo sapiens
cactcgtacacactg

SEQ ID NO: 1869433 - DNA, 15 bp, Homo sapiens
actcgtacacactga

SEQ ID NO: 1869434 - DNA, 15 bp, Homo sapiens
ctcgtacacactgac

SEQ ID NO: 1869435 - DNA, 15 bp, Homo sapiens
tcgtacacactgaca

SEQ ID NO: 1869436 - DNA, 15 bp, Homo sapiens
cgtacacactgacat

SEQ ID NO: 1869437 - DNA, 15 bp, Homo sapiens
gtacacactgacatc

SEQ ID NO: 1869438 - DNA, 15 bp, Homo sapiens
tacacactgacatca

SEQ ID NO: 1869439 - DNA, 15 bp, Homo sapiens
acacactgacatcat

SEQ ID NO: 1869440 - DNA, 15 bp, Homo sapiens
cacactgacatcatg

SEQ ID NO: 1869441 - DNA, 15 bp, Homo sapiens
acactgacatcatgg

SEQ ID NO: 1869442 - DNA, 15 bp, Homo sapiens
cactgacatcatgga

SEQ ID NO: 1869443 - DNA, 15 bp, Homo sapiens
actgacatcatggac

SEQ ID NO: 1869444 - DNA, 15 bp, Homo sapiens
ctgacatcatggaca

SEQ ID NO: 1869445 - DNA, 15 bp, Homo sapiens
tgacatcatggacac

SEQ ID NO: 1869446 - DNA, 15 bp, Homo sapiens
gacatcatggacaca

SEQ ID NO: 1869447 - DNA, 15 bp, Homo sapiens
acatcatggacacag

SEQ ID NO: 1869448 - DNA, 15 bp, Homo sapiens
catcatggacacagt

SEQ ID NO: 1869449 - DNA, 15 bp, Homo sapiens
atcatggacacagtc

SEQ ID NO: 1869450 - DNA, 15 bp, Homo sapiens
tcatggacacagtct

SEQ ID NO: 1869451 - DNA, 15 bp, Homo sapiens
catggacacagtctt

SEQ ID NO: 1869452 - DNA, 15 bp, Homo sapiens
atggacacagtcttg

SEQ ID NO: 1869453 - DNA, 15 bp, Homo sapiens
tggacacagtcttgc

SEQ ID NO: 1869454 - DNA, 15 bp, Homo sapiens
ggacacagtcttgca

SEQ ID NO: 1869455 - DNA, 15 bp, Homo sapiens
gacacagtcttgcac

SEQ ID NO: 1869456 - DNA, 15 bp, Homo sapiens
acacagtcttgcaca

SEQ ID NO: 1869457 - DNA, 15 bp, Homo sapiens
cacagtcttgcacac

SEQ ID NO: 1869458 - DNA, 15 bp, Homo sapiens
acagtcttgcacacg

SEQ ID NO: 1869459 - DNA, 15 bp, Homo sapiens
cagtcttgcacacgc

SEQ ID NO: 1869460 - DNA, 15 bp, Homo sapiens
agtcttgcacacgca

SEQ ID NO: 1869461 - DNA, 15 bp, Homo sapiens
gtcttgcacacgcac

SEQ ID NO: 1869462 - DNA, 15 bp, Homo sapiens
tcttgcacacgcaca

SEQ ID NO: 1869463 - DNA, 15 bp, Homo sapiens
cttgcacacgcacat

SEQ ID NO: 1869464 - DNA, 15 bp, Homo sapiens
ttgcacacgcacatg

SEQ ID NO: 1869465 - DNA, 15 bp, Homo sapiens
tgcacacgcacatgc

SEQ ID NO: 1869466 - DNA, 15 bp, Homo sapiens
gcacacgcacatgca

SEQ ID NO: 1869467 - DNA, 15 bp, Homo sapiens
cacacgcacatgcac

SEQ ID NO: 1869468 - DNA, 15 bp, Homo sapiens
acacgcacatgcaca

SEQ ID NO: 1869469 - DNA, 15 bp, Homo sapiens
cacgcacatgcacaa

SEQ ID NO: 1869470 - DNA, 15 bp, Homo sapiens
acgcacatgcacaag

SEQ ID NO: 1869471 - DNA, 15 bp, Homo sapiens
cgcacatgcacaagc

SEQ ID NO: 1869472 - DNA, 15 bp, Homo sapiens
gcacatgcacaagca

SEQ ID NO: 1869473 - DNA, 15 bp, Homo sapiens
cacatgcacaagcac

SEQ ID NO: 1869474 - DNA, 15 bp, Homo sapiens
acatgcacaagcact

SEQ ID NO: 1869475 - DNA, 15 bp, Homo sapiens
catgcacaagcactg

SEQ ID NO: 1869476 - DNA, 15 bp, Homo sapiens
atgcacaagcactgg

SEQ ID NO: 1869477 - DNA, 15 bp, Homo sapiens
tgcacaagcactgga

SEQ ID NO: 1869478 - DNA, 15 bp, Homo sapiens
gcacaagcactggac

SEQ ID NO: 1869479 - DNA, 15 bp, Homo sapiens
cacaagcactggact

SEQ ID NO: 1869480 - DNA, 15 bp, Homo sapiens
acaagcactggactt

SEQ ID NO: 1869481 - DNA, 15 bp, Homo sapiens
caagcactggacttc

SEQ ID NO: 1869482 - DNA, 15 bp, Homo sapiens
aagcactggacttcc

SEQ ID NO: 1869483 - DNA, 15 bp, Homo sapiens
agcactggacttcca

SEQ ID NO: 1869484 - DNA, 15 bp, Homo sapiens
gcactggacttccaa

SEQ ID NO: 1869485 - DNA, 15 bp, Homo sapiens
cactggacttccaag

SEQ ID NO: 1869486 - DNA, 15 bp, Homo sapiens
actggacttccaagc

SEQ ID NO: 1869487 - DNA, 15 bp, Homo sapiens
ctggacttccaagct

SEQ ID NO: 1869488 - DNA, 15 bp, Homo sapiens
tggacttccaagcta

SEQ ID NO: 1869489 - DNA, 15 bp, Homo sapiens
ggacttccaagctac

SEQ ID NO: 1869490 - DNA, 15 bp, Homo sapiens
gacttccaagctaca

SEQ ID NO: 1869491 - DNA, 15 bp, Homo sapiens
acttccaagctacat

SEQ ID NO: 1869492 - DNA, 15 bp, Homo sapiens
cttccaagctacatg

SEQ ID NO: 1869493 - DNA, 15 bp, Homo sapiens
ttccaagctacatgg

SEQ ID NO: 1869494 - DNA, 15 bp, Homo sapiens
tccaagctacatggg

SEQ ID NO: 1869495 - DNA, 15 bp, Homo sapiens
ccaagctacatgggg

SEQ ID NO: 1869496 - DNA, 15 bp, Homo sapiens
caagctacatggggg

SEQ ID NO: 1869497 - DNA, 15 bp, Homo sapiens
aagctacatgggggg

SEQ ID NO: 1869498 - DNA, 15 bp, Homo sapiens
agctacatggggggt

SEQ ID NO: 1869499 - DNA, 15 bp, Homo sapiens
gctacatggggggtg

SEQ ID NO: 1869500 - DNA, 15 bp, Homo sapiens
ctacatggggggtgg

SEQ ID NO: 1869501 - DNA, 15 bp, Homo sapiens
tacatggggggtggt

SEQ ID NO: 1869502 - DNA, 15 bp, Homo sapiens
acatggggggtggtg

SEQ ID NO: 1869503 - DNA, 15 bp, Homo sapiens
catggggggtggtga

SEQ ID NO: 1869504 - DNA, 15 bp, Homo sapiens
atggggggtggtgac

SEQ ID NO: 1869505 - DNA, 15 bp, Homo sapiens
tggggggtggtgacc

SEQ ID NO: 1869506 - DNA, 15 bp, Homo sapiens
ggggggtggtgaccg

SEQ ID NO: 1869507 - DNA, 15 bp, Homo sapiens
gggggtggtgaccgg

SEQ ID NO: 1869508 - DNA, 15 bp, Homo sapiens
ggggtggtgaccggc

SEQ ID NO: 1869509 - DNA, 15 bp, Homo sapiens
gggtggtgaccggcc

SEQ ID NO: 1869510 - DNA, 15 bp, Homo sapiens
ggtggtgaccggcca

SEQ ID NO: 1869511 - DNA, 15 bp, Homo sapiens
gtggtgaccggccag

SEQ ID NO: 1869512 - DNA, 15 bp, Homo sapiens
tggtgaccggccagt

SEQ ID NO: 1869513 - DNA, 15 bp, Homo sapiens
ggtgaccggccagtt

SEQ ID NO: 1869514 - DNA, 15 bp, Homo sapiens
gtgaccggccagttt

SEQ ID NO: 1869515 - DNA, 15 bp, Homo sapiens
tgaccggccagtttt

SEQ ID NO: 1869516 - DNA, 15 bp, Homo sapiens
gaccggccagttttc

SEQ ID NO: 1869517 - DNA, 15 bp, Homo sapiens
accggccagttttct

SEQ ID NO: 1869518 - DNA, 15 bp, Homo sapiens
ccggccagttttctg

SEQ ID NO: 1869519 - DNA, 15 bp, Homo sapiens
cggccagttttctgg

SEQ ID NO: 1869520 - DNA, 15 bp, Homo sapiens
ggccagttttctggt

SEQ ID NO: 1869521 - DNA, 15 bp, Homo sapiens
gccagttttctggtg

SEQ ID NO: 1869522 - DNA, 15 bp, Homo sapiens
ccagttttctggtgt

SEQ ID NO: 1869523 - DNA, 15 bp, Homo sapiens
cagttttctggtgtt

SEQ ID NO: 1869524 - DNA, 15 bp, Homo sapiens
agttttctggtgttg

SEQ ID NO: 1869525 - DNA, 15 bp, Homo sapiens
gttttctggtgttga

SEQ ID NO: 1869526 - DNA, 15 bp, Homo sapiens
ttttctggtgttgat

SEQ ID NO: 1869527 - DNA, 15 bp, Homo sapiens
tttctggtgttgatt

SEQ ID NO: 1869528 - DNA, 15 bp, Homo sapiens
ttctggtgttgattt

SEQ ID NO: 1869529 - DNA, 15 bp, Homo sapiens
tctggtgttgatttt

SEQ ID NO: 1869530 - DNA, 15 bp, Homo sapiens
ctggtgttgattttt

SEQ ID NO: 1869531 - DNA, 15 bp, Homo sapiens
tggtgttgattttta

SEQ ID NO: 1869532 - DNA, 15 bp, Homo sapiens
ggtgttgatttttag

SEQ ID NO: 1869533 - DNA, 15 bp, Homo sapiens
gtgttgatttttagt

SEQ ID NO: 1869534 - DNA, 15 bp, Homo sapiens
tgttgatttttagtg

SEQ ID NO: 1869535 - DNA, 15 bp, Homo sapiens
gttgatttttagtgg

SEQ ID NO: 1869536 - DNA, 15 bp, Homo sapiens
ttgatttttagtggg

SEQ ID NO: 1869537 - DNA, 15 bp, Homo sapiens
tgatttttagtgggg

SEQ ID NO: 1869538 - DNA, 15 bp, Homo sapiens
gatttttagtggggg

SEQ ID NO: 1869539 - DNA, 15 bp, Homo sapiens
atttttagtgggggt

SEQ ID NO: 1869540 - DNA, 15 bp, Homo sapiens
tttttagtgggggtt

SEQ ID NO: 1869541 - DNA, 15 bp, Homo sapiens
ttttagtgggggttg

SEQ ID NO: 1869542 - DNA, 15 bp, Homo sapiens
tttagtgggggttgg

SEQ ID NO: 1869543 - DNA, 15 bp, Homo sapiens
ttagtgggggttggg

SEQ ID NO: 1869544 - DNA, 15 bp, Homo sapiens
tagtgggggttgggg

SEQ ID NO: 1869545 - DNA, 15 bp, Homo sapiens
agtgggggttggggg

SEQ ID NO: 1869546 - DNA, 15 bp, Homo sapiens
gtgggggttgggggt

SEQ ID NO: 1869547 - DNA, 15 bp, Homo sapiens
tgggggttgggggtt

SEQ ID NO: 1869548 - DNA, 15 bp, Homo sapiens
gggggttgggggttg

SEQ ID NO: 1869549 - DNA, 15 bp, Homo sapiens
ggggttgggggttga

SEQ ID NO: 1869550 - DNA, 15 bp, Homo sapiens
gggttgggggttgag

SEQ ID NO: 1869551 - DNA, 15 bp, Homo sapiens
ggttgggggttgagg

SEQ ID NO: 1869552 - DNA, 15 bp, Homo sapiens
gttgggggttgaggg

SEQ ID NO: 1869553 - DNA, 15 bp, Homo sapiens
ttgggggttgaggga

SEQ ID NO: 1869554 - DNA, 15 bp, Homo sapiens
tgggggttgagggaa

SEQ ID NO: 1869555 - DNA, 15 bp, Homo sapiens
gggggttgagggaaa

SEQ ID NO: 1869556 - DNA, 15 bp, Homo sapiens
ggggttgagggaaag

SEQ ID NO: 1869557 - DNA, 15 bp, Homo sapiens
gggttgagggaaagg

SEQ ID NO: 1869558 - DNA, 15 bp, Homo sapiens
ggttgagggaaagga

SEQ ID NO: 1869559 - DNA, 15 bp, Homo sapiens
gttgagggaaaggaa

SEQ ID NO: 1869560 - DNA, 15 bp, Homo sapiens
ttgagggaaaggaat

SEQ ID NO: 1869561 - DNA, 15 bp, Homo sapiens
tgagggaaaggaatg

SEQ ID NO: 1869562 - DNA, 15 bp, Homo sapiens
gagggaaaggaatga

SEQ ID NO: 1869563 - DNA, 15 bp, Homo sapiens
agggaaaggaatgag

SEQ ID NO: 1869564 - DNA, 15 bp, Homo sapiens
gggaaaggaatgaga

SEQ ID NO: 1869565 - DNA, 15 bp, Homo sapiens
ggaaaggaatgagac

SEQ ID NO: 1869566 - DNA, 15 bp, Homo sapiens
gaaaggaatgagacc

SEQ ID NO: 1869567 - DNA, 15 bp, Homo sapiens
aaaggaatgagacct

SEQ ID NO: 1869568 - DNA, 15 bp, Homo sapiens
aaggaatgagacctc

SEQ ID NO: 1869569 - DNA, 15 bp, Homo sapiens
aggaatgagacctca

SEQ ID NO: 1869570 - DNA, 15 bp, Homo sapiens
ggaatgagacctcag

SEQ ID NO: 1869571 - DNA, 15 bp, Homo sapiens
gaatgagacctcagt

SEQ ID NO: 1869572 - DNA, 15 bp, Homo sapiens
aatgagacctcagtg

SEQ ID NO: 1869573 - DNA, 15 bp, Homo sapiens
atgagacctcagtgt

SEQ ID NO: 1869574 - DNA, 15 bp, Homo sapiens
tgagacctcagtgtc

SEQ ID NO: 1869575 - DNA, 15 bp, Homo sapiens
gagacctcagtgtcc

SEQ ID NO: 1869576 - DNA, 15 bp, Homo sapiens
agacctcagtgtccc

SEQ ID NO: 1869577 - DNA, 15 bp, Homo sapiens
gacctcagtgtcccc

SEQ ID NO: 1869578 - DNA, 15 bp, Homo sapiens
acctcagtgtcccct

SEQ ID NO: 1869579 - DNA, 15 bp, Homo sapiens
cctcagtgtcccctt

SEQ ID NO: 1869580 - DNA, 15 bp, Homo sapiens
ctcagtgtccccttt

SEQ ID NO: 1869581 - DNA, 15 bp, Homo sapiens
tcagtgtcccctttt

SEQ ID NO: 1869582 - DNA, 15 bp, Homo sapiens
cagtgtccccttttt

SEQ ID NO: 1869583 - DNA, 15 bp, Homo sapiens
agtgtcccctttttg

SEQ ID NO: 1869584 - DNA, 15 bp, Homo sapiens
gtgtcccctttttgt

SEQ ID NO: 1869585 - DNA, 15 bp, Homo sapiens
gtcccctttttgtgg

SEQ ID NO: 1869586 - DNA, 15 bp, Homo sapiens
tcccctttttgtgga

SEQ ID NO: 1869587 - DNA, 15 bp, Homo sapiens
cccctttttgtggag

SEQ ID NO: 1869588 - DNA, 15 bp, Homo sapiens
ccctttttgtggagc

SEQ ID NO: 1869589 - DNA, 15 bp, Homo sapiens
cctttttgtggagct

SEQ ID NO: 1869590 - DNA, 15 bp, Homo sapiens
ctttttgtggagctt

SEQ ID NO: 1869591 - DNA, 15 bp, Homo sapiens
tttttgtggagcttt

SEQ ID NO: 1869592 - DNA, 15 bp, Homo sapiens
ttttgtggagctttt

SEQ ID NO: 1869593 - DNA, 15 bp, Homo sapiens
tttgtggagcttttg

SEQ ID NO: 1869594 - DNA, 15 bp, Homo sapiens
ttgtggagcttttgg

SEQ ID NO: 1869595 - DNA, 15 bp, Homo sapiens
tgtggagcttttggg

SEQ ID NO: 1869596 - DNA, 15 bp, Homo sapiens
gtggagcttttgggg

SEQ ID NO: 1869597 - DNA, 15 bp, Homo sapiens
tggagcttttggggc

SEQ ID NO: 1869598 - DNA, 15 bp, Homo sapiens
ggagcttttggggca

SEQ ID NO: 1869599 - DNA, 15 bp, Homo sapiens
gagcttttggggcag

SEQ ID NO: 1869600 - DNA, 15 bp, Homo sapiens
agcttttggggcagg

SEQ ID NO: 1869601 - DNA, 15 bp, Homo sapiens
gcttttggggcaggc

SEQ ID NO: 1869602 - DNA, 15 bp, Homo sapiens
cttttggggcaggca

SEQ ID NO: 1869603 - DNA, 15 bp, Homo sapiens
ttttggggcaggcat

SEQ ID NO: 1869604 - DNA, 15 bp, Homo sapiens
tttggggcaggcatt

SEQ ID NO: 1869605 - DNA, 15 bp, Homo sapiens
ttggggcaggcattt

SEQ ID NO: 1869606 - DNA, 15 bp, Homo sapiens
tggggcaggcatttg

SEQ ID NO: 1869607 - DNA, 15 bp, Homo sapiens
ggggcaggcatttgg

SEQ ID NO: 1869608 - DNA, 15 bp, Homo sapiens
gggcaggcatttggg

SEQ ID NO: 1869609 - DNA, 15 bp, Homo sapiens
ggcaggcatttggga

SEQ ID NO: 1869610 - DNA, 15 bp, Homo sapiens
gcaggcatttgggaa

SEQ ID NO: 1869611 - DNA, 15 bp, Homo sapiens
caggcatttgggaag

SEQ ID NO: 1869612 - DNA, 15 bp, Homo sapiens
aggcatttgggaagg

SEQ ID NO: 1869613 - DNA, 15 bp, Homo sapiens
ggcatttgggaaggc

SEQ ID NO: 1869614 - DNA, 15 bp, Homo sapiens
gcatttgggaaggcc

SEQ ID NO: 1869615 - DNA, 15 bp, Homo sapiens
catttgggaaggcca

SEQ ID NO: 1869616 - DNA, 15 bp, Homo sapiens
atttgggaaggccag

SEQ ID NO: 1869617 - DNA, 15 bp, Homo sapiens
tttgggaaggccagc

SEQ ID NO: 1869618 - DNA, 15 bp, Homo sapiens
ttgggaaggccagct

SEQ ID NO: 1869619 - DNA, 15 bp, Homo sapiens
tgggaaggccagctt

SEQ ID NO: 1869620 - DNA, 15 bp, Homo sapiens
gggaaggccagcttg

SEQ ID NO: 1869621 - DNA, 15 bp, Homo sapiens
ggaaggccagcttgg

SEQ ID NO: 1869622 - DNA, 15 bp, Homo sapiens
gaaggccagcttggg

SEQ ID NO: 1869623 - DNA, 15 bp, Homo sapiens
aaggccagcttgggg

SEQ ID NO: 1869624 - DNA, 15 bp, Homo sapiens
aggccagcttggggt

SEQ ID NO: 1869625 - DNA, 15 bp, Homo sapiens
ggccagcttggggtg

SEQ ID NO: 1869626 - DNA, 15 bp, Homo sapiens
gccagcttggggtgt

SEQ ID NO: 1869627 - DNA, 15 bp, Homo sapiens
ccagcttggggtgtc

SEQ ID NO: 1869628 - DNA, 15 bp, Homo sapiens
cagcttggggtgtct

SEQ ID NO: 1869629 - DNA, 15 bp, Homo sapiens
agcttggggtgtctg

SEQ ID NO: 1869630 - DNA, 15 bp, Homo sapiens
gcttggggtgtctgt

SEQ ID NO: 1869631 - DNA, 15 bp, Homo sapiens
cttggggtgtctgta

SEQ ID NO: 1869632 - DNA, 15 bp, Homo sapiens
ttggggtgtctgtag

SEQ ID NO: 1869633 - DNA, 15 bp, Homo sapiens
tggggtgtctgtagg

SEQ ID NO: 1869634 - DNA, 15 bp, Homo sapiens
ggggtgtctgtaggg

SEQ ID NO: 1869635 - DNA, 15 bp, Homo sapiens
gggtgtctgtaggga

SEQ ID NO: 1869636 - DNA, 15 bp, Homo sapiens
ggtgtctgtagggaa

SEQ ID NO: 1869637 - DNA, 15 bp, Homo sapiens
gtgtctgtagggaac

SEQ ID NO: 1869638 - DNA, 15 bp, Homo sapiens
tgtctgtagggaacc

SEQ ID NO: 1869639 - DNA, 15 bp, Homo sapiens
gtctgtagggaaccg

SEQ ID NO: 1869640 - DNA, 15 bp, Homo sapiens
tctgtagggaaccgc

SEQ ID NO: 1869641 - DNA, 15 bp, Homo sapiens
ctgtagggaaccgct

SEQ ID NO: 1869642 - DNA, 15 bp, Homo sapiens
tgtagggaaccgctg

SEQ ID NO: 1869643 - DNA, 15 bp, Homo sapiens
gtagggaaccgctgc

SEQ ID NO: 1869644 - DNA, 15 bp, Homo sapiens
tagggaaccgctgct

SEQ ID NO: 1869645 - DNA, 15 bp, Homo sapiens
agggaaccgctgctc

SEQ ID NO: 1869646 - DNA, 15 bp, Homo sapiens
gggaaccgctgctct

SEQ ID NO: 1869647 - DNA, 15 bp, Homo sapiens
ggaaccgctgctctg

SEQ ID NO: 1869648 - DNA, 15 bp, Homo sapiens
gaaccgctgctctgg

SEQ ID NO: 1869649 - DNA, 15 bp, Homo sapiens
aaccgctgctctggg

SEQ ID NO: 1869650 - DNA, 15 bp, Homo sapiens
accgctgctctgggt

SEQ ID NO: 1869651 - DNA, 15 bp, Homo sapiens
ccgctgctctgggtg

SEQ ID NO: 1869652 - DNA, 15 bp, Homo sapiens
cgctgctctgggtgt

SEQ ID NO: 1869653 - DNA, 15 bp, Homo sapiens
gctgctctgggtgtg

SEQ ID NO: 1869654 - DNA, 15 bp, Homo sapiens
ctgctctgggtgtgt

SEQ ID NO: 1869655 - DNA, 15 bp, Homo sapiens
tgctctgggtgtgtg

SEQ ID NO: 1869656 - DNA, 15 bp, Homo sapiens
gctctgggtgtgtgt

SEQ ID NO: 1869657 - DNA, 15 bp, Homo sapiens
ctctgggtgtgtgtg

SEQ ID NO: 1869658 - DNA, 15 bp, Homo sapiens
tctgggtgtgtgtgt

SEQ ID NO: 1869659 - DNA, 15 bp, Homo sapiens
ctgggtgtgtgtgtc

SEQ ID NO: 1869660 - DNA, 15 bp, Homo sapiens
tgggtgtgtgtgtct

SEQ ID NO: 1869661 - DNA, 15 bp, Homo sapiens
gggtgtgtgtgtctg

SEQ ID NO: 1869662 - DNA, 15 bp, Homo sapiens
ggtgtgtgtgtctgt

SEQ ID NO: 1869663 - DNA, 15 bp, Homo sapiens
tgtgtgtgtctgtgg

SEQ ID NO: 1869664 - DNA, 15 bp, Homo sapiens
gtgtgtgtctgtggc

SEQ ID NO: 1869665 - DNA, 15 bp, Homo sapiens
tgtgtgtctgtggct

SEQ ID NO: 1869666 - DNA, 15 bp, Homo sapiens
gtgtgtctgtggctg

SEQ ID NO: 1869667 - DNA, 15 bp, Homo sapiens
tgtgtctgtggctgc

SEQ ID NO: 1869668 - DNA, 15 bp, Homo sapiens
gtgtctgtggctgcc

SEQ ID NO: 1869669 - DNA, 15 bp, Homo sapiens
tgtctgtggctgccc

SEQ ID NO: 1869670 - DNA, 15 bp, Homo sapiens
gtctgtggctgcccc

SEQ ID NO: 1869671 - DNA, 15 bp, Homo sapiens
tctgtggctgcccca

SEQ ID NO: 1869672 - DNA, 15 bp, Homo sapiens
ctgtggctgccccag

SEQ ID NO: 1869673 - DNA, 15 bp, Homo sapiens
tgtggctgccccagc

SEQ ID NO: 1869674 - DNA, 15 bp, Homo sapiens
gtggctgccccagca

SEQ ID NO: 1869675 - DNA, 15 bp, Homo sapiens
tggctgccccagcag

SEQ ID NO: 1869676 - DNA, 15 bp, Homo sapiens
ggctgccccagcagg

SEQ ID NO: 1869677 - DNA, 15 bp, Homo sapiens
ctgccccagcaggcc

SEQ ID NO: 1869678 - DNA, 15 bp, Homo sapiens
tgccccagcaggccg

SEQ ID NO: 1869679 - DNA, 15 bp, Homo sapiens
gccccagcaggccgc

SEQ ID NO: 1869680 - DNA, 15 bp, Homo sapiens
ccccagcaggccgca

SEQ ID NO: 1869681 - DNA, 15 bp, Homo sapiens
cccagcaggccgcag

SEQ ID NO: 1869682 - DNA, 15 bp, Homo sapiens
ccagcaggccgcagt

SEQ ID NO: 1869683 - DNA, 15 bp, Homo sapiens
cagcaggccgcagtg

SEQ ID NO: 1869684 - DNA, 15 bp, Homo sapiens
agcaggccgcagtgt

SEQ ID NO: 1869685 - DNA, 15 bp, Homo sapiens
gcaggccgcagtgtg

SEQ ID NO: 1869686 - DNA, 15 bp, Homo sapiens
caggccgcagtgtgc

SEQ ID NO: 1869687 - DNA, 15 bp, Homo sapiens
aggccgcagtgtgca

SEQ ID NO: 1869688 - DNA, 15 bp, Homo sapiens
ggccgcagtgtgcac

SEQ ID NO: 1869689 - DNA, 15 bp, Homo sapiens
gccgcagtgtgcaca

SEQ ID NO: 1869690 - DNA, 15 bp, Homo sapiens
ccgcagtgtgcacat

SEQ ID NO: 1869691 - DNA, 15 bp, Homo sapiens
cgcagtgtgcacatt

SEQ ID NO: 1869692 - DNA, 15 bp, Homo sapiens
gcagtgtgcacattt

SEQ ID NO: 1869693 - DNA, 15 bp, Homo sapiens
cagtgtgcacatttg

SEQ ID NO: 1869694 - DNA, 15 bp, Homo sapiens
agtgtgcacatttgt

SEQ ID NO: 1869695 - DNA, 15 bp, Homo sapiens
gtgtgcacatttgta

SEQ ID NO: 1869696 - DNA, 15 bp, Homo sapiens
tgtgcacatttgtat

SEQ ID NO: 1869697 - DNA, 15 bp, Homo sapiens
gtgcacatttgtatg

SEQ ID NO: 1869698 - DNA, 15 bp, Homo sapiens
tgcacatttgtatgg

SEQ ID NO: 1869699 - DNA, 15 bp, Homo sapiens
gcacatttgtatggc

SEQ ID NO: 1869700 - DNA, 15 bp, Homo sapiens
cacatttgtatggcc

SEQ ID NO: 1869701 - DNA, 15 bp, Homo sapiens
acatttgtatggcct

SEQ ID NO: 1869702 - DNA, 15 bp, Homo sapiens
catttgtatggcctt

SEQ ID NO: 1869703 - DNA, 15 bp, Homo sapiens
atttgtatggcctta

SEQ ID NO: 1869704 - DNA, 15 bp, Homo sapiens
tttgtatggccttac

SEQ ID NO: 1869705 - DNA, 15 bp, Homo sapiens
ttgtatggccttact

SEQ ID NO: 1869706 - DNA, 15 bp, Homo sapiens
tgtatggccttactg

SEQ ID NO: 1869707 - DNA, 15 bp, Homo sapiens
gtatggccttactga

SEQ ID NO: 1869708 - DNA, 15 bp, Homo sapiens
tatggccttactgac

SEQ ID NO: 1869709 - DNA, 15 bp, Homo sapiens
atggccttactgacg

SEQ ID NO: 1869710 - DNA, 15 bp, Homo sapiens
tggccttactgacgg

SEQ ID NO: 1869711 - DNA, 15 bp, Homo sapiens
ggccttactgacggg

SEQ ID NO: 1869712 - DNA, 15 bp, Homo sapiens
gccttactgacgggc

SEQ ID NO: 1869713 - DNA, 15 bp, Homo sapiens
ccttactgacgggca

SEQ ID NO: 1869714 - DNA, 15 bp, Homo sapiens
cttactgacgggcac

SEQ ID NO: 1869715 - DNA, 15 bp, Homo sapiens
ttactgacgggcacc

SEQ ID NO: 1869716 - DNA, 15 bp, Homo sapiens
tactgacgggcacct

SEQ ID NO: 1869717 - DNA, 15 bp, Homo sapiens
actgacgggcacctc

SEQ ID NO: 1869718 - DNA, 15 bp, Homo sapiens
ctgacgggcacctcc

SEQ ID NO: 1869719 - DNA, 15 bp, Homo sapiens
tgacgggcacctcca

SEQ ID NO: 1869720 - DNA, 15 bp, Homo sapiens
gacgggcacctccat

SEQ ID NO: 1869721 - DNA, 15 bp, Homo sapiens
acgggcacctccatc

SEQ ID NO: 1869722 - DNA, 15 bp, Homo sapiens
cgggcacctccatcc

SEQ ID NO: 1869723 - DNA, 15 bp, Homo sapiens
gggcacctccatcca

SEQ ID NO: 1869724 - DNA, 15 bp, Homo sapiens
ggcacctccatccaa

SEQ ID NO: 1869725 - DNA, 15 bp, Homo sapiens
gcacctccatccaac

SEQ ID NO: 1869726 - DNA, 15 bp, Homo sapiens
cacctccatccaaca

SEQ ID NO: 1869727 - DNA, 15 bp, Homo sapiens
acctccatccaacac

SEQ ID NO: 1869728 - DNA, 15 bp, Homo sapiens
cctccatccaacact

SEQ ID NO: 1869729 - DNA, 15 bp, Homo sapiens
ctccatccaacactg

SEQ ID NO: 1869730 - DNA, 15 bp, Homo sapiens
tccatccaacactgg

SEQ ID NO: 1869731 - DNA, 15 bp, Homo sapiens
ccatccaacactggc

SEQ ID NO: 1869732 - DNA, 15 bp, Homo sapiens
catccaacactggct

SEQ ID NO: 1869733 - DNA, 15 bp, Homo sapiens
atccaacactggctg

SEQ ID NO: 1869734 - DNA, 15 bp, Homo sapiens
tccaacactggctgc

SEQ ID NO: 1869735 - DNA, 15 bp, Homo sapiens
ccaacactggctgct

SEQ ID NO: 1869736 - DNA, 15 bp, Homo sapiens
caacactggctgcta

SEQ ID NO: 1869737 - DNA, 15 bp, Homo sapiens
aacactggctgctac

SEQ ID NO: 1869738 - DNA, 15 bp, Homo sapiens
acactggctgctact

SEQ ID NO: 1869739 - DNA, 15 bp, Homo sapiens
cactggctgctactt

SEQ ID NO: 1869740 - DNA, 15 bp, Homo sapiens
actggctgctactta

SEQ ID NO: 1869741 - DNA, 15 bp, Homo sapiens
ctggctgctacttaa

SEQ ID NO: 1869742 - DNA, 15 bp, Homo sapiens
tggctgctacttaaa

SEQ ID NO: 1869743 - DNA, 15 bp, Homo sapiens
ggctgctacttaaaa

SEQ ID NO: 1869744 - DNA, 15 bp, Homo sapiens
gctgctacttaaaac

SEQ ID NO: 1869745 - DNA, 15 bp, Homo sapiens
ctgctacttaaaaca

SEQ ID NO: 1869746 - DNA, 15 bp, Homo sapiens
tgctacttaaaacaa

SEQ ID NO: 1869747 - DNA, 15 bp, Homo sapiens
gctacttaaaacaac

SEQ ID NO: 1869748 - DNA, 15 bp, Homo sapiens
ctacttaaaacaaca

SEQ ID NO: 1869749 - DNA, 15 bp, Homo sapiens
tacttaaaacaacaa

SEQ ID NO: 1869750 - DNA, 15 bp, Homo sapiens
acttaaaacaacaac

SEQ ID NO: 1869751 - DNA, 15 bp, Homo sapiens
cttaaaacaacaaca

SEQ ID NO: 1869752 - DNA, 15 bp, Homo sapiens
ttaaaacaacaacaa

SEQ ID NO: 1869753 - DNA, 15 bp, Homo sapiens
taaaacaacaacaac

SEQ ID NO: 1869754 - DNA, 15 bp, Homo sapiens
acaacaacaacaact

SEQ ID NO: 1869755 - DNA, 15 bp, Homo sapiens
caacaacaacaactg

SEQ ID NO: 1869756 - DNA, 15 bp, Homo sapiens
aacaacaacaactga

SEQ ID NO: 1869757 - DNA, 15 bp, Homo sapiens
acaacaacaactgag

SEQ ID NO: 1869758 - DNA, 15 bp, Homo sapiens
caacaacaactgagt

SEQ ID NO: 1869759 - DNA, 15 bp, Homo sapiens
aacaacaactgagtg

SEQ ID NO: 1869760 - DNA, 15 bp, Homo sapiens
acaacaactgagtgg

SEQ ID NO: 1869761 - DNA, 15 bp, Homo sapiens
caacaactgagtgga

SEQ ID NO: 1869762 - DNA, 15 bp, Homo sapiens
aacaactgagtggag

SEQ ID NO: 1869763 - DNA, 15 bp, Homo sapiens
acaactgagtggagc

SEQ ID NO: 1869764 - DNA, 15 bp, Homo sapiens
caactgagtggagcc

SEQ ID NO: 1869765 - DNA, 15 bp, Homo sapiens
aactgagtggagcca

SEQ ID NO: 1869766 - DNA, 15 bp, Homo sapiens
actgagtggagccag

SEQ ID NO: 1869767 - DNA, 15 bp, Homo sapiens
ctgagtggagccagt

SEQ ID NO: 1869768 - DNA, 15 bp, Homo sapiens
tgagtggagccagtg

SEQ ID NO: 1869769 - DNA, 15 bp, Homo sapiens
gagtggagccagtgg

SEQ ID NO: 1869770 - DNA, 15 bp, Homo sapiens
agtggagccagtggg

SEQ ID NO: 1869771 - DNA, 15 bp, Homo sapiens
gtggagccagtgggt

SEQ ID NO: 1869772 - DNA, 15 bp, Homo sapiens
tggagccagtgggtt

SEQ ID NO: 1869773 - DNA, 15 bp, Homo sapiens
ggagccagtgggttc

SEQ ID NO: 1869774 - DNA, 15 bp, Homo sapiens
gagccagtgggttcc

SEQ ID NO: 1869775 - DNA, 15 bp, Homo sapiens
agccagtgggttccc

SEQ ID NO: 1869776 - DNA, 15 bp, Homo sapiens
gccagtgggttccca

SEQ ID NO: 1869777 - DNA, 15 bp, Homo sapiens
ccagtgggttcccag

SEQ ID NO: 1869778 - DNA, 15 bp, Homo sapiens
cagtgggttcccagg

SEQ ID NO: 1869779 - DNA, 15 bp, Homo sapiens
agtgggttcccaggt

SEQ ID NO: 1869780 - DNA, 15 bp, Homo sapiens
gtgggttcccaggtc

SEQ ID NO: 1869781 - DNA, 15 bp, Homo sapiens
tgggttcccaggtcc

SEQ ID NO: 1869782 - DNA, 15 bp, Homo sapiens
gggttcccaggtcct

SEQ ID NO: 1869783 - DNA, 15 bp, Homo sapiens
ggttcccaggtccta

SEQ ID NO: 1869784 - DNA, 15 bp, Homo sapiens
gttcccaggtcctaa

SEQ ID NO: 1869785 - DNA, 15 bp, Homo sapiens
ttcccaggtcctaac

SEQ ID NO: 1869786 - DNA, 15 bp, Homo sapiens
tcccaggtcctaaca

SEQ ID NO: 1869787 - DNA, 15 bp, Homo sapiens
cccaggtcctaacac

SEQ ID NO: 1869788 - DNA, 15 bp, Homo sapiens
ccaggtcctaacacg

SEQ ID NO: 1869789 - DNA, 15 bp, Homo sapiens
caggtcctaacacgc

SEQ ID NO: 1869790 - DNA, 15 bp, Homo sapiens
aggtcctaacacgcc

SEQ ID NO: 1869791 - DNA, 15 bp, Homo sapiens
ggtcctaacacgcct

SEQ ID NO: 1869792 - DNA, 15 bp, Homo sapiens
gtcctaacacgcctg

SEQ ID NO: 1869793 - DNA, 15 bp, Homo sapiens
tcctaacacgcctgt

SEQ ID NO: 1869794 - DNA, 15 bp, Homo sapiens
cctaacacgcctgta

SEQ ID NO: 1869795 - DNA, 15 bp, Homo sapiens
ctaacacgcctgtaa

SEQ ID NO: 1869796 - DNA, 15 bp, Homo sapiens
taacacgcctgtaaa

SEQ ID NO: 1869797 - DNA, 15 bp, Homo sapiens
aacacgcctgtaaaa

SEQ ID NO: 1869798 - DNA, 15 bp, Homo sapiens
acacgcctgtaaaag

SEQ ID NO: 1869799 - DNA, 15 bp, Homo sapiens
cacgcctgtaaaagt

SEQ ID NO: 1869800 - DNA, 15 bp, Homo sapiens
acgcctgtaaaagtt

SEQ ID NO: 1869801 - DNA, 15 bp, Homo sapiens
cgcctgtaaaagttg

SEQ ID NO: 1869802 - DNA, 15 bp, Homo sapiens
gcctgtaaaagttgg

SEQ ID NO: 1869803 - DNA, 15 bp, Homo sapiens
cctgtaaaagttgga

SEQ ID NO: 1869804 - DNA, 15 bp, Homo sapiens
ctgtaaaagttggag

SEQ ID NO: 1869805 - DNA, 15 bp, Homo sapiens
tgtaaaagttggagc

SEQ ID NO: 1869806 - DNA, 15 bp, Homo sapiens
gtaaaagttggagcc

SEQ ID NO: 1869807 - DNA, 15 bp, Homo sapiens
taaaagttggagcca

SEQ ID NO: 1869808 - DNA, 15 bp, Homo sapiens
aaaagttggagccag

SEQ ID NO: 1869809 - DNA, 15 bp, Homo sapiens
aaagttggagccagt

SEQ ID NO: 1869810 - DNA, 15 bp, Homo sapiens
aagttggagccagtt

SEQ ID NO: 1869811 - DNA, 15 bp, Homo sapiens
agttggagccagtta

SEQ ID NO: 1869812 - DNA, 15 bp, Homo sapiens
gttggagccagttag

SEQ ID NO: 1869813 - DNA, 15 bp, Homo sapiens
ttggagccagttagt

SEQ ID NO: 1869814 - DNA, 15 bp, Homo sapiens
tggagccagttagtg

SEQ ID NO: 1869815 - DNA, 15 bp, Homo sapiens
ggagccagttagtgt

SEQ ID NO: 1869816 - DNA, 15 bp, Homo sapiens
gagccagttagtgtc

SEQ ID NO: 1869817 - DNA, 15 bp, Homo sapiens
agccagttagtgtcc

SEQ ID NO: 1869818 - DNA, 15 bp, Homo sapiens
gccagttagtgtcct

SEQ ID NO: 1869819 - DNA, 15 bp, Homo sapiens
ccagttagtgtcctg

SEQ ID NO: 1869820 - DNA, 15 bp, Homo sapiens
cagttagtgtcctgg

SEQ ID NO: 1869821 - DNA, 15 bp, Homo sapiens
agttagtgtcctggg

SEQ ID NO: 1869822 - DNA, 15 bp, Homo sapiens
gttagtgtcctgggc

SEQ ID NO: 1869823 - DNA, 15 bp, Homo sapiens
ttagtgtcctgggct

SEQ ID NO: 1869824 - DNA, 15 bp, Homo sapiens
tagtgtcctgggctg

SEQ ID NO: 1869825 - DNA, 15 bp, Homo sapiens
agtgtcctgggctgc

SEQ ID NO: 1869826 - DNA, 15 bp, Homo sapiens
gtgtcctgggctgcc

SEQ ID NO: 1869827 - DNA, 15 bp, Homo sapiens
tgtcctgggctgccc

SEQ ID NO: 1869828 - DNA, 15 bp, Homo sapiens
gtcctgggctgcccc

SEQ ID NO: 1869829 - DNA, 15 bp, Homo sapiens
tcctgggctgcccca

SEQ ID NO: 1869830 - DNA, 15 bp, Homo sapiens
cctgggctgccccag

SEQ ID NO: 1869831 - DNA, 15 bp, Homo sapiens
ctgggctgccccagt

SEQ ID NO: 1869832 - DNA, 15 bp, Homo sapiens
tgggctgccccagtt

SEQ ID NO: 1869833 - DNA, 15 bp, Homo sapiens
gggctgccccagtta

SEQ ID NO: 1869834 - DNA, 15 bp, Homo sapiens
ggctgccccagttac

SEQ ID NO: 1869835 - DNA, 15 bp, Homo sapiens
gctgccccagttacc

SEQ ID NO: 1869836 - DNA, 15 bp, Homo sapiens
ctgccccagttaccc

SEQ ID NO: 1869837 - DNA, 15 bp, Homo sapiens
tgccccagttaccca

SEQ ID NO: 1869838 - DNA, 15 bp, Homo sapiens
gccccagttacccag

SEQ ID NO: 1869839 - DNA, 15 bp, Homo sapiens
ccccagttacccagc

SEQ ID NO: 1869840 - DNA, 15 bp, Homo sapiens
cccagttacccagcc

SEQ ID NO: 1869841 - DNA, 15 bp, Homo sapiens
ccagttacccagcct

SEQ ID NO: 1869842 - DNA, 15 bp, Homo sapiens
cagttacccagcctg

SEQ ID NO: 1869843 - DNA, 15 bp, Homo sapiens
agttacccagcctgc

SEQ ID NO: 1869844 - DNA, 15 bp, Homo sapiens
gttacccagcctgct

SEQ ID NO: 1869845 - DNA, 15 bp, Homo sapiens
ttacccagcctgctg

SEQ ID NO: 1869846 - DNA, 15 bp, Homo sapiens
tacccagcctgctgg

SEQ ID NO: 1869847 - DNA, 15 bp, Homo sapiens
acccagcctgctggg

SEQ ID NO: 1869848 - DNA, 15 bp, Homo sapiens
cccagcctgctgggg

SEQ ID NO: 1869849 - DNA, 15 bp, Homo sapiens
ccagcctgctggggc

SEQ ID NO: 1869850 - DNA, 15 bp, Homo sapiens
cagcctgctggggca

SEQ ID NO: 1869851 - DNA, 15 bp, Homo sapiens
agcctgctggggcag

SEQ ID NO: 1869852 - DNA, 15 bp, Homo sapiens
cctgctggggcagca

SEQ ID NO: 1869853 - DNA, 15 bp, Homo sapiens
ctgctggggcagcag

SEQ ID NO: 1869854 - DNA, 15 bp, Homo sapiens
tgctggggcagcagg

SEQ ID NO: 1869855 - DNA, 15 bp, Homo sapiens
gctggggcagcagga

SEQ ID NO: 1869856 - DNA, 15 bp, Homo sapiens
ctggggcagcaggat

SEQ ID NO: 1869857 - DNA, 15 bp, Homo sapiens
tggggcagcaggatg

SEQ ID NO: 1869858 - DNA, 15 bp, Homo sapiens
ggggcagcaggatgc

SEQ ID NO: 1869859 - DNA, 15 bp, Homo sapiens
gggcagcaggatgcg

SEQ ID NO: 1869860 - DNA, 15 bp, Homo sapiens
ggcagcaggatgcgg

SEQ ID NO: 1869861 - DNA, 15 bp, Homo sapiens
gcagcaggatgcggc

SEQ ID NO: 1869862 - DNA, 15 bp, Homo sapiens
cagcaggatgcggcc

SEQ ID NO: 1869863 - DNA, 15 bp, Homo sapiens
agcaggatgcggccc

SEQ ID NO: 1869864 - DNA, 15 bp, Homo sapiens
gcaggatgcggcccc

SEQ ID NO: 1869865 - DNA, 15 bp, Homo sapiens
caggatgcggcccca

SEQ ID NO: 1869866 - DNA, 15 bp, Homo sapiens
aggatgcggccccat

SEQ ID NO: 1869867 - DNA, 15 bp, Homo sapiens
ggatgcggccccatc

SEQ ID NO: 1869868 - DNA, 15 bp, Homo sapiens
gatgcggccccatct

SEQ ID NO: 1869869 - DNA, 15 bp, Homo sapiens
atgcggccccatctt

SEQ ID NO: 1869870 - DNA, 15 bp, Homo sapiens
tgcggccccatcttc

SEQ ID NO: 1869871 - DNA, 15 bp, Homo sapiens
gcggccccatcttcc

SEQ ID NO: 1869872 - DNA, 15 bp, Homo sapiens
cggccccatcttccg

SEQ ID NO: 1869873 - DNA, 15 bp, Homo sapiens
ggccccatcttccgc

SEQ ID NO: 1869874 - DNA, 15 bp, Homo sapiens
gccccatcttccgcc

SEQ ID NO: 1869875 - DNA, 15 bp, Homo sapiens
ccccatcttccgcca

SEQ ID NO: 1869876 - DNA, 15 bp, Homo sapiens
cccatcttccgccat

SEQ ID NO: 1869877 - DNA, 15 bp, Homo sapiens
ccatcttccgccatg

SEQ ID NO: 1869878 - DNA, 15 bp, Homo sapiens
catcttccgccatgg

SEQ ID NO: 1869879 - DNA, 15 bp, Homo sapiens
atcttccgccatgga

SEQ ID NO: 1869880 - DNA, 15 bp, Homo sapiens
tcttccgccatggac

SEQ ID NO: 1869881 - DNA, 15 bp, Homo sapiens
cttccgccatggacc

SEQ ID NO: 1869882 - DNA, 15 bp, Homo sapiens
ttccgccatggaccc

SEQ ID NO: 1869883 - DNA, 15 bp, Homo sapiens
tccgccatggacccc

SEQ ID NO: 1869884 - DNA, 15 bp, Homo sapiens
ccgccatggaccccc

SEQ ID NO: 1869885 - DNA, 15 bp, Homo sapiens
cgccatggaccccct

SEQ ID NO: 1869886 - DNA, 15 bp, Homo sapiens
gccatggaccccctg

SEQ ID NO: 1869887 - DNA, 15 bp, Homo sapiens
ccatggaccccctgc

SEQ ID NO: 1869888 - DNA, 15 bp, Homo sapiens
catggaccccctgca

SEQ ID NO: 1869889 - DNA, 15 bp, Homo sapiens
atggaccccctgcag

SEQ ID NO: 1869890 - DNA, 15 bp, Homo sapiens
tggaccccctgcagg

SEQ ID NO: 1869891 - DNA, 15 bp, Homo sapiens
ggaccccctgcaggg

SEQ ID NO: 1869892 - DNA, 15 bp, Homo sapiens
gaccccctgcagggt

SEQ ID NO: 1869893 - DNA, 15 bp, Homo sapiens
accccctgcagggtg

SEQ ID NO: 1869894 - DNA, 15 bp, Homo sapiens
ccccctgcagggtgc

SEQ ID NO: 1869895 - DNA, 15 bp, Homo sapiens
cccctgcagggtgca

SEQ ID NO: 1869896 - DNA, 15 bp, Homo sapiens
ccctgcagggtgcaa

SEQ ID NO: 1869897 - DNA, 15 bp, Homo sapiens
cctgcagggtgcaac

SEQ ID NO: 1869898 - DNA, 15 bp, Homo sapiens
caggctttctgggtc

SEQ ID NO: 1869899 - DNA, 15 bp, Homo sapiens
aggctttctgggtcc

SEQ ID NO: 1869900 - DNA, 15 bp, Homo sapiens
ggctttctgggtcct

SEQ ID NO: 1869901 - DNA, 15 bp, Homo sapiens
gctttctgggtcctg

SEQ ID NO: 1869902 - DNA, 15 bp, Homo sapiens
ctttctgggtcctgg

SEQ ID NO: 1869903 - DNA, 15 bp, Homo sapiens
tttctgggtcctggt

SEQ ID NO: 1869904 - DNA, 15 bp, Homo sapiens
ttctgggtcctggtt

SEQ ID NO: 1869905 - DNA, 15 bp, Homo sapiens
tctgggtcctggttt

SEQ ID NO: 1869906 - DNA, 15 bp, Homo sapiens
ctgggtcctggtttt

SEQ ID NO: 1869907 - DNA, 15 bp, Homo sapiens
tgggtcctggttttc

SEQ ID NO: 1869908 - DNA, 15 bp, Homo sapiens
gggtcctggttttct

SEQ ID NO: 1869909 - DNA, 15 bp, Homo sapiens
ggtcctggttttctc

SEQ ID NO: 1869910 - DNA, 15 bp, Homo sapiens
gtcctggttttctca

SEQ ID NO: 1869911 - DNA, 15 bp, Homo sapiens
tcctggttttctcat

SEQ ID NO: 1869912 - DNA, 15 bp, Homo sapiens
cctggttttctcatc

SEQ ID NO: 1869913 - DNA, 15 bp, Homo sapiens
ctggttttctcatca

SEQ ID NO: 1869914 - DNA, 15 bp, Homo sapiens
tggttttctcatcag

SEQ ID NO: 1869915 - DNA, 15 bp, Homo sapiens
ggttttctcatcagg

SEQ ID NO: 1869916 - DNA, 15 bp, Homo sapiens
gttttctcatcagga

SEQ ID NO: 1869917 - DNA, 15 bp, Homo sapiens
ttttctcatcaggat

SEQ ID NO: 1869918 - DNA, 15 bp, Homo sapiens
tttctcatcaggatg

SEQ ID NO: 1869919 - DNA, 15 bp, Homo sapiens
ttctcatcaggatga

SEQ ID NO: 1869920 - DNA, 15 bp, Homo sapiens
tctcatcaggatgac

SEQ ID NO: 1869921 - DNA, 15 bp, Homo sapiens
ctcatcaggatgaca

SEQ ID NO: 1869922 - DNA, 15 bp, Homo sapiens
tcatcaggatgacaa

SEQ ID NO: 1869923 - DNA, 15 bp, Homo sapiens
catcaggatgacaag

SEQ ID NO: 1869924 - DNA, 15 bp, Homo sapiens
atcaggatgacaagg

SEQ ID NO: 1869925 - DNA, 15 bp, Homo sapiens
tcaggatgacaaggg

SEQ ID NO: 1869926 - DNA, 15 bp, Homo sapiens
caggatgacaagggg

SEQ ID NO: 1869927 - DNA, 15 bp, Homo sapiens
aggatgacaaggggc

SEQ ID NO: 1869928 - DNA, 15 bp, Homo sapiens
ggatgacaaggggct

SEQ ID NO: 1869929 - DNA, 15 bp, Homo sapiens
gatgacaaggggctg

SEQ ID NO: 1869930 - DNA, 15 bp, Homo sapiens
atgacaaggggctgg

SEQ ID NO: 1869931 - DNA, 15 bp, Homo sapiens
tgacaaggggctgga

SEQ ID NO: 1869932 - DNA, 15 bp, Homo sapiens
gacaaggggctggag

SEQ ID NO: 1869933 - DNA, 15 bp, Homo sapiens
acaaggggctggagg

SEQ ID NO: 1869934 - DNA, 15 bp, Homo sapiens
caaggggctggagga

SEQ ID NO: 1869935 - DNA, 15 bp, Homo sapiens
aaggggctggaggag

SEQ ID NO: 1869936 - DNA, 15 bp, Homo sapiens
aggggctggaggagc

SEQ ID NO: 1869937 - DNA, 15 bp, Homo sapiens
ggggctggaggagct

SEQ ID NO: 1869938 - DNA, 15 bp, Homo sapiens
gggctggaggagctg

SEQ ID NO: 1869939 - DNA, 15 bp, Homo sapiens
ggctggaggagctgg

SEQ ID NO: 1869940 - DNA, 15 bp, Homo sapiens
gctggaggagctggc

SEQ ID NO: 1869941 - DNA, 15 bp, Homo sapiens
ctggaggagctggcc

SEQ ID NO: 1869942 - DNA, 15 bp, Homo sapiens
tggaggagctggcct

SEQ ID NO: 1869943 - DNA, 15 bp, Homo sapiens
ggaggagctggcctt

SEQ ID NO: 1869944 - DNA, 15 bp, Homo sapiens
gaggagctggccttc

SEQ ID NO: 1869945 - DNA, 15 bp, Homo sapiens
aggagctggccttca

SEQ ID NO: 1869946 - DNA, 15 bp, Homo sapiens
ggagctggccttcaa

SEQ ID NO: 1869947 - DNA, 15 bp, Homo sapiens
gagctggccttcaag

SEQ ID NO: 1869948 - DNA, 15 bp, Homo sapiens
agctggccttcaagg

SEQ ID NO: 1869949 - DNA, 15 bp, Homo sapiens
gctggccttcaaggt

SEQ ID NO: 1869950 - DNA, 15 bp, Homo sapiens
ctggccttcaaggtt

SEQ ID NO: 1869951 - DNA, 15 bp, Homo sapiens
tggccttcaaggttc

SEQ ID NO: 1869952 - DNA, 15 bp, Homo sapiens
ggccttcaaggttcc

SEQ ID NO: 1869953 - DNA, 15 bp, Homo sapiens
gccttcaaggttcca

SEQ ID NO: 1869954 - DNA, 15 bp, Homo sapiens
ccttcaaggttccat

SEQ ID NO: 1869955 - DNA, 15 bp, Homo sapiens
cttcaaggttccatc

SEQ ID NO: 1869956 - DNA, 15 bp, Homo sapiens
ttcaaggttccatcc

SEQ ID NO: 1869957 - DNA, 15 bp, Homo sapiens
tcaaggttccatcca

SEQ ID NO: 1869958 - DNA, 15 bp, Homo sapiens
caaggttccatccag

SEQ ID NO: 1869959 - DNA, 15 bp, Homo sapiens
aaggttccatccagt

SEQ ID NO: 1869960 - DNA, 15 bp, Homo sapiens
aggttccatccagtt

SEQ ID NO: 1869961 - DNA, 15 bp, Homo sapiens
ggttccatccagttg

SEQ ID NO: 1869962 - DNA, 15 bp, Homo sapiens
gttccatccagttga

SEQ ID NO: 1869963 - DNA, 15 bp, Homo sapiens
ttccatccagttgaa

SEQ ID NO: 1869964 - DNA, 15 bp, Homo sapiens
tccatccagttgaaa

SEQ ID NO: 1869965 - DNA, 15 bp, Homo sapiens
ccatccagttgaaag

SEQ ID NO: 1869966 - DNA, 15 bp, Homo sapiens
catccagttgaaaga

SEQ ID NO: 1869967 - DNA, 15 bp, Homo sapiens
atccagttgaaagat

SEQ ID NO: 1869968 - DNA, 15 bp, Homo sapiens
tccagttgaaagatc

SEQ ID NO: 1869969 - DNA, 15 bp, Homo sapiens
ccagttgaaagatct

SEQ ID NO: 1869970 - DNA, 15 bp, Homo sapiens
cagttgaaagatctg

SEQ ID NO: 1869971 - DNA, 15 bp, Homo sapiens
agttgaaagatctgt

SEQ ID NO: 1869972 - DNA, 15 bp, Homo sapiens
gttgaaagatctgta

SEQ ID NO: 1869973 - DNA, 15 bp, Homo sapiens
ttgaaagatctgtaa

SEQ ID NO: 1869974 - DNA, 15 bp, Homo sapiens
tgaaagatctgtaac

SEQ ID NO: 1869975 - DNA, 15 bp, Homo sapiens
gaaagatctgtaact

SEQ ID NO: 1869976 - DNA, 15 bp, Homo sapiens
aaagatctgtaactc

SEQ ID NO: 1869977 - DNA, 15 bp, Homo sapiens
aagatctgtaactcc

SEQ ID NO: 1869978 - DNA, 15 bp, Homo sapiens
agatctgtaactcca

SEQ ID NO: 1869979 - DNA, 15 bp, Homo sapiens
gatctgtaactccag

SEQ ID NO: 1869980 - DNA, 15 bp, Homo sapiens
atctgtaactccagg

SEQ ID NO: 1869981 - DNA, 15 bp, Homo sapiens
tctgtaactccagga

SEQ ID NO: 1869982 - DNA, 15 bp, Homo sapiens
ctgtaactccaggac

SEQ ID NO: 1869983 - DNA, 15 bp, Homo sapiens
tgtaactccaggacg

SEQ ID NO: 1869984 - DNA, 15 bp, Homo sapiens
gtaactccaggacgt

SEQ ID NO: 1869985 - DNA, 15 bp, Homo sapiens
taactccaggacgtt

SEQ ID NO: 1869986 - DNA, 15 bp, Homo sapiens
aactccaggacgttg

SEQ ID NO: 1869987 - DNA, 15 bp, Homo sapiens
actccaggacgttgc

SEQ ID NO: 1869988 - DNA, 15 bp, Homo sapiens
ctccaggacgttgct

SEQ ID NO: 1869989 - DNA, 15 bp, Homo sapiens
tccaggacgttgctg

SEQ ID NO: 1869990 - DNA, 15 bp, Homo sapiens
ccaggacgttgctga

SEQ ID NO: 1869991 - DNA, 15 bp, Homo sapiens
caggacgttgctgag

SEQ ID NO: 1869992 - DNA, 15 bp, Homo sapiens
aggacgttgctgagg

SEQ ID NO: 1869993 - DNA, 15 bp, Homo sapiens
ggacgttgctgaggc

SEQ ID NO: 1869994 - DNA, 15 bp, Homo sapiens
gacgttgctgaggct

SEQ ID NO: 1869995 - DNA, 15 bp, Homo sapiens
acgttgctgaggctt

SEQ ID NO: 1869996 - DNA, 15 bp, Homo sapiens
cgttgctgaggcttt

SEQ ID NO: 1869997 - DNA, 15 bp, Homo sapiens
gttgctgaggctttt

SEQ ID NO: 1869998 - DNA, 15 bp, Homo sapiens
ttgctgaggcttttt

SEQ ID NO: 1869999 - DNA, 15 bp, Homo sapiens
tgctgaggctttttg

SEQ ID NO: 1870000 - DNA, 15 bp, Homo sapiens
gctgaggctttttga

SEQ ID NO: 1870001 - DNA, 15 bp, Homo sapiens
ctgaggctttttgag

SEQ ID NO: 1870002 - DNA, 15 bp, Homo sapiens
tgaggctttttgagg

SEQ ID NO: 1870003 - DNA, 15 bp, Homo sapiens
gaggctttttgaggc

SEQ ID NO: 1870004 - DNA, 15 bp, Homo sapiens
aggctttttgaggcc

SEQ ID NO: 1870005 - DNA, 15 bp, Homo sapiens
ggctttttgaggccc

SEQ ID NO: 1870006 - DNA, 15 bp, Homo sapiens
gctttttgaggccct

SEQ ID NO: 1870007 - DNA, 15 bp, Homo sapiens
ctttttgaggcccta

SEQ ID NO: 1870008 - DNA, 15 bp, Homo sapiens
tttttgaggccctaa

SEQ ID NO: 1870009 - DNA, 15 bp, Homo sapiens
ttttgaggccctaaa

SEQ ID NO: 1870010 - DNA, 15 bp, Homo sapiens
tttgaggccctaaaa

SEQ ID NO: 1870011 - DNA, 15 bp, Homo sapiens
ttgaggccctaaaag

SEQ ID NO: 1870012 - DNA, 15 bp, Homo sapiens
tgaggccctaaaagc

SEQ ID NO: 1870013 - DNA, 15 bp, Homo sapiens
gaggccctaaaagca

SEQ ID NO: 1870014 - DNA, 15 bp, Homo sapiens
aggccctaaaagcag

SEQ ID NO: 1870015 - DNA, 15 bp, Homo sapiens
ggccctaaaagcaga

SEQ ID NO: 1870016 - DNA, 15 bp, Homo sapiens
gccctaaaagcagac

SEQ ID NO: 1870017 - DNA, 15 bp, Homo sapiens
ccctaaaagcagact

SEQ ID NO: 1870018 - DNA, 15 bp, Homo sapiens
cctaaaagcagacta

SEQ ID NO: 1870019 - DNA, 15 bp, Homo sapiens
ctaaaagcagactac

SEQ ID NO: 1870020 - DNA, 15 bp, Homo sapiens
taaaagcagactacc

SEQ ID NO: 1870021 - DNA, 15 bp, Homo sapiens
aaaagcagactaccc

SEQ ID NO: 1870022 - DNA, 15 bp, Homo sapiens
aaagcagactaccca

SEQ ID NO: 1870023 - DNA, 15 bp, Homo sapiens
aagcagactacccaa

SEQ ID NO: 1870024 - DNA, 15 bp, Homo sapiens
agcagactacccaag

SEQ ID NO: 1870025 - DNA, 15 bp, Homo sapiens
gcagactacccaagc

SEQ ID NO: 1870026 - DNA, 15 bp, Homo sapiens
cagactacccaagct

SEQ ID NO: 1870027 - DNA, 15 bp, Homo sapiens
agactacccaagcta

SEQ ID NO: 1870028 - DNA, 15 bp, Homo sapiens
gactacccaagctat

SEQ ID NO: 1870029 - DNA, 15 bp, Homo sapiens
actacccaagctatt

SEQ ID NO: 1870030 - DNA, 15 bp, Homo sapiens
ctacccaagctatta

SEQ ID NO: 1870031 - DNA, 15 bp, Homo sapiens
tacccaagctattaa

SEQ ID NO: 1870032 - DNA, 15 bp, Homo sapiens
acccaagctattaag

SEQ ID NO: 1870033 - DNA, 15 bp, Homo sapiens
cccaagctattaagg

SEQ ID NO: 1870034 - DNA, 15 bp, Homo sapiens
ccaagctattaaggg

SEQ ID NO: 1870035 - DNA, 15 bp, Homo sapiens
caagctattaagggt

SEQ ID NO: 1870036 - DNA, 15 bp, Homo sapiens
aagctattaagggtc

SEQ ID NO: 1870037 - DNA, 15 bp, Homo sapiens
agctattaagggtcc

SEQ ID NO: 1870038 - DNA, 15 bp, Homo sapiens
gctattaagggtccc

SEQ ID NO: 1870039 - DNA, 15 bp, Homo sapiens
ctattaagggtccct

SEQ ID NO: 1870040 - DNA, 15 bp, Homo sapiens
tattaagggtccctt

SEQ ID NO: 1870041 - DNA, 15 bp, Homo sapiens
attaagggtcccttt

SEQ ID NO: 1870042 - DNA, 15 bp, Homo sapiens
ttaagggtccctttg

SEQ ID NO: 1870043 - DNA, 15 bp, Homo sapiens
taagggtccctttgc

SEQ ID NO: 1870044 - DNA, 15 bp, Homo sapiens
aagggtccctttgca

SEQ ID NO: 1870045 - DNA, 15 bp, Homo sapiens
agggtccctttgcat

SEQ ID NO: 1870046 - DNA, 15 bp, Homo sapiens
gggtccctttgcatc

SEQ ID NO: 1870047 - DNA, 15 bp, Homo sapiens
ggtccctttgcatct

SEQ ID NO: 1870048 - DNA, 15 bp, Homo sapiens
gtccctttgcatctg

SEQ ID NO: 1870049 - DNA, 15 bp, Homo sapiens
tccctttgcatctgt

SEQ ID NO: 1870050 - DNA, 15 bp, Homo sapiens
ccctttgcatctgtg

SEQ ID NO: 1870051 - DNA, 15 bp, Homo sapiens
cctttgcatctgtgc

SEQ ID NO: 1870052 - DNA, 15 bp, Homo sapiens
ctttgcatctgtgct

SEQ ID NO: 1870053 - DNA, 15 bp, Homo sapiens
tttgcatctgtgctc

SEQ ID NO: 1870054 - DNA, 15 bp, Homo sapiens
ttgcatctgtgctct

SEQ ID NO: 1870055 - DNA, 15 bp, Homo sapiens
tgcatctgtgctctg

SEQ ID NO: 1870056 - DNA, 15 bp, Homo sapiens
gcatctgtgctctgc

SEQ ID NO: 1870057 - DNA, 15 bp, Homo sapiens
catctgtgctctgca

SEQ ID NO: 1870058 - DNA, 15 bp, Homo sapiens
atctgtgctctgcag

SEQ ID NO: 1870059 - DNA, 15 bp, Homo sapiens
tctgtgctctgcaga

SEQ ID NO: 1870060 - DNA, 15 bp, Homo sapiens
ctgtgctctgcagag

SEQ ID NO: 1870061 - DNA, 15 bp, Homo sapiens
tgtgctctgcagaga

SEQ ID NO: 1870062 - DNA, 15 bp, Homo sapiens
gtgctctgcagagaa

SEQ ID NO: 1870063 - DNA, 15 bp, Homo sapiens
tgctctgcagagaag

SEQ ID NO: 1870064 - DNA, 15 bp, Homo sapiens
gctctgcagagaaga

SEQ ID NO: 1870065 - DNA, 15 bp, Homo sapiens
ctctgcagagaagag

SEQ ID NO: 1870066 - DNA, 15 bp, Homo sapiens
tctgcagagaagagg

SEQ ID NO: 1870067 - DNA, 15 bp, Homo sapiens
ctgcagagaagaggc

SEQ ID NO: 1870068 - DNA, 15 bp, Homo sapiens
tgcagagaagaggct

SEQ ID NO: 1870069 - DNA, 15 bp, Homo sapiens
gcagagaagaggctt

SEQ ID NO: 1870070 - DNA, 15 bp, Homo sapiens
cagagaagaggcttt

SEQ ID NO: 1870071 - DNA, 15 bp, Homo sapiens
agagaagaggctttg

SEQ ID NO: 1870072 - DNA, 15 bp, Homo sapiens
gagaagaggctttgt

SEQ ID NO: 1870073 - DNA, 15 bp, Homo sapiens
agaagaggctttgtt

SEQ ID NO: 1870074 - DNA, 15 bp, Homo sapiens
gaagaggctttgttg

SEQ ID NO: 1870075 - DNA, 15 bp, Homo sapiens
aagaggctttgttgg

SEQ ID NO: 1870076 - DNA, 15 bp, Homo sapiens
agaggctttgttggc

SEQ ID NO: 1870077 - DNA, 15 bp, Homo sapiens
gaggctttgttggcc

SEQ ID NO: 1870078 - DNA, 15 bp, Homo sapiens
aggctttgttggcca

SEQ ID NO: 1870079 - DNA, 15 bp, Homo sapiens
ggctttgttggccag

SEQ ID NO: 1870080 - DNA, 15 bp, Homo sapiens
gctttgttggccagg

SEQ ID NO: 1870081 - DNA, 15 bp, Homo sapiens
ctttgttggccaggt

SEQ ID NO: 1870082 - DNA, 15 bp, Homo sapiens
tttgttggccaggtg

SEQ ID NO: 1870083 - DNA, 15 bp, Homo sapiens
ttgttggccaggtgg

SEQ ID NO: 1870084 - DNA, 15 bp, Homo sapiens
tgttggccaggtggg

SEQ ID NO: 1870085 - DNA, 15 bp, Homo sapiens
gttggccaggtgggc

SEQ ID NO: 1870086 - DNA, 15 bp, Homo sapiens
ttggccaggtgggca

SEQ ID NO: 1870087 - DNA, 15 bp, Homo sapiens
tggccaggtgggcac

SEQ ID NO: 1870088 - DNA, 15 bp, Homo sapiens
ggccaggtgggcaca

SEQ ID NO: 1870089 - DNA, 15 bp, Homo sapiens
gccaggtgggcacag

SEQ ID NO: 1870090 - DNA, 15 bp, Homo sapiens
ccaggtgggcacaga

SEQ ID NO: 1870091 - DNA, 15 bp, Homo sapiens
caggtgggcacagat

SEQ ID NO: 1870092 - DNA, 15 bp, Homo sapiens
aggtgggcacagatg

SEQ ID NO: 1870093 - DNA, 15 bp, Homo sapiens
ggtgggcacagatgc

SEQ ID NO: 1870094 - DNA, 15 bp, Homo sapiens
gtgggcacagatgct

SEQ ID NO: 1870095 - DNA, 15 bp, Homo sapiens
tgggcacagatgctg

SEQ ID NO: 1870096 - DNA, 15 bp, Homo sapiens
gggcacagatgctgg

SEQ ID NO: 1870097 - DNA, 15 bp, Homo sapiens
ggcacagatgctggt

SEQ ID NO: 1870098 - DNA, 15 bp, Homo sapiens
gcacagatgctggtg

SEQ ID NO: 1870099 - DNA, 15 bp, Homo sapiens
cacagatgctggtgt

SEQ ID NO: 1870100 - DNA, 15 bp, Homo sapiens
acagatgctggtgta

SEQ ID NO: 1870101 - DNA, 15 bp, Homo sapiens
cagatgctggtgtac

SEQ ID NO: 1870102 - DNA, 15 bp, Homo sapiens
agatgctggtgtact

SEQ ID NO: 1870103 - DNA, 15 bp, Homo sapiens
gatgctggtgtactg

SEQ ID NO: 1870104 - DNA, 15 bp, Homo sapiens
atgctggtgtactgg

SEQ ID NO: 1870105 - DNA, 15 bp, Homo sapiens
tgctggtgtactgga

SEQ ID NO: 1870106 - DNA, 15 bp, Homo sapiens
gctggtgtactggac

SEQ ID NO: 1870107 - DNA, 15 bp, Homo sapiens
ctggtgtactggact

SEQ ID NO: 1870108 - DNA, 15 bp, Homo sapiens
tggtgtactggactc

SEQ ID NO: 1870109 - DNA, 15 bp, Homo sapiens
ggtgtactggactcc

SEQ ID NO: 1870110 - DNA, 15 bp, Homo sapiens
gtgtactggactcct

SEQ ID NO: 1870111 - DNA, 15 bp, Homo sapiens
tgtactggactcctg

SEQ ID NO: 1870112 - DNA, 15 bp, Homo sapiens
gtactggactcctga

SEQ ID NO: 1870113 - DNA, 15 bp, Homo sapiens
tactggactcctgat

SEQ ID NO: 1870114 - DNA, 15 bp, Homo sapiens
actggactcctgatg

SEQ ID NO: 1870115 - DNA, 15 bp, Homo sapiens
ctggactcctgatgg

SEQ ID NO: 1870116 - DNA, 15 bp, Homo sapiens
tggactcctgatggg

SEQ ID NO: 1870117 - DNA, 15 bp, Homo sapiens
ggactcctgatgggc

SEQ ID NO: 1870118 - DNA, 15 bp, Homo sapiens
gactcctgatgggca

SEQ ID NO: 1870119 - DNA, 15 bp, Homo sapiens
actcctgatgggcag

SEQ ID NO: 1870120 - DNA, 15 bp, Homo sapiens
ctcctgatgggcagg

SEQ ID NO: 1870121 - DNA, 15 bp, Homo sapiens
tcctgatgggcaggg

SEQ ID NO: 1870122 - DNA, 15 bp, Homo sapiens
cctgatgggcagggg

SEQ ID NO: 1870123 - DNA, 15 bp, Homo sapiens
ctgatgggcaggggc

SEQ ID NO: 1870124 - DNA, 15 bp, Homo sapiens
tgatgggcaggggcc

SEQ ID NO: 1870125 - DNA, 15 bp, Homo sapiens
gatgggcaggggcct

SEQ ID NO: 1870126 - DNA, 15 bp, Homo sapiens
atgggcaggggcctg

SEQ ID NO: 1870127 - DNA, 15 bp, Homo sapiens
tgggcaggggcctgg

SEQ ID NO: 1870128 - DNA, 15 bp, Homo sapiens
gggcaggggcctgga

SEQ ID NO: 1870129 - DNA, 15 bp, Homo sapiens
ggcaggggcctggag

SEQ ID NO: 1870130 - DNA, 15 bp, Homo sapiens
gcaggggcctggaga

SEQ ID NO: 1870131 - DNA, 15 bp, Homo sapiens
caggggcctggagag

SEQ ID NO: 1870132 - DNA, 15 bp, Homo sapiens
aggggcctggagaga

SEQ ID NO: 1870133 - DNA, 15 bp, Homo sapiens
ggggcctggagagaa

SEQ ID NO: 1870134 - DNA, 15 bp, Homo sapiens
gggcctggagagaag

SEQ ID NO: 1870135 - DNA, 15 bp, Homo sapiens
ggcctggagagaagc

SEQ ID NO: 1870136 - DNA, 15 bp, Homo sapiens
gcctggagagaagca

SEQ ID NO: 1870137 - DNA, 15 bp, Homo sapiens
cctggagagaagcag

SEQ ID NO: 1870138 - DNA, 15 bp, Homo sapiens
ctggagagaagcagc

SEQ ID NO: 1870139 - DNA, 15 bp, Homo sapiens
tggagagaagcagca

SEQ ID NO: 1870140 - DNA, 15 bp, Homo sapiens
ggagagaagcagcac

SEQ ID NO: 1870141 - DNA, 15 bp, Homo sapiens
gagagaagcagcacc

SEQ ID NO: 1870142 - DNA, 15 bp, Homo sapiens
agagaagcagcaccc

SEQ ID NO: 1870143 - DNA, 15 bp, Homo sapiens
gagaagcagcaccca

SEQ ID NO: 1870144 - DNA, 15 bp, Homo sapiens
agaagcagcacccag

SEQ ID NO: 1870145 - DNA, 15 bp, Homo sapiens
gaagcagcacccagc

SEQ ID NO: 1870146 - DNA, 15 bp, Homo sapiens
aagcagcacccagcg

SEQ ID NO: 1870147 - DNA, 15 bp, Homo sapiens
agcagcacccagcgc

SEQ ID NO: 1870148 - DNA, 15 bp, Homo sapiens
gcagcacccagcgct

SEQ ID NO: 1870149 - DNA, 15 bp, Homo sapiens
cagcacccagcgctt

SEQ ID NO: 1870150 - DNA, 15 bp, Homo sapiens
agcacccagcgcttc

SEQ ID NO: 1870151 - DNA, 15 bp, Homo sapiens
gcacccagcgcttcc

SEQ ID NO: 1870152 - DNA, 15 bp, Homo sapiens
cacccagcgcttcct

SEQ ID NO: 1870153 - DNA, 15 bp, Homo sapiens
acccagcgcttccta

SEQ ID NO: 1870154 - DNA, 15 bp, Homo sapiens
cccagcgcttcctat

SEQ ID NO: 1870155 - DNA, 15 bp, Homo sapiens
ccagcgcttcctatg

SEQ ID NO: 1870156 - DNA, 15 bp, Homo sapiens
cagcgcttcctatgc

SEQ ID NO: 1870157 - DNA, 15 bp, Homo sapiens
agcgcttcctatgct

SEQ ID NO: 1870158 - DNA, 15 bp, Homo sapiens
gcgcttcctatgctt

SEQ ID NO: 1870159 - DNA, 15 bp, Homo sapiens
cgcttcctatgctta

SEQ ID NO: 1870160 - DNA, 15 bp, Homo sapiens
gcttcctatgcttaa

SEQ ID NO: 1870161 - DNA, 15 bp, Homo sapiens
cttcctatgcttaaa

SEQ ID NO: 1870162 - DNA, 15 bp, Homo sapiens
ttcctatgcttaaag

SEQ ID NO: 1870163 - DNA, 15 bp, Homo sapiens
tcctatgcttaaaga

SEQ ID NO: 1870164 - DNA, 15 bp, Homo sapiens
cctatgcttaaagaa

SEQ ID NO: 1870165 - DNA, 15 bp, Homo sapiens
ctatgcttaaagaaa

SEQ ID NO: 1870166 - DNA, 15 bp, Homo sapiens
tatgcttaaagaaag

SEQ ID NO: 1870167 - DNA, 15 bp, Homo sapiens
atgcttaaagaaagg

SEQ ID NO: 1870168 - DNA, 15 bp, Homo sapiens
tgcttaaagaaaggc

SEQ ID NO: 1870169 - DNA, 15 bp, Homo sapiens
gcttaaagaaaggca

SEQ ID NO: 1870170 - DNA, 15 bp, Homo sapiens
cttaaagaaaggcag

SEQ ID NO: 1870171 - DNA, 15 bp, Homo sapiens
ttaaagaaaggcagg

SEQ ID NO: 1870172 - DNA, 15 bp, Homo sapiens
taaagaaaggcaggg

SEQ ID NO: 1870173 - DNA, 15 bp, Homo sapiens
aaagaaaggcagggt

SEQ ID NO: 1870174 - DNA, 15 bp, Homo sapiens
aagaaaggcagggtc

SEQ ID NO: 1870175 - DNA, 15 bp, Homo sapiens
agaaaggcagggtcc

SEQ ID NO: 1870176 - DNA, 15 bp, Homo sapiens
gaaaggcagggtcct

SEQ ID NO: 1870177 - DNA, 15 bp, Homo sapiens
aaaggcagggtcctg

SEQ ID NO: 1870178 - DNA, 15 bp, Homo sapiens
aaggcagggtcctgg

SEQ ID NO: 1870179 - DNA, 15 bp, Homo sapiens
aggcagggtcctggt

SEQ ID NO: 1870180 - DNA, 15 bp, Homo sapiens
ggcagggtcctggtc

SEQ ID NO: 1870181 - DNA, 15 bp, Homo sapiens
gcagggtcctggtca

SEQ ID NO: 1870182 - DNA, 15 bp, Homo sapiens
cagggtcctggtcaa

SEQ ID NO: 1870183 - DNA, 15 bp, Homo sapiens
agggtcctggtcaaa

SEQ ID NO: 1870184 - DNA, 15 bp, Homo sapiens
gggtcctggtcaaag

SEQ ID NO: 1870185 - DNA, 15 bp, Homo sapiens
ggtcctggtcaaagg

SEQ ID NO: 1870186 - DNA, 15 bp, Homo sapiens
gtcctggtcaaaggg

SEQ ID NO: 1870187 - DNA, 15 bp, Homo sapiens
tcctggtcaaagggc

SEQ ID NO: 1870188 - DNA, 15 bp, Homo sapiens
cctggtcaaagggct

SEQ ID NO: 1870189 - DNA, 15 bp, Homo sapiens
ctggtcaaagggctg

SEQ ID NO: 1870190 - DNA, 15 bp, Homo sapiens
tggtcaaagggctgt

SEQ ID NO: 1870191 - DNA, 15 bp, Homo sapiens
ggtcaaagggctgta

SEQ ID NO: 1870192 - DNA, 15 bp, Homo sapiens
gtcaaagggctgtaa

SEQ ID NO: 1870193 - DNA, 15 bp, Homo sapiens
tcaaagggctgtaag

SEQ ID NO: 1870194 - DNA, 15 bp, Homo sapiens
caaagggctgtaaga

SEQ ID NO: 1870195 - DNA, 15 bp, Homo sapiens
aaagggctgtaagag

SEQ ID NO: 1870196 - DNA, 15 bp, Homo sapiens
aagggctgtaagagc

SEQ ID NO: 1870197 - DNA, 15 bp, Homo sapiens
agggctgtaagagcc

SEQ ID NO: 1870198 - DNA, 15 bp, Homo sapiens
gggctgtaagagcct

SEQ ID NO: 1870199 - DNA, 15 bp, Homo sapiens
ggctgtaagagcctg

SEQ ID NO: 1870200 - DNA, 15 bp, Homo sapiens
gctgtaagagcctgg

SEQ ID NO: 1870201 - DNA, 15 bp, Homo sapiens
ctgtaagagcctggg

SEQ ID NO: 1870202 - DNA, 15 bp, Homo sapiens
tgtaagagcctgggc

SEQ ID NO: 1870203 - DNA, 15 bp, Homo sapiens
gtaagagcctgggca

SEQ ID NO: 1870204 - DNA, 15 bp, Homo sapiens
taagagcctgggcaa

SEQ ID NO: 1870205 - DNA, 15 bp, Homo sapiens
aagagcctgggcaag

SEQ ID NO: 1870206 - DNA, 15 bp, Homo sapiens
agagcctgggcaagt

SEQ ID NO: 1870207 - DNA, 15 bp, Homo sapiens
gagcctgggcaagtc

SEQ ID NO: 1870208 - DNA, 15 bp, Homo sapiens
agcctgggcaagtcc

SEQ ID NO: 1870209 - DNA, 15 bp, Homo sapiens
gcctgggcaagtcca

SEQ ID NO: 1870210 - DNA, 15 bp, Homo sapiens
cctgggcaagtccag

SEQ ID NO: 1870211 - DNA, 15 bp, Homo sapiens
ctgggcaagtccagg

SEQ ID NO: 1870212 - DNA, 15 bp, Homo sapiens
tgggcaagtccagga

SEQ ID NO: 1870213 - DNA, 15 bp, Homo sapiens
gggcaagtccaggac

SEQ ID NO: 1870214 - DNA, 15 bp, Homo sapiens
ggcaagtccaggact

SEQ ID NO: 1870215 - DNA, 15 bp, Homo sapiens
gcaagtccaggacta

SEQ ID NO: 1870216 - DNA, 15 bp, Homo sapiens
caagtccaggactag

SEQ ID NO: 1870217 - DNA, 15 bp, Homo sapiens
aagtccaggactagc

SEQ ID NO: 1870218 - DNA, 15 bp, Homo sapiens
agtccaggactagcc

SEQ ID NO: 1870219 - DNA, 15 bp, Homo sapiens
gtccaggactagcct

SEQ ID NO: 1870220 - DNA, 15 bp, Homo sapiens
tccaggactagcctc

SEQ ID NO: 1870221 - DNA, 15 bp, Homo sapiens
ccaggactagcctca

SEQ ID NO: 1870222 - DNA, 15 bp, Homo sapiens
caggactagcctcac

SEQ ID NO: 1870223 - DNA, 15 bp, Homo sapiens
aggactagcctcacc

SEQ ID NO: 1870224 - DNA, 15 bp, Homo sapiens
ggactagcctcaccg

SEQ ID NO: 1870225 - DNA, 15 bp, Homo sapiens
gactagcctcaccgc

SEQ ID NO: 1870226 - DNA, 15 bp, Homo sapiens
actagcctcaccgcc

SEQ ID NO: 1870227 - DNA, 15 bp, Homo sapiens
ctagcctcaccgcct

SEQ ID NO: 1870228 - DNA, 15 bp, Homo sapiens
tagcctcaccgcctc

SEQ ID NO: 1870229 - DNA, 15 bp, Homo sapiens
agcctcaccgcctcc

SEQ ID NO: 1870230 - DNA, 15 bp, Homo sapiens
gcctcaccgcctcct

SEQ ID NO: 1870231 - DNA, 15 bp, Homo sapiens
cctcaccgcctcctt

SEQ ID NO: 1870232 - DNA, 15 bp, Homo sapiens
ctcaccgcctccttc

SEQ ID NO: 1870233 - DNA, 15 bp, Homo sapiens
tcaccgcctccttct

SEQ ID NO: 1870234 - DNA, 15 bp, Homo sapiens
caccgcctccttctt

SEQ ID NO: 1870235 - DNA, 15 bp, Homo sapiens
accgcctccttcttt

SEQ ID NO: 1870236 - DNA, 15 bp, Homo sapiens
ccgcctccttctttc

SEQ ID NO: 1870237 - DNA, 15 bp, Homo sapiens
cgcctccttctttct

SEQ ID NO: 1870238 - DNA, 15 bp, Homo sapiens
gcctccttctttctg

SEQ ID NO: 1870239 - DNA, 15 bp, Homo sapiens
cctccttctttctgt

SEQ ID NO: 1870240 - DNA, 15 bp, Homo sapiens
ctccttctttctgtc

SEQ ID NO: 1870241 - DNA, 15 bp, Homo sapiens
tccttctttctgtct

SEQ ID NO: 1870242 - DNA, 15 bp, Homo sapiens
ccttctttctgtctc

SEQ ID NO: 1870243 - DNA, 15 bp, Homo sapiens
cttctttctgtctcg

SEQ ID NO: 1870244 - DNA, 15 bp, Homo sapiens
ttctttctgtctcgt

SEQ ID NO: 1870245 - DNA, 15 bp, Homo sapiens
tctttctgtctcgtc

SEQ ID NO: 1870246 - DNA, 15 bp, Homo sapiens
ctttctgtctcgtcc

SEQ ID NO: 1870247 - DNA, 15 bp, Homo sapiens
tttctgtctcgtcct

SEQ ID NO: 1870248 - DNA, 15 bp, Homo sapiens
ttctgtctcgtcctg

SEQ ID NO: 1870249 - DNA, 15 bp, Homo sapiens
tctgtctcgtcctga

SEQ ID NO: 1870250 - DNA, 15 bp, Homo sapiens
ctgtctcgtcctgag

SEQ ID NO: 1870251 - DNA, 15 bp, Homo sapiens
tgtctcgtcctgaga

SEQ ID NO: 1870252 - DNA, 15 bp, Homo sapiens
gtctcgtcctgagag

SEQ ID NO: 1870253 - DNA, 15 bp, Homo sapiens
tctcgtcctgagaga

SEQ ID NO: 1870254 - DNA, 15 bp, Homo sapiens
ctcgtcctgagagat

SEQ ID NO: 1870255 - DNA, 15 bp, Homo sapiens
tcgtcctgagagatg

SEQ ID NO: 1870256 - DNA, 15 bp, Homo sapiens
cgtcctgagagatga

SEQ ID NO: 1870257 - DNA, 15 bp, Homo sapiens
gtcctgagagatgag

SEQ ID NO: 1870258 - DNA, 15 bp, Homo sapiens
tcctgagagatgagc

SEQ ID NO: 1870259 - DNA, 15 bp, Homo sapiens
cctgagagatgagct

SEQ ID NO: 1870260 - DNA, 15 bp, Homo sapiens
ctgagagatgagctg

SEQ ID NO: 1870261 - DNA, 15 bp, Homo sapiens
tgagagatgagctgg

SEQ ID NO: 1870262 - DNA, 15 bp, Homo sapiens
gagagatgagctggt

SEQ ID NO: 1870263 - DNA, 15 bp, Homo sapiens
agagatgagctggtg

SEQ ID NO: 1870264 - DNA, 15 bp, Homo sapiens
gagatgagctggtga

SEQ ID NO: 1870265 - DNA, 15 bp, Homo sapiens
agatgagctggtgac

SEQ ID NO: 1870266 - DNA, 15 bp, Homo sapiens
gatgagctggtgact

SEQ ID NO: 1870267 - DNA, 15 bp, Homo sapiens
atgagctggtgactg

SEQ ID NO: 1870268 - DNA, 15 bp, Homo sapiens
tgagctggtgactgg

SEQ ID NO: 1870269 - DNA, 15 bp, Homo sapiens
gagctggtgactggg

SEQ ID NO: 1870270 - DNA, 15 bp, Homo sapiens
agctggtgactgggt

SEQ ID NO: 1870271 - DNA, 15 bp, Homo sapiens
gctggtgactgggtg

SEQ ID NO: 1870272 - DNA, 15 bp, Homo sapiens
ctggtgactgggtgc

SEQ ID NO: 1870273 - DNA, 15 bp, Homo sapiens
tggtgactgggtgca

SEQ ID NO: 1870274 - DNA, 15 bp, Homo sapiens
ggtgactgggtgcag

SEQ ID NO: 1870275 - DNA, 15 bp, Homo sapiens
gtgactgggtgcagt

SEQ ID NO: 1870276 - DNA, 15 bp, Homo sapiens
tgactgggtgcagtg

SEQ ID NO: 1870277 - DNA, 15 bp, Homo sapiens
gactgggtgcagtgg

SEQ ID NO: 1870278 - DNA, 15 bp, Homo sapiens
actgggtgcagtggg

SEQ ID NO: 1870279 - DNA, 15 bp, Homo sapiens
ctgggtgcagtgggg

SEQ ID NO: 1870280 - DNA, 15 bp, Homo sapiens
tgggtgcagtggggg

SEQ ID NO: 1870281 - DNA, 15 bp, Homo sapiens
gggtgcagtgggggg

SEQ ID NO: 1870282 - DNA, 15 bp, Homo sapiens
ggtgcagtggggggg

SEQ ID NO: 1870283 - DNA, 15 bp, Homo sapiens
gtgcagtgggggggc

SEQ ID NO: 1870284 - DNA, 15 bp, Homo sapiens
tgcagtgggggggcg

SEQ ID NO: 1870285 - DNA, 15 bp, Homo sapiens
gcagtgggggggcgg

SEQ ID NO: 1870286 - DNA, 15 bp, Homo sapiens
cagtgggggggcggg

SEQ ID NO: 1870287 - DNA, 15 bp, Homo sapiens
agtgggggggcgggt

SEQ ID NO: 1870288 - DNA, 15 bp, Homo sapiens
gtgggggggcgggtg

SEQ ID NO: 1870289 - DNA, 15 bp, Homo sapiens
tgggggggcgggtgt

SEQ ID NO: 1870290 - DNA, 15 bp, Homo sapiens
gggggggcgggtgtc

SEQ ID NO: 1870291 - DNA, 15 bp, Homo sapiens
ggggggcgggtgtct

SEQ ID NO: 1870292 - DNA, 15 bp, Homo sapiens
gggggcgggtgtctt

SEQ ID NO: 1870293 - DNA, 15 bp, Homo sapiens
ggggcgggtgtcttc

SEQ ID NO: 1870294 - DNA, 15 bp, Homo sapiens
gggcgggtgtcttca

SEQ ID NO: 1870295 - DNA, 15 bp, Homo sapiens
ggcgggtgtcttcat

SEQ ID NO: 1870296 - DNA, 15 bp, Homo sapiens
gcgggtgtcttcatt

SEQ ID NO: 1870297 - DNA, 15 bp, Homo sapiens
cgggtgtcttcattc

SEQ ID NO: 1870298 - DNA, 15 bp, Homo sapiens
gggtgtcttcattct

SEQ ID NO: 1870299 - DNA, 15 bp, Homo sapiens
ggtgtcttcattcta

SEQ ID NO: 1870300 - DNA, 15 bp, Homo sapiens
gtgtcttcattctag

SEQ ID NO: 1870301 - DNA, 15 bp, Homo sapiens
tgtcttcattctagg

SEQ ID NO: 1870302 - DNA, 15 bp, Homo sapiens
gtcttcattctagga

SEQ ID NO: 1870303 - DNA, 15 bp, Homo sapiens
tcttcattctaggag

SEQ ID NO: 1870304 - DNA, 15 bp, Homo sapiens
cttcattctaggagt

SEQ ID NO: 1870305 - DNA, 15 bp, Homo sapiens
ttcattctaggagtc

SEQ ID NO: 1870306 - DNA, 15 bp, Homo sapiens
tcattctaggagtca

SEQ ID NO: 1870307 - DNA, 15 bp, Homo sapiens
cattctaggagtcac

SEQ ID NO: 1870308 - DNA, 15 bp, Homo sapiens
attctaggagtcacc

SEQ ID NO: 1870309 - DNA, 15 bp, Homo sapiens
ttctaggagtcacca

SEQ ID NO: 1870310 - DNA, 15 bp, Homo sapiens
tctaggagtcaccaa

SEQ ID NO: 1870311 - DNA, 15 bp, Homo sapiens
ctaggagtcaccaat

SEQ ID NO: 1870312 - DNA, 15 bp, Homo sapiens
taggagtcaccaatg

SEQ ID NO: 1870313 - DNA, 15 bp, Homo sapiens
aggagtcaccaatgc

SEQ ID NO: 1870314 - DNA, 15 bp, Homo sapiens
ggagtcaccaatgcc

SEQ ID NO: 1870315 - DNA, 15 bp, Homo sapiens
gagtcaccaatgcct

SEQ ID NO: 1870316 - DNA, 15 bp, Homo sapiens
agtcaccaatgcctg

SEQ ID NO: 1870317 - DNA, 15 bp, Homo sapiens
gtcaccaatgcctgt

SEQ ID NO: 1870318 - DNA, 15 bp, Homo sapiens
tcaccaatgcctgtc

SEQ ID NO: 1870319 - DNA, 15 bp, Homo sapiens
caccaatgcctgtcc

SEQ ID NO: 1870320 - DNA, 15 bp, Homo sapiens
accaatgcctgtccc

SEQ ID NO: 1870321 - DNA, 15 bp, Homo sapiens
ccaatgcctgtcccc

SEQ ID NO: 1870322 - DNA, 15 bp, Homo sapiens
caatgcctgtcccca

SEQ ID NO: 1870323 - DNA, 15 bp, Homo sapiens
aatgcctgtccccac

SEQ ID NO: 1870324 - DNA, 15 bp, Homo sapiens
atgcctgtccccact

SEQ ID NO: 1870325 - DNA, 15 bp, Homo sapiens
tgcctgtccccacta

SEQ ID NO: 1870326 - DNA, 15 bp, Homo sapiens
gcctgtccccactaa

SEQ ID NO: 1870327 - DNA, 15 bp, Homo sapiens
cctgtccccactaac

SEQ ID NO: 1870328 - DNA, 15 bp, Homo sapiens
ctgtccccactaacc

SEQ ID NO: 1870329 - DNA, 15 bp, Homo sapiens
tgtccccactaaccc

SEQ ID NO: 1870330 - DNA, 15 bp, Homo sapiens
gtccccactaaccct

SEQ ID NO: 1870331 - DNA, 15 bp, Homo sapiens
tccccactaaccctc

SEQ ID NO: 1870332 - DNA, 15 bp, Homo sapiens
ccccactaaccctct

SEQ ID NO: 1870333 - DNA, 15 bp, Homo sapiens
cccactaaccctctc

SEQ ID NO: 1870334 - DNA, 15 bp, Homo sapiens
ccactaaccctctct

SEQ ID NO: 1870335 - DNA, 15 bp, Homo sapiens
cactaaccctctctg

SEQ ID NO: 1870336 - DNA, 15 bp, Homo sapiens
actaaccctctctgc

SEQ ID NO: 1870337 - DNA, 15 bp, Homo sapiens
ctaaccctctctgcc

SEQ ID NO: 1870338 - DNA, 15 bp, Homo sapiens
taaccctctctgcca

SEQ ID NO: 1870339 - DNA, 15 bp, Homo sapiens
aaccctctctgccaa

SEQ ID NO: 1870340 - DNA, 15 bp, Homo sapiens
accctctctgccaat

SEQ ID NO: 1870341 - DNA, 15 bp, Homo sapiens
ccctctctgccaatg

SEQ ID NO: 1870342 - DNA, 15 bp, Homo sapiens
cctctctgccaatgt

SEQ ID NO: 1870343 - DNA, 15 bp, Homo sapiens
ctctctgccaatgtg

SEQ ID NO: 1870344 - DNA, 15 bp, Homo sapiens
tctctgccaatgtgt

SEQ ID NO: 1870345 - DNA, 15 bp, Homo sapiens
ctctgccaatgtgtt

SEQ ID NO: 1870346 - DNA, 15 bp, Homo sapiens
tctgccaatgtgttt

SEQ ID NO: 1870347 - DNA, 15 bp, Homo sapiens
ctgccaatgtgtttt

SEQ ID NO: 1870348 - DNA, 15 bp, Homo sapiens
tgccaatgtgttttc

SEQ ID NO: 1870349 - DNA, 15 bp, Homo sapiens
gccaatgtgttttct

SEQ ID NO: 1870350 - DNA, 15 bp, Homo sapiens
ccaatgtgttttcta

SEQ ID NO: 1870351 - DNA, 15 bp, Homo sapiens
caatgtgttttctag

SEQ ID NO: 1870352 - DNA, 15 bp, Homo sapiens
aatgtgttttctaga

SEQ ID NO: 1870353 - DNA, 15 bp, Homo sapiens
atgtgttttctagat

SEQ ID NO: 1870354 - DNA, 15 bp, Homo sapiens
tgtgttttctagatt

SEQ ID NO: 1870355 - DNA, 15 bp, Homo sapiens
gtgttttctagattc

SEQ ID NO: 1870356 - DNA, 15 bp, Homo sapiens
tgttttctagattcc

SEQ ID NO: 1870357 - DNA, 15 bp, Homo sapiens
gttttctagattccc

SEQ ID NO: 1870358 - DNA, 15 bp, Homo sapiens
ttttctagattccca

SEQ ID NO: 1870359 - DNA, 15 bp, Homo sapiens
tttctagattcccaa

SEQ ID NO: 1870360 - DNA, 15 bp, Homo sapiens
ttctagattcccaac

SEQ ID NO: 1870361 - DNA, 15 bp, Homo sapiens
tctagattcccaact

SEQ ID NO: 1870362 - DNA, 15 bp, Homo sapiens
ctagattcccaactt

SEQ ID NO: 1870363 - DNA, 15 bp, Homo sapiens
tagattcccaacttc

SEQ ID NO: 1870364 - DNA, 15 bp, Homo sapiens
agattcccaacttct

SEQ ID NO: 1870365 - DNA, 15 bp, Homo sapiens
gattcccaacttctt

SEQ ID NO: 1870366 - DNA, 15 bp, Homo sapiens
attcccaacttcttc

SEQ ID NO: 1870367 - DNA, 15 bp, Homo sapiens
ttcccaacttcttct

SEQ ID NO: 1870368 - DNA, 15 bp, Homo sapiens
tcccaacttcttctg

SEQ ID NO: 1870369 - DNA, 15 bp, Homo sapiens
cccaacttcttctgg

SEQ ID NO: 1870370 - DNA, 15 bp, Homo sapiens
ccaacttcttctgga

SEQ ID NO: 1870371 - DNA, 15 bp, Homo sapiens
caacttcttctggag

SEQ ID NO: 1870372 - DNA, 15 bp, Homo sapiens
aacttcttctggagc

SEQ ID NO: 1870373 - DNA, 15 bp, Homo sapiens
acttcttctggagcc

SEQ ID NO: 1870374 - DNA, 15 bp, Homo sapiens
cttcttctggagcct

SEQ ID NO: 1870375 - DNA, 15 bp, Homo sapiens
ttcttctggagcctg

SEQ ID NO: 1870376 - DNA, 15 bp, Homo sapiens
tcttctggagcctgg

SEQ ID NO: 1870377 - DNA, 15 bp, Homo sapiens
cttctggagcctggg

SEQ ID NO: 1870378 - DNA, 15 bp, Homo sapiens
ttctggagcctgggg

SEQ ID NO: 1870379 - DNA, 15 bp, Homo sapiens
tctggagcctgggga

SEQ ID NO: 1870380 - DNA, 15 bp, Homo sapiens
ctggagcctggggat

SEQ ID NO: 1870381 - DNA, 15 bp, Homo sapiens
tggagcctggggatc

SEQ ID NO: 1870382 - DNA, 15 bp, Homo sapiens
ggagcctggggatcg

SEQ ID NO: 1870383 - DNA, 15 bp, Homo sapiens
gagcctggggatcgg

SEQ ID NO: 1870384 - DNA, 15 bp, Homo sapiens
agcctggggatcggt

SEQ ID NO: 1870385 - DNA, 15 bp, Homo sapiens
gcctggggatcggtc

SEQ ID NO: 1870386 - DNA, 15 bp, Homo sapiens
cctggggatcggtca

SEQ ID NO: 1870387 - DNA, 15 bp, Homo sapiens
ctggggatcggtcac

SEQ ID NO: 1870388 - DNA, 15 bp, Homo sapiens
tggggatcggtcaca

SEQ ID NO: 1870389 - DNA, 15 bp, Homo sapiens
ggggatcggtcacac

SEQ ID NO: 1870390 - DNA, 15 bp, Homo sapiens
gggatcggtcacact

SEQ ID NO: 1870391 - DNA, 15 bp, Homo sapiens
ggatcggtcacactg

SEQ ID NO: 1870392 - DNA, 15 bp, Homo sapiens
gatcggtcacactgg

SEQ ID NO: 1870393 - DNA, 15 bp, Homo sapiens
atcggtcacactggt

SEQ ID NO: 1870394 - DNA, 15 bp, Homo sapiens
tcggtcacactggtg

SEQ ID NO: 1870395 - DNA, 15 bp, Homo sapiens
cggtcacactggtgc

SEQ ID NO: 1870396 - DNA, 15 bp, Homo sapiens
ggtcacactggtgcg

SEQ ID NO: 1870397 - DNA, 15 bp, Homo sapiens
gtcacactggtgcgt

SEQ ID NO: 1870398 - DNA, 15 bp, Homo sapiens
tcacactggtgcgtg

SEQ ID NO: 1870399 - DNA, 15 bp, Homo sapiens
cacactggtgcgtgg

SEQ ID NO: 1870400 - DNA, 15 bp, Homo sapiens
acactggtgcgtggt

SEQ ID NO: 1870401 - DNA, 15 bp, Homo sapiens
cactggtgcgtggtg

SEQ ID NO: 1870402 - DNA, 15 bp, Homo sapiens
actggtgcgtggtgg

SEQ ID NO: 1870403 - DNA, 15 bp, Homo sapiens
ctggtgcgtggtggc

SEQ ID NO: 1870404 - DNA, 15 bp, Homo sapiens
tggtgcgtggtggca

SEQ ID NO: 1870405 - DNA, 15 bp, Homo sapiens
ggtgcgtggtggcat

SEQ ID NO: 1870406 - DNA, 15 bp, Homo sapiens
gtgcgtggtggcata

SEQ ID NO: 1870407 - DNA, 15 bp, Homo sapiens
tgcgtggtggcatac

SEQ ID NO: 1870408 - DNA, 15 bp, Homo sapiens
gcgtggtggcatact

SEQ ID NO: 1870409 - DNA, 15 bp, Homo sapiens
cgtggtggcatactg

SEQ ID NO: 1870410 - DNA, 15 bp, Homo sapiens
gtggtggcatactgg

SEQ ID NO: 1870411 - DNA, 15 bp, Homo sapiens
tggtggcatactggg

SEQ ID NO: 1870412 - DNA, 15 bp, Homo sapiens
ggtggcatactggga

SEQ ID NO: 1870413 - DNA, 15 bp, Homo sapiens
gtggcatactgggag

SEQ ID NO: 1870414 - DNA, 15 bp, Homo sapiens
tggcatactgggagg

SEQ ID NO: 1870415 - DNA, 15 bp, Homo sapiens
ggcatactgggagga

SEQ ID NO: 1870416 - DNA, 15 bp, Homo sapiens
gcatactgggaggag

SEQ ID NO: 1870417 - DNA, 15 bp, Homo sapiens
catactgggaggaga

SEQ ID NO: 1870418 - DNA, 15 bp, Homo sapiens
atactgggaggagaa

SEQ ID NO: 1870419 - DNA, 15 bp, Homo sapiens
tactgggaggagaag

SEQ ID NO: 1870420 - DNA, 15 bp, Homo sapiens
actgggaggagaaga

SEQ ID NO: 1870421 - DNA, 15 bp, Homo sapiens
ctgggaggagaagac

SEQ ID NO: 1870422 - DNA, 15 bp, Homo sapiens
tgggaggagaagacg

SEQ ID NO: 1870423 - DNA, 15 bp, Homo sapiens
gggaggagaagacga

SEQ ID NO: 1870424 - DNA, 15 bp, Homo sapiens
ggaggagaagacgag

SEQ ID NO: 1870425 - DNA, 15 bp, Homo sapiens
gaggagaagacgaga

SEQ ID NO: 1870426 - DNA, 15 bp, Homo sapiens
aggagaagacgagag

SEQ ID NO: 1870427 - DNA, 15 bp, Homo sapiens
ggagaagacgagagt

SEQ ID NO: 1870428 - DNA, 15 bp, Homo sapiens
gagaagacgagagtg

SEQ ID NO: 1870429 - DNA, 15 bp, Homo sapiens
agaagacgagagtgg

SEQ ID NO: 1870430 - DNA, 15 bp, Homo sapiens
gaagacgagagtggg

SEQ ID NO: 1870431 - DNA, 15 bp, Homo sapiens
aagacgagagtgggg

SEQ ID NO: 1870432 - DNA, 15 bp, Homo sapiens
agacgagagtgggga

SEQ ID NO: 1870433 - DNA, 15 bp, Homo sapiens
gacgagagtggggag

SEQ ID NO: 1870434 - DNA, 15 bp, Homo sapiens
acgagagtggggagg

SEQ ID NO: 1870435 - DNA, 15 bp, Homo sapiens
cgagagtggggaggc

SEQ ID NO: 1870436 - DNA, 15 bp, Homo sapiens
gagagtggggaggct

SEQ ID NO: 1870437 - DNA, 15 bp, Homo sapiens
agagtggggaggctc

SEQ ID NO: 1870438 - DNA, 15 bp, Homo sapiens
gagtggggaggctct

SEQ ID NO: 1870439 - DNA, 15 bp, Homo sapiens
agtggggaggctcta

SEQ ID NO: 1870440 - DNA, 15 bp, Homo sapiens
gtggggaggctctac

SEQ ID NO: 1870441 - DNA, 15 bp, Homo sapiens
tggggaggctctact

SEQ ID NO: 1870442 - DNA, 15 bp, Homo sapiens
ggggaggctctactg

SEQ ID NO: 1870443 - DNA, 15 bp, Homo sapiens
gggaggctctactgt

SEQ ID NO: 1870444 - DNA, 15 bp, Homo sapiens
ggaggctctactgtg

SEQ ID NO: 1870445 - DNA, 15 bp, Homo sapiens
gaggctctactgtgt

SEQ ID NO: 1870446 - DNA, 15 bp, Homo sapiens
aggctctactgtgtc

SEQ ID NO: 1870447 - DNA, 15 bp, Homo sapiens
ggctctactgtgtcc

SEQ ID NO: 1870448 - DNA, 15 bp, Homo sapiens
gctctactgtgtcca

SEQ ID NO: 1870449 - DNA, 15 bp, Homo sapiens
ctctactgtgtccag

SEQ ID NO: 1870450 - DNA, 15 bp, Homo sapiens
tctactgtgtccagg

SEQ ID NO: 1870451 - DNA, 15 bp, Homo sapiens
ctactgtgtccagga

SEQ ID NO: 1870452 - DNA, 15 bp, Homo sapiens
tactgtgtccaggag

SEQ ID NO: 1870453 - DNA, 15 bp, Homo sapiens
actgtgtccaggagc

SEQ ID NO: 1870454 - DNA, 15 bp, Homo sapiens
ctgtgtccaggagcc

SEQ ID NO: 1870455 - DNA, 15 bp, Homo sapiens
tgtgtccaggagccc

SEQ ID NO: 1870456 - DNA, 15 bp, Homo sapiens
gtgtccaggagccct

SEQ ID NO: 1870457 - DNA, 15 bp, Homo sapiens
tgtccaggagccctc

SEQ ID NO: 1870458 - DNA, 15 bp, Homo sapiens
gtccaggagccctct

SEQ ID NO: 1870459 - DNA, 15 bp, Homo sapiens
tccaggagccctctc

SEQ ID NO: 1870460 - DNA, 15 bp, Homo sapiens
ccaggagccctctct

SEQ ID NO: 1870461 - DNA, 15 bp, Homo sapiens
caggagccctctctg

SEQ ID NO: 1870462 - DNA, 15 bp, Homo sapiens
aggagccctctctgg

SEQ ID NO: 1870463 - DNA, 15 bp, Homo sapiens
ggagccctctctgga

SEQ ID NO: 1870464 - DNA, 15 bp, Homo sapiens
gagccctctctggat

SEQ ID NO: 1870465 - DNA, 15 bp, Homo sapiens
agccctctctggata

SEQ ID NO: 1870466 - DNA, 15 bp, Homo sapiens
gccctctctggatat

SEQ ID NO: 1870467 - DNA, 15 bp, Homo sapiens
ccctctctggatatc

SEQ ID NO: 1870468 - DNA, 15 bp, Homo sapiens
cctctctggatatct

SEQ ID NO: 1870469 - DNA, 15 bp, Homo sapiens
ctctctggatatctt

SEQ ID NO: 1870470 - DNA, 15 bp, Homo sapiens
tctctggatatcttc

SEQ ID NO: 1870471 - DNA, 15 bp, Homo sapiens
ctctggatatcttct

SEQ ID NO: 1870472 - DNA, 15 bp, Homo sapiens
tctggatatcttcta

SEQ ID NO: 1870473 - DNA, 15 bp, Homo sapiens
ctggatatcttctat

SEQ ID NO: 1870474 - DNA, 15 bp, Homo sapiens
tggatatcttctatg

SEQ ID NO: 1870475 - DNA, 15 bp, Homo sapiens
ggatatcttctatga

SEQ ID NO: 1870476 - DNA, 15 bp, Homo sapiens
gatatcttctatgat

SEQ ID NO: 1870477 - DNA, 15 bp, Homo sapiens
atatcttctatgatc

SEQ ID NO: 1870478 - DNA, 15 bp, Homo sapiens
tatcttctatgatct

SEQ ID NO: 1870479 - DNA, 15 bp, Homo sapiens
atcttctatgatcta

SEQ ID NO: 1870480 - DNA, 15 bp, Homo sapiens
tcttctatgatctac

SEQ ID NO: 1870481 - DNA, 15 bp, Homo sapiens
cttctatgatctacc

SEQ ID NO: 1870482 - DNA, 15 bp, Homo sapiens
ttctatgatctacct

SEQ ID NO: 1870483 - DNA, 15 bp, Homo sapiens
tctatgatctacctc

SEQ ID NO: 1870484 - DNA, 15 bp, Homo sapiens
ctatgatctacctca

SEQ ID NO: 1870485 - DNA, 15 bp, Homo sapiens
tatgatctacctcag

SEQ ID NO: 1870486 - DNA, 15 bp, Homo sapiens
atgatctacctcagg

SEQ ID NO: 1870487 - DNA, 15 bp, Homo sapiens
tgatctacctcaggg

SEQ ID NO: 1870488 - DNA, 15 bp, Homo sapiens
gatctacctcagggg

SEQ ID NO: 1870489 - DNA, 15 bp, Homo sapiens
atctacctcagggga

SEQ ID NO: 1870490 - DNA, 15 bp, Homo sapiens
tctacctcaggggaa

SEQ ID NO: 1870491 - DNA, 15 bp, Homo sapiens
ctacctcaggggaat

SEQ ID NO: 1870492 - DNA, 15 bp, Homo sapiens
tacctcaggggaatg

SEQ ID NO: 1870493 - DNA, 15 bp, Homo sapiens
acctcaggggaatgg

SEQ ID NO: 1870494 - DNA, 15 bp, Homo sapiens
cctcaggggaatggc

SEQ ID NO: 1870495 - DNA, 15 bp, Homo sapiens
ctcaggggaatggct

SEQ ID NO: 1870496 - DNA, 15 bp, Homo sapiens
tcaggggaatggctt

SEQ ID NO: 1870497 - DNA, 15 bp, Homo sapiens
caggggaatggcttt

SEQ ID NO: 1870498 - DNA, 15 bp, Homo sapiens
aggggaatggctttt

SEQ ID NO: 1870499 - DNA, 15 bp, Homo sapiens
ggggaatggcttttg

SEQ ID NO: 1870500 - DNA, 15 bp, Homo sapiens
gggaatggcttttgc

SEQ ID NO: 1870501 - DNA, 15 bp, Homo sapiens
ggaatggcttttgcc

SEQ ID NO: 1870502 - DNA, 15 bp, Homo sapiens
gaatggcttttgcct

SEQ ID NO: 1870503 - DNA, 15 bp, Homo sapiens
aatggcttttgcctc

SEQ ID NO: 1870504 - DNA, 15 bp, Homo sapiens
atggcttttgcctcg

SEQ ID NO: 1870505 - DNA, 15 bp, Homo sapiens
tggcttttgcctcgg

SEQ ID NO: 1870506 - DNA, 15 bp, Homo sapiens
ggcttttgcctcgga

SEQ ID NO: 1870507 - DNA, 15 bp, Homo sapiens
gcttttgcctcggac

SEQ ID NO: 1870508 - DNA, 15 bp, Homo sapiens
cttttgcctcggaca

SEQ ID NO: 1870509 - DNA, 15 bp, Homo sapiens
ttttgcctcggacag

SEQ ID NO: 1870510 - DNA, 15 bp, Homo sapiens
tttgcctcggacagc

SEQ ID NO: 1870511 - DNA, 15 bp, Homo sapiens
ttgcctcggacagct

SEQ ID NO: 1870512 - DNA, 15 bp, Homo sapiens
tgcctcggacagctc

SEQ ID NO: 1870513 - DNA, 15 bp, Homo sapiens
gcctcggacagctca

SEQ ID NO: 1870514 - DNA, 15 bp, Homo sapiens
cctcggacagctcaa

SEQ ID NO: 1870515 - DNA, 15 bp, Homo sapiens
ctcggacagctcaat

SEQ ID NO: 1870516 - DNA, 15 bp, Homo sapiens
tcggacagctcaatt

SEQ ID NO: 1870517 - DNA, 15 bp, Homo sapiens
cggacagctcaattc

SEQ ID NO: 1870518 - DNA, 15 bp, Homo sapiens
ggacagctcaattcg

SEQ ID NO: 1870519 - DNA, 15 bp, Homo sapiens
gacagctcaattcgg

SEQ ID NO: 1870520 - DNA, 15 bp, Homo sapiens
acagctcaattcgga

SEQ ID NO: 1870521 - DNA, 15 bp, Homo sapiens
cagctcaattcggac

SEQ ID NO: 1870522 - DNA, 15 bp, Homo sapiens
agctcaattcggaca

SEQ ID NO: 1870523 - DNA, 15 bp, Homo sapiens
gctcaattcggacaa

SEQ ID NO: 1870524 - DNA, 15 bp, Homo sapiens
ctcaattcggacaac

SEQ ID NO: 1870525 - DNA, 15 bp, Homo sapiens
tcaattcggacaaca

SEQ ID NO: 1870526 - DNA, 15 bp, Homo sapiens
caattcggacaacaa

SEQ ID NO: 1870527 - DNA, 15 bp, Homo sapiens
aattcggacaacaag

SEQ ID NO: 1870528 - DNA, 15 bp, Homo sapiens
attcggacaacaaga

SEQ ID NO: 1870529 - DNA, 15 bp, Homo sapiens
ttcggacaacaagag

SEQ ID NO: 1870530 - DNA, 15 bp, Homo sapiens
tcggacaacaagagt

SEQ ID NO: 1870531 - DNA, 15 bp, Homo sapiens
cggacaacaagagtc

SEQ ID NO: 1870532 - DNA, 15 bp, Homo sapiens
ggacaacaagagtca

SEQ ID NO: 1870533 - DNA, 15 bp, Homo sapiens
gacaacaagagtcag

SEQ ID NO: 1870534 - DNA, 15 bp, Homo sapiens
acaacaagagtcagc

SEQ ID NO: 1870535 - DNA, 15 bp, Homo sapiens
caacaagagtcagct

SEQ ID NO: 1870536 - DNA, 15 bp, Homo sapiens
aacaagagtcagctg

SEQ ID NO: 1870537 - DNA, 15 bp, Homo sapiens
acaagagtcagctgg

SEQ ID NO: 1870538 - DNA, 15 bp, Homo sapiens
caagagtcagctggt

SEQ ID NO: 1870539 - DNA, 15 bp, Homo sapiens
aagagtcagctggtg

SEQ ID NO: 1870540 - DNA, 15 bp, Homo sapiens
agagtcagctggtgc

SEQ ID NO: 1870541 - DNA, 15 bp, Homo sapiens
gagtcagctggtgca

SEQ ID NO: 1870542 - DNA, 15 bp, Homo sapiens
agtcagctggtgcag

SEQ ID NO: 1870543 - DNA, 15 bp, Homo sapiens
gtcagctggtgcaga

SEQ ID NO: 1870544 - DNA, 15 bp, Homo sapiens
tcagctggtgcagaa

SEQ ID NO: 1870545 - DNA, 15 bp, Homo sapiens
cagctggtgcagaag

SEQ ID NO: 1870546 - DNA, 15 bp, Homo sapiens
agctggtgcagaagg

SEQ ID NO: 1870547 - DNA, 15 bp, Homo sapiens
gctggtgcagaaggt

SEQ ID NO: 1870548 - DNA, 15 bp, Homo sapiens
ctggtgcagaaggtg

SEQ ID NO: 1870549 - DNA, 15 bp, Homo sapiens
tggtgcagaaggtgc

SEQ ID NO: 1870550 - DNA, 15 bp, Homo sapiens
ggtgcagaaggtgcg

SEQ ID NO: 1870551 - DNA, 15 bp, Homo sapiens
gtgcagaaggtgcgg

SEQ ID NO: 1870552 - DNA, 15 bp, Homo sapiens
tgcagaaggtgcgga

SEQ ID NO: 1870553 - DNA, 15 bp, Homo sapiens
gcagaaggtgcggag

SEQ ID NO: 1870554 - DNA, 15 bp, Homo sapiens
cagaaggtgcggagc

SEQ ID NO: 1870555 - DNA, 15 bp, Homo sapiens
agaaggtgcggagca

SEQ ID NO: 1870556 - DNA, 15 bp, Homo sapiens
gaaggtgcggagcaa

SEQ ID NO: 1870557 - DNA, 15 bp, Homo sapiens
aaggtgcggagcaaa

SEQ ID NO: 1870558 - DNA, 15 bp, Homo sapiens
aggtgcggagcaaaa

SEQ ID NO: 1870559 - DNA, 15 bp, Homo sapiens
ggtgcggagcaaaat

SEQ ID NO: 1870560 - DNA, 15 bp, Homo sapiens
gtgcggagcaaaatc

SEQ ID NO: 1870561 - DNA, 15 bp, Homo sapiens
tgcggagcaaaatcg

SEQ ID NO: 1870562 - DNA, 15 bp, Homo sapiens
gcggagcaaaatcgg

SEQ ID NO: 1870563 - DNA, 15 bp, Homo sapiens
cggagcaaaatcggc

SEQ ID NO: 1870564 - DNA, 15 bp, Homo sapiens
ggagcaaaatcggct

SEQ ID NO: 1870565 - DNA, 15 bp, Homo sapiens
gagcaaaatcggctg

SEQ ID NO: 1870566 - DNA, 15 bp, Homo sapiens
agcaaaatcggctgc

SEQ ID NO: 1870567 - DNA, 15 bp, Homo sapiens
gcaaaatcggctgcg

SEQ ID NO: 1870568 - DNA, 15 bp, Homo sapiens
caaaatcggctgcgg

SEQ ID NO: 1870569 - DNA, 15 bp, Homo sapiens
aaaatcggctgcggc

SEQ ID NO: 1870570 - DNA, 15 bp, Homo sapiens
aaatcggctgcggca

SEQ ID NO: 1870571 - DNA, 15 bp, Homo sapiens
aatcggctgcggcat

SEQ ID NO: 1870572 - DNA, 15 bp, Homo sapiens
atcggctgcggcatc

SEQ ID NO: 1870573 - DNA, 15 bp, Homo sapiens
tcggctgcggcatcc

SEQ ID NO: 1870574 - DNA, 15 bp, Homo sapiens
cggctgcggcatcca

SEQ ID NO: 1870575 - DNA, 15 bp, Homo sapiens
ggctgcggcatccag

SEQ ID NO: 1870576 - DNA, 15 bp, Homo sapiens
gctgcggcatccagc

SEQ ID NO: 1870577 - DNA, 15 bp, Homo sapiens
ctgcggcatccagct

SEQ ID NO: 1870578 - DNA, 15 bp, Homo sapiens
tgcggcatccagctg

SEQ ID NO: 1870579 - DNA, 15 bp, Homo sapiens
gcggcatccagctga

SEQ ID NO: 1870580 - DNA, 15 bp, Homo sapiens
cggcatccagctgac

SEQ ID NO: 1870581 - DNA, 15 bp, Homo sapiens
ggcatccagctgacg

SEQ ID NO: 1870582 - DNA, 15 bp, Homo sapiens
gcatccagctgacgc

SEQ ID NO: 1870583 - DNA, 15 bp, Homo sapiens
catccagctgacgcg

SEQ ID NO: 1870584 - DNA, 15 bp, Homo sapiens
atccagctgacgcgg

SEQ ID NO: 1870585 - DNA, 15 bp, Homo sapiens
tccagctgacgcggg

SEQ ID NO: 1870586 - DNA, 15 bp, Homo sapiens
ccagctgacgcggga

SEQ ID NO: 1870587 - DNA, 15 bp, Homo sapiens
cagctgacgcgggag

SEQ ID NO: 1870588 - DNA, 15 bp, Homo sapiens
agctgacgcgggagg

SEQ ID NO: 1870589 - DNA, 15 bp, Homo sapiens
gctgacgcgggaggt

SEQ ID NO: 1870590 - DNA, 15 bp, Homo sapiens
ctgacgcgggaggtg

SEQ ID NO: 1870591 - DNA, 15 bp, Homo sapiens
tgacgcgggaggtgg

SEQ ID NO: 1870592 - DNA, 15 bp, Homo sapiens
gacgcgggaggtgga

SEQ ID NO: 1870593 - DNA, 15 bp, Homo sapiens
acgcgggaggtggat

SEQ ID NO: 1870594 - DNA, 15 bp, Homo sapiens
cgcgggaggtggatg

SEQ ID NO: 1870595 - DNA, 15 bp, Homo sapiens
gcgggaggtggatgg

SEQ ID NO: 1870596 - DNA, 15 bp, Homo sapiens
cgggaggtggatggt

SEQ ID NO: 1870597 - DNA, 15 bp, Homo sapiens
gggaggtggatggtg

SEQ ID NO: 1870598 - DNA, 15 bp, Homo sapiens
ggaggtggatggtgt

SEQ ID NO: 1870599 - DNA, 15 bp, Homo sapiens
gaggtggatggtgtg

SEQ ID NO: 1870600 - DNA, 15 bp, Homo sapiens
aggtggatggtgtgt

SEQ ID NO: 1870601 - DNA, 15 bp, Homo sapiens
ggtggatggtgtgtg

SEQ ID NO: 1870602 - DNA, 15 bp, Homo sapiens
gtggatggtgtgtgg

SEQ ID NO: 1870603 - DNA, 15 bp, Homo sapiens
tggatggtgtgtggg

SEQ ID NO: 1870604 - DNA, 15 bp, Homo sapiens
ggatggtgtgtgggt

SEQ ID NO: 1870605 - DNA, 15 bp, Homo sapiens
gatggtgtgtgggtg

SEQ ID NO: 1870606 - DNA, 15 bp, Homo sapiens
atggtgtgtgggtgt

SEQ ID NO: 1870607 - DNA, 15 bp, Homo sapiens
tggtgtgtgggtgta

SEQ ID NO: 1870608 - DNA, 15 bp, Homo sapiens
ggtgtgtgggtgtac

SEQ ID NO: 1870609 - DNA, 15 bp, Homo sapiens
gtgtgtgggtgtaca

SEQ ID NO: 1870610 - DNA, 15 bp, Homo sapiens
tgtgtgggtgtacaa

SEQ ID NO: 1870611 - DNA, 15 bp, Homo sapiens
gtgtgggtgtacaac

SEQ ID NO: 1870612 - DNA, 15 bp, Homo sapiens
tgtgggtgtacaacc

SEQ ID NO: 1870613 - DNA, 15 bp, Homo sapiens
gtgggtgtacaaccg

SEQ ID NO: 1870614 - DNA, 15 bp, Homo sapiens
tgggtgtacaaccgc

SEQ ID NO: 1870615 - DNA, 15 bp, Homo sapiens
gggtgtacaaccgca

SEQ ID NO: 1870616 - DNA, 15 bp, Homo sapiens
ggtgtacaaccgcag

SEQ ID NO: 1870617 - DNA, 15 bp, Homo sapiens
gtgtacaaccgcagc

SEQ ID NO: 1870618 - DNA, 15 bp, Homo sapiens
tgtacaaccgcagca

SEQ ID NO: 1870619 - DNA, 15 bp, Homo sapiens
gtacaaccgcagcag

SEQ ID NO: 1870620 - DNA, 15 bp, Homo sapiens
tacaaccgcagcagt

SEQ ID NO: 1870621 - DNA, 15 bp, Homo sapiens
acaaccgcagcagtt

SEQ ID NO: 1870622 - DNA, 15 bp, Homo sapiens
caaccgcagcagtta

SEQ ID NO: 1870623 - DNA, 15 bp, Homo sapiens
aaccgcagcagttac

SEQ ID NO: 1870624 - DNA, 15 bp, Homo sapiens
accgcagcagttacc

SEQ ID NO: 1870625 - DNA, 15 bp, Homo sapiens
ccgcagcagttaccc

SEQ ID NO: 1870626 - DNA, 15 bp, Homo sapiens
cgcagcagttacccc

SEQ ID NO: 1870627 - DNA, 15 bp, Homo sapiens
gcagcagttacccca

SEQ ID NO: 1870628 - DNA, 15 bp, Homo sapiens
cagcagttaccccat

SEQ ID NO: 1870629 - DNA, 15 bp, Homo sapiens
agcagttaccccatc

SEQ ID NO: 1870630 - DNA, 15 bp, Homo sapiens
gcagttaccccatct

SEQ ID NO: 1870631 - DNA, 15 bp, Homo sapiens
cagttaccccatctt

SEQ ID NO: 1870632 - DNA, 15 bp, Homo sapiens
agttaccccatcttc

SEQ ID NO: 1870633 - DNA, 15 bp, Homo sapiens
gttaccccatcttca

SEQ ID NO: 1870634 - DNA, 15 bp, Homo sapiens
ttaccccatcttcat

SEQ ID NO: 1870635 - DNA, 15 bp, Homo sapiens
taccccatcttcatc

SEQ ID NO: 1870636 - DNA, 15 bp, Homo sapiens
accccatcttcatca

SEQ ID NO: 1870637 - DNA, 15 bp, Homo sapiens
ccccatcttcatcaa

SEQ ID NO: 1870638 - DNA, 15 bp, Homo sapiens
cccatcttcatcaag

SEQ ID NO: 1870639 - DNA, 15 bp, Homo sapiens
ccatcttcatcaagt

SEQ ID NO: 1870640 - DNA, 15 bp, Homo sapiens
catcttcatcaagtc

SEQ ID NO: 1870641 - DNA, 15 bp, Homo sapiens
atcttcatcaagtcc

SEQ ID NO: 1870642 - DNA, 15 bp, Homo sapiens
tcttcatcaagtccg

SEQ ID NO: 1870643 - DNA, 15 bp, Homo sapiens
cttcatcaagtccgc

SEQ ID NO: 1870644 - DNA, 15 bp, Homo sapiens
ttcatcaagtccgcc

SEQ ID NO: 1870645 - DNA, 15 bp, Homo sapiens
tcatcaagtccgcca

SEQ ID NO: 1870646 - DNA, 15 bp, Homo sapiens
catcaagtccgccac

SEQ ID NO: 1870647 - DNA, 15 bp, Homo sapiens
atcaagtccgccaca

SEQ ID NO: 1870648 - DNA, 15 bp, Homo sapiens
tcaagtccgccacac

SEQ ID NO: 1870649 - DNA, 15 bp, Homo sapiens
caagtccgccacact

SEQ ID NO: 1870650 - DNA, 15 bp, Homo sapiens
aagtccgccacactg

SEQ ID NO: 1870651 - DNA, 15 bp, Homo sapiens
agtccgccacactgg

SEQ ID NO: 1870652 - DNA, 15 bp, Homo sapiens
gtccgccacactgga

SEQ ID NO: 1870653 - DNA, 15 bp, Homo sapiens
tccgccacactggac

SEQ ID NO: 1870654 - DNA, 15 bp, Homo sapiens
ccgccacactggaca

SEQ ID NO: 1870655 - DNA, 15 bp, Homo sapiens
cgccacactggacaa

SEQ ID NO: 1870656 - DNA, 15 bp, Homo sapiens
gccacactggacaac

SEQ ID NO: 1870657 - DNA, 15 bp, Homo sapiens
ccacactggacaacc

SEQ ID NO: 1870658 - DNA, 15 bp, Homo sapiens
cacactggacaaccc

SEQ ID NO: 1870659 - DNA, 15 bp, Homo sapiens
acactggacaacccg

SEQ ID NO: 1870660 - DNA, 15 bp, Homo sapiens
cactggacaacccgg

SEQ ID NO: 1870661 - DNA, 15 bp, Homo sapiens
actggacaacccgga

SEQ ID NO: 1870662 - DNA, 15 bp, Homo sapiens
ctggacaacccggac

SEQ ID NO: 1870663 - DNA, 15 bp, Homo sapiens
tggacaacccggact

SEQ ID NO: 1870664 - DNA, 15 bp, Homo sapiens
ggacaacccggactc

SEQ ID NO: 1870665 - DNA, 15 bp, Homo sapiens
gacaacccggactcc

SEQ ID NO: 1870666 - DNA, 15 bp, Homo sapiens
acaacccggactcca

SEQ ID NO: 1870667 - DNA, 15 bp, Homo sapiens
caacccggactccag

SEQ ID NO: 1870668 - DNA, 15 bp, Homo sapiens
aacccggactccagg

SEQ ID NO: 1870669 - DNA, 15 bp, Homo sapiens
acccggactccagga

SEQ ID NO: 1870670 - DNA, 15 bp, Homo sapiens
cccggactccaggac

SEQ ID NO: 1870671 - DNA, 15 bp, Homo sapiens
ccggactccaggacg

SEQ ID NO: 1870672 - DNA, 15 bp, Homo sapiens
cggactccaggacgc

SEQ ID NO: 1870673 - DNA, 15 bp, Homo sapiens
ggactccaggacgct

SEQ ID NO: 1870674 - DNA, 15 bp, Homo sapiens
gactccaggacgctg

SEQ ID NO: 1870675 - DNA, 15 bp, Homo sapiens
actccaggacgctgt

SEQ ID NO: 1870676 - DNA, 15 bp, Homo sapiens
ctccaggacgctgtt

SEQ ID NO: 1870677 - DNA, 15 bp, Homo sapiens
tccaggacgctgttg

SEQ ID NO: 1870678 - DNA, 15 bp, Homo sapiens
ccaggacgctgttgg

SEQ ID NO: 1870679 - DNA, 15 bp, Homo sapiens
caggacgctgttggt

SEQ ID NO: 1870680 - DNA, 15 bp, Homo sapiens
aggacgctgttggta

SEQ ID NO: 1870681 - DNA, 15 bp, Homo sapiens
ggacgctgttggtac

SEQ ID NO: 1870682 - DNA, 15 bp, Homo sapiens
gacgctgttggtaca

SEQ ID NO: 1870683 - DNA, 15 bp, Homo sapiens
acgctgttggtacac

SEQ ID NO: 1870684 - DNA, 15 bp, Homo sapiens
cgctgttggtacaca

SEQ ID NO: 1870685 - DNA, 15 bp, Homo sapiens
gctgttggtacacaa

SEQ ID NO: 1870686 - DNA, 15 bp, Homo sapiens
ctgttggtacacaag

SEQ ID NO: 1870687 - DNA, 15 bp, Homo sapiens
tgttggtacacaagg

SEQ ID NO: 1870688 - DNA, 15 bp, Homo sapiens
gttggtacacaaggt

SEQ ID NO: 1870689 - DNA, 15 bp, Homo sapiens
ttggtacacaaggtg

SEQ ID NO: 1870690 - DNA, 15 bp, Homo sapiens
tggtacacaaggtgt

SEQ ID NO: 1870691 - DNA, 15 bp, Homo sapiens
ggtacacaaggtgtt

SEQ ID NO: 1870692 - DNA, 15 bp, Homo sapiens
gtacacaaggtgttc

SEQ ID NO: 1870693 - DNA, 15 bp, Homo sapiens
tacacaaggtgttcc

SEQ ID NO: 1870694 - DNA, 15 bp, Homo sapiens
acacaaggtgttccc

SEQ ID NO: 1870695 - DNA, 15 bp, Homo sapiens
cacaaggtgttcccc

SEQ ID NO: 1870696 - DNA, 15 bp, Homo sapiens
acaaggtgttccccg

SEQ ID NO: 1870697 - DNA, 15 bp, Homo sapiens
caaggtgttccccgg

SEQ ID NO: 1870698 - DNA, 15 bp, Homo sapiens
aaggtgttccccggt

SEQ ID NO: 1870699 - DNA, 15 bp, Homo sapiens
aggtgttccccggtt

SEQ ID NO: 1870700 - DNA, 15 bp, Homo sapiens
ggtgttccccggttt

SEQ ID NO: 1870701 - DNA, 15 bp, Homo sapiens
gtgttccccggtttc

SEQ ID NO: 1870702 - DNA, 15 bp, Homo sapiens
tgttccccggtttct

SEQ ID NO: 1870703 - DNA, 15 bp, Homo sapiens
gttccccggtttctc

SEQ ID NO: 1870704 - DNA, 15 bp, Homo sapiens
ttccccggtttctcc

SEQ ID NO: 1870705 - DNA, 15 bp, Homo sapiens
tccccggtttctcca

SEQ ID NO: 1870706 - DNA, 15 bp, Homo sapiens
ccccggtttctccat

SEQ ID NO: 1870707 - DNA, 15 bp, Homo sapiens
cccggtttctccatc

SEQ ID NO: 1870708 - DNA, 15 bp, Homo sapiens
ccggtttctccatca

SEQ ID NO: 1870709 - DNA, 15 bp, Homo sapiens
cggtttctccatcaa

SEQ ID NO: 1870710 - DNA, 15 bp, Homo sapiens
ggtttctccatcaag

SEQ ID NO: 1870711 - DNA, 15 bp, Homo sapiens
gtttctccatcaagg

SEQ ID NO: 1870712 - DNA, 15 bp, Homo sapiens
tttctccatcaaggc

SEQ ID NO: 1870713 - DNA, 15 bp, Homo sapiens
ttctccatcaaggct

SEQ ID NO: 1870714 - DNA, 15 bp, Homo sapiens
tctccatcaaggctt

SEQ ID NO: 1870715 - DNA, 15 bp, Homo sapiens
ctccatcaaggcttt

SEQ ID NO: 1870716 - DNA, 15 bp, Homo sapiens
tccatcaaggctttc

SEQ ID NO: 1870717 - DNA, 15 bp, Homo sapiens
ccatcaaggctttcg

SEQ ID NO: 1870718 - DNA, 15 bp, Homo sapiens
catcaaggctttcga

SEQ ID NO: 1870719 - DNA, 15 bp, Homo sapiens
atcaaggctttcgac

SEQ ID NO: 1870720 - DNA, 15 bp, Homo sapiens
tcaaggctttcgact

SEQ ID NO: 1870721 - DNA, 15 bp, Homo sapiens
caaggctttcgacta

SEQ ID NO: 1870722 - DNA, 15 bp, Homo sapiens
aaggctttcgactac

SEQ ID NO: 1870723 - DNA, 15 bp, Homo sapiens
aggctttcgactacg

SEQ ID NO: 1870724 - DNA, 15 bp, Homo sapiens
ggctttcgactacga

SEQ ID NO: 1870725 - DNA, 15 bp, Homo sapiens
gctttcgactacgag

SEQ ID NO: 1870726 - DNA, 15 bp, Homo sapiens
ctttcgactacgaga

SEQ ID NO: 1870727 - DNA, 15 bp, Homo sapiens
tttcgactacgagaa

SEQ ID NO: 1870728 - DNA, 15 bp, Homo sapiens
ttcgactacgagaag

SEQ ID NO: 1870729 - DNA, 15 bp, Homo sapiens
tcgactacgagaagg

SEQ ID NO: 1870730 - DNA, 15 bp, Homo sapiens
cgactacgagaaggc

SEQ ID NO: 1870731 - DNA, 15 bp, Homo sapiens
gactacgagaaggcg

SEQ ID NO: 1870732 - DNA, 15 bp, Homo sapiens
actacgagaaggcgt

SEQ ID NO: 1870733 - DNA, 15 bp, Homo sapiens
ctacgagaaggcgta

SEQ ID NO: 1870734 - DNA, 15 bp, Homo sapiens
tacgagaaggcgtac

SEQ ID NO: 1870735 - DNA, 15 bp, Homo sapiens
acgagaaggcgtaca

SEQ ID NO: 1870736 - DNA, 15 bp, Homo sapiens
cgagaaggcgtacag

SEQ ID NO: 1870737 - DNA, 15 bp, Homo sapiens
gagaaggcgtacagc

SEQ ID NO: 1870738 - DNA, 15 bp, Homo sapiens
agaaggcgtacagcc

SEQ ID NO: 1870739 - DNA, 15 bp, Homo sapiens
gaaggcgtacagcct

SEQ ID NO: 1870740 - DNA, 15 bp, Homo sapiens
aaggcgtacagcctg

SEQ ID NO: 1870741 - DNA, 15 bp, Homo sapiens
aggcgtacagcctgc

SEQ ID NO: 1870742 - DNA, 15 bp, Homo sapiens
ggcgtacagcctgca

SEQ ID NO: 1870743 - DNA, 15 bp, Homo sapiens
gcgtacagcctgcag

SEQ ID NO: 1870744 - DNA, 15 bp, Homo sapiens
cgtacagcctgcagc

SEQ ID NO: 1870745 - DNA, 15 bp, Homo sapiens
gtacagcctgcagcg

SEQ ID NO: 1870746 - DNA, 15 bp, Homo sapiens
tacagcctgcagcgg

SEQ ID NO: 1870747 - DNA, 15 bp, Homo sapiens
acagcctgcagcggc

SEQ ID NO: 1870748 - DNA, 15 bp, Homo sapiens
cagcctgcagcggcc

SEQ ID NO: 1870749 - DNA, 15 bp, Homo sapiens
agcctgcagcggccc

SEQ ID NO: 1870750 - DNA, 15 bp, Homo sapiens
gcctgcagcggccca

SEQ ID NO: 1870751 - DNA, 15 bp, Homo sapiens
cctgcagcggcccaa

SEQ ID NO: 1870752 - DNA, 15 bp, Homo sapiens
ctgcagcggcccaat

SEQ ID NO: 1870753 - DNA, 15 bp, Homo sapiens
tgcagcggcccaatg

SEQ ID NO: 1870754 - DNA, 15 bp, Homo sapiens
gcagcggcccaatga

SEQ ID NO: 1870755 - DNA, 15 bp, Homo sapiens
cagcggcccaatgac

SEQ ID NO: 1870756 - DNA, 15 bp, Homo sapiens
agcggcccaatgacc

SEQ ID NO: 1870757 - DNA, 15 bp, Homo sapiens
gcggcccaatgacca

SEQ ID NO: 1870758 - DNA, 15 bp, Homo sapiens
cggcccaatgaccac

SEQ ID NO: 1870759 - DNA, 15 bp, Homo sapiens
ggcccaatgaccacg

SEQ ID NO: 1870760 - DNA, 15 bp, Homo sapiens
gcccaatgaccacga

SEQ ID NO: 1870761 - DNA, 15 bp, Homo sapiens
cccaatgaccacgag

SEQ ID NO: 1870762 - DNA, 15 bp, Homo sapiens
ccaatgaccacgagt

SEQ ID NO: 1870763 - DNA, 15 bp, Homo sapiens
caatgaccacgagtt

SEQ ID NO: 1870764 - DNA, 15 bp, Homo sapiens
aatgaccacgagttt

SEQ ID NO: 1870765 - DNA, 15 bp, Homo sapiens
atgaccacgagttta

SEQ ID NO: 1870766 - DNA, 15 bp, Homo sapiens
tgaccacgagtttat

SEQ ID NO: 1870767 - DNA, 15 bp, Homo sapiens
gaccacgagtttatg

SEQ ID NO: 1870768 - DNA, 15 bp, Homo sapiens
accacgagtttatgc

SEQ ID NO: 1870769 - DNA, 15 bp, Homo sapiens
ccacgagtttatgca

SEQ ID NO: 1870770 - DNA, 15 bp, Homo sapiens
cacgagtttatgcag

SEQ ID NO: 1870771 - DNA, 15 bp, Homo sapiens
acgagtttatgcagc

SEQ ID NO: 1870772 - DNA, 15 bp, Homo sapiens
cgagtttatgcagca

SEQ ID NO: 1870773 - DNA, 15 bp, Homo sapiens
gagtttatgcagcag

SEQ ID NO: 1870774 - DNA, 15 bp, Homo sapiens
agtttatgcagcagc

SEQ ID NO: 1870775 - DNA, 15 bp, Homo sapiens
gtttatgcagcagcc

SEQ ID NO: 1870776 - DNA, 15 bp, Homo sapiens
tttatgcagcagccg

SEQ ID NO: 1870777 - DNA, 15 bp, Homo sapiens
ttatgcagcagccgt

SEQ ID NO: 1870778 - DNA, 15 bp, Homo sapiens
tatgcagcagccgtg

SEQ ID NO: 1870779 - DNA, 15 bp, Homo sapiens
atgcagcagccgtgg

SEQ ID NO: 1870780 - DNA, 15 bp, Homo sapiens
tgcagcagccgtgga

SEQ ID NO: 1870781 - DNA, 15 bp, Homo sapiens
gcagcagccgtggac

SEQ ID NO: 1870782 - DNA, 15 bp, Homo sapiens
cagcagccgtggacg

SEQ ID NO: 1870783 - DNA, 15 bp, Homo sapiens
agcagccgtggacgg

SEQ ID NO: 1870784 - DNA, 15 bp, Homo sapiens
gcagccgtggacggg

SEQ ID NO: 1870785 - DNA, 15 bp, Homo sapiens
cagccgtggacgggc

SEQ ID NO: 1870786 - DNA, 15 bp, Homo sapiens
agccgtggacgggct

SEQ ID NO: 1870787 - DNA, 15 bp, Homo sapiens
gccgtggacgggctt

SEQ ID NO: 1870788 - DNA, 15 bp, Homo sapiens
ccgtggacgggcttt

SEQ ID NO: 1870789 - DNA, 15 bp, Homo sapiens
cgtggacgggcttta

SEQ ID NO: 1870790 - DNA, 15 bp, Homo sapiens
gtggacgggctttac

SEQ ID NO: 1870791 - DNA, 15 bp, Homo sapiens
tggacgggctttacc

SEQ ID NO: 1870792 - DNA, 15 bp, Homo sapiens
ggacgggctttaccg

SEQ ID NO: 1870793 - DNA, 15 bp, Homo sapiens
gacgggctttaccgt

SEQ ID NO: 1870794 - DNA, 15 bp, Homo sapiens
acgggctttaccgtg

SEQ ID NO: 1870795 - DNA, 15 bp, Homo sapiens
cgggctttaccgtgc

SEQ ID NO: 1870796 - DNA, 15 bp, Homo sapiens
gggctttaccgtgca

SEQ ID NO: 1870797 - DNA, 15 bp, Homo sapiens
ggctttaccgtgcag

SEQ ID NO: 1870798 - DNA, 15 bp, Homo sapiens
gctttaccgtgcaga

SEQ ID NO: 1870799 - DNA, 15 bp, Homo sapiens
ctttaccgtgcagat

SEQ ID NO: 1870800 - DNA, 15 bp, Homo sapiens
tttaccgtgcagatc

SEQ ID NO: 1870801 - DNA, 15 bp, Homo sapiens
ttaccgtgcagatca

SEQ ID NO: 1870802 - DNA, 15 bp, Homo sapiens
taccgtgcagatcag

SEQ ID NO: 1870803 - DNA, 15 bp, Homo sapiens
accgtgcagatcagc

SEQ ID NO: 1870804 - DNA, 15 bp, Homo sapiens
ccgtgcagatcagct

SEQ ID NO: 1870805 - DNA, 15 bp, Homo sapiens
cgtgcagatcagctt

SEQ ID NO: 1870806 - DNA, 15 bp, Homo sapiens
gtgcagatcagcttt

SEQ ID NO: 1870807 - DNA, 15 bp, Homo sapiens
tgcagatcagctttg

SEQ ID NO: 1870808 - DNA, 15 bp, Homo sapiens
gcagatcagctttgt

SEQ ID NO: 1870809 - DNA, 15 bp, Homo sapiens
cagatcagctttgtg

SEQ ID NO: 1870810 - DNA, 15 bp, Homo sapiens
agatcagctttgtga

SEQ ID NO: 1870811 - DNA, 15 bp, Homo sapiens
gatcagctttgtgaa

SEQ ID NO: 1870812 - DNA, 15 bp, Homo sapiens
atcagctttgtgaag

SEQ ID NO: 1870813 - DNA, 15 bp, Homo sapiens
tcagctttgtgaagg

SEQ ID NO: 1870814 - DNA, 15 bp, Homo sapiens
cagctttgtgaaggg

SEQ ID NO: 1870815 - DNA, 15 bp, Homo sapiens
agctttgtgaagggc

SEQ ID NO: 1870816 - DNA, 15 bp, Homo sapiens
gctttgtgaagggct

SEQ ID NO: 1870817 - DNA, 15 bp, Homo sapiens
ctttgtgaagggctg

SEQ ID NO: 1870818 - DNA, 15 bp, Homo sapiens
tttgtgaagggctgg

SEQ ID NO: 1870819 - DNA, 15 bp, Homo sapiens
ttgtgaagggctggg

SEQ ID NO: 1870820 - DNA, 15 bp, Homo sapiens
tgtgaagggctgggg

SEQ ID NO: 1870821 - DNA, 15 bp, Homo sapiens
gtgaagggctggggc

SEQ ID NO: 1870822 - DNA, 15 bp, Homo sapiens
tgaagggctggggcc

SEQ ID NO: 1870823 - DNA, 15 bp, Homo sapiens
gaagggctggggcca

SEQ ID NO: 1870824 - DNA, 15 bp, Homo sapiens
aagggctggggccag

SEQ ID NO: 1870825 - DNA, 15 bp, Homo sapiens
agggctggggccagt

SEQ ID NO: 1870826 - DNA, 15 bp, Homo sapiens
gggctggggccagtg

SEQ ID NO: 1870827 - DNA, 15 bp, Homo sapiens
ggctggggccagtgc

SEQ ID NO: 1870828 - DNA, 15 bp, Homo sapiens
gctggggccagtgct

SEQ ID NO: 1870829 - DNA, 15 bp, Homo sapiens
ctggggccagtgcta

SEQ ID NO: 1870830 - DNA, 15 bp, Homo sapiens
tggggccagtgctac

SEQ ID NO: 1870831 - DNA, 15 bp, Homo sapiens
ggggccagtgctaca

SEQ ID NO: 1870832 - DNA, 15 bp, Homo sapiens
gggccagtgctacac

SEQ ID NO: 1870833 - DNA, 15 bp, Homo sapiens
ggccagtgctacacc

SEQ ID NO: 1870834 - DNA, 15 bp, Homo sapiens
gccagtgctacaccc

SEQ ID NO: 1870835 - DNA, 15 bp, Homo sapiens
ccagtgctacacccg

SEQ ID NO: 1870836 - DNA, 15 bp, Homo sapiens
cagtgctacacccgc

SEQ ID NO: 1870837 - DNA, 15 bp, Homo sapiens
agtgctacacccgcc

SEQ ID NO: 1870838 - DNA, 15 bp, Homo sapiens
gtgctacacccgcca

SEQ ID NO: 1870839 - DNA, 15 bp, Homo sapiens
tgctacacccgccag

SEQ ID NO: 1870840 - DNA, 15 bp, Homo sapiens
gctacacccgccagt

SEQ ID NO: 1870841 - DNA, 15 bp, Homo sapiens
ctacacccgccagtt

SEQ ID NO: 1870842 - DNA, 15 bp, Homo sapiens
tacacccgccagttc

SEQ ID NO: 1870843 - DNA, 15 bp, Homo sapiens
acacccgccagttca

SEQ ID NO: 1870844 - DNA, 15 bp, Homo sapiens
cacccgccagttcat

SEQ ID NO: 1870845 - DNA, 15 bp, Homo sapiens
acccgccagttcatc

SEQ ID NO: 1870846 - DNA, 15 bp, Homo sapiens
cccgccagttcatca

SEQ ID NO: 1870847 - DNA, 15 bp, Homo sapiens
ccgccagttcatcag

SEQ ID NO: 1870848 - DNA, 15 bp, Homo sapiens
cgccagttcatcagc

SEQ ID NO: 1870849 - DNA, 15 bp, Homo sapiens
gccagttcatcagca

SEQ ID NO: 1870850 - DNA, 15 bp, Homo sapiens
ccagttcatcagcag

SEQ ID NO: 1870851 - DNA, 15 bp, Homo sapiens
cagttcatcagcagc

SEQ ID NO: 1870852 - DNA, 15 bp, Homo sapiens
agttcatcagcagct

SEQ ID NO: 1870853 - DNA, 15 bp, Homo sapiens
gttcatcagcagctg

SEQ ID NO: 1870854 - DNA, 15 bp, Homo sapiens
ttcatcagcagctgc

SEQ ID NO: 1870855 - DNA, 15 bp, Homo sapiens
tcatcagcagctgcc

SEQ ID NO: 1870856 - DNA, 15 bp, Homo sapiens
catcagcagctgccc

SEQ ID NO: 1870857 - DNA, 15 bp, Homo sapiens
atcagcagctgcccg

SEQ ID NO: 1870858 - DNA, 15 bp, Homo sapiens
tcagcagctgcccgt

SEQ ID NO: 1870859 - DNA, 15 bp, Homo sapiens
cagcagctgcccgtg

SEQ ID NO: 1870860 - DNA, 15 bp, Homo sapiens
agcagctgcccgtgc

SEQ ID NO: 1870861 - DNA, 15 bp, Homo sapiens
gcagctgcccgtgct

SEQ ID NO: 1870862 - DNA, 15 bp, Homo sapiens
cagctgcccgtgctg

SEQ ID NO: 1870863 - DNA, 15 bp, Homo sapiens
agctgcccgtgctgg

SEQ ID NO: 1870864 - DNA, 15 bp, Homo sapiens
gctgcccgtgctggc

SEQ ID NO: 1870865 - DNA, 15 bp, Homo sapiens
ctgcccgtgctggct

SEQ ID NO: 1870866 - DNA, 15 bp, Homo sapiens
tgcccgtgctggcta

SEQ ID NO: 1870867 - DNA, 15 bp, Homo sapiens
gcccgtgctggctag

SEQ ID NO: 1870868 - DNA, 15 bp, Homo sapiens
cccgtgctggctaga

SEQ ID NO: 1870869 - DNA, 15 bp, Homo sapiens
ccgtgctggctagag

SEQ ID NO: 1870870 - DNA, 15 bp, Homo sapiens
cgtgctggctagagg

SEQ ID NO: 1870871 - DNA, 15 bp, Homo sapiens
gtgctggctagaggt

SEQ ID NO: 1870872 - DNA, 15 bp, Homo sapiens
tgctggctagaggtc

SEQ ID NO: 1870873 - DNA, 15 bp, Homo sapiens
gctggctagaggtca

SEQ ID NO: 1870874 - DNA, 15 bp, Homo sapiens
ctggctagaggtcat

SEQ ID NO: 1870875 - DNA, 15 bp, Homo sapiens
tggctagaggtcatc

SEQ ID NO: 1870876 - DNA, 15 bp, Homo sapiens
ggctagaggtcatct

SEQ ID NO: 1870877 - DNA, 15 bp, Homo sapiens
gctagaggtcatctt

SEQ ID NO: 1870878 - DNA, 15 bp, Homo sapiens
ctagaggtcatcttc

SEQ ID NO: 1870879 - DNA, 15 bp, Homo sapiens
tagaggtcatcttca

SEQ ID NO: 1870880 - DNA, 15 bp, Homo sapiens
agaggtcatcttcaa

SEQ ID NO: 1870881 - DNA, 15 bp, Homo sapiens
gaggtcatcttcaac

SEQ ID NO: 1870882 - DNA, 15 bp, Homo sapiens
aggtcatcttcaaca

SEQ ID NO: 1870883 - DNA, 15 bp, Homo sapiens
ggtcatcttcaacag

SEQ ID NO: 1870884 - DNA, 15 bp, Homo sapiens
gtcatcttcaacagc

SEQ ID NO: 1870885 - DNA, 15 bp, Homo sapiens
tcatcttcaacagcc

SEQ ID NO: 1870886 - DNA, 15 bp, Homo sapiens
catcttcaacagccg

SEQ ID NO: 1870887 - DNA, 15 bp, Homo sapiens
atcttcaacagccgg

SEQ ID NO: 1870888 - DNA, 15 bp, Homo sapiens
tcttcaacagccggt

SEQ ID NO: 1870889 - DNA, 15 bp, Homo sapiens
cttcaacagccggta

SEQ ID NO: 1870890 - DNA, 15 bp, Homo sapiens
ttcaacagccggtag

SEQ ID NO: 1870891 - DNA, 15 bp, Homo sapiens
tcaacagccggtagc

SEQ ID NO: 1870892 - DNA, 15 bp, Homo sapiens
caacagccggtagcc

SEQ ID NO: 1870893 - DNA, 15 bp, Homo sapiens
aacagccggtagccg

SEQ ID NO: 1870894 - DNA, 15 bp, Homo sapiens
acagccggtagccgc

SEQ ID NO: 1870895 - DNA, 15 bp, Homo sapiens
cagccggtagccgcg

SEQ ID NO: 1870896 - DNA, 15 bp, Homo sapiens
agccggtagccgcgt

SEQ ID NO: 1870897 - DNA, 15 bp, Homo sapiens
gccggtagccgcgtg

SEQ ID NO: 1870898 - DNA, 15 bp, Homo sapiens
ccggtagccgcgtgc

SEQ ID NO: 1870899 - DNA, 15 bp, Homo sapiens
cggtagccgcgtgcg

SEQ ID NO: 1870900 - DNA, 15 bp, Homo sapiens
ggtagccgcgtgcgg

SEQ ID NO: 1870901 - DNA, 15 bp, Homo sapiens
gtagccgcgtgcgga

SEQ ID NO: 1870902 - DNA, 15 bp, Homo sapiens
tagccgcgtgcggag

SEQ ID NO: 1870903 - DNA, 15 bp, Homo sapiens
agccgcgtgcggagg

SEQ ID NO: 1870904 - DNA, 15 bp, Homo sapiens
gccgcgtgcggaggg

SEQ ID NO: 1870905 - DNA, 15 bp, Homo sapiens
ccgcgtgcggagggg

SEQ ID NO: 1870906 - DNA, 15 bp, Homo sapiens
cgcgtgcggagggga

SEQ ID NO: 1870907 - DNA, 15 bp, Homo sapiens
gcgtgcggaggggac

SEQ ID NO: 1870908 - DNA, 15 bp, Homo sapiens
cgtgcggaggggaca

SEQ ID NO: 1870909 - DNA, 15 bp, Homo sapiens
gtgcggaggggacag

SEQ ID NO: 1870910 - DNA, 15 bp, Homo sapiens
tgcggaggggacaga

SEQ ID NO: 1870911 - DNA, 15 bp, Homo sapiens
gcggaggggacagag

SEQ ID NO: 1870912 - DNA, 15 bp, Homo sapiens
cggaggggacagagc

SEQ ID NO: 1870913 - DNA, 15 bp, Homo sapiens
ggaggggacagagcg

SEQ ID NO: 1870914 - DNA, 15 bp, Homo sapiens
gaggggacagagcgt

SEQ ID NO: 1870915 - DNA, 15 bp, Homo sapiens
aggggacagagcgtg

SEQ ID NO: 1870916 - DNA, 15 bp, Homo sapiens
ggggacagagcgtga

SEQ ID NO: 1870917 - DNA, 15 bp, Homo sapiens
gggacagagcgtgag

SEQ ID NO: 1870918 - DNA, 15 bp, Homo sapiens
ggacagagcgtgagc

SEQ ID NO: 1870919 - DNA, 15 bp, Homo sapiens
gacagagcgtgagct

SEQ ID NO: 1870920 - DNA, 15 bp, Homo sapiens
acagagcgtgagctg

SEQ ID NO: 1870921 - DNA, 15 bp, Homo sapiens
cagagcgtgagctga

SEQ ID NO: 1870922 - DNA, 15 bp, Homo sapiens
agagcgtgagctgag

SEQ ID NO: 1870923 - DNA, 15 bp, Homo sapiens
gagcgtgagctgagc

SEQ ID NO: 1870924 - DNA, 15 bp, Homo sapiens
agcgtgagctgagca

SEQ ID NO: 1870925 - DNA, 15 bp, Homo sapiens
gcgtgagctgagcag

SEQ ID NO: 1870926 - DNA, 15 bp, Homo sapiens
cgtgagctgagcagg

SEQ ID NO: 1870927 - DNA, 15 bp, Homo sapiens
gtgagctgagcaggc

SEQ ID NO: 1870928 - DNA, 15 bp, Homo sapiens
tgagctgagcaggcc

SEQ ID NO: 1870929 - DNA, 15 bp, Homo sapiens
gagctgagcaggcca

SEQ ID NO: 1870930 - DNA, 15 bp, Homo sapiens
agctgagcaggccac

SEQ ID NO: 1870931 - DNA, 15 bp, Homo sapiens
gctgagcaggccaca

SEQ ID NO: 1870932 - DNA, 15 bp, Homo sapiens
ctgagcaggccacac

SEQ ID NO: 1870933 - DNA, 15 bp, Homo sapiens
tgagcaggccacact

SEQ ID NO: 1870934 - DNA, 15 bp, Homo sapiens
gagcaggccacactt

SEQ ID NO: 1870935 - DNA, 15 bp, Homo sapiens
agcaggccacacttc

SEQ ID NO: 1870936 - DNA, 15 bp, Homo sapiens
gcaggccacacttca

SEQ ID NO: 1870937 - DNA, 15 bp, Homo sapiens
caggccacacttcaa

SEQ ID NO: 1870938 - DNA, 15 bp, Homo sapiens
aggccacacttcaaa

SEQ ID NO: 1870939 - DNA, 15 bp, Homo sapiens
ggccacacttcaaac

SEQ ID NO: 1870940 - DNA, 15 bp, Homo sapiens
gccacacttcaaact

SEQ ID NO: 1870941 - DNA, 15 bp, Homo sapiens
ccacacttcaaacta

SEQ ID NO: 1870942 - DNA, 15 bp, Homo sapiens
cacacttcaaactac

SEQ ID NO: 1870943 - DNA, 15 bp, Homo sapiens
acacttcaaactact

SEQ ID NO: 1870944 - DNA, 15 bp, Homo sapiens
cacttcaaactactt

SEQ ID NO: 1870945 - DNA, 15 bp, Homo sapiens
acttcaaactacttt

SEQ ID NO: 1870946 - DNA, 15 bp, Homo sapiens
cttcaaactactttg

SEQ ID NO: 1870947 - DNA, 15 bp, Homo sapiens
ttcaaactactttgc

SEQ ID NO: 1870948 - DNA, 15 bp, Homo sapiens
tcaaactactttgct

SEQ ID NO: 1870949 - DNA, 15 bp, Homo sapiens
caaactactttgctg

SEQ ID NO: 1870950 - DNA, 15 bp, Homo sapiens
aaactactttgctgc

SEQ ID NO: 1870951 - DNA, 15 bp, Homo sapiens
aactactttgctgct

SEQ ID NO: 1870952 - DNA, 15 bp, Homo sapiens
actactttgctgcta

SEQ ID NO: 1870953 - DNA, 15 bp, Homo sapiens
ctactttgctgctaa

SEQ ID NO: 1870954 - DNA, 15 bp, Homo sapiens
tactttgctgctaat

SEQ ID NO: 1870955 - DNA, 15 bp, Homo sapiens
actttgctgctaata

SEQ ID NO: 1870956 - DNA, 15 bp, Homo sapiens
ctttgctgctaatat

SEQ ID NO: 1870957 - DNA, 15 bp, Homo sapiens
tttgctgctaatatt

SEQ ID NO: 1870958 - DNA, 15 bp, Homo sapiens
ttgctgctaatattt

SEQ ID NO: 1870959 - DNA, 15 bp, Homo sapiens
tgctgctaatatttt

SEQ ID NO: 1870960 - DNA, 15 bp, Homo sapiens
gctgctaatattttc

SEQ ID NO: 1870961 - DNA, 15 bp, Homo sapiens
ctgctaatattttcc

SEQ ID NO: 1870962 - DNA, 15 bp, Homo sapiens
tgctaatattttcct

SEQ ID NO: 1870963 - DNA, 15 bp, Homo sapiens
gctaatattttcctc

SEQ ID NO: 1870964 - DNA, 15 bp, Homo sapiens
ctaatattttcctcc

SEQ ID NO: 1870965 - DNA, 15 bp, Homo sapiens
taatattttcctcct

SEQ ID NO: 1870966 - DNA, 15 bp, Homo sapiens
aatattttcctcctg

SEQ ID NO: 1870967 - DNA, 15 bp, Homo sapiens
atattttcctcctga

SEQ ID NO: 1870968 - DNA, 15 bp, Homo sapiens
tattttcctcctgag

SEQ ID NO: 1870969 - DNA, 15 bp, Homo sapiens
attttcctcctgagt

SEQ ID NO: 1870970 - DNA, 15 bp, Homo sapiens
ttttcctcctgagtg

SEQ ID NO: 1870971 - DNA, 15 bp, Homo sapiens
tttcctcctgagtgc

SEQ ID NO: 1870972 - DNA, 15 bp, Homo sapiens
ttcctcctgagtgct

SEQ ID NO: 1870973 - DNA, 15 bp, Homo sapiens
tcctcctgagtgctt

SEQ ID NO: 1870974 - DNA, 15 bp, Homo sapiens
cctcctgagtgcttg

SEQ ID NO: 1870975 - DNA, 15 bp, Homo sapiens
ctcctgagtgcttgc

SEQ ID NO: 1870976 - DNA, 15 bp, Homo sapiens
tcctgagtgcttgct

SEQ ID NO: 1870977 - DNA, 15 bp, Homo sapiens
cctgagtgcttgctt

SEQ ID NO: 1870978 - DNA, 15 bp, Homo sapiens
ctgagtgcttgcttt

SEQ ID NO: 1870979 - DNA, 15 bp, Homo sapiens
tgagtgcttgctttt

SEQ ID NO: 1870980 - DNA, 15 bp, Homo sapiens
gagtgcttgcttttc

SEQ ID NO: 1870981 - DNA, 15 bp, Homo sapiens
agtgcttgcttttca

SEQ ID NO: 1870982 - DNA, 15 bp, Homo sapiens
gtgcttgcttttcat

SEQ ID NO: 1870983 - DNA, 15 bp, Homo sapiens
tgcttgcttttcatg

SEQ ID NO: 1870984 - DNA, 15 bp, Homo sapiens
gcttgcttttcatgc

SEQ ID NO: 1870985 - DNA, 15 bp, Homo sapiens
cttgcttttcatgca

SEQ ID NO: 1870986 - DNA, 15 bp, Homo sapiens
ttgcttttcatgcaa

SEQ ID NO: 1870987 - DNA, 15 bp, Homo sapiens
tgcttttcatgcaaa

SEQ ID NO: 1870988 - DNA, 15 bp, Homo sapiens
gcttttcatgcaaac

SEQ ID NO: 1870989 - DNA, 15 bp, Homo sapiens
cttttcatgcaaact

SEQ ID NO: 1870990 - DNA, 15 bp, Homo sapiens
ttttcatgcaaactc

SEQ ID NO: 1870991 - DNA, 15 bp, Homo sapiens
tttcatgcaaactct

SEQ ID NO: 1870992 - DNA, 15 bp, Homo sapiens
ttcatgcaaactctt

SEQ ID NO: 1870993 - DNA, 15 bp, Homo sapiens
tcatgcaaactcttt

SEQ ID NO: 1870994 - DNA, 15 bp, Homo sapiens
catgcaaactctttg

SEQ ID NO: 1870995 - DNA, 15 bp, Homo sapiens
atgcaaactctttgg

SEQ ID NO: 1870996 - DNA, 15 bp, Homo sapiens
tgcaaactctttggt

SEQ ID NO: 1870997 - DNA, 15 bp, Homo sapiens
gcaaactctttggtc

SEQ ID NO: 1870998 - DNA, 15 bp, Homo sapiens
caaactctttggtcg

SEQ ID NO: 1870999 - DNA, 15 bp, Homo sapiens
aaactctttggtcgt

SEQ ID NO: 1871000 - DNA, 15 bp, Homo sapiens
aactctttggtcgtt

SEQ ID NO: 1871001 - DNA, 15 bp, Homo sapiens
actctttggtcgttt

SEQ ID NO: 1871002 - DNA, 15 bp, Homo sapiens
ctctttggtcgtttt

SEQ ID NO: 1871003 - DNA, 15 bp, Homo sapiens
tctttggtcgttttt

SEQ ID NO: 1871004 - DNA, 15 bp, Homo sapiens
ctttggtcgtttttt

SEQ ID NO: 1871005 - DNA, 15 bp, Homo sapiens
tttggtcgttttttt

SEQ ID NO: 1871006 - DNA, 15 bp, Homo sapiens
ttggtcgtttttttt

SEQ ID NO: 1871007 - DNA, 15 bp, Homo sapiens
tggtcgttttttttt

SEQ ID NO: 1871008 - DNA, 15 bp, Homo sapiens
ggtcgtttttttttt

SEQ ID NO: 1871009 - DNA, 15 bp, Homo sapiens
gtcgttttttttttg

SEQ ID NO: 1871010 - DNA, 15 bp, Homo sapiens
tcgttttttttttgt

SEQ ID NO: 1871011 - DNA, 15 bp, Homo sapiens
cgttttttttttgtt

SEQ ID NO: 1871012 - DNA, 15 bp, Homo sapiens
tttttttgtttgttg

SEQ ID NO: 1871013 - DNA, 15 bp, Homo sapiens
ttttttgtttgttgg

SEQ ID NO: 1871014 - DNA, 15 bp, Homo sapiens
tttttgtttgttggt

SEQ ID NO: 1871015 - DNA, 15 bp, Homo sapiens
ttttgtttgttggtt

SEQ ID NO: 1871016 - DNA, 15 bp, Homo sapiens
tttgtttgttggttg

SEQ ID NO: 1871017 - DNA, 15 bp, Homo sapiens
ttgtttgttggttgg

SEQ ID NO: 1871018 - DNA, 15 bp, Homo sapiens
tgtttgttggttggt

SEQ ID NO: 1871019 - DNA, 15 bp, Homo sapiens
gtttgttggttggtt

SEQ ID NO: 1871020 - DNA, 15 bp, Homo sapiens
tttgttggttggttt

SEQ ID NO: 1871021 - DNA, 15 bp, Homo sapiens
ttgttggttggtttt

SEQ ID NO: 1871022 - DNA, 15 bp, Homo sapiens
tgttggttggttttc

SEQ ID NO: 1871023 - DNA, 15 bp, Homo sapiens
gttggttggttttct

SEQ ID NO: 1871024 - DNA, 15 bp, Homo sapiens
ttggttggttttctt

SEQ ID NO: 1871025 - DNA, 15 bp, Homo sapiens
tggttggttttcttc

SEQ ID NO: 1871026 - DNA, 15 bp, Homo sapiens
ggttggttttcttct

SEQ ID NO: 1871027 - DNA, 15 bp, Homo sapiens
gttggttttcttctt

SEQ ID NO: 1871028 - DNA, 15 bp, Homo sapiens
ttggttttcttcttc

SEQ ID NO: 1871029 - DNA, 15 bp, Homo sapiens
tggttttcttcttct

SEQ ID NO: 1871030 - DNA, 15 bp, Homo sapiens
ggttttcttcttctc

SEQ ID NO: 1871031 - DNA, 15 bp, Homo sapiens
gttttcttcttctcg

SEQ ID NO: 1871032 - DNA, 15 bp, Homo sapiens
ttttcttcttctcgt

SEQ ID NO: 1871033 - DNA, 15 bp, Homo sapiens
tttcttcttctcgtc

SEQ ID NO: 1871034 - DNA, 15 bp, Homo sapiens
ttcttcttctcgtcc

SEQ ID NO: 1871035 - DNA, 15 bp, Homo sapiens
tcttcttctcgtcct

SEQ ID NO: 1871036 - DNA, 15 bp, Homo sapiens
cttcttctcgtcctc

SEQ ID NO: 1871037 - DNA, 15 bp, Homo sapiens
ttcttctcgtcctcg

SEQ ID NO: 1871038 - DNA, 15 bp, Homo sapiens
tcttctcgtcctcgt

SEQ ID NO: 1871039 - DNA, 15 bp, Homo sapiens
cttctcgtcctcgtt

SEQ ID NO: 1871040 - DNA, 15 bp, Homo sapiens
ttctcgtcctcgttt

SEQ ID NO: 1871041 - DNA, 15 bp, Homo sapiens
tctcgtcctcgtttg

SEQ ID NO: 1871042 - DNA, 15 bp, Homo sapiens
ctcgtcctcgtttgt

SEQ ID NO: 1871043 - DNA, 15 bp, Homo sapiens
tcgtcctcgtttgtg

SEQ ID NO: 1871044 - DNA, 15 bp, Homo sapiens
cgtcctcgtttgtgt

SEQ ID NO: 1871045 - DNA, 15 bp, Homo sapiens
gtcctcgtttgtgtt

SEQ ID NO: 1871046 - DNA, 15 bp, Homo sapiens
tcctcgtttgtgttc

SEQ ID NO: 1871047 - DNA, 15 bp, Homo sapiens
cctcgtttgtgttct

SEQ ID NO: 1871048 - DNA, 15 bp, Homo sapiens
ctcgtttgtgttctg

SEQ ID NO: 1871049 - DNA, 15 bp, Homo sapiens
tcgtttgtgttctgt

SEQ ID NO: 1871050 - DNA, 15 bp, Homo sapiens
cgtttgtgttctgtt

SEQ ID NO: 1871051 - DNA, 15 bp, Homo sapiens
gtttgtgttctgttt

SEQ ID NO: 1871052 - DNA, 15 bp, Homo sapiens
tttgtgttctgtttt

SEQ ID NO: 1871053 - DNA, 15 bp, Homo sapiens
ttgtgttctgttttg

SEQ ID NO: 1871054 - DNA, 15 bp, Homo sapiens
tgtgttctgttttgt

SEQ ID NO: 1871055 - DNA, 15 bp, Homo sapiens
gtgttctgttttgtt

SEQ ID NO: 1871056 - DNA, 15 bp, Homo sapiens
tgttctgttttgttt

SEQ ID NO: 1871057 - DNA, 15 bp, Homo sapiens
gttctgttttgtttc

SEQ ID NO: 1871058 - DNA, 15 bp, Homo sapiens
ttctgttttgtttcg

SEQ ID NO: 1871059 - DNA, 15 bp, Homo sapiens
tctgttttgtttcgc

SEQ ID NO: 1871060 - DNA, 15 bp, Homo sapiens
ctgttttgtttcgct

SEQ ID NO: 1871061 - DNA, 15 bp, Homo sapiens
tgttttgtttcgctc

SEQ ID NO: 1871062 - DNA, 15 bp, Homo sapiens
gttttgtttcgctct

SEQ ID NO: 1871063 - DNA, 15 bp, Homo sapiens
ttttgtttcgctctt

SEQ ID NO: 1871064 - DNA, 15 bp, Homo sapiens
tttgtttcgctcttt

SEQ ID NO: 1871065 - DNA, 15 bp, Homo sapiens
ttgtttcgctctttg

SEQ ID NO: 1871066 - DNA, 15 bp, Homo sapiens
tgtttcgctctttga

SEQ ID NO: 1871067 - DNA, 15 bp, Homo sapiens
gtttcgctctttgag

SEQ ID NO: 1871068 - DNA, 15 bp, Homo sapiens
tttcgctctttgaga

SEQ ID NO: 1871069 - DNA, 15 bp, Homo sapiens
ttcgctctttgagaa

SEQ ID NO: 1871070 - DNA, 15 bp, Homo sapiens
tcgctctttgagaaa

SEQ ID NO: 1871071 - DNA, 15 bp, Homo sapiens
cgctctttgagaaat

SEQ ID NO: 1871072 - DNA, 15 bp, Homo sapiens
gctctttgagaaata

SEQ ID NO: 1871073 - DNA, 15 bp, Homo sapiens
ctctttgagaaatag

SEQ ID NO: 1871074 - DNA, 15 bp, Homo sapiens
tctttgagaaatagc

SEQ ID NO: 1871075 - DNA, 15 bp, Homo sapiens
ctttgagaaatagct

SEQ ID NO: 1871076 - DNA, 15 bp, Homo sapiens
tttgagaaatagctt

SEQ ID NO: 1871077 - DNA, 15 bp, Homo sapiens
ttgagaaatagctta

SEQ ID NO: 1871078 - DNA, 15 bp, Homo sapiens
tgagaaatagcttat

SEQ ID NO: 1871079 - DNA, 15 bp, Homo sapiens
gagaaatagcttatg

SEQ ID NO: 1871080 - DNA, 15 bp, Homo sapiens
agaaatagcttatga

SEQ ID NO: 1871081 - DNA, 15 bp, Homo sapiens
gaaatagcttatgaa

SEQ ID NO: 1871082 - DNA, 15 bp, Homo sapiens
aaatagcttatgaaa

SEQ ID NO: 1871083 - DNA, 15 bp, Homo sapiens
aatagcttatgaaaa

SEQ ID NO: 1871084 - DNA, 15 bp, Homo sapiens
atagcttatgaaaag

SEQ ID NO: 1871085 - DNA, 15 bp, Homo sapiens
tagcttatgaaaaga

SEQ ID NO: 1871086 - DNA, 15 bp, Homo sapiens
agcttatgaaaagaa

SEQ ID NO: 1871087 - DNA, 15 bp, Homo sapiens
gcttatgaaaagaat

SEQ ID NO: 1871088 - DNA, 15 bp, Homo sapiens
cttatgaaaagaatt

SEQ ID NO: 1871089 - DNA, 15 bp, Homo sapiens
ttatgaaaagaattg

SEQ ID NO: 1871090 - DNA, 15 bp, Homo sapiens
tatgaaaagaattgt

SEQ ID NO: 1871091 - DNA, 15 bp, Homo sapiens
atgaaaagaattgtt

SEQ ID NO: 1871092 - DNA, 15 bp, Homo sapiens
tgaaaagaattgttg

SEQ ID NO: 1871093 - DNA, 15 bp, Homo sapiens
gaaaagaattgttgg

SEQ ID NO: 1871094 - DNA, 15 bp, Homo sapiens
aaaagaattgttggg

SEQ ID NO: 1871095 - DNA, 15 bp, Homo sapiens
aaagaattgttgggg

SEQ ID NO: 1871096 - DNA, 15 bp, Homo sapiens
aagaattgttggggg

SEQ ID NO: 1871097 - DNA, 15 bp, Homo sapiens
agaattgttgggggt

SEQ ID NO: 1871098 - DNA, 15 bp, Homo sapiens
gaattgttgggggtt

SEQ ID NO: 1871099 - DNA, 15 bp, Homo sapiens
aattgttgggggttt

SEQ ID NO: 1871100 - DNA, 15 bp, Homo sapiens
attgttgggggtttt

SEQ ID NO: 1871101 - DNA, 15 bp, Homo sapiens
ttgttgggggttttt

SEQ ID NO: 1871102 - DNA, 15 bp, Homo sapiens
tgttgggggtttttt

SEQ ID NO: 1871103 - DNA, 15 bp, Homo sapiens
gttgggggttttttt

SEQ ID NO: 1871104 - DNA, 15 bp, Homo sapiens
ttgggggtttttttg

SEQ ID NO: 1871105 - DNA, 15 bp, Homo sapiens
tgggggtttttttgg

SEQ ID NO: 1871106 - DNA, 15 bp, Homo sapiens
gggggtttttttgga

SEQ ID NO: 1871107 - DNA, 15 bp, Homo sapiens
ggggtttttttggaa

SEQ ID NO: 1871108 - DNA, 15 bp, Homo sapiens
gggtttttttggaag

SEQ ID NO: 1871109 - DNA, 15 bp, Homo sapiens
ggtttttttggaaga

SEQ ID NO: 1871110 - DNA, 15 bp, Homo sapiens
gtttttttggaagaa

SEQ ID NO: 1871111 - DNA, 15 bp, Homo sapiens
tttttttggaagaag

SEQ ID NO: 1871112 - DNA, 15 bp, Homo sapiens
ttttttggaagaagg

SEQ ID NO: 1871113 - DNA, 15 bp, Homo sapiens
tttttggaagaaggg

SEQ ID NO: 1871114 - DNA, 15 bp, Homo sapiens
ttttggaagaagggg

SEQ ID NO: 1871115 - DNA, 15 bp, Homo sapiens
tttggaagaaggggc

SEQ ID NO: 1871116 - DNA, 15 bp, Homo sapiens
ttggaagaaggggca

SEQ ID NO: 1871117 - DNA, 15 bp, Homo sapiens
tggaagaaggggcag

SEQ ID NO: 1871118 - DNA, 15 bp, Homo sapiens
ggaagaaggggcagg

SEQ ID NO: 1871119 - DNA, 15 bp, Homo sapiens
gaagaaggggcaggt

SEQ ID NO: 1871120 - DNA, 15 bp, Homo sapiens
aagaaggggcaggta

SEQ ID NO: 1871121 - DNA, 15 bp, Homo sapiens
agaaggggcaggtat

SEQ ID NO: 1871122 - DNA, 15 bp, Homo sapiens
gaaggggcaggtatg

SEQ ID NO: 1871123 - DNA, 15 bp, Homo sapiens
aaggggcaggtatga

SEQ ID NO: 1871124 - DNA, 15 bp, Homo sapiens
aggggcaggtatgat

SEQ ID NO: 1871125 - DNA, 15 bp, Homo sapiens
ggggcaggtatgatc

SEQ ID NO: 1871126 - DNA, 15 bp, Homo sapiens
gggcaggtatgatcg

SEQ ID NO: 1871127 - DNA, 15 bp, Homo sapiens
ggcaggtatgatcgg

SEQ ID NO: 1871128 - DNA, 15 bp, Homo sapiens
gcaggtatgatcggc

SEQ ID NO: 1871129 - DNA, 15 bp, Homo sapiens
caggtatgatcggca

SEQ ID NO: 1871130 - DNA, 15 bp, Homo sapiens
aggtatgatcggcag

SEQ ID NO: 1871131 - DNA, 15 bp, Homo sapiens
ggtatgatcggcagg

SEQ ID NO: 1871132 - DNA, 15 bp, Homo sapiens
gtatgatcggcagga

SEQ ID NO: 1871133 - DNA, 15 bp, Homo sapiens
tatgatcggcaggac

SEQ ID NO: 1871134 - DNA, 15 bp, Homo sapiens
atgatcggcaggaca

SEQ ID NO: 1871135 - DNA, 15 bp, Homo sapiens
tgatcggcaggacac

SEQ ID NO: 1871136 - DNA, 15 bp, Homo sapiens
gatcggcaggacacc

SEQ ID NO: 1871137 - DNA, 15 bp, Homo sapiens
atcggcaggacaccc

SEQ ID NO: 1871138 - DNA, 15 bp, Homo sapiens
tcggcaggacaccct

SEQ ID NO: 1871139 - DNA, 15 bp, Homo sapiens
cggcaggacaccctg

SEQ ID NO: 1871140 - DNA, 15 bp, Homo sapiens
ggcaggacaccctga

SEQ ID NO: 1871141 - DNA, 15 bp, Homo sapiens
gcaggacaccctgat

SEQ ID NO: 1871142 - DNA, 15 bp, Homo sapiens
caggacaccctgata

SEQ ID NO: 1871143 - DNA, 15 bp, Homo sapiens
aggacaccctgatag

SEQ ID NO: 1871144 - DNA, 15 bp, Homo sapiens
ggacaccctgatagg

SEQ ID NO: 1871145 - DNA, 15 bp, Homo sapiens
gacaccctgatagga

SEQ ID NO: 1871146 - DNA, 15 bp, Homo sapiens
acaccctgataggaa

SEQ ID NO: 1871147 - DNA, 15 bp, Homo sapiens
caccctgataggaag

SEQ ID NO: 1871148 - DNA, 15 bp, Homo sapiens
accctgataggaaga

SEQ ID NO: 1871149 - DNA, 15 bp, Homo sapiens
ccctgataggaagag

SEQ ID NO: 1871150 - DNA, 15 bp, Homo sapiens
cctgataggaagagg

SEQ ID NO: 1871151 - DNA, 15 bp, Homo sapiens
ctgataggaagaggg

SEQ ID NO: 1871152 - DNA, 15 bp, Homo sapiens
tgataggaagagggg

SEQ ID NO: 1871153 - DNA, 15 bp, Homo sapiens
gataggaagagggga

SEQ ID NO: 1871154 - DNA, 15 bp, Homo sapiens
ataggaagaggggaa

SEQ ID NO: 1871155 - DNA, 15 bp, Homo sapiens
taggaagaggggaag

SEQ ID NO: 1871156 - DNA, 15 bp, Homo sapiens
aggaagaggggaagc

SEQ ID NO: 1871157 - DNA, 15 bp, Homo sapiens
ggaagaggggaagca

SEQ ID NO: 1871158 - DNA, 15 bp, Homo sapiens
gaagaggggaagcag

SEQ ID NO: 1871159 - DNA, 15 bp, Homo sapiens
aagaggggaagcaga

SEQ ID NO: 1871160 - DNA, 15 bp, Homo sapiens
agaggggaagcagaa

SEQ ID NO: 1871161 - DNA, 15 bp, Homo sapiens
gaggggaagcagaaa

SEQ ID NO: 1871162 - DNA, 15 bp, Homo sapiens
aggggaagcagaaat

SEQ ID NO: 1871163 - DNA, 15 bp, Homo sapiens
ggggaagcagaaatc

SEQ ID NO: 1871164 - DNA, 15 bp, Homo sapiens
gggaagcagaaatcc

SEQ ID NO: 1871165 - DNA, 15 bp, Homo sapiens
ggaagcagaaatcca

SEQ ID NO: 1871166 - DNA, 15 bp, Homo sapiens
gaagcagaaatccaa

SEQ ID NO: 1871167 - DNA, 15 bp, Homo sapiens
aagcagaaatccaag

SEQ ID NO: 1871168 - DNA, 15 bp, Homo sapiens
agcagaaatccaagc

SEQ ID NO: 1871169 - DNA, 15 bp, Homo sapiens
gcagaaatccaagca

SEQ ID NO: 1871170 - DNA, 15 bp, Homo sapiens
cagaaatccaagcac

SEQ ID NO: 1871171 - DNA, 15 bp, Homo sapiens
agaaatccaagcacc

SEQ ID NO: 1871172 - DNA, 15 bp, Homo sapiens
gaaatccaagcacca

SEQ ID NO: 1871173 - DNA, 15 bp, Homo sapiens
aaatccaagcaccac

SEQ ID NO: 1871174 - DNA, 15 bp, Homo sapiens
aatccaagcaccacc

SEQ ID NO: 1871175 - DNA, 15 bp, Homo sapiens
atccaagcaccacca

SEQ ID NO: 1871176 - DNA, 15 bp, Homo sapiens
tccaagcaccaccaa

SEQ ID NO: 1871177 - DNA, 15 bp, Homo sapiens
ccaagcaccaccaaa

SEQ ID NO: 1871178 - DNA, 15 bp, Homo sapiens
caagcaccaccaaac

SEQ ID NO: 1871179 - DNA, 15 bp, Homo sapiens
aagcaccaccaaaca

SEQ ID NO: 1871180 - DNA, 15 bp, Homo sapiens
agcaccaccaaacac

SEQ ID NO: 1871181 - DNA, 15 bp, Homo sapiens
gcaccaccaaacaca

SEQ ID NO: 1871182 - DNA, 15 bp, Homo sapiens
caccaccaaacacag

SEQ ID NO: 1871183 - DNA, 15 bp, Homo sapiens
accaccaaacacagt

SEQ ID NO: 1871184 - DNA, 15 bp, Homo sapiens
ccaccaaacacagtg

SEQ ID NO: 1871185 - DNA, 15 bp, Homo sapiens
caccaaacacagtgt

SEQ ID NO: 1871186 - DNA, 15 bp, Homo sapiens
accaaacacagtgta

SEQ ID NO: 1871187 - DNA, 15 bp, Homo sapiens
ccaaacacagtgtat

SEQ ID NO: 1871188 - DNA, 15 bp, Homo sapiens
caaacacagtgtatg

SEQ ID NO: 1871189 - DNA, 15 bp, Homo sapiens
aaacacagtgtatga

SEQ ID NO: 1871190 - DNA, 15 bp, Homo sapiens
aacacagtgtatgaa

SEQ ID NO: 1871191 - DNA, 15 bp, Homo sapiens
acacagtgtatgaag

SEQ ID NO: 1871192 - DNA, 15 bp, Homo sapiens
cacagtgtatgaagg

SEQ ID NO: 1871193 - DNA, 15 bp, Homo sapiens
acagtgtatgaaggg

SEQ ID NO: 1871194 - DNA, 15 bp, Homo sapiens
cagtgtatgaagggg

SEQ ID NO: 1871195 - DNA, 15 bp, Homo sapiens
agtgtatgaaggggg

SEQ ID NO: 1871196 - DNA, 15 bp, Homo sapiens
gtgtatgaagggggg

SEQ ID NO: 1871197 - DNA, 15 bp, Homo sapiens
tgtatgaaggggggc

SEQ ID NO: 1871198 - DNA, 15 bp, Homo sapiens
gtatgaaggggggcg

SEQ ID NO: 1871199 - DNA, 15 bp, Homo sapiens
tatgaaggggggcgg

SEQ ID NO: 1871200 - DNA, 15 bp, Homo sapiens
atgaaggggggcggt

SEQ ID NO: 1871201 - DNA, 15 bp, Homo sapiens
tgaaggggggcggtc

SEQ ID NO: 1871202 - DNA, 15 bp, Homo sapiens
gaaggggggcggtca

SEQ ID NO: 1871203 - DNA, 15 bp, Homo sapiens
aaggggggcggtcat

SEQ ID NO: 1871204 - DNA, 15 bp, Homo sapiens
aggggggcggtcatc

SEQ ID NO: 1871205 - DNA, 15 bp, Homo sapiens
ggggggcggtcatca

SEQ ID NO: 1871206 - DNA, 15 bp, Homo sapiens
gggggcggtcatcat

SEQ ID NO: 1871207 - DNA, 15 bp, Homo sapiens
ggggcggtcatcatt

SEQ ID NO: 1871208 - DNA, 15 bp, Homo sapiens
gggcggtcatcattt

SEQ ID NO: 1871209 - DNA, 15 bp, Homo sapiens
ggcggtcatcatttc

SEQ ID NO: 1871210 - DNA, 15 bp, Homo sapiens
gcggtcatcatttca

SEQ ID NO: 1871211 - DNA, 15 bp, Homo sapiens
cggtcatcatttcac

SEQ ID NO: 1871212 - DNA, 15 bp, Homo sapiens
ggtcatcatttcact

SEQ ID NO: 1871213 - DNA, 15 bp, Homo sapiens
gtcatcatttcactt

SEQ ID NO: 1871214 - DNA, 15 bp, Homo sapiens
tcatcatttcacttg

SEQ ID NO: 1871215 - DNA, 15 bp, Homo sapiens
catcatttcacttgt

SEQ ID NO: 1871216 - DNA, 15 bp, Homo sapiens
atcatttcacttgtc

SEQ ID NO: 1871217 - DNA, 15 bp, Homo sapiens
tcatttcacttgtca

SEQ ID NO: 1871218 - DNA, 15 bp, Homo sapiens
catttcacttgtcag

SEQ ID NO: 1871219 - DNA, 15 bp, Homo sapiens
atttcacttgtcagg

SEQ ID NO: 1871220 - DNA, 15 bp, Homo sapiens
tttcacttgtcagga

SEQ ID NO: 1871221 - DNA, 15 bp, Homo sapiens
ttcacttgtcaggag

SEQ ID NO: 1871222 - DNA, 15 bp, Homo sapiens
cacttgtcaggagtg

SEQ ID NO: 1871223 - DNA, 15 bp, Homo sapiens
acttgtcaggagtgt

SEQ ID NO: 1871224 - DNA, 15 bp, Homo sapiens
cttgtcaggagtgtg

SEQ ID NO: 1871225 - DNA, 15 bp, Homo sapiens
ttgtcaggagtgtgt

SEQ ID NO: 1871226 - DNA, 15 bp, Homo sapiens
tgtcaggagtgtgtg

SEQ ID NO: 1871227 - DNA, 15 bp, Homo sapiens
gtcaggagtgtgtgt

SEQ ID NO: 1871228 - DNA, 15 bp, Homo sapiens
tcaggagtgtgtgtg

SEQ ID NO: 1871229 - DNA, 15 bp, Homo sapiens
caggagtgtgtgtga

SEQ ID NO: 1871230 - DNA, 15 bp, Homo sapiens
aggagtgtgtgtgag

SEQ ID NO: 1871231 - DNA, 15 bp, Homo sapiens
ggagtgtgtgtgagt

SEQ ID NO: 1871232 - DNA, 15 bp, Homo sapiens
agtgtgtgtgagtgt

SEQ ID NO: 1871233 - DNA, 15 bp, Homo sapiens
gtgtgtgtgagtgtg

SEQ ID NO: 1871234 - DNA, 15 bp, Homo sapiens
tgtgtgtgagtgtga

SEQ ID NO: 1871235 - DNA, 15 bp, Homo sapiens
gtgtgtgagtgtgag

SEQ ID NO: 1871236 - DNA, 15 bp, Homo sapiens
tgtgtgagtgtgagt

SEQ ID NO: 1871237 - DNA, 15 bp, Homo sapiens
gtgtgagtgtgagtg

SEQ ID NO: 1871238 - DNA, 15 bp, Homo sapiens
tgtgagtgtgagtgt

SEQ ID NO: 1871239 - DNA, 15 bp, Homo sapiens
gtgagtgtgagtgtg

SEQ ID NO: 1871240 - DNA, 15 bp, Homo sapiens
tgagtgtgagtgtgc

SEQ ID NO: 1871241 - DNA, 15 bp, Homo sapiens
gagtgtgagtgtgcg

SEQ ID NO: 1871242 - DNA, 15 bp, Homo sapiens
agtgtgagtgtgcgg

SEQ ID NO: 1871243 - DNA, 15 bp, Homo sapiens
gtgtgagtgtgcggc

SEQ ID NO: 1871244 - DNA, 15 bp, Homo sapiens
tgtgagtgtgcggct

SEQ ID NO: 1871245 - DNA, 15 bp, Homo sapiens
gtgagtgtgcggctg

SEQ ID NO: 1871246 - DNA, 15 bp, Homo sapiens
tgagtgtgcggctgt

SEQ ID NO: 1871247 - DNA, 15 bp, Homo sapiens
gagtgtgcggctgtg

SEQ ID NO: 1871248 - DNA, 15 bp, Homo sapiens
agtgtgcggctgtgt

SEQ ID NO: 1871249 - DNA, 15 bp, Homo sapiens
gtgtgcggctgtgtg

SEQ ID NO: 1871250 - DNA, 15 bp, Homo sapiens
tgtgcggctgtgtgt

SEQ ID NO: 1871251 - DNA, 15 bp, Homo sapiens
gtgcggctgtgtgtg

SEQ ID NO: 1871252 - DNA, 15 bp, Homo sapiens
tgcggctgtgtgtgc

SEQ ID NO: 1871253 - DNA, 15 bp, Homo sapiens
gcggctgtgtgtgca

SEQ ID NO: 1871254 - DNA, 15 bp, Homo sapiens
cggctgtgtgtgcac

SEQ ID NO: 1871255 - DNA, 15 bp, Homo sapiens
ggctgtgtgtgcacg

SEQ ID NO: 1871256 - DNA, 15 bp, Homo sapiens
gctgtgtgtgcacgc

SEQ ID NO: 1871257 - DNA, 15 bp, Homo sapiens
ctgtgtgtgcacgcg

SEQ ID NO: 1871258 - DNA, 15 bp, Homo sapiens
tgtgtgtgcacgcgt

SEQ ID NO: 1871259 - DNA, 15 bp, Homo sapiens
gtgtgtgcacgcgtg

SEQ ID NO: 1871260 - DNA, 15 bp, Homo sapiens
tgtgtgcacgcgtgt

SEQ ID NO: 1871261 - DNA, 15 bp, Homo sapiens
gtgtgcacgcgtgtg

SEQ ID NO: 1871262 - DNA, 15 bp, Homo sapiens
tgtgcacgcgtgtgc

SEQ ID NO: 1871263 - DNA, 15 bp, Homo sapiens
gtgcacgcgtgtgca

SEQ ID NO: 1871264 - DNA, 15 bp, Homo sapiens
tgcacgcgtgtgcag

SEQ ID NO: 1871265 - DNA, 15 bp, Homo sapiens
gcacgcgtgtgcagg

SEQ ID NO: 1871266 - DNA, 15 bp, Homo sapiens
cacgcgtgtgcagga

SEQ ID NO: 1871267 - DNA, 15 bp, Homo sapiens
acgcgtgtgcaggag

SEQ ID NO: 1871268 - DNA, 15 bp, Homo sapiens
cgcgtgtgcaggagc

SEQ ID NO: 1871269 - DNA, 15 bp, Homo sapiens
gcgtgtgcaggagcg

SEQ ID NO: 1871270 - DNA, 15 bp, Homo sapiens
cgtgtgcaggagcgg

SEQ ID NO: 1871271 - DNA, 15 bp, Homo sapiens
gtgtgcaggagcggc

SEQ ID NO: 1871272 - DNA, 15 bp, Homo sapiens
tgtgcaggagcggca

SEQ ID NO: 1871273 - DNA, 15 bp, Homo sapiens
gtgcaggagcggcag

SEQ ID NO: 1871274 - DNA, 15 bp, Homo sapiens
tgcaggagcggcaga

SEQ ID NO: 1871275 - DNA, 15 bp, Homo sapiens
gcaggagcggcagat

SEQ ID NO: 1871276 - DNA, 15 bp, Homo sapiens
caggagcggcagatg

SEQ ID NO: 1871277 - DNA, 15 bp, Homo sapiens
aggagcggcagatgg

SEQ ID NO: 1871278 - DNA, 15 bp, Homo sapiens
ggagcggcagatggg

SEQ ID NO: 1871279 - DNA, 15 bp, Homo sapiens
gagcggcagatgggg

SEQ ID NO: 1871280 - DNA, 15 bp, Homo sapiens
agcggcagatgggga

SEQ ID NO: 1871281 - DNA, 15 bp, Homo sapiens
gcggcagatggggag

SEQ ID NO: 1871282 - DNA, 15 bp, Homo sapiens
cggcagatggggaga

SEQ ID NO: 1871283 - DNA, 15 bp, Homo sapiens
ggcagatggggagac

SEQ ID NO: 1871284 - DNA, 15 bp, Homo sapiens
gcagatggggagaca

SEQ ID NO: 1871285 - DNA, 15 bp, Homo sapiens
cagatggggagacaa

SEQ ID NO: 1871286 - DNA, 15 bp, Homo sapiens
agatggggagacaac

SEQ ID NO: 1871287 - DNA, 15 bp, Homo sapiens
gatggggagacaacg

SEQ ID NO: 1871288 - DNA, 15 bp, Homo sapiens
atggggagacaacgt

SEQ ID NO: 1871289 - DNA, 15 bp, Homo sapiens
tggggagacaacgtg

SEQ ID NO: 1871290 - DNA, 15 bp, Homo sapiens
ggggagacaacgtgc

SEQ ID NO: 1871291 - DNA, 15 bp, Homo sapiens
gggagacaacgtgct

SEQ ID NO: 1871292 - DNA, 15 bp, Homo sapiens
ggagacaacgtgctc

SEQ ID NO: 1871293 - DNA, 15 bp, Homo sapiens
gagacaacgtgctct

SEQ ID NO: 1871294 - DNA, 15 bp, Homo sapiens
agacaacgtgctctt

SEQ ID NO: 1871295 - DNA, 15 bp, Homo sapiens
gacaacgtgctcttt

SEQ ID NO: 1871296 - DNA, 15 bp, Homo sapiens
acaacgtgctctttg

SEQ ID NO: 1871297 - DNA, 15 bp, Homo sapiens
caacgtgctctttgt

SEQ ID NO: 1871298 - DNA, 15 bp, Homo sapiens
aacgtgctctttgtt

SEQ ID NO: 1871299 - DNA, 15 bp, Homo sapiens
acgtgctctttgttt

SEQ ID NO: 1871300 - DNA, 15 bp, Homo sapiens
cgtgctctttgtttt

SEQ ID NO: 1871301 - DNA, 15 bp, Homo sapiens
gtgctctttgttttg

SEQ ID NO: 1871302 - DNA, 15 bp, Homo sapiens
tgctctttgttttgt

SEQ ID NO: 1871303 - DNA, 15 bp, Homo sapiens
gctctttgttttgtg

SEQ ID NO: 1871304 - DNA, 15 bp, Homo sapiens
ctctttgttttgtgt

SEQ ID NO: 1871305 - DNA, 15 bp, Homo sapiens
tctttgttttgtgtc

SEQ ID NO: 1871306 - DNA, 15 bp, Homo sapiens
ctttgttttgtgtct

SEQ ID NO: 1871307 - DNA, 15 bp, Homo sapiens
tttgttttgtgtctc

SEQ ID NO: 1871308 - DNA, 15 bp, Homo sapiens
ttgttttgtgtctct

SEQ ID NO: 1871309 - DNA, 15 bp, Homo sapiens
tgttttgtgtctctt

SEQ ID NO: 1871310 - DNA, 15 bp, Homo sapiens
gttttgtgtctctta

SEQ ID NO: 1871311 - DNA, 15 bp, Homo sapiens
ttttgtgtctcttat

SEQ ID NO: 1871312 - DNA, 15 bp, Homo sapiens
tttgtgtctcttatg

SEQ ID NO: 1871313 - DNA, 15 bp, Homo sapiens
ttgtgtctcttatgg

SEQ ID NO: 1871314 - DNA, 15 bp, Homo sapiens
tgtgtctcttatgga

SEQ ID NO: 1871315 - DNA, 15 bp, Homo sapiens
gtgtctcttatggat

SEQ ID NO: 1871316 - DNA, 15 bp, Homo sapiens
tgtctcttatggatg

SEQ ID NO: 1871317 - DNA, 15 bp, Homo sapiens
gtctcttatggatgt

SEQ ID NO: 1871318 - DNA, 15 bp, Homo sapiens
tctcttatggatgtc

SEQ ID NO: 1871319 - DNA, 15 bp, Homo sapiens
ctcttatggatgtcc

SEQ ID NO: 1871320 - DNA, 15 bp, Homo sapiens
tcttatggatgtccc

SEQ ID NO: 1871321 - DNA, 15 bp, Homo sapiens
cttatggatgtcccc

SEQ ID NO: 1871322 - DNA, 15 bp, Homo sapiens
ttatggatgtcccca

SEQ ID NO: 1871323 - DNA, 15 bp, Homo sapiens
tatggatgtccccag

SEQ ID NO: 1871324 - DNA, 15 bp, Homo sapiens
atggatgtccccagc

SEQ ID NO: 1871325 - DNA, 15 bp, Homo sapiens
tggatgtccccagca

SEQ ID NO: 1871326 - DNA, 15 bp, Homo sapiens
ggatgtccccagcag

SEQ ID NO: 1871327 - DNA, 15 bp, Homo sapiens
gatgtccccagcaga

SEQ ID NO: 1871328 - DNA, 15 bp, Homo sapiens
atgtccccagcagag

SEQ ID NO: 1871329 - DNA, 15 bp, Homo sapiens
tgtccccagcagaga

SEQ ID NO: 1871330 - DNA, 15 bp, Homo sapiens
gtccccagcagagag

SEQ ID NO: 1871331 - DNA, 15 bp, Homo sapiens
tccccagcagagagg

SEQ ID NO: 1871332 - DNA, 15 bp, Homo sapiens
ccccagcagagaggt

SEQ ID NO: 1871333 - DNA, 15 bp, Homo sapiens
cccagcagagaggtt

SEQ ID NO: 1871334 - DNA, 15 bp, Homo sapiens
ccagcagagaggttt

SEQ ID NO: 1871335 - DNA, 15 bp, Homo sapiens
cagcagagaggtttg

SEQ ID NO: 1871336 - DNA, 15 bp, Homo sapiens
agcagagaggtttgc

SEQ ID NO: 1871337 - DNA, 15 bp, Homo sapiens
gcagagaggtttgca

SEQ ID NO: 1871338 - DNA, 15 bp, Homo sapiens
cagagaggtttgcag

SEQ ID NO: 1871339 - DNA, 15 bp, Homo sapiens
agagaggtttgcagt

SEQ ID NO: 1871340 - DNA, 15 bp, Homo sapiens
gagaggtttgcagtc

SEQ ID NO: 1871341 - DNA, 15 bp, Homo sapiens
agaggtttgcagtcc

SEQ ID NO: 1871342 - DNA, 15 bp, Homo sapiens
gaggtttgcagtccc

SEQ ID NO: 1871343 - DNA, 15 bp, Homo sapiens
aggtttgcagtccca

SEQ ID NO: 1871344 - DNA, 15 bp, Homo sapiens
ggtttgcagtcccaa

SEQ ID NO: 1871345 - DNA, 15 bp, Homo sapiens
gtttgcagtcccaag

SEQ ID NO: 1871346 - DNA, 15 bp, Homo sapiens
tttgcagtcccaagc

SEQ ID NO: 1871347 - DNA, 15 bp, Homo sapiens
ttgcagtcccaagcg

SEQ ID NO: 1871348 - DNA, 15 bp, Homo sapiens
tgcagtcccaagcgg

SEQ ID NO: 1871349 - DNA, 15 bp, Homo sapiens
gcagtcccaagcggt

SEQ ID NO: 1871350 - DNA, 15 bp, Homo sapiens
cagtcccaagcggtg

SEQ ID NO: 1871351 - DNA, 15 bp, Homo sapiens
agtcccaagcggtgt

SEQ ID NO: 1871352 - DNA, 15 bp, Homo sapiens
gtcccaagcggtgtc

SEQ ID NO: 1871353 - DNA, 15 bp, Homo sapiens
tcccaagcggtgtct

SEQ ID NO: 1871354 - DNA, 15 bp, Homo sapiens
cccaagcggtgtctc

SEQ ID NO: 1871355 - DNA, 15 bp, Homo sapiens
ccaagcggtgtctct

SEQ ID NO: 1871356 - DNA, 15 bp, Homo sapiens
caagcggtgtctctc

SEQ ID NO: 1871357 - DNA, 15 bp, Homo sapiens
aagcggtgtctctcc

SEQ ID NO: 1871358 - DNA, 15 bp, Homo sapiens
agcggtgtctctcct

SEQ ID NO: 1871359 - DNA, 15 bp, Homo sapiens
gcggtgtctctcctg

SEQ ID NO: 1871360 - DNA, 15 bp, Homo sapiens
cggtgtctctcctgc

SEQ ID NO: 1871361 - DNA, 15 bp, Homo sapiens
ggtgtctctcctgcc

SEQ ID NO: 1871362 - DNA, 15 bp, Homo sapiens
gtgtctctcctgccc

SEQ ID NO: 1871363 - DNA, 15 bp, Homo sapiens
tgtctctcctgcccc

SEQ ID NO: 1871364 - DNA, 15 bp, Homo sapiens
gtctctcctgcccct

SEQ ID NO: 1871365 - DNA, 15 bp, Homo sapiens
tctctcctgcccctt

SEQ ID NO: 1871366 - DNA, 15 bp, Homo sapiens
ctctcctgccccttg

SEQ ID NO: 1871367 - DNA, 15 bp, Homo sapiens
tctcctgccccttgg

SEQ ID NO: 1871368 - DNA, 15 bp, Homo sapiens
ctcctgccccttgga

SEQ ID NO: 1871369 - DNA, 15 bp, Homo sapiens
tcctgccccttggac

SEQ ID NO: 1871370 - DNA, 15 bp, Homo sapiens
cctgccccttggaca

SEQ ID NO: 1871371 - DNA, 15 bp, Homo sapiens
ctgccccttggacac

SEQ ID NO: 1871372 - DNA, 15 bp, Homo sapiens
tgccccttggacacg

SEQ ID NO: 1871373 - DNA, 15 bp, Homo sapiens
gccccttggacacgc

SEQ ID NO: 1871374 - DNA, 15 bp, Homo sapiens
ccccttggacacgct

SEQ ID NO: 1871375 - DNA, 15 bp, Homo sapiens
cccttggacacgctc

SEQ ID NO: 1871376 - DNA, 15 bp, Homo sapiens
ccttggacacgctca

SEQ ID NO: 1871377 - DNA, 15 bp, Homo sapiens
cttggacacgctcag

SEQ ID NO: 1871378 - DNA, 15 bp, Homo sapiens
ttggacacgctcagt

SEQ ID NO: 1871379 - DNA, 15 bp, Homo sapiens
tggacacgctcagtg

SEQ ID NO: 1871380 - DNA, 15 bp, Homo sapiens
ggacacgctcagtgg

SEQ ID NO: 1871381 - DNA, 15 bp, Homo sapiens
gacacgctcagtggg

SEQ ID NO: 1871382 - DNA, 15 bp, Homo sapiens
acacgctcagtgggg

SEQ ID NO: 1871383 - DNA, 15 bp, Homo sapiens
cacgctcagtggggc

SEQ ID NO: 1871384 - DNA, 15 bp, Homo sapiens
acgctcagtggggca

SEQ ID NO: 1871385 - DNA, 15 bp, Homo sapiens
cgctcagtggggcag

SEQ ID NO: 1871386 - DNA, 15 bp, Homo sapiens
gctcagtggggcaga

SEQ ID NO: 1871387 - DNA, 15 bp, Homo sapiens
ctcagtggggcagag

SEQ ID NO: 1871388 - DNA, 15 bp, Homo sapiens
tcagtggggcagagg

SEQ ID NO: 1871389 - DNA, 15 bp, Homo sapiens
cagtggggcagaggc

SEQ ID NO: 1871390 - DNA, 15 bp, Homo sapiens
agtggggcagaggca

SEQ ID NO: 1871391 - DNA, 15 bp, Homo sapiens
gtggggcagaggcag

SEQ ID NO: 1871392 - DNA, 15 bp, Homo sapiens
tggggcagaggcagt

SEQ ID NO: 1871393 - DNA, 15 bp, Homo sapiens
ggggcagaggcagta

SEQ ID NO: 1871394 - DNA, 15 bp, Homo sapiens
gggcagaggcagtac

SEQ ID NO: 1871395 - DNA, 15 bp, Homo sapiens
ggcagaggcagtacc

SEQ ID NO: 1871396 - DNA, 15 bp, Homo sapiens
gcagaggcagtacct

SEQ ID NO: 1871397 - DNA, 15 bp, Homo sapiens
cagaggcagtacctg

SEQ ID NO: 1871398 - DNA, 15 bp, Homo sapiens
agaggcagtacctgg

SEQ ID NO: 1871399 - DNA, 15 bp, Homo sapiens
gaggcagtacctggg

SEQ ID NO: 1871400 - DNA, 15 bp, Homo sapiens
aggcagtacctgggc

SEQ ID NO: 1871401 - DNA, 15 bp, Homo sapiens
ggcagtacctgggca

SEQ ID NO: 1871402 - DNA, 15 bp, Homo sapiens
gcagtacctgggcaa

SEQ ID NO: 1871403 - DNA, 15 bp, Homo sapiens
cagtacctgggcaag

SEQ ID NO: 1871404 - DNA, 15 bp, Homo sapiens
agtacctgggcaagc

SEQ ID NO: 1871405 - DNA, 15 bp, Homo sapiens
gtacctgggcaagct

SEQ ID NO: 1871406 - DNA, 15 bp, Homo sapiens
tacctgggcaagctg

SEQ ID NO: 1871407 - DNA, 15 bp, Homo sapiens
acctgggcaagctgg

SEQ ID NO: 1871408 - DNA, 15 bp, Homo sapiens
cctgggcaagctggc

SEQ ID NO: 1871409 - DNA, 15 bp, Homo sapiens
ctgggcaagctggcg

SEQ ID NO: 1871410 - DNA, 15 bp, Homo sapiens
tgggcaagctggcgg

SEQ ID NO: 1871411 - DNA, 15 bp, Homo sapiens
gggcaagctggcggc

SEQ ID NO: 1871412 - DNA, 15 bp, Homo sapiens
ggcaagctggcggct

SEQ ID NO: 1871413 - DNA, 15 bp, Homo sapiens
gcaagctggcggctg

SEQ ID NO: 1871414 - DNA, 15 bp, Homo sapiens
caagctggcggctgg

SEQ ID NO: 1871415 - DNA, 15 bp, Homo sapiens
aagctggcggctggg

SEQ ID NO: 1871416 - DNA, 15 bp, Homo sapiens
agctggcggctgggg

SEQ ID NO: 1871417 - DNA, 15 bp, Homo sapiens
gctggcggctggggt

SEQ ID NO: 1871418 - DNA, 15 bp, Homo sapiens
ctggcggctggggtc

SEQ ID NO: 1871419 - DNA, 15 bp, Homo sapiens
tggcggctggggtcc

SEQ ID NO: 1871420 - DNA, 15 bp, Homo sapiens
ggcggctggggtccc

SEQ ID NO: 1871421 - DNA, 15 bp, Homo sapiens
gcggctggggtccca

SEQ ID NO: 1871422 - DNA, 15 bp, Homo sapiens
cggctggggtcccag

SEQ ID NO: 1871423 - DNA, 15 bp, Homo sapiens
ggctggggtcccagc

SEQ ID NO: 1871424 - DNA, 15 bp, Homo sapiens
gctggggtcccagca

SEQ ID NO: 1871425 - DNA, 15 bp, Homo sapiens
ctggggtcccagcag

SEQ ID NO: 1871426 - DNA, 15 bp, Homo sapiens
tggggtcccagcagc

SEQ ID NO: 1871427 - DNA, 15 bp, Homo sapiens
ggggtcccagcagct

SEQ ID NO: 1871428 - DNA, 15 bp, Homo sapiens
gggtcccagcagctg

SEQ ID NO: 1871429 - DNA, 15 bp, Homo sapiens
ggtcccagcagctgc

SEQ ID NO: 1871430 - DNA, 15 bp, Homo sapiens
gtcccagcagctgcc

SEQ ID NO: 1871431 - DNA, 15 bp, Homo sapiens
tcccagcagctgcca

SEQ ID NO: 1871432 - DNA, 15 bp, Homo sapiens
cccagcagctgccag

SEQ ID NO: 1871433 - DNA, 15 bp, Homo sapiens
ccagcagctgccagg

SEQ ID NO: 1871434 - DNA, 15 bp, Homo sapiens
cagcagctgccagga

SEQ ID NO: 1871435 - DNA, 15 bp, Homo sapiens
agcagctgccaggag

SEQ ID NO: 1871436 - DNA, 15 bp, Homo sapiens
gcagctgccaggagc

SEQ ID NO: 1871437 - DNA, 15 bp, Homo sapiens
cagctgccaggagca

SEQ ID NO: 1871438 - DNA, 15 bp, Homo sapiens
agctgccaggagcac

SEQ ID NO: 1871439 - DNA, 15 bp, Homo sapiens
gctgccaggagcacg

SEQ ID NO: 1871440 - DNA, 15 bp, Homo sapiens
ctgccaggagcacgg

SEQ ID NO: 1871441 - DNA, 15 bp, Homo sapiens
tgccaggagcacggc

SEQ ID NO: 1871442 - DNA, 15 bp, Homo sapiens
gccaggagcacggct

SEQ ID NO: 1871443 - DNA, 15 bp, Homo sapiens
ccaggagcacggctc

SEQ ID NO: 1871444 - DNA, 15 bp, Homo sapiens
caggagcacggctct

SEQ ID NO: 1871445 - DNA, 15 bp, Homo sapiens
aggagcacggctctg

SEQ ID NO: 1871446 - DNA, 15 bp, Homo sapiens
ggagcacggctctgt

SEQ ID NO: 1871447 - DNA, 15 bp, Homo sapiens
gagcacggctctgtc

SEQ ID NO: 1871448 - DNA, 15 bp, Homo sapiens
agcacggctctgtcc

SEQ ID NO: 1871449 - DNA, 15 bp, Homo sapiens
gcacggctctgtccc

SEQ ID NO: 1871450 - DNA, 15 bp, Homo sapiens
cacggctctgtcccc

SEQ ID NO: 1871451 - DNA, 15 bp, Homo sapiens
acggctctgtcccca

SEQ ID NO: 1871452 - DNA, 15 bp, Homo sapiens
cggctctgtccccag

SEQ ID NO: 1871453 - DNA, 15 bp, Homo sapiens
ggctctgtccccagc

SEQ ID NO: 1871454 - DNA, 15 bp, Homo sapiens
gctctgtccccagcc

SEQ ID NO: 1871455 - DNA, 15 bp, Homo sapiens
ctctgtccccagcct

SEQ ID NO: 1871456 - DNA, 15 bp, Homo sapiens
tctgtccccagcctg

SEQ ID NO: 1871457 - DNA, 15 bp, Homo sapiens
ctgtccccagcctgg

SEQ ID NO: 1871458 - DNA, 15 bp, Homo sapiens
tgtccccagcctggg

SEQ ID NO: 1871459 - DNA, 15 bp, Homo sapiens
gtccccagcctggga

SEQ ID NO: 1871460 - DNA, 15 bp, Homo sapiens
tccccagcctgggaa

SEQ ID NO: 1871461 - DNA, 15 bp, Homo sapiens
ccccagcctgggaaa

SEQ ID NO: 1871462 - DNA, 15 bp, Homo sapiens
cccagcctgggaaag

SEQ ID NO: 1871463 - DNA, 15 bp, Homo sapiens
ccagcctgggaaagc

SEQ ID NO: 1871464 - DNA, 15 bp, Homo sapiens
cagcctgggaaagcc

SEQ ID NO: 1871465 - DNA, 15 bp, Homo sapiens
agcctgggaaagccc

SEQ ID NO: 1871466 - DNA, 15 bp, Homo sapiens
gcctgggaaagcccc

SEQ ID NO: 1871467 - DNA, 15 bp, Homo sapiens
cctgggaaagcccct

SEQ ID NO: 1871468 - DNA, 15 bp, Homo sapiens
ctgggaaagcccctg

SEQ ID NO: 1871469 - DNA, 15 bp, Homo sapiens
tgggaaagcccctgc

SEQ ID NO: 1871470 - DNA, 15 bp, Homo sapiens
gggaaagcccctgcc

SEQ ID NO: 1871471 - DNA, 15 bp, Homo sapiens
ggaaagcccctgccc

SEQ ID NO: 1871472 - DNA, 15 bp, Homo sapiens
gaaagcccctgcccc

SEQ ID NO: 1871473 - DNA, 15 bp, Homo sapiens
aaagcccctgcccct

SEQ ID NO: 1871474 - DNA, 15 bp, Homo sapiens
aagcccctgcccctc

SEQ ID NO: 1871475 - DNA, 15 bp, Homo sapiens
agcccctgcccctcc

SEQ ID NO: 1871476 - DNA, 15 bp, Homo sapiens
gcccctgcccctcct

SEQ ID NO: 1871477 - DNA, 15 bp, Homo sapiens
cccctgcccctcctc

SEQ ID NO: 1871478 - DNA, 15 bp, Homo sapiens
ccctgcccctcctct

SEQ ID NO: 1871479 - DNA, 15 bp, Homo sapiens
cctgcccctcctctc

SEQ ID NO: 1871480 - DNA, 15 bp, Homo sapiens
ctgcccctcctctcc

SEQ ID NO: 1871481 - DNA, 15 bp, Homo sapiens
tgcccctcctctccc

SEQ ID NO: 1871482 - DNA, 15 bp, Homo sapiens
gcccctcctctccct

SEQ ID NO: 1871483 - DNA, 15 bp, Homo sapiens
cccctcctctccctc

SEQ ID NO: 1871484 - DNA, 15 bp, Homo sapiens
ccctcctctccctca

SEQ ID NO: 1871485 - DNA, 15 bp, Homo sapiens
cctcctctccctcat

SEQ ID NO: 1871486 - DNA, 15 bp, Homo sapiens
ctcctctccctcatc

SEQ ID NO: 1871487 - DNA, 15 bp, Homo sapiens
tcctctccctcatca

SEQ ID NO: 1871488 - DNA, 15 bp, Homo sapiens
cctctccctcatcaa

SEQ ID NO: 1871489 - DNA, 15 bp, Homo sapiens
ctctccctcatcaag

SEQ ID NO: 1871490 - DNA, 15 bp, Homo sapiens
tctccctcatcaagg

SEQ ID NO: 1871491 - DNA, 15 bp, Homo sapiens
ctccctcatcaagga

SEQ ID NO: 1871492 - DNA, 15 bp, Homo sapiens
tccctcatcaaggac

SEQ ID NO: 1871493 - DNA, 15 bp, Homo sapiens
ccctcatcaaggaca

SEQ ID NO: 1871494 - DNA, 15 bp, Homo sapiens
cctcatcaaggacac

SEQ ID NO: 1871495 - DNA, 15 bp, Homo sapiens
ctcatcaaggacacg

SEQ ID NO: 1871496 - DNA, 15 bp, Homo sapiens
tcatcaaggacacgg

SEQ ID NO: 1871497 - DNA, 15 bp, Homo sapiens
catcaaggacacggg

SEQ ID NO: 1871498 - DNA, 15 bp, Homo sapiens
atcaaggacacgggc

SEQ ID NO: 1871499 - DNA, 15 bp, Homo sapiens
tcaaggacacgggcc

SEQ ID NO: 1871500 - DNA, 15 bp, Homo sapiens
caaggacacgggcct

SEQ ID NO: 1871501 - DNA, 15 bp, Homo sapiens
aaggacacgggcctg

SEQ ID NO: 1871502 - DNA, 15 bp, Homo sapiens
aggacacgggcctgt

SEQ ID NO: 1871503 - DNA, 15 bp, Homo sapiens
ggacacgggcctgtc

SEQ ID NO: 1871504 - DNA, 15 bp, Homo sapiens
gacacgggcctgtcc

SEQ ID NO: 1871505 - DNA, 15 bp, Homo sapiens
acacgggcctgtcca

SEQ ID NO: 1871506 - DNA, 15 bp, Homo sapiens
cacgggcctgtccac

SEQ ID NO: 1871507 - DNA, 15 bp, Homo sapiens
acgggcctgtccaca

SEQ ID NO: 1871508 - DNA, 15 bp, Homo sapiens
cgggcctgtccacag

SEQ ID NO: 1871509 - DNA, 15 bp, Homo sapiens
gggcctgtccacagg

SEQ ID NO: 1871510 - DNA, 15 bp, Homo sapiens
ggcctgtccacaggc

SEQ ID NO: 1871511 - DNA, 15 bp, Homo sapiens
gcctgtccacaggct

SEQ ID NO: 1871512 - DNA, 15 bp, Homo sapiens
cctgtccacaggctt

SEQ ID NO: 1871513 - DNA, 15 bp, Homo sapiens
ctgtccacaggcttc

SEQ ID NO: 1871514 - DNA, 15 bp, Homo sapiens
tgtccacaggcttct

SEQ ID NO: 1871515 - DNA, 15 bp, Homo sapiens
gtccacaggcttctg

SEQ ID NO: 1871516 - DNA, 15 bp, Homo sapiens
tccacaggcttctga

SEQ ID NO: 1871517 - DNA, 15 bp, Homo sapiens
ccacaggcttctgag

SEQ ID NO: 1871518 - DNA, 15 bp, Homo sapiens
cacaggcttctgagc

SEQ ID NO: 1871519 - DNA, 15 bp, Homo sapiens
acaggcttctgagca

SEQ ID NO: 1871520 - DNA, 15 bp, Homo sapiens
caggcttctgagcag

SEQ ID NO: 1871521 - DNA, 15 bp, Homo sapiens
aggcttctgagcagc

SEQ ID NO: 1871522 - DNA, 15 bp, Homo sapiens
ggcttctgagcagcg

SEQ ID NO: 1871523 - DNA, 15 bp, Homo sapiens
gcttctgagcagcga

SEQ ID NO: 1871524 - DNA, 15 bp, Homo sapiens
cttctgagcagcgag

SEQ ID NO: 1871525 - DNA, 15 bp, Homo sapiens
ttctgagcagcgagc

SEQ ID NO: 1871526 - DNA, 15 bp, Homo sapiens
tctgagcagcgagcc

SEQ ID NO: 1871527 - DNA, 15 bp, Homo sapiens
ctgagcagcgagcct

SEQ ID NO: 1871528 - DNA, 15 bp, Homo sapiens
tgagcagcgagcctg

SEQ ID NO: 1871529 - DNA, 15 bp, Homo sapiens
gagcagcgagcctgc

SEQ ID NO: 1871530 - DNA, 15 bp, Homo sapiens
agcagcgagcctgct

SEQ ID NO: 1871531 - DNA, 15 bp, Homo sapiens
gcagcgagcctgcta

SEQ ID NO: 1871532 - DNA, 15 bp, Homo sapiens
cagcgagcctgctag

SEQ ID NO: 1871533 - DNA, 15 bp, Homo sapiens
agcgagcctgctagt

SEQ ID NO: 1871534 - DNA, 15 bp, Homo sapiens
gcgagcctgctagtg

SEQ ID NO: 1871535 - DNA, 15 bp, Homo sapiens
cgagcctgctagtgg

SEQ ID NO: 1871536 - DNA, 15 bp, Homo sapiens
gagcctgctagtggc

SEQ ID NO: 1871537 - DNA, 15 bp, Homo sapiens
agcctgctagtggcc

SEQ ID NO: 1871538 - DNA, 15 bp, Homo sapiens
gcctgctagtggccg

SEQ ID NO: 1871539 - DNA, 15 bp, Homo sapiens
cctgctagtggccga

SEQ ID NO: 1871540 - DNA, 15 bp, Homo sapiens
ctgctagtggccgaa

SEQ ID NO: 1871541 - DNA, 15 bp, Homo sapiens
tgctagtggccgaac

SEQ ID NO: 1871542 - DNA, 15 bp, Homo sapiens
gctagtggccgaacc

SEQ ID NO: 1871543 - DNA, 15 bp, Homo sapiens
ctagtggccgaacca

SEQ ID NO: 1871544 - DNA, 15 bp, Homo sapiens
tagtggccgaaccag

SEQ ID NO: 1871545 - DNA, 15 bp, Homo sapiens
agtggccgaaccaga

SEQ ID NO: 1871546 - DNA, 15 bp, Homo sapiens
gtggccgaaccagaa

SEQ ID NO: 1871547 - DNA, 15 bp, Homo sapiens
tggccgaaccagaac

SEQ ID NO: 1871548 - DNA, 15 bp, Homo sapiens
ggccgaaccagaacc

SEQ ID NO: 1871549 - DNA, 15 bp, Homo sapiens
gccgaaccagaacca

SEQ ID NO: 1871550 - DNA, 15 bp, Homo sapiens
ccgaaccagaaccaa

SEQ ID NO: 1871551 - DNA, 15 bp, Homo sapiens
cgaaccagaaccaat

SEQ ID NO: 1871552 - DNA, 15 bp, Homo sapiens
gaaccagaaccaatt

SEQ ID NO: 1871553 - DNA, 15 bp, Homo sapiens
aaccagaaccaatta

SEQ ID NO: 1871554 - DNA, 15 bp, Homo sapiens
accagaaccaattat

SEQ ID NO: 1871555 - DNA, 15 bp, Homo sapiens
ccagaaccaattatt

SEQ ID NO: 1871556 - DNA, 15 bp, Homo sapiens
cagaaccaattattt

SEQ ID NO: 1871557 - DNA, 15 bp, Homo sapiens
agaaccaattatttt

SEQ ID NO: 1871558 - DNA, 15 bp, Homo sapiens
gaaccaattattttc

SEQ ID NO: 1871559 - DNA, 15 bp, Homo sapiens
aaccaattattttca

SEQ ID NO: 1871560 - DNA, 15 bp, Homo sapiens
accaattattttcat

SEQ ID NO: 1871561 - DNA, 15 bp, Homo sapiens
ccaattattttcatc

SEQ ID NO: 1871562 - DNA, 15 bp, Homo sapiens
caattattttcatcc

SEQ ID NO: 1871563 - DNA, 15 bp, Homo sapiens
aattattttcatcct

SEQ ID NO: 1871564 - DNA, 15 bp, Homo sapiens
attattttcatcctt

SEQ ID NO: 1871565 - DNA, 15 bp, Homo sapiens
ttattttcatccttg

SEQ ID NO: 1871566 - DNA, 15 bp, Homo sapiens
tattttcatccttgt

SEQ ID NO: 1871567 - DNA, 15 bp, Homo sapiens
attttcatccttgtc

SEQ ID NO: 1871568 - DNA, 15 bp, Homo sapiens
ttttcatccttgtct

SEQ ID NO: 1871569 - DNA, 15 bp, Homo sapiens
tttcatccttgtctt

SEQ ID NO: 1871570 - DNA, 15 bp, Homo sapiens
ttcatccttgtctta

SEQ ID NO: 1871571 - DNA, 15 bp, Homo sapiens
tcatccttgtcttat

SEQ ID NO: 1871572 - DNA, 15 bp, Homo sapiens
catccttgtcttatt

SEQ ID NO: 1871573 - DNA, 15 bp, Homo sapiens
atccttgtcttattc

SEQ ID NO: 1871574 - DNA, 15 bp, Homo sapiens
tccttgtcttattcc

SEQ ID NO: 1871575 - DNA, 15 bp, Homo sapiens
ccttgtcttattccc

SEQ ID NO: 1871576 - DNA, 15 bp, Homo sapiens
cttgtcttattccct

SEQ ID NO: 1871577 - DNA, 15 bp, Homo sapiens
ttgtcttattccctt

SEQ ID NO: 1871578 - DNA, 15 bp, Homo sapiens
tgtcttattcccttc

SEQ ID NO: 1871579 - DNA, 15 bp, Homo sapiens
gtcttattcccttcc

SEQ ID NO: 1871580 - DNA, 15 bp, Homo sapiens
tcttattcccttcct

SEQ ID NO: 1871581 - DNA, 15 bp, Homo sapiens
cttattcccttcctg

SEQ ID NO: 1871582 - DNA, 15 bp, Homo sapiens
ttattcccttcctgc

SEQ ID NO: 1871583 - DNA, 15 bp, Homo sapiens
tattcccttcctgcc

SEQ ID NO: 1871584 - DNA, 15 bp, Homo sapiens
attcccttcctgcca

SEQ ID NO: 1871585 - DNA, 15 bp, Homo sapiens
ttcccttcctgccag

SEQ ID NO: 1871586 - DNA, 15 bp, Homo sapiens
tcccttcctgccagc

SEQ ID NO: 1871587 - DNA, 15 bp, Homo sapiens
cccttcctgccagcc

SEQ ID NO: 1871588 - DNA, 15 bp, Homo sapiens
ccttcctgccagccc

SEQ ID NO: 1871589 - DNA, 15 bp, Homo sapiens
cttcctgccagcccc

SEQ ID NO: 1871590 - DNA, 15 bp, Homo sapiens
tccctgggagggaca

SEQ ID NO: 1871591 - DNA, 15 bp, Homo sapiens
ccctgggagggacat

SEQ ID NO: 1871592 - DNA, 15 bp, Homo sapiens
cctgggagggacatg

SEQ ID NO: 1871593 - DNA, 15 bp, Homo sapiens
ctgggagggacatgc

SEQ ID NO: 1871594 - DNA, 15 bp, Homo sapiens
tgggagggacatgct

SEQ ID NO: 1871595 - DNA, 15 bp, Homo sapiens
gggagggacatgctt

SEQ ID NO: 1871596 - DNA, 15 bp, Homo sapiens
ggagggacatgctta

SEQ ID NO: 1871597 - DNA, 15 bp, Homo sapiens
gagggacatgcttag

SEQ ID NO: 1871598 - DNA, 15 bp, Homo sapiens
agggacatgcttagc

SEQ ID NO: 1871599 - DNA, 15 bp, Homo sapiens
gggacatgcttagca

SEQ ID NO: 1871600 - DNA, 15 bp, Homo sapiens
ggacatgcttagcag

SEQ ID NO: 1871601 - DNA, 15 bp, Homo sapiens
gacatgcttagcagt

SEQ ID NO: 1871602 - DNA, 15 bp, Homo sapiens
acatgcttagcagtc

SEQ ID NO: 1871603 - DNA, 15 bp, Homo sapiens
catgcttagcagtcc

SEQ ID NO: 1871604 - DNA, 15 bp, Homo sapiens
atgcttagcagtccc

SEQ ID NO: 1871605 - DNA, 15 bp, Homo sapiens
tgcttagcagtcccc

SEQ ID NO: 1871606 - DNA, 15 bp, Homo sapiens
gcttagcagtcccct

SEQ ID NO: 1871607 - DNA, 15 bp, Homo sapiens
cttagcagtcccctt

SEQ ID NO: 1871608 - DNA, 15 bp, Homo sapiens
ttagcagtccccttc

SEQ ID NO: 1871609 - DNA, 15 bp, Homo sapiens
tagcagtccccttcc

SEQ ID NO: 1871610 - DNA, 15 bp, Homo sapiens
agcagtccccttccc

SEQ ID NO: 1871611 - DNA, 15 bp, Homo sapiens
gcagtccccttccct

SEQ ID NO: 1871612 - DNA, 15 bp, Homo sapiens
cagtccccttccctc

SEQ ID NO: 1871613 - DNA, 15 bp, Homo sapiens
agtccccttccctcc

SEQ ID NO: 1871614 - DNA, 15 bp, Homo sapiens
gtccccttccctcca

SEQ ID NO: 1871615 - DNA, 15 bp, Homo sapiens
tccccttccctccaa

SEQ ID NO: 1871616 - DNA, 15 bp, Homo sapiens
ccccttccctccaag

SEQ ID NO: 1871617 - DNA, 15 bp, Homo sapiens
cccttccctccaaga

SEQ ID NO: 1871618 - DNA, 15 bp, Homo sapiens
ccttccctccaagaa

SEQ ID NO: 1871619 - DNA, 15 bp, Homo sapiens
cttccctccaagaag

SEQ ID NO: 1871620 - DNA, 15 bp, Homo sapiens
ttccctccaagaagg

SEQ ID NO: 1871621 - DNA, 15 bp, Homo sapiens
tccctccaagaagga

SEQ ID NO: 1871622 - DNA, 15 bp, Homo sapiens
ccctccaagaaggat

SEQ ID NO: 1871623 - DNA, 15 bp, Homo sapiens
cctccaagaaggatt

SEQ ID NO: 1871624 - DNA, 15 bp, Homo sapiens
ctccaagaaggattt

SEQ ID NO: 1871625 - DNA, 15 bp, Homo sapiens
tccaagaaggatttg

SEQ ID NO: 1871626 - DNA, 15 bp, Homo sapiens
ccaagaaggatttgg

SEQ ID NO: 1871627 - DNA, 15 bp, Homo sapiens
caagaaggatttggt

SEQ ID NO: 1871628 - DNA, 15 bp, Homo sapiens
aagaaggatttggtc

SEQ ID NO: 1871629 - DNA, 15 bp, Homo sapiens
agaaggatttggtcc

SEQ ID NO: 1871630 - DNA, 15 bp, Homo sapiens
gaaggatttggtccg

SEQ ID NO: 1871631 - DNA, 15 bp, Homo sapiens
aggatttggtccgtc

SEQ ID NO: 1871632 - DNA, 15 bp, Homo sapiens
ggatttggtccgtca

SEQ ID NO: 1871633 - DNA, 15 bp, Homo sapiens
gatttggtccgtcat

SEQ ID NO: 1871634 - DNA, 15 bp, Homo sapiens
atttggtccgtcata

SEQ ID NO: 1871635 - DNA, 15 bp, Homo sapiens
tttggtccgtcataa

SEQ ID NO: 1871636 - DNA, 15 bp, Homo sapiens
ttggtccgtcataac

SEQ ID NO: 1871637 - DNA, 15 bp, Homo sapiens
tggtccgtcataacc

SEQ ID NO: 1871638 - DNA, 15 bp, Homo sapiens
ggtccgtcataaccc

SEQ ID NO: 1871639 - DNA, 15 bp, Homo sapiens
gtccgtcataaccca

SEQ ID NO: 1871640 - DNA, 15 bp, Homo sapiens
tccgtcataacccaa

SEQ ID NO: 1871641 - DNA, 15 bp, Homo sapiens
ccgtcataacccaag

SEQ ID NO: 1871642 - DNA, 15 bp, Homo sapiens
cgtcataacccaagg

SEQ ID NO: 1871643 - DNA, 15 bp, Homo sapiens
gtcataacccaaggt

SEQ ID NO: 1871644 - DNA, 15 bp, Homo sapiens
tcataacccaaggta

SEQ ID NO: 1871645 - DNA, 15 bp, Homo sapiens
cataacccaaggtac

SEQ ID NO: 1871646 - DNA, 15 bp, Homo sapiens
ataacccaaggtacc

SEQ ID NO: 1871647 - DNA, 15 bp, Homo sapiens
taacccaaggtacca

SEQ ID NO: 1871648 - DNA, 15 bp, Homo sapiens
aacccaaggtaccat

SEQ ID NO: 1871649 - DNA, 15 bp, Homo sapiens
acccaaggtaccatc

SEQ ID NO: 1871650 - DNA, 15 bp, Homo sapiens
cccaaggtaccatcc

SEQ ID NO: 1871651 - DNA, 15 bp, Homo sapiens
ccaaggtaccatcct

SEQ ID NO: 1871652 - DNA, 15 bp, Homo sapiens
caaggtaccatccta

SEQ ID NO: 1871653 - DNA, 15 bp, Homo sapiens
aaggtaccatcctag

SEQ ID NO: 1871654 - DNA, 15 bp, Homo sapiens
aggtaccatcctagg

SEQ ID NO: 1871655 - DNA, 15 bp, Homo sapiens
ggtaccatcctaggc

SEQ ID NO: 1871656 - DNA, 15 bp, Homo sapiens
gtaccatcctaggct

SEQ ID NO: 1871657 - DNA, 15 bp, Homo sapiens
taccatcctaggctg

SEQ ID NO: 1871658 - DNA, 15 bp, Homo sapiens
accatcctaggctga

SEQ ID NO: 1871659 - DNA, 15 bp, Homo sapiens
ccatcctaggctgac

SEQ ID NO: 1871660 - DNA, 15 bp, Homo sapiens
catcctaggctgaca

SEQ ID NO: 1871661 - DNA, 15 bp, Homo sapiens
atcctaggctgacac

SEQ ID NO: 1871662 - DNA, 15 bp, Homo sapiens
tcctaggctgacacc

SEQ ID NO: 1871663 - DNA, 15 bp, Homo sapiens
cctaggctgacacct

SEQ ID NO: 1871664 - DNA, 15 bp, Homo sapiens
ctaggctgacaccta

SEQ ID NO: 1871665 - DNA, 15 bp, Homo sapiens
taggctgacacctaa

SEQ ID NO: 1871666 - DNA, 15 bp, Homo sapiens
aggctgacacctaac

SEQ ID NO: 1871667 - DNA, 15 bp, Homo sapiens
ggctgacacctaact

SEQ ID NO: 1871668 - DNA, 15 bp, Homo sapiens
gctgacacctaactc

SEQ ID NO: 1871669 - DNA, 15 bp, Homo sapiens
ctgacacctaactct

SEQ ID NO: 1871670 - DNA, 15 bp, Homo sapiens
tgacacctaactctt

SEQ ID NO: 1871671 - DNA, 15 bp, Homo sapiens
gacacctaactcttc

SEQ ID NO: 1871672 - DNA, 15 bp, Homo sapiens
acacctaactcttct

SEQ ID NO: 1871673 - DNA, 15 bp, Homo sapiens
cacctaactcttctt

SEQ ID NO: 1871674 - DNA, 15 bp, Homo sapiens
acctaactcttcttt

SEQ ID NO: 1871675 - DNA, 15 bp, Homo sapiens
cctaactcttctttc

SEQ ID NO: 1871676 - DNA, 15 bp, Homo sapiens
ctaactcttctttca

SEQ ID NO: 1871677 - DNA, 15 bp, Homo sapiens
taactcttctttcat

SEQ ID NO: 1871678 - DNA, 15 bp, Homo sapiens
aactcttctttcatt

SEQ ID NO: 1871679 - DNA, 15 bp, Homo sapiens
actcttctttcattt

SEQ ID NO: 1871680 - DNA, 15 bp, Homo sapiens
ctcttctttcatttc

SEQ ID NO: 1871681 - DNA, 15 bp, Homo sapiens
tcttctttcatttct

SEQ ID NO: 1871682 - DNA, 15 bp, Homo sapiens
cttctttcatttctt

SEQ ID NO: 1871683 - DNA, 15 bp, Homo sapiens
ttctttcatttcttc

SEQ ID NO: 1871684 - DNA, 15 bp, Homo sapiens
tctttcatttcttct

SEQ ID NO: 1871685 - DNA, 15 bp, Homo sapiens
ctttcatttcttcta

SEQ ID NO: 1871686 - DNA, 15 bp, Homo sapiens
tttcatttcttctac

SEQ ID NO: 1871687 - DNA, 15 bp, Homo sapiens
ttcatttcttctaca

SEQ ID NO: 1871688 - DNA, 15 bp, Homo sapiens
tcatttcttctacaa

SEQ ID NO: 1871689 - DNA, 15 bp, Homo sapiens
catttcttctacaac

SEQ ID NO: 1871690 - DNA, 15 bp, Homo sapiens
atttcttctacaact

SEQ ID NO: 1871691 - DNA, 15 bp, Homo sapiens
tttcttctacaactc

SEQ ID NO: 1871692 - DNA, 15 bp, Homo sapiens
ttcttctacaactca

SEQ ID NO: 1871693 - DNA, 15 bp, Homo sapiens
tcttctacaactcat

SEQ ID NO: 1871694 - DNA, 15 bp, Homo sapiens
cttctacaactcata

SEQ ID NO: 1871695 - DNA, 15 bp, Homo sapiens
ttctacaactcatac

SEQ ID NO: 1871696 - DNA, 15 bp, Homo sapiens
tctacaactcataca

SEQ ID NO: 1871697 - DNA, 15 bp, Homo sapiens
ctacaactcatacac

SEQ ID NO: 1871698 - DNA, 15 bp, Homo sapiens
tacaactcatacact

SEQ ID NO: 1871699 - DNA, 15 bp, Homo sapiens
acaactcatacactc

SEQ ID NO: 1871700 - DNA, 15 bp, Homo sapiens
caactcatacactcg

SEQ ID NO: 1871701 - DNA, 15 bp, Homo sapiens
aactcatacactcgt

SEQ ID NO: 1871702 - DNA, 15 bp, Homo sapiens
actcatacactcgta

SEQ ID NO: 1871703 - DNA, 15 bp, Homo sapiens
ctcatacactcgtat

SEQ ID NO: 1871704 - DNA, 15 bp, Homo sapiens
tcatacactcgtatg

SEQ ID NO: 1871705 - DNA, 15 bp, Homo sapiens
catacactcgtatga

SEQ ID NO: 1871706 - DNA, 15 bp, Homo sapiens
atacactcgtatgat

SEQ ID NO: 1871707 - DNA, 15 bp, Homo sapiens
tacactcgtatgata

SEQ ID NO: 1871708 - DNA, 15 bp, Homo sapiens
acactcgtatgatac

SEQ ID NO: 1871709 - DNA, 15 bp, Homo sapiens
cactcgtatgatact

SEQ ID NO: 1871710 - DNA, 15 bp, Homo sapiens
actcgtatgatactt

SEQ ID NO: 1871711 - DNA, 15 bp, Homo sapiens
ctcgtatgatacttc

SEQ ID NO: 1871712 - DNA, 15 bp, Homo sapiens
tcgtatgatacttcg

SEQ ID NO: 1871713 - DNA, 15 bp, Homo sapiens
cgtatgatacttcga

SEQ ID NO: 1871714 - DNA, 15 bp, Homo sapiens
gtatgatacttcgac

SEQ ID NO: 1871715 - DNA, 15 bp, Homo sapiens
tatgatacttcgaca

SEQ ID NO: 1871716 - DNA, 15 bp, Homo sapiens
atgatacttcgacac

SEQ ID NO: 1871717 - DNA, 15 bp, Homo sapiens
tgatacttcgacact

SEQ ID NO: 1871718 - DNA, 15 bp, Homo sapiens
gatacttcgacactg

SEQ ID NO: 1871719 - DNA, 15 bp, Homo sapiens
atacttcgacactgt

SEQ ID NO: 1871720 - DNA, 15 bp, Homo sapiens
tacttcgacactgtt

SEQ ID NO: 1871721 - DNA, 15 bp, Homo sapiens
acttcgacactgttc

SEQ ID NO: 1871722 - DNA, 15 bp, Homo sapiens
cttcgacactgttct

SEQ ID NO: 1871723 - DNA, 15 bp, Homo sapiens
ttcgacactgttctt

SEQ ID NO: 1871724 - DNA, 15 bp, Homo sapiens
tcgacactgttctta

SEQ ID NO: 1871725 - DNA, 15 bp, Homo sapiens
cgacactgttcttag

SEQ ID NO: 1871726 - DNA, 15 bp, Homo sapiens
gacactgttcttagc

SEQ ID NO: 1871727 - DNA, 15 bp, Homo sapiens
acactgttcttagct

SEQ ID NO: 1871728 - DNA, 15 bp, Homo sapiens
cactgttcttagctc

SEQ ID NO: 1871729 - DNA, 15 bp, Homo sapiens
actgttcttagctca

SEQ ID NO: 1871730 - DNA, 15 bp, Homo sapiens
ctgttcttagctcaa

SEQ ID NO: 1871731 - DNA, 15 bp, Homo sapiens
tgttcttagctcaat

SEQ ID NO: 1871732 - DNA, 15 bp, Homo sapiens
gttcttagctcaatg

SEQ ID NO: 1871733 - DNA, 15 bp, Homo sapiens
ttcttagctcaatga

SEQ ID NO: 1871734 - DNA, 15 bp, Homo sapiens
tcttagctcaatgag

SEQ ID NO: 1871735 - DNA, 15 bp, Homo sapiens
cttagctcaatgagc

SEQ ID NO: 1871736 - DNA, 15 bp, Homo sapiens
ttagctcaatgagca

SEQ ID NO: 1871737 - DNA, 15 bp, Homo sapiens
tagctcaatgagcat

SEQ ID NO: 1871738 - DNA, 15 bp, Homo sapiens
agctcaatgagcatg

SEQ ID NO: 1871739 - DNA, 15 bp, Homo sapiens
gctcaatgagcatgt

SEQ ID NO: 1871740 - DNA, 15 bp, Homo sapiens
ctcaatgagcatgtt

SEQ ID NO: 1871741 - DNA, 15 bp, Homo sapiens
tcaatgagcatgttt

SEQ ID NO: 1871742 - DNA, 15 bp, Homo sapiens
caatgagcatgttta

SEQ ID NO: 1871743 - DNA, 15 bp, Homo sapiens
aatgagcatgtttag

SEQ ID NO: 1871744 - DNA, 15 bp, Homo sapiens
atgagcatgtttaga

SEQ ID NO: 1871745 - DNA, 15 bp, Homo sapiens
tgagcatgtttagac

SEQ ID NO: 1871746 - DNA, 15 bp, Homo sapiens
gagcatgtttagact

SEQ ID NO: 1871747 - DNA, 15 bp, Homo sapiens
agcatgtttagactt

SEQ ID NO: 1871748 - DNA, 15 bp, Homo sapiens
gcatgtttagacttt

SEQ ID NO: 1871749 - DNA, 15 bp, Homo sapiens
catgtttagacttta

SEQ ID NO: 1871750 - DNA, 15 bp, Homo sapiens
atgtttagactttaa

SEQ ID NO: 1871751 - DNA, 15 bp, Homo sapiens
tgtttagactttaac

SEQ ID NO: 1871752 - DNA, 15 bp, Homo sapiens
gtttagactttaaca

SEQ ID NO: 1871753 - DNA, 15 bp, Homo sapiens
tttagactttaacat

SEQ ID NO: 1871754 - DNA, 15 bp, Homo sapiens
ttagactttaacata

SEQ ID NO: 1871755 - DNA, 15 bp, Homo sapiens
tagactttaacataa

SEQ ID NO: 1871756 - DNA, 15 bp, Homo sapiens
agactttaacataag

SEQ ID NO: 1871757 - DNA, 15 bp, Homo sapiens
gactttaacataagc

SEQ ID NO: 1871758 - DNA, 15 bp, Homo sapiens
actttaacataagct

SEQ ID NO: 1871759 - DNA, 15 bp, Homo sapiens
ctttaacataagcta

SEQ ID NO: 1871760 - DNA, 15 bp, Homo sapiens
tttaacataagctat

SEQ ID NO: 1871761 - DNA, 15 bp, Homo sapiens
ttaacataagctatt

SEQ ID NO: 1871762 - DNA, 15 bp, Homo sapiens
taacataagctattt

SEQ ID NO: 1871763 - DNA, 15 bp, Homo sapiens
aacataagctatttt

SEQ ID NO: 1871764 - DNA, 15 bp, Homo sapiens
acataagctattttt

SEQ ID NO: 1871765 - DNA, 15 bp, Homo sapiens
cataagctatttttc

SEQ ID NO: 1871766 - DNA, 15 bp, Homo sapiens
ataagctatttttct

SEQ ID NO: 1871767 - DNA, 15 bp, Homo sapiens
taagctatttttcta

SEQ ID NO: 1871768 - DNA, 15 bp, Homo sapiens
aagctatttttctaa

SEQ ID NO: 1871769 - DNA, 15 bp, Homo sapiens
agctatttttctaac

SEQ ID NO: 1871770 - DNA, 15 bp, Homo sapiens
gctatttttctaact

SEQ ID NO: 1871771 - DNA, 15 bp, Homo sapiens
ctatttttctaacta

SEQ ID NO: 1871772 - DNA, 15 bp, Homo sapiens
tatttttctaactac

SEQ ID NO: 1871773 - DNA, 15 bp, Homo sapiens
atttttctaactaca

SEQ ID NO: 1871774 - DNA, 15 bp, Homo sapiens
tttttctaactacaa

SEQ ID NO: 1871775 - DNA, 15 bp, Homo sapiens
ttttctaactacaaa

SEQ ID NO: 1871776 - DNA, 15 bp, Homo sapiens
tttctaactacaaag

SEQ ID NO: 1871777 - DNA, 15 bp, Homo sapiens
ttctaactacaaagg

SEQ ID NO: 1871778 - DNA, 15 bp, Homo sapiens
tctaactacaaaggt

SEQ ID NO: 1871779 - DNA, 15 bp, Homo sapiens
ctaactacaaaggtt

SEQ ID NO: 1871780 - DNA, 15 bp, Homo sapiens
taactacaaaggttt

SEQ ID NO: 1871781 - DNA, 15 bp, Homo sapiens
aactacaaaggttta

SEQ ID NO: 1871782 - DNA, 15 bp, Homo sapiens
actacaaaggtttaa

SEQ ID NO: 1871783 - DNA, 15 bp, Homo sapiens
ctacaaaggtttaaa

SEQ ID NO: 1871784 - DNA, 15 bp, Homo sapiens
tacaaaggtttaaat

SEQ ID NO: 1871785 - DNA, 15 bp, Homo sapiens
acaaaggtttaaatg

SEQ ID NO: 1871786 - DNA, 15 bp, Homo sapiens
caaaggtttaaatga

SEQ ID NO: 1871787 - DNA, 15 bp, Homo sapiens
aaaggtttaaatgaa

SEQ ID NO: 1871788 - DNA, 15 bp, Homo sapiens
aaggtttaaatgaac

SEQ ID NO: 1871789 - DNA, 15 bp, Homo sapiens
aggtttaaatgaaca

SEQ ID NO: 1871790 - DNA, 15 bp, Homo sapiens
ggtttaaatgaacaa

SEQ ID NO: 1871791 - DNA, 15 bp, Homo sapiens
gtttaaatgaacaag

SEQ ID NO: 1871792 - DNA, 15 bp, Homo sapiens
tttaaatgaacaaga

SEQ ID NO: 1871793 - DNA, 15 bp, Homo sapiens
ttaaatgaacaagag

SEQ ID NO: 1871794 - DNA, 15 bp, Homo sapiens
taaatgaacaagaga

SEQ ID NO: 1871795 - DNA, 15 bp, Homo sapiens
aaatgaacaagagaa

SEQ ID NO: 1871796 - DNA, 15 bp, Homo sapiens
aatgaacaagagaag

SEQ ID NO: 1871797 - DNA, 15 bp, Homo sapiens
atgaacaagagaagc

SEQ ID NO: 1871798 - DNA, 15 bp, Homo sapiens
tgaacaagagaagca

SEQ ID NO: 1871799 - DNA, 15 bp, Homo sapiens
gaacaagagaagcat

SEQ ID NO: 1871800 - DNA, 15 bp, Homo sapiens
aacaagagaagcatt

SEQ ID NO: 1871801 - DNA, 15 bp, Homo sapiens
acaagagaagcattc

SEQ ID NO: 1871802 - DNA, 15 bp, Homo sapiens
caagagaagcattct

SEQ ID NO: 1871803 - DNA, 15 bp, Homo sapiens
aagagaagcattctc

SEQ ID NO: 1871804 - DNA, 15 bp, Homo sapiens
agagaagcattctca

SEQ ID NO: 1871805 - DNA, 15 bp, Homo sapiens
gagaagcattctcat

SEQ ID NO: 1871806 - DNA, 15 bp, Homo sapiens
agaagcattctcatt

SEQ ID NO: 1871807 - DNA, 15 bp, Homo sapiens
gaagcattctcattg

SEQ ID NO: 1871808 - DNA, 15 bp, Homo sapiens
aagcattctcattgg

SEQ ID NO: 1871809 - DNA, 15 bp, Homo sapiens
agcattctcattgga

SEQ ID NO: 1871810 - DNA, 15 bp, Homo sapiens
gcattctcattggaa

SEQ ID NO: 1871811 - DNA, 15 bp, Homo sapiens
cattctcattggaaa

SEQ ID NO: 1871812 - DNA, 15 bp, Homo sapiens
attctcattggaaat

SEQ ID NO: 1871813 - DNA, 15 bp, Homo sapiens
ttctcattggaaatt

SEQ ID NO: 1871814 - DNA, 15 bp, Homo sapiens
tctcattggaaattt

SEQ ID NO: 1871815 - DNA, 15 bp, Homo sapiens
ctcattggaaattta

SEQ ID NO: 1871816 - DNA, 15 bp, Homo sapiens
tcattggaaatttag

SEQ ID NO: 1871817 - DNA, 15 bp, Homo sapiens
cattggaaatttagc

SEQ ID NO: 1871818 - DNA, 15 bp, Homo sapiens
attggaaatttagca

SEQ ID NO: 1871819 - DNA, 15 bp, Homo sapiens
ttggaaatttagcat

SEQ ID NO: 1871820 - DNA, 15 bp, Homo sapiens
tggaaatttagcatt

SEQ ID NO: 1871821 - DNA, 15 bp, Homo sapiens
ggaaatttagcattg

SEQ ID NO: 1871822 - DNA, 15 bp, Homo sapiens
gaaatttagcattgt

SEQ ID NO: 1871823 - DNA, 15 bp, Homo sapiens
aaatttagcattgta

SEQ ID NO: 1871824 - DNA, 15 bp, Homo sapiens
aatttagcattgtag

SEQ ID NO: 1871825 - DNA, 15 bp, Homo sapiens
atttagcattgtagt

SEQ ID NO: 1871826 - DNA, 15 bp, Homo sapiens
tttagcattgtagtg

SEQ ID NO: 1871827 - DNA, 15 bp, Homo sapiens
ttagcattgtagtgc

SEQ ID NO: 1871828 - DNA, 15 bp, Homo sapiens
tagcattgtagtgct

SEQ ID NO: 1871829 - DNA, 15 bp, Homo sapiens
agcattgtagtgctt

SEQ ID NO: 1871830 - DNA, 15 bp, Homo sapiens
gcattgtagtgcttt

SEQ ID NO: 1871831 - DNA, 15 bp, Homo sapiens
cattgtagtgctttg

SEQ ID NO: 1871832 - DNA, 15 bp, Homo sapiens
attgtagtgctttga

SEQ ID NO: 1871833 - DNA, 15 bp, Homo sapiens
ttgtagtgctttgag

SEQ ID NO: 1871834 - DNA, 15 bp, Homo sapiens
tgtagtgctttgaga

SEQ ID NO: 1871835 - DNA, 15 bp, Homo sapiens
gtagtgctttgagag

SEQ ID NO: 1871836 - DNA, 15 bp, Homo sapiens
tagtgctttgagaga

SEQ ID NO: 1871837 - DNA, 15 bp, Homo sapiens
agtgctttgagagag

SEQ ID NO: 1871838 - DNA, 15 bp, Homo sapiens
gtgctttgagagaga

SEQ ID NO: 1871839 - DNA, 15 bp, Homo sapiens
tgctttgagagagaa

SEQ ID NO: 1871840 - DNA, 15 bp, Homo sapiens
gctttgagagagaaa

SEQ ID NO: 1871841 - DNA, 15 bp, Homo sapiens
ctttgagagagaaag

SEQ ID NO: 1871842 - DNA, 15 bp, Homo sapiens
tttgagagagaaagg

SEQ ID NO: 1871843 - DNA, 15 bp, Homo sapiens
ttgagagagaaagga

SEQ ID NO: 1871844 - DNA, 15 bp, Homo sapiens
tgagagagaaaggac

SEQ ID NO: 1871845 - DNA, 15 bp, Homo sapiens
gagagagaaaggact

SEQ ID NO: 1871846 - DNA, 15 bp, Homo sapiens
agagagaaaggactc

SEQ ID NO: 1871847 - DNA, 15 bp, Homo sapiens
gagagaaaggactcc

SEQ ID NO: 1871848 - DNA, 15 bp, Homo sapiens
agagaaaggactcct

SEQ ID NO: 1871849 - DNA, 15 bp, Homo sapiens
gagaaaggactcctg

SEQ ID NO: 1871850 - DNA, 15 bp, Homo sapiens
agaaaggactcctga

SEQ ID NO: 1871851 - DNA, 15 bp, Homo sapiens
gaaaggactcctgaa

SEQ ID NO: 1871852 - DNA, 15 bp, Homo sapiens
aaaggactcctgaaa

SEQ ID NO: 1871853 - DNA, 15 bp, Homo sapiens
aaggactcctgaaaa

SEQ ID NO: 1871854 - DNA, 15 bp, Homo sapiens
aggactcctgaaaaa

SEQ ID NO: 1871855 - DNA, 15 bp, Homo sapiens
ggactcctgaaaaaa

SEQ ID NO: 1871856 - DNA, 15 bp, Homo sapiens
gactcctgaaaaaaa

SEQ ID NO: 1871857 - DNA, 15 bp, Homo sapiens
actcctgaaaaaaaa

SEQ ID NO: 1871858 - DNA, 15 bp, Homo sapiens
ctcctgaaaaaaaac

SEQ ID NO: 1871859 - DNA, 15 bp, Homo sapiens
tcctgaaaaaaaacc

SEQ ID NO: 1871860 - DNA, 15 bp, Homo sapiens
cctgaaaaaaaacct

SEQ ID NO: 1871861 - DNA, 15 bp, Homo sapiens
ctgaaaaaaaacctg

SEQ ID NO: 1871862 - DNA, 15 bp, Homo sapiens
tgaaaaaaaacctga

SEQ ID NO: 1871863 - DNA, 15 bp, Homo sapiens
gaaaaaaaacctgag

SEQ ID NO: 1871864 - DNA, 15 bp, Homo sapiens
aaaaaaaacctgaga

SEQ ID NO: 1871865 - DNA, 15 bp, Homo sapiens
aaaaaaacctgagat

SEQ ID NO: 1871866 - DNA, 15 bp, Homo sapiens
aaaaaacctgagatt

SEQ ID NO: 1871867 - DNA, 15 bp, Homo sapiens
aaaaacctgagattt

SEQ ID NO: 1871868 - DNA, 15 bp, Homo sapiens
aaaacctgagattta

SEQ ID NO: 1871869 - DNA, 15 bp, Homo sapiens
aaacctgagatttat

SEQ ID NO: 1871870 - DNA, 15 bp, Homo sapiens
aacctgagatttatt

SEQ ID NO: 1871871 - DNA, 15 bp, Homo sapiens
acctgagatttatta

SEQ ID NO: 1871872 - DNA, 15 bp, Homo sapiens
cctgagatttattaa

SEQ ID NO: 1871873 - DNA, 15 bp, Homo sapiens
ctgagatttattaaa

SEQ ID NO: 1871874 - DNA, 15 bp, Homo sapiens
tgagatttattaaag

SEQ ID NO: 1871875 - DNA, 15 bp, Homo sapiens
gagatttattaaaga

SEQ ID NO: 1871876 - DNA, 15 bp, Homo sapiens
agatttattaaagaa

SEQ ID NO: 1871877 - DNA, 15 bp, Homo sapiens
gatttattaaagaaa

SEQ ID NO: 1871878 - DNA, 15 bp, Homo sapiens
atttattaaagaaaa

SEQ ID NO: 1871879 - DNA, 15 bp, Homo sapiens
tttattaaagaaaaa

SEQ ID NO: 1871880 - DNA, 15 bp, Homo sapiens
ttattaaagaaaaaa

SEQ ID NO: 1871881 - DNA, 15 bp, Homo sapiens
tattaaagaaaaaaa

SEQ ID NO: 1871882 - DNA, 15 bp, Homo sapiens
attaaagaaaaaaat

SEQ ID NO: 1871883 - DNA, 15 bp, Homo sapiens
ttaaagaaaaaaatg

SEQ ID NO: 1871884 - DNA, 15 bp, Homo sapiens
taaagaaaaaaatgt

SEQ ID NO: 1871885 - DNA, 15 bp, Homo sapiens
aaagaaaaaaatgta

SEQ ID NO: 1871886 - DNA, 15 bp, Homo sapiens
aagaaaaaaatgtat

SEQ ID NO: 1871887 - DNA, 15 bp, Homo sapiens
agaaaaaaatgtatt

SEQ ID NO: 1871888 - DNA, 15 bp, Homo sapiens
gaaaaaaatgtattt

SEQ ID NO: 1871889 - DNA, 15 bp, Homo sapiens
aaaaaaatgtatttt

SEQ ID NO: 1871890 - DNA, 15 bp, Homo sapiens
aaaaaatgtatttta

SEQ ID NO: 1871891 - DNA, 15 bp, Homo sapiens
aaaaatgtattttat

SEQ ID NO: 1871892 - DNA, 15 bp, Homo sapiens
aaaatgtattttatg

SEQ ID NO: 1871893 - DNA, 15 bp, Homo sapiens
aaatgtattttatgt

SEQ ID NO: 1871894 - DNA, 15 bp, Homo sapiens
aatgtattttatgtt

SEQ ID NO: 1871895 - DNA, 15 bp, Homo sapiens
atgtattttatgtta

SEQ ID NO: 1871896 - DNA, 15 bp, Homo sapiens
tgtattttatgttat

SEQ ID NO: 1871897 - DNA, 15 bp, Homo sapiens
gtattttatgttata

SEQ ID NO: 1871898 - DNA, 15 bp, Homo sapiens
tattttatgttatat

SEQ ID NO: 1871899 - DNA, 15 bp, Homo sapiens
attttatgttatata

SEQ ID NO: 1871900 - DNA, 15 bp, Homo sapiens
ttttatgttatatat

SEQ ID NO: 1871901 - DNA, 15 bp, Homo sapiens
tttatgttatatata

SEQ ID NO: 1871902 - DNA, 15 bp, Homo sapiens
ttatgttatatataa

SEQ ID NO: 1871903 - DNA, 15 bp, Homo sapiens
tatgttatatataaa

SEQ ID NO: 1871904 - DNA, 15 bp, Homo sapiens
atgttatatataaat

SEQ ID NO: 1871905 - DNA, 15 bp, Homo sapiens
tgttatatataaata

SEQ ID NO: 1871906 - DNA, 15 bp, Homo sapiens
gttatatataaatat

SEQ ID NO: 1871907 - DNA, 15 bp, Homo sapiens
ttatatataaatata

SEQ ID NO: 1871908 - DNA, 15 bp, Homo sapiens
atatataaatatatt

SEQ ID NO: 1871909 - DNA, 15 bp, Homo sapiens
tatataaatatatta

SEQ ID NO: 1871910 - DNA, 15 bp, Homo sapiens
atataaatatattat

SEQ ID NO: 1871911 - DNA, 15 bp, Homo sapiens
ataaatatattatta

SEQ ID NO: 1871912 - DNA, 15 bp, Homo sapiens
taaatatattattac

SEQ ID NO: 1871913 - DNA, 15 bp, Homo sapiens
aaatatattattact

SEQ ID NO: 1871914 - DNA, 15 bp, Homo sapiens
aatatattattactt

SEQ ID NO: 1871915 - DNA, 15 bp, Homo sapiens
atatattattacttg

SEQ ID NO: 1871916 - DNA, 15 bp, Homo sapiens
tatattattacttgt

SEQ ID NO: 1871917 - DNA, 15 bp, Homo sapiens
atattattacttgta

SEQ ID NO: 1871918 - DNA, 15 bp, Homo sapiens
tattattacttgtaa

SEQ ID NO: 1871919 - DNA, 15 bp, Homo sapiens
attattacttgtaaa

SEQ ID NO: 1871920 - DNA, 15 bp, Homo sapiens
ttattacttgtaaat

SEQ ID NO: 1871921 - DNA, 15 bp, Homo sapiens
tattacttgtaaata

SEQ ID NO: 1871922 - DNA, 15 bp, Homo sapiens
attacttgtaaatat

SEQ ID NO: 1871923 - DNA, 15 bp, Homo sapiens
ttacttgtaaatata

SEQ ID NO: 1871924 - DNA, 15 bp, Homo sapiens
tacttgtaaatataa

SEQ ID NO: 1871925 - DNA, 15 bp, Homo sapiens
acttgtaaatataaa

SEQ ID NO: 1871926 - DNA, 15 bp, Homo sapiens
cttgtaaatataaag

SEQ ID NO: 1871927 - DNA, 15 bp, Homo sapiens
ttgtaaatataaaga

SEQ ID NO: 1871928 - DNA, 15 bp, Homo sapiens
tgtaaatataaagac

SEQ ID NO: 1871929 - DNA, 15 bp, Homo sapiens
gtaaatataaagacg

SEQ ID NO: 1871930 - DNA, 15 bp, Homo sapiens
taaatataaagacgt

SEQ ID NO: 1871931 - DNA, 15 bp, Homo sapiens
aaatataaagacgtt

SEQ ID NO: 1871932 - DNA, 15 bp, Homo sapiens
aatataaagacgttt

SEQ ID NO: 1871933 - DNA, 15 bp, Homo sapiens
atataaagacgtttt

SEQ ID NO: 1871934 - DNA, 15 bp, Homo sapiens
tataaagacgtttta

SEQ ID NO: 1871935 - DNA, 15 bp, Homo sapiens
ataaagacgttttat

SEQ ID NO: 1871936 - DNA, 15 bp, Homo sapiens
taaagacgttttata

SEQ ID NO: 1871937 - DNA, 15 bp, Homo sapiens
aaagacgttttataa

SEQ ID NO: 1871938 - DNA, 15 bp, Homo sapiens
aagacgttttataag

SEQ ID NO: 1871939 - DNA, 15 bp, Homo sapiens
agacgttttataagc

SEQ ID NO: 1871940 - DNA, 15 bp, Homo sapiens
gacgttttataagca

SEQ ID NO: 1871941 - DNA, 15 bp, Homo sapiens
acgttttataagcat

SEQ ID NO: 1871942 - DNA, 15 bp, Homo sapiens
cgttttataagcatc

SEQ ID NO: 1871943 - DNA, 15 bp, Homo sapiens
gttttataagcatca

SEQ ID NO: 1871944 - DNA, 15 bp, Homo sapiens
ttttataagcatcat

SEQ ID NO: 1871945 - DNA, 15 bp, Homo sapiens
tttataagcatcatt

SEQ ID NO: 1871946 - DNA, 15 bp, Homo sapiens
ttataagcatcatta

SEQ ID NO: 1871947 - DNA, 15 bp, Homo sapiens
tataagcatcattat

SEQ ID NO: 1871948 - DNA, 15 bp, Homo sapiens
ataagcatcattatt

SEQ ID NO: 1871949 - DNA, 15 bp, Homo sapiens
taagcatcattattt

SEQ ID NO: 1871950 - DNA, 15 bp, Homo sapiens
aagcatcattattta

SEQ ID NO: 1871951 - DNA, 15 bp, Homo sapiens
agcatcattatttat

SEQ ID NO: 1871952 - DNA, 15 bp, Homo sapiens
gcatcattatttatg

SEQ ID NO: 1871953 - DNA, 15 bp, Homo sapiens
catcattatttatgt

SEQ ID NO: 1871954 - DNA, 15 bp, Homo sapiens
atcattatttatgta

SEQ ID NO: 1871955 - DNA, 15 bp, Homo sapiens
tcattatttatgtat

SEQ ID NO: 1871956 - DNA, 15 bp, Homo sapiens
cattatttatgtatt

SEQ ID NO: 1871957 - DNA, 15 bp, Homo sapiens
attatttatgtattg

SEQ ID NO: 1871958 - DNA, 15 bp, Homo sapiens
ttatttatgtattgt

SEQ ID NO: 1871959 - DNA, 15 bp, Homo sapiens
tatttatgtattgtg

SEQ ID NO: 1871960 - DNA, 15 bp, Homo sapiens
atttatgtattgtgc

SEQ ID NO: 1871961 - DNA, 15 bp, Homo sapiens
tttatgtattgtgca

SEQ ID NO: 1871962 - DNA, 15 bp, Homo sapiens
ttatgtattgtgcaa

SEQ ID NO: 1871963 - DNA, 15 bp, Homo sapiens
tatgtattgtgcaat

SEQ ID NO: 1871964 - DNA, 15 bp, Homo sapiens
atgtattgtgcaatg

SEQ ID NO: 1871965 - DNA, 15 bp, Homo sapiens
tgtattgtgcaatgt

SEQ ID NO: 1871966 - DNA, 15 bp, Homo sapiens
gtattgtgcaatgtg

SEQ ID NO: 1871967 - DNA, 15 bp, Homo sapiens
tattgtgcaatgtgt

SEQ ID NO: 1871968 - DNA, 15 bp, Homo sapiens
attgtgcaatgtgta

SEQ ID NO: 1871969 - DNA, 15 bp, Homo sapiens
ttgtgcaatgtgtat

SEQ ID NO: 1871970 - DNA, 15 bp, Homo sapiens
tgtgcaatgtgtata

SEQ ID NO: 1871971 - DNA, 15 bp, Homo sapiens
gtgcaatgtgtataa

SEQ ID NO: 1871972 - DNA, 15 bp, Homo sapiens
tgcaatgtgtataaa

SEQ ID NO: 1871973 - DNA, 15 bp, Homo sapiens
gcaatgtgtataaac

SEQ ID NO: 1871974 - DNA, 15 bp, Homo sapiens
caatgtgtataaaca

SEQ ID NO: 1871975 - DNA, 15 bp, Homo sapiens
aatgtgtataaacaa

SEQ ID NO: 1871976 - DNA, 15 bp, Homo sapiens
atgtgtataaacaag

SEQ ID NO: 1871977 - DNA, 15 bp, Homo sapiens
tgtgtataaacaaga

SEQ ID NO: 1871978 - DNA, 15 bp, Homo sapiens
gtgtataaacaagaa

SEQ ID NO: 1871979 - DNA, 15 bp, Homo sapiens
tgtataaacaagaaa

SEQ ID NO: 1871980 - DNA, 15 bp, Homo sapiens
gtataaacaagaaaa

SEQ ID NO: 1871981 - DNA, 15 bp, Homo sapiens
tataaacaagaaaaa

SEQ ID NO: 1871982 - DNA, 15 bp, Homo sapiens
ataaacaagaaaaat

SEQ ID NO: 1871983 - DNA, 15 bp, Homo sapiens
taaacaagaaaaata

SEQ ID NO: 1871984 - DNA, 15 bp, Homo sapiens
aaacaagaaaaataa

SEQ ID NO: 1871985 - DNA, 15 bp, Homo sapiens
aacaagaaaaataaa

SEQ ID NO: 1871986 - DNA, 15 bp, Homo sapiens
acaagaaaaataaag

SEQ ID NO: 1871987 - DNA, 15 bp, Homo sapiens
caagaaaaataaaga

SEQ ID NO: 1871988 - DNA, 15 bp, Homo sapiens
aagaaaaataaagaa

SEQ ID NO: 1871989 - DNA, 15 bp, Homo sapiens
agaaaaataaagaaa

SEQ ID NO: 1871990 - DNA, 15 bp, Homo sapiens
gaaaaataaagaaaa

SEQ ID NO: 1871991 - DNA, 15 bp, Homo sapiens
aaaaataaagaaaag

SEQ ID NO: 1871992 - DNA, 15 bp, Homo sapiens
aaaataaagaaaaga

SEQ ID NO: 1871993 - DNA, 15 bp, Homo sapiens
aaataaagaaaagat

SEQ ID NO: 1871994 - DNA, 15 bp, Homo sapiens
aataaagaaaagatg

SEQ ID NO: 1871995 - DNA, 15 bp, Homo sapiens
ataaagaaaagatgc

SEQ ID NO: 1871996 - DNA, 15 bp, Homo sapiens
taaagaaaagatgca

SEQ ID NO: 1871997 - DNA, 15 bp, Homo sapiens
aaagaaaagatgcac

SEQ ID NO: 1871998 - DNA, 15 bp, Homo sapiens
aagaaaagatgcact

SEQ ID NO: 1871999 - DNA, 15 bp, Homo sapiens
agaaaagatgcactt

SEQ ID NO: 1872000 - DNA, 15 bp, Homo sapiens
gaaaagatgcacttt

SEQ ID NO: 1872001 - DNA, 15 bp, Homo sapiens
aaaagatgcactttg

SEQ ID NO: 1872002 - DNA, 15 bp, Homo sapiens
aaagatgcactttgc

SEQ ID NO: 1872003 - DNA, 15 bp, Homo sapiens
aagatgcactttgct

SEQ ID NO: 1872004 - DNA, 15 bp, Homo sapiens
agatgcactttgctt

SEQ ID NO: 1872005 - DNA, 15 bp, Homo sapiens
gatgcactttgcttt

SEQ ID NO: 1872006 - DNA, 15 bp, Homo sapiens
atgcactttgcttta

SEQ ID NO: 1872007 - DNA, 15 bp, Homo sapiens
tgcactttgctttaa

SEQ ID NO: 1872008 - DNA, 15 bp, Homo sapiens
gcactttgctttaat

SEQ ID NO: 1872009 - DNA, 15 bp, Homo sapiens
cactttgctttaata

SEQ ID NO: 1872010 - DNA, 15 bp, Homo sapiens
actttgctttaatat

SEQ ID NO: 1872011 - DNA, 15 bp, Homo sapiens
ctttgctttaatata

SEQ ID NO: 1872012 - DNA, 15 bp, Homo sapiens
tttgctttaatataa

SEQ ID NO: 1872013 - DNA, 15 bp, Homo sapiens
ttgctttaatataaa

SEQ ID NO: 1872014 - DNA, 15 bp, Homo sapiens
tgctttaatataaat

SEQ ID NO: 1872015 - DNA, 15 bp, Homo sapiens
gctttaatataaatg

SEQ ID NO: 1872016 - DNA, 15 bp, Homo sapiens
ctttaatataaatgc

SEQ ID NO: 1872017 - DNA, 15 bp, Homo sapiens
tttaatataaatgca

SEQ ID NO: 1872018 - DNA, 15 bp, Homo sapiens
ttaatataaatgcaa

SEQ ID NO: 1872019 - DNA, 15 bp, Homo sapiens
taatataaatgcaaa

SEQ ID NO: 1872020 - DNA, 15 bp, Homo sapiens
aatataaatgcaaat

SEQ ID NO: 1872021 - DNA, 15 bp, Homo sapiens
atataaatgcaaata

SEQ ID NO: 1872022 - DNA, 15 bp, Homo sapiens
tataaatgcaaataa

SEQ ID NO: 1872023 - DNA, 15 bp, Homo sapiens
ataaatgcaaataac

SEQ ID NO: 1872024 - DNA, 15 bp, Homo sapiens
taaatgcaaataaca

SEQ ID NO: 1872025 - DNA, 15 bp, Homo sapiens
aaatgcaaataacaa

SEQ ID NO: 1872026 - DNA, 15 bp, Homo sapiens
aatgcaaataacaaa

SEQ ID NO: 1872027 - DNA, 15 bp, Homo sapiens
atgcaaataacaaat

SEQ ID NO: 1872028 - DNA, 15 bp, Homo sapiens
tgcaaataacaaatg

SEQ ID NO: 1872029 - DNA, 15 bp, Homo sapiens
gcaaataacaaatgc

SEQ ID NO: 1872030 - DNA, 15 bp, Homo sapiens
caaataacaaatgcc

SEQ ID NO: 1872031 - DNA, 15 bp, Homo sapiens
aaataacaaatgcca

SEQ ID NO: 1872032 - DNA, 15 bp, Homo sapiens
aataacaaatgccaa

SEQ ID NO: 1872033 - DNA, 15 bp, Homo sapiens
ataacaaatgccaaa

SEQ ID NO: 1872034 - DNA, 15 bp, Homo sapiens
taacaaatgccaaat

SEQ ID NO: 1872035 - DNA, 15 bp, Homo sapiens
aacaaatgccaaatt

SEQ ID NO: 1872036 - DNA, 15 bp, Homo sapiens
acaaatgccaaatta

SEQ ID NO: 1872037 - DNA, 15 bp, Homo sapiens
caaatgccaaattaa

SEQ ID NO: 1872038 - DNA, 15 bp, Homo sapiens
aaatgccaaattaaa

SEQ ID NO: 1872039 - DNA, 15 bp, Homo sapiens
aatgccaaattaaaa

SEQ ID NO: 1872040 - DNA, 15 bp, Homo sapiens
atgccaaattaaaaa

SEQ ID NO: 1872041 - DNA, 15 bp, Homo sapiens
tgccaaattaaaaaa

SEQ ID NO: 1872042 - DNA, 15 bp, Homo sapiens
gccaaattaaaaaag

SEQ ID NO: 1872043 - DNA, 15 bp, Homo sapiens
ccaaattaaaaaaga

SEQ ID NO: 1872044 - DNA, 15 bp, Homo sapiens
caaattaaaaaagat

SEQ ID NO: 1872045 - DNA, 15 bp, Homo sapiens
aaattaaaaaagata

SEQ ID NO: 1872046 - DNA, 15 bp, Homo sapiens
aattaaaaaagataa

SEQ ID NO: 1872047 - DNA, 15 bp, Homo sapiens
attaaaaaagataaa

SEQ ID NO: 1872048 - DNA, 15 bp, Homo sapiens
ttaaaaaagataaac

SEQ ID NO: 1872049 - DNA, 15 bp, Homo sapiens
taaaaaagataaaca

SEQ ID NO: 1872050 - DNA, 15 bp, Homo sapiens
aaaaaagataaacac

SEQ ID NO: 1872051 - DNA, 15 bp, Homo sapiens
aaaaagataaacaca

SEQ ID NO: 1872052 - DNA, 15 bp, Homo sapiens
aaaagataaacacaa

SEQ ID NO: 1872053 - DNA, 15 bp, Homo sapiens
aaagataaacacaag

SEQ ID NO: 1872054 - DNA, 15 bp, Homo sapiens
aagataaacacaaga

SEQ ID NO: 1872055 - DNA, 15 bp, Homo sapiens
agataaacacaagat

SEQ ID NO: 1872056 - DNA, 15 bp, Homo sapiens
gataaacacaagatt

SEQ ID NO: 1872057 - DNA, 15 bp, Homo sapiens
ataaacacaagattg

SEQ ID NO: 1872058 - DNA, 15 bp, Homo sapiens
taaacacaagattgg

SEQ ID NO: 1872059 - DNA, 15 bp, Homo sapiens
aaacacaagattggt

SEQ ID NO: 1872060 - DNA, 15 bp, Homo sapiens
aacacaagattggtg

SEQ ID NO: 1872061 - DNA, 15 bp, Homo sapiens
acacaagattggtgt

SEQ ID NO: 1872062 - DNA, 15 bp, Homo sapiens
cacaagattggtgtt

SEQ ID NO: 1872063 - DNA, 15 bp, Homo sapiens
acaagattggtgttt

SEQ ID NO: 1872064 - DNA, 15 bp, Homo sapiens
caagattggtgtttt

SEQ ID NO: 1872065 - DNA, 15 bp, Homo sapiens
aagattggtgttttt

SEQ ID NO: 1872066 - DNA, 15 bp, Homo sapiens
agattggtgtttttt

SEQ ID NO: 1872067 - DNA, 15 bp, Homo sapiens
gattggtgttttttt

SEQ ID NO: 1872068 - DNA, 15 bp, Homo sapiens
attggtgtttttttc

SEQ ID NO: 1872069 - DNA, 15 bp, Homo sapiens
ttggtgtttttttct

SEQ ID NO: 1872070 - DNA, 15 bp, Homo sapiens
tggtgtttttttcta

SEQ ID NO: 1872071 - DNA, 15 bp, Homo sapiens
ggtgtttttttctat

SEQ ID NO: 1872072 - DNA, 15 bp, Homo sapiens
gtgtttttttctatg

SEQ ID NO: 1872073 - DNA, 15 bp, Homo sapiens
tgtttttttctatgg

SEQ ID NO: 1872074 - DNA, 15 bp, Homo sapiens
gtttttttctatggg

SEQ ID NO: 1872075 - DNA, 15 bp, Homo sapiens
tttttttctatgggt

SEQ ID NO: 1872076 - DNA, 15 bp, Homo sapiens
ttttttctatgggtg

SEQ ID NO: 1872077 - DNA, 15 bp, Homo sapiens
ttttctatgggtgtt

SEQ ID NO: 1872078 - DNA, 15 bp, Homo sapiens
tttctatgggtgtta

SEQ ID NO: 1872079 - DNA, 15 bp, Homo sapiens
ttctatgggtgttat

SEQ ID NO: 1872080 - DNA, 15 bp, Homo sapiens
tctatgggtgttatc

SEQ ID NO: 1872081 - DNA, 15 bp, Homo sapiens
ctatgggtgttatca

SEQ ID NO: 1872082 - DNA, 15 bp, Homo sapiens
tatgggtgttatcac

SEQ ID NO: 1872083 - DNA, 15 bp, Homo sapiens
atgggtgttatcacc

SEQ ID NO: 1872084 - DNA, 15 bp, Homo sapiens
tgggtgttatcacct

SEQ ID NO: 1872085 - DNA, 15 bp, Homo sapiens
gggtgttatcaccta

SEQ ID NO: 1872086 - DNA, 15 bp, Homo sapiens
ggtgttatcacctag

SEQ ID NO: 1872087 - DNA, 15 bp, Homo sapiens
gtgttatcacctagc

SEQ ID NO: 1872088 - DNA, 15 bp, Homo sapiens
tgttatcacctagct

SEQ ID NO: 1872089 - DNA, 15 bp, Homo sapiens
gttatcacctagctg

SEQ ID NO: 1872090 - DNA, 15 bp, Homo sapiens
ttatcacctagctga

SEQ ID NO: 1872091 - DNA, 15 bp, Homo sapiens
tatcacctagctgaa

SEQ ID NO: 1872092 - DNA, 15 bp, Homo sapiens
atcacctagctgaat

SEQ ID NO: 1872093 - DNA, 15 bp, Homo sapiens
tcacctagctgaatg

SEQ ID NO: 1872094 - DNA, 15 bp, Homo sapiens
cacctagctgaatgt

SEQ ID NO: 1872095 - DNA, 15 bp, Homo sapiens
acctagctgaatgtt

SEQ ID NO: 1872096 - DNA, 15 bp, Homo sapiens
cctagctgaatgttt

SEQ ID NO: 1872097 - DNA, 15 bp, Homo sapiens
ctagctgaatgtttt

SEQ ID NO: 1872098 - DNA, 15 bp, Homo sapiens
tagctgaatgttttt

SEQ ID NO: 1872099 - DNA, 15 bp, Homo sapiens
agctgaatgtttttc

SEQ ID NO: 1872100 - DNA, 15 bp, Homo sapiens
gctgaatgtttttct

SEQ ID NO: 1872101 - DNA, 15 bp, Homo sapiens
ctgaatgtttttcta

SEQ ID NO: 1872102 - DNA, 15 bp, Homo sapiens
tgaatgtttttctaa

SEQ ID NO: 1872103 - DNA, 15 bp, Homo sapiens
gaatgtttttctaaa

SEQ ID NO: 1872104 - DNA, 15 bp, Homo sapiens
aatgtttttctaaag

SEQ ID NO: 1872105 - DNA, 15 bp, Homo sapiens
atgtttttctaaagg

SEQ ID NO: 1872106 - DNA, 15 bp, Homo sapiens
tgtttttctaaagga

SEQ ID NO: 1872107 - DNA, 15 bp, Homo sapiens
gtttttctaaaggag

SEQ ID NO: 1872108 - DNA, 15 bp, Homo sapiens
tttttctaaaggagt

SEQ ID NO: 1872109 - DNA, 15 bp, Homo sapiens
ttttctaaaggagtt

SEQ ID NO: 1872110 - DNA, 15 bp, Homo sapiens
tttctaaaggagttt

SEQ ID NO: 1872111 - DNA, 15 bp, Homo sapiens
ttctaaaggagttta

SEQ ID NO: 1872112 - DNA, 15 bp, Homo sapiens
tctaaaggagtttat

SEQ ID NO: 1872113 - DNA, 15 bp, Homo sapiens
ctaaaggagtttatg

SEQ ID NO: 1872114 - DNA, 15 bp, Homo sapiens
taaaggagtttatgt

SEQ ID NO: 1872115 - DNA, 15 bp, Homo sapiens
aaaggagtttatgtt

SEQ ID NO: 1872116 - DNA, 15 bp, Homo sapiens
aaggagtttatgttc

SEQ ID NO: 1872117 - DNA, 15 bp, Homo sapiens
aggagtttatgttcc

SEQ ID NO: 1872118 - DNA, 15 bp, Homo sapiens
ggagtttatgttcca

SEQ ID NO: 1872119 - DNA, 15 bp, Homo sapiens
gagtttatgttccat

SEQ ID NO: 1872120 - DNA, 15 bp, Homo sapiens
agtttatgttccatt

SEQ ID NO: 1872121 - DNA, 15 bp, Homo sapiens
gtttatgttccatta

SEQ ID NO: 1872122 - DNA, 15 bp, Homo sapiens
tttatgttccattaa

SEQ ID NO: 1872123 - DNA, 15 bp, Homo sapiens
ttatgttccattaaa

SEQ ID NO: 1872124 - DNA, 15 bp, Homo sapiens
tatgttccattaaac

SEQ ID NO: 1872125 - DNA, 15 bp, Homo sapiens
atgttccattaaacg

SEQ ID NO: 1872126 - DNA, 15 bp, Homo sapiens
tgttccattaaacga

SEQ ID NO: 1872127 - DNA, 15 bp, Homo sapiens
gttccattaaacgat

SEQ ID NO: 1872128 - DNA, 15 bp, Homo sapiens
ttccattaaacgatt

SEQ ID NO: 1872129 - DNA, 15 bp, Homo sapiens
tccattaaacgattt

SEQ ID NO: 1872130 - DNA, 15 bp, Homo sapiens
ccattaaacgatttt

SEQ ID NO: 1872131 - DNA, 15 bp, Homo sapiens
cattaaacgattttt

SEQ ID NO: 1872132 - DNA, 15 bp, Homo sapiens
attaaacgattttta

SEQ ID NO: 1872133 - DNA, 15 bp, Homo sapiens
ttaaacgatttttaa

SEQ ID NO: 1872134 - DNA, 15 bp, Homo sapiens
taaacgatttttaaa

SEQ ID NO: 1872135 - DNA, 15 bp, Homo sapiens
aaacgatttttaaaa

SEQ ID NO: 1872136 - DNA, 15 bp, Homo sapiens
aacgatttttaaaat

SEQ ID NO: 1872137 - DNA, 15 bp, Homo sapiens
acgatttttaaaatg

SEQ ID NO: 1872138 - DNA, 15 bp, Homo sapiens
cgatttttaaaatgt

SEQ ID NO: 1872139 - DNA, 15 bp, Homo sapiens
gatttttaaaatgta

SEQ ID NO: 1872140 - DNA, 15 bp, Homo sapiens
atttttaaaatgtac

SEQ ID NO: 1872141 - DNA, 15 bp, Homo sapiens
tttttaaaatgtaca

SEQ ID NO: 1872142 - DNA, 15 bp, Homo sapiens
ttttaaaatgtacac

SEQ ID NO: 1872143 - DNA, 15 bp, Homo sapiens
tttaaaatgtacact

SEQ ID NO: 1872144 - DNA, 15 bp, Homo sapiens
ttaaaatgtacactt

SEQ ID NO: 1872145 - DNA, 15 bp, Homo sapiens
taaaatgtacacttg

SEQ ID NO: 1872146 - DNA, 15 bp, Homo sapiens
aaaatgtacacttga

SEQ ID NO: 1872147 - DNA, 15 bp, Homo sapiens
aaatgtacacttgat

SEQ ID NO: 1872148 - DNA, 15 bp, Homo sapiens
aatgtacacttgatt

SEQ ID NO: 1872149 - DNA, 15 bp, Homo sapiens
atgtacacttgattt

SEQ ID NO: 1872150 - DNA, 15 bp, Homo sapiens
tgtacacttgatttc

SEQ ID NO: 1872151 - DNA, 15 bp, Homo sapiens
gtacacttgatttca

SEQ ID NO: 1872152 - DNA, 15 bp, Homo sapiens
tacacttgatttcat

SEQ ID NO: 1872153 - DNA, 15 bp, Homo sapiens
acacttgatttcatg

SEQ ID NO: 1872154 - DNA, 15 bp, Homo sapiens
cacttgatttcatgt

SEQ ID NO: 1872155 - DNA, 15 bp, Homo sapiens
acttgatttcatgtt

SEQ ID NO: 1872156 - DNA, 15 bp, Homo sapiens
cttgatttcatgttg

SEQ ID NO: 1872157 - DNA, 15 bp, Homo sapiens
ttgatttcatgttgt

SEQ ID NO: 1872158 - DNA, 15 bp, Homo sapiens
tgatttcatgttgtc

SEQ ID NO: 1872159 - DNA, 15 bp, Homo sapiens
gatttcatgttgtcc

SEQ ID NO: 1872160 - DNA, 15 bp, Homo sapiens
atttcatgttgtcct

SEQ ID NO: 1872161 - DNA, 15 bp, Homo sapiens
tttcatgttgtcctc

SEQ ID NO: 1872162 - DNA, 15 bp, Homo sapiens
ttcatgttgtcctcc

SEQ ID NO: 1872163 - DNA, 15 bp, Homo sapiens
tcatgttgtcctcca

SEQ ID NO: 1872164 - DNA, 15 bp, Homo sapiens
catgttgtcctccaa

SEQ ID NO: 1872165 - DNA, 15 bp, Homo sapiens
atgttgtcctccaac

SEQ ID NO: 1872166 - DNA, 15 bp, Homo sapiens
tgttgtcctccaact

SEQ ID NO: 1872167 - DNA, 15 bp, Homo sapiens
gttgtcctccaactc

SEQ ID NO: 1872168 - DNA, 15 bp, Homo sapiens
ttgtcctccaactcc

SEQ ID NO: 1872169 - DNA, 15 bp, Homo sapiens
tgtcctccaactcct

SEQ ID NO: 1872170 - DNA, 15 bp, Homo sapiens
gtcctccaactcctt

SEQ ID NO: 1872171 - DNA, 15 bp, Homo sapiens
tcctccaactccttt

SEQ ID NO: 1872172 - DNA, 15 bp, Homo sapiens
cctccaactcctttt

SEQ ID NO: 1872173 - DNA, 15 bp, Homo sapiens
ctccaactccttttt

SEQ ID NO: 1872174 - DNA, 15 bp, Homo sapiens
tccaactcctttttc

SEQ ID NO: 1872175 - DNA, 15 bp, Homo sapiens
ccaactcctttttct

SEQ ID NO: 1872176 - DNA, 15 bp, Homo sapiens
caactcctttttctt

SEQ ID NO: 1872177 - DNA, 15 bp, Homo sapiens
aactcctttttcttc

SEQ ID NO: 1872178 - DNA, 15 bp, Homo sapiens
actcctttttcttct

SEQ ID NO: 1872179 - DNA, 15 bp, Homo sapiens
ctcctttttcttctg

SEQ ID NO: 1872180 - DNA, 15 bp, Homo sapiens
tcctttttcttctgc

SEQ ID NO: 1872181 - DNA, 15 bp, Homo sapiens
cctttttcttctgct

SEQ ID NO: 1872182 - DNA, 15 bp, Homo sapiens
ctttttcttctgctg

SEQ ID NO: 1872183 - DNA, 15 bp, Homo sapiens
tttttcttctgctgc

SEQ ID NO: 1872184 - DNA, 15 bp, Homo sapiens
ttttcttctgctgct

SEQ ID NO: 1872185 - DNA, 15 bp, Homo sapiens
tttcttctgctgctt

SEQ ID NO: 1872186 - DNA, 15 bp, Homo sapiens
ttcttctgctgcttg

SEQ ID NO: 1872187 - DNA, 15 bp, Homo sapiens
tcttctgctgcttgg

SEQ ID NO: 1872188 - DNA, 15 bp, Homo sapiens
cttctgctgcttgga

SEQ ID NO: 1872189 - DNA, 15 bp, Homo sapiens
ttctgctgcttggag

SEQ ID NO: 1872190 - DNA, 15 bp, Homo sapiens
tctgctgcttggagg

SEQ ID NO: 1872191 - DNA, 15 bp, Homo sapiens
ctgctgcttggaggg

SEQ ID NO: 1872192 - DNA, 15 bp, Homo sapiens
tgctgcttggaggga

SEQ ID NO: 1872193 - DNA, 15 bp, Homo sapiens
gctgcttggagggag

SEQ ID NO: 1872194 - DNA, 15 bp, Homo sapiens
ctgcttggagggagt

SEQ ID NO: 1872195 - DNA, 15 bp, Homo sapiens
tgcttggagggagtg

SEQ ID NO: 1872196 - DNA, 15 bp, Homo sapiens
gcttggagggagtgg

SEQ ID NO: 1872197 - DNA, 15 bp, Homo sapiens
cttggagggagtggg

SEQ ID NO: 1872198 - DNA, 15 bp, Homo sapiens
ttggagggagtgggg

SEQ ID NO: 1872199 - DNA, 15 bp, Homo sapiens
tggagggagtgggga

SEQ ID NO: 1872200 - DNA, 15 bp, Homo sapiens
ggagggagtggggag

SEQ ID NO: 1872201 - DNA, 15 bp, Homo sapiens
gagggagtggggagg

SEQ ID NO: 1872202 - DNA, 15 bp, Homo sapiens
agggagtggggagga

SEQ ID NO: 1872203 - DNA, 15 bp, Homo sapiens
gggagtggggaggag

SEQ ID NO: 1872204 - DNA, 15 bp, Homo sapiens
ggagtggggaggagt

SEQ ID NO: 1872205 - DNA, 15 bp, Homo sapiens
gagtggggaggagtg

SEQ ID NO: 1872206 - DNA, 15 bp, Homo sapiens
agtggggaggagtga

SEQ ID NO: 1872207 - DNA, 15 bp, Homo sapiens
gtggggaggagtgag

SEQ ID NO: 1872208 - DNA, 15 bp, Homo sapiens
tggggaggagtgagt

SEQ ID NO: 1872209 - DNA, 15 bp, Homo sapiens
ggggaggagtgagta

SEQ ID NO: 1872210 - DNA, 15 bp, Homo sapiens
gggaggagtgagtat

SEQ ID NO: 1872211 - DNA, 15 bp, Homo sapiens
ggaggagtgagtatt

SEQ ID NO: 1872212 - DNA, 15 bp, Homo sapiens
gaggagtgagtattc

SEQ ID NO: 1872213 - DNA, 15 bp, Homo sapiens
aggagtgagtattca

SEQ ID NO: 1872214 - DNA, 15 bp, Homo sapiens
ggagtgagtattcat

SEQ ID NO: 1872215 - DNA, 15 bp, Homo sapiens
gagtgagtattcatc

SEQ ID NO: 1872216 - DNA, 15 bp, Homo sapiens
agtgagtattcatcc

SEQ ID NO: 1872217 - DNA, 15 bp, Homo sapiens
gtgagtattcatcca

SEQ ID NO: 1872218 - DNA, 15 bp, Homo sapiens
tgagtattcatccaa

SEQ ID NO: 1872219 - DNA, 15 bp, Homo sapiens
gagtattcatccaaa

SEQ ID NO: 1872220 - DNA, 15 bp, Homo sapiens
agtattcatccaaat

SEQ ID NO: 1872221 - DNA, 15 bp, Homo sapiens
gtattcatccaaatt

SEQ ID NO: 1872222 - DNA, 15 bp, Homo sapiens
tattcatccaaattc

SEQ ID NO: 1872223 - DNA, 15 bp, Homo sapiens
attcatccaaattca

SEQ ID NO: 1872224 - DNA, 15 bp, Homo sapiens
ttcatccaaattcag

SEQ ID NO: 1872225 - DNA, 15 bp, Homo sapiens
tcatccaaattcagt

SEQ ID NO: 1872226 - DNA, 15 bp, Homo sapiens
catccaaattcagtt

SEQ ID NO: 1872227 - DNA, 15 bp, Homo sapiens
atccaaattcagttg

SEQ ID NO: 1872228 - DNA, 15 bp, Homo sapiens
tccaaattcagttga

SEQ ID NO: 1872229 - DNA, 15 bp, Homo sapiens
ccaaattcagttgag

SEQ ID NO: 1872230 - DNA, 15 bp, Homo sapiens
caaattcagttgagt

SEQ ID NO: 1872231 - DNA, 15 bp, Homo sapiens
aaattcagttgagtt

SEQ ID NO: 1872232 - DNA, 15 bp, Homo sapiens
aattcagttgagttg

SEQ ID NO: 1872233 - DNA, 15 bp, Homo sapiens
attcagttgagttgg

SEQ ID NO: 1872234 - DNA, 15 bp, Homo sapiens
ttcagttgagttggc

SEQ ID NO: 1872235 - DNA, 15 bp, Homo sapiens
tcagttgagttggcg

SEQ ID NO: 1872236 - DNA, 15 bp, Homo sapiens
cagttgagttggcgt

SEQ ID NO: 1872237 - DNA, 15 bp, Homo sapiens
agttgagttggcgtc

SEQ ID NO: 1872238 - DNA, 15 bp, Homo sapiens
gttgagttggcgtct

SEQ ID NO: 1872239 - DNA, 15 bp, Homo sapiens
ttgagttggcgtctt

SEQ ID NO: 1872240 - DNA, 15 bp, Homo sapiens
tgagttggcgtcttc

SEQ ID NO: 1872241 - DNA, 15 bp, Homo sapiens
gagttggcgtcttcc

SEQ ID NO: 1872242 - DNA, 15 bp, Homo sapiens
agttggcgtcttccc

SEQ ID NO: 1872243 - DNA, 15 bp, Homo sapiens
gttggcgtcttccca

SEQ ID NO: 1872244 - DNA, 15 bp, Homo sapiens
ttggcgtcttcccag

SEQ ID NO: 1872245 - DNA, 15 bp, Homo sapiens
tggcgtcttcccagc

SEQ ID NO: 1872246 - DNA, 15 bp, Homo sapiens
ggcgtcttcccagcc

SEQ ID NO: 1872247 - DNA, 15 bp, Homo sapiens
gcgtcttcccagccc

SEQ ID NO: 1872248 - DNA, 15 bp, Homo sapiens
cgtcttcccagccca

SEQ ID NO: 1872249 - DNA, 15 bp, Homo sapiens
gtcttcccagcccag

SEQ ID NO: 1872250 - DNA, 15 bp, Homo sapiens
tcttcccagcccagt

SEQ ID NO: 1872251 - DNA, 15 bp, Homo sapiens
cttcccagcccagtg

SEQ ID NO: 1872252 - DNA, 15 bp, Homo sapiens
ttcccagcccagtgc

SEQ ID NO: 1872253 - DNA, 15 bp, Homo sapiens
tcccagcccagtgct

SEQ ID NO: 1872254 - DNA, 15 bp, Homo sapiens
cccagcccagtgctt

SEQ ID NO: 1872255 - DNA, 15 bp, Homo sapiens
ccagcccagtgcttg

SEQ ID NO: 1872256 - DNA, 15 bp, Homo sapiens
cagcccagtgcttgg

SEQ ID NO: 1872257 - DNA, 15 bp, Homo sapiens
agcccagtgcttgga

SEQ ID NO: 1872258 - DNA, 15 bp, Homo sapiens
gcccagtgcttggag

SEQ ID NO: 1872259 - DNA, 15 bp, Homo sapiens
cccagtgcttggagg

SEQ ID NO: 1872260 - DNA, 15 bp, Homo sapiens
ccagtgcttggagga

SEQ ID NO: 1872261 - DNA, 15 bp, Homo sapiens
cagtgcttggaggat

SEQ ID NO: 1872262 - DNA, 15 bp, Homo sapiens
agtgcttggaggatg

SEQ ID NO: 1872263 - DNA, 15 bp, Homo sapiens
gtgcttggaggatgg

SEQ ID NO: 1872264 - DNA, 15 bp, Homo sapiens
tgcttggaggatggg

SEQ ID NO: 1872265 - DNA, 15 bp, Homo sapiens
gcttggaggatggga

SEQ ID NO: 1872266 - DNA, 15 bp, Homo sapiens
cttggaggatgggag

SEQ ID NO: 1872267 - DNA, 15 bp, Homo sapiens
ttggaggatgggaga

SEQ ID NO: 1872268 - DNA, 15 bp, Homo sapiens
tggaggatgggagac

SEQ ID NO: 1872269 - DNA, 15 bp, Homo sapiens
ggaggatgggagacg

SEQ ID NO: 1872270 - DNA, 15 bp, Homo sapiens
gaggatgggagacgt

SEQ ID NO: 1872271 - DNA, 15 bp, Homo sapiens
aggatgggagacgtg

SEQ ID NO: 1872272 - DNA, 15 bp, Homo sapiens
ggatgggagacgtgg

SEQ ID NO: 1872273 - DNA, 15 bp, Homo sapiens
gatgggagacgtggg

SEQ ID NO: 1872274 - DNA, 15 bp, Homo sapiens
atgggagacgtgggc

SEQ ID NO: 1872275 - DNA, 15 bp, Homo sapiens
tgggagacgtgggcc

SEQ ID NO: 1872276 - DNA, 15 bp, Homo sapiens
gggagacgtgggcca

SEQ ID NO: 1872277 - DNA, 15 bp, Homo sapiens
ggagacgtgggccac

SEQ ID NO: 1872278 - DNA, 15 bp, Homo sapiens
gagacgtgggccaca

SEQ ID NO: 1872279 - DNA, 15 bp, Homo sapiens
agacgtgggccacaa

SEQ ID NO: 1872280 - DNA, 15 bp, Homo sapiens
gacgtgggccacaaa

SEQ ID NO: 1872281 - DNA, 15 bp, Homo sapiens
acgtgggccacaaaa

SEQ ID NO: 1872282 - DNA, 15 bp, Homo sapiens
cgtgggccacaaaag

SEQ ID NO: 1872283 - DNA, 15 bp, Homo sapiens
gtgggccacaaaaga

SEQ ID NO: 1872284 - DNA, 15 bp, Homo sapiens
tgggccacaaaagag

SEQ ID NO: 1872285 - DNA, 15 bp, Homo sapiens
gggccacaaaagaga

SEQ ID NO: 1872286 - DNA, 15 bp, Homo sapiens
ggccacaaaagagac

SEQ ID NO: 1872287 - DNA, 15 bp, Homo sapiens
gccacaaaagagaca

SEQ ID NO: 1872288 - DNA, 15 bp, Homo sapiens
ccacaaaagagacat

SEQ ID NO: 1872289 - DNA, 15 bp, Homo sapiens
cacaaaagagacatc

SEQ ID NO: 1872290 - DNA, 15 bp, Homo sapiens
acaaaagagacatct

SEQ ID NO: 1872291 - DNA, 15 bp, Homo sapiens
caaaagagacatcta

SEQ ID NO: 1872292 - DNA, 15 bp, Homo sapiens
aaaagagacatctag

SEQ ID NO: 1872293 - DNA, 15 bp, Homo sapiens
aaagagacatctaga

SEQ ID NO: 1872294 - DNA, 15 bp, Homo sapiens
aagagacatctagaa

SEQ ID NO: 1872295 - DNA, 15 bp, Homo sapiens
agagacatctagaac

SEQ ID NO: 1872296 - DNA, 15 bp, Homo sapiens
gagacatctagaaca

SEQ ID NO: 1872297 - DNA, 15 bp, Homo sapiens
agacatctagaacag

SEQ ID NO: 1872298 - DNA, 15 bp, Homo sapiens
gacatctagaacagc

SEQ ID NO: 1872299 - DNA, 15 bp, Homo sapiens
acatctagaacagcc

SEQ ID NO: 1872300 - DNA, 15 bp, Homo sapiens
catctagaacagccc

SEQ ID NO: 1872301 - DNA, 15 bp, Homo sapiens
atctagaacagccct

SEQ ID NO: 1872302 - DNA, 15 bp, Homo sapiens
tctagaacagccctg

SEQ ID NO: 1872303 - DNA, 15 bp, Homo sapiens
ctagaacagccctgg

SEQ ID NO: 1872304 - DNA, 15 bp, Homo sapiens
tagaacagccctggt

SEQ ID NO: 1872305 - DNA, 15 bp, Homo sapiens
agaacagccctggtc

SEQ ID NO: 1872306 - DNA, 15 bp, Homo sapiens
gaacagccctggtct

SEQ ID NO: 1872307 - DNA, 15 bp, Homo sapiens
aacagccctggtctt

SEQ ID NO: 1872308 - DNA, 15 bp, Homo sapiens
acagccctggtcttc

SEQ ID NO: 1872309 - DNA, 15 bp, Homo sapiens
cagccctggtcttca

SEQ ID NO: 1872310 - DNA, 15 bp, Homo sapiens
agccctggtcttcaa

SEQ ID NO: 1872311 - DNA, 15 bp, Homo sapiens
gccctggtcttcaag

SEQ ID NO: 1872312 - DNA, 15 bp, Homo sapiens
ccctggtcttcaaga

SEQ ID NO: 1872313 - DNA, 15 bp, Homo sapiens
cctggtcttcaagag

SEQ ID NO: 1872314 - DNA, 15 bp, Homo sapiens
ctggtcttcaagagt

SEQ ID NO: 1872315 - DNA, 15 bp, Homo sapiens
tggtcttcaagagtg

SEQ ID NO: 1872316 - DNA, 15 bp, Homo sapiens
ggtcttcaagagtgc

SEQ ID NO: 1872317 - DNA, 15 bp, Homo sapiens
gtcttcaagagtgct

SEQ ID NO: 1872318 - DNA, 15 bp, Homo sapiens
tcttcaagagtgctg

SEQ ID NO: 1872319 - DNA, 15 bp, Homo sapiens
cttcaagagtgctgg

SEQ ID NO: 1872320 - DNA, 15 bp, Homo sapiens
ttcaagagtgctgga

SEQ ID NO: 1872321 - DNA, 15 bp, Homo sapiens
tcaagagtgctggaa

SEQ ID NO: 1872322 - DNA, 15 bp, Homo sapiens
caagagtgctggaaa

SEQ ID NO: 1872323 - DNA, 15 bp, Homo sapiens
aagagtgctggaaag

SEQ ID NO: 1872324 - DNA, 15 bp, Homo sapiens
agagtgctggaaaga

SEQ ID NO: 1872325 - DNA, 15 bp, Homo sapiens
gagtgctggaaagac

SEQ ID NO: 1872326 - DNA, 15 bp, Homo sapiens
agtgctggaaagacc

SEQ ID NO: 1872327 - DNA, 15 bp, Homo sapiens
gtgctggaaagacct

SEQ ID NO: 1872328 - DNA, 15 bp, Homo sapiens
tgctggaaagacctg

SEQ ID NO: 1872329 - DNA, 15 bp, Homo sapiens
gctggaaagacctgc

SEQ ID NO: 1872330 - DNA, 15 bp, Homo sapiens
ctggaaagacctgca

SEQ ID NO: 1872331 - DNA, 15 bp, Homo sapiens
tggaaagacctgcag

SEQ ID NO: 1872332 - DNA, 15 bp, Homo sapiens
ggaaagacctgcagc

SEQ ID NO: 1872333 - DNA, 15 bp, Homo sapiens
gaaagacctgcagcc

SEQ ID NO: 1872334 - DNA, 15 bp, Homo sapiens
aaagacctgcagcca

SEQ ID NO: 1872335 - DNA, 15 bp, Homo sapiens
aagacctgcagccac

SEQ ID NO: 1872336 - DNA, 15 bp, Homo sapiens
agacctgcagccacc

SEQ ID NO: 1872337 - DNA, 15 bp, Homo sapiens
gacctgcagccaccc

SEQ ID NO: 1872338 - DNA, 15 bp, Homo sapiens
acctgcagccaccca

SEQ ID NO: 1872339 - DNA, 15 bp, Homo sapiens
cctgcagccacccag

SEQ ID NO: 1872340 - DNA, 15 bp, Homo sapiens
ctgcagccacccaga

SEQ ID NO: 1872341 - DNA, 15 bp, Homo sapiens
tgcagccacccagac

SEQ ID NO: 1872342 - DNA, 15 bp, Homo sapiens
gcagccacccagaca

SEQ ID NO: 1872343 - DNA, 15 bp, Homo sapiens
cagccacccagacat

SEQ ID NO: 1872344 - DNA, 15 bp, Homo sapiens
agccacccagacatc

SEQ ID NO: 1872345 - DNA, 15 bp, Homo sapiens
gccacccagacatcc

SEQ ID NO: 1872346 - DNA, 15 bp, Homo sapiens
ccacccagacatccc

SEQ ID NO: 1872347 - DNA, 15 bp, Homo sapiens
cacccagacatccct

SEQ ID NO: 1872348 - DNA, 15 bp, Homo sapiens
acccagacatccctc

SEQ ID NO: 1872349 - DNA, 15 bp, Homo sapiens
cccagacatccctcc

SEQ ID NO: 1872350 - DNA, 15 bp, Homo sapiens
ccagacatccctcct

SEQ ID NO: 1872351 - DNA, 15 bp, Homo sapiens
cagacatccctcctt

SEQ ID NO: 1872352 - DNA, 15 bp, Homo sapiens
agacatccctccttc

SEQ ID NO: 1872353 - DNA, 15 bp, Homo sapiens
gacatccctccttct

SEQ ID NO: 1872354 - DNA, 15 bp, Homo sapiens
acatccctccttctt

SEQ ID NO: 1872355 - DNA, 15 bp, Homo sapiens
catccctccttcttg

SEQ ID NO: 1872356 - DNA, 15 bp, Homo sapiens
atccctccttcttgt

SEQ ID NO: 1872357 - DNA, 15 bp, Homo sapiens
tccctccttcttgtg

SEQ ID NO: 1872358 - DNA, 15 bp, Homo sapiens
ccctccttcttgtgt

SEQ ID NO: 1872359 - DNA, 15 bp, Homo sapiens
cctccttcttgtgtc

SEQ ID NO: 1872360 - DNA, 15 bp, Homo sapiens
ctccttcttgtgtct

SEQ ID NO: 1872361 - DNA, 15 bp, Homo sapiens
tccttcttgtgtctt

SEQ ID NO: 1872362 - DNA, 15 bp, Homo sapiens
ccttcttgtgtcttg

SEQ ID NO: 1872363 - DNA, 15 bp, Homo sapiens
cttcttgtgtcttga

SEQ ID NO: 1872364 - DNA, 15 bp, Homo sapiens
ttcttgtgtcttgaa

SEQ ID NO: 1872365 - DNA, 15 bp, Homo sapiens
tcttgtgtcttgaat

SEQ ID NO: 1872366 - DNA, 15 bp, Homo sapiens
cttgtgtcttgaatt

SEQ ID NO: 1872367 - DNA, 15 bp, Homo sapiens
ttgtgtcttgaattt

SEQ ID NO: 1872368 - DNA, 15 bp, Homo sapiens
tgtgtcttgaatttg

SEQ ID NO: 1872369 - DNA, 15 bp, Homo sapiens
gtgtcttgaatttgt

SEQ ID NO: 1872370 - DNA, 15 bp, Homo sapiens
tgtcttgaatttgta

SEQ ID NO: 1872371 - DNA, 15 bp, Homo sapiens
gtcttgaatttgtaa

SEQ ID NO: 1872372 - DNA, 15 bp, Homo sapiens
tcttgaatttgtaat

SEQ ID NO: 1872373 - DNA, 15 bp, Homo sapiens
cttgaatttgtaatg

SEQ ID NO: 1872374 - DNA, 15 bp, Homo sapiens
ttgaatttgtaatgg

SEQ ID NO: 1872375 - DNA, 15 bp, Homo sapiens
tgaatttgtaatggg

SEQ ID NO: 1872376 - DNA, 15 bp, Homo sapiens
gaatttgtaatggga

SEQ ID NO: 1872377 - DNA, 15 bp, Homo sapiens
aatttgtaatgggag

SEQ ID NO: 1872378 - DNA, 15 bp, Homo sapiens
atttgtaatgggaga

SEQ ID NO: 1872379 - DNA, 15 bp, Homo sapiens
tttgtaatgggagac

SEQ ID NO: 1872380 - DNA, 15 bp, Homo sapiens
ttgtaatgggagaca

SEQ ID NO: 1872381 - DNA, 15 bp, Homo sapiens
tgtaatgggagacaa

SEQ ID NO: 1872382 - DNA, 15 bp, Homo sapiens
gtaatgggagacaac

SEQ ID NO: 1872383 - DNA, 15 bp, Homo sapiens
taatgggagacaacc

SEQ ID NO: 1872384 - DNA, 15 bp, Homo sapiens
aatgggagacaacct

SEQ ID NO: 1872385 - DNA, 15 bp, Homo sapiens
atgggagacaaccta

SEQ ID NO: 1872386 - DNA, 15 bp, Homo sapiens
tgggagacaacctac

SEQ ID NO: 1872387 - DNA, 15 bp, Homo sapiens
gggagacaacctaca

SEQ ID NO: 1872388 - DNA, 15 bp, Homo sapiens
ggagacaacctacag

SEQ ID NO: 1872389 - DNA, 15 bp, Homo sapiens
gagacaacctacagg

SEQ ID NO: 1872390 - DNA, 15 bp, Homo sapiens
agacaacctacagga

SEQ ID NO: 1872391 - DNA, 15 bp, Homo sapiens
gacaacctacaggag

SEQ ID NO: 1872392 - DNA, 15 bp, Homo sapiens
acaacctacaggagc

SEQ ID NO: 1872393 - DNA, 15 bp, Homo sapiens
caacctacaggagct

SEQ ID NO: 1872394 - DNA, 15 bp, Homo sapiens
aacctacaggagctc

SEQ ID NO: 1872395 - DNA, 15 bp, Homo sapiens
acctacaggagctct

SEQ ID NO: 1872396 - DNA, 15 bp, Homo sapiens
cctacaggagctctg

SEQ ID NO: 1872397 - DNA, 15 bp, Homo sapiens
ctacaggagctctgt

SEQ ID NO: 1872398 - DNA, 15 bp, Homo sapiens
tacaggagctctgtg

SEQ ID NO: 1872399 - DNA, 15 bp, Homo sapiens
acaggagctctgtgg

SEQ ID NO: 1872400 - DNA, 15 bp, Homo sapiens
caggagctctgtggg

SEQ ID NO: 1872401 - DNA, 15 bp, Homo sapiens
aggagctctgtgggt

SEQ ID NO: 1872402 - DNA, 15 bp, Homo sapiens
ggagctctgtgggtg

SEQ ID NO: 1872403 - DNA, 15 bp, Homo sapiens
gagctctgtgggtga

SEQ ID NO: 1872404 - DNA, 15 bp, Homo sapiens
agctctgtgggtgat

SEQ ID NO: 1872405 - DNA, 15 bp, Homo sapiens
gctctgtgggtgata

SEQ ID NO: 1872406 - DNA, 15 bp, Homo sapiens
ctctgtgggtgataa

SEQ ID NO: 1872407 - DNA, 15 bp, Homo sapiens
tctgtgggtgataat

SEQ ID NO: 1872408 - DNA, 15 bp, Homo sapiens
ctgtgggtgataatt

SEQ ID NO: 1872409 - DNA, 15 bp, Homo sapiens
tgtgggtgataattc

SEQ ID NO: 1872410 - DNA, 15 bp, Homo sapiens
gtgggtgataattca

SEQ ID NO: 1872411 - DNA, 15 bp, Homo sapiens
tgggtgataattcaa

SEQ ID NO: 1872412 - DNA, 15 bp, Homo sapiens
gggtgataattcaaa

SEQ ID NO: 1872413 - DNA, 15 bp, Homo sapiens
ggtgataattcaaag

SEQ ID NO: 1872414 - DNA, 15 bp, Homo sapiens
gtgataattcaaagc

SEQ ID NO: 1872415 - DNA, 15 bp, Homo sapiens
tgataattcaaagct

SEQ ID NO: 1872416 - DNA, 15 bp, Homo sapiens
gataattcaaagctt

SEQ ID NO: 1872417 - DNA, 15 bp, Homo sapiens
ataattcaaagcttg

SEQ ID NO: 1872418 - DNA, 15 bp, Homo sapiens
taattcaaagcttgt

SEQ ID NO: 1872419 - DNA, 15 bp, Homo sapiens
aattcaaagcttgta

SEQ ID NO: 1872420 - DNA, 15 bp, Homo sapiens
attcaaagcttgtag

SEQ ID NO: 1872421 - DNA, 15 bp, Homo sapiens
ttcaaagcttgtaga

SEQ ID NO: 1872422 - DNA, 15 bp, Homo sapiens
tcaaagcttgtagaa

SEQ ID NO: 1872423 - DNA, 15 bp, Homo sapiens
caaagcttgtagaat

SEQ ID NO: 1872424 - DNA, 15 bp, Homo sapiens
aaagcttgtagaatt

SEQ ID NO: 1872425 - DNA, 15 bp, Homo sapiens
aagcttgtagaattg

SEQ ID NO: 1872426 - DNA, 15 bp, Homo sapiens
agcttgtagaattga

SEQ ID NO: 1872427 - DNA, 15 bp, Homo sapiens
gcttgtagaattgag

SEQ ID NO: 1872428 - DNA, 15 bp, Homo sapiens
cttgtagaattgagg

SEQ ID NO: 1872429 - DNA, 15 bp, Homo sapiens
ttgtagaattgagga

SEQ ID NO: 1872430 - DNA, 15 bp, Homo sapiens
tgtagaattgaggac

SEQ ID NO: 1872431 - DNA, 15 bp, Homo sapiens
gtagaattgaggaca

SEQ ID NO: 1872432 - DNA, 15 bp, Homo sapiens
tagaattgaggacag

SEQ ID NO: 1872433 - DNA, 15 bp, Homo sapiens
agaattgaggacagg

SEQ ID NO: 1872434 - DNA, 15 bp, Homo sapiens
gaattgaggacaggg

SEQ ID NO: 1872435 - DNA, 15 bp, Homo sapiens
aattgaggacaggga

SEQ ID NO: 1872436 - DNA, 15 bp, Homo sapiens
attgaggacagggaa

SEQ ID NO: 1872437 - DNA, 15 bp, Homo sapiens
ttgaggacagggaat

SEQ ID NO: 1872438 - DNA, 15 bp, Homo sapiens
tgaggacagggaatt

SEQ ID NO: 1872439 - DNA, 15 bp, Homo sapiens
gaggacagggaatta

SEQ ID NO: 1872440 - DNA, 15 bp, Homo sapiens
aggacagggaattac

SEQ ID NO: 1872441 - DNA, 15 bp, Homo sapiens
ggacagggaattaca

SEQ ID NO: 1872442 - DNA, 15 bp, Homo sapiens
gacagggaattacat

SEQ ID NO: 1872443 - DNA, 15 bp, Homo sapiens
acagggaattacatc

SEQ ID NO: 1872444 - DNA, 15 bp, Homo sapiens
cagggaattacatct

SEQ ID NO: 1872445 - DNA, 15 bp, Homo sapiens
agggaattacatcta

SEQ ID NO: 1872446 - DNA, 15 bp, Homo sapiens
gggaattacatctag

SEQ ID NO: 1872447 - DNA, 15 bp, Homo sapiens
ggaattacatctagg

SEQ ID NO: 1872448 - DNA, 15 bp, Homo sapiens
gaattacatctaggg

SEQ ID NO: 1872449 - DNA, 15 bp, Homo sapiens
aattacatctagggt

SEQ ID NO: 1872450 - DNA, 15 bp, Homo sapiens
attacatctagggta

SEQ ID NO: 1872451 - DNA, 15 bp, Homo sapiens
ttacatctagggtaa

SEQ ID NO: 1872452 - DNA, 15 bp, Homo sapiens
tacatctagggtaat

SEQ ID NO: 1872453 - DNA, 15 bp, Homo sapiens
acatctagggtaatg

SEQ ID NO: 1872454 - DNA, 15 bp, Homo sapiens
catctagggtaatgg

SEQ ID NO: 1872455 - DNA, 15 bp, Homo sapiens
atctagggtaatggg

SEQ ID NO: 1872456 - DNA, 15 bp, Homo sapiens
tctagggtaatggga

SEQ ID NO: 1872457 - DNA, 15 bp, Homo sapiens
ctagggtaatgggaa

SEQ ID NO: 1872458 - DNA, 15 bp, Homo sapiens
tagggtaatgggaag

SEQ ID NO: 1872459 - DNA, 15 bp, Homo sapiens
agggtaatgggaagg

SEQ ID NO: 1872460 - DNA, 15 bp, Homo sapiens
gggtaatgggaagga

SEQ ID NO: 1872461 - DNA, 15 bp, Homo sapiens
ggtaatgggaaggag

SEQ ID NO: 1872462 - DNA, 15 bp, Homo sapiens
gtaatgggaaggaga

SEQ ID NO: 1872463 - DNA, 15 bp, Homo sapiens
taatgggaaggagac

SEQ ID NO: 1872464 - DNA, 15 bp, Homo sapiens
aatgggaaggagaca

SEQ ID NO: 1872465 - DNA, 15 bp, Homo sapiens
atgggaaggagacag

SEQ ID NO: 1872466 - DNA, 15 bp, Homo sapiens
tgggaaggagacagg

SEQ ID NO: 1872467 - DNA, 15 bp, Homo sapiens
gggaaggagacagga

SEQ ID NO: 1872468 - DNA, 15 bp, Homo sapiens
ggaaggagacaggat

SEQ ID NO: 1872469 - DNA, 15 bp, Homo sapiens
gaaggagacaggatt

SEQ ID NO: 1872470 - DNA, 15 bp, Homo sapiens
aaggagacaggatta

SEQ ID NO: 1872471 - DNA, 15 bp, Homo sapiens
aggagacaggattag

SEQ ID NO: 1872472 - DNA, 15 bp, Homo sapiens
ggagacaggattaga

SEQ ID NO: 1872473 - DNA, 15 bp, Homo sapiens
gagacaggattagag

SEQ ID NO: 1872474 - DNA, 15 bp, Homo sapiens
agacaggattagagg

SEQ ID NO: 1872475 - DNA, 15 bp, Homo sapiens
gacaggattagagga

SEQ ID NO: 1872476 - DNA, 15 bp, Homo sapiens
acaggattagaggat

SEQ ID NO: 1872477 - DNA, 15 bp, Homo sapiens
caggattagaggatg

SEQ ID NO: 1872478 - DNA, 15 bp, Homo sapiens
aggattagaggatgg

SEQ ID NO: 1872479 - DNA, 15 bp, Homo sapiens
ggattagaggatgga

SEQ ID NO: 1872480 - DNA, 15 bp, Homo sapiens
gattagaggatggat

SEQ ID NO: 1872481 - DNA, 15 bp, Homo sapiens
attagaggatggatg

SEQ ID NO: 1872482 - DNA, 15 bp, Homo sapiens
ttagaggatggatgg

SEQ ID NO: 1872483 - DNA, 15 bp, Homo sapiens
tagaggatggatgga

SEQ ID NO: 1872484 - DNA, 15 bp, Homo sapiens
agaggatggatggat

SEQ ID NO: 1872485 - DNA, 15 bp, Homo sapiens
gaggatggatggatg

SEQ ID NO: 1872486 - DNA, 15 bp, Homo sapiens
aggatggatggatgg

SEQ ID NO: 1872487 - DNA, 15 bp, Homo sapiens
ggatggatggatgga

SEQ ID NO: 1872488 - DNA, 15 bp, Homo sapiens
gatggatggatggag

SEQ ID NO: 1872489 - DNA, 15 bp, Homo sapiens
atggatggatggaga

SEQ ID NO: 1872490 - DNA, 15 bp, Homo sapiens
tggatggatggagaa

SEQ ID NO: 1872491 - DNA, 15 bp, Homo sapiens
ggatggatggagaag

SEQ ID NO: 1872492 - DNA, 15 bp, Homo sapiens
gatggatggagaagt

SEQ ID NO: 1872493 - DNA, 15 bp, Homo sapiens
atggatggagaagtt

SEQ ID NO: 1872494 - DNA, 15 bp, Homo sapiens
tggatggagaagttt

SEQ ID NO: 1872495 - DNA, 15 bp, Homo sapiens
ggatggagaagttta

SEQ ID NO: 1872496 - DNA, 15 bp, Homo sapiens
gatggagaagtttag

SEQ ID NO: 1872497 - DNA, 15 bp, Homo sapiens
atggagaagtttagc

SEQ ID NO: 1872498 - DNA, 15 bp, Homo sapiens
tggagaagtttagcc

SEQ ID NO: 1872499 - DNA, 15 bp, Homo sapiens
ggagaagtttagccc

SEQ ID NO: 1872500 - DNA, 15 bp, Homo sapiens
gagaagtttagcccc

SEQ ID NO: 1872501 - DNA, 15 bp, Homo sapiens
agaagtttagcccca

SEQ ID NO: 1872502 - DNA, 15 bp, Homo sapiens
gaagtttagccccaa

SEQ ID NO: 1872503 - DNA, 15 bp, Homo sapiens
aagtttagccccaag

SEQ ID NO: 1872504 - DNA, 15 bp, Homo sapiens
agtttagccccaaga

SEQ ID NO: 1872505 - DNA, 15 bp, Homo sapiens
gtttagccccaagaa

SEQ ID NO: 1872506 - DNA, 15 bp, Homo sapiens
tttagccccaagaac

SEQ ID NO: 1872507 - DNA, 15 bp, Homo sapiens
ttagccccaagaacc

SEQ ID NO: 1872508 - DNA, 15 bp, Homo sapiens
tagccccaagaacct

SEQ ID NO: 1872509 - DNA, 15 bp, Homo sapiens
agccccaagaacctg

SEQ ID NO: 1872510 - DNA, 15 bp, Homo sapiens
gccccaagaacctgg

SEQ ID NO: 1872511 - DNA, 15 bp, Homo sapiens
ccccaagaacctggg

SEQ ID NO: 1872512 - DNA, 15 bp, Homo sapiens
cccaagaacctgggt

SEQ ID NO: 1872513 - DNA, 15 bp, Homo sapiens
ccaagaacctgggtc

SEQ ID NO: 1872514 - DNA, 15 bp, Homo sapiens
caagaacctgggtcc

SEQ ID NO: 1872515 - DNA, 15 bp, Homo sapiens
aagaacctgggtcca

SEQ ID NO: 1872516 - DNA, 15 bp, Homo sapiens
agaacctgggtccat

SEQ ID NO: 1872517 - DNA, 15 bp, Homo sapiens
gaacctgggtccatc

SEQ ID NO: 1872518 - DNA, 15 bp, Homo sapiens
aacctgggtccatct

SEQ ID NO: 1872519 - DNA, 15 bp, Homo sapiens
acctgggtccatctg

SEQ ID NO: 1872520 - DNA, 15 bp, Homo sapiens
cctgggtccatctgg

SEQ ID NO: 1872521 - DNA, 15 bp, Homo sapiens
ctgggtccatctggt

SEQ ID NO: 1872522 - DNA, 15 bp, Homo sapiens
tgggtccatctggtt

SEQ ID NO: 1872523 - DNA, 15 bp, Homo sapiens
gggtccatctggttc

SEQ ID NO: 1872524 - DNA, 15 bp, Homo sapiens
ggtccatctggttct

SEQ ID NO: 1872525 - DNA, 15 bp, Homo sapiens
gtccatctggttctt

SEQ ID NO: 1872526 - DNA, 15 bp, Homo sapiens
tccatctggttcttg

SEQ ID NO: 1872527 - DNA, 15 bp, Homo sapiens
ccatctggttcttgc

SEQ ID NO: 1872528 - DNA, 15 bp, Homo sapiens
catctggttcttgcc

SEQ ID NO: 1872529 - DNA, 15 bp, Homo sapiens
atctggttcttgcca

SEQ ID NO: 1872530 - DNA, 15 bp, Homo sapiens
tctggttcttgccaa

SEQ ID NO: 1872531 - DNA, 15 bp, Homo sapiens
ctggttcttgccaac

SEQ ID NO: 1872532 - DNA, 15 bp, Homo sapiens
tggttcttgccaact

SEQ ID NO: 1872533 - DNA, 15 bp, Homo sapiens
ggttcttgccaactc

SEQ ID NO: 1872534 - DNA, 15 bp, Homo sapiens
gttcttgccaactcc

SEQ ID NO: 1872535 - DNA, 15 bp, Homo sapiens
ttcttgccaactcct

SEQ ID NO: 1872536 - DNA, 15 bp, Homo sapiens
tcttgccaactcctc

SEQ ID NO: 1872537 - DNA, 15 bp, Homo sapiens
cttgccaactcctca

SEQ ID NO: 1872538 - DNA, 15 bp, Homo sapiens
ttgccaactcctcac

SEQ ID NO: 1872539 - DNA, 15 bp, Homo sapiens
tgccaactcctcact

SEQ ID NO: 1872540 - DNA, 15 bp, Homo sapiens
gccaactcctcactt

SEQ ID NO: 1872541 - DNA, 15 bp, Homo sapiens
ccaactcctcacttg

SEQ ID NO: 1872542 - DNA, 15 bp, Homo sapiens
caactcctcacttgg

SEQ ID NO: 1872543 - DNA, 15 bp, Homo sapiens
aactcctcacttggt

SEQ ID NO: 1872544 - DNA, 15 bp, Homo sapiens
actcctcacttggta

SEQ ID NO: 1872545 - DNA, 15 bp, Homo sapiens
ctcctcacttggtat

SEQ ID NO: 1872546 - DNA, 15 bp, Homo sapiens
tcctcacttggtatt

SEQ ID NO: 1872547 - DNA, 15 bp, Homo sapiens
cctcacttggtatta

SEQ ID NO: 1872548 - DNA, 15 bp, Homo sapiens
ctcacttggtattaa

SEQ ID NO: 1872549 - DNA, 15 bp, Homo sapiens
tcacttggtattaaa

SEQ ID NO: 1872550 - DNA, 15 bp, Homo sapiens
cacttggtattaaat

SEQ ID NO: 1872551 - DNA, 15 bp, Homo sapiens
acttggtattaaatc

SEQ ID NO: 1872552 - DNA, 15 bp, Homo sapiens
cttggtattaaatcc

SEQ ID NO: 1872553 - DNA, 15 bp, Homo sapiens
ttggtattaaatcct

SEQ ID NO: 1872554 - DNA, 15 bp, Homo sapiens
tggtattaaatccta

SEQ ID NO: 1872555 - DNA, 15 bp, Homo sapiens
ggtattaaatcctaa

SEQ ID NO: 1872556 - DNA, 15 bp, Homo sapiens
gtattaaatcctaag

SEQ ID NO: 1872557 - DNA, 15 bp, Homo sapiens
tattaaatcctaagc

SEQ ID NO: 1872558 - DNA, 15 bp, Homo sapiens
attaaatcctaagcc

SEQ ID NO: 1872559 - DNA, 15 bp, Homo sapiens
ttaaatcctaagcct

SEQ ID NO: 1872560 - DNA, 15 bp, Homo sapiens
taaatcctaagccta

SEQ ID NO: 1872561 - DNA, 15 bp, Homo sapiens
aaatcctaagcctac

SEQ ID NO: 1872562 - DNA, 15 bp, Homo sapiens
aatcctaagcctact

SEQ ID NO: 1872563 - DNA, 15 bp, Homo sapiens
atcctaagcctactg

SEQ ID NO: 1872564 - DNA, 15 bp, Homo sapiens
tcctaagcctactgt

SEQ ID NO: 1872565 - DNA, 15 bp, Homo sapiens
cctaagcctactgta

SEQ ID NO: 1872566 - DNA, 15 bp, Homo sapiens
ctaagcctactgtac

SEQ ID NO: 1872567 - DNA, 15 bp, Homo sapiens
taagcctactgtacc

SEQ ID NO: 1872568 - DNA, 15 bp, Homo sapiens
aagcctactgtaccc

SEQ ID NO: 1872569 - DNA, 15 bp, Homo sapiens
agcctactgtacccc

SEQ ID NO: 1872570 - DNA, 15 bp, Homo sapiens
gcctactgtacccct

SEQ ID NO: 1872571 - DNA, 15 bp, Homo sapiens
cctactgtacccctg

SEQ ID NO: 1872572 - DNA, 15 bp, Homo sapiens
ctactgtacccctgc

SEQ ID NO: 1872573 - DNA, 15 bp, Homo sapiens
tactgtacccctgct

SEQ ID NO: 1872574 - DNA, 15 bp, Homo sapiens
actgtacccctgcta

SEQ ID NO: 1872575 - DNA, 15 bp, Homo sapiens
ctgtacccctgctag

SEQ ID NO: 1872576 - DNA, 15 bp, Homo sapiens
tgtacccctgctaga

SEQ ID NO: 1872577 - DNA, 15 bp, Homo sapiens
gtacccctgctagac

SEQ ID NO: 1872578 - DNA, 15 bp, Homo sapiens
tacccctgctagact

SEQ ID NO: 1872579 - DNA, 15 bp, Homo sapiens
acccctgctagactg

SEQ ID NO: 1872580 - DNA, 15 bp, Homo sapiens
cccctgctagactgg

SEQ ID NO: 1872581 - DNA, 15 bp, Homo sapiens
ccctgctagactgga

SEQ ID NO: 1872582 - DNA, 15 bp, Homo sapiens
cctgctagactggat

SEQ ID NO: 1872583 - DNA, 15 bp, Homo sapiens
ctgctagactggatt

SEQ ID NO: 1872584 - DNA, 15 bp, Homo sapiens
tgctagactggattc

SEQ ID NO: 1872585 - DNA, 15 bp, Homo sapiens
gctagactggattcc

SEQ ID NO: 1872586 - DNA, 15 bp, Homo sapiens
ctagactggattcca

SEQ ID NO: 1872587 - DNA, 15 bp, Homo sapiens
tagactggattccag

SEQ ID NO: 1872588 - DNA, 15 bp, Homo sapiens
agactggattccagg

SEQ ID NO: 1872589 - DNA, 15 bp, Homo sapiens
gactggattccagga

SEQ ID NO: 1872590 - DNA, 15 bp, Homo sapiens
actggattccaggag

SEQ ID NO: 1872591 - DNA, 15 bp, Homo sapiens
ctggattccaggaga

SEQ ID NO: 1872592 - DNA, 15 bp, Homo sapiens
tggattccaggagaa

SEQ ID NO: 1872593 - DNA, 15 bp, Homo sapiens
gattccaggagaagt

SEQ ID NO: 1872594 - DNA, 15 bp, Homo sapiens
attccaggagaagtt

SEQ ID NO: 1872595 - DNA, 15 bp, Homo sapiens
ttccaggagaagttt

SEQ ID NO: 1872596 - DNA, 15 bp, Homo sapiens
tccaggagaagtttc

SEQ ID NO: 1872597 - DNA, 15 bp, Homo sapiens
ccaggagaagtttcc

SEQ ID NO: 1872598 - DNA, 15 bp, Homo sapiens
caggagaagtttcct

SEQ ID NO: 1872599 - DNA, 15 bp, Homo sapiens
aggagaagtttcctg

SEQ ID NO: 1872600 - DNA, 15 bp, Homo sapiens
ggagaagtttcctgg

SEQ ID NO: 1872601 - DNA, 15 bp, Homo sapiens
gagaagtttcctggg

SEQ ID NO: 1872602 - DNA, 15 bp, Homo sapiens
agaagtttcctgggg

SEQ ID NO: 1872603 - DNA, 15 bp, Homo sapiens
gaagtttcctggggg

SEQ ID NO: 1872604 - DNA, 15 bp, Homo sapiens
aagtttcctgggggc

SEQ ID NO: 1872605 - DNA, 15 bp, Homo sapiens
agtttcctgggggct

SEQ ID NO: 1872606 - DNA, 15 bp, Homo sapiens
gtttcctgggggctg

SEQ ID NO: 1872607 - DNA, 15 bp, Homo sapiens
tttcctgggggctga

SEQ ID NO: 1872608 - DNA, 15 bp, Homo sapiens
ttcctgggggctgag

SEQ ID NO: 1872609 - DNA, 15 bp, Homo sapiens
tcctgggggctgaga

SEQ ID NO: 1872610 - DNA, 15 bp, Homo sapiens
cctgggggctgagac

SEQ ID NO: 1872611 - DNA, 15 bp, Homo sapiens
ctgggggctgagacc

SEQ ID NO: 1872612 - DNA, 15 bp, Homo sapiens
tgggggctgagaccc

SEQ ID NO: 1872613 - DNA, 15 bp, Homo sapiens
gggggctgagaccct

SEQ ID NO: 1872614 - DNA, 15 bp, Homo sapiens
ggggctgagaccctg

SEQ ID NO: 1872615 - DNA, 15 bp, Homo sapiens
gggctgagaccctgg

SEQ ID NO: 1872616 - DNA, 15 bp, Homo sapiens
ggctgagaccctgga

SEQ ID NO: 1872617 - DNA, 15 bp, Homo sapiens
ctgagaccctggaag

SEQ ID NO: 1872618 - DNA, 15 bp, Homo sapiens
tgagaccctggaagg

SEQ ID NO: 1872619 - DNA, 15 bp, Homo sapiens
gagaccctggaaggg

SEQ ID NO: 1872620 - DNA, 15 bp, Homo sapiens
agaccctggaagggt

SEQ ID NO: 1872621 - DNA, 15 bp, Homo sapiens
gaccctggaagggtg

SEQ ID NO: 1872622 - DNA, 15 bp, Homo sapiens
accctggaagggtga

SEQ ID NO: 1872623 - DNA, 15 bp, Homo sapiens
ccctggaagggtgat

SEQ ID NO: 1872624 - DNA, 15 bp, Homo sapiens
cctggaagggtgatg

SEQ ID NO: 1872625 - DNA, 15 bp, Homo sapiens
ctggaagggtgatga

SEQ ID NO: 1872626 - DNA, 15 bp, Homo sapiens
tggaagggtgatgaa

SEQ ID NO: 1872627 - DNA, 15 bp, Homo sapiens
ggaagggtgatgaag

SEQ ID NO: 1872628 - DNA, 15 bp, Homo sapiens
gaagggtgatgaagg

SEQ ID NO: 1872629 - DNA, 15 bp, Homo sapiens
aagggtgatgaaggt

SEQ ID NO: 1872630 - DNA, 15 bp, Homo sapiens
agggtgatgaaggtg

SEQ ID NO: 1872631 - DNA, 15 bp, Homo sapiens
gggtgatgaaggtgg

SEQ ID NO: 1872632 - DNA, 15 bp, Homo sapiens
ggtgatgaaggtggg

SEQ ID NO: 1872633 - DNA, 15 bp, Homo sapiens
gtgatgaaggtgggg

SEQ ID NO: 1872634 - DNA, 15 bp, Homo sapiens
tgatgaaggtggggg

SEQ ID NO: 1872635 - DNA, 15 bp, Homo sapiens
gatgaaggtgggggt

SEQ ID NO: 1872636 - DNA, 15 bp, Homo sapiens
atgaaggtgggggtt

SEQ ID NO: 1872637 - DNA, 15 bp, Homo sapiens
tgaaggtgggggttg

SEQ ID NO: 1872638 - DNA, 15 bp, Homo sapiens
gaaggtgggggttga

SEQ ID NO: 1872639 - DNA, 15 bp, Homo sapiens
aaggtgggggttgaa

SEQ ID NO: 1872640 - DNA, 15 bp, Homo sapiens
aggtgggggttgaat

SEQ ID NO: 1872641 - DNA, 15 bp, Homo sapiens
ggtgggggttgaatg

SEQ ID NO: 1872642 - DNA, 15 bp, Homo sapiens
gtgggggttgaatgt

SEQ ID NO: 1872643 - DNA, 15 bp, Homo sapiens
tgggggttgaatgtc

SEQ ID NO: 1872644 - DNA, 15 bp, Homo sapiens
gggggttgaatgtca

SEQ ID NO: 1872645 - DNA, 15 bp, Homo sapiens
ggggttgaatgtcag

SEQ ID NO: 1872646 - DNA, 15 bp, Homo sapiens
gggttgaatgtcagt

SEQ ID NO: 1872647 - DNA, 15 bp, Homo sapiens
ggttgaatgtcagtg

SEQ ID NO: 1872648 - DNA, 15 bp, Homo sapiens
gttgaatgtcagtgg

SEQ ID NO: 1872649 - DNA, 15 bp, Homo sapiens
ttgaatgtcagtggt

SEQ ID NO: 1872650 - DNA, 15 bp, Homo sapiens
tgaatgtcagtggtg

SEQ ID NO: 1872651 - DNA, 15 bp, Homo sapiens
gaatgtcagtggtgt

SEQ ID NO: 1872652 - DNA, 15 bp, Homo sapiens
aatgtcagtggtgtt

SEQ ID NO: 1872653 - DNA, 15 bp, Homo sapiens
atgtcagtggtgttc

SEQ ID NO: 1872654 - DNA, 15 bp, Homo sapiens
tgtcagtggtgttca

SEQ ID NO: 1872655 - DNA, 15 bp, Homo sapiens
gtcagtggtgttcag

SEQ ID NO: 1872656 - DNA, 15 bp, Homo sapiens
tcagtggtgttcaga

SEQ ID NO: 1872657 - DNA, 15 bp, Homo sapiens
cagtggtgttcagag

SEQ ID NO: 1872658 - DNA, 15 bp, Homo sapiens
agtggtgttcagagg

SEQ ID NO: 1872659 - DNA, 15 bp, Homo sapiens
gtggtgttcagaggg

SEQ ID NO: 1872660 - DNA, 15 bp, Homo sapiens
tggtgttcagaggga

SEQ ID NO: 1872661 - DNA, 15 bp, Homo sapiens
ggtgttcagagggac

SEQ ID NO: 1872662 - DNA, 15 bp, Homo sapiens
gtgttcagagggact

SEQ ID NO: 1872663 - DNA, 15 bp, Homo sapiens
tgttcagagggacta

SEQ ID NO: 1872664 - DNA, 15 bp, Homo sapiens
gttcagagggactag

SEQ ID NO: 1872665 - DNA, 15 bp, Homo sapiens
ttcagagggactagg

SEQ ID NO: 1872666 - DNA, 15 bp, Homo sapiens
tcagagggactaggc

SEQ ID NO: 1872667 - DNA, 15 bp, Homo sapiens
cagagggactaggcc

SEQ ID NO: 1872668 - DNA, 15 bp, Homo sapiens
agagggactaggcca

SEQ ID NO: 1872669 - DNA, 15 bp, Homo sapiens
gagggactaggccac

SEQ ID NO: 1872670 - DNA, 15 bp, Homo sapiens
agggactaggccacc

SEQ ID NO: 1872671 - DNA, 15 bp, Homo sapiens
gggactaggccacct

SEQ ID NO: 1872672 - DNA, 15 bp, Homo sapiens
ggactaggccacctc

SEQ ID NO: 1872673 - DNA, 15 bp, Homo sapiens
gactaggccacctcc

SEQ ID NO: 1872674 - DNA, 15 bp, Homo sapiens
actaggccacctcct

SEQ ID NO: 1872675 - DNA, 15 bp, Homo sapiens
ctaggccacctcctg

SEQ ID NO: 1872676 - DNA, 15 bp, Homo sapiens
taggccacctcctgg

SEQ ID NO: 1872677 - DNA, 15 bp, Homo sapiens
aggccacctcctggc

SEQ ID NO: 1872678 - DNA, 15 bp, Homo sapiens
ggccacctcctggcg

SEQ ID NO: 1872679 - DNA, 15 bp, Homo sapiens
gccacctcctggcgc

SEQ ID NO: 1872680 - DNA, 15 bp, Homo sapiens
ccacctcctggcgcc

SEQ ID NO: 1872681 - DNA, 15 bp, Homo sapiens
cacctcctggcgccc

SEQ ID NO: 1872682 - DNA, 15 bp, Homo sapiens
acctcctggcgccct

SEQ ID NO: 1872683 - DNA, 15 bp, Homo sapiens
cctcctggcgccctc

SEQ ID NO: 1872684 - DNA, 15 bp, Homo sapiens
ctcctggcgccctcc

SEQ ID NO: 1872685 - DNA, 15 bp, Homo sapiens
tcctggcgccctccc

SEQ ID NO: 1872686 - DNA, 15 bp, Homo sapiens
cctggcgccctccca

SEQ ID NO: 1872687 - DNA, 15 bp, Homo sapiens
ctggcgccctcccaa

SEQ ID NO: 1872688 - DNA, 15 bp, Homo sapiens
tggcgccctcccaaa

SEQ ID NO: 1872689 - DNA, 15 bp, Homo sapiens
ggcgccctcccaaat

SEQ ID NO: 1872690 - DNA, 15 bp, Homo sapiens
gcgccctcccaaata

SEQ ID NO: 1872691 - DNA, 15 bp, Homo sapiens
cgccctcccaaatac

SEQ ID NO: 1872692 - DNA, 15 bp, Homo sapiens
gccctcccaaatact

SEQ ID NO: 1872693 - DNA, 15 bp, Homo sapiens
ccctcccaaatactg

SEQ ID NO: 1872694 - DNA, 15 bp, Homo sapiens
cctcccaaatactgt

SEQ ID NO: 1872695 - DNA, 15 bp, Homo sapiens
ctcccaaatactgtc

SEQ ID NO: 1872696 - DNA, 15 bp, Homo sapiens
tcccaaatactgtcc

SEQ ID NO: 1872697 - DNA, 15 bp, Homo sapiens
cccaaatactgtcct

SEQ ID NO: 1872698 - DNA, 15 bp, Homo sapiens
ccaaatactgtcctg

SEQ ID NO: 1872699 - DNA, 15 bp, Homo sapiens
caaatactgtcctgg

SEQ ID NO: 1872700 - DNA, 15 bp, Homo sapiens
aaatactgtcctggg

SEQ ID NO: 1872701 - DNA, 15 bp, Homo sapiens
aatactgtcctgggc

SEQ ID NO: 1872702 - DNA, 15 bp, Homo sapiens
atactgtcctgggcc

SEQ ID NO: 1872703 - DNA, 15 bp, Homo sapiens
tactgtcctgggcca

SEQ ID NO: 1872704 - DNA, 15 bp, Homo sapiens
actgtcctgggccac

SEQ ID NO: 1872705 - DNA, 15 bp, Homo sapiens
ctgtcctgggccaca

SEQ ID NO: 1872706 - DNA, 15 bp, Homo sapiens
tgtcctgggccacag

SEQ ID NO: 1872707 - DNA, 15 bp, Homo sapiens
gtcctgggccacaga

SEQ ID NO: 1872708 - DNA, 15 bp, Homo sapiens
tcctgggccacagaa

SEQ ID NO: 1872709 - DNA, 15 bp, Homo sapiens
cctgggccacagaag

SEQ ID NO: 1872710 - DNA, 15 bp, Homo sapiens
ctgggccacagaagt

SEQ ID NO: 1872711 - DNA, 15 bp, Homo sapiens
tgggccacagaagtc

SEQ ID NO: 1872712 - DNA, 15 bp, Homo sapiens
gggccacagaagtca

SEQ ID NO: 1872713 - DNA, 15 bp, Homo sapiens
ggccacagaagtcac

SEQ ID NO: 1872714 - DNA, 15 bp, Homo sapiens
gccacagaagtcaca

SEQ ID NO: 1872715 - DNA, 15 bp, Homo sapiens
ccacagaagtcacag

SEQ ID NO: 1872716 - DNA, 15 bp, Homo sapiens
cacagaagtcacaga

SEQ ID NO: 1872717 - DNA, 15 bp, Homo sapiens
acagaagtcacagag

SEQ ID NO: 1872718 - DNA, 15 bp, Homo sapiens
cagaagtcacagagt

SEQ ID NO: 1872719 - DNA, 15 bp, Homo sapiens
agaagtcacagagta

SEQ ID NO: 1872720 - DNA, 15 bp, Homo sapiens
gaagtcacagagtac

SEQ ID NO: 1872721 - DNA, 15 bp, Homo sapiens
aagtcacagagtaca

SEQ ID NO: 1872722 - DNA, 15 bp, Homo sapiens
agtcacagagtacaa

SEQ ID NO: 1872723 - DNA, 15 bp, Homo sapiens
gtcacagagtacaag

SEQ ID NO: 1872724 - DNA, 15 bp, Homo sapiens
tcacagagtacaagt

SEQ ID NO: 1872725 - DNA, 15 bp, Homo sapiens
cacagagtacaagtt

SEQ ID NO: 1872726 - DNA, 15 bp, Homo sapiens
acagagtacaagttc

SEQ ID NO: 1872727 - DNA, 15 bp, Homo sapiens
cagagtacaagttcc

SEQ ID NO: 1872728 - DNA, 15 bp, Homo sapiens
agagtacaagttcca

SEQ ID NO: 1872729 - DNA, 15 bp, Homo sapiens
gagtacaagttccac

SEQ ID NO: 1872730 - DNA, 15 bp, Homo sapiens
agtacaagttccact

SEQ ID NO: 1872731 - DNA, 15 bp, Homo sapiens
gtacaagttccactc

SEQ ID NO: 1872732 - DNA, 15 bp, Homo sapiens
tacaagttccactct

SEQ ID NO: 1872733 - DNA, 15 bp, Homo sapiens
acaagttccactctg

SEQ ID NO: 1872734 - DNA, 15 bp, Homo sapiens
caagttccactctgc

SEQ ID NO: 1872735 - DNA, 15 bp, Homo sapiens
aagttccactctgca

SEQ ID NO: 1872736 - DNA, 15 bp, Homo sapiens
agttccactctgcaa

SEQ ID NO: 1872737 - DNA, 15 bp, Homo sapiens
gttccactctgcaat

SEQ ID NO: 1872738 - DNA, 15 bp, Homo sapiens
ttccactctgcaata

SEQ ID NO: 1872739 - DNA, 15 bp, Homo sapiens
tccactctgcaatat

SEQ ID NO: 1872740 - DNA, 15 bp, Homo sapiens
ccactctgcaatatc

SEQ ID NO: 1872741 - DNA, 15 bp, Homo sapiens
cactctgcaatatcg

SEQ ID NO: 1872742 - DNA, 15 bp, Homo sapiens
actctgcaatatcgt

SEQ ID NO: 1872743 - DNA, 15 bp, Homo sapiens
ctctgcaatatcgtc

SEQ ID NO: 1872744 - DNA, 15 bp, Homo sapiens
tctgcaatatcgtcc

SEQ ID NO: 1872745 - DNA, 15 bp, Homo sapiens
ctgcaatatcgtccc

SEQ ID NO: 1872746 - DNA, 15 bp, Homo sapiens
tgcaatatcgtccct

SEQ ID NO: 1872747 - DNA, 15 bp, Homo sapiens
gcaatatcgtccctt

SEQ ID NO: 1872748 - DNA, 15 bp, Homo sapiens
caatatcgtcccttg

SEQ ID NO: 1872749 - DNA, 15 bp, Homo sapiens
aatatcgtcccttgt

SEQ ID NO: 1872750 - DNA, 15 bp, Homo sapiens
atatcgtcccttgtc

SEQ ID NO: 1872751 - DNA, 15 bp, Homo sapiens
tatcgtcccttgtct

SEQ ID NO: 1872752 - DNA, 15 bp, Homo sapiens
atcgtcccttgtctg

SEQ ID NO: 1872753 - DNA, 15 bp, Homo sapiens
tcgtcccttgtctgc

SEQ ID NO: 1872754 - DNA, 15 bp, Homo sapiens
cgtcccttgtctgct

SEQ ID NO: 1872755 - DNA, 15 bp, Homo sapiens
gtcccttgtctgctg

SEQ ID NO: 1872756 - DNA, 15 bp, Homo sapiens
tcccttgtctgctgg

SEQ ID NO: 1872757 - DNA, 15 bp, Homo sapiens
cccttgtctgctggg

SEQ ID NO: 1872758 - DNA, 15 bp, Homo sapiens
ccttgtctgctggga

SEQ ID NO: 1872759 - DNA, 15 bp, Homo sapiens
cttgtctgctgggac

SEQ ID NO: 1872760 - DNA, 15 bp, Homo sapiens
ttgtctgctgggact

SEQ ID NO: 1872761 - DNA, 15 bp, Homo sapiens
tgtctgctgggactt

SEQ ID NO: 1872762 - DNA, 15 bp, Homo sapiens
gtctgctgggactta

SEQ ID NO: 1872763 - DNA, 15 bp, Homo sapiens
tctgctgggacttaa

SEQ ID NO: 1872764 - DNA, 15 bp, Homo sapiens
ctgctgggacttaag

SEQ ID NO: 1872765 - DNA, 15 bp, Homo sapiens
tgctgggacttaagt

SEQ ID NO: 1872766 - DNA, 15 bp, Homo sapiens
gctgggacttaagtg

SEQ ID NO: 1872767 - DNA, 15 bp, Homo sapiens
ctgggacttaagtga

SEQ ID NO: 1872768 - DNA, 15 bp, Homo sapiens
tgggacttaagtgac

SEQ ID NO: 1872769 - DNA, 15 bp, Homo sapiens
gggacttaagtgaca

SEQ ID NO: 1872770 - DNA, 15 bp, Homo sapiens
ggacttaagtgacag

SEQ ID NO: 1872771 - DNA, 15 bp, Homo sapiens
gacttaagtgacagt

SEQ ID NO: 1872772 - DNA, 15 bp, Homo sapiens
acttaagtgacagtt

SEQ ID NO: 1872773 - DNA, 15 bp, Homo sapiens
cttaagtgacagttc

SEQ ID NO: 1872774 - DNA, 15 bp, Homo sapiens
ttaagtgacagttca

SEQ ID NO: 1872775 - DNA, 15 bp, Homo sapiens
taagtgacagttcac

SEQ ID NO: 1872776 - DNA, 15 bp, Homo sapiens
aagtgacagttcact

SEQ ID NO: 1872777 - DNA, 15 bp, Homo sapiens
agtgacagttcacta

SEQ ID NO: 1872778 - DNA, 15 bp, Homo sapiens
gtgacagttcactag

SEQ ID NO: 1872779 - DNA, 15 bp, Homo sapiens
tgacagttcactagt

SEQ ID NO: 1872780 - DNA, 15 bp, Homo sapiens
gacagttcactagtc

SEQ ID NO: 1872781 - DNA, 15 bp, Homo sapiens
acagttcactagtcc

SEQ ID NO: 1872782 - DNA, 15 bp, Homo sapiens
cagttcactagtccc

SEQ ID NO: 1872783 - DNA, 15 bp, Homo sapiens
agttcactagtcccc

SEQ ID NO: 1872784 - DNA, 15 bp, Homo sapiens
gttcactagtcccct

SEQ ID NO: 1872785 - DNA, 15 bp, Homo sapiens
ttcactagtcccctt

SEQ ID NO: 1872786 - DNA, 15 bp, Homo sapiens
tcactagtccccttc

SEQ ID NO: 1872787 - DNA, 15 bp, Homo sapiens
cactagtccccttcc

SEQ ID NO: 1872788 - DNA, 15 bp, Homo sapiens
actagtccccttccc

SEQ ID NO: 1872789 - DNA, 15 bp, Homo sapiens
ctagtccccttcccc

SEQ ID NO: 1872790 - DNA, 15 bp, Homo sapiens
tagtccccttcccca

SEQ ID NO: 1872791 - DNA, 15 bp, Homo sapiens
agtccccttccccag

SEQ ID NO: 1872792 - DNA, 15 bp, Homo sapiens
gtccccttccccagc

SEQ ID NO: 1872793 - DNA, 15 bp, Homo sapiens
tccccttccccagcc

SEQ ID NO: 1872794 - DNA, 15 bp, Homo sapiens
ccccttccccagcct

SEQ ID NO: 1872795 - DNA, 15 bp, Homo sapiens
cccttccccagccta

SEQ ID NO: 1872796 - DNA, 15 bp, Homo sapiens
ccttccccagcctag

SEQ ID NO: 1872797 - DNA, 15 bp, Homo sapiens
cttccccagcctagc

SEQ ID NO: 1872798 - DNA, 15 bp, Homo sapiens
ttccccagcctagct

SEQ ID NO: 1872799 - DNA, 15 bp, Homo sapiens
tccccagcctagctc

SEQ ID NO: 1872800 - DNA, 15 bp, Homo sapiens
ccccagcctagctct

SEQ ID NO: 1872801 - DNA, 15 bp, Homo sapiens
cccagcctagctctg

SEQ ID NO: 1872802 - DNA, 15 bp, Homo sapiens
ccagcctagctctgg

SEQ ID NO: 1872803 - DNA, 15 bp, Homo sapiens
cagcctagctctggt

SEQ ID NO: 1872804 - DNA, 15 bp, Homo sapiens
agcctagctctggtg

SEQ ID NO: 1872805 - DNA, 15 bp, Homo sapiens
gcctagctctggtgg

SEQ ID NO: 1872806 - DNA, 15 bp, Homo sapiens
cctagctctggtggc

SEQ ID NO: 1872807 - DNA, 15 bp, Homo sapiens
ctagctctggtggca

SEQ ID NO: 1872808 - DNA, 15 bp, Homo sapiens
tagctctggtggcac

SEQ ID NO: 1872809 - DNA, 15 bp, Homo sapiens
agctctggtggcact

SEQ ID NO: 1872810 - DNA, 15 bp, Homo sapiens
gctctggtggcactt

SEQ ID NO: 1872811 - DNA, 15 bp, Homo sapiens
ctctggtggcacttg

SEQ ID NO: 1872812 - DNA, 15 bp, Homo sapiens
tctggtggcacttgc

SEQ ID NO: 1872813 - DNA, 15 bp, Homo sapiens
ctggtggcacttgca

SEQ ID NO: 1872814 - DNA, 15 bp, Homo sapiens
tggtggcacttgcag

SEQ ID NO: 1872815 - DNA, 15 bp, Homo sapiens
ggtggcacttgcagt

SEQ ID NO: 1872816 - DNA, 15 bp, Homo sapiens
gtggcacttgcagtc

SEQ ID NO: 1872817 - DNA, 15 bp, Homo sapiens
tggcacttgcagtca

SEQ ID NO: 1872818 - DNA, 15 bp, Homo sapiens
ggcacttgcagtcaa

SEQ ID NO: 1872819 - DNA, 15 bp, Homo sapiens
gcacttgcagtcaaa

SEQ ID NO: 1872820 - DNA, 15 bp, Homo sapiens
cacttgcagtcaaaa

SEQ ID NO: 1872821 - DNA, 15 bp, Homo sapiens
acttgcagtcaaaat

SEQ ID NO: 1872822 - DNA, 15 bp, Homo sapiens
cttgcagtcaaaatg

SEQ ID NO: 1872823 - DNA, 15 bp, Homo sapiens
ttgcagtcaaaatgc

SEQ ID NO: 1872824 - DNA, 15 bp, Homo sapiens
tgcagtcaaaatgcc

SEQ ID NO: 1872825 - DNA, 15 bp, Homo sapiens
gcagtcaaaatgcct

SEQ ID NO: 1872826 - DNA, 15 bp, Homo sapiens
cagtcaaaatgcctc

SEQ ID NO: 1872827 - DNA, 15 bp, Homo sapiens
agtcaaaatgcctct

SEQ ID NO: 1872828 - DNA, 15 bp, Homo sapiens
gtcaaaatgcctctt

SEQ ID NO: 1872829 - DNA, 15 bp, Homo sapiens
tcaaaatgcctcttc

SEQ ID NO: 1872830 - DNA, 15 bp, Homo sapiens
caaaatgcctcttca

SEQ ID NO: 1872831 - DNA, 15 bp, Homo sapiens
aaaatgcctcttcag

SEQ ID NO: 1872832 - DNA, 15 bp, Homo sapiens
aaatgcctcttcagt

SEQ ID NO: 1872833 - DNA, 15 bp, Homo sapiens
aatgcctcttcagtg

SEQ ID NO: 1872834 - DNA, 15 bp, Homo sapiens
atgcctcttcagtgc

SEQ ID NO: 1872835 - DNA, 15 bp, Homo sapiens
tgcctcttcagtgct

SEQ ID NO: 1872836 - DNA, 15 bp, Homo sapiens
gcctcttcagtgctg

SEQ ID NO: 1872837 - DNA, 15 bp, Homo sapiens
cctcttcagtgctgt

SEQ ID NO: 1872838 - DNA, 15 bp, Homo sapiens
ctcttcagtgctgtc

SEQ ID NO: 1872839 - DNA, 15 bp, Homo sapiens
tcttcagtgctgtct

SEQ ID NO: 1872840 - DNA, 15 bp, Homo sapiens
cttcagtgctgtctt

SEQ ID NO: 1872841 - DNA, 15 bp, Homo sapiens
ttcagtgctgtcttt

SEQ ID NO: 1872842 - DNA, 15 bp, Homo sapiens
tcagtgctgtctttg

SEQ ID NO: 1872843 - DNA, 15 bp, Homo sapiens
cagtgctgtctttgc

SEQ ID NO: 1872844 - DNA, 15 bp, Homo sapiens
agtgctgtctttgca

SEQ ID NO: 1872845 - DNA, 15 bp, Homo sapiens
gtgctgtctttgcat

SEQ ID NO: 1872846 - DNA, 15 bp, Homo sapiens
tgctgtctttgcatc

SEQ ID NO: 1872847 - DNA, 15 bp, Homo sapiens
gctgtctttgcatca

SEQ ID NO: 1872848 - DNA, 15 bp, Homo sapiens
ctgtctttgcatcag

SEQ ID NO: 1872849 - DNA, 15 bp, Homo sapiens
tgtctttgcatcagc

SEQ ID NO: 1872850 - DNA, 15 bp, Homo sapiens
gtctttgcatcagcc

SEQ ID NO: 1872851 - DNA, 15 bp, Homo sapiens
tctttgcatcagcct

SEQ ID NO: 1872852 - DNA, 15 bp, Homo sapiens
ctttgcatcagcctg

SEQ ID NO: 1872853 - DNA, 15 bp, Homo sapiens
tttgcatcagcctgc

SEQ ID NO: 1872854 - DNA, 15 bp, Homo sapiens
ttgcatcagcctgcc

SEQ ID NO: 1872855 - DNA, 15 bp, Homo sapiens
tgcatcagcctgcct

SEQ ID NO: 1872856 - DNA, 15 bp, Homo sapiens
gcatcagcctgcctt

SEQ ID NO: 1872857 - DNA, 15 bp, Homo sapiens
catcagcctgccttg

SEQ ID NO: 1872858 - DNA, 15 bp, Homo sapiens
atcagcctgccttgg

SEQ ID NO: 1872859 - DNA, 15 bp, Homo sapiens
tcagcctgccttggt

SEQ ID NO: 1872860 - DNA, 15 bp, Homo sapiens
cagcctgccttggtt

SEQ ID NO: 1872861 - DNA, 15 bp, Homo sapiens
agcctgccttggttc

SEQ ID NO: 1872862 - DNA, 15 bp, Homo sapiens
gcctgccttggttcg

SEQ ID NO: 1872863 - DNA, 15 bp, Homo sapiens
cctgccttggttcgc

SEQ ID NO: 1872864 - DNA, 15 bp, Homo sapiens
ctgccttggttcgct

SEQ ID NO: 1872865 - DNA, 15 bp, Homo sapiens
tgccttggttcgctg

SEQ ID NO: 1872866 - DNA, 15 bp, Homo sapiens
gccttggttcgctgc

SEQ ID NO: 1872867 - DNA, 15 bp, Homo sapiens
ccttggttcgctgct

SEQ ID NO: 1872868 - DNA, 15 bp, Homo sapiens
cttggttcgctgctg

SEQ ID NO: 1872869 - DNA, 15 bp, Homo sapiens
ttggttcgctgctga

SEQ ID NO: 1872870 - DNA, 15 bp, Homo sapiens
tggttcgctgctgaa

SEQ ID NO: 1872871 - DNA, 15 bp, Homo sapiens
ggttcgctgctgaac

SEQ ID NO: 1872872 - DNA, 15 bp, Homo sapiens
gttcgctgctgaacc

SEQ ID NO: 1872873 - DNA, 15 bp, Homo sapiens
ttcgctgctgaaccg

SEQ ID NO: 1872874 - DNA, 15 bp, Homo sapiens
tcgctgctgaaccgt

SEQ ID NO: 1872875 - DNA, 15 bp, Homo sapiens
cgctgctgaaccgtg

SEQ ID NO: 1872876 - DNA, 15 bp, Homo sapiens
gctgctgaaccgtga

SEQ ID NO: 1872877 - DNA, 15 bp, Homo sapiens
ctgctgaaccgtgat

SEQ ID NO: 1872878 - DNA, 15 bp, Homo sapiens
tgctgaaccgtgatc

SEQ ID NO: 1872879 - DNA, 15 bp, Homo sapiens
gctgaaccgtgatct

SEQ ID NO: 1872880 - DNA, 15 bp, Homo sapiens
ctgaaccgtgatctg

SEQ ID NO: 1872881 - DNA, 15 bp, Homo sapiens
tgaaccgtgatctga

SEQ ID NO: 1872882 - DNA, 15 bp, Homo sapiens
gaaccgtgatctgag

SEQ ID NO: 1872883 - DNA, 15 bp, Homo sapiens
aaccgtgatctgagc

SEQ ID NO: 1872884 - DNA, 15 bp, Homo sapiens
accgtgatctgagcc

SEQ ID NO: 1872885 - DNA, 15 bp, Homo sapiens
ccgtgatctgagcca

SEQ ID NO: 1872886 - DNA, 15 bp, Homo sapiens
cgtgatctgagccat

SEQ ID NO: 1872887 - DNA, 15 bp, Homo sapiens
gtgatctgagccatg

SEQ ID NO: 1872888 - DNA, 15 bp, Homo sapiens
gatctgagccatgtt

SEQ ID NO: 1872889 - DNA, 15 bp, Homo sapiens
atctgagccatgttt

SEQ ID NO: 1872890 - DNA, 15 bp, Homo sapiens
tctgagccatgtttt

SEQ ID NO: 1872891 - DNA, 15 bp, Homo sapiens
ctgagccatgtttta

SEQ ID NO: 1872892 - DNA, 15 bp, Homo sapiens
tgagccatgttttag

SEQ ID NO: 1872893 - DNA, 15 bp, Homo sapiens
gagccatgttttaga

SEQ ID NO: 1872894 - DNA, 15 bp, Homo sapiens
agccatgttttagat

SEQ ID NO: 1872895 - DNA, 15 bp, Homo sapiens
gccatgttttagatt

SEQ ID NO: 1872896 - DNA, 15 bp, Homo sapiens
ccatgttttagattt

SEQ ID NO: 1872897 - DNA, 15 bp, Homo sapiens
catgttttagatttg

SEQ ID NO: 1872898 - DNA, 15 bp, Homo sapiens
atgttttagatttgg

SEQ ID NO: 1872899 - DNA, 15 bp, Homo sapiens
tgttttagatttggg

SEQ ID NO: 1872900 - DNA, 15 bp, Homo sapiens
gttttagatttggga

SEQ ID NO: 1872901 - DNA, 15 bp, Homo sapiens
ttttagatttgggaa

SEQ ID NO: 1872902 - DNA, 15 bp, Homo sapiens
tttagatttgggaaa

SEQ ID NO: 1872903 - DNA, 15 bp, Homo sapiens
ttagatttgggaaat

SEQ ID NO: 1872904 - DNA, 15 bp, Homo sapiens
tagatttgggaaatc

SEQ ID NO: 1872905 - DNA, 15 bp, Homo sapiens
agatttgggaaatct

SEQ ID NO: 1872906 - DNA, 15 bp, Homo sapiens
gatttgggaaatctt

SEQ ID NO: 1872907 - DNA, 15 bp, Homo sapiens
atttgggaaatcttg

SEQ ID NO: 1872908 - DNA, 15 bp, Homo sapiens
tttgggaaatcttgc

SEQ ID NO: 1872909 - DNA, 15 bp, Homo sapiens
ttgggaaatcttgca

SEQ ID NO: 1872910 - DNA, 15 bp, Homo sapiens
tgggaaatcttgcac

SEQ ID NO: 1872911 - DNA, 15 bp, Homo sapiens
gggaaatcttgcaca

SEQ ID NO: 1872912 - DNA, 15 bp, Homo sapiens
ggaaatcttgcacaa

SEQ ID NO: 1872913 - DNA, 15 bp, Homo sapiens
gaaatcttgcacaag

SEQ ID NO: 1872914 - DNA, 15 bp, Homo sapiens
aaatcttgcacaaga

SEQ ID NO: 1872915 - DNA, 15 bp, Homo sapiens
aatcttgcacaagag

SEQ ID NO: 1872916 - DNA, 15 bp, Homo sapiens
atcttgcacaagaga

SEQ ID NO: 1872917 - DNA, 15 bp, Homo sapiens
tcttgcacaagagat

SEQ ID NO: 1872918 - DNA, 15 bp, Homo sapiens
cttgcacaagagatg

SEQ ID NO: 1872919 - DNA, 15 bp, Homo sapiens
ttgcacaagagatgg

SEQ ID NO: 1872920 - DNA, 15 bp, Homo sapiens
tgcacaagagatggt

SEQ ID NO: 1872921 - DNA, 15 bp, Homo sapiens
gcacaagagatggtc

SEQ ID NO: 1872922 - DNA, 15 bp, Homo sapiens
cacaagagatggtct

SEQ ID NO: 1872923 - DNA, 15 bp, Homo sapiens
acaagagatggtcta

SEQ ID NO: 1872924 - DNA, 15 bp, Homo sapiens
caagagatggtctaa

SEQ ID NO: 1872925 - DNA, 15 bp, Homo sapiens
aagagatggtctaaa

SEQ ID NO: 1872926 - DNA, 15 bp, Homo sapiens
agagatggtctaaat

SEQ ID NO: 1872927 - DNA, 15 bp, Homo sapiens
gagatggtctaaatt

SEQ ID NO: 1872928 - DNA, 15 bp, Homo sapiens
agatggtctaaattg

SEQ ID NO: 1872929 - DNA, 15 bp, Homo sapiens
gatggtctaaattgg

SEQ ID NO: 1872930 - DNA, 15 bp, Homo sapiens
atggtctaaattggg

SEQ ID NO: 1872931 - DNA, 15 bp, Homo sapiens
tggtctaaattgggt

SEQ ID NO: 1872932 - DNA, 15 bp, Homo sapiens
ggtctaaattgggta

SEQ ID NO: 1872933 - DNA, 15 bp, Homo sapiens
gtctaaattgggtac

SEQ ID NO: 1872934 - DNA, 15 bp, Homo sapiens
tctaaattgggtacc

SEQ ID NO: 1872935 - DNA, 15 bp, Homo sapiens
ctaaattgggtacca

SEQ ID NO: 1872936 - DNA, 15 bp, Homo sapiens
taaattgggtaccaa

SEQ ID NO: 1872937 - DNA, 15 bp, Homo sapiens
aaattgggtaccaaa

SEQ ID NO: 1872938 - DNA, 15 bp, Homo sapiens
aattgggtaccaaac

SEQ ID NO: 1872939 - DNA, 15 bp, Homo sapiens
attgggtaccaaaca

SEQ ID NO: 1872940 - DNA, 15 bp, Homo sapiens
ttgggtaccaaacaa

SEQ ID NO: 1872941 - DNA, 15 bp, Homo sapiens
tgggtaccaaacaaa

SEQ ID NO: 1872942 - DNA, 15 bp, Homo sapiens
gggtaccaaacaaac

SEQ ID NO: 1872943 - DNA, 15 bp, Homo sapiens
ggtaccaaacaaacg

SEQ ID NO: 1872944 - DNA, 15 bp, Homo sapiens
gtaccaaacaaacgg

SEQ ID NO: 1872945 - DNA, 15 bp, Homo sapiens
taccaaacaaacggc

SEQ ID NO: 1872946 - DNA, 15 bp, Homo sapiens
accaaacaaacggct

SEQ ID NO: 1872947 - DNA, 15 bp, Homo sapiens
ccaaacaaacggctg

SEQ ID NO: 1872948 - DNA, 15 bp, Homo sapiens
caaacaaacggctgt

SEQ ID NO: 1872949 - DNA, 15 bp, Homo sapiens
aaacaaacggctgtg

SEQ ID NO: 1872950 - DNA, 15 bp, Homo sapiens
aacaaacggctgtgc

SEQ ID NO: 1872951 - DNA, 15 bp, Homo sapiens
acaaacggctgtgca

SEQ ID NO: 1872952 - DNA, 15 bp, Homo sapiens
caaacggctgtgcag

SEQ ID NO: 1872953 - DNA, 15 bp, Homo sapiens
aaacggctgtgcagg

SEQ ID NO: 1872954 - DNA, 15 bp, Homo sapiens
aacggctgtgcaggt

SEQ ID NO: 1872955 - DNA, 15 bp, Homo sapiens
acggctgtgcaggtg

SEQ ID NO: 1872956 - DNA, 15 bp, Homo sapiens
cggctgtgcaggtgt

SEQ ID NO: 1872957 - DNA, 15 bp, Homo sapiens
ggctgtgcaggtgtc

SEQ ID NO: 1872958 - DNA, 15 bp, Homo sapiens
gctgtgcaggtgtct

SEQ ID NO: 1872959 - DNA, 15 bp, Homo sapiens
ctgtgcaggtgtcta

SEQ ID NO: 1872960 - DNA, 15 bp, Homo sapiens
tgtgcaggtgtctat

SEQ ID NO: 1872961 - DNA, 15 bp, Homo sapiens
gtgcaggtgtctatg

SEQ ID NO: 1872962 - DNA, 15 bp, Homo sapiens
tgcaggtgtctatgt

SEQ ID NO: 1872963 - DNA, 15 bp, Homo sapiens
gcaggtgtctatgta

SEQ ID NO: 1872964 - DNA, 15 bp, Homo sapiens
caggtgtctatgtaa

SEQ ID NO: 1872965 - DNA, 15 bp, Homo sapiens
aggtgtctatgtaag

SEQ ID NO: 1872966 - DNA, 15 bp, Homo sapiens
ggtgtctatgtaagg

SEQ ID NO: 1872967 - DNA, 15 bp, Homo sapiens
gtgtctatgtaaggg

SEQ ID NO: 1872968 - DNA, 15 bp, Homo sapiens
tgtctatgtaagggg

SEQ ID NO: 1872969 - DNA, 15 bp, Homo sapiens
gtctatgtaaggggt

SEQ ID NO: 1872970 - DNA, 15 bp, Homo sapiens
tctatgtaaggggtt

SEQ ID NO: 1872971 - DNA, 15 bp, Homo sapiens
ctatgtaaggggttt

SEQ ID NO: 1872972 - DNA, 15 bp, Homo sapiens
tatgtaaggggtttt

SEQ ID NO: 1872973 - DNA, 15 bp, Homo sapiens
atgtaaggggttttg

SEQ ID NO: 1872974 - DNA, 15 bp, Homo sapiens
tgtaaggggttttga

SEQ ID NO: 1872975 - DNA, 15 bp, Homo sapiens
gtaaggggttttgaa

SEQ ID NO: 1872976 - DNA, 15 bp, Homo sapiens
taaggggttttgaac

SEQ ID NO: 1872977 - DNA, 15 bp, Homo sapiens
aaggggttttgaacc

SEQ ID NO: 1872978 - DNA, 15 bp, Homo sapiens
aggggttttgaacct

SEQ ID NO: 1872979 - DNA, 15 bp, Homo sapiens
ggggttttgaacctt

SEQ ID NO: 1872980 - DNA, 15 bp, Homo sapiens
gggttttgaacctta

SEQ ID NO: 1872981 - DNA, 15 bp, Homo sapiens
ggttttgaaccttat

SEQ ID NO: 1872982 - DNA, 15 bp, Homo sapiens
gttttgaaccttata

SEQ ID NO: 1872983 - DNA, 15 bp, Homo sapiens
ttttgaaccttatat

SEQ ID NO: 1872984 - DNA, 15 bp, Homo sapiens
tttgaaccttatatc

SEQ ID NO: 1872985 - DNA, 15 bp, Homo sapiens
ttgaaccttatatcc

SEQ ID NO: 1872986 - DNA, 15 bp, Homo sapiens
tgaaccttatatcca

SEQ ID NO: 1872987 - DNA, 15 bp, Homo sapiens
gaaccttatatccag

SEQ ID NO: 1872988 - DNA, 15 bp, Homo sapiens
aaccttatatccagg

SEQ ID NO: 1872989 - DNA, 15 bp, Homo sapiens
accttatatccagga

SEQ ID NO: 1872990 - DNA, 15 bp, Homo sapiens
ccttatatccaggaa

SEQ ID NO: 1872991 - DNA, 15 bp, Homo sapiens
cttatatccaggaag

SEQ ID NO: 1872992 - DNA, 15 bp, Homo sapiens
ttatatccaggaagg

SEQ ID NO: 1872993 - DNA, 15 bp, Homo sapiens
tatatccaggaaggg

SEQ ID NO: 1872994 - DNA, 15 bp, Homo sapiens
atatccaggaagggg

SEQ ID NO: 1872995 - DNA, 15 bp, Homo sapiens
tatccaggaaggggg

SEQ ID NO: 1872996 - DNA, 15 bp, Homo sapiens
atccaggaagggggt

SEQ ID NO: 1872997 - DNA, 15 bp, Homo sapiens
tccaggaagggggtc

SEQ ID NO: 1872998 - DNA, 15 bp, Homo sapiens
ccaggaagggggtcc

SEQ ID NO: 1872999 - DNA, 15 bp, Homo sapiens
caggaagggggtcct

SEQ ID NO: 1873000 - DNA, 15 bp, Homo sapiens
aggaagggggtcctt

SEQ ID NO: 1873001 - DNA, 15 bp, Homo sapiens
ggaagggggtccttt

SEQ ID NO: 1873002 - DNA, 15 bp, Homo sapiens
gaagggggtcctttt

SEQ ID NO: 1873003 - DNA, 15 bp, Homo sapiens
aagggggtccttttg

SEQ ID NO: 1873004 - DNA, 15 bp, Homo sapiens
agggggtccttttga

SEQ ID NO: 1873005 - DNA, 15 bp, Homo sapiens
gggggtccttttgaa

SEQ ID NO: 1873006 - DNA, 15 bp, Homo sapiens
ggggtccttttgaag

SEQ ID NO: 1873007 - DNA, 15 bp, Homo sapiens
gggtccttttgaagt

SEQ ID NO: 1873008 - DNA, 15 bp, Homo sapiens
ggtccttttgaagtg

SEQ ID NO: 1873009 - DNA, 15 bp, Homo sapiens
gtccttttgaagtgg

SEQ ID NO: 1873010 - DNA, 15 bp, Homo sapiens
tccttttgaagtggg

SEQ ID NO: 1873011 - DNA, 15 bp, Homo sapiens
ccttttgaagtgggg

SEQ ID NO: 1873012 - DNA, 15 bp, Homo sapiens
cttttgaagtggggg

SEQ ID NO: 1873013 - DNA, 15 bp, Homo sapiens
ttttgaagtgggggt

SEQ ID NO: 1873014 - DNA, 15 bp, Homo sapiens
tttgaagtgggggtt

SEQ ID NO: 1873015 - DNA, 15 bp, Homo sapiens
ttgaagtgggggtta

SEQ ID NO: 1873016 - DNA, 15 bp, Homo sapiens
tgaagtgggggttaa

SEQ ID NO: 1873017 - DNA, 15 bp, Homo sapiens
gaagtgggggttaag

SEQ ID NO: 1873018 - DNA, 15 bp, Homo sapiens
aagtgggggttaaga

SEQ ID NO: 1873019 - DNA, 15 bp, Homo sapiens
agtgggggttaagat

SEQ ID NO: 1873020 - DNA, 15 bp, Homo sapiens
gtgggggttaagatt

SEQ ID NO: 1873021 - DNA, 15 bp, Homo sapiens
tgggggttaagattt

SEQ ID NO: 1873022 - DNA, 15 bp, Homo sapiens
gggggttaagatttg

SEQ ID NO: 1873023 - DNA, 15 bp, Homo sapiens
ggggttaagatttga

SEQ ID NO: 1873024 - DNA, 15 bp, Homo sapiens
gggttaagatttgaa

SEQ ID NO: 1873025 - DNA, 15 bp, Homo sapiens
ggttaagatttgaat

SEQ ID NO: 1873026 - DNA, 15 bp, Homo sapiens
gttaagatttgaata

SEQ ID NO: 1873027 - DNA, 15 bp, Homo sapiens
ttaagatttgaatat

SEQ ID NO: 1873028 - DNA, 15 bp, Homo sapiens
taagatttgaatatc

SEQ ID NO: 1873029 - DNA, 15 bp, Homo sapiens
aagatttgaatatca

SEQ ID NO: 1873030 - DNA, 15 bp, Homo sapiens
agatttgaatatcat

SEQ ID NO: 1873031 - DNA, 15 bp, Homo sapiens
gatttgaatatcata

SEQ ID NO: 1873032 - DNA, 15 bp, Homo sapiens
atttgaatatcataa

SEQ ID NO: 1873033 - DNA, 15 bp, Homo sapiens
tttgaatatcataag

SEQ ID NO: 1873034 - DNA, 15 bp, Homo sapiens
ttgaatatcataagc

SEQ ID NO: 1873035 - DNA, 15 bp, Homo sapiens
tgaatatcataagcc

SEQ ID NO: 1873036 - DNA, 15 bp, Homo sapiens
gaatatcataagcct

SEQ ID NO: 1873037 - DNA, 15 bp, Homo sapiens
aatatcataagcctg

SEQ ID NO: 1873038 - DNA, 15 bp, Homo sapiens
atatcataagcctgt

SEQ ID NO: 1873039 - DNA, 15 bp, Homo sapiens
tatcataagcctgta

SEQ ID NO: 1873040 - DNA, 15 bp, Homo sapiens
atcataagcctgtac

SEQ ID NO: 1873041 - DNA, 15 bp, Homo sapiens
tcataagcctgtaca

SEQ ID NO: 1873042 - DNA, 15 bp, Homo sapiens
cataagcctgtacaa

SEQ ID NO: 1873043 - DNA, 15 bp, Homo sapiens
ataagcctgtacaat

SEQ ID NO: 1873044 - DNA, 15 bp, Homo sapiens
taagcctgtacaatt

SEQ ID NO: 1873045 - DNA, 15 bp, Homo sapiens
aagcctgtacaattt

SEQ ID NO: 1873046 - DNA, 15 bp, Homo sapiens
agcctgtacaatttc

SEQ ID NO: 1873047 - DNA, 15 bp, Homo sapiens
gcctgtacaatttca

SEQ ID NO: 1873048 - DNA, 15 bp, Homo sapiens
cctgtacaatttcat

SEQ ID NO: 1873049 - DNA, 15 bp, Homo sapiens
ctgtacaatttcatg

SEQ ID NO: 1873050 - DNA, 15 bp, Homo sapiens
tgtacaatttcatga

SEQ ID NO: 1873051 - DNA, 15 bp, Homo sapiens
gtacaatttcatgaa

SEQ ID NO: 1873052 - DNA, 15 bp, Homo sapiens
tacaatttcatgaaa

SEQ ID NO: 1873053 - DNA, 15 bp, Homo sapiens
acaatttcatgaaag

SEQ ID NO: 1873054 - DNA, 15 bp, Homo sapiens
caatttcatgaaagc

SEQ ID NO: 1873055 - DNA, 15 bp, Homo sapiens
aatttcatgaaagct

SEQ ID NO: 1873056 - DNA, 15 bp, Homo sapiens
atttcatgaaagctt

SEQ ID NO: 1873057 - DNA, 15 bp, Homo sapiens
tttcatgaaagcttt

SEQ ID NO: 1873058 - DNA, 15 bp, Homo sapiens
ttcatgaaagctttt

SEQ ID NO: 1873059 - DNA, 15 bp, Homo sapiens
tcatgaaagcttttt

SEQ ID NO: 1873060 - DNA, 15 bp, Homo sapiens
catgaaagctttttg

SEQ ID NO: 1873061 - DNA, 15 bp, Homo sapiens
atgaaagctttttgg

SEQ ID NO: 1873062 - DNA, 15 bp, Homo sapiens
tgaaagctttttgga

SEQ ID NO: 1873063 - DNA, 15 bp, Homo sapiens
gaaagctttttggaa

SEQ ID NO: 1873064 - DNA, 15 bp, Homo sapiens
aaagctttttggaag

SEQ ID NO: 1873065 - DNA, 15 bp, Homo sapiens
aagctttttggaagg

SEQ ID NO: 1873066 - DNA, 15 bp, Homo sapiens
agctttttggaaggc

SEQ ID NO: 1873067 - DNA, 15 bp, Homo sapiens
gctttttggaaggcc

SEQ ID NO: 1873068 - DNA, 15 bp, Homo sapiens
ctttttggaaggcca

SEQ ID NO: 1873069 - DNA, 15 bp, Homo sapiens
tttttggaaggccaa

SEQ ID NO: 1873070 - DNA, 15 bp, Homo sapiens
ttttggaaggccaat

SEQ ID NO: 1873071 - DNA, 15 bp, Homo sapiens
tttggaaggccaatg

SEQ ID NO: 1873072 - DNA, 15 bp, Homo sapiens
ttggaaggccaatgt

SEQ ID NO: 1873073 - DNA, 15 bp, Homo sapiens
tggaaggccaatgta

SEQ ID NO: 1873074 - DNA, 15 bp, Homo sapiens
ggaaggccaatgtag

SEQ ID NO: 1873075 - DNA, 15 bp, Homo sapiens
gaaggccaatgtagg

SEQ ID NO: 1873076 - DNA, 15 bp, Homo sapiens
aaggccaatgtagga

SEQ ID NO: 1873077 - DNA, 15 bp, Homo sapiens
aggccaatgtaggac

SEQ ID NO: 1873078 - DNA, 15 bp, Homo sapiens
ggccaatgtaggaca

SEQ ID NO: 1873079 - DNA, 15 bp, Homo sapiens
gccaatgtaggacag

SEQ ID NO: 1873080 - DNA, 15 bp, Homo sapiens
ccaatgtaggacagc

SEQ ID NO: 1873081 - DNA, 15 bp, Homo sapiens
caatgtaggacagcc

SEQ ID NO: 1873082 - DNA, 15 bp, Homo sapiens
aatgtaggacagcca

SEQ ID NO: 1873083 - DNA, 15 bp, Homo sapiens
atgtaggacagccaa

SEQ ID NO: 1873084 - DNA, 15 bp, Homo sapiens
tgtaggacagccaac

SEQ ID NO: 1873085 - DNA, 15 bp, Homo sapiens
gtaggacagccaact

SEQ ID NO: 1873086 - DNA, 15 bp, Homo sapiens
taggacagccaactt

SEQ ID NO: 1873087 - DNA, 15 bp, Homo sapiens
aggacagccaacttt

SEQ ID NO: 1873088 - DNA, 15 bp, Homo sapiens
ggacagccaactttc

SEQ ID NO: 1873089 - DNA, 15 bp, Homo sapiens
gacagccaactttct

SEQ ID NO: 1873090 - DNA, 15 bp, Homo sapiens
acagccaactttcta

SEQ ID NO: 1873091 - DNA, 15 bp, Homo sapiens
cagccaactttctat

SEQ ID NO: 1873092 - DNA, 15 bp, Homo sapiens
agccaactttctatt

SEQ ID NO: 1873093 - DNA, 15 bp, Homo sapiens
gccaactttctattt

SEQ ID NO: 1873094 - DNA, 15 bp, Homo sapiens
ccaactttctatttt

SEQ ID NO: 1873095 - DNA, 15 bp, Homo sapiens
caactttctattttg

SEQ ID NO: 1873096 - DNA, 15 bp, Homo sapiens
aactttctattttgc

SEQ ID NO: 1873097 - DNA, 15 bp, Homo sapiens
actttctattttgcc

SEQ ID NO: 1873098 - DNA, 15 bp, Homo sapiens
ctttctattttgcca

SEQ ID NO: 1873099 - DNA, 15 bp, Homo sapiens
tttctattttgccaa

SEQ ID NO: 1873100 - DNA, 15 bp, Homo sapiens
ttctattttgccaaa

SEQ ID NO: 1873101 - DNA, 15 bp, Homo sapiens
tctattttgccaaaa

SEQ ID NO: 1873102 - DNA, 15 bp, Homo sapiens
ctattttgccaaaaa

SEQ ID NO: 1873103 - DNA, 15 bp, Homo sapiens
tattttgccaaaaaa

SEQ ID NO: 1873104 - DNA, 15 bp, Homo sapiens
attttgccaaaaaat

SEQ ID NO: 1873105 - DNA, 15 bp, Homo sapiens
ttttgccaaaaaatg

SEQ ID NO: 1873106 - DNA, 15 bp, Homo sapiens
tttgccaaaaaatga

SEQ ID NO: 1873107 - DNA, 15 bp, Homo sapiens
ttgccaaaaaatgac

SEQ ID NO: 1873108 - DNA, 15 bp, Homo sapiens
tgccaaaaaatgacc

SEQ ID NO: 1873109 - DNA, 15 bp, Homo sapiens
gccaaaaaatgacca

SEQ ID NO: 1873110 - DNA, 15 bp, Homo sapiens
ccaaaaaatgaccaa

SEQ ID NO: 1873111 - DNA, 15 bp, Homo sapiens
caaaaaatgaccaaa

SEQ ID NO: 1873112 - DNA, 15 bp, Homo sapiens
aaaaaatgaccaaaa

SEQ ID NO: 1873113 - DNA, 15 bp, Homo sapiens
aaaaatgaccaaaag

SEQ ID NO: 1873114 - DNA, 15 bp, Homo sapiens
aaaatgaccaaaagc

SEQ ID NO: 1873115 - DNA, 15 bp, Homo sapiens
aaatgaccaaaagcg

SEQ ID NO: 1873116 - DNA, 15 bp, Homo sapiens
aatgaccaaaagcgc

SEQ ID NO: 1873117 - DNA, 15 bp, Homo sapiens
atgaccaaaagcgct

SEQ ID NO: 1873118 - DNA, 15 bp, Homo sapiens
tgaccaaaagcgcta

SEQ ID NO: 1873119 - DNA, 15 bp, Homo sapiens
gaccaaaagcgctac

SEQ ID NO: 1873120 - DNA, 15 bp, Homo sapiens
accaaaagcgctaca

SEQ ID NO: 1873121 - DNA, 15 bp, Homo sapiens
ccaaaagcgctacag

SEQ ID NO: 1873122 - DNA, 15 bp, Homo sapiens
caaaagcgctacagc

SEQ ID NO: 1873123 - DNA, 15 bp, Homo sapiens
aaaagcgctacagcc

SEQ ID NO: 1873124 - DNA, 15 bp, Homo sapiens
aaagcgctacagcct

SEQ ID NO: 1873125 - DNA, 15 bp, Homo sapiens
aagcgctacagccta

SEQ ID NO: 1873126 - DNA, 15 bp, Homo sapiens
agcgctacagcctac

SEQ ID NO: 1873127 - DNA, 15 bp, Homo sapiens
gcgctacagcctact

SEQ ID NO: 1873128 - DNA, 15 bp, Homo sapiens
cgctacagcctactg

SEQ ID NO: 1873129 - DNA, 15 bp, Homo sapiens
gctacagcctactgg

SEQ ID NO: 1873130 - DNA, 15 bp, Homo sapiens
ctacagcctactggc

SEQ ID NO: 1873131 - DNA, 15 bp, Homo sapiens
tacagcctactggcg

SEQ ID NO: 1873132 - DNA, 15 bp, Homo sapiens
acagcctactggcgc

SEQ ID NO: 1873133 - DNA, 15 bp, Homo sapiens
cagcctactggcgcc

SEQ ID NO: 1873134 - DNA, 15 bp, Homo sapiens
agcctactggcgcca

SEQ ID NO: 1873135 - DNA, 15 bp, Homo sapiens
gcctactggcgccac

SEQ ID NO: 1873136 - DNA, 15 bp, Homo sapiens
cctactggcgccacc

SEQ ID NO: 1873137 - DNA, 15 bp, Homo sapiens
ctactggcgccacca

SEQ ID NO: 1873138 - DNA, 15 bp, Homo sapiens
tactggcgccaccac

SEQ ID NO: 1873139 - DNA, 15 bp, Homo sapiens
actggcgccaccact

SEQ ID NO: 1873140 - DNA, 15 bp, Homo sapiens
ctggcgccaccactt

SEQ ID NO: 1873141 - DNA, 15 bp, Homo sapiens
tggcgccaccacttc

SEQ ID NO: 1873142 - DNA, 15 bp, Homo sapiens
ggcgccaccacttca

SEQ ID NO: 1873143 - DNA, 15 bp, Homo sapiens
gcgccaccacttcat

SEQ ID NO: 1873144 - DNA, 15 bp, Homo sapiens
cgccaccacttcatt

SEQ ID NO: 1873145 - DNA, 15 bp, Homo sapiens
gccaccacttcatta

SEQ ID NO: 1873146 - DNA, 15 bp, Homo sapiens
ccaccacttcattaa

SEQ ID NO: 1873147 - DNA, 15 bp, Homo sapiens
caccacttcattaaa

SEQ ID NO: 1873148 - DNA, 15 bp, Homo sapiens
accacttcattaaag

SEQ ID NO: 1873149 - DNA, 15 bp, Homo sapiens
ccacttcattaaagg

SEQ ID NO: 1873150 - DNA, 15 bp, Homo sapiens
cacttcattaaaggg

SEQ ID NO: 1873151 - DNA, 15 bp, Homo sapiens
acttcattaaaggga

SEQ ID NO: 1873152 - DNA, 15 bp, Homo sapiens
cttcattaaagggaa

SEQ ID NO: 1873153 - DNA, 15 bp, Homo sapiens
ttcattaaagggaat

SEQ ID NO: 1873154 - DNA, 15 bp, Homo sapiens
tcattaaagggaatg

SEQ ID NO: 1873155 - DNA, 15 bp, Homo sapiens
cattaaagggaatga

SEQ ID NO: 1873156 - DNA, 15 bp, Homo sapiens
attaaagggaatgac

SEQ ID NO: 1873157 - DNA, 15 bp, Homo sapiens
ttaaagggaatgaca

SEQ ID NO: 1873158 - DNA, 15 bp, Homo sapiens
taaagggaatgacag

SEQ ID NO: 1873159 - DNA, 15 bp, Homo sapiens
aaagggaatgacagt

SEQ ID NO: 1873160 - DNA, 15 bp, Homo sapiens
aagggaatgacagta

SEQ ID NO: 1873161 - DNA, 15 bp, Homo sapiens
agggaatgacagtac

SEQ ID NO: 1873162 - DNA, 15 bp, Homo sapiens
gggaatgacagtaca

SEQ ID NO: 1873163 - DNA, 15 bp, Homo sapiens
ggaatgacagtacaa

SEQ ID NO: 1873164 - DNA, 15 bp, Homo sapiens
gaatgacagtacaat

SEQ ID NO: 1873165 - DNA, 15 bp, Homo sapiens
aatgacagtacaatt

SEQ ID NO: 1873166 - DNA, 15 bp, Homo sapiens
atgacagtacaattg

SEQ ID NO: 1873167 - DNA, 15 bp, Homo sapiens
tgacagtacaattgg

SEQ ID NO: 1873168 - DNA, 15 bp, Homo sapiens
gacagtacaattggt

SEQ ID NO: 1873169 - DNA, 15 bp, Homo sapiens
acagtacaattggtt

SEQ ID NO: 1873170 - DNA, 15 bp, Homo sapiens
cagtacaattggtta

SEQ ID NO: 1873171 - DNA, 15 bp, Homo sapiens
agtacaattggttag

SEQ ID NO: 1873172 - DNA, 15 bp, Homo sapiens
gtacaattggttagc

SEQ ID NO: 1873173 - DNA, 15 bp, Homo sapiens
tacaattggttagca

SEQ ID NO: 1873174 - DNA, 15 bp, Homo sapiens
acaattggttagcaa

SEQ ID NO: 1873175 - DNA, 15 bp, Homo sapiens
caattggttagcaag

SEQ ID NO: 1873176 - DNA, 15 bp, Homo sapiens
aattggttagcaaga

SEQ ID NO: 1873177 - DNA, 15 bp, Homo sapiens
attggttagcaagaa

SEQ ID NO: 1873178 - DNA, 15 bp, Homo sapiens
ttggttagcaagaaa

SEQ ID NO: 1873179 - DNA, 15 bp, Homo sapiens
tggttagcaagaaat

SEQ ID NO: 1873180 - DNA, 15 bp, Homo sapiens
ggttagcaagaaata

SEQ ID NO: 1873181 - DNA, 15 bp, Homo sapiens
gttagcaagaaatat

SEQ ID NO: 1873182 - DNA, 15 bp, Homo sapiens
ttagcaagaaatatt

SEQ ID NO: 1873183 - DNA, 15 bp, Homo sapiens
tagcaagaaatatta

SEQ ID NO: 1873184 - DNA, 15 bp, Homo sapiens
agcaagaaatattaa

SEQ ID NO: 1873185 - DNA, 15 bp, Homo sapiens
gcaagaaatattaat

SEQ ID NO: 1873186 - DNA, 15 bp, Homo sapiens
caagaaatattaata

SEQ ID NO: 1873187 - DNA, 15 bp, Homo sapiens
aagaaatattaatac

SEQ ID NO: 1873188 - DNA, 15 bp, Homo sapiens
agaaatattaataca

SEQ ID NO: 1873189 - DNA, 15 bp, Homo sapiens
gaaatattaatacat

SEQ ID NO: 1873190 - DNA, 15 bp, Homo sapiens
aaatattaatacatg

SEQ ID NO: 1873191 - DNA, 15 bp, Homo sapiens
aatattaatacatgt

SEQ ID NO: 1873192 - DNA, 15 bp, Homo sapiens
atattaatacatgtt

SEQ ID NO: 1873193 - DNA, 15 bp, Homo sapiens
tattaatacatgttg

SEQ ID NO: 1873194 - DNA, 15 bp, Homo sapiens
attaatacatgttga

SEQ ID NO: 1873195 - DNA, 15 bp, Homo sapiens
ttaatacatgttgat

SEQ ID NO: 1873196 - DNA, 15 bp, Homo sapiens
taatacatgttgatt

SEQ ID NO: 1873197 - DNA, 15 bp, Homo sapiens
aatacatgttgattg

SEQ ID NO: 1873198 - DNA, 15 bp, Homo sapiens
atacatgttgattgc

SEQ ID NO: 1873199 - DNA, 15 bp, Homo sapiens
tacatgttgattgct

SEQ ID NO: 1873200 - DNA, 15 bp, Homo sapiens
acatgttgattgctg

SEQ ID NO: 1873201 - DNA, 15 bp, Homo sapiens
catgttgattgctga

SEQ ID NO: 1873202 - DNA, 15 bp, Homo sapiens
atgttgattgctgat

SEQ ID NO: 1873203 - DNA, 15 bp, Homo sapiens
tgttgattgctgatt

SEQ ID NO: 1873204 - DNA, 15 bp, Homo sapiens
gttgattgctgattt

SEQ ID NO: 1873205 - DNA, 15 bp, Homo sapiens
ttgattgctgattta

SEQ ID NO: 1873206 - DNA, 15 bp, Homo sapiens
tgattgctgatttat

SEQ ID NO: 1873207 - DNA, 15 bp, Homo sapiens
gattgctgatttatg

SEQ ID NO: 1873208 - DNA, 15 bp, Homo sapiens
attgctgatttatgc

SEQ ID NO: 1873209 - DNA, 15 bp, Homo sapiens
ttgctgatttatgct

SEQ ID NO: 1873210 - DNA, 15 bp, Homo sapiens
tgctgatttatgctc

SEQ ID NO: 1873211 - DNA, 15 bp, Homo sapiens
gctgatttatgctcc

SEQ ID NO: 1873212 - DNA, 15 bp, Homo sapiens
ctgatttatgctcca

SEQ ID NO: 1873213 - DNA, 15 bp, Homo sapiens
tgatttatgctccag

SEQ ID NO: 1873214 - DNA, 15 bp, Homo sapiens
gatttatgctccagg

SEQ ID NO: 1873215 - DNA, 15 bp, Homo sapiens
atttatgctccaggg

SEQ ID NO: 1873216 - DNA, 15 bp, Homo sapiens
tttatgctccagggc

SEQ ID NO: 1873217 - DNA, 15 bp, Homo sapiens
ttatgctccagggca

SEQ ID NO: 1873218 - DNA, 15 bp, Homo sapiens
tatgctccagggcat

SEQ ID NO: 1873219 - DNA, 15 bp, Homo sapiens
atgctccagggcatt

SEQ ID NO: 1873220 - DNA, 15 bp, Homo sapiens
tgctccagggcatta

SEQ ID NO: 1873221 - DNA, 15 bp, Homo sapiens
gctccagggcattaa

SEQ ID NO: 1873222 - DNA, 15 bp, Homo sapiens
ctccagggcattaat

SEQ ID NO: 1873223 - DNA, 15 bp, Homo sapiens
tccagggcattaatg

SEQ ID NO: 1873224 - DNA, 15 bp, Homo sapiens
ccagggcattaatgc

SEQ ID NO: 1873225 - DNA, 15 bp, Homo sapiens
cagggcattaatgcc

SEQ ID NO: 1873226 - DNA, 15 bp, Homo sapiens
agggcattaatgcca

SEQ ID NO: 1873227 - DNA, 15 bp, Homo sapiens
gggcattaatgccaa

SEQ ID NO: 1873228 - DNA, 15 bp, Homo sapiens
ggcattaatgccaag

SEQ ID NO: 1873229 - DNA, 15 bp, Homo sapiens
gcattaatgccaagt

SEQ ID NO: 1873230 - DNA, 15 bp, Homo sapiens
cattaatgccaagtg

SEQ ID NO: 1873231 - DNA, 15 bp, Homo sapiens
attaatgccaagtgg

SEQ ID NO: 1873232 - DNA, 15 bp, Homo sapiens
ttaatgccaagtggt

SEQ ID NO: 1873233 - DNA, 15 bp, Homo sapiens
taatgccaagtggtc

SEQ ID NO: 1873234 - DNA, 15 bp, Homo sapiens
aatgccaagtggtca

SEQ ID NO: 1873235 - DNA, 15 bp, Homo sapiens
atgccaagtggtcat

SEQ ID NO: 1873236 - DNA, 15 bp, Homo sapiens
tgccaagtggtcatc

SEQ ID NO: 1873237 - DNA, 15 bp, Homo sapiens
gccaagtggtcatcc

SEQ ID NO: 1873238 - DNA, 15 bp, Homo sapiens
ccaagtggtcatcct

SEQ ID NO: 1873239 - DNA, 15 bp, Homo sapiens
caagtggtcatcctg

SEQ ID NO: 1873240 - DNA, 15 bp, Homo sapiens
aagtggtcatcctgg

SEQ ID NO: 1873241 - DNA, 15 bp, Homo sapiens
agtggtcatcctggc

SEQ ID NO: 1873242 - DNA, 15 bp, Homo sapiens
gtggtcatcctggcc

SEQ ID NO: 1873243 - DNA, 15 bp, Homo sapiens
tggtcatcctggcca

SEQ ID NO: 1873244 - DNA, 15 bp, Homo sapiens
ggtcatcctggccaa

SEQ ID NO: 1873245 - DNA, 15 bp, Homo sapiens
gtcatcctggccaac

SEQ ID NO: 1873246 - DNA, 15 bp, Homo sapiens
tcatcctggccaact

SEQ ID NO: 1873247 - DNA, 15 bp, Homo sapiens
catcctggccaactt

SEQ ID NO: 1873248 - DNA, 15 bp, Homo sapiens
atcctggccaacttg

SEQ ID NO: 1873249 - DNA, 15 bp, Homo sapiens
tcctggccaacttgt

SEQ ID NO: 1873250 - DNA, 15 bp, Homo sapiens
cctggccaacttgtt

SEQ ID NO: 1873251 - DNA, 15 bp, Homo sapiens
ctggccaacttgttt

SEQ ID NO: 1873252 - DNA, 15 bp, Homo sapiens
tggccaacttgttta

SEQ ID NO: 1873253 - DNA, 15 bp, Homo sapiens
ggccaacttgtttac

SEQ ID NO: 1873254 - DNA, 15 bp, Homo sapiens
gccaacttgtttaca

SEQ ID NO: 1873255 - DNA, 15 bp, Homo sapiens
ccaacttgtttacat

SEQ ID NO: 1873256 - DNA, 15 bp, Homo sapiens
caacttgtttacatg

SEQ ID NO: 1873257 - DNA, 15 bp, Homo sapiens
aacttgtttacatgt

SEQ ID NO: 1873258 - DNA, 15 bp, Homo sapiens
acttgtttacatgtg

SEQ ID NO: 1873259 - DNA, 15 bp, Homo sapiens
cttgtttacatgtga

SEQ ID NO: 1873260 - DNA, 15 bp, Homo sapiens
ttgtttacatgtgat

SEQ ID NO: 1873261 - DNA, 15 bp, Homo sapiens
tgtttacatgtgata

SEQ ID NO: 1873262 - DNA, 15 bp, Homo sapiens
gtttacatgtgatag

SEQ ID NO: 1873263 - DNA, 15 bp, Homo sapiens
tttacatgtgatagg

SEQ ID NO: 1873264 - DNA, 15 bp, Homo sapiens
ttacatgtgataggg

SEQ ID NO: 1873265 - DNA, 15 bp, Homo sapiens
tacatgtgataggga

SEQ ID NO: 1873266 - DNA, 15 bp, Homo sapiens
acatgtgatagggag

SEQ ID NO: 1873267 - DNA, 15 bp, Homo sapiens
catgtgatagggagc

SEQ ID NO: 1873268 - DNA, 15 bp, Homo sapiens
atgtgatagggagct

SEQ ID NO: 1873269 - DNA, 15 bp, Homo sapiens
tgtgatagggagctt

SEQ ID NO: 1873270 - DNA, 15 bp, Homo sapiens
gtgatagggagctta

SEQ ID NO: 1873271 - DNA, 15 bp, Homo sapiens
tgatagggagcttac

SEQ ID NO: 1873272 - DNA, 15 bp, Homo sapiens
gatagggagcttact

SEQ ID NO: 1873273 - DNA, 15 bp, Homo sapiens
atagggagcttacta

SEQ ID NO: 1873274 - DNA, 15 bp, Homo sapiens
tagggagcttactac

SEQ ID NO: 1873275 - DNA, 15 bp, Homo sapiens
agggagcttactacc

SEQ ID NO: 1873276 - DNA, 15 bp, Homo sapiens
gggagcttactacct

SEQ ID NO: 1873277 - DNA, 15 bp, Homo sapiens
ggagcttactacctc

SEQ ID NO: 1873278 - DNA, 15 bp, Homo sapiens
gagcttactacctct

SEQ ID NO: 1873279 - DNA, 15 bp, Homo sapiens
agcttactacctcta

SEQ ID NO: 1873280 - DNA, 15 bp, Homo sapiens
gcttactacctctaa

SEQ ID NO: 1873281 - DNA, 15 bp, Homo sapiens
cttactacctctaaa

SEQ ID NO: 1873282 - DNA, 15 bp, Homo sapiens
ttactacctctaaaa

SEQ ID NO: 1873283 - DNA, 15 bp, Homo sapiens
tactacctctaaaag

SEQ ID NO: 1873284 - DNA, 15 bp, Homo sapiens
actacctctaaaagt

SEQ ID NO: 1873285 - DNA, 15 bp, Homo sapiens
ctacctctaaaagta

SEQ ID NO: 1873286 - DNA, 15 bp, Homo sapiens
tacctctaaaagtag

SEQ ID NO: 1873287 - DNA, 15 bp, Homo sapiens
acctctaaaagtagc

SEQ ID NO: 1873288 - DNA, 15 bp, Homo sapiens
cctctaaaagtagct

SEQ ID NO: 1873289 - DNA, 15 bp, Homo sapiens
ctctaaaagtagctt

SEQ ID NO: 1873290 - DNA, 15 bp, Homo sapiens
tctaaaagtagcttt

SEQ ID NO: 1873291 - DNA, 15 bp, Homo sapiens
ctaaaagtagctttt

SEQ ID NO: 1873292 - DNA, 15 bp, Homo sapiens
taaaagtagcttttg

SEQ ID NO: 1873293 - DNA, 15 bp, Homo sapiens
aaaagtagcttttgc

SEQ ID NO: 1873294 - DNA, 15 bp, Homo sapiens
aaagtagcttttgct

SEQ ID NO: 1873295 - DNA, 15 bp, Homo sapiens
aagtagcttttgctt

SEQ ID NO: 1873296 - DNA, 15 bp, Homo sapiens
agtagcttttgcttt

SEQ ID NO: 1873297 - DNA, 15 bp, Homo sapiens
gtagcttttgctttt

SEQ ID NO: 1873298 - DNA, 15 bp, Homo sapiens
tagcttttgcttttt

SEQ ID NO: 1873299 - DNA, 15 bp, Homo sapiens
agcttttgctttttt

SEQ ID NO: 1873300 - DNA, 15 bp, Homo sapiens
gcttttgcttttttt

SEQ ID NO: 1873301 - DNA, 15 bp, Homo sapiens
cttttgctttttttt

SEQ ID NO: 1873302 - DNA, 15 bp, Homo sapiens
ttttgcttttttttg

SEQ ID NO: 1873303 - DNA, 15 bp, Homo sapiens
tttgcttttttttgt

SEQ ID NO: 1873304 - DNA, 15 bp, Homo sapiens
ttgcttttttttgtt

SEQ ID NO: 1873305 - DNA, 15 bp, Homo sapiens
tgcttttttttgttt

SEQ ID NO: 1873306 - DNA, 15 bp, Homo sapiens
gcttttttttgtttt

SEQ ID NO: 1873307 - DNA, 15 bp, Homo sapiens
cttttttttgttttt

SEQ ID NO: 1873308 - DNA, 15 bp, Homo sapiens
tttgttttttttgag

SEQ ID NO: 1873309 - DNA, 15 bp, Homo sapiens
ttgttttttttgaga

SEQ ID NO: 1873310 - DNA, 15 bp, Homo sapiens
tgttttttttgagat

SEQ ID NO: 1873311 - DNA, 15 bp, Homo sapiens
gttttttttgagatg

SEQ ID NO: 1873312 - DNA, 15 bp, Homo sapiens
ttttttgagatggaa

SEQ ID NO: 1873313 - DNA, 15 bp, Homo sapiens
tttttgagatggaat

SEQ ID NO: 1873314 - DNA, 15 bp, Homo sapiens
ttttgagatggaatc

SEQ ID NO: 1873315 - DNA, 15 bp, Homo sapiens
tttgagatggaatct

SEQ ID NO: 1873316 - DNA, 15 bp, Homo sapiens
ttgagatggaatctc

SEQ ID NO: 1873317 - DNA, 15 bp, Homo sapiens
tgagatggaatctcg

SEQ ID NO: 1873318 - DNA, 15 bp, Homo sapiens
gagatggaatctcgc

SEQ ID NO: 1873319 - DNA, 15 bp, Homo sapiens
agatggaatctcgct

SEQ ID NO: 1873320 - DNA, 15 bp, Homo sapiens
gatggaatctcgctt

SEQ ID NO: 1873321 - DNA, 15 bp, Homo sapiens
atggaatctcgcttt

SEQ ID NO: 1873322 - DNA, 15 bp, Homo sapiens
tggaatctcgctttg

SEQ ID NO: 1873323 - DNA, 15 bp, Homo sapiens
ggaatctcgctttgt

SEQ ID NO: 1873324 - DNA, 15 bp, Homo sapiens
gaatctcgctttgtc

SEQ ID NO: 1873325 - DNA, 15 bp, Homo sapiens
aatctcgctttgtcg

SEQ ID NO: 1873326 - DNA, 15 bp, Homo sapiens
atctcgctttgtcgc

SEQ ID NO: 1873327 - DNA, 15 bp, Homo sapiens
ctcgctttgtcgccc

SEQ ID NO: 1873328 - DNA, 15 bp, Homo sapiens
tcgctttgtcgccca

SEQ ID NO: 1873329 - DNA, 15 bp, Homo sapiens
cgctttgtcgcccag

SEQ ID NO: 1873330 - DNA, 15 bp, Homo sapiens
gctttgtcgcccagg

SEQ ID NO: 1873331 - DNA, 15 bp, Homo sapiens
ctttgtcgcccaggc

SEQ ID NO: 1873332 - DNA, 15 bp, Homo sapiens
tttgtcgcccaggct

SEQ ID NO: 1873333 - DNA, 15 bp, Homo sapiens
gctagagtgcagtga

SEQ ID NO: 1873334 - DNA, 15 bp, Homo sapiens
ctagagtgcagtgat

SEQ ID NO: 1873335 - DNA, 15 bp, Homo sapiens
tagagtgcagtgatc

SEQ ID NO: 1873336 - DNA, 15 bp, Homo sapiens
agagtgcagtgatct

SEQ ID NO: 1873337 - DNA, 15 bp, Homo sapiens
gagtgcagtgatctc

SEQ ID NO: 1873338 - DNA, 15 bp, Homo sapiens
agtgcagtgatctcg

SEQ ID NO: 1873339 - DNA, 15 bp, Homo sapiens
gtgcagtgatctcgg

SEQ ID NO: 1873340 - DNA, 15 bp, Homo sapiens
tgcagtgatctcggc

SEQ ID NO: 1873341 - DNA, 15 bp, Homo sapiens
gcagtgatctcggct

SEQ ID NO: 1873342 - DNA, 15 bp, Homo sapiens
cagtgatctcggctc

SEQ ID NO: 1873343 - DNA, 15 bp, Homo sapiens
agtgatctcggctca

SEQ ID NO: 1873344 - DNA, 15 bp, Homo sapiens
cactgcagcctctgc

SEQ ID NO: 1873345 - DNA, 15 bp, Homo sapiens
actgcagcctctgcc

SEQ ID NO: 1873346 - DNA, 15 bp, Homo sapiens
ctgcagcctctgcct

SEQ ID NO: 1873347 - DNA, 15 bp, Homo sapiens
acacatatatatctt

SEQ ID NO: 1873348 - DNA, 15 bp, Homo sapiens
cacatatatatcttc

SEQ ID NO: 1873349 - DNA, 15 bp, Homo sapiens
acatatatatcttcc

SEQ ID NO: 1873350 - DNA, 15 bp, Homo sapiens
catatatatcttccc

SEQ ID NO: 1873351 - DNA, 15 bp, Homo sapiens
atatatatcttccct

SEQ ID NO: 1873352 - DNA, 15 bp, Homo sapiens
tatatatcttccctt

SEQ ID NO: 1873353 - DNA, 15 bp, Homo sapiens
atatatcttcccttg

SEQ ID NO: 1873354 - DNA, 15 bp, Homo sapiens
tatatcttcccttgt

SEQ ID NO: 1873355 - DNA, 15 bp, Homo sapiens
atatcttcccttgtt

SEQ ID NO: 1873356 - DNA, 15 bp, Homo sapiens
tatcttcccttgtta

SEQ ID NO: 1873357 - DNA, 15 bp, Homo sapiens
atcttcccttgttaa

SEQ ID NO: 1873358 - DNA, 15 bp, Homo sapiens
tcttcccttgttaat

SEQ ID NO: 1873359 - DNA, 15 bp, Homo sapiens
cttcccttgttaatc

SEQ ID NO: 1873360 - DNA, 15 bp, Homo sapiens
ttcccttgttaatct

SEQ ID NO: 1873361 - DNA, 15 bp, Homo sapiens
tcccttgttaatctc

SEQ ID NO: 1873362 - DNA, 15 bp, Homo sapiens
cccttgttaatctcc

SEQ ID NO: 1873363 - DNA, 15 bp, Homo sapiens
ccttgttaatctcca

SEQ ID NO: 1873364 - DNA, 15 bp, Homo sapiens
cttgttaatctccat

SEQ ID NO: 1873365 - DNA, 15 bp, Homo sapiens
ttgttaatctccata

SEQ ID NO: 1873366 - DNA, 15 bp, Homo sapiens
tgttaatctccatac

SEQ ID NO: 1873367 - DNA, 15 bp, Homo sapiens
gttaatctccatact

SEQ ID NO: 1873368 - DNA, 15 bp, Homo sapiens
ttaatctccatactc

SEQ ID NO: 1873369 - DNA, 15 bp, Homo sapiens
taatctccatactct

SEQ ID NO: 1873370 - DNA, 15 bp, Homo sapiens
aatctccatactctg

SEQ ID NO: 1873371 - DNA, 15 bp, Homo sapiens
atctccatactctgg

SEQ ID NO: 1873372 - DNA, 15 bp, Homo sapiens
tctccatactctggg

SEQ ID NO: 1873373 - DNA, 15 bp, Homo sapiens
ctccatactctggga

SEQ ID NO: 1873374 - DNA, 15 bp, Homo sapiens
tccatactctgggag

SEQ ID NO: 1873375 - DNA, 15 bp, Homo sapiens
ccatactctgggagt

SEQ ID NO: 1873376 - DNA, 15 bp, Homo sapiens
catactctgggagtg

SEQ ID NO: 1873377 - DNA, 15 bp, Homo sapiens
atactctgggagtgc

SEQ ID NO: 1873378 - DNA, 15 bp, Homo sapiens
tactctgggagtgca

SEQ ID NO: 1873379 - DNA, 15 bp, Homo sapiens
actctgggagtgcaa

SEQ ID NO: 1873380 - DNA, 15 bp, Homo sapiens
ctctgggagtgcaag

SEQ ID NO: 1873381 - DNA, 15 bp, Homo sapiens
tctgggagtgcaagt

SEQ ID NO: 1873382 - DNA, 15 bp, Homo sapiens
ctgggagtgcaagtc

SEQ ID NO: 1873383 - DNA, 15 bp, Homo sapiens
tgggagtgcaagtct

SEQ ID NO: 1873384 - DNA, 15 bp, Homo sapiens
gggagtgcaagtctg

SEQ ID NO: 1873385 - DNA, 15 bp, Homo sapiens
ggagtgcaagtctgg

SEQ ID NO: 1873386 - DNA, 15 bp, Homo sapiens
gagtgcaagtctgga

SEQ ID NO: 1873387 - DNA, 15 bp, Homo sapiens
agtgcaagtctggaa

SEQ ID NO: 1873388 - DNA, 15 bp, Homo sapiens
gtgcaagtctggaaa

SEQ ID NO: 1873389 - DNA, 15 bp, Homo sapiens
tgcaagtctggaaat

SEQ ID NO: 1873390 - DNA, 15 bp, Homo sapiens
gcaagtctggaaatg

SEQ ID NO: 1873391 - DNA, 15 bp, Homo sapiens
caagtctggaaatgc

SEQ ID NO: 1873392 - DNA, 15 bp, Homo sapiens
aagtctggaaatgca

SEQ ID NO: 1873393 - DNA, 15 bp, Homo sapiens
agtctggaaatgcat

SEQ ID NO: 1873394 - DNA, 15 bp, Homo sapiens
gtctggaaatgcatt

SEQ ID NO: 1873395 - DNA, 15 bp, Homo sapiens
tctggaaatgcattt

SEQ ID NO: 1873396 - DNA, 15 bp, Homo sapiens
ctggaaatgcatttt

SEQ ID NO: 1873397 - DNA, 15 bp, Homo sapiens
tggaaatgcattttc

SEQ ID NO: 1873398 - DNA, 15 bp, Homo sapiens
ggaaatgcattttcc

SEQ ID NO: 1873399 - DNA, 15 bp, Homo sapiens
gaaatgcattttcct

SEQ ID NO: 1873400 - DNA, 15 bp, Homo sapiens
aaatgcattttcctc

SEQ ID NO: 1873401 - DNA, 15 bp, Homo sapiens
aatgcattttcctca

SEQ ID NO: 1873402 - DNA, 15 bp, Homo sapiens
atgcattttcctcag

SEQ ID NO: 1873403 - DNA, 15 bp, Homo sapiens
tgcattttcctcagg

SEQ ID NO: 1873404 - DNA, 15 bp, Homo sapiens
gcattttcctcaggt

SEQ ID NO: 1873405 - DNA, 15 bp, Homo sapiens
cattttcctcaggtg

SEQ ID NO: 1873406 - DNA, 15 bp, Homo sapiens
attttcctcaggtgt

SEQ ID NO: 1873407 - DNA, 15 bp, Homo sapiens
ttttcctcaggtgtt

SEQ ID NO: 1873408 - DNA, 15 bp, Homo sapiens
tttcctcaggtgttt

SEQ ID NO: 1873409 - DNA, 15 bp, Homo sapiens
ttcctcaggtgttta

SEQ ID NO: 1873410 - DNA, 15 bp, Homo sapiens
tcctcaggtgtttag

SEQ ID NO: 1873411 - DNA, 15 bp, Homo sapiens
cctcaggtgtttagc

SEQ ID NO: 1873412 - DNA, 15 bp, Homo sapiens
ctcaggtgtttagct

SEQ ID NO: 1873413 - DNA, 15 bp, Homo sapiens
tcaggtgtttagctg

SEQ ID NO: 1873414 - DNA, 15 bp, Homo sapiens
caggtgtttagctgc

SEQ ID NO: 1873415 - DNA, 15 bp, Homo sapiens
aggtgtttagctgca

SEQ ID NO: 1873416 - DNA, 15 bp, Homo sapiens
ggtgtttagctgcat

SEQ ID NO: 1873417 - DNA, 15 bp, Homo sapiens
gtgtttagctgcatt

SEQ ID NO: 1873418 - DNA, 15 bp, Homo sapiens
tgtttagctgcatta

SEQ ID NO: 1873419 - DNA, 15 bp, Homo sapiens
gtttagctgcattaa

SEQ ID NO: 1873420 - DNA, 15 bp, Homo sapiens
tttagctgcattaaa

SEQ ID NO: 1873421 - DNA, 15 bp, Homo sapiens
ttagctgcattaaaa

SEQ ID NO: 1873422 - DNA, 15 bp, Homo sapiens
tagctgcattaaaac

SEQ ID NO: 1873423 - DNA, 15 bp, Homo sapiens
agctgcattaaaacg

SEQ ID NO: 1873424 - DNA, 15 bp, Homo sapiens
gctgcattaaaacgc

SEQ ID NO: 1873425 - DNA, 15 bp, Homo sapiens
ctgcattaaaacgct

SEQ ID NO: 1873426 - DNA, 15 bp, Homo sapiens
tgcattaaaacgctt

SEQ ID NO: 1873427 - DNA, 15 bp, Homo sapiens
gcattaaaacgcttt

SEQ ID NO: 1873428 - DNA, 15 bp, Homo sapiens
cattaaaacgctttt

SEQ ID NO: 1873429 - DNA, 15 bp, Homo sapiens
attaaaacgcttttt

SEQ ID NO: 1873430 - DNA, 15 bp, Homo sapiens
ttaaaacgcttttta

SEQ ID NO: 1873431 - DNA, 15 bp, Homo sapiens
taaaacgctttttaa

SEQ ID NO: 1873432 - DNA, 15 bp, Homo sapiens
aaaacgctttttaaa

SEQ ID NO: 1873433 - DNA, 15 bp, Homo sapiens
aaacgctttttaaaa

SEQ ID NO: 1873434 - DNA, 15 bp, Homo sapiens
aacgctttttaaaac

SEQ ID NO: 1873435 - DNA, 15 bp, Homo sapiens
acgctttttaaaacg

SEQ ID NO: 1873436 - DNA, 15 bp, Homo sapiens
cgctttttaaaacgc

SEQ ID NO: 1873437 - DNA, 15 bp, Homo sapiens
gctttttaaaacgct

SEQ ID NO: 1873438 - DNA, 15 bp, Homo sapiens
ctttttaaaacgctt

SEQ ID NO: 1873439 - DNA, 15 bp, Homo sapiens
tttttaaaacgcttg

SEQ ID NO: 1873440 - DNA, 15 bp, Homo sapiens
ttttaaaacgcttga

SEQ ID NO: 1873441 - DNA, 15 bp, Homo sapiens
tttaaaacgcttgag

SEQ ID NO: 1873442 - DNA, 15 bp, Homo sapiens
ttaaaacgcttgaga

SEQ ID NO: 1873443 - DNA, 15 bp, Homo sapiens
taaaacgcttgagat

SEQ ID NO: 1873444 - DNA, 15 bp, Homo sapiens
aaaacgcttgagata

SEQ ID NO: 1873445 - DNA, 15 bp, Homo sapiens
aaacgcttgagataa

SEQ ID NO: 1873446 - DNA, 15 bp, Homo sapiens
aacgcttgagataat

SEQ ID NO: 1873447 - DNA, 15 bp, Homo sapiens
acgcttgagataatg

SEQ ID NO: 1873448 - DNA, 15 bp, Homo sapiens
cgcttgagataatgt

SEQ ID NO: 1873449 - DNA, 15 bp, Homo sapiens
gcttgagataatgta

SEQ ID NO: 1873450 - DNA, 15 bp, Homo sapiens
cttgagataatgtac

SEQ ID NO: 1873451 - DNA, 15 bp, Homo sapiens
ttgagataatgtact

SEQ ID NO: 1873452 - DNA, 15 bp, Homo sapiens
tgagataatgtactc

SEQ ID NO: 1873453 - DNA, 15 bp, Homo sapiens
gagataatgtactca

SEQ ID NO: 1873454 - DNA, 15 bp, Homo sapiens
agataatgtactcat

SEQ ID NO: 1873455 - DNA, 15 bp, Homo sapiens
gataatgtactcatt

SEQ ID NO: 1873456 - DNA, 15 bp, Homo sapiens
ataatgtactcattt

SEQ ID NO: 1873457 - DNA, 15 bp, Homo sapiens
taatgtactcatttt

SEQ ID NO: 1873458 - DNA, 15 bp, Homo sapiens
aatgtactcattttg

SEQ ID NO: 1873459 - DNA, 15 bp, Homo sapiens
atgtactcattttgt

SEQ ID NO: 1873460 - DNA, 15 bp, Homo sapiens
tgtactcattttgtt

SEQ ID NO: 1873461 - DNA, 15 bp, Homo sapiens
gtactcattttgtta

SEQ ID NO: 1873462 - DNA, 15 bp, Homo sapiens
tactcattttgttag

SEQ ID NO: 1873463 - DNA, 15 bp, Homo sapiens
actcattttgttagg

SEQ ID NO: 1873464 - DNA, 15 bp, Homo sapiens
ctcattttgttagga

SEQ ID NO: 1873465 - DNA, 15 bp, Homo sapiens
tcattttgttaggaa

SEQ ID NO: 1873466 - DNA, 15 bp, Homo sapiens
cattttgttaggaaa

SEQ ID NO: 1873467 - DNA, 15 bp, Homo sapiens
attttgttaggaaac

SEQ ID NO: 1873468 - DNA, 15 bp, Homo sapiens
ttttgttaggaaact

SEQ ID NO: 1873469 - DNA, 15 bp, Homo sapiens
tttgttaggaaactt

SEQ ID NO: 1873470 - DNA, 15 bp, Homo sapiens
ttgttaggaaacttg

SEQ ID NO: 1873471 - DNA, 15 bp, Homo sapiens
tgttaggaaacttgt

SEQ ID NO: 1873472 - DNA, 15 bp, Homo sapiens
gttaggaaacttgta

SEQ ID NO: 1873473 - DNA, 15 bp, Homo sapiens
ttaggaaacttgtac

SEQ ID NO: 1873474 - DNA, 15 bp, Homo sapiens
taggaaacttgtacc

SEQ ID NO: 1873475 - DNA, 15 bp, Homo sapiens
aggaaacttgtacct

SEQ ID NO: 1873476 - DNA, 15 bp, Homo sapiens
ggaaacttgtacctt

SEQ ID NO: 1873477 - DNA, 15 bp, Homo sapiens
gaaacttgtaccttt

SEQ ID NO: 1873478 - DNA, 15 bp, Homo sapiens
aaacttgtacctttc

SEQ ID NO: 1873479 - DNA, 15 bp, Homo sapiens
aacttgtacctttca

SEQ ID NO: 1873480 - DNA, 15 bp, Homo sapiens
acttgtacctttcag

SEQ ID NO: 1873481 - DNA, 15 bp, Homo sapiens
cttgtacctttcaga

SEQ ID NO: 1873482 - DNA, 15 bp, Homo sapiens
ttgtacctttcagat

SEQ ID NO: 1873483 - DNA, 15 bp, Homo sapiens
tgtacctttcagata

SEQ ID NO: 1873484 - DNA, 15 bp, Homo sapiens
gtacctttcagatac

SEQ ID NO: 1873485 - DNA, 15 bp, Homo sapiens
tacctttcagatact

SEQ ID NO: 1873486 - DNA, 15 bp, Homo sapiens
acctttcagatacta

SEQ ID NO: 1873487 - DNA, 15 bp, Homo sapiens
cctttcagatactaa

SEQ ID NO: 1873488 - DNA, 15 bp, Homo sapiens
ctttcagatactaac

SEQ ID NO: 1873489 - DNA, 15 bp, Homo sapiens
tttcagatactaact

SEQ ID NO: 1873490 - DNA, 15 bp, Homo sapiens
ttcagatactaactt

SEQ ID NO: 1873491 - DNA, 15 bp, Homo sapiens
tcagatactaactta

SEQ ID NO: 1873492 - DNA, 15 bp, Homo sapiens
cagatactaacttaa

SEQ ID NO: 1873493 - DNA, 15 bp, Homo sapiens
agatactaacttaag

SEQ ID NO: 1873494 - DNA, 15 bp, Homo sapiens
gatactaacttaagt

SEQ ID NO: 1873495 - DNA, 15 bp, Homo sapiens
atactaacttaagta

SEQ ID NO: 1873496 - DNA, 15 bp, Homo sapiens
tactaacttaagtat

SEQ ID NO: 1873497 - DNA, 15 bp, Homo sapiens
actaacttaagtatt

SEQ ID NO: 1873498 - DNA, 15 bp, Homo sapiens
ctaacttaagtattt

SEQ ID NO: 1873499 - DNA, 15 bp, Homo sapiens
taacttaagtatttt

SEQ ID NO: 1873500 - DNA, 15 bp, Homo sapiens
aacttaagtattttg

SEQ ID NO: 1873501 - DNA, 15 bp, Homo sapiens
acttaagtattttga

SEQ ID NO: 1873502 - DNA, 15 bp, Homo sapiens
cttaagtattttgat

SEQ ID NO: 1873503 - DNA, 15 bp, Homo sapiens
ttaagtattttgatt

SEQ ID NO: 1873504 - DNA, 15 bp, Homo sapiens
taagtattttgatta

SEQ ID NO: 1873505 - DNA, 15 bp, Homo sapiens
aagtattttgattac

SEQ ID NO: 1873506 - DNA, 15 bp, Homo sapiens
agtattttgattact

SEQ ID NO: 1873507 - DNA, 15 bp, Homo sapiens
gtattttgattacta

SEQ ID NO: 1873508 - DNA, 15 bp, Homo sapiens
tattttgattactaa

SEQ ID NO: 1873509 - DNA, 15 bp, Homo sapiens
attttgattactaac

SEQ ID NO: 1873510 - DNA, 15 bp, Homo sapiens
ttttgattactaact

SEQ ID NO: 1873511 - DNA, 15 bp, Homo sapiens
tttgattactaactt

SEQ ID NO: 1873512 - DNA, 15 bp, Homo sapiens
ttgattactaacttg

SEQ ID NO: 1873513 - DNA, 15 bp, Homo sapiens
tgattactaacttga

SEQ ID NO: 1873514 - DNA, 15 bp, Homo sapiens
gattactaacttgaa

SEQ ID NO: 1873515 - DNA, 15 bp, Homo sapiens
attactaacttgaac

SEQ ID NO: 1873516 - DNA, 15 bp, Homo sapiens
ttactaacttgaact

SEQ ID NO: 1873517 - DNA, 15 bp, Homo sapiens
tactaacttgaactc

SEQ ID NO: 1873518 - DNA, 15 bp, Homo sapiens
actaacttgaactca

SEQ ID NO: 1873519 - DNA, 15 bp, Homo sapiens
ctaacttgaactcat

SEQ ID NO: 1873520 - DNA, 15 bp, Homo sapiens
taacttgaactcatg

SEQ ID NO: 1873521 - DNA, 15 bp, Homo sapiens
aacttgaactcatgt

SEQ ID NO: 1873522 - DNA, 15 bp, Homo sapiens
acttgaactcatgtt

SEQ ID NO: 1873523 - DNA, 15 bp, Homo sapiens
cttgaactcatgttc

SEQ ID NO: 1873524 - DNA, 15 bp, Homo sapiens
ttgaactcatgttca

SEQ ID NO: 1873525 - DNA, 15 bp, Homo sapiens
tgaactcatgttcat

SEQ ID NO: 1873526 - DNA, 15 bp, Homo sapiens
gaactcatgttcata

SEQ ID NO: 1873527 - DNA, 15 bp, Homo sapiens
aactcatgttcatat

SEQ ID NO: 1873528 - DNA, 15 bp, Homo sapiens
actcatgttcatatt

SEQ ID NO: 1873529 - DNA, 15 bp, Homo sapiens
ctcatgttcatattt

SEQ ID NO: 1873530 - DNA, 15 bp, Homo sapiens
tcatgttcatattta

SEQ ID NO: 1873531 - DNA, 15 bp, Homo sapiens
catgttcatatttac

SEQ ID NO: 1873532 - DNA, 15 bp, Homo sapiens
atgttcatatttaca

SEQ ID NO: 1873533 - DNA, 15 bp, Homo sapiens
tgttcatatttacat

SEQ ID NO: 1873534 - DNA, 15 bp, Homo sapiens
gttcatatttacatt

SEQ ID NO: 1873535 - DNA, 15 bp, Homo sapiens
ttcatatttacattt

SEQ ID NO: 1873536 - DNA, 15 bp, Homo sapiens
tcatatttacatttg

SEQ ID NO: 1873537 - DNA, 15 bp, Homo sapiens
catatttacatttgt

SEQ ID NO: 1873538 - DNA, 15 bp, Homo sapiens
atatttacatttgtt

SEQ ID NO: 1873539 - DNA, 15 bp, Homo sapiens
tatttacatttgttt

SEQ ID NO: 1873540 - DNA, 15 bp, Homo sapiens
atttacatttgtttt

SEQ ID NO: 1873541 - DNA, 15 bp, Homo sapiens
tttacatttgttttg

SEQ ID NO: 1873542 - DNA, 15 bp, Homo sapiens
ttacatttgttttgt

SEQ ID NO: 1873543 - DNA, 15 bp, Homo sapiens
tacatttgttttgta

SEQ ID NO: 1873544 - DNA, 15 bp, Homo sapiens
acatttgttttgtag

SEQ ID NO: 1873545 - DNA, 15 bp, Homo sapiens
catttgttttgtagt

SEQ ID NO: 1873546 - DNA, 15 bp, Homo sapiens
atttgttttgtagta

SEQ ID NO: 1873547 - DNA, 15 bp, Homo sapiens
tttgttttgtagtat

SEQ ID NO: 1873548 - DNA, 15 bp, Homo sapiens
ttgttttgtagtatc

SEQ ID NO: 1873549 - DNA, 15 bp, Homo sapiens
tgttttgtagtatcc

SEQ ID NO: 1873550 - DNA, 15 bp, Homo sapiens
gttttgtagtatccc

SEQ ID NO: 1873551 - DNA, 15 bp, Homo sapiens
ttttgtagtatccct

SEQ ID NO: 1873552 - DNA, 15 bp, Homo sapiens
tttgtagtatccctc

SEQ ID NO: 1873553 - DNA, 15 bp, Homo sapiens
ttgtagtatccctcg

SEQ ID NO: 1873554 - DNA, 15 bp, Homo sapiens
tgtagtatccctcgg

SEQ ID NO: 1873555 - DNA, 15 bp, Homo sapiens
gtagtatccctcggg

SEQ ID NO: 1873556 - DNA, 15 bp, Homo sapiens
tagtatccctcggga

SEQ ID NO: 1873557 - DNA, 15 bp, Homo sapiens
agtatccctcgggat

SEQ ID NO: 1873558 - DNA, 15 bp, Homo sapiens
gtatccctcgggatc

SEQ ID NO: 1873559 - DNA, 15 bp, Homo sapiens
tatccctcgggatcg

SEQ ID NO: 1873560 - DNA, 15 bp, Homo sapiens
atccctcgggatcgt

SEQ ID NO: 1873561 - DNA, 15 bp, Homo sapiens
tccctcgggatcgtg

SEQ ID NO: 1873562 - DNA, 15 bp, Homo sapiens
ccctcgggatcgtgt

SEQ ID NO: 1873563 - DNA, 15 bp, Homo sapiens
cctcgggatcgtgtc

SEQ ID NO: 1873564 - DNA, 15 bp, Homo sapiens
ctcgggatcgtgtcc

SEQ ID NO: 1873565 - DNA, 15 bp, Homo sapiens
tcgggatcgtgtccc

SEQ ID NO: 1873566 - DNA, 15 bp, Homo sapiens
cgggatcgtgtccct

SEQ ID NO: 1873567 - DNA, 15 bp, Homo sapiens
gggatcgtgtccctg

SEQ ID NO: 1873568 - DNA, 15 bp, Homo sapiens
ggatcgtgtccctgg

SEQ ID NO: 1873569 - DNA, 15 bp, Homo sapiens
gatcgtgtccctggg

SEQ ID NO: 1873570 - DNA, 15 bp, Homo sapiens
atcgtgtccctggga

SEQ ID NO: 1873571 - DNA, 15 bp, Homo sapiens
tcgtgtccctgggag

SEQ ID NO: 1873572 - DNA, 15 bp, Homo sapiens
cgtgtccctgggagg

SEQ ID NO: 1873573 - DNA, 15 bp, Homo sapiens
gtgtccctgggaggc

SEQ ID NO: 1873574 - DNA, 15 bp, Homo sapiens
tgtccctgggaggcg

SEQ ID NO: 1873575 - DNA, 15 bp, Homo sapiens
gtccctgggaggcgg

SEQ ID NO: 1873576 - DNA, 15 bp, Homo sapiens
tccctgggaggcgga

SEQ ID NO: 1873577 - DNA, 15 bp, Homo sapiens
ccctgggaggcggat

SEQ ID NO: 1873578 - DNA, 15 bp, Homo sapiens
cctgggaggcggata

SEQ ID NO: 1873579 - DNA, 15 bp, Homo sapiens
ctgggaggcggatag

SEQ ID NO: 1873580 - DNA, 15 bp, Homo sapiens
tgggaggcggatagg

SEQ ID NO: 1873581 - DNA, 15 bp, Homo sapiens
gggaggcggatagga

SEQ ID NO: 1873582 - DNA, 15 bp, Homo sapiens
ggaggcggataggat

SEQ ID NO: 1873583 - DNA, 15 bp, Homo sapiens
gaggcggataggatt

SEQ ID NO: 1873584 - DNA, 15 bp, Homo sapiens
aggcggataggattc

SEQ ID NO: 1873585 - DNA, 15 bp, Homo sapiens
ggcggataggattca

SEQ ID NO: 1873586 - DNA, 15 bp, Homo sapiens
gcggataggattcag

SEQ ID NO: 1873587 - DNA, 15 bp, Homo sapiens
cggataggattcagc

SEQ ID NO: 1873588 - DNA, 15 bp, Homo sapiens
ggataggattcagca

SEQ ID NO: 1873589 - DNA, 15 bp, Homo sapiens
gataggattcagcac

SEQ ID NO: 1873590 - DNA, 15 bp, Homo sapiens
ataggattcagcact

SEQ ID NO: 1873591 - DNA, 15 bp, Homo sapiens
taggattcagcactc

SEQ ID NO: 1873592 - DNA, 15 bp, Homo sapiens
aggattcagcactct

SEQ ID NO: 1873593 - DNA, 15 bp, Homo sapiens
ggattcagcactcta

SEQ ID NO: 1873594 - DNA, 15 bp, Homo sapiens
gattcagcactctag

SEQ ID NO: 1873595 - DNA, 15 bp, Homo sapiens
attcagcactctaga

SEQ ID NO: 1873596 - DNA, 15 bp, Homo sapiens
ttcagcactctagaa

SEQ ID NO: 1873597 - DNA, 15 bp, Homo sapiens
tcagcactctagaat

SEQ ID NO: 1873598 - DNA, 15 bp, Homo sapiens
cagcactctagaatt

SEQ ID NO: 1873599 - DNA, 15 bp, Homo sapiens
agcactctagaattg

SEQ ID NO: 1873600 - DNA, 15 bp, Homo sapiens
gcactctagaattgt

SEQ ID NO: 1873601 - DNA, 15 bp, Homo sapiens
cactctagaattgtc

SEQ ID NO: 1873602 - DNA, 15 bp, Homo sapiens
actctagaattgtct

SEQ ID NO: 1873603 - DNA, 15 bp, Homo sapiens
ctctagaattgtctc

SEQ ID NO: 1873604 - DNA, 15 bp, Homo sapiens
tctagaattgtctca

SEQ ID NO: 1873605 - DNA, 15 bp, Homo sapiens
ctagaattgtctcac

SEQ ID NO: 1873606 - DNA, 15 bp, Homo sapiens
tagaattgtctcacc

SEQ ID NO: 1873607 - DNA, 15 bp, Homo sapiens
agaattgtctcacca

SEQ ID NO: 1873608 - DNA, 15 bp, Homo sapiens
gaattgtctcaccat

SEQ ID NO: 1873609 - DNA, 15 bp, Homo sapiens
aattgtctcaccatt

SEQ ID NO: 1873610 - DNA, 15 bp, Homo sapiens
attgtctcaccattt

SEQ ID NO: 1873611 - DNA, 15 bp, Homo sapiens
ttgtctcaccatttg

SEQ ID NO: 1873612 - DNA, 15 bp, Homo sapiens
tgtctcaccatttga

SEQ ID NO: 1873613 - DNA, 15 bp, Homo sapiens
gtctcaccatttgaa

SEQ ID NO: 1873614 - DNA, 15 bp, Homo sapiens
tctcaccatttgaat

SEQ ID NO: 1873615 - DNA, 15 bp, Homo sapiens
ctcaccatttgaata

SEQ ID NO: 1873616 - DNA, 15 bp, Homo sapiens
tcaccatttgaatag

SEQ ID NO: 1873617 - DNA, 15 bp, Homo sapiens
caccatttgaatagg

SEQ ID NO: 1873618 - DNA, 15 bp, Homo sapiens
accatttgaataggt

SEQ ID NO: 1873619 - DNA, 15 bp, Homo sapiens
ccatttgaataggtg

SEQ ID NO: 1873620 - DNA, 15 bp, Homo sapiens
catttgaataggtgc

SEQ ID NO: 1873621 - DNA, 15 bp, Homo sapiens
atttgaataggtgct

SEQ ID NO: 1873622 - DNA, 15 bp, Homo sapiens
tttgaataggtgctg

SEQ ID NO: 1873623 - DNA, 15 bp, Homo sapiens
ttgaataggtgctgc

SEQ ID NO: 1873624 - DNA, 15 bp, Homo sapiens
tgaataggtgctgct

SEQ ID NO: 1873625 - DNA, 15 bp, Homo sapiens
gaataggtgctgctc

SEQ ID NO: 1873626 - DNA, 15 bp, Homo sapiens
aataggtgctgctca

SEQ ID NO: 1873627 - DNA, 15 bp, Homo sapiens
ataggtgctgctcag

SEQ ID NO: 1873628 - DNA, 15 bp, Homo sapiens
taggtgctgctcagc

SEQ ID NO: 1873629 - DNA, 15 bp, Homo sapiens
aggtgctgctcagcc

SEQ ID NO: 1873630 - DNA, 15 bp, Homo sapiens
ggtgctgctcagccc

SEQ ID NO: 1873631 - DNA, 15 bp, Homo sapiens
gtgctgctcagccct

SEQ ID NO: 1873632 - DNA, 15 bp, Homo sapiens
tgctgctcagccctt

SEQ ID NO: 1873633 - DNA, 15 bp, Homo sapiens
gctgctcagcccttt

SEQ ID NO: 1873634 - DNA, 15 bp, Homo sapiens
ctgctcagccctttt

SEQ ID NO: 1873635 - DNA, 15 bp, Homo sapiens
tgctcagcccttttg

SEQ ID NO: 1873636 - DNA, 15 bp, Homo sapiens
gctcagcccttttga

SEQ ID NO: 1873637 - DNA, 15 bp, Homo sapiens
ctcagcccttttgag

SEQ ID NO: 1873638 - DNA, 15 bp, Homo sapiens
tcagcccttttgagt

SEQ ID NO: 1873639 - DNA, 15 bp, Homo sapiens
cagcccttttgagtc

SEQ ID NO: 1873640 - DNA, 15 bp, Homo sapiens
agcccttttgagtct

SEQ ID NO: 1873641 - DNA, 15 bp, Homo sapiens
gcccttttgagtctg

SEQ ID NO: 1873642 - DNA, 15 bp, Homo sapiens
cccttttgagtctgt

SEQ ID NO: 1873643 - DNA, 15 bp, Homo sapiens
ccttttgagtctgtc

SEQ ID NO: 1873644 - DNA, 15 bp, Homo sapiens
cttttgagtctgtca

SEQ ID NO: 1873645 - DNA, 15 bp, Homo sapiens
ttttgagtctgtcat

SEQ ID NO: 1873646 - DNA, 15 bp, Homo sapiens
tttgagtctgtcatc

SEQ ID NO: 1873647 - DNA, 15 bp, Homo sapiens
ttgagtctgtcatcg

SEQ ID NO: 1873648 - DNA, 15 bp, Homo sapiens
tgagtctgtcatcgg

SEQ ID NO: 1873649 - DNA, 15 bp, Homo sapiens
gagtctgtcatcgga

SEQ ID NO: 1873650 - DNA, 15 bp, Homo sapiens
agtctgtcatcggaa

SEQ ID NO: 1873651 - DNA, 15 bp, Homo sapiens
gtctgtcatcggaaa

SEQ ID NO: 1873652 - DNA, 15 bp, Homo sapiens
tctgtcatcggaaag

SEQ ID NO: 1873653 - DNA, 15 bp, Homo sapiens
ctgtcatcggaaaga

SEQ ID NO: 1873654 - DNA, 15 bp, Homo sapiens
tgtcatcggaaagac

SEQ ID NO: 1873655 - DNA, 15 bp, Homo sapiens
gtcatcggaaagacc

SEQ ID NO: 1873656 - DNA, 15 bp, Homo sapiens
tcatcggaaagacca

SEQ ID NO: 1873657 - DNA, 15 bp, Homo sapiens
catcggaaagaccat

SEQ ID NO: 1873658 - DNA, 15 bp, Homo sapiens
atcggaaagaccatg

SEQ ID NO: 1873659 - DNA, 15 bp, Homo sapiens
tcggaaagaccatgg

SEQ ID NO: 1873660 - DNA, 15 bp, Homo sapiens
cggaaagaccatggc

SEQ ID NO: 1873661 - DNA, 15 bp, Homo sapiens
ggaaagaccatggct

SEQ ID NO: 1873662 - DNA, 15 bp, Homo sapiens
gaaagaccatggctt

SEQ ID NO: 1873663 - DNA, 15 bp, Homo sapiens
aaagaccatggcttt

SEQ ID NO: 1873664 - DNA, 15 bp, Homo sapiens
aagaccatggctttc

SEQ ID NO: 1873665 - DNA, 15 bp, Homo sapiens
agaccatggctttct

SEQ ID NO: 1873666 - DNA, 15 bp, Homo sapiens
gaccatggctttctc

SEQ ID NO: 1873667 - DNA, 15 bp, Homo sapiens
accatggctttctcg

SEQ ID NO: 1873668 - DNA, 15 bp, Homo sapiens
ccatggctttctcgc

SEQ ID NO: 1873669 - DNA, 15 bp, Homo sapiens
catggctttctcgct

SEQ ID NO: 1873670 - DNA, 15 bp, Homo sapiens
atggctttctcgctt

SEQ ID NO: 1873671 - DNA, 15 bp, Homo sapiens
tggctttctcgcttt

SEQ ID NO: 1873672 - DNA, 15 bp, Homo sapiens
ggctttctcgctttt

SEQ ID NO: 1873673 - DNA, 15 bp, Homo sapiens
gctttctcgcttttc

SEQ ID NO: 1873674 - DNA, 15 bp, Homo sapiens
ctttctcgcttttca

SEQ ID NO: 1873675 - DNA, 15 bp, Homo sapiens
tttctcgcttttcat

SEQ ID NO: 1873676 - DNA, 15 bp, Homo sapiens
ttctcgcttttcatc

SEQ ID NO: 1873677 - DNA, 15 bp, Homo sapiens
tctcgcttttcatct

SEQ ID NO: 1873678 - DNA, 15 bp, Homo sapiens
ctcgcttttcatctt

SEQ ID NO: 1873679 - DNA, 15 bp, Homo sapiens
tcgcttttcatcttt

SEQ ID NO: 1873680 - DNA, 15 bp, Homo sapiens
cgcttttcatctttt

SEQ ID NO: 1873681 - DNA, 15 bp, Homo sapiens
gcttttcatcttttt

SEQ ID NO: 1873682 - DNA, 15 bp, Homo sapiens
cttttcatctttttg

SEQ ID NO: 1873683 - DNA, 15 bp, Homo sapiens
ttttcatctttttgg

SEQ ID NO: 1873684 - DNA, 15 bp, Homo sapiens
tttcatctttttgga

SEQ ID NO: 1873685 - DNA, 15 bp, Homo sapiens
ttcatctttttggat

SEQ ID NO: 1873686 - DNA, 15 bp, Homo sapiens
tcatctttttggatg

SEQ ID NO: 1873687 - DNA, 15 bp, Homo sapiens
catctttttggatgg

SEQ ID NO: 1873688 - DNA, 15 bp, Homo sapiens
atctttttggatggc

SEQ ID NO: 1873689 - DNA, 15 bp, Homo sapiens
tctttttggatggct

SEQ ID NO: 1873690 - DNA, 15 bp, Homo sapiens
ctttttggatggctg

SEQ ID NO: 1873691 - DNA, 15 bp, Homo sapiens
tttttggatggctgc

SEQ ID NO: 1873692 - DNA, 15 bp, Homo sapiens
ttttggatggctgct

SEQ ID NO: 1873693 - DNA, 15 bp, Homo sapiens
tttggatggctgctt

SEQ ID NO: 1873694 - DNA, 15 bp, Homo sapiens
ttggatggctgcttg

SEQ ID NO: 1873695 - DNA, 15 bp, Homo sapiens
tggatggctgcttgt

SEQ ID NO: 1873696 - DNA, 15 bp, Homo sapiens
ggatggctgcttgtc

SEQ ID NO: 1873697 - DNA, 15 bp, Homo sapiens
gatggctgcttgtcg

SEQ ID NO: 1873698 - DNA, 15 bp, Homo sapiens
atggctgcttgtcgc

SEQ ID NO: 1873699 - DNA, 15 bp, Homo sapiens
tggctgcttgtcgca

SEQ ID NO: 1873700 - DNA, 15 bp, Homo sapiens
ggctgcttgtcgcaa

SEQ ID NO: 1873701 - DNA, 15 bp, Homo sapiens
gctgcttgtcgcaat

SEQ ID NO: 1873702 - DNA, 15 bp, Homo sapiens
ctgcttgtcgcaata

SEQ ID NO: 1873703 - DNA, 15 bp, Homo sapiens
tgcttgtcgcaatat

SEQ ID NO: 1873704 - DNA, 15 bp, Homo sapiens
gcttgtcgcaatatt

SEQ ID NO: 1873705 - DNA, 15 bp, Homo sapiens
cttgtcgcaatattg

SEQ ID NO: 1873706 - DNA, 15 bp, Homo sapiens
ttgtcgcaatattgt

SEQ ID NO: 1873707 - DNA, 15 bp, Homo sapiens
tgtcgcaatattgtc

SEQ ID NO: 1873708 - DNA, 15 bp, Homo sapiens
gtcgcaatattgtct

SEQ ID NO: 1873709 - DNA, 15 bp, Homo sapiens
tcgcaatattgtctt

SEQ ID NO: 1873710 - DNA, 15 bp, Homo sapiens
cgcaatattgtcttc

SEQ ID NO: 1873711 - DNA, 15 bp, Homo sapiens
gcaatattgtcttct

SEQ ID NO: 1873712 - DNA, 15 bp, Homo sapiens
caatattgtcttctt

SEQ ID NO: 1873713 - DNA, 15 bp, Homo sapiens
aatattgtcttcttc

SEQ ID NO: 1873714 - DNA, 15 bp, Homo sapiens
atattgtcttcttcg

SEQ ID NO: 1873715 - DNA, 15 bp, Homo sapiens
tattgtcttcttcgc

SEQ ID NO: 1873716 - DNA, 15 bp, Homo sapiens
attgtcttcttcgct

SEQ ID NO: 1873717 - DNA, 15 bp, Homo sapiens
ttgtcttcttcgctt

SEQ ID NO: 1873718 - DNA, 15 bp, Homo sapiens
tgtcttcttcgcttt

SEQ ID NO: 1873719 - DNA, 15 bp, Homo sapiens
gtcttcttcgcttta

SEQ ID NO: 1873720 - DNA, 15 bp, Homo sapiens
tcttcttcgctttag

SEQ ID NO: 1873721 - DNA, 15 bp, Homo sapiens
cttcttcgctttaga

SEQ ID NO: 1873722 - DNA, 15 bp, Homo sapiens
ttcttcgctttagac

SEQ ID NO: 1873723 - DNA, 15 bp, Homo sapiens
tcttcgctttagaca

SEQ ID NO: 1873724 - DNA, 15 bp, Homo sapiens
cttcgctttagacaa

SEQ ID NO: 1873725 - DNA, 15 bp, Homo sapiens
ttcgctttagacaag

SEQ ID NO: 1873726 - DNA, 15 bp, Homo sapiens
tcgctttagacaagt

SEQ ID NO: 1873727 - DNA, 15 bp, Homo sapiens
cgctttagacaagta

SEQ ID NO: 1873728 - DNA, 15 bp, Homo sapiens
gctttagacaagtat

SEQ ID NO: 1873729 - DNA, 15 bp, Homo sapiens
ctttagacaagtatg

SEQ ID NO: 1873730 - DNA, 15 bp, Homo sapiens
tttagacaagtatgt

SEQ ID NO: 1873731 - DNA, 15 bp, Homo sapiens
ttagacaagtatgtc

SEQ ID NO: 1873732 - DNA, 15 bp, Homo sapiens
tagacaagtatgtct

SEQ ID NO: 1873733 - DNA, 15 bp, Homo sapiens
agacaagtatgtctc

SEQ ID NO: 1873734 - DNA, 15 bp, Homo sapiens
gacaagtatgtctcc

SEQ ID NO: 1873735 - DNA, 15 bp, Homo sapiens
acaagtatgtctcca

SEQ ID NO: 1873736 - DNA, 15 bp, Homo sapiens
caagtatgtctccag

SEQ ID NO: 1873737 - DNA, 15 bp, Homo sapiens
aagtatgtctccagg

SEQ ID NO: 1873738 - DNA, 15 bp, Homo sapiens
agtatgtctccagga

SEQ ID NO: 1873739 - DNA, 15 bp, Homo sapiens
gtatgtctccaggat

SEQ ID NO: 1873740 - DNA, 15 bp, Homo sapiens
tatgtctccaggata

SEQ ID NO: 1873741 - DNA, 15 bp, Homo sapiens
atgtctccaggatac

SEQ ID NO: 1873742 - DNA, 15 bp, Homo sapiens
tgtctccaggatacc

SEQ ID NO: 1873743 - DNA, 15 bp, Homo sapiens
gtctccaggatacct

SEQ ID NO: 1873744 - DNA, 15 bp, Homo sapiens
tctccaggatacctt

SEQ ID NO: 1873745 - DNA, 15 bp, Homo sapiens
ctccaggataccttc

SEQ ID NO: 1873746 - DNA, 15 bp, Homo sapiens
tccaggataccttct

SEQ ID NO: 1873747 - DNA, 15 bp, Homo sapiens
ccaggataccttctg

SEQ ID NO: 1873748 - DNA, 15 bp, Homo sapiens
caggataccttctgg

SEQ ID NO: 1873749 - DNA, 15 bp, Homo sapiens
aggataccttctggt

SEQ ID NO: 1873750 - DNA, 15 bp, Homo sapiens
ggataccttctggtc

SEQ ID NO: 1873751 - DNA, 15 bp, Homo sapiens
gataccttctggtct

SEQ ID NO: 1873752 - DNA, 15 bp, Homo sapiens
ataccttctggtctc

SEQ ID NO: 1873753 - DNA, 15 bp, Homo sapiens
taccttctggtctca

SEQ ID NO: 1873754 - DNA, 15 bp, Homo sapiens
accttctggtctcaa

SEQ ID NO: 1873755 - DNA, 15 bp, Homo sapiens
ccttctggtctcaaa

SEQ ID NO: 1873756 - DNA, 15 bp, Homo sapiens
cttctggtctcaaag

SEQ ID NO: 1873757 - DNA, 15 bp, Homo sapiens
ttctggtctcaaagt

SEQ ID NO: 1873758 - DNA, 15 bp, Homo sapiens
tctggtctcaaagtt

SEQ ID NO: 1873759 - DNA, 15 bp, Homo sapiens
ctggtctcaaagttc

SEQ ID NO: 1873760 - DNA, 15 bp, Homo sapiens
tggtctcaaagttct

SEQ ID NO: 1873761 - DNA, 15 bp, Homo sapiens
ggtctcaaagttcta

SEQ ID NO: 1873762 - DNA, 15 bp, Homo sapiens
gtctcaaagttctat

SEQ ID NO: 1873763 - DNA, 15 bp, Homo sapiens
tctcaaagttctata

SEQ ID NO: 1873764 - DNA, 15 bp, Homo sapiens
ctcaaagttctatac

SEQ ID NO: 1873765 - DNA, 15 bp, Homo sapiens
tcaaagttctatacc

SEQ ID NO: 1873766 - DNA, 15 bp, Homo sapiens
caaagttctatacct

SEQ ID NO: 1873767 - DNA, 15 bp, Homo sapiens
aaagttctatacctt

SEQ ID NO: 1873768 - DNA, 15 bp, Homo sapiens
aagttctataccttt

SEQ ID NO: 1873769 - DNA, 15 bp, Homo sapiens
agttctataccttta

SEQ ID NO: 1873770 - DNA, 15 bp, Homo sapiens
gttctatacctttaa

SEQ ID NO: 1873771 - DNA, 15 bp, Homo sapiens
ttctatacctttaag

SEQ ID NO: 1873772 - DNA, 15 bp, Homo sapiens
tctatacctttaaga

SEQ ID NO: 1873773 - DNA, 15 bp, Homo sapiens
ctatacctttaagaa

SEQ ID NO: 1873774 - DNA, 15 bp, Homo sapiens
tatacctttaagaag

SEQ ID NO: 1873775 - DNA, 15 bp, Homo sapiens
atacctttaagaagt

SEQ ID NO: 1873776 - DNA, 15 bp, Homo sapiens
tacctttaagaagtt

SEQ ID NO: 1873777 - DNA, 15 bp, Homo sapiens
acctttaagaagttg

SEQ ID NO: 1873778 - DNA, 15 bp, Homo sapiens
cctttaagaagttgt

SEQ ID NO: 1873779 - DNA, 15 bp, Homo sapiens
ctttaagaagttgtt

SEQ ID NO: 1873780 - DNA, 15 bp, Homo sapiens
tttaagaagttgttt

SEQ ID NO: 1873781 - DNA, 15 bp, Homo sapiens
ttaagaagttgtttg

SEQ ID NO: 1873782 - DNA, 15 bp, Homo sapiens
taagaagttgtttga

SEQ ID NO: 1873783 - DNA, 15 bp, Homo sapiens
aagaagttgtttgaa

SEQ ID NO: 1873784 - DNA, 15 bp, Homo sapiens
agaagttgtttgaat

SEQ ID NO: 1873785 - DNA, 15 bp, Homo sapiens
gaagttgtttgaata

SEQ ID NO: 1873786 - DNA, 15 bp, Homo sapiens
aagttgtttgaatat

SEQ ID NO: 1873787 - DNA, 15 bp, Homo sapiens
agttgtttgaatata

SEQ ID NO: 1873788 - DNA, 15 bp, Homo sapiens
gttgtttgaatatat

SEQ ID NO: 1873789 - DNA, 15 bp, Homo sapiens
ttgtttgaatatatg

SEQ ID NO: 1873790 - DNA, 15 bp, Homo sapiens
tgtttgaatatatgt

SEQ ID NO: 1873791 - DNA, 15 bp, Homo sapiens
gtttgaatatatgtt

SEQ ID NO: 1873792 - DNA, 15 bp, Homo sapiens
tttgaatatatgttt

SEQ ID NO: 1873793 - DNA, 15 bp, Homo sapiens
ttgaatatatgtttt

SEQ ID NO: 1873794 - DNA, 15 bp, Homo sapiens
tgaatatatgtttta

SEQ ID NO: 1873795 - DNA, 15 bp, Homo sapiens
gaatatatgttttaa

SEQ ID NO: 1873796 - DNA, 15 bp, Homo sapiens
aatatatgttttaat

SEQ ID NO: 1873797 - DNA, 15 bp, Homo sapiens
atatatgttttaatg

SEQ ID NO: 1873798 - DNA, 15 bp, Homo sapiens
tatatgttttaatgg

SEQ ID NO: 1873799 - DNA, 15 bp, Homo sapiens
atatgttttaatgga

SEQ ID NO: 1873800 - DNA, 15 bp, Homo sapiens
tatgttttaatggaa

SEQ ID NO: 1873801 - DNA, 15 bp, Homo sapiens
atgttttaatggaat

SEQ ID NO: 1873802 - DNA, 15 bp, Homo sapiens
tgttttaatggaatt

SEQ ID NO: 1873803 - DNA, 15 bp, Homo sapiens
gttttaatggaatta

SEQ ID NO: 1873804 - DNA, 15 bp, Homo sapiens
ttttaatggaattac

SEQ ID NO: 1873805 - DNA, 15 bp, Homo sapiens
tttaatggaattacg

SEQ ID NO: 1873806 - DNA, 15 bp, Homo sapiens
ttaatggaattacgt

SEQ ID NO: 1873807 - DNA, 15 bp, Homo sapiens
taatggaattacgta

SEQ ID NO: 1873808 - DNA, 15 bp, Homo sapiens
aatggaattacgtat

SEQ ID NO: 1873809 - DNA, 15 bp, Homo sapiens
atggaattacgtatt

SEQ ID NO: 1873810 - DNA, 15 bp, Homo sapiens
tggaattacgtattt

SEQ ID NO: 1873811 - DNA, 15 bp, Homo sapiens
ggaattacgtatttg

SEQ ID NO: 1873812 - DNA, 15 bp, Homo sapiens
gaattacgtatttgt

SEQ ID NO: 1873813 - DNA, 15 bp, Homo sapiens
aattacgtatttgtt

SEQ ID NO: 1873814 - DNA, 15 bp, Homo sapiens
attacgtatttgttg

SEQ ID NO: 1873815 - DNA, 15 bp, Homo sapiens
ttacgtatttgttgg

SEQ ID NO: 1873816 - DNA, 15 bp, Homo sapiens
tacgtatttgttggt

SEQ ID NO: 1873817 - DNA, 15 bp, Homo sapiens
acgtatttgttggta

SEQ ID NO: 1873818 - DNA, 15 bp, Homo sapiens
cgtatttgttggtaa

SEQ ID NO: 1873819 - DNA, 15 bp, Homo sapiens
gtatttgttggtaac

SEQ ID NO: 1873820 - DNA, 15 bp, Homo sapiens
tatttgttggtaaca

SEQ ID NO: 1873821 - DNA, 15 bp, Homo sapiens
atttgttggtaacag

SEQ ID NO: 1873822 - DNA, 15 bp, Homo sapiens
tttgttggtaacagt

SEQ ID NO: 1873823 - DNA, 15 bp, Homo sapiens
ttgttggtaacagtg

SEQ ID NO: 1873824 - DNA, 15 bp, Homo sapiens
tgttggtaacagtgt

SEQ ID NO: 1873825 - DNA, 15 bp, Homo sapiens
gttggtaacagtgtt

SEQ ID NO: 1873826 - DNA, 15 bp, Homo sapiens
ttggtaacagtgtta

SEQ ID NO: 1873827 - DNA, 15 bp, Homo sapiens
tggtaacagtgttag

SEQ ID NO: 1873828 - DNA, 15 bp, Homo sapiens
ggtaacagtgttagt

SEQ ID NO: 1873829 - DNA, 15 bp, Homo sapiens
gtaacagtgttagtc

SEQ ID NO: 1873830 - DNA, 15 bp, Homo sapiens
taacagtgttagtct

SEQ ID NO: 1873831 - DNA, 15 bp, Homo sapiens
aacagtgttagtctg

SEQ ID NO: 1873832 - DNA, 15 bp, Homo sapiens
acagtgttagtctgt

SEQ ID NO: 1873833 - DNA, 15 bp, Homo sapiens
cagtgttagtctgtt

SEQ ID NO: 1873834 - DNA, 15 bp, Homo sapiens
agtgttagtctgttt

SEQ ID NO: 1873835 - DNA, 15 bp, Homo sapiens
gtgttagtctgtttt

SEQ ID NO: 1873836 - DNA, 15 bp, Homo sapiens
tgttagtctgttttg

SEQ ID NO: 1873837 - DNA, 15 bp, Homo sapiens
gttagtctgttttgt

SEQ ID NO: 1873838 - DNA, 15 bp, Homo sapiens
ttagtctgttttgtg

SEQ ID NO: 1873839 - DNA, 15 bp, Homo sapiens
tagtctgttttgtgc

SEQ ID NO: 1873840 - DNA, 15 bp, Homo sapiens
agtctgttttgtgct

SEQ ID NO: 1873841 - DNA, 15 bp, Homo sapiens
gtctgttttgtgctg

SEQ ID NO: 1873842 - DNA, 15 bp, Homo sapiens
tctgttttgtgctgc

SEQ ID NO: 1873843 - DNA, 15 bp, Homo sapiens
ctgttttgtgctgct

SEQ ID NO: 1873844 - DNA, 15 bp, Homo sapiens
tgttttgtgctgctg

SEQ ID NO: 1873845 - DNA, 15 bp, Homo sapiens
gttttgtgctgctgt

SEQ ID NO: 1873846 - DNA, 15 bp, Homo sapiens
ttttgtgctgctgta

SEQ ID NO: 1873847 - DNA, 15 bp, Homo sapiens
tttgtgctgctgtaa

SEQ ID NO: 1873848 - DNA, 15 bp, Homo sapiens
ttgtgctgctgtaac

SEQ ID NO: 1873849 - DNA, 15 bp, Homo sapiens
tgtgctgctgtaaca

SEQ ID NO: 1873850 - DNA, 15 bp, Homo sapiens
gtgctgctgtaacag

SEQ ID NO: 1873851 - DNA, 15 bp, Homo sapiens
tgctgctgtaacaga

SEQ ID NO: 1873852 - DNA, 15 bp, Homo sapiens
gctgctgtaacagaa

SEQ ID NO: 1873853 - DNA, 15 bp, Homo sapiens
ctgctgtaacagaat

SEQ ID NO: 1873854 - DNA, 15 bp, Homo sapiens
tgctgtaacagaata

SEQ ID NO: 1873855 - DNA, 15 bp, Homo sapiens
gctgtaacagaatac

SEQ ID NO: 1873856 - DNA, 15 bp, Homo sapiens
ctgtaacagaatacc

SEQ ID NO: 1873857 - DNA, 15 bp, Homo sapiens
tgtaacagaatacca

SEQ ID NO: 1873858 - DNA, 15 bp, Homo sapiens
gtaacagaataccac

SEQ ID NO: 1873859 - DNA, 15 bp, Homo sapiens
taacagaataccaca

SEQ ID NO: 1873860 - DNA, 15 bp, Homo sapiens
aacagaataccacag

SEQ ID NO: 1873861 - DNA, 15 bp, Homo sapiens
acagaataccacaga

SEQ ID NO: 1873862 - DNA, 15 bp, Homo sapiens
cagaataccacagat

SEQ ID NO: 1873863 - DNA, 15 bp, Homo sapiens
agaataccacagatt

SEQ ID NO: 1873864 - DNA, 15 bp, Homo sapiens
gaataccacagattg

SEQ ID NO: 1873865 - DNA, 15 bp, Homo sapiens
aataccacagattgg

SEQ ID NO: 1873866 - DNA, 15 bp, Homo sapiens
ataccacagattggg

SEQ ID NO: 1873867 - DNA, 15 bp, Homo sapiens
taccacagattgggt

SEQ ID NO: 1873868 - DNA, 15 bp, Homo sapiens
accacagattgggta

SEQ ID NO: 1873869 - DNA, 15 bp, Homo sapiens
ccacagattgggtaa

SEQ ID NO: 1873870 - DNA, 15 bp, Homo sapiens
cacagattgggtaat

SEQ ID NO: 1873871 - DNA, 15 bp, Homo sapiens
acagattgggtaatt

SEQ ID NO: 1873872 - DNA, 15 bp, Homo sapiens
cagattgggtaattt

SEQ ID NO: 1873873 - DNA, 15 bp, Homo sapiens
agattgggtaatttt

SEQ ID NO: 1873874 - DNA, 15 bp, Homo sapiens
gattgggtaattttt

SEQ ID NO: 1873875 - DNA, 15 bp, Homo sapiens
attgggtaattttta

SEQ ID NO: 1873876 - DNA, 15 bp, Homo sapiens
ttgggtaatttttaa

SEQ ID NO: 1873877 - DNA, 15 bp, Homo sapiens
tgggtaatttttaaa

SEQ ID NO: 1873878 - DNA, 15 bp, Homo sapiens
gggtaatttttaaag

SEQ ID NO: 1873879 - DNA, 15 bp, Homo sapiens
ggtaatttttaaaga

SEQ ID NO: 1873880 - DNA, 15 bp, Homo sapiens
gtaatttttaaagaa

SEQ ID NO: 1873881 - DNA, 15 bp, Homo sapiens
taatttttaaagaac

SEQ ID NO: 1873882 - DNA, 15 bp, Homo sapiens
aatttttaaagaaca

SEQ ID NO: 1873883 - DNA, 15 bp, Homo sapiens
atttttaaagaacac

SEQ ID NO: 1873884 - DNA, 15 bp, Homo sapiens
tttttaaagaacaca

SEQ ID NO: 1873885 - DNA, 15 bp, Homo sapiens
ttttaaagaacacat

SEQ ID NO: 1873886 - DNA, 15 bp, Homo sapiens
tttaaagaacacatt

SEQ ID NO: 1873887 - DNA, 15 bp, Homo sapiens
ttaaagaacacattt

SEQ ID NO: 1873888 - DNA, 15 bp, Homo sapiens
taaagaacacatttt

SEQ ID NO: 1873889 - DNA, 15 bp, Homo sapiens
aaagaacacatttta

SEQ ID NO: 1873890 - DNA, 15 bp, Homo sapiens
aagaacacattttat

SEQ ID NO: 1873891 - DNA, 15 bp, Homo sapiens
agaacacattttatt

SEQ ID NO: 1873892 - DNA, 15 bp, Homo sapiens
gaacacattttattt

SEQ ID NO: 1873893 - DNA, 15 bp, Homo sapiens
aacacattttatttc

SEQ ID NO: 1873894 - DNA, 15 bp, Homo sapiens
acacattttatttct

SEQ ID NO: 1873895 - DNA, 15 bp, Homo sapiens
cacattttatttctt

SEQ ID NO: 1873896 - DNA, 15 bp, Homo sapiens
acattttatttcttg

SEQ ID NO: 1873897 - DNA, 15 bp, Homo sapiens
cattttatttcttgt

SEQ ID NO: 1873898 - DNA, 15 bp, Homo sapiens
attttatttcttgta

SEQ ID NO: 1873899 - DNA, 15 bp, Homo sapiens
ttttatttcttgtag

SEQ ID NO: 1873900 - DNA, 15 bp, Homo sapiens
tttatttcttgtagt

SEQ ID NO: 1873901 - DNA, 15 bp, Homo sapiens
ttatttcttgtagtt

SEQ ID NO: 1873902 - DNA, 15 bp, Homo sapiens
tatttcttgtagttc

SEQ ID NO: 1873903 - DNA, 15 bp, Homo sapiens
atttcttgtagttca

SEQ ID NO: 1873904 - DNA, 15 bp, Homo sapiens
tttcttgtagttcag

SEQ ID NO: 1873905 - DNA, 15 bp, Homo sapiens
ttcttgtagttcagg

SEQ ID NO: 1873906 - DNA, 15 bp, Homo sapiens
tcttgtagttcagga

SEQ ID NO: 1873907 - DNA, 15 bp, Homo sapiens
cttgtagttcaggag

SEQ ID NO: 1873908 - DNA, 15 bp, Homo sapiens
ttgtagttcaggagt

SEQ ID NO: 1873909 - DNA, 15 bp, Homo sapiens
tgtagttcaggagtc

SEQ ID NO: 1873910 - DNA, 15 bp, Homo sapiens
gtagttcaggagtca

SEQ ID NO: 1873911 - DNA, 15 bp, Homo sapiens
tagttcaggagtcag

SEQ ID NO: 1873912 - DNA, 15 bp, Homo sapiens
agttcaggagtcagg

SEQ ID NO: 1873913 - DNA, 15 bp, Homo sapiens
gttcaggagtcaggg

SEQ ID NO: 1873914 - DNA, 15 bp, Homo sapiens
ttcaggagtcaggga

SEQ ID NO: 1873915 - DNA, 15 bp, Homo sapiens
tcaggagtcagggaa

SEQ ID NO: 1873916 - DNA, 15 bp, Homo sapiens
caggagtcagggaag

SEQ ID NO: 1873917 - DNA, 15 bp, Homo sapiens
aggagtcagggaagt

SEQ ID NO: 1873918 - DNA, 15 bp, Homo sapiens
ggagtcagggaagtc

SEQ ID NO: 1873919 - DNA, 15 bp, Homo sapiens
gagtcagggaagtct

SEQ ID NO: 1873920 - DNA, 15 bp, Homo sapiens
agtcagggaagtctt

SEQ ID NO: 1873921 - DNA, 15 bp, Homo sapiens
gtcagggaagtcttg

SEQ ID NO: 1873922 - DNA, 15 bp, Homo sapiens
tcagggaagtcttga

SEQ ID NO: 1873923 - DNA, 15 bp, Homo sapiens
cagggaagtcttgag

SEQ ID NO: 1873924 - DNA, 15 bp, Homo sapiens
agggaagtcttgaga

SEQ ID NO: 1873925 - DNA, 15 bp, Homo sapiens
gggaagtcttgagat

SEQ ID NO: 1873926 - DNA, 15 bp, Homo sapiens
ggaagtcttgagatc

SEQ ID NO: 1873927 - DNA, 15 bp, Homo sapiens
gaagtcttgagatca

SEQ ID NO: 1873928 - DNA, 15 bp, Homo sapiens
aagtcttgagatcaa

SEQ ID NO: 1873929 - DNA, 15 bp, Homo sapiens
agtcttgagatcaag

SEQ ID NO: 1873930 - DNA, 15 bp, Homo sapiens
gtcttgagatcaagg

SEQ ID NO: 1873931 - DNA, 15 bp, Homo sapiens
tcttgagatcaaggg

SEQ ID NO: 1873932 - DNA, 15 bp, Homo sapiens
cttgagatcaaggga

SEQ ID NO: 1873933 - DNA, 15 bp, Homo sapiens
ttgagatcaagggac

SEQ ID NO: 1873934 - DNA, 15 bp, Homo sapiens
tgagatcaagggact

SEQ ID NO: 1873935 - DNA, 15 bp, Homo sapiens
gagatcaagggactg

SEQ ID NO: 1873936 - DNA, 15 bp, Homo sapiens
agatcaagggactgg

SEQ ID NO: 1873937 - DNA, 15 bp, Homo sapiens
gatcaagggactggc

SEQ ID NO: 1873938 - DNA, 15 bp, Homo sapiens
atcaagggactggca

SEQ ID NO: 1873939 - DNA, 15 bp, Homo sapiens
tcaagggactggcat

SEQ ID NO: 1873940 - DNA, 15 bp, Homo sapiens
caagggactggcatg

SEQ ID NO: 1873941 - DNA, 15 bp, Homo sapiens
aagggactggcatgt

SEQ ID NO: 1873942 - DNA, 15 bp, Homo sapiens
agggactggcatgtg

SEQ ID NO: 1873943 - DNA, 15 bp, Homo sapiens
gggactggcatgtgg

SEQ ID NO: 1873944 - DNA, 15 bp, Homo sapiens
ggactggcatgtggg

SEQ ID NO: 1873945 - DNA, 15 bp, Homo sapiens
gactggcatgtgggg

SEQ ID NO: 1873946 - DNA, 15 bp, Homo sapiens
actggcatgtgggga

SEQ ID NO: 1873947 - DNA, 15 bp, Homo sapiens
ctggcatgtggggag

SEQ ID NO: 1873948 - DNA, 15 bp, Homo sapiens
tggcatgtggggagg

SEQ ID NO: 1873949 - DNA, 15 bp, Homo sapiens
ggcatgtggggaggt

SEQ ID NO: 1873950 - DNA, 15 bp, Homo sapiens
gcatgtggggaggtc

SEQ ID NO: 1873951 - DNA, 15 bp, Homo sapiens
catgtggggaggtcc

SEQ ID NO: 1873952 - DNA, 15 bp, Homo sapiens
atgtggggaggtcct

SEQ ID NO: 1873953 - DNA, 15 bp, Homo sapiens
tgtggggaggtcctt

SEQ ID NO: 1873954 - DNA, 15 bp, Homo sapiens
gtggggaggtccttc

SEQ ID NO: 1873955 - DNA, 15 bp, Homo sapiens
tggggaggtccttct

SEQ ID NO: 1873956 - DNA, 15 bp, Homo sapiens
ggggaggtccttctt

SEQ ID NO: 1873957 - DNA, 15 bp, Homo sapiens
gggaggtccttcttg

SEQ ID NO: 1873958 - DNA, 15 bp, Homo sapiens
ggaggtccttcttgc

SEQ ID NO: 1873959 - DNA, 15 bp, Homo sapiens
gaggtccttcttgct

SEQ ID NO: 1873960 - DNA, 15 bp, Homo sapiens
aggtccttcttgctg

SEQ ID NO: 1873961 - DNA, 15 bp, Homo sapiens
ggtccttcttgctgt

SEQ ID NO: 1873962 - DNA, 15 bp, Homo sapiens
gtccttcttgctgtc

SEQ ID NO: 1873963 - DNA, 15 bp, Homo sapiens
tccttcttgctgtca

SEQ ID NO: 1873964 - DNA, 15 bp, Homo sapiens
ccttcttgctgtcat

SEQ ID NO: 1873965 - DNA, 15 bp, Homo sapiens
cttcttgctgtcatc

SEQ ID NO: 1873966 - DNA, 15 bp, Homo sapiens
ttcttgctgtcatcc

SEQ ID NO: 1873967 - DNA, 15 bp, Homo sapiens
tcttgctgtcatccc

SEQ ID NO: 1873968 - DNA, 15 bp, Homo sapiens
cttgctgtcatccct

SEQ ID NO: 1873969 - DNA, 15 bp, Homo sapiens
ttgctgtcatccctt

SEQ ID NO: 1873970 - DNA, 15 bp, Homo sapiens
tgctgtcatcccttg

SEQ ID NO: 1873971 - DNA, 15 bp, Homo sapiens
gctgtcatcccttgg

SEQ ID NO: 1873972 - DNA, 15 bp, Homo sapiens
ctgtcatcccttggt

SEQ ID NO: 1873973 - DNA, 15 bp, Homo sapiens
tgtcatcccttggtg

SEQ ID NO: 1873974 - DNA, 15 bp, Homo sapiens
gtcatcccttggtgg

SEQ ID NO: 1873975 - DNA, 15 bp, Homo sapiens
tcatcccttggtgga

SEQ ID NO: 1873976 - DNA, 15 bp, Homo sapiens
catcccttggtggaa

SEQ ID NO: 1873977 - DNA, 15 bp, Homo sapiens
atcccttggtggaag

SEQ ID NO: 1873978 - DNA, 15 bp, Homo sapiens
tcccttggtggaagg

SEQ ID NO: 1873979 - DNA, 15 bp, Homo sapiens
cccttggtggaaggt

SEQ ID NO: 1873980 - DNA, 15 bp, Homo sapiens
ccttggtggaaggtg

SEQ ID NO: 1873981 - DNA, 15 bp, Homo sapiens
cttggtggaaggtgg

SEQ ID NO: 1873982 - DNA, 15 bp, Homo sapiens
ttggtggaaggtgga

SEQ ID NO: 1873983 - DNA, 15 bp, Homo sapiens
tggtggaaggtggaa

SEQ ID NO: 1873984 - DNA, 15 bp, Homo sapiens
ggtggaaggtggaag

SEQ ID NO: 1873985 - DNA, 15 bp, Homo sapiens
gtggaaggtggaagg

SEQ ID NO: 1873986 - DNA, 15 bp, Homo sapiens
tggaaggtggaaggg

SEQ ID NO: 1873987 - DNA, 15 bp, Homo sapiens
ggaaggtggaagggt

SEQ ID NO: 1873988 - DNA, 15 bp, Homo sapiens
gaaggtggaagggta

SEQ ID NO: 1873989 - DNA, 15 bp, Homo sapiens
aaggtggaagggtaa

SEQ ID NO: 1873990 - DNA, 15 bp, Homo sapiens
aggtggaagggtaag

SEQ ID NO: 1873991 - DNA, 15 bp, Homo sapiens
ggtggaagggtaaga

SEQ ID NO: 1873992 - DNA, 15 bp, Homo sapiens
gtggaagggtaagag

SEQ ID NO: 1873993 - DNA, 15 bp, Homo sapiens
tggaagggtaagaga

SEQ ID NO: 1873994 - DNA, 15 bp, Homo sapiens
ggaagggtaagagaa

SEQ ID NO: 1873995 - DNA, 15 bp, Homo sapiens
gaagggtaagagaac

SEQ ID NO: 1873996 - DNA, 15 bp, Homo sapiens
aagggtaagagaaca

SEQ ID NO: 1873997 - DNA, 15 bp, Homo sapiens
agggtaagagaacat

SEQ ID NO: 1873998 - DNA, 15 bp, Homo sapiens
gggtaagagaacatg

SEQ ID NO: 1873999 - DNA, 15 bp, Homo sapiens
ggtaagagaacatga

SEQ ID NO: 1874000 - DNA, 15 bp, Homo sapiens
gtaagagaacatgag

SEQ ID NO: 1874001 - DNA, 15 bp, Homo sapiens
taagagaacatgaga

SEQ ID NO: 1874002 - DNA, 15 bp, Homo sapiens
aagagaacatgagaa

SEQ ID NO: 1874003 - DNA, 15 bp, Homo sapiens
agagaacatgagaaa

SEQ ID NO: 1874004 - DNA, 15 bp, Homo sapiens
gagaacatgagaaaa

SEQ ID NO: 1874005 - DNA, 15 bp, Homo sapiens
agaacatgagaaaac

SEQ ID NO: 1874006 - DNA, 15 bp, Homo sapiens
gaacatgagaaaaca

SEQ ID NO: 1874007 - DNA, 15 bp, Homo sapiens
aacatgagaaaacaa

SEQ ID NO: 1874008 - DNA, 15 bp, Homo sapiens
acatgagaaaacaag

SEQ ID NO: 1874009 - DNA, 15 bp, Homo sapiens
catgagaaaacaaga

SEQ ID NO: 1874010 - DNA, 15 bp, Homo sapiens
atgagaaaacaagag

SEQ ID NO: 1874011 - DNA, 15 bp, Homo sapiens
tgagaaaacaagagg

SEQ ID NO: 1874012 - DNA, 15 bp, Homo sapiens
gagaaaacaagaggg

SEQ ID NO: 1874013 - DNA, 15 bp, Homo sapiens
agaaaacaagagggg

SEQ ID NO: 1874014 - DNA, 15 bp, Homo sapiens
gaaaacaagaggggg

SEQ ID NO: 1874015 - DNA, 15 bp, Homo sapiens
aaaacaagagggggc

SEQ ID NO: 1874016 - DNA, 15 bp, Homo sapiens
aaacaagagggggcc

SEQ ID NO: 1874017 - DNA, 15 bp, Homo sapiens
aacaagagggggccc

SEQ ID NO: 1874018 - DNA, 15 bp, Homo sapiens
acaagagggggccca

SEQ ID NO: 1874019 - DNA, 15 bp, Homo sapiens
caagagggggcccac

SEQ ID NO: 1874020 - DNA, 15 bp, Homo sapiens
aagagggggcccact

SEQ ID NO: 1874021 - DNA, 15 bp, Homo sapiens
agagggggcccactt

SEQ ID NO: 1874022 - DNA, 15 bp, Homo sapiens
gagggggcccacttt

SEQ ID NO: 1874023 - DNA, 15 bp, Homo sapiens
agggggcccactttc

SEQ ID NO: 1874024 - DNA, 15 bp, Homo sapiens
gggggcccactttca

SEQ ID NO: 1874025 - DNA, 15 bp, Homo sapiens
ggggcccactttcac

SEQ ID NO: 1874026 - DNA, 15 bp, Homo sapiens
gggcccactttcact

SEQ ID NO: 1874027 - DNA, 15 bp, Homo sapiens
ggcccactttcactt

SEQ ID NO: 1874028 - DNA, 15 bp, Homo sapiens
gcccactttcacttt

SEQ ID NO: 1874029 - DNA, 15 bp, Homo sapiens
cccactttcactttt

SEQ ID NO: 1874030 - DNA, 15 bp, Homo sapiens
ccactttcactttta

SEQ ID NO: 1874031 - DNA, 15 bp, Homo sapiens
cactttcacttttat

SEQ ID NO: 1874032 - DNA, 15 bp, Homo sapiens
actttcacttttata

SEQ ID NO: 1874033 - DNA, 15 bp, Homo sapiens
ctttcacttttataa

SEQ ID NO: 1874034 - DNA, 15 bp, Homo sapiens
tttcacttttataac

SEQ ID NO: 1874035 - DNA, 15 bp, Homo sapiens
ttcacttttataaca

SEQ ID NO: 1874036 - DNA, 15 bp, Homo sapiens
tcacttttataacaa

SEQ ID NO: 1874037 - DNA, 15 bp, Homo sapiens
cacttttataacaaa

SEQ ID NO: 1874038 - DNA, 15 bp, Homo sapiens
acttttataacaaac

SEQ ID NO: 1874039 - DNA, 15 bp, Homo sapiens
cttttataacaaacc

SEQ ID NO: 1874040 - DNA, 15 bp, Homo sapiens
ttttataacaaacct

SEQ ID NO: 1874041 - DNA, 15 bp, Homo sapiens
tttataacaaaccta

SEQ ID NO: 1874042 - DNA, 15 bp, Homo sapiens
ttataacaaacctac

SEQ ID NO: 1874043 - DNA, 15 bp, Homo sapiens
tataacaaacctact

SEQ ID NO: 1874044 - DNA, 15 bp, Homo sapiens
ataacaaacctactc

SEQ ID NO: 1874045 - DNA, 15 bp, Homo sapiens
taacaaacctactcc

SEQ ID NO: 1874046 - DNA, 15 bp, Homo sapiens
aacaaacctactccc

SEQ ID NO: 1874047 - DNA, 15 bp, Homo sapiens
acaaacctactccct

SEQ ID NO: 1874048 - DNA, 15 bp, Homo sapiens
caaacctactccctc

SEQ ID NO: 1874049 - DNA, 15 bp, Homo sapiens
aaacctactccctca

SEQ ID NO: 1874050 - DNA, 15 bp, Homo sapiens
aacctactccctcaa

SEQ ID NO: 1874051 - DNA, 15 bp, Homo sapiens
acctactccctcaat

SEQ ID NO: 1874052 - DNA, 15 bp, Homo sapiens
cctactccctcaata

SEQ ID NO: 1874053 - DNA, 15 bp, Homo sapiens
ctactccctcaataa

SEQ ID NO: 1874054 - DNA, 15 bp, Homo sapiens
tactccctcaataac

SEQ ID NO: 1874055 - DNA, 15 bp, Homo sapiens
actccctcaataaca

SEQ ID NO: 1874056 - DNA, 15 bp, Homo sapiens
ctccctcaataacaa

SEQ ID NO: 1874057 - DNA, 15 bp, Homo sapiens
tccctcaataacaaa

SEQ ID NO: 1874058 - DNA, 15 bp, Homo sapiens
ccctcaataacaaaa

SEQ ID NO: 1874059 - DNA, 15 bp, Homo sapiens
cctcaataacaaaat

SEQ ID NO: 1874060 - DNA, 15 bp, Homo sapiens
ctcaataacaaaatt

SEQ ID NO: 1874061 - DNA, 15 bp, Homo sapiens
aacaaaattaattca

SEQ ID NO: 1874062 - DNA, 15 bp, Homo sapiens
acaaaattaattcat

SEQ ID NO: 1874063 - DNA, 15 bp, Homo sapiens
caaaattaattcatt

SEQ ID NO: 1874064 - DNA, 15 bp, Homo sapiens
aaaattaattcattc

SEQ ID NO: 1874065 - DNA, 15 bp, Homo sapiens
aaattaattcattct

SEQ ID NO: 1874066 - DNA, 15 bp, Homo sapiens
aattaattcattctt

SEQ ID NO: 1874067 - DNA, 15 bp, Homo sapiens
attaattcattcttg

SEQ ID NO: 1874068 - DNA, 15 bp, Homo sapiens
ttaattcattcttga

SEQ ID NO: 1874069 - DNA, 15 bp, Homo sapiens
taattcattcttgaa

SEQ ID NO: 1874070 - DNA, 15 bp, Homo sapiens
aattcattcttgaag

SEQ ID NO: 1874071 - DNA, 15 bp, Homo sapiens
attcattcttgaagg

SEQ ID NO: 1874072 - DNA, 15 bp, Homo sapiens
ttcattcttgaaggc

SEQ ID NO: 1874073 - DNA, 15 bp, Homo sapiens
tcattcttgaaggca

SEQ ID NO: 1874074 - DNA, 15 bp, Homo sapiens
cattcttgaaggcag

SEQ ID NO: 1874075 - DNA, 15 bp, Homo sapiens
attcttgaaggcaga

SEQ ID NO: 1874076 - DNA, 15 bp, Homo sapiens
ttcttgaaggcagag

SEQ ID NO: 1874077 - DNA, 15 bp, Homo sapiens
tcttgaaggcagagc

SEQ ID NO: 1874078 - DNA, 15 bp, Homo sapiens
cttgaaggcagagcc

SEQ ID NO: 1874079 - DNA, 15 bp, Homo sapiens
ttgaaggcagagcct

SEQ ID NO: 1874080 - DNA, 15 bp, Homo sapiens
tgaaggcagagcctt

SEQ ID NO: 1874081 - DNA, 15 bp, Homo sapiens
gaaggcagagccttc

SEQ ID NO: 1874082 - DNA, 15 bp, Homo sapiens
aaggcagagccttca

SEQ ID NO: 1874083 - DNA, 15 bp, Homo sapiens
aggcagagccttcat

SEQ ID NO: 1874084 - DNA, 15 bp, Homo sapiens
ggcagagccttcatg

SEQ ID NO: 1874085 - DNA, 15 bp, Homo sapiens
gcagagccttcatga

SEQ ID NO: 1874086 - DNA, 15 bp, Homo sapiens
cagagccttcatgac

SEQ ID NO: 1874087 - DNA, 15 bp, Homo sapiens
agagccttcatgacc

SEQ ID NO: 1874088 - DNA, 15 bp, Homo sapiens
gagccttcatgacct

SEQ ID NO: 1874089 - DNA, 15 bp, Homo sapiens
agccttcatgaccta

SEQ ID NO: 1874090 - DNA, 15 bp, Homo sapiens
gccttcatgacctaa

SEQ ID NO: 1874091 - DNA, 15 bp, Homo sapiens
ccttcatgacctaat

SEQ ID NO: 1874092 - DNA, 15 bp, Homo sapiens
cttcatgacctaatt

SEQ ID NO: 1874093 - DNA, 15 bp, Homo sapiens
ttcatgacctaatta

SEQ ID NO: 1874094 - DNA, 15 bp, Homo sapiens
tcatgacctaattac

SEQ ID NO: 1874095 - DNA, 15 bp, Homo sapiens
catgacctaattacc

SEQ ID NO: 1874096 - DNA, 15 bp, Homo sapiens
atgacctaattacca

SEQ ID NO: 1874097 - DNA, 15 bp, Homo sapiens
tgacctaattaccac

SEQ ID NO: 1874098 - DNA, 15 bp, Homo sapiens
gacctaattaccact

SEQ ID NO: 1874099 - DNA, 15 bp, Homo sapiens
acctaattaccactc

SEQ ID NO: 1874100 - DNA, 15 bp, Homo sapiens
cctaattaccactca

SEQ ID NO: 1874101 - DNA, 15 bp, Homo sapiens
ctaattaccactcac

SEQ ID NO: 1874102 - DNA, 15 bp, Homo sapiens
taattaccactcaca

SEQ ID NO: 1874103 - DNA, 15 bp, Homo sapiens
aattaccactcacag

SEQ ID NO: 1874104 - DNA, 15 bp, Homo sapiens
attaccactcacagg

SEQ ID NO: 1874105 - DNA, 15 bp, Homo sapiens
ttaccactcacaggt

SEQ ID NO: 1874106 - DNA, 15 bp, Homo sapiens
taccactcacaggtc

SEQ ID NO: 1874107 - DNA, 15 bp, Homo sapiens
accactcacaggtcc

SEQ ID NO: 1874108 - DNA, 15 bp, Homo sapiens
ccactcacaggtccc

SEQ ID NO: 1874109 - DNA, 15 bp, Homo sapiens
cactcacaggtccca

SEQ ID NO: 1874110 - DNA, 15 bp, Homo sapiens
actcacaggtcccac

SEQ ID NO: 1874111 - DNA, 15 bp, Homo sapiens
ctcacaggtcccacc

SEQ ID NO: 1874112 - DNA, 15 bp, Homo sapiens
tcacaggtcccacct

SEQ ID NO: 1874113 - DNA, 15 bp, Homo sapiens
cacaggtcccacctt

SEQ ID NO: 1874114 - DNA, 15 bp, Homo sapiens
acaggtcccaccttt

SEQ ID NO: 1874115 - DNA, 15 bp, Homo sapiens
caggtcccacctttc

SEQ ID NO: 1874116 - DNA, 15 bp, Homo sapiens
aggtcccacctttca

SEQ ID NO: 1874117 - DNA, 15 bp, Homo sapiens
ggtcccacctttcaa

SEQ ID NO: 1874118 - DNA, 15 bp, Homo sapiens
gtcccacctttcaac

SEQ ID NO: 1874119 - DNA, 15 bp, Homo sapiens
tcccacctttcaaca

SEQ ID NO: 1874120 - DNA, 15 bp, Homo sapiens
cccacctttcaacac

SEQ ID NO: 1874121 - DNA, 15 bp, Homo sapiens
ccacctttcaacact

SEQ ID NO: 1874122 - DNA, 15 bp, Homo sapiens
cacctttcaacactt

SEQ ID NO: 1874123 - DNA, 15 bp, Homo sapiens
acctttcaacacttt

SEQ ID NO: 1874124 - DNA, 15 bp, Homo sapiens
cctttcaacactttt

SEQ ID NO: 1874125 - DNA, 15 bp, Homo sapiens
ctttcaacacttttg

SEQ ID NO: 1874126 - DNA, 15 bp, Homo sapiens
tttcaacacttttgc

SEQ ID NO: 1874127 - DNA, 15 bp, Homo sapiens
ttcaacacttttgca

SEQ ID NO: 1874128 - DNA, 15 bp, Homo sapiens
tcaacacttttgcac

SEQ ID NO: 1874129 - DNA, 15 bp, Homo sapiens
caacacttttgcact

SEQ ID NO: 1874130 - DNA, 15 bp, Homo sapiens
aacacttttgcactt

SEQ ID NO: 1874131 - DNA, 15 bp, Homo sapiens
acacttttgcacttg

SEQ ID NO: 1874132 - DNA, 15 bp, Homo sapiens
cacttttgcacttgg

SEQ ID NO: 1874133 - DNA, 15 bp, Homo sapiens
acttttgcacttggg

SEQ ID NO: 1874134 - DNA, 15 bp, Homo sapiens
cttttgcacttggga

SEQ ID NO: 1874135 - DNA, 15 bp, Homo sapiens
ttttgcacttgggat

SEQ ID NO: 1874136 - DNA, 15 bp, Homo sapiens
tttgcacttgggatt

SEQ ID NO: 1874137 - DNA, 15 bp, Homo sapiens
ttgcacttgggattt

SEQ ID NO: 1874138 - DNA, 15 bp, Homo sapiens
tgcacttgggatttt

SEQ ID NO: 1874139 - DNA, 15 bp, Homo sapiens
gcacttgggattttc

SEQ ID NO: 1874140 - DNA, 15 bp, Homo sapiens
cacttgggattttca

SEQ ID NO: 1874141 - DNA, 15 bp, Homo sapiens
acttgggattttcaa

SEQ ID NO: 1874142 - DNA, 15 bp, Homo sapiens
cttgggattttcaaa

SEQ ID NO: 1874143 - DNA, 15 bp, Homo sapiens
ttgggattttcaaac

SEQ ID NO: 1874144 - DNA, 15 bp, Homo sapiens
tgggattttcaaaca

SEQ ID NO: 1874145 - DNA, 15 bp, Homo sapiens
gggattttcaaacac

SEQ ID NO: 1874146 - DNA, 15 bp, Homo sapiens
ggattttcaaacaca

SEQ ID NO: 1874147 - DNA, 15 bp, Homo sapiens
gattttcaaacacac

SEQ ID NO: 1874148 - DNA, 15 bp, Homo sapiens
attttcaaacacact

SEQ ID NO: 1874149 - DNA, 15 bp, Homo sapiens
ttttcaaacacacta

SEQ ID NO: 1874150 - DNA, 15 bp, Homo sapiens
tttcaaacacactag

SEQ ID NO: 1874151 - DNA, 15 bp, Homo sapiens
ttcaaacacactagt

SEQ ID NO: 1874152 - DNA, 15 bp, Homo sapiens
tcaaacacactagtt

SEQ ID NO: 1874153 - DNA, 15 bp, Homo sapiens
caaacacactagttt

SEQ ID NO: 1874154 - DNA, 15 bp, Homo sapiens
aaacacactagtttt

SEQ ID NO: 1874155 - DNA, 15 bp, Homo sapiens
aacacactagttttt

SEQ ID NO: 1874156 - DNA, 15 bp, Homo sapiens
acacactagttttta

SEQ ID NO: 1874157 - DNA, 15 bp, Homo sapiens
cacactagtttttaa

SEQ ID NO: 1874158 - DNA, 15 bp, Homo sapiens
acactagtttttaaa

SEQ ID NO: 1874159 - DNA, 15 bp, Homo sapiens
cactagtttttaaaa

SEQ ID NO: 1874160 - DNA, 15 bp, Homo sapiens
actagtttttaaaat

SEQ ID NO: 1874161 - DNA, 15 bp, Homo sapiens
ctagtttttaaaata

SEQ ID NO: 1874162 - DNA, 15 bp, Homo sapiens
tagtttttaaaatat

SEQ ID NO: 1874163 - DNA, 15 bp, Homo sapiens
agtttttaaaatatt

SEQ ID NO: 1874164 - DNA, 15 bp, Homo sapiens
gtttttaaaatatta

SEQ ID NO: 1874165 - DNA, 15 bp, Homo sapiens
tttttaaaatattaa

SEQ ID NO: 1874166 - DNA, 15 bp, Homo sapiens
ttttaaaatattaat

SEQ ID NO: 1874167 - DNA, 15 bp, Homo sapiens
tttaaaatattaatg

SEQ ID NO: 1874168 - DNA, 15 bp, Homo sapiens
ttaaaatattaatgt

SEQ ID NO: 1874169 - DNA, 15 bp, Homo sapiens
taaaatattaatgtt

SEQ ID NO: 1874170 - DNA, 15 bp, Homo sapiens
aaaatattaatgttt

SEQ ID NO: 1874171 - DNA, 15 bp, Homo sapiens
aaatattaatgtttc

SEQ ID NO: 1874172 - DNA, 15 bp, Homo sapiens
gtgtgtgtgtgtcta

SEQ ID NO: 1874173 - DNA, 15 bp, Homo sapiens
tgtgtgtgtgtctat

SEQ ID NO: 1874174 - DNA, 15 bp, Homo sapiens
gtgtgtgtgtctatc

SEQ ID NO: 1874175 - DNA, 15 bp, Homo sapiens
tgtgtgtgtctatct

SEQ ID NO: 1874176 - DNA, 15 bp, Homo sapiens
gtgtgtgtctatctg

SEQ ID NO: 1874177 - DNA, 15 bp, Homo sapiens
tgtgtgtctatctgt

SEQ ID NO: 1874178 - DNA, 15 bp, Homo sapiens
gtgtgtctatctgtc

SEQ ID NO: 1874179 - DNA, 15 bp, Homo sapiens
tgtgtctatctgtct

SEQ ID NO: 1874180 - DNA, 15 bp, Homo sapiens
gtgtctatctgtctg

SEQ ID NO: 1874181 - DNA, 15 bp, Homo sapiens
tgtctatctgtctga

SEQ ID NO: 1874182 - DNA, 15 bp, Homo sapiens
gtctatctgtctgag

SEQ ID NO: 1874183 - DNA, 15 bp, Homo sapiens
tctatctgtctgaga

SEQ ID NO: 1874184 - DNA, 15 bp, Homo sapiens
ctatctgtctgagaa

SEQ ID NO: 1874185 - DNA, 15 bp, Homo sapiens
tatctgtctgagaaa

SEQ ID NO: 1874186 - DNA, 15 bp, Homo sapiens
atctgtctgagaaag

SEQ ID NO: 1874187 - DNA, 15 bp, Homo sapiens
tctgtctgagaaaga

SEQ ID NO: 1874188 - DNA, 15 bp, Homo sapiens
ctgtctgagaaagaa

SEQ ID NO: 1874189 - DNA, 15 bp, Homo sapiens
tgtctgagaaagaag

SEQ ID NO: 1874190 - DNA, 15 bp, Homo sapiens
gtctgagaaagaaga

SEQ ID NO: 1874191 - DNA, 15 bp, Homo sapiens
tctgagaaagaagag

SEQ ID NO: 1874192 - DNA, 15 bp, Homo sapiens
ctgagaaagaagaga

SEQ ID NO: 1874193 - DNA, 15 bp, Homo sapiens
tgagaaagaagagaa

SEQ ID NO: 1874194 - DNA, 15 bp, Homo sapiens
gagaaagaagagaaa

SEQ ID NO: 1874195 - DNA, 15 bp, Homo sapiens
agaaagaagagaaac

SEQ ID NO: 1874196 - DNA, 15 bp, Homo sapiens
gaaagaagagaaact

SEQ ID NO: 1874197 - DNA, 15 bp, Homo sapiens
aaagaagagaaactt

SEQ ID NO: 1874198 - DNA, 15 bp, Homo sapiens
aagaagagaaacttt

SEQ ID NO: 1874199 - DNA, 15 bp, Homo sapiens
agaagagaaactttt

SEQ ID NO: 1874200 - DNA, 15 bp, Homo sapiens
gaagagaaacttttg

SEQ ID NO: 1874201 - DNA, 15 bp, Homo sapiens
aagagaaacttttga

SEQ ID NO: 1874202 - DNA, 15 bp, Homo sapiens
agagaaacttttgaa

SEQ ID NO: 1874203 - DNA, 15 bp, Homo sapiens
gagaaacttttgaaa

SEQ ID NO: 1874204 - DNA, 15 bp, Homo sapiens
agaaacttttgaaat

SEQ ID NO: 1874205 - DNA, 15 bp, Homo sapiens
gaaacttttgaaatt

SEQ ID NO: 1874206 - DNA, 15 bp, Homo sapiens
aaacttttgaaattg

SEQ ID NO: 1874207 - DNA, 15 bp, Homo sapiens
aacttttgaaattgg

SEQ ID NO: 1874208 - DNA, 15 bp, Homo sapiens
acttttgaaattggg

SEQ ID NO: 1874209 - DNA, 15 bp, Homo sapiens
cttttgaaattgggc

SEQ ID NO: 1874210 - DNA, 15 bp, Homo sapiens
ttttgaaattgggct

SEQ ID NO: 1874211 - DNA, 15 bp, Homo sapiens
tttgaaattgggctg

SEQ ID NO: 1874212 - DNA, 15 bp, Homo sapiens
ttgaaattgggctga

SEQ ID NO: 1874213 - DNA, 15 bp, Homo sapiens
tgaaattgggctgaa

SEQ ID NO: 1874214 - DNA, 15 bp, Homo sapiens
gaaattgggctgaat

SEQ ID NO: 1874215 - DNA, 15 bp, Homo sapiens
aaattgggctgaata

SEQ ID NO: 1874216 - DNA, 15 bp, Homo sapiens
aattgggctgaataa

SEQ ID NO: 1874217 - DNA, 15 bp, Homo sapiens
attgggctgaataat

SEQ ID NO: 1874218 - DNA, 15 bp, Homo sapiens
ttgggctgaataatt

SEQ ID NO: 1874219 - DNA, 15 bp, Homo sapiens
tgggctgaataattt

SEQ ID NO: 1874220 - DNA, 15 bp, Homo sapiens
gggctgaataattta

SEQ ID NO: 1874221 - DNA, 15 bp, Homo sapiens
ggctgaataatttat

SEQ ID NO: 1874222 - DNA, 15 bp, Homo sapiens
gctgaataatttata

SEQ ID NO: 1874223 - DNA, 15 bp, Homo sapiens
ctgaataatttataa

SEQ ID NO: 1874224 - DNA, 15 bp, Homo sapiens
tgaataatttataaa

SEQ ID NO: 1874225 - DNA, 15 bp, Homo sapiens
gaataatttataaag

SEQ ID NO: 1874226 - DNA, 15 bp, Homo sapiens
aataatttataaagg

SEQ ID NO: 1874227 - DNA, 15 bp, Homo sapiens
ataatttataaagga

SEQ ID NO: 1874228 - DNA, 15 bp, Homo sapiens
taatttataaaggac

SEQ ID NO: 1874229 - DNA, 15 bp, Homo sapiens
aatttataaaggact

SEQ ID NO: 1874230 - DNA, 15 bp, Homo sapiens
atttataaaggactc

SEQ ID NO: 1874231 - DNA, 15 bp, Homo sapiens
tttataaaggactcc

SEQ ID NO: 1874232 - DNA, 15 bp, Homo sapiens
ttataaaggactccc

SEQ ID NO: 1874233 - DNA, 15 bp, Homo sapiens
tataaaggactccct

SEQ ID NO: 1874234 - DNA, 15 bp, Homo sapiens
ataaaggactccctt

SEQ ID NO: 1874235 - DNA, 15 bp, Homo sapiens
taaaggactcccttg

SEQ ID NO: 1874236 - DNA, 15 bp, Homo sapiens
aaaggactcccttgt

SEQ ID NO: 1874237 - DNA, 15 bp, Homo sapiens
aaggactcccttgtt

SEQ ID NO: 1874238 - DNA, 15 bp, Homo sapiens
aggactcccttgttg

SEQ ID NO: 1874239 - DNA, 15 bp, Homo sapiens
ggactcccttgttgt

SEQ ID NO: 1874240 - DNA, 15 bp, Homo sapiens
gactcccttgttgtg

SEQ ID NO: 1874241 - DNA, 15 bp, Homo sapiens
actcccttgttgtga

SEQ ID NO: 1874242 - DNA, 15 bp, Homo sapiens
ctcccttgttgtgat

SEQ ID NO: 1874243 - DNA, 15 bp, Homo sapiens
tcccttgttgtgata

SEQ ID NO: 1874244 - DNA, 15 bp, Homo sapiens
cccttgttgtgatag

SEQ ID NO: 1874245 - DNA, 15 bp, Homo sapiens
ccttgttgtgatagt

SEQ ID NO: 1874246 - DNA, 15 bp, Homo sapiens
cttgttgtgatagtc

SEQ ID NO: 1874247 - DNA, 15 bp, Homo sapiens
ttgttgtgatagtct

SEQ ID NO: 1874248 - DNA, 15 bp, Homo sapiens
tgttgtgatagtctt

SEQ ID NO: 1874249 - DNA, 15 bp, Homo sapiens
gttgtgatagtcttt

SEQ ID NO: 1874250 - DNA, 15 bp, Homo sapiens
ttgtgatagtcttta

SEQ ID NO: 1874251 - DNA, 15 bp, Homo sapiens
tgtgatagtctttaa

SEQ ID NO: 1874252 - DNA, 15 bp, Homo sapiens
gtgatagtctttaaa

SEQ ID NO: 1874253 - DNA, 15 bp, Homo sapiens
tgatagtctttaaac

SEQ ID NO: 1874254 - DNA, 15 bp, Homo sapiens
gatagtctttaaaca

SEQ ID NO: 1874255 - DNA, 15 bp, Homo sapiens
atagtctttaaacat

SEQ ID NO: 1874256 - DNA, 15 bp, Homo sapiens
tagtctttaaacatc

SEQ ID NO: 1874257 - DNA, 15 bp, Homo sapiens
agtctttaaacatcc

SEQ ID NO: 1874258 - DNA, 15 bp, Homo sapiens
gtctttaaacatccc

SEQ ID NO: 1874259 - DNA, 15 bp, Homo sapiens
tctttaaacatcccc

SEQ ID NO: 1874260 - DNA, 15 bp, Homo sapiens
ctttaaacatcccca

SEQ ID NO: 1874261 - DNA, 15 bp, Homo sapiens
tttaaacatccccag

SEQ ID NO: 1874262 - DNA, 15 bp, Homo sapiens
ttaaacatccccaga

SEQ ID NO: 1874263 - DNA, 15 bp, Homo sapiens
taaacatccccagat

SEQ ID NO: 1874264 - DNA, 15 bp, Homo sapiens
aaacatccccagatc

SEQ ID NO: 1874265 - DNA, 15 bp, Homo sapiens
aacatccccagatct

SEQ ID NO: 1874266 - DNA, 15 bp, Homo sapiens
acatccccagatctg

SEQ ID NO: 1874267 - DNA, 15 bp, Homo sapiens
catccccagatctgg

SEQ ID NO: 1874268 - DNA, 15 bp, Homo sapiens
atccccagatctggc

SEQ ID NO: 1874269 - DNA, 15 bp, Homo sapiens
tccccagatctggcc

SEQ ID NO: 1874270 - DNA, 15 bp, Homo sapiens
ccccagatctggcct

SEQ ID NO: 1874271 - DNA, 15 bp, Homo sapiens
cccagatctggcctg

SEQ ID NO: 1874272 - DNA, 15 bp, Homo sapiens
ccagatctggcctgt

SEQ ID NO: 1874273 - DNA, 15 bp, Homo sapiens
cagatctggcctgtc

SEQ ID NO: 1874274 - DNA, 15 bp, Homo sapiens
agatctggcctgtca

SEQ ID NO: 1874275 - DNA, 15 bp, Homo sapiens
gatctggcctgtcaa

SEQ ID NO: 1874276 - DNA, 15 bp, Homo sapiens
atctggcctgtcaat

SEQ ID NO: 1874277 - DNA, 15 bp, Homo sapiens
tctggcctgtcaatc

SEQ ID NO: 1874278 - DNA, 15 bp, Homo sapiens
ctggcctgtcaatct

SEQ ID NO: 1874279 - DNA, 15 bp, Homo sapiens
tggcctgtcaatctg

SEQ ID NO: 1874280 - DNA, 15 bp, Homo sapiens
ggcctgtcaatctga

SEQ ID NO: 1874281 - DNA, 15 bp, Homo sapiens
gcctgtcaatctgag

SEQ ID NO: 1874282 - DNA, 15 bp, Homo sapiens
cctgtcaatctgaga

SEQ ID NO: 1874283 - DNA, 15 bp, Homo sapiens
ctgtcaatctgagac

SEQ ID NO: 1874284 - DNA, 15 bp, Homo sapiens
tgtcaatctgagact

SEQ ID NO: 1874285 - DNA, 15 bp, Homo sapiens
gtcaatctgagactt

SEQ ID NO: 1874286 - DNA, 15 bp, Homo sapiens
tcaatctgagacttc

SEQ ID NO: 1874287 - DNA, 15 bp, Homo sapiens
caatctgagacttct

SEQ ID NO: 1874288 - DNA, 15 bp, Homo sapiens
aatctgagacttctc

SEQ ID NO: 1874289 - DNA, 15 bp, Homo sapiens
atctgagacttctca

SEQ ID NO: 1874290 - DNA, 15 bp, Homo sapiens
tctgagacttctcag

SEQ ID NO: 1874291 - DNA, 15 bp, Homo sapiens
ctgagacttctcagc

SEQ ID NO: 1874292 - DNA, 15 bp, Homo sapiens
tgagacttctcagcc

SEQ ID NO: 1874293 - DNA, 15 bp, Homo sapiens
gagacttctcagcct

SEQ ID NO: 1874294 - DNA, 15 bp, Homo sapiens
agacttctcagcctc

SEQ ID NO: 1874295 - DNA, 15 bp, Homo sapiens
gacttctcagcctcc

SEQ ID NO: 1874296 - DNA, 15 bp, Homo sapiens
acttctcagcctcca

SEQ ID NO: 1874297 - DNA, 15 bp, Homo sapiens
cttctcagcctccat

SEQ ID NO: 1874298 - DNA, 15 bp, Homo sapiens
ttctcagcctccata

SEQ ID NO: 1874299 - DNA, 15 bp, Homo sapiens
tctcagcctccataa

SEQ ID NO: 1874300 - DNA, 15 bp, Homo sapiens
ctcagcctccataac

SEQ ID NO: 1874301 - DNA, 15 bp, Homo sapiens
tcagcctccataact

SEQ ID NO: 1874302 - DNA, 15 bp, Homo sapiens
cagcctccataactg

SEQ ID NO: 1874303 - DNA, 15 bp, Homo sapiens
agcctccataactgc

SEQ ID NO: 1874304 - DNA, 15 bp, Homo sapiens
gcctccataactgca

SEQ ID NO: 1874305 - DNA, 15 bp, Homo sapiens
cctccataactgcaa

SEQ ID NO: 1874306 - DNA, 15 bp, Homo sapiens
ctccataactgcaag

SEQ ID NO: 1874307 - DNA, 15 bp, Homo sapiens
tccataactgcaaga

SEQ ID NO: 1874308 - DNA, 15 bp, Homo sapiens
ccataactgcaagaa

SEQ ID NO: 1874309 - DNA, 15 bp, Homo sapiens
cataactgcaagaaa

SEQ ID NO: 1874310 - DNA, 15 bp, Homo sapiens
ataactgcaagaaat

SEQ ID NO: 1874311 - DNA, 15 bp, Homo sapiens
taactgcaagaaata

SEQ ID NO: 1874312 - DNA, 15 bp, Homo sapiens
aactgcaagaaataa

SEQ ID NO: 1874313 - DNA, 15 bp, Homo sapiens
actgcaagaaataaa

SEQ ID NO: 1874314 - DNA, 15 bp, Homo sapiens
ctgcaagaaataaat

SEQ ID NO: 1874315 - DNA, 15 bp, Homo sapiens
tgcaagaaataaatt

SEQ ID NO: 1874316 - DNA, 15 bp, Homo sapiens
gcaagaaataaattc

SEQ ID NO: 1874317 - DNA, 15 bp, Homo sapiens
caagaaataaattcc

SEQ ID NO: 1874318 - DNA, 15 bp, Homo sapiens
aagaaataaattcct

SEQ ID NO: 1874319 - DNA, 15 bp, Homo sapiens
agaaataaattcctt

SEQ ID NO: 1874320 - DNA, 15 bp, Homo sapiens
gaaataaattccttt

SEQ ID NO: 1874321 - DNA, 15 bp, Homo sapiens
aaataaattcctttt

SEQ ID NO: 1874322 - DNA, 15 bp, Homo sapiens
aataaattccttttc

SEQ ID NO: 1874323 - DNA, 15 bp, Homo sapiens
ataaattccttttct

SEQ ID NO: 1874324 - DNA, 15 bp, Homo sapiens
taaattccttttctt

SEQ ID NO: 1874325 - DNA, 15 bp, Homo sapiens
aaattccttttcttt

SEQ ID NO: 1874326 - DNA, 15 bp, Homo sapiens
aattccttttcttta

SEQ ID NO: 1874327 - DNA, 15 bp, Homo sapiens
attccttttctttat

SEQ ID NO: 1874328 - DNA, 15 bp, Homo sapiens
ttccttttctttata

SEQ ID NO: 1874329 - DNA, 15 bp, Homo sapiens
tccttttctttataa

SEQ ID NO: 1874330 - DNA, 15 bp, Homo sapiens
ccttttctttataaa

SEQ ID NO: 1874331 - DNA, 15 bp, Homo sapiens
ctttataaattacct

SEQ ID NO: 1874332 - DNA, 15 bp, Homo sapiens
tttataaattaccta

SEQ ID NO: 1874333 - DNA, 15 bp, Homo sapiens
ttataaattacctag

SEQ ID NO: 1874334 - DNA, 15 bp, Homo sapiens
tataaattacctagt

SEQ ID NO: 1874335 - DNA, 15 bp, Homo sapiens
ataaattacctagtt

SEQ ID NO: 1874336 - DNA, 15 bp, Homo sapiens
taaattacctagttt

SEQ ID NO: 1874337 - DNA, 15 bp, Homo sapiens
aaattacctagtttc

SEQ ID NO: 1874338 - DNA, 15 bp, Homo sapiens
aattacctagtttca

SEQ ID NO: 1874339 - DNA, 15 bp, Homo sapiens
attacctagtttcag

SEQ ID NO: 1874340 - DNA, 15 bp, Homo sapiens
ttacctagtttcagg

SEQ ID NO: 1874341 - DNA, 15 bp, Homo sapiens
tacctagtttcaggt

SEQ ID NO: 1874342 - DNA, 15 bp, Homo sapiens
acctagtttcaggta

SEQ ID NO: 1874343 - DNA, 15 bp, Homo sapiens
cctagtttcaggtat

SEQ ID NO: 1874344 - DNA, 15 bp, Homo sapiens
ctagtttcaggtatt

SEQ ID NO: 1874345 - DNA, 15 bp, Homo sapiens
tagtttcaggtattc

SEQ ID NO: 1874346 - DNA, 15 bp, Homo sapiens
agtttcaggtattct

SEQ ID NO: 1874347 - DNA, 15 bp, Homo sapiens
gtttcaggtattcta

SEQ ID NO: 1874348 - DNA, 15 bp, Homo sapiens
tttcaggtattctat

SEQ ID NO: 1874349 - DNA, 15 bp, Homo sapiens
ttcaggtattctatt

SEQ ID NO: 1874350 - DNA, 15 bp, Homo sapiens
tcaggtattctatta

SEQ ID NO: 1874351 - DNA, 15 bp, Homo sapiens
caggtattctattat

SEQ ID NO: 1874352 - DNA, 15 bp, Homo sapiens
aggtattctattatg

SEQ ID NO: 1874353 - DNA, 15 bp, Homo sapiens
ggtattctattatga

SEQ ID NO: 1874354 - DNA, 15 bp, Homo sapiens
gtattctattatgag

SEQ ID NO: 1874355 - DNA, 15 bp, Homo sapiens
tattctattatgagc

SEQ ID NO: 1874356 - DNA, 15 bp, Homo sapiens
attctattatgagca

SEQ ID NO: 1874357 - DNA, 15 bp, Homo sapiens
ttctattatgagcaa

SEQ ID NO: 1874358 - DNA, 15 bp, Homo sapiens
tctattatgagcaac

SEQ ID NO: 1874359 - DNA, 15 bp, Homo sapiens
ctattatgagcaaca

SEQ ID NO: 1874360 - DNA, 15 bp, Homo sapiens
tattatgagcaacag

SEQ ID NO: 1874361 - DNA, 15 bp, Homo sapiens
attatgagcaacaga

SEQ ID NO: 1874362 - DNA, 15 bp, Homo sapiens
ttatgagcaacagaa

SEQ ID NO: 1874363 - DNA, 15 bp, Homo sapiens
tatgagcaacagaaa

SEQ ID NO: 1874364 - DNA, 15 bp, Homo sapiens
atgagcaacagaaaa

SEQ ID NO: 1874365 - DNA, 15 bp, Homo sapiens
tgagcaacagaaaat

SEQ ID NO: 1874366 - DNA, 15 bp, Homo sapiens
gagcaacagaaaata

SEQ ID NO: 1874367 - DNA, 15 bp, Homo sapiens
agcaacagaaaatag

SEQ ID NO: 1874368 - DNA, 15 bp, Homo sapiens
gcaacagaaaataga

SEQ ID NO: 1874369 - DNA, 15 bp, Homo sapiens
caacagaaaatagac

SEQ ID NO: 1874370 - DNA, 15 bp, Homo sapiens
aacagaaaatagact

SEQ ID NO: 1874371 - DNA, 15 bp, Homo sapiens
acagaaaatagacta

SEQ ID NO: 1874372 - DNA, 15 bp, Homo sapiens
cagaaaatagactaa

SEQ ID NO: 1874373 - DNA, 15 bp, Homo sapiens
agaaaatagactaat

SEQ ID NO: 1874374 - DNA, 15 bp, Homo sapiens
gaaaatagactaata

SEQ ID NO: 1874375 - DNA, 15 bp, Homo sapiens
aaaatagactaatac

SEQ ID NO: 1874376 - DNA, 15 bp, Homo sapiens
aaatagactaataca

SEQ ID NO: 1874377 - DNA, 15 bp, Homo sapiens
aatagactaatacag

SEQ ID NO: 1874378 - DNA, 15 bp, Homo sapiens
atagactaatacagg

SEQ ID NO: 1874379 - DNA, 15 bp, Homo sapiens
tagactaatacaggc

SEQ ID NO: 1874380 - DNA, 15 bp, Homo sapiens
agactaatacaggct

SEQ ID NO: 1874381 - DNA, 15 bp, Homo sapiens
gactaatacaggctc

SEQ ID NO: 1874382 - DNA, 15 bp, Homo sapiens
actaatacaggctct

SEQ ID NO: 1874383 - DNA, 15 bp, Homo sapiens
ctaatacaggctctg

SEQ ID NO: 1874384 - DNA, 15 bp, Homo sapiens
taatacaggctctgt

SEQ ID NO: 1874385 - DNA, 15 bp, Homo sapiens
aatacaggctctgtt

SEQ ID NO: 1874386 - DNA, 15 bp, Homo sapiens
atacaggctctgttt

SEQ ID NO: 1874387 - DNA, 15 bp, Homo sapiens
tacaggctctgtttt

SEQ ID NO: 1874388 - DNA, 15 bp, Homo sapiens
acaggctctgttttc

SEQ ID NO: 1874389 - DNA, 15 bp, Homo sapiens
caggctctgttttct

SEQ ID NO: 1874390 - DNA, 15 bp, Homo sapiens
aggctctgttttctt

SEQ ID NO: 1874391 - DNA, 15 bp, Homo sapiens
ggctctgttttcttt

SEQ ID NO: 1874392 - DNA, 15 bp, Homo sapiens
gctctgttttctttt

SEQ ID NO: 1874393 - DNA, 15 bp, Homo sapiens
ctctgttttctttta

SEQ ID NO: 1874394 - DNA, 15 bp, Homo sapiens
tctgttttcttttaa

SEQ ID NO: 1874395 - DNA, 15 bp, Homo sapiens
ctgttttcttttaag

SEQ ID NO: 1874396 - DNA, 15 bp, Homo sapiens
tgttttcttttaaga

SEQ ID NO: 1874397 - DNA, 15 bp, Homo sapiens
gttttcttttaagat

SEQ ID NO: 1874398 - DNA, 15 bp, Homo sapiens
ttttcttttaagatg

SEQ ID NO: 1874399 - DNA, 15 bp, Homo sapiens
tttcttttaagatgg

SEQ ID NO: 1874400 - DNA, 15 bp, Homo sapiens
ttcttttaagatggc

SEQ ID NO: 1874401 - DNA, 15 bp, Homo sapiens
tcttttaagatggca

SEQ ID NO: 1874402 - DNA, 15 bp, Homo sapiens
cttttaagatggcag

SEQ ID NO: 1874403 - DNA, 15 bp, Homo sapiens
ttttaagatggcagc

SEQ ID NO: 1874404 - DNA, 15 bp, Homo sapiens
tttaagatggcagca

SEQ ID NO: 1874405 - DNA, 15 bp, Homo sapiens
ttaagatggcagcag

SEQ ID NO: 1874406 - DNA, 15 bp, Homo sapiens
taagatggcagcagt

SEQ ID NO: 1874407 - DNA, 15 bp, Homo sapiens
aagatggcagcagtc

SEQ ID NO: 1874408 - DNA, 15 bp, Homo sapiens
agatggcagcagtct

SEQ ID NO: 1874409 - DNA, 15 bp, Homo sapiens
gatggcagcagtctg

SEQ ID NO: 1874410 - DNA, 15 bp, Homo sapiens
atggcagcagtctgg

SEQ ID NO: 1874411 - DNA, 15 bp, Homo sapiens
tggcagcagtctggt

SEQ ID NO: 1874412 - DNA, 15 bp, Homo sapiens
ggcagcagtctggtt

SEQ ID NO: 1874413 - DNA, 15 bp, Homo sapiens
gcagcagtctggtta

SEQ ID NO: 1874414 - DNA, 15 bp, Homo sapiens
cagcagtctggttaa

SEQ ID NO: 1874415 - DNA, 15 bp, Homo sapiens
agcagtctggttaat

SEQ ID NO: 1874416 - DNA, 15 bp, Homo sapiens
gcagtctggttaatc

SEQ ID NO: 1874417 - DNA, 15 bp, Homo sapiens
cagtctggttaatcc

SEQ ID NO: 1874418 - DNA, 15 bp, Homo sapiens
agtctggttaatcct

SEQ ID NO: 1874419 - DNA, 15 bp, Homo sapiens
gtctggttaatccta

SEQ ID NO: 1874420 - DNA, 15 bp, Homo sapiens
tctggttaatcctaa

SEQ ID NO: 1874421 - DNA, 15 bp, Homo sapiens
ctggttaatcctaaa

SEQ ID NO: 1874422 - DNA, 15 bp, Homo sapiens
tggttaatcctaaag

SEQ ID NO: 1874423 - DNA, 15 bp, Homo sapiens
ggttaatcctaaagt

SEQ ID NO: 1874424 - DNA, 15 bp, Homo sapiens
gttaatcctaaagtc

SEQ ID NO: 1874425 - DNA, 15 bp, Homo sapiens
ttaatcctaaagtct

SEQ ID NO: 1874426 - DNA, 15 bp, Homo sapiens
taatcctaaagtctg

SEQ ID NO: 1874427 - DNA, 15 bp, Homo sapiens
aatcctaaagtctgt

SEQ ID NO: 1874428 - DNA, 15 bp, Homo sapiens
atcctaaagtctgtg

SEQ ID NO: 1874429 - DNA, 15 bp, Homo sapiens
tcctaaagtctgtgg

SEQ ID NO: 1874430 - DNA, 15 bp, Homo sapiens
cctaaagtctgtggg

SEQ ID NO: 1874431 - DNA, 15 bp, Homo sapiens
ctaaagtctgtggga

SEQ ID NO: 1874432 - DNA, 15 bp, Homo sapiens
taaagtctgtgggat

SEQ ID NO: 1874433 - DNA, 15 bp, Homo sapiens
aaagtctgtgggatt

SEQ ID NO: 1874434 - DNA, 15 bp, Homo sapiens
aagtctgtgggatta

SEQ ID NO: 1874435 - DNA, 15 bp, Homo sapiens
agtctgtgggattat

SEQ ID NO: 1874436 - DNA, 15 bp, Homo sapiens
gtctgtgggattatc

SEQ ID NO: 1874437 - DNA, 15 bp, Homo sapiens
tctgtgggattatct

SEQ ID NO: 1874438 - DNA, 15 bp, Homo sapiens
ctgtgggattatctg

SEQ ID NO: 1874439 - DNA, 15 bp, Homo sapiens
tgtgggattatctgt

SEQ ID NO: 1874440 - DNA, 15 bp, Homo sapiens
gtgggattatctgtt

SEQ ID NO: 1874441 - DNA, 15 bp, Homo sapiens
tgggattatctgtta

SEQ ID NO: 1874442 - DNA, 15 bp, Homo sapiens
gggattatctgttat

SEQ ID NO: 1874443 - DNA, 15 bp, Homo sapiens
ggattatctgttata

SEQ ID NO: 1874444 - DNA, 15 bp, Homo sapiens
gattatctgttatac

SEQ ID NO: 1874445 - DNA, 15 bp, Homo sapiens
attatctgttataca

SEQ ID NO: 1874446 - DNA, 15 bp, Homo sapiens
ttatctgttatacaa

SEQ ID NO: 1874447 - DNA, 15 bp, Homo sapiens
tatctgttatacaat

SEQ ID NO: 1874448 - DNA, 15 bp, Homo sapiens
atctgttatacaata

SEQ ID NO: 1874449 - DNA, 15 bp, Homo sapiens
tctgttatacaatag

SEQ ID NO: 1874450 - DNA, 15 bp, Homo sapiens
ctgttatacaatagc

SEQ ID NO: 1874451 - DNA, 15 bp, Homo sapiens
tgttatacaatagcg

SEQ ID NO: 1874452 - DNA, 15 bp, Homo sapiens
gttatacaatagcgc

SEQ ID NO: 1874453 - DNA, 15 bp, Homo sapiens
ttatacaatagcgca

SEQ ID NO: 1874454 - DNA, 15 bp, Homo sapiens
tatacaatagcgcat

SEQ ID NO: 1874455 - DNA, 15 bp, Homo sapiens
atacaatagcgcatc

SEQ ID NO: 1874456 - DNA, 15 bp, Homo sapiens
tacaatagcgcatct

SEQ ID NO: 1874457 - DNA, 15 bp, Homo sapiens
acaatagcgcatctc

SEQ ID NO: 1874458 - DNA, 15 bp, Homo sapiens
caatagcgcatctct

SEQ ID NO: 1874459 - DNA, 15 bp, Homo sapiens
aatagcgcatctctc

SEQ ID NO: 1874460 - DNA, 15 bp, Homo sapiens
atagcgcatctctct

SEQ ID NO: 1874461 - DNA, 15 bp, Homo sapiens
tagcgcatctctctt

SEQ ID NO: 1874462 - DNA, 15 bp, Homo sapiens
agcgcatctctcttt

SEQ ID NO: 1874463 - DNA, 15 bp, Homo sapiens
gcgcatctctctttt

SEQ ID NO: 1874464 - DNA, 15 bp, Homo sapiens
cgcatctctcttttc

SEQ ID NO: 1874465 - DNA, 15 bp, Homo sapiens
gcatctctcttttcc

SEQ ID NO: 1874466 - DNA, 15 bp, Homo sapiens
catctctcttttcca

SEQ ID NO: 1874467 - DNA, 15 bp, Homo sapiens
atctctcttttccat

SEQ ID NO: 1874468 - DNA, 15 bp, Homo sapiens
tctctcttttccatg

SEQ ID NO: 1874469 - DNA, 15 bp, Homo sapiens
ctctcttttccatgt

SEQ ID NO: 1874470 - DNA, 15 bp, Homo sapiens
tctcttttccatgtt

SEQ ID NO: 1874471 - DNA, 15 bp, Homo sapiens
ctcttttccatgttg

SEQ ID NO: 1874472 - DNA, 15 bp, Homo sapiens
tcttttccatgttgg

SEQ ID NO: 1874473 - DNA, 15 bp, Homo sapiens
cttttccatgttggg

SEQ ID NO: 1874474 - DNA, 15 bp, Homo sapiens
ttttccatgttgggg

SEQ ID NO: 1874475 - DNA, 15 bp, Homo sapiens
tttccatgttggggt

SEQ ID NO: 1874476 - DNA, 15 bp, Homo sapiens
ttccatgttggggtc

SEQ ID NO: 1874477 - DNA, 15 bp, Homo sapiens
tccatgttggggtcg

SEQ ID NO: 1874478 - DNA, 15 bp, Homo sapiens
ccatgttggggtcgg

SEQ ID NO: 1874479 - DNA, 15 bp, Homo sapiens
catgttggggtcggt

SEQ ID NO: 1874480 - DNA, 15 bp, Homo sapiens
atgttggggtcggtt

SEQ ID NO: 1874481 - DNA, 15 bp, Homo sapiens
tgttggggtcggtta

SEQ ID NO: 1874482 - DNA, 15 bp, Homo sapiens
gttggggtcggttac

SEQ ID NO: 1874483 - DNA, 15 bp, Homo sapiens
ttggggtcggttacg

SEQ ID NO: 1874484 - DNA, 15 bp, Homo sapiens
tggggtcggttacgt

SEQ ID NO: 1874485 - DNA, 15 bp, Homo sapiens
ggggtcggttacgtg

SEQ ID NO: 1874486 - DNA, 15 bp, Homo sapiens
gggtcggttacgtgt

SEQ ID NO: 1874487 - DNA, 15 bp, Homo sapiens
ggtcggttacgtgtg

SEQ ID NO: 1874488 - DNA, 15 bp, Homo sapiens
gtcggttacgtgtgc

SEQ ID NO: 1874489 - DNA, 15 bp, Homo sapiens
tcggttacgtgtgcc

SEQ ID NO: 1874490 - DNA, 15 bp, Homo sapiens
cggttacgtgtgccc

SEQ ID NO: 1874491 - DNA, 15 bp, Homo sapiens
ggttacgtgtgccct

SEQ ID NO: 1874492 - DNA, 15 bp, Homo sapiens
gttacgtgtgcccta

SEQ ID NO: 1874493 - DNA, 15 bp, Homo sapiens
ttacgtgtgccctaa

SEQ ID NO: 1874494 - DNA, 15 bp, Homo sapiens
tacgtgtgccctaaa

SEQ ID NO: 1874495 - DNA, 15 bp, Homo sapiens
acgtgtgccctaaac

SEQ ID NO: 1874496 - DNA, 15 bp, Homo sapiens
cgtgtgccctaaact

SEQ ID NO: 1874497 - DNA, 15 bp, Homo sapiens
gtgtgccctaaacta

SEQ ID NO: 1874498 - DNA, 15 bp, Homo sapiens
tgtgccctaaactaa

SEQ ID NO: 1874499 - DNA, 15 bp, Homo sapiens
gtgccctaaactaag

SEQ ID NO: 1874500 - DNA, 15 bp, Homo sapiens
tgccctaaactaagt

SEQ ID NO: 1874501 - DNA, 15 bp, Homo sapiens
gccctaaactaagtg

SEQ ID NO: 1874502 - DNA, 15 bp, Homo sapiens
ccctaaactaagtgc

SEQ ID NO: 1874503 - DNA, 15 bp, Homo sapiens
cctaaactaagtgct

SEQ ID NO: 1874504 - DNA, 15 bp, Homo sapiens
ctaaactaagtgctc

SEQ ID NO: 1874505 - DNA, 15 bp, Homo sapiens
taaactaagtgctca

SEQ ID NO: 1874506 - DNA, 15 bp, Homo sapiens
aaactaagtgctcag

SEQ ID NO: 1874507 - DNA, 15 bp, Homo sapiens
aactaagtgctcagt

SEQ ID NO: 1874508 - DNA, 15 bp, Homo sapiens
actaagtgctcagtg

SEQ ID NO: 1874509 - DNA, 15 bp, Homo sapiens
taagtgctcagtgag

SEQ ID NO: 1874510 - DNA, 15 bp, Homo sapiens
aagtgctcagtgagt

SEQ ID NO: 1874511 - DNA, 15 bp, Homo sapiens
agtgctcagtgagtt

SEQ ID NO: 1874512 - DNA, 15 bp, Homo sapiens
gtgctcagtgagttt

SEQ ID NO: 1874513 - DNA, 15 bp, Homo sapiens
tgctcagtgagtttc

SEQ ID NO: 1874514 - DNA, 15 bp, Homo sapiens
gctcagtgagtttct

SEQ ID NO: 1874515 - DNA, 15 bp, Homo sapiens
ctcagtgagtttctg

SEQ ID NO: 1874516 - DNA, 15 bp, Homo sapiens
tcagtgagtttctgt

SEQ ID NO: 1874517 - DNA, 15 bp, Homo sapiens
cagtgagtttctgtg

SEQ ID NO: 1874518 - DNA, 15 bp, Homo sapiens
agtgagtttctgtgc

SEQ ID NO: 1874519 - DNA, 15 bp, Homo sapiens
gtgagtttctgtgca

SEQ ID NO: 1874520 - DNA, 15 bp, Homo sapiens
tgagtttctgtgcac

SEQ ID NO: 1874521 - DNA, 15 bp, Homo sapiens
gagtttctgtgcact

SEQ ID NO: 1874522 - DNA, 15 bp, Homo sapiens
agtttctgtgcactt

SEQ ID NO: 1874523 - DNA, 15 bp, Homo sapiens
gtttctgtgcacttc

SEQ ID NO: 1874524 - DNA, 15 bp, Homo sapiens
tttctgtgcacttct

SEQ ID NO: 1874525 - DNA, 15 bp, Homo sapiens
ttctgtgcacttctt

SEQ ID NO: 1874526 - DNA, 15 bp, Homo sapiens
tctgtgcacttcttc

SEQ ID NO: 1874527 - DNA, 15 bp, Homo sapiens
ctgtgcacttcttct

SEQ ID NO: 1874528 - DNA, 15 bp, Homo sapiens
tgtgcacttcttcta

SEQ ID NO: 1874529 - DNA, 15 bp, Homo sapiens
gtgcacttcttctat

SEQ ID NO: 1874530 - DNA, 15 bp, Homo sapiens
tgcacttcttctatt

SEQ ID NO: 1874531 - DNA, 15 bp, Homo sapiens
gcacttcttctattg

SEQ ID NO: 1874532 - DNA, 15 bp, Homo sapiens
cacttcttctattgt

SEQ ID NO: 1874533 - DNA, 15 bp, Homo sapiens
acttcttctattgta

SEQ ID NO: 1874534 - DNA, 15 bp, Homo sapiens
cttcttctattgtat

SEQ ID NO: 1874535 - DNA, 15 bp, Homo sapiens
ttcttctattgtatt

SEQ ID NO: 1874536 - DNA, 15 bp, Homo sapiens
tcttctattgtatta

SEQ ID NO: 1874537 - DNA, 15 bp, Homo sapiens
cttctattgtattac

SEQ ID NO: 1874538 - DNA, 15 bp, Homo sapiens
ttctattgtattact

SEQ ID NO: 1874539 - DNA, 15 bp, Homo sapiens
tctattgtattactt

SEQ ID NO: 1874540 - DNA, 15 bp, Homo sapiens
ctattgtattactta

SEQ ID NO: 1874541 - DNA, 15 bp, Homo sapiens
tattgtattacttaa

SEQ ID NO: 1874542 - DNA, 15 bp, Homo sapiens
attgtattacttaat

SEQ ID NO: 1874543 - DNA, 15 bp, Homo sapiens
ttgtattacttaatt

SEQ ID NO: 1874544 - DNA, 15 bp, Homo sapiens
tgtattacttaattt

SEQ ID NO: 1874545 - DNA, 15 bp, Homo sapiens
gtattacttaatttt

SEQ ID NO: 1874546 - DNA, 15 bp, Homo sapiens
tattacttaattttt

SEQ ID NO: 1874547 - DNA, 15 bp, Homo sapiens
attacttaatttttt

SEQ ID NO: 1874548 - DNA, 15 bp, Homo sapiens
ttacttaattttttc

SEQ ID NO: 1874549 - DNA, 15 bp, Homo sapiens
tacttaattttttcc

SEQ ID NO: 1874550 - DNA, 15 bp, Homo sapiens
acttaattttttccc

SEQ ID NO: 1874551 - DNA, 15 bp, Homo sapiens
cttaattttttccca

SEQ ID NO: 1874552 - DNA, 15 bp, Homo sapiens
ttaattttttcccaa

SEQ ID NO: 1874553 - DNA, 15 bp, Homo sapiens
taattttttcccaag

SEQ ID NO: 1874554 - DNA, 15 bp, Homo sapiens
aattttttcccaagg

SEQ ID NO: 1874555 - DNA, 15 bp, Homo sapiens
attttttcccaagga

SEQ ID NO: 1874556 - DNA, 15 bp, Homo sapiens
ttttttcccaaggac

SEQ ID NO: 1874557 - DNA, 15 bp, Homo sapiens
tttttcccaaggacc

SEQ ID NO: 1874558 - DNA, 15 bp, Homo sapiens
ttttcccaaggaccc

SEQ ID NO: 1874559 - DNA, 15 bp, Homo sapiens
tttcccaaggaccca

SEQ ID NO: 1874560 - DNA, 15 bp, Homo sapiens
ttcccaaggacccag

SEQ ID NO: 1874561 - DNA, 15 bp, Homo sapiens
tcccaaggacccagt

SEQ ID NO: 1874562 - DNA, 15 bp, Homo sapiens
cccaaggacccagta

SEQ ID NO: 1874563 - DNA, 15 bp, Homo sapiens
ccaaggacccagtaa

SEQ ID NO: 1874564 - DNA, 15 bp, Homo sapiens
caaggacccagtaat

SEQ ID NO: 1874565 - DNA, 15 bp, Homo sapiens
aaggacccagtaata

SEQ ID NO: 1874566 - DNA, 15 bp, Homo sapiens
aggacccagtaatag

SEQ ID NO: 1874567 - DNA, 15 bp, Homo sapiens
ggacccagtaataga

SEQ ID NO: 1874568 - DNA, 15 bp, Homo sapiens
gacccagtaatagat

SEQ ID NO: 1874569 - DNA, 15 bp, Homo sapiens
acccagtaatagatg

SEQ ID NO: 1874570 - DNA, 15 bp, Homo sapiens
cccagtaatagatgg

SEQ ID NO: 1874571 - DNA, 15 bp, Homo sapiens
ccagtaatagatggc

SEQ ID NO: 1874572 - DNA, 15 bp, Homo sapiens
cagtaatagatggca

SEQ ID NO: 1874573 - DNA, 15 bp, Homo sapiens
agtaatagatggcag

SEQ ID NO: 1874574 - DNA, 15 bp, Homo sapiens
gtaatagatggcagg

SEQ ID NO: 1874575 - DNA, 15 bp, Homo sapiens
taatagatggcaggg

SEQ ID NO: 1874576 - DNA, 15 bp, Homo sapiens
aatagatggcagggg

SEQ ID NO: 1874577 - DNA, 15 bp, Homo sapiens
atagatggcaggggg

SEQ ID NO: 1874578 - DNA, 15 bp, Homo sapiens
tagatggcagggggt

SEQ ID NO: 1874579 - DNA, 15 bp, Homo sapiens
agatggcagggggtg

SEQ ID NO: 1874580 - DNA, 15 bp, Homo sapiens
gatggcagggggtgg

SEQ ID NO: 1874581 - DNA, 15 bp, Homo sapiens
atggcagggggtggg

SEQ ID NO: 1874582 - DNA, 15 bp, Homo sapiens
ggcagggggtggggt

SEQ ID NO: 1874583 - DNA, 15 bp, Homo sapiens
gcagggggtggggta

SEQ ID NO: 1874584 - DNA, 15 bp, Homo sapiens
cagggggtggggtag

SEQ ID NO: 1874585 - DNA, 15 bp, Homo sapiens
agggggtggggtaga

SEQ ID NO: 1874586 - DNA, 15 bp, Homo sapiens
gggggtggggtagat

SEQ ID NO: 1874587 - DNA, 15 bp, Homo sapiens
ggggtggggtagatg

SEQ ID NO: 1874588 - DNA, 15 bp, Homo sapiens
gggtggggtagatga

SEQ ID NO: 1874589 - DNA, 15 bp, Homo sapiens
ggtggggtagatgag

SEQ ID NO: 1874590 - DNA, 15 bp, Homo sapiens
gtggggtagatgagg

SEQ ID NO: 1874591 - DNA, 15 bp, Homo sapiens
tggggtagatgagga

SEQ ID NO: 1874592 - DNA, 15 bp, Homo sapiens
ggggtagatgaggag

SEQ ID NO: 1874593 - DNA, 15 bp, Homo sapiens
gggtagatgaggaga

SEQ ID NO: 1874594 - DNA, 15 bp, Homo sapiens
ggtagatgaggagat

SEQ ID NO: 1874595 - DNA, 15 bp, Homo sapiens
gtagatgaggagatg

SEQ ID NO: 1874596 - DNA, 15 bp, Homo sapiens
tagatgaggagatga

SEQ ID NO: 1874597 - DNA, 15 bp, Homo sapiens
agatgaggagatgac

SEQ ID NO: 1874598 - DNA, 15 bp, Homo sapiens
gatgaggagatgact

SEQ ID NO: 1874599 - DNA, 15 bp, Homo sapiens
atgaggagatgactc

SEQ ID NO: 1874600 - DNA, 15 bp, Homo sapiens
tgaggagatgactct

SEQ ID NO: 1874601 - DNA, 15 bp, Homo sapiens
gaggagatgactcta

SEQ ID NO: 1874602 - DNA, 15 bp, Homo sapiens
aggagatgactctat

SEQ ID NO: 1874603 - DNA, 15 bp, Homo sapiens
ggagatgactctatc

SEQ ID NO: 1874604 - DNA, 15 bp, Homo sapiens
gagatgactctatca

SEQ ID NO: 1874605 - DNA, 15 bp, Homo sapiens
agatgactctatcac

SEQ ID NO: 1874606 - DNA, 15 bp, Homo sapiens
gatgactctatcact

SEQ ID NO: 1874607 - DNA, 15 bp, Homo sapiens
atgactctatcactt

SEQ ID NO: 1874608 - DNA, 15 bp, Homo sapiens
tgactctatcactta

SEQ ID NO: 1874609 - DNA, 15 bp, Homo sapiens
gactctatcacttaa

SEQ ID NO: 1874610 - DNA, 15 bp, Homo sapiens
actctatcacttaat

SEQ ID NO: 1874611 - DNA, 15 bp, Homo sapiens
ctctatcacttaatg

SEQ ID NO: 1874612 - DNA, 15 bp, Homo sapiens
tctatcacttaatgt

SEQ ID NO: 1874613 - DNA, 15 bp, Homo sapiens
ctatcacttaatgtc

SEQ ID NO: 1874614 - DNA, 15 bp, Homo sapiens
tatcacttaatgtct

SEQ ID NO: 1874615 - DNA, 15 bp, Homo sapiens
atcacttaatgtctg

SEQ ID NO: 1874616 - DNA, 15 bp, Homo sapiens
tcacttaatgtctgt

SEQ ID NO: 1874617 - DNA, 15 bp, Homo sapiens
cacttaatgtctgta

SEQ ID NO: 1874618 - DNA, 15 bp, Homo sapiens
acttaatgtctgtat

SEQ ID NO: 1874619 - DNA, 15 bp, Homo sapiens
cttaatgtctgtatg

SEQ ID NO: 1874620 - DNA, 15 bp, Homo sapiens
ttaatgtctgtatga

SEQ ID NO: 1874621 - DNA, 15 bp, Homo sapiens
taatgtctgtatgac

SEQ ID NO: 1874622 - DNA, 15 bp, Homo sapiens
aatgtctgtatgact

SEQ ID NO: 1874623 - DNA, 15 bp, Homo sapiens
atgtctgtatgactt

SEQ ID NO: 1874624 - DNA, 15 bp, Homo sapiens
tgtctgtatgactta

SEQ ID NO: 1874625 - DNA, 15 bp, Homo sapiens
gtctgtatgacttag

SEQ ID NO: 1874626 - DNA, 15 bp, Homo sapiens
tctgtatgacttagg

SEQ ID NO: 1874627 - DNA, 15 bp, Homo sapiens
ctgtatgacttagga

SEQ ID NO: 1874628 - DNA, 15 bp, Homo sapiens
tgtatgacttaggat

SEQ ID NO: 1874629 - DNA, 15 bp, Homo sapiens
gtatgacttaggata

SEQ ID NO: 1874630 - DNA, 15 bp, Homo sapiens
tatgacttaggatac

SEQ ID NO: 1874631 - DNA, 15 bp, Homo sapiens
atgacttaggataca

SEQ ID NO: 1874632 - DNA, 15 bp, Homo sapiens
tgacttaggatacat

SEQ ID NO: 1874633 - DNA, 15 bp, Homo sapiens
gacttaggatacatt

SEQ ID NO: 1874634 - DNA, 15 bp, Homo sapiens
acttaggatacatta

SEQ ID NO: 1874635 - DNA, 15 bp, Homo sapiens
cttaggatacattat

SEQ ID NO: 1874636 - DNA, 15 bp, Homo sapiens
ttaggatacattatt

SEQ ID NO: 1874637 - DNA, 15 bp, Homo sapiens
taggatacattattt

SEQ ID NO: 1874638 - DNA, 15 bp, Homo sapiens
aggatacattattta

SEQ ID NO: 1874639 - DNA, 15 bp, Homo sapiens
ggatacattatttaa

SEQ ID NO: 1874640 - DNA, 15 bp, Homo sapiens
gatacattatttaat

SEQ ID NO: 1874641 - DNA, 15 bp, Homo sapiens
atacattatttaata

SEQ ID NO: 1874642 - DNA, 15 bp, Homo sapiens
tacattatttaatac

SEQ ID NO: 1874643 - DNA, 15 bp, Homo sapiens
acattatttaatacg

SEQ ID NO: 1874644 - DNA, 15 bp, Homo sapiens
cattatttaatacgt

SEQ ID NO: 1874645 - DNA, 15 bp, Homo sapiens
attatttaatacgtg

SEQ ID NO: 1874646 - DNA, 15 bp, Homo sapiens
ttatttaatacgtga

SEQ ID NO: 1874647 - DNA, 15 bp, Homo sapiens
tatttaatacgtgag

SEQ ID NO: 1874648 - DNA, 15 bp, Homo sapiens
atttaatacgtgagg

SEQ ID NO: 1874649 - DNA, 15 bp, Homo sapiens
tttaatacgtgaggg

SEQ ID NO: 1874650 - DNA, 15 bp, Homo sapiens
ttaatacgtgagggt

SEQ ID NO: 1874651 - DNA, 15 bp, Homo sapiens
taatacgtgagggtc

SEQ ID NO: 1874652 - DNA, 15 bp, Homo sapiens
aatacgtgagggtca

SEQ ID NO: 1874653 - DNA, 15 bp, Homo sapiens
atacgtgagggtcag

SEQ ID NO: 1874654 - DNA, 15 bp, Homo sapiens
tacgtgagggtcagt

SEQ ID NO: 1874655 - DNA, 15 bp, Homo sapiens
acgtgagggtcagtt

SEQ ID NO: 1874656 - DNA, 15 bp, Homo sapiens
cgtgagggtcagttt

SEQ ID NO: 1874657 - DNA, 15 bp, Homo sapiens
gtgagggtcagtttt

SEQ ID NO: 1874658 - DNA, 15 bp, Homo sapiens
tgagggtcagttttc

SEQ ID NO: 1874659 - DNA, 15 bp, Homo sapiens
gagggtcagttttct

SEQ ID NO: 1874660 - DNA, 15 bp, Homo sapiens
agggtcagttttctc

SEQ ID NO: 1874661 - DNA, 15 bp, Homo sapiens
gggtcagttttctca

SEQ ID NO: 1874662 - DNA, 15 bp, Homo sapiens
ggtcagttttctcat

SEQ ID NO: 1874663 - DNA, 15 bp, Homo sapiens
gtcagttttctcatt

SEQ ID NO: 1874664 - DNA, 15 bp, Homo sapiens
tcagttttctcattt

SEQ ID NO: 1874665 - DNA, 15 bp, Homo sapiens
cagttttctcatttg

SEQ ID NO: 1874666 - DNA, 15 bp, Homo sapiens
agttttctcatttgt

SEQ ID NO: 1874667 - DNA, 15 bp, Homo sapiens
gttttctcatttgta

SEQ ID NO: 1874668 - DNA, 15 bp, Homo sapiens
ttttctcatttgtac

SEQ ID NO: 1874669 - DNA, 15 bp, Homo sapiens
tttctcatttgtaca

SEQ ID NO: 1874670 - DNA, 15 bp, Homo sapiens
ttctcatttgtacag

SEQ ID NO: 1874671 - DNA, 15 bp, Homo sapiens
tctcatttgtacagt

SEQ ID NO: 1874672 - DNA, 15 bp, Homo sapiens
ctcatttgtacagtg

SEQ ID NO: 1874673 - DNA, 15 bp, Homo sapiens
tcatttgtacagtgg

SEQ ID NO: 1874674 - DNA, 15 bp, Homo sapiens
catttgtacagtggg

SEQ ID NO: 1874675 - DNA, 15 bp, Homo sapiens
atttgtacagtgggg

SEQ ID NO: 1874676 - DNA, 15 bp, Homo sapiens
tttgtacagtgggga

SEQ ID NO: 1874677 - DNA, 15 bp, Homo sapiens
ttgtacagtggggat

SEQ ID NO: 1874678 - DNA, 15 bp, Homo sapiens
tgtacagtggggatt

SEQ ID NO: 1874679 - DNA, 15 bp, Homo sapiens
gtacagtggggattt

SEQ ID NO: 1874680 - DNA, 15 bp, Homo sapiens
tacagtggggatttt

SEQ ID NO: 1874681 - DNA, 15 bp, Homo sapiens
acagtggggatttta

SEQ ID NO: 1874682 - DNA, 15 bp, Homo sapiens
cagtggggattttaa

SEQ ID NO: 1874683 - DNA, 15 bp, Homo sapiens
agtggggattttaat

SEQ ID NO: 1874684 - DNA, 15 bp, Homo sapiens
gtggggattttaata

SEQ ID NO: 1874685 - DNA, 15 bp, Homo sapiens
tggggattttaataa

SEQ ID NO: 1874686 - DNA, 15 bp, Homo sapiens
ggggattttaataac

SEQ ID NO: 1874687 - DNA, 15 bp, Homo sapiens
gggattttaataact

SEQ ID NO: 1874688 - DNA, 15 bp, Homo sapiens
ggattttaataactt

SEQ ID NO: 1874689 - DNA, 15 bp, Homo sapiens
gattttaataacttt

SEQ ID NO: 1874690 - DNA, 15 bp, Homo sapiens
attttaataactttc

SEQ ID NO: 1874691 - DNA, 15 bp, Homo sapiens
ttttaataactttct

SEQ ID NO: 1874692 - DNA, 15 bp, Homo sapiens
tttaataactttctt

SEQ ID NO: 1874693 - DNA, 15 bp, Homo sapiens
ttaataactttctta

SEQ ID NO: 1874694 - DNA, 15 bp, Homo sapiens
taataactttcttac

SEQ ID NO: 1874695 - DNA, 15 bp, Homo sapiens
aataactttcttacc

SEQ ID NO: 1874696 - DNA, 15 bp, Homo sapiens
ataactttcttaccc

SEQ ID NO: 1874697 - DNA, 15 bp, Homo sapiens
taactttcttaccct

SEQ ID NO: 1874698 - DNA, 15 bp, Homo sapiens
aactttcttaccctg

SEQ ID NO: 1874699 - DNA, 15 bp, Homo sapiens
actttcttaccctgt

SEQ ID NO: 1874700 - DNA, 15 bp, Homo sapiens
ctttcttaccctgtt

SEQ ID NO: 1874701 - DNA, 15 bp, Homo sapiens
tttcttaccctgttc

SEQ ID NO: 1874702 - DNA, 15 bp, Homo sapiens
ttcttaccctgttcc

SEQ ID NO: 1874703 - DNA, 15 bp, Homo sapiens
tcttaccctgttcct

SEQ ID NO: 1874704 - DNA, 15 bp, Homo sapiens
cttaccctgttcctg

SEQ ID NO: 1874705 - DNA, 15 bp, Homo sapiens
ttaccctgttcctgt

SEQ ID NO: 1874706 - DNA, 15 bp, Homo sapiens
taccctgttcctgtg

SEQ ID NO: 1874707 - DNA, 15 bp, Homo sapiens
accctgttcctgtga

SEQ ID NO: 1874708 - DNA, 15 bp, Homo sapiens
ccctgttcctgtgag

SEQ ID NO: 1874709 - DNA, 15 bp, Homo sapiens
cctgttcctgtgagg

SEQ ID NO: 1874710 - DNA, 15 bp, Homo sapiens
ctgttcctgtgaggg

SEQ ID NO: 1874711 - DNA, 15 bp, Homo sapiens
tgttcctgtgagggt

SEQ ID NO: 1874712 - DNA, 15 bp, Homo sapiens
gttcctgtgagggtt

SEQ ID NO: 1874713 - DNA, 15 bp, Homo sapiens
ttcctgtgagggtta

SEQ ID NO: 1874714 - DNA, 15 bp, Homo sapiens
tcctgtgagggttaa

SEQ ID NO: 1874715 - DNA, 15 bp, Homo sapiens
cctgtgagggttaaa

SEQ ID NO: 1874716 - DNA, 15 bp, Homo sapiens
ctgtgagggttaaat

SEQ ID NO: 1874717 - DNA, 15 bp, Homo sapiens
tgtgagggttaaatg

SEQ ID NO: 1874718 - DNA, 15 bp, Homo sapiens
gtgagggttaaatga

SEQ ID NO: 1874719 - DNA, 15 bp, Homo sapiens
tgagggttaaatgag

SEQ ID NO: 1874720 - DNA, 15 bp, Homo sapiens
gagggttaaatgaga

SEQ ID NO: 1874721 - DNA, 15 bp, Homo sapiens
agggttaaatgagat

SEQ ID NO: 1874722 - DNA, 15 bp, Homo sapiens
gggttaaatgagata

SEQ ID NO: 1874723 - DNA, 15 bp, Homo sapiens
ggttaaatgagatac

SEQ ID NO: 1874724 - DNA, 15 bp, Homo sapiens
gttaaatgagataca

SEQ ID NO: 1874725 - DNA, 15 bp, Homo sapiens
ttaaatgagatacaa

SEQ ID NO: 1874726 - DNA, 15 bp, Homo sapiens
taaatgagatacaac

SEQ ID NO: 1874727 - DNA, 15 bp, Homo sapiens
aaatgagatacaaca

SEQ ID NO: 1874728 - DNA, 15 bp, Homo sapiens
aatgagatacaacat

SEQ ID NO: 1874729 - DNA, 15 bp, Homo sapiens
atgagatacaacata

SEQ ID NO: 1874730 - DNA, 15 bp, Homo sapiens
tgagatacaacatat

SEQ ID NO: 1874731 - DNA, 15 bp, Homo sapiens
gagatacaacatatg

SEQ ID NO: 1874732 - DNA, 15 bp, Homo sapiens
agatacaacatatgt

SEQ ID NO: 1874733 - DNA, 15 bp, Homo sapiens
gatacaacatatgta

SEQ ID NO: 1874734 - DNA, 15 bp, Homo sapiens
atacaacatatgtaa

SEQ ID NO: 1874735 - DNA, 15 bp, Homo sapiens
tacaacatatgtaaa

SEQ ID NO: 1874736 - DNA, 15 bp, Homo sapiens
acaacatatgtaaat

SEQ ID NO: 1874737 - DNA, 15 bp, Homo sapiens
caacatatgtaaata

SEQ ID NO: 1874738 - DNA, 15 bp, Homo sapiens
aacatatgtaaatat

SEQ ID NO: 1874739 - DNA, 15 bp, Homo sapiens
acatatgtaaatatg

SEQ ID NO: 1874740 - DNA, 15 bp, Homo sapiens
catatgtaaatatgc

SEQ ID NO: 1874741 - DNA, 15 bp, Homo sapiens
atatgtaaatatgcc

SEQ ID NO: 1874742 - DNA, 15 bp, Homo sapiens
tatgtaaatatgccc

SEQ ID NO: 1874743 - DNA, 15 bp, Homo sapiens
atgtaaatatgccca

SEQ ID NO: 1874744 - DNA, 15 bp, Homo sapiens
tgtaaatatgcccaa

SEQ ID NO: 1874745 - DNA, 15 bp, Homo sapiens
gtaaatatgcccaac

SEQ ID NO: 1874746 - DNA, 15 bp, Homo sapiens
taaatatgcccaaca

SEQ ID NO: 1874747 - DNA, 15 bp, Homo sapiens
aaatatgcccaacac

SEQ ID NO: 1874748 - DNA, 15 bp, Homo sapiens
aatatgcccaacaca

SEQ ID NO: 1874749 - DNA, 15 bp, Homo sapiens
atatgcccaacacat

SEQ ID NO: 1874750 - DNA, 15 bp, Homo sapiens
tatgcccaacacatg

SEQ ID NO: 1874751 - DNA, 15 bp, Homo sapiens
atgcccaacacatgt

SEQ ID NO: 1874752 - DNA, 15 bp, Homo sapiens
tgcccaacacatgtg

SEQ ID NO: 1874753 - DNA, 15 bp, Homo sapiens
gcccaacacatgtgc

SEQ ID NO: 1874754 - DNA, 15 bp, Homo sapiens
cccaacacatgtgca

SEQ ID NO: 1874755 - DNA, 15 bp, Homo sapiens
ccaacacatgtgcag

SEQ ID NO: 1874756 - DNA, 15 bp, Homo sapiens
caacacatgtgcaga

SEQ ID NO: 1874757 - DNA, 15 bp, Homo sapiens
aacacatgtgcagag

SEQ ID NO: 1874758 - DNA, 15 bp, Homo sapiens
acacatgtgcagagt

SEQ ID NO: 1874759 - DNA, 15 bp, Homo sapiens
cacatgtgcagagtc

SEQ ID NO: 1874760 - DNA, 15 bp, Homo sapiens
acatgtgcagagtca

SEQ ID NO: 1874761 - DNA, 15 bp, Homo sapiens
catgtgcagagtcag

SEQ ID NO: 1874762 - DNA, 15 bp, Homo sapiens
atgtgcagagtcagt

SEQ ID NO: 1874763 - DNA, 15 bp, Homo sapiens
tgtgcagagtcagtg

SEQ ID NO: 1874764 - DNA, 15 bp, Homo sapiens
gtgcagagtcagtgc

SEQ ID NO: 1874765 - DNA, 15 bp, Homo sapiens
tgcagagtcagtgct

SEQ ID NO: 1874766 - DNA, 15 bp, Homo sapiens
gcagagtcagtgctc

SEQ ID NO: 1874767 - DNA, 15 bp, Homo sapiens
cagagtcagtgctca

SEQ ID NO: 1874768 - DNA, 15 bp, Homo sapiens
agagtcagtgctcaa

SEQ ID NO: 1874769 - DNA, 15 bp, Homo sapiens
gagtcagtgctcaat

SEQ ID NO: 1874770 - DNA, 15 bp, Homo sapiens
agtcagtgctcaata

SEQ ID NO: 1874771 - DNA, 15 bp, Homo sapiens
gtcagtgctcaatat

SEQ ID NO: 1874772 - DNA, 15 bp, Homo sapiens
tcagtgctcaatata

SEQ ID NO: 1874773 - DNA, 15 bp, Homo sapiens
cagtgctcaatatag

SEQ ID NO: 1874774 - DNA, 15 bp, Homo sapiens
agtgctcaatatagg

SEQ ID NO: 1874775 - DNA, 15 bp, Homo sapiens
gtgctcaatataggc

SEQ ID NO: 1874776 - DNA, 15 bp, Homo sapiens
tgctcaatataggca

SEQ ID NO: 1874777 - DNA, 15 bp, Homo sapiens
gctcaatataggcat

SEQ ID NO: 1874778 - DNA, 15 bp, Homo sapiens
ctcaatataggcatt

SEQ ID NO: 1874779 - DNA, 15 bp, Homo sapiens
tcaatataggcattt

SEQ ID NO: 1874780 - DNA, 15 bp, Homo sapiens
caatataggcatttg

SEQ ID NO: 1874781 - DNA, 15 bp, Homo sapiens
aatataggcatttgc

SEQ ID NO: 1874782 - DNA, 15 bp, Homo sapiens
atataggcatttgct

SEQ ID NO: 1874783 - DNA, 15 bp, Homo sapiens
tataggcatttgctt

SEQ ID NO: 1874784 - DNA, 15 bp, Homo sapiens
ataggcatttgcttt

SEQ ID NO: 1874785 - DNA, 15 bp, Homo sapiens
taggcatttgctttc

SEQ ID NO: 1874786 - DNA, 15 bp, Homo sapiens
aggcatttgctttcc

SEQ ID NO: 1874787 - DNA, 15 bp, Homo sapiens
ggcatttgctttcct

SEQ ID NO: 1874788 - DNA, 15 bp, Homo sapiens
gcatttgctttcctc

SEQ ID NO: 1874789 - DNA, 15 bp, Homo sapiens
catttgctttcctct

SEQ ID NO: 1874790 - DNA, 15 bp, Homo sapiens
atttgctttcctcta

SEQ ID NO: 1874791 - DNA, 15 bp, Homo sapiens
tttgctttcctctac

SEQ ID NO: 1874792 - DNA, 15 bp, Homo sapiens
ttgctttcctctact

SEQ ID NO: 1874793 - DNA, 15 bp, Homo sapiens
tgctttcctctacta

SEQ ID NO: 1874794 - DNA, 15 bp, Homo sapiens
gctttcctctactat

SEQ ID NO: 1874795 - DNA, 15 bp, Homo sapiens
ctttcctctactatg

SEQ ID NO: 1874796 - DNA, 15 bp, Homo sapiens
tttcctctactatgg

SEQ ID NO: 1874797 - DNA, 15 bp, Homo sapiens
ttcctctactatggg

SEQ ID NO: 1874798 - DNA, 15 bp, Homo sapiens
tcctctactatgggt

SEQ ID NO: 1874799 - DNA, 15 bp, Homo sapiens
cctctactatgggtt

SEQ ID NO: 1874800 - DNA, 15 bp, Homo sapiens
ctctactatgggttt

SEQ ID NO: 1874801 - DNA, 15 bp, Homo sapiens
tctactatgggttta

SEQ ID NO: 1874802 - DNA, 15 bp, Homo sapiens
ctactatgggtttaa

SEQ ID NO: 1874803 - DNA, 15 bp, Homo sapiens
tactatgggtttaag

SEQ ID NO: 1874804 - DNA, 15 bp, Homo sapiens
actatgggtttaaga

SEQ ID NO: 1874805 - DNA, 15 bp, Homo sapiens
ctatgggtttaagat

SEQ ID NO: 1874806 - DNA, 15 bp, Homo sapiens
tatgggtttaagatt

SEQ ID NO: 1874807 - DNA, 15 bp, Homo sapiens
atgggtttaagattc

SEQ ID NO: 1874808 - DNA, 15 bp, Homo sapiens
tgggtttaagattca

SEQ ID NO: 1874809 - DNA, 15 bp, Homo sapiens
gggtttaagattcat

SEQ ID NO: 1874810 - DNA, 15 bp, Homo sapiens
ggtttaagattcatg

SEQ ID NO: 1874811 - DNA, 15 bp, Homo sapiens
gtttaagattcatgc

SEQ ID NO: 1874812 - DNA, 15 bp, Homo sapiens
tttaagattcatgca

SEQ ID NO: 1874813 - DNA, 15 bp, Homo sapiens
ttaagattcatgcaa

SEQ ID NO: 1874814 - DNA, 15 bp, Homo sapiens
taagattcatgcaag

SEQ ID NO: 1874815 - DNA, 15 bp, Homo sapiens
aagattcatgcaagg

SEQ ID NO: 1874816 - DNA, 15 bp, Homo sapiens
agattcatgcaagga

SEQ ID NO: 1874817 - DNA, 15 bp, Homo sapiens
gattcatgcaaggat

SEQ ID NO: 1874818 - DNA, 15 bp, Homo sapiens
attcatgcaaggatg

SEQ ID NO: 1874819 - DNA, 15 bp, Homo sapiens
ttcatgcaaggatgt

SEQ ID NO: 1874820 - DNA, 15 bp, Homo sapiens
tcatgcaaggatgtt

SEQ ID NO: 1874821 - DNA, 15 bp, Homo sapiens
catgcaaggatgtta

SEQ ID NO: 1874822 - DNA, 15 bp, Homo sapiens
atgcaaggatgttaa

SEQ ID NO: 1874823 - DNA, 15 bp, Homo sapiens
tgcaaggatgttaaa

SEQ ID NO: 1874824 - DNA, 15 bp, Homo sapiens
gcaaggatgttaaaa

SEQ ID NO: 1874825 - DNA, 15 bp, Homo sapiens
caaggatgttaaaac

SEQ ID NO: 1874826 - DNA, 15 bp, Homo sapiens
aaggatgttaaaaca

SEQ ID NO: 1874827 - DNA, 15 bp, Homo sapiens
aggatgttaaaacag

SEQ ID NO: 1874828 - DNA, 15 bp, Homo sapiens
ggatgttaaaacagc

SEQ ID NO: 1874829 - DNA, 15 bp, Homo sapiens
gatgttaaaacagct

SEQ ID NO: 1874830 - DNA, 15 bp, Homo sapiens
atgttaaaacagctc

SEQ ID NO: 1874831 - DNA, 15 bp, Homo sapiens
tgttaaaacagctca

SEQ ID NO: 1874832 - DNA, 15 bp, Homo sapiens
gttaaaacagctcaa

SEQ ID NO: 1874833 - DNA, 15 bp, Homo sapiens
ttaaaacagctcaat

SEQ ID NO: 1874834 - DNA, 15 bp, Homo sapiens
taaaacagctcaatc

SEQ ID NO: 1874835 - DNA, 15 bp, Homo sapiens
aaaacagctcaatct

SEQ ID NO: 1874836 - DNA, 15 bp, Homo sapiens
aaacagctcaatctg

SEQ ID NO: 1874837 - DNA, 15 bp, Homo sapiens
aacagctcaatctgg

SEQ ID NO: 1874838 - DNA, 15 bp, Homo sapiens
acagctcaatctgga

SEQ ID NO: 1874839 - DNA, 15 bp, Homo sapiens
cagctcaatctggac

SEQ ID NO: 1874840 - DNA, 15 bp, Homo sapiens
agctcaatctggact

SEQ ID NO: 1874841 - DNA, 15 bp, Homo sapiens
gctcaatctggactg

SEQ ID NO: 1874842 - DNA, 15 bp, Homo sapiens
ctcaatctggactgt

SEQ ID NO: 1874843 - DNA, 15 bp, Homo sapiens
tcaatctggactgtt

SEQ ID NO: 1874844 - DNA, 15 bp, Homo sapiens
caatctggactgttc

SEQ ID NO: 1874845 - DNA, 15 bp, Homo sapiens
aatctggactgttct

SEQ ID NO: 1874846 - DNA, 15 bp, Homo sapiens
atctggactgttctc

SEQ ID NO: 1874847 - DNA, 15 bp, Homo sapiens
tctggactgttctca

SEQ ID NO: 1874848 - DNA, 15 bp, Homo sapiens
ctggactgttctcat

SEQ ID NO: 1874849 - DNA, 15 bp, Homo sapiens
tggactgttctcatg

SEQ ID NO: 1874850 - DNA, 15 bp, Homo sapiens
ggactgttctcatga

SEQ ID NO: 1874851 - DNA, 15 bp, Homo sapiens
gactgttctcatgac

SEQ ID NO: 1874852 - DNA, 15 bp, Homo sapiens
actgttctcatgacc

SEQ ID NO: 1874853 - DNA, 15 bp, Homo sapiens
ctgttctcatgacca

SEQ ID NO: 1874854 - DNA, 15 bp, Homo sapiens
tgttctcatgaccat

SEQ ID NO: 1874855 - DNA, 15 bp, Homo sapiens
gttctcatgaccatt

SEQ ID NO: 1874856 - DNA, 15 bp, Homo sapiens
ttctcatgaccattc

SEQ ID NO: 1874857 - DNA, 15 bp, Homo sapiens
tctcatgaccattca

SEQ ID NO: 1874858 - DNA, 15 bp, Homo sapiens
ctcatgaccattcag

SEQ ID NO: 1874859 - DNA, 15 bp, Homo sapiens
tcatgaccattcaga

SEQ ID NO: 1874860 - DNA, 15 bp, Homo sapiens
catgaccattcagac

SEQ ID NO: 1874861 - DNA, 15 bp, Homo sapiens
atgaccattcagact

SEQ ID NO: 1874862 - DNA, 15 bp, Homo sapiens
tgaccattcagactt

SEQ ID NO: 1874863 - DNA, 15 bp, Homo sapiens
gaccattcagactta

SEQ ID NO: 1874864 - DNA, 15 bp, Homo sapiens
accattcagacttaa

SEQ ID NO: 1874865 - DNA, 15 bp, Homo sapiens
ccattcagacttaat

SEQ ID NO: 1874866 - DNA, 15 bp, Homo sapiens
cattcagacttaata

SEQ ID NO: 1874867 - DNA, 15 bp, Homo sapiens
attcagacttaatat

SEQ ID NO: 1874868 - DNA, 15 bp, Homo sapiens
ttcagacttaatatt

SEQ ID NO: 1874869 - DNA, 15 bp, Homo sapiens
tcagacttaatattt

SEQ ID NO: 1874870 - DNA, 15 bp, Homo sapiens
cagacttaatattta

SEQ ID NO: 1874871 - DNA, 15 bp, Homo sapiens
agacttaatatttac

SEQ ID NO: 1874872 - DNA, 15 bp, Homo sapiens
gacttaatatttacc

SEQ ID NO: 1874873 - DNA, 15 bp, Homo sapiens
acttaatatttaccc

SEQ ID NO: 1874874 - DNA, 15 bp, Homo sapiens
cttaatatttaccct

SEQ ID NO: 1874875 - DNA, 15 bp, Homo sapiens
ttaatatttacccta

SEQ ID NO: 1874876 - DNA, 15 bp, Homo sapiens
taatatttaccctaa

SEQ ID NO: 1874877 - DNA, 15 bp, Homo sapiens
aatatttaccctaaa

SEQ ID NO: 1874878 - DNA, 15 bp, Homo sapiens
atatttaccctaaaa

SEQ ID NO: 1874879 - DNA, 15 bp, Homo sapiens
tatttaccctaaaac

SEQ ID NO: 1874880 - DNA, 15 bp, Homo sapiens
atttaccctaaaact

SEQ ID NO: 1874881 - DNA, 15 bp, Homo sapiens
tttaccctaaaactg

SEQ ID NO: 1874882 - DNA, 15 bp, Homo sapiens
ttaccctaaaactgg

SEQ ID NO: 1874883 - DNA, 15 bp, Homo sapiens
taccctaaaactggc

SEQ ID NO: 1874884 - DNA, 15 bp, Homo sapiens
accctaaaactggca

SEQ ID NO: 1874885 - DNA, 15 bp, Homo sapiens
ccctaaaactggcat

SEQ ID NO: 1874886 - DNA, 15 bp, Homo sapiens
cctaaaactggcatt

SEQ ID NO: 1874887 - DNA, 15 bp, Homo sapiens
ctaaaactggcatta

SEQ ID NO: 1874888 - DNA, 15 bp, Homo sapiens
taaaactggcattac

SEQ ID NO: 1874889 - DNA, 15 bp, Homo sapiens
aaaactggcattacc

SEQ ID NO: 1874890 - DNA, 15 bp, Homo sapiens
aaactggcattaccc

SEQ ID NO: 1874891 - DNA, 15 bp, Homo sapiens
aactggcattaccct

SEQ ID NO: 1874892 - DNA, 15 bp, Homo sapiens
actggcattaccctt

SEQ ID NO: 1874893 - DNA, 15 bp, Homo sapiens
ctggcattacccttg

SEQ ID NO: 1874894 - DNA, 15 bp, Homo sapiens
tggcattacccttga

SEQ ID NO: 1874895 - DNA, 15 bp, Homo sapiens
ggcattacccttgat

SEQ ID NO: 1874896 - DNA, 15 bp, Homo sapiens
gcattacccttgatt

SEQ ID NO: 1874897 - DNA, 15 bp, Homo sapiens
cattacccttgattt

SEQ ID NO: 1874898 - DNA, 15 bp, Homo sapiens
attacccttgattta

SEQ ID NO: 1874899 - DNA, 15 bp, Homo sapiens
ttacccttgatttag

SEQ ID NO: 1874900 - DNA, 15 bp, Homo sapiens
tacccttgatttagt

SEQ ID NO: 1874901 - DNA, 15 bp, Homo sapiens
acccttgatttagtc

SEQ ID NO: 1874902 - DNA, 15 bp, Homo sapiens
cccttgatttagtca

SEQ ID NO: 1874903 - DNA, 15 bp, Homo sapiens
ccttgatttagtcat

SEQ ID NO: 1874904 - DNA, 15 bp, Homo sapiens
cttgatttagtcatg

SEQ ID NO: 1874905 - DNA, 15 bp, Homo sapiens
ttgatttagtcatga

SEQ ID NO: 1874906 - DNA, 15 bp, Homo sapiens
tgatttagtcatgac

SEQ ID NO: 1874907 - DNA, 15 bp, Homo sapiens
gatttagtcatgacg

SEQ ID NO: 1874908 - DNA, 15 bp, Homo sapiens
atttagtcatgacgt

SEQ ID NO: 1874909 - DNA, 15 bp, Homo sapiens
tttagtcatgacgtg

SEQ ID NO: 1874910 - DNA, 15 bp, Homo sapiens
ttagtcatgacgtga

SEQ ID NO: 1874911 - DNA, 15 bp, Homo sapiens
tagtcatgacgtgat

SEQ ID NO: 1874912 - DNA, 15 bp, Homo sapiens
agtcatgacgtgatt

SEQ ID NO: 1874913 - DNA, 15 bp, Homo sapiens
gtcatgacgtgatta

SEQ ID NO: 1874914 - DNA, 15 bp, Homo sapiens
tcatgacgtgattat

SEQ ID NO: 1874915 - DNA, 15 bp, Homo sapiens
catgacgtgattatt

SEQ ID NO: 1874916 - DNA, 15 bp, Homo sapiens
atgacgtgattatta

SEQ ID NO: 1874917 - DNA, 15 bp, Homo sapiens
tgacgtgattattaa

SEQ ID NO: 1874918 - DNA, 15 bp, Homo sapiens
gacgtgattattaaa

SEQ ID NO: 1874919 - DNA, 15 bp, Homo sapiens
acgtgattattaaat

SEQ ID NO: 1874920 - DNA, 15 bp, Homo sapiens
cgtgattattaaatt

SEQ ID NO: 1874921 - DNA, 15 bp, Homo sapiens
gtgattattaaattt

SEQ ID NO: 1874922 - DNA, 15 bp, Homo sapiens
tgattattaaatttg

SEQ ID NO: 1874923 - DNA, 15 bp, Homo sapiens
gattattaaatttgt

SEQ ID NO: 1874924 - DNA, 15 bp, Homo sapiens
attattaaatttgtt

SEQ ID NO: 1874925 - DNA, 15 bp, Homo sapiens
ttattaaatttgtta

SEQ ID NO: 1874926 - DNA, 15 bp, Homo sapiens
tattaaatttgttaa

SEQ ID NO: 1874927 - DNA, 15 bp, Homo sapiens
attaaatttgttaaa

SEQ ID NO: 1874928 - DNA, 15 bp, Homo sapiens
ttaaatttgttaaaa

SEQ ID NO: 1874929 - DNA, 15 bp, Homo sapiens
taaatttgttaaaaa

SEQ ID NO: 1874930 - DNA, 15 bp, Homo sapiens
aaatttgttaaaaaa

SEQ ID NO: 1874931 - DNA, 15 bp, Homo sapiens
aatttgttaaaaaaa

SEQ ID NO: 1874932 - DNA, 15 bp, Homo sapiens
atttgttaaaaaaat

SEQ ID NO: 1874933 - DNA, 15 bp, Homo sapiens
tttgttaaaaaaatt

SEQ ID NO: 1874934 - DNA, 15 bp, Homo sapiens
ttgttaaaaaaattg

SEQ ID NO: 1874935 - DNA, 15 bp, Homo sapiens
tgttaaaaaaattgg

SEQ ID NO: 1874936 - DNA, 15 bp, Homo sapiens
gttaaaaaaattggg

SEQ ID NO: 1874937 - DNA, 15 bp, Homo sapiens
ttaaaaaaattgggt

SEQ ID NO: 1874938 - DNA, 15 bp, Homo sapiens
taaaaaaattgggtc

SEQ ID NO: 1874939 - DNA, 15 bp, Homo sapiens
aaaaaaattgggtcc

SEQ ID NO: 1874940 - DNA, 15 bp, Homo sapiens
aaaaaattgggtcct

SEQ ID NO: 1874941 - DNA, 15 bp, Homo sapiens
aaaaattgggtcctg

SEQ ID NO: 1874942 - DNA, 15 bp, Homo sapiens
aaaattgggtcctgt

SEQ ID NO: 1874943 - DNA, 15 bp, Homo sapiens
aaattgggtcctgta

SEQ ID NO: 1874944 - DNA, 15 bp, Homo sapiens
aattgggtcctgtat

SEQ ID NO: 1874945 - DNA, 15 bp, Homo sapiens
attgggtcctgtata

SEQ ID NO: 1874946 - DNA, 15 bp, Homo sapiens
ttgggtcctgtataa

SEQ ID NO: 1874947 - DNA, 15 bp, Homo sapiens
tgggtcctgtataag

SEQ ID NO: 1874948 - DNA, 15 bp, Homo sapiens
gggtcctgtataaga

SEQ ID NO: 1874949 - DNA, 15 bp, Homo sapiens
ggtcctgtataagaa

SEQ ID NO: 1874950 - DNA, 15 bp, Homo sapiens
gtcctgtataagaac

SEQ ID NO: 1874951 - DNA, 15 bp, Homo sapiens
tcctgtataagaact

SEQ ID NO: 1874952 - DNA, 15 bp, Homo sapiens
cctgtataagaactg

SEQ ID NO: 1874953 - DNA, 15 bp, Homo sapiens
ctgtataagaactgc

SEQ ID NO: 1874954 - DNA, 15 bp, Homo sapiens
tgtataagaactgcc

SEQ ID NO: 1874955 - DNA, 15 bp, Homo sapiens
gtataagaactgccc

SEQ ID NO: 1874956 - DNA, 15 bp, Homo sapiens
tataagaactgccca

SEQ ID NO: 1874957 - DNA, 15 bp, Homo sapiens
ataagaactgcccat

SEQ ID NO: 1874958 - DNA, 15 bp, Homo sapiens
taagaactgcccatg

SEQ ID NO: 1874959 - DNA, 15 bp, Homo sapiens
aagaactgcccatga

SEQ ID NO: 1874960 - DNA, 15 bp, Homo sapiens
agaactgcccatgat

SEQ ID NO: 1874961 - DNA, 15 bp, Homo sapiens
gaactgcccatgatt

SEQ ID NO: 1874962 - DNA, 15 bp, Homo sapiens
aactgcccatgattt

SEQ ID NO: 1874963 - DNA, 15 bp, Homo sapiens
actgcccatgatttg

SEQ ID NO: 1874964 - DNA, 15 bp, Homo sapiens
ctgcccatgatttgg

SEQ ID NO: 1874965 - DNA, 15 bp, Homo sapiens
tgcccatgatttgga

SEQ ID NO: 1874966 - DNA, 15 bp, Homo sapiens
gcccatgatttggat

SEQ ID NO: 1874967 - DNA, 15 bp, Homo sapiens
cccatgatttggatt

SEQ ID NO: 1874968 - DNA, 15 bp, Homo sapiens
ccatgatttggattt

SEQ ID NO: 1874969 - DNA, 15 bp, Homo sapiens
catgatttggatttt

SEQ ID NO: 1874970 - DNA, 15 bp, Homo sapiens
atgatttggattttg

SEQ ID NO: 1874971 - DNA, 15 bp, Homo sapiens
tgatttggattttgg

SEQ ID NO: 1874972 - DNA, 15 bp, Homo sapiens
gatttggattttggc

SEQ ID NO: 1874973 - DNA, 15 bp, Homo sapiens
atttggattttggca

SEQ ID NO: 1874974 - DNA, 15 bp, Homo sapiens
tttggattttggcag

SEQ ID NO: 1874975 - DNA, 15 bp, Homo sapiens
ttggattttggcagg

SEQ ID NO: 1874976 - DNA, 15 bp, Homo sapiens
tggattttggcaggt

SEQ ID NO: 1874977 - DNA, 15 bp, Homo sapiens
ggattttggcaggta

SEQ ID NO: 1874978 - DNA, 15 bp, Homo sapiens
gattttggcaggtaa

SEQ ID NO: 1874979 - DNA, 15 bp, Homo sapiens
attttggcaggtaat

SEQ ID NO: 1874980 - DNA, 15 bp, Homo sapiens
ttttggcaggtaatt

SEQ ID NO: 1874981 - DNA, 15 bp, Homo sapiens
tttggcaggtaattt

SEQ ID NO: 1874982 - DNA, 15 bp, Homo sapiens
ttggcaggtaattta

SEQ ID NO: 1874983 - DNA, 15 bp, Homo sapiens
tggcaggtaatttag

SEQ ID NO: 1874984 - DNA, 15 bp, Homo sapiens
ggcaggtaatttagc

SEQ ID NO: 1874985 - DNA, 15 bp, Homo sapiens
gcaggtaatttagct

SEQ ID NO: 1874986 - DNA, 15 bp, Homo sapiens
caggtaatttagctg

SEQ ID NO: 1874987 - DNA, 15 bp, Homo sapiens
aggtaatttagctgt

SEQ ID NO: 1874988 - DNA, 15 bp, Homo sapiens
ggtaatttagctgta

SEQ ID NO: 1874989 - DNA, 15 bp, Homo sapiens
gtaatttagctgtac

SEQ ID NO: 1874990 - DNA, 15 bp, Homo sapiens
taatttagctgtacc

SEQ ID NO: 1874991 - DNA, 15 bp, Homo sapiens
aatttagctgtacca

SEQ ID NO: 1874992 - DNA, 15 bp, Homo sapiens
atttagctgtaccat

SEQ ID NO: 1874993 - DNA, 15 bp, Homo sapiens
tttagctgtaccatc

SEQ ID NO: 1874994 - DNA, 15 bp, Homo sapiens
ttagctgtaccatca

SEQ ID NO: 1874995 - DNA, 15 bp, Homo sapiens
tagctgtaccatcaa

SEQ ID NO: 1874996 - DNA, 15 bp, Homo sapiens
agctgtaccatcaat

SEQ ID NO: 1874997 - DNA, 15 bp, Homo sapiens
gctgtaccatcaatg

SEQ ID NO: 1874998 - DNA, 15 bp, Homo sapiens
ctgtaccatcaatgg

SEQ ID NO: 1874999 - DNA, 15 bp, Homo sapiens
tgtaccatcaatggt

SEQ ID NO: 1875000 - DNA, 15 bp, Homo sapiens
gtaccatcaatggta

SEQ ID NO: 1875001 - DNA, 15 bp, Homo sapiens
taccatcaatggtaa

SEQ ID NO: 1875002 - DNA, 15 bp, Homo sapiens
accatcaatggtaac

SEQ ID NO: 1875003 - DNA, 15 bp, Homo sapiens
ccatcaatggtaact

SEQ ID NO: 1875004 - DNA, 15 bp, Homo sapiens
catcaatggtaactg

SEQ ID NO: 1875005 - DNA, 15 bp, Homo sapiens
atcaatggtaactgt

SEQ ID NO: 1875006 - DNA, 15 bp, Homo sapiens
tcaatggtaactgtt

SEQ ID NO: 1875007 - DNA, 15 bp, Homo sapiens
caatggtaactgttt

SEQ ID NO: 1875008 - DNA, 15 bp, Homo sapiens
aatggtaactgttta

SEQ ID NO: 1875009 - DNA, 15 bp, Homo sapiens
atggtaactgtttat

SEQ ID NO: 1875010 - DNA, 15 bp, Homo sapiens
tggtaactgtttatc

SEQ ID NO: 1875011 - DNA, 15 bp, Homo sapiens
ggtaactgtttatcc

SEQ ID NO: 1875012 - DNA, 15 bp, Homo sapiens
gtaactgtttatcca

SEQ ID NO: 1875013 - DNA, 15 bp, Homo sapiens
taactgtttatccag

SEQ ID NO: 1875014 - DNA, 15 bp, Homo sapiens
aactgtttatccaga

SEQ ID NO: 1875015 - DNA, 15 bp, Homo sapiens
actgtttatccagag

SEQ ID NO: 1875016 - DNA, 15 bp, Homo sapiens
ctgtttatccagagt

SEQ ID NO: 1875017 - DNA, 15 bp, Homo sapiens
tgtttatccagagta

SEQ ID NO: 1875018 - DNA, 15 bp, Homo sapiens
gtttatccagagtaa

SEQ ID NO: 1875019 - DNA, 15 bp, Homo sapiens
tttatccagagtaat

SEQ ID NO: 1875020 - DNA, 15 bp, Homo sapiens
ttatccagagtaatt

SEQ ID NO: 1875021 - DNA, 15 bp, Homo sapiens
tatccagagtaattc

SEQ ID NO: 1875022 - DNA, 15 bp, Homo sapiens
atccagagtaattct

SEQ ID NO: 1875023 - DNA, 15 bp, Homo sapiens
tccagagtaattctt

SEQ ID NO: 1875024 - DNA, 15 bp, Homo sapiens
ccagagtaattcttt

SEQ ID NO: 1875025 - DNA, 15 bp, Homo sapiens
cagagtaattctttc

SEQ ID NO: 1875026 - DNA, 15 bp, Homo sapiens
agagtaattctttct

SEQ ID NO: 1875027 - DNA, 15 bp, Homo sapiens
gagtaattctttcta

SEQ ID NO: 1875028 - DNA, 15 bp, Homo sapiens
agtaattctttctac

SEQ ID NO: 1875029 - DNA, 15 bp, Homo sapiens
gtaattctttctacc

SEQ ID NO: 1875030 - DNA, 15 bp, Homo sapiens
taattctttctacca

SEQ ID NO: 1875031 - DNA, 15 bp, Homo sapiens
aattctttctaccac

SEQ ID NO: 1875032 - DNA, 15 bp, Homo sapiens
attctttctaccact

SEQ ID NO: 1875033 - DNA, 15 bp, Homo sapiens
ttctttctaccacta

SEQ ID NO: 1875034 - DNA, 15 bp, Homo sapiens
tctttctaccactag

SEQ ID NO: 1875035 - DNA, 15 bp, Homo sapiens
ctttctaccactaga

SEQ ID NO: 1875036 - DNA, 15 bp, Homo sapiens
tttctaccactagat

SEQ ID NO: 1875037 - DNA, 15 bp, Homo sapiens
ttctaccactagatg

SEQ ID NO: 1875038 - DNA, 15 bp, Homo sapiens
tctaccactagatgg

SEQ ID NO: 1875039 - DNA, 15 bp, Homo sapiens
ctaccactagatggt

SEQ ID NO: 1875040 - DNA, 15 bp, Homo sapiens
taccactagatggtg

SEQ ID NO: 1875041 - DNA, 15 bp, Homo sapiens
accactagatggtgc

SEQ ID NO: 1875042 - DNA, 15 bp, Homo sapiens
ccactagatggtgct

SEQ ID NO: 1875043 - DNA, 15 bp, Homo sapiens
cactagatggtgctt

SEQ ID NO: 1875044 - DNA, 15 bp, Homo sapiens
actagatggtgcttg

SEQ ID NO: 1875045 - DNA, 15 bp, Homo sapiens
ctagatggtgcttgt

SEQ ID NO: 1875046 - DNA, 15 bp, Homo sapiens
tagatggtgcttgtc

SEQ ID NO: 1875047 - DNA, 15 bp, Homo sapiens
agatggtgcttgtcc

SEQ ID NO: 1875048 - DNA, 15 bp, Homo sapiens
gatggtgcttgtcca

SEQ ID NO: 1875049 - DNA, 15 bp, Homo sapiens
atggtgcttgtccat

SEQ ID NO: 1875050 - DNA, 15 bp, Homo sapiens
tggtgcttgtccata

SEQ ID NO: 1875051 - DNA, 15 bp, Homo sapiens
ggtgcttgtccatat

SEQ ID NO: 1875052 - DNA, 15 bp, Homo sapiens
gtgcttgtccatata

SEQ ID NO: 1875053 - DNA, 15 bp, Homo sapiens
tgcttgtccatatat

SEQ ID NO: 1875054 - DNA, 15 bp, Homo sapiens
gcttgtccatatatt

SEQ ID NO: 1875055 - DNA, 15 bp, Homo sapiens
cttgtccatatattt

SEQ ID NO: 1875056 - DNA, 15 bp, Homo sapiens
ttgtccatatatttg

SEQ ID NO: 1875057 - DNA, 15 bp, Homo sapiens
tgtccatatatttgt

SEQ ID NO: 1875058 - DNA, 15 bp, Homo sapiens
gtccatatatttgtg

SEQ ID NO: 1875059 - DNA, 15 bp, Homo sapiens
tccatatatttgtga

SEQ ID NO: 1875060 - DNA, 15 bp, Homo sapiens
ccatatatttgtgag

SEQ ID NO: 1875061 - DNA, 15 bp, Homo sapiens
catatatttgtgagg

SEQ ID NO: 1875062 - DNA, 15 bp, Homo sapiens
atatatttgtgaggc

SEQ ID NO: 1875063 - DNA, 15 bp, Homo sapiens
tatatttgtgaggct

SEQ ID NO: 1875064 - DNA, 15 bp, Homo sapiens
atatttgtgaggctc

SEQ ID NO: 1875065 - DNA, 15 bp, Homo sapiens
tatttgtgaggctct

SEQ ID NO: 1875066 - DNA, 15 bp, Homo sapiens
atttgtgaggctctc

SEQ ID NO: 1875067 - DNA, 15 bp, Homo sapiens
tttgtgaggctctcc

SEQ ID NO: 1875068 - DNA, 15 bp, Homo sapiens
ttgtgaggctctcct

SEQ ID NO: 1875069 - DNA, 15 bp, Homo sapiens
tgtgaggctctccta

SEQ ID NO: 1875070 - DNA, 15 bp, Homo sapiens
gtgaggctctcctat

SEQ ID NO: 1875071 - DNA, 15 bp, Homo sapiens
tgaggctctcctata

SEQ ID NO: 1875072 - DNA, 15 bp, Homo sapiens
gaggctctcctatat

SEQ ID NO: 1875073 - DNA, 15 bp, Homo sapiens
aggctctcctatata

SEQ ID NO: 1875074 - DNA, 15 bp, Homo sapiens
ggctctcctatataa

SEQ ID NO: 1875075 - DNA, 15 bp, Homo sapiens
gctctcctatataaa

SEQ ID NO: 1875076 - DNA, 15 bp, Homo sapiens
ctctcctatataaag

SEQ ID NO: 1875077 - DNA, 15 bp, Homo sapiens
tctcctatataaagt

SEQ ID NO: 1875078 - DNA, 15 bp, Homo sapiens
ctcctatataaagtt

SEQ ID NO: 1875079 - DNA, 15 bp, Homo sapiens
tcctatataaagtta

SEQ ID NO: 1875080 - DNA, 15 bp, Homo sapiens
cctatataaagttac

SEQ ID NO: 1875081 - DNA, 15 bp, Homo sapiens
ctatataaagttaca

SEQ ID NO: 1875082 - DNA, 15 bp, Homo sapiens
tatataaagttacat

SEQ ID NO: 1875083 - DNA, 15 bp, Homo sapiens
atataaagttacata

SEQ ID NO: 1875084 - DNA, 15 bp, Homo sapiens
tataaagttacataa

SEQ ID NO: 1875085 - DNA, 15 bp, Homo sapiens
ataaagttacataat

SEQ ID NO: 1875086 - DNA, 15 bp, Homo sapiens
taaagttacataatt

SEQ ID NO: 1875087 - DNA, 15 bp, Homo sapiens
aaagttacataattt

SEQ ID NO: 1875088 - DNA, 15 bp, Homo sapiens
aagttacataatttg

SEQ ID NO: 1875089 - DNA, 15 bp, Homo sapiens
agttacataatttgg

SEQ ID NO: 1875090 - DNA, 15 bp, Homo sapiens
gttacataatttggg

SEQ ID NO: 1875091 - DNA, 15 bp, Homo sapiens
ttacataatttgggg

SEQ ID NO: 1875092 - DNA, 15 bp, Homo sapiens
tacataatttggggt

SEQ ID NO: 1875093 - DNA, 15 bp, Homo sapiens
acataatttggggta

SEQ ID NO: 1875094 - DNA, 15 bp, Homo sapiens
cataatttggggtaa

SEQ ID NO: 1875095 - DNA, 15 bp, Homo sapiens
ataatttggggtaaa

SEQ ID NO: 1875096 - DNA, 15 bp, Homo sapiens
taatttggggtaaaa

SEQ ID NO: 1875097 - DNA, 15 bp, Homo sapiens
aatttggggtaaaac

SEQ ID NO: 1875098 - DNA, 15 bp, Homo sapiens
atttggggtaaaaca

SEQ ID NO: 1875099 - DNA, 15 bp, Homo sapiens
tttggggtaaaacac

SEQ ID NO: 1875100 - DNA, 15 bp, Homo sapiens
ttggggtaaaacaca

SEQ ID NO: 1875101 - DNA, 15 bp, Homo sapiens
tggggtaaaacacat

SEQ ID NO: 1875102 - DNA, 15 bp, Homo sapiens
ggggtaaaacacatc

SEQ ID NO: 1875103 - DNA, 15 bp, Homo sapiens
gggtaaaacacatct

SEQ ID NO: 1875104 - DNA, 15 bp, Homo sapiens
ggtaaaacacatctt

SEQ ID NO: 1875105 - DNA, 15 bp, Homo sapiens
gtaaaacacatcttg

SEQ ID NO: 1875106 - DNA, 15 bp, Homo sapiens
taaaacacatcttgt

SEQ ID NO: 1875107 - DNA, 15 bp, Homo sapiens
aaaacacatcttgtt

SEQ ID NO: 1875108 - DNA, 15 bp, Homo sapiens
aaacacatcttgttg

SEQ ID NO: 1875109 - DNA, 15 bp, Homo sapiens
aacacatcttgttga

SEQ ID NO: 1875110 - DNA, 15 bp, Homo sapiens
acacatcttgttgac

SEQ ID NO: 1875111 - DNA, 15 bp, Homo sapiens
cacatcttgttgacc

SEQ ID NO: 1875112 - DNA, 15 bp, Homo sapiens
acatcttgttgacct

SEQ ID NO: 1875113 - DNA, 15 bp, Homo sapiens
catcttgttgacctt

SEQ ID NO: 1875114 - DNA, 15 bp, Homo sapiens
atcttgttgaccttt

SEQ ID NO: 1875115 - DNA, 15 bp, Homo sapiens
tcttgttgacctttg

SEQ ID NO: 1875116 - DNA, 15 bp, Homo sapiens
cttgttgacctttga

SEQ ID NO: 1875117 - DNA, 15 bp, Homo sapiens
ttgttgacctttgag

SEQ ID NO: 1875118 - DNA, 15 bp, Homo sapiens
tgttgacctttgaga

SEQ ID NO: 1875119 - DNA, 15 bp, Homo sapiens
gttgacctttgagaa

SEQ ID NO: 1875120 - DNA, 15 bp, Homo sapiens
ttgacctttgagaat

SEQ ID NO: 1875121 - DNA, 15 bp, Homo sapiens
tgacctttgagaatt

SEQ ID NO: 1875122 - DNA, 15 bp, Homo sapiens
gacctttgagaattg

SEQ ID NO: 1875123 - DNA, 15 bp, Homo sapiens
acctttgagaattgt

SEQ ID NO: 1875124 - DNA, 15 bp, Homo sapiens
cctttgagaattgta

SEQ ID NO: 1875125 - DNA, 15 bp, Homo sapiens
ctttgagaattgtat

SEQ ID NO: 1875126 - DNA, 15 bp, Homo sapiens
tttgagaattgtata

SEQ ID NO: 1875127 - DNA, 15 bp, Homo sapiens
ttgagaattgtatag

SEQ ID NO: 1875128 - DNA, 15 bp, Homo sapiens
tgagaattgtatagt

SEQ ID NO: 1875129 - DNA, 15 bp, Homo sapiens
gagaattgtatagtg

SEQ ID NO: 1875130 - DNA, 15 bp, Homo sapiens
agaattgtatagtgg

SEQ ID NO: 1875131 - DNA, 15 bp, Homo sapiens
gaattgtatagtggt

SEQ ID NO: 1875132 - DNA, 15 bp, Homo sapiens
aattgtatagtggta

SEQ ID NO: 1875133 - DNA, 15 bp, Homo sapiens
attgtatagtggtat

SEQ ID NO: 1875134 - DNA, 15 bp, Homo sapiens
ttgtatagtggtatt

SEQ ID NO: 1875135 - DNA, 15 bp, Homo sapiens
tgtatagtggtattg

SEQ ID NO: 1875136 - DNA, 15 bp, Homo sapiens
gtatagtggtattga

SEQ ID NO: 1875137 - DNA, 15 bp, Homo sapiens
tatagtggtattgat

SEQ ID NO: 1875138 - DNA, 15 bp, Homo sapiens
atagtggtattgata

SEQ ID NO: 1875139 - DNA, 15 bp, Homo sapiens
tagtggtattgatac

SEQ ID NO: 1875140 - DNA, 15 bp, Homo sapiens
agtggtattgatact

SEQ ID NO: 1875141 - DNA, 15 bp, Homo sapiens
gtggtattgatactc

SEQ ID NO: 1875142 - DNA, 15 bp, Homo sapiens
tggtattgatactca

SEQ ID NO: 1875143 - DNA, 15 bp, Homo sapiens
ggtattgatactcat

SEQ ID NO: 1875144 - DNA, 15 bp, Homo sapiens
gtattgatactcatg

SEQ ID NO: 1875145 - DNA, 15 bp, Homo sapiens
tattgatactcatgt

SEQ ID NO: 1875146 - DNA, 15 bp, Homo sapiens
attgatactcatgtt

SEQ ID NO: 1875147 - DNA, 15 bp, Homo sapiens
ttgatactcatgttc

SEQ ID NO: 1875148 - DNA, 15 bp, Homo sapiens
tgatactcatgttca

SEQ ID NO: 1875149 - DNA, 15 bp, Homo sapiens
gatactcatgttcac

SEQ ID NO: 1875150 - DNA, 15 bp, Homo sapiens
atactcatgttcacc

SEQ ID NO: 1875151 - DNA, 15 bp, Homo sapiens
tactcatgttcacct

SEQ ID NO: 1875152 - DNA, 15 bp, Homo sapiens
actcatgttcacctt

SEQ ID NO: 1875153 - DNA, 15 bp, Homo sapiens
ctcatgttcaccttg

SEQ ID NO: 1875154 - DNA, 15 bp, Homo sapiens
tcatgttcaccttgt

SEQ ID NO: 1875155 - DNA, 15 bp, Homo sapiens
catgttcaccttgtt

SEQ ID NO: 1875156 - DNA, 15 bp, Homo sapiens
atgttcaccttgttg

SEQ ID NO: 1875157 - DNA, 15 bp, Homo sapiens
tgttcaccttgttga

SEQ ID NO: 1875158 - DNA, 15 bp, Homo sapiens
gttcaccttgttgat

SEQ ID NO: 1875159 - DNA, 15 bp, Homo sapiens
ttcaccttgttgatg

SEQ ID NO: 1875160 - DNA, 15 bp, Homo sapiens
tcaccttgttgatga

SEQ ID NO: 1875161 - DNA, 15 bp, Homo sapiens
caccttgttgatgag

SEQ ID NO: 1875162 - DNA, 15 bp, Homo sapiens
accttgttgatgaga

SEQ ID NO: 1875163 - DNA, 15 bp, Homo sapiens
ccttgttgatgagat

SEQ ID NO: 1875164 - DNA, 15 bp, Homo sapiens
cttgttgatgagatg

SEQ ID NO: 1875165 - DNA, 15 bp, Homo sapiens
ttgttgatgagatgt

SEQ ID NO: 1875166 - DNA, 15 bp, Homo sapiens
tgttgatgagatgtt

SEQ ID NO: 1875167 - DNA, 15 bp, Homo sapiens
gttgatgagatgttt

SEQ ID NO: 1875168 - DNA, 15 bp, Homo sapiens
ttgatgagatgtttt

SEQ ID NO: 1875169 - DNA, 15 bp, Homo sapiens
tgatgagatgttttt

SEQ ID NO: 1875170 - DNA, 15 bp, Homo sapiens
gatgagatgttttta

SEQ ID NO: 1875171 - DNA, 15 bp, Homo sapiens
atgagatgtttttaa

SEQ ID NO: 1875172 - DNA, 15 bp, Homo sapiens
tgagatgtttttaag

SEQ ID NO: 1875173 - DNA, 15 bp, Homo sapiens
gagatgtttttaagg

SEQ ID NO: 1875174 - DNA, 15 bp, Homo sapiens
agatgtttttaaggg

SEQ ID NO: 1875175 - DNA, 15 bp, Homo sapiens
gatgtttttaagggt

SEQ ID NO: 1875176 - DNA, 15 bp, Homo sapiens
atgtttttaagggta

SEQ ID NO: 1875177 - DNA, 15 bp, Homo sapiens
tgtttttaagggtaa

SEQ ID NO: 1875178 - DNA, 15 bp, Homo sapiens
gtttttaagggtaaa

SEQ ID NO: 1875179 - DNA, 15 bp, Homo sapiens
tttttaagggtaaaa

SEQ ID NO: 1875180 - DNA, 15 bp, Homo sapiens
ttttaagggtaaaat

SEQ ID NO: 1875181 - DNA, 15 bp, Homo sapiens
tttaagggtaaaatt

SEQ ID NO: 1875182 - DNA, 15 bp, Homo sapiens
ttaagggtaaaattt

SEQ ID NO: 1875183 - DNA, 15 bp, Homo sapiens
taagggtaaaattta

SEQ ID NO: 1875184 - DNA, 15 bp, Homo sapiens
aagggtaaaatttag

SEQ ID NO: 1875185 - DNA, 15 bp, Homo sapiens
agggtaaaatttagg

SEQ ID NO: 1875186 - DNA, 15 bp, Homo sapiens
gggtaaaatttaggg

SEQ ID NO: 1875187 - DNA, 15 bp, Homo sapiens
ggtaaaatttagggt

SEQ ID NO: 1875188 - DNA, 15 bp, Homo sapiens
gtaaaatttagggta

SEQ ID NO: 1875189 - DNA, 15 bp, Homo sapiens
taaaatttagggtag

SEQ ID NO: 1875190 - DNA, 15 bp, Homo sapiens
aaaatttagggtagg

SEQ ID NO: 1875191 - DNA, 15 bp, Homo sapiens
aaatttagggtagga

SEQ ID NO: 1875192 - DNA, 15 bp, Homo sapiens
aatttagggtaggat

SEQ ID NO: 1875193 - DNA, 15 bp, Homo sapiens
atttagggtaggatt

SEQ ID NO: 1875194 - DNA, 15 bp, Homo sapiens
tttagggtaggattt

SEQ ID NO: 1875195 - DNA, 15 bp, Homo sapiens
ttagggtaggatttg

SEQ ID NO: 1875196 - DNA, 15 bp, Homo sapiens
tagggtaggatttga

SEQ ID NO: 1875197 - DNA, 15 bp, Homo sapiens
agggtaggatttgat

SEQ ID NO: 1875198 - DNA, 15 bp, Homo sapiens
gggtaggatttgatg

SEQ ID NO: 1875199 - DNA, 15 bp, Homo sapiens
ggtaggatttgatga

SEQ ID NO: 1875200 - DNA, 15 bp, Homo sapiens
gtaggatttgatgaa

SEQ ID NO: 1875201 - DNA, 15 bp, Homo sapiens
taggatttgatgaaa

SEQ ID NO: 1875202 - DNA, 15 bp, Homo sapiens
aggatttgatgaaaa

SEQ ID NO: 1875203 - DNA, 15 bp, Homo sapiens
ggatttgatgaaaat

SEQ ID NO: 1875204 - DNA, 15 bp, Homo sapiens
gatttgatgaaaatt

SEQ ID NO: 1875205 - DNA, 15 bp, Homo sapiens
atttgatgaaaattt

SEQ ID NO: 1875206 - DNA, 15 bp, Homo sapiens
tttgatgaaaattta

SEQ ID NO: 1875207 - DNA, 15 bp, Homo sapiens
ttgatgaaaatttaa

SEQ ID NO: 1875208 - DNA, 15 bp, Homo sapiens
tgatgaaaatttaaa

SEQ ID NO: 1875209 - DNA, 15 bp, Homo sapiens
gatgaaaatttaaaa

SEQ ID NO: 1875210 - DNA, 15 bp, Homo sapiens
atgaaaatttaaaag

SEQ ID NO: 1875211 - DNA, 15 bp, Homo sapiens
tgaaaatttaaaagt

SEQ ID NO: 1875212 - DNA, 15 bp, Homo sapiens
gaaaatttaaaagtt

SEQ ID NO: 1875213 - DNA, 15 bp, Homo sapiens
aaaatttaaaagttt

SEQ ID NO: 1875214 - DNA, 15 bp, Homo sapiens
aaatttaaaagtttg

SEQ ID NO: 1875215 - DNA, 15 bp, Homo sapiens
aatttaaaagtttgg

SEQ ID NO: 1875216 - DNA, 15 bp, Homo sapiens
atttaaaagtttgga

SEQ ID NO: 1875217 - DNA, 15 bp, Homo sapiens
tttaaaagtttggat

SEQ ID NO: 1875218 - DNA, 15 bp, Homo sapiens
ttaaaagtttggatc

SEQ ID NO: 1875219 - DNA, 15 bp, Homo sapiens
taaaagtttggatca

SEQ ID NO: 1875220 - DNA, 15 bp, Homo sapiens
aaaagtttggatcac

SEQ ID NO: 1875221 - DNA, 15 bp, Homo sapiens
aaagtttggatcact

SEQ ID NO: 1875222 - DNA, 15 bp, Homo sapiens
aagtttggatcactt

SEQ ID NO: 1875223 - DNA, 15 bp, Homo sapiens
agtttggatcacttt

SEQ ID NO: 1875224 - DNA, 15 bp, Homo sapiens
gtttggatcactttg

SEQ ID NO: 1875225 - DNA, 15 bp, Homo sapiens
tttggatcactttgt

SEQ ID NO: 1875226 - DNA, 15 bp, Homo sapiens
ttggatcactttgtt

SEQ ID NO: 1875227 - DNA, 15 bp, Homo sapiens
tggatcactttgttt

SEQ ID NO: 1875228 - DNA, 15 bp, Homo sapiens
ggatcactttgttta

SEQ ID NO: 1875229 - DNA, 15 bp, Homo sapiens
gatcactttgtttac

SEQ ID NO: 1875230 - DNA, 15 bp, Homo sapiens
atcactttgtttacc

SEQ ID NO: 1875231 - DNA, 15 bp, Homo sapiens
tcactttgtttaccc

SEQ ID NO: 1875232 - DNA, 15 bp, Homo sapiens
cactttgtttaccca

SEQ ID NO: 1875233 - DNA, 15 bp, Homo sapiens
actttgtttacccat

SEQ ID NO: 1875234 - DNA, 15 bp, Homo sapiens
ctttgtttacccata

SEQ ID NO: 1875235 - DNA, 15 bp, Homo sapiens
tttgtttacccatag

SEQ ID NO: 1875236 - DNA, 15 bp, Homo sapiens
ttgtttacccatagc

SEQ ID NO: 1875237 - DNA, 15 bp, Homo sapiens
tgtttacccatagca

SEQ ID NO: 1875238 - DNA, 15 bp, Homo sapiens
gtttacccatagcat

SEQ ID NO: 1875239 - DNA, 15 bp, Homo sapiens
tttacccatagcatt

SEQ ID NO: 1875240 - DNA, 15 bp, Homo sapiens
ttacccatagcattc

SEQ ID NO: 1875241 - DNA, 15 bp, Homo sapiens
tacccatagcattcc

SEQ ID NO: 1875242 - DNA, 15 bp, Homo sapiens
acccatagcattccc

SEQ ID NO: 1875243 - DNA, 15 bp, Homo sapiens
cccatagcattccca

SEQ ID NO: 1875244 - DNA, 15 bp, Homo sapiens
ccatagcattcccaa

SEQ ID NO: 1875245 - DNA, 15 bp, Homo sapiens
catagcattcccaag

SEQ ID NO: 1875246 - DNA, 15 bp, Homo sapiens
atagcattcccaagt

SEQ ID NO: 1875247 - DNA, 15 bp, Homo sapiens
tagcattcccaagtc

SEQ ID NO: 1875248 - DNA, 15 bp, Homo sapiens
agcattcccaagtcc

SEQ ID NO: 1875249 - DNA, 15 bp, Homo sapiens
gcattcccaagtcct

SEQ ID NO: 1875250 - DNA, 15 bp, Homo sapiens
cattcccaagtccta

SEQ ID NO: 1875251 - DNA, 15 bp, Homo sapiens
attcccaagtcctaa

SEQ ID NO: 1875252 - DNA, 15 bp, Homo sapiens
ttcccaagtcctaag

SEQ ID NO: 1875253 - DNA, 15 bp, Homo sapiens
tcccaagtcctaagt

SEQ ID NO: 1875254 - DNA, 15 bp, Homo sapiens
cccaagtcctaagta

SEQ ID NO: 1875255 - DNA, 15 bp, Homo sapiens
ccaagtcctaagtat

SEQ ID NO: 1875256 - DNA, 15 bp, Homo sapiens
caagtcctaagtata

SEQ ID NO: 1875257 - DNA, 15 bp, Homo sapiens
aagtcctaagtataa

SEQ ID NO: 1875258 - DNA, 15 bp, Homo sapiens
agtcctaagtataag

SEQ ID NO: 1875259 - DNA, 15 bp, Homo sapiens
gtcctaagtataaga

SEQ ID NO: 1875260 - DNA, 15 bp, Homo sapiens
tcctaagtataagat

SEQ ID NO: 1875261 - DNA, 15 bp, Homo sapiens
cctaagtataagata

SEQ ID NO: 1875262 - DNA, 15 bp, Homo sapiens
ctaagtataagatat

SEQ ID NO: 1875263 - DNA, 15 bp, Homo sapiens
taagtataagatatt

SEQ ID NO: 1875264 - DNA, 15 bp, Homo sapiens
aagtataagatattt

SEQ ID NO: 1875265 - DNA, 15 bp, Homo sapiens
agtataagatattta

SEQ ID NO: 1875266 - DNA, 15 bp, Homo sapiens
gtataagatatttac

SEQ ID NO: 1875267 - DNA, 15 bp, Homo sapiens
tataagatatttact

SEQ ID NO: 1875268 - DNA, 15 bp, Homo sapiens
ataagatatttacta

SEQ ID NO: 1875269 - DNA, 15 bp, Homo sapiens
taagatatttactaa

SEQ ID NO: 1875270 - DNA, 15 bp, Homo sapiens
aagatatttactaaa

SEQ ID NO: 1875271 - DNA, 15 bp, Homo sapiens
agatatttactaaaa

SEQ ID NO: 1875272 - DNA, 15 bp, Homo sapiens
gatatttactaaaaa

SEQ ID NO: 1875273 - DNA, 15 bp, Homo sapiens
atatttactaaaaaa

SEQ ID NO: 1875274 - DNA, 15 bp, Homo sapiens
tatttactaaaaaaa

SEQ ID NO: 1875275 - DNA, 15 bp, Homo sapiens
atttactaaaaaaat

SEQ ID NO: 1875276 - DNA, 15 bp, Homo sapiens
tttactaaaaaaatg

SEQ ID NO: 1875277 - DNA, 15 bp, Homo sapiens
ttactaaaaaaatga

SEQ ID NO: 1875278 - DNA, 15 bp, Homo sapiens
tactaaaaaaatgat

SEQ ID NO: 1875279 - DNA, 15 bp, Homo sapiens
actaaaaaaatgatg

SEQ ID NO: 1875280 - DNA, 15 bp, Homo sapiens
ctaaaaaaatgatga

SEQ ID NO: 1875281 - DNA, 15 bp, Homo sapiens
taaaaaaatgatgag

SEQ ID NO: 1875282 - DNA, 15 bp, Homo sapiens
aaaaaaatgatgaga

SEQ ID NO: 1875283 - DNA, 15 bp, Homo sapiens
aaaaaatgatgagat

SEQ ID NO: 1875284 - DNA, 15 bp, Homo sapiens
aaaaatgatgagatg

SEQ ID NO: 1875285 - DNA, 15 bp, Homo sapiens
aaaatgatgagatgg

SEQ ID NO: 1875286 - DNA, 15 bp, Homo sapiens
aaatgatgagatggg

SEQ ID NO: 1875287 - DNA, 15 bp, Homo sapiens
aatgatgagatggga

SEQ ID NO: 1875288 - DNA, 15 bp, Homo sapiens
atgatgagatgggaa

SEQ ID NO: 1875289 - DNA, 15 bp, Homo sapiens
tgatgagatgggaag

SEQ ID NO: 1875290 - DNA, 15 bp, Homo sapiens
gatgagatgggaaga

SEQ ID NO: 1875291 - DNA, 15 bp, Homo sapiens
atgagatgggaagaa

SEQ ID NO: 1875292 - DNA, 15 bp, Homo sapiens
tgagatgggaagaat

SEQ ID NO: 1875293 - DNA, 15 bp, Homo sapiens
gagatgggaagaatt

SEQ ID NO: 1875294 - DNA, 15 bp, Homo sapiens
agatgggaagaatta

SEQ ID NO: 1875295 - DNA, 15 bp, Homo sapiens
gatgggaagaattaa

SEQ ID NO: 1875296 - DNA, 15 bp, Homo sapiens
atgggaagaattaat

SEQ ID NO: 1875297 - DNA, 15 bp, Homo sapiens
tgggaagaattaatg

SEQ ID NO: 1875298 - DNA, 15 bp, Homo sapiens
gggaagaattaatgt

SEQ ID NO: 1875299 - DNA, 15 bp, Homo sapiens
ggaagaattaatgtg

SEQ ID NO: 1875300 - DNA, 15 bp, Homo sapiens
gaagaattaatgtgg

SEQ ID NO: 1875301 - DNA, 15 bp, Homo sapiens
aagaattaatgtggg

SEQ ID NO: 1875302 - DNA, 15 bp, Homo sapiens
agaattaatgtgggt

SEQ ID NO: 1875303 - DNA, 15 bp, Homo sapiens
gaattaatgtgggta

SEQ ID NO: 1875304 - DNA, 15 bp, Homo sapiens
aattaatgtgggtaa

SEQ ID NO: 1875305 - DNA, 15 bp, Homo sapiens
attaatgtgggtaat

SEQ ID NO: 1875306 - DNA, 15 bp, Homo sapiens
ttaatgtgggtaata

SEQ ID NO: 1875307 - DNA, 15 bp, Homo sapiens
taatgtgggtaatat

SEQ ID NO: 1875308 - DNA, 15 bp, Homo sapiens
aatgtgggtaatatg

SEQ ID NO: 1875309 - DNA, 15 bp, Homo sapiens
atgtgggtaatatgg

SEQ ID NO: 1875310 - DNA, 15 bp, Homo sapiens
tgtgggtaatatggt

SEQ ID NO: 1875311 - DNA, 15 bp, Homo sapiens
gtgggtaatatggta

SEQ ID NO: 1875312 - DNA, 15 bp, Homo sapiens
tgggtaatatggtat

SEQ ID NO: 1875313 - DNA, 15 bp, Homo sapiens
gggtaatatggtatt

SEQ ID NO: 1875314 - DNA, 15 bp, Homo sapiens
ggtaatatggtattc

SEQ ID NO: 1875315 - DNA, 15 bp, Homo sapiens
gtaatatggtattcg

SEQ ID NO: 1875316 - DNA, 15 bp, Homo sapiens
taatatggtattcgt

SEQ ID NO: 1875317 - DNA, 15 bp, Homo sapiens
aatatggtattcgta

SEQ ID NO: 1875318 - DNA, 15 bp, Homo sapiens
atatggtattcgtat

SEQ ID NO: 1875319 - DNA, 15 bp, Homo sapiens
tatggtattcgtatt

SEQ ID NO: 1875320 - DNA, 15 bp, Homo sapiens
atggtattcgtattt

SEQ ID NO: 1875321 - DNA, 15 bp, Homo sapiens
tggtattcgtatttt

SEQ ID NO: 1875322 - DNA, 15 bp, Homo sapiens
ggtattcgtattttt

SEQ ID NO: 1875323 - DNA, 15 bp, Homo sapiens
gtattcgtatttttg

SEQ ID NO: 1875324 - DNA, 15 bp, Homo sapiens
tattcgtatttttga

SEQ ID NO: 1875325 - DNA, 15 bp, Homo sapiens
attcgtatttttgaa

SEQ ID NO: 1875326 - DNA, 15 bp, Homo sapiens
ttcgtatttttgaaa

SEQ ID NO: 1875327 - DNA, 15 bp, Homo sapiens
tcgtatttttgaaat

SEQ ID NO: 1875328 - DNA, 15 bp, Homo sapiens
cgtatttttgaaatg

SEQ ID NO: 1875329 - DNA, 15 bp, Homo sapiens
gtatttttgaaatgt

SEQ ID NO: 1875330 - DNA, 15 bp, Homo sapiens
atttttgaaatgtgt

SEQ ID NO: 1875331 - DNA, 15 bp, Homo sapiens
tttttgaaatgtgtg

SEQ ID NO: 1875332 - DNA, 15 bp, Homo sapiens
ttttgaaatgtgtgc

SEQ ID NO: 1875333 - DNA, 15 bp, Homo sapiens
tttgaaatgtgtgcg

SEQ ID NO: 1875334 - DNA, 15 bp, Homo sapiens
ttgaaatgtgtgcga

SEQ ID NO: 1875335 - DNA, 15 bp, Homo sapiens
tgaaatgtgtgcgaa

SEQ ID NO: 1875336 - DNA, 15 bp, Homo sapiens
gaaatgtgtgcgaaa

SEQ ID NO: 1875337 - DNA, 15 bp, Homo sapiens
aaatgtgtgcgaaat

SEQ ID NO: 1875338 - DNA, 15 bp, Homo sapiens
aatgtgtgcgaaatt

SEQ ID NO: 1875339 - DNA, 15 bp, Homo sapiens
atgtgtgcgaaattg

SEQ ID NO: 1875340 - DNA, 15 bp, Homo sapiens
tgtgtgcgaaattgg

SEQ ID NO: 1875341 - DNA, 15 bp, Homo sapiens
gtgtgcgaaattgga

SEQ ID NO: 1875342 - DNA, 15 bp, Homo sapiens
tgtgcgaaattggac

SEQ ID NO: 1875343 - DNA, 15 bp, Homo sapiens
gtgcgaaattggacc

SEQ ID NO: 1875344 - DNA, 15 bp, Homo sapiens
tgcgaaattggacct

SEQ ID NO: 1875345 - DNA, 15 bp, Homo sapiens
gcgaaattggaccta

SEQ ID NO: 1875346 - DNA, 15 bp, Homo sapiens
cgaaattggacctag

SEQ ID NO: 1875347 - DNA, 15 bp, Homo sapiens
gaaattggacctagg

SEQ ID NO: 1875348 - DNA, 15 bp, Homo sapiens
aaattggacctaggc

SEQ ID NO: 1875349 - DNA, 15 bp, Homo sapiens
aattggacctaggct

SEQ ID NO: 1875350 - DNA, 15 bp, Homo sapiens
attggacctaggcta

SEQ ID NO: 1875351 - DNA, 15 bp, Homo sapiens
ttggacctaggctag

SEQ ID NO: 1875352 - DNA, 15 bp, Homo sapiens
tggacctaggctagt

SEQ ID NO: 1875353 - DNA, 15 bp, Homo sapiens
ggacctaggctagtt

SEQ ID NO: 1875354 - DNA, 15 bp, Homo sapiens
gacctaggctagttc

SEQ ID NO: 1875355 - DNA, 15 bp, Homo sapiens
acctaggctagttca

SEQ ID NO: 1875356 - DNA, 15 bp, Homo sapiens
cctaggctagttcat

SEQ ID NO: 1875357 - DNA, 15 bp, Homo sapiens
ctaggctagttcatg

SEQ ID NO: 1875358 - DNA, 15 bp, Homo sapiens
taggctagttcatga

SEQ ID NO: 1875359 - DNA, 15 bp, Homo sapiens
aggctagttcatgaa

SEQ ID NO: 1875360 - DNA, 15 bp, Homo sapiens
ggctagttcatgaat

SEQ ID NO: 1875361 - DNA, 15 bp, Homo sapiens
gctagttcatgaatt

SEQ ID NO: 1875362 - DNA, 15 bp, Homo sapiens
ctagttcatgaattt

SEQ ID NO: 1875363 - DNA, 15 bp, Homo sapiens
tagttcatgaatttg

SEQ ID NO: 1875364 - DNA, 15 bp, Homo sapiens
agttcatgaatttgt

SEQ ID NO: 1875365 - DNA, 15 bp, Homo sapiens
gttcatgaatttgtt

SEQ ID NO: 1875366 - DNA, 15 bp, Homo sapiens
ttcatgaatttgtta

SEQ ID NO: 1875367 - DNA, 15 bp, Homo sapiens
tcatgaatttgttag

SEQ ID NO: 1875368 - DNA, 15 bp, Homo sapiens
catgaatttgttaga

SEQ ID NO: 1875369 - DNA, 15 bp, Homo sapiens
atgaatttgttagaa

SEQ ID NO: 1875370 - DNA, 15 bp, Homo sapiens
tgaatttgttagaag

SEQ ID NO: 1875371 - DNA, 15 bp, Homo sapiens
gaatttgttagaagt

SEQ ID NO: 1875372 - DNA, 15 bp, Homo sapiens
aatttgttagaagta

SEQ ID NO: 1875373 - DNA, 15 bp, Homo sapiens
atttgttagaagtat

SEQ ID NO: 1875374 - DNA, 15 bp, Homo sapiens
tttgttagaagtatc

SEQ ID NO: 1875375 - DNA, 15 bp, Homo sapiens
ttgttagaagtatca

SEQ ID NO: 1875376 - DNA, 15 bp, Homo sapiens
tgttagaagtatcaa

SEQ ID NO: 1875377 - DNA, 15 bp, Homo sapiens
gttagaagtatcaag

SEQ ID NO: 1875378 - DNA, 15 bp, Homo sapiens
ttagaagtatcaaga

SEQ ID NO: 1875379 - DNA, 15 bp, Homo sapiens
tagaagtatcaagat

SEQ ID NO: 1875380 - DNA, 15 bp, Homo sapiens
agaagtatcaagata

SEQ ID NO: 1875381 - DNA, 15 bp, Homo sapiens
gaagtatcaagataa

SEQ ID NO: 1875382 - DNA, 15 bp, Homo sapiens
aagtatcaagataat

SEQ ID NO: 1875383 - DNA, 15 bp, Homo sapiens
agtatcaagataatt

SEQ ID NO: 1875384 - DNA, 15 bp, Homo sapiens
gtatcaagataatta

SEQ ID NO: 1875385 - DNA, 15 bp, Homo sapiens
tatcaagataattaa

SEQ ID NO: 1875386 - DNA, 15 bp, Homo sapiens
atcaagataattaag

SEQ ID NO: 1875387 - DNA, 15 bp, Homo sapiens
tcaagataattaagc

SEQ ID NO: 1875388 - DNA, 15 bp, Homo sapiens
caagataattaagca

SEQ ID NO: 1875389 - DNA, 15 bp, Homo sapiens
aagataattaagcaa

SEQ ID NO: 1875390 - DNA, 15 bp, Homo sapiens
agataattaagcaac

SEQ ID NO: 1875391 - DNA, 15 bp, Homo sapiens
gataattaagcaacc

SEQ ID NO: 1875392 - DNA, 15 bp, Homo sapiens
ataattaagcaacct

SEQ ID NO: 1875393 - DNA, 15 bp, Homo sapiens
taattaagcaacctg

SEQ ID NO: 1875394 - DNA, 15 bp, Homo sapiens
aattaagcaacctgt

SEQ ID NO: 1875395 - DNA, 15 bp, Homo sapiens
attaagcaacctgta

SEQ ID NO: 1875396 - DNA, 15 bp, Homo sapiens
ttaagcaacctgtag

SEQ ID NO: 1875397 - DNA, 15 bp, Homo sapiens
taagcaacctgtagg

SEQ ID NO: 1875398 - DNA, 15 bp, Homo sapiens
aagcaacctgtaggc

SEQ ID NO: 1875399 - DNA, 15 bp, Homo sapiens
agcaacctgtaggcc

SEQ ID NO: 1875400 - DNA, 15 bp, Homo sapiens
gcaacctgtaggccc

SEQ ID NO: 1875401 - DNA, 15 bp, Homo sapiens
caacctgtaggccca

SEQ ID NO: 1875402 - DNA, 15 bp, Homo sapiens
aacctgtaggcccac

SEQ ID NO: 1875403 - DNA, 15 bp, Homo sapiens
acctgtaggcccaca

SEQ ID NO: 1875404 - DNA, 15 bp, Homo sapiens
cctgtaggcccacat

SEQ ID NO: 1875405 - DNA, 15 bp, Homo sapiens
ctgtaggcccacata

SEQ ID NO: 1875406 - DNA, 15 bp, Homo sapiens
tgtaggcccacataa

SEQ ID NO: 1875407 - DNA, 15 bp, Homo sapiens
gtaggcccacataat

SEQ ID NO: 1875408 - DNA, 15 bp, Homo sapiens
taggcccacataatt

SEQ ID NO: 1875409 - DNA, 15 bp, Homo sapiens
aggcccacataattt

SEQ ID NO: 1875410 - DNA, 15 bp, Homo sapiens
ggcccacataatttc

SEQ ID NO: 1875411 - DNA, 15 bp, Homo sapiens
gcccacataatttcc

SEQ ID NO: 1875412 - DNA, 15 bp, Homo sapiens
cccacataatttcct

SEQ ID NO: 1875413 - DNA, 15 bp, Homo sapiens
ccacataatttcctc

SEQ ID NO: 1875414 - DNA, 15 bp, Homo sapiens
cacataatttcctct

SEQ ID NO: 1875415 - DNA, 15 bp, Homo sapiens
acataatttcctctt

SEQ ID NO: 1875416 - DNA, 15 bp, Homo sapiens
cataatttcctcttg

SEQ ID NO: 1875417 - DNA, 15 bp, Homo sapiens
ataatttcctcttga

SEQ ID NO: 1875418 - DNA, 15 bp, Homo sapiens
taatttcctcttgat

SEQ ID NO: 1875419 - DNA, 15 bp, Homo sapiens
aatttcctcttgatt

SEQ ID NO: 1875420 - DNA, 15 bp, Homo sapiens
atttcctcttgattt

SEQ ID NO: 1875421 - DNA, 15 bp, Homo sapiens
tttcctcttgatttt

SEQ ID NO: 1875422 - DNA, 15 bp, Homo sapiens
ttcctcttgattttt

SEQ ID NO: 1875423 - DNA, 15 bp, Homo sapiens
tcctcttgatttttc

SEQ ID NO: 1875424 - DNA, 15 bp, Homo sapiens
cctcttgatttttca

SEQ ID NO: 1875425 - DNA, 15 bp, Homo sapiens
ctcttgatttttcaa

SEQ ID NO: 1875426 - DNA, 15 bp, Homo sapiens
tcttgatttttcaat

SEQ ID NO: 1875427 - DNA, 15 bp, Homo sapiens
cttgatttttcaata

SEQ ID NO: 1875428 - DNA, 15 bp, Homo sapiens
ttgatttttcaatat

SEQ ID NO: 1875429 - DNA, 15 bp, Homo sapiens
tgatttttcaatatg

SEQ ID NO: 1875430 - DNA, 15 bp, Homo sapiens
gatttttcaatatga

SEQ ID NO: 1875431 - DNA, 15 bp, Homo sapiens
atttttcaatatgaa

SEQ ID NO: 1875432 - DNA, 15 bp, Homo sapiens
tttttcaatatgaac

SEQ ID NO: 1875433 - DNA, 15 bp, Homo sapiens
ttttcaatatgaaca

SEQ ID NO: 1875434 - DNA, 15 bp, Homo sapiens
tttcaatatgaacag

SEQ ID NO: 1875435 - DNA, 15 bp, Homo sapiens
ttcaatatgaacaga

SEQ ID NO: 1875436 - DNA, 15 bp, Homo sapiens
tcaatatgaacagaa

SEQ ID NO: 1875437 - DNA, 15 bp, Homo sapiens
caatatgaacagaaa

SEQ ID NO: 1875438 - DNA, 15 bp, Homo sapiens
aatatgaacagaaaa

SEQ ID NO: 1875439 - DNA, 15 bp, Homo sapiens
atatgaacagaaaag

SEQ ID NO: 1875440 - DNA, 15 bp, Homo sapiens
tatgaacagaaaagc

SEQ ID NO: 1875441 - DNA, 15 bp, Homo sapiens
atgaacagaaaagct

SEQ ID NO: 1875442 - DNA, 15 bp, Homo sapiens
tgaacagaaaagctt

SEQ ID NO: 1875443 - DNA, 15 bp, Homo sapiens
gaacagaaaagctta

SEQ ID NO: 1875444 - DNA, 15 bp, Homo sapiens
aacagaaaagcttag

SEQ ID NO: 1875445 - DNA, 15 bp, Homo sapiens
acagaaaagcttagc

SEQ ID NO: 1875446 - DNA, 15 bp, Homo sapiens
cagaaaagcttagca

SEQ ID NO: 1875447 - DNA, 15 bp, Homo sapiens
agaaaagcttagcag

SEQ ID NO: 1875448 - DNA, 15 bp, Homo sapiens
gaaaagcttagcaga

SEQ ID NO: 1875449 - DNA, 15 bp, Homo sapiens
aaaagcttagcagac

SEQ ID NO: 1875450 - DNA, 15 bp, Homo sapiens
aaagcttagcagaca

SEQ ID NO: 1875451 - DNA, 15 bp, Homo sapiens
aagcttagcagacat

SEQ ID NO: 1875452 - DNA, 15 bp, Homo sapiens
agcttagcagacatt

SEQ ID NO: 1875453 - DNA, 15 bp, Homo sapiens
gcttagcagacattt

SEQ ID NO: 1875454 - DNA, 15 bp, Homo sapiens
cttagcagacatttc

SEQ ID NO: 1875455 - DNA, 15 bp, Homo sapiens
ttagcagacatttca

SEQ ID NO: 1875456 - DNA, 15 bp, Homo sapiens
tagcagacatttcac

SEQ ID NO: 1875457 - DNA, 15 bp, Homo sapiens
agcagacatttcaca

SEQ ID NO: 1875458 - DNA, 15 bp, Homo sapiens
gcagacatttcacac

SEQ ID NO: 1875459 - DNA, 15 bp, Homo sapiens
cagacatttcacact

SEQ ID NO: 1875460 - DNA, 15 bp, Homo sapiens
agacatttcacactc

SEQ ID NO: 1875461 - DNA, 15 bp, Homo sapiens
gacatttcacactca

SEQ ID NO: 1875462 - DNA, 15 bp, Homo sapiens
acatttcacactcaa

SEQ ID NO: 1875463 - DNA, 15 bp, Homo sapiens
catttcacactcaaa

SEQ ID NO: 1875464 - DNA, 15 bp, Homo sapiens
atttcacactcaaat

SEQ ID NO: 1875465 - DNA, 15 bp, Homo sapiens
tttcacactcaaatg

SEQ ID NO: 1875466 - DNA, 15 bp, Homo sapiens
ttcacactcaaatgt

SEQ ID NO: 1875467 - DNA, 15 bp, Homo sapiens
tcacactcaaatgta

SEQ ID NO: 1875468 - DNA, 15 bp, Homo sapiens
cacactcaaatgtac

SEQ ID NO: 1875469 - DNA, 15 bp, Homo sapiens
acactcaaatgtact

SEQ ID NO: 1875470 - DNA, 15 bp, Homo sapiens
cactcaaatgtacta

SEQ ID NO: 1875471 - DNA, 15 bp, Homo sapiens
actcaaatgtactag

SEQ ID NO: 1875472 - DNA, 15 bp, Homo sapiens
ctcaaatgtactagt

SEQ ID NO: 1875473 - DNA, 15 bp, Homo sapiens
tcaaatgtactagta

SEQ ID NO: 1875474 - DNA, 15 bp, Homo sapiens
caaatgtactagtag

SEQ ID NO: 1875475 - DNA, 15 bp, Homo sapiens
aaatgtactagtagt

SEQ ID NO: 1875476 - DNA, 15 bp, Homo sapiens
aatgtactagtagtg

SEQ ID NO: 1875477 - DNA, 15 bp, Homo sapiens
atgtactagtagtgg

SEQ ID NO: 1875478 - DNA, 15 bp, Homo sapiens
tgtactagtagtgga

SEQ ID NO: 1875479 - DNA, 15 bp, Homo sapiens
gtactagtagtggat

SEQ ID NO: 1875480 - DNA, 15 bp, Homo sapiens
tactagtagtggata

SEQ ID NO: 1875481 - DNA, 15 bp, Homo sapiens
actagtagtggatag

SEQ ID NO: 1875482 - DNA, 15 bp, Homo sapiens
ctagtagtggatagt

SEQ ID NO: 1875483 - DNA, 15 bp, Homo sapiens
tagtagtggatagtc

SEQ ID NO: 1875484 - DNA, 15 bp, Homo sapiens
agtagtggatagtca

SEQ ID NO: 1875485 - DNA, 15 bp, Homo sapiens
gtagtggatagtcaa

SEQ ID NO: 1875486 - DNA, 15 bp, Homo sapiens
tagtggatagtcaac

SEQ ID NO: 1875487 - DNA, 15 bp, Homo sapiens
agtggatagtcaaca

SEQ ID NO: 1875488 - DNA, 15 bp, Homo sapiens
gtggatagtcaacat

SEQ ID NO: 1875489 - DNA, 15 bp, Homo sapiens
tggatagtcaacatc

SEQ ID NO: 1875490 - DNA, 15 bp, Homo sapiens
ggatagtcaacatca

SEQ ID NO: 1875491 - DNA, 15 bp, Homo sapiens
gatagtcaacatcac

SEQ ID NO: 1875492 - DNA, 15 bp, Homo sapiens
atagtcaacatcaca

SEQ ID NO: 1875493 - DNA, 15 bp, Homo sapiens
tagtcaacatcacat

SEQ ID NO: 1875494 - DNA, 15 bp, Homo sapiens
agtcaacatcacata

SEQ ID NO: 1875495 - DNA, 15 bp, Homo sapiens
gtcaacatcacatac

SEQ ID NO: 1875496 - DNA, 15 bp, Homo sapiens
tcaacatcacataca

SEQ ID NO: 1875497 - DNA, 15 bp, Homo sapiens
caacatcacatacaa

SEQ ID NO: 1875498 - DNA, 15 bp, Homo sapiens
aacatcacatacaac

SEQ ID NO: 1875499 - DNA, 15 bp, Homo sapiens
acatcacatacaact

SEQ ID NO: 1875500 - DNA, 15 bp, Homo sapiens
catcacatacaactc

SEQ ID NO: 1875501 - DNA, 15 bp, Homo sapiens
atcacatacaactca

SEQ ID NO: 1875502 - DNA, 15 bp, Homo sapiens
tcacatacaactcag

SEQ ID NO: 1875503 - DNA, 15 bp, Homo sapiens
cacatacaactcaga

SEQ ID NO: 1875504 - DNA, 15 bp, Homo sapiens
acatacaactcagag

SEQ ID NO: 1875505 - DNA, 15 bp, Homo sapiens
catacaactcagagt

SEQ ID NO: 1875506 - DNA, 15 bp, Homo sapiens
atacaactcagagta

SEQ ID NO: 1875507 - DNA, 15 bp, Homo sapiens
tacaactcagagtat

SEQ ID NO: 1875508 - DNA, 15 bp, Homo sapiens
acaactcagagtatg

SEQ ID NO: 1875509 - DNA, 15 bp, Homo sapiens
caactcagagtatgc

SEQ ID NO: 1875510 - DNA, 15 bp, Homo sapiens
aactcagagtatgca

SEQ ID NO: 1875511 - DNA, 15 bp, Homo sapiens
actcagagtatgcat

SEQ ID NO: 1875512 - DNA, 15 bp, Homo sapiens
ctcagagtatgcatc

SEQ ID NO: 1875513 - DNA, 15 bp, Homo sapiens
tcagagtatgcatca

SEQ ID NO: 1875514 - DNA, 15 bp, Homo sapiens
cagagtatgcatcat

SEQ ID NO: 1875515 - DNA, 15 bp, Homo sapiens
agagtatgcatcatt

SEQ ID NO: 1875516 - DNA, 15 bp, Homo sapiens
gagtatgcatcattt

SEQ ID NO: 1875517 - DNA, 15 bp, Homo sapiens
agtatgcatcatttg

SEQ ID NO: 1875518 - DNA, 15 bp, Homo sapiens
gtatgcatcatttga

SEQ ID NO: 1875519 - DNA, 15 bp, Homo sapiens
tatgcatcatttgaa

SEQ ID NO: 1875520 - DNA, 15 bp, Homo sapiens
atgcatcatttgaag

SEQ ID NO: 1875521 - DNA, 15 bp, Homo sapiens
tgcatcatttgaagt

SEQ ID NO: 1875522 - DNA, 15 bp, Homo sapiens
gcatcatttgaagta

SEQ ID NO: 1875523 - DNA, 15 bp, Homo sapiens
catcatttgaagtat

SEQ ID NO: 1875524 - DNA, 15 bp, Homo sapiens
atcatttgaagtatg

SEQ ID NO: 1875525 - DNA, 15 bp, Homo sapiens
tcatttgaagtatgg

SEQ ID NO: 1875526 - DNA, 15 bp, Homo sapiens
catttgaagtatggt

SEQ ID NO: 1875527 - DNA, 15 bp, Homo sapiens
atttgaagtatggtg

SEQ ID NO: 1875528 - DNA, 15 bp, Homo sapiens
tttgaagtatggtga

SEQ ID NO: 1875529 - DNA, 15 bp, Homo sapiens
ttgaagtatggtgac

SEQ ID NO: 1875530 - DNA, 15 bp, Homo sapiens
tgaagtatggtgaca

SEQ ID NO: 1875531 - DNA, 15 bp, Homo sapiens
gaagtatggtgacat

SEQ ID NO: 1875532 - DNA, 15 bp, Homo sapiens
aagtatggtgacatc

SEQ ID NO: 1875533 - DNA, 15 bp, Homo sapiens
agtatggtgacatca

SEQ ID NO: 1875534 - DNA, 15 bp, Homo sapiens
gtatggtgacatcaa

SEQ ID NO: 1875535 - DNA, 15 bp, Homo sapiens
tatggtgacatcaaa

SEQ ID NO: 1875536 - DNA, 15 bp, Homo sapiens
atggtgacatcaaaa

SEQ ID NO: 1875537 - DNA, 15 bp, Homo sapiens
tggtgacatcaaaaa

SEQ ID NO: 1875538 - DNA, 15 bp, Homo sapiens
ggtgacatcaaaaaa

SEQ ID NO: 1875539 - DNA, 15 bp, Homo sapiens
gtgacatcaaaaaat

SEQ ID NO: 1875540 - DNA, 15 bp, Homo sapiens
tgacatcaaaaaata

SEQ ID NO: 1875541 - DNA, 15 bp, Homo sapiens
gacatcaaaaaatat

SEQ ID NO: 1875542 - DNA, 15 bp, Homo sapiens
acatcaaaaaatata

SEQ ID NO: 1875543 - DNA, 15 bp, Homo sapiens
catcaaaaaatataa

SEQ ID NO: 1875544 - DNA, 15 bp, Homo sapiens
atcaaaaaatataaa

SEQ ID NO: 1875545 - DNA, 15 bp, Homo sapiens
tcaaaaaatataaag

SEQ ID NO: 1875546 - DNA, 15 bp, Homo sapiens
caaaaaatataaagc

SEQ ID NO: 1875547 - DNA, 15 bp, Homo sapiens
aaaaaatataaagca

SEQ ID NO: 1875548 - DNA, 15 bp, Homo sapiens
aaaaatataaagcaa

SEQ ID NO: 1875549 - DNA, 15 bp, Homo sapiens
aaaatataaagcaat

SEQ ID NO: 1875550 - DNA, 15 bp, Homo sapiens
aaatataaagcaatt

SEQ ID NO: 1875551 - DNA, 15 bp, Homo sapiens
aatataaagcaattt

SEQ ID NO: 1875552 - DNA, 15 bp, Homo sapiens
atataaagcaatttt

SEQ ID NO: 1875553 - DNA, 15 bp, Homo sapiens
tataaagcaattttt

SEQ ID NO: 1875554 - DNA, 15 bp, Homo sapiens
ataaagcaatttttg

SEQ ID NO: 1875555 - DNA, 15 bp, Homo sapiens
taaagcaatttttgt

SEQ ID NO: 1875556 - DNA, 15 bp, Homo sapiens
aaagcaatttttgtt

SEQ ID NO: 1875557 - DNA, 15 bp, Homo sapiens
aagcaatttttgttt

SEQ ID NO: 1875558 - DNA, 15 bp, Homo sapiens
agcaatttttgtttt

SEQ ID NO: 1875559 - DNA, 15 bp, Homo sapiens
gcaatttttgtttta

SEQ ID NO: 1875560 - DNA, 15 bp, Homo sapiens
caatttttgttttac

SEQ ID NO: 1875561 - DNA, 15 bp, Homo sapiens
aatttttgttttact

SEQ ID NO: 1875562 - DNA, 15 bp, Homo sapiens
atttttgttttactt

SEQ ID NO: 1875563 - DNA, 15 bp, Homo sapiens
tttttgttttacttt

SEQ ID NO: 1875564 - DNA, 15 bp, Homo sapiens
ttttgttttactttc

SEQ ID NO: 1875565 - DNA, 15 bp, Homo sapiens
tttgttttactttct

SEQ ID NO: 1875566 - DNA, 15 bp, Homo sapiens
ttgttttactttctg

SEQ ID NO: 1875567 - DNA, 15 bp, Homo sapiens
tgttttactttctga

SEQ ID NO: 1875568 - DNA, 15 bp, Homo sapiens
gttttactttctgaa

SEQ ID NO: 1875569 - DNA, 15 bp, Homo sapiens
ttttactttctgaac

SEQ ID NO: 1875570 - DNA, 15 bp, Homo sapiens
tttactttctgaaca

SEQ ID NO: 1875571 - DNA, 15 bp, Homo sapiens
ttactttctgaacaa

SEQ ID NO: 1875572 - DNA, 15 bp, Homo sapiens
tactttctgaacaaa

SEQ ID NO: 1875573 - DNA, 15 bp, Homo sapiens
actttctgaacaaat

SEQ ID NO: 1875574 - DNA, 15 bp, Homo sapiens
ctttctgaacaaatt

SEQ ID NO: 1875575 - DNA, 15 bp, Homo sapiens
tttctgaacaaattc

SEQ ID NO: 1875576 - DNA, 15 bp, Homo sapiens
ttctgaacaaattca

SEQ ID NO: 1875577 - DNA, 15 bp, Homo sapiens
tctgaacaaattcaa

SEQ ID NO: 1875578 - DNA, 15 bp, Homo sapiens
ctgaacaaattcaac

SEQ ID NO: 1875579 - DNA, 15 bp, Homo sapiens
tgaacaaattcaaca

SEQ ID NO: 1875580 - DNA, 15 bp, Homo sapiens
gaacaaattcaacaa

SEQ ID NO: 1875581 - DNA, 15 bp, Homo sapiens
aacaaattcaacaag

SEQ ID NO: 1875582 - DNA, 15 bp, Homo sapiens
acaaattcaacaagc

SEQ ID NO: 1875583 - DNA, 15 bp, Homo sapiens
caaattcaacaagca

SEQ ID NO: 1875584 - DNA, 15 bp, Homo sapiens
aaattcaacaagcaa

SEQ ID NO: 1875585 - DNA, 15 bp, Homo sapiens
aattcaacaagcaaa

SEQ ID NO: 1875586 - DNA, 15 bp, Homo sapiens
attcaacaagcaaat

SEQ ID NO: 1875587 - DNA, 15 bp, Homo sapiens
ttcaacaagcaaatt

SEQ ID NO: 1875588 - DNA, 15 bp, Homo sapiens
tcaacaagcaaattc

SEQ ID NO: 1875589 - DNA, 15 bp, Homo sapiens
caacaagcaaattca

SEQ ID NO: 1875590 - DNA, 15 bp, Homo sapiens
aacaagcaaattcaa

SEQ ID NO: 1875591 - DNA, 15 bp, Homo sapiens
acaagcaaattcaac

SEQ ID NO: 1875592 - DNA, 15 bp, Homo sapiens
caagcaaattcaacg

SEQ ID NO: 1875593 - DNA, 15 bp, Homo sapiens
aagcaaattcaacgt

SEQ ID NO: 1875594 - DNA, 15 bp, Homo sapiens
agcaaattcaacgtg

SEQ ID NO: 1875595 - DNA, 15 bp, Homo sapiens
gcaaattcaacgtgc

SEQ ID NO: 1875596 - DNA, 15 bp, Homo sapiens
caaattcaacgtgcc

SEQ ID NO: 1875597 - DNA, 15 bp, Homo sapiens
aaattcaacgtgcct

SEQ ID NO: 1875598 - DNA, 15 bp, Homo sapiens
aattcaacgtgcctc

SEQ ID NO: 1875599 - DNA, 15 bp, Homo sapiens
attcaacgtgcctca

SEQ ID NO: 1875600 - DNA, 15 bp, Homo sapiens
ttcaacgtgcctcac

SEQ ID NO: 1875601 - DNA, 15 bp, Homo sapiens
tcaacgtgcctcaca

SEQ ID NO: 1875602 - DNA, 15 bp, Homo sapiens
caacgtgcctcacat

SEQ ID NO: 1875603 - DNA, 15 bp, Homo sapiens
aacgtgcctcacatg

SEQ ID NO: 1875604 - DNA, 15 bp, Homo sapiens
acgtgcctcacatgg

SEQ ID NO: 1875605 - DNA, 15 bp, Homo sapiens
cgtgcctcacatggg

SEQ ID NO: 1875606 - DNA, 15 bp, Homo sapiens
gtgcctcacatgggg

SEQ ID NO: 1875607 - DNA, 15 bp, Homo sapiens
tgcctcacatggggc

SEQ ID NO: 1875608 - DNA, 15 bp, Homo sapiens
gcctcacatggggct

SEQ ID NO: 1875609 - DNA, 15 bp, Homo sapiens
cctcacatggggcta

SEQ ID NO: 1875610 - DNA, 15 bp, Homo sapiens
ctcacatggggctac

SEQ ID NO: 1875611 - DNA, 15 bp, Homo sapiens
tcacatggggctaca

SEQ ID NO: 1875612 - DNA, 15 bp, Homo sapiens
cacatggggctacag

SEQ ID NO: 1875613 - DNA, 15 bp, Homo sapiens
acatggggctacaga

SEQ ID NO: 1875614 - DNA, 15 bp, Homo sapiens
catggggctacagag

SEQ ID NO: 1875615 - DNA, 15 bp, Homo sapiens
atggggctacagaga

SEQ ID NO: 1875616 - DNA, 15 bp, Homo sapiens
tggggctacagagat

SEQ ID NO: 1875617 - DNA, 15 bp, Homo sapiens
ggggctacagagatg

SEQ ID NO: 1875618 - DNA, 15 bp, Homo sapiens
gggctacagagatga

SEQ ID NO: 1875619 - DNA, 15 bp, Homo sapiens
ggctacagagatgag

SEQ ID NO: 1875620 - DNA, 15 bp, Homo sapiens
gctacagagatgaga

SEQ ID NO: 1875621 - DNA, 15 bp, Homo sapiens
ctacagagatgagac

SEQ ID NO: 1875622 - DNA, 15 bp, Homo sapiens
tacagagatgagaca

SEQ ID NO: 1875623 - DNA, 15 bp, Homo sapiens
acagagatgagacat

SEQ ID NO: 1875624 - DNA, 15 bp, Homo sapiens
cagagatgagacata

SEQ ID NO: 1875625 - DNA, 15 bp, Homo sapiens
agagatgagacatag

SEQ ID NO: 1875626 - DNA, 15 bp, Homo sapiens
gagatgagacatagt

SEQ ID NO: 1875627 - DNA, 15 bp, Homo sapiens
agatgagacatagtc

SEQ ID NO: 1875628 - DNA, 15 bp, Homo sapiens
gatgagacatagtcc

SEQ ID NO: 1875629 - DNA, 15 bp, Homo sapiens
atgagacatagtccc

SEQ ID NO: 1875630 - DNA, 15 bp, Homo sapiens
tgagacatagtccct

SEQ ID NO: 1875631 - DNA, 15 bp, Homo sapiens
gagacatagtccctt

SEQ ID NO: 1875632 - DNA, 15 bp, Homo sapiens
agacatagtcccttc

SEQ ID NO: 1875633 - DNA, 15 bp, Homo sapiens
gacatagtcccttct

SEQ ID NO: 1875634 - DNA, 15 bp, Homo sapiens
acatagtcccttctt

SEQ ID NO: 1875635 - DNA, 15 bp, Homo sapiens
catagtcccttcttt

SEQ ID NO: 1875636 - DNA, 15 bp, Homo sapiens
atagtcccttctttc

SEQ ID NO: 1875637 - DNA, 15 bp, Homo sapiens
tagtcccttctttca

SEQ ID NO: 1875638 - DNA, 15 bp, Homo sapiens
agtcccttctttcat

SEQ ID NO: 1875639 - DNA, 15 bp, Homo sapiens
gtcccttctttcatg

SEQ ID NO: 1875640 - DNA, 15 bp, Homo sapiens
tcccttctttcatga

SEQ ID NO: 1875641 - DNA, 15 bp, Homo sapiens
cccttctttcatgaa

SEQ ID NO: 1875642 - DNA, 15 bp, Homo sapiens
ccttctttcatgaag

SEQ ID NO: 1875643 - DNA, 15 bp, Homo sapiens
cttctttcatgaagt

SEQ ID NO: 1875644 - DNA, 15 bp, Homo sapiens
ttctttcatgaagtt

SEQ ID NO: 1875645 - DNA, 15 bp, Homo sapiens
tctttcatgaagtta

SEQ ID NO: 1875646 - DNA, 15 bp, Homo sapiens
ctttcatgaagttag

SEQ ID NO: 1875647 - DNA, 15 bp, Homo sapiens
tttcatgaagttagg

SEQ ID NO: 1875648 - DNA, 15 bp, Homo sapiens
ttcatgaagttagga

SEQ ID NO: 1875649 - DNA, 15 bp, Homo sapiens
tcatgaagttaggaa

SEQ ID NO: 1875650 - DNA, 15 bp, Homo sapiens
catgaagttaggaat

SEQ ID NO: 1875651 - DNA, 15 bp, Homo sapiens
atgaagttaggaata

SEQ ID NO: 1875652 - DNA, 15 bp, Homo sapiens
tgaagttaggaataa

SEQ ID NO: 1875653 - DNA, 15 bp, Homo sapiens
gaagttaggaataat

SEQ ID NO: 1875654 - DNA, 15 bp, Homo sapiens
aagttaggaataatt

SEQ ID NO: 1875655 - DNA, 15 bp, Homo sapiens
agttaggaataatta

SEQ ID NO: 1875656 - DNA, 15 bp, Homo sapiens
gttaggaataattaa

SEQ ID NO: 1875657 - DNA, 15 bp, Homo sapiens
ttaggaataattaat

SEQ ID NO: 1875658 - DNA, 15 bp, Homo sapiens
taggaataattaatt

SEQ ID NO: 1875659 - DNA, 15 bp, Homo sapiens
gaataattaattgtg

SEQ ID NO: 1875660 - DNA, 15 bp, Homo sapiens
aataattaattgtgt

SEQ ID NO: 1875661 - DNA, 15 bp, Homo sapiens
ataattaattgtgtt

SEQ ID NO: 1875662 - DNA, 15 bp, Homo sapiens
taattaattgtgttt

SEQ ID NO: 1875663 - DNA, 15 bp, Homo sapiens
aattaattgtgtttg

SEQ ID NO: 1875664 - DNA, 15 bp, Homo sapiens
attaattgtgtttga

SEQ ID NO: 1875665 - DNA, 15 bp, Homo sapiens
ttaattgtgtttgac

SEQ ID NO: 1875666 - DNA, 15 bp, Homo sapiens
taattgtgtttgact

SEQ ID NO: 1875667 - DNA, 15 bp, Homo sapiens
aattgtgtttgactg

SEQ ID NO: 1875668 - DNA, 15 bp, Homo sapiens
attgtgtttgactga

SEQ ID NO: 1875669 - DNA, 15 bp, Homo sapiens
ttgtgtttgactgag

SEQ ID NO: 1875670 - DNA, 15 bp, Homo sapiens
tgtgtttgactgagg

SEQ ID NO: 1875671 - DNA, 15 bp, Homo sapiens
gtgtttgactgaggt

SEQ ID NO: 1875672 - DNA, 15 bp, Homo sapiens
tgtttgactgaggtt

SEQ ID NO: 1875673 - DNA, 15 bp, Homo sapiens
gtttgactgaggtta

SEQ ID NO: 1875674 - DNA, 15 bp, Homo sapiens
tttgactgaggttag

SEQ ID NO: 1875675 - DNA, 15 bp, Homo sapiens
ttgactgaggttagc

SEQ ID NO: 1875676 - DNA, 15 bp, Homo sapiens
tgactgaggttagct

SEQ ID NO: 1875677 - DNA, 15 bp, Homo sapiens
gactgaggttagctg

SEQ ID NO: 1875678 - DNA, 15 bp, Homo sapiens
actgaggttagctgg

SEQ ID NO: 1875679 - DNA, 15 bp, Homo sapiens
ctgaggttagctggt

SEQ ID NO: 1875680 - DNA, 15 bp, Homo sapiens
tgaggttagctggta

SEQ ID NO: 1875681 - DNA, 15 bp, Homo sapiens
gaggttagctggtat

SEQ ID NO: 1875682 - DNA, 15 bp, Homo sapiens
aggttagctggtata

SEQ ID NO: 1875683 - DNA, 15 bp, Homo sapiens
ggttagctggtataa

SEQ ID NO: 1875684 - DNA, 15 bp, Homo sapiens
gttagctggtataat

SEQ ID NO: 1875685 - DNA, 15 bp, Homo sapiens
ttagctggtataata

SEQ ID NO: 1875686 - DNA, 15 bp, Homo sapiens
tagctggtataatag

SEQ ID NO: 1875687 - DNA, 15 bp, Homo sapiens
agctggtataataga

SEQ ID NO: 1875688 - DNA, 15 bp, Homo sapiens
gctggtataatagag

SEQ ID NO: 1875689 - DNA, 15 bp, Homo sapiens
ctggtataatagaga

SEQ ID NO: 1875690 - DNA, 15 bp, Homo sapiens
tggtataatagagat

SEQ ID NO: 1875691 - DNA, 15 bp, Homo sapiens
ggtataatagagatt

SEQ ID NO: 1875692 - DNA, 15 bp, Homo sapiens
gtataatagagattg

SEQ ID NO: 1875693 - DNA, 15 bp, Homo sapiens
tataatagagattgt

SEQ ID NO: 1875694 - DNA, 15 bp, Homo sapiens
ataatagagattgtg

SEQ ID NO: 1875695 - DNA, 15 bp, Homo sapiens
tatgtatttatgtgc

SEQ ID NO: 1875696 - DNA, 15 bp, Homo sapiens
atgtatttatgtgcc

SEQ ID NO: 1875697 - DNA, 15 bp, Homo sapiens
tgtatttatgtgcct

SEQ ID NO: 1875698 - DNA, 15 bp, Homo sapiens
gtatttatgtgccta

SEQ ID NO: 1875699 - DNA, 15 bp, Homo sapiens
tatttatgtgcctag

SEQ ID NO: 1875700 - DNA, 15 bp, Homo sapiens
atttatgtgcctaga

SEQ ID NO: 1875701 - DNA, 15 bp, Homo sapiens
tttatgtgcctagaa

SEQ ID NO: 1875702 - DNA, 15 bp, Homo sapiens
ttatgtgcctagaat

SEQ ID NO: 1875703 - DNA, 15 bp, Homo sapiens
tatgtgcctagaata

SEQ ID NO: 1875704 - DNA, 15 bp, Homo sapiens
atgtgcctagaatat

SEQ ID NO: 1875705 - DNA, 15 bp, Homo sapiens
tgtgcctagaatata

SEQ ID NO: 1875706 - DNA, 15 bp, Homo sapiens
gtgcctagaatatat

SEQ ID NO: 1875707 - DNA, 15 bp, Homo sapiens
tgcctagaatatatg

SEQ ID NO: 1875708 - DNA, 15 bp, Homo sapiens
gcctagaatatatgt

SEQ ID NO: 1875709 - DNA, 15 bp, Homo sapiens
cctagaatatatgtg

SEQ ID NO: 1875710 - DNA, 15 bp, Homo sapiens
ctagaatatatgtgt

SEQ ID NO: 1875711 - DNA, 15 bp, Homo sapiens
tagaatatatgtgta

SEQ ID NO: 1875712 - DNA, 15 bp, Homo sapiens
agaatatatgtgtaa

SEQ ID NO: 1875713 - DNA, 15 bp, Homo sapiens
gaatatatgtgtaat

SEQ ID NO: 1875714 - DNA, 15 bp, Homo sapiens
aatatatgtgtaata

SEQ ID NO: 1875715 - DNA, 15 bp, Homo sapiens
atatatgtgtaatag

SEQ ID NO: 1875716 - DNA, 15 bp, Homo sapiens
tatatgtgtaatagt

SEQ ID NO: 1875717 - DNA, 15 bp, Homo sapiens
atatgtgtaatagta

SEQ ID NO: 1875718 - DNA, 15 bp, Homo sapiens
tatgtgtaatagtat

SEQ ID NO: 1875719 - DNA, 15 bp, Homo sapiens
atgtgtaatagtata

SEQ ID NO: 1875720 - DNA, 15 bp, Homo sapiens
tgtgtaatagtatac

SEQ ID NO: 1875721 - DNA, 15 bp, Homo sapiens
gtgtaatagtataca

SEQ ID NO: 1875722 - DNA, 15 bp, Homo sapiens
tgtaatagtatacat

SEQ ID NO: 1875723 - DNA, 15 bp, Homo sapiens
gtaatagtatacata

SEQ ID NO: 1875724 - DNA, 15 bp, Homo sapiens
taatagtatacatat

SEQ ID NO: 1875725 - DNA, 15 bp, Homo sapiens
aatagtatacatatt

SEQ ID NO: 1875726 - DNA, 15 bp, Homo sapiens
atagtatacatattt

SEQ ID NO: 1875727 - DNA, 15 bp, Homo sapiens
tagtatacatatttt

SEQ ID NO: 1875728 - DNA, 15 bp, Homo sapiens
agtatacatattttc

SEQ ID NO: 1875729 - DNA, 15 bp, Homo sapiens
gtatacatattttca

SEQ ID NO: 1875730 - DNA, 15 bp, Homo sapiens
tatacatattttcac

SEQ ID NO: 1875731 - DNA, 15 bp, Homo sapiens
atacatattttcaca

SEQ ID NO: 1875732 - DNA, 15 bp, Homo sapiens
tacatattttcacat

SEQ ID NO: 1875733 - DNA, 15 bp, Homo sapiens
acatattttcacata

SEQ ID NO: 1875734 - DNA, 15 bp, Homo sapiens
catattttcacatac

SEQ ID NO: 1875735 - DNA, 15 bp, Homo sapiens
atattttcacatact

SEQ ID NO: 1875736 - DNA, 15 bp, Homo sapiens
tattttcacatactt

SEQ ID NO: 1875737 - DNA, 15 bp, Homo sapiens
attttcacatacttg

SEQ ID NO: 1875738 - DNA, 15 bp, Homo sapiens
ttttcacatacttgt

SEQ ID NO: 1875739 - DNA, 15 bp, Homo sapiens
tttcacatacttgtg

SEQ ID NO: 1875740 - DNA, 15 bp, Homo sapiens
ttcacatacttgtga

SEQ ID NO: 1875741 - DNA, 15 bp, Homo sapiens
tcacatacttgtgat

SEQ ID NO: 1875742 - DNA, 15 bp, Homo sapiens
cacatacttgtgatt

SEQ ID NO: 1875743 - DNA, 15 bp, Homo sapiens
acatacttgtgattg

SEQ ID NO: 1875744 - DNA, 15 bp, Homo sapiens
catacttgtgattga

SEQ ID NO: 1875745 - DNA, 15 bp, Homo sapiens
atacttgtgattgag

SEQ ID NO: 1875746 - DNA, 15 bp, Homo sapiens
tacttgtgattgagt

SEQ ID NO: 1875747 - DNA, 15 bp, Homo sapiens
acttgtgattgagtg

SEQ ID NO: 1875748 - DNA, 15 bp, Homo sapiens
cttgtgattgagtgt

SEQ ID NO: 1875749 - DNA, 15 bp, Homo sapiens
ttgtgattgagtgta

SEQ ID NO: 1875750 - DNA, 15 bp, Homo sapiens
tgtgattgagtgtac

SEQ ID NO: 1875751 - DNA, 15 bp, Homo sapiens
gtgattgagtgtaca

SEQ ID NO: 1875752 - DNA, 15 bp, Homo sapiens
tgattgagtgtacaa

SEQ ID NO: 1875753 - DNA, 15 bp, Homo sapiens
gattgagtgtacaat

SEQ ID NO: 1875754 - DNA, 15 bp, Homo sapiens
attgagtgtacaatc

SEQ ID NO: 1875755 - DNA, 15 bp, Homo sapiens
ttgagtgtacaatcc

SEQ ID NO: 1875756 - DNA, 15 bp, Homo sapiens
tgagtgtacaatcct

SEQ ID NO: 1875757 - DNA, 15 bp, Homo sapiens
gagtgtacaatcctt

SEQ ID NO: 1875758 - DNA, 15 bp, Homo sapiens
agtgtacaatccttg

SEQ ID NO: 1875759 - DNA, 15 bp, Homo sapiens
gtgtacaatccttga

SEQ ID NO: 1875760 - DNA, 15 bp, Homo sapiens
tgtacaatccttgat

SEQ ID NO: 1875761 - DNA, 15 bp, Homo sapiens
gtacaatccttgatc

SEQ ID NO: 1875762 - DNA, 15 bp, Homo sapiens
tacaatccttgatct

SEQ ID NO: 1875763 - DNA, 15 bp, Homo sapiens
acaatccttgatctg

SEQ ID NO: 1875764 - DNA, 15 bp, Homo sapiens
caatccttgatctgt

SEQ ID NO: 1875765 - DNA, 15 bp, Homo sapiens
aatccttgatctgtc

SEQ ID NO: 1875766 - DNA, 15 bp, Homo sapiens
atccttgatctgtca

SEQ ID NO: 1875767 - DNA, 15 bp, Homo sapiens
tccttgatctgtcaa

SEQ ID NO: 1875768 - DNA, 15 bp, Homo sapiens
ccttgatctgtcaat

SEQ ID NO: 1875769 - DNA, 15 bp, Homo sapiens
cttgatctgtcaatc

SEQ ID NO: 1875770 - DNA, 15 bp, Homo sapiens
ttgatctgtcaatct

SEQ ID NO: 1875771 - DNA, 15 bp, Homo sapiens
tgatctgtcaatcta

SEQ ID NO: 1875772 - DNA, 15 bp, Homo sapiens
gatctgtcaatctac

SEQ ID NO: 1875773 - DNA, 15 bp, Homo sapiens
atctgtcaatctacc

SEQ ID NO: 1875774 - DNA, 15 bp, Homo sapiens
tctgtcaatctacca

SEQ ID NO: 1875775 - DNA, 15 bp, Homo sapiens
ctgtcaatctaccat

SEQ ID NO: 1875776 - DNA, 15 bp, Homo sapiens
tgtcaatctaccata

SEQ ID NO: 1875777 - DNA, 15 bp, Homo sapiens
gtcaatctaccataa

SEQ ID NO: 1875778 - DNA, 15 bp, Homo sapiens
tcaatctaccataag

SEQ ID NO: 1875779 - DNA, 15 bp, Homo sapiens
caatctaccataagc

SEQ ID NO: 1875780 - DNA, 15 bp, Homo sapiens
aatctaccataagct

SEQ ID NO: 1875781 - DNA, 15 bp, Homo sapiens
atctaccataagctt

SEQ ID NO: 1875782 - DNA, 15 bp, Homo sapiens
tctaccataagcttt

SEQ ID NO: 1875783 - DNA, 15 bp, Homo sapiens
ctaccataagctttg

SEQ ID NO: 1875784 - DNA, 15 bp, Homo sapiens
taccataagctttga

SEQ ID NO: 1875785 - DNA, 15 bp, Homo sapiens
accataagctttgag

SEQ ID NO: 1875786 - DNA, 15 bp, Homo sapiens
ccataagctttgaga

SEQ ID NO: 1875787 - DNA, 15 bp, Homo sapiens
cataagctttgagaa

SEQ ID NO: 1875788 - DNA, 15 bp, Homo sapiens
ataagctttgagaag

SEQ ID NO: 1875789 - DNA, 15 bp, Homo sapiens
taagctttgagaaga

SEQ ID NO: 1875790 - DNA, 15 bp, Homo sapiens
aagctttgagaagat

SEQ ID NO: 1875791 - DNA, 15 bp, Homo sapiens
agctttgagaagata

SEQ ID NO: 1875792 - DNA, 15 bp, Homo sapiens
gctttgagaagataa

SEQ ID NO: 1875793 - DNA, 15 bp, Homo sapiens
ctttgagaagataac

SEQ ID NO: 1875794 - DNA, 15 bp, Homo sapiens
tttgagaagataaca

SEQ ID NO: 1875795 - DNA, 15 bp, Homo sapiens
ttgagaagataacaa

SEQ ID NO: 1875796 - DNA, 15 bp, Homo sapiens
tgagaagataacaat

SEQ ID NO: 1875797 - DNA, 15 bp, Homo sapiens
gagaagataacaatg

SEQ ID NO: 1875798 - DNA, 15 bp, Homo sapiens
agaagataacaatga

SEQ ID NO: 1875799 - DNA, 15 bp, Homo sapiens
gaagataacaatgaa

SEQ ID NO: 1875800 - DNA, 15 bp, Homo sapiens
aagataacaatgaac

SEQ ID NO: 1875801 - DNA, 15 bp, Homo sapiens
agataacaatgaact

SEQ ID NO: 1875802 - DNA, 15 bp, Homo sapiens
gataacaatgaactc

SEQ ID NO: 1875803 - DNA, 15 bp, Homo sapiens
ataacaatgaactct

SEQ ID NO: 1875804 - DNA, 15 bp, Homo sapiens
taacaatgaactctt

SEQ ID NO: 1875805 - DNA, 15 bp, Homo sapiens
aacaatgaactcttc

SEQ ID NO: 1875806 - DNA, 15 bp, Homo sapiens
acaatgaactcttct

SEQ ID NO: 1875807 - DNA, 15 bp, Homo sapiens
caatgaactcttctg

SEQ ID NO: 1875808 - DNA, 15 bp, Homo sapiens
aatgaactcttctgt

SEQ ID NO: 1875809 - DNA, 15 bp, Homo sapiens
atgaactcttctgta

SEQ ID NO: 1875810 - DNA, 15 bp, Homo sapiens
tgaactcttctgtaa

SEQ ID NO: 1875811 - DNA, 15 bp, Homo sapiens
gaactcttctgtaat

SEQ ID NO: 1875812 - DNA, 15 bp, Homo sapiens
aactcttctgtaatt

SEQ ID NO: 1875813 - DNA, 15 bp, Homo sapiens
actcttctgtaatta

SEQ ID NO: 1875814 - DNA, 15 bp, Homo sapiens
ctcttctgtaattac

SEQ ID NO: 1875815 - DNA, 15 bp, Homo sapiens
tcttctgtaattact

SEQ ID NO: 1875816 - DNA, 15 bp, Homo sapiens
cttctgtaattactt

SEQ ID NO: 1875817 - DNA, 15 bp, Homo sapiens
ttctgtaattacttc

SEQ ID NO: 1875818 - DNA, 15 bp, Homo sapiens
tctgtaattacttct

SEQ ID NO: 1875819 - DNA, 15 bp, Homo sapiens
ctgtaattacttcta

SEQ ID NO: 1875820 - DNA, 15 bp, Homo sapiens
tgtaattacttctaa

SEQ ID NO: 1875821 - DNA, 15 bp, Homo sapiens
gtaattacttctaaa

SEQ ID NO: 1875822 - DNA, 15 bp, Homo sapiens
taattacttctaaag

SEQ ID NO: 1875823 - DNA, 15 bp, Homo sapiens
aattacttctaaaga

SEQ ID NO: 1875824 - DNA, 15 bp, Homo sapiens
attacttctaaagac

SEQ ID NO: 1875825 - DNA, 15 bp, Homo sapiens
ttacttctaaagaca

SEQ ID NO: 1875826 - DNA, 15 bp, Homo sapiens
tacttctaaagacag

SEQ ID NO: 1875827 - DNA, 15 bp, Homo sapiens
acttctaaagacaga

SEQ ID NO: 1875828 - DNA, 15 bp, Homo sapiens
cttctaaagacagat

SEQ ID NO: 1875829 - DNA, 15 bp, Homo sapiens
ttctaaagacagata

SEQ ID NO: 1875830 - DNA, 15 bp, Homo sapiens
tctaaagacagataa

SEQ ID NO: 1875831 - DNA, 15 bp, Homo sapiens
ctaaagacagataat

SEQ ID NO: 1875832 - DNA, 15 bp, Homo sapiens
taaagacagataatg

SEQ ID NO: 1875833 - DNA, 15 bp, Homo sapiens
aaagacagataatgt

SEQ ID NO: 1875834 - DNA, 15 bp, Homo sapiens
aagacagataatgtt

SEQ ID NO: 1875835 - DNA, 15 bp, Homo sapiens
agacagataatgttt

SEQ ID NO: 1875836 - DNA, 15 bp, Homo sapiens
gacagataatgtttc

SEQ ID NO: 1875837 - DNA, 15 bp, Homo sapiens
acagataatgtttct

SEQ ID NO: 1875838 - DNA, 15 bp, Homo sapiens
cagataatgtttctc

SEQ ID NO: 1875839 - DNA, 15 bp, Homo sapiens
agataatgtttctca

SEQ ID NO: 1875840 - DNA, 15 bp, Homo sapiens
gataatgtttctcat

SEQ ID NO: 1875841 - DNA, 15 bp, Homo sapiens
ataatgtttctcatt

SEQ ID NO: 1875842 - DNA, 15 bp, Homo sapiens
taatgtttctcattt

SEQ ID NO: 1875843 - DNA, 15 bp, Homo sapiens
aatgtttctcatttc

SEQ ID NO: 1875844 - DNA, 15 bp, Homo sapiens
atgtttctcatttct

SEQ ID NO: 1875845 - DNA, 15 bp, Homo sapiens
tgtttctcatttctg

SEQ ID NO: 1875846 - DNA, 15 bp, Homo sapiens
gtttctcatttctga

SEQ ID NO: 1875847 - DNA, 15 bp, Homo sapiens
tttctcatttctgat

SEQ ID NO: 1875848 - DNA, 15 bp, Homo sapiens
ttctcatttctgata

SEQ ID NO: 1875849 - DNA, 15 bp, Homo sapiens
tctcatttctgatat

SEQ ID NO: 1875850 - DNA, 15 bp, Homo sapiens
ctcatttctgatatt

SEQ ID NO: 1875851 - DNA, 15 bp, Homo sapiens
tcatttctgatattc

SEQ ID NO: 1875852 - DNA, 15 bp, Homo sapiens
catttctgatattct

SEQ ID NO: 1875853 - DNA, 15 bp, Homo sapiens
atttctgatattctt

SEQ ID NO: 1875854 - DNA, 15 bp, Homo sapiens
tttctgatattctta

SEQ ID NO: 1875855 - DNA, 15 bp, Homo sapiens
ttctgatattcttaa

SEQ ID NO: 1875856 - DNA, 15 bp, Homo sapiens
tctgatattcttaat

SEQ ID NO: 1875857 - DNA, 15 bp, Homo sapiens
ctgatattcttaatt

SEQ ID NO: 1875858 - DNA, 15 bp, Homo sapiens
tgatattcttaattc

SEQ ID NO: 1875859 - DNA, 15 bp, Homo sapiens
gatattcttaattcc

SEQ ID NO: 1875860 - DNA, 15 bp, Homo sapiens
atattcttaattccc

SEQ ID NO: 1875861 - DNA, 15 bp, Homo sapiens
tattcttaattccct

SEQ ID NO: 1875862 - DNA, 15 bp, Homo sapiens
attcttaattccctt

SEQ ID NO: 1875863 - DNA, 15 bp, Homo sapiens
ttcttaattcccttg

SEQ ID NO: 1875864 - DNA, 15 bp, Homo sapiens
tcttaattcccttga

SEQ ID NO: 1875865 - DNA, 15 bp, Homo sapiens
cttaattcccttgaa

SEQ ID NO: 1875866 - DNA, 15 bp, Homo sapiens
ttaattcccttgaaa

SEQ ID NO: 1875867 - DNA, 15 bp, Homo sapiens
taattcccttgaaaa

SEQ ID NO: 1875868 - DNA, 15 bp, Homo sapiens
aattcccttgaaaag

SEQ ID NO: 1875869 - DNA, 15 bp, Homo sapiens
attcccttgaaaagt

SEQ ID NO: 1875870 - DNA, 15 bp, Homo sapiens
ttcccttgaaaagtt

SEQ ID NO: 1875871 - DNA, 15 bp, Homo sapiens
tcccttgaaaagttc

SEQ ID NO: 1875872 - DNA, 15 bp, Homo sapiens
cccttgaaaagttct

SEQ ID NO: 1875873 - DNA, 15 bp, Homo sapiens
ccttgaaaagttctt

SEQ ID NO: 1875874 - DNA, 15 bp, Homo sapiens
cttgaaaagttcttt

SEQ ID NO: 1875875 - DNA, 15 bp, Homo sapiens
ttgaaaagttctttc

SEQ ID NO: 1875876 - DNA, 15 bp, Homo sapiens
tgaaaagttctttct

SEQ ID NO: 1875877 - DNA, 15 bp, Homo sapiens
gaaaagttctttcta

SEQ ID NO: 1875878 - DNA, 15 bp, Homo sapiens
aaaagttctttctat

SEQ ID NO: 1875879 - DNA, 15 bp, Homo sapiens
aaagttctttctata

SEQ ID NO: 1875880 - DNA, 15 bp, Homo sapiens
aagttctttctatat

SEQ ID NO: 1875881 - DNA, 15 bp, Homo sapiens
agttctttctatatg

SEQ ID NO: 1875882 - DNA, 15 bp, Homo sapiens
gttctttctatatgc

SEQ ID NO: 1875883 - DNA, 15 bp, Homo sapiens
ttctttctatatgct

SEQ ID NO: 1875884 - DNA, 15 bp, Homo sapiens
tctttctatatgctg

SEQ ID NO: 1875885 - DNA, 15 bp, Homo sapiens
ctttctatatgctgc

SEQ ID NO: 1875886 - DNA, 15 bp, Homo sapiens
tttctatatgctgcg

SEQ ID NO: 1875887 - DNA, 15 bp, Homo sapiens
ttctatatgctgcgc

SEQ ID NO: 1875888 - DNA, 15 bp, Homo sapiens
tctatatgctgcgca

SEQ ID NO: 1875889 - DNA, 15 bp, Homo sapiens
ctatatgctgcgcaa

SEQ ID NO: 1875890 - DNA, 15 bp, Homo sapiens
tatatgctgcgcaaa

SEQ ID NO: 1875891 - DNA, 15 bp, Homo sapiens
atatgctgcgcaaaa

SEQ ID NO: 1875892 - DNA, 15 bp, Homo sapiens
tatgctgcgcaaaac

SEQ ID NO: 1875893 - DNA, 15 bp, Homo sapiens
atgctgcgcaaaacc

SEQ ID NO: 1875894 - DNA, 15 bp, Homo sapiens
tgctgcgcaaaacca

SEQ ID NO: 1875895 - DNA, 15 bp, Homo sapiens
gctgcgcaaaaccaa

SEQ ID NO: 1875896 - DNA, 15 bp, Homo sapiens
ctgcgcaaaaccaag

SEQ ID NO: 1875897 - DNA, 15 bp, Homo sapiens
tgcgcaaaaccaaga

SEQ ID NO: 1875898 - DNA, 15 bp, Homo sapiens
gcgcaaaaccaagaa

SEQ ID NO: 1875899 - DNA, 15 bp, Homo sapiens
cgcaaaaccaagaag

SEQ ID NO: 1875900 - DNA, 15 bp, Homo sapiens
gcaaaaccaagaaga

SEQ ID NO: 1875901 - DNA, 15 bp, Homo sapiens
caaaaccaagaagac

SEQ ID NO: 1875902 - DNA, 15 bp, Homo sapiens
aaaaccaagaagact

SEQ ID NO: 1875903 - DNA, 15 bp, Homo sapiens
aaaccaagaagactg

SEQ ID NO: 1875904 - DNA, 15 bp, Homo sapiens
aaccaagaagactga

SEQ ID NO: 1875905 - DNA, 15 bp, Homo sapiens
accaagaagactgat

SEQ ID NO: 1875906 - DNA, 15 bp, Homo sapiens
ccaagaagactgata

SEQ ID NO: 1875907 - DNA, 15 bp, Homo sapiens
caagaagactgatat

SEQ ID NO: 1875908 - DNA, 15 bp, Homo sapiens
aagaagactgatatg

SEQ ID NO: 1875909 - DNA, 15 bp, Homo sapiens
agaagactgatatgc

SEQ ID NO: 1875910 - DNA, 15 bp, Homo sapiens
gaagactgatatgca

SEQ ID NO: 1875911 - DNA, 15 bp, Homo sapiens
aagactgatatgcat

SEQ ID NO: 1875912 - DNA, 15 bp, Homo sapiens
agactgatatgcatg

SEQ ID NO: 1875913 - DNA, 15 bp, Homo sapiens
gactgatatgcatga

SEQ ID NO: 1875914 - DNA, 15 bp, Homo sapiens
actgatatgcatgat

SEQ ID NO: 1875915 - DNA, 15 bp, Homo sapiens
ctgatatgcatgatg

SEQ ID NO: 1875916 - DNA, 15 bp, Homo sapiens
tgatatgcatgatgt

SEQ ID NO: 1875917 - DNA, 15 bp, Homo sapiens
gatatgcatgatgtc

SEQ ID NO: 1875918 - DNA, 15 bp, Homo sapiens
atatgcatgatgtct

SEQ ID NO: 1875919 - DNA, 15 bp, Homo sapiens
tatgcatgatgtctt

SEQ ID NO: 1875920 - DNA, 15 bp, Homo sapiens
atgcatgatgtcttt

SEQ ID NO: 1875921 - DNA, 15 bp, Homo sapiens
tgcatgatgtctttg

SEQ ID NO: 1875922 - DNA, 15 bp, Homo sapiens
gcatgatgtctttgt

SEQ ID NO: 1875923 - DNA, 15 bp, Homo sapiens
catgatgtctttgtg

SEQ ID NO: 1875924 - DNA, 15 bp, Homo sapiens
atgatgtctttgtgg

SEQ ID NO: 1875925 - DNA, 15 bp, Homo sapiens
tgatgtctttgtggt

SEQ ID NO: 1875926 - DNA, 15 bp, Homo sapiens
gatgtctttgtggtt

SEQ ID NO: 1875927 - DNA, 15 bp, Homo sapiens
atgtctttgtggtta

SEQ ID NO: 1875928 - DNA, 15 bp, Homo sapiens
tgtctttgtggttaa

SEQ ID NO: 1875929 - DNA, 15 bp, Homo sapiens
gtctttgtggttaat

SEQ ID NO: 1875930 - DNA, 15 bp, Homo sapiens
tctttgtggttaatt

SEQ ID NO: 1875931 - DNA, 15 bp, Homo sapiens
ctttgtggttaattg

SEQ ID NO: 1875932 - DNA, 15 bp, Homo sapiens
tttgtggttaattgc

SEQ ID NO: 1875933 - DNA, 15 bp, Homo sapiens
ttgtggttaattgct

SEQ ID NO: 1875934 - DNA, 15 bp, Homo sapiens
tgtggttaattgcta

SEQ ID NO: 1875935 - DNA, 15 bp, Homo sapiens
gtggttaattgctat

SEQ ID NO: 1875936 - DNA, 15 bp, Homo sapiens
tggttaattgctata

SEQ ID NO: 1875937 - DNA, 15 bp, Homo sapiens
ggttaattgctataa

SEQ ID NO: 1875938 - DNA, 15 bp, Homo sapiens
gttaattgctataaa

SEQ ID NO: 1875939 - DNA, 15 bp, Homo sapiens
ttaattgctataaag

SEQ ID NO: 1875940 - DNA, 15 bp, Homo sapiens
taattgctataaagc

SEQ ID NO: 1875941 - DNA, 15 bp, Homo sapiens
aattgctataaagcc

SEQ ID NO: 1875942 - DNA, 15 bp, Homo sapiens
attgctataaagcca

SEQ ID NO: 1875943 - DNA, 15 bp, Homo sapiens
ttgctataaagccaa

SEQ ID NO: 1875944 - DNA, 15 bp, Homo sapiens
tgctataaagccaat

SEQ ID NO: 1875945 - DNA, 15 bp, Homo sapiens
gctataaagccaata

SEQ ID NO: 1875946 - DNA, 15 bp, Homo sapiens
ctataaagccaatat

SEQ ID NO: 1875947 - DNA, 15 bp, Homo sapiens
tataaagccaatatt

SEQ ID NO: 1875948 - DNA, 15 bp, Homo sapiens
ataaagccaatattt

SEQ ID NO: 1875949 - DNA, 15 bp, Homo sapiens
taaagccaatattta

SEQ ID NO: 1875950 - DNA, 15 bp, Homo sapiens
aaagccaatatttaa

SEQ ID NO: 1875951 - DNA, 15 bp, Homo sapiens
aagccaatatttaaa

SEQ ID NO: 1875952 - DNA, 15 bp, Homo sapiens
agccaatatttaaat

SEQ ID NO: 1875953 - DNA, 15 bp, Homo sapiens
gccaatatttaaatt

SEQ ID NO: 1875954 - DNA, 15 bp, Homo sapiens
ccaatatttaaattt

SEQ ID NO: 1875955 - DNA, 15 bp, Homo sapiens
caatatttaaatttc

SEQ ID NO: 1875956 - DNA, 15 bp, Homo sapiens
aatatttaaatttct

SEQ ID NO: 1875957 - DNA, 15 bp, Homo sapiens
atatttaaatttctt

SEQ ID NO: 1875958 - DNA, 15 bp, Homo sapiens
tatttaaatttcttt

SEQ ID NO: 1875959 - DNA, 15 bp, Homo sapiens
atttaaatttctttg

SEQ ID NO: 1875960 - DNA, 15 bp, Homo sapiens
tttaaatttctttga

SEQ ID NO: 1875961 - DNA, 15 bp, Homo sapiens
ttaaatttctttgag

SEQ ID NO: 1875962 - DNA, 15 bp, Homo sapiens
taaatttctttgagt

SEQ ID NO: 1875963 - DNA, 15 bp, Homo sapiens
aaatttctttgagtc

SEQ ID NO: 1875964 - DNA, 15 bp, Homo sapiens
aatttctttgagtcc

SEQ ID NO: 1875965 - DNA, 15 bp, Homo sapiens
atttctttgagtcct

SEQ ID NO: 1875966 - DNA, 15 bp, Homo sapiens
tttctttgagtcctc

SEQ ID NO: 1875967 - DNA, 15 bp, Homo sapiens
ttctttgagtcctct

SEQ ID NO: 1875968 - DNA, 15 bp, Homo sapiens
tctttgagtcctctt

SEQ ID NO: 1875969 - DNA, 15 bp, Homo sapiens
ctttgagtcctcttt

SEQ ID NO: 1875970 - DNA, 15 bp, Homo sapiens
tttgagtcctctttt

SEQ ID NO: 1875971 - DNA, 15 bp, Homo sapiens
ttgagtcctctttta

SEQ ID NO: 1875972 - DNA, 15 bp, Homo sapiens
tgagtcctcttttac

SEQ ID NO: 1875973 - DNA, 15 bp, Homo sapiens
gagtcctcttttact

SEQ ID NO: 1875974 - DNA, 15 bp, Homo sapiens
agtcctcttttactg

SEQ ID NO: 1875975 - DNA, 15 bp, Homo sapiens
gtcctcttttactgc

SEQ ID NO: 1875976 - DNA, 15 bp, Homo sapiens
tcctcttttactgcc

SEQ ID NO: 1875977 - DNA, 15 bp, Homo sapiens
cctcttttactgcct

SEQ ID NO: 1875978 - DNA, 15 bp, Homo sapiens
ctcttttactgcctg

SEQ ID NO: 1875979 - DNA, 15 bp, Homo sapiens
tcttttactgcctgg

SEQ ID NO: 1875980 - DNA, 15 bp, Homo sapiens
cttttactgcctggt

SEQ ID NO: 1875981 - DNA, 15 bp, Homo sapiens
ttttactgcctggta

SEQ ID NO: 1875982 - DNA, 15 bp, Homo sapiens
tttactgcctggtat

SEQ ID NO: 1875983 - DNA, 15 bp, Homo sapiens
ttactgcctggtatc

SEQ ID NO: 1875984 - DNA, 15 bp, Homo sapiens
tactgcctggtatca

SEQ ID NO: 1875985 - DNA, 15 bp, Homo sapiens
actgcctggtatcat

SEQ ID NO: 1875986 - DNA, 15 bp, Homo sapiens
ctgcctggtatcatg

SEQ ID NO: 1875987 - DNA, 15 bp, Homo sapiens
tgcctggtatcatgg

SEQ ID NO: 1875988 - DNA, 15 bp, Homo sapiens
gcctggtatcatggg

SEQ ID NO: 1875989 - DNA, 15 bp, Homo sapiens
cctggtatcatggga

SEQ ID NO: 1875990 - DNA, 15 bp, Homo sapiens
ctggtatcatgggat

SEQ ID NO: 1875991 - DNA, 15 bp, Homo sapiens
tggtatcatgggatg

SEQ ID NO: 1875992 - DNA, 15 bp, Homo sapiens
ggtatcatgggatga

SEQ ID NO: 1875993 - DNA, 15 bp, Homo sapiens
gtatcatgggatgaa

SEQ ID NO: 1875994 - DNA, 15 bp, Homo sapiens
tatcatgggatgaag

SEQ ID NO: 1875995 - DNA, 15 bp, Homo sapiens
atcatgggatgaaga

SEQ ID NO: 1875996 - DNA, 15 bp, Homo sapiens
tcatgggatgaagag

SEQ ID NO: 1875997 - DNA, 15 bp, Homo sapiens
catgggatgaagagc

SEQ ID NO: 1875998 - DNA, 15 bp, Homo sapiens
atgggatgaagagct

SEQ ID NO: 1875999 - DNA, 15 bp, Homo sapiens
tgggatgaagagctg

SEQ ID NO: 1876000 - DNA, 15 bp, Homo sapiens
gggatgaagagctgc

SEQ ID NO: 1876001 - DNA, 15 bp, Homo sapiens
ggatgaagagctgcg

SEQ ID NO: 1876002 - DNA, 15 bp, Homo sapiens
gatgaagagctgcgc

SEQ ID NO: 1876003 - DNA, 15 bp, Homo sapiens
atgaagagctgcgca

SEQ ID NO: 1876004 - DNA, 15 bp, Homo sapiens
tgaagagctgcgcag

SEQ ID NO: 1876005 - DNA, 15 bp, Homo sapiens
gaagagctgcgcagg

SEQ ID NO: 1876006 - DNA, 15 bp, Homo sapiens
aagagctgcgcagga

SEQ ID NO: 1876007 - DNA, 15 bp, Homo sapiens
agagctgcgcaggag

SEQ ID NO: 1876008 - DNA, 15 bp, Homo sapiens
gagctgcgcaggagg

SEQ ID NO: 1876009 - DNA, 15 bp, Homo sapiens
agctgcgcaggaggg

SEQ ID NO: 1876010 - DNA, 15 bp, Homo sapiens
gctgcgcaggagggg

SEQ ID NO: 1876011 - DNA, 15 bp, Homo sapiens
ctgcgcaggagggga

SEQ ID NO: 1876012 - DNA, 15 bp, Homo sapiens
tgcgcaggaggggag

SEQ ID NO: 1876013 - DNA, 15 bp, Homo sapiens
gcgcaggaggggagt

SEQ ID NO: 1876014 - DNA, 15 bp, Homo sapiens
cgcaggaggggagtg

SEQ ID NO: 1876015 - DNA, 15 bp, Homo sapiens
gcaggaggggagtgt

SEQ ID NO: 1876016 - DNA, 15 bp, Homo sapiens
caggaggggagtgta

SEQ ID NO: 1876017 - DNA, 15 bp, Homo sapiens
aggaggggagtgtat

SEQ ID NO: 1876018 - DNA, 15 bp, Homo sapiens
ggaggggagtgtata

SEQ ID NO: 1876019 - DNA, 15 bp, Homo sapiens
gaggggagtgtatac

SEQ ID NO: 1876020 - DNA, 15 bp, Homo sapiens
aggggagtgtatacg

SEQ ID NO: 1876021 - DNA, 15 bp, Homo sapiens
ggggagtgtatacgt

SEQ ID NO: 1876022 - DNA, 15 bp, Homo sapiens
gggagtgtatacgtg

SEQ ID NO: 1876023 - DNA, 15 bp, Homo sapiens
ggagtgtatacgtgg

SEQ ID NO: 1876024 - DNA, 15 bp, Homo sapiens
gagtgtatacgtggc

SEQ ID NO: 1876025 - DNA, 15 bp, Homo sapiens
agtgtatacgtggct

SEQ ID NO: 1876026 - DNA, 15 bp, Homo sapiens
gtgtatacgtggctc

SEQ ID NO: 1876027 - DNA, 15 bp, Homo sapiens
tgtatacgtggctct

SEQ ID NO: 1876028 - DNA, 15 bp, Homo sapiens
gtatacgtggctctc

SEQ ID NO: 1876029 - DNA, 15 bp, Homo sapiens
tatacgtggctctcg

SEQ ID NO: 1876030 - DNA, 15 bp, Homo sapiens
atacgtggctctcgg

SEQ ID NO: 1876031 - DNA, 15 bp, Homo sapiens
tacgtggctctcggt

SEQ ID NO: 1876032 - DNA, 15 bp, Homo sapiens
acgtggctctcggtc

SEQ ID NO: 1876033 - DNA, 15 bp, Homo sapiens
cgtggctctcggtct

SEQ ID NO: 1876034 - DNA, 15 bp, Homo sapiens
gtggctctcggtctt

SEQ ID NO: 1876035 - DNA, 15 bp, Homo sapiens
tggctctcggtcttg

SEQ ID NO: 1876036 - DNA, 15 bp, Homo sapiens
ggctctcggtcttgt

SEQ ID NO: 1876037 - DNA, 15 bp, Homo sapiens
gctctcggtcttgtg

SEQ ID NO: 1876038 - DNA, 15 bp, Homo sapiens
ctctcggtcttgtgc

SEQ ID NO: 1876039 - DNA, 15 bp, Homo sapiens
tctcggtcttgtgca

SEQ ID NO: 1876040 - DNA, 15 bp, Homo sapiens
ctcggtcttgtgcat

SEQ ID NO: 1876041 - DNA, 15 bp, Homo sapiens
tcggtcttgtgcatt

SEQ ID NO: 1876042 - DNA, 15 bp, Homo sapiens
cggtcttgtgcattt

SEQ ID NO: 1876043 - DNA, 15 bp, Homo sapiens
ggtcttgtgcatttt

SEQ ID NO: 1876044 - DNA, 15 bp, Homo sapiens
gtcttgtgcattttg

SEQ ID NO: 1876045 - DNA, 15 bp, Homo sapiens
tcttgtgcattttgt

SEQ ID NO: 1876046 - DNA, 15 bp, Homo sapiens
cttgtgcattttgtg

SEQ ID NO: 1876047 - DNA, 15 bp, Homo sapiens
ttgtgcattttgtga

SEQ ID NO: 1876048 - DNA, 15 bp, Homo sapiens
tgtgcattttgtgac

SEQ ID NO: 1876049 - DNA, 15 bp, Homo sapiens
gtgcattttgtgaca

SEQ ID NO: 1876050 - DNA, 15 bp, Homo sapiens
tgcattttgtgacaa

SEQ ID NO: 1876051 - DNA, 15 bp, Homo sapiens
gcattttgtgacaaa

SEQ ID NO: 1876052 - DNA, 15 bp, Homo sapiens
cattttgtgacaaag

SEQ ID NO: 1876053 - DNA, 15 bp, Homo sapiens
attttgtgacaaagg

SEQ ID NO: 1876054 - DNA, 15 bp, Homo sapiens
ttttgtgacaaagga

SEQ ID NO: 1876055 - DNA, 15 bp, Homo sapiens
tttgtgacaaaggaa

SEQ ID NO: 1876056 - DNA, 15 bp, Homo sapiens
ttgtgacaaaggaat

SEQ ID NO: 1876057 - DNA, 15 bp, Homo sapiens
tgtgacaaaggaatt

SEQ ID NO: 1876058 - DNA, 15 bp, Homo sapiens
gtgacaaaggaattc

SEQ ID NO: 1876059 - DNA, 15 bp, Homo sapiens
tgacaaaggaattcc

SEQ ID NO: 1876060 - DNA, 15 bp, Homo sapiens
gacaaaggaattccc

SEQ ID NO: 1876061 - DNA, 15 bp, Homo sapiens
acaaaggaattcccc

SEQ ID NO: 1876062 - DNA, 15 bp, Homo sapiens
caaaggaattcccct

SEQ ID NO: 1876063 - DNA, 15 bp, Homo sapiens
aaaggaattcccctt

SEQ ID NO: 1876064 - DNA, 15 bp, Homo sapiens
aaggaattccccttt

SEQ ID NO: 1876065 - DNA, 15 bp, Homo sapiens
aggaattcccctttc

SEQ ID NO: 1876066 - DNA, 15 bp, Homo sapiens
ggaattcccctttca

SEQ ID NO: 1876067 - DNA, 15 bp, Homo sapiens
gaattcccctttcaa

SEQ ID NO: 1876068 - DNA, 15 bp, Homo sapiens
aattcccctttcaat

SEQ ID NO: 1876069 - DNA, 15 bp, Homo sapiens
attcccctttcaatc

SEQ ID NO: 1876070 - DNA, 15 bp, Homo sapiens
ttcccctttcaatca

SEQ ID NO: 1876071 - DNA, 15 bp, Homo sapiens
tcccctttcaatcac

SEQ ID NO: 1876072 - DNA, 15 bp, Homo sapiens
cccctttcaatcacg

SEQ ID NO: 1876073 - DNA, 15 bp, Homo sapiens
ccctttcaatcacgc

SEQ ID NO: 1876074 - DNA, 15 bp, Homo sapiens
cctttcaatcacgct

SEQ ID NO: 1876075 - DNA, 15 bp, Homo sapiens
ctttcaatcacgctg

SEQ ID NO: 1876076 - DNA, 15 bp, Homo sapiens
tttcaatcacgctgc

SEQ ID NO: 1876077 - DNA, 15 bp, Homo sapiens
ttcaatcacgctgct

SEQ ID NO: 1876078 - DNA, 15 bp, Homo sapiens
tcaatcacgctgctc

SEQ ID NO: 1876079 - DNA, 15 bp, Homo sapiens
caatcacgctgctct

SEQ ID NO: 1876080 - DNA, 15 bp, Homo sapiens
aatcacgctgctctc

SEQ ID NO: 1876081 - DNA, 15 bp, Homo sapiens
atcacgctgctctcc

SEQ ID NO: 1876082 - DNA, 15 bp, Homo sapiens
tcacgctgctctcct

SEQ ID NO: 1876083 - DNA, 15 bp, Homo sapiens
cacgctgctctcctg

SEQ ID NO: 1876084 - DNA, 15 bp, Homo sapiens
acgctgctctcctgg

SEQ ID NO: 1876085 - DNA, 15 bp, Homo sapiens
cgctgctctcctgga

SEQ ID NO: 1876086 - DNA, 15 bp, Homo sapiens
gctgctctcctggag

SEQ ID NO: 1876087 - DNA, 15 bp, Homo sapiens
ctgctctcctggagc

SEQ ID NO: 1876088 - DNA, 15 bp, Homo sapiens
tgctctcctggagcc

SEQ ID NO: 1876089 - DNA, 15 bp, Homo sapiens
gctctcctggagccc

SEQ ID NO: 1876090 - DNA, 15 bp, Homo sapiens
ctctcctggagcccc

SEQ ID NO: 1876091 - DNA, 15 bp, Homo sapiens
tctcctggagcccct

SEQ ID NO: 1876092 - DNA, 15 bp, Homo sapiens
ctcctggagcccctg

SEQ ID NO: 1876093 - DNA, 15 bp, Homo sapiens
tcctggagcccctgg

SEQ ID NO: 1876094 - DNA, 15 bp, Homo sapiens
cctggagcccctgga

SEQ ID NO: 1876095 - DNA, 15 bp, Homo sapiens
ctggagcccctggag

SEQ ID NO: 1876096 - DNA, 15 bp, Homo sapiens
tggagcccctggagc

SEQ ID NO: 1876097 - DNA, 15 bp, Homo sapiens
ggagcccctggagcc

SEQ ID NO: 1876098 - DNA, 15 bp, Homo sapiens
gagcccctggagcct

SEQ ID NO: 1876099 - DNA, 15 bp, Homo sapiens
agcccctggagcctc

SEQ ID NO: 1876100 - DNA, 15 bp, Homo sapiens
gcccctggagcctct

SEQ ID NO: 1876101 - DNA, 15 bp, Homo sapiens
cccctggagcctctg

SEQ ID NO: 1876102 - DNA, 15 bp, Homo sapiens
ccctggagcctctgg

SEQ ID NO: 1876103 - DNA, 15 bp, Homo sapiens
cctggagcctctggc

SEQ ID NO: 1876104 - DNA, 15 bp, Homo sapiens
ctggagcctctggct

SEQ ID NO: 1876105 - DNA, 15 bp, Homo sapiens
tggagcctctggctc

SEQ ID NO: 1876106 - DNA, 15 bp, Homo sapiens
ggagcctctggctca

SEQ ID NO: 1876107 - DNA, 15 bp, Homo sapiens
gagcctctggctcaa

SEQ ID NO: 1876108 - DNA, 15 bp, Homo sapiens
agcctctggctcaag

SEQ ID NO: 1876109 - DNA, 15 bp, Homo sapiens
gcctctggctcaagc

SEQ ID NO: 1876110 - DNA, 15 bp, Homo sapiens
cctctggctcaagca

SEQ ID NO: 1876111 - DNA, 15 bp, Homo sapiens
ctctggctcaagcag

SEQ ID NO: 1876112 - DNA, 15 bp, Homo sapiens
tctggctcaagcagc

SEQ ID NO: 1876113 - DNA, 15 bp, Homo sapiens
ctggctcaagcagcg

SEQ ID NO: 1876114 - DNA, 15 bp, Homo sapiens
tggctcaagcagcgc

SEQ ID NO: 1876115 - DNA, 15 bp, Homo sapiens
ggctcaagcagcgca

SEQ ID NO: 1876116 - DNA, 15 bp, Homo sapiens
gctcaagcagcgcag

SEQ ID NO: 1876117 - DNA, 15 bp, Homo sapiens
ctcaagcagcgcagt

SEQ ID NO: 1876118 - DNA, 15 bp, Homo sapiens
tcaagcagcgcagtc

SEQ ID NO: 1876119 - DNA, 15 bp, Homo sapiens
caagcagcgcagtcg

SEQ ID NO: 1876120 - DNA, 15 bp, Homo sapiens
aagcagcgcagtcgg

SEQ ID NO: 1876121 - DNA, 15 bp, Homo sapiens
agcagcgcagtcggt

SEQ ID NO: 1876122 - DNA, 15 bp, Homo sapiens
gcagcgcagtcggtc

SEQ ID NO: 1876123 - DNA, 15 bp, Homo sapiens
cagcgcagtcggtct

SEQ ID NO: 1876124 - DNA, 15 bp, Homo sapiens
agcgcagtcggtctg

SEQ ID NO: 1876125 - DNA, 15 bp, Homo sapiens
gcgcagtcggtctgt

SEQ ID NO: 1876126 - DNA, 15 bp, Homo sapiens
cgcagtcggtctgtg

SEQ ID NO: 1876127 - DNA, 15 bp, Homo sapiens
gcagtcggtctgtgc

SEQ ID NO: 1876128 - DNA, 15 bp, Homo sapiens
cagtcggtctgtgca

SEQ ID NO: 1876129 - DNA, 15 bp, Homo sapiens
agtcggtctgtgcag

SEQ ID NO: 1876130 - DNA, 15 bp, Homo sapiens
gtcggtctgtgcagt

SEQ ID NO: 1876131 - DNA, 15 bp, Homo sapiens
tcggtctgtgcagtg

SEQ ID NO: 1876132 - DNA, 15 bp, Homo sapiens
cggtctgtgcagtgt

SEQ ID NO: 1876133 - DNA, 15 bp, Homo sapiens
ggtctgtgcagtgtc

SEQ ID NO: 1876134 - DNA, 15 bp, Homo sapiens
gtctgtgcagtgtcc

SEQ ID NO: 1876135 - DNA, 15 bp, Homo sapiens
tctgtgcagtgtccc

SEQ ID NO: 1876136 - DNA, 15 bp, Homo sapiens
ctgtgcagtgtccct

SEQ ID NO: 1876137 - DNA, 15 bp, Homo sapiens
tgtgcagtgtccctg

SEQ ID NO: 1876138 - DNA, 15 bp, Homo sapiens
gtgcagtgtccctga

SEQ ID NO: 1876139 - DNA, 15 bp, Homo sapiens
tgcagtgtccctgac

SEQ ID NO: 1876140 - DNA, 15 bp, Homo sapiens
gcagtgtccctgacg

SEQ ID NO: 1876141 - DNA, 15 bp, Homo sapiens
cagtgtccctgacgt

SEQ ID NO: 1876142 - DNA, 15 bp, Homo sapiens
agtgtccctgacgtc

SEQ ID NO: 1876143 - DNA, 15 bp, Homo sapiens
gtgtccctgacgtca

SEQ ID NO: 1876144 - DNA, 15 bp, Homo sapiens
tgtccctgacgtcat

SEQ ID NO: 1876145 - DNA, 15 bp, Homo sapiens
gtccctgacgtcatc

SEQ ID NO: 1876146 - DNA, 15 bp, Homo sapiens
tccctgacgtcatcc

SEQ ID NO: 1876147 - DNA, 15 bp, Homo sapiens
ccctgacgtcatcca

SEQ ID NO: 1876148 - DNA, 15 bp, Homo sapiens
cctgacgtcatccag

SEQ ID NO: 1876149 - DNA, 15 bp, Homo sapiens
ctgacgtcatccagc

SEQ ID NO: 1876150 - DNA, 15 bp, Homo sapiens
tgacgtcatccagcg

SEQ ID NO: 1876151 - DNA, 15 bp, Homo sapiens
gacgtcatccagcgt

SEQ ID NO: 1876152 - DNA, 15 bp, Homo sapiens
acgtcatccagcgta

SEQ ID NO: 1876153 - DNA, 15 bp, Homo sapiens
cgtcatccagcgtat

SEQ ID NO: 1876154 - DNA, 15 bp, Homo sapiens
gtcatccagcgtatg

SEQ ID NO: 1876155 - DNA, 15 bp, Homo sapiens
tcatccagcgtatgc

SEQ ID NO: 1876156 - DNA, 15 bp, Homo sapiens
catccagcgtatgca

SEQ ID NO: 1876157 - DNA, 15 bp, Homo sapiens
atccagcgtatgcat

SEQ ID NO: 1876158 - DNA, 15 bp, Homo sapiens
tccagcgtatgcata

SEQ ID NO: 1876159 - DNA, 15 bp, Homo sapiens
ccagcgtatgcataa

SEQ ID NO: 1876160 - DNA, 15 bp, Homo sapiens
cagcgtatgcataag

SEQ ID NO: 1876161 - DNA, 15 bp, Homo sapiens
agcgtatgcataagc

SEQ ID NO: 1876162 - DNA, 15 bp, Homo sapiens
gcgtatgcataagcc

SEQ ID NO: 1876163 - DNA, 15 bp, Homo sapiens
cgtatgcataagccc

SEQ ID NO: 1876164 - DNA, 15 bp, Homo sapiens
gtatgcataagccct

SEQ ID NO: 1876165 - DNA, 15 bp, Homo sapiens
tatgcataagccctg

SEQ ID NO: 1876166 - DNA, 15 bp, Homo sapiens
atgcataagccctgc

SEQ ID NO: 1876167 - DNA, 15 bp, Homo sapiens
tgcataagccctgct

SEQ ID NO: 1876168 - DNA, 15 bp, Homo sapiens
gcataagccctgcta

SEQ ID NO: 1876169 - DNA, 15 bp, Homo sapiens
cataagccctgctat

SEQ ID NO: 1876170 - DNA, 15 bp, Homo sapiens
ataagccctgctatt

SEQ ID NO: 1876171 - DNA, 15 bp, Homo sapiens
taagccctgctattg

SEQ ID NO: 1876172 - DNA, 15 bp, Homo sapiens
aagccctgctattgt

SEQ ID NO: 1876173 - DNA, 15 bp, Homo sapiens
agccctgctattgtc

SEQ ID NO: 1876174 - DNA, 15 bp, Homo sapiens
gccctgctattgtct

SEQ ID NO: 1876175 - DNA, 15 bp, Homo sapiens
ccctgctattgtctt

SEQ ID NO: 1876176 - DNA, 15 bp, Homo sapiens
cctgctattgtctta

SEQ ID NO: 1876177 - DNA, 15 bp, Homo sapiens
ctgctattgtcttac

SEQ ID NO: 1876178 - DNA, 15 bp, Homo sapiens
tgctattgtcttact

SEQ ID NO: 1876179 - DNA, 15 bp, Homo sapiens
gctattgtcttactg

SEQ ID NO: 1876180 - DNA, 15 bp, Homo sapiens
ctattgtcttactgc

SEQ ID NO: 1876181 - DNA, 15 bp, Homo sapiens
tattgtcttactgct

SEQ ID NO: 1876182 - DNA, 15 bp, Homo sapiens
attgtcttactgcta

SEQ ID NO: 1876183 - DNA, 15 bp, Homo sapiens
ttgtcttactgctac

SEQ ID NO: 1876184 - DNA, 15 bp, Homo sapiens
tgtcttactgctaca

SEQ ID NO: 1876185 - DNA, 15 bp, Homo sapiens
gtcttactgctacag

SEQ ID NO: 1876186 - DNA, 15 bp, Homo sapiens
tcttactgctacagc

SEQ ID NO: 1876187 - DNA, 15 bp, Homo sapiens
cttactgctacagca

SEQ ID NO: 1876188 - DNA, 15 bp, Homo sapiens
ttactgctacagcag

SEQ ID NO: 1876189 - DNA, 15 bp, Homo sapiens
tactgctacagcagg

SEQ ID NO: 1876190 - DNA, 15 bp, Homo sapiens
actgctacagcaggg

SEQ ID NO: 1876191 - DNA, 15 bp, Homo sapiens
ctgctacagcagggc

SEQ ID NO: 1876192 - DNA, 15 bp, Homo sapiens
tgctacagcagggct

SEQ ID NO: 1876193 - DNA, 15 bp, Homo sapiens
gctacagcagggctg

SEQ ID NO: 1876194 - DNA, 15 bp, Homo sapiens
ctacagcagggctgg

SEQ ID NO: 1876195 - DNA, 15 bp, Homo sapiens
tacagcagggctggg

SEQ ID NO: 1876196 - DNA, 15 bp, Homo sapiens
acagcagggctgggg

SEQ ID NO: 1876197 - DNA, 15 bp, Homo sapiens
cagcagggctgggga

SEQ ID NO: 1876198 - DNA, 15 bp, Homo sapiens
agcagggctggggat

SEQ ID NO: 1876199 - DNA, 15 bp, Homo sapiens
gcagggctggggatt

SEQ ID NO: 1876200 - DNA, 15 bp, Homo sapiens
cagggctggggattg

SEQ ID NO: 1876201 - DNA, 15 bp, Homo sapiens
agggctggggattgc

SEQ ID NO: 1876202 - DNA, 15 bp, Homo sapiens
gggctggggattgca

SEQ ID NO: 1876203 - DNA, 15 bp, Homo sapiens
ggctggggattgcag

SEQ ID NO: 1876204 - DNA, 15 bp, Homo sapiens
gctggggattgcagt

SEQ ID NO: 1876205 - DNA, 15 bp, Homo sapiens
ctggggattgcagta

SEQ ID NO: 1876206 - DNA, 15 bp, Homo sapiens
tggggattgcagtat

SEQ ID NO: 1876207 - DNA, 15 bp, Homo sapiens
ggggattgcagtatc

SEQ ID NO: 1876208 - DNA, 15 bp, Homo sapiens
gggattgcagtatcc

SEQ ID NO: 1876209 - DNA, 15 bp, Homo sapiens
ggattgcagtatccg

SEQ ID NO: 1876210 - DNA, 15 bp, Homo sapiens
gattgcagtatccgc

SEQ ID NO: 1876211 - DNA, 15 bp, Homo sapiens
attgcagtatccgct

SEQ ID NO: 1876212 - DNA, 15 bp, Homo sapiens
ttgcagtatccgctg

SEQ ID NO: 1876213 - DNA, 15 bp, Homo sapiens
tgcagtatccgctgt

SEQ ID NO: 1876214 - DNA, 15 bp, Homo sapiens
gcagtatccgctgtt

SEQ ID NO: 1876215 - DNA, 15 bp, Homo sapiens
cagtatccgctgttg

SEQ ID NO: 1876216 - DNA, 15 bp, Homo sapiens
agtatccgctgttgc

SEQ ID NO: 1876217 - DNA, 15 bp, Homo sapiens
gtatccgctgttgct

SEQ ID NO: 1876218 - DNA, 15 bp, Homo sapiens
tatccgctgttgctg

SEQ ID NO: 1876219 - DNA, 15 bp, Homo sapiens
atccgctgttgctgc

SEQ ID NO: 1876220 - DNA, 15 bp, Homo sapiens
tccgctgttgctgct

SEQ ID NO: 1876221 - DNA, 15 bp, Homo sapiens
ccgctgttgctgctg

SEQ ID NO: 1876222 - DNA, 15 bp, Homo sapiens
cgctgttgctgctgc

SEQ ID NO: 1876223 - DNA, 15 bp, Homo sapiens
gctgttgctgctgct

SEQ ID NO: 1876224 - DNA, 15 bp, Homo sapiens
ctgttgctgctgctc

SEQ ID NO: 1876225 - DNA, 15 bp, Homo sapiens
tgttgctgctgctcc

SEQ ID NO: 1876226 - DNA, 15 bp, Homo sapiens
gttgctgctgctccc

SEQ ID NO: 1876227 - DNA, 15 bp, Homo sapiens
ttgctgctgctccca

SEQ ID NO: 1876228 - DNA, 15 bp, Homo sapiens
tgctgctgctcccag

SEQ ID NO: 1876229 - DNA, 15 bp, Homo sapiens
gctgctgctcccagt

SEQ ID NO: 1876230 - DNA, 15 bp, Homo sapiens
ctgctgctcccagtc

SEQ ID NO: 1876231 - DNA, 15 bp, Homo sapiens
tgctgctcccagtcc

SEQ ID NO: 1876232 - DNA, 15 bp, Homo sapiens
gctgctcccagtcct

SEQ ID NO: 1876233 - DNA, 15 bp, Homo sapiens
ctgctcccagtcctg

SEQ ID NO: 1876234 - DNA, 15 bp, Homo sapiens
tgctcccagtcctgc

SEQ ID NO: 1876235 - DNA, 15 bp, Homo sapiens
gctcccagtcctgcc

SEQ ID NO: 1876236 - DNA, 15 bp, Homo sapiens
ctcccagtcctgccc

SEQ ID NO: 1876237 - DNA, 15 bp, Homo sapiens
tcccagtcctgcccc

SEQ ID NO: 1876238 - DNA, 15 bp, Homo sapiens
cccagtcctgcccct

SEQ ID NO: 1876239 - DNA, 15 bp, Homo sapiens
ccagtcctgcccctg

SEQ ID NO: 1876240 - DNA, 15 bp, Homo sapiens
cagtcctgcccctgc

SEQ ID NO: 1876241 - DNA, 15 bp, Homo sapiens
agtcctgcccctgct

SEQ ID NO: 1876242 - DNA, 15 bp, Homo sapiens
gtcctgcccctgctg

SEQ ID NO: 1876243 - DNA, 15 bp, Homo sapiens
tcctgcccctgctgc

SEQ ID NO: 1876244 - DNA, 15 bp, Homo sapiens
cctgcccctgctgct

SEQ ID NO: 1876245 - DNA, 15 bp, Homo sapiens
ctgcccctgctgcta

SEQ ID NO: 1876246 - DNA, 15 bp, Homo sapiens
tgcccctgctgctac

SEQ ID NO: 1876247 - DNA, 15 bp, Homo sapiens
gcccctgctgctacc

SEQ ID NO: 1876248 - DNA, 15 bp, Homo sapiens
cccctgctgctacct

SEQ ID NO: 1876249 - DNA, 15 bp, Homo sapiens
ccctgctgctaccta

SEQ ID NO: 1876250 - DNA, 15 bp, Homo sapiens
cctgctgctacctag

SEQ ID NO: 1876251 - DNA, 15 bp, Homo sapiens
ctgctgctacctagt

SEQ ID NO: 1876252 - DNA, 15 bp, Homo sapiens
tgctgctacctagtc

SEQ ID NO: 1876253 - DNA, 15 bp, Homo sapiens
gctgctacctagtcc

SEQ ID NO: 1876254 - DNA, 15 bp, Homo sapiens
ctgctacctagtcca

SEQ ID NO: 1876255 - DNA, 15 bp, Homo sapiens
tgctacctagtccag

SEQ ID NO: 1876256 - DNA, 15 bp, Homo sapiens
gctacctagtccagc

SEQ ID NO: 1876257 - DNA, 15 bp, Homo sapiens
ctacctagtccagcc

SEQ ID NO: 1876258 - DNA, 15 bp, Homo sapiens
tacctagtccagcct

SEQ ID NO: 1876259 - DNA, 15 bp, Homo sapiens
acctagtccagcctc

SEQ ID NO: 1876260 - DNA, 15 bp, Homo sapiens
cctagtccagcctca

SEQ ID NO: 1876261 - DNA, 15 bp, Homo sapiens
ctagtccagcctcac

SEQ ID NO: 1876262 - DNA, 15 bp, Homo sapiens
tagtccagcctcacc

SEQ ID NO: 1876263 - DNA, 15 bp, Homo sapiens
agtccagcctcaccg

SEQ ID NO: 1876264 - DNA, 15 bp, Homo sapiens
gtccagcctcaccgc

SEQ ID NO: 1876265 - DNA, 15 bp, Homo sapiens
tccagcctcaccgca

SEQ ID NO: 1876266 - DNA, 15 bp, Homo sapiens
ccagcctcaccgcat

SEQ ID NO: 1876267 - DNA, 15 bp, Homo sapiens
cagcctcaccgcatc

SEQ ID NO: 1876268 - DNA, 15 bp, Homo sapiens
agcctcaccgcatcc

SEQ ID NO: 1876269 - DNA, 15 bp, Homo sapiens
gcctcaccgcatccc

SEQ ID NO: 1876270 - DNA, 15 bp, Homo sapiens
cctcaccgcatccca

SEQ ID NO: 1876271 - DNA, 15 bp, Homo sapiens
ctcaccgcatcccag

SEQ ID NO: 1876272 - DNA, 15 bp, Homo sapiens
tcaccgcatcccaga

SEQ ID NO: 1876273 - DNA, 15 bp, Homo sapiens
caccgcatcccagaa

SEQ ID NO: 1876274 - DNA, 15 bp, Homo sapiens
accgcatcccagaag

SEQ ID NO: 1876275 - DNA, 15 bp, Homo sapiens
ccgcatcccagaaga

SEQ ID NO: 1876276 - DNA, 15 bp, Homo sapiens
cgcatcccagaagag

SEQ ID NO: 1876277 - DNA, 15 bp, Homo sapiens
gcatcccagaagagg

SEQ ID NO: 1876278 - DNA, 15 bp, Homo sapiens
catcccagaagaggc

SEQ ID NO: 1876279 - DNA, 15 bp, Homo sapiens
atcccagaagaggca

SEQ ID NO: 1876280 - DNA, 15 bp, Homo sapiens
tcccagaagaggcac

SEQ ID NO: 1876281 - DNA, 15 bp, Homo sapiens
cccagaagaggcacg

SEQ ID NO: 1876282 - DNA, 15 bp, Homo sapiens
ccagaagaggcacgt

SEQ ID NO: 1876283 - DNA, 15 bp, Homo sapiens
cagaagaggcacgtc

SEQ ID NO: 1876284 - DNA, 15 bp, Homo sapiens
agaagaggcacgtcg

SEQ ID NO: 1876285 - DNA, 15 bp, Homo sapiens
gaagaggcacgtcgg

SEQ ID NO: 1876286 - DNA, 15 bp, Homo sapiens
aagaggcacgtcggc

SEQ ID NO: 1876287 - DNA, 15 bp, Homo sapiens
agaggcacgtcggcc

SEQ ID NO: 1876288 - DNA, 15 bp, Homo sapiens
gaggcacgtcggcct

SEQ ID NO: 1876289 - DNA, 15 bp, Homo sapiens
aggcacgtcggcctt

SEQ ID NO: 1876290 - DNA, 15 bp, Homo sapiens
ggcacgtcggccttc

SEQ ID NO: 1876291 - DNA, 15 bp, Homo sapiens
gcacgtcggccttca

SEQ ID NO: 1876292 - DNA, 15 bp, Homo sapiens
cacgtcggccttcat

SEQ ID NO: 1876293 - DNA, 15 bp, Homo sapiens
acgtcggccttcatt

SEQ ID NO: 1876294 - DNA, 15 bp, Homo sapiens
cgtcggccttcattt

SEQ ID NO: 1876295 - DNA, 15 bp, Homo sapiens
gtcggccttcatttg

SEQ ID NO: 1876296 - DNA, 15 bp, Homo sapiens
tcggccttcatttgc

SEQ ID NO: 1876297 - DNA, 15 bp, Homo sapiens
cggccttcatttgcc

SEQ ID NO: 1876298 - DNA, 15 bp, Homo sapiens
ggccttcatttgcct

SEQ ID NO: 1876299 - DNA, 15 bp, Homo sapiens
gccttcatttgccta

SEQ ID NO: 1876300 - DNA, 15 bp, Homo sapiens
ccttcatttgcctag

SEQ ID NO: 1876301 - DNA, 15 bp, Homo sapiens
cttcatttgcctagt

SEQ ID NO: 1876302 - DNA, 15 bp, Homo sapiens
ttcatttgcctagtg

SEQ ID NO: 1876303 - DNA, 15 bp, Homo sapiens
tcatttgcctagtgg

SEQ ID NO: 1876304 - DNA, 15 bp, Homo sapiens
catttgcctagtgga

SEQ ID NO: 1876305 - DNA, 15 bp, Homo sapiens
atttgcctagtggat

SEQ ID NO: 1876306 - DNA, 15 bp, Homo sapiens
tttgcctagtggatt

SEQ ID NO: 1876307 - DNA, 15 bp, Homo sapiens
ttgcctagtggattt

SEQ ID NO: 1876308 - DNA, 15 bp, Homo sapiens
tgcctagtggatttt

SEQ ID NO: 1876309 - DNA, 15 bp, Homo sapiens
gcctagtggattttc

SEQ ID NO: 1876310 - DNA, 15 bp, Homo sapiens
cctagtggattttca

SEQ ID NO: 1876311 - DNA, 15 bp, Homo sapiens
ctagtggattttcaa

SEQ ID NO: 1876312 - DNA, 15 bp, Homo sapiens
tagtggattttcaaa

SEQ ID NO: 1876313 - DNA, 15 bp, Homo sapiens
agtggattttcaaaa

SEQ ID NO: 1876314 - DNA, 15 bp, Homo sapiens
gtggattttcaaaag

SEQ ID NO: 1876315 - DNA, 15 bp, Homo sapiens
tggattttcaaaagc

SEQ ID NO: 1876316 - DNA, 15 bp, Homo sapiens
ggattttcaaaagca

SEQ ID NO: 1876317 - DNA, 15 bp, Homo sapiens
gattttcaaaagcag

SEQ ID NO: 1876318 - DNA, 15 bp, Homo sapiens
attttcaaaagcagc

SEQ ID NO: 1876319 - DNA, 15 bp, Homo sapiens
ttttcaaaagcagct

SEQ ID NO: 1876320 - DNA, 15 bp, Homo sapiens
tttcaaaagcagctc

SEQ ID NO: 1876321 - DNA, 15 bp, Homo sapiens
ttcaaaagcagctct

SEQ ID NO: 1876322 - DNA, 15 bp, Homo sapiens
tcaaaagcagctctt

SEQ ID NO: 1876323 - DNA, 15 bp, Homo sapiens
caaaagcagctcttc

SEQ ID NO: 1876324 - DNA, 15 bp, Homo sapiens
aaaagcagctcttcg

SEQ ID NO: 1876325 - DNA, 15 bp, Homo sapiens
aaagcagctcttcgg

SEQ ID NO: 1876326 - DNA, 15 bp, Homo sapiens
aagcagctcttcggt

SEQ ID NO: 1876327 - DNA, 15 bp, Homo sapiens
agcagctcttcggtt

SEQ ID NO: 1876328 - DNA, 15 bp, Homo sapiens
gcagctcttcggttt

SEQ ID NO: 1876329 - DNA, 15 bp, Homo sapiens
cagctcttcggtttt

SEQ ID NO: 1876330 - DNA, 15 bp, Homo sapiens
agctcttcggttttt

SEQ ID NO: 1876331 - DNA, 15 bp, Homo sapiens
gctcttcggtttttg

SEQ ID NO: 1876332 - DNA, 15 bp, Homo sapiens
ctcttcggtttttgg

SEQ ID NO: 1876333 - DNA, 15 bp, Homo sapiens
tcttcggtttttggt

SEQ ID NO: 1876334 - DNA, 15 bp, Homo sapiens
cttcggtttttggtg

SEQ ID NO: 1876335 - DNA, 15 bp, Homo sapiens
ttcggtttttggtgc

SEQ ID NO: 1876336 - DNA, 15 bp, Homo sapiens
tcggtttttggtgct

SEQ ID NO: 1876337 - DNA, 15 bp, Homo sapiens
cggtttttggtgctg

SEQ ID NO: 1876338 - DNA, 15 bp, Homo sapiens
ggtttttggtgctgt

SEQ ID NO: 1876339 - DNA, 15 bp, Homo sapiens
gtttttggtgctgtt

SEQ ID NO: 1876340 - DNA, 15 bp, Homo sapiens
tttttggtgctgtta

SEQ ID NO: 1876341 - DNA, 15 bp, Homo sapiens
ttttggtgctgttaa

SEQ ID NO: 1876342 - DNA, 15 bp, Homo sapiens
tttggtgctgttaag

SEQ ID NO: 1876343 - DNA, 15 bp, Homo sapiens
ttggtgctgttaaga

SEQ ID NO: 1876344 - DNA, 15 bp, Homo sapiens
tggtgctgttaagag

SEQ ID NO: 1876345 - DNA, 15 bp, Homo sapiens
ggtgctgttaagaga

SEQ ID NO: 1876346 - DNA, 15 bp, Homo sapiens
gtgctgttaagagac

SEQ ID NO: 1876347 - DNA, 15 bp, Homo sapiens
tgctgttaagagacc

SEQ ID NO: 1876348 - DNA, 15 bp, Homo sapiens
gctgttaagagacct

SEQ ID NO: 1876349 - DNA, 15 bp, Homo sapiens
ctgttaagagacctt

SEQ ID NO: 1876350 - DNA, 15 bp, Homo sapiens
tgttaagagaccttg

SEQ ID NO: 1876351 - DNA, 15 bp, Homo sapiens
gttaagagaccttgc

SEQ ID NO: 1876352 - DNA, 15 bp, Homo sapiens
ttaagagaccttgca

SEQ ID NO: 1876353 - DNA, 15 bp, Homo sapiens
taagagaccttgcat

SEQ ID NO: 1876354 - DNA, 15 bp, Homo sapiens
aagagaccttgcatt

SEQ ID NO: 1876355 - DNA, 15 bp, Homo sapiens
agagaccttgcattt

SEQ ID NO: 1876356 - DNA, 15 bp, Homo sapiens
gagaccttgcatttc

SEQ ID NO: 1876357 - DNA, 15 bp, Homo sapiens
agaccttgcatttca

SEQ ID NO: 1876358 - DNA, 15 bp, Homo sapiens
gaccttgcatttcaa

SEQ ID NO: 1876359 - DNA, 15 bp, Homo sapiens
accttgcatttcaat

SEQ ID NO: 1876360 - DNA, 15 bp, Homo sapiens
ccttgcatttcaatc

SEQ ID NO: 1876361 - DNA, 15 bp, Homo sapiens
cttgcatttcaatca

SEQ ID NO: 1876362 - DNA, 15 bp, Homo sapiens
ttgcatttcaatcac

SEQ ID NO: 1876363 - DNA, 15 bp, Homo sapiens
tgcatttcaatcaca

SEQ ID NO: 1876364 - DNA, 15 bp, Homo sapiens
gcatttcaatcacac

SEQ ID NO: 1876365 - DNA, 15 bp, Homo sapiens
catttcaatcacacc

SEQ ID NO: 1876366 - DNA, 15 bp, Homo sapiens
atttcaatcacaccg

SEQ ID NO: 1876367 - DNA, 15 bp, Homo sapiens
tttcaatcacaccgg

SEQ ID NO: 1876368 - DNA, 15 bp, Homo sapiens
ttcaatcacaccggg

SEQ ID NO: 1876369 - DNA, 15 bp, Homo sapiens
tcaatcacaccggga

SEQ ID NO: 1876370 - DNA, 15 bp, Homo sapiens
caatcacaccgggag

SEQ ID NO: 1876371 - DNA, 15 bp, Homo sapiens
aatcacaccgggaga

SEQ ID NO: 1876372 - DNA, 15 bp, Homo sapiens
atcacaccgggagaa

SEQ ID NO: 1876373 - DNA, 15 bp, Homo sapiens
tcacaccgggagaaa

SEQ ID NO: 1876374 - DNA, 15 bp, Homo sapiens
cacaccgggagaaaa

SEQ ID NO: 1876375 - DNA, 15 bp, Homo sapiens
acaccgggagaaaac

SEQ ID NO: 1876376 - DNA, 15 bp, Homo sapiens
caccgggagaaaact

SEQ ID NO: 1876377 - DNA, 15 bp, Homo sapiens
accgggagaaaactg

SEQ ID NO: 1876378 - DNA, 15 bp, Homo sapiens
ccgggagaaaactga

SEQ ID NO: 1876379 - DNA, 15 bp, Homo sapiens
cgggagaaaactgaa

SEQ ID NO: 1876380 - DNA, 15 bp, Homo sapiens
gggagaaaactgaag

SEQ ID NO: 1876381 - DNA, 15 bp, Homo sapiens
ggagaaaactgaagc

SEQ ID NO: 1876382 - DNA, 15 bp, Homo sapiens
gagaaaactgaagct

SEQ ID NO: 1876383 - DNA, 15 bp, Homo sapiens
agaaaactgaagctc

SEQ ID NO: 1876384 - DNA, 15 bp, Homo sapiens
gaaaactgaagctcg

SEQ ID NO: 1876385 - DNA, 15 bp, Homo sapiens
aaaactgaagctcgt

SEQ ID NO: 1876386 - DNA, 15 bp, Homo sapiens
aaactgaagctcgta

SEQ ID NO: 1876387 - DNA, 15 bp, Homo sapiens
aactgaagctcgtaa

SEQ ID NO: 1876388 - DNA, 15 bp, Homo sapiens
actgaagctcgtaac

SEQ ID NO: 1876389 - DNA, 15 bp, Homo sapiens
ctgaagctcgtaaca

SEQ ID NO: 1876390 - DNA, 15 bp, Homo sapiens
tgaagctcgtaacag

SEQ ID NO: 1876391 - DNA, 15 bp, Homo sapiens
gaagctcgtaacagg

SEQ ID NO: 1876392 - DNA, 15 bp, Homo sapiens
aagctcgtaacagga

SEQ ID NO: 1876393 - DNA, 15 bp, Homo sapiens
agctcgtaacaggag

SEQ ID NO: 1876394 - DNA, 15 bp, Homo sapiens
gctcgtaacaggaga

SEQ ID NO: 1876395 - DNA, 15 bp, Homo sapiens
ctcgtaacaggagaa

SEQ ID NO: 1876396 - DNA, 15 bp, Homo sapiens
tcgtaacaggagaat

SEQ ID NO: 1876397 - DNA, 15 bp, Homo sapiens
cgtaacaggagaatc

SEQ ID NO: 1876398 - DNA, 15 bp, Homo sapiens
gtaacaggagaatct

SEQ ID NO: 1876399 - DNA, 15 bp, Homo sapiens
taacaggagaatctg

SEQ ID NO: 1876400 - DNA, 15 bp, Homo sapiens
aacaggagaatctgg

SEQ ID NO: 1876401 - DNA, 15 bp, Homo sapiens
acaggagaatctggc

SEQ ID NO: 1876402 - DNA, 15 bp, Homo sapiens
caggagaatctggca

SEQ ID NO: 1876403 - DNA, 15 bp, Homo sapiens
aggagaatctggcag

SEQ ID NO: 1876404 - DNA, 15 bp, Homo sapiens
ggagaatctggcagc

SEQ ID NO: 1876405 - DNA, 15 bp, Homo sapiens
gagaatctggcagct

SEQ ID NO: 1876406 - DNA, 15 bp, Homo sapiens
agaatctggcagctg

SEQ ID NO: 1876407 - DNA, 15 bp, Homo sapiens
gaatctggcagctgg

SEQ ID NO: 1876408 - DNA, 15 bp, Homo sapiens
aatctggcagctgga

SEQ ID NO: 1876409 - DNA, 15 bp, Homo sapiens
atctggcagctggac

SEQ ID NO: 1876410 - DNA, 15 bp, Homo sapiens
tctggcagctggaca

SEQ ID NO: 1876411 - DNA, 15 bp, Homo sapiens
ctggcagctggacac

SEQ ID NO: 1876412 - DNA, 15 bp, Homo sapiens
tggcagctggacaca

SEQ ID NO: 1876413 - DNA, 15 bp, Homo sapiens
ggcagctggacacag

SEQ ID NO: 1876414 - DNA, 15 bp, Homo sapiens
gcagctggacacagc

SEQ ID NO: 1876415 - DNA, 15 bp, Homo sapiens
cagctggacacagct

SEQ ID NO: 1876416 - DNA, 15 bp, Homo sapiens
agctggacacagctt

SEQ ID NO: 1876417 - DNA, 15 bp, Homo sapiens
gctggacacagcttg

SEQ ID NO: 1876418 - DNA, 15 bp, Homo sapiens
ctggacacagcttgg

SEQ ID NO: 1876419 - DNA, 15 bp, Homo sapiens
tggacacagcttgga

SEQ ID NO: 1876420 - DNA, 15 bp, Homo sapiens
ggacacagcttggac

SEQ ID NO: 1876421 - DNA, 15 bp, Homo sapiens
gacacagcttggact

SEQ ID NO: 1876422 - DNA, 15 bp, Homo sapiens
acacagcttggactg

SEQ ID NO: 1876423 - DNA, 15 bp, Homo sapiens
cacagcttggactgc

SEQ ID NO: 1876424 - DNA, 15 bp, Homo sapiens
acagcttggactgca

SEQ ID NO: 1876425 - DNA, 15 bp, Homo sapiens
cagcttggactgcat

SEQ ID NO: 1876426 - DNA, 15 bp, Homo sapiens
agcttggactgcatt

SEQ ID NO: 1876427 - DNA, 15 bp, Homo sapiens
gcttggactgcattg

SEQ ID NO: 1876428 - DNA, 15 bp, Homo sapiens
cttggactgcattgt

SEQ ID NO: 1876429 - DNA, 15 bp, Homo sapiens
ttggactgcattgtc

SEQ ID NO: 1876430 - DNA, 15 bp, Homo sapiens
tggactgcattgtct

SEQ ID NO: 1876431 - DNA, 15 bp, Homo sapiens
ggactgcattgtctg

SEQ ID NO: 1876432 - DNA, 15 bp, Homo sapiens
gactgcattgtctgg

SEQ ID NO: 1876433 - DNA, 15 bp, Homo sapiens
actgcattgtctggc

SEQ ID NO: 1876434 - DNA, 15 bp, Homo sapiens
ctgcattgtctggct

SEQ ID NO: 1876435 - DNA, 15 bp, Homo sapiens
tgcattgtctggctt

SEQ ID NO: 1876436 - DNA, 15 bp, Homo sapiens
gcattgtctggcttc

SEQ ID NO: 1876437 - DNA, 15 bp, Homo sapiens
cattgtctggcttca

SEQ ID NO: 1876438 - DNA, 15 bp, Homo sapiens
attgtctggcttcat

SEQ ID NO: 1876439 - DNA, 15 bp, Homo sapiens
ttgtctggcttcatg

SEQ ID NO: 1876440 - DNA, 15 bp, Homo sapiens
tgtctggcttcatga

SEQ ID NO: 1876441 - DNA, 15 bp, Homo sapiens
gtctggcttcatgac

SEQ ID NO: 1876442 - DNA, 15 bp, Homo sapiens
tctggcttcatgacc

SEQ ID NO: 1876443 - DNA, 15 bp, Homo sapiens
ctggcttcatgaccc

SEQ ID NO: 1876444 - DNA, 15 bp, Homo sapiens
tggcttcatgacccc

SEQ ID NO: 1876445 - DNA, 15 bp, Homo sapiens
ggcttcatgacccct

SEQ ID NO: 1876446 - DNA, 15 bp, Homo sapiens
gcttcatgacccctg

SEQ ID NO: 1876447 - DNA, 15 bp, Homo sapiens
cttcatgacccctgc

SEQ ID NO: 1876448 - DNA, 15 bp, Homo sapiens
ttcatgacccctgct

SEQ ID NO: 1876449 - DNA, 15 bp, Homo sapiens
tcatgacccctgctg

SEQ ID NO: 1876450 - DNA, 15 bp, Homo sapiens
catgacccctgctgt

SEQ ID NO: 1876451 - DNA, 15 bp, Homo sapiens
atgacccctgctgtg

SEQ ID NO: 1876452 - DNA, 15 bp, Homo sapiens
tgacccctgctgtgt

SEQ ID NO: 1876453 - DNA, 15 bp, Homo sapiens
gacccctgctgtgta

SEQ ID NO: 1876454 - DNA, 15 bp, Homo sapiens
acccctgctgtgtag

SEQ ID NO: 1876455 - DNA, 15 bp, Homo sapiens
cccctgctgtgtagc

SEQ ID NO: 1876456 - DNA, 15 bp, Homo sapiens
ccctgctgtgtagcc

SEQ ID NO: 1876457 - DNA, 15 bp, Homo sapiens
cctgctgtgtagccg

SEQ ID NO: 1876458 - DNA, 15 bp, Homo sapiens
ctgctgtgtagccgg

SEQ ID NO: 1876459 - DNA, 15 bp, Homo sapiens
tgctgtgtagccggc

SEQ ID NO: 1876460 - DNA, 15 bp, Homo sapiens
gctgtgtagccggct

SEQ ID NO: 1876461 - DNA, 15 bp, Homo sapiens
ctgtgtagccggctc

SEQ ID NO: 1876462 - DNA, 15 bp, Homo sapiens
tgtgtagccggctca

SEQ ID NO: 1876463 - DNA, 15 bp, Homo sapiens
gtgtagccggctcat

SEQ ID NO: 1876464 - DNA, 15 bp, Homo sapiens
tgtagccggctcatc

SEQ ID NO: 1876465 - DNA, 15 bp, Homo sapiens
gtagccggctcatct

SEQ ID NO: 1876466 - DNA, 15 bp, Homo sapiens
tagccggctcatctc

SEQ ID NO: 1876467 - DNA, 15 bp, Homo sapiens
agccggctcatctct

SEQ ID NO: 1876468 - DNA, 15 bp, Homo sapiens
gccggctcatctctt

SEQ ID NO: 1876469 - DNA, 15 bp, Homo sapiens
ccggctcatctcttc

SEQ ID NO: 1876470 - DNA, 15 bp, Homo sapiens
cggctcatctcttca

SEQ ID NO: 1876471 - DNA, 15 bp, Homo sapiens
ggctcatctcttcac

SEQ ID NO: 1876472 - DNA, 15 bp, Homo sapiens
gctcatctcttcact

SEQ ID NO: 1876473 - DNA, 15 bp, Homo sapiens
ctcatctcttcactc

SEQ ID NO: 1876474 - DNA, 15 bp, Homo sapiens
tcatctcttcactct

SEQ ID NO: 1876475 - DNA, 15 bp, Homo sapiens
catctcttcactctc

SEQ ID NO: 1876476 - DNA, 15 bp, Homo sapiens
atctcttcactctca

SEQ ID NO: 1876477 - DNA, 15 bp, Homo sapiens
tctcttcactctcac

SEQ ID NO: 1876478 - DNA, 15 bp, Homo sapiens
ctcttcactctcaca

SEQ ID NO: 1876479 - DNA, 15 bp, Homo sapiens
tcttcactctcacat

SEQ ID NO: 1876480 - DNA, 15 bp, Homo sapiens
cttcactctcacatg

SEQ ID NO: 1876481 - DNA, 15 bp, Homo sapiens
ttcactctcacatgt

SEQ ID NO: 1876482 - DNA, 15 bp, Homo sapiens
tcactctcacatgta

SEQ ID NO: 1876483 - DNA, 15 bp, Homo sapiens
cactctcacatgtac

SEQ ID NO: 1876484 - DNA, 15 bp, Homo sapiens
actctcacatgtaca

SEQ ID NO: 1876485 - DNA, 15 bp, Homo sapiens
ctctcacatgtacac

SEQ ID NO: 1876486 - DNA, 15 bp, Homo sapiens
tctcacatgtacact

SEQ ID NO: 1876487 - DNA, 15 bp, Homo sapiens
ctcacatgtacactc

SEQ ID NO: 1876488 - DNA, 15 bp, Homo sapiens
tcacatgtacactct

SEQ ID NO: 1876489 - DNA, 15 bp, Homo sapiens
cacatgtacactctc

SEQ ID NO: 1876490 - DNA, 15 bp, Homo sapiens
acatgtacactctcc

SEQ ID NO: 1876491 - DNA, 15 bp, Homo sapiens
catgtacactctcct

SEQ ID NO: 1876492 - DNA, 15 bp, Homo sapiens
atgtacactctcctc

SEQ ID NO: 1876493 - DNA, 15 bp, Homo sapiens
tgtacactctcctcg

SEQ ID NO: 1876494 - DNA, 15 bp, Homo sapiens
gtacactctcctcgc

SEQ ID NO: 1876495 - DNA, 15 bp, Homo sapiens
tacactctcctcgct

SEQ ID NO: 1876496 - DNA, 15 bp, Homo sapiens
acactctcctcgctt

SEQ ID NO: 1876497 - DNA, 15 bp, Homo sapiens
cactctcctcgcttt

SEQ ID NO: 1876498 - DNA, 15 bp, Homo sapiens
actctcctcgctttt

SEQ ID NO: 1876499 - DNA, 15 bp, Homo sapiens
ctctcctcgcttttc

SEQ ID NO: 1876500 - DNA, 15 bp, Homo sapiens
tctcctcgcttttct

SEQ ID NO: 1876501 - DNA, 15 bp, Homo sapiens
ctcctcgcttttctt

SEQ ID NO: 1876502 - DNA, 15 bp, Homo sapiens
tcctcgcttttcttt

SEQ ID NO: 1876503 - DNA, 15 bp, Homo sapiens
cctcgcttttctttc

SEQ ID NO: 1876504 - DNA, 15 bp, Homo sapiens
ctcgcttttctttct

SEQ ID NO: 1876505 - DNA, 15 bp, Homo sapiens
tcgcttttctttctt

SEQ ID NO: 1876506 - DNA, 15 bp, Homo sapiens
cgcttttctttcttt

SEQ ID NO: 1876507 - DNA, 15 bp, Homo sapiens
gcttttctttctttt

SEQ ID NO: 1876508 - DNA, 15 bp, Homo sapiens
cttttctttcttttt

SEQ ID NO: 1876509 - DNA, 15 bp, Homo sapiens
ttcttttttttttcc

SEQ ID NO: 1876510 - DNA, 15 bp, Homo sapiens
tcttttttttttccc

SEQ ID NO: 1876511 - DNA, 15 bp, Homo sapiens
cttttttttttccct

SEQ ID NO: 1876512 - DNA, 15 bp, Homo sapiens
ttttttttttccctt

SEQ ID NO: 1876513 - DNA, 15 bp, Homo sapiens
tttttttttcccttt

SEQ ID NO: 1876514 - DNA, 15 bp, Homo sapiens
ttttttttccctttt

SEQ ID NO: 1876515 - DNA, 15 bp, Homo sapiens
tttttttcccttttc

SEQ ID NO: 1876516 - DNA, 15 bp, Homo sapiens
ttttttcccttttct

SEQ ID NO: 1876517 - DNA, 15 bp, Homo sapiens
tttttcccttttctt

SEQ ID NO: 1876518 - DNA, 15 bp, Homo sapiens
ttttcccttttcttt

SEQ ID NO: 1876519 - DNA, 15 bp, Homo sapiens
tttcccttttctttc

SEQ ID NO: 1876520 - DNA, 15 bp, Homo sapiens
ttcccttttctttct

SEQ ID NO: 1876521 - DNA, 15 bp, Homo sapiens
tcccttttctttctt

SEQ ID NO: 1876522 - DNA, 15 bp, Homo sapiens
cccttttctttcttc

SEQ ID NO: 1876523 - DNA, 15 bp, Homo sapiens
ccttttctttcttct

SEQ ID NO: 1876524 - DNA, 15 bp, Homo sapiens
cttttctttcttcta

SEQ ID NO: 1876525 - DNA, 15 bp, Homo sapiens
ttttctttcttctaa

SEQ ID NO: 1876526 - DNA, 15 bp, Homo sapiens
tttctttcttctaat

SEQ ID NO: 1876527 - DNA, 15 bp, Homo sapiens
ttctttcttctaatt

SEQ ID NO: 1876528 - DNA, 15 bp, Homo sapiens
tctttcttctaattt

SEQ ID NO: 1876529 - DNA, 15 bp, Homo sapiens
ctttcttctaatttt

SEQ ID NO: 1876530 - DNA, 15 bp, Homo sapiens
tttcttctaattttt

SEQ ID NO: 1876531 - DNA, 15 bp, Homo sapiens
ttcttctaattttta

SEQ ID NO: 1876532 - DNA, 15 bp, Homo sapiens
tcttctaatttttaa

SEQ ID NO: 1876533 - DNA, 15 bp, Homo sapiens
cttctaatttttaaa

SEQ ID NO: 1876534 - DNA, 15 bp, Homo sapiens
ttctaatttttaaaa

SEQ ID NO: 1876535 - DNA, 15 bp, Homo sapiens
tctaatttttaaaaa

SEQ ID NO: 1876536 - DNA, 15 bp, Homo sapiens
ctaatttttaaaaag

SEQ ID NO: 1876537 - DNA, 15 bp, Homo sapiens
taatttttaaaaagc

SEQ ID NO: 1876538 - DNA, 15 bp, Homo sapiens
aatttttaaaaagca

SEQ ID NO: 1876539 - DNA, 15 bp, Homo sapiens
atttttaaaaagcag

SEQ ID NO: 1876540 - DNA, 15 bp, Homo sapiens
tttttaaaaagcagc

SEQ ID NO: 1876541 - DNA, 15 bp, Homo sapiens
ttttaaaaagcagcc

SEQ ID NO: 1876542 - DNA, 15 bp, Homo sapiens
tttaaaaagcagcct

SEQ ID NO: 1876543 - DNA, 15 bp, Homo sapiens
ttaaaaagcagcctc

SEQ ID NO: 1876544 - DNA, 15 bp, Homo sapiens
taaaaagcagcctct

SEQ ID NO: 1876545 - DNA, 15 bp, Homo sapiens
aaaaagcagcctctg

SEQ ID NO: 1876546 - DNA, 15 bp, Homo sapiens
aaaagcagcctctgg

SEQ ID NO: 1876547 - DNA, 15 bp, Homo sapiens
aaagcagcctctgga

SEQ ID NO: 1876548 - DNA, 15 bp, Homo sapiens
aagcagcctctggag

SEQ ID NO: 1876549 - DNA, 15 bp, Homo sapiens
agcagcctctggagc

SEQ ID NO: 1876550 - DNA, 15 bp, Homo sapiens
gcagcctctggagcc

SEQ ID NO: 1876551 - DNA, 15 bp, Homo sapiens
cagcctctggagcca

SEQ ID NO: 1876552 - DNA, 15 bp, Homo sapiens
agcctctggagccag

SEQ ID NO: 1876553 - DNA, 15 bp, Homo sapiens
gcctctggagccagc

SEQ ID NO: 1876554 - DNA, 15 bp, Homo sapiens
cctctggagccagcc

SEQ ID NO: 1876555 - DNA, 15 bp, Homo sapiens
ctctggagccagcca

SEQ ID NO: 1876556 - DNA, 15 bp, Homo sapiens
tctggagccagccat

SEQ ID NO: 1876557 - DNA, 15 bp, Homo sapiens
ctggagccagccatg

SEQ ID NO: 1876558 - DNA, 15 bp, Homo sapiens
tggagccagccatgt

SEQ ID NO: 1876559 - DNA, 15 bp, Homo sapiens
ggagccagccatgtt

SEQ ID NO: 1876560 - DNA, 15 bp, Homo sapiens
gagccagccatgttt

SEQ ID NO: 1876561 - DNA, 15 bp, Homo sapiens
agccagccatgtttg

SEQ ID NO: 1876562 - DNA, 15 bp, Homo sapiens
gccagccatgtttgg

SEQ ID NO: 1876563 - DNA, 15 bp, Homo sapiens
ccagccatgtttggc

SEQ ID NO: 1876564 - DNA, 15 bp, Homo sapiens
cagccatgtttggca

SEQ ID NO: 1876565 - DNA, 15 bp, Homo sapiens
agccatgtttggcac

SEQ ID NO: 1876566 - DNA, 15 bp, Homo sapiens
gccatgtttggcact

SEQ ID NO: 1876567 - DNA, 15 bp, Homo sapiens
ccatgtttggcactg

SEQ ID NO: 1876568 - DNA, 15 bp, Homo sapiens
catgtttggcactga

SEQ ID NO: 1876569 - DNA, 15 bp, Homo sapiens
atgtttggcactgaa

SEQ ID NO: 1876570 - DNA, 15 bp, Homo sapiens
tgtttggcactgaat

SEQ ID NO: 1876571 - DNA, 15 bp, Homo sapiens
gtttggcactgaatc

SEQ ID NO: 1876572 - DNA, 15 bp, Homo sapiens
tttggcactgaatct

SEQ ID NO: 1876573 - DNA, 15 bp, Homo sapiens
ttggcactgaatctt

SEQ ID NO: 1876574 - DNA, 15 bp, Homo sapiens
tggcactgaatcttc

SEQ ID NO: 1876575 - DNA, 15 bp, Homo sapiens
ggcactgaatcttca

SEQ ID NO: 1876576 - DNA, 15 bp, Homo sapiens
gcactgaatcttcat

SEQ ID NO: 1876577 - DNA, 15 bp, Homo sapiens
cactgaatcttcatg

SEQ ID NO: 1876578 - DNA, 15 bp, Homo sapiens
actgaatcttcatgt

SEQ ID NO: 1876579 - DNA, 15 bp, Homo sapiens
ctgaatcttcatgta

SEQ ID NO: 1876580 - DNA, 15 bp, Homo sapiens
tgaatcttcatgtaa

SEQ ID NO: 1876581 - DNA, 15 bp, Homo sapiens
gaatcttcatgtaag

SEQ ID NO: 1876582 - DNA, 15 bp, Homo sapiens
aatcttcatgtaagt

SEQ ID NO: 1876583 - DNA, 15 bp, Homo sapiens
atcttcatgtaagta

SEQ ID NO: 1876584 - DNA, 15 bp, Homo sapiens
tcttcatgtaagtaa

SEQ ID NO: 1876585 - DNA, 15 bp, Homo sapiens
cttcatgtaagtaaa

SEQ ID NO: 1876586 - DNA, 15 bp, Homo sapiens
ttcatgtaagtaaat

SEQ ID NO: 1876587 - DNA, 15 bp, Homo sapiens
tcatgtaagtaaatg

SEQ ID NO: 1876588 - DNA, 15 bp, Homo sapiens
catgtaagtaaatgg

SEQ ID NO: 1876589 - DNA, 15 bp, Homo sapiens
atgtaagtaaatgga

SEQ ID NO: 1876590 - DNA, 15 bp, Homo sapiens
tgtaagtaaatggat

SEQ ID NO: 1876591 - DNA, 15 bp, Homo sapiens
gtaagtaaatggatc

SEQ ID NO: 1876592 - DNA, 15 bp, Homo sapiens
taagtaaatggatcc

SEQ ID NO: 1876593 - DNA, 15 bp, Homo sapiens
aagtaaatggatccc

SEQ ID NO: 1876594 - DNA, 15 bp, Homo sapiens
agtaaatggatccca

SEQ ID NO: 1876595 - DNA, 15 bp, Homo sapiens
gtaaatggatcccac

SEQ ID NO: 1876596 - DNA, 15 bp, Homo sapiens
taaatggatcccact

SEQ ID NO: 1876597 - DNA, 15 bp, Homo sapiens
aaatggatcccactt

SEQ ID NO: 1876598 - DNA, 15 bp, Homo sapiens
aatggatcccacttc

SEQ ID NO: 1876599 - DNA, 15 bp, Homo sapiens
atggatcccacttct

SEQ ID NO: 1876600 - DNA, 15 bp, Homo sapiens
tggatcccacttctc

SEQ ID NO: 1876601 - DNA, 15 bp, Homo sapiens
ggatcccacttctct

SEQ ID NO: 1876602 - DNA, 15 bp, Homo sapiens
gatcccacttctctg

SEQ ID NO: 1876603 - DNA, 15 bp, Homo sapiens
atcccacttctctgc

SEQ ID NO: 1876604 - DNA, 15 bp, Homo sapiens
tcccacttctctgct

SEQ ID NO: 1876605 - DNA, 15 bp, Homo sapiens
cccacttctctgcta

SEQ ID NO: 1876606 - DNA, 15 bp, Homo sapiens
ccacttctctgctat

SEQ ID NO: 1876607 - DNA, 15 bp, Homo sapiens
cacttctctgctatt

SEQ ID NO: 1876608 - DNA, 15 bp, Homo sapiens
acttctctgctattt

SEQ ID NO: 1876609 - DNA, 15 bp, Homo sapiens
cttctctgctattta

SEQ ID NO: 1876610 - DNA, 15 bp, Homo sapiens
ttctctgctatttag

SEQ ID NO: 1876611 - DNA, 15 bp, Homo sapiens
tctctgctatttaga

SEQ ID NO: 1876612 - DNA, 15 bp, Homo sapiens
ctctgctatttagaa

SEQ ID NO: 1876613 - DNA, 15 bp, Homo sapiens
tctgctatttagaaa

SEQ ID NO: 1876614 - DNA, 15 bp, Homo sapiens
ctgctatttagaaat

SEQ ID NO: 1876615 - DNA, 15 bp, Homo sapiens
tgctatttagaaatc

SEQ ID NO: 1876616 - DNA, 15 bp, Homo sapiens
gctatttagaaatct

SEQ ID NO: 1876617 - DNA, 15 bp, Homo sapiens
ctatttagaaatctg

SEQ ID NO: 1876618 - DNA, 15 bp, Homo sapiens
tatttagaaatctgc

SEQ ID NO: 1876619 - DNA, 15 bp, Homo sapiens
atttagaaatctgct

SEQ ID NO: 1876620 - DNA, 15 bp, Homo sapiens
tttagaaatctgctt

SEQ ID NO: 1876621 - DNA, 15 bp, Homo sapiens
ttagaaatctgcttg

SEQ ID NO: 1876622 - DNA, 15 bp, Homo sapiens
tagaaatctgcttgc

SEQ ID NO: 1876623 - DNA, 15 bp, Homo sapiens
agaaatctgcttgct

SEQ ID NO: 1876624 - DNA, 15 bp, Homo sapiens
gaaatctgcttgctg

SEQ ID NO: 1876625 - DNA, 15 bp, Homo sapiens
aaatctgcttgctgt

SEQ ID NO: 1876626 - DNA, 15 bp, Homo sapiens
aatctgcttgctgtc

SEQ ID NO: 1876627 - DNA, 15 bp, Homo sapiens
atctgcttgctgtca

SEQ ID NO: 1876628 - DNA, 15 bp, Homo sapiens
tctgcttgctgtcat

SEQ ID NO: 1876629 - DNA, 15 bp, Homo sapiens
ctgcttgctgtcatg

SEQ ID NO: 1876630 - DNA, 15 bp, Homo sapiens
tgcttgctgtcatgg

SEQ ID NO: 1876631 - DNA, 15 bp, Homo sapiens
gcttgctgtcatggt

SEQ ID NO: 1876632 - DNA, 15 bp, Homo sapiens
cttgctgtcatggtt

SEQ ID NO: 1876633 - DNA, 15 bp, Homo sapiens
ttgctgtcatggttt

SEQ ID NO: 1876634 - DNA, 15 bp, Homo sapiens
tgctgtcatggtttc

SEQ ID NO: 1876635 - DNA, 15 bp, Homo sapiens
gctgtcatggtttca

SEQ ID NO: 1876636 - DNA, 15 bp, Homo sapiens
ctgtcatggtttcat

SEQ ID NO: 1876637 - DNA, 15 bp, Homo sapiens
tgtcatggtttcatt

SEQ ID NO: 1876638 - DNA, 15 bp, Homo sapiens
gtcatggtttcattg

SEQ ID NO: 1876639 - DNA, 15 bp, Homo sapiens
tcatggtttcattgg

SEQ ID NO: 1876640 - DNA, 15 bp, Homo sapiens
catggtttcattggc

SEQ ID NO: 1876641 - DNA, 15 bp, Homo sapiens
atggtttcattggct

SEQ ID NO: 1876642 - DNA, 15 bp, Homo sapiens
tggtttcattggctt

SEQ ID NO: 1876643 - DNA, 15 bp, Homo sapiens
ggtttcattggctta

SEQ ID NO: 1876644 - DNA, 15 bp, Homo sapiens
gtttcattggcttag

SEQ ID NO: 1876645 - DNA, 15 bp, Homo sapiens
tttcattggcttaga

SEQ ID NO: 1876646 - DNA, 15 bp, Homo sapiens
ttcattggcttagag

SEQ ID NO: 1876647 - DNA, 15 bp, Homo sapiens
tcattggcttagagt

SEQ ID NO: 1876648 - DNA, 15 bp, Homo sapiens
cattggcttagagtt

SEQ ID NO: 1876649 - DNA, 15 bp, Homo sapiens
attggcttagagttc

SEQ ID NO: 1876650 - DNA, 15 bp, Homo sapiens
ttggcttagagttca

SEQ ID NO: 1876651 - DNA, 15 bp, Homo sapiens
tggcttagagttcat

SEQ ID NO: 1876652 - DNA, 15 bp, Homo sapiens
ggcttagagttcata

SEQ ID NO: 1876653 - DNA, 15 bp, Homo sapiens
gcttagagttcatat

SEQ ID NO: 1876654 - DNA, 15 bp, Homo sapiens
cttagagttcatatc

SEQ ID NO: 1876655 - DNA, 15 bp, Homo sapiens
ttagagttcatatca

SEQ ID NO: 1876656 - DNA, 15 bp, Homo sapiens
tagagttcatatcac

SEQ ID NO: 1876657 - DNA, 15 bp, Homo sapiens
agagttcatatcact

SEQ ID NO: 1876658 - DNA, 15 bp, Homo sapiens
gagttcatatcactt

SEQ ID NO: 1876659 - DNA, 15 bp, Homo sapiens
agttcatatcacttt

SEQ ID NO: 1876660 - DNA, 15 bp, Homo sapiens
gttcatatcactttg

SEQ ID NO: 1876661 - DNA, 15 bp, Homo sapiens
ttcatatcactttgc

SEQ ID NO: 1876662 - DNA, 15 bp, Homo sapiens
tcatatcactttgcc

SEQ ID NO: 1876663 - DNA, 15 bp, Homo sapiens
catatcactttgcct

SEQ ID NO: 1876664 - DNA, 15 bp, Homo sapiens
atatcactttgcctt

SEQ ID NO: 1876665 - DNA, 15 bp, Homo sapiens
tatcactttgcctta

SEQ ID NO: 1876666 - DNA, 15 bp, Homo sapiens
atcactttgccttag

SEQ ID NO: 1876667 - DNA, 15 bp, Homo sapiens
tcactttgccttagg

SEQ ID NO: 1876668 - DNA, 15 bp, Homo sapiens
cactttgccttaggt

SEQ ID NO: 1876669 - DNA, 15 bp, Homo sapiens
actttgccttaggtc

SEQ ID NO: 1876670 - DNA, 15 bp, Homo sapiens
ctttgccttaggtca

SEQ ID NO: 1876671 - DNA, 15 bp, Homo sapiens
tttgccttaggtcat

SEQ ID NO: 1876672 - DNA, 15 bp, Homo sapiens
ttgccttaggtcatt

SEQ ID NO: 1876673 - DNA, 15 bp, Homo sapiens
tgccttaggtcatta

SEQ ID NO: 1876674 - DNA, 15 bp, Homo sapiens
gccttaggtcattaa

SEQ ID NO: 1876675 - DNA, 15 bp, Homo sapiens
ccttaggtcattaac

SEQ ID NO: 1876676 - DNA, 15 bp, Homo sapiens
cttaggtcattaaca

SEQ ID NO: 1876677 - DNA, 15 bp, Homo sapiens
ttaggtcattaacaa

SEQ ID NO: 1876678 - DNA, 15 bp, Homo sapiens
taggtcattaacaac

SEQ ID NO: 1876679 - DNA, 15 bp, Homo sapiens
aggtcattaacaacc

SEQ ID NO: 1876680 - DNA, 15 bp, Homo sapiens
ggtcattaacaacct

SEQ ID NO: 1876681 - DNA, 15 bp, Homo sapiens
gtcattaacaacctt

SEQ ID NO: 1876682 - DNA, 15 bp, Homo sapiens
tcattaacaaccttt

SEQ ID NO: 1876683 - DNA, 15 bp, Homo sapiens
cattaacaacctttg

SEQ ID NO: 1876684 - DNA, 15 bp, Homo sapiens
attaacaacctttgt

SEQ ID NO: 1876685 - DNA, 15 bp, Homo sapiens
ttaacaacctttgta

SEQ ID NO: 1876686 - DNA, 15 bp, Homo sapiens
taacaacctttgtat

SEQ ID NO: 1876687 - DNA, 15 bp, Homo sapiens
aacaacctttgtatt

SEQ ID NO: 1876688 - DNA, 15 bp, Homo sapiens
acaacctttgtattt

SEQ ID NO: 1876689 - DNA, 15 bp, Homo sapiens
caacctttgtatttt

SEQ ID NO: 1876690 - DNA, 15 bp, Homo sapiens
aacctttgtattttg

SEQ ID NO: 1876691 - DNA, 15 bp, Homo sapiens
acctttgtattttgg

SEQ ID NO: 1876692 - DNA, 15 bp, Homo sapiens
cctttgtattttggc

SEQ ID NO: 1876693 - DNA, 15 bp, Homo sapiens
ctttgtattttggct

SEQ ID NO: 1876694 - DNA, 15 bp, Homo sapiens
tttgtattttggctc

SEQ ID NO: 1876695 - DNA, 15 bp, Homo sapiens
ttgtattttggctct

SEQ ID NO: 1876696 - DNA, 15 bp, Homo sapiens
tgtattttggctcta

SEQ ID NO: 1876697 - DNA, 15 bp, Homo sapiens
gtattttggctctaa

SEQ ID NO: 1876698 - DNA, 15 bp, Homo sapiens
tattttggctctaat

SEQ ID NO: 1876699 - DNA, 15 bp, Homo sapiens
attttggctctaatt

SEQ ID NO: 1876700 - DNA, 15 bp, Homo sapiens
ttttggctctaatta

SEQ ID NO: 1876701 - DNA, 15 bp, Homo sapiens
tttggctctaattac

SEQ ID NO: 1876702 - DNA, 15 bp, Homo sapiens
ttggctctaattaca

SEQ ID NO: 1876703 - DNA, 15 bp, Homo sapiens
tggctctaattacaa

SEQ ID NO: 1876704 - DNA, 15 bp, Homo sapiens
ggctctaattacaaa

SEQ ID NO: 1876705 - DNA, 15 bp, Homo sapiens
gctctaattacaaag

SEQ ID NO: 1876706 - DNA, 15 bp, Homo sapiens
ctctaattacaaagg

SEQ ID NO: 1876707 - DNA, 15 bp, Homo sapiens
tctaattacaaagga

SEQ ID NO: 1876708 - DNA, 15 bp, Homo sapiens
ctaattacaaaggaa

SEQ ID NO: 1876709 - DNA, 15 bp, Homo sapiens
taattacaaaggaat

SEQ ID NO: 1876710 - DNA, 15 bp, Homo sapiens
aattacaaaggaatt

SEQ ID NO: 1876711 - DNA, 15 bp, Homo sapiens
attacaaaggaattg

SEQ ID NO: 1876712 - DNA, 15 bp, Homo sapiens
ttacaaaggaattgg

SEQ ID NO: 1876713 - DNA, 15 bp, Homo sapiens
tacaaaggaattggt

SEQ ID NO: 1876714 - DNA, 15 bp, Homo sapiens
acaaaggaattggtc

SEQ ID NO: 1876715 - DNA, 15 bp, Homo sapiens
caaaggaattggtct

SEQ ID NO: 1876716 - DNA, 15 bp, Homo sapiens
aaaggaattggtctc

SEQ ID NO: 1876717 - DNA, 15 bp, Homo sapiens
aaggaattggtctca

SEQ ID NO: 1876718 - DNA, 15 bp, Homo sapiens
aggaattggtctcag

SEQ ID NO: 1876719 - DNA, 15 bp, Homo sapiens
ggaattggtctcagg

SEQ ID NO: 1876720 - DNA, 15 bp, Homo sapiens
gaattggtctcaggg

SEQ ID NO: 1876721 - DNA, 15 bp, Homo sapiens
aattggtctcaggga

SEQ ID NO: 1876722 - DNA, 15 bp, Homo sapiens
attggtctcagggaa

SEQ ID NO: 1876723 - DNA, 15 bp, Homo sapiens
ttggtctcagggaag

SEQ ID NO: 1876724 - DNA, 15 bp, Homo sapiens
tggtctcagggaagg

SEQ ID NO: 1876725 - DNA, 15 bp, Homo sapiens
ggtctcagggaagga

SEQ ID NO: 1876726 - DNA, 15 bp, Homo sapiens
gtctcagggaaggaa

SEQ ID NO: 1876727 - DNA, 15 bp, Homo sapiens
tctcagggaaggaac

SEQ ID NO: 1876728 - DNA, 15 bp, Homo sapiens
ctcagggaaggaact

SEQ ID NO: 1876729 - DNA, 15 bp, Homo sapiens
tcagggaaggaactc

SEQ ID NO: 1876730 - DNA, 15 bp, Homo sapiens
cagggaaggaactcc

SEQ ID NO: 1876731 - DNA, 15 bp, Homo sapiens
agggaaggaactccc

SEQ ID NO: 1876732 - DNA, 15 bp, Homo sapiens
gggaaggaactcccc

SEQ ID NO: 1876733 - DNA, 15 bp, Homo sapiens
ggaaggaactcccct

SEQ ID NO: 1876734 - DNA, 15 bp, Homo sapiens
gaaggaactcccctt

SEQ ID NO: 1876735 - DNA, 15 bp, Homo sapiens
aaggaactcccctta

SEQ ID NO: 1876736 - DNA, 15 bp, Homo sapiens
aggaactccccttaa

SEQ ID NO: 1876737 - DNA, 15 bp, Homo sapiens
ggaactccccttaac

SEQ ID NO: 1876738 - DNA, 15 bp, Homo sapiens
gaactccccttaact

SEQ ID NO: 1876739 - DNA, 15 bp, Homo sapiens
aactccccttaactg

SEQ ID NO: 1876740 - DNA, 15 bp, Homo sapiens
actccccttaactgg

SEQ ID NO: 1876741 - DNA, 15 bp, Homo sapiens
ctccccttaactggg

SEQ ID NO: 1876742 - DNA, 15 bp, Homo sapiens
tccccttaactgggt

SEQ ID NO: 1876743 - DNA, 15 bp, Homo sapiens
ccccttaactgggtt

SEQ ID NO: 1876744 - DNA, 15 bp, Homo sapiens
cccttaactgggtta

SEQ ID NO: 1876745 - DNA, 15 bp, Homo sapiens
ccttaactgggttat

SEQ ID NO: 1876746 - DNA, 15 bp, Homo sapiens
cttaactgggttatt

SEQ ID NO: 1876747 - DNA, 15 bp, Homo sapiens
ttaactgggttattc

SEQ ID NO: 1876748 - DNA, 15 bp, Homo sapiens
taactgggttattca

SEQ ID NO: 1876749 - DNA, 15 bp, Homo sapiens
aactgggttattcat

SEQ ID NO: 1876750 - DNA, 15 bp, Homo sapiens
actgggttattcatc

SEQ ID NO: 1876751 - DNA, 15 bp, Homo sapiens
ctgggttattcatcc

SEQ ID NO: 1876752 - DNA, 15 bp, Homo sapiens
tgggttattcatcct

SEQ ID NO: 1876753 - DNA, 15 bp, Homo sapiens
gggttattcatcctt

SEQ ID NO: 1876754 - DNA, 15 bp, Homo sapiens
ggttattcatcctta

SEQ ID NO: 1876755 - DNA, 15 bp, Homo sapiens
gttattcatccttaa

SEQ ID NO: 1876756 - DNA, 15 bp, Homo sapiens
ttattcatccttaag

SEQ ID NO: 1876757 - DNA, 15 bp, Homo sapiens
tattcatccttaagg

SEQ ID NO: 1876758 - DNA, 15 bp, Homo sapiens
attcatccttaaggc

SEQ ID NO: 1876759 - DNA, 15 bp, Homo sapiens
ttcatccttaaggcc

SEQ ID NO: 1876760 - DNA, 15 bp, Homo sapiens
tcatccttaaggcca

SEQ ID NO: 1876761 - DNA, 15 bp, Homo sapiens
catccttaaggccag

SEQ ID NO: 1876762 - DNA, 15 bp, Homo sapiens
atccttaaggccagg

SEQ ID NO: 1876763 - DNA, 15 bp, Homo sapiens
tccttaaggccaggg

SEQ ID NO: 1876764 - DNA, 15 bp, Homo sapiens
ccttaaggccaggga

SEQ ID NO: 1876765 - DNA, 15 bp, Homo sapiens
cttaaggccagggat

SEQ ID NO: 1876766 - DNA, 15 bp, Homo sapiens
ttaaggccagggatg

SEQ ID NO: 1876767 - DNA, 15 bp, Homo sapiens
taaggccagggatgt

SEQ ID NO: 1876768 - DNA, 15 bp, Homo sapiens
aaggccagggatgtc

SEQ ID NO: 1876769 - DNA, 15 bp, Homo sapiens
aggccagggatgtca

SEQ ID NO: 1876770 - DNA, 15 bp, Homo sapiens
ggccagggatgtcaa

SEQ ID NO: 1876771 - DNA, 15 bp, Homo sapiens
gccagggatgtcaat

SEQ ID NO: 1876772 - DNA, 15 bp, Homo sapiens
ccagggatgtcaatg

SEQ ID NO: 1876773 - DNA, 15 bp, Homo sapiens
cagggatgtcaatgt

SEQ ID NO: 1876774 - DNA, 15 bp, Homo sapiens
agggatgtcaatgtg

SEQ ID NO: 1876775 - DNA, 15 bp, Homo sapiens
gggatgtcaatgtgt

SEQ ID NO: 1876776 - DNA, 15 bp, Homo sapiens
ggatgtcaatgtgtc

SEQ ID NO: 1876777 - DNA, 15 bp, Homo sapiens
gatgtcaatgtgtca

SEQ ID NO: 1876778 - DNA, 15 bp, Homo sapiens
atgtcaatgtgtcaa

SEQ ID NO: 1876779 - DNA, 15 bp, Homo sapiens
tgtcaatgtgtcaaa

SEQ ID NO: 1876780 - DNA, 15 bp, Homo sapiens
gtcaatgtgtcaaaa

SEQ ID NO: 1876781 - DNA, 15 bp, Homo sapiens
tcaatgtgtcaaaac

SEQ ID NO: 1876782 - DNA, 15 bp, Homo sapiens
caatgtgtcaaaacc

SEQ ID NO: 1876783 - DNA, 15 bp, Homo sapiens
aatgtgtcaaaacca

SEQ ID NO: 1876784 - DNA, 15 bp, Homo sapiens
atgtgtcaaaaccag

SEQ ID NO: 1876785 - DNA, 15 bp, Homo sapiens
tgtgtcaaaaccagg

SEQ ID NO: 1876786 - DNA, 15 bp, Homo sapiens
gtgtcaaaaccaggc

SEQ ID NO: 1876787 - DNA, 15 bp, Homo sapiens
tgtcaaaaccaggcc

SEQ ID NO: 1876788 - DNA, 15 bp, Homo sapiens
gtcaaaaccaggcct

SEQ ID NO: 1876789 - DNA, 15 bp, Homo sapiens
tcaaaaccaggcctg

SEQ ID NO: 1876790 - DNA, 15 bp, Homo sapiens
caaaaccaggcctgt

SEQ ID NO: 1876791 - DNA, 15 bp, Homo sapiens
aaaaccaggcctgta

SEQ ID NO: 1876792 - DNA, 15 bp, Homo sapiens
aaaccaggcctgtaa

SEQ ID NO: 1876793 - DNA, 15 bp, Homo sapiens
aaccaggcctgtaag

SEQ ID NO: 1876794 - DNA, 15 bp, Homo sapiens
accaggcctgtaaga

SEQ ID NO: 1876795 - DNA, 15 bp, Homo sapiens
ccaggcctgtaagag

SEQ ID NO: 1876796 - DNA, 15 bp, Homo sapiens
caggcctgtaagagg

SEQ ID NO: 1876797 - DNA, 15 bp, Homo sapiens
aggcctgtaagaggg

SEQ ID NO: 1876798 - DNA, 15 bp, Homo sapiens
ggcctgtaagaggga

SEQ ID NO: 1876799 - DNA, 15 bp, Homo sapiens
gcctgtaagagggag

SEQ ID NO: 1876800 - DNA, 15 bp, Homo sapiens
cctgtaagagggagg

SEQ ID NO: 1876801 - DNA, 15 bp, Homo sapiens
ctgtaagagggaggt

SEQ ID NO: 1876802 - DNA, 15 bp, Homo sapiens
tgtaagagggaggta

SEQ ID NO: 1876803 - DNA, 15 bp, Homo sapiens
gtaagagggaggtag

SEQ ID NO: 1876804 - DNA, 15 bp, Homo sapiens
taagagggaggtagg

SEQ ID NO: 1876805 - DNA, 15 bp, Homo sapiens
aagagggaggtagga

SEQ ID NO: 1876806 - DNA, 15 bp, Homo sapiens
agagggaggtaggaa

SEQ ID NO: 1876807 - DNA, 15 bp, Homo sapiens
gagggaggtaggaaa

SEQ ID NO: 1876808 - DNA, 15 bp, Homo sapiens
agggaggtaggaaaa

SEQ ID NO: 1876809 - DNA, 15 bp, Homo sapiens
gggaggtaggaaaac

SEQ ID NO: 1876810 - DNA, 15 bp, Homo sapiens
ggaggtaggaaaacc

SEQ ID NO: 1876811 - DNA, 15 bp, Homo sapiens
gaggtaggaaaacca

SEQ ID NO: 1876812 - DNA, 15 bp, Homo sapiens
aggtaggaaaaccag

SEQ ID NO: 1876813 - DNA, 15 bp, Homo sapiens
ggtaggaaaaccaga

SEQ ID NO: 1876814 - DNA, 15 bp, Homo sapiens
gtaggaaaaccagaa

SEQ ID NO: 1876815 - DNA, 15 bp, Homo sapiens
taggaaaaccagaat

SEQ ID NO: 1876816 - DNA, 15 bp, Homo sapiens
aggaaaaccagaatc

SEQ ID NO: 1876817 - DNA, 15 bp, Homo sapiens
ggaaaaccagaatcc

SEQ ID NO: 1876818 - DNA, 15 bp, Homo sapiens
gaaaaccagaatcca

SEQ ID NO: 1876819 - DNA, 15 bp, Homo sapiens
aaaaccagaatccat

SEQ ID NO: 1876820 - DNA, 15 bp, Homo sapiens
aaaccagaatccata

SEQ ID NO: 1876821 - DNA, 15 bp, Homo sapiens
aaccagaatccatac

SEQ ID NO: 1876822 - DNA, 15 bp, Homo sapiens
accagaatccataca

SEQ ID NO: 1876823 - DNA, 15 bp, Homo sapiens
ccagaatccatacag

SEQ ID NO: 1876824 - DNA, 15 bp, Homo sapiens
cagaatccatacagc

SEQ ID NO: 1876825 - DNA, 15 bp, Homo sapiens
agaatccatacagcc

SEQ ID NO: 1876826 - DNA, 15 bp, Homo sapiens
gaatccatacagcca

SEQ ID NO: 1876827 - DNA, 15 bp, Homo sapiens
aatccatacagccac

SEQ ID NO: 1876828 - DNA, 15 bp, Homo sapiens
atccatacagccacc

SEQ ID NO: 1876829 - DNA, 15 bp, Homo sapiens
tccatacagccaccc

SEQ ID NO: 1876830 - DNA, 15 bp, Homo sapiens
ccatacagccaccct

SEQ ID NO: 1876831 - DNA, 15 bp, Homo sapiens
catacagccacccta

SEQ ID NO: 1876832 - DNA, 15 bp, Homo sapiens
atacagccaccctag

SEQ ID NO: 1876833 - DNA, 15 bp, Homo sapiens
tacagccaccctaga

SEQ ID NO: 1876834 - DNA, 15 bp, Homo sapiens
acagccaccctagaa

SEQ ID NO: 1876835 - DNA, 15 bp, Homo sapiens
cagccaccctagaat

SEQ ID NO: 1876836 - DNA, 15 bp, Homo sapiens
agccaccctagaatg

SEQ ID NO: 1876837 - DNA, 15 bp, Homo sapiens
gccaccctagaatgt

SEQ ID NO: 1876838 - DNA, 15 bp, Homo sapiens
ccaccctagaatgtg

SEQ ID NO: 1876839 - DNA, 15 bp, Homo sapiens
caccctagaatgtgt

SEQ ID NO: 1876840 - DNA, 15 bp, Homo sapiens
accctagaatgtgtt

SEQ ID NO: 1876841 - DNA, 15 bp, Homo sapiens
ccctagaatgtgtta

SEQ ID NO: 1876842 - DNA, 15 bp, Homo sapiens
cctagaatgtgttaa

SEQ ID NO: 1876843 - DNA, 15 bp, Homo sapiens
ctagaatgtgttaat

SEQ ID NO: 1876844 - DNA, 15 bp, Homo sapiens
tagaatgtgttaatt

SEQ ID NO: 1876845 - DNA, 15 bp, Homo sapiens
agaatgtgttaattg

SEQ ID NO: 1876846 - DNA, 15 bp, Homo sapiens
gaatgtgttaattga

SEQ ID NO: 1876847 - DNA, 15 bp, Homo sapiens
aatgtgttaattgat

SEQ ID NO: 1876848 - DNA, 15 bp, Homo sapiens
atgtgttaattgatg

SEQ ID NO: 1876849 - DNA, 15 bp, Homo sapiens
tgtgttaattgatgg

SEQ ID NO: 1876850 - DNA, 15 bp, Homo sapiens
gtgttaattgatggg

SEQ ID NO: 1876851 - DNA, 15 bp, Homo sapiens
tgttaattgatggga

SEQ ID NO: 1876852 - DNA, 15 bp, Homo sapiens
gttaattgatgggat

SEQ ID NO: 1876853 - DNA, 15 bp, Homo sapiens
ttaattgatgggatc

SEQ ID NO: 1876854 - DNA, 15 bp, Homo sapiens
taattgatgggatca

SEQ ID NO: 1876855 - DNA, 15 bp, Homo sapiens
aattgatgggatcag

SEQ ID NO: 1876856 - DNA, 15 bp, Homo sapiens
attgatgggatcagg

SEQ ID NO: 1876857 - DNA, 15 bp, Homo sapiens
ttgatgggatcaggc

SEQ ID NO: 1876858 - DNA, 15 bp, Homo sapiens
tgatgggatcaggcc

SEQ ID NO: 1876859 - DNA, 15 bp, Homo sapiens
gatgggatcaggcct

SEQ ID NO: 1876860 - DNA, 15 bp, Homo sapiens
atgggatcaggcctg

SEQ ID NO: 1876861 - DNA, 15 bp, Homo sapiens
tgggatcaggcctgt

SEQ ID NO: 1876862 - DNA, 15 bp, Homo sapiens
gggatcaggcctgtc

SEQ ID NO: 1876863 - DNA, 15 bp, Homo sapiens
ggatcaggcctgtca

SEQ ID NO: 1876864 - DNA, 15 bp, Homo sapiens
gatcaggcctgtcac

SEQ ID NO: 1876865 - DNA, 15 bp, Homo sapiens
atcaggcctgtcact

SEQ ID NO: 1876866 - DNA, 15 bp, Homo sapiens
tcaggcctgtcactg

SEQ ID NO: 1876867 - DNA, 15 bp, Homo sapiens
caggcctgtcactga

SEQ ID NO: 1876868 - DNA, 15 bp, Homo sapiens
aggcctgtcactgat

SEQ ID NO: 1876869 - DNA, 15 bp, Homo sapiens
ggcctgtcactgatc

SEQ ID NO: 1876870 - DNA, 15 bp, Homo sapiens
gcctgtcactgatct

SEQ ID NO: 1876871 - DNA, 15 bp, Homo sapiens
cctgtcactgatcta

SEQ ID NO: 1876872 - DNA, 15 bp, Homo sapiens
ctgtcactgatctat

SEQ ID NO: 1876873 - DNA, 15 bp, Homo sapiens
tgtcactgatctatt

SEQ ID NO: 1876874 - DNA, 15 bp, Homo sapiens
gtcactgatctattg

SEQ ID NO: 1876875 - DNA, 15 bp, Homo sapiens
tcactgatctattgt

SEQ ID NO: 1876876 - DNA, 15 bp, Homo sapiens
cactgatctattgtt

SEQ ID NO: 1876877 - DNA, 15 bp, Homo sapiens
actgatctattgttg

SEQ ID NO: 1876878 - DNA, 15 bp, Homo sapiens
ctgatctattgttgt

SEQ ID NO: 1876879 - DNA, 15 bp, Homo sapiens
tgatctattgttgta

SEQ ID NO: 1876880 - DNA, 15 bp, Homo sapiens
gatctattgttgtag

SEQ ID NO: 1876881 - DNA, 15 bp, Homo sapiens
atctattgttgtagg

SEQ ID NO: 1876882 - DNA, 15 bp, Homo sapiens
tctattgttgtaggc

SEQ ID NO: 1876883 - DNA, 15 bp, Homo sapiens
ctattgttgtaggct

SEQ ID NO: 1876884 - DNA, 15 bp, Homo sapiens
tattgttgtaggctc

SEQ ID NO: 1876885 - DNA, 15 bp, Homo sapiens
attgttgtaggctcc

SEQ ID NO: 1876886 - DNA, 15 bp, Homo sapiens
ttgttgtaggctccg

SEQ ID NO: 1876887 - DNA, 15 bp, Homo sapiens
tgttgtaggctccgt

SEQ ID NO: 1876888 - DNA, 15 bp, Homo sapiens
gttgtaggctccgta

SEQ ID NO: 1876889 - DNA, 15 bp, Homo sapiens
ttgtaggctccgtaa

SEQ ID NO: 1876890 - DNA, 15 bp, Homo sapiens
tgtaggctccgtaat

SEQ ID NO: 1876891 - DNA, 15 bp, Homo sapiens
gtaggctccgtaatg

SEQ ID NO: 1876892 - DNA, 15 bp, Homo sapiens
taggctccgtaatgg

SEQ ID NO: 1876893 - DNA, 15 bp, Homo sapiens
aggctccgtaatggt

SEQ ID NO: 1876894 - DNA, 15 bp, Homo sapiens
ggctccgtaatggtg

SEQ ID NO: 1876895 - DNA, 15 bp, Homo sapiens
gctccgtaatggtgc

SEQ ID NO: 1876896 - DNA, 15 bp, Homo sapiens
ctccgtaatggtgct

SEQ ID NO: 1876897 - DNA, 15 bp, Homo sapiens
tccgtaatggtgctt

SEQ ID NO: 1876898 - DNA, 15 bp, Homo sapiens
ccgtaatggtgctta

SEQ ID NO: 1876899 - DNA, 15 bp, Homo sapiens
cgtaatggtgcttaa

SEQ ID NO: 1876900 - DNA, 15 bp, Homo sapiens
gtaatggtgcttaaa

SEQ ID NO: 1876901 - DNA, 15 bp, Homo sapiens
taatggtgcttaaac

SEQ ID NO: 1876902 - DNA, 15 bp, Homo sapiens
aatggtgcttaaacc

SEQ ID NO: 1876903 - DNA, 15 bp, Homo sapiens
atggtgcttaaacct

SEQ ID NO: 1876904 - DNA, 15 bp, Homo sapiens
tggtgcttaaacctt

SEQ ID NO: 1876905 - DNA, 15 bp, Homo sapiens
ggtgcttaaacctta

SEQ ID NO: 1876906 - DNA, 15 bp, Homo sapiens
gtgcttaaaccttaa

SEQ ID NO: 1876907 - DNA, 15 bp, Homo sapiens
tgcttaaaccttaaa

SEQ ID NO: 1876908 - DNA, 15 bp, Homo sapiens
gcttaaaccttaaaa

SEQ ID NO: 1876909 - DNA, 15 bp, Homo sapiens
cttaaaccttaaaat

SEQ ID NO: 1876910 - DNA, 15 bp, Homo sapiens
ttaaaccttaaaata

SEQ ID NO: 1876911 - DNA, 15 bp, Homo sapiens
taaaccttaaaatag

SEQ ID NO: 1876912 - DNA, 15 bp, Homo sapiens
aaaccttaaaataga

SEQ ID NO: 1876913 - DNA, 15 bp, Homo sapiens
aaccttaaaatagat

SEQ ID NO: 1876914 - DNA, 15 bp, Homo sapiens
accttaaaatagata

SEQ ID NO: 1876915 - DNA, 15 bp, Homo sapiens
ccttaaaatagatac

SEQ ID NO: 1876916 - DNA, 15 bp, Homo sapiens
cttaaaatagatact

SEQ ID NO: 1876917 - DNA, 15 bp, Homo sapiens
ttaaaatagatactg

SEQ ID NO: 1876918 - DNA, 15 bp, Homo sapiens
taaaatagatactgg

SEQ ID NO: 1876919 - DNA, 15 bp, Homo sapiens
aaaatagatactggg

SEQ ID NO: 1876920 - DNA, 15 bp, Homo sapiens
aaatagatactggga

SEQ ID NO: 1876921 - DNA, 15 bp, Homo sapiens
aatagatactgggag

SEQ ID NO: 1876922 - DNA, 15 bp, Homo sapiens
atagatactgggagg

SEQ ID NO: 1876923 - DNA, 15 bp, Homo sapiens
tagatactgggagga

SEQ ID NO: 1876924 - DNA, 15 bp, Homo sapiens
agatactgggaggat

SEQ ID NO: 1876925 - DNA, 15 bp, Homo sapiens
gatactgggaggatc

SEQ ID NO: 1876926 - DNA, 15 bp, Homo sapiens
atactgggaggatct

SEQ ID NO: 1876927 - DNA, 15 bp, Homo sapiens
tactgggaggatctg

SEQ ID NO: 1876928 - DNA, 15 bp, Homo sapiens
actgggaggatctga

SEQ ID NO: 1876929 - DNA, 15 bp, Homo sapiens
ctgggaggatctgag

SEQ ID NO: 1876930 - DNA, 15 bp, Homo sapiens
tgggaggatctgaga

SEQ ID NO: 1876931 - DNA, 15 bp, Homo sapiens
gggaggatctgagat

SEQ ID NO: 1876932 - DNA, 15 bp, Homo sapiens
ggaggatctgagatg

SEQ ID NO: 1876933 - DNA, 15 bp, Homo sapiens
gaggatctgagatga

SEQ ID NO: 1876934 - DNA, 15 bp, Homo sapiens
aggatctgagatgat

SEQ ID NO: 1876935 - DNA, 15 bp, Homo sapiens
ggatctgagatgata

SEQ ID NO: 1876936 - DNA, 15 bp, Homo sapiens
gatctgagatgatag

SEQ ID NO: 1876937 - DNA, 15 bp, Homo sapiens
atctgagatgatagt

SEQ ID NO: 1876938 - DNA, 15 bp, Homo sapiens
tctgagatgatagtg

SEQ ID NO: 1876939 - DNA, 15 bp, Homo sapiens
ctgagatgatagtgt

SEQ ID NO: 1876940 - DNA, 15 bp, Homo sapiens
tgagatgatagtgtt

SEQ ID NO: 1876941 - DNA, 15 bp, Homo sapiens
gagatgatagtgttt

SEQ ID NO: 1876942 - DNA, 15 bp, Homo sapiens
agatgatagtgttta

SEQ ID NO: 1876943 - DNA, 15 bp, Homo sapiens
gatgatagtgtttat

SEQ ID NO: 1876944 - DNA, 15 bp, Homo sapiens
atgatagtgtttatt

SEQ ID NO: 1876945 - DNA, 15 bp, Homo sapiens
tgatagtgtttatta

SEQ ID NO: 1876946 - DNA, 15 bp, Homo sapiens
gatagtgtttattag

SEQ ID NO: 1876947 - DNA, 15 bp, Homo sapiens
atagtgtttattaga

SEQ ID NO: 1876948 - DNA, 15 bp, Homo sapiens
tagtgtttattagaa

SEQ ID NO: 1876949 - DNA, 15 bp, Homo sapiens
agtgtttattagaaa

SEQ ID NO: 1876950 - DNA, 15 bp, Homo sapiens
gtgtttattagaaag

SEQ ID NO: 1876951 - DNA, 15 bp, Homo sapiens
tgtttattagaaagg

SEQ ID NO: 1876952 - DNA, 15 bp, Homo sapiens
gtttattagaaagga

SEQ ID NO: 1876953 - DNA, 15 bp, Homo sapiens
tttattagaaaggaa

SEQ ID NO: 1876954 - DNA, 15 bp, Homo sapiens
ttattagaaaggaaa

SEQ ID NO: 1876955 - DNA, 15 bp, Homo sapiens
tattagaaaggaaag

SEQ ID NO: 1876956 - DNA, 15 bp, Homo sapiens
attagaaaggaaaga

SEQ ID NO: 1876957 - DNA, 15 bp, Homo sapiens
ttagaaaggaaagaa

SEQ ID NO: 1876958 - DNA, 15 bp, Homo sapiens
tagaaaggaaagaaa

SEQ ID NO: 1876959 - DNA, 15 bp, Homo sapiens
aaaggaaagaaaggc

SEQ ID NO: 1876960 - DNA, 15 bp, Homo sapiens
aaggaaagaaaggct

SEQ ID NO: 1876961 - DNA, 15 bp, Homo sapiens
aggaaagaaaggctt

SEQ ID NO: 1876962 - DNA, 15 bp, Homo sapiens
ggaaagaaaggctta

SEQ ID NO: 1876963 - DNA, 15 bp, Homo sapiens
gaaagaaaggcttac

SEQ ID NO: 1876964 - DNA, 15 bp, Homo sapiens
aaagaaaggcttaca

SEQ ID NO: 1876965 - DNA, 15 bp, Homo sapiens
aagaaaggcttacat

SEQ ID NO: 1876966 - DNA, 15 bp, Homo sapiens
agaaaggcttacatt

SEQ ID NO: 1876967 - DNA, 15 bp, Homo sapiens
gaaaggcttacattt

SEQ ID NO: 1876968 - DNA, 15 bp, Homo sapiens
aaaggcttacatttt

SEQ ID NO: 1876969 - DNA, 15 bp, Homo sapiens
aaggcttacattttt

SEQ ID NO: 1876970 - DNA, 15 bp, Homo sapiens
aggcttacatttttt

SEQ ID NO: 1876971 - DNA, 15 bp, Homo sapiens
ggcttacattttttc

SEQ ID NO: 1876972 - DNA, 15 bp, Homo sapiens
gcttacattttttca

SEQ ID NO: 1876973 - DNA, 15 bp, Homo sapiens
cttacattttttcat

SEQ ID NO: 1876974 - DNA, 15 bp, Homo sapiens
ttacattttttcatc

SEQ ID NO: 1876975 - DNA, 15 bp, Homo sapiens
tacattttttcatct

SEQ ID NO: 1876976 - DNA, 15 bp, Homo sapiens
acattttttcatcta

SEQ ID NO: 1876977 - DNA, 15 bp, Homo sapiens
cattttttcatctaa

SEQ ID NO: 1876978 - DNA, 15 bp, Homo sapiens
attttttcatctaaa

SEQ ID NO: 1876979 - DNA, 15 bp, Homo sapiens
ttttttcatctaaag

SEQ ID NO: 1876980 - DNA, 15 bp, Homo sapiens
tttttcatctaaaga

SEQ ID NO: 1876981 - DNA, 15 bp, Homo sapiens
ttttcatctaaagag

SEQ ID NO: 1876982 - DNA, 15 bp, Homo sapiens
tttcatctaaagaga

SEQ ID NO: 1876983 - DNA, 15 bp, Homo sapiens
ttcatctaaagagat

SEQ ID NO: 1876984 - DNA, 15 bp, Homo sapiens
tcatctaaagagata

SEQ ID NO: 1876985 - DNA, 15 bp, Homo sapiens
catctaaagagataa

SEQ ID NO: 1876986 - DNA, 15 bp, Homo sapiens
atctaaagagataaa

SEQ ID NO: 1876987 - DNA, 15 bp, Homo sapiens
tctaaagagataaat

SEQ ID NO: 1876988 - DNA, 15 bp, Homo sapiens
ctaaagagataaata

SEQ ID NO: 1876989 - DNA, 15 bp, Homo sapiens
taaagagataaatag

SEQ ID NO: 1876990 - DNA, 15 bp, Homo sapiens
aaagagataaatagt

SEQ ID NO: 1876991 - DNA, 15 bp, Homo sapiens
aagagataaatagtt

SEQ ID NO: 1876992 - DNA, 15 bp, Homo sapiens
agagataaatagtta

SEQ ID NO: 1876993 - DNA, 15 bp, Homo sapiens
gagataaatagttat

SEQ ID NO: 1876994 - DNA, 15 bp, Homo sapiens
agataaatagttatc

SEQ ID NO: 1876995 - DNA, 15 bp, Homo sapiens
gataaatagttatca

SEQ ID NO: 1876996 - DNA, 15 bp, Homo sapiens
ataaatagttatcat

SEQ ID NO: 1876997 - DNA, 15 bp, Homo sapiens
taaatagttatcatt

SEQ ID NO: 1876998 - DNA, 15 bp, Homo sapiens
aaatagttatcatta

SEQ ID NO: 1876999 - DNA, 15 bp, Homo sapiens
aatagttatcattat

SEQ ID NO: 1877000 - DNA, 15 bp, Homo sapiens
atagttatcattata

SEQ ID NO: 1877001 - DNA, 15 bp, Homo sapiens
tagttatcattatat

SEQ ID NO: 1877002 - DNA, 15 bp, Homo sapiens
agttatcattatata

SEQ ID NO: 1877003 - DNA, 15 bp, Homo sapiens
gttatcattatatac

SEQ ID NO: 1877004 - DNA, 15 bp, Homo sapiens
ttatcattatatact

SEQ ID NO: 1877005 - DNA, 15 bp, Homo sapiens
tatcattatatactc

SEQ ID NO: 1877006 - DNA, 15 bp, Homo sapiens
atcattatatactct

SEQ ID NO: 1877007 - DNA, 15 bp, Homo sapiens
tcattatatactctt

SEQ ID NO: 1877008 - DNA, 15 bp, Homo sapiens
cattatatactcttc

SEQ ID NO: 1877009 - DNA, 15 bp, Homo sapiens
attatatactcttcc

SEQ ID NO: 1877010 - DNA, 15 bp, Homo sapiens
ttatatactcttcca

SEQ ID NO: 1877011 - DNA, 15 bp, Homo sapiens
tatatactcttccat

SEQ ID NO: 1877012 - DNA, 15 bp, Homo sapiens
atatactcttccata

SEQ ID NO: 1877013 - DNA, 15 bp, Homo sapiens
tatactcttccatat

SEQ ID NO: 1877014 - DNA, 15 bp, Homo sapiens
atactcttccatatt

SEQ ID NO: 1877015 - DNA, 15 bp, Homo sapiens
tactcttccatattt

SEQ ID NO: 1877016 - DNA, 15 bp, Homo sapiens
actcttccatatttt

SEQ ID NO: 1877017 - DNA, 15 bp, Homo sapiens
ctcttccatattttc

SEQ ID NO: 1877018 - DNA, 15 bp, Homo sapiens
tcttccatattttca

SEQ ID NO: 1877019 - DNA, 15 bp, Homo sapiens
cttccatattttcac

SEQ ID NO: 1877020 - DNA, 15 bp, Homo sapiens
ttccatattttcaca

SEQ ID NO: 1877021 - DNA, 15 bp, Homo sapiens
tccatattttcacaa

SEQ ID NO: 1877022 - DNA, 15 bp, Homo sapiens
ccatattttcacaaa

SEQ ID NO: 1877023 - DNA, 15 bp, Homo sapiens
catattttcacaaaa

SEQ ID NO: 1877024 - DNA, 15 bp, Homo sapiens
atattttcacaaaaa

SEQ ID NO: 1877025 - DNA, 15 bp, Homo sapiens
tattttcacaaaaac

SEQ ID NO: 1877026 - DNA, 15 bp, Homo sapiens
attttcacaaaaaca

SEQ ID NO: 1877027 - DNA, 15 bp, Homo sapiens
ttttcacaaaaacat

SEQ ID NO: 1877028 - DNA, 15 bp, Homo sapiens
tttcacaaaaacata

SEQ ID NO: 1877029 - DNA, 15 bp, Homo sapiens
ttcacaaaaacatag

SEQ ID NO: 1877030 - DNA, 15 bp, Homo sapiens
caaaaacatagacat

SEQ ID NO: 1877031 - DNA, 15 bp, Homo sapiens
aaaaacatagacatt

SEQ ID NO: 1877032 - DNA, 15 bp, Homo sapiens
aaaacatagacatta

SEQ ID NO: 1877033 - DNA, 15 bp, Homo sapiens
aaacatagacattat

SEQ ID NO: 1877034 - DNA, 15 bp, Homo sapiens
aacatagacattata

SEQ ID NO: 1877035 - DNA, 15 bp, Homo sapiens
acatagacattatag

SEQ ID NO: 1877036 - DNA, 15 bp, Homo sapiens
catagacattatagg

SEQ ID NO: 1877037 - DNA, 15 bp, Homo sapiens
atagacattataggt

SEQ ID NO: 1877038 - DNA, 15 bp, Homo sapiens
tagacattataggta

SEQ ID NO: 1877039 - DNA, 15 bp, Homo sapiens
agacattataggtag

SEQ ID NO: 1877040 - DNA, 15 bp, Homo sapiens
gacattataggtaga

SEQ ID NO: 1877041 - DNA, 15 bp, Homo sapiens
acattataggtagat

SEQ ID NO: 1877042 - DNA, 15 bp, Homo sapiens
cattataggtagatt

SEQ ID NO: 1877043 - DNA, 15 bp, Homo sapiens
attataggtagattc

SEQ ID NO: 1877044 - DNA, 15 bp, Homo sapiens
ttataggtagattca

SEQ ID NO: 1877045 - DNA, 15 bp, Homo sapiens
tataggtagattcag

SEQ ID NO: 1877046 - DNA, 15 bp, Homo sapiens
ataggtagattcaga

SEQ ID NO: 1877047 - DNA, 15 bp, Homo sapiens
taggtagattcagaa

SEQ ID NO: 1877048 - DNA, 15 bp, Homo sapiens
aggtagattcagaat

SEQ ID NO: 1877049 - DNA, 15 bp, Homo sapiens
ggtagattcagaatg

SEQ ID NO: 1877050 - DNA, 15 bp, Homo sapiens
gtagattcagaatga

SEQ ID NO: 1877051 - DNA, 15 bp, Homo sapiens
tagattcagaatgag

SEQ ID NO: 1877052 - DNA, 15 bp, Homo sapiens
agattcagaatgagt

SEQ ID NO: 1877053 - DNA, 15 bp, Homo sapiens
gattcagaatgagta

SEQ ID NO: 1877054 - DNA, 15 bp, Homo sapiens
attcagaatgagtaa

SEQ ID NO: 1877055 - DNA, 15 bp, Homo sapiens
ttcagaatgagtaag

SEQ ID NO: 1877056 - DNA, 15 bp, Homo sapiens
tcagaatgagtaaga

SEQ ID NO: 1877057 - DNA, 15 bp, Homo sapiens
cagaatgagtaagaa

SEQ ID NO: 1877058 - DNA, 15 bp, Homo sapiens
agaatgagtaagaaa

SEQ ID NO: 1877059 - DNA, 15 bp, Homo sapiens
gaatgagtaagaaat

SEQ ID NO: 1877060 - DNA, 15 bp, Homo sapiens
aatgagtaagaaatc

SEQ ID NO: 1877061 - DNA, 15 bp, Homo sapiens
atgagtaagaaatcg

SEQ ID NO: 1877062 - DNA, 15 bp, Homo sapiens
tgagtaagaaatcgc

SEQ ID NO: 1877063 - DNA, 15 bp, Homo sapiens
gagtaagaaatcgct

SEQ ID NO: 1877064 - DNA, 15 bp, Homo sapiens
agtaagaaatcgctt

SEQ ID NO: 1877065 - DNA, 15 bp, Homo sapiens
gtaagaaatcgcttt

SEQ ID NO: 1877066 - DNA, 15 bp, Homo sapiens
taagaaatcgcttta

SEQ ID NO: 1877067 - DNA, 15 bp, Homo sapiens
aagaaatcgctttat

SEQ ID NO: 1877068 - DNA, 15 bp, Homo sapiens
agaaatcgctttatt

SEQ ID NO: 1877069 - DNA, 15 bp, Homo sapiens
gaaatcgctttattt

SEQ ID NO: 1877070 - DNA, 15 bp, Homo sapiens
aaatcgctttatttt

SEQ ID NO: 1877071 - DNA, 15 bp, Homo sapiens
aatcgctttattttt

SEQ ID NO: 1877072 - DNA, 15 bp, Homo sapiens
atcgctttatttttg

SEQ ID NO: 1877073 - DNA, 15 bp, Homo sapiens
tcgctttatttttga

SEQ ID NO: 1877074 - DNA, 15 bp, Homo sapiens
cgctttatttttgag

SEQ ID NO: 1877075 - DNA, 15 bp, Homo sapiens
gctttatttttgagg

SEQ ID NO: 1877076 - DNA, 15 bp, Homo sapiens
ctttatttttgagga

SEQ ID NO: 1877077 - DNA, 15 bp, Homo sapiens
tttatttttgaggat

SEQ ID NO: 1877078 - DNA, 15 bp, Homo sapiens
ttatttttgaggatg

SEQ ID NO: 1877079 - DNA, 15 bp, Homo sapiens
tatttttgaggatgg

SEQ ID NO: 1877080 - DNA, 15 bp, Homo sapiens
atttttgaggatgga

SEQ ID NO: 1877081 - DNA, 15 bp, Homo sapiens
tttttgaggatggat

SEQ ID NO: 1877082 - DNA, 15 bp, Homo sapiens
ttttgaggatggatt

SEQ ID NO: 1877083 - DNA, 15 bp, Homo sapiens
tttgaggatggattt

SEQ ID NO: 1877084 - DNA, 15 bp, Homo sapiens
ttgaggatggatttt

SEQ ID NO: 1877085 - DNA, 15 bp, Homo sapiens
tgaggatggattttt

SEQ ID NO: 1877086 - DNA, 15 bp, Homo sapiens
gaggatggatttttt

SEQ ID NO: 1877087 - DNA, 15 bp, Homo sapiens
aggatggattttttt

SEQ ID NO: 1877088 - DNA, 15 bp, Homo sapiens
ggatggatttttttt

SEQ ID NO: 1877089 - DNA, 15 bp, Homo sapiens
gatggattttttttt

SEQ ID NO: 1877090 - DNA, 15 bp, Homo sapiens
atggatttttttttt

SEQ ID NO: 1877091 - DNA, 15 bp, Homo sapiens
tggattttttttttt

SEQ ID NO: 1877092 - DNA, 15 bp, Homo sapiens
ggatttttttttttc

SEQ ID NO: 1877093 - DNA, 15 bp, Homo sapiens
gatttttttttttcc

SEQ ID NO: 1877094 - DNA, 15 bp, Homo sapiens
atttttttttttccc

SEQ ID NO: 1877095 - DNA, 15 bp, Homo sapiens
ttttttttttcccac

SEQ ID NO: 1877096 - DNA, 15 bp, Homo sapiens
tttttttttcccaca

SEQ ID NO: 1877097 - DNA, 15 bp, Homo sapiens
ttttttttcccacag

SEQ ID NO: 1877098 - DNA, 15 bp, Homo sapiens
tttttttcccacagt

SEQ ID NO: 1877099 - DNA, 15 bp, Homo sapiens
ttttttcccacagtg

SEQ ID NO: 1877100 - DNA, 15 bp, Homo sapiens
tttttcccacagtgg

SEQ ID NO: 1877101 - DNA, 15 bp, Homo sapiens
ttttcccacagtggc

SEQ ID NO: 1877102 - DNA, 15 bp, Homo sapiens
tttcccacagtggct

SEQ ID NO: 1877103 - DNA, 15 bp, Homo sapiens
ttcccacagtggctt

SEQ ID NO: 1877104 - DNA, 15 bp, Homo sapiens
tcccacagtggcttc

SEQ ID NO: 1877105 - DNA, 15 bp, Homo sapiens
cccacagtggcttca

SEQ ID NO: 1877106 - DNA, 15 bp, Homo sapiens
ccacagtggcttcaa

SEQ ID NO: 1877107 - DNA, 15 bp, Homo sapiens
cacagtggcttcaat

SEQ ID NO: 1877108 - DNA, 15 bp, Homo sapiens
acagtggcttcaatt

SEQ ID NO: 1877109 - DNA, 15 bp, Homo sapiens
cagtggcttcaattt

SEQ ID NO: 1877110 - DNA, 15 bp, Homo sapiens
agtggcttcaatttt

SEQ ID NO: 1877111 - DNA, 15 bp, Homo sapiens
gtggcttcaattttg

SEQ ID NO: 1877112 - DNA, 15 bp, Homo sapiens
tggcttcaattttga

SEQ ID NO: 1877113 - DNA, 15 bp, Homo sapiens
ggcttcaattttgat

SEQ ID NO: 1877114 - DNA, 15 bp, Homo sapiens
gcttcaattttgata

SEQ ID NO: 1877115 - DNA, 15 bp, Homo sapiens
cttcaattttgatat

SEQ ID NO: 1877116 - DNA, 15 bp, Homo sapiens
ttcaattttgatatg

SEQ ID NO: 1877117 - DNA, 15 bp, Homo sapiens
tcaattttgatatgc

SEQ ID NO: 1877118 - DNA, 15 bp, Homo sapiens
caattttgatatgct

SEQ ID NO: 1877119 - DNA, 15 bp, Homo sapiens
aattttgatatgctg

SEQ ID NO: 1877120 - DNA, 15 bp, Homo sapiens
attttgatatgctgg

SEQ ID NO: 1877121 - DNA, 15 bp, Homo sapiens
ttttgatatgctggc

SEQ ID NO: 1877122 - DNA, 15 bp, Homo sapiens
tttgatatgctggct

SEQ ID NO: 1877123 - DNA, 15 bp, Homo sapiens
ttgatatgctggcta

SEQ ID NO: 1877124 - DNA, 15 bp, Homo sapiens
tgatatgctggctag

SEQ ID NO: 1877125 - DNA, 15 bp, Homo sapiens
gatatgctggctagc

SEQ ID NO: 1877126 - DNA, 15 bp, Homo sapiens
atatgctggctagca

SEQ ID NO: 1877127 - DNA, 15 bp, Homo sapiens
tatgctggctagcat

SEQ ID NO: 1877128 - DNA, 15 bp, Homo sapiens
atgctggctagcatc

SEQ ID NO: 1877129 - DNA, 15 bp, Homo sapiens
tgctggctagcatca

SEQ ID NO: 1877130 - DNA, 15 bp, Homo sapiens
gctggctagcatcac

SEQ ID NO: 1877131 - DNA, 15 bp, Homo sapiens
ctggctagcatcaca

SEQ ID NO: 1877132 - DNA, 15 bp, Homo sapiens
tggctagcatcacag

SEQ ID NO: 1877133 - DNA, 15 bp, Homo sapiens
ggctagcatcacagt

SEQ ID NO: 1877134 - DNA, 15 bp, Homo sapiens
gctagcatcacagtc

SEQ ID NO: 1877135 - DNA, 15 bp, Homo sapiens
ctagcatcacagtcc

SEQ ID NO: 1877136 - DNA, 15 bp, Homo sapiens
tagcatcacagtcca

SEQ ID NO: 1877137 - DNA, 15 bp, Homo sapiens
agcatcacagtccag

SEQ ID NO: 1877138 - DNA, 15 bp, Homo sapiens
gcatcacagtccagc

SEQ ID NO: 1877139 - DNA, 15 bp, Homo sapiens
catcacagtccagca

SEQ ID NO: 1877140 - DNA, 15 bp, Homo sapiens
atcacagtccagcag

SEQ ID NO: 1877141 - DNA, 15 bp, Homo sapiens
tcacagtccagcagg

SEQ ID NO: 1877142 - DNA, 15 bp, Homo sapiens
cacagtccagcagga

SEQ ID NO: 1877143 - DNA, 15 bp, Homo sapiens
acagtccagcaggat

SEQ ID NO: 1877144 - DNA, 15 bp, Homo sapiens
cagtccagcaggatc

SEQ ID NO: 1877145 - DNA, 15 bp, Homo sapiens
agtccagcaggatca

SEQ ID NO: 1877146 - DNA, 15 bp, Homo sapiens
gtccagcaggatcat

SEQ ID NO: 1877147 - DNA, 15 bp, Homo sapiens
tccagcaggatcata

SEQ ID NO: 1877148 - DNA, 15 bp, Homo sapiens
ccagcaggatcatat

SEQ ID NO: 1877149 - DNA, 15 bp, Homo sapiens
cagcaggatcatatc

SEQ ID NO: 1877150 - DNA, 15 bp, Homo sapiens
agcaggatcatatct

SEQ ID NO: 1877151 - DNA, 15 bp, Homo sapiens
gcaggatcatatctt

SEQ ID NO: 1877152 - DNA, 15 bp, Homo sapiens
caggatcatatcttt

SEQ ID NO: 1877153 - DNA, 15 bp, Homo sapiens
aggatcatatctttt

SEQ ID NO: 1877154 - DNA, 15 bp, Homo sapiens
ggatcatatcttttt

SEQ ID NO: 1877155 - DNA, 15 bp, Homo sapiens
gatcatatcttttta

SEQ ID NO: 1877156 - DNA, 15 bp, Homo sapiens
atcatatctttttaa

SEQ ID NO: 1877157 - DNA, 15 bp, Homo sapiens
tcatatctttttaaa

SEQ ID NO: 1877158 - DNA, 15 bp, Homo sapiens
catatctttttaaaa

SEQ ID NO: 1877159 - DNA, 15 bp, Homo sapiens
atatctttttaaaaa

SEQ ID NO: 1877160 - DNA, 15 bp, Homo sapiens
tatctttttaaaaac

SEQ ID NO: 1877161 - DNA, 15 bp, Homo sapiens
atctttttaaaaact

SEQ ID NO: 1877162 - DNA, 15 bp, Homo sapiens
tctttttaaaaactt

SEQ ID NO: 1877163 - DNA, 15 bp, Homo sapiens
ctttttaaaaactta

SEQ ID NO: 1877164 - DNA, 15 bp, Homo sapiens
tttttaaaaacttat

SEQ ID NO: 1877165 - DNA, 15 bp, Homo sapiens
ttttaaaaacttata

SEQ ID NO: 1877166 - DNA, 15 bp, Homo sapiens
tttaaaaacttatac

SEQ ID NO: 1877167 - DNA, 15 bp, Homo sapiens
ttaaaaacttataca

SEQ ID NO: 1877168 - DNA, 15 bp, Homo sapiens
taaaaacttatacaa

SEQ ID NO: 1877169 - DNA, 15 bp, Homo sapiens
aaaaacttatacaat

SEQ ID NO: 1877170 - DNA, 15 bp, Homo sapiens
aaaacttatacaatg

SEQ ID NO: 1877171 - DNA, 15 bp, Homo sapiens
aaacttatacaatga

SEQ ID NO: 1877172 - DNA, 15 bp, Homo sapiens
aacttatacaatgaa

SEQ ID NO: 1877173 - DNA, 15 bp, Homo sapiens
acttatacaatgaaa

SEQ ID NO: 1877174 - DNA, 15 bp, Homo sapiens
cttatacaatgaaat

SEQ ID NO: 1877175 - DNA, 15 bp, Homo sapiens
ttatacaatgaaatt

SEQ ID NO: 1877176 - DNA, 15 bp, Homo sapiens
tatacaatgaaattg

SEQ ID NO: 1877177 - DNA, 15 bp, Homo sapiens
atacaatgaaattgc

SEQ ID NO: 1877178 - DNA, 15 bp, Homo sapiens
tacaatgaaattgct

SEQ ID NO: 1877179 - DNA, 15 bp, Homo sapiens
acaatgaaattgctt

SEQ ID NO: 1877180 - DNA, 15 bp, Homo sapiens
caatgaaattgcttt

SEQ ID NO: 1877181 - DNA, 15 bp, Homo sapiens
aatgaaattgctttg

SEQ ID NO: 1877182 - DNA, 15 bp, Homo sapiens
atgaaattgctttgg

SEQ ID NO: 1877183 - DNA, 15 bp, Homo sapiens
tgaaattgctttggt

SEQ ID NO: 1877184 - DNA, 15 bp, Homo sapiens
gaaattgctttggtg

SEQ ID NO: 1877185 - DNA, 15 bp, Homo sapiens
aaattgctttggtgc

SEQ ID NO: 1877186 - DNA, 15 bp, Homo sapiens
aattgctttggtgca

SEQ ID NO: 1877187 - DNA, 15 bp, Homo sapiens
attgctttggtgcag

SEQ ID NO: 1877188 - DNA, 15 bp, Homo sapiens
ttgctttggtgcaga

SEQ ID NO: 1877189 - DNA, 15 bp, Homo sapiens
tgctttggtgcagag

SEQ ID NO: 1877190 - DNA, 15 bp, Homo sapiens
gctttggtgcagaga

SEQ ID NO: 1877191 - DNA, 15 bp, Homo sapiens
ctttggtgcagagaa

SEQ ID NO: 1877192 - DNA, 15 bp, Homo sapiens
tttggtgcagagaag

SEQ ID NO: 1877193 - DNA, 15 bp, Homo sapiens
ttggtgcagagaagg

SEQ ID NO: 1877194 - DNA, 15 bp, Homo sapiens
tggtgcagagaaggc

SEQ ID NO: 1877195 - DNA, 15 bp, Homo sapiens
ggtgcagagaaggcc

SEQ ID NO: 1877196 - DNA, 15 bp, Homo sapiens
gtgttaagctctgtt

SEQ ID NO: 1877197 - DNA, 15 bp, Homo sapiens
tgttaagctctgttt

SEQ ID NO: 1877198 - DNA, 15 bp, Homo sapiens
gttaagctctgtttc

SEQ ID NO: 1877199 - DNA, 15 bp, Homo sapiens
ttaagctctgtttct

SEQ ID NO: 1877200 - DNA, 15 bp, Homo sapiens
taagctctgtttctt

SEQ ID NO: 1877201 - DNA, 15 bp, Homo sapiens
aagctctgtttcttg

SEQ ID NO: 1877202 - DNA, 15 bp, Homo sapiens
agctctgtttcttgc

SEQ ID NO: 1877203 - DNA, 15 bp, Homo sapiens
gctctgtttcttgct

SEQ ID NO: 1877204 - DNA, 15 bp, Homo sapiens
ctctgtttcttgctt

SEQ ID NO: 1877205 - DNA, 15 bp, Homo sapiens
tctgtttcttgctta

SEQ ID NO: 1877206 - DNA, 15 bp, Homo sapiens
ctgtttcttgcttat

SEQ ID NO: 1877207 - DNA, 15 bp, Homo sapiens
tgtttcttgcttata

SEQ ID NO: 1877208 - DNA, 15 bp, Homo sapiens
gtttcttgcttatag

SEQ ID NO: 1877209 - DNA, 15 bp, Homo sapiens
tttcttgcttatagg

SEQ ID NO: 1877210 - DNA, 15 bp, Homo sapiens
ttcttgcttataggt

SEQ ID NO: 1877211 - DNA, 15 bp, Homo sapiens
tcttgcttataggta

SEQ ID NO: 1877212 - DNA, 15 bp, Homo sapiens
cttgcttataggtag

SEQ ID NO: 1877213 - DNA, 15 bp, Homo sapiens
ttgcttataggtaga

SEQ ID NO: 1877214 - DNA, 15 bp, Homo sapiens
tgcttataggtagat

SEQ ID NO: 1877215 - DNA, 15 bp, Homo sapiens
gcttataggtagatt

SEQ ID NO: 1877216 - DNA, 15 bp, Homo sapiens
cttataggtagattc

SEQ ID NO: 1877217 - DNA, 15 bp, Homo sapiens
ttataggtagattcg

SEQ ID NO: 1877218 - DNA, 15 bp, Homo sapiens
tataggtagattcgt

SEQ ID NO: 1877219 - DNA, 15 bp, Homo sapiens
ataggtagattcgta

SEQ ID NO: 1877220 - DNA, 15 bp, Homo sapiens
taggtagattcgtac

SEQ ID NO: 1877221 - DNA, 15 bp, Homo sapiens
aggtagattcgtact

SEQ ID NO: 1877222 - DNA, 15 bp, Homo sapiens
ggtagattcgtactg

SEQ ID NO: 1877223 - DNA, 15 bp, Homo sapiens
gtagattcgtactgt

SEQ ID NO: 1877224 - DNA, 15 bp, Homo sapiens
tagattcgtactgtc

SEQ ID NO: 1877225 - DNA, 15 bp, Homo sapiens
agattcgtactgtca

SEQ ID NO: 1877226 - DNA, 15 bp, Homo sapiens
gattcgtactgtcag

SEQ ID NO: 1877227 - DNA, 15 bp, Homo sapiens
attcgtactgtcagt

SEQ ID NO: 1877228 - DNA, 15 bp, Homo sapiens
ttcgtactgtcagtg

SEQ ID NO: 1877229 - DNA, 15 bp, Homo sapiens
tcgtactgtcagtgg

SEQ ID NO: 1877230 - DNA, 15 bp, Homo sapiens
cgtactgtcagtgga

SEQ ID NO: 1877231 - DNA, 15 bp, Homo sapiens
gtactgtcagtggat

SEQ ID NO: 1877232 - DNA, 15 bp, Homo sapiens
tactgtcagtggata

SEQ ID NO: 1877233 - DNA, 15 bp, Homo sapiens
actgtcagtggatat

SEQ ID NO: 1877234 - DNA, 15 bp, Homo sapiens
ctgtcagtggatatc

SEQ ID NO: 1877235 - DNA, 15 bp, Homo sapiens
tgtcagtggatatcg

SEQ ID NO: 1877236 - DNA, 15 bp, Homo sapiens
gtcagtggatatcgt

SEQ ID NO: 1877237 - DNA, 15 bp, Homo sapiens
tcagtggatatcgtg

SEQ ID NO: 1877238 - DNA, 15 bp, Homo sapiens
cagtggatatcgtgt

SEQ ID NO: 1877239 - DNA, 15 bp, Homo sapiens
agtggatatcgtgtt

SEQ ID NO: 1877240 - DNA, 15 bp, Homo sapiens
gtggatatcgtgttg

SEQ ID NO: 1877241 - DNA, 15 bp, Homo sapiens
tggatatcgtgttga

SEQ ID NO: 1877242 - DNA, 15 bp, Homo sapiens
ggatatcgtgttgaa

SEQ ID NO: 1877243 - DNA, 15 bp, Homo sapiens
gatatcgtgttgaaa

SEQ ID NO: 1877244 - DNA, 15 bp, Homo sapiens
atatcgtgttgaaaa

SEQ ID NO: 1877245 - DNA, 15 bp, Homo sapiens
tatcgtgttgaaaat

SEQ ID NO: 1877246 - DNA, 15 bp, Homo sapiens
atcgtgttgaaaatg

SEQ ID NO: 1877247 - DNA, 15 bp, Homo sapiens
tcgtgttgaaaatga

SEQ ID NO: 1877248 - DNA, 15 bp, Homo sapiens
cgtgttgaaaatgaa

SEQ ID NO: 1877249 - DNA, 15 bp, Homo sapiens
gtgttgaaaatgaat

SEQ ID NO: 1877250 - DNA, 15 bp, Homo sapiens
tgttgaaaatgaatt

SEQ ID NO: 1877251 - DNA, 15 bp, Homo sapiens
gttgaaaatgaattg

SEQ ID NO: 1877252 - DNA, 15 bp, Homo sapiens
ttgaaaatgaattgc

SEQ ID NO: 1877253 - DNA, 15 bp, Homo sapiens
tgaaaatgaattgcc

SEQ ID NO: 1877254 - DNA, 15 bp, Homo sapiens
gaaaatgaattgcct

SEQ ID NO: 1877255 - DNA, 15 bp, Homo sapiens
aaaatgaattgcctt

SEQ ID NO: 1877256 - DNA, 15 bp, Homo sapiens
aaatgaattgccttc

SEQ ID NO: 1877257 - DNA, 15 bp, Homo sapiens
aatgaattgccttct

SEQ ID NO: 1877258 - DNA, 15 bp, Homo sapiens
atgaattgccttctt

SEQ ID NO: 1877259 - DNA, 15 bp, Homo sapiens
tgaattgccttcttt

SEQ ID NO: 1877260 - DNA, 15 bp, Homo sapiens
gaattgccttctttg

SEQ ID NO: 1877261 - DNA, 15 bp, Homo sapiens
aattgccttctttgg

SEQ ID NO: 1877262 - DNA, 15 bp, Homo sapiens
attgccttctttggc

SEQ ID NO: 1877263 - DNA, 15 bp, Homo sapiens
ttgccttctttggca

SEQ ID NO: 1877264 - DNA, 15 bp, Homo sapiens
tgccttctttggcac

SEQ ID NO: 1877265 - DNA, 15 bp, Homo sapiens
gccttctttggcacg

SEQ ID NO: 1877266 - DNA, 15 bp, Homo sapiens
ccttctttggcacgt

SEQ ID NO: 1877267 - DNA, 15 bp, Homo sapiens
cttctttggcacgtg

SEQ ID NO: 1877268 - DNA, 15 bp, Homo sapiens
ttctttggcacgtgt

SEQ ID NO: 1877269 - DNA, 15 bp, Homo sapiens
tctttggcacgtgta

SEQ ID NO: 1877270 - DNA, 15 bp, Homo sapiens
ctttggcacgtgtat

SEQ ID NO: 1877271 - DNA, 15 bp, Homo sapiens
tttggcacgtgtata

SEQ ID NO: 1877272 - DNA, 15 bp, Homo sapiens
ttggcacgtgtatac

SEQ ID NO: 1877273 - DNA, 15 bp, Homo sapiens
tggcacgtgtatacc

SEQ ID NO: 1877274 - DNA, 15 bp, Homo sapiens
ggcacgtgtatacct

SEQ ID NO: 1877275 - DNA, 15 bp, Homo sapiens
gcacgtgtataccta

SEQ ID NO: 1877276 - DNA, 15 bp, Homo sapiens
cacgtgtatacctat

SEQ ID NO: 1877277 - DNA, 15 bp, Homo sapiens
acgtgtatacctatg

SEQ ID NO: 1877278 - DNA, 15 bp, Homo sapiens
cgtgtatacctatgt

SEQ ID NO: 1877279 - DNA, 15 bp, Homo sapiens
gtgtatacctatgta

SEQ ID NO: 1877280 - DNA, 15 bp, Homo sapiens
taacaaacctgcaca

SEQ ID NO: 1877281 - DNA, 15 bp, Homo sapiens
aacaaacctgcacat

SEQ ID NO: 1877282 - DNA, 15 bp, Homo sapiens
acaaacctgcacatt

SEQ ID NO: 1877283 - DNA, 15 bp, Homo sapiens
caaacctgcacattc

SEQ ID NO: 1877284 - DNA, 15 bp, Homo sapiens
aaacctgcacattct

SEQ ID NO: 1877285 - DNA, 15 bp, Homo sapiens
aacctgcacattctg

SEQ ID NO: 1877286 - DNA, 15 bp, Homo sapiens
acctgcacattctgc

SEQ ID NO: 1877287 - DNA, 15 bp, Homo sapiens
cctgcacattctgca

SEQ ID NO: 1877288 - DNA, 15 bp, Homo sapiens
ctgcacattctgcac

SEQ ID NO: 1877289 - DNA, 15 bp, Homo sapiens
tgcacattctgcaca

SEQ ID NO: 1877290 - DNA, 15 bp, Homo sapiens
gcacattctgcacat

SEQ ID NO: 1877291 - DNA, 15 bp, Homo sapiens
cacattctgcacatg

SEQ ID NO: 1877292 - DNA, 15 bp, Homo sapiens
acattctgcacatgt

SEQ ID NO: 1877293 - DNA, 15 bp, Homo sapiens
cattctgcacatgta

SEQ ID NO: 1877294 - DNA, 15 bp, Homo sapiens
attctgcacatgtac

SEQ ID NO: 1877295 - DNA, 15 bp, Homo sapiens
ttctgcacatgtacc

SEQ ID NO: 1877296 - DNA, 15 bp, Homo sapiens
tctgcacatgtaccc

SEQ ID NO: 1877297 - DNA, 15 bp, Homo sapiens
ctgcacatgtacccc

SEQ ID NO: 1877298 - DNA, 15 bp, Homo sapiens
tgcacatgtacccca

SEQ ID NO: 1877299 - DNA, 15 bp, Homo sapiens
gcacatgtaccccag

SEQ ID NO: 1877300 - DNA, 15 bp, Homo sapiens
cacatgtaccccaga

SEQ ID NO: 1877301 - DNA, 15 bp, Homo sapiens
acatgtaccccagaa

SEQ ID NO: 1877302 - DNA, 15 bp, Homo sapiens
catgtaccccagaac

SEQ ID NO: 1877303 - DNA, 15 bp, Homo sapiens
atgtaccccagaact

SEQ ID NO: 1877304 - DNA, 15 bp, Homo sapiens
tgtaccccagaactt

SEQ ID NO: 1877305 - DNA, 15 bp, Homo sapiens
gtaccccagaactta

SEQ ID NO: 1877306 - DNA, 15 bp, Homo sapiens
taccccagaacttaa

SEQ ID NO: 1877307 - DNA, 15 bp, Homo sapiens
accccagaacttaaa

SEQ ID NO: 1877308 - DNA, 15 bp, Homo sapiens
ccccagaacttaaag

SEQ ID NO: 1877309 - DNA, 15 bp, Homo sapiens
ttaaagtataataat

SEQ ID NO: 1877310 - DNA, 15 bp, Homo sapiens
taaagtataataata

SEQ ID NO: 1877311 - DNA, 15 bp, Homo sapiens
aaagtataataataa

SEQ ID NO: 1877312 - DNA, 15 bp, Homo sapiens
aagtataataataat

SEQ ID NO: 1877313 - DNA, 15 bp, Homo sapiens
agtataataataata

SEQ ID NO: 1877314 - DNA, 15 bp, Homo sapiens
gtataataataataa

SEQ ID NO: 1877315 - DNA, 15 bp, Homo sapiens
tataataataataat

SEQ ID NO: 1877316 - DNA, 15 bp, Homo sapiens
ataataataataaaa

SEQ ID NO: 1877317 - DNA, 15 bp, Homo sapiens
taataataataaaag

SEQ ID NO: 1877318 - DNA, 15 bp, Homo sapiens
aataataataaaaga

SEQ ID NO: 1877319 - DNA, 15 bp, Homo sapiens
ataataataaaagaa

SEQ ID NO: 1877320 - DNA, 15 bp, Homo sapiens
taataataaaagaag

SEQ ID NO: 1877321 - DNA, 15 bp, Homo sapiens
aataataaaagaaga

SEQ ID NO: 1877322 - DNA, 15 bp, Homo sapiens
ataataaaagaagat

SEQ ID NO: 1877323 - DNA, 15 bp, Homo sapiens
taataaaagaagatt

SEQ ID NO: 1877324 - DNA, 15 bp, Homo sapiens
aataaaagaagattc

SEQ ID NO: 1877325 - DNA, 15 bp, Homo sapiens
ataaaagaagattcc

SEQ ID NO: 1877326 - DNA, 15 bp, Homo sapiens
taaaagaagattccc

SEQ ID NO: 1877327 - DNA, 15 bp, Homo sapiens
aaaagaagattccct

SEQ ID NO: 1877328 - DNA, 15 bp, Homo sapiens
aaagaagattcccta

SEQ ID NO: 1877329 - DNA, 15 bp, Homo sapiens
aagaagattccctaa

SEQ ID NO: 1877330 - DNA, 15 bp, Homo sapiens
agaagattccctaag

SEQ ID NO: 1877331 - DNA, 15 bp, Homo sapiens
gaagattccctaagt

SEQ ID NO: 1877332 - DNA, 15 bp, Homo sapiens
aagattccctaagtc

SEQ ID NO: 1877333 - DNA, 15 bp, Homo sapiens
agattccctaagtct

SEQ ID NO: 1877334 - DNA, 15 bp, Homo sapiens
gattccctaagtctg

SEQ ID NO: 1877335 - DNA, 15 bp, Homo sapiens
attccctaagtctgc

SEQ ID NO: 1877336 - DNA, 15 bp, Homo sapiens
ttccctaagtctgca

SEQ ID NO: 1877337 - DNA, 15 bp, Homo sapiens
tccctaagtctgcat

SEQ ID NO: 1877338 - DNA, 15 bp, Homo sapiens
ccctaagtctgcatt

SEQ ID NO: 1877339 - DNA, 15 bp, Homo sapiens
cctaagtctgcattc

SEQ ID NO: 1877340 - DNA, 15 bp, Homo sapiens
ctaagtctgcattca

SEQ ID NO: 1877341 - DNA, 15 bp, Homo sapiens
taagtctgcattcag

SEQ ID NO: 1877342 - DNA, 15 bp, Homo sapiens
aagtctgcattcagt

SEQ ID NO: 1877343 - DNA, 15 bp, Homo sapiens
agtctgcattcagtg

SEQ ID NO: 1877344 - DNA, 15 bp, Homo sapiens
gtctgcattcagtgt

SEQ ID NO: 1877345 - DNA, 15 bp, Homo sapiens
tctgcattcagtgtt

SEQ ID NO: 1877346 - DNA, 15 bp, Homo sapiens
ctgcattcagtgtta

SEQ ID NO: 1877347 - DNA, 15 bp, Homo sapiens
tgcattcagtgttag

SEQ ID NO: 1877348 - DNA, 15 bp, Homo sapiens
gcattcagtgttagg

SEQ ID NO: 1877349 - DNA, 15 bp, Homo sapiens
cattcagtgttagga

SEQ ID NO: 1877350 - DNA, 15 bp, Homo sapiens
attcagtgttaggac

SEQ ID NO: 1877351 - DNA, 15 bp, Homo sapiens
ttcagtgttaggaca

SEQ ID NO: 1877352 - DNA, 15 bp, Homo sapiens
tcagtgttaggacaa

SEQ ID NO: 1877353 - DNA, 15 bp, Homo sapiens
cagtgttaggacaag

SEQ ID NO: 1877354 - DNA, 15 bp, Homo sapiens
agtgttaggacaagt

SEQ ID NO: 1877355 - DNA, 15 bp, Homo sapiens
gtgttaggacaagtg

SEQ ID NO: 1877356 - DNA, 15 bp, Homo sapiens
tgttaggacaagtgt

SEQ ID NO: 1877357 - DNA, 15 bp, Homo sapiens
gttaggacaagtgta

SEQ ID NO: 1877358 - DNA, 15 bp, Homo sapiens
ttaggacaagtgtat

SEQ ID NO: 1877359 - DNA, 15 bp, Homo sapiens
taggacaagtgtatt

SEQ ID NO: 1877360 - DNA, 15 bp, Homo sapiens
aggacaagtgtattt

SEQ ID NO: 1877361 - DNA, 15 bp, Homo sapiens
ggacaagtgtatttt

SEQ ID NO: 1877362 - DNA, 15 bp, Homo sapiens
gacaagtgtattttc

SEQ ID NO: 1877363 - DNA, 15 bp, Homo sapiens
acaagtgtattttct

SEQ ID NO: 1877364 - DNA, 15 bp, Homo sapiens
caagtgtattttctt

SEQ ID NO: 1877365 - DNA, 15 bp, Homo sapiens
aagtgtattttcttt

SEQ ID NO: 1877366 - DNA, 15 bp, Homo sapiens
agtgtattttctttg

SEQ ID NO: 1877367 - DNA, 15 bp, Homo sapiens
gtgtattttctttgt

SEQ ID NO: 1877368 - DNA, 15 bp, Homo sapiens
tgtattttctttgtg

SEQ ID NO: 1877369 - DNA, 15 bp, Homo sapiens
gtattttctttgtgt

SEQ ID NO: 1877370 - DNA, 15 bp, Homo sapiens
tattttctttgtgtt

SEQ ID NO: 1877371 - DNA, 15 bp, Homo sapiens
attttctttgtgttc

SEQ ID NO: 1877372 - DNA, 15 bp, Homo sapiens
ttttctttgtgttct

SEQ ID NO: 1877373 - DNA, 15 bp, Homo sapiens
tttctttgtgttctg

SEQ ID NO: 1877374 - DNA, 15 bp, Homo sapiens
ttctttgtgttctga

SEQ ID NO: 1877375 - DNA, 15 bp, Homo sapiens
tctttgtgttctgag

SEQ ID NO: 1877376 - DNA, 15 bp, Homo sapiens
ctttgtgttctgaga

SEQ ID NO: 1877377 - DNA, 15 bp, Homo sapiens
tttgtgttctgagac

SEQ ID NO: 1877378 - DNA, 15 bp, Homo sapiens
ttgtgttctgagaca

SEQ ID NO: 1877379 - DNA, 15 bp, Homo sapiens
tgtgttctgagacat

SEQ ID NO: 1877380 - DNA, 15 bp, Homo sapiens
gtgttctgagacata

SEQ ID NO: 1877381 - DNA, 15 bp, Homo sapiens
tgttctgagacatag

SEQ ID NO: 1877382 - DNA, 15 bp, Homo sapiens
gttctgagacatagc

SEQ ID NO: 1877383 - DNA, 15 bp, Homo sapiens
ttctgagacatagct

SEQ ID NO: 1877384 - DNA, 15 bp, Homo sapiens
tctgagacatagctt

SEQ ID NO: 1877385 - DNA, 15 bp, Homo sapiens
ctgagacatagcttt

SEQ ID NO: 1877386 - DNA, 15 bp, Homo sapiens
tgagacatagctttc

SEQ ID NO: 1877387 - DNA, 15 bp, Homo sapiens
gagacatagctttct

SEQ ID NO: 1877388 - DNA, 15 bp, Homo sapiens
agacatagctttctt

SEQ ID NO: 1877389 - DNA, 15 bp, Homo sapiens
gacatagctttcttg

SEQ ID NO: 1877390 - DNA, 15 bp, Homo sapiens
acatagctttcttgg

SEQ ID NO: 1877391 - DNA, 15 bp, Homo sapiens
catagctttcttggc

SEQ ID NO: 1877392 - DNA, 15 bp, Homo sapiens
atagctttcttggcc

SEQ ID NO: 1877393 - DNA, 15 bp, Homo sapiens
tagctttcttggcct

SEQ ID NO: 1877394 - DNA, 15 bp, Homo sapiens
agctttcttggcctt

SEQ ID NO: 1877395 - DNA, 15 bp, Homo sapiens
gctttcttggccttt

SEQ ID NO: 1877396 - DNA, 15 bp, Homo sapiens
ctttcttggcctttg

SEQ ID NO: 1877397 - DNA, 15 bp, Homo sapiens
tttcttggcctttga

SEQ ID NO: 1877398 - DNA, 15 bp, Homo sapiens
ttcttggcctttgat

SEQ ID NO: 1877399 - DNA, 15 bp, Homo sapiens
tcttggcctttgatg

SEQ ID NO: 1877400 - DNA, 15 bp, Homo sapiens
cttggcctttgatgt

SEQ ID NO: 1877401 - DNA, 15 bp, Homo sapiens
ttggcctttgatgtc

SEQ ID NO: 1877402 - DNA, 15 bp, Homo sapiens
tggcctttgatgtca

SEQ ID NO: 1877403 - DNA, 15 bp, Homo sapiens
ggcctttgatgtcaa

SEQ ID NO: 1877404 - DNA, 15 bp, Homo sapiens
gcctttgatgtcaac

SEQ ID NO: 1877405 - DNA, 15 bp, Homo sapiens
cctttgatgtcaacc

SEQ ID NO: 1877406 - DNA, 15 bp, Homo sapiens
ctttgatgtcaacct

SEQ ID NO: 1877407 - DNA, 15 bp, Homo sapiens
tttgatgtcaacctt

SEQ ID NO: 1877408 - DNA, 15 bp, Homo sapiens
ttgatgtcaaccttt

SEQ ID NO: 1877409 - DNA, 15 bp, Homo sapiens
tgatgtcaacctttt

SEQ ID NO: 1877410 - DNA, 15 bp, Homo sapiens
gatgtcaaccttttg

SEQ ID NO: 1877411 - DNA, 15 bp, Homo sapiens
atgtcaaccttttgg

SEQ ID NO: 1877412 - DNA, 15 bp, Homo sapiens
tgtcaaccttttgga

SEQ ID NO: 1877413 - DNA, 15 bp, Homo sapiens
gtcaaccttttggag

SEQ ID NO: 1877414 - DNA, 15 bp, Homo sapiens
tcaaccttttggagg

SEQ ID NO: 1877415 - DNA, 15 bp, Homo sapiens
caaccttttggaggc

SEQ ID NO: 1877416 - DNA, 15 bp, Homo sapiens
aaccttttggaggct

SEQ ID NO: 1877417 - DNA, 15 bp, Homo sapiens
accttttggaggcta

SEQ ID NO: 1877418 - DNA, 15 bp, Homo sapiens
ccttttggaggctat

SEQ ID NO: 1877419 - DNA, 15 bp, Homo sapiens
cttttggaggctatt

SEQ ID NO: 1877420 - DNA, 15 bp, Homo sapiens
ttttggaggctattt

SEQ ID NO: 1877421 - DNA, 15 bp, Homo sapiens
tttggaggctatttt

SEQ ID NO: 1877422 - DNA, 15 bp, Homo sapiens
ttggaggctattttt

SEQ ID NO: 1877423 - DNA, 15 bp, Homo sapiens
tggaggctatttttt

SEQ ID NO: 1877424 - DNA, 15 bp, Homo sapiens
ggaggctatttttta

SEQ ID NO: 1877425 - DNA, 15 bp, Homo sapiens
gaggctattttttag

SEQ ID NO: 1877426 - DNA, 15 bp, Homo sapiens
aggctattttttagg

SEQ ID NO: 1877427 - DNA, 15 bp, Homo sapiens
ggctattttttaggt

SEQ ID NO: 1877428 - DNA, 15 bp, Homo sapiens
gctattttttaggtt

SEQ ID NO: 1877429 - DNA, 15 bp, Homo sapiens
ctattttttaggttt

SEQ ID NO: 1877430 - DNA, 15 bp, Homo sapiens
tattttttaggtttg

SEQ ID NO: 1877431 - DNA, 15 bp, Homo sapiens
attttttaggtttga

SEQ ID NO: 1877432 - DNA, 15 bp, Homo sapiens
ttttttaggtttgaa

SEQ ID NO: 1877433 - DNA, 15 bp, Homo sapiens
tttttaggtttgaaa

SEQ ID NO: 1877434 - DNA, 15 bp, Homo sapiens
ttttaggtttgaaac

SEQ ID NO: 1877435 - DNA, 15 bp, Homo sapiens
tttaggtttgaaact

SEQ ID NO: 1877436 - DNA, 15 bp, Homo sapiens
ttaggtttgaaactg

SEQ ID NO: 1877437 - DNA, 15 bp, Homo sapiens
taggtttgaaactgt

SEQ ID NO: 1877438 - DNA, 15 bp, Homo sapiens
aggtttgaaactgta

SEQ ID NO: 1877439 - DNA, 15 bp, Homo sapiens
ggtttgaaactgtac

SEQ ID NO: 1877440 - DNA, 15 bp, Homo sapiens
gtttgaaactgtact

SEQ ID NO: 1877441 - DNA, 15 bp, Homo sapiens
tttgaaactgtactt

SEQ ID NO: 1877442 - DNA, 15 bp, Homo sapiens
ttgaaactgtactta

SEQ ID NO: 1877443 - DNA, 15 bp, Homo sapiens
tgaaactgtacttaa

SEQ ID NO: 1877444 - DNA, 15 bp, Homo sapiens
gaaactgtacttaaa

SEQ ID NO: 1877445 - DNA, 15 bp, Homo sapiens
aaactgtacttaaaa

SEQ ID NO: 1877446 - DNA, 15 bp, Homo sapiens
aactgtacttaaaat

SEQ ID NO: 1877447 - DNA, 15 bp, Homo sapiens
actgtacttaaaata

SEQ ID NO: 1877448 - DNA, 15 bp, Homo sapiens
ctgtacttaaaatat

SEQ ID NO: 1877449 - DNA, 15 bp, Homo sapiens
tgtacttaaaatatt

SEQ ID NO: 1877450 - DNA, 15 bp, Homo sapiens
gtacttaaaatattc

SEQ ID NO: 1877451 - DNA, 15 bp, Homo sapiens
tacttaaaatattca

SEQ ID NO: 1877452 - DNA, 15 bp, Homo sapiens
acttaaaatattcag

SEQ ID NO: 1877453 - DNA, 15 bp, Homo sapiens
cttaaaatattcagg

SEQ ID NO: 1877454 - DNA, 15 bp, Homo sapiens
ttaaaatattcagga

SEQ ID NO: 1877455 - DNA, 15 bp, Homo sapiens
taaaatattcaggaa

SEQ ID NO: 1877456 - DNA, 15 bp, Homo sapiens
aaaatattcaggaaa

SEQ ID NO: 1877457 - DNA, 15 bp, Homo sapiens
aaatattcaggaaaa

SEQ ID NO: 1877458 - DNA, 15 bp, Homo sapiens
aatattcaggaaaat

SEQ ID NO: 1877459 - DNA, 15 bp, Homo sapiens
atattcaggaaaata

SEQ ID NO: 1877460 - DNA, 15 bp, Homo sapiens
tattcaggaaaatag

SEQ ID NO: 1877461 - DNA, 15 bp, Homo sapiens
attcaggaaaatagt

SEQ ID NO: 1877462 - DNA, 15 bp, Homo sapiens
ttcaggaaaatagtc

SEQ ID NO: 1877463 - DNA, 15 bp, Homo sapiens
tcaggaaaatagtca

SEQ ID NO: 1877464 - DNA, 15 bp, Homo sapiens
caggaaaatagtcac

SEQ ID NO: 1877465 - DNA, 15 bp, Homo sapiens
aggaaaatagtcaca

SEQ ID NO: 1877466 - DNA, 15 bp, Homo sapiens
ggaaaatagtcacat

SEQ ID NO: 1877467 - DNA, 15 bp, Homo sapiens
gaaaatagtcacatt

SEQ ID NO: 1877468 - DNA, 15 bp, Homo sapiens
aaaatagtcacattt

SEQ ID NO: 1877469 - DNA, 15 bp, Homo sapiens
aaatagtcacatttg

SEQ ID NO: 1877470 - DNA, 15 bp, Homo sapiens
aatagtcacatttga

SEQ ID NO: 1877471 - DNA, 15 bp, Homo sapiens
atagtcacatttgaa

SEQ ID NO: 1877472 - DNA, 15 bp, Homo sapiens
tagtcacatttgaaa

SEQ ID NO: 1877473 - DNA, 15 bp, Homo sapiens
agtcacatttgaaat

SEQ ID NO: 1877474 - DNA, 15 bp, Homo sapiens
gtcacatttgaaatt

SEQ ID NO: 1877475 - DNA, 15 bp, Homo sapiens
tcacatttgaaattc

SEQ ID NO: 1877476 - DNA, 15 bp, Homo sapiens
cacatttgaaattcc

SEQ ID NO: 1877477 - DNA, 15 bp, Homo sapiens
acatttgaaattcca

SEQ ID NO: 1877478 - DNA, 15 bp, Homo sapiens
catttgaaattccaa

SEQ ID NO: 1877479 - DNA, 15 bp, Homo sapiens
atttgaaattccaat

SEQ ID NO: 1877480 - DNA, 15 bp, Homo sapiens
tttgaaattccaatt

SEQ ID NO: 1877481 - DNA, 15 bp, Homo sapiens
ttgaaattccaatta

SEQ ID NO: 1877482 - DNA, 15 bp, Homo sapiens
tgaaattccaattag

SEQ ID NO: 1877483 - DNA, 15 bp, Homo sapiens
gaaattccaattagt

SEQ ID NO: 1877484 - DNA, 15 bp, Homo sapiens
aaattccaattagtt

SEQ ID NO: 1877485 - DNA, 15 bp, Homo sapiens
aattccaattagttc

SEQ ID NO: 1877486 - DNA, 15 bp, Homo sapiens
attccaattagttca

SEQ ID NO: 1877487 - DNA, 15 bp, Homo sapiens
ttccaattagttcaa

SEQ ID NO: 1877488 - DNA, 15 bp, Homo sapiens
tccaattagttcaaa

SEQ ID NO: 1877489 - DNA, 15 bp, Homo sapiens
ccaattagttcaaaa

SEQ ID NO: 1877490 - DNA, 15 bp, Homo sapiens
caattagttcaaaag

SEQ ID NO: 1877491 - DNA, 15 bp, Homo sapiens
aattagttcaaaagg

SEQ ID NO: 1877492 - DNA, 15 bp, Homo sapiens
attagttcaaaaggg

SEQ ID NO: 1877493 - DNA, 15 bp, Homo sapiens
ttagttcaaaaggga

SEQ ID NO: 1877494 - DNA, 15 bp, Homo sapiens
tagttcaaaagggat

SEQ ID NO: 1877495 - DNA, 15 bp, Homo sapiens
agttcaaaagggatc

SEQ ID NO: 1877496 - DNA, 15 bp, Homo sapiens
gttcaaaagggatct

SEQ ID NO: 1877497 - DNA, 15 bp, Homo sapiens
ttcaaaagggatctc

SEQ ID NO: 1877498 - DNA, 15 bp, Homo sapiens
tcaaaagggatctcc

SEQ ID NO: 1877499 - DNA, 15 bp, Homo sapiens
caaaagggatctccc

SEQ ID NO: 1877500 - DNA, 15 bp, Homo sapiens
aaaagggatctccca

SEQ ID NO: 1877501 - DNA, 15 bp, Homo sapiens
aaagggatctcccaa

SEQ ID NO: 1877502 - DNA, 15 bp, Homo sapiens
aagggatctcccaaa

SEQ ID NO: 1877503 - DNA, 15 bp, Homo sapiens
agggatctcccaaac

SEQ ID NO: 1877504 - DNA, 15 bp, Homo sapiens
gggatctcccaaacc

SEQ ID NO: 1877505 - DNA, 15 bp, Homo sapiens
ggatctcccaaacca

SEQ ID NO: 1877506 - DNA, 15 bp, Homo sapiens
gatctcccaaaccat

SEQ ID NO: 1877507 - DNA, 15 bp, Homo sapiens
atctcccaaaccatc

SEQ ID NO: 1877508 - DNA, 15 bp, Homo sapiens
tctcccaaaccatct

SEQ ID NO: 1877509 - DNA, 15 bp, Homo sapiens
ctcccaaaccatcta

SEQ ID NO: 1877510 - DNA, 15 bp, Homo sapiens
tcccaaaccatctag

SEQ ID NO: 1877511 - DNA, 15 bp, Homo sapiens
cccaaaccatctagg

SEQ ID NO: 1877512 - DNA, 15 bp, Homo sapiens
ccaaaccatctaggg

SEQ ID NO: 1877513 - DNA, 15 bp, Homo sapiens
caaaccatctagggt

SEQ ID NO: 1877514 - DNA, 15 bp, Homo sapiens
aaaccatctagggtg

SEQ ID NO: 1877515 - DNA, 15 bp, Homo sapiens
aaccatctagggtgt

SEQ ID NO: 1877516 - DNA, 15 bp, Homo sapiens
accatctagggtgtt

SEQ ID NO: 1877517 - DNA, 15 bp, Homo sapiens
ccatctagggtgttc

SEQ ID NO: 1877518 - DNA, 15 bp, Homo sapiens
catctagggtgttct

SEQ ID NO: 1877519 - DNA, 15 bp, Homo sapiens
atctagggtgttctt

SEQ ID NO: 1877520 - DNA, 15 bp, Homo sapiens
tctagggtgttctta

SEQ ID NO: 1877521 - DNA, 15 bp, Homo sapiens
ctagggtgttcttac

SEQ ID NO: 1877522 - DNA, 15 bp, Homo sapiens
tagggtgttcttact

SEQ ID NO: 1877523 - DNA, 15 bp, Homo sapiens
agggtgttcttacta

SEQ ID NO: 1877524 - DNA, 15 bp, Homo sapiens
gggtgttcttactaa

SEQ ID NO: 1877525 - DNA, 15 bp, Homo sapiens
ggtgttcttactaaa

SEQ ID NO: 1877526 - DNA, 15 bp, Homo sapiens
gtgttcttactaaat

SEQ ID NO: 1877527 - DNA, 15 bp, Homo sapiens
tgttcttactaaatt

SEQ ID NO: 1877528 - DNA, 15 bp, Homo sapiens
gttcttactaaatta

SEQ ID NO: 1877529 - DNA, 15 bp, Homo sapiens
ttcttactaaattat

SEQ ID NO: 1877530 - DNA, 15 bp, Homo sapiens
tcttactaaattatc

SEQ ID NO: 1877531 - DNA, 15 bp, Homo sapiens
cttactaaattatcg

SEQ ID NO: 1877532 - DNA, 15 bp, Homo sapiens
ttactaaattatcgt

SEQ ID NO: 1877533 - DNA, 15 bp, Homo sapiens
tactaaattatcgta

SEQ ID NO: 1877534 - DNA, 15 bp, Homo sapiens
actaaattatcgtaa

SEQ ID NO: 1877535 - DNA, 15 bp, Homo sapiens
ctaaattatcgtaag

SEQ ID NO: 1877536 - DNA, 15 bp, Homo sapiens
taaattatcgtaaga

SEQ ID NO: 1877537 - DNA, 15 bp, Homo sapiens
aaattatcgtaagaa

SEQ ID NO: 1877538 - DNA, 15 bp, Homo sapiens
aattatcgtaagaaa

SEQ ID NO: 1877539 - DNA, 15 bp, Homo sapiens
attatcgtaagaaat

SEQ ID NO: 1877540 - DNA, 15 bp, Homo sapiens
ttatcgtaagaaata

SEQ ID NO: 1877541 - DNA, 15 bp, Homo sapiens
tatcgtaagaaatac

SEQ ID NO: 1877542 - DNA, 15 bp, Homo sapiens
atcgtaagaaatact

SEQ ID NO: 1877543 - DNA, 15 bp, Homo sapiens
tcgtaagaaatactt

SEQ ID NO: 1877544 - DNA, 15 bp, Homo sapiens
cgtaagaaatacttg

SEQ ID NO: 1877545 - DNA, 15 bp, Homo sapiens
gtaagaaatacttgt

SEQ ID NO: 1877546 - DNA, 15 bp, Homo sapiens
taagaaatacttgtt

SEQ ID NO: 1877547 - DNA, 15 bp, Homo sapiens
aagaaatacttgttt

SEQ ID NO: 1877548 - DNA, 15 bp, Homo sapiens
agaaatacttgttta

SEQ ID NO: 1877549 - DNA, 15 bp, Homo sapiens
gaaatacttgtttaa

SEQ ID NO: 1877550 - DNA, 15 bp, Homo sapiens
aaatacttgtttaac

SEQ ID NO: 1877551 - DNA, 15 bp, Homo sapiens
aatacttgtttaact

SEQ ID NO: 1877552 - DNA, 15 bp, Homo sapiens
atacttgtttaacta

SEQ ID NO: 1877553 - DNA, 15 bp, Homo sapiens
tacttgtttaactat

SEQ ID NO: 1877554 - DNA, 15 bp, Homo sapiens
acttgtttaactatc

SEQ ID NO: 1877555 - DNA, 15 bp, Homo sapiens
cttgtttaactatct

SEQ ID NO: 1877556 - DNA, 15 bp, Homo sapiens
ttgtttaactatcta

SEQ ID NO: 1877557 - DNA, 15 bp, Homo sapiens
tgtttaactatctat

SEQ ID NO: 1877558 - DNA, 15 bp, Homo sapiens
gtttaactatctatt

SEQ ID NO: 1877559 - DNA, 15 bp, Homo sapiens
tttaactatctattc

SEQ ID NO: 1877560 - DNA, 15 bp, Homo sapiens
ttaactatctattct

SEQ ID NO: 1877561 - DNA, 15 bp, Homo sapiens
taactatctattctg

SEQ ID NO: 1877562 - DNA, 15 bp, Homo sapiens
actatctattctgta

SEQ ID NO: 1877563 - DNA, 15 bp, Homo sapiens
ctatctattctgtat

SEQ ID NO: 1877564 - DNA, 15 bp, Homo sapiens
tatctattctgtata

SEQ ID NO: 1877565 - DNA, 15 bp, Homo sapiens
atctattctgtatac

SEQ ID NO: 1877566 - DNA, 15 bp, Homo sapiens
tctattctgtataca

SEQ ID NO: 1877567 - DNA, 15 bp, Homo sapiens
ctattctgtatacag

SEQ ID NO: 1877568 - DNA, 15 bp, Homo sapiens
tattctgtatacagt

SEQ ID NO: 1877569 - DNA, 15 bp, Homo sapiens
attctgtatacagta

SEQ ID NO: 1877570 - DNA, 15 bp, Homo sapiens
ttctgtatacagtac

SEQ ID NO: 1877571 - DNA, 15 bp, Homo sapiens
tctgtatacagtact

SEQ ID NO: 1877572 - DNA, 15 bp, Homo sapiens
ctgtatacagtactg

SEQ ID NO: 1877573 - DNA, 15 bp, Homo sapiens
tgtatacagtactgt

SEQ ID NO: 1877574 - DNA, 15 bp, Homo sapiens
gtatacagtactgtg

SEQ ID NO: 1877575 - DNA, 15 bp, Homo sapiens
tatacagtactgtgg

SEQ ID NO: 1877576 - DNA, 15 bp, Homo sapiens
atacagtactgtggt

SEQ ID NO: 1877577 - DNA, 15 bp, Homo sapiens
tacagtactgtggta

SEQ ID NO: 1877578 - DNA, 15 bp, Homo sapiens
acagtactgtggtag

SEQ ID NO: 1877579 - DNA, 15 bp, Homo sapiens
cagtactgtggtaga

SEQ ID NO: 1877580 - DNA, 15 bp, Homo sapiens
agtactgtggtagat

SEQ ID NO: 1877581 - DNA, 15 bp, Homo sapiens
gtactgtggtagatc

SEQ ID NO: 1877582 - DNA, 15 bp, Homo sapiens
tactgtggtagatcc

SEQ ID NO: 1877583 - DNA, 15 bp, Homo sapiens
actgtggtagatcct

SEQ ID NO: 1877584 - DNA, 15 bp, Homo sapiens
ctgtggtagatcctg

SEQ ID NO: 1877585 - DNA, 15 bp, Homo sapiens
tgtggtagatcctgg

SEQ ID NO: 1877586 - DNA, 15 bp, Homo sapiens
gtggtagatcctggt

SEQ ID NO: 1877587 - DNA, 15 bp, Homo sapiens
tggtagatcctggta

SEQ ID NO: 1877588 - DNA, 15 bp, Homo sapiens
ggtagatcctggtaa

SEQ ID NO: 1877589 - DNA, 15 bp, Homo sapiens
gtagatcctggtaag

SEQ ID NO: 1877590 - DNA, 15 bp, Homo sapiens
tagatcctggtaagg

SEQ ID NO: 1877591 - DNA, 15 bp, Homo sapiens
agatcctggtaaggg

SEQ ID NO: 1877592 - DNA, 15 bp, Homo sapiens
gatcctggtaagggt

SEQ ID NO: 1877593 - DNA, 15 bp, Homo sapiens
atcctggtaagggtt

SEQ ID NO: 1877594 - DNA, 15 bp, Homo sapiens
tcctggtaagggtta

SEQ ID NO: 1877595 - DNA, 15 bp, Homo sapiens
cctggtaagggttaa

SEQ ID NO: 1877596 - DNA, 15 bp, Homo sapiens
ctggtaagggttaat

SEQ ID NO: 1877597 - DNA, 15 bp, Homo sapiens
tggtaagggttaatt

SEQ ID NO: 1877598 - DNA, 15 bp, Homo sapiens
ggtaagggttaattt

SEQ ID NO: 1877599 - DNA, 15 bp, Homo sapiens
gtaagggttaatttt

SEQ ID NO: 1877600 - DNA, 15 bp, Homo sapiens
taagggttaattttt

SEQ ID NO: 1877601 - DNA, 15 bp, Homo sapiens
aagggttaatttttt

SEQ ID NO: 1877602 - DNA, 15 bp, Homo sapiens
agggttaattttttt

SEQ ID NO: 1877603 - DNA, 15 bp, Homo sapiens
gggttaatttttttc

SEQ ID NO: 1877604 - DNA, 15 bp, Homo sapiens
ggttaatttttttct

SEQ ID NO: 1877605 - DNA, 15 bp, Homo sapiens
gttaatttttttcta

SEQ ID NO: 1877606 - DNA, 15 bp, Homo sapiens
ttaatttttttctaa

SEQ ID NO: 1877607 - DNA, 15 bp, Homo sapiens
taatttttttctaac

SEQ ID NO: 1877608 - DNA, 15 bp, Homo sapiens
aatttttttctaact

SEQ ID NO: 1877609 - DNA, 15 bp, Homo sapiens
atttttttctaactt

SEQ ID NO: 1877610 - DNA, 15 bp, Homo sapiens
tttttttctaactta

SEQ ID NO: 1877611 - DNA, 15 bp, Homo sapiens
ttttttctaacttat

SEQ ID NO: 1877612 - DNA, 15 bp, Homo sapiens
tttttctaacttatt

SEQ ID NO: 1877613 - DNA, 15 bp, Homo sapiens
ttttctaacttattc

SEQ ID NO: 1877614 - DNA, 15 bp, Homo sapiens
tttctaacttattct

SEQ ID NO: 1877615 - DNA, 15 bp, Homo sapiens
ttctaacttattctg

SEQ ID NO: 1877616 - DNA, 15 bp, Homo sapiens
tctaacttattctga

SEQ ID NO: 1877617 - DNA, 15 bp, Homo sapiens
ctaacttattctgat

SEQ ID NO: 1877618 - DNA, 15 bp, Homo sapiens
taacttattctgatt

SEQ ID NO: 1877619 - DNA, 15 bp, Homo sapiens
aacttattctgattt

SEQ ID NO: 1877620 - DNA, 15 bp, Homo sapiens
acttattctgatttc

SEQ ID NO: 1877621 - DNA, 15 bp, Homo sapiens
cttattctgatttcg

SEQ ID NO: 1877622 - DNA, 15 bp, Homo sapiens
ttattctgatttcgt

SEQ ID NO: 1877623 - DNA, 15 bp, Homo sapiens
tattctgatttcgtg

SEQ ID NO: 1877624 - DNA, 15 bp, Homo sapiens
attctgatttcgtga

SEQ ID NO: 1877625 - DNA, 15 bp, Homo sapiens
ttctgatttcgtgat

SEQ ID NO: 1877626 - DNA, 15 bp, Homo sapiens
tctgatttcgtgatt

SEQ ID NO: 1877627 - DNA, 15 bp, Homo sapiens
ctgatttcgtgattc

SEQ ID NO: 1877628 - DNA, 15 bp, Homo sapiens
tgatttcgtgattct

SEQ ID NO: 1877629 - DNA, 15 bp, Homo sapiens
gatttcgtgattctt

SEQ ID NO: 1877630 - DNA, 15 bp, Homo sapiens
atttcgtgattctta

SEQ ID NO: 1877631 - DNA, 15 bp, Homo sapiens
tttcgtgattcttac

SEQ ID NO: 1877632 - DNA, 15 bp, Homo sapiens
ttcgtgattcttacc

SEQ ID NO: 1877633 - DNA, 15 bp, Homo sapiens
tcgtgattcttaccc

SEQ ID NO: 1877634 - DNA, 15 bp, Homo sapiens
cgtgattcttaccct

SEQ ID NO: 1877635 - DNA, 15 bp, Homo sapiens
gtgattcttaccctt

SEQ ID NO: 1877636 - DNA, 15 bp, Homo sapiens
tgattcttacccttg

SEQ ID NO: 1877637 - DNA, 15 bp, Homo sapiens
gattcttacccttga

SEQ ID NO: 1877638 - DNA, 15 bp, Homo sapiens
attcttacccttgat

SEQ ID NO: 1877639 - DNA, 15 bp, Homo sapiens
ttcttacccttgatt

SEQ ID NO: 1877640 - DNA, 15 bp, Homo sapiens
tcttacccttgatta

SEQ ID NO: 1877641 - DNA, 15 bp, Homo sapiens
cttacccttgattat

SEQ ID NO: 1877642 - DNA, 15 bp, Homo sapiens
ttacccttgattatg

SEQ ID NO: 1877643 - DNA, 15 bp, Homo sapiens
tacccttgattatgg

SEQ ID NO: 1877644 - DNA, 15 bp, Homo sapiens
acccttgattatggt

SEQ ID NO: 1877645 - DNA, 15 bp, Homo sapiens
cccttgattatggtt

SEQ ID NO: 1877646 - DNA, 15 bp, Homo sapiens
ccttgattatggttg

SEQ ID NO: 1877647 - DNA, 15 bp, Homo sapiens
cttgattatggttgc

SEQ ID NO: 1877648 - DNA, 15 bp, Homo sapiens
ttgattatggttgca

SEQ ID NO: 1877649 - DNA, 15 bp, Homo sapiens
tgattatggttgcag

SEQ ID NO: 1877650 - DNA, 15 bp, Homo sapiens
gattatggttgcagt

SEQ ID NO: 1877651 - DNA, 15 bp, Homo sapiens
attatggttgcagtg

SEQ ID NO: 1877652 - DNA, 15 bp, Homo sapiens
ttatggttgcagtgc

SEQ ID NO: 1877653 - DNA, 15 bp, Homo sapiens
tatggttgcagtgcc

SEQ ID NO: 1877654 - DNA, 15 bp, Homo sapiens
atggttgcagtgcct

SEQ ID NO: 1877655 - DNA, 15 bp, Homo sapiens
tggttgcagtgcctt

SEQ ID NO: 1877656 - DNA, 15 bp, Homo sapiens
ggttgcagtgcctta

SEQ ID NO: 1877657 - DNA, 15 bp, Homo sapiens
gttgcagtgccttac

SEQ ID NO: 1877658 - DNA, 15 bp, Homo sapiens
ttgcagtgccttact

SEQ ID NO: 1877659 - DNA, 15 bp, Homo sapiens
tgcagtgccttactt

SEQ ID NO: 1877660 - DNA, 15 bp, Homo sapiens
gcagtgccttacttg

SEQ ID NO: 1877661 - DNA, 15 bp, Homo sapiens
cagtgccttacttgt

SEQ ID NO: 1877662 - DNA, 15 bp, Homo sapiens
agtgccttacttgta

SEQ ID NO: 1877663 - DNA, 15 bp, Homo sapiens
gtgccttacttgtat

SEQ ID NO: 1877664 - DNA, 15 bp, Homo sapiens
tgccttacttgtata

SEQ ID NO: 1877665 - DNA, 15 bp, Homo sapiens
gccttacttgtatag

SEQ ID NO: 1877666 - DNA, 15 bp, Homo sapiens
ccttacttgtatagg

SEQ ID NO: 1877667 - DNA, 15 bp, Homo sapiens
cttacttgtatagga

SEQ ID NO: 1877668 - DNA, 15 bp, Homo sapiens
ttacttgtataggat

SEQ ID NO: 1877669 - DNA, 15 bp, Homo sapiens
tacttgtataggatg

SEQ ID NO: 1877670 - DNA, 15 bp, Homo sapiens
acttgtataggatgc

SEQ ID NO: 1877671 - DNA, 15 bp, Homo sapiens
cttgtataggatgct

SEQ ID NO: 1877672 - DNA, 15 bp, Homo sapiens
ttgtataggatgctt

SEQ ID NO: 1877673 - DNA, 15 bp, Homo sapiens
tgtataggatgcttt

SEQ ID NO: 1877674 - DNA, 15 bp, Homo sapiens
gtataggatgctttt

SEQ ID NO: 1877675 - DNA, 15 bp, Homo sapiens
tataggatgctttta

SEQ ID NO: 1877676 - DNA, 15 bp, Homo sapiens
ataggatgcttttac

SEQ ID NO: 1877677 - DNA, 15 bp, Homo sapiens
taggatgcttttact

SEQ ID NO: 1877678 - DNA, 15 bp, Homo sapiens
aggatgcttttactt

SEQ ID NO: 1877679 - DNA, 15 bp, Homo sapiens
ggatgcttttacttt

SEQ ID NO: 1877680 - DNA, 15 bp, Homo sapiens
gatgcttttactttt

SEQ ID NO: 1877681 - DNA, 15 bp, Homo sapiens
atgcttttacttttt

SEQ ID NO: 1877682 - DNA, 15 bp, Homo sapiens
tgcttttacttttta

SEQ ID NO: 1877683 - DNA, 15 bp, Homo sapiens
gcttttactttttaa

SEQ ID NO: 1877684 - DNA, 15 bp, Homo sapiens
cttttactttttaaa

SEQ ID NO: 1877685 - DNA, 15 bp, Homo sapiens
ttttactttttaaat

SEQ ID NO: 1877686 - DNA, 15 bp, Homo sapiens
tttactttttaaatt

SEQ ID NO: 1877687 - DNA, 15 bp, Homo sapiens
tactttttaaattga

SEQ ID NO: 1877688 - DNA, 15 bp, Homo sapiens
actttttaaattgag

SEQ ID NO: 1877689 - DNA, 15 bp, Homo sapiens
ctttttaaattgagg

SEQ ID NO: 1877690 - DNA, 15 bp, Homo sapiens
tttttaaattgaggt

SEQ ID NO: 1877691 - DNA, 15 bp, Homo sapiens
ttttaaattgaggta

SEQ ID NO: 1877692 - DNA, 15 bp, Homo sapiens
tttaaattgaggtat

SEQ ID NO: 1877693 - DNA, 15 bp, Homo sapiens
ttaaattgaggtatg

SEQ ID NO: 1877694 - DNA, 15 bp, Homo sapiens
taaattgaggtatga

SEQ ID NO: 1877695 - DNA, 15 bp, Homo sapiens
aaattgaggtatgat

SEQ ID NO: 1877696 - DNA, 15 bp, Homo sapiens
aattgaggtatgatt

SEQ ID NO: 1877697 - DNA, 15 bp, Homo sapiens
attgaggtatgattt

SEQ ID NO: 1877698 - DNA, 15 bp, Homo sapiens
ttgaggtatgattta

SEQ ID NO: 1877699 - DNA, 15 bp, Homo sapiens
tgaggtatgatttac

SEQ ID NO: 1877700 - DNA, 15 bp, Homo sapiens
gaggtatgatttaca

SEQ ID NO: 1877701 - DNA, 15 bp, Homo sapiens
aggtatgatttacat

SEQ ID NO: 1877702 - DNA, 15 bp, Homo sapiens
ggtatgatttacatg

SEQ ID NO: 1877703 - DNA, 15 bp, Homo sapiens
gtatgatttacatgc

SEQ ID NO: 1877704 - DNA, 15 bp, Homo sapiens
tatgatttacatgca

SEQ ID NO: 1877705 - DNA, 15 bp, Homo sapiens
atgatttacatgcag

SEQ ID NO: 1877706 - DNA, 15 bp, Homo sapiens
tgatttacatgcagt

SEQ ID NO: 1877707 - DNA, 15 bp, Homo sapiens
gatttacatgcagta

SEQ ID NO: 1877708 - DNA, 15 bp, Homo sapiens
atttacatgcagtaa

SEQ ID NO: 1877709 - DNA, 15 bp, Homo sapiens
tttacatgcagtaaa

SEQ ID NO: 1877710 - DNA, 15 bp, Homo sapiens
ttacatgcagtaaaa

SEQ ID NO: 1877711 - DNA, 15 bp, Homo sapiens
tacatgcagtaaaat

SEQ ID NO: 1877712 - DNA, 15 bp, Homo sapiens
acatgcagtaaaatg

SEQ ID NO: 1877713 - DNA, 15 bp, Homo sapiens
catgcagtaaaatgc

SEQ ID NO: 1877714 - DNA, 15 bp, Homo sapiens
atgcagtaaaatgct

SEQ ID NO: 1877715 - DNA, 15 bp, Homo sapiens
tgcagtaaaatgctt

SEQ ID NO: 1877716 - DNA, 15 bp, Homo sapiens
gcagtaaaatgctta

SEQ ID NO: 1877717 - DNA, 15 bp, Homo sapiens
cagtaaaatgcttaa

SEQ ID NO: 1877718 - DNA, 15 bp, Homo sapiens
agtaaaatgcttaag

SEQ ID NO: 1877719 - DNA, 15 bp, Homo sapiens
gtaaaatgcttaagt

SEQ ID NO: 1877720 - DNA, 15 bp, Homo sapiens
taaaatgcttaagtc

SEQ ID NO: 1877721 - DNA, 15 bp, Homo sapiens
aaaatgcttaagtct

SEQ ID NO: 1877722 - DNA, 15 bp, Homo sapiens
aaatgcttaagtcta

SEQ ID NO: 1877723 - DNA, 15 bp, Homo sapiens
aatgcttaagtctag

SEQ ID NO: 1877724 - DNA, 15 bp, Homo sapiens
atgcttaagtctagg

SEQ ID NO: 1877725 - DNA, 15 bp, Homo sapiens
tgcttaagtctaggt

SEQ ID NO: 1877726 - DNA, 15 bp, Homo sapiens
gcttaagtctaggtg

SEQ ID NO: 1877727 - DNA, 15 bp, Homo sapiens
cttaagtctaggtgt

SEQ ID NO: 1877728 - DNA, 15 bp, Homo sapiens
ttaagtctaggtgtg

SEQ ID NO: 1877729 - DNA, 15 bp, Homo sapiens
taagtctaggtgtgc

SEQ ID NO: 1877730 - DNA, 15 bp, Homo sapiens
aagtctaggtgtgca

SEQ ID NO: 1877731 - DNA, 15 bp, Homo sapiens
agtctaggtgtgcag

SEQ ID NO: 1877732 - DNA, 15 bp, Homo sapiens
gtctaggtgtgcagc

SEQ ID NO: 1877733 - DNA, 15 bp, Homo sapiens
tctaggtgtgcagct

SEQ ID NO: 1877734 - DNA, 15 bp, Homo sapiens
ctaggtgtgcagctc

SEQ ID NO: 1877735 - DNA, 15 bp, Homo sapiens
taggtgtgcagctca

SEQ ID NO: 1877736 - DNA, 15 bp, Homo sapiens
aggtgtgcagctcag

SEQ ID NO: 1877737 - DNA, 15 bp, Homo sapiens
ggtgtgcagctcagt

SEQ ID NO: 1877738 - DNA, 15 bp, Homo sapiens
gtgtgcagctcagtg

SEQ ID NO: 1877739 - DNA, 15 bp, Homo sapiens
tgtgcagctcagtga

SEQ ID NO: 1877740 - DNA, 15 bp, Homo sapiens
gtgcagctcagtgaa

SEQ ID NO: 1877741 - DNA, 15 bp, Homo sapiens
tgcagctcagtgaat

SEQ ID NO: 1877742 - DNA, 15 bp, Homo sapiens
gcagctcagtgaatt

SEQ ID NO: 1877743 - DNA, 15 bp, Homo sapiens
cagctcagtgaattt

SEQ ID NO: 1877744 - DNA, 15 bp, Homo sapiens
agctcagtgaatttt

SEQ ID NO: 1877745 - DNA, 15 bp, Homo sapiens
gctcagtgaattttt

SEQ ID NO: 1877746 - DNA, 15 bp, Homo sapiens
ctcagtgaatttttg

SEQ ID NO: 1877747 - DNA, 15 bp, Homo sapiens
tcagtgaatttttgc

SEQ ID NO: 1877748 - DNA, 15 bp, Homo sapiens
cagtgaatttttgcc

SEQ ID NO: 1877749 - DNA, 15 bp, Homo sapiens
agtgaatttttgccc

SEQ ID NO: 1877750 - DNA, 15 bp, Homo sapiens
gtgaatttttgccca

SEQ ID NO: 1877751 - DNA, 15 bp, Homo sapiens
tgaatttttgcccat

SEQ ID NO: 1877752 - DNA, 15 bp, Homo sapiens
gaatttttgcccatg

SEQ ID NO: 1877753 - DNA, 15 bp, Homo sapiens
aatttttgcccatgt

SEQ ID NO: 1877754 - DNA, 15 bp, Homo sapiens
atttttgcccatgtt

SEQ ID NO: 1877755 - DNA, 15 bp, Homo sapiens
tttttgcccatgttt

SEQ ID NO: 1877756 - DNA, 15 bp, Homo sapiens
ttttgcccatgttta

SEQ ID NO: 1877757 - DNA, 15 bp, Homo sapiens
tttgcccatgtttat

SEQ ID NO: 1877758 - DNA, 15 bp, Homo sapiens
ttgcccatgtttata

SEQ ID NO: 1877759 - DNA, 15 bp, Homo sapiens
tgcccatgtttatac

SEQ ID NO: 1877760 - DNA, 15 bp, Homo sapiens
gcccatgtttatacc

SEQ ID NO: 1877761 - DNA, 15 bp, Homo sapiens
cccatgtttataccc

SEQ ID NO: 1877762 - DNA, 15 bp, Homo sapiens
ccatgtttataccca

SEQ ID NO: 1877763 - DNA, 15 bp, Homo sapiens
catgtttatacccat

SEQ ID NO: 1877764 - DNA, 15 bp, Homo sapiens
atgtttatacccata

SEQ ID NO: 1877765 - DNA, 15 bp, Homo sapiens
tgtttatacccatag

SEQ ID NO: 1877766 - DNA, 15 bp, Homo sapiens
gtttatacccataga

SEQ ID NO: 1877767 - DNA, 15 bp, Homo sapiens
tttatacccatagaa

SEQ ID NO: 1877768 - DNA, 15 bp, Homo sapiens
ttatacccatagaac

SEQ ID NO: 1877769 - DNA, 15 bp, Homo sapiens
tatacccatagaact

SEQ ID NO: 1877770 - DNA, 15 bp, Homo sapiens
atacccatagaactc

SEQ ID NO: 1877771 - DNA, 15 bp, Homo sapiens
tacccatagaactct

SEQ ID NO: 1877772 - DNA, 15 bp, Homo sapiens
acccatagaactcta

SEQ ID NO: 1877773 - DNA, 15 bp, Homo sapiens
cccatagaactctac

SEQ ID NO: 1877774 - DNA, 15 bp, Homo sapiens
ccatagaactctact

SEQ ID NO: 1877775 - DNA, 15 bp, Homo sapiens
catagaactctactc

SEQ ID NO: 1877776 - DNA, 15 bp, Homo sapiens
atagaactctactca

SEQ ID NO: 1877777 - DNA, 15 bp, Homo sapiens
tagaactctactcag

SEQ ID NO: 1877778 - DNA, 15 bp, Homo sapiens
agaactctactcagc

SEQ ID NO: 1877779 - DNA, 15 bp, Homo sapiens
gaactctactcagct

SEQ ID NO: 1877780 - DNA, 15 bp, Homo sapiens
aactctactcagctc

SEQ ID NO: 1877781 - DNA, 15 bp, Homo sapiens
actctactcagctca

SEQ ID NO: 1877782 - DNA, 15 bp, Homo sapiens
ctctactcagctcaa

SEQ ID NO: 1877783 - DNA, 15 bp, Homo sapiens
tctactcagctcaaa

SEQ ID NO: 1877784 - DNA, 15 bp, Homo sapiens
ctactcagctcaaaa

SEQ ID NO: 1877785 - DNA, 15 bp, Homo sapiens
tactcagctcaaaat

SEQ ID NO: 1877786 - DNA, 15 bp, Homo sapiens
actcagctcaaaata

SEQ ID NO: 1877787 - DNA, 15 bp, Homo sapiens
ctcagctcaaaatac

SEQ ID NO: 1877788 - DNA, 15 bp, Homo sapiens
tcagctcaaaataca

SEQ ID NO: 1877789 - DNA, 15 bp, Homo sapiens
cagctcaaaatacag

SEQ ID NO: 1877790 - DNA, 15 bp, Homo sapiens
agctcaaaatacaga

SEQ ID NO: 1877791 - DNA, 15 bp, Homo sapiens
gctcaaaatacagaa

SEQ ID NO: 1877792 - DNA, 15 bp, Homo sapiens
ctcaaaatacagaac

SEQ ID NO: 1877793 - DNA, 15 bp, Homo sapiens
tcaaaatacagaaca

SEQ ID NO: 1877794 - DNA, 15 bp, Homo sapiens
caaaatacagaacat

SEQ ID NO: 1877795 - DNA, 15 bp, Homo sapiens
aaaatacagaacatt

SEQ ID NO: 1877796 - DNA, 15 bp, Homo sapiens
aaatacagaacattt

SEQ ID NO: 1877797 - DNA, 15 bp, Homo sapiens
aatacagaacatttc

SEQ ID NO: 1877798 - DNA, 15 bp, Homo sapiens
atacagaacatttcc

SEQ ID NO: 1877799 - DNA, 15 bp, Homo sapiens
tacagaacatttcca

SEQ ID NO: 1877800 - DNA, 15 bp, Homo sapiens
acagaacatttccat

SEQ ID NO: 1877801 - DNA, 15 bp, Homo sapiens
cagaacatttccatt

SEQ ID NO: 1877802 - DNA, 15 bp, Homo sapiens
agaacatttccattt

SEQ ID NO: 1877803 - DNA, 15 bp, Homo sapiens
gaacatttccatttc

SEQ ID NO: 1877804 - DNA, 15 bp, Homo sapiens
aacatttccatttcc

SEQ ID NO: 1877805 - DNA, 15 bp, Homo sapiens
acatttccatttccc

SEQ ID NO: 1877806 - DNA, 15 bp, Homo sapiens
catttccatttcccc

SEQ ID NO: 1877807 - DNA, 15 bp, Homo sapiens
atttccatttcccct

SEQ ID NO: 1877808 - DNA, 15 bp, Homo sapiens
tttccatttcccctg

SEQ ID NO: 1877809 - DNA, 15 bp, Homo sapiens
ttccatttcccctgg

SEQ ID NO: 1877810 - DNA, 15 bp, Homo sapiens
tccatttcccctgga

SEQ ID NO: 1877811 - DNA, 15 bp, Homo sapiens
ccatttcccctggaa

SEQ ID NO: 1877812 - DNA, 15 bp, Homo sapiens
catttcccctggaag

SEQ ID NO: 1877813 - DNA, 15 bp, Homo sapiens
atttcccctggaagt

SEQ ID NO: 1877814 - DNA, 15 bp, Homo sapiens
tttcccctggaagtt

SEQ ID NO: 1877815 - DNA, 15 bp, Homo sapiens
ttcccctggaagttc

SEQ ID NO: 1877816 - DNA, 15 bp, Homo sapiens
tcccctggaagttct

SEQ ID NO: 1877817 - DNA, 15 bp, Homo sapiens
cccctggaagttctc

SEQ ID NO: 1877818 - DNA, 15 bp, Homo sapiens
ccctggaagttctct

SEQ ID NO: 1877819 - DNA, 15 bp, Homo sapiens
cctggaagttctctt

SEQ ID NO: 1877820 - DNA, 15 bp, Homo sapiens
ctggaagttctcttg

SEQ ID NO: 1877821 - DNA, 15 bp, Homo sapiens
tggaagttctcttgt

SEQ ID NO: 1877822 - DNA, 15 bp, Homo sapiens
ggaagttctcttgtg

SEQ ID NO: 1877823 - DNA, 15 bp, Homo sapiens
gaagttctcttgtgg

SEQ ID NO: 1877824 - DNA, 15 bp, Homo sapiens
aagttctcttgtggc

SEQ ID NO: 1877825 - DNA, 15 bp, Homo sapiens
agttctcttgtggcc

SEQ ID NO: 1877826 - DNA, 15 bp, Homo sapiens
gttctcttgtggcct

SEQ ID NO: 1877827 - DNA, 15 bp, Homo sapiens
ttctcttgtggcctt

SEQ ID NO: 1877828 - DNA, 15 bp, Homo sapiens
tctcttgtggccttt

SEQ ID NO: 1877829 - DNA, 15 bp, Homo sapiens
ttgtggcctttccca

SEQ ID NO: 1877830 - DNA, 15 bp, Homo sapiens
tgtggcctttcccag

SEQ ID NO: 1877831 - DNA, 15 bp, Homo sapiens
gtggcctttcccagt

SEQ ID NO: 1877832 - DNA, 15 bp, Homo sapiens
tggcctttcccagtc

SEQ ID NO: 1877833 - DNA, 15 bp, Homo sapiens
ggcctttcccagtca

SEQ ID NO: 1877834 - DNA, 15 bp, Homo sapiens
gcctttcccagtcaa

SEQ ID NO: 1877835 - DNA, 15 bp, Homo sapiens
cctttcccagtcaat

SEQ ID NO: 1877836 - DNA, 15 bp, Homo sapiens
ctttcccagtcaata

SEQ ID NO: 1877837 - DNA, 15 bp, Homo sapiens
tttcccagtcaatat

SEQ ID NO: 1877838 - DNA, 15 bp, Homo sapiens
ttcccagtcaatatt

SEQ ID NO: 1877839 - DNA, 15 bp, Homo sapiens
tcccagtcaatatta

SEQ ID NO: 1877840 - DNA, 15 bp, Homo sapiens
cccagtcaatattat

SEQ ID NO: 1877841 - DNA, 15 bp, Homo sapiens
ccagtcaatattatt

SEQ ID NO: 1877842 - DNA, 15 bp, Homo sapiens
cagtcaatattattt

SEQ ID NO: 1877843 - DNA, 15 bp, Homo sapiens
agtcaatattatttc

SEQ ID NO: 1877844 - DNA, 15 bp, Homo sapiens
gtcaatattatttcc

SEQ ID NO: 1877845 - DNA, 15 bp, Homo sapiens
tcaatattatttccc

SEQ ID NO: 1877846 - DNA, 15 bp, Homo sapiens
caatattatttcccc

SEQ ID NO: 1877847 - DNA, 15 bp, Homo sapiens
aatattatttcccct

SEQ ID NO: 1877848 - DNA, 15 bp, Homo sapiens
atattatttcccctc

SEQ ID NO: 1877849 - DNA, 15 bp, Homo sapiens
tattatttcccctct

SEQ ID NO: 1877850 - DNA, 15 bp, Homo sapiens
attatttcccctctt

SEQ ID NO: 1877851 - DNA, 15 bp, Homo sapiens
ttatttcccctcttc

SEQ ID NO: 1877852 - DNA, 15 bp, Homo sapiens
tatttcccctcttca

SEQ ID NO: 1877853 - DNA, 15 bp, Homo sapiens
atttcccctcttcat

SEQ ID NO: 1877854 - DNA, 15 bp, Homo sapiens
tttcccctcttcatg

SEQ ID NO: 1877855 - DNA, 15 bp, Homo sapiens
ttcccctcttcatga

SEQ ID NO: 1877856 - DNA, 15 bp, Homo sapiens
tcccctcttcatgaa

SEQ ID NO: 1877857 - DNA, 15 bp, Homo sapiens
cccctcttcatgaaa

SEQ ID NO: 1877858 - DNA, 15 bp, Homo sapiens
ccctcttcatgaaaa

SEQ ID NO: 1877859 - DNA, 15 bp, Homo sapiens
cctcttcatgaaaag

SEQ ID NO: 1877860 - DNA, 15 bp, Homo sapiens
ctcttcatgaaaagg

SEQ ID NO: 1877861 - DNA, 15 bp, Homo sapiens
tcttcatgaaaaggt

SEQ ID NO: 1877862 - DNA, 15 bp, Homo sapiens
cttcatgaaaaggta

SEQ ID NO: 1877863 - DNA, 15 bp, Homo sapiens
ttcatgaaaaggtaa

SEQ ID NO: 1877864 - DNA, 15 bp, Homo sapiens
tcatgaaaaggtaac

SEQ ID NO: 1877865 - DNA, 15 bp, Homo sapiens
catgaaaaggtaacc

SEQ ID NO: 1877866 - DNA, 15 bp, Homo sapiens
atgaaaaggtaacca

SEQ ID NO: 1877867 - DNA, 15 bp, Homo sapiens
tgaaaaggtaaccac

SEQ ID NO: 1877868 - DNA, 15 bp, Homo sapiens
gaaaaggtaaccact

SEQ ID NO: 1877869 - DNA, 15 bp, Homo sapiens
aaaaggtaaccacta

SEQ ID NO: 1877870 - DNA, 15 bp, Homo sapiens
aaaggtaaccactat

SEQ ID NO: 1877871 - DNA, 15 bp, Homo sapiens
aaggtaaccactatt

SEQ ID NO: 1877872 - DNA, 15 bp, Homo sapiens
aggtaaccactattc

SEQ ID NO: 1877873 - DNA, 15 bp, Homo sapiens
ggtaaccactattct

SEQ ID NO: 1877874 - DNA, 15 bp, Homo sapiens
gtaaccactattctg

SEQ ID NO: 1877875 - DNA, 15 bp, Homo sapiens
taaccactattctga

SEQ ID NO: 1877876 - DNA, 15 bp, Homo sapiens
aaccactattctgac

SEQ ID NO: 1877877 - DNA, 15 bp, Homo sapiens
accactattctgact

SEQ ID NO: 1877878 - DNA, 15 bp, Homo sapiens
ccactattctgactt

SEQ ID NO: 1877879 - DNA, 15 bp, Homo sapiens
cactattctgacttc

SEQ ID NO: 1877880 - DNA, 15 bp, Homo sapiens
actattctgacttct

SEQ ID NO: 1877881 - DNA, 15 bp, Homo sapiens
ctattctgacttctg

SEQ ID NO: 1877882 - DNA, 15 bp, Homo sapiens
tattctgacttctga

SEQ ID NO: 1877883 - DNA, 15 bp, Homo sapiens
attctgacttctgat

SEQ ID NO: 1877884 - DNA, 15 bp, Homo sapiens
ttctgacttctgatg

SEQ ID NO: 1877885 - DNA, 15 bp, Homo sapiens
tctgacttctgatgc

SEQ ID NO: 1877886 - DNA, 15 bp, Homo sapiens
ctgacttctgatgcc

SEQ ID NO: 1877887 - DNA, 15 bp, Homo sapiens
tgacttctgatgcca

SEQ ID NO: 1877888 - DNA, 15 bp, Homo sapiens
gacttctgatgccat

SEQ ID NO: 1877889 - DNA, 15 bp, Homo sapiens
acttctgatgccata

SEQ ID NO: 1877890 - DNA, 15 bp, Homo sapiens
cttctgatgccatag

SEQ ID NO: 1877891 - DNA, 15 bp, Homo sapiens
ttctgatgccataga

SEQ ID NO: 1877892 - DNA, 15 bp, Homo sapiens
tctgatgccatagat

SEQ ID NO: 1877893 - DNA, 15 bp, Homo sapiens
ctgatgccatagatt

SEQ ID NO: 1877894 - DNA, 15 bp, Homo sapiens
tgatgccatagattc

SEQ ID NO: 1877895 - DNA, 15 bp, Homo sapiens
gatgccatagattca

SEQ ID NO: 1877896 - DNA, 15 bp, Homo sapiens
atgccatagattcat

SEQ ID NO: 1877897 - DNA, 15 bp, Homo sapiens
tgccatagattcatg

SEQ ID NO: 1877898 - DNA, 15 bp, Homo sapiens
gccatagattcatgt

SEQ ID NO: 1877899 - DNA, 15 bp, Homo sapiens
ccatagattcatgtt

SEQ ID NO: 1877900 - DNA, 15 bp, Homo sapiens
catagattcatgttg

SEQ ID NO: 1877901 - DNA, 15 bp, Homo sapiens
atagattcatgttgt

SEQ ID NO: 1877902 - DNA, 15 bp, Homo sapiens
tagattcatgttgta

SEQ ID NO: 1877903 - DNA, 15 bp, Homo sapiens
agattcatgttgtaa

SEQ ID NO: 1877904 - DNA, 15 bp, Homo sapiens
gattcatgttgtaag

SEQ ID NO: 1877905 - DNA, 15 bp, Homo sapiens
attcatgttgtaagt

SEQ ID NO: 1877906 - DNA, 15 bp, Homo sapiens
ttcatgttgtaagtg

SEQ ID NO: 1877907 - DNA, 15 bp, Homo sapiens
tcatgttgtaagtgg

SEQ ID NO: 1877908 - DNA, 15 bp, Homo sapiens
catgttgtaagtggc

SEQ ID NO: 1877909 - DNA, 15 bp, Homo sapiens
atgttgtaagtggct

SEQ ID NO: 1877910 - DNA, 15 bp, Homo sapiens
tgttgtaagtggctc

SEQ ID NO: 1877911 - DNA, 15 bp, Homo sapiens
gttgtaagtggctct

SEQ ID NO: 1877912 - DNA, 15 bp, Homo sapiens
ttgtaagtggctctt

SEQ ID NO: 1877913 - DNA, 15 bp, Homo sapiens
tgtaagtggctcttt

SEQ ID NO: 1877914 - DNA, 15 bp, Homo sapiens
gtaagtggctctttt

SEQ ID NO: 1877915 - DNA, 15 bp, Homo sapiens
taagtggctctttta

SEQ ID NO: 1877916 - DNA, 15 bp, Homo sapiens
aagtggctcttttaa

SEQ ID NO: 1877917 - DNA, 15 bp, Homo sapiens
agtggctcttttaaa

SEQ ID NO: 1877918 - DNA, 15 bp, Homo sapiens
gtggctcttttaaac

SEQ ID NO: 1877919 - DNA, 15 bp, Homo sapiens
tggctcttttaaact

SEQ ID NO: 1877920 - DNA, 15 bp, Homo sapiens
ggctcttttaaactt

SEQ ID NO: 1877921 - DNA, 15 bp, Homo sapiens
gctcttttaaacttt

SEQ ID NO: 1877922 - DNA, 15 bp, Homo sapiens
ctcttttaaactttc

SEQ ID NO: 1877923 - DNA, 15 bp, Homo sapiens
tcttttaaactttct

SEQ ID NO: 1877924 - DNA, 15 bp, Homo sapiens
cttttaaactttctt

SEQ ID NO: 1877925 - DNA, 15 bp, Homo sapiens
ttttaaactttcttt

SEQ ID NO: 1877926 - DNA, 15 bp, Homo sapiens
tttaaactttcttta

SEQ ID NO: 1877927 - DNA, 15 bp, Homo sapiens
ttaaactttctttat

SEQ ID NO: 1877928 - DNA, 15 bp, Homo sapiens
taaactttctttatc

SEQ ID NO: 1877929 - DNA, 15 bp, Homo sapiens
aaactttctttatct

SEQ ID NO: 1877930 - DNA, 15 bp, Homo sapiens
aactttctttatctc

SEQ ID NO: 1877931 - DNA, 15 bp, Homo sapiens
actttctttatctcc

SEQ ID NO: 1877932 - DNA, 15 bp, Homo sapiens
ctttctttatctccc

SEQ ID NO: 1877933 - DNA, 15 bp, Homo sapiens
tttctttatctcccc

SEQ ID NO: 1877934 - DNA, 15 bp, Homo sapiens
ttctttatctccccc

SEQ ID NO: 1877935 - DNA, 15 bp, Homo sapiens
tctttatctccccct

SEQ ID NO: 1877936 - DNA, 15 bp, Homo sapiens
ctttatctccccctt

SEQ ID NO: 1877937 - DNA, 15 bp, Homo sapiens
tttatctcccccttg

SEQ ID NO: 1877938 - DNA, 15 bp, Homo sapiens
ttatctcccccttgc

SEQ ID NO: 1877939 - DNA, 15 bp, Homo sapiens
tatctcccccttgct

SEQ ID NO: 1877940 - DNA, 15 bp, Homo sapiens
atctcccccttgctc

SEQ ID NO: 1877941 - DNA, 15 bp, Homo sapiens
tctcccccttgctct

SEQ ID NO: 1877942 - DNA, 15 bp, Homo sapiens
ctcccccttgctctt

SEQ ID NO: 1877943 - DNA, 15 bp, Homo sapiens
tcccccttgctcttt

SEQ ID NO: 1877944 - DNA, 15 bp, Homo sapiens
cccccttgctctttg

SEQ ID NO: 1877945 - DNA, 15 bp, Homo sapiens
ccccttgctctttgc

SEQ ID NO: 1877946 - DNA, 15 bp, Homo sapiens
cccttgctctttgcc

SEQ ID NO: 1877947 - DNA, 15 bp, Homo sapiens
ccttgctctttgcct

SEQ ID NO: 1877948 - DNA, 15 bp, Homo sapiens
cttgctctttgcctg

SEQ ID NO: 1877949 - DNA, 15 bp, Homo sapiens
ttgctctttgcctgt

SEQ ID NO: 1877950 - DNA, 15 bp, Homo sapiens
tgctctttgcctgta

SEQ ID NO: 1877951 - DNA, 15 bp, Homo sapiens
gctctttgcctgtaa

SEQ ID NO: 1877952 - DNA, 15 bp, Homo sapiens
ctctttgcctgtaag

SEQ ID NO: 1877953 - DNA, 15 bp, Homo sapiens
tctttgcctgtaaga

SEQ ID NO: 1877954 - DNA, 15 bp, Homo sapiens
ctttgcctgtaagag

SEQ ID NO: 1877955 - DNA, 15 bp, Homo sapiens
tttgcctgtaagaga

SEQ ID NO: 1877956 - DNA, 15 bp, Homo sapiens
ttgcctgtaagagaa

SEQ ID NO: 1877957 - DNA, 15 bp, Homo sapiens
tgcctgtaagagaag

SEQ ID NO: 1877958 - DNA, 15 bp, Homo sapiens
gcctgtaagagaagg

SEQ ID NO: 1877959 - DNA, 15 bp, Homo sapiens
cctgtaagagaagga

SEQ ID NO: 1877960 - DNA, 15 bp, Homo sapiens
ctgtaagagaaggaa

SEQ ID NO: 1877961 - DNA, 15 bp, Homo sapiens
tgtaagagaaggaaa

SEQ ID NO: 1877962 - DNA, 15 bp, Homo sapiens
gtaagagaaggaaat

SEQ ID NO: 1877963 - DNA, 15 bp, Homo sapiens
taagagaaggaaatg

SEQ ID NO: 1877964 - DNA, 15 bp, Homo sapiens
aagagaaggaaatgt

SEQ ID NO: 1877965 - DNA, 15 bp, Homo sapiens
agagaaggaaatgtc

SEQ ID NO: 1877966 - DNA, 15 bp, Homo sapiens
gagaaggaaatgtct

SEQ ID NO: 1877967 - DNA, 15 bp, Homo sapiens
agaaggaaatgtctt

SEQ ID NO: 1877968 - DNA, 15 bp, Homo sapiens
gaaggaaatgtcttc

SEQ ID NO: 1877969 - DNA, 15 bp, Homo sapiens
aaggaaatgtcttca

SEQ ID NO: 1877970 - DNA, 15 bp, Homo sapiens
aggaaatgtcttcat

SEQ ID NO: 1877971 - DNA, 15 bp, Homo sapiens
ggaaatgtcttcatt

SEQ ID NO: 1877972 - DNA, 15 bp, Homo sapiens
gaaatgtcttcattt

SEQ ID NO: 1877973 - DNA, 15 bp, Homo sapiens
aaatgtcttcatttt

SEQ ID NO: 1877974 - DNA, 15 bp, Homo sapiens
aatgtcttcattttc

SEQ ID NO: 1877975 - DNA, 15 bp, Homo sapiens
atgtcttcattttca

SEQ ID NO: 1877976 - DNA, 15 bp, Homo sapiens
tgtcttcattttcaa

SEQ ID NO: 1877977 - DNA, 15 bp, Homo sapiens
gtcttcattttcaaa

SEQ ID NO: 1877978 - DNA, 15 bp, Homo sapiens
tcttcattttcaaat

SEQ ID NO: 1877979 - DNA, 15 bp, Homo sapiens
cttcattttcaaata

SEQ ID NO: 1877980 - DNA, 15 bp, Homo sapiens
ttcattttcaaatat

SEQ ID NO: 1877981 - DNA, 15 bp, Homo sapiens
tcattttcaaatatt

SEQ ID NO: 1877982 - DNA, 15 bp, Homo sapiens
cattttcaaatattg

SEQ ID NO: 1877983 - DNA, 15 bp, Homo sapiens
attttcaaatattgt

SEQ ID NO: 1877984 - DNA, 15 bp, Homo sapiens
ttttcaaatattgta

SEQ ID NO: 1877985 - DNA, 15 bp, Homo sapiens
tttcaaatattgtat

SEQ ID NO: 1877986 - DNA, 15 bp, Homo sapiens
ttcaaatattgtatt

SEQ ID NO: 1877987 - DNA, 15 bp, Homo sapiens
tcaaatattgtattg

SEQ ID NO: 1877988 - DNA, 15 bp, Homo sapiens
caaatattgtattga

SEQ ID NO: 1877989 - DNA, 15 bp, Homo sapiens
aaatattgtattgat

SEQ ID NO: 1877990 - DNA, 15 bp, Homo sapiens
aatattgtattgatt

SEQ ID NO: 1877991 - DNA, 15 bp, Homo sapiens
atattgtattgatta

SEQ ID NO: 1877992 - DNA, 15 bp, Homo sapiens
tattgtattgattaa

SEQ ID NO: 1877993 - DNA, 15 bp, Homo sapiens
attgtattgattaag

SEQ ID NO: 1877994 - DNA, 15 bp, Homo sapiens
ttgtattgattaagt

SEQ ID NO: 1877995 - DNA, 15 bp, Homo sapiens
tgtattgattaagtt

SEQ ID NO: 1877996 - DNA, 15 bp, Homo sapiens
gtattgattaagttg

SEQ ID NO: 1877997 - DNA, 15 bp, Homo sapiens
tattgattaagttga

SEQ ID NO: 1877998 - DNA, 15 bp, Homo sapiens
attgattaagttgat

SEQ ID NO: 1877999 - DNA, 15 bp, Homo sapiens
ttgattaagttgatt

SEQ ID NO: 1878000 - DNA, 15 bp, Homo sapiens
tgattaagttgattt

SEQ ID NO: 1878001 - DNA, 15 bp, Homo sapiens
gattaagttgatttt

SEQ ID NO: 1878002 - DNA, 15 bp, Homo sapiens
attaagttgatttta

SEQ ID NO: 1878003 - DNA, 15 bp, Homo sapiens
ttaagttgattttat

SEQ ID NO: 1878004 - DNA, 15 bp, Homo sapiens
taagttgattttatg

SEQ ID NO: 1878005 - DNA, 15 bp, Homo sapiens
aagttgattttatgt

SEQ ID NO: 1878006 - DNA, 15 bp, Homo sapiens
agttgattttatgtt

SEQ ID NO: 1878007 - DNA, 15 bp, Homo sapiens
gttgattttatgttt

SEQ ID NO: 1878008 - DNA, 15 bp, Homo sapiens
ttgattttatgtttc

SEQ ID NO: 1878009 - DNA, 15 bp, Homo sapiens
tgattttatgtttca

SEQ ID NO: 1878010 - DNA, 15 bp, Homo sapiens
gattttatgtttcag

SEQ ID NO: 1878011 - DNA, 15 bp, Homo sapiens
attttatgtttcaga

SEQ ID NO: 1878012 - DNA, 15 bp, Homo sapiens
ttttatgtttcagac

SEQ ID NO: 1878013 - DNA, 15 bp, Homo sapiens
tttatgtttcagacc

SEQ ID NO: 1878014 - DNA, 15 bp, Homo sapiens
ttatgtttcagacct

SEQ ID NO: 1878015 - DNA, 15 bp, Homo sapiens
tatgtttcagacctt

SEQ ID NO: 1878016 - DNA, 15 bp, Homo sapiens
atgtttcagaccttt

SEQ ID NO: 1878017 - DNA, 15 bp, Homo sapiens
tgtttcagacctttg

SEQ ID NO: 1878018 - DNA, 15 bp, Homo sapiens
gtttcagacctttga

SEQ ID NO: 1878019 - DNA, 15 bp, Homo sapiens
tttcagacctttgag

SEQ ID NO: 1878020 - DNA, 15 bp, Homo sapiens
ttcagacctttgagg

SEQ ID NO: 1878021 - DNA, 15 bp, Homo sapiens
tcagacctttgaggt

SEQ ID NO: 1878022 - DNA, 15 bp, Homo sapiens
cagacctttgaggtc

SEQ ID NO: 1878023 - DNA, 15 bp, Homo sapiens
agacctttgaggtca

SEQ ID NO: 1878024 - DNA, 15 bp, Homo sapiens
gacctttgaggtcag

SEQ ID NO: 1878025 - DNA, 15 bp, Homo sapiens
acctttgaggtcaga

SEQ ID NO: 1878026 - DNA, 15 bp, Homo sapiens
cctttgaggtcagaa

SEQ ID NO: 1878027 - DNA, 15 bp, Homo sapiens
ctttgaggtcagaaa

SEQ ID NO: 1878028 - DNA, 15 bp, Homo sapiens
tttgaggtcagaaat

SEQ ID NO: 1878029 - DNA, 15 bp, Homo sapiens
ttgaggtcagaaatt

SEQ ID NO: 1878030 - DNA, 15 bp, Homo sapiens
tgaggtcagaaattt

SEQ ID NO: 1878031 - DNA, 15 bp, Homo sapiens
gaggtcagaaatttg

SEQ ID NO: 1878032 - DNA, 15 bp, Homo sapiens
aggtcagaaatttgc

SEQ ID NO: 1878033 - DNA, 15 bp, Homo sapiens
ggtcagaaatttgca

SEQ ID NO: 1878034 - DNA, 15 bp, Homo sapiens
gtcagaaatttgcag

SEQ ID NO: 1878035 - DNA, 15 bp, Homo sapiens
tcagaaatttgcagt

SEQ ID NO: 1878036 - DNA, 15 bp, Homo sapiens
cagaaatttgcagta

SEQ ID NO: 1878037 - DNA, 15 bp, Homo sapiens
agaaatttgcagtag

SEQ ID NO: 1878038 - DNA, 15 bp, Homo sapiens
gaaatttgcagtagc

SEQ ID NO: 1878039 - DNA, 15 bp, Homo sapiens
aaatttgcagtagcc

SEQ ID NO: 1878040 - DNA, 15 bp, Homo sapiens
aatttgcagtagcct

SEQ ID NO: 1878041 - DNA, 15 bp, Homo sapiens
atttgcagtagcctg

SEQ ID NO: 1878042 - DNA, 15 bp, Homo sapiens
tttgcagtagcctgg

SEQ ID NO: 1878043 - DNA, 15 bp, Homo sapiens
ttgcagtagcctgga

SEQ ID NO: 1878044 - DNA, 15 bp, Homo sapiens
tgcagtagcctggat

SEQ ID NO: 1878045 - DNA, 15 bp, Homo sapiens
gcagtagcctggata

SEQ ID NO: 1878046 - DNA, 15 bp, Homo sapiens
cagtagcctggatat

SEQ ID NO: 1878047 - DNA, 15 bp, Homo sapiens
agtagcctggatatc

SEQ ID NO: 1878048 - DNA, 15 bp, Homo sapiens
gtagcctggatatca

SEQ ID NO: 1878049 - DNA, 15 bp, Homo sapiens
tagcctggatatcac

SEQ ID NO: 1878050 - DNA, 15 bp, Homo sapiens
agcctggatatcaca

SEQ ID NO: 1878051 - DNA, 15 bp, Homo sapiens
gcctggatatcacat

SEQ ID NO: 1878052 - DNA, 15 bp, Homo sapiens
cctggatatcacatt

SEQ ID NO: 1878053 - DNA, 15 bp, Homo sapiens
ctggatatcacatta

SEQ ID NO: 1878054 - DNA, 15 bp, Homo sapiens
tggatatcacattat

SEQ ID NO: 1878055 - DNA, 15 bp, Homo sapiens
ggatatcacattata

SEQ ID NO: 1878056 - DNA, 15 bp, Homo sapiens
gatatcacattataa

SEQ ID NO: 1878057 - DNA, 15 bp, Homo sapiens
atatcacattataat

SEQ ID NO: 1878058 - DNA, 15 bp, Homo sapiens
tatcacattataata

SEQ ID NO: 1878059 - DNA, 15 bp, Homo sapiens
atcacattataatac

SEQ ID NO: 1878060 - DNA, 15 bp, Homo sapiens
tcacattataataca

SEQ ID NO: 1878061 - DNA, 15 bp, Homo sapiens
cacattataatacat

SEQ ID NO: 1878062 - DNA, 15 bp, Homo sapiens
acattataatacatt

SEQ ID NO: 1878063 - DNA, 15 bp, Homo sapiens
cattataatacattc

SEQ ID NO: 1878064 - DNA, 15 bp, Homo sapiens
attataatacattct

SEQ ID NO: 1878065 - DNA, 15 bp, Homo sapiens
ttataatacattctg

SEQ ID NO: 1878066 - DNA, 15 bp, Homo sapiens
tataatacattctgt

SEQ ID NO: 1878067 - DNA, 15 bp, Homo sapiens
ataatacattctgtc

SEQ ID NO: 1878068 - DNA, 15 bp, Homo sapiens
taatacattctgtct

SEQ ID NO: 1878069 - DNA, 15 bp, Homo sapiens
aatacattctgtctt

SEQ ID NO: 1878070 - DNA, 15 bp, Homo sapiens
atacattctgtctta

SEQ ID NO: 1878071 - DNA, 15 bp, Homo sapiens
tacattctgtcttac

SEQ ID NO: 1878072 - DNA, 15 bp, Homo sapiens
acattctgtcttact

SEQ ID NO: 1878073 - DNA, 15 bp, Homo sapiens
cattctgtcttactg

SEQ ID NO: 1878074 - DNA, 15 bp, Homo sapiens
attctgtcttactga

SEQ ID NO: 1878075 - DNA, 15 bp, Homo sapiens
ttctgtcttactgaa

SEQ ID NO: 1878076 - DNA, 15 bp, Homo sapiens
tctgtcttactgaaa

SEQ ID NO: 1878077 - DNA, 15 bp, Homo sapiens
ctgtcttactgaaat

SEQ ID NO: 1878078 - DNA, 15 bp, Homo sapiens
tgtcttactgaaata

SEQ ID NO: 1878079 - DNA, 15 bp, Homo sapiens
gtcttactgaaataa

SEQ ID NO: 1878080 - DNA, 15 bp, Homo sapiens
tcttactgaaataat

SEQ ID NO: 1878081 - DNA, 15 bp, Homo sapiens
cttactgaaataata

SEQ ID NO: 1878082 - DNA, 15 bp, Homo sapiens
ttactgaaataatat

SEQ ID NO: 1878083 - DNA, 15 bp, Homo sapiens
tactgaaataatatt

SEQ ID NO: 1878084 - DNA, 15 bp, Homo sapiens
actgaaataatattg

SEQ ID NO: 1878085 - DNA, 15 bp, Homo sapiens
ctgaaataatattgt

SEQ ID NO: 1878086 - DNA, 15 bp, Homo sapiens
tgaaataatattgtt

SEQ ID NO: 1878087 - DNA, 15 bp, Homo sapiens
gaaataatattgttt

SEQ ID NO: 1878088 - DNA, 15 bp, Homo sapiens
aaataatattgtttt

SEQ ID NO: 1878089 - DNA, 15 bp, Homo sapiens
aataatattgtttta

SEQ ID NO: 1878090 - DNA, 15 bp, Homo sapiens
ataatattgttttaa

SEQ ID NO: 1878091 - DNA, 15 bp, Homo sapiens
taatattgttttaaa

SEQ ID NO: 1878092 - DNA, 15 bp, Homo sapiens
aatattgttttaaat

SEQ ID NO: 1878093 - DNA, 15 bp, Homo sapiens
atattgttttaaata

SEQ ID NO: 1878094 - DNA, 15 bp, Homo sapiens
tattgttttaaatac

SEQ ID NO: 1878095 - DNA, 15 bp, Homo sapiens
attgttttaaatact

SEQ ID NO: 1878096 - DNA, 15 bp, Homo sapiens
ttgttttaaatactt

SEQ ID NO: 1878097 - DNA, 15 bp, Homo sapiens
tgttttaaatacttg

SEQ ID NO: 1878098 - DNA, 15 bp, Homo sapiens
gttttaaatacttgc

SEQ ID NO: 1878099 - DNA, 15 bp, Homo sapiens
ttttaaatacttgca

SEQ ID NO: 1878100 - DNA, 15 bp, Homo sapiens
tttaaatacttgcac

SEQ ID NO: 1878101 - DNA, 15 bp, Homo sapiens
ttaaatacttgcacc

SEQ ID NO: 1878102 - DNA, 15 bp, Homo sapiens
taaatacttgcaccc

SEQ ID NO: 1878103 - DNA, 15 bp, Homo sapiens
aaatacttgcaccct

SEQ ID NO: 1878104 - DNA, 15 bp, Homo sapiens
aatacttgcaccctt

SEQ ID NO: 1878105 - DNA, 15 bp, Homo sapiens
atacttgcacccttc

SEQ ID NO: 1878106 - DNA, 15 bp, Homo sapiens
tacttgcacccttcc

SEQ ID NO: 1878107 - DNA, 15 bp, Homo sapiens
acttgcacccttcct

SEQ ID NO: 1878108 - DNA, 15 bp, Homo sapiens
cttgcacccttcctc

SEQ ID NO: 1878109 - DNA, 15 bp, Homo sapiens
ttgcacccttcctca

SEQ ID NO: 1878110 - DNA, 15 bp, Homo sapiens
tgcacccttcctcac

SEQ ID NO: 1878111 - DNA, 15 bp, Homo sapiens
gcacccttcctcacc

SEQ ID NO: 1878112 - DNA, 15 bp, Homo sapiens
cacccttcctcacca

SEQ ID NO: 1878113 - DNA, 15 bp, Homo sapiens
acccttcctcaccaa

SEQ ID NO: 1878114 - DNA, 15 bp, Homo sapiens
cccttcctcaccaaa

SEQ ID NO: 1878115 - DNA, 15 bp, Homo sapiens
ccttcctcaccaaaa

SEQ ID NO: 1878116 - DNA, 15 bp, Homo sapiens
cttcctcaccaaaaa

SEQ ID NO: 1878117 - DNA, 15 bp, Homo sapiens
ttcctcaccaaaaaa

SEQ ID NO: 1878118 - DNA, 15 bp, Homo sapiens
tcctcaccaaaaaaa

SEQ ID NO: 1878119 - DNA, 15 bp, Homo sapiens
cctcaccaaaaaaaa

SEQ ID NO: 1878120 - DNA, 15 bp, Homo sapiens
ctcaccaaaaaaaac

SEQ ID NO: 1878121 - DNA, 15 bp, Homo sapiens
tcaccaaaaaaaaca

SEQ ID NO: 1878122 - DNA, 15 bp, Homo sapiens
caccaaaaaaaacag

SEQ ID NO: 1878123 - DNA, 15 bp, Homo sapiens
accaaaaaaaacaga

SEQ ID NO: 1878124 - DNA, 15 bp, Homo sapiens
ccaaaaaaaacagac

SEQ ID NO: 1878125 - DNA, 15 bp, Homo sapiens
caaaaaaaacagaca

SEQ ID NO: 1878126 - DNA, 15 bp, Homo sapiens
aaaaaaaacagacaa

SEQ ID NO: 1878127 - DNA, 15 bp, Homo sapiens
aaaaaaacagacaaa

SEQ ID NO: 1878128 - DNA, 15 bp, Homo sapiens
aaaaaacagacaaaa

SEQ ID NO: 1878129 - DNA, 15 bp, Homo sapiens
aaaaacagacaaaaa

SEQ ID NO: 1878130 - DNA, 15 bp, Homo sapiens
aaaacagacaaaaaa

SEQ ID NO: 1878131 - DNA, 15 bp, Homo sapiens
aaacagacaaaaaaa

SEQ ID NO: 1878132 - DNA, 15 bp, Homo sapiens
aacagacaaaaaaag

SEQ ID NO: 1878133 - DNA, 15 bp, Homo sapiens
acagacaaaaaaagc

SEQ ID NO: 1878134 - DNA, 15 bp, Homo sapiens
cagacaaaaaaagcc

SEQ ID NO: 1878135 - DNA, 15 bp, Homo sapiens
agacaaaaaaagcct

SEQ ID NO: 1878136 - DNA, 15 bp, Homo sapiens
gacaaaaaaagcctt

SEQ ID NO: 1878137 - DNA, 15 bp, Homo sapiens
acaaaaaaagccttt

SEQ ID NO: 1878138 - DNA, 15 bp, Homo sapiens
caaaaaaagccttta

SEQ ID NO: 1878139 - DNA, 15 bp, Homo sapiens
aaaaaaagcctttaa

SEQ ID NO: 1878140 - DNA, 15 bp, Homo sapiens
aaaaaagcctttaaa

SEQ ID NO: 1878141 - DNA, 15 bp, Homo sapiens
aaaaagcctttaaaa

SEQ ID NO: 1878142 - DNA, 15 bp, Homo sapiens
aaaagcctttaaaat

SEQ ID NO: 1878143 - DNA, 15 bp, Homo sapiens
aaagcctttaaaata

SEQ ID NO: 1878144 - DNA, 15 bp, Homo sapiens
aagcctttaaaatac

SEQ ID NO: 1878145 - DNA, 15 bp, Homo sapiens
agcctttaaaatacc

SEQ ID NO: 1878146 - DNA, 15 bp, Homo sapiens
gcctttaaaatacca

SEQ ID NO: 1878147 - DNA, 15 bp, Homo sapiens
cctttaaaataccaa

SEQ ID NO: 1878148 - DNA, 15 bp, Homo sapiens
ctttaaaataccaaa

SEQ ID NO: 1878149 - DNA, 15 bp, Homo sapiens
tttaaaataccaaaa

SEQ ID NO: 1878150 - DNA, 15 bp, Homo sapiens
ttaaaataccaaaaa

SEQ ID NO: 1878151 - DNA, 15 bp, Homo sapiens
taaaataccaaaaaa

SEQ ID NO: 1878152 - DNA, 15 bp, Homo sapiens
aaaataccaaaaaaa

SEQ ID NO: 1878153 - DNA, 15 bp, Homo sapiens
aataccaaaaaaatt

SEQ ID NO: 1878154 - DNA, 15 bp, Homo sapiens
ataccaaaaaaatta

SEQ ID NO: 1878155 - DNA, 15 bp, Homo sapiens
taccaaaaaaattat

SEQ ID NO: 1878156 - DNA, 15 bp, Homo sapiens
accaaaaaaattatg

SEQ ID NO: 1878157 - DNA, 15 bp, Homo sapiens
ccaaaaaaattatgt

SEQ ID NO: 1878158 - DNA, 15 bp, Homo sapiens
caaaaaaattatgtg

SEQ ID NO: 1878159 - DNA, 15 bp, Homo sapiens
aaaaaaattatgtgg

SEQ ID NO: 1878160 - DNA, 15 bp, Homo sapiens
aaaaaattatgtgga

SEQ ID NO: 1878161 - DNA, 15 bp, Homo sapiens
aaaaattatgtggaa

SEQ ID NO: 1878162 - DNA, 15 bp, Homo sapiens
aaaattatgtggaag

SEQ ID NO: 1878163 - DNA, 15 bp, Homo sapiens
aaattatgtggaaga

SEQ ID NO: 1878164 - DNA, 15 bp, Homo sapiens
aattatgtggaagag

SEQ ID NO: 1878165 - DNA, 15 bp, Homo sapiens
attatgtggaagagt

SEQ ID NO: 1878166 - DNA, 15 bp, Homo sapiens
ttatgtggaagagta

SEQ ID NO: 1878167 - DNA, 15 bp, Homo sapiens
tatgtggaagagtaa

SEQ ID NO: 1878168 - DNA, 15 bp, Homo sapiens
atgtggaagagtaaa

SEQ ID NO: 1878169 - DNA, 15 bp, Homo sapiens
tgtggaagagtaaac

SEQ ID NO: 1878170 - DNA, 15 bp, Homo sapiens
gtggaagagtaaacg

SEQ ID NO: 1878171 - DNA, 15 bp, Homo sapiens
tggaagagtaaacgc

SEQ ID NO: 1878172 - DNA, 15 bp, Homo sapiens
ggaagagtaaacgct

SEQ ID NO: 1878173 - DNA, 15 bp, Homo sapiens
gaagagtaaacgcta

SEQ ID NO: 1878174 - DNA, 15 bp, Homo sapiens
aagagtaaacgctag

SEQ ID NO: 1878175 - DNA, 15 bp, Homo sapiens
agagtaaacgctagt

SEQ ID NO: 1878176 - DNA, 15 bp, Homo sapiens
gagtaaacgctagtt

SEQ ID NO: 1878177 - DNA, 15 bp, Homo sapiens
agtaaacgctagttc

SEQ ID NO: 1878178 - DNA, 15 bp, Homo sapiens
gtaaacgctagttct

SEQ ID NO: 1878179 - DNA, 15 bp, Homo sapiens
taaacgctagttctt

SEQ ID NO: 1878180 - DNA, 15 bp, Homo sapiens
aaacgctagttcttc

SEQ ID NO: 1878181 - DNA, 15 bp, Homo sapiens
aacgctagttcttca

SEQ ID NO: 1878182 - DNA, 15 bp, Homo sapiens
acgctagttcttcaa

SEQ ID NO: 1878183 - DNA, 15 bp, Homo sapiens
cgctagttcttcaaa

SEQ ID NO: 1878184 - DNA, 15 bp, Homo sapiens
gctagttcttcaaag

SEQ ID NO: 1878185 - DNA, 15 bp, Homo sapiens
ctagttcttcaaagt

SEQ ID NO: 1878186 - DNA, 15 bp, Homo sapiens
tagttcttcaaagtt

SEQ ID NO: 1878187 - DNA, 15 bp, Homo sapiens
agttcttcaaagtta

SEQ ID NO: 1878188 - DNA, 15 bp, Homo sapiens
gttcttcaaagttaa

SEQ ID NO: 1878189 - DNA, 15 bp, Homo sapiens
ttcttcaaagttaaa

SEQ ID NO: 1878190 - DNA, 15 bp, Homo sapiens
tcttcaaagttaaag

SEQ ID NO: 1878191 - DNA, 15 bp, Homo sapiens
cttcaaagttaaaga

SEQ ID NO: 1878192 - DNA, 15 bp, Homo sapiens
ttcaaagttaaagac

SEQ ID NO: 1878193 - DNA, 15 bp, Homo sapiens
tcaaagttaaagact

SEQ ID NO: 1878194 - DNA, 15 bp, Homo sapiens
caaagttaaagactt

SEQ ID NO: 1878195 - DNA, 15 bp, Homo sapiens
aaagttaaagactta

SEQ ID NO: 1878196 - DNA, 15 bp, Homo sapiens
aagttaaagacttac

SEQ ID NO: 1878197 - DNA, 15 bp, Homo sapiens
agttaaagacttaca

SEQ ID NO: 1878198 - DNA, 15 bp, Homo sapiens
gttaaagacttacac

SEQ ID NO: 1878199 - DNA, 15 bp, Homo sapiens
ttaaagacttacaca

SEQ ID NO: 1878200 - DNA, 15 bp, Homo sapiens
taaagacttacacag

SEQ ID NO: 1878201 - DNA, 15 bp, Homo sapiens
aaagacttacacagc

SEQ ID NO: 1878202 - DNA, 15 bp, Homo sapiens
aagacttacacagct

SEQ ID NO: 1878203 - DNA, 15 bp, Homo sapiens
agacttacacagcta

SEQ ID NO: 1878204 - DNA, 15 bp, Homo sapiens
gacttacacagctat

SEQ ID NO: 1878205 - DNA, 15 bp, Homo sapiens
acttacacagctatg

SEQ ID NO: 1878206 - DNA, 15 bp, Homo sapiens
cttacacagctatgg

SEQ ID NO: 1878207 - DNA, 15 bp, Homo sapiens
ttacacagctatggc

SEQ ID NO: 1878208 - DNA, 15 bp, Homo sapiens
tacacagctatggca

SEQ ID NO: 1878209 - DNA, 15 bp, Homo sapiens
acacagctatggcaa

SEQ ID NO: 1878210 - DNA, 15 bp, Homo sapiens
cacagctatggcaat

SEQ ID NO: 1878211 - DNA, 15 bp, Homo sapiens
acagctatggcaata

SEQ ID NO: 1878212 - DNA, 15 bp, Homo sapiens
cagctatggcaatag

SEQ ID NO: 1878213 - DNA, 15 bp, Homo sapiens
agctatggcaataga

SEQ ID NO: 1878214 - DNA, 15 bp, Homo sapiens
gctatggcaatagaa

SEQ ID NO: 1878215 - DNA, 15 bp, Homo sapiens
ctatggcaatagaat

SEQ ID NO: 1878216 - DNA, 15 bp, Homo sapiens
tatggcaatagaatt

SEQ ID NO: 1878217 - DNA, 15 bp, Homo sapiens
atggcaatagaatta

SEQ ID NO: 1878218 - DNA, 15 bp, Homo sapiens
tggcaatagaattaa

SEQ ID NO: 1878219 - DNA, 15 bp, Homo sapiens
ggcaatagaattaat

SEQ ID NO: 1878220 - DNA, 15 bp, Homo sapiens
gcaatagaattaata

SEQ ID NO: 1878221 - DNA, 15 bp, Homo sapiens
caatagaattaataa

SEQ ID NO: 1878222 - DNA, 15 bp, Homo sapiens
aatagaattaataaa

SEQ ID NO: 1878223 - DNA, 15 bp, Homo sapiens
atagaattaataaat

SEQ ID NO: 1878224 - DNA, 15 bp, Homo sapiens
tagaattaataaatg

SEQ ID NO: 1878225 - DNA, 15 bp, Homo sapiens
agaattaataaatgc

SEQ ID NO: 1878226 - DNA, 15 bp, Homo sapiens
gaattaataaatgct

SEQ ID NO: 1878227 - DNA, 15 bp, Homo sapiens
aattaataaatgctc

SEQ ID NO: 1878228 - DNA, 15 bp, Homo sapiens
attaataaatgctct

SEQ ID NO: 1878229 - DNA, 15 bp, Homo sapiens
ttaataaatgctctt

SEQ ID NO: 1878230 - DNA, 15 bp, Homo sapiens
taataaatgctcttt

SEQ ID NO: 1878231 - DNA, 15 bp, Homo sapiens
aataaatgctctttt

SEQ ID NO: 1878232 - DNA, 15 bp, Homo sapiens
ataaatgctctttta

SEQ ID NO: 1878233 - DNA, 15 bp, Homo sapiens
taaatgctcttttat

SEQ ID NO: 1878234 - DNA, 15 bp, Homo sapiens
aaatgctcttttatg

SEQ ID NO: 1878235 - DNA, 15 bp, Homo sapiens
aatgctcttttatgc

SEQ ID NO: 1878236 - DNA, 15 bp, Homo sapiens
atgctcttttatgcc

SEQ ID NO: 1878237 - DNA, 15 bp, Homo sapiens
tgctcttttatgcct

SEQ ID NO: 1878238 - DNA, 15 bp, Homo sapiens
gctcttttatgcctg

SEQ ID NO: 1878239 - DNA, 15 bp, Homo sapiens
ctcttttatgcctga

SEQ ID NO: 1878240 - DNA, 15 bp, Homo sapiens
tcttttatgcctgac

SEQ ID NO: 1878241 - DNA, 15 bp, Homo sapiens
cttttatgcctgaca

SEQ ID NO: 1878242 - DNA, 15 bp, Homo sapiens
ttttatgcctgacac

SEQ ID NO: 1878243 - DNA, 15 bp, Homo sapiens
tttatgcctgacact

SEQ ID NO: 1878244 - DNA, 15 bp, Homo sapiens
ttatgcctgacactg

SEQ ID NO: 1878245 - DNA, 15 bp, Homo sapiens
tatgcctgacactgc

SEQ ID NO: 1878246 - DNA, 15 bp, Homo sapiens
atgcctgacactgct

SEQ ID NO: 1878247 - DNA, 15 bp, Homo sapiens
tgcctgacactgctt

SEQ ID NO: 1878248 - DNA, 15 bp, Homo sapiens
gcctgacactgcttt

SEQ ID NO: 1878249 - DNA, 15 bp, Homo sapiens
cctgacactgctttc

SEQ ID NO: 1878250 - DNA, 15 bp, Homo sapiens
ctgacactgctttca

SEQ ID NO: 1878251 - DNA, 15 bp, Homo sapiens
tgacactgctttcat

SEQ ID NO: 1878252 - DNA, 15 bp, Homo sapiens
gacactgctttcatc

SEQ ID NO: 1878253 - DNA, 15 bp, Homo sapiens
acactgctttcatca

SEQ ID NO: 1878254 - DNA, 15 bp, Homo sapiens
cactgctttcatcaa

SEQ ID NO: 1878255 - DNA, 15 bp, Homo sapiens
actgctttcatcaat

SEQ ID NO: 1878256 - DNA, 15 bp, Homo sapiens
ctgctttcatcaata

SEQ ID NO: 1878257 - DNA, 15 bp, Homo sapiens
tgctttcatcaatat

SEQ ID NO: 1878258 - DNA, 15 bp, Homo sapiens
gctttcatcaatatc

SEQ ID NO: 1878259 - DNA, 15 bp, Homo sapiens
ctttcatcaatatct

SEQ ID NO: 1878260 - DNA, 15 bp, Homo sapiens
tttcatcaatatctc

SEQ ID NO: 1878261 - DNA, 15 bp, Homo sapiens
ttcatcaatatctcc

SEQ ID NO: 1878262 - DNA, 15 bp, Homo sapiens
tcatcaatatctcca

SEQ ID NO: 1878263 - DNA, 15 bp, Homo sapiens
catcaatatctccaa

SEQ ID NO: 1878264 - DNA, 15 bp, Homo sapiens
atcaatatctccaat

SEQ ID NO: 1878265 - DNA, 15 bp, Homo sapiens
tcaatatctccaatg

SEQ ID NO: 1878266 - DNA, 15 bp, Homo sapiens
caatatctccaatga

SEQ ID NO: 1878267 - DNA, 15 bp, Homo sapiens
aatatctccaatgat

SEQ ID NO: 1878268 - DNA, 15 bp, Homo sapiens
atatctccaatgata

SEQ ID NO: 1878269 - DNA, 15 bp, Homo sapiens
tatctccaatgatac

SEQ ID NO: 1878270 - DNA, 15 bp, Homo sapiens
atctccaatgatact

SEQ ID NO: 1878271 - DNA, 15 bp, Homo sapiens
tctccaatgatacta

SEQ ID NO: 1878272 - DNA, 15 bp, Homo sapiens
ctccaatgatactag

SEQ ID NO: 1878273 - DNA, 15 bp, Homo sapiens
tccaatgatactagt

SEQ ID NO: 1878274 - DNA, 15 bp, Homo sapiens
ccaatgatactagtc

SEQ ID NO: 1878275 - DNA, 15 bp, Homo sapiens
caatgatactagtct

SEQ ID NO: 1878276 - DNA, 15 bp, Homo sapiens
aatgatactagtctc

SEQ ID NO: 1878277 - DNA, 15 bp, Homo sapiens
atgatactagtctca

SEQ ID NO: 1878278 - DNA, 15 bp, Homo sapiens
tgatactagtctcat

SEQ ID NO: 1878279 - DNA, 15 bp, Homo sapiens
gatactagtctcatc

SEQ ID NO: 1878280 - DNA, 15 bp, Homo sapiens
atactagtctcatct

SEQ ID NO: 1878281 - DNA, 15 bp, Homo sapiens
tactagtctcatctc

SEQ ID NO: 1878282 - DNA, 15 bp, Homo sapiens
actagtctcatctct

SEQ ID NO: 1878283 - DNA, 15 bp, Homo sapiens
ctagtctcatctctt

SEQ ID NO: 1878284 - DNA, 15 bp, Homo sapiens
tagtctcatctcttt

SEQ ID NO: 1878285 - DNA, 15 bp, Homo sapiens
agtctcatctctttg

SEQ ID NO: 1878286 - DNA, 15 bp, Homo sapiens
gtctcatctctttga

SEQ ID NO: 1878287 - DNA, 15 bp, Homo sapiens
tctcatctctttgac

SEQ ID NO: 1878288 - DNA, 15 bp, Homo sapiens
ctcatctctttgact

SEQ ID NO: 1878289 - DNA, 15 bp, Homo sapiens
tcatctctttgactt

SEQ ID NO: 1878290 - DNA, 15 bp, Homo sapiens
catctctttgactta

SEQ ID NO: 1878291 - DNA, 15 bp, Homo sapiens
atctctttgacttag

SEQ ID NO: 1878292 - DNA, 15 bp, Homo sapiens
tctctttgacttagt

SEQ ID NO: 1878293 - DNA, 15 bp, Homo sapiens
ctctttgacttagtg

SEQ ID NO: 1878294 - DNA, 15 bp, Homo sapiens
tctttgacttagtga

SEQ ID NO: 1878295 - DNA, 15 bp, Homo sapiens
ctttgacttagtgaa

SEQ ID NO: 1878296 - DNA, 15 bp, Homo sapiens
tttgacttagtgaat

SEQ ID NO: 1878297 - DNA, 15 bp, Homo sapiens
ttgacttagtgaatc

SEQ ID NO: 1878298 - DNA, 15 bp, Homo sapiens
tgacttagtgaatct

SEQ ID NO: 1878299 - DNA, 15 bp, Homo sapiens
gacttagtgaatctg

SEQ ID NO: 1878300 - DNA, 15 bp, Homo sapiens
acttagtgaatctga

SEQ ID NO: 1878301 - DNA, 15 bp, Homo sapiens
cttagtgaatctgaa

SEQ ID NO: 1878302 - DNA, 15 bp, Homo sapiens
ttagtgaatctgaat

SEQ ID NO: 1878303 - DNA, 15 bp, Homo sapiens
tagtgaatctgaatc

SEQ ID NO: 1878304 - DNA, 15 bp, Homo sapiens
agtgaatctgaatct

SEQ ID NO: 1878305 - DNA, 15 bp, Homo sapiens
gtgaatctgaatctc

SEQ ID NO: 1878306 - DNA, 15 bp, Homo sapiens
tgaatctgaatctcc

SEQ ID NO: 1878307 - DNA, 15 bp, Homo sapiens
gaatctgaatctccc

SEQ ID NO: 1878308 - DNA, 15 bp, Homo sapiens
aatctgaatctccca

SEQ ID NO: 1878309 - DNA, 15 bp, Homo sapiens
atctgaatctcccac

SEQ ID NO: 1878310 - DNA, 15 bp, Homo sapiens
tctgaatctcccaca

SEQ ID NO: 1878311 - DNA, 15 bp, Homo sapiens
ctgaatctcccacag

SEQ ID NO: 1878312 - DNA, 15 bp, Homo sapiens
tgaatctcccacagt

SEQ ID NO: 1878313 - DNA, 15 bp, Homo sapiens
gaatctcccacagtt

SEQ ID NO: 1878314 - DNA, 15 bp, Homo sapiens
aatctcccacagttg

SEQ ID NO: 1878315 - DNA, 15 bp, Homo sapiens
atctcccacagttgt

SEQ ID NO: 1878316 - DNA, 15 bp, Homo sapiens
tctcccacagttgtg

SEQ ID NO: 1878317 - DNA, 15 bp, Homo sapiens
ctcccacagttgtgc

SEQ ID NO: 1878318 - DNA, 15 bp, Homo sapiens
tcccacagttgtgca

SEQ ID NO: 1878319 - DNA, 15 bp, Homo sapiens
cccacagttgtgcag

SEQ ID NO: 1878320 - DNA, 15 bp, Homo sapiens
ccacagttgtgcaga

SEQ ID NO: 1878321 - DNA, 15 bp, Homo sapiens
cacagttgtgcagat

SEQ ID NO: 1878322 - DNA, 15 bp, Homo sapiens
acagttgtgcagatt

SEQ ID NO: 1878323 - DNA, 15 bp, Homo sapiens
cagttgtgcagattg

SEQ ID NO: 1878324 - DNA, 15 bp, Homo sapiens
agttgtgcagattgg

SEQ ID NO: 1878325 - DNA, 15 bp, Homo sapiens
gttgtgcagattggc

SEQ ID NO: 1878326 - DNA, 15 bp, Homo sapiens
ttgtgcagattggcc

SEQ ID NO: 1878327 - DNA, 15 bp, Homo sapiens
tgtgcagattggcca

SEQ ID NO: 1878328 - DNA, 15 bp, Homo sapiens
gtgcagattggccac

SEQ ID NO: 1878329 - DNA, 15 bp, Homo sapiens
tgcagattggccaca

SEQ ID NO: 1878330 - DNA, 15 bp, Homo sapiens
gcagattggccacag

SEQ ID NO: 1878331 - DNA, 15 bp, Homo sapiens
cagattggccacagt

SEQ ID NO: 1878332 - DNA, 15 bp, Homo sapiens
agattggccacagtc

SEQ ID NO: 1878333 - DNA, 15 bp, Homo sapiens
gattggccacagtca

SEQ ID NO: 1878334 - DNA, 15 bp, Homo sapiens
attggccacagtcag

SEQ ID NO: 1878335 - DNA, 15 bp, Homo sapiens
ttggccacagtcagt

SEQ ID NO: 1878336 - DNA, 15 bp, Homo sapiens
tggccacagtcagtc

SEQ ID NO: 1878337 - DNA, 15 bp, Homo sapiens
ggccacagtcagtct

SEQ ID NO: 1878338 - DNA, 15 bp, Homo sapiens
gccacagtcagtcta

SEQ ID NO: 1878339 - DNA, 15 bp, Homo sapiens
ccacagtcagtctat

SEQ ID NO: 1878340 - DNA, 15 bp, Homo sapiens
cacagtcagtctatt

SEQ ID NO: 1878341 - DNA, 15 bp, Homo sapiens
acagtcagtctattt

SEQ ID NO: 1878342 - DNA, 15 bp, Homo sapiens
cagtcagtctatttt

SEQ ID NO: 1878343 - DNA, 15 bp, Homo sapiens
agtcagtctattttg

SEQ ID NO: 1878344 - DNA, 15 bp, Homo sapiens
gtcagtctattttgg

SEQ ID NO: 1878345 - DNA, 15 bp, Homo sapiens
tcagtctattttggg

SEQ ID NO: 1878346 - DNA, 15 bp, Homo sapiens
cagtctattttgggc

SEQ ID NO: 1878347 - DNA, 15 bp, Homo sapiens
agtctattttgggct

SEQ ID NO: 1878348 - DNA, 15 bp, Homo sapiens
gtctattttgggctc

SEQ ID NO: 1878349 - DNA, 15 bp, Homo sapiens
tctattttgggctca

SEQ ID NO: 1878350 - DNA, 15 bp, Homo sapiens
ctattttgggctcac

SEQ ID NO: 1878351 - DNA, 15 bp, Homo sapiens
tattttgggctcact

SEQ ID NO: 1878352 - DNA, 15 bp, Homo sapiens
attttgggctcactt

SEQ ID NO: 1878353 - DNA, 15 bp, Homo sapiens
ttttgggctcacttt

SEQ ID NO: 1878354 - DNA, 15 bp, Homo sapiens
tttgggctcactttg

SEQ ID NO: 1878355 - DNA, 15 bp, Homo sapiens
ttgggctcactttga

SEQ ID NO: 1878356 - DNA, 15 bp, Homo sapiens
tgggctcactttgaa

SEQ ID NO: 1878357 - DNA, 15 bp, Homo sapiens
gggctcactttgaaa

SEQ ID NO: 1878358 - DNA, 15 bp, Homo sapiens
ggctcactttgaaat

SEQ ID NO: 1878359 - DNA, 15 bp, Homo sapiens
gctcactttgaaatg

SEQ ID NO: 1878360 - DNA, 15 bp, Homo sapiens
ctcactttgaaatgg

SEQ ID NO: 1878361 - DNA, 15 bp, Homo sapiens
tcactttgaaatggg

SEQ ID NO: 1878362 - DNA, 15 bp, Homo sapiens
cactttgaaatgggt

SEQ ID NO: 1878363 - DNA, 15 bp, Homo sapiens
actttgaaatgggtg

SEQ ID NO: 1878364 - DNA, 15 bp, Homo sapiens
ctttgaaatgggtgt

SEQ ID NO: 1878365 - DNA, 15 bp, Homo sapiens
tttgaaatgggtgtt

SEQ ID NO: 1878366 - DNA, 15 bp, Homo sapiens
ttgaaatgggtgttc

SEQ ID NO: 1878367 - DNA, 15 bp, Homo sapiens
tgaaatgggtgttct

SEQ ID NO: 1878368 - DNA, 15 bp, Homo sapiens
gaaatgggtgttcta

SEQ ID NO: 1878369 - DNA, 15 bp, Homo sapiens
aaatgggtgttctat

SEQ ID NO: 1878370 - DNA, 15 bp, Homo sapiens
aatgggtgttctata

SEQ ID NO: 1878371 - DNA, 15 bp, Homo sapiens
atgggtgttctatag

SEQ ID NO: 1878372 - DNA, 15 bp, Homo sapiens
tgggtgttctatagt

SEQ ID NO: 1878373 - DNA, 15 bp, Homo sapiens
gggtgttctatagta

SEQ ID NO: 1878374 - DNA, 15 bp, Homo sapiens
ggtgttctatagtat

SEQ ID NO: 1878375 - DNA, 15 bp, Homo sapiens
gtgttctatagtatg

SEQ ID NO: 1878376 - DNA, 15 bp, Homo sapiens
tgttctatagtatgt

SEQ ID NO: 1878377 - DNA, 15 bp, Homo sapiens
gttctatagtatgtg

SEQ ID NO: 1878378 - DNA, 15 bp, Homo sapiens
ttctatagtatgtgt

SEQ ID NO: 1878379 - DNA, 15 bp, Homo sapiens
tctatagtatgtgta

SEQ ID NO: 1878380 - DNA, 15 bp, Homo sapiens
ctatagtatgtgtag

SEQ ID NO: 1878381 - DNA, 15 bp, Homo sapiens
tatagtatgtgtaga

SEQ ID NO: 1878382 - DNA, 15 bp, Homo sapiens
atagtatgtgtagac

SEQ ID NO: 1878383 - DNA, 15 bp, Homo sapiens
tagtatgtgtagact

SEQ ID NO: 1878384 - DNA, 15 bp, Homo sapiens
agtatgtgtagacta

SEQ ID NO: 1878385 - DNA, 15 bp, Homo sapiens
gtatgtgtagactaa

SEQ ID NO: 1878386 - DNA, 15 bp, Homo sapiens
tatgtgtagactaat

SEQ ID NO: 1878387 - DNA, 15 bp, Homo sapiens
atgtgtagactaatc

SEQ ID NO: 1878388 - DNA, 15 bp, Homo sapiens
tgtgtagactaatca

SEQ ID NO: 1878389 - DNA, 15 bp, Homo sapiens
gtgtagactaatcat

SEQ ID NO: 1878390 - DNA, 15 bp, Homo sapiens
tgtagactaatcatc

SEQ ID NO: 1878391 - DNA, 15 bp, Homo sapiens
gtagactaatcatca

SEQ ID NO: 1878392 - DNA, 15 bp, Homo sapiens
tagactaatcatcac

SEQ ID NO: 1878393 - DNA, 15 bp, Homo sapiens
agactaatcatcaca

SEQ ID NO: 1878394 - DNA, 15 bp, Homo sapiens
gactaatcatcacaa

SEQ ID NO: 1878395 - DNA, 15 bp, Homo sapiens
actaatcatcacaaa

SEQ ID NO: 1878396 - DNA, 15 bp, Homo sapiens
ctaatcatcacaaag

SEQ ID NO: 1878397 - DNA, 15 bp, Homo sapiens
taatcatcacaaagc

SEQ ID NO: 1878398 - DNA, 15 bp, Homo sapiens
aatcatcacaaagca

SEQ ID NO: 1878399 - DNA, 15 bp, Homo sapiens
atcatcacaaagcag

SEQ ID NO: 1878400 - DNA, 15 bp, Homo sapiens
tcatcacaaagcagg

SEQ ID NO: 1878401 - DNA, 15 bp, Homo sapiens
catcacaaagcagga

SEQ ID NO: 1878402 - DNA, 15 bp, Homo sapiens
atcacaaagcaggaa

SEQ ID NO: 1878403 - DNA, 15 bp, Homo sapiens
tcacaaagcaggaag

SEQ ID NO: 1878404 - DNA, 15 bp, Homo sapiens
cacaaagcaggaagt

SEQ ID NO: 1878405 - DNA, 15 bp, Homo sapiens
acaaagcaggaagta

SEQ ID NO: 1878406 - DNA, 15 bp, Homo sapiens
caaagcaggaagtat

SEQ ID NO: 1878407 - DNA, 15 bp, Homo sapiens
aaagcaggaagtata

SEQ ID NO: 1878408 - DNA, 15 bp, Homo sapiens
aagcaggaagtatag

SEQ ID NO: 1878409 - DNA, 15 bp, Homo sapiens
agcaggaagtatagc

SEQ ID NO: 1878410 - DNA, 15 bp, Homo sapiens
gcaggaagtatagct

SEQ ID NO: 1878411 - DNA, 15 bp, Homo sapiens
caggaagtatagctt

SEQ ID NO: 1878412 - DNA, 15 bp, Homo sapiens
aggaagtatagcttc

SEQ ID NO: 1878413 - DNA, 15 bp, Homo sapiens
ggaagtatagcttct

SEQ ID NO: 1878414 - DNA, 15 bp, Homo sapiens
gaagtatagcttctg

SEQ ID NO: 1878415 - DNA, 15 bp, Homo sapiens
aagtatagcttctgt

SEQ ID NO: 1878416 - DNA, 15 bp, Homo sapiens
agtatagcttctgta

SEQ ID NO: 1878417 - DNA, 15 bp, Homo sapiens
gtatagcttctgtaa

SEQ ID NO: 1878418 - DNA, 15 bp, Homo sapiens
tatagcttctgtaac

SEQ ID NO: 1878419 - DNA, 15 bp, Homo sapiens
atagcttctgtaact

SEQ ID NO: 1878420 - DNA, 15 bp, Homo sapiens
tagcttctgtaactc

SEQ ID NO: 1878421 - DNA, 15 bp, Homo sapiens
agcttctgtaactcc

SEQ ID NO: 1878422 - DNA, 15 bp, Homo sapiens
gcttctgtaactccg

SEQ ID NO: 1878423 - DNA, 15 bp, Homo sapiens
cttctgtaactccgt

SEQ ID NO: 1878424 - DNA, 15 bp, Homo sapiens
ttctgtaactccgtt

SEQ ID NO: 1878425 - DNA, 15 bp, Homo sapiens
tctgtaactccgttt

SEQ ID NO: 1878426 - DNA, 15 bp, Homo sapiens
ctgtaactccgttta

SEQ ID NO: 1878427 - DNA, 15 bp, Homo sapiens
tgtaactccgtttat

SEQ ID NO: 1878428 - DNA, 15 bp, Homo sapiens
gtaactccgtttatt

SEQ ID NO: 1878429 - DNA, 15 bp, Homo sapiens
taactccgtttatta

SEQ ID NO: 1878430 - DNA, 15 bp, Homo sapiens
aactccgtttattac

SEQ ID NO: 1878431 - DNA, 15 bp, Homo sapiens
actccgtttattacc

SEQ ID NO: 1878432 - DNA, 15 bp, Homo sapiens
ctccgtttattacca

SEQ ID NO: 1878433 - DNA, 15 bp, Homo sapiens
tccgtttattaccat

SEQ ID NO: 1878434 - DNA, 15 bp, Homo sapiens
ccgtttattaccatc

SEQ ID NO: 1878435 - DNA, 15 bp, Homo sapiens
cgtttattaccatct

SEQ ID NO: 1878436 - DNA, 15 bp, Homo sapiens
gtttattaccatctt

SEQ ID NO: 1878437 - DNA, 15 bp, Homo sapiens
tattaccatcttgat

SEQ ID NO: 1878438 - DNA, 15 bp, Homo sapiens
attaccatcttgatg

SEQ ID NO: 1878439 - DNA, 15 bp, Homo sapiens
ttaccatcttgatgt

SEQ ID NO: 1878440 - DNA, 15 bp, Homo sapiens
taccatcttgatgta

SEQ ID NO: 1878441 - DNA, 15 bp, Homo sapiens
accatcttgatgtat

SEQ ID NO: 1878442 - DNA, 15 bp, Homo sapiens
ccatcttgatgtatt

SEQ ID NO: 1878443 - DNA, 15 bp, Homo sapiens
catcttgatgtattt

SEQ ID NO: 1878444 - DNA, 15 bp, Homo sapiens
atcttgatgtatttc

SEQ ID NO: 1878445 - DNA, 15 bp, Homo sapiens
tcttgatgtatttca

SEQ ID NO: 1878446 - DNA, 15 bp, Homo sapiens
cttgatgtatttcac

SEQ ID NO: 1878447 - DNA, 15 bp, Homo sapiens
ttgatgtatttcact

SEQ ID NO: 1878448 - DNA, 15 bp, Homo sapiens
tgatgtatttcactg

SEQ ID NO: 1878449 - DNA, 15 bp, Homo sapiens
gatgtatttcactga

SEQ ID NO: 1878450 - DNA, 15 bp, Homo sapiens
atgtatttcactgag

SEQ ID NO: 1878451 - DNA, 15 bp, Homo sapiens
tgtatttcactgagc

SEQ ID NO: 1878452 - DNA, 15 bp, Homo sapiens
gtatttcactgagct

SEQ ID NO: 1878453 - DNA, 15 bp, Homo sapiens
tatttcactgagctt

SEQ ID NO: 1878454 - DNA, 15 bp, Homo sapiens
atttcactgagcttt

SEQ ID NO: 1878455 - DNA, 15 bp, Homo sapiens
tttcactgagctttt

SEQ ID NO: 1878456 - DNA, 15 bp, Homo sapiens
ttcactgagcttttc

SEQ ID NO: 1878457 - DNA, 15 bp, Homo sapiens
tcactgagcttttcc

SEQ ID NO: 1878458 - DNA, 15 bp, Homo sapiens
cactgagcttttcct

SEQ ID NO: 1878459 - DNA, 15 bp, Homo sapiens
actgagcttttcctt

SEQ ID NO: 1878460 - DNA, 15 bp, Homo sapiens
ctgagcttttccttt

SEQ ID NO: 1878461 - DNA, 15 bp, Homo sapiens
tgagcttttccttta

SEQ ID NO: 1878462 - DNA, 15 bp, Homo sapiens
gagcttttcctttac

SEQ ID NO: 1878463 - DNA, 15 bp, Homo sapiens
agcttttcctttact

SEQ ID NO: 1878464 - DNA, 15 bp, Homo sapiens
gcttttcctttacta

SEQ ID NO: 1878465 - DNA, 15 bp, Homo sapiens
cttttcctttactaa

SEQ ID NO: 1878466 - DNA, 15 bp, Homo sapiens
ttttcctttactaaa

SEQ ID NO: 1878467 - DNA, 15 bp, Homo sapiens
tttcctttactaaag

SEQ ID NO: 1878468 - DNA, 15 bp, Homo sapiens
ttcctttactaaagt

SEQ ID NO: 1878469 - DNA, 15 bp, Homo sapiens
tcctttactaaagtt

SEQ ID NO: 1878470 - DNA, 15 bp, Homo sapiens
cctttactaaagttt

SEQ ID NO: 1878471 - DNA, 15 bp, Homo sapiens
ctttactaaagtttc

SEQ ID NO: 1878472 - DNA, 15 bp, Homo sapiens
tttactaaagtttcc

SEQ ID NO: 1878473 - DNA, 15 bp, Homo sapiens
ttactaaagtttccc

SEQ ID NO: 1878474 - DNA, 15 bp, Homo sapiens
tactaaagtttccca

SEQ ID NO: 1878475 - DNA, 15 bp, Homo sapiens
actaaagtttcccat

SEQ ID NO: 1878476 - DNA, 15 bp, Homo sapiens
ctaaagtttcccatg

SEQ ID NO: 1878477 - DNA, 15 bp, Homo sapiens
taaagtttcccatgt

SEQ ID NO: 1878478 - DNA, 15 bp, Homo sapiens
aaagtttcccatgtc

SEQ ID NO: 1878479 - DNA, 15 bp, Homo sapiens
aagtttcccatgtct

SEQ ID NO: 1878480 - DNA, 15 bp, Homo sapiens
agtttcccatgtcta

SEQ ID NO: 1878481 - DNA, 15 bp, Homo sapiens
gtttcccatgtctaa

SEQ ID NO: 1878482 - DNA, 15 bp, Homo sapiens
tttcccatgtctaaa

SEQ ID NO: 1878483 - DNA, 15 bp, Homo sapiens
ttcccatgtctaaaa

SEQ ID NO: 1878484 - DNA, 15 bp, Homo sapiens
tcccatgtctaaaaa

SEQ ID NO: 1878485 - DNA, 15 bp, Homo sapiens
cccatgtctaaaaat

SEQ ID NO: 1878486 - DNA, 15 bp, Homo sapiens
ccatgtctaaaaatg

SEQ ID NO: 1878487 - DNA, 15 bp, Homo sapiens
catgtctaaaaatgg

SEQ ID NO: 1878488 - DNA, 15 bp, Homo sapiens
atgtctaaaaatggg

SEQ ID NO: 1878489 - DNA, 15 bp, Homo sapiens
tgtctaaaaatggga

SEQ ID NO: 1878490 - DNA, 15 bp, Homo sapiens
gtctaaaaatgggag

SEQ ID NO: 1878491 - DNA, 15 bp, Homo sapiens
tctaaaaatgggagt

SEQ ID NO: 1878492 - DNA, 15 bp, Homo sapiens
ctaaaaatgggagta

SEQ ID NO: 1878493 - DNA, 15 bp, Homo sapiens
taaaaatgggagtag

SEQ ID NO: 1878494 - DNA, 15 bp, Homo sapiens
aaaaatgggagtagc

SEQ ID NO: 1878495 - DNA, 15 bp, Homo sapiens
aaaatgggagtagcg

SEQ ID NO: 1878496 - DNA, 15 bp, Homo sapiens
aaatgggagtagcgt

SEQ ID NO: 1878497 - DNA, 15 bp, Homo sapiens
aatgggagtagcgtg

SEQ ID NO: 1878498 - DNA, 15 bp, Homo sapiens
atgggagtagcgtgt

SEQ ID NO: 1878499 - DNA, 15 bp, Homo sapiens
tgggagtagcgtgtc

SEQ ID NO: 1878500 - DNA, 15 bp, Homo sapiens
gggagtagcgtgtct

SEQ ID NO: 1878501 - DNA, 15 bp, Homo sapiens
ggagtagcgtgtctg

SEQ ID NO: 1878502 - DNA, 15 bp, Homo sapiens
gagtagcgtgtctgc

SEQ ID NO: 1878503 - DNA, 15 bp, Homo sapiens
agtagcgtgtctgct

SEQ ID NO: 1878504 - DNA, 15 bp, Homo sapiens
gtagcgtgtctgctc

SEQ ID NO: 1878505 - DNA, 15 bp, Homo sapiens
tagcgtgtctgctct

SEQ ID NO: 1878506 - DNA, 15 bp, Homo sapiens
agcgtgtctgctctt

SEQ ID NO: 1878507 - DNA, 15 bp, Homo sapiens
gcgtgtctgctcttt

SEQ ID NO: 1878508 - DNA, 15 bp, Homo sapiens
cgtgtctgctcttta

SEQ ID NO: 1878509 - DNA, 15 bp, Homo sapiens
gtgtctgctctttaa

SEQ ID NO: 1878510 - DNA, 15 bp, Homo sapiens
tgtctgctctttaac

SEQ ID NO: 1878511 - DNA, 15 bp, Homo sapiens
gtctgctctttaact

SEQ ID NO: 1878512 - DNA, 15 bp, Homo sapiens
tctgctctttaactg

SEQ ID NO: 1878513 - DNA, 15 bp, Homo sapiens
ctgctctttaactgc

SEQ ID NO: 1878514 - DNA, 15 bp, Homo sapiens
tgctctttaactgct

SEQ ID NO: 1878515 - DNA, 15 bp, Homo sapiens
gctctttaactgctt

SEQ ID NO: 1878516 - DNA, 15 bp, Homo sapiens
ctctttaactgcttt

SEQ ID NO: 1878517 - DNA, 15 bp, Homo sapiens
tctttaactgctttg

SEQ ID NO: 1878518 - DNA, 15 bp, Homo sapiens
ctttaactgctttga

SEQ ID NO: 1878519 - DNA, 15 bp, Homo sapiens
tttaactgctttgaa

SEQ ID NO: 1878520 - DNA, 15 bp, Homo sapiens
ttaactgctttgaag

SEQ ID NO: 1878521 - DNA, 15 bp, Homo sapiens
taactgctttgaaga

SEQ ID NO: 1878522 - DNA, 15 bp, Homo sapiens
aactgctttgaagat

SEQ ID NO: 1878523 - DNA, 15 bp, Homo sapiens
actgctttgaagata

SEQ ID NO: 1878524 - DNA, 15 bp, Homo sapiens
ctgctttgaagatat

SEQ ID NO: 1878525 - DNA, 15 bp, Homo sapiens
tgctttgaagatata

SEQ ID NO: 1878526 - DNA, 15 bp, Homo sapiens
gctttgaagatatac

SEQ ID NO: 1878527 - DNA, 15 bp, Homo sapiens
ctttgaagatataca

SEQ ID NO: 1878528 - DNA, 15 bp, Homo sapiens
tttgaagatatacag

SEQ ID NO: 1878529 - DNA, 15 bp, Homo sapiens
ttgaagatatacagt

SEQ ID NO: 1878530 - DNA, 15 bp, Homo sapiens
tgaagatatacagtt

SEQ ID NO: 1878531 - DNA, 15 bp, Homo sapiens
gaagatatacagttt

SEQ ID NO: 1878532 - DNA, 15 bp, Homo sapiens
aagatatacagtttt

SEQ ID NO: 1878533 - DNA, 15 bp, Homo sapiens
agatatacagtttta

SEQ ID NO: 1878534 - DNA, 15 bp, Homo sapiens
gatatacagttttag

SEQ ID NO: 1878535 - DNA, 15 bp, Homo sapiens
atatacagttttagt

SEQ ID NO: 1878536 - DNA, 15 bp, Homo sapiens
tatacagttttagtt

SEQ ID NO: 1878537 - DNA, 15 bp, Homo sapiens
atacagttttagttt

SEQ ID NO: 1878538 - DNA, 15 bp, Homo sapiens
tacagttttagtttc

SEQ ID NO: 1878539 - DNA, 15 bp, Homo sapiens
acagttttagtttct

SEQ ID NO: 1878540 - DNA, 15 bp, Homo sapiens
cagttttagtttctg

SEQ ID NO: 1878541 - DNA, 15 bp, Homo sapiens
agttttagtttctgt

SEQ ID NO: 1878542 - DNA, 15 bp, Homo sapiens
gttttagtttctgtg

SEQ ID NO: 1878543 - DNA, 15 bp, Homo sapiens
ttttagtttctgtgg

SEQ ID NO: 1878544 - DNA, 15 bp, Homo sapiens
tttagtttctgtggt

SEQ ID NO: 1878545 - DNA, 15 bp, Homo sapiens
ttagtttctgtggtc

SEQ ID NO: 1878546 - DNA, 15 bp, Homo sapiens
tagtttctgtggtca

SEQ ID NO: 1878547 - DNA, 15 bp, Homo sapiens
agtttctgtggtcag

SEQ ID NO: 1878548 - DNA, 15 bp, Homo sapiens
gtttctgtggtcaga

SEQ ID NO: 1878549 - DNA, 15 bp, Homo sapiens
tttctgtggtcagaa

SEQ ID NO: 1878550 - DNA, 15 bp, Homo sapiens
ttctgtggtcagaat

SEQ ID NO: 1878551 - DNA, 15 bp, Homo sapiens
tctgtggtcagaata

SEQ ID NO: 1878552 - DNA, 15 bp, Homo sapiens
ctgtggtcagaatac

SEQ ID NO: 1878553 - DNA, 15 bp, Homo sapiens
tgtggtcagaatact

SEQ ID NO: 1878554 - DNA, 15 bp, Homo sapiens
gtggtcagaatactt

SEQ ID NO: 1878555 - DNA, 15 bp, Homo sapiens
tggtcagaatacttt

SEQ ID NO: 1878556 - DNA, 15 bp, Homo sapiens
ggtcagaatacttta

SEQ ID NO: 1878557 - DNA, 15 bp, Homo sapiens
gtcagaatactttag

SEQ ID NO: 1878558 - DNA, 15 bp, Homo sapiens
tcagaatactttagg

SEQ ID NO: 1878559 - DNA, 15 bp, Homo sapiens
cagaatactttaggt

SEQ ID NO: 1878560 - DNA, 15 bp, Homo sapiens
agaatactttaggtg

SEQ ID NO: 1878561 - DNA, 15 bp, Homo sapiens
gaatactttaggtgt

SEQ ID NO: 1878562 - DNA, 15 bp, Homo sapiens
aatactttaggtgta

SEQ ID NO: 1878563 - DNA, 15 bp, Homo sapiens
atactttaggtgtaa

SEQ ID NO: 1878564 - DNA, 15 bp, Homo sapiens
tactttaggtgtaag

SEQ ID NO: 1878565 - DNA, 15 bp, Homo sapiens
actttaggtgtaaga

SEQ ID NO: 1878566 - DNA, 15 bp, Homo sapiens
ctttaggtgtaagaa

SEQ ID NO: 1878567 - DNA, 15 bp, Homo sapiens
tttaggtgtaagaag

SEQ ID NO: 1878568 - DNA, 15 bp, Homo sapiens
ttaggtgtaagaaga

SEQ ID NO: 1878569 - DNA, 15 bp, Homo sapiens
taggtgtaagaagaa

SEQ ID NO: 1878570 - DNA, 15 bp, Homo sapiens
aggtgtaagaagaaa

SEQ ID NO: 1878571 - DNA, 15 bp, Homo sapiens
ggtgtaagaagaaag

SEQ ID NO: 1878572 - DNA, 15 bp, Homo sapiens
gtgtaagaagaaagt

SEQ ID NO: 1878573 - DNA, 15 bp, Homo sapiens
tgtaagaagaaagta

SEQ ID NO: 1878574 - DNA, 15 bp, Homo sapiens
gtaagaagaaagtac

SEQ ID NO: 1878575 - DNA, 15 bp, Homo sapiens
taagaagaaagtact

SEQ ID NO: 1878576 - DNA, 15 bp, Homo sapiens
aagaagaaagtacta

SEQ ID NO: 1878577 - DNA, 15 bp, Homo sapiens
agaagaaagtactat

SEQ ID NO: 1878578 - DNA, 15 bp, Homo sapiens
gaagaaagtactatc

SEQ ID NO: 1878579 - DNA, 15 bp, Homo sapiens
aagaaagtactatca

SEQ ID NO: 1878580 - DNA, 15 bp, Homo sapiens
agaaagtactatcaa

SEQ ID NO: 1878581 - DNA, 15 bp, Homo sapiens
gaaagtactatcaag

SEQ ID NO: 1878582 - DNA, 15 bp, Homo sapiens
aaagtactatcaagt

SEQ ID NO: 1878583 - DNA, 15 bp, Homo sapiens
aagtactatcaagtt

SEQ ID NO: 1878584 - DNA, 15 bp, Homo sapiens
agtactatcaagttt

SEQ ID NO: 1878585 - DNA, 15 bp, Homo sapiens
gtactatcaagtttt

SEQ ID NO: 1878586 - DNA, 15 bp, Homo sapiens
tactatcaagttttg

SEQ ID NO: 1878587 - DNA, 15 bp, Homo sapiens
actatcaagttttgt

SEQ ID NO: 1878588 - DNA, 15 bp, Homo sapiens
ctatcaagttttgtt

SEQ ID NO: 1878589 - DNA, 15 bp, Homo sapiens
tatcaagttttgttg

SEQ ID NO: 1878590 - DNA, 15 bp, Homo sapiens
atcaagttttgttga

SEQ ID NO: 1878591 - DNA, 15 bp, Homo sapiens
tcaagttttgttgag

SEQ ID NO: 1878592 - DNA, 15 bp, Homo sapiens
caagttttgttgagg

SEQ ID NO: 1878593 - DNA, 15 bp, Homo sapiens
aagttttgttgagga

SEQ ID NO: 1878594 - DNA, 15 bp, Homo sapiens
gttttgttgaggaag

SEQ ID NO: 1878595 - DNA, 15 bp, Homo sapiens
ttttgttgaggaagg

SEQ ID NO: 1878596 - DNA, 15 bp, Homo sapiens
tttgttgaggaaggt

SEQ ID NO: 1878597 - DNA, 15 bp, Homo sapiens
ttgttgaggaaggtg

SEQ ID NO: 1878598 - DNA, 15 bp, Homo sapiens
tgttgaggaaggtga

SEQ ID NO: 1878599 - DNA, 15 bp, Homo sapiens
gttgaggaaggtgat

SEQ ID NO: 1878600 - DNA, 15 bp, Homo sapiens
ttgaggaaggtgata

SEQ ID NO: 1878601 - DNA, 15 bp, Homo sapiens
tgaggaaggtgataa

SEQ ID NO: 1878602 - DNA, 15 bp, Homo sapiens
gaggaaggtgataat

SEQ ID NO: 1878603 - DNA, 15 bp, Homo sapiens
aggaaggtgataatt

SEQ ID NO: 1878604 - DNA, 15 bp, Homo sapiens
ggaaggtgataatta

SEQ ID NO: 1878605 - DNA, 15 bp, Homo sapiens
gaaggtgataattaa

SEQ ID NO: 1878606 - DNA, 15 bp, Homo sapiens
aaggtgataattaaa

SEQ ID NO: 1878607 - DNA, 15 bp, Homo sapiens
aggtgataattaaaa

SEQ ID NO: 1878608 - DNA, 15 bp, Homo sapiens
ggtgataattaaaat

SEQ ID NO: 1878609 - DNA, 15 bp, Homo sapiens
gtgataattaaaatg

SEQ ID NO: 1878610 - DNA, 15 bp, Homo sapiens
tgataattaaaatgt

SEQ ID NO: 1878611 - DNA, 15 bp, Homo sapiens
gataattaaaatgta

SEQ ID NO: 1878612 - DNA, 15 bp, Homo sapiens
ataattaaaatgtat

SEQ ID NO: 1878613 - DNA, 15 bp, Homo sapiens
taattaaaatgtata

SEQ ID NO: 1878614 - DNA, 15 bp, Homo sapiens
aattaaaatgtatat

SEQ ID NO: 1878615 - DNA, 15 bp, Homo sapiens
attaaaatgtatatt

SEQ ID NO: 1878616 - DNA, 15 bp, Homo sapiens
ttaaaatgtatattt

SEQ ID NO: 1878617 - DNA, 15 bp, Homo sapiens
taaaatgtatatttg

SEQ ID NO: 1878618 - DNA, 15 bp, Homo sapiens
aaaatgtatatttgg

SEQ ID NO: 1878619 - DNA, 15 bp, Homo sapiens
aaatgtatatttgga

SEQ ID NO: 1878620 - DNA, 15 bp, Homo sapiens
aatgtatatttggag

SEQ ID NO: 1878621 - DNA, 15 bp, Homo sapiens
atgtatatttggagt

SEQ ID NO: 1878622 - DNA, 15 bp, Homo sapiens
tgtatatttggagtt

SEQ ID NO: 1878623 - DNA, 15 bp, Homo sapiens
gtatatttggagttc

SEQ ID NO: 1878624 - DNA, 15 bp, Homo sapiens
tatatttggagttct

SEQ ID NO: 1878625 - DNA, 15 bp, Homo sapiens
atatttggagttctt

SEQ ID NO: 1878626 - DNA, 15 bp, Homo sapiens
tatttggagttctta

SEQ ID NO: 1878627 - DNA, 15 bp, Homo sapiens
atttggagttcttaa

SEQ ID NO: 1878628 - DNA, 15 bp, Homo sapiens
tttggagttcttaat

SEQ ID NO: 1878629 - DNA, 15 bp, Homo sapiens
ttggagttcttaatt

SEQ ID NO: 1878630 - DNA, 15 bp, Homo sapiens
tggagttcttaattt

SEQ ID NO: 1878631 - DNA, 15 bp, Homo sapiens
ggagttcttaatttg

SEQ ID NO: 1878632 - DNA, 15 bp, Homo sapiens
gagttcttaatttga

SEQ ID NO: 1878633 - DNA, 15 bp, Homo sapiens
agttcttaatttgat

SEQ ID NO: 1878634 - DNA, 15 bp, Homo sapiens
gttcttaatttgatt

SEQ ID NO: 1878635 - DNA, 15 bp, Homo sapiens
ttcttaatttgatta

SEQ ID NO: 1878636 - DNA, 15 bp, Homo sapiens
tcttaatttgattat

SEQ ID NO: 1878637 - DNA, 15 bp, Homo sapiens
cttaatttgattata

SEQ ID NO: 1878638 - DNA, 15 bp, Homo sapiens
ttaatttgattatat

SEQ ID NO: 1878639 - DNA, 15 bp, Homo sapiens
taatttgattatata

SEQ ID NO: 1878640 - DNA, 15 bp, Homo sapiens
aatttgattatatat

SEQ ID NO: 1878641 - DNA, 15 bp, Homo sapiens
atttgattatatata

SEQ ID NO: 1878642 - DNA, 15 bp, Homo sapiens
tttgattatatatat

SEQ ID NO: 1878643 - DNA, 15 bp, Homo sapiens
ttgattatatatata

SEQ ID NO: 1878644 - DNA, 15 bp, Homo sapiens
tgattatatatatat

SEQ ID NO: 1878645 - DNA, 15 bp, Homo sapiens
attatatatatatat

SEQ ID NO: 1878646 - DNA, 15 bp, Homo sapiens
tatatatatatatcg

SEQ ID NO: 1878647 - DNA, 15 bp, Homo sapiens
atatatatatatcgt

SEQ ID NO: 1878648 - DNA, 15 bp, Homo sapiens
tatatatatatcgtg

SEQ ID NO: 1878649 - DNA, 15 bp, Homo sapiens
atatatatatcgtgt

SEQ ID NO: 1878650 - DNA, 15 bp, Homo sapiens
tatatatatcgtgtg

SEQ ID NO: 1878651 - DNA, 15 bp, Homo sapiens
atatatatcgtgtgt

SEQ ID NO: 1878652 - DNA, 15 bp, Homo sapiens
tatatatcgtgtgtg

SEQ ID NO: 1878653 - DNA, 15 bp, Homo sapiens
atatatcgtgtgtgt

SEQ ID NO: 1878654 - DNA, 15 bp, Homo sapiens
ttccttgcctcagga

SEQ ID NO: 1878655 - DNA, 15 bp, Homo sapiens
tccttgcctcaggaa

SEQ ID NO: 1878656 - DNA, 15 bp, Homo sapiens
ccttgcctcaggaac

SEQ ID NO: 1878657 - DNA, 15 bp, Homo sapiens
cttgcctcaggaact

SEQ ID NO: 1878658 - DNA, 15 bp, Homo sapiens
ttgcctcaggaactt

SEQ ID NO: 1878659 - DNA, 15 bp, Homo sapiens
tgcctcaggaacttt

SEQ ID NO: 1878660 - DNA, 15 bp, Homo sapiens
gcctcaggaactttg

SEQ ID NO: 1878661 - DNA, 15 bp, Homo sapiens
cctcaggaactttgc

SEQ ID NO: 1878662 - DNA, 15 bp, Homo sapiens
ctcaggaactttgca

SEQ ID NO: 1878663 - DNA, 15 bp, Homo sapiens
tcaggaactttgcac

SEQ ID NO: 1878664 - DNA, 15 bp, Homo sapiens
caggaactttgcact

SEQ ID NO: 1878665 - DNA, 15 bp, Homo sapiens
aggaactttgcactt

SEQ ID NO: 1878666 - DNA, 15 bp, Homo sapiens
ggaactttgcactta

SEQ ID NO: 1878667 - DNA, 15 bp, Homo sapiens
gaactttgcacttaa

SEQ ID NO: 1878668 - DNA, 15 bp, Homo sapiens
aactttgcacttaaa

SEQ ID NO: 1878669 - DNA, 15 bp, Homo sapiens
actttgcacttaaac

SEQ ID NO: 1878670 - DNA, 15 bp, Homo sapiens
ctttgcacttaaact

SEQ ID NO: 1878671 - DNA, 15 bp, Homo sapiens
tttgcacttaaactt

SEQ ID NO: 1878672 - DNA, 15 bp, Homo sapiens
ttgcacttaaacttt

SEQ ID NO: 1878673 - DNA, 15 bp, Homo sapiens
tgcacttaaactttc

SEQ ID NO: 1878674 - DNA, 15 bp, Homo sapiens
gcacttaaactttcc

SEQ ID NO: 1878675 - DNA, 15 bp, Homo sapiens
cacttaaactttcct

SEQ ID NO: 1878676 - DNA, 15 bp, Homo sapiens
acttaaactttcctt

SEQ ID NO: 1878677 - DNA, 15 bp, Homo sapiens
cttaaactttccttt

SEQ ID NO: 1878678 - DNA, 15 bp, Homo sapiens
ttaaactttcctttg

SEQ ID NO: 1878679 - DNA, 15 bp, Homo sapiens
taaactttcctttgt

SEQ ID NO: 1878680 - DNA, 15 bp, Homo sapiens
aaactttcctttgtc

SEQ ID NO: 1878681 - DNA, 15 bp, Homo sapiens
aactttcctttgtct

SEQ ID NO: 1878682 - DNA, 15 bp, Homo sapiens
actttcctttgtctg

SEQ ID NO: 1878683 - DNA, 15 bp, Homo sapiens
ctttcctttgtctgc

SEQ ID NO: 1878684 - DNA, 15 bp, Homo sapiens
tttcctttgtctgca

SEQ ID NO: 1878685 - DNA, 15 bp, Homo sapiens
ttcctttgtctgcag

SEQ ID NO: 1878686 - DNA, 15 bp, Homo sapiens
tcctttgtctgcagg

SEQ ID NO: 1878687 - DNA, 15 bp, Homo sapiens
cctttgtctgcaggt

SEQ ID NO: 1878688 - DNA, 15 bp, Homo sapiens
ctttgtctgcaggtc

SEQ ID NO: 1878689 - DNA, 15 bp, Homo sapiens
tttgtctgcaggtct

SEQ ID NO: 1878690 - DNA, 15 bp, Homo sapiens
ttgtctgcaggtctt

SEQ ID NO: 1878691 - DNA, 15 bp, Homo sapiens
tgtctgcaggtcttc

SEQ ID NO: 1878692 - DNA, 15 bp, Homo sapiens
gtctgcaggtcttca

SEQ ID NO: 1878693 - DNA, 15 bp, Homo sapiens
tctgcaggtcttcaa

SEQ ID NO: 1878694 - DNA, 15 bp, Homo sapiens
ctgcaggtcttcaag

SEQ ID NO: 1878695 - DNA, 15 bp, Homo sapiens
tgcaggtcttcaagt

SEQ ID NO: 1878696 - DNA, 15 bp, Homo sapiens
gcaggtcttcaagtt

SEQ ID NO: 1878697 - DNA, 15 bp, Homo sapiens
caggtcttcaagttc

SEQ ID NO: 1878698 - DNA, 15 bp, Homo sapiens
aggtcttcaagttcc

SEQ ID NO: 1878699 - DNA, 15 bp, Homo sapiens
ggtcttcaagttcct

SEQ ID NO: 1878700 - DNA, 15 bp, Homo sapiens
gtcttcaagttcctt

SEQ ID NO: 1878701 - DNA, 15 bp, Homo sapiens
tcttcaagttcctta

SEQ ID NO: 1878702 - DNA, 15 bp, Homo sapiens
cttcaagttccttaa

SEQ ID NO: 1878703 - DNA, 15 bp, Homo sapiens
ttcaagttccttaaa

SEQ ID NO: 1878704 - DNA, 15 bp, Homo sapiens
tcaagttccttaaat

SEQ ID NO: 1878705 - DNA, 15 bp, Homo sapiens
caagttccttaaatt

SEQ ID NO: 1878706 - DNA, 15 bp, Homo sapiens
aagttccttaaattc

SEQ ID NO: 1878707 - DNA, 15 bp, Homo sapiens
agttccttaaattct

SEQ ID NO: 1878708 - DNA, 15 bp, Homo sapiens
gttccttaaattctt

SEQ ID NO: 1878709 - DNA, 15 bp, Homo sapiens
ttccttaaattcttt

SEQ ID NO: 1878710 - DNA, 15 bp, Homo sapiens
tccttaaattctttg

SEQ ID NO: 1878711 - DNA, 15 bp, Homo sapiens
ccttaaattctttga

SEQ ID NO: 1878712 - DNA, 15 bp, Homo sapiens
cttaaattctttgac

SEQ ID NO: 1878713 - DNA, 15 bp, Homo sapiens
ttaaattctttgact

SEQ ID NO: 1878714 - DNA, 15 bp, Homo sapiens
taaattctttgactc

SEQ ID NO: 1878715 - DNA, 15 bp, Homo sapiens
aaattctttgactcc

SEQ ID NO: 1878716 - DNA, 15 bp, Homo sapiens
aattctttgactccc

SEQ ID NO: 1878717 - DNA, 15 bp, Homo sapiens
attctttgactccct

SEQ ID NO: 1878718 - DNA, 15 bp, Homo sapiens
ttctttgactccctc

SEQ ID NO: 1878719 - DNA, 15 bp, Homo sapiens
tctttgactccctcc

SEQ ID NO: 1878720 - DNA, 15 bp, Homo sapiens
ctttgactccctcca

SEQ ID NO: 1878721 - DNA, 15 bp, Homo sapiens
tttgactccctccaa

SEQ ID NO: 1878722 - DNA, 15 bp, Homo sapiens
ttgactccctccaac

SEQ ID NO: 1878723 - DNA, 15 bp, Homo sapiens
tgactccctccaact

SEQ ID NO: 1878724 - DNA, 15 bp, Homo sapiens
gactccctccaactg

SEQ ID NO: 1878725 - DNA, 15 bp, Homo sapiens
actccctccaactga

SEQ ID NO: 1878726 - DNA, 15 bp, Homo sapiens
ctccctccaactgat

SEQ ID NO: 1878727 - DNA, 15 bp, Homo sapiens
tccctccaactgatc

SEQ ID NO: 1878728 - DNA, 15 bp, Homo sapiens
ccctccaactgatcc

SEQ ID NO: 1878729 - DNA, 15 bp, Homo sapiens
cctccaactgatcct

SEQ ID NO: 1878730 - DNA, 15 bp, Homo sapiens
ctccaactgatcctt

SEQ ID NO: 1878731 - DNA, 15 bp, Homo sapiens
tccaactgatccttc

SEQ ID NO: 1878732 - DNA, 15 bp, Homo sapiens
ccaactgatccttca

SEQ ID NO: 1878733 - DNA, 15 bp, Homo sapiens
caactgatccttcag

SEQ ID NO: 1878734 - DNA, 15 bp, Homo sapiens
aactgatccttcaga

SEQ ID NO: 1878735 - DNA, 15 bp, Homo sapiens
actgatccttcagat

SEQ ID NO: 1878736 - DNA, 15 bp, Homo sapiens
ctgatccttcagatt

SEQ ID NO: 1878737 - DNA, 15 bp, Homo sapiens
tgatccttcagattt

SEQ ID NO: 1878738 - DNA, 15 bp, Homo sapiens
gatccttcagatttc

SEQ ID NO: 1878739 - DNA, 15 bp, Homo sapiens
atccttcagatttca

SEQ ID NO: 1878740 - DNA, 15 bp, Homo sapiens
tccttcagatttcag

SEQ ID NO: 1878741 - DNA, 15 bp, Homo sapiens
ccttcagatttcagc

SEQ ID NO: 1878742 - DNA, 15 bp, Homo sapiens
cttcagatttcagcc

SEQ ID NO: 1878743 - DNA, 15 bp, Homo sapiens
ttcagatttcagccc

SEQ ID NO: 1878744 - DNA, 15 bp, Homo sapiens
tcagatttcagccca

SEQ ID NO: 1878745 - DNA, 15 bp, Homo sapiens
cagatttcagcccaa

SEQ ID NO: 1878746 - DNA, 15 bp, Homo sapiens
agatttcagcccaaa

SEQ ID NO: 1878747 - DNA, 15 bp, Homo sapiens
gatttcagcccaaat

SEQ ID NO: 1878748 - DNA, 15 bp, Homo sapiens
atttcagcccaaatg

SEQ ID NO: 1878749 - DNA, 15 bp, Homo sapiens
tttcagcccaaatgt

SEQ ID NO: 1878750 - DNA, 15 bp, Homo sapiens
ttcagcccaaatgtc

SEQ ID NO: 1878751 - DNA, 15 bp, Homo sapiens
tcagcccaaatgtca

SEQ ID NO: 1878752 - DNA, 15 bp, Homo sapiens
cagcccaaatgtcat

SEQ ID NO: 1878753 - DNA, 15 bp, Homo sapiens
agcccaaatgtcatt

SEQ ID NO: 1878754 - DNA, 15 bp, Homo sapiens
gcccaaatgtcattt

SEQ ID NO: 1878755 - DNA, 15 bp, Homo sapiens
cccaaatgtcatttc

SEQ ID NO: 1878756 - DNA, 15 bp, Homo sapiens
ccaaatgtcatttcc

SEQ ID NO: 1878757 - DNA, 15 bp, Homo sapiens
caaatgtcatttcct

SEQ ID NO: 1878758 - DNA, 15 bp, Homo sapiens
aaatgtcatttcctg

SEQ ID NO: 1878759 - DNA, 15 bp, Homo sapiens
aatgtcatttcctga

SEQ ID NO: 1878760 - DNA, 15 bp, Homo sapiens
atgtcatttcctgaa

SEQ ID NO: 1878761 - DNA, 15 bp, Homo sapiens
tgtcatttcctgaag

SEQ ID NO: 1878762 - DNA, 15 bp, Homo sapiens
gtcatttcctgaaga

SEQ ID NO: 1878763 - DNA, 15 bp, Homo sapiens
tcatttcctgaagaa

SEQ ID NO: 1878764 - DNA, 15 bp, Homo sapiens
catttcctgaagaaa

SEQ ID NO: 1878765 - DNA, 15 bp, Homo sapiens
atttcctgaagaaat

SEQ ID NO: 1878766 - DNA, 15 bp, Homo sapiens
tttcctgaagaaata

SEQ ID NO: 1878767 - DNA, 15 bp, Homo sapiens
ttcctgaagaaatac

SEQ ID NO: 1878768 - DNA, 15 bp, Homo sapiens
tcctgaagaaataca

SEQ ID NO: 1878769 - DNA, 15 bp, Homo sapiens
cctgaagaaatacat

SEQ ID NO: 1878770 - DNA, 15 bp, Homo sapiens
ctgaagaaatacatt

SEQ ID NO: 1878771 - DNA, 15 bp, Homo sapiens
tgaagaaatacattc

SEQ ID NO: 1878772 - DNA, 15 bp, Homo sapiens
gaagaaatacattct

SEQ ID NO: 1878773 - DNA, 15 bp, Homo sapiens
aagaaatacattctc

SEQ ID NO: 1878774 - DNA, 15 bp, Homo sapiens
agaaatacattctcc

SEQ ID NO: 1878775 - DNA, 15 bp, Homo sapiens
gaaatacattctcct

SEQ ID NO: 1878776 - DNA, 15 bp, Homo sapiens
aaatacattctccta

SEQ ID NO: 1878777 - DNA, 15 bp, Homo sapiens
aatacattctcctac

SEQ ID NO: 1878778 - DNA, 15 bp, Homo sapiens
atacattctcctact

SEQ ID NO: 1878779 - DNA, 15 bp, Homo sapiens
tacattctcctactt

SEQ ID NO: 1878780 - DNA, 15 bp, Homo sapiens
acattctcctacttc

SEQ ID NO: 1878781 - DNA, 15 bp, Homo sapiens
cattctcctacttcc

SEQ ID NO: 1878782 - DNA, 15 bp, Homo sapiens
attctcctacttcct

SEQ ID NO: 1878783 - DNA, 15 bp, Homo sapiens
ttctcctacttccta

SEQ ID NO: 1878784 - DNA, 15 bp, Homo sapiens
tctcctacttcctaa

SEQ ID NO: 1878785 - DNA, 15 bp, Homo sapiens
ctcctacttcctaaa

SEQ ID NO: 1878786 - DNA, 15 bp, Homo sapiens
tcctacttcctaaac

SEQ ID NO: 1878787 - DNA, 15 bp, Homo sapiens
cctacttcctaaact

SEQ ID NO: 1878788 - DNA, 15 bp, Homo sapiens
ttcctaaactaagtc

SEQ ID NO: 1878789 - DNA, 15 bp, Homo sapiens
tcctaaactaagtcc

SEQ ID NO: 1878790 - DNA, 15 bp, Homo sapiens
cctaaactaagtcct

SEQ ID NO: 1878791 - DNA, 15 bp, Homo sapiens
ctaaactaagtcctc

SEQ ID NO: 1878792 - DNA, 15 bp, Homo sapiens
taaactaagtcctcc

SEQ ID NO: 1878793 - DNA, 15 bp, Homo sapiens
aaactaagtcctcct

SEQ ID NO: 1878794 - DNA, 15 bp, Homo sapiens
aactaagtcctcctg

SEQ ID NO: 1878795 - DNA, 15 bp, Homo sapiens
actaagtcctcctga

SEQ ID NO: 1878796 - DNA, 15 bp, Homo sapiens
ctaagtcctcctgat

SEQ ID NO: 1878797 - DNA, 15 bp, Homo sapiens
taagtcctcctgatt

SEQ ID NO: 1878798 - DNA, 15 bp, Homo sapiens
aagtcctcctgattt

SEQ ID NO: 1878799 - DNA, 15 bp, Homo sapiens
agtcctcctgattta

SEQ ID NO: 1878800 - DNA, 15 bp, Homo sapiens
gtcctcctgatttat

SEQ ID NO: 1878801 - DNA, 15 bp, Homo sapiens
tcctcctgatttatt

SEQ ID NO: 1878802 - DNA, 15 bp, Homo sapiens
cctcctgatttattc

SEQ ID NO: 1878803 - DNA, 15 bp, Homo sapiens
ctcctgatttattca

SEQ ID NO: 1878804 - DNA, 15 bp, Homo sapiens
tcctgatttattcat

SEQ ID NO: 1878805 - DNA, 15 bp, Homo sapiens
cctgatttattcatg

SEQ ID NO: 1878806 - DNA, 15 bp, Homo sapiens
ctgatttattcatgt

SEQ ID NO: 1878807 - DNA, 15 bp, Homo sapiens
tgatttattcatgtt

SEQ ID NO: 1878808 - DNA, 15 bp, Homo sapiens
gatttattcatgttt

SEQ ID NO: 1878809 - DNA, 15 bp, Homo sapiens
atttattcatgtttt

SEQ ID NO: 1878810 - DNA, 15 bp, Homo sapiens
tttattcatgttttt

SEQ ID NO: 1878811 - DNA, 15 bp, Homo sapiens
ttattcatgtttttt

SEQ ID NO: 1878812 - DNA, 15 bp, Homo sapiens
tattcatgttttttc

SEQ ID NO: 1878813 - DNA, 15 bp, Homo sapiens
attcatgttttttct

SEQ ID NO: 1878814 - DNA, 15 bp, Homo sapiens
ttcatgttttttctc

SEQ ID NO: 1878815 - DNA, 15 bp, Homo sapiens
tcatgttttttctct

SEQ ID NO: 1878816 - DNA, 15 bp, Homo sapiens
catgttttttctctc

SEQ ID NO: 1878817 - DNA, 15 bp, Homo sapiens
atgttttttctctct

SEQ ID NO: 1878818 - DNA, 15 bp, Homo sapiens
tgttttttctctctc

SEQ ID NO: 1878819 - DNA, 15 bp, Homo sapiens
gttttttctctctcc

SEQ ID NO: 1878820 - DNA, 15 bp, Homo sapiens
ttttttctctctcct

SEQ ID NO: 1878821 - DNA, 15 bp, Homo sapiens
tttttctctctcctg

SEQ ID NO: 1878822 - DNA, 15 bp, Homo sapiens
ttttctctctcctga

SEQ ID NO: 1878823 - DNA, 15 bp, Homo sapiens
tttctctctcctgac

SEQ ID NO: 1878824 - DNA, 15 bp, Homo sapiens
ttctctctcctgaca

SEQ ID NO: 1878825 - DNA, 15 bp, Homo sapiens
tctctctcctgacat

SEQ ID NO: 1878826 - DNA, 15 bp, Homo sapiens
ctctctcctgacatt

SEQ ID NO: 1878827 - DNA, 15 bp, Homo sapiens
tctctcctgacattt

SEQ ID NO: 1878828 - DNA, 15 bp, Homo sapiens
ctctcctgacattta

SEQ ID NO: 1878829 - DNA, 15 bp, Homo sapiens
tctcctgacatttat

SEQ ID NO: 1878830 - DNA, 15 bp, Homo sapiens
ctcctgacatttata

SEQ ID NO: 1878831 - DNA, 15 bp, Homo sapiens
tcctgacatttataa

SEQ ID NO: 1878832 - DNA, 15 bp, Homo sapiens
cctgacatttataat

SEQ ID NO: 1878833 - DNA, 15 bp, Homo sapiens
ctgacatttataatt

SEQ ID NO: 1878834 - DNA, 15 bp, Homo sapiens
tgacatttataattt

SEQ ID NO: 1878835 - DNA, 15 bp, Homo sapiens
gacatttataatttg

SEQ ID NO: 1878836 - DNA, 15 bp, Homo sapiens
acatttataatttgc

SEQ ID NO: 1878837 - DNA, 15 bp, Homo sapiens
catttataatttgcc

SEQ ID NO: 1878838 - DNA, 15 bp, Homo sapiens
atttataatttgcct

SEQ ID NO: 1878839 - DNA, 15 bp, Homo sapiens
tttataatttgcctt

SEQ ID NO: 1878840 - DNA, 15 bp, Homo sapiens
ttataatttgccttt

SEQ ID NO: 1878841 - DNA, 15 bp, Homo sapiens
tataatttgccttta

SEQ ID NO: 1878842 - DNA, 15 bp, Homo sapiens
ataatttgcctttat

SEQ ID NO: 1878843 - DNA, 15 bp, Homo sapiens
taatttgcctttata

SEQ ID NO: 1878844 - DNA, 15 bp, Homo sapiens
aatttgcctttatac

SEQ ID NO: 1878845 - DNA, 15 bp, Homo sapiens
atttgcctttatact

SEQ ID NO: 1878846 - DNA, 15 bp, Homo sapiens
tttgcctttatactc

SEQ ID NO: 1878847 - DNA, 15 bp, Homo sapiens
ttgcctttatactca

SEQ ID NO: 1878848 - DNA, 15 bp, Homo sapiens
tgcctttatactcat

SEQ ID NO: 1878849 - DNA, 15 bp, Homo sapiens
gcctttatactcatt

SEQ ID NO: 1878850 - DNA, 15 bp, Homo sapiens
cctttatactcattt

SEQ ID NO: 1878851 - DNA, 15 bp, Homo sapiens
ctttatactcattta

SEQ ID NO: 1878852 - DNA, 15 bp, Homo sapiens
tttatactcatttag

SEQ ID NO: 1878853 - DNA, 15 bp, Homo sapiens
ttatactcatttaga

SEQ ID NO: 1878854 - DNA, 15 bp, Homo sapiens
tatactcatttagaa

SEQ ID NO: 1878855 - DNA, 15 bp, Homo sapiens
atactcatttagaaa

SEQ ID NO: 1878856 - DNA, 15 bp, Homo sapiens
tactcatttagaaat

SEQ ID NO: 1878857 - DNA, 15 bp, Homo sapiens
actcatttagaaata

SEQ ID NO: 1878858 - DNA, 15 bp, Homo sapiens
ctcatttagaaataa

SEQ ID NO: 1878859 - DNA, 15 bp, Homo sapiens
tcatttagaaataac

SEQ ID NO: 1878860 - DNA, 15 bp, Homo sapiens
catttagaaataaca

SEQ ID NO: 1878861 - DNA, 15 bp, Homo sapiens
atttagaaataacat

SEQ ID NO: 1878862 - DNA, 15 bp, Homo sapiens
tttagaaataacatt

SEQ ID NO: 1878863 - DNA, 15 bp, Homo sapiens
ttagaaataacattt

SEQ ID NO: 1878864 - DNA, 15 bp, Homo sapiens
tagaaataacattta

SEQ ID NO: 1878865 - DNA, 15 bp, Homo sapiens
agaaataacatttag

SEQ ID NO: 1878866 - DNA, 15 bp, Homo sapiens
gaaataacatttagc

SEQ ID NO: 1878867 - DNA, 15 bp, Homo sapiens
aaataacatttagca

SEQ ID NO: 1878868 - DNA, 15 bp, Homo sapiens
aataacatttagcaa

SEQ ID NO: 1878869 - DNA, 15 bp, Homo sapiens
ataacatttagcaag

SEQ ID NO: 1878870 - DNA, 15 bp, Homo sapiens
taacatttagcaagc

SEQ ID NO: 1878871 - DNA, 15 bp, Homo sapiens
aacatttagcaagcc

SEQ ID NO: 1878872 - DNA, 15 bp, Homo sapiens
acatttagcaagccc

SEQ ID NO: 1878873 - DNA, 15 bp, Homo sapiens
catttagcaagccct

SEQ ID NO: 1878874 - DNA, 15 bp, Homo sapiens
atttagcaagccctt

SEQ ID NO: 1878875 - DNA, 15 bp, Homo sapiens
tttagcaagcccttc

SEQ ID NO: 1878876 - DNA, 15 bp, Homo sapiens
ttagcaagcccttcc

SEQ ID NO: 1878877 - DNA, 15 bp, Homo sapiens
tagcaagcccttcca

SEQ ID NO: 1878878 - DNA, 15 bp, Homo sapiens
agcaagcccttccag

SEQ ID NO: 1878879 - DNA, 15 bp, Homo sapiens
gcaagcccttccagt

SEQ ID NO: 1878880 - DNA, 15 bp, Homo sapiens
caagcccttccagtg

SEQ ID NO: 1878881 - DNA, 15 bp, Homo sapiens
aagcccttccagtgt

SEQ ID NO: 1878882 - DNA, 15 bp, Homo sapiens
agcccttccagtgtg

SEQ ID NO: 1878883 - DNA, 15 bp, Homo sapiens
gcccttccagtgtgc

SEQ ID NO: 1878884 - DNA, 15 bp, Homo sapiens
cccttccagtgtgcc

SEQ ID NO: 1878885 - DNA, 15 bp, Homo sapiens
ccttccagtgtgcca

SEQ ID NO: 1878886 - DNA, 15 bp, Homo sapiens
cttccagtgtgccaa

SEQ ID NO: 1878887 - DNA, 15 bp, Homo sapiens
ttccagtgtgccaat

SEQ ID NO: 1878888 - DNA, 15 bp, Homo sapiens
tccagtgtgccaatc

SEQ ID NO: 1878889 - DNA, 15 bp, Homo sapiens
ccagtgtgccaatca

SEQ ID NO: 1878890 - DNA, 15 bp, Homo sapiens
cagtgtgccaatcac

SEQ ID NO: 1878891 - DNA, 15 bp, Homo sapiens
agtgtgccaatcacc

SEQ ID NO: 1878892 - DNA, 15 bp, Homo sapiens
gtgtgccaatcacct

SEQ ID NO: 1878893 - DNA, 15 bp, Homo sapiens
tgtgccaatcacctg

SEQ ID NO: 1878894 - DNA, 15 bp, Homo sapiens
gtgccaatcacctgc

SEQ ID NO: 1878895 - DNA, 15 bp, Homo sapiens
tgccaatcacctgcc

SEQ ID NO: 1878896 - DNA, 15 bp, Homo sapiens
gccaatcacctgcct

SEQ ID NO: 1878897 - DNA, 15 bp, Homo sapiens
ccaatcacctgcctt

SEQ ID NO: 1878898 - DNA, 15 bp, Homo sapiens
caatcacctgccttt

SEQ ID NO: 1878899 - DNA, 15 bp, Homo sapiens
aatcacctgccttta

SEQ ID NO: 1878900 - DNA, 15 bp, Homo sapiens
atcacctgcctttaa

SEQ ID NO: 1878901 - DNA, 15 bp, Homo sapiens
tcacctgcctttaaa

SEQ ID NO: 1878902 - DNA, 15 bp, Homo sapiens
cacctgcctttaaac

SEQ ID NO: 1878903 - DNA, 15 bp, Homo sapiens
acctgcctttaaacc

SEQ ID NO: 1878904 - DNA, 15 bp, Homo sapiens
cctgcctttaaacct

SEQ ID NO: 1878905 - DNA, 15 bp, Homo sapiens
ctgcctttaaacctt

SEQ ID NO: 1878906 - DNA, 15 bp, Homo sapiens
tgcctttaaacctta

SEQ ID NO: 1878907 - DNA, 15 bp, Homo sapiens
gcctttaaaccttat

SEQ ID NO: 1878908 - DNA, 15 bp, Homo sapiens
cctttaaaccttatt

SEQ ID NO: 1878909 - DNA, 15 bp, Homo sapiens
ctttaaaccttattt

SEQ ID NO: 1878910 - DNA, 15 bp, Homo sapiens
tttaaaccttatttg

SEQ ID NO: 1878911 - DNA, 15 bp, Homo sapiens
ttaaaccttatttgt

SEQ ID NO: 1878912 - DNA, 15 bp, Homo sapiens
taaaccttatttgta

SEQ ID NO: 1878913 - DNA, 15 bp, Homo sapiens
aaaccttatttgtag

SEQ ID NO: 1878914 - DNA, 15 bp, Homo sapiens
aaccttatttgtaga

SEQ ID NO: 1878915 - DNA, 15 bp, Homo sapiens
accttatttgtagat

SEQ ID NO: 1878916 - DNA, 15 bp, Homo sapiens
ccttatttgtagatg

SEQ ID NO: 1878917 - DNA, 15 bp, Homo sapiens
cttatttgtagatga

SEQ ID NO: 1878918 - DNA, 15 bp, Homo sapiens
ttatttgtagatgag

SEQ ID NO: 1878919 - DNA, 15 bp, Homo sapiens
tatttgtagatgagg

SEQ ID NO: 1878920 - DNA, 15 bp, Homo sapiens
atttgtagatgagga

SEQ ID NO: 1878921 - DNA, 15 bp, Homo sapiens
tttgtagatgaggaa

SEQ ID NO: 1878922 - DNA, 15 bp, Homo sapiens
ttgtagatgaggaag

SEQ ID NO: 1878923 - DNA, 15 bp, Homo sapiens
tgtagatgaggaagt

SEQ ID NO: 1878924 - DNA, 15 bp, Homo sapiens
gtagatgaggaagta

SEQ ID NO: 1878925 - DNA, 15 bp, Homo sapiens
tagatgaggaagtaa

SEQ ID NO: 1878926 - DNA, 15 bp, Homo sapiens
agatgaggaagtaaa

SEQ ID NO: 1878927 - DNA, 15 bp, Homo sapiens
gatgaggaagtaaaa

SEQ ID NO: 1878928 - DNA, 15 bp, Homo sapiens
atgaggaagtaaaat

SEQ ID NO: 1878929 - DNA, 15 bp, Homo sapiens
tgaggaagtaaaata

SEQ ID NO: 1878930 - DNA, 15 bp, Homo sapiens
gaggaagtaaaatac

SEQ ID NO: 1878931 - DNA, 15 bp, Homo sapiens
aggaagtaaaatact

SEQ ID NO: 1878932 - DNA, 15 bp, Homo sapiens
ggaagtaaaatactt

SEQ ID NO: 1878933 - DNA, 15 bp, Homo sapiens
gaagtaaaatacttt

SEQ ID NO: 1878934 - DNA, 15 bp, Homo sapiens
aagtaaaatactttc

SEQ ID NO: 1878935 - DNA, 15 bp, Homo sapiens
agtaaaatactttcc

SEQ ID NO: 1878936 - DNA, 15 bp, Homo sapiens
gtaaaatactttccc

SEQ ID NO: 1878937 - DNA, 15 bp, Homo sapiens
taaaatactttccca

SEQ ID NO: 1878938 - DNA, 15 bp, Homo sapiens
aaaatactttcccag

SEQ ID NO: 1878939 - DNA, 15 bp, Homo sapiens
aaatactttcccaga

SEQ ID NO: 1878940 - DNA, 15 bp, Homo sapiens
aatactttcccagat

SEQ ID NO: 1878941 - DNA, 15 bp, Homo sapiens
atactttcccagatt

SEQ ID NO: 1878942 - DNA, 15 bp, Homo sapiens
tactttcccagattc

SEQ ID NO: 1878943 - DNA, 15 bp, Homo sapiens
actttcccagattcc

SEQ ID NO: 1878944 - DNA, 15 bp, Homo sapiens
ctttcccagattccc

SEQ ID NO: 1878945 - DNA, 15 bp, Homo sapiens
tttcccagattccca

SEQ ID NO: 1878946 - DNA, 15 bp, Homo sapiens
ttcccagattcccac

SEQ ID NO: 1878947 - DNA, 15 bp, Homo sapiens
tcccagattcccaca

SEQ ID NO: 1878948 - DNA, 15 bp, Homo sapiens
cccagattcccacaa

SEQ ID NO: 1878949 - DNA, 15 bp, Homo sapiens
ccagattcccacaag

SEQ ID NO: 1878950 - DNA, 15 bp, Homo sapiens
cagattcccacaagt

SEQ ID NO: 1878951 - DNA, 15 bp, Homo sapiens
agattcccacaagtg

SEQ ID NO: 1878952 - DNA, 15 bp, Homo sapiens
gattcccacaagtgt

SEQ ID NO: 1878953 - DNA, 15 bp, Homo sapiens
attcccacaagtgtt

SEQ ID NO: 1878954 - DNA, 15 bp, Homo sapiens
ttcccacaagtgttg

SEQ ID NO: 1878955 - DNA, 15 bp, Homo sapiens
tcccacaagtgttga

SEQ ID NO: 1878956 - DNA, 15 bp, Homo sapiens
cccacaagtgttgaa

SEQ ID NO: 1878957 - DNA, 15 bp, Homo sapiens
ccacaagtgttgaac

SEQ ID NO: 1878958 - DNA, 15 bp, Homo sapiens
cacaagtgttgaacc

SEQ ID NO: 1878959 - DNA, 15 bp, Homo sapiens
acaagtgttgaacca

SEQ ID NO: 1878960 - DNA, 15 bp, Homo sapiens
caagtgttgaaccag

SEQ ID NO: 1878961 - DNA, 15 bp, Homo sapiens
aagtgttgaaccagg

SEQ ID NO: 1878962 - DNA, 15 bp, Homo sapiens
agtgttgaaccaggg

SEQ ID NO: 1878963 - DNA, 15 bp, Homo sapiens
gtgttgaaccagggt

SEQ ID NO: 1878964 - DNA, 15 bp, Homo sapiens
tgttgaaccagggtt

SEQ ID NO: 1878965 - DNA, 15 bp, Homo sapiens
gttgaaccagggttt

SEQ ID NO: 1878966 - DNA, 15 bp, Homo sapiens
ttgaaccagggttta

SEQ ID NO: 1878967 - DNA, 15 bp, Homo sapiens
tgaaccagggtttaa

SEQ ID NO: 1878968 - DNA, 15 bp, Homo sapiens
gaaccagggtttaaa

SEQ ID NO: 1878969 - DNA, 15 bp, Homo sapiens
aaccagggtttaaac

SEQ ID NO: 1878970 - DNA, 15 bp, Homo sapiens
accagggtttaaacc

SEQ ID NO: 1878971 - DNA, 15 bp, Homo sapiens
ccagggtttaaaccc

SEQ ID NO: 1878972 - DNA, 15 bp, Homo sapiens
cagggtttaaaccca

SEQ ID NO: 1878973 - DNA, 15 bp, Homo sapiens
agggtttaaacccag

SEQ ID NO: 1878974 - DNA, 15 bp, Homo sapiens
gggtttaaacccagg

SEQ ID NO: 1878975 - DNA, 15 bp, Homo sapiens
ggtttaaacccaggt

SEQ ID NO: 1878976 - DNA, 15 bp, Homo sapiens
gtttaaacccaggtt

SEQ ID NO: 1878977 - DNA, 15 bp, Homo sapiens
tttaaacccaggttt

SEQ ID NO: 1878978 - DNA, 15 bp, Homo sapiens
ttaaacccaggtttc

SEQ ID NO: 1878979 - DNA, 15 bp, Homo sapiens
taaacccaggtttcc

SEQ ID NO: 1878980 - DNA, 15 bp, Homo sapiens
aaacccaggtttcct

SEQ ID NO: 1878981 - DNA, 15 bp, Homo sapiens
aacccaggtttcctc

SEQ ID NO: 1878982 - DNA, 15 bp, Homo sapiens
acccaggtttcctca

SEQ ID NO: 1878983 - DNA, 15 bp, Homo sapiens
cccaggtttcctcaa

SEQ ID NO: 1878984 - DNA, 15 bp, Homo sapiens
ccaggtttcctcaac

SEQ ID NO: 1878985 - DNA, 15 bp, Homo sapiens
caggtttcctcaaca

SEQ ID NO: 1878986 - DNA, 15 bp, Homo sapiens
aggtttcctcaacaa

SEQ ID NO: 1878987 - DNA, 15 bp, Homo sapiens
ggtttcctcaacaaa

SEQ ID NO: 1878988 - DNA, 15 bp, Homo sapiens
gtttcctcaacaaaa

SEQ ID NO: 1878989 - DNA, 15 bp, Homo sapiens
tttcctcaacaaaac

SEQ ID NO: 1878990 - DNA, 15 bp, Homo sapiens
tcctcaacaaaacta

SEQ ID NO: 1878991 - DNA, 15 bp, Homo sapiens
cctcaacaaaactat

SEQ ID NO: 1878992 - DNA, 15 bp, Homo sapiens
ctcaacaaaactata

SEQ ID NO: 1878993 - DNA, 15 bp, Homo sapiens
tcaacaaaactataa

SEQ ID NO: 1878994 - DNA, 15 bp, Homo sapiens
caacaaaactataaa

SEQ ID NO: 1878995 - DNA, 15 bp, Homo sapiens
aacaaaactataaac

SEQ ID NO: 1878996 - DNA, 15 bp, Homo sapiens
acaaaactataaact

SEQ ID NO: 1878997 - DNA, 15 bp, Homo sapiens
caaaactataaactc

SEQ ID NO: 1878998 - DNA, 15 bp, Homo sapiens
aaaactataaactct

SEQ ID NO: 1878999 - DNA, 15 bp, Homo sapiens
aaactataaactctg

SEQ ID NO: 1879000 - DNA, 15 bp, Homo sapiens
aactataaactctgg

SEQ ID NO: 1879001 - DNA, 15 bp, Homo sapiens
actataaactctggg

SEQ ID NO: 1879002 - DNA, 15 bp, Homo sapiens
ctataaactctggga

SEQ ID NO: 1879003 - DNA, 15 bp, Homo sapiens
tataaactctgggaa

SEQ ID NO: 1879004 - DNA, 15 bp, Homo sapiens
ataaactctgggaaa

SEQ ID NO: 1879005 - DNA, 15 bp, Homo sapiens
taaactctgggaaat

SEQ ID NO: 1879006 - DNA, 15 bp, Homo sapiens
aaactctgggaaata

SEQ ID NO: 1879007 - DNA, 15 bp, Homo sapiens
aactctgggaaatag

SEQ ID NO: 1879008 - DNA, 15 bp, Homo sapiens
actctgggaaataga

SEQ ID NO: 1879009 - DNA, 15 bp, Homo sapiens
ctctgggaaatagac

SEQ ID NO: 1879010 - DNA, 15 bp, Homo sapiens
tctgggaaatagacc

SEQ ID NO: 1879011 - DNA, 15 bp, Homo sapiens
ctgggaaatagaccg

SEQ ID NO: 1879012 - DNA, 15 bp, Homo sapiens
tgggaaatagaccgt

SEQ ID NO: 1879013 - DNA, 15 bp, Homo sapiens
gggaaatagaccgtg

SEQ ID NO: 1879014 - DNA, 15 bp, Homo sapiens
ggaaatagaccgtgt

SEQ ID NO: 1879015 - DNA, 15 bp, Homo sapiens
gaaatagaccgtgtc

SEQ ID NO: 1879016 - DNA, 15 bp, Homo sapiens
aaatagaccgtgtct

SEQ ID NO: 1879017 - DNA, 15 bp, Homo sapiens
aatagaccgtgtcta

SEQ ID NO: 1879018 - DNA, 15 bp, Homo sapiens
atagaccgtgtctat

SEQ ID NO: 1879019 - DNA, 15 bp, Homo sapiens
tagaccgtgtctatg

SEQ ID NO: 1879020 - DNA, 15 bp, Homo sapiens
agaccgtgtctatgt

SEQ ID NO: 1879021 - DNA, 15 bp, Homo sapiens
gaccgtgtctatgta

SEQ ID NO: 1879022 - DNA, 15 bp, Homo sapiens
accgtgtctatgtat

SEQ ID NO: 1879023 - DNA, 15 bp, Homo sapiens
ccgtgtctatgtatt

SEQ ID NO: 1879024 - DNA, 15 bp, Homo sapiens
cgtgtctatgtatta

SEQ ID NO: 1879025 - DNA, 15 bp, Homo sapiens
gtgtctatgtattat

SEQ ID NO: 1879026 - DNA, 15 bp, Homo sapiens
tgtctatgtattatt

SEQ ID NO: 1879027 - DNA, 15 bp, Homo sapiens
gtctatgtattattg

SEQ ID NO: 1879028 - DNA, 15 bp, Homo sapiens
tctatgtattattgt

SEQ ID NO: 1879029 - DNA, 15 bp, Homo sapiens
ctatgtattattgta

SEQ ID NO: 1879030 - DNA, 15 bp, Homo sapiens
tatgtattattgtag

SEQ ID NO: 1879031 - DNA, 15 bp, Homo sapiens
atgtattattgtagc

SEQ ID NO: 1879032 - DNA, 15 bp, Homo sapiens
tgtattattgtagct

SEQ ID NO: 1879033 - DNA, 15 bp, Homo sapiens
gtattattgtagctc

SEQ ID NO: 1879034 - DNA, 15 bp, Homo sapiens
tattattgtagctcc

SEQ ID NO: 1879035 - DNA, 15 bp, Homo sapiens
attattgtagctcca

SEQ ID NO: 1879036 - DNA, 15 bp, Homo sapiens
ttattgtagctccag

SEQ ID NO: 1879037 - DNA, 15 bp, Homo sapiens
tattgtagctccagt

SEQ ID NO: 1879038 - DNA, 15 bp, Homo sapiens
attgtagctccagtg

SEQ ID NO: 1879039 - DNA, 15 bp, Homo sapiens
ttgtagctccagtgc

SEQ ID NO: 1879040 - DNA, 15 bp, Homo sapiens
tgtagctccagtgcc

SEQ ID NO: 1879041 - DNA, 15 bp, Homo sapiens
gtagctccagtgcct

SEQ ID NO: 1879042 - DNA, 15 bp, Homo sapiens
tagctccagtgcctg

SEQ ID NO: 1879043 - DNA, 15 bp, Homo sapiens
agctccagtgcctgg

SEQ ID NO: 1879044 - DNA, 15 bp, Homo sapiens
gctccagtgcctggt

SEQ ID NO: 1879045 - DNA, 15 bp, Homo sapiens
ctccagtgcctggta

SEQ ID NO: 1879046 - DNA, 15 bp, Homo sapiens
tccagtgcctggtat

SEQ ID NO: 1879047 - DNA, 15 bp, Homo sapiens
ccagtgcctggtatt

SEQ ID NO: 1879048 - DNA, 15 bp, Homo sapiens
cagtgcctggtattt

SEQ ID NO: 1879049 - DNA, 15 bp, Homo sapiens
agtgcctggtattta

SEQ ID NO: 1879050 - DNA, 15 bp, Homo sapiens
gtgcctggtatttag

SEQ ID NO: 1879051 - DNA, 15 bp, Homo sapiens
tgcctggtatttagt

SEQ ID NO: 1879052 - DNA, 15 bp, Homo sapiens
gcctggtatttagtt

SEQ ID NO: 1879053 - DNA, 15 bp, Homo sapiens
cctggtatttagttg

SEQ ID NO: 1879054 - DNA, 15 bp, Homo sapiens
ctggtatttagttgg

SEQ ID NO: 1879055 - DNA, 15 bp, Homo sapiens
tggtatttagttggc

SEQ ID NO: 1879056 - DNA, 15 bp, Homo sapiens
ggtatttagttggcc

SEQ ID NO: 1879057 - DNA, 15 bp, Homo sapiens
gtatttagttggccc

SEQ ID NO: 1879058 - DNA, 15 bp, Homo sapiens
tatttagttggccct

SEQ ID NO: 1879059 - DNA, 15 bp, Homo sapiens
atttagttggccctc

SEQ ID NO: 1879060 - DNA, 15 bp, Homo sapiens
tttagttggccctca

SEQ ID NO: 1879061 - DNA, 15 bp, Homo sapiens
ttagttggccctcaa

SEQ ID NO: 1879062 - DNA, 15 bp, Homo sapiens
tagttggccctcaac

SEQ ID NO: 1879063 - DNA, 15 bp, Homo sapiens
agttggccctcaaca

SEQ ID NO: 1879064 - DNA, 15 bp, Homo sapiens
gttggccctcaacaa

SEQ ID NO: 1879065 - DNA, 15 bp, Homo sapiens
ttggccctcaacaaa

SEQ ID NO: 1879066 - DNA, 15 bp, Homo sapiens
tggccctcaacaaat

SEQ ID NO: 1879067 - DNA, 15 bp, Homo sapiens
ggccctcaacaaata

SEQ ID NO: 1879068 - DNA, 15 bp, Homo sapiens
gccctcaacaaatag

SEQ ID NO: 1879069 - DNA, 15 bp, Homo sapiens
ccctcaacaaataga

SEQ ID NO: 1879070 - DNA, 15 bp, Homo sapiens
cctcaacaaatagat

SEQ ID NO: 1879071 - DNA, 15 bp, Homo sapiens
ctcaacaaatagata

SEQ ID NO: 1879072 - DNA, 15 bp, Homo sapiens
tcaacaaatagatat

SEQ ID NO: 1879073 - DNA, 15 bp, Homo sapiens
caacaaatagatatt

SEQ ID NO: 1879074 - DNA, 15 bp, Homo sapiens
aacaaatagatattg

SEQ ID NO: 1879075 - DNA, 15 bp, Homo sapiens
acaaatagatattga

SEQ ID NO: 1879076 - DNA, 15 bp, Homo sapiens
caaatagatattgaa

SEQ ID NO: 1879077 - DNA, 15 bp, Homo sapiens
aaatagatattgaac

SEQ ID NO: 1879078 - DNA, 15 bp, Homo sapiens
aatagatattgaaca

SEQ ID NO: 1879079 - DNA, 15 bp, Homo sapiens
atagatattgaacaa

SEQ ID NO: 1879080 - DNA, 15 bp, Homo sapiens
tagatattgaacaaa

SEQ ID NO: 1879081 - DNA, 15 bp, Homo sapiens
agatattgaacaaat

SEQ ID NO: 1879082 - DNA, 15 bp, Homo sapiens
gatattgaacaaatg

SEQ ID NO: 1879083 - DNA, 15 bp, Homo sapiens
atattgaacaaatga

SEQ ID NO: 1879084 - DNA, 15 bp, Homo sapiens
tattgaacaaatgaa

SEQ ID NO: 1879085 - DNA, 15 bp, Homo sapiens
attgaacaaatgaac

SEQ ID NO: 1879086 - DNA, 15 bp, Homo sapiens
ttgaacaaatgaacc

SEQ ID NO: 1879087 - DNA, 15 bp, Homo sapiens
tgaacaaatgaacct

SEQ ID NO: 1879088 - DNA, 15 bp, Homo sapiens
gaacaaatgaacctg

SEQ ID NO: 1879089 - DNA, 15 bp, Homo sapiens
aacaaatgaacctgt

SEQ ID NO: 1879090 - DNA, 15 bp, Homo sapiens
acaaatgaacctgta

SEQ ID NO: 1879091 - DNA, 15 bp, Homo sapiens
caaatgaacctgtag

SEQ ID NO: 1879092 - DNA, 15 bp, Homo sapiens
aaatgaacctgtagc

SEQ ID NO: 1879093 - DNA, 15 bp, Homo sapiens
aatgaacctgtagca

SEQ ID NO: 1879094 - DNA, 15 bp, Homo sapiens
atgaacctgtagcaa

SEQ ID NO: 1879095 - DNA, 15 bp, Homo sapiens
tgaacctgtagcaat

SEQ ID NO: 1879096 - DNA, 15 bp, Homo sapiens
gaacctgtagcaatg

SEQ ID NO: 1879097 - DNA, 15 bp, Homo sapiens
aacctgtagcaatga

SEQ ID NO: 1879098 - DNA, 15 bp, Homo sapiens
acctgtagcaatgac

SEQ ID NO: 1879099 - DNA, 15 bp, Homo sapiens
cctgtagcaatgact

SEQ ID NO: 1879100 - DNA, 15 bp, Homo sapiens
ctgtagcaatgactt

SEQ ID NO: 1879101 - DNA, 15 bp, Homo sapiens
tgtagcaatgacttt

SEQ ID NO: 1879102 - DNA, 15 bp, Homo sapiens
gtagcaatgactttt

SEQ ID NO: 1879103 - DNA, 15 bp, Homo sapiens
tagcaatgacttttt

SEQ ID NO: 1879104 - DNA, 15 bp, Homo sapiens
agcaatgactttttt

SEQ ID NO: 1879105 - DNA, 15 bp, Homo sapiens
gcaatgacttttttt

SEQ ID NO: 1879106 - DNA, 15 bp, Homo sapiens
caatgactttttttt

SEQ ID NO: 1879107 - DNA, 15 bp, Homo sapiens
aatgacttttttttt

SEQ ID NO: 1879108 - DNA, 15 bp, Homo sapiens
atgactttttttttc

SEQ ID NO: 1879109 - DNA, 15 bp, Homo sapiens
tgactttttttttct

SEQ ID NO: 1879110 - DNA, 15 bp, Homo sapiens
gactttttttttcta

SEQ ID NO: 1879111 - DNA, 15 bp, Homo sapiens
actttttttttctaa

SEQ ID NO: 1879112 - DNA, 15 bp, Homo sapiens
ctttttttttctaaa

SEQ ID NO: 1879113 - DNA, 15 bp, Homo sapiens
tttttttttctaaat

SEQ ID NO: 1879114 - DNA, 15 bp, Homo sapiens
ttttttttctaaata

SEQ ID NO: 1879115 - DNA, 15 bp, Homo sapiens
tttttttctaaatag

SEQ ID NO: 1879116 - DNA, 15 bp, Homo sapiens
ttttttctaaatagc

SEQ ID NO: 1879117 - DNA, 15 bp, Homo sapiens
tttttctaaatagct

SEQ ID NO: 1879118 - DNA, 15 bp, Homo sapiens
ttttctaaatagctt

SEQ ID NO: 1879119 - DNA, 15 bp, Homo sapiens
tttctaaatagcttt

SEQ ID NO: 1879120 - DNA, 15 bp, Homo sapiens
ttctaaatagcttta

SEQ ID NO: 1879121 - DNA, 15 bp, Homo sapiens
tctaaatagctttat

SEQ ID NO: 1879122 - DNA, 15 bp, Homo sapiens
ctaaatagctttatt

SEQ ID NO: 1879123 - DNA, 15 bp, Homo sapiens
taaatagctttattg

SEQ ID NO: 1879124 - DNA, 15 bp, Homo sapiens
aaatagctttattga

SEQ ID NO: 1879125 - DNA, 15 bp, Homo sapiens
aatagctttattgaa

SEQ ID NO: 1879126 - DNA, 15 bp, Homo sapiens
atagctttattgaaa

SEQ ID NO: 1879127 - DNA, 15 bp, Homo sapiens
tagctttattgaaat

SEQ ID NO: 1879128 - DNA, 15 bp, Homo sapiens
agctttattgaaata

SEQ ID NO: 1879129 - DNA, 15 bp, Homo sapiens
gctttattgaaatat

SEQ ID NO: 1879130 - DNA, 15 bp, Homo sapiens
ctttattgaaatata

SEQ ID NO: 1879131 - DNA, 15 bp, Homo sapiens
tttattgaaatataa

SEQ ID NO: 1879132 - DNA, 15 bp, Homo sapiens
ttattgaaatataat

SEQ ID NO: 1879133 - DNA, 15 bp, Homo sapiens
tattgaaatataatt

SEQ ID NO: 1879134 - DNA, 15 bp, Homo sapiens
attgaaatataattc

SEQ ID NO: 1879135 - DNA, 15 bp, Homo sapiens
ttgaaatataattca

SEQ ID NO: 1879136 - DNA, 15 bp, Homo sapiens
tgaaatataattcac

SEQ ID NO: 1879137 - DNA, 15 bp, Homo sapiens
gaaatataattcaca

SEQ ID NO: 1879138 - DNA, 15 bp, Homo sapiens
aaatataattcacat

SEQ ID NO: 1879139 - DNA, 15 bp, Homo sapiens
aatataattcacata

SEQ ID NO: 1879140 - DNA, 15 bp, Homo sapiens
atataattcacatac

SEQ ID NO: 1879141 - DNA, 15 bp, Homo sapiens
tataattcacataca

SEQ ID NO: 1879142 - DNA, 15 bp, Homo sapiens
ataattcacatacag

SEQ ID NO: 1879143 - DNA, 15 bp, Homo sapiens
taattcacatacagc

SEQ ID NO: 1879144 - DNA, 15 bp, Homo sapiens
aattcacatacagca

SEQ ID NO: 1879145 - DNA, 15 bp, Homo sapiens
attcacatacagcaa

SEQ ID NO: 1879146 - DNA, 15 bp, Homo sapiens
ttcacatacagcaat

SEQ ID NO: 1879147 - DNA, 15 bp, Homo sapiens
tcacatacagcaata

SEQ ID NO: 1879148 - DNA, 15 bp, Homo sapiens
cacatacagcaatat

SEQ ID NO: 1879149 - DNA, 15 bp, Homo sapiens
acatacagcaatatc

SEQ ID NO: 1879150 - DNA, 15 bp, Homo sapiens
catacagcaatatct

SEQ ID NO: 1879151 - DNA, 15 bp, Homo sapiens
atacagcaatatctg

SEQ ID NO: 1879152 - DNA, 15 bp, Homo sapiens
tacagcaatatctgc

SEQ ID NO: 1879153 - DNA, 15 bp, Homo sapiens
acagcaatatctgcc

SEQ ID NO: 1879154 - DNA, 15 bp, Homo sapiens
cagcaatatctgccc

SEQ ID NO: 1879155 - DNA, 15 bp, Homo sapiens
agcaatatctgccct

SEQ ID NO: 1879156 - DNA, 15 bp, Homo sapiens
gcaatatctgccctt

SEQ ID NO: 1879157 - DNA, 15 bp, Homo sapiens
caatatctgcccttt

SEQ ID NO: 1879158 - DNA, 15 bp, Homo sapiens
aatatctgcccttta

SEQ ID NO: 1879159 - DNA, 15 bp, Homo sapiens
atatctgccctttaa

SEQ ID NO: 1879160 - DNA, 15 bp, Homo sapiens
tatctgccctttaaa

SEQ ID NO: 1879161 - DNA, 15 bp, Homo sapiens
atctgccctttaaaa

SEQ ID NO: 1879162 - DNA, 15 bp, Homo sapiens
tctgccctttaaaaa

SEQ ID NO: 1879163 - DNA, 15 bp, Homo sapiens
ctgccctttaaaaat

SEQ ID NO: 1879164 - DNA, 15 bp, Homo sapiens
tgccctttaaaaatg

SEQ ID NO: 1879165 - DNA, 15 bp, Homo sapiens
gccctttaaaaatgt

SEQ ID NO: 1879166 - DNA, 15 bp, Homo sapiens
ccctttaaaaatgtg

SEQ ID NO: 1879167 - DNA, 15 bp, Homo sapiens
cctttaaaaatgtga

SEQ ID NO: 1879168 - DNA, 15 bp, Homo sapiens
ctttaaaaatgtgag

SEQ ID NO: 1879169 - DNA, 15 bp, Homo sapiens
tttaaaaatgtgaga

SEQ ID NO: 1879170 - DNA, 15 bp, Homo sapiens
ttaaaaatgtgagat

SEQ ID NO: 1879171 - DNA, 15 bp, Homo sapiens
taaaaatgtgagatt

SEQ ID NO: 1879172 - DNA, 15 bp, Homo sapiens
aaaaatgtgagattc

SEQ ID NO: 1879173 - DNA, 15 bp, Homo sapiens
aaaatgtgagattca

SEQ ID NO: 1879174 - DNA, 15 bp, Homo sapiens
aaatgtgagattcag

SEQ ID NO: 1879175 - DNA, 15 bp, Homo sapiens
aatgtgagattcagc

SEQ ID NO: 1879176 - DNA, 15 bp, Homo sapiens
atgtgagattcagcc

SEQ ID NO: 1879177 - DNA, 15 bp, Homo sapiens
tgtgagattcagcca

SEQ ID NO: 1879178 - DNA, 15 bp, Homo sapiens
gtgagattcagccag

SEQ ID NO: 1879179 - DNA, 15 bp, Homo sapiens
tgagattcagccagg

SEQ ID NO: 1879180 - DNA, 15 bp, Homo sapiens
gagattcagccaggc

SEQ ID NO: 1879181 - DNA, 15 bp, Homo sapiens
agattcagccaggcg

SEQ ID NO: 1879182 - DNA, 15 bp, Homo sapiens
gattcagccaggcgt

SEQ ID NO: 1879183 - DNA, 15 bp, Homo sapiens
attcagccaggcgtg

SEQ ID NO: 1879184 - DNA, 15 bp, Homo sapiens
ttcagccaggcgtgg

SEQ ID NO: 1879185 - DNA, 15 bp, Homo sapiens
tcagccaggcgtggt

SEQ ID NO: 1879186 - DNA, 15 bp, Homo sapiens
cagccaggcgtggtg

SEQ ID NO: 1879187 - DNA, 15 bp, Homo sapiens
caggcgtggtggcta

SEQ ID NO: 1879188 - DNA, 15 bp, Homo sapiens
aggcgtggtggctaa

SEQ ID NO: 1879189 - DNA, 15 bp, Homo sapiens
ggcgtggtggctaac

SEQ ID NO: 1879190 - DNA, 15 bp, Homo sapiens
gcgtggtggctaacg

SEQ ID NO: 1879191 - DNA, 15 bp, Homo sapiens
cgtggtggctaacgc

SEQ ID NO: 1879192 - DNA, 15 bp, Homo sapiens
gtggtggctaacgcc

SEQ ID NO: 1879193 - DNA, 15 bp, Homo sapiens
tggtggctaacgcct

SEQ ID NO: 1879194 - DNA, 15 bp, Homo sapiens
ggtggctaacgcctg

SEQ ID NO: 1879195 - DNA, 15 bp, Homo sapiens
gtggctaacgcctgt

SEQ ID NO: 1879196 - DNA, 15 bp, Homo sapiens
tggctaacgcctgta

SEQ ID NO: 1879197 - DNA, 15 bp, Homo sapiens
tgtaatcccagcacc

SEQ ID NO: 1879198 - DNA, 15 bp, Homo sapiens
gtaatcccagcacct

SEQ ID NO: 1879199 - DNA, 15 bp, Homo sapiens
taatcccagcacctt

SEQ ID NO: 1879200 - DNA, 15 bp, Homo sapiens
aatcccagcaccttg

SEQ ID NO: 1879201 - DNA, 15 bp, Homo sapiens
atcccagcaccttgg

SEQ ID NO: 1879202 - DNA, 15 bp, Homo sapiens
tcccagcaccttggg

SEQ ID NO: 1879203 - DNA, 15 bp, Homo sapiens
ggataataacacaaa

SEQ ID NO: 1879204 - DNA, 15 bp, Homo sapiens
gataataacacaaag

SEQ ID NO: 1879205 - DNA, 15 bp, Homo sapiens
ataataacacaaagt

SEQ ID NO: 1879206 - DNA, 15 bp, Homo sapiens
taataacacaaagtt

SEQ ID NO: 1879207 - DNA, 15 bp, Homo sapiens
aataacacaaagttg

SEQ ID NO: 1879208 - DNA, 15 bp, Homo sapiens
ataacacaaagttgt

SEQ ID NO: 1879209 - DNA, 15 bp, Homo sapiens
taacacaaagttgtg

SEQ ID NO: 1879210 - DNA, 15 bp, Homo sapiens
aacacaaagttgtga

SEQ ID NO: 1879211 - DNA, 15 bp, Homo sapiens
acacaaagttgtgaa

SEQ ID NO: 1879212 - DNA, 15 bp, Homo sapiens
cacaaagttgtgaaa

SEQ ID NO: 1879213 - DNA, 15 bp, Homo sapiens
acaaagttgtgaaaa

SEQ ID NO: 1879214 - DNA, 15 bp, Homo sapiens
caaagttgtgaaaat

SEQ ID NO: 1879215 - DNA, 15 bp, Homo sapiens
aaagttgtgaaaatt

SEQ ID NO: 1879216 - DNA, 15 bp, Homo sapiens
aagttgtgaaaattt

SEQ ID NO: 1879217 - DNA, 15 bp, Homo sapiens
agttgtgaaaattta

SEQ ID NO: 1879218 - DNA, 15 bp, Homo sapiens
gttgtgaaaatttac

SEQ ID NO: 1879219 - DNA, 15 bp, Homo sapiens
ttgtgaaaatttact

SEQ ID NO: 1879220 - DNA, 15 bp, Homo sapiens
tgtgaaaatttacta

SEQ ID NO: 1879221 - DNA, 15 bp, Homo sapiens
gtgaaaatttactaa

SEQ ID NO: 1879222 - DNA, 15 bp, Homo sapiens
tgaaaatttactaag

SEQ ID NO: 1879223 - DNA, 15 bp, Homo sapiens
gaaaatttactaaga

SEQ ID NO: 1879224 - DNA, 15 bp, Homo sapiens
aaaatttactaagac

SEQ ID NO: 1879225 - DNA, 15 bp, Homo sapiens
aaatttactaagaca

SEQ ID NO: 1879226 - DNA, 15 bp, Homo sapiens
aatttactaagacac

SEQ ID NO: 1879227 - DNA, 15 bp, Homo sapiens
atttactaagacacc

SEQ ID NO: 1879228 - DNA, 15 bp, Homo sapiens
tttactaagacacca

SEQ ID NO: 1879229 - DNA, 15 bp, Homo sapiens
ttactaagacaccat

SEQ ID NO: 1879230 - DNA, 15 bp, Homo sapiens
tactaagacaccatg

SEQ ID NO: 1879231 - DNA, 15 bp, Homo sapiens
actaagacaccatgt

SEQ ID NO: 1879232 - DNA, 15 bp, Homo sapiens
ctaagacaccatgta

SEQ ID NO: 1879233 - DNA, 15 bp, Homo sapiens
taagacaccatgtaa

SEQ ID NO: 1879234 - DNA, 15 bp, Homo sapiens
aagacaccatgtaaa

SEQ ID NO: 1879235 - DNA, 15 bp, Homo sapiens
agacaccatgtaaag

SEQ ID NO: 1879236 - DNA, 15 bp, Homo sapiens
gacaccatgtaaagc

SEQ ID NO: 1879237 - DNA, 15 bp, Homo sapiens
acaccatgtaaagca

SEQ ID NO: 1879238 - DNA, 15 bp, Homo sapiens
caccatgtaaagcat

SEQ ID NO: 1879239 - DNA, 15 bp, Homo sapiens
accatgtaaagcatt

SEQ ID NO: 1879240 - DNA, 15 bp, Homo sapiens
ccatgtaaagcattt

SEQ ID NO: 1879241 - DNA, 15 bp, Homo sapiens
catgtaaagcattta

SEQ ID NO: 1879242 - DNA, 15 bp, Homo sapiens
atgtaaagcatttag

SEQ ID NO: 1879243 - DNA, 15 bp, Homo sapiens
tgtaaagcatttagc

SEQ ID NO: 1879244 - DNA, 15 bp, Homo sapiens
gtaaagcatttagcc

SEQ ID NO: 1879245 - DNA, 15 bp, Homo sapiens
taaagcatttagccc

SEQ ID NO: 1879246 - DNA, 15 bp, Homo sapiens
aaagcatttagccca

SEQ ID NO: 1879247 - DNA, 15 bp, Homo sapiens
aagcatttagcccat

SEQ ID NO: 1879248 - DNA, 15 bp, Homo sapiens
agcatttagcccatt

SEQ ID NO: 1879249 - DNA, 15 bp, Homo sapiens
gcatttagcccattg

SEQ ID NO: 1879250 - DNA, 15 bp, Homo sapiens
catttagcccattgc

SEQ ID NO: 1879251 - DNA, 15 bp, Homo sapiens
atttagcccattgct

SEQ ID NO: 1879252 - DNA, 15 bp, Homo sapiens
tttagcccattgctg

SEQ ID NO: 1879253 - DNA, 15 bp, Homo sapiens
ttagcccattgctgg

SEQ ID NO: 1879254 - DNA, 15 bp, Homo sapiens
tagcccattgctggt

SEQ ID NO: 1879255 - DNA, 15 bp, Homo sapiens
agcccattgctggtt

SEQ ID NO: 1879256 - DNA, 15 bp, Homo sapiens
gcccattgctggttg

SEQ ID NO: 1879257 - DNA, 15 bp, Homo sapiens
cccattgctggttgt

SEQ ID NO: 1879258 - DNA, 15 bp, Homo sapiens
ccattgctggttgtt

SEQ ID NO: 1879259 - DNA, 15 bp, Homo sapiens
cattgctggttgttt

SEQ ID NO: 1879260 - DNA, 15 bp, Homo sapiens
attgctggttgtttt

SEQ ID NO: 1879261 - DNA, 15 bp, Homo sapiens
ttgctggttgtttta

SEQ ID NO: 1879262 - DNA, 15 bp, Homo sapiens
tgctggttgttttat

SEQ ID NO: 1879263 - DNA, 15 bp, Homo sapiens
gctggttgttttatg

SEQ ID NO: 1879264 - DNA, 15 bp, Homo sapiens
ctggttgttttatga

SEQ ID NO: 1879265 - DNA, 15 bp, Homo sapiens
tggttgttttatgaa

SEQ ID NO: 1879266 - DNA, 15 bp, Homo sapiens
ggttgttttatgaag

SEQ ID NO: 1879267 - DNA, 15 bp, Homo sapiens
gttgttttatgaaga

SEQ ID NO: 1879268 - DNA, 15 bp, Homo sapiens
ttgttttatgaagat

SEQ ID NO: 1879269 - DNA, 15 bp, Homo sapiens
tgttttatgaagatt

SEQ ID NO: 1879270 - DNA, 15 bp, Homo sapiens
gttttatgaagattc

SEQ ID NO: 1879271 - DNA, 15 bp, Homo sapiens
ttttatgaagattct

SEQ ID NO: 1879272 - DNA, 15 bp, Homo sapiens
tttatgaagattcta

SEQ ID NO: 1879273 - DNA, 15 bp, Homo sapiens
ttatgaagattctat

SEQ ID NO: 1879274 - DNA, 15 bp, Homo sapiens
tatgaagattctatg

SEQ ID NO: 1879275 - DNA, 15 bp, Homo sapiens
atgaagattctatga

SEQ ID NO: 1879276 - DNA, 15 bp, Homo sapiens
tgaagattctatgag

SEQ ID NO: 1879277 - DNA, 15 bp, Homo sapiens
gaagattctatgagt

SEQ ID NO: 1879278 - DNA, 15 bp, Homo sapiens
aagattctatgagtg

SEQ ID NO: 1879279 - DNA, 15 bp, Homo sapiens
agattctatgagtgt

SEQ ID NO: 1879280 - DNA, 15 bp, Homo sapiens
gattctatgagtgtt

SEQ ID NO: 1879281 - DNA, 15 bp, Homo sapiens
attctatgagtgttt

SEQ ID NO: 1879282 - DNA, 15 bp, Homo sapiens
ttctatgagtgtttg

SEQ ID NO: 1879283 - DNA, 15 bp, Homo sapiens
tctatgagtgtttgc

SEQ ID NO: 1879284 - DNA, 15 bp, Homo sapiens
ctatgagtgtttgct

SEQ ID NO: 1879285 - DNA, 15 bp, Homo sapiens
tatgagtgtttgctg

SEQ ID NO: 1879286 - DNA, 15 bp, Homo sapiens
atgagtgtttgctgc

SEQ ID NO: 1879287 - DNA, 15 bp, Homo sapiens
tgagtgtttgctgcc

SEQ ID NO: 1879288 - DNA, 15 bp, Homo sapiens
gagtgtttgctgcca

SEQ ID NO: 1879289 - DNA, 15 bp, Homo sapiens
agtgtttgctgccat

SEQ ID NO: 1879290 - DNA, 15 bp, Homo sapiens
gtgtttgctgccatt

SEQ ID NO: 1879291 - DNA, 15 bp, Homo sapiens
tgtttgctgccatta

SEQ ID NO: 1879292 - DNA, 15 bp, Homo sapiens
gtttgctgccattat

SEQ ID NO: 1879293 - DNA, 15 bp, Homo sapiens
tttgctgccattatt

SEQ ID NO: 1879294 - DNA, 15 bp, Homo sapiens
ttgctgccattatta

SEQ ID NO: 1879295 - DNA, 15 bp, Homo sapiens
tgctgccattattat

SEQ ID NO: 1879296 - DNA, 15 bp, Homo sapiens
gctgccattattatt

SEQ ID NO: 1879297 - DNA, 15 bp, Homo sapiens
ctgccattattatta

SEQ ID NO: 1879298 - DNA, 15 bp, Homo sapiens
tgccattattattat

SEQ ID NO: 1879299 - DNA, 15 bp, Homo sapiens
gccattattattatt

SEQ ID NO: 1879300 - DNA, 15 bp, Homo sapiens
ccattattattattc

SEQ ID NO: 1879301 - DNA, 15 bp, Homo sapiens
cattattattattca

SEQ ID NO: 1879302 - DNA, 15 bp, Homo sapiens
attattattattcat

SEQ ID NO: 1879303 - DNA, 15 bp, Homo sapiens
ttattattattcatt

SEQ ID NO: 1879304 - DNA, 15 bp, Homo sapiens
tattattattcatta

SEQ ID NO: 1879305 - DNA, 15 bp, Homo sapiens
attattattcattat

SEQ ID NO: 1879306 - DNA, 15 bp, Homo sapiens
ttattattcattatt

SEQ ID NO: 1879307 - DNA, 15 bp, Homo sapiens
tattattcattatta

SEQ ID NO: 1879308 - DNA, 15 bp, Homo sapiens
attattcattattat

SEQ ID NO: 1879309 - DNA, 15 bp, Homo sapiens
ttattcattattatt

SEQ ID NO: 1879310 - DNA, 15 bp, Homo sapiens
tattcattattatta

SEQ ID NO: 1879311 - DNA, 15 bp, Homo sapiens
attcattattattat

SEQ ID NO: 1879312 - DNA, 15 bp, Homo sapiens
ttcattattattatt

SEQ ID NO: 1879313 - DNA, 15 bp, Homo sapiens
tcattattattattt

SEQ ID NO: 1879314 - DNA, 15 bp, Homo sapiens
cattattattatttg

SEQ ID NO: 1879315 - DNA, 15 bp, Homo sapiens
attattattatttgt

SEQ ID NO: 1879316 - DNA, 15 bp, Homo sapiens
ttattattatttgtg

SEQ ID NO: 1879317 - DNA, 15 bp, Homo sapiens
tattattatttgtgg

SEQ ID NO: 1879318 - DNA, 15 bp, Homo sapiens
attattatttgtggg

SEQ ID NO: 1879319 - DNA, 15 bp, Homo sapiens
ttattatttgtggga

SEQ ID NO: 1879320 - DNA, 15 bp, Homo sapiens
tattatttgtgggag

SEQ ID NO: 1879321 - DNA, 15 bp, Homo sapiens
attatttgtgggagg

SEQ ID NO: 1879322 - DNA, 15 bp, Homo sapiens
ttatttgtgggagga

SEQ ID NO: 1879323 - DNA, 15 bp, Homo sapiens
tatttgtgggaggaa

SEQ ID NO: 1879324 - DNA, 15 bp, Homo sapiens
atttgtgggaggaag

SEQ ID NO: 1879325 - DNA, 15 bp, Homo sapiens
tttgtgggaggaagt

SEQ ID NO: 1879326 - DNA, 15 bp, Homo sapiens
ttgtgggaggaagta

SEQ ID NO: 1879327 - DNA, 15 bp, Homo sapiens
tgtgggaggaagtaa

SEQ ID NO: 1879328 - DNA, 15 bp, Homo sapiens
gtgggaggaagtaaa

SEQ ID NO: 1879329 - DNA, 15 bp, Homo sapiens
tgggaggaagtaaag

SEQ ID NO: 1879330 - DNA, 15 bp, Homo sapiens
gggaggaagtaaagt

SEQ ID NO: 1879331 - DNA, 15 bp, Homo sapiens
ggaggaagtaaagtt

SEQ ID NO: 1879332 - DNA, 15 bp, Homo sapiens
gaggaagtaaagttc

SEQ ID NO: 1879333 - DNA, 15 bp, Homo sapiens
aggaagtaaagttca

SEQ ID NO: 1879334 - DNA, 15 bp, Homo sapiens
ggaagtaaagttcaa

SEQ ID NO: 1879335 - DNA, 15 bp, Homo sapiens
gaagtaaagttcaag

SEQ ID NO: 1879336 - DNA, 15 bp, Homo sapiens
aagtaaagttcaagt

SEQ ID NO: 1879337 - DNA, 15 bp, Homo sapiens
agtaaagttcaagta

SEQ ID NO: 1879338 - DNA, 15 bp, Homo sapiens
gtaaagttcaagtac

SEQ ID NO: 1879339 - DNA, 15 bp, Homo sapiens
taaagttcaagtacc

SEQ ID NO: 1879340 - DNA, 15 bp, Homo sapiens
aaagttcaagtacca

SEQ ID NO: 1879341 - DNA, 15 bp, Homo sapiens
aagttcaagtaccaa

SEQ ID NO: 1879342 - DNA, 15 bp, Homo sapiens
agttcaagtaccaat

SEQ ID NO: 1879343 - DNA, 15 bp, Homo sapiens
gttcaagtaccaata

SEQ ID NO: 1879344 - DNA, 15 bp, Homo sapiens
ttcaagtaccaataa

SEQ ID NO: 1879345 - DNA, 15 bp, Homo sapiens
tcaagtaccaataat

SEQ ID NO: 1879346 - DNA, 15 bp, Homo sapiens
caagtaccaataata

SEQ ID NO: 1879347 - DNA, 15 bp, Homo sapiens
aagtaccaataataa

SEQ ID NO: 1879348 - DNA, 15 bp, Homo sapiens
agtaccaataataat

SEQ ID NO: 1879349 - DNA, 15 bp, Homo sapiens
gtaccaataataatt

SEQ ID NO: 1879350 - DNA, 15 bp, Homo sapiens
taccaataataattt

SEQ ID NO: 1879351 - DNA, 15 bp, Homo sapiens
accaataataatttt

SEQ ID NO: 1879352 - DNA, 15 bp, Homo sapiens
ccaataataattttc

SEQ ID NO: 1879353 - DNA, 15 bp, Homo sapiens
caataataattttca

SEQ ID NO: 1879354 - DNA, 15 bp, Homo sapiens
aataataattttcaa

SEQ ID NO: 1879355 - DNA, 15 bp, Homo sapiens
ataataattttcaac

SEQ ID NO: 1879356 - DNA, 15 bp, Homo sapiens
taataattttcaacc

SEQ ID NO: 1879357 - DNA, 15 bp, Homo sapiens
aataattttcaacca

SEQ ID NO: 1879358 - DNA, 15 bp, Homo sapiens
ataattttcaaccat

SEQ ID NO: 1879359 - DNA, 15 bp, Homo sapiens
taattttcaaccatt

SEQ ID NO: 1879360 - DNA, 15 bp, Homo sapiens
aattttcaaccatta

SEQ ID NO: 1879361 - DNA, 15 bp, Homo sapiens
attttcaaccattac

SEQ ID NO: 1879362 - DNA, 15 bp, Homo sapiens
ttttcaaccattaca

SEQ ID NO: 1879363 - DNA, 15 bp, Homo sapiens
tttcaaccattacaa

SEQ ID NO: 1879364 - DNA, 15 bp, Homo sapiens
ttcaaccattacaaa

SEQ ID NO: 1879365 - DNA, 15 bp, Homo sapiens
tcaaccattacaaat

SEQ ID NO: 1879366 - DNA, 15 bp, Homo sapiens
caaccattacaaatt

SEQ ID NO: 1879367 - DNA, 15 bp, Homo sapiens
aaccattacaaattg

SEQ ID NO: 1879368 - DNA, 15 bp, Homo sapiens
accattacaaattgt

SEQ ID NO: 1879369 - DNA, 15 bp, Homo sapiens
ccattacaaattgtg

SEQ ID NO: 1879370 - DNA, 15 bp, Homo sapiens
cattacaaattgtga

SEQ ID NO: 1879371 - DNA, 15 bp, Homo sapiens
attacaaattgtgat

SEQ ID NO: 1879372 - DNA, 15 bp, Homo sapiens
ttacaaattgtgatt

SEQ ID NO: 1879373 - DNA, 15 bp, Homo sapiens
tacaaattgtgatta

SEQ ID NO: 1879374 - DNA, 15 bp, Homo sapiens
acaaattgtgattat

SEQ ID NO: 1879375 - DNA, 15 bp, Homo sapiens
caaattgtgattata

SEQ ID NO: 1879376 - DNA, 15 bp, Homo sapiens
aaattgtgattatat

SEQ ID NO: 1879377 - DNA, 15 bp, Homo sapiens
aattgtgattatata

SEQ ID NO: 1879378 - DNA, 15 bp, Homo sapiens
attgtgattatataa

SEQ ID NO: 1879379 - DNA, 15 bp, Homo sapiens
ttgtgattatataaa

SEQ ID NO: 1879380 - DNA, 15 bp, Homo sapiens
tgtgattatataaaa

SEQ ID NO: 1879381 - DNA, 15 bp, Homo sapiens
gtgattatataaaag

SEQ ID NO: 1879382 - DNA, 15 bp, Homo sapiens
tgattatataaaagt

SEQ ID NO: 1879383 - DNA, 15 bp, Homo sapiens
gattatataaaagtt

SEQ ID NO: 1879384 - DNA, 15 bp, Homo sapiens
attatataaaagttt

SEQ ID NO: 1879385 - DNA, 15 bp, Homo sapiens
ttatataaaagtttt

SEQ ID NO: 1879386 - DNA, 15 bp, Homo sapiens
tatataaaagtttta

SEQ ID NO: 1879387 - DNA, 15 bp, Homo sapiens
atataaaagttttaa

SEQ ID NO: 1879388 - DNA, 15 bp, Homo sapiens
tataaaagttttaaa

SEQ ID NO: 1879389 - DNA, 15 bp, Homo sapiens
ataaaagttttaaaa

SEQ ID NO: 1879390 - DNA, 15 bp, Homo sapiens
taaaagttttaaaaa

SEQ ID NO: 1879391 - DNA, 15 bp, Homo sapiens
aaaagttttaaaaat

SEQ ID NO: 1879392 - DNA, 15 bp, Homo sapiens
aaagttttaaaaatt

SEQ ID NO: 1879393 - DNA, 15 bp, Homo sapiens
aagttttaaaaattt

SEQ ID NO: 1879394 - DNA, 15 bp, Homo sapiens
agttttaaaaatttc

SEQ ID NO: 1879395 - DNA, 15 bp, Homo sapiens
gttttaaaaatttct

SEQ ID NO: 1879396 - DNA, 15 bp, Homo sapiens
ttttaaaaatttctc

SEQ ID NO: 1879397 - DNA, 15 bp, Homo sapiens
tttaaaaatttctca

SEQ ID NO: 1879398 - DNA, 15 bp, Homo sapiens
ttaaaaatttctcag

SEQ ID NO: 1879399 - DNA, 15 bp, Homo sapiens
taaaaatttctcagg

SEQ ID NO: 1879400 - DNA, 15 bp, Homo sapiens
aaaaatttctcagga

SEQ ID NO: 1879401 - DNA, 15 bp, Homo sapiens
aaaatttctcaggaa

SEQ ID NO: 1879402 - DNA, 15 bp, Homo sapiens
aaatttctcaggaac

SEQ ID NO: 1879403 - DNA, 15 bp, Homo sapiens
aatttctcaggaacc

SEQ ID NO: 1879404 - DNA, 15 bp, Homo sapiens
atttctcaggaacca

SEQ ID NO: 1879405 - DNA, 15 bp, Homo sapiens
tttctcaggaaccag

SEQ ID NO: 1879406 - DNA, 15 bp, Homo sapiens
ttctcaggaaccagg

SEQ ID NO: 1879407 - DNA, 15 bp, Homo sapiens
tctcaggaaccaggg

SEQ ID NO: 1879408 - DNA, 15 bp, Homo sapiens
ctcaggaaccaggga

SEQ ID NO: 1879409 - DNA, 15 bp, Homo sapiens
tcaggaaccagggag

SEQ ID NO: 1879410 - DNA, 15 bp, Homo sapiens
caggaaccagggagc

SEQ ID NO: 1879411 - DNA, 15 bp, Homo sapiens
aggaaccagggagca

SEQ ID NO: 1879412 - DNA, 15 bp, Homo sapiens
ggaaccagggagcat

SEQ ID NO: 1879413 - DNA, 15 bp, Homo sapiens
gaaccagggagcatt

SEQ ID NO: 1879414 - DNA, 15 bp, Homo sapiens
aaccagggagcattc

SEQ ID NO: 1879415 - DNA, 15 bp, Homo sapiens
accagggagcattct

SEQ ID NO: 1879416 - DNA, 15 bp, Homo sapiens
ccagggagcattcta

SEQ ID NO: 1879417 - DNA, 15 bp, Homo sapiens
cagggagcattctat

SEQ ID NO: 1879418 - DNA, 15 bp, Homo sapiens
agggagcattctatt

SEQ ID NO: 1879419 - DNA, 15 bp, Homo sapiens
gggagcattctattt

SEQ ID NO: 1879420 - DNA, 15 bp, Homo sapiens
ggagcattctatttt

SEQ ID NO: 1879421 - DNA, 15 bp, Homo sapiens
gagcattctattttt

SEQ ID NO: 1879422 - DNA, 15 bp, Homo sapiens
agcattctatttttc

SEQ ID NO: 1879423 - DNA, 15 bp, Homo sapiens
gcattctatttttca

SEQ ID NO: 1879424 - DNA, 15 bp, Homo sapiens
cattctatttttcat

SEQ ID NO: 1879425 - DNA, 15 bp, Homo sapiens
attctatttttcatt

SEQ ID NO: 1879426 - DNA, 15 bp, Homo sapiens
ttctatttttcattc

SEQ ID NO: 1879427 - DNA, 15 bp, Homo sapiens
tctatttttcattct

SEQ ID NO: 1879428 - DNA, 15 bp, Homo sapiens
ctatttttcattcta

SEQ ID NO: 1879429 - DNA, 15 bp, Homo sapiens
tatttttcattctaa

SEQ ID NO: 1879430 - DNA, 15 bp, Homo sapiens
atttttcattctaat

SEQ ID NO: 1879431 - DNA, 15 bp, Homo sapiens
tttttcattctaatt

SEQ ID NO: 1879432 - DNA, 15 bp, Homo sapiens
ttttcattctaattt

SEQ ID NO: 1879433 - DNA, 15 bp, Homo sapiens
tttcattctaatttg

SEQ ID NO: 1879434 - DNA, 15 bp, Homo sapiens
ttcattctaatttga

SEQ ID NO: 1879435 - DNA, 15 bp, Homo sapiens
tcattctaatttgag

SEQ ID NO: 1879436 - DNA, 15 bp, Homo sapiens
cattctaatttgaga

SEQ ID NO: 1879437 - DNA, 15 bp, Homo sapiens
attctaatttgagaa

SEQ ID NO: 1879438 - DNA, 15 bp, Homo sapiens
ttctaatttgagaat

SEQ ID NO: 1879439 - DNA, 15 bp, Homo sapiens
tctaatttgagaata

SEQ ID NO: 1879440 - DNA, 15 bp, Homo sapiens
ctaatttgagaataa

SEQ ID NO: 1879441 - DNA, 15 bp, Homo sapiens
taatttgagaataaa

SEQ ID NO: 1879442 - DNA, 15 bp, Homo sapiens
aatttgagaataaaa

SEQ ID NO: 1879443 - DNA, 15 bp, Homo sapiens
atttgagaataaaat

SEQ ID NO: 1879444 - DNA, 15 bp, Homo sapiens
tttgagaataaaatt

SEQ ID NO: 1879445 - DNA, 15 bp, Homo sapiens
ttgagaataaaatta

SEQ ID NO: 1879446 - DNA, 15 bp, Homo sapiens
tgagaataaaattat

SEQ ID NO: 1879447 - DNA, 15 bp, Homo sapiens
gagaataaaattata

SEQ ID NO: 1879448 - DNA, 15 bp, Homo sapiens
agaataaaattatat

SEQ ID NO: 1879449 - DNA, 15 bp, Homo sapiens
gaataaaattatatt

SEQ ID NO: 1879450 - DNA, 15 bp, Homo sapiens
aataaaattatattt

SEQ ID NO: 1879451 - DNA, 15 bp, Homo sapiens
ataaaattatatttt

SEQ ID NO: 1879452 - DNA, 15 bp, Homo sapiens
taaaattatatttta

SEQ ID NO: 1879453 - DNA, 15 bp, Homo sapiens
aaaattatattttat

SEQ ID NO: 1879454 - DNA, 15 bp, Homo sapiens
aaattatattttatg

SEQ ID NO: 1879455 - DNA, 15 bp, Homo sapiens
aattatattttatgt

SEQ ID NO: 1879456 - DNA, 15 bp, Homo sapiens
attatattttatgtt

SEQ ID NO: 1879457 - DNA, 15 bp, Homo sapiens
ttatattttatgttt

SEQ ID NO: 1879458 - DNA, 15 bp, Homo sapiens
tatattttatgtttt

SEQ ID NO: 1879459 - DNA, 15 bp, Homo sapiens
atattttatgttttt

SEQ ID NO: 1879460 - DNA, 15 bp, Homo sapiens
tattttatgttttta

SEQ ID NO: 1879461 - DNA, 15 bp, Homo sapiens
attttatgtttttac

SEQ ID NO: 1879462 - DNA, 15 bp, Homo sapiens
ttttatgtttttact

SEQ ID NO: 1879463 - DNA, 15 bp, Homo sapiens
tttatgtttttactt

SEQ ID NO: 1879464 - DNA, 15 bp, Homo sapiens
ttatgtttttacttt

SEQ ID NO: 1879465 - DNA, 15 bp, Homo sapiens
tatgtttttactttt

SEQ ID NO: 1879466 - DNA, 15 bp, Homo sapiens
atgtttttacttttc

SEQ ID NO: 1879467 - DNA, 15 bp, Homo sapiens
tgtttttacttttct

SEQ ID NO: 1879468 - DNA, 15 bp, Homo sapiens
gtttttacttttctc

SEQ ID NO: 1879469 - DNA, 15 bp, Homo sapiens
tttttacttttctca

SEQ ID NO: 1879470 - DNA, 15 bp, Homo sapiens
ttttacttttctcaa

SEQ ID NO: 1879471 - DNA, 15 bp, Homo sapiens
tttacttttctcaaa

SEQ ID NO: 1879472 - DNA, 15 bp, Homo sapiens
ttacttttctcaaaa

SEQ ID NO: 1879473 - DNA, 15 bp, Homo sapiens
tacttttctcaaaag

SEQ ID NO: 1879474 - DNA, 15 bp, Homo sapiens
acttttctcaaaagc

SEQ ID NO: 1879475 - DNA, 15 bp, Homo sapiens
cttttctcaaaagcg

SEQ ID NO: 1879476 - DNA, 15 bp, Homo sapiens
ttttctcaaaagcgg

SEQ ID NO: 1879477 - DNA, 15 bp, Homo sapiens
tttctcaaaagcggt

SEQ ID NO: 1879478 - DNA, 15 bp, Homo sapiens
ttctcaaaagcggta

SEQ ID NO: 1879479 - DNA, 15 bp, Homo sapiens
tctcaaaagcggtag

SEQ ID NO: 1879480 - DNA, 15 bp, Homo sapiens
ctcaaaagcggtagg

SEQ ID NO: 1879481 - DNA, 15 bp, Homo sapiens
tcaaaagcggtagga

SEQ ID NO: 1879482 - DNA, 15 bp, Homo sapiens
caaaagcggtaggag

SEQ ID NO: 1879483 - DNA, 15 bp, Homo sapiens
aaaagcggtaggagc

SEQ ID NO: 1879484 - DNA, 15 bp, Homo sapiens
aaagcggtaggagca

SEQ ID NO: 1879485 - DNA, 15 bp, Homo sapiens
aagcggtaggagcaa

SEQ ID NO: 1879486 - DNA, 15 bp, Homo sapiens
agcggtaggagcaaa

SEQ ID NO: 1879487 - DNA, 15 bp, Homo sapiens
gcggtaggagcaaat

SEQ ID NO: 1879488 - DNA, 15 bp, Homo sapiens
cggtaggagcaaatc

SEQ ID NO: 1879489 - DNA, 15 bp, Homo sapiens
ggtaggagcaaatca

SEQ ID NO: 1879490 - DNA, 15 bp, Homo sapiens
gtaggagcaaatcag

SEQ ID NO: 1879491 - DNA, 15 bp, Homo sapiens
taggagcaaatcagt

SEQ ID NO: 1879492 - DNA, 15 bp, Homo sapiens
aggagcaaatcagtt

SEQ ID NO: 1879493 - DNA, 15 bp, Homo sapiens
ggagcaaatcagttt

SEQ ID NO: 1879494 - DNA, 15 bp, Homo sapiens
gagcaaatcagtttt

SEQ ID NO: 1879495 - DNA, 15 bp, Homo sapiens
agcaaatcagtttta

SEQ ID NO: 1879496 - DNA, 15 bp, Homo sapiens
gcaaatcagttttag

SEQ ID NO: 1879497 - DNA, 15 bp, Homo sapiens
caaatcagttttagg

SEQ ID NO: 1879498 - DNA, 15 bp, Homo sapiens
aaatcagttttaggt

SEQ ID NO: 1879499 - DNA, 15 bp, Homo sapiens
aatcagttttaggtt

SEQ ID NO: 1879500 - DNA, 15 bp, Homo sapiens
atcagttttaggttg

SEQ ID NO: 1879501 - DNA, 15 bp, Homo sapiens
tcagttttaggttgt

SEQ ID NO: 1879502 - DNA, 15 bp, Homo sapiens
cagttttaggttgtc

SEQ ID NO: 1879503 - DNA, 15 bp, Homo sapiens
agttttaggttgtca

SEQ ID NO: 1879504 - DNA, 15 bp, Homo sapiens
gttttaggttgtcat

SEQ ID NO: 1879505 - DNA, 15 bp, Homo sapiens
ttttaggttgtcatt

SEQ ID NO: 1879506 - DNA, 15 bp, Homo sapiens
tttaggttgtcattt

SEQ ID NO: 1879507 - DNA, 15 bp, Homo sapiens
ttaggttgtcatttt

SEQ ID NO: 1879508 - DNA, 15 bp, Homo sapiens
taggttgtcattttt

SEQ ID NO: 1879509 - DNA, 15 bp, Homo sapiens
aggttgtcatttttt

SEQ ID NO: 1879510 - DNA, 15 bp, Homo sapiens
ggttgtcattttttc

SEQ ID NO: 1879511 - DNA, 15 bp, Homo sapiens
gttgtcattttttct

SEQ ID NO: 1879512 - DNA, 15 bp, Homo sapiens
ttgtcattttttctg

SEQ ID NO: 1879513 - DNA, 15 bp, Homo sapiens
tgtcattttttctgt

SEQ ID NO: 1879514 - DNA, 15 bp, Homo sapiens
gtcattttttctgtt

SEQ ID NO: 1879515 - DNA, 15 bp, Homo sapiens
tcattttttctgttt

SEQ ID NO: 1879516 - DNA, 15 bp, Homo sapiens
cattttttctgtttc

SEQ ID NO: 1879517 - DNA, 15 bp, Homo sapiens
attttttctgtttcc

SEQ ID NO: 1879518 - DNA, 15 bp, Homo sapiens
ttttttctgtttcca

SEQ ID NO: 1879519 - DNA, 15 bp, Homo sapiens
tttttctgtttccag

SEQ ID NO: 1879520 - DNA, 15 bp, Homo sapiens
ttttctgtttccagg

SEQ ID NO: 1879521 - DNA, 15 bp, Homo sapiens
tttctgtttccaggt

SEQ ID NO: 1879522 - DNA, 15 bp, Homo sapiens
ttctgtttccaggtt

SEQ ID NO: 1879523 - DNA, 15 bp, Homo sapiens
tctgtttccaggttt

SEQ ID NO: 1879524 - DNA, 15 bp, Homo sapiens
ctgtttccaggtttt

SEQ ID NO: 1879525 - DNA, 15 bp, Homo sapiens
tgtttccaggttttt

SEQ ID NO: 1879526 - DNA, 15 bp, Homo sapiens
gtttccaggttttta

SEQ ID NO: 1879527 - DNA, 15 bp, Homo sapiens
tttccaggtttttag

SEQ ID NO: 1879528 - DNA, 15 bp, Homo sapiens
ttccaggtttttaga

SEQ ID NO: 1879529 - DNA, 15 bp, Homo sapiens
tccaggtttttagaa

SEQ ID NO: 1879530 - DNA, 15 bp, Homo sapiens
ccaggtttttagaac

SEQ ID NO: 1879531 - DNA, 15 bp, Homo sapiens
caggtttttagaaca

SEQ ID NO: 1879532 - DNA, 15 bp, Homo sapiens
aggtttttagaacag

SEQ ID NO: 1879533 - DNA, 15 bp, Homo sapiens
ggtttttagaacagt

SEQ ID NO: 1879534 - DNA, 15 bp, Homo sapiens
gtttttagaacagta

SEQ ID NO: 1879535 - DNA, 15 bp, Homo sapiens
tttttagaacagtag

SEQ ID NO: 1879536 - DNA, 15 bp, Homo sapiens
ttttagaacagtaga

SEQ ID NO: 1879537 - DNA, 15 bp, Homo sapiens
tttagaacagtagat

SEQ ID NO: 1879538 - DNA, 15 bp, Homo sapiens
ttagaacagtagata

SEQ ID NO: 1879539 - DNA, 15 bp, Homo sapiens
tagaacagtagatac

SEQ ID NO: 1879540 - DNA, 15 bp, Homo sapiens
agaacagtagatacc

SEQ ID NO: 1879541 - DNA, 15 bp, Homo sapiens
gaacagtagatacct

SEQ ID NO: 1879542 - DNA, 15 bp, Homo sapiens
aacagtagatacctg

SEQ ID NO: 1879543 - DNA, 15 bp, Homo sapiens
acagtagatacctgt

SEQ ID NO: 1879544 - DNA, 15 bp, Homo sapiens
cagtagatacctgtt

SEQ ID NO: 1879545 - DNA, 15 bp, Homo sapiens
agtagatacctgttc

SEQ ID NO: 1879546 - DNA, 15 bp, Homo sapiens
gtagatacctgttct

SEQ ID NO: 1879547 - DNA, 15 bp, Homo sapiens
tagatacctgttctc

SEQ ID NO: 1879548 - DNA, 15 bp, Homo sapiens
agatacctgttctct

SEQ ID NO: 1879549 - DNA, 15 bp, Homo sapiens
gatacctgttctctg

SEQ ID NO: 1879550 - DNA, 15 bp, Homo sapiens
atacctgttctctgt

SEQ ID NO: 1879551 - DNA, 15 bp, Homo sapiens
tacctgttctctgta

SEQ ID NO: 1879552 - DNA, 15 bp, Homo sapiens
acctgttctctgtaa

SEQ ID NO: 1879553 - DNA, 15 bp, Homo sapiens
cctgttctctgtaat

SEQ ID NO: 1879554 - DNA, 15 bp, Homo sapiens
ctgttctctgtaatt

SEQ ID NO: 1879555 - DNA, 15 bp, Homo sapiens
tgttctctgtaattt

SEQ ID NO: 1879556 - DNA, 15 bp, Homo sapiens
gttctctgtaatttg

SEQ ID NO: 1879557 - DNA, 15 bp, Homo sapiens
ttctctgtaatttgg

SEQ ID NO: 1879558 - DNA, 15 bp, Homo sapiens
tctctgtaatttggt

SEQ ID NO: 1879559 - DNA, 15 bp, Homo sapiens
ctctgtaatttggta

SEQ ID NO: 1879560 - DNA, 15 bp, Homo sapiens
tctgtaatttggtat

SEQ ID NO: 1879561 - DNA, 15 bp, Homo sapiens
ctgtaatttggtatg

SEQ ID NO: 1879562 - DNA, 15 bp, Homo sapiens
tgtaatttggtatgt

SEQ ID NO: 1879563 - DNA, 15 bp, Homo sapiens
gtaatttggtatgtc

SEQ ID NO: 1879564 - DNA, 15 bp, Homo sapiens
taatttggtatgtct

SEQ ID NO: 1879565 - DNA, 15 bp, Homo sapiens
aatttggtatgtcta

SEQ ID NO: 1879566 - DNA, 15 bp, Homo sapiens
atttggtatgtctat

SEQ ID NO: 1879567 - DNA, 15 bp, Homo sapiens
tttggtatgtctatc

SEQ ID NO: 1879568 - DNA, 15 bp, Homo sapiens
ttggtatgtctatct

SEQ ID NO: 1879569 - DNA, 15 bp, Homo sapiens
tggtatgtctatctg

SEQ ID NO: 1879570 - DNA, 15 bp, Homo sapiens
ggtatgtctatctgt

SEQ ID NO: 1879571 - DNA, 15 bp, Homo sapiens
gtatgtctatctgtg

SEQ ID NO: 1879572 - DNA, 15 bp, Homo sapiens
tatgtctatctgtgt

SEQ ID NO: 1879573 - DNA, 15 bp, Homo sapiens
atgtctatctgtgta

SEQ ID NO: 1879574 - DNA, 15 bp, Homo sapiens
tgtctatctgtgtaa

SEQ ID NO: 1879575 - DNA, 15 bp, Homo sapiens
gtctatctgtgtaat

SEQ ID NO: 1879576 - DNA, 15 bp, Homo sapiens
tctatctgtgtaatg

SEQ ID NO: 1879577 - DNA, 15 bp, Homo sapiens
ctatctgtgtaatgc

SEQ ID NO: 1879578 - DNA, 15 bp, Homo sapiens
tatctgtgtaatgct

SEQ ID NO: 1879579 - DNA, 15 bp, Homo sapiens
atctgtgtaatgctt

SEQ ID NO: 1879580 - DNA, 15 bp, Homo sapiens
tctgtgtaatgctta

SEQ ID NO: 1879581 - DNA, 15 bp, Homo sapiens
ctgtgtaatgcttaa

SEQ ID NO: 1879582 - DNA, 15 bp, Homo sapiens
tgtgtaatgcttaag

SEQ ID NO: 1879583 - DNA, 15 bp, Homo sapiens
gtgtaatgcttaagt

SEQ ID NO: 1879584 - DNA, 15 bp, Homo sapiens
tgtaatgcttaagtc

SEQ ID NO: 1879585 - DNA, 15 bp, Homo sapiens
gtaatgcttaagtca

SEQ ID NO: 1879586 - DNA, 15 bp, Homo sapiens
taatgcttaagtcag

SEQ ID NO: 1879587 - DNA, 15 bp, Homo sapiens
aatgcttaagtcagt

SEQ ID NO: 1879588 - DNA, 15 bp, Homo sapiens
atgcttaagtcagtc

SEQ ID NO: 1879589 - DNA, 15 bp, Homo sapiens
tgcttaagtcagtcc

SEQ ID NO: 1879590 - DNA, 15 bp, Homo sapiens
gcttaagtcagtcct

SEQ ID NO: 1879591 - DNA, 15 bp, Homo sapiens
cttaagtcagtcctg

SEQ ID NO: 1879592 - DNA, 15 bp, Homo sapiens
ttaagtcagtcctgg

SEQ ID NO: 1879593 - DNA, 15 bp, Homo sapiens
taagtcagtcctggc

SEQ ID NO: 1879594 - DNA, 15 bp, Homo sapiens
aagtcagtcctggcg

SEQ ID NO: 1879595 - DNA, 15 bp, Homo sapiens
agtcagtcctggcgc

SEQ ID NO: 1879596 - DNA, 15 bp, Homo sapiens
gtcagtcctggcgct

SEQ ID NO: 1879597 - DNA, 15 bp, Homo sapiens
tcagtcctggcgctt

SEQ ID NO: 1879598 - DNA, 15 bp, Homo sapiens
cagtcctggcgcttg

SEQ ID NO: 1879599 - DNA, 15 bp, Homo sapiens
agtcctggcgcttgt

SEQ ID NO: 1879600 - DNA, 15 bp, Homo sapiens
gtcctggcgcttgtt

SEQ ID NO: 1879601 - DNA, 15 bp, Homo sapiens
tcctggcgcttgttc

SEQ ID NO: 1879602 - DNA, 15 bp, Homo sapiens
cctggcgcttgttcc

SEQ ID NO: 1879603 - DNA, 15 bp, Homo sapiens
ctggcgcttgttcct

SEQ ID NO: 1879604 - DNA, 15 bp, Homo sapiens
tggcgcttgttccta

SEQ ID NO: 1879605 - DNA, 15 bp, Homo sapiens
ggcgcttgttcctaa

SEQ ID NO: 1879606 - DNA, 15 bp, Homo sapiens
gcgcttgttcctaag

SEQ ID NO: 1879607 - DNA, 15 bp, Homo sapiens
cgcttgttcctaaga

SEQ ID NO: 1879608 - DNA, 15 bp, Homo sapiens
gcttgttcctaagaa

SEQ ID NO: 1879609 - DNA, 15 bp, Homo sapiens
cttgttcctaagaaa

SEQ ID NO: 1879610 - DNA, 15 bp, Homo sapiens
ttgttcctaagaaaa

SEQ ID NO: 1879611 - DNA, 15 bp, Homo sapiens
tgttcctaagaaaag

SEQ ID NO: 1879612 - DNA, 15 bp, Homo sapiens
gttcctaagaaaagg

SEQ ID NO: 1879613 - DNA, 15 bp, Homo sapiens
ttcctaagaaaagga

SEQ ID NO: 1879614 - DNA, 15 bp, Homo sapiens
tcctaagaaaaggaa

SEQ ID NO: 1879615 - DNA, 15 bp, Homo sapiens
cctaagaaaaggaaa

SEQ ID NO: 1879616 - DNA, 15 bp, Homo sapiens
ctaagaaaaggaaaa

SEQ ID NO: 1879617 - DNA, 15 bp, Homo sapiens
taagaaaaggaaaat

SEQ ID NO: 1879618 - DNA, 15 bp, Homo sapiens
aagaaaaggaaaata

SEQ ID NO: 1879619 - DNA, 15 bp, Homo sapiens
agaaaaggaaaataa

SEQ ID NO: 1879620 - DNA, 15 bp, Homo sapiens
gaaaaggaaaataag

SEQ ID NO: 1879621 - DNA, 15 bp, Homo sapiens
aaaaggaaaataaga

SEQ ID NO: 1879622 - DNA, 15 bp, Homo sapiens
aaaggaaaataagag

SEQ ID NO: 1879623 - DNA, 15 bp, Homo sapiens
aaggaaaataagagg

SEQ ID NO: 1879624 - DNA, 15 bp, Homo sapiens
aggaaaataagaggc

SEQ ID NO: 1879625 - DNA, 15 bp, Homo sapiens
ggaaaataagaggca

SEQ ID NO: 1879626 - DNA, 15 bp, Homo sapiens
gaaaataagaggcaa

SEQ ID NO: 1879627 - DNA, 15 bp, Homo sapiens
aaaataagaggcaaa

SEQ ID NO: 1879628 - DNA, 15 bp, Homo sapiens
aaataagaggcaaat

SEQ ID NO: 1879629 - DNA, 15 bp, Homo sapiens
aataagaggcaaata

SEQ ID NO: 1879630 - DNA, 15 bp, Homo sapiens
ataagaggcaaatac

SEQ ID NO: 1879631 - DNA, 15 bp, Homo sapiens
taagaggcaaataca

SEQ ID NO: 1879632 - DNA, 15 bp, Homo sapiens
aagaggcaaatacat

SEQ ID NO: 1879633 - DNA, 15 bp, Homo sapiens
agaggcaaatacata

SEQ ID NO: 1879634 - DNA, 15 bp, Homo sapiens
gaggcaaatacatat

SEQ ID NO: 1879635 - DNA, 15 bp, Homo sapiens
aggcaaatacatatt

SEQ ID NO: 1879636 - DNA, 15 bp, Homo sapiens
ggcaaatacatattg

SEQ ID NO: 1879637 - DNA, 15 bp, Homo sapiens
gcaaatacatattga

SEQ ID NO: 1879638 - DNA, 15 bp, Homo sapiens
caaatacatattgat

SEQ ID NO: 1879639 - DNA, 15 bp, Homo sapiens
aaatacatattgatt

SEQ ID NO: 1879640 - DNA, 15 bp, Homo sapiens
aatacatattgattc

SEQ ID NO: 1879641 - DNA, 15 bp, Homo sapiens
atacatattgattct

SEQ ID NO: 1879642 - DNA, 15 bp, Homo sapiens
tacatattgattctg

SEQ ID NO: 1879643 - DNA, 15 bp, Homo sapiens
acatattgattctgt

SEQ ID NO: 1879644 - DNA, 15 bp, Homo sapiens
catattgattctgta

SEQ ID NO: 1879645 - DNA, 15 bp, Homo sapiens
atattgattctgtac

SEQ ID NO: 1879646 - DNA, 15 bp, Homo sapiens
tattgattctgtaca

SEQ ID NO: 1879647 - DNA, 15 bp, Homo sapiens
attgattctgtacaa

SEQ ID NO: 1879648 - DNA, 15 bp, Homo sapiens
ttgattctgtacaag

SEQ ID NO: 1879649 - DNA, 15 bp, Homo sapiens
tgattctgtacaaga

SEQ ID NO: 1879650 - DNA, 15 bp, Homo sapiens
gattctgtacaagaa

SEQ ID NO: 1879651 - DNA, 15 bp, Homo sapiens
attctgtacaagaaa

SEQ ID NO: 1879652 - DNA, 15 bp, Homo sapiens
ttctgtacaagaaaa

SEQ ID NO: 1879653 - DNA, 15 bp, Homo sapiens
tctgtacaagaaaaa

SEQ ID NO: 1879654 - DNA, 15 bp, Homo sapiens
ctgtacaagaaaaag

SEQ ID NO: 1879655 - DNA, 15 bp, Homo sapiens
tgtacaagaaaaaga

SEQ ID NO: 1879656 - DNA, 15 bp, Homo sapiens
gtacaagaaaaagaa

SEQ ID NO: 1879657 - DNA, 15 bp, Homo sapiens
tacaagaaaaagaat

SEQ ID NO: 1879658 - DNA, 15 bp, Homo sapiens
acaagaaaaagaata

SEQ ID NO: 1879659 - DNA, 15 bp, Homo sapiens
caagaaaaagaataa

SEQ ID NO: 1879660 - DNA, 15 bp, Homo sapiens
aagaaaaagaataaa

SEQ ID NO: 1879661 - DNA, 15 bp, Homo sapiens
agaaaaagaataaag

SEQ ID NO: 1879662 - DNA, 15 bp, Homo sapiens
gaaaaagaataaagg

SEQ ID NO: 1879663 - DNA, 15 bp, Homo sapiens
aaaaagaataaagga

SEQ ID NO: 1879664 - DNA, 15 bp, Homo sapiens
aaaagaataaaggaa

SEQ ID NO: 1879665 - DNA, 15 bp, Homo sapiens
aaagaataaaggaag

SEQ ID NO: 1879666 - DNA, 15 bp, Homo sapiens
aagaataaaggaagg

SEQ ID NO: 1879667 - DNA, 15 bp, Homo sapiens
agaataaaggaaggg

SEQ ID NO: 1879668 - DNA, 15 bp, Homo sapiens
gaataaaggaaggga

SEQ ID NO: 1879669 - DNA, 15 bp, Homo sapiens
aataaaggaagggag

SEQ ID NO: 1879670 - DNA, 15 bp, Homo sapiens
ataaaggaagggaga

SEQ ID NO: 1879671 - DNA, 15 bp, Homo sapiens
taaaggaagggagaa

SEQ ID NO: 1879672 - DNA, 15 bp, Homo sapiens
aaaggaagggagaaa

SEQ ID NO: 1879673 - DNA, 15 bp, Homo sapiens
aaggaagggagaaaa

SEQ ID NO: 1879674 - DNA, 15 bp, Homo sapiens
aggaagggagaaaaa

SEQ ID NO: 1879675 - DNA, 15 bp, Homo sapiens
ggaagggagaaaaac

SEQ ID NO: 1879676 - DNA, 15 bp, Homo sapiens
gaagggagaaaaaca

SEQ ID NO: 1879677 - DNA, 15 bp, Homo sapiens
aagggagaaaaacac

SEQ ID NO: 1879678 - DNA, 15 bp, Homo sapiens
agggagaaaaacacc

SEQ ID NO: 1879679 - DNA, 15 bp, Homo sapiens
gggagaaaaacacca

SEQ ID NO: 1879680 - DNA, 15 bp, Homo sapiens
ggagaaaaacaccaa

SEQ ID NO: 1879681 - DNA, 15 bp, Homo sapiens
gagaaaaacaccaaa

SEQ ID NO: 1879682 - DNA, 15 bp, Homo sapiens
agaaaaacaccaaac

SEQ ID NO: 1879683 - DNA, 15 bp, Homo sapiens
gaaaaacaccaaacg

SEQ ID NO: 1879684 - DNA, 15 bp, Homo sapiens
aaaaacaccaaacgt

SEQ ID NO: 1879685 - DNA, 15 bp, Homo sapiens
aaaacaccaaacgtc

SEQ ID NO: 1879686 - DNA, 15 bp, Homo sapiens
aaacaccaaacgtca

SEQ ID NO: 1879687 - DNA, 15 bp, Homo sapiens
aacaccaaacgtcac

SEQ ID NO: 1879688 - DNA, 15 bp, Homo sapiens
acaccaaacgtcact

SEQ ID NO: 1879689 - DNA, 15 bp, Homo sapiens
caccaaacgtcacta

SEQ ID NO: 1879690 - DNA, 15 bp, Homo sapiens
accaaacgtcactag

SEQ ID NO: 1879691 - DNA, 15 bp, Homo sapiens
ccaaacgtcactagt

SEQ ID NO: 1879692 - DNA, 15 bp, Homo sapiens
caaacgtcactagtg

SEQ ID NO: 1879693 - DNA, 15 bp, Homo sapiens
aaacgtcactagtgc

SEQ ID NO: 1879694 - DNA, 15 bp, Homo sapiens
aacgtcactagtgct

SEQ ID NO: 1879695 - DNA, 15 bp, Homo sapiens
acgtcactagtgctc

SEQ ID NO: 1879696 - DNA, 15 bp, Homo sapiens
cgtcactagtgctct

SEQ ID NO: 1879697 - DNA, 15 bp, Homo sapiens
gtcactagtgctctg

SEQ ID NO: 1879698 - DNA, 15 bp, Homo sapiens
tcactagtgctctgt

SEQ ID NO: 1879699 - DNA, 15 bp, Homo sapiens
cactagtgctctgtg

SEQ ID NO: 1879700 - DNA, 15 bp, Homo sapiens
actagtgctctgtga

SEQ ID NO: 1879701 - DNA, 15 bp, Homo sapiens
ctagtgctctgtgac

SEQ ID NO: 1879702 - DNA, 15 bp, Homo sapiens
tagtgctctgtgaca

SEQ ID NO: 1879703 - DNA, 15 bp, Homo sapiens
agtgctctgtgacag

SEQ ID NO: 1879704 - DNA, 15 bp, Homo sapiens
gtgctctgtgacaga

SEQ ID NO: 1879705 - DNA, 15 bp, Homo sapiens
tgctctgtgacagaa

SEQ ID NO: 1879706 - DNA, 15 bp, Homo sapiens
gctctgtgacagaag

SEQ ID NO: 1879707 - DNA, 15 bp, Homo sapiens
ctctgtgacagaaga

SEQ ID NO: 1879708 - DNA, 15 bp, Homo sapiens
tctgtgacagaagag

SEQ ID NO: 1879709 - DNA, 15 bp, Homo sapiens
ctgtgacagaagaga

SEQ ID NO: 1879710 - DNA, 15 bp, Homo sapiens
tgtgacagaagagaa

SEQ ID NO: 1879711 - DNA, 15 bp, Homo sapiens
gtgacagaagagaaa

SEQ ID NO: 1879712 - DNA, 15 bp, Homo sapiens
tgacagaagagaaaa

SEQ ID NO: 1879713 - DNA, 15 bp, Homo sapiens
gacagaagagaaaaa

SEQ ID NO: 1879714 - DNA, 15 bp, Homo sapiens
acagaagagaaaaag

SEQ ID NO: 1879715 - DNA, 15 bp, Homo sapiens
cagaagagaaaaagg

SEQ ID NO: 1879716 - DNA, 15 bp, Homo sapiens
agaagagaaaaaggt

SEQ ID NO: 1879717 - DNA, 15 bp, Homo sapiens
gaagagaaaaaggtt

SEQ ID NO: 1879718 - DNA, 15 bp, Homo sapiens
aagagaaaaaggttg

SEQ ID NO: 1879719 - DNA, 15 bp, Homo sapiens
agagaaaaaggttgt

SEQ ID NO: 1879720 - DNA, 15 bp, Homo sapiens
gagaaaaaggttgtg

SEQ ID NO: 1879721 - DNA, 15 bp, Homo sapiens
agaaaaaggttgtgt

SEQ ID NO: 1879722 - DNA, 15 bp, Homo sapiens
gaaaaaggttgtgtt

SEQ ID NO: 1879723 - DNA, 15 bp, Homo sapiens
aaaaaggttgtgttt

SEQ ID NO: 1879724 - DNA, 15 bp, Homo sapiens
aaaaggttgtgtttc

SEQ ID NO: 1879725 - DNA, 15 bp, Homo sapiens
aaaggttgtgtttca

SEQ ID NO: 1879726 - DNA, 15 bp, Homo sapiens
aaggttgtgtttcat

SEQ ID NO: 1879727 - DNA, 15 bp, Homo sapiens
aggttgtgtttcata

SEQ ID NO: 1879728 - DNA, 15 bp, Homo sapiens
ggttgtgtttcataa

SEQ ID NO: 1879729 - DNA, 15 bp, Homo sapiens
gttgtgtttcataat

SEQ ID NO: 1879730 - DNA, 15 bp, Homo sapiens
ttgtgtttcataata

SEQ ID NO: 1879731 - DNA, 15 bp, Homo sapiens
tgtgtttcataatac

SEQ ID NO: 1879732 - DNA, 15 bp, Homo sapiens
gtgtttcataataca

SEQ ID NO: 1879733 - DNA, 15 bp, Homo sapiens
tgtttcataatacac

SEQ ID NO: 1879734 - DNA, 15 bp, Homo sapiens
gtttcataatacact

SEQ ID NO: 1879735 - DNA, 15 bp, Homo sapiens
tttcataatacactg

SEQ ID NO: 1879736 - DNA, 15 bp, Homo sapiens
ttcataatacactga

SEQ ID NO: 1879737 - DNA, 15 bp, Homo sapiens
tcataatacactgag

SEQ ID NO: 1879738 - DNA, 15 bp, Homo sapiens
cataatacactgagg

SEQ ID NO: 1879739 - DNA, 15 bp, Homo sapiens
ataatacactgaggt

SEQ ID NO: 1879740 - DNA, 15 bp, Homo sapiens
taatacactgaggta

SEQ ID NO: 1879741 - DNA, 15 bp, Homo sapiens
aatacactgaggtag

SEQ ID NO: 1879742 - DNA, 15 bp, Homo sapiens
atacactgaggtaga

SEQ ID NO: 1879743 - DNA, 15 bp, Homo sapiens
tacactgaggtagac

SEQ ID NO: 1879744 - DNA, 15 bp, Homo sapiens
acactgaggtagact

SEQ ID NO: 1879745 - DNA, 15 bp, Homo sapiens
cactgaggtagactt

SEQ ID NO: 1879746 - DNA, 15 bp, Homo sapiens
actgaggtagacttt

SEQ ID NO: 1879747 - DNA, 15 bp, Homo sapiens
ctgaggtagacttta

SEQ ID NO: 1879748 - DNA, 15 bp, Homo sapiens
tgaggtagactttat

SEQ ID NO: 1879749 - DNA, 15 bp, Homo sapiens
gaggtagactttata

SEQ ID NO: 1879750 - DNA, 15 bp, Homo sapiens
aggtagactttatat

SEQ ID NO: 1879751 - DNA, 15 bp, Homo sapiens
ggtagactttatatt

SEQ ID NO: 1879752 - DNA, 15 bp, Homo sapiens
gtagactttatatta

SEQ ID NO: 1879753 - DNA, 15 bp, Homo sapiens
tagactttatattaa

SEQ ID NO: 1879754 - DNA, 15 bp, Homo sapiens
agactttatattaaa

SEQ ID NO: 1879755 - DNA, 15 bp, Homo sapiens
gactttatattaaaa

SEQ ID NO: 1879756 - DNA, 15 bp, Homo sapiens
actttatattaaaaa

SEQ ID NO: 1879757 - DNA, 15 bp, Homo sapiens
ctttatattaaaaac

SEQ ID NO: 1879758 - DNA, 15 bp, Homo sapiens
ttatattaaaaacat

SEQ ID NO: 1879759 - DNA, 15 bp, Homo sapiens
tatattaaaaacata

SEQ ID NO: 1879760 - DNA, 15 bp, Homo sapiens
atattaaaaacatac

SEQ ID NO: 1879761 - DNA, 15 bp, Homo sapiens
tattaaaaacatact

SEQ ID NO: 1879762 - DNA, 15 bp, Homo sapiens
attaaaaacatactc

SEQ ID NO: 1879763 - DNA, 15 bp, Homo sapiens
ttaaaaacatactct

SEQ ID NO: 1879764 - DNA, 15 bp, Homo sapiens
taaaaacatactctc

SEQ ID NO: 1879765 - DNA, 15 bp, Homo sapiens
aaaaacatactctcc

SEQ ID NO: 1879766 - DNA, 15 bp, Homo sapiens
aaaacatactctccc

SEQ ID NO: 1879767 - DNA, 15 bp, Homo sapiens
aaacatactctcccc

SEQ ID NO: 1879768 - DNA, 15 bp, Homo sapiens
aacatactctcccca

SEQ ID NO: 1879769 - DNA, 15 bp, Homo sapiens
acatactctccccaa

SEQ ID NO: 1879770 - DNA, 15 bp, Homo sapiens
catactctccccaat

SEQ ID NO: 1879771 - DNA, 15 bp, Homo sapiens
atactctccccaata

SEQ ID NO: 1879772 - DNA, 15 bp, Homo sapiens
tactctccccaatac

SEQ ID NO: 1879773 - DNA, 15 bp, Homo sapiens
actctccccaatact

SEQ ID NO: 1879774 - DNA, 15 bp, Homo sapiens
ctctccccaatactc

SEQ ID NO: 1879775 - DNA, 15 bp, Homo sapiens
tctccccaatactct

SEQ ID NO: 1879776 - DNA, 15 bp, Homo sapiens
ctccccaatactctg

SEQ ID NO: 1879777 - DNA, 15 bp, Homo sapiens
tccccaatactctgc

SEQ ID NO: 1879778 - DNA, 15 bp, Homo sapiens
ccccaatactctgca

SEQ ID NO: 1879779 - DNA, 15 bp, Homo sapiens
cccaatactctgcaa

SEQ ID NO: 1879780 - DNA, 15 bp, Homo sapiens
ccaatactctgcaag

SEQ ID NO: 1879781 - DNA, 15 bp, Homo sapiens
caatactctgcaagt

SEQ ID NO: 1879782 - DNA, 15 bp, Homo sapiens
aatactctgcaagtt

SEQ ID NO: 1879783 - DNA, 15 bp, Homo sapiens
atactctgcaagttg

SEQ ID NO: 1879784 - DNA, 15 bp, Homo sapiens
tactctgcaagttgg

SEQ ID NO: 1879785 - DNA, 15 bp, Homo sapiens
actctgcaagttgga

SEQ ID NO: 1879786 - DNA, 15 bp, Homo sapiens
ctctgcaagttggat

SEQ ID NO: 1879787 - DNA, 15 bp, Homo sapiens
tctgcaagttggatt

SEQ ID NO: 1879788 - DNA, 15 bp, Homo sapiens
ctgcaagttggattt

SEQ ID NO: 1879789 - DNA, 15 bp, Homo sapiens
tgcaagttggatttt

SEQ ID NO: 1879790 - DNA, 15 bp, Homo sapiens
gcaagttggattttt

SEQ ID NO: 1879791 - DNA, 15 bp, Homo sapiens
caagttggatttttt

SEQ ID NO: 1879792 - DNA, 15 bp, Homo sapiens
aagttggattttttt

SEQ ID NO: 1879793 - DNA, 15 bp, Homo sapiens
agttggatttttttg

SEQ ID NO: 1879794 - DNA, 15 bp, Homo sapiens
gttggatttttttga

SEQ ID NO: 1879795 - DNA, 15 bp, Homo sapiens
ttggatttttttgaa

SEQ ID NO: 1879796 - DNA, 15 bp, Homo sapiens
tggatttttttgaat

SEQ ID NO: 1879797 - DNA, 15 bp, Homo sapiens
ggatttttttgaata

SEQ ID NO: 1879798 - DNA, 15 bp, Homo sapiens
gatttttttgaatat

SEQ ID NO: 1879799 - DNA, 15 bp, Homo sapiens
atttttttgaatatt

SEQ ID NO: 1879800 - DNA, 15 bp, Homo sapiens
tttttttgaatattt

SEQ ID NO: 1879801 - DNA, 15 bp, Homo sapiens
ttttttgaatatttc

SEQ ID NO: 1879802 - DNA, 15 bp, Homo sapiens
tttttgaatatttct

SEQ ID NO: 1879803 - DNA, 15 bp, Homo sapiens
ttttgaatatttctt

SEQ ID NO: 1879804 - DNA, 15 bp, Homo sapiens
tttgaatatttcttt

SEQ ID NO: 1879805 - DNA, 15 bp, Homo sapiens
ttgaatatttctttt

SEQ ID NO: 1879806 - DNA, 15 bp, Homo sapiens
tgaatatttcttttc

SEQ ID NO: 1879807 - DNA, 15 bp, Homo sapiens
gaatatttcttttca

SEQ ID NO: 1879808 - DNA, 15 bp, Homo sapiens
aatatttcttttcat

SEQ ID NO: 1879809 - DNA, 15 bp, Homo sapiens
atatttcttttcatc

SEQ ID NO: 1879810 - DNA, 15 bp, Homo sapiens
tatttcttttcatca

SEQ ID NO: 1879811 - DNA, 15 bp, Homo sapiens
atttcttttcatcag

SEQ ID NO: 1879812 - DNA, 15 bp, Homo sapiens
tttcttttcatcagc

SEQ ID NO: 1879813 - DNA, 15 bp, Homo sapiens
ttcttttcatcagct

SEQ ID NO: 1879814 - DNA, 15 bp, Homo sapiens
tcttttcatcagcta

SEQ ID NO: 1879815 - DNA, 15 bp, Homo sapiens
cttttcatcagctag

SEQ ID NO: 1879816 - DNA, 15 bp, Homo sapiens
ttttcatcagctagg

SEQ ID NO: 1879817 - DNA, 15 bp, Homo sapiens
tttcatcagctaggt

SEQ ID NO: 1879818 - DNA, 15 bp, Homo sapiens
ttcatcagctaggtt

SEQ ID NO: 1879819 - DNA, 15 bp, Homo sapiens
tcatcagctaggttc

SEQ ID NO: 1879820 - DNA, 15 bp, Homo sapiens
catcagctaggttct

SEQ ID NO: 1879821 - DNA, 15 bp, Homo sapiens
atcagctaggttctt

SEQ ID NO: 1879822 - DNA, 15 bp, Homo sapiens
tcagctaggttctta

SEQ ID NO: 1879823 - DNA, 15 bp, Homo sapiens
cagctaggttcttat

SEQ ID NO: 1879824 - DNA, 15 bp, Homo sapiens
agctaggttcttatt

SEQ ID NO: 1879825 - DNA, 15 bp, Homo sapiens
gctaggttcttattt

SEQ ID NO: 1879826 - DNA, 15 bp, Homo sapiens
ctaggttcttatttt

SEQ ID NO: 1879827 - DNA, 15 bp, Homo sapiens
taggttcttatttta

SEQ ID NO: 1879828 - DNA, 15 bp, Homo sapiens
aggttcttattttat

SEQ ID NO: 1879829 - DNA, 15 bp, Homo sapiens
ggttcttattttatt

SEQ ID NO: 1879830 - DNA, 15 bp, Homo sapiens
gttcttattttattt

SEQ ID NO: 1879831 - DNA, 15 bp, Homo sapiens
ttcttattttatttt

SEQ ID NO: 1879832 - DNA, 15 bp, Homo sapiens
tcttattttatttta

SEQ ID NO: 1879833 - DNA, 15 bp, Homo sapiens
cttattttattttat

SEQ ID NO: 1879834 - DNA, 15 bp, Homo sapiens
ttttattttattttc

SEQ ID NO: 1879835 - DNA, 15 bp, Homo sapiens
tttattttattttct

SEQ ID NO: 1879836 - DNA, 15 bp, Homo sapiens
ttattttattttctc

SEQ ID NO: 1879837 - DNA, 15 bp, Homo sapiens
tattttattttctct

SEQ ID NO: 1879838 - DNA, 15 bp, Homo sapiens
attttattttctctg

SEQ ID NO: 1879839 - DNA, 15 bp, Homo sapiens
ttttattttctctgc

SEQ ID NO: 1879840 - DNA, 15 bp, Homo sapiens
tttattttctctgca

SEQ ID NO: 1879841 - DNA, 15 bp, Homo sapiens
ttattttctctgcag

SEQ ID NO: 1879842 - DNA, 15 bp, Homo sapiens
tattttctctgcagc

SEQ ID NO: 1879843 - DNA, 15 bp, Homo sapiens
attttctctgcagct

SEQ ID NO: 1879844 - DNA, 15 bp, Homo sapiens
ttttctctgcagctg

SEQ ID NO: 1879845 - DNA, 15 bp, Homo sapiens
tttctctgcagctgt

SEQ ID NO: 1879846 - DNA, 15 bp, Homo sapiens
ttctctgcagctgtt

SEQ ID NO: 1879847 - DNA, 15 bp, Homo sapiens
tctctgcagctgttg

SEQ ID NO: 1879848 - DNA, 15 bp, Homo sapiens
ctctgcagctgttgg

SEQ ID NO: 1879849 - DNA, 15 bp, Homo sapiens
tctgcagctgttggt

SEQ ID NO: 1879850 - DNA, 15 bp, Homo sapiens
ctgcagctgttggtc

SEQ ID NO: 1879851 - DNA, 15 bp, Homo sapiens
tgcagctgttggtct

SEQ ID NO: 1879852 - DNA, 15 bp, Homo sapiens
gcagctgttggtctg

SEQ ID NO: 1879853 - DNA, 15 bp, Homo sapiens
cagctgttggtctgt

SEQ ID NO: 1879854 - DNA, 15 bp, Homo sapiens
agctgttggtctgtc

SEQ ID NO: 1879855 - DNA, 15 bp, Homo sapiens
gctgttggtctgtct

SEQ ID NO: 1879856 - DNA, 15 bp, Homo sapiens
ctgttggtctgtctc

SEQ ID NO: 1879857 - DNA, 15 bp, Homo sapiens
tgttggtctgtctca

SEQ ID NO: 1879858 - DNA, 15 bp, Homo sapiens
gttggtctgtctcat

SEQ ID NO: 1879859 - DNA, 15 bp, Homo sapiens
ttggtctgtctcatg

SEQ ID NO: 1879860 - DNA, 15 bp, Homo sapiens
tggtctgtctcatgt

SEQ ID NO: 1879861 - DNA, 15 bp, Homo sapiens
ggtctgtctcatgtt

SEQ ID NO: 1879862 - DNA, 15 bp, Homo sapiens
gtctgtctcatgtta

SEQ ID NO: 1879863 - DNA, 15 bp, Homo sapiens
tctgtctcatgttac

SEQ ID NO: 1879864 - DNA, 15 bp, Homo sapiens
ctgtctcatgttaca

SEQ ID NO: 1879865 - DNA, 15 bp, Homo sapiens
tgtctcatgttacat

SEQ ID NO: 1879866 - DNA, 15 bp, Homo sapiens
gtctcatgttacatt

SEQ ID NO: 1879867 - DNA, 15 bp, Homo sapiens
tctcatgttacattc

SEQ ID NO: 1879868 - DNA, 15 bp, Homo sapiens
ctcatgttacattcc

SEQ ID NO: 1879869 - DNA, 15 bp, Homo sapiens
tcatgttacattccc

SEQ ID NO: 1879870 - DNA, 15 bp, Homo sapiens
catgttacattccca

SEQ ID NO: 1879871 - DNA, 15 bp, Homo sapiens
atgttacattcccat

SEQ ID NO: 1879872 - DNA, 15 bp, Homo sapiens
tgttacattcccatc

SEQ ID NO: 1879873 - DNA, 15 bp, Homo sapiens
gttacattcccatca

SEQ ID NO: 1879874 - DNA, 15 bp, Homo sapiens
ttacattcccatcat

SEQ ID NO: 1879875 - DNA, 15 bp, Homo sapiens
tacattcccatcatt

SEQ ID NO: 1879876 - DNA, 15 bp, Homo sapiens
acattcccatcattt

SEQ ID NO: 1879877 - DNA, 15 bp, Homo sapiens
cattcccatcattta

SEQ ID NO: 1879878 - DNA, 15 bp, Homo sapiens
attcccatcatttat

SEQ ID NO: 1879879 - DNA, 15 bp, Homo sapiens
ttcccatcatttatg

SEQ ID NO: 1879880 - DNA, 15 bp, Homo sapiens
tcccatcatttatgt

SEQ ID NO: 1879881 - DNA, 15 bp, Homo sapiens
cccatcatttatgta

SEQ ID NO: 1879882 - DNA, 15 bp, Homo sapiens
ccatcatttatgtat

SEQ ID NO: 1879883 - DNA, 15 bp, Homo sapiens
catcatttatgtatc

SEQ ID NO: 1879884 - DNA, 15 bp, Homo sapiens
atcatttatgtatct

SEQ ID NO: 1879885 - DNA, 15 bp, Homo sapiens
tcatttatgtatctg

SEQ ID NO: 1879886 - DNA, 15 bp, Homo sapiens
catttatgtatctgg

SEQ ID NO: 1879887 - DNA, 15 bp, Homo sapiens
atttatgtatctggt

SEQ ID NO: 1879888 - DNA, 15 bp, Homo sapiens
tttatgtatctggtt

SEQ ID NO: 1879889 - DNA, 15 bp, Homo sapiens
ttatgtatctggttt

SEQ ID NO: 1879890 - DNA, 15 bp, Homo sapiens
tatgtatctggtttt

SEQ ID NO: 1879891 - DNA, 15 bp, Homo sapiens
atgtatctggttttg

SEQ ID NO: 1879892 - DNA, 15 bp, Homo sapiens
tgtatctggttttgc

SEQ ID NO: 1879893 - DNA, 15 bp, Homo sapiens
gtatctggttttgcc

SEQ ID NO: 1879894 - DNA, 15 bp, Homo sapiens
tatctggttttgcct

SEQ ID NO: 1879895 - DNA, 15 bp, Homo sapiens
atctggttttgcctg

SEQ ID NO: 1879896 - DNA, 15 bp, Homo sapiens
tctggttttgcctgt

SEQ ID NO: 1879897 - DNA, 15 bp, Homo sapiens
ctggttttgcctgtg

SEQ ID NO: 1879898 - DNA, 15 bp, Homo sapiens
tggttttgcctgtga

SEQ ID NO: 1879899 - DNA, 15 bp, Homo sapiens
ggttttgcctgtgat

SEQ ID NO: 1879900 - DNA, 15 bp, Homo sapiens
gttttgcctgtgatg

SEQ ID NO: 1879901 - DNA, 15 bp, Homo sapiens
ttttgcctgtgatga

SEQ ID NO: 1879902 - DNA, 15 bp, Homo sapiens
tttgcctgtgatgaa

SEQ ID NO: 1879903 - DNA, 15 bp, Homo sapiens
ttgcctgtgatgaag

SEQ ID NO: 1879904 - DNA, 15 bp, Homo sapiens
tgcctgtgatgaagc

SEQ ID NO: 1879905 - DNA, 15 bp, Homo sapiens
gcctgtgatgaagct

SEQ ID NO: 1879906 - DNA, 15 bp, Homo sapiens
cctgtgatgaagctg

SEQ ID NO: 1879907 - DNA, 15 bp, Homo sapiens
ctgtgatgaagctga

SEQ ID NO: 1879908 - DNA, 15 bp, Homo sapiens
tgtgatgaagctgag

SEQ ID NO: 1879909 - DNA, 15 bp, Homo sapiens
gtgatgaagctgaga

SEQ ID NO: 1879910 - DNA, 15 bp, Homo sapiens
tgatgaagctgagaa

SEQ ID NO: 1879911 - DNA, 15 bp, Homo sapiens
gatgaagctgagaaa

SEQ ID NO: 1879912 - DNA, 15 bp, Homo sapiens
atgaagctgagaaat

SEQ ID NO: 1879913 - DNA, 15 bp, Homo sapiens
tgaagctgagaaatg

SEQ ID NO: 1879914 - DNA, 15 bp, Homo sapiens
gaagctgagaaatgt

SEQ ID NO: 1879915 - DNA, 15 bp, Homo sapiens
aagctgagaaatgtc

SEQ ID NO: 1879916 - DNA, 15 bp, Homo sapiens
agctgagaaatgtct

SEQ ID NO: 1879917 - DNA, 15 bp, Homo sapiens
gctgagaaatgtctc

SEQ ID NO: 1879918 - DNA, 15 bp, Homo sapiens
ctgagaaatgtctca

SEQ ID NO: 1879919 - DNA, 15 bp, Homo sapiens
tgagaaatgtctcat

SEQ ID NO: 1879920 - DNA, 15 bp, Homo sapiens
gagaaatgtctcatt

SEQ ID NO: 1879921 - DNA, 15 bp, Homo sapiens
agaaatgtctcattt

SEQ ID NO: 1879922 - DNA, 15 bp, Homo sapiens
gaaatgtctcatttt

SEQ ID NO: 1879923 - DNA, 15 bp, Homo sapiens
aaatgtctcatttta

SEQ ID NO: 1879924 - DNA, 15 bp, Homo sapiens
aatgtctcattttaa

SEQ ID NO: 1879925 - DNA, 15 bp, Homo sapiens
atgtctcattttaat

SEQ ID NO: 1879926 - DNA, 15 bp, Homo sapiens
tgtctcattttaatg

SEQ ID NO: 1879927 - DNA, 15 bp, Homo sapiens
gtctcattttaatgg

SEQ ID NO: 1879928 - DNA, 15 bp, Homo sapiens
tctcattttaatggt

SEQ ID NO: 1879929 - DNA, 15 bp, Homo sapiens
ctcattttaatggtt

SEQ ID NO: 1879930 - DNA, 15 bp, Homo sapiens
tcattttaatggttt

SEQ ID NO: 1879931 - DNA, 15 bp, Homo sapiens
cattttaatggtttc

SEQ ID NO: 1879932 - DNA, 15 bp, Homo sapiens
attttaatggtttct

SEQ ID NO: 1879933 - DNA, 15 bp, Homo sapiens
ttttaatggtttctg

SEQ ID NO: 1879934 - DNA, 15 bp, Homo sapiens
tttaatggtttctgt

SEQ ID NO: 1879935 - DNA, 15 bp, Homo sapiens
ttaatggtttctgtg

SEQ ID NO: 1879936 - DNA, 15 bp, Homo sapiens
taatggtttctgtgt

SEQ ID NO: 1879937 - DNA, 15 bp, Homo sapiens
aatggtttctgtgtt

SEQ ID NO: 1879938 - DNA, 15 bp, Homo sapiens
atggtttctgtgttt

SEQ ID NO: 1879939 - DNA, 15 bp, Homo sapiens
tggtttctgtgtttt

SEQ ID NO: 1879940 - DNA, 15 bp, Homo sapiens
ggtttctgtgttttg

SEQ ID NO: 1879941 - DNA, 15 bp, Homo sapiens
gtttctgtgttttgt

SEQ ID NO: 1879942 - DNA, 15 bp, Homo sapiens
tttctgtgttttgtg

SEQ ID NO: 1879943 - DNA, 15 bp, Homo sapiens
ttctgtgttttgtgt

SEQ ID NO: 1879944 - DNA, 15 bp, Homo sapiens
tctgtgttttgtgtc

SEQ ID NO: 1879945 - DNA, 15 bp, Homo sapiens
ctgtgttttgtgtct

SEQ ID NO: 1879946 - DNA, 15 bp, Homo sapiens
gtgttttgtgtctgt

SEQ ID NO: 1879947 - DNA, 15 bp, Homo sapiens
tgttttgtgtctgtc

SEQ ID NO: 1879948 - DNA, 15 bp, Homo sapiens
gttttgtgtctgtct

SEQ ID NO: 1879949 - DNA, 15 bp, Homo sapiens
ttttgtgtctgtctg

SEQ ID NO: 1879950 - DNA, 15 bp, Homo sapiens
tttgtgtctgtctgt

SEQ ID NO: 1879951 - DNA, 15 bp, Homo sapiens
ttgtgtctgtctgtt

SEQ ID NO: 1879952 - DNA, 15 bp, Homo sapiens
tgtgtctgtctgttt

SEQ ID NO: 1879953 - DNA, 15 bp, Homo sapiens
gtgtctgtctgtttt

SEQ ID NO: 1879954 - DNA, 15 bp, Homo sapiens
tgtctgtctgttttc

SEQ ID NO: 1879955 - DNA, 15 bp, Homo sapiens
gtctgtctgttttcc

SEQ ID NO: 1879956 - DNA, 15 bp, Homo sapiens
tctgtctgttttcca

SEQ ID NO: 1879957 - DNA, 15 bp, Homo sapiens
ctgtctgttttccag

SEQ ID NO: 1879958 - DNA, 15 bp, Homo sapiens
tgtctgttttccagt

SEQ ID NO: 1879959 - DNA, 15 bp, Homo sapiens
gtctgttttccagtt

SEQ ID NO: 1879960 - DNA, 15 bp, Homo sapiens
tctgttttccagttt

SEQ ID NO: 1879961 - DNA, 15 bp, Homo sapiens
ctgttttccagtttt

SEQ ID NO: 1879962 - DNA, 15 bp, Homo sapiens
tgttttccagttttg

SEQ ID NO: 1879963 - DNA, 15 bp, Homo sapiens
gttttccagttttgg

SEQ ID NO: 1879964 - DNA, 15 bp, Homo sapiens
ttttccagttttggg

SEQ ID NO: 1879965 - DNA, 15 bp, Homo sapiens
tttccagttttgggg

SEQ ID NO: 1879966 - DNA, 15 bp, Homo sapiens
ttccagttttgggga

SEQ ID NO: 1879967 - DNA, 15 bp, Homo sapiens
tccagttttggggag

SEQ ID NO: 1879968 - DNA, 15 bp, Homo sapiens
ccagttttggggaga

SEQ ID NO: 1879969 - DNA, 15 bp, Homo sapiens
cagttttggggagac

SEQ ID NO: 1879970 - DNA, 15 bp, Homo sapiens
agttttggggagaca

SEQ ID NO: 1879971 - DNA, 15 bp, Homo sapiens
gttttggggagacat

SEQ ID NO: 1879972 - DNA, 15 bp, Homo sapiens
ttttggggagacatt

SEQ ID NO: 1879973 - DNA, 15 bp, Homo sapiens
tttggggagacattt

SEQ ID NO: 1879974 - DNA, 15 bp, Homo sapiens
ttggggagacattta

SEQ ID NO: 1879975 - DNA, 15 bp, Homo sapiens
tggggagacatttaa

SEQ ID NO: 1879976 - DNA, 15 bp, Homo sapiens
ggggagacatttaaa

SEQ ID NO: 1879977 - DNA, 15 bp, Homo sapiens
gggagacatttaaac

SEQ ID NO: 1879978 - DNA, 15 bp, Homo sapiens
ggagacatttaaacc

SEQ ID NO: 1879979 - DNA, 15 bp, Homo sapiens
gagacatttaaacca

SEQ ID NO: 1879980 - DNA, 15 bp, Homo sapiens
agacatttaaaccag

SEQ ID NO: 1879981 - DNA, 15 bp, Homo sapiens
gacatttaaaccagt

SEQ ID NO: 1879982 - DNA, 15 bp, Homo sapiens
acatttaaaccagta

SEQ ID NO: 1879983 - DNA, 15 bp, Homo sapiens
catttaaaccagtag

SEQ ID NO: 1879984 - DNA, 15 bp, Homo sapiens
atttaaaccagtagt

SEQ ID NO: 1879985 - DNA, 15 bp, Homo sapiens
tttaaaccagtagtc

SEQ ID NO: 1879986 - DNA, 15 bp, Homo sapiens
ttaaaccagtagtca

SEQ ID NO: 1879987 - DNA, 15 bp, Homo sapiens
taaaccagtagtcat

SEQ ID NO: 1879988 - DNA, 15 bp, Homo sapiens
aaaccagtagtcatg

SEQ ID NO: 1879989 - DNA, 15 bp, Homo sapiens
aaccagtagtcatgt

SEQ ID NO: 1879990 - DNA, 15 bp, Homo sapiens
accagtagtcatgtc

SEQ ID NO: 1879991 - DNA, 15 bp, Homo sapiens
ccagtagtcatgtca

SEQ ID NO: 1879992 - DNA, 15 bp, Homo sapiens
cagtagtcatgtcat

SEQ ID NO: 1879993 - DNA, 15 bp, Homo sapiens
agtagtcatgtcatc

SEQ ID NO: 1879994 - DNA, 15 bp, Homo sapiens
gtagtcatgtcatct

SEQ ID NO: 1879995 - DNA, 15 bp, Homo sapiens
tagtcatgtcatctc

SEQ ID NO: 1879996 - DNA, 15 bp, Homo sapiens
agtcatgtcatctca

SEQ ID NO: 1879997 - DNA, 15 bp, Homo sapiens
gtcatgtcatctcat

SEQ ID NO: 1879998 - DNA, 15 bp, Homo sapiens
tcatgtcatctcatg

SEQ ID NO: 1879999 - DNA, 15 bp, Homo sapiens
catgtcatctcatgt

SEQ ID NO: 1880000 - DNA, 15 bp, Homo sapiens
atgtcatctcatgta

SEQ ID NO: 1880001 - DNA, 15 bp, Homo sapiens
tgtcatctcatgtaa

SEQ ID NO: 1880002 - DNA, 15 bp, Homo sapiens
gtcatctcatgtaat

SEQ ID NO: 1880003 - DNA, 15 bp, Homo sapiens
tcatctcatgtaatg

SEQ ID NO: 1880004 - DNA, 15 bp, Homo sapiens
catctcatgtaatga

SEQ ID NO: 1880005 - DNA, 15 bp, Homo sapiens
atctcatgtaatgac

SEQ ID NO: 1880006 - DNA, 15 bp, Homo sapiens
tctcatgtaatgaca

SEQ ID NO: 1880007 - DNA, 15 bp, Homo sapiens
ctcatgtaatgacat

SEQ ID NO: 1880008 - DNA, 15 bp, Homo sapiens
tcatgtaatgacatg

SEQ ID NO: 1880009 - DNA, 15 bp, Homo sapiens
catgtaatgacatgc

SEQ ID NO: 1880010 - DNA, 15 bp, Homo sapiens
atgtaatgacatgcc

SEQ ID NO: 1880011 - DNA, 15 bp, Homo sapiens
tgtaatgacatgcct

SEQ ID NO: 1880012 - DNA, 15 bp, Homo sapiens
gtaatgacatgcctc

SEQ ID NO: 1880013 - DNA, 15 bp, Homo sapiens
taatgacatgcctct

SEQ ID NO: 1880014 - DNA, 15 bp, Homo sapiens
aatgacatgcctctc

SEQ ID NO: 1880015 - DNA, 15 bp, Homo sapiens
atgacatgcctctct

SEQ ID NO: 1880016 - DNA, 15 bp, Homo sapiens
tgacatgcctctctg

SEQ ID NO: 1880017 - DNA, 15 bp, Homo sapiens
gacatgcctctctgc

SEQ ID NO: 1880018 - DNA, 15 bp, Homo sapiens
acatgcctctctgct

SEQ ID NO: 1880019 - DNA, 15 bp, Homo sapiens
catgcctctctgctt

SEQ ID NO: 1880020 - DNA, 15 bp, Homo sapiens
atgcctctctgctta

SEQ ID NO: 1880021 - DNA, 15 bp, Homo sapiens
tgcctctctgcttat

SEQ ID NO: 1880022 - DNA, 15 bp, Homo sapiens
gcctctctgcttatt

SEQ ID NO: 1880023 - DNA, 15 bp, Homo sapiens
cctctctgcttattc

SEQ ID NO: 1880024 - DNA, 15 bp, Homo sapiens
ctctctgcttattct

SEQ ID NO: 1880025 - DNA, 15 bp, Homo sapiens
tctctgcttattctc

SEQ ID NO: 1880026 - DNA, 15 bp, Homo sapiens
ctctgcttattctcc

SEQ ID NO: 1880027 - DNA, 15 bp, Homo sapiens
tctgcttattctccc

SEQ ID NO: 1880028 - DNA, 15 bp, Homo sapiens
ctgcttattctccct

SEQ ID NO: 1880029 - DNA, 15 bp, Homo sapiens
tgcttattctccctt

SEQ ID NO: 1880030 - DNA, 15 bp, Homo sapiens
gcttattctcccttc

SEQ ID NO: 1880031 - DNA, 15 bp, Homo sapiens
cttattctcccttct

SEQ ID NO: 1880032 - DNA, 15 bp, Homo sapiens
ttattctcccttctg

SEQ ID NO: 1880033 - DNA, 15 bp, Homo sapiens
tattctcccttctgt

SEQ ID NO: 1880034 - DNA, 15 bp, Homo sapiens
attctcccttctgtt

SEQ ID NO: 1880035 - DNA, 15 bp, Homo sapiens
ttctcccttctgtta

SEQ ID NO: 1880036 - DNA, 15 bp, Homo sapiens
tctcccttctgttac

SEQ ID NO: 1880037 - DNA, 15 bp, Homo sapiens
ctcccttctgttacc

SEQ ID NO: 1880038 - DNA, 15 bp, Homo sapiens
tcccttctgttacca

SEQ ID NO: 1880039 - DNA, 15 bp, Homo sapiens
cccttctgttaccaa

SEQ ID NO: 1880040 - DNA, 15 bp, Homo sapiens
ccttctgttaccaaa

SEQ ID NO: 1880041 - DNA, 15 bp, Homo sapiens
cttctgttaccaaac

SEQ ID NO: 1880042 - DNA, 15 bp, Homo sapiens
ttctgttaccaaaca

SEQ ID NO: 1880043 - DNA, 15 bp, Homo sapiens
tctgttaccaaacaa

SEQ ID NO: 1880044 - DNA, 15 bp, Homo sapiens
ctgttaccaaacaat

SEQ ID NO: 1880045 - DNA, 15 bp, Homo sapiens
tgttaccaaacaata

SEQ ID NO: 1880046 - DNA, 15 bp, Homo sapiens
gttaccaaacaatat

SEQ ID NO: 1880047 - DNA, 15 bp, Homo sapiens
ttaccaaacaatatt

SEQ ID NO: 1880048 - DNA, 15 bp, Homo sapiens
taccaaacaatattt

SEQ ID NO: 1880049 - DNA, 15 bp, Homo sapiens
accaaacaatattta

SEQ ID NO: 1880050 - DNA, 15 bp, Homo sapiens
ccaaacaatatttat

SEQ ID NO: 1880051 - DNA, 15 bp, Homo sapiens
caaacaatatttatg

SEQ ID NO: 1880052 - DNA, 15 bp, Homo sapiens
aaacaatatttatgg

SEQ ID NO: 1880053 - DNA, 15 bp, Homo sapiens
aacaatatttatggc

SEQ ID NO: 1880054 - DNA, 15 bp, Homo sapiens
acaatatttatggct

SEQ ID NO: 1880055 - DNA, 15 bp, Homo sapiens
caatatttatggcta

SEQ ID NO: 1880056 - DNA, 15 bp, Homo sapiens
aatatttatggctag

SEQ ID NO: 1880057 - DNA, 15 bp, Homo sapiens
atatttatggctagc

SEQ ID NO: 1880058 - DNA, 15 bp, Homo sapiens
tatttatggctagcg

SEQ ID NO: 1880059 - DNA, 15 bp, Homo sapiens
atttatggctagcgt

SEQ ID NO: 1880060 - DNA, 15 bp, Homo sapiens
tttatggctagcgtc

SEQ ID NO: 1880061 - DNA, 15 bp, Homo sapiens
ttatggctagcgtct

SEQ ID NO: 1880062 - DNA, 15 bp, Homo sapiens
tatggctagcgtctg

SEQ ID NO: 1880063 - DNA, 15 bp, Homo sapiens
atggctagcgtctgt

SEQ ID NO: 1880064 - DNA, 15 bp, Homo sapiens
tggctagcgtctgta

SEQ ID NO: 1880065 - DNA, 15 bp, Homo sapiens
ggctagcgtctgtat

SEQ ID NO: 1880066 - DNA, 15 bp, Homo sapiens
gctagcgtctgtatg

SEQ ID NO: 1880067 - DNA, 15 bp, Homo sapiens
ctagcgtctgtatgc

SEQ ID NO: 1880068 - DNA, 15 bp, Homo sapiens
tagcgtctgtatgca

SEQ ID NO: 1880069 - DNA, 15 bp, Homo sapiens
agcgtctgtatgcat

SEQ ID NO: 1880070 - DNA, 15 bp, Homo sapiens
gcgtctgtatgcatg

SEQ ID NO: 1880071 - DNA, 15 bp, Homo sapiens
cgtctgtatgcatgt

SEQ ID NO: 1880072 - DNA, 15 bp, Homo sapiens
gtctgtatgcatgtg

SEQ ID NO: 1880073 - DNA, 15 bp, Homo sapiens
tctgtatgcatgtgt

SEQ ID NO: 1880074 - DNA, 15 bp, Homo sapiens
ctgtatgcatgtgtg

SEQ ID NO: 1880075 - DNA, 15 bp, Homo sapiens
tgtatgcatgtgtgc

SEQ ID NO: 1880076 - DNA, 15 bp, Homo sapiens
gtatgcatgtgtgcg

SEQ ID NO: 1880077 - DNA, 15 bp, Homo sapiens
tatgcatgtgtgcga

SEQ ID NO: 1880078 - DNA, 15 bp, Homo sapiens
atgcatgtgtgcgat

SEQ ID NO: 1880079 - DNA, 15 bp, Homo sapiens
tgcatgtgtgcgatg

SEQ ID NO: 1880080 - DNA, 15 bp, Homo sapiens
gcatgtgtgcgatga

SEQ ID NO: 1880081 - DNA, 15 bp, Homo sapiens
catgtgtgcgatgac

SEQ ID NO: 1880082 - DNA, 15 bp, Homo sapiens
atgtgtgcgatgact

SEQ ID NO: 1880083 - DNA, 15 bp, Homo sapiens
tgtgtgcgatgacta

SEQ ID NO: 1880084 - DNA, 15 bp, Homo sapiens
gtgtgcgatgactat

SEQ ID NO: 1880085 - DNA, 15 bp, Homo sapiens
tgtgcgatgactatt

SEQ ID NO: 1880086 - DNA, 15 bp, Homo sapiens
gtgcgatgactattt

SEQ ID NO: 1880087 - DNA, 15 bp, Homo sapiens
tgcgatgactatttg

SEQ ID NO: 1880088 - DNA, 15 bp, Homo sapiens
gcgatgactatttgc

SEQ ID NO: 1880089 - DNA, 15 bp, Homo sapiens
cgatgactatttgct

SEQ ID NO: 1880090 - DNA, 15 bp, Homo sapiens
gatgactatttgcta

SEQ ID NO: 1880091 - DNA, 15 bp, Homo sapiens
atgactatttgctat

SEQ ID NO: 1880092 - DNA, 15 bp, Homo sapiens
tgactatttgctata

SEQ ID NO: 1880093 - DNA, 15 bp, Homo sapiens
gactatttgctatac

SEQ ID NO: 1880094 - DNA, 15 bp, Homo sapiens
actatttgctataca

SEQ ID NO: 1880095 - DNA, 15 bp, Homo sapiens
ctatttgctatacag

SEQ ID NO: 1880096 - DNA, 15 bp, Homo sapiens
tatttgctatacagt

SEQ ID NO: 1880097 - DNA, 15 bp, Homo sapiens
atttgctatacagtt

SEQ ID NO: 1880098 - DNA, 15 bp, Homo sapiens
tttgctatacagttg

SEQ ID NO: 1880099 - DNA, 15 bp, Homo sapiens
ttgctatacagttgc

SEQ ID NO: 1880100 - DNA, 15 bp, Homo sapiens
tgctatacagttgcc

SEQ ID NO: 1880101 - DNA, 15 bp, Homo sapiens
gctatacagttgcct

SEQ ID NO: 1880102 - DNA, 15 bp, Homo sapiens
ctatacagttgccta

SEQ ID NO: 1880103 - DNA, 15 bp, Homo sapiens
tatacagttgcctag

SEQ ID NO: 1880104 - DNA, 15 bp, Homo sapiens
atacagttgcctaga

SEQ ID NO: 1880105 - DNA, 15 bp, Homo sapiens
tacagttgcctagag

SEQ ID NO: 1880106 - DNA, 15 bp, Homo sapiens
acagttgcctagagc

SEQ ID NO: 1880107 - DNA, 15 bp, Homo sapiens
cagttgcctagagca

SEQ ID NO: 1880108 - DNA, 15 bp, Homo sapiens
agttgcctagagcac

SEQ ID NO: 1880109 - DNA, 15 bp, Homo sapiens
gttgcctagagcact

SEQ ID NO: 1880110 - DNA, 15 bp, Homo sapiens
ttgcctagagcactg

SEQ ID NO: 1880111 - DNA, 15 bp, Homo sapiens
tgcctagagcactgt

SEQ ID NO: 1880112 - DNA, 15 bp, Homo sapiens
gcctagagcactgtg

SEQ ID NO: 1880113 - DNA, 15 bp, Homo sapiens
cctagagcactgtga

SEQ ID NO: 1880114 - DNA, 15 bp, Homo sapiens
ctagagcactgtgaa

SEQ ID NO: 1880115 - DNA, 15 bp, Homo sapiens
tagagcactgtgaaa

SEQ ID NO: 1880116 - DNA, 15 bp, Homo sapiens
agagcactgtgaaac

SEQ ID NO: 1880117 - DNA, 15 bp, Homo sapiens
gagcactgtgaaact

SEQ ID NO: 1880118 - DNA, 15 bp, Homo sapiens
agcactgtgaaactc

SEQ ID NO: 1880119 - DNA, 15 bp, Homo sapiens
gcactgtgaaactcc

SEQ ID NO: 1880120 - DNA, 15 bp, Homo sapiens
cactgtgaaactcca

SEQ ID NO: 1880121 - DNA, 15 bp, Homo sapiens
actgtgaaactccac

SEQ ID NO: 1880122 - DNA, 15 bp, Homo sapiens
ctgtgaaactccaca

SEQ ID NO: 1880123 - DNA, 15 bp, Homo sapiens
tgtgaaactccacat

SEQ ID NO: 1880124 - DNA, 15 bp, Homo sapiens
gtgaaactccacatg

SEQ ID NO: 1880125 - DNA, 15 bp, Homo sapiens
tgaaactccacatgt

SEQ ID NO: 1880126 - DNA, 15 bp, Homo sapiens
gaaactccacatgtt

SEQ ID NO: 1880127 - DNA, 15 bp, Homo sapiens
aaactccacatgttc

SEQ ID NO: 1880128 - DNA, 15 bp, Homo sapiens
aactccacatgttca

SEQ ID NO: 1880129 - DNA, 15 bp, Homo sapiens
actccacatgttcaa

SEQ ID NO: 1880130 - DNA, 15 bp, Homo sapiens
ctccacatgttcaat

SEQ ID NO: 1880131 - DNA, 15 bp, Homo sapiens
tccacatgttcaatg

SEQ ID NO: 1880132 - DNA, 15 bp, Homo sapiens
ccacatgttcaatgg

SEQ ID NO: 1880133 - DNA, 15 bp, Homo sapiens
cacatgttcaatgga

SEQ ID NO: 1880134 - DNA, 15 bp, Homo sapiens
acatgttcaatggag

SEQ ID NO: 1880135 - DNA, 15 bp, Homo sapiens
catgttcaatggagt

SEQ ID NO: 1880136 - DNA, 15 bp, Homo sapiens
atgttcaatggagtg

SEQ ID NO: 1880137 - DNA, 15 bp, Homo sapiens
tgttcaatggagtga

SEQ ID NO: 1880138 - DNA, 15 bp, Homo sapiens
gttcaatggagtgat

SEQ ID NO: 1880139 - DNA, 15 bp, Homo sapiens
ttcaatggagtgatt

SEQ ID NO: 1880140 - DNA, 15 bp, Homo sapiens
tcaatggagtgattt

SEQ ID NO: 1880141 - DNA, 15 bp, Homo sapiens
caatggagtgatttc

SEQ ID NO: 1880142 - DNA, 15 bp, Homo sapiens
atggagtgatttctt

SEQ ID NO: 1880143 - DNA, 15 bp, Homo sapiens
tggagtgatttcttt

SEQ ID NO: 1880144 - DNA, 15 bp, Homo sapiens
ggagtgatttctttt

SEQ ID NO: 1880145 - DNA, 15 bp, Homo sapiens
gagtgatttcttttt

SEQ ID NO: 1880146 - DNA, 15 bp, Homo sapiens
agtgatttctttttg

SEQ ID NO: 1880147 - DNA, 15 bp, Homo sapiens
gtgatttctttttgt

SEQ ID NO: 1880148 - DNA, 15 bp, Homo sapiens
tgatttctttttgtt

SEQ ID NO: 1880149 - DNA, 15 bp, Homo sapiens
gatttctttttgttt

SEQ ID NO: 1880150 - DNA, 15 bp, Homo sapiens
atttctttttgtttt

SEQ ID NO: 1880151 - DNA, 15 bp, Homo sapiens
tttctttttgttttt

SEQ ID NO: 1880152 - DNA, 15 bp, Homo sapiens
ttctttttgtttttc

SEQ ID NO: 1880153 - DNA, 15 bp, Homo sapiens
tctttttgtttttct

SEQ ID NO: 1880154 - DNA, 15 bp, Homo sapiens
ctttttgtttttctg

SEQ ID NO: 1880155 - DNA, 15 bp, Homo sapiens
tttttgtttttctgc

SEQ ID NO: 1880156 - DNA, 15 bp, Homo sapiens
ttttgtttttctgca

SEQ ID NO: 1880157 - DNA, 15 bp, Homo sapiens
tttgtttttctgcat

SEQ ID NO: 1880158 - DNA, 15 bp, Homo sapiens
ttgtttttctgcatg

SEQ ID NO: 1880159 - DNA, 15 bp, Homo sapiens
tgtttttctgcatgc

SEQ ID NO: 1880160 - DNA, 15 bp, Homo sapiens
gtttttctgcatgct

SEQ ID NO: 1880161 - DNA, 15 bp, Homo sapiens
tttttctgcatgcta

SEQ ID NO: 1880162 - DNA, 15 bp, Homo sapiens
ttttctgcatgctat

SEQ ID NO: 1880163 - DNA, 15 bp, Homo sapiens
tttctgcatgctatc

SEQ ID NO: 1880164 - DNA, 15 bp, Homo sapiens
ttctgcatgctatca

SEQ ID NO: 1880165 - DNA, 15 bp, Homo sapiens
tctgcatgctatcaa

SEQ ID NO: 1880166 - DNA, 15 bp, Homo sapiens
ctgcatgctatcaag

SEQ ID NO: 1880167 - DNA, 15 bp, Homo sapiens
tgcatgctatcaagt

SEQ ID NO: 1880168 - DNA, 15 bp, Homo sapiens
gcatgctatcaagta

SEQ ID NO: 1880169 - DNA, 15 bp, Homo sapiens
catgctatcaagtac

SEQ ID NO: 1880170 - DNA, 15 bp, Homo sapiens
atgctatcaagtact

SEQ ID NO: 1880171 - DNA, 15 bp, Homo sapiens
tgctatcaagtactc

SEQ ID NO: 1880172 - DNA, 15 bp, Homo sapiens
gctatcaagtactct

SEQ ID NO: 1880173 - DNA, 15 bp, Homo sapiens
ctatcaagtactctc

SEQ ID NO: 1880174 - DNA, 15 bp, Homo sapiens
tatcaagtactctca

SEQ ID NO: 1880175 - DNA, 15 bp, Homo sapiens
atcaagtactctcaa

SEQ ID NO: 1880176 - DNA, 15 bp, Homo sapiens
tcaagtactctcaaa

SEQ ID NO: 1880177 - DNA, 15 bp, Homo sapiens
caagtactctcaaag

SEQ ID NO: 1880178 - DNA, 15 bp, Homo sapiens
aagtactctcaaagt

SEQ ID NO: 1880179 - DNA, 15 bp, Homo sapiens
agtactctcaaagtg

SEQ ID NO: 1880180 - DNA, 15 bp, Homo sapiens
gtactctcaaagtgt

SEQ ID NO: 1880181 - DNA, 15 bp, Homo sapiens
tactctcaaagtgtt

SEQ ID NO: 1880182 - DNA, 15 bp, Homo sapiens
actctcaaagtgttc

SEQ ID NO: 1880183 - DNA, 15 bp, Homo sapiens
ctctcaaagtgttcc

SEQ ID NO: 1880184 - DNA, 15 bp, Homo sapiens
tctcaaagtgttcct

SEQ ID NO: 1880185 - DNA, 15 bp, Homo sapiens
ctcaaagtgttcctt

SEQ ID NO: 1880186 - DNA, 15 bp, Homo sapiens
tcaaagtgttccttc

SEQ ID NO: 1880187 - DNA, 15 bp, Homo sapiens
caaagtgttccttcg

SEQ ID NO: 1880188 - DNA, 15 bp, Homo sapiens
aaagtgttccttcgg

SEQ ID NO: 1880189 - DNA, 15 bp, Homo sapiens
aagtgttccttcggc

SEQ ID NO: 1880190 - DNA, 15 bp, Homo sapiens
agtgttccttcggct

SEQ ID NO: 1880191 - DNA, 15 bp, Homo sapiens
gtgttccttcggctt

SEQ ID NO: 1880192 - DNA, 15 bp, Homo sapiens
tgttccttcggcttt

SEQ ID NO: 1880193 - DNA, 15 bp, Homo sapiens
gttccttcggctttt

SEQ ID NO: 1880194 - DNA, 15 bp, Homo sapiens
ttccttcggcttttt

SEQ ID NO: 1880195 - DNA, 15 bp, Homo sapiens
tccttcggctttttg

SEQ ID NO: 1880196 - DNA, 15 bp, Homo sapiens
ccttcggctttttgc

SEQ ID NO: 1880197 - DNA, 15 bp, Homo sapiens
cttcggctttttgca

SEQ ID NO: 1880198 - DNA, 15 bp, Homo sapiens
ttcggctttttgcat

SEQ ID NO: 1880199 - DNA, 15 bp, Homo sapiens
tcggctttttgcatg

SEQ ID NO: 1880200 - DNA, 15 bp, Homo sapiens
cggctttttgcatga

SEQ ID NO: 1880201 - DNA, 15 bp, Homo sapiens
ggctttttgcatgaa

SEQ ID NO: 1880202 - DNA, 15 bp, Homo sapiens
gctttttgcatgaaa

SEQ ID NO: 1880203 - DNA, 15 bp, Homo sapiens
ctttttgcatgaaag

SEQ ID NO: 1880204 - DNA, 15 bp, Homo sapiens
tttttgcatgaaaga

SEQ ID NO: 1880205 - DNA, 15 bp, Homo sapiens
ttttgcatgaaagat

SEQ ID NO: 1880206 - DNA, 15 bp, Homo sapiens
tttgcatgaaagata

SEQ ID NO: 1880207 - DNA, 15 bp, Homo sapiens
ttgcatgaaagatag

SEQ ID NO: 1880208 - DNA, 15 bp, Homo sapiens
tgcatgaaagatagc

SEQ ID NO: 1880209 - DNA, 15 bp, Homo sapiens
gcatgaaagatagct

SEQ ID NO: 1880210 - DNA, 15 bp, Homo sapiens
catgaaagatagcta

SEQ ID NO: 1880211 - DNA, 15 bp, Homo sapiens
atgaaagatagctag

SEQ ID NO: 1880212 - DNA, 15 bp, Homo sapiens
tgaaagatagctaga

SEQ ID NO: 1880213 - DNA, 15 bp, Homo sapiens
gaaagatagctagag

SEQ ID NO: 1880214 - DNA, 15 bp, Homo sapiens
aaagatagctagagg

SEQ ID NO: 1880215 - DNA, 15 bp, Homo sapiens
aagatagctagagga

SEQ ID NO: 1880216 - DNA, 15 bp, Homo sapiens
agatagctagaggat

SEQ ID NO: 1880217 - DNA, 15 bp, Homo sapiens
gatagctagaggata

SEQ ID NO: 1880218 - DNA, 15 bp, Homo sapiens
atagctagaggatag

SEQ ID NO: 1880219 - DNA, 15 bp, Homo sapiens
tagctagaggataga

SEQ ID NO: 1880220 - DNA, 15 bp, Homo sapiens
agctagaggatagaa

SEQ ID NO: 1880221 - DNA, 15 bp, Homo sapiens
gctagaggatagaaa

SEQ ID NO: 1880222 - DNA, 15 bp, Homo sapiens
ctagaggatagaaag

SEQ ID NO: 1880223 - DNA, 15 bp, Homo sapiens
tagaggatagaaagg

SEQ ID NO: 1880224 - DNA, 15 bp, Homo sapiens
agaggatagaaaggg

SEQ ID NO: 1880225 - DNA, 15 bp, Homo sapiens
gaggatagaaaggga

SEQ ID NO: 1880226 - DNA, 15 bp, Homo sapiens
aggatagaaagggac

SEQ ID NO: 1880227 - DNA, 15 bp, Homo sapiens
ggatagaaagggaca

SEQ ID NO: 1880228 - DNA, 15 bp, Homo sapiens
gatagaaagggacat

SEQ ID NO: 1880229 - DNA, 15 bp, Homo sapiens
atagaaagggacatt

SEQ ID NO: 1880230 - DNA, 15 bp, Homo sapiens
tagaaagggacattc

SEQ ID NO: 1880231 - DNA, 15 bp, Homo sapiens
agaaagggacattcc

SEQ ID NO: 1880232 - DNA, 15 bp, Homo sapiens
gaaagggacattcca

SEQ ID NO: 1880233 - DNA, 15 bp, Homo sapiens
aaagggacattccag

SEQ ID NO: 1880234 - DNA, 15 bp, Homo sapiens
aagggacattccagt

SEQ ID NO: 1880235 - DNA, 15 bp, Homo sapiens
agggacattccagta

SEQ ID NO: 1880236 - DNA, 15 bp, Homo sapiens
gggacattccagtaa

SEQ ID NO: 1880237 - DNA, 15 bp, Homo sapiens
ggacattccagtaaa

SEQ ID NO: 1880238 - DNA, 15 bp, Homo sapiens
gacattccagtaaat

SEQ ID NO: 1880239 - DNA, 15 bp, Homo sapiens
acattccagtaaatt

SEQ ID NO: 1880240 - DNA, 15 bp, Homo sapiens
cattccagtaaattc

SEQ ID NO: 1880241 - DNA, 15 bp, Homo sapiens
attccagtaaattct

SEQ ID NO: 1880242 - DNA, 15 bp, Homo sapiens
ttccagtaaattcta

SEQ ID NO: 1880243 - DNA, 15 bp, Homo sapiens
tccagtaaattctac

SEQ ID NO: 1880244 - DNA, 15 bp, Homo sapiens
ccagtaaattctact

SEQ ID NO: 1880245 - DNA, 15 bp, Homo sapiens
cagtaaattctactt

SEQ ID NO: 1880246 - DNA, 15 bp, Homo sapiens
agtaaattctacttt

SEQ ID NO: 1880247 - DNA, 15 bp, Homo sapiens
gtaaattctactttg

SEQ ID NO: 1880248 - DNA, 15 bp, Homo sapiens
taaattctactttgt

SEQ ID NO: 1880249 - DNA, 15 bp, Homo sapiens
aaattctactttgta

SEQ ID NO: 1880250 - DNA, 15 bp, Homo sapiens
aattctactttgtag

SEQ ID NO: 1880251 - DNA, 15 bp, Homo sapiens
attctactttgtagc

SEQ ID NO: 1880252 - DNA, 15 bp, Homo sapiens
ttctactttgtagca

SEQ ID NO: 1880253 - DNA, 15 bp, Homo sapiens
tctactttgtagcaa

SEQ ID NO: 1880254 - DNA, 15 bp, Homo sapiens
ctactttgtagcaaa

SEQ ID NO: 1880255 - DNA, 15 bp, Homo sapiens
tactttgtagcaaat

SEQ ID NO: 1880256 - DNA, 15 bp, Homo sapiens
actttgtagcaaatt

SEQ ID NO: 1880257 - DNA, 15 bp, Homo sapiens
ctttgtagcaaattg

SEQ ID NO: 1880258 - DNA, 15 bp, Homo sapiens
tttgtagcaaattga

SEQ ID NO: 1880259 - DNA, 15 bp, Homo sapiens
ttgtagcaaattgaa

SEQ ID NO: 1880260 - DNA, 15 bp, Homo sapiens
tgtagcaaattgaat

SEQ ID NO: 1880261 - DNA, 15 bp, Homo sapiens
gtagcaaattgaata

SEQ ID NO: 1880262 - DNA, 15 bp, Homo sapiens
tagcaaattgaatat

SEQ ID NO: 1880263 - DNA, 15 bp, Homo sapiens
agcaaattgaatata

SEQ ID NO: 1880264 - DNA, 15 bp, Homo sapiens
gcaaattgaatatag

SEQ ID NO: 1880265 - DNA, 15 bp, Homo sapiens
caaattgaatataga

SEQ ID NO: 1880266 - DNA, 15 bp, Homo sapiens
aaattgaatatagag

SEQ ID NO: 1880267 - DNA, 15 bp, Homo sapiens
aattgaatatagagg

SEQ ID NO: 1880268 - DNA, 15 bp, Homo sapiens
attgaatatagaggt

SEQ ID NO: 1880269 - DNA, 15 bp, Homo sapiens
ttgaatatagaggtt

SEQ ID NO: 1880270 - DNA, 15 bp, Homo sapiens
tgaatatagaggttt

SEQ ID NO: 1880271 - DNA, 15 bp, Homo sapiens
gaatatagaggtttt

SEQ ID NO: 1880272 - DNA, 15 bp, Homo sapiens
aatatagaggttttt

SEQ ID NO: 1880273 - DNA, 15 bp, Homo sapiens
atatagaggtttttc

SEQ ID NO: 1880274 - DNA, 15 bp, Homo sapiens
tatagaggtttttct

SEQ ID NO: 1880275 - DNA, 15 bp, Homo sapiens
atagaggtttttctt

SEQ ID NO: 1880276 - DNA, 15 bp, Homo sapiens
tagaggtttttcttc

SEQ ID NO: 1880277 - DNA, 15 bp, Homo sapiens
agaggtttttcttcc

SEQ ID NO: 1880278 - DNA, 15 bp, Homo sapiens
gaggtttttcttcca

SEQ ID NO: 1880279 - DNA, 15 bp, Homo sapiens
aggtttttcttccag

SEQ ID NO: 1880280 - DNA, 15 bp, Homo sapiens
ggtttttcttccagt

SEQ ID NO: 1880281 - DNA, 15 bp, Homo sapiens
gtttttcttccagta

SEQ ID NO: 1880282 - DNA, 15 bp, Homo sapiens
tttttcttccagtaa

SEQ ID NO: 1880283 - DNA, 15 bp, Homo sapiens
ttttcttccagtaat

SEQ ID NO: 1880284 - DNA, 15 bp, Homo sapiens
tttcttccagtaatg

SEQ ID NO: 1880285 - DNA, 15 bp, Homo sapiens
ttcttccagtaatgt

SEQ ID NO: 1880286 - DNA, 15 bp, Homo sapiens
tcttccagtaatgtt

SEQ ID NO: 1880287 - DNA, 15 bp, Homo sapiens
cttccagtaatgttt

SEQ ID NO: 1880288 - DNA, 15 bp, Homo sapiens
ttccagtaatgtttt

SEQ ID NO: 1880289 - DNA, 15 bp, Homo sapiens
tccagtaatgttttc

SEQ ID NO: 1880290 - DNA, 15 bp, Homo sapiens
ccagtaatgttttcc

SEQ ID NO: 1880291 - DNA, 15 bp, Homo sapiens
cagtaatgttttcct

SEQ ID NO: 1880292 - DNA, 15 bp, Homo sapiens
agtaatgttttcctc

SEQ ID NO: 1880293 - DNA, 15 bp, Homo sapiens
gtaatgttttcctcc

SEQ ID NO: 1880294 - DNA, 15 bp, Homo sapiens
taatgttttcctccc

SEQ ID NO: 1880295 - DNA, 15 bp, Homo sapiens
aatgttttcctcccg

SEQ ID NO: 1880296 - DNA, 15 bp, Homo sapiens
atgttttcctcccga

SEQ ID NO: 1880297 - DNA, 15 bp, Homo sapiens
tgttttcctcccgat

SEQ ID NO: 1880298 - DNA, 15 bp, Homo sapiens
gttttcctcccgatt

SEQ ID NO: 1880299 - DNA, 15 bp, Homo sapiens
ttttcctcccgattt

SEQ ID NO: 1880300 - DNA, 15 bp, Homo sapiens
tttcctcccgatttt

SEQ ID NO: 1880301 - DNA, 15 bp, Homo sapiens
ttcctcccgattttt

SEQ ID NO: 1880302 - DNA, 15 bp, Homo sapiens
tcctcccgattttta

SEQ ID NO: 1880303 - DNA, 15 bp, Homo sapiens
cctcccgatttttat

SEQ ID NO: 1880304 - DNA, 15 bp, Homo sapiens
ctcccgatttttatg

SEQ ID NO: 1880305 - DNA, 15 bp, Homo sapiens
tcccgatttttatgt

SEQ ID NO: 1880306 - DNA, 15 bp, Homo sapiens
cccgatttttatgta

SEQ ID NO: 1880307 - DNA, 15 bp, Homo sapiens
ccgatttttatgtag

SEQ ID NO: 1880308 - DNA, 15 bp, Homo sapiens
cgatttttatgtaga

SEQ ID NO: 1880309 - DNA, 15 bp, Homo sapiens
gatttttatgtagaa

SEQ ID NO: 1880310 - DNA, 15 bp, Homo sapiens
atttttatgtagaaa

SEQ ID NO: 1880311 - DNA, 15 bp, Homo sapiens
tttttatgtagaaag

SEQ ID NO: 1880312 - DNA, 15 bp, Homo sapiens
ttttatgtagaaagt

SEQ ID NO: 1880313 - DNA, 15 bp, Homo sapiens
tttatgtagaaagtg

SEQ ID NO: 1880314 - DNA, 15 bp, Homo sapiens
ttatgtagaaagtgt

SEQ ID NO: 1880315 - DNA, 15 bp, Homo sapiens
tatgtagaaagtgtt

SEQ ID NO: 1880316 - DNA, 15 bp, Homo sapiens
atgtagaaagtgttt

SEQ ID NO: 1880317 - DNA, 15 bp, Homo sapiens
tgtagaaagtgtttt

SEQ ID NO: 1880318 - DNA, 15 bp, Homo sapiens
gtagaaagtgttttg

SEQ ID NO: 1880319 - DNA, 15 bp, Homo sapiens
tagaaagtgttttgt

SEQ ID NO: 1880320 - DNA, 15 bp, Homo sapiens
agaaagtgttttgtt

SEQ ID NO: 1880321 - DNA, 15 bp, Homo sapiens
gaaagtgttttgtta

SEQ ID NO: 1880322 - DNA, 15 bp, Homo sapiens
aaagtgttttgttaa

SEQ ID NO: 1880323 - DNA, 15 bp, Homo sapiens
aagtgttttgttaaa

SEQ ID NO: 1880324 - DNA, 15 bp, Homo sapiens
agtgttttgttaaaa

SEQ ID NO: 1880325 - DNA, 15 bp, Homo sapiens
gtgttttgttaaaat

SEQ ID NO: 1880326 - DNA, 15 bp, Homo sapiens
tgttttgttaaaatt

SEQ ID NO: 1880327 - DNA, 15 bp, Homo sapiens
gttttgttaaaattc

SEQ ID NO: 1880328 - DNA, 15 bp, Homo sapiens
ttttgttaaaattct

SEQ ID NO: 1880329 - DNA, 15 bp, Homo sapiens
tttgttaaaattctg

SEQ ID NO: 1880330 - DNA, 15 bp, Homo sapiens
ttgttaaaattctgg

SEQ ID NO: 1880331 - DNA, 15 bp, Homo sapiens
tgttaaaattctgga

SEQ ID NO: 1880332 - DNA, 15 bp, Homo sapiens
gttaaaattctggaa

SEQ ID NO: 1880333 - DNA, 15 bp, Homo sapiens
ttaaaattctggaaa

SEQ ID NO: 1880334 - DNA, 15 bp, Homo sapiens
taaaattctggaaat

SEQ ID NO: 1880335 - DNA, 15 bp, Homo sapiens
aaaattctggaaatg

SEQ ID NO: 1880336 - DNA, 15 bp, Homo sapiens
aaattctggaaatga

SEQ ID NO: 1880337 - DNA, 15 bp, Homo sapiens
aattctggaaatgaa

SEQ ID NO: 1880338 - DNA, 15 bp, Homo sapiens
attctggaaatgaaa

SEQ ID NO: 1880339 - DNA, 15 bp, Homo sapiens
ttctggaaatgaaac

SEQ ID NO: 1880340 - DNA, 15 bp, Homo sapiens
tctggaaatgaaact

SEQ ID NO: 1880341 - DNA, 15 bp, Homo sapiens
ctggaaatgaaactc

SEQ ID NO: 1880342 - DNA, 15 bp, Homo sapiens
tggaaatgaaactca

SEQ ID NO: 1880343 - DNA, 15 bp, Homo sapiens
ggaaatgaaactcag

SEQ ID NO: 1880344 - DNA, 15 bp, Homo sapiens
gaaatgaaactcaga

SEQ ID NO: 1880345 - DNA, 15 bp, Homo sapiens
aaatgaaactcagaa

SEQ ID NO: 1880346 - DNA, 15 bp, Homo sapiens
aatgaaactcagaaa

SEQ ID NO: 1880347 - DNA, 15 bp, Homo sapiens
atgaaactcagaaag

SEQ ID NO: 1880348 - DNA, 15 bp, Homo sapiens
tgaaactcagaaagg

SEQ ID NO: 1880349 - DNA, 15 bp, Homo sapiens
gaaactcagaaagga

SEQ ID NO: 1880350 - DNA, 15 bp, Homo sapiens
aaactcagaaaggaa

SEQ ID NO: 1880351 - DNA, 15 bp, Homo sapiens
aactcagaaaggaaa

SEQ ID NO: 1880352 - DNA, 15 bp, Homo sapiens
actcagaaaggaaat

SEQ ID NO: 1880353 - DNA, 15 bp, Homo sapiens
tcagaaaggaaatta

SEQ ID NO: 1880354 - DNA, 15 bp, Homo sapiens
cagaaaggaaattaa

SEQ ID NO: 1880355 - DNA, 15 bp, Homo sapiens
agaaaggaaattaaa

SEQ ID NO: 1880356 - DNA, 15 bp, Homo sapiens
gaaaggaaattaaaa

SEQ ID NO: 1880357 - DNA, 15 bp, Homo sapiens
aaaggaaattaaaag

SEQ ID NO: 1880358 - DNA, 15 bp, Homo sapiens
aaggaaattaaaaga

SEQ ID NO: 1880359 - DNA, 15 bp, Homo sapiens
aggaaattaaaagaa

SEQ ID NO: 1880360 - DNA, 15 bp, Homo sapiens
ggaaattaaaagaaa

SEQ ID NO: 1880361 - DNA, 15 bp, Homo sapiens
gaaattaaaagaaaa

SEQ ID NO: 1880362 - DNA, 15 bp, Homo sapiens
aaattaaaagaaaag

SEQ ID NO: 1880363 - DNA, 15 bp, Homo sapiens
aattaaaagaaaagg

SEQ ID NO: 1880364 - DNA, 15 bp, Homo sapiens
attaaaagaaaaggg

SEQ ID NO: 1880365 - DNA, 15 bp, Homo sapiens
ttaaaagaaaaggga

SEQ ID NO: 1880366 - DNA, 15 bp, Homo sapiens
taaaagaaaagggaa

SEQ ID NO: 1880367 - DNA, 15 bp, Homo sapiens
aaaagaaaagggaag

SEQ ID NO: 1880368 - DNA, 15 bp, Homo sapiens
aaagaaaagggaaga

SEQ ID NO: 1880369 - DNA, 15 bp, Homo sapiens
aagaaaagggaagaa

SEQ ID NO: 1880370 - DNA, 15 bp, Homo sapiens
agaaaagggaagaat

SEQ ID NO: 1880371 - DNA, 15 bp, Homo sapiens
gaaaagggaagaatt

SEQ ID NO: 1880372 - DNA, 15 bp, Homo sapiens
aaaagggaagaattg

SEQ ID NO: 1880373 - DNA, 15 bp, Homo sapiens
aaagggaagaattgc

SEQ ID NO: 1880374 - DNA, 15 bp, Homo sapiens
aagggaagaattgca

SEQ ID NO: 1880375 - DNA, 15 bp, Homo sapiens
agggaagaattgcat

SEQ ID NO: 1880376 - DNA, 15 bp, Homo sapiens
gggaagaattgcatc

SEQ ID NO: 1880377 - DNA, 15 bp, Homo sapiens
ggaagaattgcatca

SEQ ID NO: 1880378 - DNA, 15 bp, Homo sapiens
gaagaattgcatcaa

SEQ ID NO: 1880379 - DNA, 15 bp, Homo sapiens
aagaattgcatcaat

SEQ ID NO: 1880380 - DNA, 15 bp, Homo sapiens
agaattgcatcaatt

SEQ ID NO: 1880381 - DNA, 15 bp, Homo sapiens
gaattgcatcaatta

SEQ ID NO: 1880382 - DNA, 15 bp, Homo sapiens
aattgcatcaattat

SEQ ID NO: 1880383 - DNA, 15 bp, Homo sapiens
attgcatcaattatg

SEQ ID NO: 1880384 - DNA, 15 bp, Homo sapiens
ttgcatcaattatga

SEQ ID NO: 1880385 - DNA, 15 bp, Homo sapiens
tgcatcaattatgac

SEQ ID NO: 1880386 - DNA, 15 bp, Homo sapiens
gcatcaattatgaca

SEQ ID NO: 1880387 - DNA, 15 bp, Homo sapiens
catcaattatgacag

SEQ ID NO: 1880388 - DNA, 15 bp, Homo sapiens
atcaattatgacaga

SEQ ID NO: 1880389 - DNA, 15 bp, Homo sapiens
tcaattatgacagat

SEQ ID NO: 1880390 - DNA, 15 bp, Homo sapiens
caattatgacagata

SEQ ID NO: 1880391 - DNA, 15 bp, Homo sapiens
aattatgacagataa

SEQ ID NO: 1880392 - DNA, 15 bp, Homo sapiens
attatgacagataag

SEQ ID NO: 1880393 - DNA, 15 bp, Homo sapiens
ttatgacagataaga

SEQ ID NO: 1880394 - DNA, 15 bp, Homo sapiens
tatgacagataagag

SEQ ID NO: 1880395 - DNA, 15 bp, Homo sapiens
atgacagataagaga

SEQ ID NO: 1880396 - DNA, 15 bp, Homo sapiens
tgacagataagagat

SEQ ID NO: 1880397 - DNA, 15 bp, Homo sapiens
gacagataagagatt

SEQ ID NO: 1880398 - DNA, 15 bp, Homo sapiens
acagataagagatta

SEQ ID NO: 1880399 - DNA, 15 bp, Homo sapiens
cagataagagattaa

SEQ ID NO: 1880400 - DNA, 15 bp, Homo sapiens
agataagagattaac

SEQ ID NO: 1880401 - DNA, 15 bp, Homo sapiens
gataagagattaacg

SEQ ID NO: 1880402 - DNA, 15 bp, Homo sapiens
ataagagattaacgt

SEQ ID NO: 1880403 - DNA, 15 bp, Homo sapiens
taagagattaacgta

SEQ ID NO: 1880404 - DNA, 15 bp, Homo sapiens
aagagattaacgtac

SEQ ID NO: 1880405 - DNA, 15 bp, Homo sapiens
agagattaacgtact

SEQ ID NO: 1880406 - DNA, 15 bp, Homo sapiens
gagattaacgtactt

SEQ ID NO: 1880407 - DNA, 15 bp, Homo sapiens
agattaacgtactta

SEQ ID NO: 1880408 - DNA, 15 bp, Homo sapiens
gattaacgtacttac

SEQ ID NO: 1880409 - DNA, 15 bp, Homo sapiens
attaacgtacttact

SEQ ID NO: 1880410 - DNA, 15 bp, Homo sapiens
ttaacgtacttacta

SEQ ID NO: 1880411 - DNA, 15 bp, Homo sapiens
taacgtacttactaa

SEQ ID NO: 1880412 - DNA, 15 bp, Homo sapiens
aacgtacttactaag

SEQ ID NO: 1880413 - DNA, 15 bp, Homo sapiens
acgtacttactaaga

SEQ ID NO: 1880414 - DNA, 15 bp, Homo sapiens
cgtacttactaagag

SEQ ID NO: 1880415 - DNA, 15 bp, Homo sapiens
gtacttactaagagc

SEQ ID NO: 1880416 - DNA, 15 bp, Homo sapiens
tacttactaagagct

SEQ ID NO: 1880417 - DNA, 15 bp, Homo sapiens
acttactaagagctt

SEQ ID NO: 1880418 - DNA, 15 bp, Homo sapiens
cttactaagagcttt

SEQ ID NO: 1880419 - DNA, 15 bp, Homo sapiens
ttactaagagctttt

SEQ ID NO: 1880420 - DNA, 15 bp, Homo sapiens
tactaagagctttta

SEQ ID NO: 1880421 - DNA, 15 bp, Homo sapiens
actaagagcttttat

SEQ ID NO: 1880422 - DNA, 15 bp, Homo sapiens
ctaagagcttttata

SEQ ID NO: 1880423 - DNA, 15 bp, Homo sapiens
taagagcttttataa

SEQ ID NO: 1880424 - DNA, 15 bp, Homo sapiens
aagagcttttataaa

SEQ ID NO: 1880425 - DNA, 15 bp, Homo sapiens
agagcttttataaat

SEQ ID NO: 1880426 - DNA, 15 bp, Homo sapiens
gagcttttataaatt

SEQ ID NO: 1880427 - DNA, 15 bp, Homo sapiens
agcttttataaatta

SEQ ID NO: 1880428 - DNA, 15 bp, Homo sapiens
gcttttataaattag

SEQ ID NO: 1880429 - DNA, 15 bp, Homo sapiens
cttttataaattagt

SEQ ID NO: 1880430 - DNA, 15 bp, Homo sapiens
ttttataaattagtg

SEQ ID NO: 1880431 - DNA, 15 bp, Homo sapiens
tttataaattagtgc

SEQ ID NO: 1880432 - DNA, 15 bp, Homo sapiens
ttataaattagtgcc

SEQ ID NO: 1880433 - DNA, 15 bp, Homo sapiens
tataaattagtgcca

SEQ ID NO: 1880434 - DNA, 15 bp, Homo sapiens
ataaattagtgccat

SEQ ID NO: 1880435 - DNA, 15 bp, Homo sapiens
taaattagtgccatt

SEQ ID NO: 1880436 - DNA, 15 bp, Homo sapiens
aaattagtgccattc

SEQ ID NO: 1880437 - DNA, 15 bp, Homo sapiens
aattagtgccattcc

SEQ ID NO: 1880438 - DNA, 15 bp, Homo sapiens
attagtgccattcca

SEQ ID NO: 1880439 - DNA, 15 bp, Homo sapiens
ttagtgccattccaa

SEQ ID NO: 1880440 - DNA, 15 bp, Homo sapiens
tagtgccattccaat

SEQ ID NO: 1880441 - DNA, 15 bp, Homo sapiens
agtgccattccaata

SEQ ID NO: 1880442 - DNA, 15 bp, Homo sapiens
gtgccattccaatag

SEQ ID NO: 1880443 - DNA, 15 bp, Homo sapiens
tgccattccaataga

SEQ ID NO: 1880444 - DNA, 15 bp, Homo sapiens
gccattccaatagaa

SEQ ID NO: 1880445 - DNA, 15 bp, Homo sapiens
ccattccaatagaaa

SEQ ID NO: 1880446 - DNA, 15 bp, Homo sapiens
cattccaatagaaaa

SEQ ID NO: 1880447 - DNA, 15 bp, Homo sapiens
attccaatagaaaaa

SEQ ID NO: 1880448 - DNA, 15 bp, Homo sapiens
ttccaatagaaaaaa

SEQ ID NO: 1880449 - DNA, 15 bp, Homo sapiens
tccaatagaaaaaaa

SEQ ID NO: 1880450 - DNA, 15 bp, Homo sapiens
ccaatagaaaaaaag

SEQ ID NO: 1880451 - DNA, 15 bp, Homo sapiens
caatagaaaaaaagg

SEQ ID NO: 1880452 - DNA, 15 bp, Homo sapiens
aatagaaaaaaaggc

SEQ ID NO: 1880453 - DNA, 15 bp, Homo sapiens
atagaaaaaaaggca

SEQ ID NO: 1880454 - DNA, 15 bp, Homo sapiens
tagaaaaaaaggcaa

SEQ ID NO: 1880455 - DNA, 15 bp, Homo sapiens
agaaaaaaaggcaac

SEQ ID NO: 1880456 - DNA, 15 bp, Homo sapiens
gaaaaaaaggcaaca

SEQ ID NO: 1880457 - DNA, 15 bp, Homo sapiens
aaaaaaaggcaacac

SEQ ID NO: 1880458 - DNA, 15 bp, Homo sapiens
aaaaaaggcaacacg

SEQ ID NO: 1880459 - DNA, 15 bp, Homo sapiens
aaaaaggcaacacga

SEQ ID NO: 1880460 - DNA, 15 bp, Homo sapiens
aaaaggcaacacgaa

SEQ ID NO: 1880461 - DNA, 15 bp, Homo sapiens
aaaggcaacacgaac

SEQ ID NO: 1880462 - DNA, 15 bp, Homo sapiens
aaggcaacacgaact

SEQ ID NO: 1880463 - DNA, 15 bp, Homo sapiens
aggcaacacgaacta

SEQ ID NO: 1880464 - DNA, 15 bp, Homo sapiens
ggcaacacgaactag

SEQ ID NO: 1880465 - DNA, 15 bp, Homo sapiens
gcaacacgaactagt

SEQ ID NO: 1880466 - DNA, 15 bp, Homo sapiens
caacacgaactagta

SEQ ID NO: 1880467 - DNA, 15 bp, Homo sapiens
aacacgaactagtaa

SEQ ID NO: 1880468 - DNA, 15 bp, Homo sapiens
acacgaactagtaat

SEQ ID NO: 1880469 - DNA, 15 bp, Homo sapiens
cacgaactagtaatt

SEQ ID NO: 1880470 - DNA, 15 bp, Homo sapiens
acgaactagtaatta

SEQ ID NO: 1880471 - DNA, 15 bp, Homo sapiens
cgaactagtaattaa

SEQ ID NO: 1880472 - DNA, 15 bp, Homo sapiens
gaactagtaattaaa

SEQ ID NO: 1880473 - DNA, 15 bp, Homo sapiens
aactagtaattaaat

SEQ ID NO: 1880474 - DNA, 15 bp, Homo sapiens
actagtaattaaatt

SEQ ID NO: 1880475 - DNA, 15 bp, Homo sapiens
ctagtaattaaatta

SEQ ID NO: 1880476 - DNA, 15 bp, Homo sapiens
agtaattaaattaaa

SEQ ID NO: 1880477 - DNA, 15 bp, Homo sapiens
gtaattaaattaaat

SEQ ID NO: 1880478 - DNA, 15 bp, Homo sapiens
taattaaattaaatt

SEQ ID NO: 1880479 - DNA, 15 bp, Homo sapiens
aattaaattaaattt

SEQ ID NO: 1880480 - DNA, 15 bp, Homo sapiens
attaaattaaattta

SEQ ID NO: 1880481 - DNA, 15 bp, Homo sapiens
ttaaattaaatttaa

SEQ ID NO: 1880482 - DNA, 15 bp, Homo sapiens
taaattaaatttaaa

SEQ ID NO: 1880483 - DNA, 15 bp, Homo sapiens
aaattaaatttaaaa

SEQ ID NO: 1880484 - DNA, 15 bp, Homo sapiens
aattaaatttaaaaa

SEQ ID NO: 1880485 - DNA, 15 bp, Homo sapiens
attaaatttaaaaaa

SEQ ID NO: 1880486 - DNA, 15 bp, Homo sapiens
ttaaatttaaaaaat

SEQ ID NO: 1880487 - DNA, 15 bp, Homo sapiens
taaatttaaaaaatt

SEQ ID NO: 1880488 - DNA, 15 bp, Homo sapiens
aaatttaaaaaatta

SEQ ID NO: 1880489 - DNA, 15 bp, Homo sapiens
aatttaaaaaattaa

SEQ ID NO: 1880490 - DNA, 15 bp, Homo sapiens
atttaaaaaattaat

SEQ ID NO: 1880491 - DNA, 15 bp, Homo sapiens
tttaaaaaattaatt

SEQ ID NO: 1880492 - DNA, 15 bp, Homo sapiens
ttaaaaaattaatta

SEQ ID NO: 1880493 - DNA, 15 bp, Homo sapiens
taaaaaattaattaa

SEQ ID NO: 1880494 - DNA, 15 bp, Homo sapiens
aaaaaattaattaaa

SEQ ID NO: 1880495 - DNA, 15 bp, Homo sapiens
aaaaattaattaaag

SEQ ID NO: 1880496 - DNA, 15 bp, Homo sapiens
aaaattaattaaagc

SEQ ID NO: 1880497 - DNA, 15 bp, Homo sapiens
aaattaattaaagca

SEQ ID NO: 1880498 - DNA, 15 bp, Homo sapiens
aattaattaaagcat

SEQ ID NO: 1880499 - DNA, 15 bp, Homo sapiens
attaattaaagcatt

SEQ ID NO: 1880500 - DNA, 15 bp, Homo sapiens
ttaattaaagcatta

SEQ ID NO: 1880501 - DNA, 15 bp, Homo sapiens
taattaaagcattaa

SEQ ID NO: 1880502 - DNA, 15 bp, Homo sapiens
aattaaagcattaaa

SEQ ID NO: 1880503 - DNA, 15 bp, Homo sapiens
attaaagcattaaaa

SEQ ID NO: 1880504 - DNA, 15 bp, Homo sapiens
ttaaagcattaaaaa

SEQ ID NO: 1880505 - DNA, 15 bp, Homo sapiens
taaagcattaaaaac

SEQ ID NO: 1880506 - DNA, 15 bp, Homo sapiens
aaagcattaaaaact

SEQ ID NO: 1880507 - DNA, 15 bp, Homo sapiens
aagcattaaaaacta

SEQ ID NO: 1880508 - DNA, 15 bp, Homo sapiens
agcattaaaaactag

SEQ ID NO: 1880509 - DNA, 15 bp, Homo sapiens
gcattaaaaactaga

SEQ ID NO: 1880510 - DNA, 15 bp, Homo sapiens
cattaaaaactagag

SEQ ID NO: 1880511 - DNA, 15 bp, Homo sapiens
attaaaaactagaga

SEQ ID NO: 1880512 - DNA, 15 bp, Homo sapiens
ttaaaaactagagaa

SEQ ID NO: 1880513 - DNA, 15 bp, Homo sapiens
taaaaactagagaaa

SEQ ID NO: 1880514 - DNA, 15 bp, Homo sapiens
aaaaactagagaaaa

SEQ ID NO: 1880515 - DNA, 15 bp, Homo sapiens
aaaactagagaaaat

SEQ ID NO: 1880516 - DNA, 15 bp, Homo sapiens
aaactagagaaaata

SEQ ID NO: 1880517 - DNA, 15 bp, Homo sapiens
aactagagaaaatag

SEQ ID NO: 1880518 - DNA, 15 bp, Homo sapiens
actagagaaaataga

SEQ ID NO: 1880519 - DNA, 15 bp, Homo sapiens
ctagagaaaatagac

SEQ ID NO: 1880520 - DNA, 15 bp, Homo sapiens
tagagaaaatagaca

SEQ ID NO: 1880521 - DNA, 15 bp, Homo sapiens
agagaaaatagacat

SEQ ID NO: 1880522 - DNA, 15 bp, Homo sapiens
gagaaaatagacata

SEQ ID NO: 1880523 - DNA, 15 bp, Homo sapiens
agaaaatagacatag

SEQ ID NO: 1880524 - DNA, 15 bp, Homo sapiens
gaaaatagacataga

SEQ ID NO: 1880525 - DNA, 15 bp, Homo sapiens
aaaatagacatagaa

SEQ ID NO: 1880526 - DNA, 15 bp, Homo sapiens
aaatagacatagaat

SEQ ID NO: 1880527 - DNA, 15 bp, Homo sapiens
aatagacatagaatt

SEQ ID NO: 1880528 - DNA, 15 bp, Homo sapiens
atagacatagaattt

SEQ ID NO: 1880529 - DNA, 15 bp, Homo sapiens
tagacatagaatttt

SEQ ID NO: 1880530 - DNA, 15 bp, Homo sapiens
agacatagaatttta

SEQ ID NO: 1880531 - DNA, 15 bp, Homo sapiens
gacatagaattttaa

SEQ ID NO: 1880532 - DNA, 15 bp, Homo sapiens
acatagaattttaag

SEQ ID NO: 1880533 - DNA, 15 bp, Homo sapiens
catagaattttaagc

SEQ ID NO: 1880534 - DNA, 15 bp, Homo sapiens
atagaattttaagcc

SEQ ID NO: 1880535 - DNA, 15 bp, Homo sapiens
tagaattttaagcct

SEQ ID NO: 1880536 - DNA, 15 bp, Homo sapiens
agaattttaagccta

SEQ ID NO: 1880537 - DNA, 15 bp, Homo sapiens
gaattttaagcctag

SEQ ID NO: 1880538 - DNA, 15 bp, Homo sapiens
aattttaagcctagc

SEQ ID NO: 1880539 - DNA, 15 bp, Homo sapiens
attttaagcctagct

SEQ ID NO: 1880540 - DNA, 15 bp, Homo sapiens
ttttaagcctagcta

SEQ ID NO: 1880541 - DNA, 15 bp, Homo sapiens
tttaagcctagctag

SEQ ID NO: 1880542 - DNA, 15 bp, Homo sapiens
ttaagcctagctagt

SEQ ID NO: 1880543 - DNA, 15 bp, Homo sapiens
taagcctagctagta

SEQ ID NO: 1880544 - DNA, 15 bp, Homo sapiens
aagcctagctagtaa

SEQ ID NO: 1880545 - DNA, 15 bp, Homo sapiens
agcctagctagtaat

SEQ ID NO: 1880546 - DNA, 15 bp, Homo sapiens
gcctagctagtaatc

SEQ ID NO: 1880547 - DNA, 15 bp, Homo sapiens
cctagctagtaatca

SEQ ID NO: 1880548 - DNA, 15 bp, Homo sapiens
ctagctagtaatcaa

SEQ ID NO: 1880549 - DNA, 15 bp, Homo sapiens
tagctagtaatcaaa

SEQ ID NO: 1880550 - DNA, 15 bp, Homo sapiens
agctagtaatcaaat

SEQ ID NO: 1880551 - DNA, 15 bp, Homo sapiens
gctagtaatcaaata

SEQ ID NO: 1880552 - DNA, 15 bp, Homo sapiens
ctagtaatcaaataa

SEQ ID NO: 1880553 - DNA, 15 bp, Homo sapiens
tagtaatcaaataac

SEQ ID NO: 1880554 - DNA, 15 bp, Homo sapiens
agtaatcaaataacc

SEQ ID NO: 1880555 - DNA, 15 bp, Homo sapiens
gtaatcaaataacca

SEQ ID NO: 1880556 - DNA, 15 bp, Homo sapiens
taatcaaataaccaa

SEQ ID NO: 1880557 - DNA, 15 bp, Homo sapiens
aatcaaataaccaaa

SEQ ID NO: 1880558 - DNA, 15 bp, Homo sapiens
atcaaataaccaaac

SEQ ID NO: 1880559 - DNA, 15 bp, Homo sapiens
tcaaataaccaaact

SEQ ID NO: 1880560 - DNA, 15 bp, Homo sapiens
caaataaccaaactt

SEQ ID NO: 1880561 - DNA, 15 bp, Homo sapiens
aaataaccaaacttc

SEQ ID NO: 1880562 - DNA, 15 bp, Homo sapiens
aataaccaaacttcc

SEQ ID NO: 1880563 - DNA, 15 bp, Homo sapiens
ataaccaaacttccc

SEQ ID NO: 1880564 - DNA, 15 bp, Homo sapiens
taaccaaacttccct

SEQ ID NO: 1880565 - DNA, 15 bp, Homo sapiens
aaccaaacttccctc

SEQ ID NO: 1880566 - DNA, 15 bp, Homo sapiens
accaaacttccctcc

SEQ ID NO: 1880567 - DNA, 15 bp, Homo sapiens
ccaaacttccctcct

SEQ ID NO: 1880568 - DNA, 15 bp, Homo sapiens
caaacttccctcctc

SEQ ID NO: 1880569 - DNA, 15 bp, Homo sapiens
aaacttccctcctct

SEQ ID NO: 1880570 - DNA, 15 bp, Homo sapiens
aacttccctcctctc

SEQ ID NO: 1880571 - DNA, 15 bp, Homo sapiens
acttccctcctctcc

SEQ ID NO: 1880572 - DNA, 15 bp, Homo sapiens
cttccctcctctccc

SEQ ID NO: 1880573 - DNA, 15 bp, Homo sapiens
ttccctcctctcccc

SEQ ID NO: 1880574 - DNA, 15 bp, Homo sapiens
tccctcctctcccct

SEQ ID NO: 1880575 - DNA, 15 bp, Homo sapiens
ccctcctctcccctc

SEQ ID NO: 1880576 - DNA, 15 bp, Homo sapiens
cctcctctcccctcc

SEQ ID NO: 1880577 - DNA, 15 bp, Homo sapiens
ctcctctcccctccc

SEQ ID NO: 1880578 - DNA, 15 bp, Homo sapiens
tcctctcccctcccc

SEQ ID NO: 1880579 - DNA, 15 bp, Homo sapiens
cctctcccctcccct

SEQ ID NO: 1880580 - DNA, 15 bp, Homo sapiens
ctctcccctcccctc

SEQ ID NO: 1880581 - DNA, 15 bp, Homo sapiens
tctcccctcccctct

SEQ ID NO: 1880582 - DNA, 15 bp, Homo sapiens
ctcccctcccctctc

SEQ ID NO: 1880583 - DNA, 15 bp, Homo sapiens
tcccctcccctctct

SEQ ID NO: 1880584 - DNA, 15 bp, Homo sapiens
cccctcccctctctt

SEQ ID NO: 1880585 - DNA, 15 bp, Homo sapiens
ccctcccctctcttc

SEQ ID NO: 1880586 - DNA, 15 bp, Homo sapiens
cctcccctctcttcc

SEQ ID NO: 1880587 - DNA, 15 bp, Homo sapiens
ctcccctctcttccc

SEQ ID NO: 1880588 - DNA, 15 bp, Homo sapiens
tcccctctcttccct

SEQ ID NO: 1880589 - DNA, 15 bp, Homo sapiens
cccctctcttccctt

SEQ ID NO: 1880590 - DNA, 15 bp, Homo sapiens
ccctctcttcccttc

SEQ ID NO: 1880591 - DNA, 15 bp, Homo sapiens
cctctcttcccttct

SEQ ID NO: 1880592 - DNA, 15 bp, Homo sapiens
ctctcttcccttctt

SEQ ID NO: 1880593 - DNA, 15 bp, Homo sapiens
tctcttcccttcttc

SEQ ID NO: 1880594 - DNA, 15 bp, Homo sapiens
ctcttcccttcttct

SEQ ID NO: 1880595 - DNA, 15 bp, Homo sapiens
tcttcccttcttctc

SEQ ID NO: 1880596 - DNA, 15 bp, Homo sapiens
cttcccttcttctcc

SEQ ID NO: 1880597 - DNA, 15 bp, Homo sapiens
ttcccttcttctccc

SEQ ID NO: 1880598 - DNA, 15 bp, Homo sapiens
tcccttcttctccct

SEQ ID NO: 1880599 - DNA, 15 bp, Homo sapiens
cccttcttctccctc

SEQ ID NO: 1880600 - DNA, 15 bp, Homo sapiens
ccttcttctccctcc

SEQ ID NO: 1880601 - DNA, 15 bp, Homo sapiens
cttcttctccctccc

SEQ ID NO: 1880602 - DNA, 15 bp, Homo sapiens
ttcttctccctcccc

SEQ ID NO: 1880603 - DNA, 15 bp, Homo sapiens
tcttctccctccccc

SEQ ID NO: 1880604 - DNA, 15 bp, Homo sapiens
cttctccctccccct

SEQ ID NO: 1880605 - DNA, 15 bp, Homo sapiens
ttctccctccccctt

SEQ ID NO: 1880606 - DNA, 15 bp, Homo sapiens
tctccctcccccttg

SEQ ID NO: 1880607 - DNA, 15 bp, Homo sapiens
ctccctcccccttgt

SEQ ID NO: 1880608 - DNA, 15 bp, Homo sapiens
tccctcccccttgtt

SEQ ID NO: 1880609 - DNA, 15 bp, Homo sapiens
ccctcccccttgttt

SEQ ID NO: 1880610 - DNA, 15 bp, Homo sapiens
cctcccccttgtttt

SEQ ID NO: 1880611 - DNA, 15 bp, Homo sapiens
ctcccccttgttttc

SEQ ID NO: 1880612 - DNA, 15 bp, Homo sapiens
tcccccttgttttct

SEQ ID NO: 1880613 - DNA, 15 bp, Homo sapiens
cccccttgttttctt

SEQ ID NO: 1880614 - DNA, 15 bp, Homo sapiens
ccccttgttttcttt

SEQ ID NO: 1880615 - DNA, 15 bp, Homo sapiens
cccttgttttctttt

SEQ ID NO: 1880616 - DNA, 15 bp, Homo sapiens
ccttgttttcttttc

SEQ ID NO: 1880617 - DNA, 15 bp, Homo sapiens
cttgttttcttttcc

SEQ ID NO: 1880618 - DNA, 15 bp, Homo sapiens
ttgttttcttttcct

SEQ ID NO: 1880619 - DNA, 15 bp, Homo sapiens
tgttttcttttcctt

SEQ ID NO: 1880620 - DNA, 15 bp, Homo sapiens
gttttcttttccttt

SEQ ID NO: 1880621 - DNA, 15 bp, Homo sapiens
ttttcttttcctttc

SEQ ID NO: 1880622 - DNA, 15 bp, Homo sapiens
cttttcctttctttt

SEQ ID NO: 1880623 - DNA, 15 bp, Homo sapiens
ttttcctttcttttt

SEQ ID NO: 1880624 - DNA, 15 bp, Homo sapiens
tttcctttctttttt

SEQ ID NO: 1880625 - DNA, 15 bp, Homo sapiens
ttcctttcttttttc

SEQ ID NO: 1880626 - DNA, 15 bp, Homo sapiens
tcctttcttttttct

SEQ ID NO: 1880627 - DNA, 15 bp, Homo sapiens
cctttcttttttctt

SEQ ID NO: 1880628 - DNA, 15 bp, Homo sapiens
tcttttttcttttct

SEQ ID NO: 1880629 - DNA, 15 bp, Homo sapiens
cttttttcttttctt

SEQ ID NO: 1880630 - DNA, 15 bp, Homo sapiens
tttttcttttctttc

SEQ ID NO: 1880631 - DNA, 15 bp, Homo sapiens
ttcttttctttcttg

SEQ ID NO: 1880632 - DNA, 15 bp, Homo sapiens
tcttttctttcttga

SEQ ID NO: 1880633 - DNA, 15 bp, Homo sapiens
cttttctttcttgag

SEQ ID NO: 1880634 - DNA, 15 bp, Homo sapiens
ttttctttcttgagc

SEQ ID NO: 1880635 - DNA, 15 bp, Homo sapiens
tttctttcttgagca

SEQ ID NO: 1880636 - DNA, 15 bp, Homo sapiens
ttctttcttgagcag

SEQ ID NO: 1880637 - DNA, 15 bp, Homo sapiens
tctttcttgagcagg

SEQ ID NO: 1880638 - DNA, 15 bp, Homo sapiens
ctttcttgagcaggg

SEQ ID NO: 1880639 - DNA, 15 bp, Homo sapiens
tttcttgagcagggg

SEQ ID NO: 1880640 - DNA, 15 bp, Homo sapiens
ttcttgagcaggggc

SEQ ID NO: 1880641 - DNA, 15 bp, Homo sapiens
tcttgagcaggggca

SEQ ID NO: 1880642 - DNA, 15 bp, Homo sapiens
cttgagcaggggcag

SEQ ID NO: 1880643 - DNA, 15 bp, Homo sapiens
ttgagcaggggcagg

SEQ ID NO: 1880644 - DNA, 15 bp, Homo sapiens
tgagcaggggcaggg

SEQ ID NO: 1880645 - DNA, 15 bp, Homo sapiens
gagcaggggcaggga

SEQ ID NO: 1880646 - DNA, 15 bp, Homo sapiens
agcaggggcagggag

SEQ ID NO: 1880647 - DNA, 15 bp, Homo sapiens
caggggcagggagga

SEQ ID NO: 1880648 - DNA, 15 bp, Homo sapiens
aggggcagggaggaa

SEQ ID NO: 1880649 - DNA, 15 bp, Homo sapiens
ggggcagggaggaat

SEQ ID NO: 1880650 - DNA, 15 bp, Homo sapiens
gggcagggaggaatg

SEQ ID NO: 1880651 - DNA, 15 bp, Homo sapiens
ggcagggaggaatgg

SEQ ID NO: 1880652 - DNA, 15 bp, Homo sapiens
gcagggaggaatggt

SEQ ID NO: 1880653 - DNA, 15 bp, Homo sapiens
cagggaggaatggtt

SEQ ID NO: 1880654 - DNA, 15 bp, Homo sapiens
agggaggaatggttt

SEQ ID NO: 1880655 - DNA, 15 bp, Homo sapiens
gggaggaatggtttc

SEQ ID NO: 1880656 - DNA, 15 bp, Homo sapiens
ggaggaatggtttct

SEQ ID NO: 1880657 - DNA, 15 bp, Homo sapiens
gaggaatggtttctt

SEQ ID NO: 1880658 - DNA, 15 bp, Homo sapiens
aggaatggtttcttt

SEQ ID NO: 1880659 - DNA, 15 bp, Homo sapiens
ggaatggtttctttc

SEQ ID NO: 1880660 - DNA, 15 bp, Homo sapiens
gaatggtttctttct

SEQ ID NO: 1880661 - DNA, 15 bp, Homo sapiens
aatggtttctttctt

SEQ ID NO: 1880662 - DNA, 15 bp, Homo sapiens
atggtttctttcttt

SEQ ID NO: 1880663 - DNA, 15 bp, Homo sapiens
tggtttctttctttt

SEQ ID NO: 1880664 - DNA, 15 bp, Homo sapiens
ggtttctttcttttt

SEQ ID NO: 1880665 - DNA, 15 bp, Homo sapiens
gtttctttctttttt

SEQ ID NO: 1880666 - DNA, 15 bp, Homo sapiens
tttcttttttttgtt

SEQ ID NO: 1880667 - DNA, 15 bp, Homo sapiens
ttcttttttttgttt

SEQ ID NO: 1880668 - DNA, 15 bp, Homo sapiens
tcttttttttgtttt

SEQ ID NO: 1880669 - DNA, 15 bp, Homo sapiens
cttttttttgtttta

SEQ ID NO: 1880670 - DNA, 15 bp, Homo sapiens
ttttttttgttttat

SEQ ID NO: 1880671 - DNA, 15 bp, Homo sapiens
tttttttgttttatt

SEQ ID NO: 1880672 - DNA, 15 bp, Homo sapiens
ttttttgttttattt

SEQ ID NO: 1880673 - DNA, 15 bp, Homo sapiens
ttttgttttattttc

SEQ ID NO: 1880674 - DNA, 15 bp, Homo sapiens
tttgttttattttct

SEQ ID NO: 1880675 - DNA, 15 bp, Homo sapiens
ttgttttattttctg

SEQ ID NO: 1880676 - DNA, 15 bp, Homo sapiens
tgttttattttctgt

SEQ ID NO: 1880677 - DNA, 15 bp, Homo sapiens
gttttattttctgta

SEQ ID NO: 1880678 - DNA, 15 bp, Homo sapiens
ttttattttctgtat

SEQ ID NO: 1880679 - DNA, 15 bp, Homo sapiens
tttattttctgtatt

SEQ ID NO: 1880680 - DNA, 15 bp, Homo sapiens
ttattttctgtattt

SEQ ID NO: 1880681 - DNA, 15 bp, Homo sapiens
tattttctgtatttt

SEQ ID NO: 1880682 - DNA, 15 bp, Homo sapiens
attttctgtatttta

SEQ ID NO: 1880683 - DNA, 15 bp, Homo sapiens
ttttctgtattttaa

SEQ ID NO: 1880684 - DNA, 15 bp, Homo sapiens
tttctgtattttaaa

SEQ ID NO: 1880685 - DNA, 15 bp, Homo sapiens
ttctgtattttaaaa

SEQ ID NO: 1880686 - DNA, 15 bp, Homo sapiens
tctgtattttaaaaa

SEQ ID NO: 1880687 - DNA, 15 bp, Homo sapiens
ctgtattttaaaaaa

SEQ ID NO: 1880688 - DNA, 15 bp, Homo sapiens
tgtattttaaaaaat

SEQ ID NO: 1880689 - DNA, 15 bp, Homo sapiens
gtattttaaaaaatg

SEQ ID NO: 1880690 - DNA, 15 bp, Homo sapiens
tattttaaaaaatgt

SEQ ID NO: 1880691 - DNA, 15 bp, Homo sapiens
tttaaaaaatgtttt

SEQ ID NO: 1880692 - DNA, 15 bp, Homo sapiens
ttaaaaaatgttttg

SEQ ID NO: 1880693 - DNA, 15 bp, Homo sapiens
taaaaaatgttttgg

SEQ ID NO: 1880694 - DNA, 15 bp, Homo sapiens
aaaaaatgttttggg

SEQ ID NO: 1880695 - DNA, 15 bp, Homo sapiens
aaaaatgttttggga

SEQ ID NO: 1880696 - DNA, 15 bp, Homo sapiens
aaaatgttttgggaa

SEQ ID NO: 1880697 - DNA, 15 bp, Homo sapiens
aaatgttttgggaaa

SEQ ID NO: 1880698 - DNA, 15 bp, Homo sapiens
aatgttttgggaaaa

SEQ ID NO: 1880699 - DNA, 15 bp, Homo sapiens
atgttttgggaaaac

SEQ ID NO: 1880700 - DNA, 15 bp, Homo sapiens
tgttttgggaaaaca

SEQ ID NO: 1880701 - DNA, 15 bp, Homo sapiens
gttttgggaaaacaa

SEQ ID NO: 1880702 - DNA, 15 bp, Homo sapiens
ttttgggaaaacaac

SEQ ID NO: 1880703 - DNA, 15 bp, Homo sapiens
tttgggaaaacaact

SEQ ID NO: 1880704 - DNA, 15 bp, Homo sapiens
ttgggaaaacaactt

SEQ ID NO: 1880705 - DNA, 15 bp, Homo sapiens
tgggaaaacaacttt

SEQ ID NO: 1880706 - DNA, 15 bp, Homo sapiens
gggaaaacaactttg

SEQ ID NO: 1880707 - DNA, 15 bp, Homo sapiens
ggaaaacaactttga

SEQ ID NO: 1880708 - DNA, 15 bp, Homo sapiens
gaaaacaactttgaa

SEQ ID NO: 1880709 - DNA, 15 bp, Homo sapiens
aaaacaactttgaaa

SEQ ID NO: 1880710 - DNA, 15 bp, Homo sapiens
aaacaactttgaaaa

SEQ ID NO: 1880711 - DNA, 15 bp, Homo sapiens
aacaactttgaaaag

SEQ ID NO: 1880712 - DNA, 15 bp, Homo sapiens
acaactttgaaaagc

SEQ ID NO: 1880713 - DNA, 15 bp, Homo sapiens
caactttgaaaagca

SEQ ID NO: 1880714 - DNA, 15 bp, Homo sapiens
aactttgaaaagcaa

SEQ ID NO: 1880715 - DNA, 15 bp, Homo sapiens
actttgaaaagcaaa

SEQ ID NO: 1880716 - DNA, 15 bp, Homo sapiens
ctttgaaaagcaaaa

SEQ ID NO: 1880717 - DNA, 15 bp, Homo sapiens
tttgaaaagcaaaag

SEQ ID NO: 1880718 - DNA, 15 bp, Homo sapiens
ttgaaaagcaaaagc

SEQ ID NO: 1880719 - DNA, 15 bp, Homo sapiens
tgaaaagcaaaagca

SEQ ID NO: 1880720 - DNA, 15 bp, Homo sapiens
gaaaagcaaaagcaa

SEQ ID NO: 1880721 - DNA, 15 bp, Homo sapiens
aaaagcaaaagcaat

SEQ ID NO: 1880722 - DNA, 15 bp, Homo sapiens
aaagcaaaagcaatc

SEQ ID NO: 1880723 - DNA, 15 bp, Homo sapiens
aagcaaaagcaatct

SEQ ID NO: 1880724 - DNA, 15 bp, Homo sapiens
agcaaaagcaatctc

SEQ ID NO: 1880725 - DNA, 15 bp, Homo sapiens
gcaaaagcaatctcc

SEQ ID NO: 1880726 - DNA, 15 bp, Homo sapiens
caaaagcaatctcca

SEQ ID NO: 1880727 - DNA, 15 bp, Homo sapiens
aaaagcaatctccat

SEQ ID NO: 1880728 - DNA, 15 bp, Homo sapiens
aaagcaatctccatc

SEQ ID NO: 1880729 - DNA, 15 bp, Homo sapiens
aagcaatctccatcc

SEQ ID NO: 1880730 - DNA, 15 bp, Homo sapiens
agcaatctccatcca

SEQ ID NO: 1880731 - DNA, 15 bp, Homo sapiens
gcaatctccatccat

SEQ ID NO: 1880732 - DNA, 15 bp, Homo sapiens
caatctccatccatt

SEQ ID NO: 1880733 - DNA, 15 bp, Homo sapiens
aatctccatccattt

SEQ ID NO: 1880734 - DNA, 15 bp, Homo sapiens
atctccatccatttt

SEQ ID NO: 1880735 - DNA, 15 bp, Homo sapiens
tctccatccattttg

SEQ ID NO: 1880736 - DNA, 15 bp, Homo sapiens
ctccatccattttgg

SEQ ID NO: 1880737 - DNA, 15 bp, Homo sapiens
tccatccattttggg

SEQ ID NO: 1880738 - DNA, 15 bp, Homo sapiens
ccatccattttgggg

SEQ ID NO: 1880739 - DNA, 15 bp, Homo sapiens
catccattttgggga

SEQ ID NO: 1880740 - DNA, 15 bp, Homo sapiens
atccattttggggat

SEQ ID NO: 1880741 - DNA, 15 bp, Homo sapiens
tccattttggggata

SEQ ID NO: 1880742 - DNA, 15 bp, Homo sapiens
ccattttggggatac

SEQ ID NO: 1880743 - DNA, 15 bp, Homo sapiens
cattttggggataca

SEQ ID NO: 1880744 - DNA, 15 bp, Homo sapiens
attttggggatacac

SEQ ID NO: 1880745 - DNA, 15 bp, Homo sapiens
ttttggggatacaca

SEQ ID NO: 1880746 - DNA, 15 bp, Homo sapiens
tttggggatacacat

SEQ ID NO: 1880747 - DNA, 15 bp, Homo sapiens
ttggggatacacatt

SEQ ID NO: 1880748 - DNA, 15 bp, Homo sapiens
tggggatacacattt

SEQ ID NO: 1880749 - DNA, 15 bp, Homo sapiens
ggggatacacatttg

SEQ ID NO: 1880750 - DNA, 15 bp, Homo sapiens
gggatacacatttgt

SEQ ID NO: 1880751 - DNA, 15 bp, Homo sapiens
ggatacacatttgtt

SEQ ID NO: 1880752 - DNA, 15 bp, Homo sapiens
gatacacatttgttt

SEQ ID NO: 1880753 - DNA, 15 bp, Homo sapiens
atacacatttgtttg

SEQ ID NO: 1880754 - DNA, 15 bp, Homo sapiens
tacacatttgtttgt

SEQ ID NO: 1880755 - DNA, 15 bp, Homo sapiens
acacatttgtttgtt

SEQ ID NO: 1880756 - DNA, 15 bp, Homo sapiens
cacatttgtttgttt

SEQ ID NO: 1880757 - DNA, 15 bp, Homo sapiens
acatttgtttgtttc

SEQ ID NO: 1880758 - DNA, 15 bp, Homo sapiens
catttgtttgtttct

SEQ ID NO: 1880759 - DNA, 15 bp, Homo sapiens
atttgtttgtttcta

SEQ ID NO: 1880760 - DNA, 15 bp, Homo sapiens
tttgtttgtttctat

SEQ ID NO: 1880761 - DNA, 15 bp, Homo sapiens
ttgtttgtttctata

SEQ ID NO: 1880762 - DNA, 15 bp, Homo sapiens
tgtttgtttctatag

SEQ ID NO: 1880763 - DNA, 15 bp, Homo sapiens
gtttgtttctatagt

SEQ ID NO: 1880764 - DNA, 15 bp, Homo sapiens
tttgtttctatagta

SEQ ID NO: 1880765 - DNA, 15 bp, Homo sapiens
ttgtttctatagtaa

SEQ ID NO: 1880766 - DNA, 15 bp, Homo sapiens
tgtttctatagtaac

SEQ ID NO: 1880767 - DNA, 15 bp, Homo sapiens
gtttctatagtaaca

SEQ ID NO: 1880768 - DNA, 15 bp, Homo sapiens
tttctatagtaacat

SEQ ID NO: 1880769 - DNA, 15 bp, Homo sapiens
ttctatagtaacatg

SEQ ID NO: 1880770 - DNA, 15 bp, Homo sapiens
tctatagtaacatga

SEQ ID NO: 1880771 - DNA, 15 bp, Homo sapiens
ctatagtaacatgat

SEQ ID NO: 1880772 - DNA, 15 bp, Homo sapiens
tatagtaacatgatg

SEQ ID NO: 1880773 - DNA, 15 bp, Homo sapiens
atagtaacatgatgg

SEQ ID NO: 1880774 - DNA, 15 bp, Homo sapiens
tagtaacatgatggt

SEQ ID NO: 1880775 - DNA, 15 bp, Homo sapiens
agtaacatgatggtt

SEQ ID NO: 1880776 - DNA, 15 bp, Homo sapiens
gtaacatgatggttg

SEQ ID NO: 1880777 - DNA, 15 bp, Homo sapiens
taacatgatggttgg

SEQ ID NO: 1880778 - DNA, 15 bp, Homo sapiens
aacatgatggttggc

SEQ ID NO: 1880779 - DNA, 15 bp, Homo sapiens
acatgatggttggcc

SEQ ID NO: 1880780 - DNA, 15 bp, Homo sapiens
catgatggttggcct

SEQ ID NO: 1880781 - DNA, 15 bp, Homo sapiens
atgatggttggcctt

SEQ ID NO: 1880782 - DNA, 15 bp, Homo sapiens
tgatggttggccttc

SEQ ID NO: 1880783 - DNA, 15 bp, Homo sapiens
gatggttggccttcc

SEQ ID NO: 1880784 - DNA, 15 bp, Homo sapiens
atggttggccttcca

SEQ ID NO: 1880785 - DNA, 15 bp, Homo sapiens
tggttggccttccag

SEQ ID NO: 1880786 - DNA, 15 bp, Homo sapiens
ggttggccttccagt

SEQ ID NO: 1880787 - DNA, 15 bp, Homo sapiens
gttggccttccagtg

SEQ ID NO: 1880788 - DNA, 15 bp, Homo sapiens
ttggccttccagtgg

SEQ ID NO: 1880789 - DNA, 15 bp, Homo sapiens
tggccttccagtggt

SEQ ID NO: 1880790 - DNA, 15 bp, Homo sapiens
ggccttccagtggta

SEQ ID NO: 1880791 - DNA, 15 bp, Homo sapiens
gccttccagtggtaa

SEQ ID NO: 1880792 - DNA, 15 bp, Homo sapiens
ccttccagtggtaat

SEQ ID NO: 1880793 - DNA, 15 bp, Homo sapiens
cttccagtggtaata

SEQ ID NO: 1880794 - DNA, 15 bp, Homo sapiens
ttccagtggtaatac

SEQ ID NO: 1880795 - DNA, 15 bp, Homo sapiens
tccagtggtaatact

SEQ ID NO: 1880796 - DNA, 15 bp, Homo sapiens
ccagtggtaatactc

SEQ ID NO: 1880797 - DNA, 15 bp, Homo sapiens
cagtggtaatactca

SEQ ID NO: 1880798 - DNA, 15 bp, Homo sapiens
agtggtaatactcat

SEQ ID NO: 1880799 - DNA, 15 bp, Homo sapiens
gtggtaatactcatt

SEQ ID NO: 1880800 - DNA, 15 bp, Homo sapiens
tggtaatactcattt

SEQ ID NO: 1880801 - DNA, 15 bp, Homo sapiens
ggtaatactcatttg

SEQ ID NO: 1880802 - DNA, 15 bp, Homo sapiens
gtaatactcatttgt

SEQ ID NO: 1880803 - DNA, 15 bp, Homo sapiens
taatactcatttgta

SEQ ID NO: 1880804 - DNA, 15 bp, Homo sapiens
aatactcatttgtaa

SEQ ID NO: 1880805 - DNA, 15 bp, Homo sapiens
atactcatttgtaat

SEQ ID NO: 1880806 - DNA, 15 bp, Homo sapiens
tactcatttgtaata

SEQ ID NO: 1880807 - DNA, 15 bp, Homo sapiens
actcatttgtaatac

SEQ ID NO: 1880808 - DNA, 15 bp, Homo sapiens
ctcatttgtaataca

SEQ ID NO: 1880809 - DNA, 15 bp, Homo sapiens
tcatttgtaatacaa

SEQ ID NO: 1880810 - DNA, 15 bp, Homo sapiens
catttgtaatacaac

SEQ ID NO: 1880811 - DNA, 15 bp, Homo sapiens
atttgtaatacaact

SEQ ID NO: 1880812 - DNA, 15 bp, Homo sapiens
tttgtaatacaactg

SEQ ID NO: 1880813 - DNA, 15 bp, Homo sapiens
ttgtaatacaactgg

SEQ ID NO: 1880814 - DNA, 15 bp, Homo sapiens
tgtaatacaactggg

SEQ ID NO: 1880815 - DNA, 15 bp, Homo sapiens
gtaatacaactgggc

SEQ ID NO: 1880816 - DNA, 15 bp, Homo sapiens
taatacaactgggcc

SEQ ID NO: 1880817 - DNA, 15 bp, Homo sapiens
aatacaactgggcca

SEQ ID NO: 1880818 - DNA, 15 bp, Homo sapiens
atacaactgggccag

SEQ ID NO: 1880819 - DNA, 15 bp, Homo sapiens
tacaactgggccaga

SEQ ID NO: 1880820 - DNA, 15 bp, Homo sapiens
acaactgggccagag

SEQ ID NO: 1880821 - DNA, 15 bp, Homo sapiens
caactgggccagagg

SEQ ID NO: 1880822 - DNA, 15 bp, Homo sapiens
aactgggccagaggt

SEQ ID NO: 1880823 - DNA, 15 bp, Homo sapiens
actgggccagaggta

SEQ ID NO: 1880824 - DNA, 15 bp, Homo sapiens
ctgggccagaggtac

SEQ ID NO: 1880825 - DNA, 15 bp, Homo sapiens
tgggccagaggtacc

SEQ ID NO: 1880826 - DNA, 15 bp, Homo sapiens
gggccagaggtacct

SEQ ID NO: 1880827 - DNA, 15 bp, Homo sapiens
ggccagaggtacctt

SEQ ID NO: 1880828 - DNA, 15 bp, Homo sapiens
gccagaggtaccttc

SEQ ID NO: 1880829 - DNA, 15 bp, Homo sapiens
ccagaggtaccttct

SEQ ID NO: 1880830 - DNA, 15 bp, Homo sapiens
cagaggtaccttctg

SEQ ID NO: 1880831 - DNA, 15 bp, Homo sapiens
agaggtaccttctga

SEQ ID NO: 1880832 - DNA, 15 bp, Homo sapiens
gaggtaccttctgag

SEQ ID NO: 1880833 - DNA, 15 bp, Homo sapiens
aggtaccttctgagt

SEQ ID NO: 1880834 - DNA, 15 bp, Homo sapiens
ggtaccttctgagtt

SEQ ID NO: 1880835 - DNA, 15 bp, Homo sapiens
gtaccttctgagttc

SEQ ID NO: 1880836 - DNA, 15 bp, Homo sapiens
taccttctgagttca

SEQ ID NO: 1880837 - DNA, 15 bp, Homo sapiens
accttctgagttcat

SEQ ID NO: 1880838 - DNA, 15 bp, Homo sapiens
ccttctgagttcatg

SEQ ID NO: 1880839 - DNA, 15 bp, Homo sapiens
cttctgagttcatgg

SEQ ID NO: 1880840 - DNA, 15 bp, Homo sapiens
ttctgagttcatggc

SEQ ID NO: 1880841 - DNA, 15 bp, Homo sapiens
tctgagttcatggca

SEQ ID NO: 1880842 - DNA, 15 bp, Homo sapiens
ctgagttcatggcac

SEQ ID NO: 1880843 - DNA, 15 bp, Homo sapiens
tgagttcatggcaca

SEQ ID NO: 1880844 - DNA, 15 bp, Homo sapiens
gagttcatggcacag

SEQ ID NO: 1880845 - DNA, 15 bp, Homo sapiens
agttcatggcacagg

SEQ ID NO: 1880846 - DNA, 15 bp, Homo sapiens
gttcatggcacagga

SEQ ID NO: 1880847 - DNA, 15 bp, Homo sapiens
ttcatggcacaggat

SEQ ID NO: 1880848 - DNA, 15 bp, Homo sapiens
tcatggcacaggatt

SEQ ID NO: 1880849 - DNA, 15 bp, Homo sapiens
catggcacaggattt

SEQ ID NO: 1880850 - DNA, 15 bp, Homo sapiens
atggcacaggatttc

SEQ ID NO: 1880851 - DNA, 15 bp, Homo sapiens
tggcacaggatttct

SEQ ID NO: 1880852 - DNA, 15 bp, Homo sapiens
gcacaggatttctta

SEQ ID NO: 1880853 - DNA, 15 bp, Homo sapiens
cacaggatttcttag

SEQ ID NO: 1880854 - DNA, 15 bp, Homo sapiens
acaggatttcttaga

SEQ ID NO: 1880855 - DNA, 15 bp, Homo sapiens
caggatttcttagag

SEQ ID NO: 1880856 - DNA, 15 bp, Homo sapiens
aggatttcttagagt

SEQ ID NO: 1880857 - DNA, 15 bp, Homo sapiens
ggatttcttagagtg

SEQ ID NO: 1880858 - DNA, 15 bp, Homo sapiens
gatttcttagagtga

SEQ ID NO: 1880859 - DNA, 15 bp, Homo sapiens
atttcttagagtgag

SEQ ID NO: 1880860 - DNA, 15 bp, Homo sapiens
tttcttagagtgagg

SEQ ID NO: 1880861 - DNA, 15 bp, Homo sapiens
ttcttagagtgaggt

SEQ ID NO: 1880862 - DNA, 15 bp, Homo sapiens
tcttagagtgaggtt

SEQ ID NO: 1880863 - DNA, 15 bp, Homo sapiens
cttagagtgaggttg

SEQ ID NO: 1880864 - DNA, 15 bp, Homo sapiens
ttagagtgaggttga

SEQ ID NO: 1880865 - DNA, 15 bp, Homo sapiens
tagagtgaggttgac

SEQ ID NO: 1880866 - DNA, 15 bp, Homo sapiens
agagtgaggttgact

SEQ ID NO: 1880867 - DNA, 15 bp, Homo sapiens
gagtgaggttgactg

SEQ ID NO: 1880868 - DNA, 15 bp, Homo sapiens
agtgaggttgactga

SEQ ID NO: 1880869 - DNA, 15 bp, Homo sapiens
gtgaggttgactgac

SEQ ID NO: 1880870 - DNA, 15 bp, Homo sapiens
tgaggttgactgact

SEQ ID NO: 1880871 - DNA, 15 bp, Homo sapiens
gaggttgactgactc

SEQ ID NO: 1880872 - DNA, 15 bp, Homo sapiens
aggttgactgactca

SEQ ID NO: 1880873 - DNA, 15 bp, Homo sapiens
ggttgactgactcat

SEQ ID NO: 1880874 - DNA, 15 bp, Homo sapiens
gttgactgactcatt

SEQ ID NO: 1880875 - DNA, 15 bp, Homo sapiens
ttgactgactcattc

SEQ ID NO: 1880876 - DNA, 15 bp, Homo sapiens
tgactgactcattca

SEQ ID NO: 1880877 - DNA, 15 bp, Homo sapiens
gactgactcattcaa

SEQ ID NO: 1880878 - DNA, 15 bp, Homo sapiens
actgactcattcaaa

SEQ ID NO: 1880879 - DNA, 15 bp, Homo sapiens
ctgactcattcaaac

SEQ ID NO: 1880880 - DNA, 15 bp, Homo sapiens
tgactcattcaaacc

SEQ ID NO: 1880881 - DNA, 15 bp, Homo sapiens
gactcattcaaacct

SEQ ID NO: 1880882 - DNA, 15 bp, Homo sapiens
actcattcaaaccta

SEQ ID NO: 1880883 - DNA, 15 bp, Homo sapiens
ctcattcaaacctag

SEQ ID NO: 1880884 - DNA, 15 bp, Homo sapiens
tcattcaaacctagg

SEQ ID NO: 1880885 - DNA, 15 bp, Homo sapiens
cattcaaacctagga

SEQ ID NO: 1880886 - DNA, 15 bp, Homo sapiens
attcaaacctaggac

SEQ ID NO: 1880887 - DNA, 15 bp, Homo sapiens
ttcaaacctaggact

SEQ ID NO: 1880888 - DNA, 15 bp, Homo sapiens
tcaaacctaggactg

SEQ ID NO: 1880889 - DNA, 15 bp, Homo sapiens
caaacctaggactgt

SEQ ID NO: 1880890 - DNA, 15 bp, Homo sapiens
aaacctaggactgta

SEQ ID NO: 1880891 - DNA, 15 bp, Homo sapiens
aacctaggactgtag

SEQ ID NO: 1880892 - DNA, 15 bp, Homo sapiens
acctaggactgtagc

SEQ ID NO: 1880893 - DNA, 15 bp, Homo sapiens
cctaggactgtagct

SEQ ID NO: 1880894 - DNA, 15 bp, Homo sapiens
ctaggactgtagctt

SEQ ID NO: 1880895 - DNA, 15 bp, Homo sapiens
taggactgtagcttc

SEQ ID NO: 1880896 - DNA, 15 bp, Homo sapiens
aggactgtagcttca

SEQ ID NO: 1880897 - DNA, 15 bp, Homo sapiens
ggactgtagcttcat

SEQ ID NO: 1880898 - DNA, 15 bp, Homo sapiens
gactgtagcttcatt

SEQ ID NO: 1880899 - DNA, 15 bp, Homo sapiens
actgtagcttcatta

SEQ ID NO: 1880900 - DNA, 15 bp, Homo sapiens
ctgtagcttcattaa

SEQ ID NO: 1880901 - DNA, 15 bp, Homo sapiens
tgtagcttcattaac

SEQ ID NO: 1880902 - DNA, 15 bp, Homo sapiens
gtagcttcattaacc

SEQ ID NO: 1880903 - DNA, 15 bp, Homo sapiens
tagcttcattaacct

SEQ ID NO: 1880904 - DNA, 15 bp, Homo sapiens
agcttcattaacctt

SEQ ID NO: 1880905 - DNA, 15 bp, Homo sapiens
gcttcattaaccttg

SEQ ID NO: 1880906 - DNA, 15 bp, Homo sapiens
cttcattaaccttga

SEQ ID NO: 1880907 - DNA, 15 bp, Homo sapiens
ttcattaaccttgag

SEQ ID NO: 1880908 - DNA, 15 bp, Homo sapiens
tcattaaccttgagt

SEQ ID NO: 1880909 - DNA, 15 bp, Homo sapiens
cattaaccttgagtt

SEQ ID NO: 1880910 - DNA, 15 bp, Homo sapiens
attaaccttgagttt

SEQ ID NO: 1880911 - DNA, 15 bp, Homo sapiens
ttaaccttgagtttt

SEQ ID NO: 1880912 - DNA, 15 bp, Homo sapiens
taaccttgagtttta

SEQ ID NO: 1880913 - DNA, 15 bp, Homo sapiens
aaccttgagttttaa

SEQ ID NO: 1880914 - DNA, 15 bp, Homo sapiens
accttgagttttaac

SEQ ID NO: 1880915 - DNA, 15 bp, Homo sapiens
ccttgagttttaacc

SEQ ID NO: 1880916 - DNA, 15 bp, Homo sapiens
cttgagttttaacca

SEQ ID NO: 1880917 - DNA, 15 bp, Homo sapiens
ttgagttttaaccaa

SEQ ID NO: 1880918 - DNA, 15 bp, Homo sapiens
tgagttttaaccaat

SEQ ID NO: 1880919 - DNA, 15 bp, Homo sapiens
gagttttaaccaatt

SEQ ID NO: 1880920 - DNA, 15 bp, Homo sapiens
agttttaaccaatta

SEQ ID NO: 1880921 - DNA, 15 bp, Homo sapiens
gttttaaccaattac

SEQ ID NO: 1880922 - DNA, 15 bp, Homo sapiens
ttttaaccaattact

SEQ ID NO: 1880923 - DNA, 15 bp, Homo sapiens
tttaaccaattactg

SEQ ID NO: 1880924 - DNA, 15 bp, Homo sapiens
ttaaccaattactga

SEQ ID NO: 1880925 - DNA, 15 bp, Homo sapiens
taaccaattactgat

SEQ ID NO: 1880926 - DNA, 15 bp, Homo sapiens
aaccaattactgatc

SEQ ID NO: 1880927 - DNA, 15 bp, Homo sapiens
accaattactgatcc

SEQ ID NO: 1880928 - DNA, 15 bp, Homo sapiens
ccaattactgatcca

SEQ ID NO: 1880929 - DNA, 15 bp, Homo sapiens
caattactgatccac

SEQ ID NO: 1880930 - DNA, 15 bp, Homo sapiens
aattactgatccacc

SEQ ID NO: 1880931 - DNA, 15 bp, Homo sapiens
attactgatccacct

SEQ ID NO: 1880932 - DNA, 15 bp, Homo sapiens
ttactgatccacctc

SEQ ID NO: 1880933 - DNA, 15 bp, Homo sapiens
tactgatccacctca

SEQ ID NO: 1880934 - DNA, 15 bp, Homo sapiens
actgatccacctcaa

SEQ ID NO: 1880935 - DNA, 15 bp, Homo sapiens
ctgatccacctcaag

SEQ ID NO: 1880936 - DNA, 15 bp, Homo sapiens
tgatccacctcaaga

SEQ ID NO: 1880937 - DNA, 15 bp, Homo sapiens
gatccacctcaagaa

SEQ ID NO: 1880938 - DNA, 15 bp, Homo sapiens
atccacctcaagaaa

SEQ ID NO: 1880939 - DNA, 15 bp, Homo sapiens
tccacctcaagaaac

SEQ ID NO: 1880940 - DNA, 15 bp, Homo sapiens
ccacctcaagaaaca

SEQ ID NO: 1880941 - DNA, 15 bp, Homo sapiens
cacctcaagaaacat

SEQ ID NO: 1880942 - DNA, 15 bp, Homo sapiens
acctcaagaaacatt

SEQ ID NO: 1880943 - DNA, 15 bp, Homo sapiens
cctcaagaaacattg

SEQ ID NO: 1880944 - DNA, 15 bp, Homo sapiens
ctcaagaaacattgt

SEQ ID NO: 1880945 - DNA, 15 bp, Homo sapiens
tcaagaaacattgtc

SEQ ID NO: 1880946 - DNA, 15 bp, Homo sapiens
caagaaacattgtct

SEQ ID NO: 1880947 - DNA, 15 bp, Homo sapiens
aagaaacattgtctg

SEQ ID NO: 1880948 - DNA, 15 bp, Homo sapiens
agaaacattgtctgc

SEQ ID NO: 1880949 - DNA, 15 bp, Homo sapiens
gaaacattgtctgca

SEQ ID NO: 1880950 - DNA, 15 bp, Homo sapiens
aaacattgtctgcat

SEQ ID NO: 1880951 - DNA, 15 bp, Homo sapiens
aacattgtctgcatt

SEQ ID NO: 1880952 - DNA, 15 bp, Homo sapiens
acattgtctgcattc

SEQ ID NO: 1880953 - DNA, 15 bp, Homo sapiens
cattgtctgcattct

SEQ ID NO: 1880954 - DNA, 15 bp, Homo sapiens
attgtctgcattcta

SEQ ID NO: 1880955 - DNA, 15 bp, Homo sapiens
ttgtctgcattctaa

SEQ ID NO: 1880956 - DNA, 15 bp, Homo sapiens
tgtctgcattctaag

SEQ ID NO: 1880957 - DNA, 15 bp, Homo sapiens
gtctgcattctaagg

SEQ ID NO: 1880958 - DNA, 15 bp, Homo sapiens
tctgcattctaagga

SEQ ID NO: 1880959 - DNA, 15 bp, Homo sapiens
ctgcattctaaggat

SEQ ID NO: 1880960 - DNA, 15 bp, Homo sapiens
tgcattctaaggatc

SEQ ID NO: 1880961 - DNA, 15 bp, Homo sapiens
gcattctaaggatct

SEQ ID NO: 1880962 - DNA, 15 bp, Homo sapiens
cattctaaggatcta

SEQ ID NO: 1880963 - DNA, 15 bp, Homo sapiens
attctaaggatctag

SEQ ID NO: 1880964 - DNA, 15 bp, Homo sapiens
ttctaaggatctagg

SEQ ID NO: 1880965 - DNA, 15 bp, Homo sapiens
tctaaggatctaggc

SEQ ID NO: 1880966 - DNA, 15 bp, Homo sapiens
ctaaggatctaggcg

SEQ ID NO: 1880967 - DNA, 15 bp, Homo sapiens
taaggatctaggcgt

SEQ ID NO: 1880968 - DNA, 15 bp, Homo sapiens
aaggatctaggcgtt

SEQ ID NO: 1880969 - DNA, 15 bp, Homo sapiens
aggatctaggcgtta

SEQ ID NO: 1880970 - DNA, 15 bp, Homo sapiens
ggatctaggcgttag

SEQ ID NO: 1880971 - DNA, 15 bp, Homo sapiens
gatctaggcgttaga

SEQ ID NO: 1880972 - DNA, 15 bp, Homo sapiens
atctaggcgttagac

SEQ ID NO: 1880973 - DNA, 15 bp, Homo sapiens
tctaggcgttagaca

SEQ ID NO: 1880974 - DNA, 15 bp, Homo sapiens
ctaggcgttagacaa

SEQ ID NO: 1880975 - DNA, 15 bp, Homo sapiens
taggcgttagacaat

SEQ ID NO: 1880976 - DNA, 15 bp, Homo sapiens
aggcgttagacaatt

SEQ ID NO: 1880977 - DNA, 15 bp, Homo sapiens
ggcgttagacaattg

SEQ ID NO: 1880978 - DNA, 15 bp, Homo sapiens
gcgttagacaattgc

SEQ ID NO: 1880979 - DNA, 15 bp, Homo sapiens
cgttagacaattgct

SEQ ID NO: 1880980 - DNA, 15 bp, Homo sapiens
gttagacaattgcta

SEQ ID NO: 1880981 - DNA, 15 bp, Homo sapiens
ttagacaattgctaa

SEQ ID NO: 1880982 - DNA, 15 bp, Homo sapiens
tagacaattgctaat

SEQ ID NO: 1880983 - DNA, 15 bp, Homo sapiens
agacaattgctaatt

SEQ ID NO: 1880984 - DNA, 15 bp, Homo sapiens
gacaattgctaatta

SEQ ID NO: 1880985 - DNA, 15 bp, Homo sapiens
acaattgctaattaa

SEQ ID NO: 1880986 - DNA, 15 bp, Homo sapiens
caattgctaattaaa

SEQ ID NO: 1880987 - DNA, 15 bp, Homo sapiens
aattgctaattaaaa

SEQ ID NO: 1880988 - DNA, 15 bp, Homo sapiens
attgctaattaaaaa

SEQ ID NO: 1880989 - DNA, 15 bp, Homo sapiens
ttgctaattaaaaac

SEQ ID NO: 1880990 - DNA, 15 bp, Homo sapiens
tgctaattaaaaaca

SEQ ID NO: 1880991 - DNA, 15 bp, Homo sapiens
gctaattaaaaacat

SEQ ID NO: 1880992 - DNA, 15 bp, Homo sapiens
ctaattaaaaacatg

SEQ ID NO: 1880993 - DNA, 15 bp, Homo sapiens
taattaaaaacatga

SEQ ID NO: 1880994 - DNA, 15 bp, Homo sapiens
aattaaaaacatgaa

SEQ ID NO: 1880995 - DNA, 15 bp, Homo sapiens
attaaaaacatgaaa

SEQ ID NO: 1880996 - DNA, 15 bp, Homo sapiens
ttaaaaacatgaaat

SEQ ID NO: 1880997 - DNA, 15 bp, Homo sapiens
taaaaacatgaaatt

SEQ ID NO: 1880998 - DNA, 15 bp, Homo sapiens
aaaaacatgaaattt

SEQ ID NO: 1880999 - DNA, 15 bp, Homo sapiens
aaaacatgaaatttc

SEQ ID NO: 1881000 - DNA, 15 bp, Homo sapiens
aaacatgaaatttct

SEQ ID NO: 1881001 - DNA, 15 bp, Homo sapiens
aacatgaaatttctt

SEQ ID NO: 1881002 - DNA, 15 bp, Homo sapiens
acatgaaatttcttt

SEQ ID NO: 1881003 - DNA, 15 bp, Homo sapiens
catgaaatttctttc

SEQ ID NO: 1881004 - DNA, 15 bp, Homo sapiens
atgaaatttctttct

SEQ ID NO: 1881005 - DNA, 15 bp, Homo sapiens
tgaaatttctttctt

SEQ ID NO: 1881006 - DNA, 15 bp, Homo sapiens
gaaatttctttcttt

SEQ ID NO: 1881007 - DNA, 15 bp, Homo sapiens
aaatttctttctttt

SEQ ID NO: 1881008 - DNA, 15 bp, Homo sapiens
aatttctttcttttt

SEQ ID NO: 1881009 - DNA, 15 bp, Homo sapiens
atttctttctttttc

SEQ ID NO: 1881010 - DNA, 15 bp, Homo sapiens
tttctttctttttcc

SEQ ID NO: 1881011 - DNA, 15 bp, Homo sapiens
ttctttctttttcct

SEQ ID NO: 1881012 - DNA, 15 bp, Homo sapiens
tctttctttttcctt

SEQ ID NO: 1881013 - DNA, 15 bp, Homo sapiens
ctttctttttccttc

SEQ ID NO: 1881014 - DNA, 15 bp, Homo sapiens
tttctttttccttct

SEQ ID NO: 1881015 - DNA, 15 bp, Homo sapiens
ttctttttccttctg

SEQ ID NO: 1881016 - DNA, 15 bp, Homo sapiens
tctttttccttctgc

SEQ ID NO: 1881017 - DNA, 15 bp, Homo sapiens
ctttttccttctgca

SEQ ID NO: 1881018 - DNA, 15 bp, Homo sapiens
tttttccttctgcat

SEQ ID NO: 1881019 - DNA, 15 bp, Homo sapiens
ttttccttctgcatt

SEQ ID NO: 1881020 - DNA, 15 bp, Homo sapiens
tttccttctgcatta

SEQ ID NO: 1881021 - DNA, 15 bp, Homo sapiens
ttccttctgcattac

SEQ ID NO: 1881022 - DNA, 15 bp, Homo sapiens
tccttctgcattaca

SEQ ID NO: 1881023 - DNA, 15 bp, Homo sapiens
ccttctgcattacag

SEQ ID NO: 1881024 - DNA, 15 bp, Homo sapiens
cttctgcattacaga

SEQ ID NO: 1881025 - DNA, 15 bp, Homo sapiens
ttctgcattacagat

SEQ ID NO: 1881026 - DNA, 15 bp, Homo sapiens
tctgcattacagatg

SEQ ID NO: 1881027 - DNA, 15 bp, Homo sapiens
ctgcattacagatga

SEQ ID NO: 1881028 - DNA, 15 bp, Homo sapiens
tgcattacagatgaa

SEQ ID NO: 1881029 - DNA, 15 bp, Homo sapiens
gcattacagatgaat

SEQ ID NO: 1881030 - DNA, 15 bp, Homo sapiens
cattacagatgaata

SEQ ID NO: 1881031 - DNA, 15 bp, Homo sapiens
attacagatgaatag

SEQ ID NO: 1881032 - DNA, 15 bp, Homo sapiens
ttacagatgaataga

SEQ ID NO: 1881033 - DNA, 15 bp, Homo sapiens
tacagatgaatagat

SEQ ID NO: 1881034 - DNA, 15 bp, Homo sapiens
acagatgaatagatt

SEQ ID NO: 1881035 - DNA, 15 bp, Homo sapiens
cagatgaatagatta

SEQ ID NO: 1881036 - DNA, 15 bp, Homo sapiens
agatgaatagattat

SEQ ID NO: 1881037 - DNA, 15 bp, Homo sapiens
gatgaatagattatt

SEQ ID NO: 1881038 - DNA, 15 bp, Homo sapiens
atgaatagattattc

SEQ ID NO: 1881039 - DNA, 15 bp, Homo sapiens
tgaatagattattca

SEQ ID NO: 1881040 - DNA, 15 bp, Homo sapiens
gaatagattattcac

SEQ ID NO: 1881041 - DNA, 15 bp, Homo sapiens
aatagattattcacc

SEQ ID NO: 1881042 - DNA, 15 bp, Homo sapiens
atagattattcacca

SEQ ID NO: 1881043 - DNA, 15 bp, Homo sapiens
tagattattcaccat

SEQ ID NO: 1881044 - DNA, 15 bp, Homo sapiens
agattattcaccatg

SEQ ID NO: 1881045 - DNA, 15 bp, Homo sapiens
gattattcaccatga

SEQ ID NO: 1881046 - DNA, 15 bp, Homo sapiens
attattcaccatgag

SEQ ID NO: 1881047 - DNA, 15 bp, Homo sapiens
ttattcaccatgagg

SEQ ID NO: 1881048 - DNA, 15 bp, Homo sapiens
tattcaccatgaggg

SEQ ID NO: 1881049 - DNA, 15 bp, Homo sapiens
attcaccatgaggga

SEQ ID NO: 1881050 - DNA, 15 bp, Homo sapiens
ttcaccatgagggat

SEQ ID NO: 1881051 - DNA, 15 bp, Homo sapiens
tcaccatgagggatg

SEQ ID NO: 1881052 - DNA, 15 bp, Homo sapiens
caccatgagggatga

SEQ ID NO: 1881053 - DNA, 15 bp, Homo sapiens
accatgagggatgac

SEQ ID NO: 1881054 - DNA, 15 bp, Homo sapiens
ccatgagggatgacc

SEQ ID NO: 1881055 - DNA, 15 bp, Homo sapiens
catgagggatgacca

SEQ ID NO: 1881056 - DNA, 15 bp, Homo sapiens
atgagggatgaccat

SEQ ID NO: 1881057 - DNA, 15 bp, Homo sapiens
tgagggatgaccatt

SEQ ID NO: 1881058 - DNA, 15 bp, Homo sapiens
gagggatgaccattt

SEQ ID NO: 1881059 - DNA, 15 bp, Homo sapiens
agggatgaccatttt

SEQ ID NO: 1881060 - DNA, 15 bp, Homo sapiens
gggatgaccattttg

SEQ ID NO: 1881061 - DNA, 15 bp, Homo sapiens
ggatgaccattttgg

SEQ ID NO: 1881062 - DNA, 15 bp, Homo sapiens
gatgaccattttgga

SEQ ID NO: 1881063 - DNA, 15 bp, Homo sapiens
atgaccattttggac

SEQ ID NO: 1881064 - DNA, 15 bp, Homo sapiens
tgaccattttggaca

SEQ ID NO: 1881065 - DNA, 15 bp, Homo sapiens
gaccattttggacac

SEQ ID NO: 1881066 - DNA, 15 bp, Homo sapiens
accattttggacact

SEQ ID NO: 1881067 - DNA, 15 bp, Homo sapiens
ccattttggacacta

SEQ ID NO: 1881068 - DNA, 15 bp, Homo sapiens
cattttggacactat

SEQ ID NO: 1881069 - DNA, 15 bp, Homo sapiens
attttggacactatt

SEQ ID NO: 1881070 - DNA, 15 bp, Homo sapiens
ttttggacactattt

SEQ ID NO: 1881071 - DNA, 15 bp, Homo sapiens
tttggacactatttg

SEQ ID NO: 1881072 - DNA, 15 bp, Homo sapiens
ttggacactatttga

SEQ ID NO: 1881073 - DNA, 15 bp, Homo sapiens
tggacactatttgag

SEQ ID NO: 1881074 - DNA, 15 bp, Homo sapiens
ggacactatttgaga

SEQ ID NO: 1881075 - DNA, 15 bp, Homo sapiens
gacactatttgagat

SEQ ID NO: 1881076 - DNA, 15 bp, Homo sapiens
acactatttgagata

SEQ ID NO: 1881077 - DNA, 15 bp, Homo sapiens
cactatttgagataa

SEQ ID NO: 1881078 - DNA, 15 bp, Homo sapiens
actatttgagataat

SEQ ID NO: 1881079 - DNA, 15 bp, Homo sapiens
ctatttgagataata

SEQ ID NO: 1881080 - DNA, 15 bp, Homo sapiens
tatttgagataataa

SEQ ID NO: 1881081 - DNA, 15 bp, Homo sapiens
atttgagataataag

SEQ ID NO: 1881082 - DNA, 15 bp, Homo sapiens
tttgagataataaga

SEQ ID NO: 1881083 - DNA, 15 bp, Homo sapiens
ttgagataataagaa

SEQ ID NO: 1881084 - DNA, 15 bp, Homo sapiens
tgagataataagaat

SEQ ID NO: 1881085 - DNA, 15 bp, Homo sapiens
gagataataagaata

SEQ ID NO: 1881086 - DNA, 15 bp, Homo sapiens
agataataagaatag

SEQ ID NO: 1881087 - DNA, 15 bp, Homo sapiens
gataataagaataga

SEQ ID NO: 1881088 - DNA, 15 bp, Homo sapiens
ataataagaatagat

SEQ ID NO: 1881089 - DNA, 15 bp, Homo sapiens
taataagaatagatg

SEQ ID NO: 1881090 - DNA, 15 bp, Homo sapiens
aataagaatagatgt

SEQ ID NO: 1881091 - DNA, 15 bp, Homo sapiens
ataagaatagatgtt

SEQ ID NO: 1881092 - DNA, 15 bp, Homo sapiens
taagaatagatgttt

SEQ ID NO: 1881093 - DNA, 15 bp, Homo sapiens
aagaatagatgttta

SEQ ID NO: 1881094 - DNA, 15 bp, Homo sapiens
agaatagatgtttaa

SEQ ID NO: 1881095 - DNA, 15 bp, Homo sapiens
gaatagatgtttaag

SEQ ID NO: 1881096 - DNA, 15 bp, Homo sapiens
aatagatgtttaaga

SEQ ID NO: 1881097 - DNA, 15 bp, Homo sapiens
atagatgtttaagag

SEQ ID NO: 1881098 - DNA, 15 bp, Homo sapiens
tagatgtttaagagg

SEQ ID NO: 1881099 - DNA, 15 bp, Homo sapiens
agatgtttaagaggg

SEQ ID NO: 1881100 - DNA, 15 bp, Homo sapiens
gatgtttaagagggg

SEQ ID NO: 1881101 - DNA, 15 bp, Homo sapiens
atgtttaagagggga

SEQ ID NO: 1881102 - DNA, 15 bp, Homo sapiens
tgtttaagaggggaa

SEQ ID NO: 1881103 - DNA, 15 bp, Homo sapiens
gtttaagaggggaaa

SEQ ID NO: 1881104 - DNA, 15 bp, Homo sapiens
tttaagaggggaaaa

SEQ ID NO: 1881105 - DNA, 15 bp, Homo sapiens
ttaagaggggaaaat

SEQ ID NO: 1881106 - DNA, 15 bp, Homo sapiens
taagaggggaaaatg

SEQ ID NO: 1881107 - DNA, 15 bp, Homo sapiens
aagaggggaaaatgc

SEQ ID NO: 1881108 - DNA, 15 bp, Homo sapiens
agaggggaaaatgcc

SEQ ID NO: 1881109 - DNA, 15 bp, Homo sapiens
gaggggaaaatgcca

SEQ ID NO: 1881110 - DNA, 15 bp, Homo sapiens
aggggaaaatgccat

SEQ ID NO: 1881111 - DNA, 15 bp, Homo sapiens
ggggaaaatgccatt

SEQ ID NO: 1881112 - DNA, 15 bp, Homo sapiens
gggaaaatgccattt

SEQ ID NO: 1881113 - DNA, 15 bp, Homo sapiens
ggaaaatgccattta

SEQ ID NO: 1881114 - DNA, 15 bp, Homo sapiens
gaaaatgccatttac

SEQ ID NO: 1881115 - DNA, 15 bp, Homo sapiens
aaaatgccatttaca

SEQ ID NO: 1881116 - DNA, 15 bp, Homo sapiens
aaatgccatttacat

SEQ ID NO: 1881117 - DNA, 15 bp, Homo sapiens
aatgccatttacatg

SEQ ID NO: 1881118 - DNA, 15 bp, Homo sapiens
atgccatttacatgg

SEQ ID NO: 1881119 - DNA, 15 bp, Homo sapiens
tgccatttacatggg

SEQ ID NO: 1881120 - DNA, 15 bp, Homo sapiens
gccatttacatgggc

SEQ ID NO: 1881121 - DNA, 15 bp, Homo sapiens
ccatttacatgggct

SEQ ID NO: 1881122 - DNA, 15 bp, Homo sapiens
catttacatgggcta

SEQ ID NO: 1881123 - DNA, 15 bp, Homo sapiens
atttacatgggctag

SEQ ID NO: 1881124 - DNA, 15 bp, Homo sapiens
tttacatgggctagg

SEQ ID NO: 1881125 - DNA, 15 bp, Homo sapiens
ttacatgggctagga

SEQ ID NO: 1881126 - DNA, 15 bp, Homo sapiens
tacatgggctaggag

SEQ ID NO: 1881127 - DNA, 15 bp, Homo sapiens
acatgggctaggagc

SEQ ID NO: 1881128 - DNA, 15 bp, Homo sapiens
catgggctaggagca

SEQ ID NO: 1881129 - DNA, 15 bp, Homo sapiens
atgggctaggagcat

SEQ ID NO: 1881130 - DNA, 15 bp, Homo sapiens
tgggctaggagcatt

SEQ ID NO: 1881131 - DNA, 15 bp, Homo sapiens
gggctaggagcattt

SEQ ID NO: 1881132 - DNA, 15 bp, Homo sapiens
gctccagtttccacc

SEQ ID NO: 1881133 - DNA, 15 bp, Homo sapiens
ctccagtttccaccg

SEQ ID NO: 1881134 - DNA, 15 bp, Homo sapiens
tccagtttccaccga

SEQ ID NO: 1881135 - DNA, 15 bp, Homo sapiens
ccagtttccaccgac

SEQ ID NO: 1881136 - DNA, 15 bp, Homo sapiens
cagtttccaccgact

SEQ ID NO: 1881137 - DNA, 15 bp, Homo sapiens
agtttccaccgactg

SEQ ID NO: 1881138 - DNA, 15 bp, Homo sapiens
gtttccaccgactgt

SEQ ID NO: 1881139 - DNA, 15 bp, Homo sapiens
tttccaccgactgtt

SEQ ID NO: 1881140 - DNA, 15 bp, Homo sapiens
ttccaccgactgtta

SEQ ID NO: 1881141 - DNA, 15 bp, Homo sapiens
tccaccgactgttac

SEQ ID NO: 1881142 - DNA, 15 bp, Homo sapiens
ccaccgactgttacc

SEQ ID NO: 1881143 - DNA, 15 bp, Homo sapiens
caccgactgttaccc

SEQ ID NO: 1881144 - DNA, 15 bp, Homo sapiens
accgactgttacccg

SEQ ID NO: 1881145 - DNA, 15 bp, Homo sapiens
ccgactgttacccgt

SEQ ID NO: 1881146 - DNA, 15 bp, Homo sapiens
cgactgttacccgta

SEQ ID NO: 1881147 - DNA, 15 bp, Homo sapiens
gactgttacccgtag

SEQ ID NO: 1881148 - DNA, 15 bp, Homo sapiens
actgttacccgtaga

SEQ ID NO: 1881149 - DNA, 15 bp, Homo sapiens
ctgttacccgtagac

SEQ ID NO: 1881150 - DNA, 15 bp, Homo sapiens
tgttacccgtagaca

SEQ ID NO: 1881151 - DNA, 15 bp, Homo sapiens
gttacccgtagacat

SEQ ID NO: 1881152 - DNA, 15 bp, Homo sapiens
ttacccgtagacatt

SEQ ID NO: 1881153 - DNA, 15 bp, Homo sapiens
tacccgtagacatta

SEQ ID NO: 1881154 - DNA, 15 bp, Homo sapiens
acccgtagacattac

SEQ ID NO: 1881155 - DNA, 15 bp, Homo sapiens
cccgtagacattacg

SEQ ID NO: 1881156 - DNA, 15 bp, Homo sapiens
ccgtagacattacgt

SEQ ID NO: 1881157 - DNA, 15 bp, Homo sapiens
cgtagacattacgta

SEQ ID NO: 1881158 - DNA, 15 bp, Homo sapiens
gtagacattacgtaa

SEQ ID NO: 1881159 - DNA, 15 bp, Homo sapiens
tagacattacgtaaa

SEQ ID NO: 1881160 - DNA, 15 bp, Homo sapiens
agacattacgtaaag

SEQ ID NO: 1881161 - DNA, 15 bp, Homo sapiens
gacattacgtaaagc

SEQ ID NO: 1881162 - DNA, 15 bp, Homo sapiens
acattacgtaaagcc

SEQ ID NO: 1881163 - DNA, 15 bp, Homo sapiens
cattacgtaaagcca

SEQ ID NO: 1881164 - DNA, 15 bp, Homo sapiens
attacgtaaagccag

SEQ ID NO: 1881165 - DNA, 15 bp, Homo sapiens
ttacgtaaagccaga

SEQ ID NO: 1881166 - DNA, 15 bp, Homo sapiens
tacgtaaagccagat

SEQ ID NO: 1881167 - DNA, 15 bp, Homo sapiens
acgtaaagccagatg

SEQ ID NO: 1881168 - DNA, 15 bp, Homo sapiens
cgtaaagccagatgc

SEQ ID NO: 1881169 - DNA, 15 bp, Homo sapiens
gtaaagccagatgca

SEQ ID NO: 1881170 - DNA, 15 bp, Homo sapiens
taaagccagatgcat

SEQ ID NO: 1881171 - DNA, 15 bp, Homo sapiens
aaagccagatgcatt

SEQ ID NO: 1881172 - DNA, 15 bp, Homo sapiens
aagccagatgcattt

SEQ ID NO: 1881173 - DNA, 15 bp, Homo sapiens
agccagatgcatttg

SEQ ID NO: 1881174 - DNA, 15 bp, Homo sapiens
gccagatgcatttgt

SEQ ID NO: 1881175 - DNA, 15 bp, Homo sapiens
ccagatgcatttgtg

SEQ ID NO: 1881176 - DNA, 15 bp, Homo sapiens
cagatgcatttgtga

SEQ ID NO: 1881177 - DNA, 15 bp, Homo sapiens
agatgcatttgtgat

SEQ ID NO: 1881178 - DNA, 15 bp, Homo sapiens
gatgcatttgtgatt

SEQ ID NO: 1881179 - DNA, 15 bp, Homo sapiens
atgcatttgtgattt

SEQ ID NO: 1881180 - DNA, 15 bp, Homo sapiens
tgcatttgtgattta

SEQ ID NO: 1881181 - DNA, 15 bp, Homo sapiens
gcatttgtgatttaa

SEQ ID NO: 1881182 - DNA, 15 bp, Homo sapiens
catttgtgatttaac

SEQ ID NO: 1881183 - DNA, 15 bp, Homo sapiens
atttgtgatttaacc

SEQ ID NO: 1881184 - DNA, 15 bp, Homo sapiens
tttgtgatttaaccg

SEQ ID NO: 1881185 - DNA, 15 bp, Homo sapiens
ttgtgatttaaccgg

SEQ ID NO: 1881186 - DNA, 15 bp, Homo sapiens
tgtgatttaaccgga

SEQ ID NO: 1881187 - DNA, 15 bp, Homo sapiens
gtgatttaaccggag

SEQ ID NO: 1881188 - DNA, 15 bp, Homo sapiens
tgatttaaccggagt

SEQ ID NO: 1881189 - DNA, 15 bp, Homo sapiens
gatttaaccggagtt

SEQ ID NO: 1881190 - DNA, 15 bp, Homo sapiens
atttaaccggagttc

SEQ ID NO: 1881191 - DNA, 15 bp, Homo sapiens
tttaaccggagttca

SEQ ID NO: 1881192 - DNA, 15 bp, Homo sapiens
ttaaccggagttcac

SEQ ID NO: 1881193 - DNA, 15 bp, Homo sapiens
taaccggagttcaca

SEQ ID NO: 1881194 - DNA, 15 bp, Homo sapiens
aaccggagttcacag

SEQ ID NO: 1881195 - DNA, 15 bp, Homo sapiens
accggagttcacagc

SEQ ID NO: 1881196 - DNA, 15 bp, Homo sapiens
ccggagttcacagcc

SEQ ID NO: 1881197 - DNA, 15 bp, Homo sapiens
cggagttcacagccc

SEQ ID NO: 1881198 - DNA, 15 bp, Homo sapiens
ggagttcacagccca

SEQ ID NO: 1881199 - DNA, 15 bp, Homo sapiens
gagttcacagcccag

SEQ ID NO: 1881200 - DNA, 15 bp, Homo sapiens
agttcacagcccagg

SEQ ID NO: 1881201 - DNA, 15 bp, Homo sapiens
gttcacagcccagga

SEQ ID NO: 1881202 - DNA, 15 bp, Homo sapiens
ttcacagcccaggac

SEQ ID NO: 1881203 - DNA, 15 bp, Homo sapiens
tcacagcccaggacc

SEQ ID NO: 1881204 - DNA, 15 bp, Homo sapiens
cacagcccaggacct

SEQ ID NO: 1881205 - DNA, 15 bp, Homo sapiens
acagcccaggacctg

SEQ ID NO: 1881206 - DNA, 15 bp, Homo sapiens
cagcccaggacctga

SEQ ID NO: 1881207 - DNA, 15 bp, Homo sapiens
agcccaggacctgag

SEQ ID NO: 1881208 - DNA, 15 bp, Homo sapiens
gcccaggacctgagg

SEQ ID NO: 1881209 - DNA, 15 bp, Homo sapiens
cccaggacctgagga

SEQ ID NO: 1881210 - DNA, 15 bp, Homo sapiens
ccaggacctgaggag

SEQ ID NO: 1881211 - DNA, 15 bp, Homo sapiens
caggacctgaggaga

SEQ ID NO: 1881212 - DNA, 15 bp, Homo sapiens
aggacctgaggagat

SEQ ID NO: 1881213 - DNA, 15 bp, Homo sapiens
ggacctgaggagata

SEQ ID NO: 1881214 - DNA, 15 bp, Homo sapiens
gacctgaggagataa

SEQ ID NO: 1881215 - DNA, 15 bp, Homo sapiens
acctgaggagataat

SEQ ID NO: 1881216 - DNA, 15 bp, Homo sapiens
cctgaggagataatt

SEQ ID NO: 1881217 - DNA, 15 bp, Homo sapiens
ctgaggagataattt

SEQ ID NO: 1881218 - DNA, 15 bp, Homo sapiens
tgaggagataatttt

SEQ ID NO: 1881219 - DNA, 15 bp, Homo sapiens
gaggagataatttta

SEQ ID NO: 1881220 - DNA, 15 bp, Homo sapiens
aggagataattttag

SEQ ID NO: 1881221 - DNA, 15 bp, Homo sapiens
ggagataattttagg

SEQ ID NO: 1881222 - DNA, 15 bp, Homo sapiens
gagataattttaggt

SEQ ID NO: 1881223 - DNA, 15 bp, Homo sapiens
agataattttaggta

SEQ ID NO: 1881224 - DNA, 15 bp, Homo sapiens
gataattttaggtac

SEQ ID NO: 1881225 - DNA, 15 bp, Homo sapiens
ataattttaggtact

SEQ ID NO: 1881226 - DNA, 15 bp, Homo sapiens
taattttaggtactt

SEQ ID NO: 1881227 - DNA, 15 bp, Homo sapiens
aattttaggtacttt

SEQ ID NO: 1881228 - DNA, 15 bp, Homo sapiens
attttaggtactttc

SEQ ID NO: 1881229 - DNA, 15 bp, Homo sapiens
ttttaggtactttct

SEQ ID NO: 1881230 - DNA, 15 bp, Homo sapiens
tttaggtactttctg

SEQ ID NO: 1881231 - DNA, 15 bp, Homo sapiens
ttaggtactttctgg

SEQ ID NO: 1881232 - DNA, 15 bp, Homo sapiens
taggtactttctgga

SEQ ID NO: 1881233 - DNA, 15 bp, Homo sapiens
aggtactttctggaa

SEQ ID NO: 1881234 - DNA, 15 bp, Homo sapiens
ggtactttctggaaa

SEQ ID NO: 1881235 - DNA, 15 bp, Homo sapiens
gtactttctggaaaa

SEQ ID NO: 1881236 - DNA, 15 bp, Homo sapiens
tactttctggaaaaa

SEQ ID NO: 1881237 - DNA, 15 bp, Homo sapiens
actttctggaaaaat

SEQ ID NO: 1881238 - DNA, 15 bp, Homo sapiens
ctttctggaaaaata

SEQ ID NO: 1881239 - DNA, 15 bp, Homo sapiens
tttctggaaaaataa

SEQ ID NO: 1881240 - DNA, 15 bp, Homo sapiens
ttctggaaaaataac

SEQ ID NO: 1881241 - DNA, 15 bp, Homo sapiens
tctggaaaaataact

SEQ ID NO: 1881242 - DNA, 15 bp, Homo sapiens
ctggaaaaataactg

SEQ ID NO: 1881243 - DNA, 15 bp, Homo sapiens
tggaaaaataactgg

SEQ ID NO: 1881244 - DNA, 15 bp, Homo sapiens
ggaaaaataactggt

SEQ ID NO: 1881245 - DNA, 15 bp, Homo sapiens
gaaaaataactggtc

SEQ ID NO: 1881246 - DNA, 15 bp, Homo sapiens
aaaaataactggtcc

SEQ ID NO: 1881247 - DNA, 15 bp, Homo sapiens
aaaataactggtcct

SEQ ID NO: 1881248 - DNA, 15 bp, Homo sapiens
aaataactggtcctt

SEQ ID NO: 1881249 - DNA, 15 bp, Homo sapiens
aataactggtcctta

SEQ ID NO: 1881250 - DNA, 15 bp, Homo sapiens
ataactggtccttag

SEQ ID NO: 1881251 - DNA, 15 bp, Homo sapiens
taactggtccttagg

SEQ ID NO: 1881252 - DNA, 15 bp, Homo sapiens
aactggtccttaggt

SEQ ID NO: 1881253 - DNA, 15 bp, Homo sapiens
actggtccttaggta

SEQ ID NO: 1881254 - DNA, 15 bp, Homo sapiens
ctggtccttaggtac

SEQ ID NO: 1881255 - DNA, 15 bp, Homo sapiens
tggtccttaggtaca

SEQ ID NO: 1881256 - DNA, 15 bp, Homo sapiens
ggtccttaggtacaa

SEQ ID NO: 1881257 - DNA, 15 bp, Homo sapiens
gtccttaggtacaaa

SEQ ID NO: 1881258 - DNA, 15 bp, Homo sapiens
tccttaggtacaaat

SEQ ID NO: 1881259 - DNA, 15 bp, Homo sapiens
ccttaggtacaaatg

SEQ ID NO: 1881260 - DNA, 15 bp, Homo sapiens
cttaggtacaaatgc

SEQ ID NO: 1881261 - DNA, 15 bp, Homo sapiens
ttaggtacaaatgca

SEQ ID NO: 1881262 - DNA, 15 bp, Homo sapiens
taggtacaaatgcaa

SEQ ID NO: 1881263 - DNA, 15 bp, Homo sapiens
aggtacaaatgcaaa

SEQ ID NO: 1881264 - DNA, 15 bp, Homo sapiens
ggtacaaatgcaaag

SEQ ID NO: 1881265 - DNA, 15 bp, Homo sapiens
gtacaaatgcaaagc

SEQ ID NO: 1881266 - DNA, 15 bp, Homo sapiens
tacaaatgcaaagcc

SEQ ID NO: 1881267 - DNA, 15 bp, Homo sapiens
acaaatgcaaagcca

SEQ ID NO: 1881268 - DNA, 15 bp, Homo sapiens
caaatgcaaagccaa

SEQ ID NO: 1881269 - DNA, 15 bp, Homo sapiens
aaatgcaaagccaaa

SEQ ID NO: 1881270 - DNA, 15 bp, Homo sapiens
aatgcaaagccaaac

SEQ ID NO: 1881271 - DNA, 15 bp, Homo sapiens
atgcaaagccaaacg

SEQ ID NO: 1881272 - DNA, 15 bp, Homo sapiens
tgcaaagccaaacgt

SEQ ID NO: 1881273 - DNA, 15 bp, Homo sapiens
gcaaagccaaacgta

SEQ ID NO: 1881274 - DNA, 15 bp, Homo sapiens
caaagccaaacgtag

SEQ ID NO: 1881275 - DNA, 15 bp, Homo sapiens
aaagccaaacgtagt

SEQ ID NO: 1881276 - DNA, 15 bp, Homo sapiens
aagccaaacgtagtt

SEQ ID NO: 1881277 - DNA, 15 bp, Homo sapiens
agccaaacgtagtta

SEQ ID NO: 1881278 - DNA, 15 bp, Homo sapiens
gccaaacgtagttat

SEQ ID NO: 1881279 - DNA, 15 bp, Homo sapiens
ccaaacgtagttatt

SEQ ID NO: 1881280 - DNA, 15 bp, Homo sapiens
caaacgtagttattg

SEQ ID NO: 1881281 - DNA, 15 bp, Homo sapiens
aaacgtagttattgg

SEQ ID NO: 1881282 - DNA, 15 bp, Homo sapiens
aacgtagttattgga

SEQ ID NO: 1881283 - DNA, 15 bp, Homo sapiens
acgtagttattggaa

SEQ ID NO: 1881284 - DNA, 15 bp, Homo sapiens
cgtagttattggaat

SEQ ID NO: 1881285 - DNA, 15 bp, Homo sapiens
gtagttattggaatt

SEQ ID NO: 1881286 - DNA, 15 bp, Homo sapiens
tagttattggaattg

SEQ ID NO: 1881287 - DNA, 15 bp, Homo sapiens
agttattggaattga

SEQ ID NO: 1881288 - DNA, 15 bp, Homo sapiens
gttattggaattgaa

SEQ ID NO: 1881289 - DNA, 15 bp, Homo sapiens
ttattggaattgaaa

SEQ ID NO: 1881290 - DNA, 15 bp, Homo sapiens
tattggaattgaaaa

SEQ ID NO: 1881291 - DNA, 15 bp, Homo sapiens
attggaattgaaaat

SEQ ID NO: 1881292 - DNA, 15 bp, Homo sapiens
ttggaattgaaaata

SEQ ID NO: 1881293 - DNA, 15 bp, Homo sapiens
tggaattgaaaataa

SEQ ID NO: 1881294 - DNA, 15 bp, Homo sapiens
ggaattgaaaataat

SEQ ID NO: 1881295 - DNA, 15 bp, Homo sapiens
gaattgaaaataata

SEQ ID NO: 1881296 - DNA, 15 bp, Homo sapiens
aattgaaaataataa

SEQ ID NO: 1881297 - DNA, 15 bp, Homo sapiens
attgaaaataataaa

SEQ ID NO: 1881298 - DNA, 15 bp, Homo sapiens
ttgaaaataataaag

SEQ ID NO: 1881299 - DNA, 15 bp, Homo sapiens
tgaaaataataaagc

SEQ ID NO: 1881300 - DNA, 15 bp, Homo sapiens
gaaaataataaagcc

SEQ ID NO: 1881301 - DNA, 15 bp, Homo sapiens
aaaataataaagcca

SEQ ID NO: 1881302 - DNA, 15 bp, Homo sapiens
aaataataaagccaa

SEQ ID NO: 1881303 - DNA, 15 bp, Homo sapiens
aataataaagccaag

SEQ ID NO: 1881304 - DNA, 15 bp, Homo sapiens
ataataaagccaagg

SEQ ID NO: 1881305 - DNA, 15 bp, Homo sapiens
taataaagccaaggg

SEQ ID NO: 1881306 - DNA, 15 bp, Homo sapiens
aataaagccaagggc

SEQ ID NO: 1881307 - DNA, 15 bp, Homo sapiens
ataaagccaagggct

SEQ ID NO: 1881308 - DNA, 15 bp, Homo sapiens
taaagccaagggctt

SEQ ID NO: 1881309 - DNA, 15 bp, Homo sapiens
aaagccaagggctta

SEQ ID NO: 1881310 - DNA, 15 bp, Homo sapiens
aagccaagggcttat

SEQ ID NO: 1881311 - DNA, 15 bp, Homo sapiens
agccaagggcttatt

SEQ ID NO: 1881312 - DNA, 15 bp, Homo sapiens
gccaagggcttattt

SEQ ID NO: 1881313 - DNA, 15 bp, Homo sapiens
ccaagggcttatttt

SEQ ID NO: 1881314 - DNA, 15 bp, Homo sapiens
caagggcttattttg

SEQ ID NO: 1881315 - DNA, 15 bp, Homo sapiens
aagggcttattttgg

SEQ ID NO: 1881316 - DNA, 15 bp, Homo sapiens
agggcttattttgga

SEQ ID NO: 1881317 - DNA, 15 bp, Homo sapiens
gggcttattttggac

SEQ ID NO: 1881318 - DNA, 15 bp, Homo sapiens
ggcttattttggaca

SEQ ID NO: 1881319 - DNA, 15 bp, Homo sapiens
gcttattttggacaa

SEQ ID NO: 1881320 - DNA, 15 bp, Homo sapiens
cttattttggacaac

SEQ ID NO: 1881321 - DNA, 15 bp, Homo sapiens
ttattttggacaacc

SEQ ID NO: 1881322 - DNA, 15 bp, Homo sapiens
tattttggacaacca

SEQ ID NO: 1881323 - DNA, 15 bp, Homo sapiens
attttggacaaccat

SEQ ID NO: 1881324 - DNA, 15 bp, Homo sapiens
ttttggacaaccatg

SEQ ID NO: 1881325 - DNA, 15 bp, Homo sapiens
tttggacaaccatgc

SEQ ID NO: 1881326 - DNA, 15 bp, Homo sapiens
ttggacaaccatgca

SEQ ID NO: 1881327 - DNA, 15 bp, Homo sapiens
tggacaaccatgcag

SEQ ID NO: 1881328 - DNA, 15 bp, Homo sapiens
ggacaaccatgcagc

SEQ ID NO: 1881329 - DNA, 15 bp, Homo sapiens
gacaaccatgcagct

SEQ ID NO: 1881330 - DNA, 15 bp, Homo sapiens
acaaccatgcagctg

SEQ ID NO: 1881331 - DNA, 15 bp, Homo sapiens
caaccatgcagctgg

SEQ ID NO: 1881332 - DNA, 15 bp, Homo sapiens
aaccatgcagctgga

SEQ ID NO: 1881333 - DNA, 15 bp, Homo sapiens
accatgcagctggag

SEQ ID NO: 1881334 - DNA, 15 bp, Homo sapiens
ccatgcagctggagc

SEQ ID NO: 1881335 - DNA, 15 bp, Homo sapiens
catgcagctggagca

SEQ ID NO: 1881336 - DNA, 15 bp, Homo sapiens
atgcagctggagcag

SEQ ID NO: 1881337 - DNA, 15 bp, Homo sapiens
tgcagctggagcagc

SEQ ID NO: 1881338 - DNA, 15 bp, Homo sapiens
gcagctggagcagct

SEQ ID NO: 1881339 - DNA, 15 bp, Homo sapiens
cagctggagcagctg

SEQ ID NO: 1881340 - DNA, 15 bp, Homo sapiens
agctggagcagctga

SEQ ID NO: 1881341 - DNA, 15 bp, Homo sapiens
gctggagcagctgaa

SEQ ID NO: 1881342 - DNA, 15 bp, Homo sapiens
ctggagcagctgaat

SEQ ID NO: 1881343 - DNA, 15 bp, Homo sapiens
tggagcagctgaata

SEQ ID NO: 1881344 - DNA, 15 bp, Homo sapiens
ggagcagctgaatac

SEQ ID NO: 1881345 - DNA, 15 bp, Homo sapiens
gagcagctgaatact

SEQ ID NO: 1881346 - DNA, 15 bp, Homo sapiens
agcagctgaatacta

SEQ ID NO: 1881347 - DNA, 15 bp, Homo sapiens
gcagctgaatactaa

SEQ ID NO: 1881348 - DNA, 15 bp, Homo sapiens
cagctgaatactaaa

SEQ ID NO: 1881349 - DNA, 15 bp, Homo sapiens
agctgaatactaaaa

SEQ ID NO: 1881350 - DNA, 15 bp, Homo sapiens
gctgaatactaaaat

SEQ ID NO: 1881351 - DNA, 15 bp, Homo sapiens
gaatactaaaatagt

SEQ ID NO: 1881352 - DNA, 15 bp, Homo sapiens
aatactaaaatagtg

SEQ ID NO: 1881353 - DNA, 15 bp, Homo sapiens
atactaaaatagtgg

SEQ ID NO: 1881354 - DNA, 15 bp, Homo sapiens
tactaaaatagtggc

SEQ ID NO: 1881355 - DNA, 15 bp, Homo sapiens
actaaaatagtggcc

SEQ ID NO: 1881356 - DNA, 15 bp, Homo sapiens
ctaaaatagtggcct

SEQ ID NO: 1881357 - DNA, 15 bp, Homo sapiens
taaaatagtggcctg

SEQ ID NO: 1881358 - DNA, 15 bp, Homo sapiens
aaaatagtggcctgt

SEQ ID NO: 1881359 - DNA, 15 bp, Homo sapiens
aaatagtggcctgtg

SEQ ID NO: 1881360 - DNA, 15 bp, Homo sapiens
aatagtggcctgtgt

SEQ ID NO: 1881361 - DNA, 15 bp, Homo sapiens
atagtggcctgtgtg

SEQ ID NO: 1881362 - DNA, 15 bp, Homo sapiens
tagtggcctgtgtgg

SEQ ID NO: 1881363 - DNA, 15 bp, Homo sapiens
agtggcctgtgtggt

SEQ ID NO: 1881364 - DNA, 15 bp, Homo sapiens
gtggcctgtgtggtg

SEQ ID NO: 1881365 - DNA, 15 bp, Homo sapiens
tggcctgtgtggtgg

SEQ ID NO: 1881366 - DNA, 15 bp, Homo sapiens
ggcctgtgtggtggt

SEQ ID NO: 1881367 - DNA, 15 bp, Homo sapiens
gcctgtgtggtggtt

SEQ ID NO: 1881368 - DNA, 15 bp, Homo sapiens
cctgtgtggtggttt

SEQ ID NO: 1881369 - DNA, 15 bp, Homo sapiens
ctgtgtggtggtttc

SEQ ID NO: 1881370 - DNA, 15 bp, Homo sapiens
tgtgtggtggtttcc

SEQ ID NO: 1881371 - DNA, 15 bp, Homo sapiens
gtgtggtggtttccc

SEQ ID NO: 1881372 - DNA, 15 bp, Homo sapiens
tgtggtggtttcccc

SEQ ID NO: 1881373 - DNA, 15 bp, Homo sapiens
gtggtggtttcccct

SEQ ID NO: 1881374 - DNA, 15 bp, Homo sapiens
tggtggtttcccctg

SEQ ID NO: 1881375 - DNA, 15 bp, Homo sapiens
ggtggtttcccctgt

SEQ ID NO: 1881376 - DNA, 15 bp, Homo sapiens
gtggtttcccctgtg

SEQ ID NO: 1881377 - DNA, 15 bp, Homo sapiens
tggtttcccctgtgg

SEQ ID NO: 1881378 - DNA, 15 bp, Homo sapiens
ggtttcccctgtggc

SEQ ID NO: 1881379 - DNA, 15 bp, Homo sapiens
gtttcccctgtggct

SEQ ID NO: 1881380 - DNA, 15 bp, Homo sapiens
tttcccctgtggctt

SEQ ID NO: 1881381 - DNA, 15 bp, Homo sapiens
ttcccctgtggcttc

SEQ ID NO: 1881382 - DNA, 15 bp, Homo sapiens
tcccctgtggcttct

SEQ ID NO: 1881383 - DNA, 15 bp, Homo sapiens
cccctgtggcttctt

SEQ ID NO: 1881384 - DNA, 15 bp, Homo sapiens
ccctgtggcttctta

SEQ ID NO: 1881385 - DNA, 15 bp, Homo sapiens
cctgtggcttcttat

SEQ ID NO: 1881386 - DNA, 15 bp, Homo sapiens
ctgtggcttcttatc

SEQ ID NO: 1881387 - DNA, 15 bp, Homo sapiens
tgtggcttcttatct

SEQ ID NO: 1881388 - DNA, 15 bp, Homo sapiens
gtggcttcttatctc

SEQ ID NO: 1881389 - DNA, 15 bp, Homo sapiens
tggcttcttatctcc

SEQ ID NO: 1881390 - DNA, 15 bp, Homo sapiens
ggcttcttatctccg

SEQ ID NO: 1881391 - DNA, 15 bp, Homo sapiens
gcttcttatctccgt

SEQ ID NO: 1881392 - DNA, 15 bp, Homo sapiens
cttcttatctccgtg

SEQ ID NO: 1881393 - DNA, 15 bp, Homo sapiens
ttcttatctccgtgg

SEQ ID NO: 1881394 - DNA, 15 bp, Homo sapiens
tcttatctccgtggg

SEQ ID NO: 1881395 - DNA, 15 bp, Homo sapiens
cttatctccgtgggt

SEQ ID NO: 1881396 - DNA, 15 bp, Homo sapiens
ttatctccgtgggtt

SEQ ID NO: 1881397 - DNA, 15 bp, Homo sapiens
tatctccgtgggtta

SEQ ID NO: 1881398 - DNA, 15 bp, Homo sapiens
atctccgtgggttac

SEQ ID NO: 1881399 - DNA, 15 bp, Homo sapiens
tctccgtgggttaca

SEQ ID NO: 1881400 - DNA, 15 bp, Homo sapiens
ctccgtgggttacac

SEQ ID NO: 1881401 - DNA, 15 bp, Homo sapiens
tccgtgggttacaca

SEQ ID NO: 1881402 - DNA, 15 bp, Homo sapiens
ccgtgggttacacac

SEQ ID NO: 1881403 - DNA, 15 bp, Homo sapiens
cgtgggttacacacc

SEQ ID NO: 1881404 - DNA, 15 bp, Homo sapiens
gtgggttacacaccc

SEQ ID NO: 1881405 - DNA, 15 bp, Homo sapiens
tgggttacacaccct

SEQ ID NO: 1881406 - DNA, 15 bp, Homo sapiens
gggttacacaccctc

SEQ ID NO: 1881407 - DNA, 15 bp, Homo sapiens
ggttacacaccctca

SEQ ID NO: 1881408 - DNA, 15 bp, Homo sapiens
gttacacaccctcac

SEQ ID NO: 1881409 - DNA, 15 bp, Homo sapiens
ttacacaccctcacc

SEQ ID NO: 1881410 - DNA, 15 bp, Homo sapiens
tacacaccctcaccc

SEQ ID NO: 1881411 - DNA, 15 bp, Homo sapiens
acacaccctcaccca

SEQ ID NO: 1881412 - DNA, 15 bp, Homo sapiens
cacaccctcacccag

SEQ ID NO: 1881413 - DNA, 15 bp, Homo sapiens
acaccctcacccagg

SEQ ID NO: 1881414 - DNA, 15 bp, Homo sapiens
caccctcacccaggg

SEQ ID NO: 1881415 - DNA, 15 bp, Homo sapiens
accctcacccagggg

SEQ ID NO: 1881416 - DNA, 15 bp, Homo sapiens
ccctcacccagggga

SEQ ID NO: 1881417 - DNA, 15 bp, Homo sapiens
cctcacccaggggaa

SEQ ID NO: 1881418 - DNA, 15 bp, Homo sapiens
ctcacccaggggaag

SEQ ID NO: 1881419 - DNA, 15 bp, Homo sapiens
tcacccaggggaaga

SEQ ID NO: 1881420 - DNA, 15 bp, Homo sapiens
cacccaggggaagac

SEQ ID NO: 1881421 - DNA, 15 bp, Homo sapiens
acccaggggaagaca

SEQ ID NO: 1881422 - DNA, 15 bp, Homo sapiens
cccaggggaagacag

SEQ ID NO: 1881423 - DNA, 15 bp, Homo sapiens
ccaggggaagacagc

SEQ ID NO: 1881424 - DNA, 15 bp, Homo sapiens
caggggaagacagcc

SEQ ID NO: 1881425 - DNA, 15 bp, Homo sapiens
aggggaagacagcct

SEQ ID NO: 1881426 - DNA, 15 bp, Homo sapiens
ggggaagacagcctt

SEQ ID NO: 1881427 - DNA, 15 bp, Homo sapiens
gggaagacagccttc

SEQ ID NO: 1881428 - DNA, 15 bp, Homo sapiens
ggaagacagccttct

SEQ ID NO: 1881429 - DNA, 15 bp, Homo sapiens
gaagacagccttctt

SEQ ID NO: 1881430 - DNA, 15 bp, Homo sapiens
aagacagccttctta

SEQ ID NO: 1881431 - DNA, 15 bp, Homo sapiens
agacagccttcttaa

SEQ ID NO: 1881432 - DNA, 15 bp, Homo sapiens
gacagccttcttaat

SEQ ID NO: 1881433 - DNA, 15 bp, Homo sapiens
acagccttcttaatg

SEQ ID NO: 1881434 - DNA, 15 bp, Homo sapiens
cagccttcttaatgc

SEQ ID NO: 1881435 - DNA, 15 bp, Homo sapiens
agccttcttaatgca

SEQ ID NO: 1881436 - DNA, 15 bp, Homo sapiens
gccttcttaatgcag

SEQ ID NO: 1881437 - DNA, 15 bp, Homo sapiens
ccttcttaatgcagc

SEQ ID NO: 1881438 - DNA, 15 bp, Homo sapiens
cttcttaatgcagct

SEQ ID NO: 1881439 - DNA, 15 bp, Homo sapiens
ttcttaatgcagctt

SEQ ID NO: 1881440 - DNA, 15 bp, Homo sapiens
tcttaatgcagcttg

SEQ ID NO: 1881441 - DNA, 15 bp, Homo sapiens
cttaatgcagcttgc

SEQ ID NO: 1881442 - DNA, 15 bp, Homo sapiens
ttaatgcagcttgca

SEQ ID NO: 1881443 - DNA, 15 bp, Homo sapiens
taatgcagcttgcag

SEQ ID NO: 1881444 - DNA, 15 bp, Homo sapiens
aatgcagcttgcagc

SEQ ID NO: 1881445 - DNA, 15 bp, Homo sapiens
atgcagcttgcagca

SEQ ID NO: 1881446 - DNA, 15 bp, Homo sapiens
tgcagcttgcagcag

SEQ ID NO: 1881447 - DNA, 15 bp, Homo sapiens
gcagcttgcagcagg

SEQ ID NO: 1881448 - DNA, 15 bp, Homo sapiens
cagcttgcagcaggc

SEQ ID NO: 1881449 - DNA, 15 bp, Homo sapiens
agcttgcagcaggcc

SEQ ID NO: 1881450 - DNA, 15 bp, Homo sapiens
gcttgcagcaggcct

SEQ ID NO: 1881451 - DNA, 15 bp, Homo sapiens
cttgcagcaggcctt

SEQ ID NO: 1881452 - DNA, 15 bp, Homo sapiens
ttgcagcaggccttc

SEQ ID NO: 1881453 - DNA, 15 bp, Homo sapiens
tgcagcaggccttct

SEQ ID NO: 1881454 - DNA, 15 bp, Homo sapiens
gcagcaggccttctt

SEQ ID NO: 1881455 - DNA, 15 bp, Homo sapiens
cagcaggccttcttt

SEQ ID NO: 1881456 - DNA, 15 bp, Homo sapiens
agcaggccttctttt

SEQ ID NO: 1881457 - DNA, 15 bp, Homo sapiens
gcaggccttcttttg

SEQ ID NO: 1881458 - DNA, 15 bp, Homo sapiens
caggccttcttttgc

SEQ ID NO: 1881459 - DNA, 15 bp, Homo sapiens
aggccttcttttgcg

SEQ ID NO: 1881460 - DNA, 15 bp, Homo sapiens
ggccttcttttgcgg

SEQ ID NO: 1881461 - DNA, 15 bp, Homo sapiens
gccttcttttgcggg

SEQ ID NO: 1881462 - DNA, 15 bp, Homo sapiens
ccttcttttgcgggg

SEQ ID NO: 1881463 - DNA, 15 bp, Homo sapiens
cttcttttgcggggc

SEQ ID NO: 1881464 - DNA, 15 bp, Homo sapiens
ttcttttgcggggca

SEQ ID NO: 1881465 - DNA, 15 bp, Homo sapiens
tcttttgcggggcag

SEQ ID NO: 1881466 - DNA, 15 bp, Homo sapiens
cttttgcggggcaga

SEQ ID NO: 1881467 - DNA, 15 bp, Homo sapiens
ttttgcggggcagat

SEQ ID NO: 1881468 - DNA, 15 bp, Homo sapiens
tttgcggggcagatt

SEQ ID NO: 1881469 - DNA, 15 bp, Homo sapiens
ttgcggggcagattt

SEQ ID NO: 1881470 - DNA, 15 bp, Homo sapiens
tgcggggcagatttt

SEQ ID NO: 1881471 - DNA, 15 bp, Homo sapiens
gcggggcagattttc

SEQ ID NO: 1881472 - DNA, 15 bp, Homo sapiens
cggggcagattttcc

SEQ ID NO: 1881473 - DNA, 15 bp, Homo sapiens
ggggcagattttcct

SEQ ID NO: 1881474 - DNA, 15 bp, Homo sapiens
gggcagattttcctc

SEQ ID NO: 1881475 - DNA, 15 bp, Homo sapiens
ggcagattttcctca

SEQ ID NO: 1881476 - DNA, 15 bp, Homo sapiens
gcagattttcctcag

SEQ ID NO: 1881477 - DNA, 15 bp, Homo sapiens
cagattttcctcaga

SEQ ID NO: 1881478 - DNA, 15 bp, Homo sapiens
agattttcctcagaa

SEQ ID NO: 1881479 - DNA, 15 bp, Homo sapiens
gattttcctcagaag

SEQ ID NO: 1881480 - DNA, 15 bp, Homo sapiens
attttcctcagaaga

SEQ ID NO: 1881481 - DNA, 15 bp, Homo sapiens
ttttcctcagaagag

SEQ ID NO: 1881482 - DNA, 15 bp, Homo sapiens
tttcctcagaagaga

SEQ ID NO: 1881483 - DNA, 15 bp, Homo sapiens
ttcctcagaagagaa

SEQ ID NO: 1881484 - DNA, 15 bp, Homo sapiens
tcctcagaagagaag

SEQ ID NO: 1881485 - DNA, 15 bp, Homo sapiens
cctcagaagagaagt

SEQ ID NO: 1881486 - DNA, 15 bp, Homo sapiens
ctcagaagagaagta

SEQ ID NO: 1881487 - DNA, 15 bp, Homo sapiens
tcagaagagaagtac

SEQ ID NO: 1881488 - DNA, 15 bp, Homo sapiens
cagaagagaagtaca

SEQ ID NO: 1881489 - DNA, 15 bp, Homo sapiens
agaagagaagtacat

SEQ ID NO: 1881490 - DNA, 15 bp, Homo sapiens
gaagagaagtacatt

SEQ ID NO: 1881491 - DNA, 15 bp, Homo sapiens
aagagaagtacatta

SEQ ID NO: 1881492 - DNA, 15 bp, Homo sapiens
agagaagtacattag

SEQ ID NO: 1881493 - DNA, 15 bp, Homo sapiens
gagaagtacattagt

SEQ ID NO: 1881494 - DNA, 15 bp, Homo sapiens
agaagtacattagtc

SEQ ID NO: 1881495 - DNA, 15 bp, Homo sapiens
gaagtacattagtca

SEQ ID NO: 1881496 - DNA, 15 bp, Homo sapiens
aagtacattagtcat

SEQ ID NO: 1881497 - DNA, 15 bp, Homo sapiens
agtacattagtcatt

SEQ ID NO: 1881498 - DNA, 15 bp, Homo sapiens
gtacattagtcattg

SEQ ID NO: 1881499 - DNA, 15 bp, Homo sapiens
tacattagtcattga

SEQ ID NO: 1881500 - DNA, 15 bp, Homo sapiens
acattagtcattgaa

SEQ ID NO: 1881501 - DNA, 15 bp, Homo sapiens
cattagtcattgaac

SEQ ID NO: 1881502 - DNA, 15 bp, Homo sapiens
attagtcattgaact

SEQ ID NO: 1881503 - DNA, 15 bp, Homo sapiens
ttagtcattgaactg

SEQ ID NO: 1881504 - DNA, 15 bp, Homo sapiens
tagtcattgaactgt

SEQ ID NO: 1881505 - DNA, 15 bp, Homo sapiens
agtcattgaactgtt

SEQ ID NO: 1881506 - DNA, 15 bp, Homo sapiens
gtcattgaactgtta

SEQ ID NO: 1881507 - DNA, 15 bp, Homo sapiens
tcattgaactgttag

SEQ ID NO: 1881508 - DNA, 15 bp, Homo sapiens
cattgaactgttaga

SEQ ID NO: 1881509 - DNA, 15 bp, Homo sapiens
attgaactgttagag

SEQ ID NO: 1881510 - DNA, 15 bp, Homo sapiens
ttgaactgttagaga

SEQ ID NO: 1881511 - DNA, 15 bp, Homo sapiens
tgaactgttagagaa

SEQ ID NO: 1881512 - DNA, 15 bp, Homo sapiens
gaactgttagagaat

SEQ ID NO: 1881513 - DNA, 15 bp, Homo sapiens
aactgttagagaata

SEQ ID NO: 1881514 - DNA, 15 bp, Homo sapiens
actgttagagaatat

SEQ ID NO: 1881515 - DNA, 15 bp, Homo sapiens
ctgttagagaatata

SEQ ID NO: 1881516 - DNA, 15 bp, Homo sapiens
tgttagagaatataa

SEQ ID NO: 1881517 - DNA, 15 bp, Homo sapiens
gttagagaatataat

SEQ ID NO: 1881518 - DNA, 15 bp, Homo sapiens
ttagagaatataatg

SEQ ID NO: 1881519 - DNA, 15 bp, Homo sapiens
tagagaatataatga

SEQ ID NO: 1881520 - DNA, 15 bp, Homo sapiens
agagaatataatgaa

SEQ ID NO: 1881521 - DNA, 15 bp, Homo sapiens
gagaatataatgaaa

SEQ ID NO: 1881522 - DNA, 15 bp, Homo sapiens
agaatataatgaaaa

SEQ ID NO: 1881523 - DNA, 15 bp, Homo sapiens
gaatataatgaaaag

SEQ ID NO: 1881524 - DNA, 15 bp, Homo sapiens
aatataatgaaaaga

SEQ ID NO: 1881525 - DNA, 15 bp, Homo sapiens
atataatgaaaagaa

SEQ ID NO: 1881526 - DNA, 15 bp, Homo sapiens
tataatgaaaagaaa

SEQ ID NO: 1881527 - DNA, 15 bp, Homo sapiens
ataatgaaaagaaaa

SEQ ID NO: 1881528 - DNA, 15 bp, Homo sapiens
taatgaaaagaaaaa

SEQ ID NO: 1881529 - DNA, 15 bp, Homo sapiens
aatgaaaagaaaaac

SEQ ID NO: 1881530 - DNA, 15 bp, Homo sapiens
atgaaaagaaaaacc

SEQ ID NO: 1881531 - DNA, 15 bp, Homo sapiens
tgaaaagaaaaacct

SEQ ID NO: 1881532 - DNA, 15 bp, Homo sapiens
gaaaagaaaaaccta

SEQ ID NO: 1881533 - DNA, 15 bp, Homo sapiens
aaaagaaaaacctaa

SEQ ID NO: 1881534 - DNA, 15 bp, Homo sapiens
aaagaaaaacctaac

SEQ ID NO: 1881535 - DNA, 15 bp, Homo sapiens
aagaaaaacctaact

SEQ ID NO: 1881536 - DNA, 15 bp, Homo sapiens
agaaaaacctaactt

SEQ ID NO: 1881537 - DNA, 15 bp, Homo sapiens
gaaaaacctaacttt

SEQ ID NO: 1881538 - DNA, 15 bp, Homo sapiens
aaaaacctaactttg

SEQ ID NO: 1881539 - DNA, 15 bp, Homo sapiens
aaaacctaactttgg

SEQ ID NO: 1881540 - DNA, 15 bp, Homo sapiens
aaacctaactttgga

SEQ ID NO: 1881541 - DNA, 15 bp, Homo sapiens
aacctaactttggat

SEQ ID NO: 1881542 - DNA, 15 bp, Homo sapiens
acctaactttggatc

SEQ ID NO: 1881543 - DNA, 15 bp, Homo sapiens
cctaactttggatca

SEQ ID NO: 1881544 - DNA, 15 bp, Homo sapiens
ctaactttggatcag

SEQ ID NO: 1881545 - DNA, 15 bp, Homo sapiens
taactttggatcaga

SEQ ID NO: 1881546 - DNA, 15 bp, Homo sapiens
aactttggatcagat

SEQ ID NO: 1881547 - DNA, 15 bp, Homo sapiens
actttggatcagatt

SEQ ID NO: 1881548 - DNA, 15 bp, Homo sapiens
ctttggatcagattt

SEQ ID NO: 1881549 - DNA, 15 bp, Homo sapiens
tttggatcagatttg

SEQ ID NO: 1881550 - DNA, 15 bp, Homo sapiens
ttggatcagatttga

SEQ ID NO: 1881551 - DNA, 15 bp, Homo sapiens
tggatcagatttgaa

SEQ ID NO: 1881552 - DNA, 15 bp, Homo sapiens
ggatcagatttgaat

SEQ ID NO: 1881553 - DNA, 15 bp, Homo sapiens
gatcagatttgaatt

SEQ ID NO: 1881554 - DNA, 15 bp, Homo sapiens
atcagatttgaattt

SEQ ID NO: 1881555 - DNA, 15 bp, Homo sapiens
tcagatttgaatttt

SEQ ID NO: 1881556 - DNA, 15 bp, Homo sapiens
cagatttgaatttta

SEQ ID NO: 1881557 - DNA, 15 bp, Homo sapiens
agatttgaattttac

SEQ ID NO: 1881558 - DNA, 15 bp, Homo sapiens
gatttgaattttact

SEQ ID NO: 1881559 - DNA, 15 bp, Homo sapiens
atttgaattttacta

SEQ ID NO: 1881560 - DNA, 15 bp, Homo sapiens
tttgaattttactac

SEQ ID NO: 1881561 - DNA, 15 bp, Homo sapiens
ttgaattttactacc

SEQ ID NO: 1881562 - DNA, 15 bp, Homo sapiens
tgaattttactaccc

SEQ ID NO: 1881563 - DNA, 15 bp, Homo sapiens
gaattttactacccc

SEQ ID NO: 1881564 - DNA, 15 bp, Homo sapiens
aattttactacccca

SEQ ID NO: 1881565 - DNA, 15 bp, Homo sapiens
attttactaccccat

SEQ ID NO: 1881566 - DNA, 15 bp, Homo sapiens
ttttactaccccatg

SEQ ID NO: 1881567 - DNA, 15 bp, Homo sapiens
tttactaccccatgg

SEQ ID NO: 1881568 - DNA, 15 bp, Homo sapiens
ttactaccccatggc

SEQ ID NO: 1881569 - DNA, 15 bp, Homo sapiens
tactaccccatggcc

SEQ ID NO: 1881570 - DNA, 15 bp, Homo sapiens
actaccccatggcct

SEQ ID NO: 1881571 - DNA, 15 bp, Homo sapiens
ctaccccatggcctg

SEQ ID NO: 1881572 - DNA, 15 bp, Homo sapiens
taccccatggcctgt

SEQ ID NO: 1881573 - DNA, 15 bp, Homo sapiens
accccatggcctgta

SEQ ID NO: 1881574 - DNA, 15 bp, Homo sapiens
ccccatggcctgtag

SEQ ID NO: 1881575 - DNA, 15 bp, Homo sapiens
cccatggcctgtagc

SEQ ID NO: 1881576 - DNA, 15 bp, Homo sapiens
ccatggcctgtagct

SEQ ID NO: 1881577 - DNA, 15 bp, Homo sapiens
catggcctgtagctg

SEQ ID NO: 1881578 - DNA, 15 bp, Homo sapiens
atggcctgtagctgc

SEQ ID NO: 1881579 - DNA, 15 bp, Homo sapiens
tggcctgtagctgct

SEQ ID NO: 1881580 - DNA, 15 bp, Homo sapiens
ggcctgtagctgctt

SEQ ID NO: 1881581 - DNA, 15 bp, Homo sapiens
gcctgtagctgcttc

SEQ ID NO: 1881582 - DNA, 15 bp, Homo sapiens
cctgtagctgcttct

SEQ ID NO: 1881583 - DNA, 15 bp, Homo sapiens
ctgtagctgcttctc

SEQ ID NO: 1881584 - DNA, 15 bp, Homo sapiens
tgtagctgcttctct

SEQ ID NO: 1881585 - DNA, 15 bp, Homo sapiens
gtagctgcttctctg

SEQ ID NO: 1881586 - DNA, 15 bp, Homo sapiens
tagctgcttctctga

SEQ ID NO: 1881587 - DNA, 15 bp, Homo sapiens
agctgcttctctgac

SEQ ID NO: 1881588 - DNA, 15 bp, Homo sapiens
gctgcttctctgact

SEQ ID NO: 1881589 - DNA, 15 bp, Homo sapiens
ctgcttctctgactc

SEQ ID NO: 1881590 - DNA, 15 bp, Homo sapiens
tgcttctctgactca

SEQ ID NO: 1881591 - DNA, 15 bp, Homo sapiens
gcttctctgactcaa

SEQ ID NO: 1881592 - DNA, 15 bp, Homo sapiens
cttctctgactcaat

SEQ ID NO: 1881593 - DNA, 15 bp, Homo sapiens
ttctctgactcaata

SEQ ID NO: 1881594 - DNA, 15 bp, Homo sapiens
tctctgactcaatat

SEQ ID NO: 1881595 - DNA, 15 bp, Homo sapiens
ctctgactcaatata

SEQ ID NO: 1881596 - DNA, 15 bp, Homo sapiens
tctgactcaatatat

SEQ ID NO: 1881597 - DNA, 15 bp, Homo sapiens
ctgactcaatatatt

SEQ ID NO: 1881598 - DNA, 15 bp, Homo sapiens
tgactcaatatatta

SEQ ID NO: 1881599 - DNA, 15 bp, Homo sapiens
gactcaatatattat

SEQ ID NO: 1881600 - DNA, 15 bp, Homo sapiens
actcaatatattatc

SEQ ID NO: 1881601 - DNA, 15 bp, Homo sapiens
ctcaatatattatct

SEQ ID NO: 1881602 - DNA, 15 bp, Homo sapiens
tcaatatattatctt

SEQ ID NO: 1881603 - DNA, 15 bp, Homo sapiens
caatatattatcttc

SEQ ID NO: 1881604 - DNA, 15 bp, Homo sapiens
aatatattatcttcc

SEQ ID NO: 1881605 - DNA, 15 bp, Homo sapiens
atatattatcttcct

SEQ ID NO: 1881606 - DNA, 15 bp, Homo sapiens
tatattatcttcctt

SEQ ID NO: 1881607 - DNA, 15 bp, Homo sapiens
atattatcttccttt

SEQ ID NO: 1881608 - DNA, 15 bp, Homo sapiens
tattatcttccttta

SEQ ID NO: 1881609 - DNA, 15 bp, Homo sapiens
attatcttcctttaa

SEQ ID NO: 1881610 - DNA, 15 bp, Homo sapiens
ttatcttcctttaag

SEQ ID NO: 1881611 - DNA, 15 bp, Homo sapiens
tatcttcctttaagg

SEQ ID NO: 1881612 - DNA, 15 bp, Homo sapiens
atcttcctttaaggc

SEQ ID NO: 1881613 - DNA, 15 bp, Homo sapiens
tcttcctttaaggca

SEQ ID NO: 1881614 - DNA, 15 bp, Homo sapiens
cttcctttaaggcaa

SEQ ID NO: 1881615 - DNA, 15 bp, Homo sapiens
ttcctttaaggcaaa

SEQ ID NO: 1881616 - DNA, 15 bp, Homo sapiens
tcctttaaggcaaac

SEQ ID NO: 1881617 - DNA, 15 bp, Homo sapiens
cctttaaggcaaact

SEQ ID NO: 1881618 - DNA, 15 bp, Homo sapiens
ctttaaggcaaacta

SEQ ID NO: 1881619 - DNA, 15 bp, Homo sapiens
tttaaggcaaactat

SEQ ID NO: 1881620 - DNA, 15 bp, Homo sapiens
ttaaggcaaactatt

SEQ ID NO: 1881621 - DNA, 15 bp, Homo sapiens
taaggcaaactattt

SEQ ID NO: 1881622 - DNA, 15 bp, Homo sapiens
aaggcaaactattta

SEQ ID NO: 1881623 - DNA, 15 bp, Homo sapiens
aggcaaactatttag

SEQ ID NO: 1881624 - DNA, 15 bp, Homo sapiens
ggcaaactatttagt

SEQ ID NO: 1881625 - DNA, 15 bp, Homo sapiens
gcaaactatttagtt

SEQ ID NO: 1881626 - DNA, 15 bp, Homo sapiens
caaactatttagttt

SEQ ID NO: 1881627 - DNA, 15 bp, Homo sapiens
aaactatttagtttt

SEQ ID NO: 1881628 - DNA, 15 bp, Homo sapiens
aactatttagttttc

SEQ ID NO: 1881629 - DNA, 15 bp, Homo sapiens
actatttagttttca

SEQ ID NO: 1881630 - DNA, 15 bp, Homo sapiens
ctatttagttttcag

SEQ ID NO: 1881631 - DNA, 15 bp, Homo sapiens
tatttagttttcagt

SEQ ID NO: 1881632 - DNA, 15 bp, Homo sapiens
atttagttttcagtt

SEQ ID NO: 1881633 - DNA, 15 bp, Homo sapiens
tttagttttcagtta

SEQ ID NO: 1881634 - DNA, 15 bp, Homo sapiens
ttagttttcagttag

SEQ ID NO: 1881635 - DNA, 15 bp, Homo sapiens
tagttttcagttagt

SEQ ID NO: 1881636 - DNA, 15 bp, Homo sapiens
agttttcagttagta

SEQ ID NO: 1881637 - DNA, 15 bp, Homo sapiens
gttttcagttagtag

SEQ ID NO: 1881638 - DNA, 15 bp, Homo sapiens
ttttcagttagtaga

SEQ ID NO: 1881639 - DNA, 15 bp, Homo sapiens
tttcagttagtagag

SEQ ID NO: 1881640 - DNA, 15 bp, Homo sapiens
ttcagttagtagagg

SEQ ID NO: 1881641 - DNA, 15 bp, Homo sapiens
tcagttagtagaggg

SEQ ID NO: 1881642 - DNA, 15 bp, Homo sapiens
cagttagtagagggt

SEQ ID NO: 1881643 - DNA, 15 bp, Homo sapiens
agttagtagagggtt

SEQ ID NO: 1881644 - DNA, 15 bp, Homo sapiens
gttagtagagggttt

SEQ ID NO: 1881645 - DNA, 15 bp, Homo sapiens
ttagtagagggtttc

SEQ ID NO: 1881646 - DNA, 15 bp, Homo sapiens
tagtagagggtttca

SEQ ID NO: 1881647 - DNA, 15 bp, Homo sapiens
agtagagggtttcaa

SEQ ID NO: 1881648 - DNA, 15 bp, Homo sapiens
gtagagggtttcaaa

SEQ ID NO: 1881649 - DNA, 15 bp, Homo sapiens
tagagggtttcaaaa

SEQ ID NO: 1881650 - DNA, 15 bp, Homo sapiens
agagggtttcaaaac

SEQ ID NO: 1881651 - DNA, 15 bp, Homo sapiens
gagggtttcaaaaca

SEQ ID NO: 1881652 - DNA, 15 bp, Homo sapiens
agggtttcaaaacaa

SEQ ID NO: 1881653 - DNA, 15 bp, Homo sapiens
gggtttcaaaacaaa

SEQ ID NO: 1881654 - DNA, 15 bp, Homo sapiens
ggtttcaaaacaaag

SEQ ID NO: 1881655 - DNA, 15 bp, Homo sapiens
gtttcaaaacaaagc

SEQ ID NO: 1881656 - DNA, 15 bp, Homo sapiens
tttcaaaacaaagca

SEQ ID NO: 1881657 - DNA, 15 bp, Homo sapiens
ttcaaaacaaagcaa

SEQ ID NO: 1881658 - DNA, 15 bp, Homo sapiens
tcaaaacaaagcaag

SEQ ID NO: 1881659 - DNA, 15 bp, Homo sapiens
caaaacaaagcaagt

SEQ ID NO: 1881660 - DNA, 15 bp, Homo sapiens
aaaacaaagcaagta

SEQ ID NO: 1881661 - DNA, 15 bp, Homo sapiens
aaacaaagcaagtag

SEQ ID NO: 1881662 - DNA, 15 bp, Homo sapiens
aacaaagcaagtaga

SEQ ID NO: 1881663 - DNA, 15 bp, Homo sapiens
acaaagcaagtagat

SEQ ID NO: 1881664 - DNA, 15 bp, Homo sapiens
caaagcaagtagatt

SEQ ID NO: 1881665 - DNA, 15 bp, Homo sapiens
aaagcaagtagatta

SEQ ID NO: 1881666 - DNA, 15 bp, Homo sapiens
aagcaagtagattaa

SEQ ID NO: 1881667 - DNA, 15 bp, Homo sapiens
agcaagtagattaat

SEQ ID NO: 1881668 - DNA, 15 bp, Homo sapiens
gcaagtagattaata

SEQ ID NO: 1881669 - DNA, 15 bp, Homo sapiens
caagtagattaataa

SEQ ID NO: 1881670 - DNA, 15 bp, Homo sapiens
aagtagattaataaa

SEQ ID NO: 1881671 - DNA, 15 bp, Homo sapiens
agtagattaataaaa

SEQ ID NO: 1881672 - DNA, 15 bp, Homo sapiens
gtagattaataaaaa

SEQ ID NO: 1881673 - DNA, 15 bp, Homo sapiens
tagattaataaaaag

SEQ ID NO: 1881674 - DNA, 15 bp, Homo sapiens
agattaataaaaagt

SEQ ID NO: 1881675 - DNA, 15 bp, Homo sapiens
gattaataaaaagtg

SEQ ID NO: 1881676 - DNA, 15 bp, Homo sapiens
attaataaaaagtgt

SEQ ID NO: 1881677 - DNA, 15 bp, Homo sapiens
ttaataaaaagtgta

SEQ ID NO: 1881678 - DNA, 15 bp, Homo sapiens
taataaaaagtgtaa

SEQ ID NO: 1881679 - DNA, 15 bp, Homo sapiens
aataaaaagtgtaaa

SEQ ID NO: 1881680 - DNA, 15 bp, Homo sapiens
ataaaaagtgtaaaa

SEQ ID NO: 1881681 - DNA, 15 bp, Homo sapiens
taaaaagtgtaaaaa

SEQ ID NO: 1881682 - DNA, 15 bp, Homo sapiens
aaaaagtgtaaaaat

SEQ ID NO: 1881683 - DNA, 15 bp, Homo sapiens
aaaagtgtaaaaatc

SEQ ID NO: 1881684 - DNA, 15 bp, Homo sapiens
aaagtgtaaaaatca

SEQ ID NO: 1881685 - DNA, 15 bp, Homo sapiens
aagtgtaaaaatcag

SEQ ID NO: 1881686 - DNA, 15 bp, Homo sapiens
agtgtaaaaatcaga

SEQ ID NO: 1881687 - DNA, 15 bp, Homo sapiens
gtgtaaaaatcagaa

SEQ ID NO: 1881688 - DNA, 15 bp, Homo sapiens
tgtaaaaatcagaat

SEQ ID NO: 1881689 - DNA, 15 bp, Homo sapiens
gtaaaaatcagaata

SEQ ID NO: 1881690 - DNA, 15 bp, Homo sapiens
taaaaatcagaataa

SEQ ID NO: 1881691 - DNA, 15 bp, Homo sapiens
aaaaatcagaataaa

SEQ ID NO: 1881692 - DNA, 15 bp, Homo sapiens
aaaatcagaataaat

SEQ ID NO: 1881693 - DNA, 15 bp, Homo sapiens
aaatcagaataaata

SEQ ID NO: 1881694 - DNA, 15 bp, Homo sapiens
aatcagaataaatag

SEQ ID NO: 1881695 - DNA, 15 bp, Homo sapiens
atcagaataaataga

SEQ ID NO: 1881696 - DNA, 15 bp, Homo sapiens
tcagaataaatagaa

SEQ ID NO: 1881697 - DNA, 15 bp, Homo sapiens
cagaataaatagaat

SEQ ID NO: 1881698 - DNA, 15 bp, Homo sapiens
agaataaatagaata

SEQ ID NO: 1881699 - DNA, 15 bp, Homo sapiens
gaataaatagaatag

SEQ ID NO: 1881700 - DNA, 15 bp, Homo sapiens
aataaatagaataga

SEQ ID NO: 1881701 - DNA, 15 bp, Homo sapiens
ataaatagaatagaa

SEQ ID NO: 1881702 - DNA, 15 bp, Homo sapiens
taaatagaatagaaa

SEQ ID NO: 1881703 - DNA, 15 bp, Homo sapiens
aaatagaatagaaaa

SEQ ID NO: 1881704 - DNA, 15 bp, Homo sapiens
aatagaatagaaaat

SEQ ID NO: 1881705 - DNA, 15 bp, Homo sapiens
atagaatagaaaata

SEQ ID NO: 1881706 - DNA, 15 bp, Homo sapiens
gaatagaaaatagat

SEQ ID NO: 1881707 - DNA, 15 bp, Homo sapiens
aatagaaaatagatt

SEQ ID NO: 1881708 - DNA, 15 bp, Homo sapiens
atagaaaatagattt

SEQ ID NO: 1881709 - DNA, 15 bp, Homo sapiens
tagaaaatagattta

SEQ ID NO: 1881710 - DNA, 15 bp, Homo sapiens
agaaaatagatttat

SEQ ID NO: 1881711 - DNA, 15 bp, Homo sapiens
gaaaatagatttatt

SEQ ID NO: 1881712 - DNA, 15 bp, Homo sapiens
aaaatagatttattt

SEQ ID NO: 1881713 - DNA, 15 bp, Homo sapiens
aaatagatttatttt

SEQ ID NO: 1881714 - DNA, 15 bp, Homo sapiens
aatagatttattttt

SEQ ID NO: 1881715 - DNA, 15 bp, Homo sapiens
atagatttattttta

SEQ ID NO: 1881716 - DNA, 15 bp, Homo sapiens
tagatttatttttat

SEQ ID NO: 1881717 - DNA, 15 bp, Homo sapiens
agatttatttttatt

SEQ ID NO: 1881718 - DNA, 15 bp, Homo sapiens
gatttatttttattt

SEQ ID NO: 1881719 - DNA, 15 bp, Homo sapiens
tttatttttattttg

SEQ ID NO: 1881720 - DNA, 15 bp, Homo sapiens
ttatttttattttgt

SEQ ID NO: 1881721 - DNA, 15 bp, Homo sapiens
tatttttattttgtc

SEQ ID NO: 1881722 - DNA, 15 bp, Homo sapiens
atttttattttgtca

SEQ ID NO: 1881723 - DNA, 15 bp, Homo sapiens
tttttattttgtcat

SEQ ID NO: 1881724 - DNA, 15 bp, Homo sapiens
ttttattttgtcatg

SEQ ID NO: 1881725 - DNA, 15 bp, Homo sapiens
tttattttgtcatgt

SEQ ID NO: 1881726 - DNA, 15 bp, Homo sapiens
ttattttgtcatgta

SEQ ID NO: 1881727 - DNA, 15 bp, Homo sapiens
tattttgtcatgtaa

SEQ ID NO: 1881728 - DNA, 15 bp, Homo sapiens
attttgtcatgtaat

SEQ ID NO: 1881729 - DNA, 15 bp, Homo sapiens
ttttgtcatgtaatc

SEQ ID NO: 1881730 - DNA, 15 bp, Homo sapiens
tttgtcatgtaatct

SEQ ID NO: 1881731 - DNA, 15 bp, Homo sapiens
ttgtcatgtaatctc

SEQ ID NO: 1881732 - DNA, 15 bp, Homo sapiens
tgtcatgtaatctcg

SEQ ID NO: 1881733 - DNA, 15 bp, Homo sapiens
gtcatgtaatctcgg

SEQ ID NO: 1881734 - DNA, 15 bp, Homo sapiens
tcatgtaatctcggc

SEQ ID NO: 1881735 - DNA, 15 bp, Homo sapiens
catgtaatctcggct

SEQ ID NO: 1881736 - DNA, 15 bp, Homo sapiens
atgtaatctcggctg

SEQ ID NO: 1881737 - DNA, 15 bp, Homo sapiens
tgtaatctcggctga

SEQ ID NO: 1881738 - DNA, 15 bp, Homo sapiens
gtaatctcggctgat

SEQ ID NO: 1881739 - DNA, 15 bp, Homo sapiens
taatctcggctgata

SEQ ID NO: 1881740 - DNA, 15 bp, Homo sapiens
aatctcggctgataa

SEQ ID NO: 1881741 - DNA, 15 bp, Homo sapiens
atctcggctgataaa

SEQ ID NO: 1881742 - DNA, 15 bp, Homo sapiens
tctcggctgataaaa

SEQ ID NO: 1881743 - DNA, 15 bp, Homo sapiens
ctcggctgataaaac

SEQ ID NO: 1881744 - DNA, 15 bp, Homo sapiens
tcggctgataaaaca

SEQ ID NO: 1881745 - DNA, 15 bp, Homo sapiens
cggctgataaaacag

SEQ ID NO: 1881746 - DNA, 15 bp, Homo sapiens
ggctgataaaacagg

SEQ ID NO: 1881747 - DNA, 15 bp, Homo sapiens
gctgataaaacagga

SEQ ID NO: 1881748 - DNA, 15 bp, Homo sapiens
ctgataaaacaggaa

SEQ ID NO: 1881749 - DNA, 15 bp, Homo sapiens
tgataaaacaggaat

SEQ ID NO: 1881750 - DNA, 15 bp, Homo sapiens
gataaaacaggaata

SEQ ID NO: 1881751 - DNA, 15 bp, Homo sapiens
ataaaacaggaatat

SEQ ID NO: 1881752 - DNA, 15 bp, Homo sapiens
taaaacaggaatata

SEQ ID NO: 1881753 - DNA, 15 bp, Homo sapiens
aaaacaggaatatac

SEQ ID NO: 1881754 - DNA, 15 bp, Homo sapiens
aaacaggaatataca

SEQ ID NO: 1881755 - DNA, 15 bp, Homo sapiens
aacaggaatatacat

SEQ ID NO: 1881756 - DNA, 15 bp, Homo sapiens
acaggaatatacata

SEQ ID NO: 1881757 - DNA, 15 bp, Homo sapiens
caggaatatacatat

SEQ ID NO: 1881758 - DNA, 15 bp, Homo sapiens
aggaatatacatatg

SEQ ID NO: 1881759 - DNA, 15 bp, Homo sapiens
ggaatatacatatgt

SEQ ID NO: 1881760 - DNA, 15 bp, Homo sapiens
gaatatacatatgtg

SEQ ID NO: 1881761 - DNA, 15 bp, Homo sapiens
aatatacatatgtgt

SEQ ID NO: 1881762 - DNA, 15 bp, Homo sapiens
atatacatatgtgtg

SEQ ID NO: 1881763 - DNA, 15 bp, Homo sapiens
tatacatatgtgtgt

SEQ ID NO: 1881764 - DNA, 15 bp, Homo sapiens
atacatatgtgtgta

SEQ ID NO: 1881765 - DNA, 15 bp, Homo sapiens
tacatatgtgtgtag

SEQ ID NO: 1881766 - DNA, 15 bp, Homo sapiens
acatatgtgtgtagt

SEQ ID NO: 1881767 - DNA, 15 bp, Homo sapiens
catatgtgtgtagtg

SEQ ID NO: 1881768 - DNA, 15 bp, Homo sapiens
atatgtgtgtagtgg

SEQ ID NO: 1881769 - DNA, 15 bp, Homo sapiens
tatgtgtgtagtggt

SEQ ID NO: 1881770 - DNA, 15 bp, Homo sapiens
atgtgtgtagtggtc

SEQ ID NO: 1881771 - DNA, 15 bp, Homo sapiens
tgtgtgtagtggtca

SEQ ID NO: 1881772 - DNA, 15 bp, Homo sapiens
gtgtgtagtggtcag

SEQ ID NO: 1881773 - DNA, 15 bp, Homo sapiens
tgtgtagtggtcagt

SEQ ID NO: 1881774 - DNA, 15 bp, Homo sapiens
gtgtagtggtcagtt

SEQ ID NO: 1881775 - DNA, 15 bp, Homo sapiens
tgtagtggtcagttt

SEQ ID NO: 1881776 - DNA, 15 bp, Homo sapiens
gtagtggtcagtttc

SEQ ID NO: 1881777 - DNA, 15 bp, Homo sapiens
tagtggtcagtttca

SEQ ID NO: 1881778 - DNA, 15 bp, Homo sapiens
agtggtcagtttcaa

SEQ ID NO: 1881779 - DNA, 15 bp, Homo sapiens
gtggtcagtttcaaa

SEQ ID NO: 1881780 - DNA, 15 bp, Homo sapiens
tggtcagtttcaaaa

SEQ ID NO: 1881781 - DNA, 15 bp, Homo sapiens
ggtcagtttcaaaat

SEQ ID NO: 1881782 - DNA, 15 bp, Homo sapiens
gtcagtttcaaaatc

SEQ ID NO: 1881783 - DNA, 15 bp, Homo sapiens
tcagtttcaaaatca

SEQ ID NO: 1881784 - DNA, 15 bp, Homo sapiens
cagtttcaaaatcat

SEQ ID NO: 1881785 - DNA, 15 bp, Homo sapiens
agtttcaaaatcatg

SEQ ID NO: 1881786 - DNA, 15 bp, Homo sapiens
gtttcaaaatcatgc

SEQ ID NO: 1881787 - DNA, 15 bp, Homo sapiens
tttcaaaatcatgcc

SEQ ID NO: 1881788 - DNA, 15 bp, Homo sapiens
ttcaaaatcatgcca

SEQ ID NO: 1881789 - DNA, 15 bp, Homo sapiens
tcaaaatcatgccag

SEQ ID NO: 1881790 - DNA, 15 bp, Homo sapiens
caaaatcatgccagt

SEQ ID NO: 1881791 - DNA, 15 bp, Homo sapiens
aaaatcatgccagtt

SEQ ID NO: 1881792 - DNA, 15 bp, Homo sapiens
aaatcatgccagtta

SEQ ID NO: 1881793 - DNA, 15 bp, Homo sapiens
aatcatgccagttaa

SEQ ID NO: 1881794 - DNA, 15 bp, Homo sapiens
atcatgccagttaaa

SEQ ID NO: 1881795 - DNA, 15 bp, Homo sapiens
tcatgccagttaaag

SEQ ID NO: 1881796 - DNA, 15 bp, Homo sapiens
catgccagttaaagt

SEQ ID NO: 1881797 - DNA, 15 bp, Homo sapiens
atgccagttaaagtt

SEQ ID NO: 1881798 - DNA, 15 bp, Homo sapiens
tgccagttaaagttc

SEQ ID NO: 1881799 - DNA, 15 bp, Homo sapiens
gccagttaaagttct

SEQ ID NO: 1881800 - DNA, 15 bp, Homo sapiens
ccagttaaagttctc

SEQ ID NO: 1881801 - DNA, 15 bp, Homo sapiens
cagttaaagttctct

SEQ ID NO: 1881802 - DNA, 15 bp, Homo sapiens
agttaaagttctctg

SEQ ID NO: 1881803 - DNA, 15 bp, Homo sapiens
gttaaagttctctgt

SEQ ID NO: 1881804 - DNA, 15 bp, Homo sapiens
ttaaagttctctgtg

SEQ ID NO: 1881805 - DNA, 15 bp, Homo sapiens
taaagttctctgtgt

SEQ ID NO: 1881806 - DNA, 15 bp, Homo sapiens
aaagttctctgtgtt

SEQ ID NO: 1881807 - DNA, 15 bp, Homo sapiens
aagttctctgtgttt

SEQ ID NO: 1881808 - DNA, 15 bp, Homo sapiens
agttctctgtgtttt

SEQ ID NO: 1881809 - DNA, 15 bp, Homo sapiens
gttctctgtgtttta

SEQ ID NO: 1881810 - DNA, 15 bp, Homo sapiens
ttctctgtgttttaa

SEQ ID NO: 1881811 - DNA, 15 bp, Homo sapiens
tctctgtgttttaat

SEQ ID NO: 1881812 - DNA, 15 bp, Homo sapiens
ctctgtgttttaatt

SEQ ID NO: 1881813 - DNA, 15 bp, Homo sapiens
tctgtgttttaattt

SEQ ID NO: 1881814 - DNA, 15 bp, Homo sapiens
ctgtgttttaatttt

SEQ ID NO: 1881815 - DNA, 15 bp, Homo sapiens
tgtgttttaattttt

SEQ ID NO: 1881816 - DNA, 15 bp, Homo sapiens
gtgttttaatttttc

SEQ ID NO: 1881817 - DNA, 15 bp, Homo sapiens
tgttttaatttttct

SEQ ID NO: 1881818 - DNA, 15 bp, Homo sapiens
gttttaatttttctt

SEQ ID NO: 1881819 - DNA, 15 bp, Homo sapiens
ttttaatttttctta

SEQ ID NO: 1881820 - DNA, 15 bp, Homo sapiens
tttaatttttcttaa

SEQ ID NO: 1881821 - DNA, 15 bp, Homo sapiens
ttaatttttcttaaa

SEQ ID NO: 1881822 - DNA, 15 bp, Homo sapiens
taatttttcttaaag

SEQ ID NO: 1881823 - DNA, 15 bp, Homo sapiens
aatttttcttaaagg

SEQ ID NO: 1881824 - DNA, 15 bp, Homo sapiens
atttttcttaaaggc

SEQ ID NO: 1881825 - DNA, 15 bp, Homo sapiens
tttttcttaaaggca

SEQ ID NO: 1881826 - DNA, 15 bp, Homo sapiens
ttttcttaaaggcat

SEQ ID NO: 1881827 - DNA, 15 bp, Homo sapiens
tttcttaaaggcata

SEQ ID NO: 1881828 - DNA, 15 bp, Homo sapiens
ttcttaaaggcatat

SEQ ID NO: 1881829 - DNA, 15 bp, Homo sapiens
tcttaaaggcatata

SEQ ID NO: 1881830 - DNA, 15 bp, Homo sapiens
cttaaaggcatatat

SEQ ID NO: 1881831 - DNA, 15 bp, Homo sapiens
ttaaaggcatatata

SEQ ID NO: 1881832 - DNA, 15 bp, Homo sapiens
taaaggcatatataa

SEQ ID NO: 1881833 - DNA, 15 bp, Homo sapiens
aaaggcatatataaa

SEQ ID NO: 1881834 - DNA, 15 bp, Homo sapiens
aaggcatatataaaa

SEQ ID NO: 1881835 - DNA, 15 bp, Homo sapiens
aggcatatataaaaa

SEQ ID NO: 1881836 - DNA, 15 bp, Homo sapiens
ggcatatataaaaaa

SEQ ID NO: 1881837 - DNA, 15 bp, Homo sapiens
gcatatataaaaaag

SEQ ID NO: 1881838 - DNA, 15 bp, Homo sapiens
catatataaaaaaga

SEQ ID NO: 1881839 - DNA, 15 bp, Homo sapiens
atatataaaaaagaa

SEQ ID NO: 1881840 - DNA, 15 bp, Homo sapiens
tatataaaaaagaat

SEQ ID NO: 1881841 - DNA, 15 bp, Homo sapiens
atataaaaaagaatc

SEQ ID NO: 1881842 - DNA, 15 bp, Homo sapiens
tataaaaaagaatct

SEQ ID NO: 1881843 - DNA, 15 bp, Homo sapiens
ataaaaaagaatctc

SEQ ID NO: 1881844 - DNA, 15 bp, Homo sapiens
taaaaaagaatctca

SEQ ID NO: 1881845 - DNA, 15 bp, Homo sapiens
aaaaaagaatctcag

SEQ ID NO: 1881846 - DNA, 15 bp, Homo sapiens
aaaaagaatctcaga

SEQ ID NO: 1881847 - DNA, 15 bp, Homo sapiens
aaaagaatctcagag

SEQ ID NO: 1881848 - DNA, 15 bp, Homo sapiens
aaagaatctcagaga

SEQ ID NO: 1881849 - DNA, 15 bp, Homo sapiens
aagaatctcagagaa

SEQ ID NO: 1881850 - DNA, 15 bp, Homo sapiens
agaatctcagagaaa

SEQ ID NO: 1881851 - DNA, 15 bp, Homo sapiens
gaatctcagagaaag

SEQ ID NO: 1881852 - DNA, 15 bp, Homo sapiens
aatctcagagaaagg

SEQ ID NO: 1881853 - DNA, 15 bp, Homo sapiens
atctcagagaaagga

SEQ ID NO: 1881854 - DNA, 15 bp, Homo sapiens
tctcagagaaaggag

SEQ ID NO: 1881855 - DNA, 15 bp, Homo sapiens
ctcagagaaaggaga

SEQ ID NO: 1881856 - DNA, 15 bp, Homo sapiens
tcagagaaaggagac

SEQ ID NO: 1881857 - DNA, 15 bp, Homo sapiens
cagagaaaggagaca

SEQ ID NO: 1881858 - DNA, 15 bp, Homo sapiens
agagaaaggagacac

SEQ ID NO: 1881859 - DNA, 15 bp, Homo sapiens
gagaaaggagacaca

SEQ ID NO: 1881860 - DNA, 15 bp, Homo sapiens
agaaaggagacacat

SEQ ID NO: 1881861 - DNA, 15 bp, Homo sapiens
gaaaggagacacatt

SEQ ID NO: 1881862 - DNA, 15 bp, Homo sapiens
aaaggagacacattc

SEQ ID NO: 1881863 - DNA, 15 bp, Homo sapiens
aaggagacacattca

SEQ ID NO: 1881864 - DNA, 15 bp, Homo sapiens
aggagacacattcat

SEQ ID NO: 1881865 - DNA, 15 bp, Homo sapiens
catccaacatcaact

SEQ ID NO: 1881866 - DNA, 15 bp, Homo sapiens
atccaacatcaactg

SEQ ID NO: 1881867 - DNA, 15 bp, Homo sapiens
tccaacatcaactga

SEQ ID NO: 1881868 - DNA, 15 bp, Homo sapiens
ccaacatcaactgaa

SEQ ID NO: 1881869 - DNA, 15 bp, Homo sapiens
caacatcaactgaat

SEQ ID NO: 1881870 - DNA, 15 bp, Homo sapiens
aacatcaactgaatg

SEQ ID NO: 1881871 - DNA, 15 bp, Homo sapiens
acatcaactgaatgc

SEQ ID NO: 1881872 - DNA, 15 bp, Homo sapiens
catcaactgaatgct

SEQ ID NO: 1881873 - DNA, 15 bp, Homo sapiens
atcaactgaatgctt

SEQ ID NO: 1881874 - DNA, 15 bp, Homo sapiens
tcaactgaatgctta

SEQ ID NO: 1881875 - DNA, 15 bp, Homo sapiens
caactgaatgcttac

SEQ ID NO: 1881876 - DNA, 15 bp, Homo sapiens
aactgaatgcttaca

SEQ ID NO: 1881877 - DNA, 15 bp, Homo sapiens
actgaatgcttacag

SEQ ID NO: 1881878 - DNA, 15 bp, Homo sapiens
ctgaatgcttacagt

SEQ ID NO: 1881879 - DNA, 15 bp, Homo sapiens
tgaatgcttacagtg

SEQ ID NO: 1881880 - DNA, 15 bp, Homo sapiens
gaatgcttacagtga

SEQ ID NO: 1881881 - DNA, 15 bp, Homo sapiens
aatgcttacagtgat

SEQ ID NO: 1881882 - DNA, 15 bp, Homo sapiens
atgcttacagtgatc

SEQ ID NO: 1881883 - DNA, 15 bp, Homo sapiens
tgcttacagtgatct

SEQ ID NO: 1881884 - DNA, 15 bp, Homo sapiens
gcttacagtgatctt

SEQ ID NO: 1881885 - DNA, 15 bp, Homo sapiens
cttacagtgatctta

SEQ ID NO: 1881886 - DNA, 15 bp, Homo sapiens
ttacagtgatcttat

SEQ ID NO: 1881887 - DNA, 15 bp, Homo sapiens
tacagtgatcttatt

SEQ ID NO: 1881888 - DNA, 15 bp, Homo sapiens
acagtgatcttattt

SEQ ID NO: 1881889 - DNA, 15 bp, Homo sapiens
cagtgatcttatttt

SEQ ID NO: 1881890 - DNA, 15 bp, Homo sapiens
agtgatcttatttta

SEQ ID NO: 1881891 - DNA, 15 bp, Homo sapiens
gtgatcttattttac

SEQ ID NO: 1881892 - DNA, 15 bp, Homo sapiens
tgatcttattttaca

SEQ ID NO: 1881893 - DNA, 15 bp, Homo sapiens
gatcttattttacac

SEQ ID NO: 1881894 - DNA, 15 bp, Homo sapiens
atcttattttacaca

SEQ ID NO: 1881895 - DNA, 15 bp, Homo sapiens
tcttattttacacat

SEQ ID NO: 1881896 - DNA, 15 bp, Homo sapiens
cttattttacacatt

SEQ ID NO: 1881897 - DNA, 15 bp, Homo sapiens
ttattttacacatta

SEQ ID NO: 1881898 - DNA, 15 bp, Homo sapiens
tattttacacattag

SEQ ID NO: 1881899 - DNA, 15 bp, Homo sapiens
attttacacattaga

SEQ ID NO: 1881900 - DNA, 15 bp, Homo sapiens
ttttacacattagaa

SEQ ID NO: 1881901 - DNA, 15 bp, Homo sapiens
tttacacattagaaa

SEQ ID NO: 1881902 - DNA, 15 bp, Homo sapiens
ttacacattagaaaa

SEQ ID NO: 1881903 - DNA, 15 bp, Homo sapiens
tacacattagaaaac

SEQ ID NO: 1881904 - DNA, 15 bp, Homo sapiens
acacattagaaaact

SEQ ID NO: 1881905 - DNA, 15 bp, Homo sapiens
cacattagaaaacta

SEQ ID NO: 1881906 - DNA, 15 bp, Homo sapiens
acattagaaaactaa

SEQ ID NO: 1881907 - DNA, 15 bp, Homo sapiens
cattagaaaactaag

SEQ ID NO: 1881908 - DNA, 15 bp, Homo sapiens
attagaaaactaagc

SEQ ID NO: 1881909 - DNA, 15 bp, Homo sapiens
ttagaaaactaagcc

SEQ ID NO: 1881910 - DNA, 15 bp, Homo sapiens
tagaaaactaagccc

SEQ ID NO: 1881911 - DNA, 15 bp, Homo sapiens
agaaaactaagcccc

SEQ ID NO: 1881912 - DNA, 15 bp, Homo sapiens
gaaaactaagcccca

SEQ ID NO: 1881913 - DNA, 15 bp, Homo sapiens
aaaactaagccccaa

SEQ ID NO: 1881914 - DNA, 15 bp, Homo sapiens
aaactaagccccaag

SEQ ID NO: 1881915 - DNA, 15 bp, Homo sapiens
aactaagccccaagg

SEQ ID NO: 1881916 - DNA, 15 bp, Homo sapiens
actaagccccaagga

SEQ ID NO: 1881917 - DNA, 15 bp, Homo sapiens
ctaagccccaaggaa

SEQ ID NO: 1881918 - DNA, 15 bp, Homo sapiens
taagccccaaggaat

SEQ ID NO: 1881919 - DNA, 15 bp, Homo sapiens
aagccccaaggaatc

SEQ ID NO: 1881920 - DNA, 15 bp, Homo sapiens
agccccaaggaatca

SEQ ID NO: 1881921 - DNA, 15 bp, Homo sapiens
gccccaaggaatcaa

SEQ ID NO: 1881922 - DNA, 15 bp, Homo sapiens
ccccaaggaatcaag

SEQ ID NO: 1881923 - DNA, 15 bp, Homo sapiens
cccaaggaatcaaga

SEQ ID NO: 1881924 - DNA, 15 bp, Homo sapiens
ccaaggaatcaagaa

SEQ ID NO: 1881925 - DNA, 15 bp, Homo sapiens
caaggaatcaagaaa

SEQ ID NO: 1881926 - DNA, 15 bp, Homo sapiens
aaggaatcaagaaaa

SEQ ID NO: 1881927 - DNA, 15 bp, Homo sapiens
aggaatcaagaaaag

SEQ ID NO: 1881928 - DNA, 15 bp, Homo sapiens
ggaatcaagaaaagc

SEQ ID NO: 1881929 - DNA, 15 bp, Homo sapiens
gaatcaagaaaagca

SEQ ID NO: 1881930 - DNA, 15 bp, Homo sapiens
aatcaagaaaagcaa

SEQ ID NO: 1881931 - DNA, 15 bp, Homo sapiens
atcaagaaaagcaac

SEQ ID NO: 1881932 - DNA, 15 bp, Homo sapiens
tcaagaaaagcaacc

SEQ ID NO: 1881933 - DNA, 15 bp, Homo sapiens
caagaaaagcaacca

SEQ ID NO: 1881934 - DNA, 15 bp, Homo sapiens
aagaaaagcaaccaa

SEQ ID NO: 1881935 - DNA, 15 bp, Homo sapiens
agaaaagcaaccaag

SEQ ID NO: 1881936 - DNA, 15 bp, Homo sapiens
gaaaagcaaccaagg

SEQ ID NO: 1881937 - DNA, 15 bp, Homo sapiens
aaaagcaaccaaggt

SEQ ID NO: 1881938 - DNA, 15 bp, Homo sapiens
aaagcaaccaaggtc

SEQ ID NO: 1881939 - DNA, 15 bp, Homo sapiens
aagcaaccaaggtca

SEQ ID NO: 1881940 - DNA, 15 bp, Homo sapiens
agcaaccaaggtcac

SEQ ID NO: 1881941 - DNA, 15 bp, Homo sapiens
gcaaccaaggtcaca

SEQ ID NO: 1881942 - DNA, 15 bp, Homo sapiens
caaccaaggtcacat

SEQ ID NO: 1881943 - DNA, 15 bp, Homo sapiens
aaccaaggtcacata

SEQ ID NO: 1881944 - DNA, 15 bp, Homo sapiens
accaaggtcacatag

SEQ ID NO: 1881945 - DNA, 15 bp, Homo sapiens
ccaaggtcacatagc

SEQ ID NO: 1881946 - DNA, 15 bp, Homo sapiens
caaggtcacatagcc

SEQ ID NO: 1881947 - DNA, 15 bp, Homo sapiens
aaggtcacatagccc

SEQ ID NO: 1881948 - DNA, 15 bp, Homo sapiens
aggtcacatagccca

SEQ ID NO: 1881949 - DNA, 15 bp, Homo sapiens
ggtcacatagcccag

SEQ ID NO: 1881950 - DNA, 15 bp, Homo sapiens
gtcacatagcccagc

SEQ ID NO: 1881951 - DNA, 15 bp, Homo sapiens
tcacatagcccagct

SEQ ID NO: 1881952 - DNA, 15 bp, Homo sapiens
cacatagcccagcta

SEQ ID NO: 1881953 - DNA, 15 bp, Homo sapiens
acatagcccagctat

SEQ ID NO: 1881954 - DNA, 15 bp, Homo sapiens
catagcccagctatc

SEQ ID NO: 1881955 - DNA, 15 bp, Homo sapiens
atagcccagctatct

SEQ ID NO: 1881956 - DNA, 15 bp, Homo sapiens
tagcccagctatcta

SEQ ID NO: 1881957 - DNA, 15 bp, Homo sapiens
agcccagctatctag

SEQ ID NO: 1881958 - DNA, 15 bp, Homo sapiens
gcccagctatctagt

SEQ ID NO: 1881959 - DNA, 15 bp, Homo sapiens
cccagctatctagtt

SEQ ID NO: 1881960 - DNA, 15 bp, Homo sapiens
ccagctatctagttt

SEQ ID NO: 1881961 - DNA, 15 bp, Homo sapiens
cagctatctagttta

SEQ ID NO: 1881962 - DNA, 15 bp, Homo sapiens
agctatctagtttaa

SEQ ID NO: 1881963 - DNA, 15 bp, Homo sapiens
gctatctagtttaaa

SEQ ID NO: 1881964 - DNA, 15 bp, Homo sapiens
ctatctagtttaaag

SEQ ID NO: 1881965 - DNA, 15 bp, Homo sapiens
tatctagtttaaagg

SEQ ID NO: 1881966 - DNA, 15 bp, Homo sapiens
atctagtttaaaggg

SEQ ID NO: 1881967 - DNA, 15 bp, Homo sapiens
tctagtttaaagggg

SEQ ID NO: 1881968 - DNA, 15 bp, Homo sapiens
ctagtttaaaggggt

SEQ ID NO: 1881969 - DNA, 15 bp, Homo sapiens
tagtttaaaggggtt

SEQ ID NO: 1881970 - DNA, 15 bp, Homo sapiens
agtttaaaggggttt

SEQ ID NO: 1881971 - DNA, 15 bp, Homo sapiens
gtttaaaggggtttt

SEQ ID NO: 1881972 - DNA, 15 bp, Homo sapiens
tttaaaggggttttg

SEQ ID NO: 1881973 - DNA, 15 bp, Homo sapiens
ttaaaggggttttgc

SEQ ID NO: 1881974 - DNA, 15 bp, Homo sapiens
taaaggggttttgcc

SEQ ID NO: 1881975 - DNA, 15 bp, Homo sapiens
aaaggggttttgcct

SEQ ID NO: 1881976 - DNA, 15 bp, Homo sapiens
aaggggttttgcctt

SEQ ID NO: 1881977 - DNA, 15 bp, Homo sapiens
aggggttttgccttt

SEQ ID NO: 1881978 - DNA, 15 bp, Homo sapiens
ggggttttgccttta

SEQ ID NO: 1881979 - DNA, 15 bp, Homo sapiens
gggttttgcctttaa

SEQ ID NO: 1881980 - DNA, 15 bp, Homo sapiens
ggttttgcctttaaa

SEQ ID NO: 1881981 - DNA, 15 bp, Homo sapiens
gttttgcctttaaac

SEQ ID NO: 1881982 - DNA, 15 bp, Homo sapiens
ttttgcctttaaact

SEQ ID NO: 1881983 - DNA, 15 bp, Homo sapiens
tttgcctttaaacta

SEQ ID NO: 1881984 - DNA, 15 bp, Homo sapiens
ttgcctttaaactaa

SEQ ID NO: 1881985 - DNA, 15 bp, Homo sapiens
tgcctttaaactaaa

SEQ ID NO: 1881986 - DNA, 15 bp, Homo sapiens
gcctttaaactaaat

SEQ ID NO: 1881987 - DNA, 15 bp, Homo sapiens
cctttaaactaaatg

SEQ ID NO: 1881988 - DNA, 15 bp, Homo sapiens
ctttaaactaaatgg

SEQ ID NO: 1881989 - DNA, 15 bp, Homo sapiens
tttaaactaaatggt

SEQ ID NO: 1881990 - DNA, 15 bp, Homo sapiens
ttaaactaaatggta

SEQ ID NO: 1881991 - DNA, 15 bp, Homo sapiens
taaactaaatggtaa

SEQ ID NO: 1881992 - DNA, 15 bp, Homo sapiens
aaactaaatggtaag

SEQ ID NO: 1881993 - DNA, 15 bp, Homo sapiens
aactaaatggtaagg

SEQ ID NO: 1881994 - DNA, 15 bp, Homo sapiens
actaaatggtaaggt

SEQ ID NO: 1881995 - DNA, 15 bp, Homo sapiens
ctaaatggtaaggtt

SEQ ID NO: 1881996 - DNA, 15 bp, Homo sapiens
taaatggtaaggttc

SEQ ID NO: 1881997 - DNA, 15 bp, Homo sapiens
aaatggtaaggttcc

SEQ ID NO: 1881998 - DNA, 15 bp, Homo sapiens
aatggtaaggttcct

SEQ ID NO: 1881999 - DNA, 15 bp, Homo sapiens
atggtaaggttcctg

SEQ ID NO: 1882000 - DNA, 15 bp, Homo sapiens
tggtaaggttcctgt

SEQ ID NO: 1882001 - DNA, 15 bp, Homo sapiens
ggtaaggttcctgtt

SEQ ID NO: 1882002 - DNA, 15 bp, Homo sapiens
gtaaggttcctgttg

SEQ ID NO: 1882003 - DNA, 15 bp, Homo sapiens
taaggttcctgttga

SEQ ID NO: 1882004 - DNA, 15 bp, Homo sapiens
aaggttcctgttgac

SEQ ID NO: 1882005 - DNA, 15 bp, Homo sapiens
aggttcctgttgact

SEQ ID NO: 1882006 - DNA, 15 bp, Homo sapiens
ggttcctgttgactt

SEQ ID NO: 1882007 - DNA, 15 bp, Homo sapiens
gttcctgttgacttc

SEQ ID NO: 1882008 - DNA, 15 bp, Homo sapiens
ttcctgttgacttcc

SEQ ID NO: 1882009 - DNA, 15 bp, Homo sapiens
tcctgttgacttcct

SEQ ID NO: 1882010 - DNA, 15 bp, Homo sapiens
cctgttgacttccta

SEQ ID NO: 1882011 - DNA, 15 bp, Homo sapiens
ctgttgacttcctaa

SEQ ID NO: 1882012 - DNA, 15 bp, Homo sapiens
tgttgacttcctaaa

SEQ ID NO: 1882013 - DNA, 15 bp, Homo sapiens
gttgacttcctaaat

SEQ ID NO: 1882014 - DNA, 15 bp, Homo sapiens
ttgacttcctaaatc

SEQ ID NO: 1882015 - DNA, 15 bp, Homo sapiens
tgacttcctaaatcc

SEQ ID NO: 1882016 - DNA, 15 bp, Homo sapiens
gacttcctaaatccc

SEQ ID NO: 1882017 - DNA, 15 bp, Homo sapiens
acttcctaaatccca

SEQ ID NO: 1882018 - DNA, 15 bp, Homo sapiens
cttcctaaatcccaa

SEQ ID NO: 1882019 - DNA, 15 bp, Homo sapiens
ttcctaaatcccaaa

SEQ ID NO: 1882020 - DNA, 15 bp, Homo sapiens
tcctaaatcccaaac

SEQ ID NO: 1882021 - DNA, 15 bp, Homo sapiens
cctaaatcccaaacc

SEQ ID NO: 1882022 - DNA, 15 bp, Homo sapiens
ctaaatcccaaacca

SEQ ID NO: 1882023 - DNA, 15 bp, Homo sapiens
taaatcccaaaccag

SEQ ID NO: 1882024 - DNA, 15 bp, Homo sapiens
aaatcccaaaccagc

SEQ ID NO: 1882025 - DNA, 15 bp, Homo sapiens
aatcccaaaccagct

SEQ ID NO: 1882026 - DNA, 15 bp, Homo sapiens
atcccaaaccagctt

SEQ ID NO: 1882027 - DNA, 15 bp, Homo sapiens
tcccaaaccagcttg

SEQ ID NO: 1882028 - DNA, 15 bp, Homo sapiens
cccaaaccagcttga

SEQ ID NO: 1882029 - DNA, 15 bp, Homo sapiens
ccaaaccagcttgat

SEQ ID NO: 1882030 - DNA, 15 bp, Homo sapiens
caaaccagcttgata

SEQ ID NO: 1882031 - DNA, 15 bp, Homo sapiens
aaaccagcttgatac

SEQ ID NO: 1882032 - DNA, 15 bp, Homo sapiens
aaccagcttgatact

SEQ ID NO: 1882033 - DNA, 15 bp, Homo sapiens
accagcttgatactt

SEQ ID NO: 1882034 - DNA, 15 bp, Homo sapiens
ccagcttgatacttt

SEQ ID NO: 1882035 - DNA, 15 bp, Homo sapiens
cagcttgatactttt

SEQ ID NO: 1882036 - DNA, 15 bp, Homo sapiens
agcttgatacttttt

SEQ ID NO: 1882037 - DNA, 15 bp, Homo sapiens
gcttgatacttttta

SEQ ID NO: 1882038 - DNA, 15 bp, Homo sapiens
cttgatactttttag

SEQ ID NO: 1882039 - DNA, 15 bp, Homo sapiens
ttgatactttttagt

SEQ ID NO: 1882040 - DNA, 15 bp, Homo sapiens
tgatactttttagtt

SEQ ID NO: 1882041 - DNA, 15 bp, Homo sapiens
gatactttttagttc

SEQ ID NO: 1882042 - DNA, 15 bp, Homo sapiens
atactttttagttct

SEQ ID NO: 1882043 - DNA, 15 bp, Homo sapiens
tactttttagttctc

SEQ ID NO: 1882044 - DNA, 15 bp, Homo sapiens
actttttagttctcg

SEQ ID NO: 1882045 - DNA, 15 bp, Homo sapiens
ctttttagttctcgt

SEQ ID NO: 1882046 - DNA, 15 bp, Homo sapiens
tttttagttctcgtc

SEQ ID NO: 1882047 - DNA, 15 bp, Homo sapiens
ttttagttctcgtct

SEQ ID NO: 1882048 - DNA, 15 bp, Homo sapiens
tttagttctcgtctt

SEQ ID NO: 1882049 - DNA, 15 bp, Homo sapiens
ttagttctcgtctta

SEQ ID NO: 1882050 - DNA, 15 bp, Homo sapiens
tagttctcgtcttac

SEQ ID NO: 1882051 - DNA, 15 bp, Homo sapiens
agttctcgtcttact

SEQ ID NO: 1882052 - DNA, 15 bp, Homo sapiens
gttctcgtcttactt

SEQ ID NO: 1882053 - DNA, 15 bp, Homo sapiens
ttctcgtcttacttg

SEQ ID NO: 1882054 - DNA, 15 bp, Homo sapiens
tctcgtcttacttga

SEQ ID NO: 1882055 - DNA, 15 bp, Homo sapiens
ctcgtcttacttgac

SEQ ID NO: 1882056 - DNA, 15 bp, Homo sapiens
tcgtcttacttgacc

SEQ ID NO: 1882057 - DNA, 15 bp, Homo sapiens
cgtcttacttgaccc

SEQ ID NO: 1882058 - DNA, 15 bp, Homo sapiens
gtcttacttgaccct

SEQ ID NO: 1882059 - DNA, 15 bp, Homo sapiens
tcttacttgaccctc

SEQ ID NO: 1882060 - DNA, 15 bp, Homo sapiens
cttacttgaccctct

SEQ ID NO: 1882061 - DNA, 15 bp, Homo sapiens
ttacttgaccctctc

SEQ ID NO: 1882062 - DNA, 15 bp, Homo sapiens
tacttgaccctctca

SEQ ID NO: 1882063 - DNA, 15 bp, Homo sapiens
acttgaccctctcag

SEQ ID NO: 1882064 - DNA, 15 bp, Homo sapiens
cttgaccctctcagg

SEQ ID NO: 1882065 - DNA, 15 bp, Homo sapiens
ttgaccctctcaggg

SEQ ID NO: 1882066 - DNA, 15 bp, Homo sapiens
tgaccctctcagggg

SEQ ID NO: 1882067 - DNA, 15 bp, Homo sapiens
gaccctctcaggggc

SEQ ID NO: 1882068 - DNA, 15 bp, Homo sapiens
accctctcaggggca

SEQ ID NO: 1882069 - DNA, 15 bp, Homo sapiens
ccctctcaggggcag

SEQ ID NO: 1882070 - DNA, 15 bp, Homo sapiens
cctctcaggggcaga

SEQ ID NO: 1882071 - DNA, 15 bp, Homo sapiens
ctctcaggggcagag

SEQ ID NO: 1882072 - DNA, 15 bp, Homo sapiens
tctcaggggcagagc

SEQ ID NO: 1882073 - DNA, 15 bp, Homo sapiens
ctcaggggcagagca

SEQ ID NO: 1882074 - DNA, 15 bp, Homo sapiens
tcaggggcagagcat

SEQ ID NO: 1882075 - DNA, 15 bp, Homo sapiens
caggggcagagcatc

SEQ ID NO: 1882076 - DNA, 15 bp, Homo sapiens
aggggcagagcatca

SEQ ID NO: 1882077 - DNA, 15 bp, Homo sapiens
ggggcagagcatcaa

SEQ ID NO: 1882078 - DNA, 15 bp, Homo sapiens
gggcagagcatcaac

SEQ ID NO: 1882079 - DNA, 15 bp, Homo sapiens
ggcagagcatcaaca

SEQ ID NO: 1882080 - DNA, 15 bp, Homo sapiens
gcagagcatcaacag

SEQ ID NO: 1882081 - DNA, 15 bp, Homo sapiens
cagagcatcaacagg

SEQ ID NO: 1882082 - DNA, 15 bp, Homo sapiens
agagcatcaacagga

SEQ ID NO: 1882083 - DNA, 15 bp, Homo sapiens
gagcatcaacaggaa

SEQ ID NO: 1882084 - DNA, 15 bp, Homo sapiens
agcatcaacaggaaa

SEQ ID NO: 1882085 - DNA, 15 bp, Homo sapiens
gcatcaacaggaaaa

SEQ ID NO: 1882086 - DNA, 15 bp, Homo sapiens
catcaacaggaaaaa

SEQ ID NO: 1882087 - DNA, 15 bp, Homo sapiens
atcaacaggaaaaaa

SEQ ID NO: 1882088 - DNA, 15 bp, Homo sapiens
tcaacaggaaaaaag

SEQ ID NO: 1882089 - DNA, 15 bp, Homo sapiens
caacaggaaaaaagc

SEQ ID NO: 1882090 - DNA, 15 bp, Homo sapiens
aacaggaaaaaagcg

SEQ ID NO: 1882091 - DNA, 15 bp, Homo sapiens
acaggaaaaaagcgc

SEQ ID NO: 1882092 - DNA, 15 bp, Homo sapiens
caggaaaaaagcgca

SEQ ID NO: 1882093 - DNA, 15 bp, Homo sapiens
aggaaaaaagcgcag

SEQ ID NO: 1882094 - DNA, 15 bp, Homo sapiens
ggaaaaaagcgcagg

SEQ ID NO: 1882095 - DNA, 15 bp, Homo sapiens
gaaaaaagcgcagga

SEQ ID NO: 1882096 - DNA, 15 bp, Homo sapiens
aaaaaagcgcaggag

SEQ ID NO: 1882097 - DNA, 15 bp, Homo sapiens
aaaaagcgcaggaga

SEQ ID NO: 1882098 - DNA, 15 bp, Homo sapiens
aaaagcgcaggagag

SEQ ID NO: 1882099 - DNA, 15 bp, Homo sapiens
aaagcgcaggagagg

SEQ ID NO: 1882100 - DNA, 15 bp, Homo sapiens
aagcgcaggagaggt

SEQ ID NO: 1882101 - DNA, 15 bp, Homo sapiens
agcgcaggagaggtt

SEQ ID NO: 1882102 - DNA, 15 bp, Homo sapiens
gcgcaggagaggtta

SEQ ID NO: 1882103 - DNA, 15 bp, Homo sapiens
cgcaggagaggttaa

SEQ ID NO: 1882104 - DNA, 15 bp, Homo sapiens
gcaggagaggttaag

SEQ ID NO: 1882105 - DNA, 15 bp, Homo sapiens
caggagaggttaagt

SEQ ID NO: 1882106 - DNA, 15 bp, Homo sapiens
aggagaggttaagtt

SEQ ID NO: 1882107 - DNA, 15 bp, Homo sapiens
ggagaggttaagttt

SEQ ID NO: 1882108 - DNA, 15 bp, Homo sapiens
gagaggttaagtttt

SEQ ID NO: 1882109 - DNA, 15 bp, Homo sapiens
agaggttaagttttt

SEQ ID NO: 1882110 - DNA, 15 bp, Homo sapiens
gaggttaagttttta

SEQ ID NO: 1882111 - DNA, 15 bp, Homo sapiens
aggttaagtttttaa

SEQ ID NO: 1882112 - DNA, 15 bp, Homo sapiens
ggttaagtttttaag

SEQ ID NO: 1882113 - DNA, 15 bp, Homo sapiens
gttaagtttttaaga

SEQ ID NO: 1882114 - DNA, 15 bp, Homo sapiens
ttaagtttttaagac

SEQ ID NO: 1882115 - DNA, 15 bp, Homo sapiens
taagtttttaagact

SEQ ID NO: 1882116 - DNA, 15 bp, Homo sapiens
aagtttttaagacta

SEQ ID NO: 1882117 - DNA, 15 bp, Homo sapiens
agtttttaagactat

SEQ ID NO: 1882118 - DNA, 15 bp, Homo sapiens
gtttttaagactatg

SEQ ID NO: 1882119 - DNA, 15 bp, Homo sapiens
tttttaagactatga

SEQ ID NO: 1882120 - DNA, 15 bp, Homo sapiens
ttttaagactatgaa

SEQ ID NO: 1882121 - DNA, 15 bp, Homo sapiens
tttaagactatgaaa

SEQ ID NO: 1882122 - DNA, 15 bp, Homo sapiens
ttaagactatgaaat

SEQ ID NO: 1882123 - DNA, 15 bp, Homo sapiens
taagactatgaaatg

SEQ ID NO: 1882124 - DNA, 15 bp, Homo sapiens
aagactatgaaatgc

SEQ ID NO: 1882125 - DNA, 15 bp, Homo sapiens
agactatgaaatgca

SEQ ID NO: 1882126 - DNA, 15 bp, Homo sapiens
gactatgaaatgcat

SEQ ID NO: 1882127 - DNA, 15 bp, Homo sapiens
actatgaaatgcata

SEQ ID NO: 1882128 - DNA, 15 bp, Homo sapiens
ctatgaaatgcatat

SEQ ID NO: 1882129 - DNA, 15 bp, Homo sapiens
tatgaaatgcatatt

SEQ ID NO: 1882130 - DNA, 15 bp, Homo sapiens
atgaaatgcatattt

SEQ ID NO: 1882131 - DNA, 15 bp, Homo sapiens
tgaaatgcatattta

SEQ ID NO: 1882132 - DNA, 15 bp, Homo sapiens
gaaatgcatatttat

SEQ ID NO: 1882133 - DNA, 15 bp, Homo sapiens
aaatgcatatttata

SEQ ID NO: 1882134 - DNA, 15 bp, Homo sapiens
aatgcatatttatat

SEQ ID NO: 1882135 - DNA, 15 bp, Homo sapiens
atgcatatttatatt

SEQ ID NO: 1882136 - DNA, 15 bp, Homo sapiens
tgcatatttatattt

SEQ ID NO: 1882137 - DNA, 15 bp, Homo sapiens
gcatatttatatttt

SEQ ID NO: 1882138 - DNA, 15 bp, Homo sapiens
catatttatatttta

SEQ ID NO: 1882139 - DNA, 15 bp, Homo sapiens
atatttatattttaa

SEQ ID NO: 1882140 - DNA, 15 bp, Homo sapiens
tttatattttaattt

SEQ ID NO: 1882141 - DNA, 15 bp, Homo sapiens
tatattttaattttt

SEQ ID NO: 1882142 - DNA, 15 bp, Homo sapiens
attttaattttttgg

SEQ ID NO: 1882143 - DNA, 15 bp, Homo sapiens
ttttaattttttggt

SEQ ID NO: 1882144 - DNA, 15 bp, Homo sapiens
tttaattttttggtt

SEQ ID NO: 1882145 - DNA, 15 bp, Homo sapiens
ttaattttttggttg

SEQ ID NO: 1882146 - DNA, 15 bp, Homo sapiens
taattttttggttgt

SEQ ID NO: 1882147 - DNA, 15 bp, Homo sapiens
aattttttggttgtc

SEQ ID NO: 1882148 - DNA, 15 bp, Homo sapiens
attttttggttgtca

SEQ ID NO: 1882149 - DNA, 15 bp, Homo sapiens
ttttttggttgtcag

SEQ ID NO: 1882150 - DNA, 15 bp, Homo sapiens
tttttggttgtcaga

SEQ ID NO: 1882151 - DNA, 15 bp, Homo sapiens
ttttggttgtcagac

SEQ ID NO: 1882152 - DNA, 15 bp, Homo sapiens
tttggttgtcagacc

SEQ ID NO: 1882153 - DNA, 15 bp, Homo sapiens
ttggttgtcagacca

SEQ ID NO: 1882154 - DNA, 15 bp, Homo sapiens
tggttgtcagaccaa

SEQ ID NO: 1882155 - DNA, 15 bp, Homo sapiens
ggttgtcagaccaaa

SEQ ID NO: 1882156 - DNA, 15 bp, Homo sapiens
gttgtcagaccaaaa

SEQ ID NO: 1882157 - DNA, 15 bp, Homo sapiens
ttgtcagaccaaaaa

SEQ ID NO: 1882158 - DNA, 15 bp, Homo sapiens
tgtcagaccaaaaac

SEQ ID NO: 1882159 - DNA, 15 bp, Homo sapiens
gtcagaccaaaaact

SEQ ID NO: 1882160 - DNA, 15 bp, Homo sapiens
tcagaccaaaaactg

SEQ ID NO: 1882161 - DNA, 15 bp, Homo sapiens
cagaccaaaaactgt

SEQ ID NO: 1882162 - DNA, 15 bp, Homo sapiens
agaccaaaaactgtt

SEQ ID NO: 1882163 - DNA, 15 bp, Homo sapiens
gaccaaaaactgttt

SEQ ID NO: 1882164 - DNA, 15 bp, Homo sapiens
accaaaaactgtttt

SEQ ID NO: 1882165 - DNA, 15 bp, Homo sapiens
ccaaaaactgttttg

SEQ ID NO: 1882166 - DNA, 15 bp, Homo sapiens
caaaaactgttttgt

SEQ ID NO: 1882167 - DNA, 15 bp, Homo sapiens
aaaaactgttttgtt

SEQ ID NO: 1882168 - DNA, 15 bp, Homo sapiens
aaaactgttttgttc

SEQ ID NO: 1882169 - DNA, 15 bp, Homo sapiens
aaactgttttgttcc

SEQ ID NO: 1882170 - DNA, 15 bp, Homo sapiens
aactgttttgttcca

SEQ ID NO: 1882171 - DNA, 15 bp, Homo sapiens
actgttttgttccac

SEQ ID NO: 1882172 - DNA, 15 bp, Homo sapiens
ctgttttgttccact

SEQ ID NO: 1882173 - DNA, 15 bp, Homo sapiens
tgttttgttccactg

SEQ ID NO: 1882174 - DNA, 15 bp, Homo sapiens
gttttgttccactgt

SEQ ID NO: 1882175 - DNA, 15 bp, Homo sapiens
ttttgttccactgtg

SEQ ID NO: 1882176 - DNA, 15 bp, Homo sapiens
tttgttccactgtga

SEQ ID NO: 1882177 - DNA, 15 bp, Homo sapiens
ttgttccactgtgac

SEQ ID NO: 1882178 - DNA, 15 bp, Homo sapiens
tgttccactgtgaca

SEQ ID NO: 1882179 - DNA, 15 bp, Homo sapiens
gttccactgtgacag

SEQ ID NO: 1882180 - DNA, 15 bp, Homo sapiens
ttccactgtgacagg

SEQ ID NO: 1882181 - DNA, 15 bp, Homo sapiens
tccactgtgacaggc

SEQ ID NO: 1882182 - DNA, 15 bp, Homo sapiens
ccactgtgacaggcc

SEQ ID NO: 1882183 - DNA, 15 bp, Homo sapiens
cactgtgacaggccc

SEQ ID NO: 1882184 - DNA, 15 bp, Homo sapiens
actgtgacaggccca

SEQ ID NO: 1882185 - DNA, 15 bp, Homo sapiens
ctgtgacaggcccac

SEQ ID NO: 1882186 - DNA, 15 bp, Homo sapiens
tgtgacaggcccact

SEQ ID NO: 1882187 - DNA, 15 bp, Homo sapiens
gtgacaggcccactg

SEQ ID NO: 1882188 - DNA, 15 bp, Homo sapiens
tgacaggcccactga

SEQ ID NO: 1882189 - DNA, 15 bp, Homo sapiens
gacaggcccactgag

SEQ ID NO: 1882190 - DNA, 15 bp, Homo sapiens
acaggcccactgagc

SEQ ID NO: 1882191 - DNA, 15 bp, Homo sapiens
caggcccactgagct

SEQ ID NO: 1882192 - DNA, 15 bp, Homo sapiens
aggcccactgagcta

SEQ ID NO: 1882193 - DNA, 15 bp, Homo sapiens
ggcccactgagctac

SEQ ID NO: 1882194 - DNA, 15 bp, Homo sapiens
gcccactgagctact

SEQ ID NO: 1882195 - DNA, 15 bp, Homo sapiens
cccactgagctacta

SEQ ID NO: 1882196 - DNA, 15 bp, Homo sapiens
ccactgagctactag

SEQ ID NO: 1882197 - DNA, 15 bp, Homo sapiens
cactgagctactagc

SEQ ID NO: 1882198 - DNA, 15 bp, Homo sapiens
actgagctactagca

SEQ ID NO: 1882199 - DNA, 15 bp, Homo sapiens
ctgagctactagcat

SEQ ID NO: 1882200 - DNA, 15 bp, Homo sapiens
tgagctactagcatg

SEQ ID NO: 1882201 - DNA, 15 bp, Homo sapiens
gagctactagcatgt

SEQ ID NO: 1882202 - DNA, 15 bp, Homo sapiens
agctactagcatgtc

SEQ ID NO: 1882203 - DNA, 15 bp, Homo sapiens
gctactagcatgtcc

SEQ ID NO: 1882204 - DNA, 15 bp, Homo sapiens
ctactagcatgtcca

SEQ ID NO: 1882205 - DNA, 15 bp, Homo sapiens
tactagcatgtccaa

SEQ ID NO: 1882206 - DNA, 15 bp, Homo sapiens
actagcatgtccaag

SEQ ID NO: 1882207 - DNA, 15 bp, Homo sapiens
ctagcatgtccaaga

SEQ ID NO: 1882208 - DNA, 15 bp, Homo sapiens
tagcatgtccaagaa

SEQ ID NO: 1882209 - DNA, 15 bp, Homo sapiens
agcatgtccaagaag

SEQ ID NO: 1882210 - DNA, 15 bp, Homo sapiens
gcatgtccaagaagt

SEQ ID NO: 1882211 - DNA, 15 bp, Homo sapiens
catgtccaagaagtg

SEQ ID NO: 1882212 - DNA, 15 bp, Homo sapiens
atgtccaagaagtgc

SEQ ID NO: 1882213 - DNA, 15 bp, Homo sapiens
tgtccaagaagtgct

SEQ ID NO: 1882214 - DNA, 15 bp, Homo sapiens
gtccaagaagtgctt

SEQ ID NO: 1882215 - DNA, 15 bp, Homo sapiens
tccaagaagtgcttt

SEQ ID NO: 1882216 - DNA, 15 bp, Homo sapiens
ccaagaagtgctttt

SEQ ID NO: 1882217 - DNA, 15 bp, Homo sapiens
caagaagtgctttta

SEQ ID NO: 1882218 - DNA, 15 bp, Homo sapiens
aagaagtgcttttaa

SEQ ID NO: 1882219 - DNA, 15 bp, Homo sapiens
agaagtgcttttaaa

SEQ ID NO: 1882220 - DNA, 15 bp, Homo sapiens
gaagtgcttttaaaa

SEQ ID NO: 1882221 - DNA, 15 bp, Homo sapiens
aagtgcttttaaaat

SEQ ID NO: 1882222 - DNA, 15 bp, Homo sapiens
agtgcttttaaaatc

SEQ ID NO: 1882223 - DNA, 15 bp, Homo sapiens
gtgcttttaaaatct

SEQ ID NO: 1882224 - DNA, 15 bp, Homo sapiens
tgcttttaaaatcta

SEQ ID NO: 1882225 - DNA, 15 bp, Homo sapiens
gcttttaaaatctaa

SEQ ID NO: 1882226 - DNA, 15 bp, Homo sapiens
cttttaaaatctaaa

SEQ ID NO: 1882227 - DNA, 15 bp, Homo sapiens
tttaaaatctaaatt

SEQ ID NO: 1882228 - DNA, 15 bp, Homo sapiens
ttaaaatctaaattt

SEQ ID NO: 1882229 - DNA, 15 bp, Homo sapiens
taaaatctaaatttg

SEQ ID NO: 1882230 - DNA, 15 bp, Homo sapiens
aaaatctaaatttgt

SEQ ID NO: 1882231 - DNA, 15 bp, Homo sapiens
aaatctaaatttgtt

SEQ ID NO: 1882232 - DNA, 15 bp, Homo sapiens
aatctaaatttgttt

SEQ ID NO: 1882233 - DNA, 15 bp, Homo sapiens
atctaaatttgttta

SEQ ID NO: 1882234 - DNA, 15 bp, Homo sapiens
tctaaatttgtttat

SEQ ID NO: 1882235 - DNA, 15 bp, Homo sapiens
ctaaatttgtttatg

SEQ ID NO: 1882236 - DNA, 15 bp, Homo sapiens
taaatttgtttatga

SEQ ID NO: 1882237 - DNA, 15 bp, Homo sapiens
aaatttgtttatgag

SEQ ID NO: 1882238 - DNA, 15 bp, Homo sapiens
aatttgtttatgaga

SEQ ID NO: 1882239 - DNA, 15 bp, Homo sapiens
atttgtttatgagag

SEQ ID NO: 1882240 - DNA, 15 bp, Homo sapiens
tttgtttatgagagc

SEQ ID NO: 1882241 - DNA, 15 bp, Homo sapiens
ttgtttatgagagct

SEQ ID NO: 1882242 - DNA, 15 bp, Homo sapiens
tgtttatgagagctt

SEQ ID NO: 1882243 - DNA, 15 bp, Homo sapiens
gtttatgagagcttt

SEQ ID NO: 1882244 - DNA, 15 bp, Homo sapiens
tttatgagagctttg

SEQ ID NO: 1882245 - DNA, 15 bp, Homo sapiens
ttatgagagctttgc

SEQ ID NO: 1882246 - DNA, 15 bp, Homo sapiens
tatgagagctttgct

SEQ ID NO: 1882247 - DNA, 15 bp, Homo sapiens
atgagagctttgctg

SEQ ID NO: 1882248 - DNA, 15 bp, Homo sapiens
tgagagctttgctgt

SEQ ID NO: 1882249 - DNA, 15 bp, Homo sapiens
gagagctttgctgtt

SEQ ID NO: 1882250 - DNA, 15 bp, Homo sapiens
agagctttgctgttt

SEQ ID NO: 1882251 - DNA, 15 bp, Homo sapiens
gagctttgctgttta

SEQ ID NO: 1882252 - DNA, 15 bp, Homo sapiens
agctttgctgtttac

SEQ ID NO: 1882253 - DNA, 15 bp, Homo sapiens
gctttgctgtttaca

SEQ ID NO: 1882254 - DNA, 15 bp, Homo sapiens
ctttgctgtttacat

SEQ ID NO: 1882255 - DNA, 15 bp, Homo sapiens
tttgctgtttacatt

SEQ ID NO: 1882256 - DNA, 15 bp, Homo sapiens
ttgctgtttacattg

SEQ ID NO: 1882257 - DNA, 15 bp, Homo sapiens
tgctgtttacattgt

SEQ ID NO: 1882258 - DNA, 15 bp, Homo sapiens
gctgtttacattgta

SEQ ID NO: 1882259 - DNA, 15 bp, Homo sapiens
ctgtttacattgtag

SEQ ID NO: 1882260 - DNA, 15 bp, Homo sapiens
tgtttacattgtagg

SEQ ID NO: 1882261 - DNA, 15 bp, Homo sapiens
gtttacattgtaggt

SEQ ID NO: 1882262 - DNA, 15 bp, Homo sapiens
tttacattgtaggta

SEQ ID NO: 1882263 - DNA, 15 bp, Homo sapiens
ttacattgtaggtat

SEQ ID NO: 1882264 - DNA, 15 bp, Homo sapiens
tacattgtaggtatg

SEQ ID NO: 1882265 - DNA, 15 bp, Homo sapiens
acattgtaggtatgc

SEQ ID NO: 1882266 - DNA, 15 bp, Homo sapiens
cattgtaggtatgca

SEQ ID NO: 1882267 - DNA, 15 bp, Homo sapiens
attgtaggtatgcac

SEQ ID NO: 1882268 - DNA, 15 bp, Homo sapiens
ttgtaggtatgcacc

SEQ ID NO: 1882269 - DNA, 15 bp, Homo sapiens
tgtaggtatgcacca

SEQ ID NO: 1882270 - DNA, 15 bp, Homo sapiens
gtaggtatgcaccag

SEQ ID NO: 1882271 - DNA, 15 bp, Homo sapiens
taggtatgcaccagg

SEQ ID NO: 1882272 - DNA, 15 bp, Homo sapiens
aggtatgcaccaggg

SEQ ID NO: 1882273 - DNA, 15 bp, Homo sapiens
ggtatgcaccaggga

SEQ ID NO: 1882274 - DNA, 15 bp, Homo sapiens
gtatgcaccagggaa

SEQ ID NO: 1882275 - DNA, 15 bp, Homo sapiens
tatgcaccagggaaa

SEQ ID NO: 1882276 - DNA, 15 bp, Homo sapiens
atgcaccagggaaaa

SEQ ID NO: 1882277 - DNA, 15 bp, Homo sapiens
tgcaccagggaaaag

SEQ ID NO: 1882278 - DNA, 15 bp, Homo sapiens
gcaccagggaaaaga

SEQ ID NO: 1882279 - DNA, 15 bp, Homo sapiens
caccagggaaaagaa

SEQ ID NO: 1882280 - DNA, 15 bp, Homo sapiens
accagggaaaagaat

SEQ ID NO: 1882281 - DNA, 15 bp, Homo sapiens
ccagggaaaagaatt

SEQ ID NO: 1882282 - DNA, 15 bp, Homo sapiens
cagggaaaagaattc

SEQ ID NO: 1882283 - DNA, 15 bp, Homo sapiens
agggaaaagaattca

SEQ ID NO: 1882284 - DNA, 15 bp, Homo sapiens
gggaaaagaattcaa

SEQ ID NO: 1882285 - DNA, 15 bp, Homo sapiens
ggaaaagaattcaaa

SEQ ID NO: 1882286 - DNA, 15 bp, Homo sapiens
gaaaagaattcaaag

SEQ ID NO: 1882287 - DNA, 15 bp, Homo sapiens
aaaagaattcaaagt

SEQ ID NO: 1882288 - DNA, 15 bp, Homo sapiens
aaagaattcaaagtg

SEQ ID NO: 1882289 - DNA, 15 bp, Homo sapiens
aagaattcaaagtga

SEQ ID NO: 1882290 - DNA, 15 bp, Homo sapiens
agaattcaaagtgac

SEQ ID NO: 1882291 - DNA, 15 bp, Homo sapiens
gaattcaaagtgaca

SEQ ID NO: 1882292 - DNA, 15 bp, Homo sapiens
aattcaaagtgacac

SEQ ID NO: 1882293 - DNA, 15 bp, Homo sapiens
attcaaagtgacacc

SEQ ID NO: 1882294 - DNA, 15 bp, Homo sapiens
ttcaaagtgacacca

SEQ ID NO: 1882295 - DNA, 15 bp, Homo sapiens
tcaaagtgacaccaa

SEQ ID NO: 1882296 - DNA, 15 bp, Homo sapiens
caaagtgacaccaaa

SEQ ID NO: 1882297 - DNA, 15 bp, Homo sapiens
aaagtgacaccaaat

SEQ ID NO: 1882298 - DNA, 15 bp, Homo sapiens
aagtgacaccaaata

SEQ ID NO: 1882299 - DNA, 15 bp, Homo sapiens
agtgacaccaaatat

SEQ ID NO: 1882300 - DNA, 15 bp, Homo sapiens
gtgacaccaaatatg

SEQ ID NO: 1882301 - DNA, 15 bp, Homo sapiens
tgacaccaaatatgt

SEQ ID NO: 1882302 - DNA, 15 bp, Homo sapiens
gacaccaaatatgtg

SEQ ID NO: 1882303 - DNA, 15 bp, Homo sapiens
acaccaaatatgtgc

SEQ ID NO: 1882304 - DNA, 15 bp, Homo sapiens
caccaaatatgtgcg

SEQ ID NO: 1882305 - DNA, 15 bp, Homo sapiens
accaaatatgtgcgc

SEQ ID NO: 1882306 - DNA, 15 bp, Homo sapiens
ccaaatatgtgcgca

SEQ ID NO: 1882307 - DNA, 15 bp, Homo sapiens
caaatatgtgcgcat

SEQ ID NO: 1882308 - DNA, 15 bp, Homo sapiens
aaatatgtgcgcatt

SEQ ID NO: 1882309 - DNA, 15 bp, Homo sapiens
aatatgtgcgcatta

SEQ ID NO: 1882310 - DNA, 15 bp, Homo sapiens
atatgtgcgcattaa

SEQ ID NO: 1882311 - DNA, 15 bp, Homo sapiens
tatgtgcgcattaaa

SEQ ID NO: 1882312 - DNA, 15 bp, Homo sapiens
atgtgcgcattaaat

SEQ ID NO: 1882313 - DNA, 15 bp, Homo sapiens
tgtgcgcattaaata

SEQ ID NO: 1882314 - DNA, 15 bp, Homo sapiens
gtgcgcattaaataa

SEQ ID NO: 1882315 - DNA, 15 bp, Homo sapiens
tgcgcattaaataac

SEQ ID NO: 1882316 - DNA, 15 bp, Homo sapiens
gcgcattaaataaca

SEQ ID NO: 1882317 - DNA, 15 bp, Homo sapiens
cgcattaaataacac

SEQ ID NO: 1882318 - DNA, 15 bp, Homo sapiens
gcattaaataacacc

SEQ ID NO: 1882319 - DNA, 15 bp, Homo sapiens
cattaaataacacca

SEQ ID NO: 1882320 - DNA, 15 bp, Homo sapiens
attaaataacaccat

SEQ ID NO: 1882321 - DNA, 15 bp, Homo sapiens
ttaaataacaccatc

SEQ ID NO: 1882322 - DNA, 15 bp, Homo sapiens
taaataacaccatct

SEQ ID NO: 1882323 - DNA, 15 bp, Homo sapiens
aaataacaccatctg

SEQ ID NO: 1882324 - DNA, 15 bp, Homo sapiens
aataacaccatctgc

SEQ ID NO: 1882325 - DNA, 15 bp, Homo sapiens
ataacaccatctgcc

SEQ ID NO: 1882326 - DNA, 15 bp, Homo sapiens
taacaccatctgccc

SEQ ID NO: 1882327 - DNA, 15 bp, Homo sapiens
aacaccatctgccca

SEQ ID NO: 1882328 - DNA, 15 bp, Homo sapiens
acaccatctgcccat

SEQ ID NO: 1882329 - DNA, 15 bp, Homo sapiens
caccatctgcccatt

SEQ ID NO: 1882330 - DNA, 15 bp, Homo sapiens
accatctgcccattt

SEQ ID NO: 1882331 - DNA, 15 bp, Homo sapiens
ccatctgcccatttg

SEQ ID NO: 1882332 - DNA, 15 bp, Homo sapiens
catctgcccatttgg

SEQ ID NO: 1882333 - DNA, 15 bp, Homo sapiens
atctgcccatttgga

SEQ ID NO: 1882334 - DNA, 15 bp, Homo sapiens
tctgcccatttggat

SEQ ID NO: 1882335 - DNA, 15 bp, Homo sapiens
ctgcccatttggatc

SEQ ID NO: 1882336 - DNA, 15 bp, Homo sapiens
tgcccatttggatct

SEQ ID NO: 1882337 - DNA, 15 bp, Homo sapiens
gcccatttggatctg

SEQ ID NO: 1882338 - DNA, 15 bp, Homo sapiens
cccatttggatctgt

SEQ ID NO: 1882339 - DNA, 15 bp, Homo sapiens
ccatttggatctgtg

SEQ ID NO: 1882340 - DNA, 15 bp, Homo sapiens
catttggatctgtgc

SEQ ID NO: 1882341 - DNA, 15 bp, Homo sapiens
atttggatctgtgca

SEQ ID NO: 1882342 - DNA, 15 bp, Homo sapiens
tttggatctgtgcag

SEQ ID NO: 1882343 - DNA, 15 bp, Homo sapiens
ttggatctgtgcagc

SEQ ID NO: 1882344 - DNA, 15 bp, Homo sapiens
tggatctgtgcagct

SEQ ID NO: 1882345 - DNA, 15 bp, Homo sapiens
ggatctgtgcagctc

SEQ ID NO: 1882346 - DNA, 15 bp, Homo sapiens
gatctgtgcagctct

SEQ ID NO: 1882347 - DNA, 15 bp, Homo sapiens
atctgtgcagctctt

SEQ ID NO: 1882348 - DNA, 15 bp, Homo sapiens
tctgtgcagctcttt

SEQ ID NO: 1882349 - DNA, 15 bp, Homo sapiens
ctgtgcagctctttt

SEQ ID NO: 1882350 - DNA, 15 bp, Homo sapiens
tgtgcagctctttta

SEQ ID NO: 1882351 - DNA, 15 bp, Homo sapiens
gtgcagctcttttaa

SEQ ID NO: 1882352 - DNA, 15 bp, Homo sapiens
tgcagctcttttaaa

SEQ ID NO: 1882353 - DNA, 15 bp, Homo sapiens
gcagctcttttaaaa

SEQ ID NO: 1882354 - DNA, 15 bp, Homo sapiens
cagctcttttaaaat

SEQ ID NO: 1882355 - DNA, 15 bp, Homo sapiens
agctcttttaaaata

SEQ ID NO: 1882356 - DNA, 15 bp, Homo sapiens
gctcttttaaaatac

SEQ ID NO: 1882357 - DNA, 15 bp, Homo sapiens
ctcttttaaaatact

SEQ ID NO: 1882358 - DNA, 15 bp, Homo sapiens
tcttttaaaatactg

SEQ ID NO: 1882359 - DNA, 15 bp, Homo sapiens
cttttaaaatactgt

SEQ ID NO: 1882360 - DNA, 15 bp, Homo sapiens
ttttaaaatactgtg

SEQ ID NO: 1882361 - DNA, 15 bp, Homo sapiens
tttaaaatactgtga

SEQ ID NO: 1882362 - DNA, 15 bp, Homo sapiens
ttaaaatactgtgag

SEQ ID NO: 1882363 - DNA, 15 bp, Homo sapiens
taaaatactgtgagg

SEQ ID NO: 1882364 - DNA, 15 bp, Homo sapiens
aaaatactgtgaggt

SEQ ID NO: 1882365 - DNA, 15 bp, Homo sapiens
aaatactgtgaggtg

SEQ ID NO: 1882366 - DNA, 15 bp, Homo sapiens
aatactgtgaggtgc

SEQ ID NO: 1882367 - DNA, 15 bp, Homo sapiens
atactgtgaggtgct

SEQ ID NO: 1882368 - DNA, 15 bp, Homo sapiens
tactgtgaggtgctc

SEQ ID NO: 1882369 - DNA, 15 bp, Homo sapiens
actgtgaggtgctcg

SEQ ID NO: 1882370 - DNA, 15 bp, Homo sapiens
ctgtgaggtgctcgc

SEQ ID NO: 1882371 - DNA, 15 bp, Homo sapiens
tgtgaggtgctcgcc

SEQ ID NO: 1882372 - DNA, 15 bp, Homo sapiens
gtgaggtgctcgccc

SEQ ID NO: 1882373 - DNA, 15 bp, Homo sapiens
tgaggtgctcgccca

SEQ ID NO: 1882374 - DNA, 15 bp, Homo sapiens
gaggtgctcgcccaa

SEQ ID NO: 1882375 - DNA, 15 bp, Homo sapiens
aggtgctcgcccaaa

SEQ ID NO: 1882376 - DNA, 15 bp, Homo sapiens
ggtgctcgcccaaag

SEQ ID NO: 1882377 - DNA, 15 bp, Homo sapiens
gtgctcgcccaaagc

SEQ ID NO: 1882378 - DNA, 15 bp, Homo sapiens
tgctcgcccaaagcc

SEQ ID NO: 1882379 - DNA, 15 bp, Homo sapiens
gctcgcccaaagcct

SEQ ID NO: 1882380 - DNA, 15 bp, Homo sapiens
ctcgcccaaagcctg

SEQ ID NO: 1882381 - DNA, 15 bp, Homo sapiens
tcgcccaaagcctga

SEQ ID NO: 1882382 - DNA, 15 bp, Homo sapiens
cgcccaaagcctgac

SEQ ID NO: 1882383 - DNA, 15 bp, Homo sapiens
gcccaaagcctgaca

SEQ ID NO: 1882384 - DNA, 15 bp, Homo sapiens
cccaaagcctgacat

SEQ ID NO: 1882385 - DNA, 15 bp, Homo sapiens
ccaaagcctgacata

SEQ ID NO: 1882386 - DNA, 15 bp, Homo sapiens
caaagcctgacatat

SEQ ID NO: 1882387 - DNA, 15 bp, Homo sapiens
aaagcctgacatatt

SEQ ID NO: 1882388 - DNA, 15 bp, Homo sapiens
aagcctgacatattt

SEQ ID NO: 1882389 - DNA, 15 bp, Homo sapiens
agcctgacatatttc

SEQ ID NO: 1882390 - DNA, 15 bp, Homo sapiens
gcctgacatatttca

SEQ ID NO: 1882391 - DNA, 15 bp, Homo sapiens
cctgacatatttcag

SEQ ID NO: 1882392 - DNA, 15 bp, Homo sapiens
ctgacatatttcagg

SEQ ID NO: 1882393 - DNA, 15 bp, Homo sapiens
tgacatatttcagga

SEQ ID NO: 1882394 - DNA, 15 bp, Homo sapiens
gacatatttcaggat

SEQ ID NO: 1882395 - DNA, 15 bp, Homo sapiens
acatatttcaggata

SEQ ID NO: 1882396 - DNA, 15 bp, Homo sapiens
catatttcaggataa

SEQ ID NO: 1882397 - DNA, 15 bp, Homo sapiens
atatttcaggataag

SEQ ID NO: 1882398 - DNA, 15 bp, Homo sapiens
tatttcaggataagg

SEQ ID NO: 1882399 - DNA, 15 bp, Homo sapiens
atttcaggataaggg

SEQ ID NO: 1882400 - DNA, 15 bp, Homo sapiens
tttcaggataaggga

SEQ ID NO: 1882401 - DNA, 15 bp, Homo sapiens
ttcaggataagggaa

SEQ ID NO: 1882402 - DNA, 15 bp, Homo sapiens
tcaggataagggaaa

SEQ ID NO: 1882403 - DNA, 15 bp, Homo sapiens
caggataagggaaag

SEQ ID NO: 1882404 - DNA, 15 bp, Homo sapiens
aggataagggaaaga

SEQ ID NO: 1882405 - DNA, 15 bp, Homo sapiens
ggataagggaaagat

SEQ ID NO: 1882406 - DNA, 15 bp, Homo sapiens
gataagggaaagatt

SEQ ID NO: 1882407 - DNA, 15 bp, Homo sapiens
ataagggaaagattt

SEQ ID NO: 1882408 - DNA, 15 bp, Homo sapiens
taagggaaagatttt

SEQ ID NO: 1882409 - DNA, 15 bp, Homo sapiens
aagggaaagattttt

SEQ ID NO: 1882410 - DNA, 15 bp, Homo sapiens
agggaaagattttta

SEQ ID NO: 1882411 - DNA, 15 bp, Homo sapiens
gggaaagatttttat

SEQ ID NO: 1882412 - DNA, 15 bp, Homo sapiens
ggaaagatttttatg

SEQ ID NO: 1882413 - DNA, 15 bp, Homo sapiens
gaaagatttttatgt

SEQ ID NO: 1882414 - DNA, 15 bp, Homo sapiens
aaagatttttatgtt

SEQ ID NO: 1882415 - DNA, 15 bp, Homo sapiens
aagatttttatgtta

SEQ ID NO: 1882416 - DNA, 15 bp, Homo sapiens
agatttttatgttaa

SEQ ID NO: 1882417 - DNA, 15 bp, Homo sapiens
gatttttatgttaag

SEQ ID NO: 1882418 - DNA, 15 bp, Homo sapiens
atttttatgttaaga

SEQ ID NO: 1882419 - DNA, 15 bp, Homo sapiens
tttttatgttaagac

SEQ ID NO: 1882420 - DNA, 15 bp, Homo sapiens
ttttatgttaagacc

SEQ ID NO: 1882421 - DNA, 15 bp, Homo sapiens
tttatgttaagaccc

SEQ ID NO: 1882422 - DNA, 15 bp, Homo sapiens
ttatgttaagaccct

SEQ ID NO: 1882423 - DNA, 15 bp, Homo sapiens
tatgttaagacccta

SEQ ID NO: 1882424 - DNA, 15 bp, Homo sapiens
atgttaagaccctac

SEQ ID NO: 1882425 - DNA, 15 bp, Homo sapiens
tgttaagaccctaca

SEQ ID NO: 1882426 - DNA, 15 bp, Homo sapiens
gttaagaccctacat

SEQ ID NO: 1882427 - DNA, 15 bp, Homo sapiens
ttaagaccctacatg

SEQ ID NO: 1882428 - DNA, 15 bp, Homo sapiens
taagaccctacatga

SEQ ID NO: 1882429 - DNA, 15 bp, Homo sapiens
aagaccctacatgaa

SEQ ID NO: 1882430 - DNA, 15 bp, Homo sapiens
agaccctacatgaag

SEQ ID NO: 1882431 - DNA, 15 bp, Homo sapiens
gaccctacatgaaga

SEQ ID NO: 1882432 - DNA, 15 bp, Homo sapiens
accctacatgaagac

SEQ ID NO: 1882433 - DNA, 15 bp, Homo sapiens
ccctacatgaagaca

SEQ ID NO: 1882434 - DNA, 15 bp, Homo sapiens
cctacatgaagacac

SEQ ID NO: 1882435 - DNA, 15 bp, Homo sapiens
ctacatgaagacact

SEQ ID NO: 1882436 - DNA, 15 bp, Homo sapiens
tacatgaagacactg

SEQ ID NO: 1882437 - DNA, 15 bp, Homo sapiens
acatgaagacactgt

SEQ ID NO: 1882438 - DNA, 15 bp, Homo sapiens
catgaagacactgtt

SEQ ID NO: 1882439 - DNA, 15 bp, Homo sapiens
atgaagacactgttt

SEQ ID NO: 1882440 - DNA, 15 bp, Homo sapiens
tgaagacactgtttg

SEQ ID NO: 1882441 - DNA, 15 bp, Homo sapiens
gaagacactgtttga

SEQ ID NO: 1882442 - DNA, 15 bp, Homo sapiens
aagacactgtttgaa

SEQ ID NO: 1882443 - DNA, 15 bp, Homo sapiens
agacactgtttgaag

SEQ ID NO: 1882444 - DNA, 15 bp, Homo sapiens
gacactgtttgaagt

SEQ ID NO: 1882445 - DNA, 15 bp, Homo sapiens
acactgtttgaagtt

SEQ ID NO: 1882446 - DNA, 15 bp, Homo sapiens
cactgtttgaagttt

SEQ ID NO: 1882447 - DNA, 15 bp, Homo sapiens
actgtttgaagtttc

SEQ ID NO: 1882448 - DNA, 15 bp, Homo sapiens
ctgtttgaagtttca

SEQ ID NO: 1882449 - DNA, 15 bp, Homo sapiens
tgtttgaagtttcag

SEQ ID NO: 1882450 - DNA, 15 bp, Homo sapiens
gtttgaagtttcaga

SEQ ID NO: 1882451 - DNA, 15 bp, Homo sapiens
tttgaagtttcagaa

SEQ ID NO: 1882452 - DNA, 15 bp, Homo sapiens
ttgaagtttcagaag

SEQ ID NO: 1882453 - DNA, 15 bp, Homo sapiens
tgaagtttcagaagg

SEQ ID NO: 1882454 - DNA, 15 bp, Homo sapiens
gaagtttcagaaggc

SEQ ID NO: 1882455 - DNA, 15 bp, Homo sapiens
aagtttcagaaggct

SEQ ID NO: 1882456 - DNA, 15 bp, Homo sapiens
agtttcagaaggctt

SEQ ID NO: 1882457 - DNA, 15 bp, Homo sapiens
gtttcagaaggcttt

SEQ ID NO: 1882458 - DNA, 15 bp, Homo sapiens
tttcagaaggctttg

SEQ ID NO: 1882459 - DNA, 15 bp, Homo sapiens
ttcagaaggctttga

SEQ ID NO: 1882460 - DNA, 15 bp, Homo sapiens
tcagaaggctttgag

SEQ ID NO: 1882461 - DNA, 15 bp, Homo sapiens
cagaaggctttgagt

SEQ ID NO: 1882462 - DNA, 15 bp, Homo sapiens
agaaggctttgagtt

SEQ ID NO: 1882463 - DNA, 15 bp, Homo sapiens
gaaggctttgagttc

SEQ ID NO: 1882464 - DNA, 15 bp, Homo sapiens
aaggctttgagttct

SEQ ID NO: 1882465 - DNA, 15 bp, Homo sapiens
aggctttgagttctt

SEQ ID NO: 1882466 - DNA, 15 bp, Homo sapiens
ggctttgagttcttc

SEQ ID NO: 1882467 - DNA, 15 bp, Homo sapiens
gctttgagttcttcc

SEQ ID NO: 1882468 - DNA, 15 bp, Homo sapiens
ctttgagttcttccc

SEQ ID NO: 1882469 - DNA, 15 bp, Homo sapiens
tttgagttcttccct

SEQ ID NO: 1882470 - DNA, 15 bp, Homo sapiens
ttgagttcttccctt

SEQ ID NO: 1882471 - DNA, 15 bp, Homo sapiens
tgagttcttcccttc

SEQ ID NO: 1882472 - DNA, 15 bp, Homo sapiens
gagttcttcccttct

SEQ ID NO: 1882473 - DNA, 15 bp, Homo sapiens
agttcttcccttctt

SEQ ID NO: 1882474 - DNA, 15 bp, Homo sapiens
gttcttcccttcttt

SEQ ID NO: 1882475 - DNA, 15 bp, Homo sapiens
ttcttcccttctttc

SEQ ID NO: 1882476 - DNA, 15 bp, Homo sapiens
tcttcccttctttct

SEQ ID NO: 1882477 - DNA, 15 bp, Homo sapiens
ttcccttctttcttt

SEQ ID NO: 1882478 - DNA, 15 bp, Homo sapiens
tcccttctttctttc

SEQ ID NO: 1882479 - DNA, 15 bp, Homo sapiens
cccttctttctttcc

SEQ ID NO: 1882480 - DNA, 15 bp, Homo sapiens
ccttctttctttcct

SEQ ID NO: 1882481 - DNA, 15 bp, Homo sapiens
cttctttctttccta

SEQ ID NO: 1882482 - DNA, 15 bp, Homo sapiens
ttctttctttcctag

SEQ ID NO: 1882483 - DNA, 15 bp, Homo sapiens
tctttctttcctagt

SEQ ID NO: 1882484 - DNA, 15 bp, Homo sapiens
ctttctttcctagtt

SEQ ID NO: 1882485 - DNA, 15 bp, Homo sapiens
tttctttcctagttg

SEQ ID NO: 1882486 - DNA, 15 bp, Homo sapiens
ttctttcctagttgt

SEQ ID NO: 1882487 - DNA, 15 bp, Homo sapiens
tctttcctagttgtt

SEQ ID NO: 1882488 - DNA, 15 bp, Homo sapiens
ctttcctagttgttc

SEQ ID NO: 1882489 - DNA, 15 bp, Homo sapiens
tttcctagttgttca

SEQ ID NO: 1882490 - DNA, 15 bp, Homo sapiens
ttcctagttgttcat

SEQ ID NO: 1882491 - DNA, 15 bp, Homo sapiens
tcctagttgttcatt

SEQ ID NO: 1882492 - DNA, 15 bp, Homo sapiens
cctagttgttcattc

SEQ ID NO: 1882493 - DNA, 15 bp, Homo sapiens
ctagttgttcattca

SEQ ID NO: 1882494 - DNA, 15 bp, Homo sapiens
tagttgttcattcaa

SEQ ID NO: 1882495 - DNA, 15 bp, Homo sapiens
agttgttcattcaat

SEQ ID NO: 1882496 - DNA, 15 bp, Homo sapiens
gttgttcattcaata

SEQ ID NO: 1882497 - DNA, 15 bp, Homo sapiens
ttgttcattcaatat

SEQ ID NO: 1882498 - DNA, 15 bp, Homo sapiens
tgttcattcaatatt

SEQ ID NO: 1882499 - DNA, 15 bp, Homo sapiens
gttcattcaatattt

SEQ ID NO: 1882500 - DNA, 15 bp, Homo sapiens
ttcattcaatattta

SEQ ID NO: 1882501 - DNA, 15 bp, Homo sapiens
tcattcaatatttat

SEQ ID NO: 1882502 - DNA, 15 bp, Homo sapiens
cattcaatatttatt

SEQ ID NO: 1882503 - DNA, 15 bp, Homo sapiens
attcaatatttatta

SEQ ID NO: 1882504 - DNA, 15 bp, Homo sapiens
ttcaatatttattag

SEQ ID NO: 1882505 - DNA, 15 bp, Homo sapiens
tcaatatttattaga

SEQ ID NO: 1882506 - DNA, 15 bp, Homo sapiens
caatatttattagaa

SEQ ID NO: 1882507 - DNA, 15 bp, Homo sapiens
aatatttattagaag

SEQ ID NO: 1882508 - DNA, 15 bp, Homo sapiens
atatttattagaagg

SEQ ID NO: 1882509 - DNA, 15 bp, Homo sapiens
tatttattagaagga

SEQ ID NO: 1882510 - DNA, 15 bp, Homo sapiens
atttattagaaggac

SEQ ID NO: 1882511 - DNA, 15 bp, Homo sapiens
tttattagaaggacg

SEQ ID NO: 1882512 - DNA, 15 bp, Homo sapiens
ttattagaaggacgg

SEQ ID NO: 1882513 - DNA, 15 bp, Homo sapiens
tattagaaggacggg

SEQ ID NO: 1882514 - DNA, 15 bp, Homo sapiens
attagaaggacgggg

SEQ ID NO: 1882515 - DNA, 15 bp, Homo sapiens
ttagaaggacggggt

SEQ ID NO: 1882516 - DNA, 15 bp, Homo sapiens
tagaaggacggggtc

SEQ ID NO: 1882517 - DNA, 15 bp, Homo sapiens
agaaggacggggtcc

SEQ ID NO: 1882518 - DNA, 15 bp, Homo sapiens
gaaggacggggtcct

SEQ ID NO: 1882519 - DNA, 15 bp, Homo sapiens
aaggacggggtcctt

SEQ ID NO: 1882520 - DNA, 15 bp, Homo sapiens
aggacggggtccttt

SEQ ID NO: 1882521 - DNA, 15 bp, Homo sapiens
ggacggggtcctttt

SEQ ID NO: 1882522 - DNA, 15 bp, Homo sapiens
gacggggtccttttt

SEQ ID NO: 1882523 - DNA, 15 bp, Homo sapiens
acggggtcctttttt

SEQ ID NO: 1882524 - DNA, 15 bp, Homo sapiens
cggggtcctttttta

SEQ ID NO: 1882525 - DNA, 15 bp, Homo sapiens
ggggtccttttttat

SEQ ID NO: 1882526 - DNA, 15 bp, Homo sapiens
gggtccttttttatt

SEQ ID NO: 1882527 - DNA, 15 bp, Homo sapiens
ggtccttttttattc

SEQ ID NO: 1882528 - DNA, 15 bp, Homo sapiens
gtccttttttattct

SEQ ID NO: 1882529 - DNA, 15 bp, Homo sapiens
tccttttttattcta

SEQ ID NO: 1882530 - DNA, 15 bp, Homo sapiens
ccttttttattctag

SEQ ID NO: 1882531 - DNA, 15 bp, Homo sapiens
cttttttattctagt

SEQ ID NO: 1882532 - DNA, 15 bp, Homo sapiens
ttttttattctagtg

SEQ ID NO: 1882533 - DNA, 15 bp, Homo sapiens
tttttattctagtgc

SEQ ID NO: 1882534 - DNA, 15 bp, Homo sapiens
ttttattctagtgcc

SEQ ID NO: 1882535 - DNA, 15 bp, Homo sapiens
tttattctagtgccc

SEQ ID NO: 1882536 - DNA, 15 bp, Homo sapiens
ttattctagtgcccc

SEQ ID NO: 1882537 - DNA, 15 bp, Homo sapiens
tattctagtgccccc

SEQ ID NO: 1882538 - DNA, 15 bp, Homo sapiens
attctagtgccccct

SEQ ID NO: 1882539 - DNA, 15 bp, Homo sapiens
ttctagtgccccctg

SEQ ID NO: 1882540 - DNA, 15 bp, Homo sapiens
tctagtgccccctgt

SEQ ID NO: 1882541 - DNA, 15 bp, Homo sapiens
ctagtgccccctgta

SEQ ID NO: 1882542 - DNA, 15 bp, Homo sapiens
tagtgccccctgtac

SEQ ID NO: 1882543 - DNA, 15 bp, Homo sapiens
agtgccccctgtaca

SEQ ID NO: 1882544 - DNA, 15 bp, Homo sapiens
gtgccccctgtacac

SEQ ID NO: 1882545 - DNA, 15 bp, Homo sapiens
tgccccctgtacaca

SEQ ID NO: 1882546 - DNA, 15 bp, Homo sapiens
gccccctgtacacag

SEQ ID NO: 1882547 - DNA, 15 bp, Homo sapiens
ccccctgtacacagc

SEQ ID NO: 1882548 - DNA, 15 bp, Homo sapiens
cccctgtacacagca

SEQ ID NO: 1882549 - DNA, 15 bp, Homo sapiens
ccctgtacacagcag

SEQ ID NO: 1882550 - DNA, 15 bp, Homo sapiens
cctgtacacagcaga

SEQ ID NO: 1882551 - DNA, 15 bp, Homo sapiens
ctgtacacagcagag

SEQ ID NO: 1882552 - DNA, 15 bp, Homo sapiens
tgtacacagcagagg

SEQ ID NO: 1882553 - DNA, 15 bp, Homo sapiens
gtacacagcagaggt

SEQ ID NO: 1882554 - DNA, 15 bp, Homo sapiens
tacacagcagaggtc

SEQ ID NO: 1882555 - DNA, 15 bp, Homo sapiens
acacagcagaggtcc

SEQ ID NO: 1882556 - DNA, 15 bp, Homo sapiens
cacagcagaggtcca

SEQ ID NO: 1882557 - DNA, 15 bp, Homo sapiens
acagcagaggtccat

SEQ ID NO: 1882558 - DNA, 15 bp, Homo sapiens
cagcagaggtccatc

SEQ ID NO: 1882559 - DNA, 15 bp, Homo sapiens
agcagaggtccatct

SEQ ID NO: 1882560 - DNA, 15 bp, Homo sapiens
gcagaggtccatctt

SEQ ID NO: 1882561 - DNA, 15 bp, Homo sapiens
cagaggtccatcttt

SEQ ID NO: 1882562 - DNA, 15 bp, Homo sapiens
agaggtccatcttta

SEQ ID NO: 1882563 - DNA, 15 bp, Homo sapiens
gaggtccatctttat

SEQ ID NO: 1882564 - DNA, 15 bp, Homo sapiens
aggtccatctttata

SEQ ID NO: 1882565 - DNA, 15 bp, Homo sapiens
ggtccatctttatac

SEQ ID NO: 1882566 - DNA, 15 bp, Homo sapiens
gtccatctttatact

SEQ ID NO: 1882567 - DNA, 15 bp, Homo sapiens
tccatctttatactt

SEQ ID NO: 1882568 - DNA, 15 bp, Homo sapiens
ccatctttatactta

SEQ ID NO: 1882569 - DNA, 15 bp, Homo sapiens
catctttatacttat

SEQ ID NO: 1882570 - DNA, 15 bp, Homo sapiens
atctttatacttatg

SEQ ID NO: 1882571 - DNA, 15 bp, Homo sapiens
tctttatacttatgt

SEQ ID NO: 1882572 - DNA, 15 bp, Homo sapiens
ctttatacttatgtt

SEQ ID NO: 1882573 - DNA, 15 bp, Homo sapiens
tttatacttatgttc

SEQ ID NO: 1882574 - DNA, 15 bp, Homo sapiens
ttatacttatgttct

SEQ ID NO: 1882575 - DNA, 15 bp, Homo sapiens
tatacttatgttctc

SEQ ID NO: 1882576 - DNA, 15 bp, Homo sapiens
atacttatgttctct

SEQ ID NO: 1882577 - DNA, 15 bp, Homo sapiens
tacttatgttctctg

SEQ ID NO: 1882578 - DNA, 15 bp, Homo sapiens
acttatgttctctgt

SEQ ID NO: 1882579 - DNA, 15 bp, Homo sapiens
cttatgttctctgta

SEQ ID NO: 1882580 - DNA, 15 bp, Homo sapiens
ttatgttctctgtac

SEQ ID NO: 1882581 - DNA, 15 bp, Homo sapiens
tatgttctctgtaca

SEQ ID NO: 1882582 - DNA, 15 bp, Homo sapiens
atgttctctgtacac

SEQ ID NO: 1882583 - DNA, 15 bp, Homo sapiens
tgttctctgtacaca

SEQ ID NO: 1882584 - DNA, 15 bp, Homo sapiens
gttctctgtacacag

SEQ ID NO: 1882585 - DNA, 15 bp, Homo sapiens
ttctctgtacacagc

SEQ ID NO: 1882586 - DNA, 15 bp, Homo sapiens
tctctgtacacagca

SEQ ID NO: 1882587 - DNA, 15 bp, Homo sapiens
ctctgtacacagcag

SEQ ID NO: 1882588 - DNA, 15 bp, Homo sapiens
tctgtacacagcagg

SEQ ID NO: 1882589 - DNA, 15 bp, Homo sapiens
ctgtacacagcaggg

SEQ ID NO: 1882590 - DNA, 15 bp, Homo sapiens
tgtacacagcagggg

SEQ ID NO: 1882591 - DNA, 15 bp, Homo sapiens
gtacacagcaggggc

SEQ ID NO: 1882592 - DNA, 15 bp, Homo sapiens
tacacagcaggggct

SEQ ID NO: 1882593 - DNA, 15 bp, Homo sapiens
acacagcaggggctg

SEQ ID NO: 1882594 - DNA, 15 bp, Homo sapiens
cacagcaggggctgt

SEQ ID NO: 1882595 - DNA, 15 bp, Homo sapiens
acagcaggggctgta

SEQ ID NO: 1882596 - DNA, 15 bp, Homo sapiens
cagcaggggctgtac

SEQ ID NO: 1882597 - DNA, 15 bp, Homo sapiens
agcaggggctgtact

SEQ ID NO: 1882598 - DNA, 15 bp, Homo sapiens
gcaggggctgtacta

SEQ ID NO: 1882599 - DNA, 15 bp, Homo sapiens
caggggctgtactat

SEQ ID NO: 1882600 - DNA, 15 bp, Homo sapiens
aggggctgtactatt

SEQ ID NO: 1882601 - DNA, 15 bp, Homo sapiens
ggggctgtactattg

SEQ ID NO: 1882602 - DNA, 15 bp, Homo sapiens
gggctgtactattgc

SEQ ID NO: 1882603 - DNA, 15 bp, Homo sapiens
ggctgtactattgca

SEQ ID NO: 1882604 - DNA, 15 bp, Homo sapiens
gctgtactattgcag

SEQ ID NO: 1882605 - DNA, 15 bp, Homo sapiens
ctgtactattgcagt

SEQ ID NO: 1882606 - DNA, 15 bp, Homo sapiens
tgtactattgcagtg
